United States Patent Application Publication US 2026/0103690 A1 - sequence listing, part 51

SEQ ID NO: 244806 - protein, 357 aa, unidentified
MGKSIIDTSSVTHVGLDLAKRVFRIHAVDATGSVVIARSVNRRTLLKFFDALPRCVVAMEACASAHYWGRQLLELGFAVRLIPPAHVKPYVRRNKNDAADAAAICEAAGRPGQRFVPVRSVENQAALMRHRARELMVGQRTAALNALRGHLSEIGVVAAQGVQNAYVLKRLACDGVDDDGEIVVPDCVRLALAPLVRQIDALDEAIEAIDKTLEASARTDETARRLMTIPGIGPVTAMALLATIQDFAAFSSGREFAAFLGLTPREHSSGGKPRLGRITKMGDRYLRKLLVVGACSALGARKGHNDALRRWASGMLERKTVKYKFKLTAVALANKLARIVYALATKGGHYDDRPVAA

SEQ ID NO: 244807 - protein, 400 aa, unidentified
MYVGWDWAGKVHDVTVLDEQGRVVEHFEVGHHEAGFEHALKRLCRHGRPEALPVAIERPSGLVVERLVEAGHPVIPIHPNAFNAARSRWGASHAKSDPGDSYRLADYLRTDGRRLRRLRPMDAVTRQLQALVRMRDDHIKARIAAANQLEALLNAHWPGALSIFADLASDIALNFLERYPTPHSTAGLGATRLAAFLKRHSYCGRRSPAQLLERLRRAPTAPDRLDSEVLAELVRHQVCLLRTLLHTGKELEHAITAVLPDHAKARLLAGLPRIGDGVNLAQVLSEVGPILDASLDVDHAAAQCGASPVTKASGQSRGVQFRWAANTHARQALQIFADNSRHASPWAARLYARHVAAGKRHPHAVRILMRAWLRVIWSCWHSNIPYDPARHRSELRLAGA

SEQ ID NO: 244808 - protein, 399 aa, unidentified
MNALYTPNELQIGIDVGSLNHAVAVSDGFGNIINEFEITHTQKGFDYFFKMIEDEACKRDATITIAMEGYNGWARPLDSLILQKGYKLYNVNNLKLARFKEIFPAAAKTDAIDARKIVELFSLQKHLPIAKKVLQEISISDDTNAQLKKLTRRRKQLVEERMAIANRFGSDLQAEAPDLKNLTSSVDNLWFLRFITLRNDIRKLSKVHQQSIAKIKYLGRKNLALIMQWQKEVIFADTLDYTASILYDDAMRILELKNKIKELTGQIDTLIPFSNIARVIKTIPGFSTISAGTLAGEIATLNRFDNEGSLALYLGMTNLDNSSGKYKGSKRNMATNRHAKMAMITATMKHTQHVEESKQYIEKKISQGKKYQQAIRSMGRHLTRVIWNMIKQDRDYEIR

SEQ ID NO: 244809 - protein, 356 aa, unidentified
MPTMPDHAGEVILGIDTHEREHVAALVDELGRLLATRSFPATTRGFKLLLAWTHEHGHVCRAGVEGTGSFGTGLARFLAGEGVRVVEVSRPNRRGRRHLGKSDTVDAEAAARMVLSGEATATPKRRDGIVESIRVLQIARRSAIKARTQAGQQVRSLIVTAPPELNGALAGLSVKRQVERCARLRPAARSSASASTQRALRSLARRWQQLDTEVRELERELHSLIRTAAPSLLAEPGVGPDTAGKLLVIASDNVDRLRSDAAFAALCGVSPIEASSGKTRRHRLNKGGDRQGNNALWTIANNRLIHHPETRVYAARRTGEGLSRREILRCLKRHLARRLYRLLVADLTAAAALDLT

SEQ ID NO: 244810 - protein, 345 aa, unidentified
MELHTIGIDLGKTVFHLVGLNLRGEVVVRKKFSRTQLLRFTANVHVGLIGMEACGGAHFLGRALREQGHEVRLIPAQYVKPYVKTNKSDYIDAEAIAEAVARPTMRFVPIKTDDQLDLQSLHRVRERWVMRRTAVINQIRGLLLERGITLRKGRCHVGAALPGILEDAHAKLSGALRMLLAQLKLELDHLDLRIDEADEMIKKTARENEACQRLVAIPGIGPVTATALIAAIGNGGAFRKGREFAAWMGVVPREQSTGGKQKLLGISKRGNSYLRRLFVQGARAVMQQRTKQSSGLSRWLAQLTSRSHRNVAAVALANKIARMAWAVLAKNEPYRPPVLADVAAA

SEQ ID NO: 244811 - protein, 407 aa, unidentified
MDLLKTVFGIDVSSRKSNVCIMVNGQKVNDYAISNDMVGFNRLLGDLKQVTKPQIIFEATGVYSRRLQAFLDMHELRYVMMNPLEAKRKTKDDLHQNKTDKLDALYLAKLQSEHPQRLAYVQNKEYQELMANNRIYEQSSHDLITNKNRLHKAVQLTFPEIEHLLANPRGKNYWSIALRFPHPDIVLETKEADIIDFLKGLSGIGKKRANDITQSLIRLAKVACPAVKKNSAHVRGLKMAINNILSAEEECQTALQEMAKLAPKRDLEILTSIPGIGENTALRIISELGDIRRFNNPSQLNAFVGVDPQVYESGNLTAHLSISKRGTAIGRKVLYLAINQIQSAKKAGKPCHIADYYEKRKRSSETASHKKAAIASIHKLLRTIFALIKNDQLYSYEVAKHNQRLLS

SEQ ID NO: 244812 - protein, 311 aa, unidentified
MTHDTIGIDISKLHFDAHRRMTGRHARFDNTAAGFKAFSHWIGADHPDLVVFEPTGPYHRDFEAAFAGRLPLAKVNPLQARRFAQSQGTRAKTDAVDAAMLARMGRALELVPDRPAEEIQTVLRELRVARAGLVRDRTALMNRLSAARLPLVRRLVKARLAQAERQIATLDAEIDGRLDACPRRRRAAQLLTSIPGIGRITARSILAECPEIGTLRHKQIAALAGLAPMTRQSGTWCGKARIEGGRRHLREALFMPALVAMKKNPDLSAKYDQMRAAGKPHKVALTALMRKLIQLANTLIREDRTWHPKCA

SEQ ID NO: 244813 - protein, 325 aa, unidentified
MAYFRDVVGIDVSKQSLDLYVLSCAERRAVANTPAGHAELVVWLKSLGVRMAVMEASGGYERDLAGTLRRAGLDVRIVDPKRVRHFARAAGRLAKNDRIDAQMIAEFGAVFAIAKRCEMPADAKREHLAGLVTARQGLIDHQTALQNQVSACPAGVARRVLAATLKPIATAIKKLDRVIAAAIVAHEPFAVLAARLATVPGLGPVAIAALIAWLPELGYLDRRALAALVGVAPFDDDSGKRTGQRYIQGGRGKLRNVVYMAVMGAATKHNPVLNAHYVAMLARGKLPKVAIIACFRKLLTILNTMVAKQQDWQPKTEIPLVSSAT

SEQ ID NO: 244814 - protein, 343 aa, unidentified
MKYIGLDLHKKNIFATVLDGDGKILSRANIRSKKEDISYYLKSQGSSENLSIAIEASYNWLYYYRILEGITDNIVVAHPLKTKIIGESRVKTDKIDSEALAYMLKADMLPRVYIPTRISMENKLLLRSRISLVRLRTSIKNKVHAIIDRNRDSYLSLENKSDIFCKTGMLVLRDTKIPEPDYMIITNYLDLIDELNKKIKEIEAEIDKRVVCDKDVELLKTIPGVGRFISFLLKSEIDSIDRFSSKEKFTSYAGLTPSVHQSGNKSYTGKITKQGNKFIRWALTEAAQVAIVHSEYFRYYYSKAKAKKGTNSAIVAVARRIAEIAYVILKEKREYIEKPINYP

SEQ ID NO: 244815 - protein, 343 aa, unidentified
MEYYVGLDVSLKHTSICVVNPTGSIVQEGVVDSDPEAIALFVRSRAPGTVRIGIETGPTTTWLWTELNRLGLPVICIDARHAKAVLKMQINKSDRNDAAGIARIMQTGWFKEVRVKDIDSHAVKALLASRALLVKIKRDLENQIRGLLKNFGLVIGRGKFNVFAVRAAELIENRPELIAAVRPLLEARTAIEQQVDDLDRKVHKLARHDVEVRRFMTVPGVGPITALCFKATIDDPTRFKRSRSVGAYIGLTTRRHASGEIDWSGRISKCGDAMLRMYLFEAAGVLLTRVPKWSGLKAWGAKLTKRNGLRKAKVAVARKLAVILHRMWIDGTEFNWSMKKAAA

SEQ ID NO: 244816 - protein, 353 aa, unidentified
MSQTSNTAIAVIGIDIGKNSFHVVGHDARGAIVLRQKWSRGQVEARLANVSPCLIGMEACVGAHHLSRNLASLGHDARLMPAKYVRPYSKGQKNDFNDAEAIAEAVQRPTMKFVATKTAEQLDLQALHRVRERLVSQRTGVTNQIRAFMLERGIAVRQGIGFLRMELPTILATRTDALSPRMLRVIEELAGDWRWLDQRIDGLSGEIEALARLDQACLRLMTVPGIGPIISSAMVAAIGTGDVFSKGRDFGAWLGLVPKQISTGDRTILGKISRRGNRYLRVLFVQAARVVLARIKHLERYGLKSWIEAAKKRLHPNVLAIALANKLARIAWAVLHKGRAFECVKTNEAYRPA

SEQ ID NO: 244817 - protein, 389 aa, unidentified
MLYVGIDVAKDKHDCCILNSVGEELSCFTFSNDRAGFEQLTAAISSFGDLMDAKIGLESTGHYSINIANYLLQKRLCVKIFNPLQVQLIRKASTLRKTKTDKSDSKFLAGILFSDSSKPYQIPLYPYSELKTLTRNRHRLVAMRTKLRISVSRLVTMLFPELPSVVWSVNQKSTYALLLEFPTANAIATAHLTRLTNLLSANSHGKYARDKAIQIRELAANSIGLDSRAAGFELVQTIRLIQNLQGEIDLVDDEIKSIMQEIDSPILTIPGIGYILGAIILSEIGSIENFDNHGKLLAFAGLEPSTYQSGKFTADKTSMVKHGSAYLRWGLLQAARLVAYRDETFAQYYAKKKSEGKHHFVALSHVAKKLVRVLFQLLKTNQAFEPQAS

SEQ ID NO: 244818 - protein, 304 aa, unidentified
MENMFGVDVAKSWVDVVGPDGHERVRNDDLMAFARRVAKQGGRVAFEASGGYEAPLRSALGKAGVPAIRINPRRARAFATSLGRLAKTDRVDAGVLREMALRLDLPECPPETEEVSQLKALQLRRRQLVEDAKREKTRLSQTRDTAMRASVACVLRLLQREIDRIEAAITRCIAASEDLRTRAALLRTAPGVGPVSATALLAEMPELGRLTPRQVAALAGLAPMARESGLRRGKRRIGGGRKSLRDVLYMAGLSAARHDPALRAFSDRLRANGKAPKQAIIAVTRKLLIILNAMIREYRPYTPT

SEQ ID NO: 244819 - protein, 331 aa, unidentified
MNMHVGLDVGSRTTAMGWRNGGRFAGQCNIDQTPAGRKAAVGKLLELKPISVVMEATGIYYLDLAMELAAAGLPVSVINPKSFHNFAKLMLKNSKTDAIDAQLLAEYGERMSPRLWTPPTSIQLELRAIGRHINRLTGHRTRAKNELHALKATQTTLPMLIEDEEEAINAFDKRIERFRVAGRALIDNCPMLSAQFGHMIAAPGMGEISVFAALAELTTLPVTLKSAQVSRHAGLDVRLTQSGSSIDKPGRISKGGNAYLRSAMYMPALTAIRCDPNVKAFYEALVARGKRKMQAIVAVMRKYLTGLWACMQAGEDFDTAKLFSGKHVQKA

SEQ ID NO: 244820 - protein, 414 aa, unidentified
MDVIHGRCAGMDVSKRDAKVCVRIAGRGRRKTVETVRTWASTTNAVLALREHLVEEQVSLVVMEATGDYWKPFYYLLEDAGFEVMLVNARQVKNLPGRKSDVSDAAWLAQLGAHGLVRGSLVPPAPIRELRDLTRARTMMTRERGRDIQRLEKLLEDAGIKLSSVASDITGVSGRLMLQALIDGQRDPAVLADLAKRRLRHKLPELTEALTGRFADHHAFLARMYLEAIDQRSRAITELTARIEVVIEPFRSFCNLICTVPGIGVRCAEVIAAETGADMSVFPTAAHLASWAGTCPGSNESAGRVKSTVTRPGNPYLKAALGAAALSIANTRGTYLAAKYRRIAARRGPKKALVAVEHAILIAIWNMAHTGAEYDDLGADYYTRRDPERVRLHAMNQLQRLGYHVTLSPAAASA

SEQ ID NO: 244821 - protein, 325 aa, unidentified
MAQNDPIVVGIDVAKDKVDACIRRFTLRQMFPNTAQGHRKLVAWLRKYQVGKAVMEASGGYEREWRNVLHKAGIEVRIVDPRRVRSFAQSAGRLAKNDPIDAEMIAWFAETFSQAPGQIPDAAREELAALAKARTALVGVKIRLLAQDEHAAPEPARKAYARILKSLAAEIDKLEAAISAKVQATPEFAERAEIIESVPGFAQTTSAILIAGMSEFGQVSDKVAAALIGVAPYDDDSGKRRGERYIKGGRRWVRNAIYMPCLGAATQYNPVLKAFYQRLLAKGKEPKVALVACMRKLIIILNTMLERRQKWNPGPHAMGRLRERT

SEQ ID NO: 244822 - protein, 343 aa, unidentified
MQSIATIGLDIAKSVFQVHGVDVAGQVVIRRQLKRRYVLAFFQKLPPCLIGIEACASAHHWSRELQALGHTVRLMPPAYVKPYVKRHKNDATDAEAICEAVTRPNMRFVATKTREQQSCLTLHRTRHLFIRQQTSVINAIRSHLAEFGIVAPVGRNGVEELLSAVADASDKRLPDVARACVAALGTQLRMLKAQILQFDRLIMAWHRSSEASRRLDDIPGVGPALATALIATVADPKAFRSGRNFSAWIGIVPKQHSSGGKDRLGSISKRGDRYLRGLFVAGALAVIRYAKIHGTKRRPWLTALLARRPTKVAAIALANKIARMAWAMMAKGERYKEPVALAA

SEQ ID NO: 244823 - protein, 334 aa, unidentified
MANGTVVGIDVSKNTLDVVIGRDGVAAAFSNDERGHQALVAALRRQPISLIVMEATGRYQFACACVLQAAGFRVAVVNPRQARDFAKAMGRLAKTDRVDALMLAELAEVIYKRPDRDRFTKPMADETQQCLHALVTRRRQLVRLQVSERQRKYASHADVQPGIIELMNILKRQVQDIDVRIAAHLSKHQASLTKLLQSVKGVGPATTAALISELPELGQLKAKQISSLVGVAPMNRDSGQSRGKRMICGGRATVRSALYMAAIVAMRHNPVIRTCYERLVAAGKPKKVAIVACMRKLLIILNAMVRTGRPWKEKAATAQNDAEADIVPPCGLLA

SEQ ID NO: 244824 - protein, 386 aa, unidentified
MRGKTFIPQDYDVFAGLDVDKRSLSVTFTNHRGLLRSLRLPYRVEHLLNHVRKHFGDQKVAFAYEAGPTGYGLYDGLVAQAYRCVIASPSMIPKAPGQRVKTNRLDSRGLAENLRGGQLKSIHVPSPVYRELRHLTQLRDTFVREVVAMKLRIKSLLLFEGIPFPPAPPGSQWSLTVKATLGTLACSNTVRFKLDRLLDSVAFSEKQVRKTTQEIRHFCRTDPELSQCIQYLLTVPGIGWIVASQSLARIGDWRELHNIRQLAGFLGVVPTEHSTGETIARGSITHTGDGRLRSKLIQAAWSAIRQDGELREFYRAVCQTHPRDRAARVAIVAVARKLTTRISAVLMHQRPYVVRERVHAVPLTQAETVPQGTPRRQAEPGAANDS

SEQ ID NO: 244825 - protein, 348 aa, unidentified
MPNYNQPHQFYAGVDLHARSMFVHVLSAKGKTVFERDLPAEPDAFLDAVKPFRKNLVVGCECMFAWYWLADLCEDQRIPFVLGHALAMKHIHGGKAKSDKIDASKLANMLRGGMFPLAYVYPRAKRQTRDLLRRRSFFVRQRAQLITHIVNTNSQFNLPPFAKKLSYAANRSEEIAERFPDPSTRLMIGADLRLIDAYDAQIATLERHLLQSAKVDDPVTFGFLRTIPGIGPILGLILLYEIDRISRFPEAGNFLSYSRLVRCAHESGGKVKGFGGKKIGNAHLKWAFSEAACLMLRTCLPVKSWMQRQEQKRGKRKALSVLEAKIGRTVYHLWNKQQAFDAKKFLHA

SEQ ID NO: 244826 - protein, 337 aa, unidentified
MNKITIGLDIAKNIFHLVWLSNSGKVLKKKKLKRTNMKEYFCNLEPAIVVMEACGSSNYWAQSIQNYGHEVKVIAPQYVVPYRKGNKNDFNDAEAIAEASQRVNMRFVPIKSVEQQDIQLLHRIRERRIKCRTALVNQTRGLLAEYGISLSQGVNQVRKSIPYILEDASNMLTPLSRRYIASLYDELIEVDKLITDLDSEIKALSHQIEQCQKLETMTGIGPIIATALYSAIGDGKTFKSGRHMAAWLGLVAKQHTTGDNPKLKGISKRGNTYLRTQLINGARAALVKSGSKADKVSLWANNLRERLPFNKAVVALANKMARMAWAMTVKQERYKFV

SEQ ID NO: 244827 - protein, 346 aa, unidentified
MKILKQVVGIDVAMDELVSKFGFLNQELNIKFKSDEVFKNTEKGFVKLINWTEKHLSAETEVLFVMEATGVYHEKLAHWLHKKSKKVSIVLPNKISNYARTLDIKTVTDKTAAEAITRFGLERNLDTWEPARPVFSKIKQLTREREQIVAERTVIKNQLHAENSEAFPNHNSLKRLNKRLKLLNEQEKEIKKEISQKIREDKKVQDHVNNITTIPGVGELTAAIVLAETNGFELIRNKKQLTSYAGLDVREKLSGISVKGKPSISKKGNRYLRKAVHLPALTAVKHCEQYKRTYAGLVGRHGIKMKALVAIQRKLLELMYILYKTESVFDPVYEEKRKALKTYQNL

SEQ ID NO: 244828 - protein, 509 aa, unidentified
MRRPVLQVEHIVHPETSNRSTESPAMNKHSTLTVGIDLGDRRSTACVYGAGVVVRWFEFPMTPEGVREAFTNQGFGRVAMEAGAQSGWVTRELRKLGYEPLVANPRKLKAISANERKSDRNDALLLARLAVADASLLYPIHHRTEARERALSVLRARDTLVRTRTRLISTIRAMCKGAGCRLRSCAADAFAKREAEMPAELAPATAGLFAAIRSLDEQIRLYDAQLAEMAETTFPETQRVLQVRGVGPVTALAFVLTLEDPARFRDGRTAAAYLGLVPRRDQSGEVDKQLGISKTGSTFARRLLVQCAQYILGPFGRDCDLRRFGQRLMERGGKSAKKRAIVATARKLAVLLYRLWKRDEVWKPLHNAESAAPPSKADAVRPQPAVPADCARFLDDAQAGERRGIDCSADDGPDPTMRRTSSGPSMSADRSKGLGATASTTTKLRTAAPGRTDRSRASGPGPTTPSAPATPACAGDPADPCPPAPRRGPKRKQGAAGAAQSPGPGGRSP

SEQ ID NO: 244829 - protein, 343 aa, unidentified
MSGYYYIGLDIHKRTISYCIKAVDGSLIGQGKIEADRKSLDEWAKGLPGPWIGAMEATIFTGWVYDFLKPYAVALKVAHPEMLKAITAAKKKNDRADAEKIADLLRVNLLPECYMLSEEIRELRRILRYRNHIVRTAVKMQNKISGLLMEVGVSYSKRRIHGRKYFHEILERVEEIPPSVKELLKLSRSGYEMFRTFQKKLVETLHANNLIHDRVRRLMTIPGVGEITALTWVLEIGDADRFASIRQAVSYCGLCSAQRESAGKEQRGPISKKRNKHLQTMLIEAAKLAPHWNEQLAIVHERELKKGNRNRATLAVARRLVAYMLAVDKRHTDFTLSAKMQAA

SEQ ID NO: 244830 - protein, 296 aa, unidentified
MYFIGVDHHKQVSVMTVLDEDGQERKNGRVPNLRRDVDRFLEGWRPFTAVLEAGRSSYVMADLFRELGGEVKIANALQVKAIAQARIKTDKRDSRTLAHLLRANLIPEVYQRGDGNRRAQRVIRMRAYWVCKQTEVKNKIRVLLAQQDVRSEVEKRESGLFSSKGLEFLAGLPLESREKEILKDLLQGYEEIQAHIKKSDGLVNALYGEMEEASRIDTVPGFAKTLSVLVAVEIADVKRFSRAADLHSYAGVIPSTYSSGERTYHGPITKQGSSWLRWAALEAVYPAIKKDLVLRT

SEQ ID NO: 244831 - protein, 361 aa, unidentified
MHSDQIFIGFDVDKAHVAACVLRGTQAAPIEEVTLPNEAGRIRKYLKEVSREGKLQVGYEAGFSGYELARAIQEWGYDGRVVAPSTVPRPSKERKKKTNRTDARRLALAMQSGDVNYVTIPDRMRETHRDRWRCWRALRKDLKRVKQRAGSFVHSRGLVYREGKTLWTKRYLAWLGHLPLCPEDLRTLQTYLNEKCYLEAQMGLVMGELKEIAQLPAYREAVRRLQCFKAVDTLTALALVLEIGDFRRFPTAGALMDYLGLVPGEHSTGETRKDGPLTGTGNARLRHLLIEVAWHYTYRPSHRKTLLLRQQGQPSEVIAHAWKAQLRLYQRYHHLLHTRGKATAVVAVARELVGFLWAVMR

SEQ ID NO: 244832 - protein, 351 aa, unidentified
MSHKTAATVAHTIGIDTGKNTLHLIGLDEKGAIVLREKLARGRIAARLANVPRCLIGIEAGMATHYVARELSALGHDVRQVPPAYAKPFRQGHKNDFRDAHAVAEAVQRPSTRCVPVKTDDQLDLQALHRVRSRLVGQRTAVINQIRGFLLEHGIAIRQGLRFLRQQLPDILAKRDDVLSPRMIRILEDLSGDWRRLDERIEHVTEEIEVLAHSSESCRQLMTAPGIGPLIASAMVAAIGNGAAFAKGRDFAAWLGLVPKQMSTGDRTILGRITKRGNRYLRTLLMQGARVILLRPANWAKHSFGLWLTAAAQRLHHNVLATALANKLARIAWTVLAQGRSYEARVVPKVA

SEQ ID NO: 244833 - protein, 423 aa, unidentified
MMKLKYSICCGLDVHKNVIVATIVITNKDGVSEYKQKSFSTISSDIQKFHNWLIENHCYHVCMESTGKYWIPIFNYLENDIEICLTHPKYVKAIKGKKTDKKDSKWIADLYKFDLVRCSFIPPKDFRQLRELARYRFKLVCMKSSEKNRIQNCMTVSNVGIASVLSDPFGKTATEIMSYLLEHTADSIDEKAVRKLIKKGAKAKSDEIIEAIRGYNIETDQAKKLELARAHLDFLDDMITQTEVELYVRIKPYYEFVEFVSSMPGMTELSSTIVLAETGVDMNIFDNAKHLCSWCGLSPANNESAGKKKSVRIAKAGDYLKPMMVQCALAAVKSRKQPYFAIKYGRIKKRRGHKKAIIAIARMMMVCIYHMVSEKKPFTPTDYEELMDPQNHVERVVLNENNVFTYLETLGYDSSKLVKRSDN

SEQ ID NO: 244834 - protein, 364 aa, unidentified
MVYVGVDLHRKSSHVAVLADDGEQLASRRIASQPDEFLRVFGELEAEPTGVAFEATYGWGWFADLLSDIGIPAHMAHPLATKAISSARVKNDRVDAKTLAHLLRTNLLPEAWAAPPEVRDARKLARTRVSLARISSRLKCQTHALLADQAIAPPVTDLFGLAGRAFLEEVVLRPVPQARLQANLRLIDLLAPELTQAERELRELFRADPRIPRLTPIPGIGFTTAALIVAEVWDVSRFPSPQHLCSWAGLTPTERSSADHTRRGHISKQGSRWLRWAMVESASRPYLMDPTLRRFRDGIARRRGAKIAKVALARRLLTLCYYALRDEDGCRAFPVPPTRTNRPNRGRARSPQVMASSGTAAVSD

SEQ ID NO: 244835 - protein, 339 aa, unidentified
MKQEIVTVGLDLAKSVFQVHAIGSDGAVLIRRKLRRAEVIGFFTDLPSCLVGMEACASAHHWARELIALGHEVRLMPPAYVKPYVKRGKTDAADAEAICEAVTRPTMRFVAVKTVEQQAVLMLHKSRDLMVRQRNMLINALRGHLAEYGIVTGIGAGGVTAMLKALHERQEELPAHARSALHGLAAQLRALTSEIDRLEAQILAWHRADETSRRLATIPGIGPITASAISAAVPDASLFRSGRQFAAWLGLTPRANSSGGKERLGGITKQGDGYLRRLLVVGATAVMRMTRKNADRQPWMAQLLERKPAKIATVALANKTARIAWAVMSRKEVYAAETA

SEQ ID NO: 244836 - protein, 348 aa, unidentified
MRFYSEQHQHYCGIDLHARTLYLCILDAEGNVLLHKNLPCDRDRFLEAIAPFRGDLVVASECIFNWYWLADLCADEGIPFVLGHALYMRAIHGAKAKNDRIDARKTVGLLRGGLLPMAYAYPAEMRSTRDLLRRRTHFVRKRAQLMAHIQNTFHQYNLPRPPGRLVYKYQREPIPDAFDDPILKKSVETDLALCDTYDELIRDLEKTVLRQARSHDPQTLLRLNTIPGIGEILALTLLYEIHDIGRFDSVQRFASYARLVKCEKSSAGKRLGTSGHKIGSVHLKWAFSEAAVAMIRHLPQSKRLHDRLKRKYGKGKALSILAHKLGRTVYFMLKRNQAFDADRFLANA

SEQ ID NO: 244837 - protein, 370 aa, unidentified
MSIRRHIVYVHYKTYSLCALLKETGEIIGETKIPADVSLIIKFIENAKKSVDSDDVQIKTGYEAGCLGYSLYWQLAAKGIECDILAPSTMHRSAKNKVVKNDRRDAKNIAANLANGTYKSVYVPTDEDVEIKEYIRMMHDFKIELKKVKQHINAFLLRFGHHYPGKSKWIPAHIKWLKELELSDMYREILDEYLSQLEILSEKIERFKYRLEELSQKETYNEKIGQLRCIKGIDTTAAMTIYAETSDFDRFPTANAFASYCGLTPGEDSSGDSYHRLGITKQGNSMIRTTLVEAAQVLVRGTIGKKGKKVKSKQKDQDVKVIDYADKAVVRLQKKYHRMIFRGVKRNIAITAVARELACFVWGIETGHIS

SEQ ID NO: 244838 - protein, 374 aa, unidentified
MEVFYTRYCGLDVHKSSITACVRLHDGGGKPRKIVRRFGAMTNDLRAMASWLIEEGVTHVAMESTGVYWKPVWNILEGQFTLVLANAQHVKNVPGRKTDTKDSEWLAELLQHGLLAGSFVPPRLIRDLRDLTRTRATLTQESSRIASRIQKVLEDANIKLASVASDALGKSGQAMLAALIAGQRDPGQLANLALGTLRGKIPQLRRALDGLIRDHHRFLLERLLVQWRFMENEIELIDQRLEQIGKEEPEIAEAIIRWDTVPGVDRIAAWGLVAEMGINMEQFPSAQHAASWGGVCPGNHESAGKRLGGKTRKGNPWLRRILGQSAWAAARTKSTFVAVQFRRLAAKRGRKRAIAAIGHSLLVTGYYLLRKQCM

SEQ ID NO: 244839 - protein, 333 aa, unidentified
MSSILRTVGIDISKDWLDAFAAPEGRASRFPNDRAGFRKLIAWIGSGIDRIAYEPTGAFHRDFEDTLLKAGLPLYAINPFQVRSFARSIGRRAKTDAVDARMLAMMASAIEDLRPTEARSEGQRELAELQQIRDALVRDRTATTNRGKNLRTPVGKRVTKQRLRQIERQLKVIDAEIRRRLGEEKALERRAEILTSIPGISDITAAGLIVHIPELGTLTGPRAASLAGLAPVTRESGHWRGRSFIQGGRHRVRRLLYMPAVVAVQHNPALKRKYEVLVAKGKPPKVALTAVMRKLLVLANALVQQDRTWTPHPPREYCCPTFPTPSPAGSVHG

SEQ ID NO: 244840 - protein, 341 aa, unidentified
MTVIIGIDPHKATHMAVAIDSSEYPIGRLEVRADGSQARRLLAWAVPLGEERMWAIESAGGLGKLLAQQLLTAGEHVVDVPPTLSARVRLLGATKTGKNDGNDALSTAIAGLRHCGLRAVRGDDHSTVLRLLVGRYDDLVSLRTQATCRLHAVLRELVAGGAPLRLSADRAAKLLRSVRPEGLAGLERRKLAADLLNDVCRLDRDLTAIKSRIRDAVDASATTLVELHGVGPIVAGLLLAYVGDPGRFPTAARFASYNGTAPIEASSGPRKRHRLNPRGNRKLNHAIHMIAVTQIRHDTPGRVYYDRKLAEGKTKKEALRALKRRISDAVWRQLQVDLAAR

SEQ ID NO: 244841 - protein, 321 aa, unidentified
MNPVSCVGIDVAKAKFDVALLKPDGKYRSKVFSNNPEGFRQFLDWLEKQEALKAHLCMETTGAYGRSLARFLAQQQLLISVMNPALIHAFGKTELSRAKTDKADARLIARYCQMHQPAPWVPPAEAIVTLQALVQRLDDLLGMQNMENNRLEMAEPAARASIEVLLVTIHQQIDVVRRQIQDHMDDHPDLKSQKALLLSIPGIGEATAAMLLAFLSPLTRFHSAKQVVAYAGLNPRIRESGQWAGKSHIAKAGNVLLRKALYLPAVVAKRYNPAIAAFCDRLLSRGKCPMQVIIAAMRKLLHIAYGVLKSGQPFDPEKALA

SEQ ID NO: 244842 - protein, 343 aa, unidentified
MQPATHILGIDIAKDKFDVNLRLLEASDSRWAATFPNNPKGFKALHQWLVQHGPRFSHQVHACLESTSRYGDALAQFLHQEDYQVSLVNPRRTRHYADSQLTRTVNDTIDARLIADFCAAERSTLSLWEPLSPEHRQLRDLTRARQALVEERERFANMLETASGLARKAFLKQVRQLDRQVKDLDRAIQQFVRLVPQLHQQVALADSVTGVGPITAATVIAELPPIDKIPQAAQAVALFGLDPIKKTSGSSVNTPARLSRMGSRHGRKALYMPALVALRWNPIIRQLGQRLQNKGRTGKYVVVAAMRKLLRLIYGVIKQGRPFDPNWSAPAQRDPQAQTPVLA

SEQ ID NO: 244843 - protein, 460 aa, unidentified
MNKRRKSPSAKHASGDSLPSVQPMVAGIDLGSREHWVCGPAGAEGKRNVRVFSTTTSDLECLADWLIEQGVESVAMESTHVYWIPVYELLESRGVEVVLVNAQQLRNVPGRKTDVQDCQWIQKLHSCGLLNGSFRPAESICKLRSMHRQRRNLIGEQGRAVQWMQKSLDQMNVQVHRAVADITGKTGMLIVRAIVGGERDPMKLAELRDWRCRKTKEQIAEYLNGTWRDEHLFNLASALRIHDVLQREIDIYDRGIRDAITELQPEHRKNSSVPAHPNPTKEAAIKQRGEQAQRTELWRFAGCDLTRIDGISSDTAAIVLTEVGFDLSSFPSEKGFVSWLRLAPRRPISGGKQLHKRPNGTGSNRVAGALRMAALALARSKTALGAYYRRLSRRKDGKVAVFALARKLAQLVFRMLKYGQDYLDIGEKAFEETHRQNRLAGLQRAASAIGYTLAPAPSGD

SEQ ID NO: 244844 - protein, 369 aa, unidentified
MKTLVRKPRRFKGLTVGLDVHKRFVQYAVLNRKGDQVGGGRLKAEEAALREQVRKWRAQGEVQVVLEACGCFVWVFDLLVAEVGRAQVHVAQPGKLRVIAKSQEKNDATDAWWLAYLLYEGRLPEAFVAEGQLRALRIAVRELRSYTETRSDQLRRLRSHLAQAGLKAPSAWHTSKVKRAQVRTLMKAVPGERGLALHRVYQLIYRLSQQVRYWRRRVQELSKGFTAIERIDEELPGLGLVTASAVHAELGPAERFHSEKAYAKATGLTPGYRVSGGRMSGQVITKAGSRLARWALTRAALACLRCRSGPGLQVKYWMLRRMKHKSRKKVLVAVARKLAEGIWRLFRYGEAFDVRKAFPAPKALPGQAA

SEQ ID NO: 244845 - protein, 356 aa, unidentified
MANTIPTGVFIGVDTHKEVHAAAAISEVGAHLATTTIPANSKGYGVLEAWAGSMGAVLAFGIEGTGSYGAGLSRFLRERGHNVVEVNRPNRQLRHQKGKSDAVDAESPARAVLAGQATGRPKSGTGSVEMIRHLKIARDTAVKSRTQAMQTLKAIIVCSPDALREQLDPVRGKMTLLRRLAALRPGPLTSTLASAKASLRAIARRWLSLDAEIKQHDAHLETLTADRAPNLLEAHGMATGTAAEMLLLVGDNPERIHSEAAFAKLCGACPIPASSGKTNRHRLNRGGNRQANAALYRVVIVRMRGHQPTLDYVRRRTAEGKSKPEIIRCLKRYVAREIFGYLCAKSILTNTATASP

SEQ ID NO: 244846 - protein, 377 aa, unidentified
MVEHTASGLRDLIGFLARHGVGEVAIERPDGPVIDTLLRHHLSVVVISPNQVKNLRGRYRSAGNKDDRFDAFVLADTLRTDRHRLRRLEPDTPATVALRRACRARKDLVSHRVAVANQLRARLHNVFPGAVGLFAEIDSPISLAFLTRFTTQDQADWLSPKRLGDWLAKVGYPGRTSPEQLHVRLVAAPSGITGPDATTQAHVTRALLTVLATLVEQIKALSAQISRQLDAHADQHIFTSLPRAGRVRAARLLAEIGDCRAKFPTPESLACLAGAAPSTRQSGKLRAVTFRWACDKQLRDAVTDFAGDSRHANPWAADLYDRARDRGHDPPPPVRILARAWLYIIWHCWHQGVAYDPARHHALQRVLTQTPAPTKAA

SEQ ID NO: 244847 - protein, 408 aa, unidentified
MADKIAGIDVHKKVLMVVVMDARTPESKPERRRFATMPSELRRLSTWLQERGVEEAVMESTAQYWRSVWLELEPHMCLHLAQAFSNRAPRGRKHDFKDAERLVRRLIAKELILSFVPDGEQRIWRNLTRMKLQLTRDRVRIQSQIECLLEEMRIKLSIVVSDLLGSSGLRILHALANGETDAKSLASLGDDRLKCTEEQLVEALTGRSHPMHGQMLALQLERLRLLDEQIAKLNSLIAQAMKPHQDAVIRLAEVPGLGIDSAQQVIAEVGVTASTFSSAAEFTSWVGTCPGKEESAEENSSSRSAKGNKYMRRVLNQAAHAAARSKGTHFQAVFRRLLPRLGYQSAVWAIAHRLCRLVWKILHQGIRYIEQGIESEPKLLIYRAKYLAKQLRKFGYNVQITPANGAPA

SEQ ID NO: 244848 - protein, 411 aa, unidentified
MEGVYRDVVGRSVLMTIPVEVVVKRAKRRGPGPSHLLMTPDHAGNVVGVDPHKRTLTATVADARGGILASAHFRVSGEGHRELEAWARQFGPIARWGIEGSASWGRHTAVFLIGRDHDVRDVCANRTPRSDRARQRGKSDTLDSERIAREVLAHPLLPKAFKRSGQEQGPDEQHQLLALWHNRRRSILTSRQHLVGEAESLLCELPLRLREQLPDTKAVKPRLAALARRNRRRRYDAPTKLRLQLLDAYHAQIKALDLEEKQVIAQLEVLVEQSGSTLGELSGLRTRSVAELLVEVGDARRFTEGGFARFNGSAPLPASTAEGPGEPVRHRYNPGGNRRINAILHRMAVTQLRCEPRAQRIYANARANGHTKKEARRVLKRHLSDVIYRRMIRDLAAAERASPSAQPLLAA

SEQ ID NO: 244849 - protein, 447 aa, unidentified
MGNLPVLDAHAAFVDVGSEQMHVSIAGGPPRVFGTVTAQLHELRDWLKAQSARSVAMEATGVYWLPLYGVLEAAGFEVCMVNGRQTRNLPGRKSDMQDSQWGATLHAHGLLRAGFVPPAQIRRLQDYMRLRADHIQMAATHVQHMQQALERMNIKLHDVIAKLTGVSGLAVVRAILDGERDPQKLLSLCDTQIQRSKAERVKQSLLGTWTEEHLFALHQALQSWEHYQGQISECDRRVEALLREIDPGDKSHSTPLSVHRSRPGVNAPDIPDLRATLAQICGGKDLTQLPASTEYSVLQLVAEVGTDLTKWATEKHFTSWMGLAPGSHQSGKRKRSVKRNRNRAGRIFCVIARSLARSKDIALGGFYRRLAARRGGLVANIALARKLAVLFWRVMVKGMDYVEHGLQQYEAKVLETKQRSLSRLARQLGQKLVPITPQDTGAGLHLT

SEQ ID NO: 244850 - protein, 410 aa, unidentified
MITMEVIIDHACGMDVHKDSITACIMTPKGKEIRTFPTKTVFLLQLIDWIKEHGCTHVAMESTGVYWKPIVNILEAENIEFLVVNAQHMKAVPGRKTDAKDAEWITKLLRHGLLKASFIPNRIQRELRELVRYRRSMIEERARQHNRIQKVLEGANIKLGSVVSDIMGVSARDMLRAIADGEDDPEKLASFARRTMKKKKDELELALRGYINPHQRLMIKTILTHIDFLSDQIDMLDQEIANRFISDQQDIERLDSIPGIATRMAEQILAEIGTDVANQFPSAAHLCSWAGLVPGHNESAGKRKSTTMKKGNKYLKSALIEAAHSIRGSKNYLGALYRRTAARKGKKRAGIAVAHAILRISYYLLTRKEMYVDLGEDYFDKQKQQSIVRYSVRRLENLGYNVTITEPEAS

SEQ ID NO: 244851 - protein, 400 aa, unidentified
MRVVFGIDVSKASSEVAILVNGEKVHGYTISNDAIGFARLLGDLRTVHKPEIIFEATGVYSRRLQTFLDDNGYAYTRLNPLEAKKQLDSLRVRKTDQIDAEKLAQSQFVLNRKPTYVQEEVYQNLRDLSRFYQNLTEDIVRAKNRLHKVLQVTFPELENILSTPTGEQYWNLVITFPCKDFVLDLSKNELSKSIRQSTSKRISDKRVAYLAEKLTALANQSYCAVKKTSPILEEVHYYAKELLRLSEQRQAVLDQMVELAQPLPEYDILLSIPGIAETTATSIIGELGDIRRFQSANQINAFIGIDLRHYESGNFLAKEHITKRGNPYARKILFKCIHNIASASHTNPCHIADFYEKRKRQSQTTSTKPHTIASIHRLIRTMYYLIMHNKLYDYASTQNR

SEQ ID NO: 244852 - protein, 404 aa, unidentified
MEVLYKRCCGIDIHKNMMVACVFTSVRKKEIRQFSTMTEDILQLVSWLKETDCEMAARESTGSYWKPVYNIFEEEQIPTMIVNAQHIKGVPGRKTDVKDAEWIADLVRHGLVKASYIPNREQRELREITRYRQKIIEERARELNRIQDVLEGCNIKLSSVITDISGKSGMAILKAIISGETDPIVLSELAEGRARNKIPEMQKSLQGRISEHQQKMLKHQLGHIESLTFLIMDLDADIKKTESINWAIEALDSMPGVGRQSAERILAETGVEMEHFQNESRFSSWAGLVPECKESAGKKMSTRIRKGNKYLKATLVECARAAIRNKQSYLYSRYQRIAARRGGKRALIAVAHTMLIAIYHILKEKVPCHDLGDDYYSVINQEKLIKRNLHALEKLGMDVIIQPK

SEQ ID NO: 244853 - protein, 403 aa, unidentified
MSFNGAPVMAATVVAVDVGKNTAVLLVTDSARHRLLGPVGFAMTAAAVAAVVERVSAVLPAAPVKVGVEAAGHYHRPLLESRLWPVGWELLELSPVRVSEQRRVQGRRRVKTDAVDLEAITELVLAGYGVPVTARSGRITELSGWAMHRSRRIWTRTATKNQLLAQLDRCFPGLTLALPDVLGTQIGRLVAAEFADPHRLATLGVTRFVRFAANRGLRVRRSAAERLVAAARTALPASEAVVARQVLVDDLGLLGDLEVQIAGAEAKIAQLLPETPFAVLLTVPGWGMIRAGNYGAAVGDPRRWPGASQIYRASGLSPAQYESAGKRRDGSISREGSVQLRRALIDLGIGLWRSDPAARRYGQRLRARGKKSGVIGCAMAHRANKIAYALVRDQAGYDPDRWA

SEQ ID NO: 244854 - protein, 405 aa, unidentified
MKHVIAFDVSMGKSYMVIYNGLKKCIYEAEIKHTKPEFEKLRARIDELIEGYGDQPYIVFESTGVYSRQLERFMRDNYYSYCLLNPLEAKKQCDALRIHKTDKSDAHQLALTHFSVSRRETNGIDTLFQQLKSLSRFYSELDDELSVTRSRMHKVIQLTFPELEKLFTIKSDLFLNIVQLFPHPDFVQGLSKTIIKNKIRANTNKNISGAMAEKKAIALIEASQQSYPAVSSSDVLCEQLRSYARRYQELLQQKEQCINDMVQLAEKRSEYKVILSFPGIGPNTAVRLIAEIGDIHRFENNKQLNAYAGIDIRRFQSGKTYFKDKINKRGNKHLRKLLFLIIQNMIKQRRYGQNHIVEYYDKLKTQPYNKCHKVASIACVNKLLKNIFFLISHNMNYDYGLASKS

SEQ ID NO: 244855 - protein, 366 aa, unidentified
MEYFCGLDVATVETAVCVVDDHGEVHLEVKVATDPQALLAALKPFLSRLRRVGHEAGSLSPWLHPELVKLGIPAVCLETRHVRAAMAAQRNKTDQKDALGIAHMMRTGWFRRAHVKTPEFYRLRLLLTHRRNLKRKFLDLENAIRHSLKAFGIRLKGTGRTGFEAAVREAVAQDELTRELMDAMLSARAALWKQYKRLHQLVVQFVARHELCRRFMAIPGVGPVAALSFMTAVEDPARFRRSRDVAAYFGLTSRRWQSGTSIDVQGRISKAGDPDVRRALYEAASALMTRFRGKDKVKQWGESLAKRGSHRKAVVAVARKLAVIMHAMWSDGTFYVGDPSANEADVAARAKGKELRLLGAQALRGL

SEQ ID NO: 244856 - protein, 334 aa, unidentified
MDKVTTVGIDLAKSVFSLHGVDGAGRVLLRRTVRRDQLIQTVAALSPCLIGMEACSGAHEWGRRFQGLGHTVKLMAPKFVAPYRKSGKNDGNDAEAICEAVMRPNMRFVPVKSAEQQALLVLHRVRQGFIVERTATINRLRGLLCEFGVVLPLRSKTVRRQAAQAAEAVPELARRAIRDLLDQLRLLDERIDGYDREIEAQARLSEPAQRLMKIRGIGATTALAIVATVGNAREFKNGRQFAAWIGLVPGQYSTGGKSRLGHISKRGDAYLRNLLVQGARSVLQTAPSHQDRLSRWALELQARRGYYRTLVAIANKNARIAWALLARGQELRTV

SEQ ID NO: 244857 - protein, 413 aa, unidentified
MTEHNFAWFAGVDWGSEGHQACLVDAQGRIVGERRFLHGGTGLADLCDWLLSIGGAADTVAVGIEVPHGPVVDTLVDRGFVLHAINPKQLDRLRDRISVAGAKDDRRDAYVLGDGVRTDRRLFRRLHVTDPRLVELRAWSRLAEELTEERVRLGNRVHHELWRYYPQMLKISTEDVAAPWVLDLWNLAPTPAKARRLRAAPVEKLLKQHRIRRIDADTVLRILQEPAIKVAGGVAAAASVHLRSLFTRLRVVNRELRQAEAKLDALCAAIGETDADSGEGLQRQDVMILRSMPGIGRINLATLLCEGSGPLSRRDYPALRTLCGAAPVTKSSGKSHIVIMRYAAHVRLRNVVYHWARVATQHDPKCRARYAALRGRGHSHGRALRGVADRLLALACVLLQRQTPFDPNFAQAK

SEQ ID NO: 244858 - protein, 345 aa, unidentified
MDEAYDGRQVVGMDLHRRRSVLVRMSMDGRKLETVRITNSPGALRAVLARCGERPLVVLEATYGWYWAADVLAGAGAEVRLAHPLGVRAFSYRRVKNDERDAADLADLLRAGLLPEAWIAPAEVRALREVVRYRHKLVGQRTSCKDQVHAVLAKLGVPVTHSDVFGTGGGLWLDQLVLPEPYAAKVASLRALIGVLDGEIARLGQRAAGVLGADPGYAALRELPGIGPVLAAVIIAEIGDVTRFRRAGQLCSWAGLTPRHYESDTKVIRGHVSKQGSKMLRWALVEAIQHQPAGTRPRQARDAIIARRGKEARNIAKTAAARVLLTQVFYALRDGHVRSAGRPAA

SEQ ID NO: 244859 - protein, 394 aa, unidentified
MFLVGIDIGKHKHSFCIINKETGESIVKPKFFNNNKVGFEELLSSFKGLPKKDILIGMEDTGHYHFALLKFLLDKKYQVALINPVTTDLTRKLSGSHTKTDKLDTLTICDVLTSNQRTKPYRISKVDRFDLYEQKQLTREHHNLKEQSNVLKNRLQKSIDIVFPEFNSLFKSMYGVVYMNILKEFGSADALAHSDIRTIRKCFDFKGRGKRIELTAKELKNAAIDSIGFPSIAEVVQIKHLVNQIELVEEQIEELDKKIEEFSIANNSPILSIPGISHFSGTSILAELGDIHNYSKPSQIIKFAGVAPLTYESSQFMAKHTAITKKGSTYLRKTLYQIIIPVINNNKVFKDYYNLKLSQGKGYRCAQGHCVRKLLRVIFQLLSTNTQFDPTLLV

SEQ ID NO: 244860 - protein, 404 aa, unidentified
MFNAVGIDVSKGKSTVSVPQPGGTVVKKPFNVVHSSSSLNELSRFILHLDGQTRVVMECTGRYHEPILHALHDAGIFVSAVNPHLIKNFGSNSIRKVKSDPADSRKIARYALDNWASLRQYSDMDTTRTQLKTLNSQMDFFTKQKVAARTNLISLMDMTYPGVNSLFSSPARDDGSEKWLDYAESFWHVDCVRKIGLKAFTKRYQAFCKRNGYNFQPGKPEELYLASKELVAVYPKDKVYKDLIMTGIEQLKSTTQHVEHIRHEMDALASTLPEYETVLSMRGVGKTLGPQLMAEIGDITNYTHREALTAFAGVDPGVNESGSFRSKSNPASKCGSSRLRKTLFLIMTSLLQTSLADDRVYQFLDRKRSEGKPYLVYMTAGANKFLRIYYGKVKACIAAQSKSE

SEQ ID NO: 244861 - protein, 338 aa, unidentified
MALYCGIDLHSTNSWIVVLEGTQKVMLDVRVPNDLKEVLAELEPFREGLAGIAVESTFNWYWLVDGLMDAGYRVHLVNTWASQQYKGLKYTDDRHDARWLAHMLALGILPEGHIYAREDRLVRDLLRRRALLVKVRTSLLLSLRGNVERLTGERVGINHIKRWTGDGLEEFIGEPVARIGIESLLVSTQALTTEIKKLEQEVLRRARKREEYPFLTSVWGVGPILGMAILYETGDISRFAKVGNFTSYCRLVESRWTSNSKKKGTGNRKNGNPYLSWAFSEVGHFAQQHHAEARKYFQRKRARTNGIVAARAVAHKLARASYYVMRDRVVFDPERIFG

SEQ ID NO: 244862 - protein, 391 aa, unidentified
MFYIGIDIAKHNHEVSIIDDNGKALAKSFSISNSQKGVDKFNTYLASFNVTSENCVIGMESTGHYWINLFSFLVNSKFNVFVINPIQSDAFRKMYIRKTKNDSKDSYIIAQIMRFGEYSSSNISDENIFALKQLSRYRTSLVDECSTWKRKIISILDQVFPEYSDLFSDTFGVTSKELLSKYPLPEDMLKLSTEELTNLLTKASKGRFGNEKAQEIKEFAKNSFGISFAKQTFSFQIKQIINQISFIESQLKELDNEISNMLKVLNSEITTITGIGEVLGACILSEIGDISRFEKASQLVAFAGLDVAVKQSGEFSGTEMKITKRGSPYLRRAIWLAATVASFKDPALSIYYKNLIARGKKHLTAIGAVSRKMCNIIFSVLKNKKPYTPNI

SEQ ID NO: 244863 - protein, 449 aa, unidentified
MHGAHIGGQRAGAFLDLVRGVDPERVLLVGIDVAKATWFVVASNLLGEVVVDGVRLVADRAGLAELERVLGAASARVNAAMVVVGIEAAGHQHQTLTAHLLDRDELVVRLLNPAQVAAVRKQQGNRRRKTDWLDAAAICELLARGEGALVHLDGSAAAALRPLWSGRKDLVDTRSRLRQQAGALVDCLWPGCSAKDTVAGVTPVLCDLFATKAGRVLLELLAQGWTPARVAATSVAALRGLFAVRGCRLTRPLATRLIGRAQAALPAHPAATAGKAVTLAALLGTIDTLDHQIACLEAAMAPLLAHTQGAKLTQLRGVGVVAAAGFVAFVGSTDRWAEWSKVWRAAGLDPARSQSGPTDARLGISREGSAWGRRAILDLAAAVCQQPGPWRDRLRTRTTQQHKPAKVALTATANAIGRTLFALMASGADFDPGFEAKRAAARKAGGQAA

SEQ ID NO: 244864 - protein, 364 aa, unidentified
MTTVHCVGMDVDKEKIVLARVGGGRDTLAVQHVIAHTPAAVKKYFTALTANAEVQAAYEAGCFGFGLYRQLVSLGVAVTVAAPGLIPRKPSDRIKTDRRDALSLALALRAGQLTAIHVPTEQDESVRDYLRMYDALRGDLRICKQRVLQFLLRHGIHYQGGGPWTVKHKHWLANIEFALPRDRQTLDMYLSQMQELQGRCAEAAAEVESIAAQDCYGPQTRKLTAFKGIKTLTALSFITDIGDFRRFATARQFMAFLGLVPSERSSGNKRRQGGITKAGNSHLRRLLVEAAWHYRSYHPCSRDLTERRRGVPTPLVSYANRAGRRLNRKYMHMVLRGKRSQLAVIAVSRELAGFLWGAMTDRVA

SEQ ID NO: 244865 - protein, 323 aa, unidentified
MTNATHGNQTSQVTVYAAIELSKKSWVISIARPDRDQPSIHRITGGNFSELVGRLRTAAKNFGRILVCYEAGYDGFWLARSLTKVGIECRVLDPASLQVNRRARRVKTDRIDALALLRALIAIDRGDRHVCAVVRVPTLEEEDARRSHRERQRLVRERTAHINRIKGLLFGQGIRGVEPKLRLSRIDFAALTTSEGHPIPDRLRRELEREYVRLNLVEQQLRTVEKERDTADSQDPAVDRKRQMLCALRGIGEASAAILAREVFVRSFANRRQLGSYLGLTPSAYDSGSTSRCQGISSAYAVSCLSRWRANSPLPCGDMSRQG

SEQ ID NO: 244866 - protein, 392 aa, unidentified
MIFIGIDIAMDKHDIIIIDDLGEIIYDHFIIHNNRSGFKKLHTVIQSCTKSVNDIRIGMEATGIYHNNLRDYLISKGYTVYCTNPMLVSLSRKSASPRLTKTDKIDAIAVCRHLMHNLNRLHPYTPPLYHLVELKQLSRDYNSNNQIITKAKGELKRLLQMFFPEFLKHFNPFSKWALDLLYDYPLPSDYKGLHIESLVQRIHSRSNHIEQAKLLKHIAKNSIGNSNSLNTYLIKFCVSNIIHFNSQNETLKKLISQHMTLYPKILSIPGIGPINGATILGETGDIGRFPNKHKYTSLFGIEPIVHESGKYKRKRTRISKRGSKYLRTAIYSAARVACVNPMTKDNKFKRKYLKMMSKENKHHTTIIFAIAKNMVHSIYKILKTDTFYNDLL

SEQ ID NO: 244867 - protein, 404 aa, unidentified
MGQVFVGHDWAEEHHDIDIRDGEGRSLGRARLSEGVEGVARFHALVGALVEHPSAVVVATETDRGLFVGSLVAAGYQVYAVNPMSVARYRERHSTSGAKSDPGDAAVLAELARTDRHHHRRVAGDSDLAEAIKVLARAHQSLIWTCQRQLNQLRSTLREYYPAALELGDLHGPDALGVLTVAPTPSLGRRLSRTRIGSAIARAGRQRRVEQRAAEIQAVLRTDQLSPPAVIGEAMGASVSALVAVVGEFNTQIARLEEQLSERFDQHPDAKVVRSLPGLGTILGARVLAEFGDDPNRYDSAKSRKNYAGTSPITKASGKSRVVLARYARNRRLADACYLWAFAAITASPEARSFYDARRAAGDTHNRALRALANRLVGLLHGCLRHDTLYDAHAAWDHRHQRAA

SEQ ID NO: 244868 - protein, 448 aa, unidentified
MSVIQLLHGTDHIIEVPDIHTYPGNSQACNTTGGDLMQDILTCVMGLDVHRDIIVACLVKGAVDAEPEAETRTFSTLIPEMQKLRDWVIEAECRNIAMESTGIYWQPIYEMLESCFDGEVSILVVNARHMKNVPGRKTDMKDAQWIATLLRAGLLKGSFIPDKTFRELRHLTRYRKSVVHDITAQKNRIDKFLQSSGFRFTAFLSDTFGASGRNIIRHLIERGSIDREALDKCLKTKTRNRIDEILVALNGSLSVHQRRFLNIVFLHLEDLEAHKHTIEDEITEEVLKHTDALNLLCSIPGIDVTAAAAIVAEIGTDMSAFPDSQHICSWAGLSPGNNESAGKRKSVHINKGNPYLKSMLCETAWIMASHRKLYLSGWYWKVKQRKGAKRATIALARKVLSIIYTMLKTGTPYSEECFEQRRQRCERKRANRMVNELQKLGYTVVAPD

SEQ ID NO: 244869 - protein, 403 aa, unidentified
MNSVGIDISKGRSMIAVMRPFGEVVISPFEVRHTDSELSELARQLKSLDGETRVVMEATGNYHTPVAKLLHDAGLYVSVVNAKLVHGYGNNDLRRVKTDKKDSVKLANYGLDRWLTLPRYIPEEDTRLLLKNCYRQYRQYSKVQTVLKNNLISLLDMVFPNVNRLFSSPIRGDGSEKWVDFVAEFWHCRCVSEKSQKAFTNKYQRWCRKHGYNFSEAKAHTIHAEACGHIDVIPKSETTKLLVEQAVAQLRATSAALAALKHEMQALASMLPEYPVVMDMFGVGPTLGPQLMAEIGDVRRFYSKKALVAYAGLDAPPNDSGDVTGRHKSMSKVGASSLRRTLFLVMSVYLQTAPLDEPVYQFMDRKRAEGKPYRVYMMASANKFLRIYYATVKAYLESLEHTA

SEQ ID NO: 244870 - protein, 429 aa, unidentified
MTPPSSTTSPVVRVAIDVAKLTHQVLLELPTGKRRSLRVQNTRIEIERLCTLLRSLDCPCDVAFEPTGDYHRPLAYILGQAGCRLSLVSSLAVARTRDALYNSWDKNDPKDAQVILHLMKTGTTQRYLDPLVTGHQDLQELANTYQQVSLRKVRLQHSIVTHHLPLYFPEAERYLHSSRAEWFTDLLLFTPCPAAVRRYTKAAFVAAAREQIAGRKVDKARWLADFYDTAATSLGLPVSESSEAMRMFRIVLEEYRALCVLRKRLEADVVTRLAHQPDFIRLQTLPGIGPILAMIILAEARDLRRFGCARQFLKYCGFDLCTEQSGQFRGTTHLSKRGNARLRYAFWMAGTVAIRMQQNGFRRKFEDYIRPDPQNADRRRKAYTAVAAKMARVAYAVITTGIDFRRFPEAAKPGGRIPSPAAVEAHATS

SEQ ID NO: 244871 - protein, 346 aa, unidentified
MMLIGCDFHPSWQQVSWLDVETGETGEQKLVHARGEAKQFYEQLAAPVLIGMEATGNSQWFIELVEDLGHQIWIGDAAQIRASYVRKQKTDKRDAAHILKLLVEGRFPRLWTPDREQRDLRQLVLHRHKLVLIRSRVKNELQHLSLNKGMQRKRRLWSQAGQQLLRELPLKKWAACRREDLLGLLTMLDEQIGKLDGAVEHAAEENPQSKLLMTQPGVGPNTALAFVLTIGDVGRFPRGKQVASYLGLIPREESSGGRQKLGAITKQGNRMLRSLLVEAAQVAVQHDPGLRKQYRHRCHQKPKAVAKVAVARKLAVRLYWMLRTNVAYPEIVRIESSSGLPLVGAS

SEQ ID NO: 244872 - protein, 376 aa, unidentified
MSNVRFIGLDVHAETIAVAVAEPDGEVRSLGVIHNRPESIQKLVKKLGPTKRLRVCYEAGPTGYVVYWQLTALGVTCEVVAPTLVPVKAGDRVKTDRRDALKLARSYRASDLTPVWVPDTAHEALRDLVRAREAAKKDQLRARHRLGKFLLRQGRRPPTTMKAWTQKHLRWVKTVHFEHAAQEATLLDYLHEVEHMADRIGRLEGAIDEAVKSAPERMRAVIDALQALRGIALVSAVTIAAEVGELSRFARPRQLMGYSGAVSSEDSTGRRIRRGAITKTGNAHLRRVVIEAAWAYRYRPAVGAPLRKRQASVSQEVKAMAWKAQHRLYARYRHLTAQGKCKQQTVTAIGRELLGFIWAIGVHVESETSRLKSTAA

SEQ ID NO: 244873 - protein, 390 aa, unidentified
MRCKKGDRHMKKNSIAKLQVTKSQLRRKAAKQRLTVGLDLGDRTSRYCILDEAGEKAGENQLPTSRAGMDAVFAKMAPSRVALEVGTHSPWVSRQLAGMGHEVMVANPRKVRLISQSVKKNDRMDAEQLARLARVDPKLLSPIRHRGAEVQADLAVIRARAGLVESRTGLINTARGLVKPMGERLKKCDADQVREALGEGLSEEAQNVIGPLLKSVEEITKQIQVYEQKIEEIEKRYPETKVLKQVSGVGRLVALTFVLTVEDPERFEHSRDIGPYLGLTRKQRDSGESQPELGISKAGDELLRWLLVQAAHCILRRGAPESDLREWGLRKVQAVGGKKGGKTRKKKAAVGVARKLAVLLHRLWVTGEVYDPQYNRKARETAKGKRKAAA

SEQ ID NO: 244874 - protein, 479 aa, unidentified
MSGPAGSFVTTGVQVISNMLCEQIKEAPRVQELRLGIDLACRESHRAALADETGKILWSNRRLFTTSVDLQSLWTAVRAAGDVPVLVVMEPTRNAWVPVAAWLRARGADVRMVPPEQSADLRKYYNKHTKTDRLDCELLARLPLLHPDGLVATPGLGPAEALRRSVAHRQSLVARRTAGLQRLDALLGPAWTDVLGTDFGKAALTVLERYADPDALFRLGRARLTQVLIRASRGQWRQDKADELLDAAAQTRLLWAGGGLVFAELADDIAVEARLVRQLGAEIDQLDDRITTHYQDADPTGIVASAPGVGPVLAPLLLGRLGDAKRFRDLAAVRNYTGLVPKVNQSGTSDHTGGLTKAGDPLLREALFMAADHARKVDPTLAARYWRLRAADKHHNSALCTLAAVLVTRIAACWRNDQQYILRLLNGNPITETQGRAQCADLKPTPTAKAGTGRRNKESHSAPSTGPSTKQATKLRKSA

SEQ ID NO: 244875 - protein, 339 aa, unidentified
MDEVSTIGLDIAKRVFQVHGVDSAGAVSVRRALRRSQMLAWFSKLPHCLVGMEACATAHYWARALAKLGHEVRLIPPAYAKAYVRRNKNDPADAAAICEAVSRPAMRFVAVKSERQQAAAGIHRVRDLLMKQHTMLRNQLRGLMAEFGIVTAKGRRGVSELVAILTDAEDQRIPSPLRDGLVMIAETLRGIDRKLEGIDRQLAAAGRADATYRHLITAPGYGPILSSAMAAMVVNPAAFRRSSDFAASLGLVPRQEGTGGKLWLGPISKRGNGYLRRLLVNGATALLNSKRAKEDPWLVKLLATKPRKVVAVALANKLARIGWALMMRQEDFRSPPAAA

SEQ ID NO: 244876 - protein, 322 aa, unidentified
MNKYTETFGIDISKDVFDCYGSKQGHLQFKNTEHGFIKFLQLLDDNTLIVMEATGYYHYRLAQFLYKKKQVVSVVNPLSVKRFIQMKLAKVKTDKSDAKAICEYGIINEVPLYNALTEVQSESLQLFRLMDSFLKKRTATKNKVHGEEVLGIPSKWVYRSLKRDLKHLDKELLGIEKQLLSLVKQDQQIQLTLLQSIPGIGLKTALFLIVITDGFKKFETASQLCSYVGITPTIRESGSSVRGRSRISKVGNRKLRNLLFLCSFSACKQNKACKNIYERIVNKGKSKKLALIAVSNKLLKQSFAIAKSGLPYDETYVSVLSK

SEQ ID NO: 244877 - protein, 408 aa, unidentified
MEVLHPRCCGIDVHKTSITACLRLQDGRRTSSTVRQFGTTTVELLQLHTWLTEAGCTHVAMESTSVYWKPVFNILEGAFNVVLANAHHIKAVPGRKTDVKDCEWLADLLAHGLIRPSFIPPPAIRELRDLTRHRKSVIRDRVKTANRIHKLLESANVKLGNVVTDILGISGRAMLTAMAAGESDPIALARLAKGALVPKISRIAEALRGTFTDHHRFLLHQMLTQLDQYSALITACDDRIAAVAEPFARQIGHVQTIIGVGRRSAEVIVSEIGVDMSRFESAGHLASWARICPGMRESAGKRHNAGTGTGNNWLRTTLLESAWAASHSRKSYLGAQYRRISRRRGPKRAAIAVAHSILTIAFHLLHNDVDFADLGADYFDRLNTVKLKRYHLRRLADLGCDVSKIVAA

SEQ ID NO: 244878 - protein, 324 aa, unidentified
MRRFHMNYIGIDVAKEELVVYDGKNEHICKNTRGLPELEKCLAGLFLSLDDMVIIFEATGPYSLFLREFCAHAGIRVWIVNPLKSASFTKALGNRSKTDAIDAKMLYELHKVIQPEYIIIPKIDEAAQTLSLYISSYELIIKTRTALSNHLHALAHTPDAPEELKGLIKEQLQGLKEAETTLLDTMEKYVKGDKEIRQDYENLLTIKGIGRISALCLLMLFRTYPDTSRSEITALAGLDPTRTESGTSVRGRRKISKGGNSTTRKILYFPALNCIQHNKQIRTFYERLIVNHKVKKLAVIAAMRKLLLIAHAVHKSREPYRDAA

SEQ ID NO: 244879 - protein, 478 aa, unidentified
MAARKKNTSKKAAPGSPAAAGQPGGDGAEVAEERVEVVTYAAAVDVAKGSGMVCTRVPGSRPDRKRQKVWLAEAGYDSVVALMDHLRCEGIQRLVIESTSDYWRIWYYLAEAAGLEVWLVNARDVKHLPGRGKSDREDCVWLCKLNERGMLRRSFVPPEPVRDLRSLTRTRSRLTQDQVRHQNRVEKILEDALLKISVVISDLFGASGRRFLDALVAGERSPKALAALGHPQLKATPQQLAAALTGRFREVHAFEIATHLRLIDAINDEIARLDARIEQQLASIPGVAPACTACGLIGGGHAPGCASKDAAVLSLAERLAEITGVGARNAQVLIAELGTDMSVFPTPGHAAAWARLTPRTIQSGTTARPGRTGKGNPYLRGALGQCVMAASRTDTRLGEQYRRTARRRGKQKGIIAVSRVICEIACILIADRAARFTDPGAGYYSPGNPQRHTRSRIREIERLNPGMKVTLTPIDPAA

SEQ ID NO: 244880 - protein, 460 aa, unidentified
MTTRKKKMELDIINPNAAGIDVGSRSHFVAVGQSLEDVKEFGVYAEDLTSLCLWLVSYGIKSVAMESTGDYWQNLYTELMKHGIDVILCNGKFTKHAKGKKTDVKDCQYIQKLHALGLLTSSFLPDETTEKLRTYCRQRNNLISSASGASRRMQKFLKFLNFRLDVVVKDVCGLTGLAIIEDICKGNLDPESLSNHRHYNCHKSKEEIAKALHGNNREDFLFGLKQELQAYQFFQKQIEACDKEIAKFVNDELKKSPEKSKLKTTDKPYKRQNKNAVSINNFNQVSFKYFGGVDLMAIEGLSHATVLAIMSEIGPDGFKKFETSKHFVSWSRLAPNNKISGGKVLSSRIPKGSNRLKIALRQAANAIGNLKDTHLSDFFKRVAYRKGRQAVVSATARKLGVIIWTMATKKVPYSPPTEYLFLDQKRKMGIAKRIQKQMAKFDIKPEEIGIGNSLIPNYNF

SEQ ID NO: 244881 - protein, 374 aa, unidentified
METIYIGVDFHARQQTICYLKTETGELVTCELKHQDKDKVRAFYAEFRGQVVVGLEASGYSPWFERLLEELGCAVWLGHATEIRRRARWRQKNDRRDAELILELMLHDEFPRLHRPAVQSREVLRMLRYRQKLIKIRTMSKNSLQALALQAGVARRSHLFTREGKQELTAALMSPAMQWQREHWLQLLEPLNQQVLEAMVWLKAQSKGDVEVARLRTHPGIGLLTSLCLAHTLQPIDRFRNTRKVVAYAGFDPVERSSAERKRFLGISKAGSRLLRHLMVEAAHVAVRKDEDLKCFYQRLADRRGRPKAKVAAARKLLIRAYIMLRDEIDYAEFRRRAVAARLARLGHGPQVPAVVIGQPASTERREQLTRTRK

SEQ ID NO: 244882 - protein, 338 aa, unidentified
MNIVFMGIDLAKNVFQLCGLNQAGKPVYTKRTGRKELLQTLANIPACLIGIEASTGAFYWQREFEKLGHKVKVISPQYVKPFVRGQKNDGNDAQAIAVALMQPTMQFVPPKSPEQQDIQALHRARQRIVNHRTATVCQIRGLLLDRGIPIGSAVSRARRAIPLILEDAENGLSPRMRRTIAELYDLFNDLERRIHFFDKEIETVFRQSETCQRIAKVKGIGPKTATAVVAAIGKGTEFKNGRHFAAWLGLVPRQHSSGDRQVLMNMTKKGDKHLRTLFIHGARAVVRVATNNNEGYMNQWVNQLKERRGFNKTTVAVANKNARIIWSMLRNETEYQVV

SEQ ID NO: 244883 - protein, 472 aa, unidentified
MMMPQEIEDEEHERVLGRVAAVDVAKASGMVCIRVPHPSRPGKRRTRVWEAAATTGAVLGLAEQLAGEGVEMVTLEATSDYWRIWFYLLEAAGLSVQLVNARDVKNVPGRSRSDKLDSVWLAKLTERGMLRPSFVPPAEIRQLRDYTRLRTDLTRDRTRYFSRLEKLLEDSLIKVSSVASSLDTRSVRDMIEALIAGERDPGVLAGLARGKMKAKHAALVEALTGRFDDHHGELARMLLDQTGALTAQIERLTGRAGELIAGIPAARGVDAGGATGPGAGEGQDAAVRPAIARLDEVPGISRRTAQVILAGTGLDMSRFPAAGHLVSWAKLSPRTIQSGAKSTPGKTGKGSPYLKGALGEAAAAAARTGTFPGERYRRIVKRRGKLRALVAAARSILVIVWHPARRPRRPLPRPRPRPLHQPHRHRPQDPQPRPPARSARVHRHPGPRRLTRITPPPGCAGAPPGAAALWLG

SEQ ID NO: 244884 - protein, 313 aa, unidentified
MSEIQVVVGIDIAKDSVEVSTLGAPGPEGGYGNDPEGHSALIAQVPAGALVVMEATGGYEAALACALQAAGLAVAVVNPKQVRDFAKGMGQRAKTDRIDARVLAEFGQALGRKADLARYLKPLVDEQVKDLAAWVTRRRQLLGMLLSERQRLGLARAKVRPSIELMIESIKRQLDQIEREMEAHVARHHRELDRLLRSAGGIGPVASVTLIAALPELGRLSGAQIGALVGVVPIARDSGRWKGRRWIQAGRFEVRRVLYMATLTAIRCNPTIRAFYARLVAAGKLKKVALVACMHKLLRILNAMVRDRQPFHA

SEQ ID NO: 244885 - protein, 431 aa, unidentified
MKYKQSKKQNQRITQITDATLVVGADIAKETHVARGIDFRGIELGKECVFSNNRPGLIKLVQWMKELQRQHAKADVIFGIEPTGHYWFPLAEFLQHEGIKVVVVNPHHVNKSKELEDNSPTKNDYKDAKVIADLIRNGKYTEPKFPKSVYADLRILMNLREKVMGNFGQVQRRIQNWLDRFFPEYQQVFKDWEGKASFITLSEFPTPQEIVSLGAYTILKRWKQDVKRAVGMKRAEKLVQTAKNSIGLTEGLTAAKMELKALLEQYDLFSRQLEDIMQQVELLLEQVPGSEEMLTVPGVGVVTLAGFLAEVGDLRGYDHSQQIIRLAGFNLKENSSGKKKGKSTITKRGRSRLRALLFRAVMPMVAKNAEFKALHHYYTKRANNPLKKKQSIVALCGKLIRVLFTLGTKQIGYNPIDVLGPVRQSQLQMAA

SEQ ID NO: 244886 - protein, 388 aa, unidentified
MFQTIDQCKKALNAFEQDSMLVVIVELSQKSWLVAGIVSGVDRHPLKKFDADENRLFALIERWKQEAIKAGCEVKRIVVSFEAGRDGFWLARWLRARGIEAHVIHPTSVSVSREHLRAKTDRLDTELLKRAALGWLRGEPDHCRMVAIPTLEQEDAKRSNREHQYLVGERTRVINRLKAALARLGVRNFNPKLRKASERLRALVTPEGKSLPPNTLAEMERDMQRLQFVRQQIKVIEQTRFERLKKDPNTRLNVMVLLVGRVFGMGIETADMLVHEVLSRDLRDRRAVARYAGLTGSPDESGARRREKGLARAGNARVRRGMIEFAWRFVRFQKDSTLAQWFRARTADARGTTRKTMIVALARKLLIALWRLVTTGEIPTSLTLRLAA

SEQ ID NO: 244887 - protein, 340 aa, unidentified
MKRIFIGVDFSKLKFDVAVFEGATKEYLGFSVFENNLEGCQQALAWVATVTDVSPNGWLVCGEHTGLYSVTLTHYLCASGVAVSLEPGLQIKLSKGMTRGKNDKIDAGYIAEYAYRFQDKVKPYRAASAALSGLKDLVAYRNRLLGFKKSLTTSQQELQRVKADQTAVAFIYDDSKAAVNDLNARIKRVEAAMRDILQSDAELLENYALLTSIKGVGMLNAVVFLVVTGNFTLFSSARKLGSYCGVVPFEHRSGSSIRGRDKVSKLANKKMKVLLTLAARTAVLHDPVLRAYYLRKLAEGKHDRVIINNVRNKLVHRMFAVVRDKKRYDPSITHPLQQAA

SEQ ID NO: 244888 - protein, 361 aa, unidentified
MKEEQTMAGRRSIVGGVDTHKDLHFAAVVDEHDRLLGSESFPTTRHGYKQMLLWMRSFGEVVRVGVECTGSYGAGLLRYLQRAHVTVLEVTAPDKSDRRKRGKDDTLDAYNAAHAAFAGVRTVTPKTRDGMIESLRVLKVCRKTAISARRVALQLIHSTIISAPDELRESLRAMTRMQLIRTLAAWRPDLSDYRNLTSACRIALKSLGRRYLELHDEIADLDVMIATLVDELAPDLVSRNAIGYESALQLLLTAGDNSDRLQSEASFAALCGVSPVPASSGKVTRHRLNRGGDRAANSALHIIAIGRLRTDARTKAYVAKRVSEGHSKLEAIRCLKRYIAREVYYVIQHRNRQITQTQIAP

SEQ ID NO: 244889 - protein, 526 aa, unidentified
MRPLAGREDRCGTGAFVPVAECGLRDGVDNIGELSISRMANIPLRRMRILTSLRLQAKVDQQLAVELPMTKHRKTAKSQSFKLTKLPKQLQHINLNAAGIDIGSERHLVAVPEGRDEISSVREFGTFTTDLEALAAWLKKCGVTTVAMESTGVYWIPLFELLECRGFEVKLVDARHVKNVSGRKSDVLDCQWIQQLHTYGLLAGAFRPPDEVCVLRSYLRQREMLTQAASMHIQHMQKALQQMNLLLHNVVSDITGATGMKIIKAILAGERDPRVLARHRHELCKHSSATIAKSLVGNYREEHLFALRQAVDLYEIYQAKIADCDQAIIKQLENRPDVSDDGPPPTDKHIKARDRVRNGVDVRELLFKKSGVDLFTIPGLGADTLLTLASEVGFDLTPWKTEKHFASWLGICPGTKRSGGKVLDAKTKRNPNRAAQAFRMAASSLHHSQTALGAFYRRIKARTGGQQAVTATAHKIARIYYAILTKGTSYVELGQQAYEQRYKERRLDHLKVQAKSFGFQLVPCTP

SEQ ID NO: 244890 - protein, 399 aa, unidentified
MSYQSLFVGIDVSKFKHDIAIVNEQKQFVGRPFVIKDDREGYQRLIRKLDELRRLYHTQRFYIGLESTGDYWKNIYYYLKQQSQSFVVTVINPVQTRAHAKSELRRASTDAVNARDIALFMAEKKPKASFDRAPILDNIKDIDRQIYQLKKQQTMSVNKLRIELTKVAPEIEKNVSNIQGKQILALLAEFPTAELIANSCSQQLASIRYGKSNWPLSAPFIEKVKALSQHSIAYKTGLGAGYAVQSLVRCIWQFQREIQWLKSQSVKLYQSVTDQESLLATISGISRETAILLEAYIGDVHRFPNVKKFVAYFGMNPTVCTSGISKRSSYLQKKGNALVRHKLFMAVLGMIRREVDPIYGYYKRLVDAGKPKLVAIGAAMRKLLVIMYYMLSKNKPFKN

SEQ ID NO: 244891 - protein, 339 aa, unidentified
MKRFLFIGIDFSKSKFDVSALENIDEKNVIQATFDNEATGYNDFLKWVSRQSKIKREDWRFCGEHTGLYSRGLSNFLAKKGLFIWLENPLQIKQCSGIKRAKNDLFDSLVIAQYACRYIDRAVAYKPSEKEVEALRLLVSYRSRLVKNKVSLQVAASEMRRVIKRDTTARFVYESSMREIERIKKQINGIEQKMHNTVVNSSLKENYLLINSIKGVGMQTAVMMIIHTNNFEGFENARQIASYCGCAPFPNQSGTIDKGNHISRLANKELKVLLSQCAVSAIQHNKEMATYAQRKMAEGKTKRIIINNVRNRLIQRIFAVVTNKIPYREDYLNPLAKCA

SEQ ID NO: 244892 - protein, 449 aa, unidentified
MSTLCSAEEKPSYAARIGLDWADQKHFWTMLTADGKRTRGELKHTPEAIEIWAVELARSFDGRPIALALEQKRGALVAILSKYAHVHLFPLHPTKLGHYRKSVCASGAKSDPSDADLILDYLLKHPEWLPCLMPDTVETRSLQFLVEERRKLVDQHTSQLQILIYWLKQIFPQMLEWFDGMSTPLVGDLLKRWPQLPALQKASQKTLRKFFAQHNCRSEERIQQRLDQIGQAVPATTDAALLNTGDLCIHIAVQLLAALRAGIAEFDRQIEAVYQTHPDRSLVASLPGAGPALEPRLIAALGTNRERFESASSMACCFGIAPVTESSGNAHWVHWRWACSKFVRQTFHEWANCSIRSCGWAKEHYDKQRLKGKGHHASVRSVAFKWIRILFRCWRDRVPYSEQRYVEALRKHGTSTSTPVAVVINSTSMLSGVQWESCGGFSKLAKVSS

SEQ ID NO: 244893 - protein, 410 aa, unidentified
MLELFVGDDWAEEHHDVELMDPAGRRLARARLPEGVAGMARLHVMIAAQLGEGVEDAVVKVGIETDRGPWAQALIAAGYEVFAVNPLQAARYRERHSISGAKSDKADAHTLADMVRTDSHQLRPVAADTPRAEAIKVVARAHKTLIWERTRHAQRLRHALREYFPAALEAFEDLAAADTLELLSKAPDPASAARLSISQISAALRRARRRKIEEKAAVIQTALRAEHLRQPEVVVAAYAASVQSTVAVLKVLVEQVKTLQGQVESHFGRHPVAEIILSQPGLGPILGARVLGEFGDAEDRYVSAKSRKNYAGTSPITRASGKKKVVMARFVHSDRLIDALDAQAFAALSASPGARAYYDRIRARGVGHRAALRQLANRLVGILHGCLKTGTVYDETTAWPADATDSPAAA

SEQ ID NO: 244894 - protein, 410 aa, unidentified
MSGESTAGGYTEKSSRTQNGQRQFLKLWPWRMAFYLGGKMNVETKNLPPKEATRMSRDVKYIGMDVHKEAIVIAVRNGSGKLIMESIIETKASSLLQFLQGLRGELHVTVEEGTWAAWLYDVRKPHVHQLLVCNPRRNALFKEGSKNDKVDARKLAELLRAGMLRPVYHGENGLRTLRELARSYQTISKDLTRVMNRIKALYRGWSIPCASTQVYTPRYREQWLHKIPHAGVRRRAELLYQQLDGLQALRRNVRPEFLAESRKQKAAKLLRQIPCIGPIRAGLLIALMQTPHRFRSKRQLWTYSGLAVETHDSAQYRYVDGQLQRSKKPQQLRGLNQNHNHEMKHIFKSAATTASCGVGPFRDFYAALLAKGMRPEMARLTLARKIAAITLTLWKKGGRFDPEQLKPQAA

SEQ ID NO: 244895 - protein, 348 aa, unidentified
MKKAYAGMDIGSKECAAVVLDSRGKLVDAATFRTSERNLVCWGKNHAGTTVLIEECEIAGWVRSVLKPRVRQVVVSDPRQNAWIAKGTDKSDKVDAAKLAHLNRMGSYKEVFHTDDADIAAFKMLVKHYDKTTRRLAAVKSQIKGLLRGQGIITTGAAVYHSGRNRALSKVDGNMIRLAIEQDYALLDYLEAAQQVSRRNVVKASALFPIIARLKEIPGVGDITAARFVAYVADPHRFNKGALNRYSCLAVVDRTSGNSHLGRRCLNKDGNSALKDVSNTIFHAAISCTKPNGIKAFYAKSLRRTTDRDKARLNTQRKILALMLAIWRNEERYSDDRVTGRKRALPSA

SEQ ID NO: 244896 - protein, 357 aa, unidentified
MFAGIDTHKDTLAVAVVDAAGRQRAGVEVVNAAAGFAAVTQLLAAHGVGRVGIEGSGAFGRAVAAYLAATTRLDLREVPTALTSRERGARPGQGKTDEVDALAIARITARDPDLPPVRLTVGLAADLRSLLDYRQDLVYERHTLVNQAHAELSGLVPGYQHAHPHLKTSAQVKAVLELLDGDERVRAEVTRRRLVRVLAVAAEAQAVRKQITGMVAGHAEHVAALYGAGPIIAARFLAEVVDIDRYPTRDAFASANGTAPLAASSGRTVRHRLNRGGNRRLNYALYIMAITQARADTEGRVYYDRKRAEGKTAKEAIRCLKRQLSDQVYKAMRADAATAGAVLEADGGPSAAPAQAA

SEQ ID NO: 244897 - protein, 363 aa, unidentified
MKTEKRRFVGIDLGKREYTIAIIGEKGKFNCHHGKTSVYGRQILLRLLKQSDKVALEAGNLAFNLAHEIQERVGCEVRVLNAAKLPFIWDAPTKTDKEDARKLAMLIEERRDEKLPLVSLPSKEEMERRKLIANYSREVKGRTRLLNLLHAMFVHQGHTTIVKKDLATVEKRLEVVELLIGQEKEEAEWLLKHLELYEQRKRQLKESIKKEARTNENMKNLQTIPGVGPVVAYAFVAHVGDGSRFTKGSAVSNYIGFVPKLYYSGTIQRQGHITKRGNAYLRGLLVQAAWSMVRCNKYSSLRERYICLTKFYGSGKKKTIVSIARRLTELMYSVLRDKTEFEERIWMGRKEYLASVKELKKIA

SEQ ID NO: 244898 - protein, 361 aa, unidentified
MAPSTPLYVGLDVHKDSIAVAHARGQNADPPGFVGAIGTRQADLDRLIRRLEAKAPELVFAYEAGPCGYVLHRYLTGKGFAWQVVAPSLIPKKPGDKVKTDRRDAVELARLLRSGDLPRVYVPTVDDEAMRDLVRARDAARLTLKNAKLRLKGFLLRLGLHYVGRADGTAAHLRYLAKVVCPTAAQQIVFQESLRAVDEQVDRLNRLEAELLERAPAWRLSPVVQALQALRGGQWLVAITVVADLGDLTRFDSPRPRSAFVGLIPSEYSSGQARRQGGSTKAGNGCARRALIEGAWAYRHPAKVAAHIQTRIDGLPKPIQDLGWKAHVRLGKRFRRLTARGKHPTVAVTAIAQGGADHGIT

SEQ ID NO: 244899 - protein, 368 aa, unidentified
MKKNTSKTKKRTTTAEAREKFASFVGIDLGDKHCEVCVFNGAGEVQERLRLPMKGKDLEGYFGKLGRSRVALEAGGQSRWVAEVIERCGHEVYVSNVRKVAYISASDDKDDPGDAYKLAELVHFKPQLLHPIQHRSREAQADLSWIRAREALVESRTQLVNTVRGMSKAFGERLGRCSVEAFPAKRAEQVPEEIRGAVAPLLEMIDQLNEKIAYYDQMEEHIARQRYEKHGLLRQVDGVGVHTALSFMLTIGEAERFEKSRMVGPFLGLRPRKKDSGESRPQLGITKAGDEYLRKTLTNCAHHILGPLGKDSDLRRAGQRICERGGKNAKKRAVIAVARKLAVLLHRLWITGEVYEPLRNSKKKAVAA

SEQ ID NO: 244900 - protein, 274 aa, unidentified
MEKYLKQSLGIDVSKLNLSLSLGVLNEKLVKEFDSHPDVSNDLKGYKVLLKWLKASVDSEVLLLVVMEATGVYHQGIAHYLYEQGYSVCIMQSGRVKRYAQSLDQRSKTDALDSRMLSMLGLERNIRLWHPPSEELQELKGLSRERSSLLNDRTMETNRQGAIASSVHSNARALKRHKIRLKLLNTQIAAVEEEMRMLISKNEVLKRKLDYLISIPGVSFISAATIIGETLGFESIVNAKQLASYAGYDVVLRESGNRGTSRERPEFVKKGTAI

SEQ ID NO: 244901 - protein, 312 aa, unidentified
MDAIFVGIDVSKDRLDVAVQPIGEGFSVSRTGAGIAELAERLKAMSPKVVAVEATGGFETVVAAGLAGANLPVVVVNPAQVRAFANALGKRAKTDPIDAAVIARFAEATKPQIRQLPDETTRMLADLVARRRQIVEMIAAESQRARRLTSARLKKSIARLHKALEKELADLDGEISDHVRGSPAWAEKEDLLASVPGIGPTIARSLIAELPELGSLDRRQIAALVGLAPWTRQSGQWRGKSFIGGGRANVRRVLFMGAMVASRFNPTLKLFRDRLVAAGKPKLVAIIAVARKLLTILNAILRDKSPWQLKNA

SEQ ID NO: 244902 - protein, 350 aa, unidentified
MVIIGCDFHTRFQQIAMLDMQTGEVVERQLEHETGEAEQFYRSLSLPVRIGMESSGHAHWFERLLAELGHELWVGDAARIRAAEVRKQKTDTRDAAHILDLLVTNRFPRVWRASPGDRDVRLLLVHRQKLVWARSSVKNQLQALAMNQGVCRRRKLWARAGRRALEELALGPWTSRRRQELLALLDQLDGSIRELDRAVEEEAQKRADAVRLMTHCGVGPVTALAFVLTLGPVERFRCSKQVVSYLGLNPREHSSGGRQRLGAISKQGNSILRSLLVEAAHTASRFHPELRRNYQRLKFRRGSAVAKVAIARKLAVRLYWMLREQAHPAQPVRMQGSPGGILVDASPSHF

SEQ ID NO: 244903 - protein, 373 aa, unidentified
MAKYSTAFGMDVHLRSTTVCALDADTGEAVTRRFPGNPWGEIAGWMDGFPGPSLAAYESGYLGFAPQRELAGLGVECVVAAVSKIPRSAADSASKNDRNDAARMAKAILAHDISPVWVPSPEVEGIRDLAGAYDGATARLATAKQRLLAFLARRGFVYGGTTPAGNPRKYWTYDFLRWLDKVRPEDDGGVRALAALRNEVEAAAEARADLLSEYRAAVDASPIAAEVAALQSIKGCAFALAAAFSAEVGDFTRFRSGRQVTSYFGLAPKQRSSGDSVRLGGISGAGNALVRKLAVEGSWCYAAARHQPKLMPRDTGVPLEIRMHGRKGSERLLRRREEMLARGMPQAKANAATAAELVRWLWALGMMCREGAE

SEQ ID NO: 244904 - protein, 478 aa, unidentified
MVAPRPAELNRKQRKALARQLRVDDPGLDVMHPHAAGIDIGNSAHYVAVRPDRDPDSVRRFECFTADLHRLADWLQQCGVTTVAMQSTGVYWIPLYEILDARGLEVYLVNARHTKNLPGRKSDVQESQWLLKLHTYGLLRNSFHPSAEIRIVRTYWRQRGDHVHAVSTCIQRMQKALTQMNIQLANVISDLSGWTGQRIVRAMLAGERDPDTLAELSHPGIHATRDTFAKSLEGTWQPDLLFVLQQEVAMYDAYQQRIVECDQALEQHLKSVADKVADAAPDGQHSPTTPGEPRRAGPKRRRKAGSHTPQFDLGGELSRISGVDLTRIDGIDVGVAQTVISEVGVDMTRWKTEAHFASWLGLCPDNRITGGKVIRKGTRHVVNRAATALRLAATTLLRSQSYLGAQYRRLRGRLGTPKAITAMAHKLARLIYRLLKWGHAYVDKGLHYYEERHREQQVHLLQKRAAKLGLQLVAPEVA

SEQ ID NO: 244905 - protein, 486 aa, unidentified
MRRLVGIDLGIASAHTVRVLDEQGKEVCRRKCGPTVASLSTIEAAALAGAPVGTALEVVIEPTGPAWLPVAVYFVGRGHTVYRVSSAKAAALRRFLSRHAKSNGIDADTLARLPLVDPAGLQPLELPDAERAALDRRVRACDRLTRAGAEHKVRIKDLVRQLMPATPLTGELGKADLAVLERFADPRTLLAAGVDQLTTLIIEASQNHLGTQRAEQWLTAAAAALELYGDHPAMPYADLAAEVATEVRLLRAVETELAGHEEQRETAYRWADPGQLARTLPGLGQVGGPVLAAIMGRASRFPTGAHFRSYTGLTPRASQTGDTDRKGQPMSKAGSTLLRYTLIRAADHARKQDPQLARIYYVQMVERGAEHIKALCVVAAHLAERAWAVMSRAMPYVVCDTNATPVSPAEAKKIIADQWTVPADVRARRRSTRKTKAGKAPQQVLTGHGKSHAQGADRTRRPSPRGSSKTTSTRVKPNEPLTADPQ

SEQ ID NO: 244906 - protein, 344 aa, unidentified
MDHFAGLDVSVKETSICIVDDTGRIVREVKVASEPEALLKVLGNPAYRFKRIGLEAGPLSQWLFSALAEAGLPVVCVETRHMQAALKAQINKTDRNDARGIAQMIRVGLYRPVHVKTLRSQKLRMLLTHRKLLQSKAIAIENDLRGTLRNFGLKVGMVGKVRFEARIQELVENISDLAVLVEPLLIVRRVLREQIVILHRRLLAIVREDEVCRRLMTTPGVGPVVALTYRATVDVPARFRKSKSVGAVFGLTCSRYQSGEIDWSGKISRCGDEMMRTMLYEAAQSMMHSKKWSWLKAWAMQIARRRGMKKAIVALARRLAVIMHRIWVDGTEFRWTREQATTAA

SEQ ID NO: 244907 - protein, 351 aa, unidentified
MIIIGVDYHPSDQYIALVDTETGEYEERQLNHSAGEAEKFYRELAARGVSVRVGMEATGYTRWFERLLAELGIELWIGDAAKIKTKRVRKQKTDREDARLLLRLLRENNFPRIWVPSPENRDLRQLLWHRHRLVQMRTRIMNQLQALAMNEGQRRKKKLWSEAGRAQLDKLPLAPWASRRRKDLLELLDRMNPSIEELTAAIEREARKWPEALRLMTHPGVGPLTALAFVLIIGTVERFQCGKQIGSYVGLIPCEDSSAGHQRLGHITKQGSSLLRFLLGEAAQAAARWDADWRRRYMHLALRRQRNIAKVAMARRLGVRLYWMWRKGWEYSDWVKFGSHAGQLGTGDGVQ

SEQ ID NO: 244908 - protein, 313 aa, unidentified
MNQPKSNVFVGVDVSKERLDVAVRPSGEHNSFANDEAGIAQMTECLCRLSPEMILFEATGGWQMNAVNALAARRLPVVIMNPRQVRDFAKATGQLAKTDAIDAAILAHFAEAVRPEIRELKPLEARKLEALNTRRRQIVEMLTAERNRLITAPEWTRPDIEDLIAFLKKRLATINLDINKLIRQSPLWREKDKILKSFPGVGPVTASTMLSDLPELGSLNPKAIAALVGVAPLNCDSGKHQGKRKICGGRAGVRSLLFMCAKTAVRCNPVIRGFYERLLRAGKLRKVALTACMHKILIILNAMIRDQVCWKTA

SEQ ID NO: 244909 - protein, 338 aa, unidentified
MNSVTLLGIDIGKNSFHLHGQDAQGHQVLRKKLNRSQLLPLLAQMPPCKVAMESCGGSQFLAREITKLGHQVQLIAPQHVKAYVTGNKNDFIDAEAICEAASRPRTRSVQVKSVDQQVLSTVHKLRKSLVSRRTGVINQVHGFLLEFGVIFPAGYAALDRVPALMEEHNLPLRLRQAISRMLDDIRQLTSEIKALDIEIKQQVNGSDAGKRLQSIPGIGPLIASALVADVGDASIYKSSRDFSASLGLVPRQYSTGGQTTLLGISKRGDRYLRTLLMQGAQTLLYRIDKRNDALGVWARNLLARKPLNKVACALANKMARIVWALLTKGGTYNGHFTV

SEQ ID NO: 244910 - protein, 355 aa, unidentified
MNQEKYIGMDVHDATISAAVMNAEGKLLMECVLETKAATVLDFIRGLRGTLALTLEEGILAAWLHDLLKPHVSRLVVCDPRKNALLRDGNQNDRVDARNLAELLRTHQVHAVYHGKHGTRTLKEVGRSYLALTQDTTRVMNRIKSVYRSWAIACAGTSVYSRRHRAEWLAQLVEPGVRIRAEHLYQQLDSLEPVRQAARRELLRESGKHAAVKLLRQIPAIGPIRSALLVALLQTPHRFRTKRQLWAYSGLAVQTYDSGEFRFVRGKLHRNRERITVRGLNRNHNHDVKNLLKGAAISAIGHPGPLQDFYAALVEKGMRTSMARLTLARKIAAIALTMWKKGVSFDPKQLQRQTA

SEQ ID NO: 244911 - protein, 342 aa, unidentified
MRIVGGLDIHRQQVTFDWVDLDSGEAKRGRITPADRVGFRKWLGQFDGEVEVVLEGCTGWRFIAEECAAAGARVHVADPAEVATRRSSKRRAKTDRIDARQLRQLLERGEVPESWIPPKIVLEVRERVRLYLDLLEDKQAWQHRIHATLFQHGVPKVDGKLLAGGRAEHGRDDPDLSDAGRDAVDTALRITAALDADLTRIRTELIAFGRQHPGPRELAHEYGLGALLATAVWEELGDTRRFSASRQAVRHAGLDISVYDSDGKHKGRPTLTRQGPPALRWALYEGALHAHKPTSPDHAYYTRLARRAGSGRARLAVARKLARRCHHRLRALGDQAWVDLPG

SEQ ID NO: 244912 - protein, 436 aa, unidentified
MDEVEDEPLFRERVAGIDIGKTTIMVTIRVPSDTRRGRRQQETREFRAVRKDLLALADWLRCWGVTRIGMEATGDYWKPVYFLLEREGFDCVLYHASQVKALPGRPKTDKLDSVWLAKITERGNLPGSFVPPEDIRRLRTHTRYRRHLVQTRTAEKNRCEKLLEDAHLKLSSVISDIHGVSGREMLTAIIAGQRDPKVLAQMARTRMRGKIAQLEEALDCSFFTGQHAFILQMMLANIDHLTAQTDELSKKIDVLCEPYERQIAQLDGVPGFGIITAQDIIGEVGVDMSVFPTAGHLCSWARQAPQVSESAGKRKGKNATGRGNPYLGGTLGEAAANAGRTSTFLGTKYRRLVRHMPKKKAQGAISRSQLVIAYELLSDPDAEYQDLGTDYYEQRANIRREVRSHARAIERRGYRVILEPIDPGLDPDILPITKAS

SEQ ID NO: 244913 - protein, 384 aa, unidentified
MNNDSIIFIGLDTHKSFIQVAVLQGHRGAQPQQLGRIKSNKSALVKLAQQLQSKYPKATFHFVYEAGPCGYWTYRLLTSLGHCCFVVAPSLIPKKPGDRVKTDKRDAAKLAKLFKAEELTPIYVPEAEDEAIRDLSRARETAMKDLKDAKFQLKGFLLRNNVQATVNDNWSKKHLRWLTDLILPHHSQQIVLQEMIITISERMQRLQRLDNELLHQVKNWRYYPVVKAVQAMRGVRLLVALGTIAELGDLRRFDHPRKLMAYLGLVPTESSSGGKTRRGSLTKCGNSRARRLLVEGAHTYKHKANISVELQLRQEGLPKEIVDIAWQAQQRLCRRYQRLLQKGKHRNVVVVAIAREMIAYIWAIAREVVVSDVDPKTRIARLPA

SEQ ID NO: 244914 - protein, 339 aa, unidentified
MNKVSVMGIDLAKHVFQVYGADKKGQRLFSKSIKRAQLIKFISEMPTCLIGMEACGSAHFWAREFQRSGHKVKLIAPQFVKPFVKSNKNDAADAEAIAEAVVRPTMRFVPIKQSWQQDIQSVHRVRQRWVRAQTATINEIHGLLGEYGLVVSRSPRQLLKQIGELIAPEDTRLSIEMKHLMSLLIEEYKELQSRREESDEKLQRVGKDNEVCKRLSTIPGIGHITATAILTVVSDPTLFKNGREFAAWLGLVPRQQSSGGKNVLLGISKRGDSYIRSLLVHGSRSALHHATGKTDRLSIWAVNKKETRGSNRATVALANKNARIIWALLSRNEDYRTVA

SEQ ID NO: 244915 - protein, 314 aa, unidentified
MSTSNCFIGIDISKNQLDVAVRPTNESMSFANADEGIDMLIKSLRPLQPDLILMEATGSYHQLVLGRLLACGFAAIAINPRQARDFARAIGRLAKTDRIDARVLAEFAEKIRPELRPIADEATQQLDAICTRRRQLVGMIAAEKNRHHSGPASIRAQIKKHIVWLERQITEIENDLDKLIRSTPAWREKDDLLRSCKGIGPTTSHTMLACLPELGSLSRHRIAALVGIAPFNRDTGQHRGPRHIQGGRVDVRCVLYMATLAAIRSNAVIRTFHQKLIAAGKAKKVAITACMRKLLTILNAMLRTKTRWSPDFVA

SEQ ID NO: 244916 - protein, 443 aa, unidentified
MAMRTKKNELSVCYPNAAGIDVGGGSHFVAVPPDCSDLSVREFGCFTEDLYAMASWLAECGVTDVALESTGVYWIPVFEVLESCGLRVLLVNARSVKNVSGRKSDVLDCQWLQQLMSFGLLSAAFRPPADVCALRAISRQRDTLLQEQGRCIQRMQKALTQMNVQLANVITDITGQTGLAIIRAIVAGERDPAVLAKHRNYRIRASAETIAKSLQGTWKEEHLFCLGQSLALFDTYRTMVAEVDAQLKTMIAPLRLHAAAPLQGKPKRRGKNAPDFDVREALQQWAGVDLTRIGGIDVGTALKVLVELGPDLSRFKTAKHFASWLGLCPGTRISGGKRLSGASKRIPNRVARALKLAAQGLSRSQCGLGAYYRRMAARMGAGKAITATAHKLARLVYAMLTQGTEYVEQSQAQYEERFVDRTFKYLQQKAKAMGYILVAEAAV

SEQ ID NO: 244917 - protein, 368 aa, unidentified
MKMNAIKAALAASTIALKNEKSAKAKRILIGTDVHLRGYQAARKVDNGVIGVVENFRSEEALLLHVEKQCERAEQVVVVYEAGPLGYTLYRKLTARGVLCYVCAPDSSEQKRKRRKNNKIDARNLTSKLFNYLNGDEGALQLARVPTEAQEQLRLASREHDQMVEERKRLGAKGNALLLSQGFGSWSNWWRPKAWAQLSSLVPEWLLERLKIWVDVLKMLDEKICLAKVALARACSGPRPKGVGALSQIQLQSEVLDWSLYTNRRKIACLAGMVPSEWSTGDTERRGSITKVGVPAIRRIIVEMVWRIVLFQPQYKPVQKWQKVLQGTNPALKKKAVVAIGRQLIVDLWRLQTGRVTAQELNLVMVGA

SEQ ID NO: 244918 - protein, 297 aa, unidentified
MQVTTIGIDVAKNVFQLHGVDSRGRVVLRKRLVREKLLAFVANLPRCVIGMEACASAHHWAREIGKVGHEVKLINPKFVKAYVKSNTSDPNDAEGICEAVSRPSMRFVPVKTVEQQELLALHRVRAQLTKTRTALVNQIRGLLAERGVVVSRGISRLRAALPAILEDQDGRLGSLMRELIAEMSERLRLSDERIKRYDLKLSQLCAQDQRCQRLVAVEGIGSLAATAMVGAVGDAGQFRNGRELSAWLGLVPGHRKSGNREVMLGISKRGDRYLRTLLIHGARAVAMSHRMLKFGFE

SEQ ID NO: 244919 - protein, 401 aa, unidentified
MNAVGIDVSKGKSTVAIMRPYGEIVASPFEINHTEDDFKKLVSQIQKLHGESRIIMEYTGRYYEPLANYLYNAGLHVSVVNAILIHDYSNSSIRRVKTDKKDSIKIANYGLDRWLDLPDYMPEDELRQALKVYNRQCSQYAKLKVVLVNNLIALSDQTFPGIDSLFGKTPRQDGHQKWIDFIKSYWHKDCIIKKSFKSFDNSYKKWCSKNGYHYQSNKTIDIYQLAYEAVASMPYNANTELIITETANELISLVDTLERLRIEMNRIASQLPKYPVVLSLHGVGTTLGPQLIAEIGDVRRFHNRKALIAYAGIDSSPYQSGTIDIKSRGISKRGSATLRKTLFTVMDCILRHKHTDEPVYQFLDKKRAEGKHYYVYMIAGCNKFLRIYYARVSEYLNSLEK

SEQ ID NO: 244920 - protein, 424 aa, unidentified
MSKKKSSPAGLQALYARACGLDVHKKLVVACVRILDSKDGTVQSTLRKFGTMTADLLELRQWLAELKVTHVAMESTGVYWQPEFNLLEGHFKVWVVNAQHIKKVPGRKTDMKDAEWIAQLLQCGLLRPSFVPERQQRELRDLTRQQTKLVQQRNAVDNRIQKVLETANIKLGSVASDVLGVSGRKMIEGLIAGEKDVTALADLAQRQLRGKIPELQRALEGELTEHHRFLLRQLLGQYDFLEKEIASVSERLGAVAPPSFRAAVEQLDAIAGVGERGARALLAETGTDMSRFPTHKHFASWAGRCPGNHESAGKRRSGKTPAANRHLDAVLTEMAHAAVRTKNSYFKAQYHRLAGRRGKKRAISALKHSLLVTVYFMLRDNRPYKDLGVDYFDKLNPQQRIRYHVRRLQELGQEVELSPIPDAA

SEQ ID NO: 244921 - protein, 397 aa, unidentified
MYIVGIDIAKRKHEAAVIDGDGAVIIKPFSFTNNCSGYNRLLAMLAKAKLPLDEVSFAMEATGHYWLALFTRLQKEGFRVQVINPVQTNSIRSFYIRQAKTDPRDALLIAEVIRFGHFSESTLHPENIYELRELCRGRHAIVSMQADVKRKVVALLDQVFPEYETAFTNMFGDTSMAILQTCPTPKELSEMCLEELCHLIEVSSHKRFRMAKAQELQALARGSFGFAMAGDVFSTMIRLYAKHLDFLKQQVREIDRKIAEIMDTLDTPITTITGIGPTLGAYILSEIGDISRFSSAAKLAAYAGIDPTMRQSGEYNGVRNRMSKRGSPYLRHAIWLAASSAVLHDPALKLYFQKKRDEGKPYMASVGHACRKMVSIIYAVMRDNKAYTPCIPNEISA

SEQ ID NO: 244922 - protein, 353 aa, unidentified
MSDDKYIGFDVHRATTVVSVMNAAGRELDTTILPTQPQPLIRYLDGLHGRLHLTLEEGTYSAWLYDLLEWRVAELVVCDPRRNALLKEGNKTDHTDAHKLADLLRTGMLRPVYHGSRGLRNLQDLAHAYLALVKDTTRVMNRIKAFYRSRGIDCAGRGVYSPKRRESWLERLLAGASRLRAELLYDELEQLRKLRRKARQALLLESRKHTVAARLREIPGFGPLRVALLITLLQTPHRFRTRRKLWTYAGLGLVQAGSSEYGWVEGRPVRRRHALQLRGLNRNHRPELKEIFKSAALAAIRQPGPFKDYYEPRAQQGVDPAILRVTVARKLAALTLSLWKKGGRYQAEGVKQA

SEQ ID NO: 244923 - protein, 438 aa, unidentified
MSNKIIFNLDELFISVGIDVGADFSWMSIALPNQQFVGKPYKILHNSMDSLTTAVSKIKEAEELYSLESRIFLESTGIYHYPLFCYLRDKGFNCSVINPIITKNSTNMNIRKVHNDRFDSKKAALVGLKPDLKVSLMPSDLALNCRNLCREYYDLMDNRNAYVNKLQGELRMTFPQYLGIFSKVTINTSLTLLETYTSPSAFLEADKQEIIDIIRSTARFGLTYAQNKYNAIIQAANEANEFGYIIDSNIKRIRLYISFIRKYDEEINRILDSLHELVDANEDTDFVKQIHLIETFKGAGFLSAVSLMGEIGDFFAFSKPKQLFAYFGLDPAVKQSGKFEGTKIQMSKRGSAIARRVIHTLTLQSISTSRKGDAKNPVLRDYYLKKCESKPKLVAIGAVSHKVCNMIFAILRDNKPFEIITPQEHIKQYNAAKCDVAA

SEQ ID NO: 244924 - protein, 341 aa, unidentified
MSTVYVGLDVGSTTFHQIAMRPDGSITVSRRFPMSEANLIQAFTGFGQGVHVHMEAGELAAWVRSVISPLVKRVVISHPRSNAWIANDPNKCDRIDATKLADLLRMNRLTEVYYAQETPRRDFKQLVQHYDDLTDQQVRLKNKIKARLRAQGIIVRDGRLFTRKWRMDVVEKVPSPDVRQAIMQLYSVLDQTLAARLAARKLMFEAAKSFPEIALFRDVPGVGPIGACRFSAYIQTPHRFSNVRKIWRYCRLGVSHRSSDGKPLGHPKLDRAGCGQLKNVSRRAFEAALRRSDHNAFKRAYERALESTRNKIHARLSVQRKIVSVLRAMWLKMAPYRDELI

SEQ ID NO: 244925 - protein, 351 aa, unidentified
MPRRSTVRAVTTIGIDMGKNTLHMIGLDSLGAIVLRERVSRGRIKSRLANLPPCLIGIEAGMATHYVARELAALGHDVKQVPPTYAKPFRQGHKNDFRDALAVAEAVQRPTTRFVPPKSNEQLDLQALHRVRSRLVSQRTAVINQIRGFLLERGIIVRQGLRFLRQLLPDILAKRTDVLSPRMVRIVSDLAGDWRQLDDRIETVTDEIETLAKSDDSCRRVMTVPGIGPIISSAMVAAIGSGAAFARGRDYSAWLGLVPKQMSTGDRTILGRISKRGNSYLRMLFIQAARVILLRPANWPKHGFGAWLVRAIQRLHPNVLAAALANKLARIAWTVLAQERSYEARVTKAEA

SEQ ID NO: 244926 - protein, 424 aa, unidentified
MTPPPEVACAAFVGIDWSDTKHDICLQAGHSEEREFAVVPHRPAAIDAWASALRQRFQGRPVAVCLELAKGPLVYALQKHDFLVLFPVHPATLAKYREAFVPSHAKADPSDAQFALELLLRYRAKLKAFTPQSVPMRTLLRLVEQRRRLVGDQSRISNRLTDALKQYFPDVLAWFADRDTLLFCDFLSRWPTLKQLKRARRATLLSFFHDHHLRSQARIDERLHAIKSAFPLTDDPAVILPNQLLVLALVEQLRATLQAIERFDAEIATVSETLSDYSLFRALPGAGATLAPRLLAAFGEQRERYQSATELQRYTGIAPVTESSGNKHWVHWRLQCPTFIRQTLVEWAGATIPRSFWAAAYYRQQRAKGCSHHAAVRALAFKWIRILYRCWQTRTPYDESTYLNALKRRGSPLLASMMETAKNI

SEQ ID NO: 244927 - protein, 396 aa, unidentified
MLYLAIDQHRKQLTVNLRNEVGDVILKRQVSTEWARVREFLEEVRNRSVPEGGFVAIVEVCGFNDWFLKLLADYGCKDIVLIQPEKRSKNKTDRRDANALGELLWTNRQRLLAGKKVQNVRQIVPPSPRDAEDRQLTALRQRVGRLRTRAINRVQHLLLKHNLQQECPTKGLQTQAAKRWLAKLPLGRIDRMELDQMLAQWQLLDQQLKELEAEIVPRQAKSLTAPIIATIPGAGAYGSLALASRIGSIERFPSARSLANYFGLTPGCRNSGDATRRLGSITKEGSAIARFILAQMVLHVLRRDARMKEWFVRIKRRRGAKIARVAAMRRLATIIWHMLKQQQPYRPGGKREKGGGPEDACLLPDRRAFLEALQERARGGKQKGCPGLTTEAAARS

SEQ ID NO: 244928 - protein, 400 aa, unidentified
MEPCIRVGVDVGSRAHRVGIAAPDGAILDEFDISHTREGFEDLFRRVGRHEQERKLPVAVAMEGYNGYARPLDREIRAHGWRLYNVNNLKLARFRELFSGPAKTDALDTRKILELFHLQDHLPLAKGVLQEVGETPAENEKLKRLSRRRRQLVEEKIRVMDRLQADLQAVSPGLLAITKDVANLWFLRFLTSRDDLTELARLRRSSLLKIKRLGPKWAGVIEDWQKRATFSSEVDYVGSMIIADARRILELLEQIQALDKAMAELTDASQIGRRVRTIPGFGKTCAAELAGEIGTQERFPAEGSLALYLGMATLANQSGQHHGTKRPRQVNKRAKAAMMTAVARHIECVPQSKAYYDKKRAEGKTHNQAVRALGRHLVRVIWSMLRDDRDYELRDLPPAP

SEQ ID NO: 244929 - protein, 444 aa, unidentified
MVCSGMILIREVADAPVIMGISKPAGLKSPCGEVKIVNPLFVGIDVSSRSNVAYLMKPDGSKHSSFSVQNNLGGAKMLSERIVSALSSMRLSDVVIGLEATSIYGNNLVYALREDGSLSRFQRKIHVLNPKQVKKFKEAYPDLPKNDFVDAFVIADHLRFGRIAKEVYMDDYRYQALRTLTRARFDVIQNLTREKQRFANYLFLKCSGIAQEKDIQNTSATTIALMEHFETVDDLANTDLDELTDFIAQAGRGRFVDPDATARAVRAAAKGSYRLPKTVNDTVNQAMSVSIASMRALKEQVKVLDKAIEQQFEIIPNTLTSIPGIGKVYSAGIIAEIGDIHRFASQASVAKFAGLVWTQHQSGEFEAEHSRMIKSGNRYLRYYLLEAANSVRRCDSEFRRYYDLKFKEVNKYQHKRALALTARKLVRLVFRLLKDNRLYIPPEG

SEQ ID NO: 244930 - protein, 354 aa, unidentified
MKRTTKQVALDVHQSTTVAPVREDSGRVIARAILPTEEAALVEFFRGMRGTIHVACEEGTQAQWVHDLLVPLVDRVVVCDRRGESRSGNKADQVDADQLSEQLRWGNLRAVYHASAERTTLKELTRSYTNLVEDSTRVMLRLKALFRARGIPAPGQRVYHPRERAEWLAQLADRGAQLRAEVLYAELDMLRQLRPQAKTVMVAEARRDPAWAVLQTIPFFGPVRVALLLATMQTPWRFRTKRNLWAYAGLAVVTRSSADYVLRAGQPVRRRRAPLTRGLNRNHNRVLKDVFKGAATAATARPGPLQDWYQERLAGGMRAELARVTLTRKLAALTLRLWKKGERFDPTQLTRQAR

SEQ ID NO: 244931 - protein, 310 aa, unidentified
MDAIVIGIDVSKDKLDVHVLPAAQAFAVARNGAGIEELAARLAALAPAVVAIEATGGFETIVAAGLAGAGLPVVVVNPAQIRAYAKAIKQRAKTDPIDAAVIAKFARATRPEVRPLPDEATRQLADLVARRRQIVEMMAAEGQRGRRVDHKRVARSIARVKKTLEAELAELDQEIGDQVRGSPLWREKEDLLVSVPGVGPVVARTLLAELPELGRLERREIAALAGLAPFTRQSGRWRGRSFIGGGRATVRTVLFLAAMTAARHNPTLKAFRDRLVAAGKPNMVALIATARKLLTILNAIIRDNRPWQNA

SEQ ID NO: 244932 - protein, 357 aa, unidentified
MKRDSYIGMDLGDQKHEVCALNAAGDIVQRDPVVNTAEAITKYFSRLPKGTPVAFEAGTHSGWISRLLESLGLHVVVAQPRKLRALWGRDRKNDASDAVLLARMLRADPQLLHPIVHRSEQAQIDIMTLRSRDVLVQTRTKLVNAARGFAKSLGHRLPAADARYVAAKARKDLPPVLHTALLPLLDTVETINAQIKALDQQIEAVARVRYPETMRLREVSGVGPLTSLAFVVTVGDAARFRRSRDVGPYLGLVPKQDQSGSLDKQLHITKAGDGYLRRLPVGSAQYILGPFGPACGLRSFGLRLALRGGKNAKRRAVVAVARKLAVLLHKLWVSEVAYDPTRGLVTETLVGLQPQRA

SEQ ID NO: 244933 - protein, 349 aa, unidentified
MNYYAGLDVSLEETAICVVDGSGLIVKEVRAASEPEALIAALKAIDVPLERIGLEACSLTAWLHDGLWGAGLPAICIETRQANAAMKTMPNKTDRNDARALAQIMRTGWFRAVHVKSRQSRLWRSLLVARRTLVNERRAIENVVRAVLREAGLKLGRPSCAAFAGRVRELAGDDPTVRPIVEPLLAVLATMLGQLARLTKQALAITRREEVCRRLMSVPGVGPITALAFRATIDRPERFRRSRDVGAHLGLTPTRYQSGETDIVGRISRCGDELTRTALYEAAHSLLVRSRKWSALRAWGMKIAKARGMARARVAVARKLAVILHRMWSDRTAFRFGREPAAVAVLAVA

SEQ ID NO: 244934 - protein, 333 aa, unidentified
MKTLTLGIDVSKATLDAALWLGDRSKWHTKAKVDNQPAGVHTLIDWLRTKTALAPSACRVVLEATGVYHEVAAQVFHDAGCEVVIANPKRVRDYAKGRGLLTKTDAVDARVLARYGAEGDERVPWLPPAPEVRTLRALVARLDAVSQDLQREENRWEKAQTIDTPGPVRDSLQRSLSALRAERDRLLRAIDDHYDQHPPLKQARDQLKTIPGVGDACARRLLCLLKRHRFESARQAAACAGLIPIEYQSGTSVCKRPRLSKQGDRRLRATLYMAAIVAARHNPPLRTVYLDLIGRGKTKMSALGALMRRLVHIAFGILKHQTPFNPALVSKIA

SEQ ID NO: 244935 - protein, 431 aa, unidentified
MSERLTPSASEPEWAAFAAIDWADQKHVWRLVPANSPEFEQGELENTPEAVDAWAATLQQRFGGRPIAVCLEQSRGALLYMLSKYAHVVLFPVHPTTSARYRRTFSTAGASDDEGDSAWLLDLLLRHRERLRRLQPDTLETRLLQFLVEERRRTVDEKTRQSNRLTDCLKQYFPQILRWFDDVTSPLVGDLLARWGSLQELQRAHPGTLRKFFHQHNCRSEERLTAIYQALPATQDAAVLEAGVLTARGWTKVLASLREQIALLEQRLAKLVSSHPDGALCASLPGAGPALTPRLIVAFGTRRERYASAQELQCYSGIAPVTEASGKSQGVHFRRAGPKFLRQTFQEFADHSIGQSEWARAYYQHLRQDEKKPHQVAVRALAYKWIRIIFRCWKDGKPYDQQVYWHSIRRRRSLLGAACPALINAGWKEEG

SEQ ID NO: 244936 - protein, 312 aa, unidentified
MFIGIDVSKQRLDIHARPSGEEWSVTNDANGHSELVRKLVSLSPTLVVLEATGGYQSAVAAELGANKLAVAVVNPRQVRDFAKATGRLAKTDAIDAAALAHFAESIRPEPRPMPDDLTVELQALVTRRRQLIDMRTAESNRLETCRVMPVRRNIQKMINMLTKQIGKVDDDIDTTIRNSPLWREREDLLTSAIGVGTTTARTLLTQLPELGRLNRREVAALVGVAPFNDDSGQRRGTRRIRGGRGEVRSVLYMATIAAVRHNPQLQGMYQRLLSRGKLKKVALIACARKLLTVLNAMMKANACWRLDAGKAA

SEQ ID NO: 244937 - protein, 327 aa, unidentified
MTDHTIGVDISKSHLDVFRLEDGAAQRFDNSAAGFRSLIKWLSKAPVVRIVFEPTGPYHKAFEIALGERFPLVKVNPLQARRFVEAHGTRAKTDAVDAQMLARMGAAFGLEPQAPCSKETRILKDLHVARTGLIKDRTRLRNRAQTQHIAVLKRQTKARLDQVNRHIAELDTEIATIIKAGMDTARNRDILCSMPGIGAVTAAAMLTLLPEIGTLERKQVASLAGLAPITRQSGQWQGKSFIGGGRKQLRDALYMPALVAIKHNPDLKAKYEALRLAGKPAKVAIVAVMRKLIEMANALVKADRTWTKKSLIKTDTPCLPCPALPTI

SEQ ID NO: 244938 - protein, 338 aa, unidentified
MTQHKIIGIDLAKNIFFLFEINHKGKNLSRKKLQRSKLLNYVVSQSPCVIAMEACSGAHYWAREFVKFGHEVLLYPPQHVKSQRRKQKNDYNDAEAIAELALYQRHPAVPHKSIEQQDIQSLIRMRRLCVTERTRLINQVRGFIAEYGIVLPKGKISFRKAIPEVLEDVENQLSPILRELLSRQYERYLYIDEQISWFEDKLNQTVKQFDNAKRLMSIPSFGPLTSQAVAVWLGSGKQFKTGRDASAAMGLVPRQDTTGGNVVLLGITKQGNTYIRSLLVHGARAALRRAKFKSDKLSKWMLDLQERRGPNRAAVALANKLMRIAWAVIAKNEEYQPA

SEQ ID NO: 244939 - protein, 402 aa, unidentified
MNAVGIDVSKGKSMVSIMRPFGEIVSAPFEIKHTASGINSLVELINSVEGESRIVMEHTGRYYEVLAHQLSKANLFVSAINPKLIKDFDNDSLRKVKSDKADAVKIARYALDKWQNLKQYNVMDELRNQLKTMNRQFGFYIKHKTAMKNNLIGILDQTYPGVNTYFDSPARSDGSQKWVDFASTYWHVDCVRKMSINAFIDHYENWCKRKKYNFSQSKAEEIYGKAKELVPVLPKDDITKLIIKQAVDQLNSVSTTVESLRTLMNETASKLPEYPVVMAMKGVGTSLGPQLMAEIGDVSRFTHKGAITAFAGVDPGVNESGSYEQKSVPTSKRGSSDLRKTLFQVMDVLIKTHPQDDPVYQFLDKKRAQGKPYYVYMTAGANKFLRIYYGRVKEYLSSLPES

SEQ ID NO: 244940 - protein, 369 aa, unidentified
MSTHYFTIKPLQYDVFVGMDVDKTSISITVVSHEGELLQRKLPYDAANLLALIAKRFPTKKIAFCYEAGPTGYGLYDQIASAGFNCIVVPPATVPKAPSERVKTNRLDSRKLAESLRGGNLHGIHVPTAPYRSLRHLVQLRETLLHQVVSYKNRIKGFLLMEGIPFPPATRRCQWTQKVLEQLKTMPLPITSRFKLDSLLYQLQSSKIQLNQIATGIQKYCSEEPELSESIQLLMSLPGIAWIVAMHLLARIGDWRYLQNPHQIAGLLGLIPVEDSTGLVINRGSITRMGDSAARNKLIETAWTAIRYDQQLREFFLRVCLRHPRQFAKRKAIVAVARKLTIRIYVVLKFRRPYLPYSQFLALQEQTRR

SEQ ID NO: 244941 - protein, 381 aa, unidentified
MPTKTVPIKKEVTIKSIHQVRSVLPEAPPHSEIAAVVGIDLGDKKSSYCALDASGGDLGEGVVSTTDQGFRMAFEGKGKMRIAIECGTHSPWVSRLLQELGHDVIVVNPRRLRLIAESNRKNDKADARTLATIAQAAPGLLKRVHHRSERAQLDLATIKARDTAVQARSRMVAAMRGIVKSTGARLTVCSTGAFAKKALESCPATLRDALTPLLRIIEQLTAEIRKYDRVIERKINDEYPAAASILSIPGVGSLTALTFVLLLDNDPNRFSKSRDLGCYFGLQPKQQDSGKFVSQLGITKAGDQLMRSLAVQCSHFMLGRFGRDSALRQWGLSLCLRGGGNAKKRAVIAVARKLLILMHRLWKTQTAFVPFPGIQPVPQAA

SEQ ID NO: 244942 - protein, 322 aa, unidentified
MSEVVGSEVFVGIDVAKAKLDVGVHPSGESWTVEHDEAGITTVVERLVAAGPRLVILEATGGLELALAAALVAAAVPVQVVNPRQARDFAKATGQLAKTDRLDALVLARFGAALRPEPRPLPDAALQEVRALVARRRQLQAMVIAEKNRRASAPKRLHAQIDEHLAWLRRAVADLDRDLGTTIKATMAWQTAVTRWRSVPGIGPVVSATLLADLPELGTLTRQQIAALVGVAPLNHDSGAHRGSRSCWGGRAHVRAALYMGALVATRCNPTIKAFYQRLLTAGKPKTLALTACMHKLLTILNAITRAGTDWRDQATSAELAA

SEQ ID NO: 244943 - protein, 388 aa, unidentified
MRRSNQDRIVGLDVHPDSFAGAILQGIDPWKARVVSTSTRVALPLLEKWALRHTREEDILVMEASGNAFCVAERLRALKRKVVILESHRAGKVGKTYCATDRVDAIKIARIYLSALSPVVWQPDAKTRERREVFSAYQAVVKEGMRLKQQIKSMLNEHCVRLEKGFRLSHPSALGRLLRRRKWTEAQKMLLSQLHAGLVGARVRRQRLRHYMAQEILAEKELLRLTRLCGINLITLYGLIAAIGEIKRFATARKLSTYFGLNPTVEQSGNYEGSGALKRHGRGAIRALLVQSAKKLLQVDNPLQKWGLALAARRGRNKATVAVARKLCVAVWHVMQGHVIGAIERTTTLHTKLHKLATELGVPTIKQLGYETKEAFVQKKLYVLRSYA

SEQ ID NO: 244944 - protein, 340 aa, unidentified
MSKFTKKTGFIGIDISKDTFDAALLHEQSPESFKEKKFSNELNGFEAMLQWISSQKVLLSESLFCMEHTGNYGLLLYAWLSQKGIDFCVQPGLEIRQSLGMIRGKNDKIDARRIATYALMKKATIKPFILPAKILIQIKQLLTYRDQLVRIKTGLKNSLKSHQLYQKVSNLEYVIQDIGKQIQQQTERIEQVEKLIKEIIESEQGLKTNFNLATSVKGIGLVIAAFMLVTTNNFTSFDNGRKYACYIGTAPFGSTSGTSIKVKPKVSHLANKRMKTLFSNGANSAKSWDPELKAYYKRKLKEGKEHKLIINAISCKLVNRVFAVIERRTPYVTVYGNNFV

SEQ ID NO: 244945 - protein, 341 aa, unidentified
MSNANSYIGVDLHKKTCFITIMNESGKIKKQTEISTDADKVSKFFSKHTEASVAVESTMNWIPFYENLESLGCSVVLSNPWQTKAIAAARIKNDKVDSKILADLLRTNLLPTAYIQPREIRDLKELVRQRVNYVEIRTRIKNKIHSVLFKNNLKHDFTCLYGKAGMIWLRQLELRDIYRQEMDRYLTTLDLLDKQIEELSMVIMETAKADYDCKLLMTVPGISYFTALTIKSEIGDIERFGSAKKLCSYAGLIPSTYASADKIRHGRITKRGSKWLRKALIDAITSGSRHPSKLTFLYRKLKKNKGTGKAKVATARKLCTIIFAILTDKQPFREFVSVKQR

SEQ ID NO: 244946 - protein, 311 aa, unidentified
MTSQFAGIDVGKDSLTGNLYGQDVVKDYPNTSRGIQRLSAWLQKHEVHLVVMEATGGYEKMASRQLERAGLAVAVVNPTYVRRFAQGMGTLAKTDPIDARMIAWYASVKQPKPRPPRSEAAEALSACVDRRDQLVAMRTMEKNRLGSAAAYVQSSITAHIESIDEQIKQMEVEIDHLIDQEEEWQSRIACMTSCKGVGKVTAVTLLAEMPERGHEKREHIAAVAAVAPMNRDSGRKSGRRKSRGGRSKLRRVLFMAAMSAAKFHPVIHAFYQRLIEKGKPKSVVMVACMHKLLTILNAMLRKNEMWRPDFA

SEQ ID NO: 244947 - protein, 421 aa, unidentified
MLGVGIDWAEEFHLVALGRPGEGVFDIARVEHTPADIDALVARIASIEPDPAEVRVVLETSHGMLVERLLDAGYVVVPVNPDLVARRRGPARKKDDAEDARIACLIALDRFERLRVLVPHGEEAGELRAIARDDERAARDERRLLNRLRADLIATFPAAHVVAGDDMGAPTFLRLLERWPTADALAGATHDELVDFARVARHSWPERFAGQVATAIATSHFVPRAYLVRAKEGTIRLLATQLLALGAQRRAWERRMGELLLGAPRTGRNKQPKEEKRGPTVPGGEIYLSFPGLGDRLAARVAAEIGDIANFDTPNGLQCYAGKAPVTRRSGKHELVVANRLACNGYLRDAVQLWAFCSLSRSGWAREFYDGQRSRDKGHHAALRALGNRWLEVLWHCLSKDVAYDEATHVANRDRALARAA

SEQ ID NO: 244948 - protein, 329 aa, unidentified
MVFLGIDVSKDRLDCALLAEGGGRPLGGRSFPNNAAGLDRVVAWAARASGMAAADVHVVLEATAAYHELAAHRLAAAGMRVSIVNSARVRSFAKGLGILGKTDPIDARLLARYGQLLRPRAWQPPARALLELEALLARLDDIEADLRREENRLEQVRVRGCPEVVERSLLGSIEASKGRRDELQRAIAAHVAAVPGLQADLDRLLTIPAVGPRTAVRMLVMLRARAFESARQAAAFLGLVPIEQTSGKRIRGRPTLSKAGNPRLRATLYMAAVAGIRRNPDLKAQYERLLGRGKCKMAALGAAMRKLVHLCFGVLKNAADYRAGATTGV

SEQ ID NO: 244949 - protein, 355 aa, unidentified
MNDEKYIGLDVHQATIVVAVMDSTGKLVMESILETKAATILQFFAGLRGTLSVTFEEGTWSAWLYDLLHSRVDKLVVCNPRKNALLKDGNKSDRIDARKLAELLRGNQLKPVYHGETGVRMLRELSRSYLTIVKDLSRVMNRLKAVYRSWAIPCAGRDVYYRRHRAQWLAKIREAGVRRRAERLYEQLDMLQHLRQQARRELLAESRRHTITGKLRQIPYLGPIRVALAVALIQTPHRFRTKRQLWAYSGLALETRTSAEYRFVEGQVRRSKKLLSIRGLNKDHNHDLKGLFKGAATMASVRPGPFQDFYTAALAKGIKPTMARLTLARKIAAITLTLWKKGENFDAEKLKSQAA

SEQ ID NO: 244950 - protein, 351 aa, unidentified
MKILALDLGKSKTMACVYDAVTGDHVYRTIRTVPDVLQDLIGAVRPDRVVLEISSTAGWVTDLVRALEIEVQVANTAHQAWRWRNVRKKNDRVDALKLAQLSAVNQLSLVHVPERRVRQWRSFISYRHQLVQRRTQIKNHIRAILDREALLMPAGHRGWTLDSLASLGELAKPLDAVSMDQLWRAELWMELRALETVEMWITEVEHKLDAMVQADARTRLLQTIPGVGPRMAEVVVAVIDDPHRFKNARQVGSYAGLTPRQYQSGDSDRQGKISGQGNNRLRSLLVEVSWIGLRYNPWFRSVYERVRRASPTRKKIAIVALARHLLIRCWAMLRDGTSWRPPELACAGART

SEQ ID NO: 244951 - protein, 322 aa, unidentified
METLGIDISKKDFHAVLLQGNSAAKKSFPNSSKGFEQLDAWLRNRQAGKVSACMEATGAYWRALATHLYDAGHHVAVVNPRRIKAFAESELLRSKTDAVDAALIARFALAHRPKAWKPWPPEVVELQGLSRHLEFLKKSRVQLVNRVQTPGLPRSVVKSSKRIIVELETQIAELERAIKDHIDRHPGLKVKRDLLTSIPGIAQTTAAGILSEMPAIAEFSGTQAVAAYAGLSPRIHESGSSVRGKRRLSKIGNARLRKLLYMPAIVAQKYNPTLKAFAARLEAAGKVPMVIIGALMRKLLILAYGVLKSGKPYDPAFVPANA

SEQ ID NO: 244952 - protein, 359 aa, unidentified
MTSMAPDPRRRRVIIGVDTHKYVHVAVALDIIGGVIDSQSFAADSGGYEQLITWALSLGLKLTFAIEGTGSYGAGLTSAVRRRGVGTVEVMRTDRRDRRLRGKSDTLDAENAARAVLSGNATAIPKTNDGTVEMIRQVKIAKDLAVKARSAAIISLKTIIVTAEPELREQLQGLPRVALIERCAGLRPGTLTSVLAATKHTLRATARRWVLLNTEVLAHEKILTELTKQVVPDLVAAHGIGPDTASEMLIVAGDNAARVRSEPAWARLLGVAPVPASSGLTNRHRLNRGGHRQANAALYRAVIVRMQFHEPTKAYVARRIAEGKTKREIIRCLKRLLAREIWTLMKPFREASTTTAMAA

SEQ ID NO: 244953 - protein, 426 aa, unidentified
MPYKIAGIDVHKRMLHVVVSDVEVDGEYEFTRQVFGSYPEALRSLAAWLVQQQVEEVVMESTAQYWKPVWGALERYWKPICEKRESARRRSGTLHLAQALSNRGRRGRKKDFGDAERLVKRLVANELTLSFVPDVEQRLWRTIMRTKYQLTRNRVQLQNRLEALLEEAHIKLSSLVSDLLGASARRMLKAIAEGETDPLVLAALADERLRATPERLRDALGVCQELNSVYRRLIEIALEELASIDKRIDELKQAMADLLRPHEDQVKRLVEVPGLSVDSAQQIIAEVGATASTFPSERHLSSWVGACPGEEESAQVNYSRRSPQGNRHMRRILNQAANAAVKHKGSIFQILYRRYVPRMGHNQTIGIIAHKLCRLIWKILHLGAHYEEHGPQVNETCQQRRTQRVIRNLRKLGYRVELTSESVLPA

SEQ ID NO: 244954 - protein, 496 aa, unidentified
MRSKPKQGSGLEEIPDAEYELVAERVAAIDVAKASGKVCVRAPDGNRRVSRVWDVSAMTRPITDLADQLIGLGIEKVTVESTSDYWRIWYYLLEAAGLDVQLVNARDVKNVPGRPKTDKLDAVWLAKLTEKGLLRPSFVPPKPIRQLRDYTRLRVDLVSERVRYWQRLEKLLEDALIKVSSVASTMDTQSVRDMIEALIAGERDPRRLAGLARGKMRPKYAALVEAFDGQFDEHHAELARMLLDQIDALSAQIGTLTTRIEQLLAAMTDEPIESGGSAGGPTNIDVSETRQDLSTGAAFSIEVNADVLAERRLTLIERLDEIPGIGPQTAQAILAEIGFDMTRFPTTAHLVSWAKLCPRTIQSGPKQRVGRSGTGNPYLKGALGEAANAAAKTNTFLGERYRRIVKHRGRPKALVAVARSILVIVWHLLADPTTRFHDLGSDYHATRINTERRVHSHIAQLTALGYHVISPASRLIKYQDSQSNPTPQAPPGAVIC

SEQ ID NO: 244955 - protein, 365 aa, unidentified
MKKISTVARKQIRNFSEQTLTIGLDLGDRSSWYCVLDEHGEVVLEQKLGTTPKAMKAGFGGMPRSRIALETGMHSPWVSRLLSELGHEVIVAHARNVRLIGESRKKDDRLDAQTLARLARIDPQLLGPVKHRSARAQADLTVIRARAGLVRARTALVNTARGLAKSYGERLRGCNVRNMNPEKAVVLSPELQKAREPLLAGIESLSERIREYNEGIEQLAEQSYPQVARLKQVKGVGTLIALTFLLTLEDAHRFRKSRDVGCYLGLQPGRRNSGQSEPQMHISKEGDPYLRTLLVQGAHHILGPFGVDSDLRRWGLKLAERGGKSGKKRAIIAVARKLAVLLHRLWVSGEVYEPLRNQRAMPAAA

SEQ ID NO: 244956 - protein, 340 aa, unidentified
MGEVTTIGLDLAKHVFQVHGVDAEGATVLRKQLRRAQVLTFFSRQPRCLVGLEACATAHYWARELRALGHEVRLMPAQYVKAYVKRNKNDAADAAAICEAVMRPTMRFVPVKTADQQAAVLLHRGRERLVRQRTGLVNALRGHLAEFGVIAPQGLRNVGKLIAIVRDEGDGRLPDLARQVLAVLAAQIEQLEATVAALEKQLIAWHKSNPVSQRLASVPGIGPIIATAIAATVTEPSGFRSGREFAAWLGLVPRQNSTGGKNRLGRISKRGNQYLRRLLINGASANLLRSKATNADPWVIGLRRRRPSLVVAVALANKTARIAWAVMHRQENYRRVAAAA

SEQ ID NO: 244957 - protein, 354 aa, unidentified
MIIIGADYHPGFQQIAFVDTDTGELQERRLEHREEAETFYRELEAQGLKVRVGMEASGHARWFERLLGELRLELWIGDAAEIRAKRVRKQKTDRQDAQLILHLLLENRFPQVWVPSRENRDLRQLLWHRHRMVQARTRIMNQLQAVALNEGVRCKKRLWRDAGREQLQSFKLAPWASRRRRDLLELLDRLTPTIAELTQAIEQEADKWPEAQRLQTHPGVGALTALAFVLILGNVERFQCGKQIASYLGLVPVEDSSGQRRRLGHITKQGNALLRFLLVEAAQVTVRGDQEWRRKYFHLALRRGRKIAKVAMARRLAVRLYWMWRKGWDYEQLKNFGSHAGQPGHPDGVQSSTE

SEQ ID NO: 244958 - protein, 350 aa, unidentified
MKITRLGIDLAKQVFQLHGVDERGHRVLRRQVRRAQLLEYLARLEPCLIGMEACAGAHHWARRLNDLGHDVRLIAPQFVKPYVRGNKNDANDAEAICEAVGRPDMRFVRIKTVAQQDIQALHRVRSERVASRTALVNQIRGLLAEYGVVIAQGVRQVRVALPVLIENADERLSEAFVQILSELYDDLVALDERIARLDAQIERIAREDGAARRLMSLRGVGPITATALVASLGDGRQFSRARQASAWAGIVPAQHASGGKQRLLGISKRGDAYVRTLLIHGARSVIKNCAHKDDALSLWVQALCARRNKNVAAVALANKTLRMAWALLVRGGEYDPAYARAQHEEHVCTA

SEQ ID NO: 244959 - protein, 428 aa, unidentified
MHVEEITRIKEFRQIREEIRGSKKYLIVGIDVAKEKHHAFYGTSNGKTLKRKLVFDNSFSGIEMMMDFAYTLKTEHCLEKVVYGLEPTASYHKPLAEYLIKSGCNVVMVSGLAITKNRELLDGRWDKNDDKDAANVADLISQGKCQYYDYPSLEVRDLRGLLSLKRMLKKQEHRMKTRIRNNLIAQYFPEFDSHFAKGRFESLAVVKWCARPKEINYMEFDEFEELIAPSRRTRTQIARLKEIWEDANESIGCEAGDAIQFGAKIMVEELQKIRESINALDEQIEKICSGFPEYQYLLSIPGFGPDVSSKVIGAIGNPLRFDNGKQVLKLAGYDLSASRSGKPSDFAIPRISKRGNAYLRYALYQAALIASTRNKYFMRYYASQLTGRQCERGIGTKMKVKLAAKMLIIAWTLMKNKEPFDPAYLNIE

SEQ ID NO: 244960 - protein, 335 aa, unidentified
MHKGDRARRPVKESDMDAVLGIDVAKHKFDVTLILPSGARRRKACANSVAGFADLAAWLTRHGAGRVHAGLEATGTYGEALATTLYDAGHHVSLLNPAVIHHYAKSHLTRAKTDRVDADLIAEYTAKEQPPLWTPLPREVRDLQALVRRLDALLGMHTEERNRADTAALTPAVAASIAAVVARLEEQIGAVRAEIRRHMDQHPTLRTQRELLTSIPGVGETTAALLLAELFTKAFTSARQAAAFAGVVPRPRDSGTVQGRRVMCKLGSARLRKGLYFPAIAAIRFNPSLQPLARRLRAAGKPPMLIIGAAMRKLIHIAFGVLKSGRAYDSSLAGA

SEQ ID NO: 244961 - protein, 337 aa, unidentified
MTTVVALGIDLAKNVFQLHGVDVSGKTVLRKRVMRDQLAAILANLPPCLIGAEACGGAHHFARLAQAQGHTVRLMSAQYVKPYVKSQKNDCADAEAICEAVGRPNMRFVPVKTSEQQDVQAIHRVRAQLMKWRTMLTNQARGLAAERGFIARQGVSGFKRALPLWCESPQMSDVLRELLLDLRERLDQLEERIHRLDVQLQRIANTDDRAKRLRAIEGIGPITASALVAALGDPASFKNGRHVSAWLGLVPRQDSSGGKPRLLGLSKRGDRYLRTLLIHGARTVIQHCATKTDARSRWLQDLKARAGVNKAACALANKNARIAWALLARGQSYRAPG

SEQ ID NO: 244962 - protein, 352 aa, unidentified
MILLGADMHKSSHTIAGVAAATGELLGDETIRVGERGFAAALDWARGLGAERVWALEDCRHVSGSFERFLLVNGERVVRVATRLMAGERRAGRERGKSDRIDAVAVARAALREGIDRLPVAELAGVELDIRLLVDHRERLVRMRTALYNDVLWHLHDLWPEQTFPGCALLSKKWTSHIARRLARAEQTARVRIARDELRHMRELTDTINALKAEIANLVAQVAPQLLDEPGFGPLTAGKLIGEIAGAQRFSSDAKLARAGGIAPIPVSSGKSNRHRLDRGGNRQINTAIHRVAVTRARCHPETKAYIHRKRAEGKTTKDAIRCLKRHLARRIWHLLQTPAPDPPKTLSPSTP

SEQ ID NO: 244963 - protein, 333 aa, unidentified
MSSVPVFVGLDYHQSFVQVCVMDGSGKLLTNTRCVNRAAALVLAVQPYGTTVAAAIESCCGAADLAEELVAAGWQVSLAHAAYVHKLKQSPDKTDWSDARLLADLLRVGYLPKTWLPPAPLRQLRHVVHLRQQQAQARRAAKQRVRALLRAERVEFSGSCWSKAWIAAVRNCTDLGEQGRWVVNQLLDEVEHLQRQLAITEARLEELTAKDPIVQALLDLPGIGLVTAVTLRAELGPPSRFHSGKQMARFCGLSPRNASSGLKQADAGLIKAGNAALRSVVIEAAHRLMRHDVRWNKLGNSLRLRGKPGSVAAAAVANRWVRWLYHHLLALAV

SEQ ID NO: 244964 - protein, 329 aa, unidentified
MNVCGIDVSKDTLEIVLRKNNQSQKSKTFDNSPEGHLKLIEFLISRKIDFICLEATGIYHLDIAIMIAKTDQLKIMVLNPTAANNFAKAMMQRTKTDAIDAEILAQYADRMDFIEWQAPDTEVISLRVLGRWLEASNKELTRLKNQLHAFEMTQTTPDSVLNSIKNRIATLEQEISDLEKEALDLIKENSAIKEKYELLISVKGIADRTAIKILGELLVLPSDMSAKQWVAHAGLFPQIIQSGSSINKKTRIGKAGNRYIRGALYMSALVAAYREPHVSGFYQHLVNDNGLKKIQAVCAVMRKLLLSIHAMFRTNKPFDGACFYTLKEA

SEQ ID NO: 244965 - protein, 371 aa, unidentified
MAESSKTLYVGLDVHKESIAVAYAPEERGAEVVSLGSIGTRQCDIDKLIRQLQSKGARLVFVYEAGPCGYWLYRYLTRKGLSCHVVAPSLIPRKPGDRVKTDRRDAITLARLMRSGDLSAIYVPRLEDEALRDLSRGREDAMRDLKRSKLRLKSFLLRHDIRYEGRANWTAAHLRWLSEVVCPTPVQQIVFQEYVRAVTEQHERQQRLERELHEAVQGWRLYPVVEAIQALRGVELTGAVILMVELGDITRFDTPRKLMSYLGLTPSEYTSGDRRRQGRITKAGNGHARRALVEGAWAYRYPAKVSRHLQLRQEKLPAEIQAIAWKAQVRLCRRYRQLTARGKHVNQVVVAIAREMAAFAWAIARLVPVAA

SEQ ID NO: 244966 - protein, 336 aa, unidentified
MNIKRIGLDLAKQVFQLHAVDHQERVVLRKTLHRARMLTFFTRLEPCLIGIEACGSSHYWARELTRLGHTVRIIPPQFVKPYLKGNKNDANDAEAICEAVSRPGMRYVAIKSEAQQSMQAEHRVRARLIHDRTALSNEIRGMLGEFGFVLPAGLSALRKALPEILSQQEKWDNRFIRLLSELTEELQALDERLNRYDRRLKQLAQEDERIRRLQEIGGIGPVTASALVAAVGDAKQFKSGREMAAWLGLVPRQHSSGGKTKMGHISKRGDSYLRTLLIHGARAVLNVCDHKEDRRSRWLQSVAERRNRNIATVAMANKNARIAWSVLSRGEEYRVM

SEQ ID NO: 244967 - protein, 451 aa, unidentified
MKDLSMEVVNPNAAGIDIGSRSHFVAVGQKEEDVKEFGVYNDDLSALAKWLKEHEVKTVAMESTGTYWQNLFTVLQGAGFEVILCNGKFTKNIKGKKSDVQDCQWIQKLHTLGLLSSSFLPDEATEQLRTYCRHRMNLIEQGADTIRKLQKYLRLLNFRLDIVVNDVTGLTGLSIIKAICKGEADPEKLASLRNGNCKKSEAEIAKALQYNGRKDYLFALRHEYEMYVTLQSRIEECDAEINTLLKAQISSDENKKQHHIEKKVHKRVNKNNPKNIDINLLSYQYFEGTDLLSIEGLGHSTVLTIMSEVGNGIYKFDTAKQFASWLRLSPNNKISGGKVLSNRIPKGSNRLKIALRNAANVIGNLKGTALSDFFKRIAFRKGRVSAISATARKLAVIIWNMLVKKIPYKPENTYEFLDQKRKRKVMEMKKLIHKFGITPDDLGLQLNISNL

SEQ ID NO: 244968 - protein, 412 aa, unidentified
MRIVHQRCCALDVHKSSITACLLVWDGQEAVQERKKEFGTYKKELERLRFWLMASKVTVVAMESAGVYWKPVWHVLERQKQFKLKLINAQHYHGVDGRKSDQIDASWLAELLQCGLLKASFVPPQWQRELRDLTRLRVALLQDQNRIQNRMEKVLEDANLKLGSVASDTLGVSGRKIIRAVIAGDKDPGWMADYAEGTLRTKRKELERALHGLVTDHHRRLLATLLAQHNALERDVEHLEADIRQRLAPYQELIDRLCEIPGFGAVTAWTVIAELGVDPKVFGGSPKRASSWSGLCPGNRKSAGKRGHGRTRKGNRWIRRGLTQAALGASHSKDTYLRSFYWRIASKRGDKKARIATAHKQLEIAFIMIRDGVRYKELGANHLDLRHKQRTQNYLVHRLEGMGYKVTLQPAA

SEQ ID NO: 244969 - protein, 359 aa, unidentified
MDKNTQVPAVRVGVDLSKRVIQVHAVDAGGRALCNRALARDKFLAWCALLPAGCMVVMEVSSSAHHWARQLLLMGLDARIVSAHLAAPYRSEGHVGKNDANDAAAICEAASRPHMRFVPLKSVEQQSLLCVHRLREGIKADRTACINRIRGLLLEFGVAVPAGVRALRLVLDDVLEDAANEMNGLARMTLRRAQQQWRELDEHLAWCDDRLAAHERDNADVRRASALMGIGPVGASAAIATVGDFKQFKSGAQFGAWIGLTPKQHSSGGKSNLGTITKRGDAYLRTLLIQGAKSVVNSAHTRSDPISRWALALKERSGWQKAVVALANKNARILWAVMTRGERFDPHHISVKPGCAAPA

SEQ ID NO: 244970 - protein, 407 aa, unidentified
MPYTVGLDWAQDDHAVCVIDEQAQVHLRCTVVHSASGLADLIQQLRRVAGPAALPIAVERPSGLLIDTLVEAGFPVVPIHPNALKASRPRYSAAQGKSDPGDAFILADLLRTDGHRFRPLHPLSDDTRALRALARSRDDLVVQRVALANQLRALLESFWPGAAAIFADVDSPIALAFLARYPTPASAAHLGEKRLAAFLARQAYCGRRPAAELLDRLRAAPAGLAGPAECEAKGELVRTLAAVLEPLVTQLQQLTASLEHAVAQHPDGPIIMSFPRAGRVNAAQILAELGDDRARFSHPDQLAAEAGVAPVTYESGKHRGVGYRWACNKRLRRAVTCFADNSRHASPWSAQVYRRARDRGCDHPHAVRILGRAWLRVLWRCWQDRKPYDPAAHRRARPLLLAADPAA

SEQ ID NO: 244971 - protein, 363 aa, unidentified
MSVQYVGMDVDKQKIVLARLGAGREARAVEQVIANTPSAVKKYFASLLGAAEVHATYEAGCFGFGLYRQLSAMGVTVVLAAPGLIPRKPSDRIKTDRRDACSLALALRAGQLTGIYIPTEQDESVRDYLRMYESLRGDLRVCKQRVLQFLLRRGISYDGGGPWTVKHRHWLSALEFSEARDRQTLDMYLSQMQELEAKCEEAAAEVESIAAQDCYRQQTKKLTAFKGIKTLIALSFVTDIGDFRRFSSARQFMAYLGLVPSEHSSGNKRRQGGITKAGNCHLRRLLVEAAWHYRSYHPSSRDLTERRRGVDPAVLSYANRAGRRLNRKYLHLLLRGKRSQVAVTAISRELAGFLWGAMTDHVA

SEQ ID NO: 244972 - protein, 408 aa, unidentified
MQVTFGIDVSKSTSTVCELIGESKNELTITNNRPGFIQLLHELTAFSKHPQIIFEATGVYSRTLQAFLEDYGYEYVIINPLKAKKEMNMGLRHNKTDKTDAYHLALIQRLYHHPINQSQSQTYKQLNALSRFYDQLTADLVMAKNRLHQALQSTFPEIENLFSSAKGKNYWQIVVRYPHCDLVRREDKKQLINWLMSLKGIAFKHALRTADKLIELAYQAYPVVSCSSIEVEQVQYYAHRLLNLSDQRENLIARMVKLAKSLPNHDLENLESIPGFAQTTAVRVLAELGDLRRFSNPNKINAFIGIDPGRYQSGEMDSNLSITKHGNAVARKLLYRAIGQIDNAAKTNPCHIADYYESKKLSSQTKGFKKIAIASIHKLIRTIYALIINDQLYDYNVATHNQKDFSCN

SEQ ID NO: 244973 - protein, 415 aa, unidentified
MSLHVLYARCAGLDVHKLTVVACVLLTAASGKVSKVVRTFATTTAGLQELADWLSSQEVSHVAMESTGIYWRPVFNLLEGRFEVILVNAAHMKAVPGHKTDVKDSEWIADLLRHGLLQASFIPPKAIRDLRDLVRARKSLVRQRATATNRVQKVLETANIKLSSVATDVLGVSGRDMIEALIAGVSDAEAMAELARGRLRKKLPALQQALEGRVEPTHQTLLRQLLTQIDFLQSQIDSLSTDIEARLAPYEPKLERLMQLPGVGRTAATAILAELGTDMTRFPTASHLASWAGVAPGNKQSGGKRQKAHANKGNTHLRATLAEVVWVISHTKGNYLSAQYHRLARRIGKPKAIVAVSHSVLVIMYQMLLHNQDYHDLGAHFFATLDSTRQRDSAVRRLQALGYQVTLAEVKEVSN

SEQ ID NO: 244974 - protein, 408 aa, unidentified
MNTLYVGIDVSSKSNVVYLMLPNGDKHSNFSVANSRDGSAQLVKRILSALTSHSLDTVLIGLEATNVYGDNLVYFLREDATLAQFNRKIHVLNPKQVKRFHDTYNDLPKNDYMDSFVIADCLRFGRINKEVYMGDYRYKALKNLTRARYFAVQNLTKEKQRFMNVLFKKYSTMTQEKVFSNTFSTTALAVYDEFESAEALANMDLHELTAFIIRKGKNRFPDPDAVAKAIQKAARSSYRLPKTVNDSVNQVLSISITSMKALESQIKEFDKAIKAQMELLPNVLISIPGIGPVYSAGIMAEIGDINRFESQAALAKYSGLAWKKHQSGGFEAEVTRLIPSGNRFLKYYLCEAAFSLVRCDKEYSDFYHLKYKDGNRCQHKRALALTARKFVRLVFRLLKDNRLYTPAK

SEQ ID NO: 244975 - protein, 409 aa, unidentified
MLFVGDDWAEDHHDVELMGSAGQMLARARLPEGVAGIAKLHAMLGEQLGEDADEAAVLVGIETDRGPWVAALIAAGYTVYAINPLQVSRYRERHSVSGAKSDAADAHTLADMVRTDAHQLRPVAGDSAEAEAIKVVSRAHKQLIFERTRHTQRLRHALREYFPAALEAFDDLDAADTLELLGKAPDPASAARLSLAQIRAALKRARRRDIDAKAARLQAVLRTGQLGRAEVITMAYAATTRSAVAVLATLVEQVKTLQRQVETHFGQHPDAEIITSQPGLGPILGARVLAEFGDDPDRYATAKNRKNYAGTSPITRASGKKKAVLARFVRNDRLIDALMAQAFAALHTSPGARSYYDQQRARGAEHNPALRQLANRFVGILHGCLKTRTPYNEATAWAHHTEQKPATAA

SEQ ID NO: 244976 - protein, 322 aa, unidentified
MEQFSFFTGIDVSKLWLDIAVFKPGYGIVYQTRVNNNTKEIRSFLKGLKKQLKAEITGNLFCMEHTGKYGHAFLNASILEQAKVWVELPIQIKRSQGLVRGKTDKWDAIRIAQYAYRFADKAVFWMPADKIIQDLKELQAKRNILVKTYSQLSQENKNDPLFKKPLMALKQGIGAIELKMEQLIEQNELANHQYELLKTVPGIGKQTAMALIIVTNGFTRLTESRKLSCYSGLAPFPYQSGSSVKGRTKVSKMGDKKLKVLLNLSAWNAIRSITAFKDYFNRKVSEGKHKMSVINAVRNKLIALALAVIKRNSPFEKNYSFS

SEQ ID NO: 244977 - protein, 449 aa, unidentified
MSTWNLGIDLGVTNAHQAVLATNEGKFVWPKPWSFSTREEDFDQLDRRVRRAAPPGTTFRAVMEPTGMSWFSVAVALQKRGWQTHRVKSQKVHALRQYYKKHAKSDRLDGETLAKMPVVDEEGLYPLYLPDATTLACQRLCRQREHFLELAVASQNRIQAIDHLALPGLGKDLGDPFSPAARAFRDELYDPREVLTLGEAGLSAFFARFAAEGDDPAAARKRAQRVYDVCQNAVALYRRSGLEPAMYLDYLALCQEVRRELRFLTLYEQQVHEIEQAIWLLYRQLHPSGYLESIYGVGAHGAPVFVSFIGDPHRFASLREWRAFVGLIPESAQSTTTDQKGLHITQAGQDILKKYAYLGADVARHYDPQIAAIYYDQMVNKGNHHIQAVCACATHLLDRILVVLQDERPYELRDVDGRVVTPEEARAIIAQKYTVPKEVRARLRKQRAR

SEQ ID NO: 244978 - protein, 435 aa, unidentified
MEEVEDEPLFCDRVAGIDIGKATVMVTIRVPSEARAKGRQQETREFGTTRRELLALADWLRCWQVERAGMEATSDYWKPVLFTLEQEGFDCLLYQASQVKALPGRPKTDKLDSVWLARITEQGSLAGSFVPPEEIRRLRTHTRYRRKLVQMRTAQKERCEKLLEDAHLKLSSVISDIHGVSGRDMLRAIAAGERNPKVLAQMARGVMRSKIARLEQALDCSFFTGEHAFILTMMLDSIDSLTAQAGVLDARIADMCQPYQRQLEQLDEIPGFGTTTAQDLIAEIGTDMNVFPTAGHLASYARQAPRVKESAGKRKGKNATGRGNPCIGGALGEASISAGRTQTFIGEKYRRLTRRMPKRKAQVAIMRSQLVIAHALLSDPDARYQDLGPDYYERKADIRRRARNHARALERLGYKVTLEAIDPGTGELHLVATAG

SEQ ID NO: 244979 - protein, 343 aa, unidentified
MTQYVGLDVSMRETKLHVLDDAGKRVWRGRCPTEPAAIAAAVRQYAPTAVRIGLETGPLTTWLWTALTAEGLPMVCLDARHAKKALDMKVNKTDANDAEGLAHLVRAGWYREVRVKSRSAMLTKALLGARRQLLGMSLALENQIRGVLKTFGRIVPKGGGGLFEKNVGALIMDDGEIAAVIMPLLQARQMARSKCAALDRRLVRLVQGDANCRMLMTVPGIGPITAVAYVAALERPDTFKRSRAVAAWLGLTPRRFQSGEVDYDGHISRRGDSQLRALLYEAASVLLTRVRMESGLRRWGLILWKRLGFKRAATALARKMAVVLHAMWKSGTAFDSKLGAATA

SEQ ID NO: 244980 - protein, 455 aa, unidentified
MAKRTSAERAELKPVKVGAAAIDVGSKIHLAAVDPSCTGMPVRAFGTFTQELHDLADWFKSCGVTSVAMESTGVYWIPVYEILEQRGFEVILVNARYAKNVPGRKTDVSDAAWLRQLHSYGLLRGSFRPDAEIASLRAYLRQRERLVEYAAAHIQHMQKALMEMNLQLHHVVSDITGATGMRIIRAIVAGERNPDVLAKYRDVRCHSSIETVRAALVGNDREEHVFALTQSLELYDTYQAKMLACDRKLEALIAALTEKGAKPVGKLSRPRVKTKQVNTPSFDVRAALHGVLGVDLTEIHGLGPSLALKLIGECGTDLRAWPTSKHFTSWLCLAPGNKTSGGKVLSSRTRRSSSRAAALLRLAATSVGRSETALGAFYRRLSSRAGKAKAVTATARKIAVLFYNTLRHGMTYRDPGADHYEEQYRSRVVANLKRRAKSLGLIVLPVPSDAEVAVS

SEQ ID NO: 244981 - protein, 359 aa, unidentified
MREQRNKISFRGQKIYVGIDVHLKSWSVTVLSETSVLKKFSQHPSPEALYGFLTRSYPGAEYHSVYEAGFCGFWIHERLTALGIDNIVVNPADVPTKSSEKLRKTDTVDSGKLARSLRANELKGIYTPDSVSLEMRSLIRLKNSTTKDTTRQKNRLKSQLRYLGIEIPQEFLTPFSNWSKRFFAWLKEIETLTPSGRQALDIHIRHLEELRRQKLEMTRALRTLAKTDRFREPLRLIMSVPGFGQATGMAFLSEICDITRFRNAEQLAAYIGMIPMCHSSGEKDGTGDITIRKHAVMRCNLIEAAWVAVRQDPAMNLFYTEQCKRMPKSKAIVKVARKLVNRLFFVLKHQTEYVNSIVS

SEQ ID NO: 244982 - protein, 367 aa, unidentified
MTVTIVDAARPATGGADTHLDLSIAPRLVTGGVDTHLDLNVAAALDPVGGLLGVAEFPATLAGHRRLLGWLAGFGPVTRAGVEGTGSYGAGLARFLRGAGVEVVEVDRPNRQARRRSGKSDPLDAIEAARAALSGRARGAAKSRDGNVEAIRALVVAKRSARSAKIQALNQIRHLSFTAPDELRQQLAGVSRQQLAARAAALRPATREGADPVIAATKTALRILGRRVLALDEEKARIDALLTTLVTQTAPQLLAVFGVGVDTAAALLVTAGDNPGRLRSEAAWAHLCGTAPIPASSGKVTRYRLNRGGDRQANRALWGIVITRLGNDPRTRAYMARRLGEGRSKPEVIRILKRYVAREIYHRLPRP

SEQ ID NO: 244983 - protein, 434 aa, unidentified
MRTIGLDVHKRFAEVAILEPGRPLQRQRIRTTPAELRAFVAELGPDDQVALEASFNTWQLTDLLRARAGRVVVSNPMKTKAIASAKIKTDKVDAEILARLLAADFLPEVWIPEAPLRELRRLLSHRHALVRQRTQLRNRIHAALSRNLLDCPFTDLFGKAGQRWLAQQTLPADERALVDGTQRLLGWFESELEMLDRRLAAQAAGDRRIQHLITIPGVGMVTALAVVAVIGDVRRFPRPTQLVGYLGLDPRVRQSGERPARLGHISRQGQSHARAMLVEAALASVRQPGPLRAFYERLRGRRRTQIAVVAVARKLAVLAWHLLTHETDYRWASASLTDRKRRAIARRAGQPGLRLSAEPVSDRDLQVLLQAERAYRVLVEARRKEQDAVAPNGKRSMGSRPDARRGSHSQTPIFSSGDDRVQHNLTNMSSPPKA

SEQ ID NO: 244984 - protein, 362 aa, unidentified
MRKVFDVCAGIDVHKQSIVICLLKVGQDGKVSQEVQTFGTTTRALLEALDWLMAAHCQSVAMESTGVYWKPVFNLLESSMKVVLVNVQHVKALPGRKTGEQDSEWLAELHLHGLVRSSFIPPREIRELRDLVRTRTKLIGERARHVNRTQKVLEDANIKLGSMASDILGVSGRRMLNALVAGENDPTAVAGLTEEIEDRMRPFAETHDRLDAIPGIGPDVATVYISEMGVDSSRWPSYRHAASQAGLCPGHHESKRKSGRRRHGNRWIKQALVQAAWSAQRTAGTYMQAHFRRIRTRRGPKKSAVGVAHSLLVRCYVLVANGVEYKDLGPTYFDDHAKEVLTKRLVRRLKQLGYDVALTQAA

SEQ ID NO: 244985 - protein, 334 aa, unidentified
MNTIALIGIDLGKHSFHVHCQEQSGKALLRKKFTRTKLMEFLANCSPATVVMEACAGAHFMARWIADLGHEAKLISPQFVRPFVKSNKNDFIDAEAICEAASRPSMRFVQPRTEAQQAMRALHRVRESLVRDKVKTTNQMQAFLLEFGISMPKGIAVIKRLSTVLAEHPLPPYLVQILLRLQAHYHYLVGQITEIETALSQEIIQDDTGQRLMTIPGIGPITASVLSSQLGDGKQYSRSRDFAASTGLVPRQYSTGGRTTLLGISKRGNKTLRQLLVLCARSFMQQIEHRQGKLADWVKQQLERKHSNIVACALANKLARIAWAITTQHTVFVA

SEQ ID NO: 244986 - protein, 354 aa, unidentified
MRCSTKYVGLDVHQATTVATVRESSGKIIARSILPTEDAALLEFFAGMRGAVHVAFEEGTQAQWLHDLLSPRVARVIVCNRRGAPRQGNKGDQVDSAQLSELLRTGQLRSVYHGRADRRDLKELTRTYDNLIEDSVRAMLRMKALFRARAIRTPGKQVYEAETRGSWLDRLPERGCRFRADTLAAELDLLRRLRREAKAAMFATARKDPAYELLCSVPFLGPVRVAQLLATMQTPWRFRTKRNLWAYAGLAVVTHSSADYTIVEGRPVRRRRQPMTRGLNRNHNRVLKNVFKGAANAAVARPGPLKDFYDTMVTRGMREELARVTLARKLAAVTLRLWKKGEPYDARKLTLKAA

SEQ ID NO: 244987 - protein, 325 aa, unidentified
MKKIFIGIDISSKTLDICLKIDGRIQYLTIQNELKAIRAFFKRHVANGAVVAMENTGRYNWNLFEVLTDLDLLVYVLSPLHLKKSLGLSRGKNDKIDSFRICNYIEKNQHESVIWKASSISIRKLKILLTEREARVRMRGQLVRQQHDYKLMKSLGIDKELLKLNKKLIEAIHAQVKKIELDIEKCIMGDCELKKKAELIRSVPGVGKVVCWTMMAKTEGFTTITDPRKMACYCGVVPFDHQSGTSIRYRSRVSVFADKGLKSLLHLAAMSAIRLNNELKTYYRRKVEEGKNKMSVLNAVRNKIVHRIFAVIKNQTMYKNDLVLS

SEQ ID NO: 244988 - protein, 314 aa, unidentified
MSENPEIFVGIDISKDTLDIGFQPPGHTGELPHDEQGISEATRRLREAEPRLVVLEATGGIETELAASLMAAGLAVVVVNPRQVRDYAKATGQLAKSDRIDALVLADFARAIRPELRPMKDALTRELDDLVSRRRQLVEMRVQESLRLGRASKVQQKSLKSHIAWLDKRIEEIDTDLRQRLRASPAWRTKDDLLRSIPGVGATTSATLLAKLPELDTLDRKGIAALAGLAPLANDSGKQRGKRVIWGGRAEVRCVLYMSAVAAIRCNPVTHAFAQRLKAAGKPAKVVIVACMHKLLSIMNAMLKSNTPWNPKIA

SEQ ID NO: 244989 - protein, 409 aa, unidentified
MEHNSEAFIGIDTSKLKNAIAIAEGGRDGEVRYLGEIETTDAATRKLVKKLATKYRKVTFCYEAGPTGYGLYRLITSLGHECSVVAPSLVPKKPGDRVKTNRRDAVGLAKNLRAGELTAVWVPDTRHEAMRDLSRARETAVDDLKSKRQQISSLLLRLGLHYPGEKTWGKSHRNWLASLKLDQREQRIVLEELFGAERQAQERVDRLVSAIIDAVPEWSLAKIVTALMAVRGIDLVAAVTIMAELGDLSRFASPRELMAFLGLVPSESSTGDSVKRGGITKAGNRRARRILVESAWSYRYPPRISRDKLAKVAAAPEPVRAIAWKAQTRLSSRYRALIKRGKRSTIVATAIARELCGSSFLDNVGGSVPRHARSCRRARGRQGRFAPLKRWPEGGPSWTAAARASISRV

SEQ ID NO: 244990 - protein, 311 aa, unidentified
MASTCVGIDVGKVELHANLYGEEAVRVFPNTHIGIKHLGNWLGRKKAELVVMEASGGYERQPAQDLRRAGFAVSIVNPTYVRRFCQSMGTLAKTDVKDARLIANFAYVKQPKPQLAKSDAELNLTSLVERREQLIEMLGKEKNRRSNAPEFHLPSLTLTIAFLETQIETLDQDLDKLIQANPDWQARLAVMQSFKSVGKVISTTLLVEMPELGAESREAIAALAGVAPINHDSGKMRGKRKTYGGRSRVRRVLYMAALSAVRSNPVIKLYYKRLLQNGKEKKVALVACMHKILTILNALLKKGQLWDPLYA

SEQ ID NO: 244991 - protein, 366 aa, unidentified
MQKLSTRRVMGDTILKVHQLTIGLDLGDRWSFYCVLNERGEVVREEKLPTTPEGMKRIFEQLPASRIVLETGTHSPWISRLLTELRHEVIVAHAQKVQLITKSSRKDDRHDAQTLARLARIDPQLLGPVRHRSAQAQIHLTVIRARAELVSVRTALINAARGLAKSHGERLPKRGTQQVGRELAATLSIALREVLEPLLREVESLNERIREYDQRIEQIAKQVYPEVALLTQVKGVGTQIALTYRLTIDDPHRFTKSREVGCFLGLRPGRRNSGQSEPQQKISKEGDRYLRTMLVQGAHYILGPFGEDSDLRRWGLKLAERGGKNAKKRAVVAVARKLAVLLHRLWVGGEVYERLRNTNRAMGAAA

SEQ ID NO: 244992 - protein, 409 aa, unidentified
MRYYLGVDWADQTHAVWVVDERGTKVAMRTVPHTAEGLSEWGRELDEWRAQGTELWAAIERPEGRVVDFLLDHGVVVYPVNPKALDRARDRFRQSAAKSDPFDARVLADFLRTDHARLRALRPSSEAAQELKLLTDDYQQQIRQQTRLVNQLTMTLKAYYPRALEVAELPTALARDFLQAYPTPAALTALTERQWQRWARAHRMHEARTQELWAVLQRPQLPVPAHVVRAKTRLMQSLVAQLTLVVEVVGTYREAIEDFFAQIPAAQWIRTLPIGDHGITAPTLWARLGDAPGRWESFRHLQAQAGTVPVTIRSGKQQVVRFRFACDKSLRYVIDHVAFLSLRWSEWARAYYAGQRARGHSYHQALRALSAKWLKIIFVMWERQVPYDEQYHLATMTRQQLRLRQKLIA

SEQ ID NO: 244993 - protein, 341 aa, unidentified
MKHYVGLDVSQKETSICIVDEAGRPIHQGRVKSDPGVLAAVIAKKAPNAERVGLETGAMSSWLWHELKRTGLPVVCIDARHAHAALSVRMNKSDENDARGLAELVRVGWYREVAVKSEESQTARSILVCRSRLVRVRRDLENQMRSMLKECGLLFPRAAGGQFQRRVNDLIADGHALCPILRPLLSVHQQTCSELEKIDRTIRDLAREDETTRRLMTVPGIGVVTALTYRHTIDDPTRFQNAAKVGAYLGLTPRRKQSGEMDVTEKISRWGDRLLRAYLFEAASVLLHRTKRWCSLKAWGLRLAKRSGMKKAQVAVARKLAIILHCIWVDGTEFEWGKQPA

SEQ ID NO: 244994 - protein, 373 aa, unidentified
MVLLNNRHCEEEVSMSTITIGVDLAKHVFSTCEVDGLGHVLRRQDLRRDAFSPWLARQPAGTVVAMEACSGAHYWARRCQEHGLEPRIIAAQFVKPFRKSSKTKNDRADAEAIATAARQGNMRFVPVKAVDQQVRLSWHRVREGYKIESLAIGNRIRGLLAEFGVIVAQSDLALRRLLADLDEQAGLPVEFKELLRDLADHWSQLRTHFDACDARIEAHARDDERCVRLRAIVGIGPITADAAVATVGNAHEYKQGRQMAAWLGLVPTQHSSGGHARLGEISCRGDAYLRTLLIQGARSSLQRAKAVATEKATPEQRWIRSLDGRMPFGKVIVAIANKHARQIWAMLARDVDYDPHACLHHPMHQRSHTANAA

SEQ ID NO: 244995 - protein, 344 aa, unidentified
MTNIQHKETAHETKPDLFAGIDVGAEELILVIRKNGKLFDPQKFANTPADRDRLVKKLVKLPGIMVCLEATGIYHFDLSLAFHDAGVLLMVVNPKASHNFAKVLMKNSKTDAVDANTLAEYAARMDFVAWTRPSDETIALRSFARRINALTGQKAAAKNHLHALNATSETPKAVLKDAKLAITQLEKRIDRLTAEVLVLIGKHSELTRILALLIGIKGVGETSAIALMGELLLLPPDLSHREWVKFAGLDPRAFDSGKSVHKQTRISKAGSRHIRAALYFPALSAKQHDKHVKAYFQHLMDNGKTPLQGVCAVMRKLLHAIHGMLKNNEPFDNTRFYAIPESNG

SEQ ID NO: 244996 - protein, 363 aa, unidentified
MNKITHIGLDVHKETIAVATLRPDALLCEERVIPNTPEALRKLVARMGDPSALRACYEAGPTGYDTQRLLDSLGVVCDVIAPALIPRRPGVRIKTDRSDARNLARLHRAGELIPIRIPTVAEEALRELIRTREDLKNDRRIARQRVKSFLLKHGRRYPRTRAARWSGAFAEWARSQKFGEPAAQAAFLYLLAAEQTRSTQLAAIEAEIIKAAAEPELAPGVARLRCLTGIDTLSAVTLLAEVGDFRRFGSAATFMAFTGLVPSEHSSGLSVCHGSITKTGNAHLRRVLVEAAWAYRYRPAVGETLAKRLDGQPPEVVAYAWTAQCRLSTRFRTLAQRKAHNKAAVAVARELAGFVWGLMTDRI

SEQ ID NO: 244997 - protein, 293 aa, unidentified
MSEDYAGRQVVGMDLHRHRSVLVRMTEDGRKLGTARISNSPAALRAEIARAGESPRVVLEATYGWYWAADTLAAAGAEVHLAHPLGVKAYGYQRVKTDARDAANLADLLRMGRLPEAWITPPEVRDLRELTRYRQKLVGLRSNCKDQVHAVLAKLGLQVTCSDLFGAWGRSWMDGLRLPQPYAGKVASLRQLIGELNTEIAMLSEVIADLLAAHSGYRVIRQLPGIGPVLAAVIIAEIGDVTRFRTAAQLSSWAGLTPQHRESDIKVTRGHVTKQGSRLLRWALIEAIQRARG

SEQ ID NO: 244998 - protein, 360 aa, unidentified
MALPIANFIRQEMHNMNAAGIDVSGRKSMVAVLRPFWEVVMCPFEVGHNHNTEGLVHLAQQLKELDWETRVVMEHTGRYYEPVAKILHKAGLFVSAVNPLLIKEYGGNSLRKVKPDKTDASKLARYGLDNWADLRDYTPMDTIRYDLKTLNRQFHLAVKQKTATANNLIALQEQSFPGIRKCFTSPVRKDGAQKRVDFTHDFWHIDCVWGVSKNAFTERYRKWCKRHDYKFKQDKAEEVYTLAKSVVVLVAKSEVTKLLIQESADQLTSISRSAETYRAEMNRLASMLPEYPFVMQMYGCGGSTGPQLMAEIGDVCRFASKKVLAAFAGVDPAPNAFGDKVSKSNRTTKRGFSLSLKDAV

SEQ ID NO: 244999 - protein, 346 aa, unidentified
MNNNNSKGKLTVLGIDLAKSSFQLHGVDENGKTVLKKKLSRNKLTAFIATLPPCLIGLEACGGAHHWVRVFSEFGHTVKMIAPQFVKPYVKSNKNDAVDAEAICEAVQRPNMRFVPGKSIEQQDIQCVHRVRSLLVGRRTAQANQIRGLLMEYGITIPQGINQLRKAIPCILEDADNKLSAYFRELLRELYKEIVYFDKRIDAVELKLKEISDQNEDCKRLLTIPGIGLLTATALVAAIGDISVFKNGRELAAWLGLVPRQHSTGGKQTLPGISKRGDTYLPTLLIHGGRSVVRVAHKHQDKRNQWIGEIKQRRGENISNVAVANKNARIVWALLTKKQDYCAIGA

SEQ ID NO: 245000 - protein, 348 aa, unidentified
MKRYIGVDLHKNTFTVCYLSRKGKELKSFKVSKEGIEAFKQTLTRDDEVAVESTGNTGYFVREIKDRVGGVKIINPTQFKIISQSVKKNDKRDAKTIAKYLSKGLIPEVRMKSKKEAQLSSLIGTRDKFVKLRTALKNKIHNILNANGIVTKREIFASEKNLDRVLKYELDEDSLFELRIIIRELRNLNKAIEEIDEELKGRGKKLKGHKNLTNITGIGDISATIFLNTIGDINDFGGDHKLAAYFGIVPRVHISNKTTHYGRITKMGNKIARTALVQCALIAIRYNPYLRSFYLKLKAKKGSGKAIIATARKLLTIIYRTLKNDWVFEDFNNFKLTSASKGYHLSPA

SEQ ID NO: 245001 - protein, 363 aa, unidentified
MNDGICFAGLDVHARKTAAAAVQLGSGEVFKAQLSGSPSAVIEWLVSLPGPVRAVYEAGPTGFGLARQARAEGVEVMVCSPGAIPRQPGDRIKTDTRDALKLARLLAAGQLRLVVVPAPEIEALRDLVRAREDLRGDLMGARHRVSKLLLRRGLLFDGPGETWSQRHLQWLSTVRFEQPLVEVVFGEYLAHHEVLLARRDRLDRLIVEQSLQGSWAPTVARLRCLRGVDTLTAVGLVAEIGDITAFKHPKQLASYLGLVPSEQSSGTKRRQGSITKAGSSHARRLLVEAAWHYRRAPRVSLTLKRRQTGQPPAAIDAAWRAQLRLHRRWAHLDAARGKKRTTVAVAVARELACFVWEIAQQPD

SEQ ID NO: 245002 - protein, 345 aa, unidentified
MSELYSGQQFVGMDLHRRRSVLVRMTETGEHLETTRIVNDRDQLADVMSRAGESPEVVLEATYGWYWAADALAELGASVHLAHPLGVKGFSYRRVKNDQRDASDLADLLRMGRLPHAWIAPPETRELRELVRHRAKLVAMRSQCKAHVHAVLAKGGIWVPMTDLFGVEGNLLLDKVTMPAPYKERIASLRRFIEGFDAEIDLFTGLAQRRLTHDAGYTAIQQIPGVGPVLAAVFVAEIGDVHRFAGPAQLTCWAGLTPSHHESDTTVRRGRITKQGSRLVRWAAVESVKILPKTSHIGGIREKVAQRRGNRNIGAVAAARKQLELVYYGLRDHHVRALHRSPRAA

SEQ ID NO: 245003 - protein, 338 aa, unidentified
MQEVAVVGLDLAKNVFQVHGSDAAGVVVVRKQLRRNQVLPFFEGLSPCLVGIEACASAHHWGRQLMAIGHDVRLMPPAYVKPYVKRGKTDAADAEAIAEAVTRPTMRFVAVKTEAQQAVLMLHKTRDLLVRQRTMLINALRGHLSEFGIVSAQGSAGVQAALRSLILEQERLPELAQAALRGLAGQLEILRAEIERLEHRILAWHRQDATSRRLATIPGIGPITASAMAASAPDPALFGSGRQFAAWLGLTPRAHSSGGKERQAGISKMGDGYLRRLLVVGATAVLRMARQRGTGGAWIRGLLDRKKPKAAAVALANKTARIAWVLMARQEVYTPAAA

SEQ ID NO: 245004 - protein, 436 aa, unidentified
MENHALNVGIDFSQKRADFGLFGPQGELIHPHIAVRNSRSGYEQFRAQLIEVMKAYELDEVNISGEATANYWLPFFMTISKDQELNKYHVHPYLVNPRWVKWYKKCYSPEHKTDEKDCFFIAERTRTMQRGHEWKLDELWMGLRFLTRLRFHLVQDLIREKNYYQSYLFVLNNAYVQHKPFRYLFGTTSREILTDLDQIAALDKLDDQELADQLQTMSGNRLKNPLGNAQRMKEVAGESFQIAPELADVLQNILNLVLDHIRFIEAQISAVTKMMDEESKTHPEVALLRSIPGIGVVFSCGIAAELGNAKRFMEGKKWDKKKQMYRPKNLRDADAAVAKMAGLWWPRNASGDFESQERKLMKTGNRYLRYYLIEAADRLRLWSPVYAAYYQKKFSESNRFSHKRALVLTARKSVRLYVGLLHRMEPFRSEEVDVKD

SEQ ID NO: 245005 - protein, 424 aa, unidentified
MLAVGIDWAEAFHLVALGRPGEGVIEVRRVEHTPAAVAALLADIAALEPDPAEVRVVLETRHGVLVERLVDAGFVVLPVNPDLIARRRGPAKKKDDAEDARLACLLALDRYTSLRPLLPHGELAAELRAIARDDERAARDQRRLLNRLRQDLLSTFPAALQLAGEELGAPTILKLLARWPTAAALGTATRHELVAFARGAHHGWPERLADQVAAALATDQFTPRDYLVRAKADTIRLAATQLLAIATQRRVWERRMGTLLLGAPRRGRANTPRQDELDQGQAFPGGEVYLSFPGLGDRLAARVAGEIGDHPQQFQSPNALACYAGKAPVTRRSGKSELVVACRLACNRYLAGAVQQWAFCSLRESGWARAFYDAQRARGKTHQAALRALGNRWLEVLWHCLRKGVRYDEATHVANRNRALGKAA

SEQ ID NO: 245006 - protein, 437 aa, unidentified
MLSKTKTEISNMNATTNFAVTIGLDWADQKHDLWIRPADGSKAQHLRLEQTPEALHEWVAKLRERFGNRPVAIGIETSRGPVISALLAYDFIVFFPVNPKALKDYRAAFSVSGAKDDRTDAQLLEEFIRLHRDKLKALEPDTELTRKLAGLAENRRHLVDERTRLVNQLHATLKTYYPLAETLLDGQMNKPLAADFLARWPELESLQKAAVQTLRAFFYKHNSRSAQKMEERLAALQKAKALTTDPAIITPARLLVVALASMLRPLHQAIARLDNEIEQAMDQHPDASIFRSFPGAGPALAPRLLVAFGTHRDRFESADEVAQFYGLAPVVIQSGNSQTTHMRHRCPKFGRQTFHENANCAAKQEPWARCYYEQQKERHDDKHHQACRALAYKLIRVYFPCWKQRKAYDPDRYLRALETHGSPLHKKLQIPTPAPGE

SEQ ID NO: 245007 - protein, 425 aa, unidentified
MRGEAPPRISFGRLRSRAFGQAPPHRRREFDMIYAGVDIAKMDHVIGAVDERGAEACRPMPFKNTQAGFERAVAWLEGLAESPSDVVVGMEATGHYWMACYSFLISRGYPVAVINPMQVKAVRKLKGLDKVKNDRIDAGLIAETLRIGQYDETRLATDEVASLRSLSRYLQSLRGMIAELKTQCICLMDAHFPEYAGIFSDMFGAGSRAVLSRSPLPFELARRRSDSLARDIAEASRRAGKSAGRAAEIKAAAKSSIGVRLGQEAASFQVKSLIRQIEFADSECAEVEARIKSLLDEVEPLVLTIPGVSYVTGAQIVSEIGDVSRFRNAPALVSYAGLNSSVSQSGKFDSGGGPITKHGSPYLRRALWLAANRARQHDPGLRAFYDKKRAEGKPHRVAVTAVARKLCHIVFAVMRDRVPYDPRRK

SEQ ID NO: 245008 - protein, 407 aa, unidentified
MTDKVAGIDVHKKVLMVVVSHPAASEQEWERGRFGTTTEELRRLAAWLQARGVEEAVMESTAQYWKPVWYELEPHMRLHLAQAHSNKAPRGRKHDFGDARRLVRRFVAGELILSLVPGPEQRGWRTLTRMKVQLTEDRSRLHNQVECLLEEMRIKLSSVVSDLFGVSGYRILRALAAGQTDPGDLAKLADGRLQCSREQLVEALRGKPAPIHLQLLALYLERYRVLEEQIEKLDRMAAEALTPHRDAVARLAEAPGFGVDSAQQVIAEIGSRAVTFPSAANLASWVGTCPGQNESAEQNHSSRSAKGNRWMRRILNQAAHAAARKKGSHFQAVFQRLLPRLGYKAAIWAVAHRLCRLIWKILHEGVRYIEKGTESDPVTRRARAQRLLRSLRRLGYQVEIQPIAETL

SEQ ID NO: 245009 - protein, 339 aa, unidentified
MQLYAGLDLHSRNTYIGIMDKEFKRVFNKRVSNKLPLILKTLAPFQDQLEGIVVESTFNWYWLIDGLMGAGYRGVHLANPSAMKQYEGIKHTDDQHDAFFLAQMLILGILPRGYIYPKEDRPVRDLARKRLFLVRQKTSHILSLQSLIARCCGKRVSANDIRKFTVEDLQQLLKEEYIVLSAQANLDTILFLKQQIRQLEKAIKNKVKPNKEFQQLLTVPGIGLILAMTIMLEVGDIGRFAQVGNFASYSRCVSSQRLSDGKSKGHGNRKNGNRYLSWAFTEAAHLSRRYNERFRSYYNRKVAQANTSLATKALSNKLARICYYIMRDQVPFREELHSH

SEQ ID NO: 245010 - protein, 433 aa, unidentified
MEEVTGEPLYRDRVCGIDIGKAQMAATIRVPSDRDPSRRAAETRMFGTTKREVLALADWLRCWQVPAVVMEATGDYWKPIFYRLEAEGLECVLADPKQVRNLPGRPKRDPSDSAWLAACFERGTVTSCFVATPEFRIIREHTRYRRDLTEDRTREKNRAEKLLESAAVKLSSVLTDLHGVTGRDIMDQLIAGQRDPKALAQLARARARRKIGELEQALEGAEFLTPELAALLRVMLERIDRINEEIARLSQVIERLLAPYEEQLQQAESMPGWGRRAAQDAIAETGVDMSRFPTPGHLASWAGRTPLEHQSGKRAGPARRKHGNRYLGAITGETAVAAGKTDTREGARHRRLARRRGKAKACVATGNTQMRVYHALLSRPGSRYQDLGPDYYERQRDTARQVSHHVGKLASLGYEVTLCKRPEPDETGPSQPA

SEQ ID NO: 245011 - protein, 338 aa, unidentified
MNIVFLGIDLAKNVFQICGLNQAGKPVYTKRTGRKELLQMLANIPACLIGIEASTGAFYWQREFEKLGHNVKVISPQYVKPFVRGQKNDGNDAQAIAVALMQPTMHFVPPKSPEQQDIQALHRARQRIVNHRTATVCQIRGLLLDRGITIGAAVSRVRRAVPLILEDAENGLSVRMHSTIAELYDLFNDLERRIHFFDKEIETVFRQSEACQRIAKVKGIGPKTATAVVAAIGKGTEFKNGRHFAAWLGLVPRQHSSGDRQVLMNMTKKGDKHLRTLFIHGARAVVRVAANNNDSHMNQWVNQLKERRGFNKTTVAVANKNARIIWSMLRNETEYQVV

SEQ ID NO: 245012 - protein, 337 aa, unidentified
MSYLGVDLHTNSFTVCRRTKQDKETVQTFPMARLGHFRKTLRKRDLLAVEATGNTAWFVSQIRDRLRKVTVVNPFQFEVIRRSVSKNDENDAKALAFFLSKGMLPEARMKTKENAQLHSLATTRDKLVKQRTALINKIHNVLNSYGIKFKKESLGTEKGLKSIWAYEWDIIVKIELEVLVEQIRSLTKSIKTLDKEMSDHGQNLDGHESLTSIKGIAARSATVLLSVIGDVNDFADENKLAAYFGIVPRVSNSNETVRHGRITKRGSKLGRTTLVQCTLVAKRYSPYLRHYYERIKSHRGSGKAIIATARKFLGIIYNTLKNGWVFEDFPNFVIANT

SEQ ID NO: 245013 - protein, 409 aa, unidentified
MEQLIERGCGLDVHRDTVAACVRVPGPNRRPQQDVRTFGTTAAELLALRDWLEGHGVTHVAMESTGVYWKPVFYVLEDSFTCLLVNATHIKQVPGRKTDVRDCVWIAQLLEHGLLRGSFVPPAPIRELRDLTRHRKVLIQERSRAANRLHKLLQDAGIKLASVATDILGVSARAMLDALVEGTTDPDVLADLARGKLRKKLPALRQALTGRFRPHHAFLVSQLLAHVDYLNESITAVSEEVAVRITPFAAQVEQLDTIPGINTRTAEVIIAELGVDMHFFPSDRHLASWAALCPGNHESAGKHASGKTRQGNRWLRTALVEAAAAAIRTKDSALGARYRRIMRHRGHKKAVVAVAHAMLRSIYHLLAEGTTYHDPGADYFDRRHAQRVTRRAIQLLERQGFRVVLEPAA

SEQ ID NO: 245014 - protein, 391 aa, unidentified
MFYIGIDIAKKNHEASIIDSSGKSLSKSISFPNSTKGIEKFNNFIAEFGVTTNNCIIGMEATGHYWISLFSYIVDLGFTCYVINPIQSDAFRKMYVRQTKNDSVDSFIIAQIMRFGEFSISNFSDENTFALRNLTRYRFALVDECSDWKRKLVAILDQVFPEYSSLFSNIYGVTSKELLSKYPLPEDMLSIPAEELGNLLCECSKGRLGINKAKEIQSRARESFGIKFAKRSFSFQIKQIISQISFLEEQLKEIEIEISSLLEDICPVITTITGIGSVLGASIVSEIGNISRFERANQLVAYAGLDTRIKQSGDFSATNTKLSKRGSPYLRRSIWLAATVAAFKDPALSIYYKGLRVRGKAHGTAIGAVARKLTNIIFAVLRDQKPYTPNI

SEQ ID NO: 245015 - protein, 351 aa, unidentified
MSDAISEKQFVGVDLHLHRSVICRIDSRGQQLECVQIDNNPKALVKAVRAAGRGAQVAVEATYGWYWAVDALQAARFEVHLAHPYGMKAMRKRKRVKTDAKDAYELANLLRLGSLPEGYIAPKELRELRELVRHRRQLTKTATSVKAQIRALLAKHGVRLPASCLESQAGQDQLDAVVLAECAASRLASRRRLMMMLENEIDALDVELDGRLKTHDGYRNLLKVKGIGPVLAAVFVVEIGEITRFGTAEQLACWAGITPRHYESDRTVRRGHISKEGCALVRWAAVEAVQRQCEPAVAKVREDILARRGQQARNIAKVAAGRKMLEAVFYVLRDGQAHFLTARPATTEQAA

SEQ ID NO: 245016 - protein, 355 aa, unidentified
MDGLKHQKEKRSMDHSAGLDVSVKETSVCIVDDAGKVVREVKVASEPGALLQVLVNPDYHFKRIGLEAGPLSQWLFSALAEAGLPVICVETRHMHAVLKAQINKTDRNDARGIAQMMRAGLYRPVHVKTLRSQKLRMLLTHRKLLQSKAIAIENDLRATLRNFGLKVGVVGTVKFEARIKELVENLPDLVILVEPLLLVRRVVREQIGILHRRLLAIVRDDEVCRRLMTVPGVGPVVALTYRVTVDVPARFRNSKAVGAAFGLTPSKYQSGESDRTGGISRCGDDMMRMMLYEAAQSMLFHSSKWSWLKAWAMKVARQRGMKKAIVALARRLAVIMHRIWIDGTDFRWTREVAAT

SEQ ID NO: 245017 - protein, 383 aa, unidentified
MTTAIDTRDVCCVALELSKTSWVCAFAVPGESKVAIHKIKAGDTDRLMAVLTGSKARAEQQLGRPLQIVLCYEVGYDGFWLARYLIARAIHTIVFDPASFLMPRRSRVAKTDRLDAEGMTRILRRWLSGDREMARPVQIPSVEQEDAKRIERERKYLVEERISIIGRIKGLLALHGIWLVKKNIGKGLRQRLDAMKTGDGRPLAPFLRSEIERMLTRYDLISRQIADVEADRKAALNNEKGVFPHADKVRRLTTLGAVGETTATVLVAEIYHRTFLTRRQVASFVGLAPSPYKSGEVDRDRGINKAGSKLARHMLVELAWFWLRYQSNSQLSQWWHSRFGNQGMRGRKVGIVALARKLAIALWRFVEDGIVPEGATLKVRHAS

SEQ ID NO: 245018 - protein, 365 aa, unidentified
MVNHIFVGIDLGDKNSVARIAVNQGKTERWGFVNDRRGRQRLLDEVRRRSEKVENGQVVMAYEASSCGFILYDEAEARGIRCEVLAPTKMEKSVEQRQHKNDDRDAEDVVEKLRGHVLAGNRLPTVWVPDRQMRDDREVVRTRVELVEKQTRVKTQIQMLVKRHSLEKPTGIGGPWTVRHRQWLEALTESDAWGYGARTALMSLLRHLSFLEAEIERIEKPIHELAEQPRHKPILDELTREHGVGLMTAMVYRTEIGYAGRFRRGRHVGKFVGLTPTSHESGQQQDRKGHISRQGPPRLRRMLCQASWVHVGHDPQAKRFYQQLVARNPKKKKIAIVAVMRRLAVRLWHRMRQAEIRMTDLVPVN

SEQ ID NO: 245019 - protein, 416 aa, unidentified
MTFKIVRFICGGMDVHKNLIVATIGTTDKQTLTTEYIQQSFSTFYSDLIRLKEWFISHDCYDVCMESTGKYWIPIYNVLETELNICLTHPKYVKAIKGKKTDKRDSKWICDLYKCDLVKHSFIPEKEIREMREIARYRCKLVYMRSSERNRYQNCLTVSNIGLASAVSDPFGKTATNIMKELMQSEVIEDDKILKLIHKNCKDKDKILDSLQGYHIESDQRFKMDTVMNHIEYLDKQIQACEAELIKRAYPLRDYFQHITHIKGISALSAILIVSEIGTDMNQFESDKQLVNWAGLSPANNESANKKKSVRISKAGQYLKPLLVQCALSSIKDKNSYFGIKYCRIKKRRGHKKAIIAIARMMLVCIYHMILTGEEFNPCDYESLTNPKPKKEPIMTVESALQFLKDSNFDFSSIQL

SEQ ID NO: 245020 - protein, 414 aa, unidentified
MAEEETISWFAGVDWGSERHQVCLLDARGTTVGEREFPHSGEGLAELGNWLLSMASGASTVAVAIEVPHGPVVDALIDRGFVVYAINPKQLDRLRDRFSVAGAKDDRRDAYVQADGLRTDRRLFRRLQVADPRLIELRAWSRLAEELRAERVRLSNRVHHQLWRYYPQMLKLTDDLAAPWFLELWAIASTPAKAGRLRKSTVERLLKQHRIRRMDAETVLRILREPAIKVAEGVAEAASIHMRSLVARLRIVNRELREAERKLDELCTTVSEIEQTSGEGLQRRDVAILRSMPGIGRINLGTLLSEASGPLSRRDYEGLRTLSGAAPVTKRSGKSLIVVRRYAAHVRLRDTVYHWARVATQRDPKCRARYTALRKRGHSHGRALRGVADRLLALACVLLQRQTLFDPYFGRPTA

SEQ ID NO: 245021 - protein, 420 aa, unidentified
MTRKNNNKIISVVHPICCGLDVHKDMVSACTIITKADGEQTFVVNEFSTFTDDLYRLKSWLSSHACPVVAMESTSVYWRPVHNVLEDAFKVVLVNAQHVKNVPGRKTDISDSMWLASLLRIGVLKASFIPEKRIRQIRELVTLRKSYTRSLADYKRRVHKLFETANIKIASVMSNLFGKTGRNLIAKLIDTDIELKIEHVQQCAQGSLKKKVAELLRAIQGFFEDHHRFQLKMMMHTIEHLESEIEAITKRLDQILIPNHDLLEQLDEVPGIDKKTAQSIIGHIGDTLTAFRSDKALASWGGLCPGNNESAGKRKSGKSPVRKHPFKELMIEIAWAAVRTKGSYYKDKYYRLKSRRGAKRAIVAIAHRITKAIYHIIKHGRSFVDLGEAYLMSKSKEKRLKALKRKARHLGFSLVPVATK

SEQ ID NO: 245022 - protein, 401 aa, unidentified
MDTLRDNATRVKRFRELKATLRTNRNRLLLGIDIGKAQDVAQLRVAHTRIVVPQVAIPNTTAGFTAFWRQVQRAHRETGCAEIVCALEPTGTYHQALALFLEAHGVDVVLVSNAVAHLNRRTQDGTWDKSDPKDAANLCDLLEQGKVLFYALPEGPFGELRTLVKLLRQARTERAACKARWRNTLRPALGPAAEPLPTRVHAALPARLQAWEPAPTAPPTRRGGPLGPGRTAACQDLAARVAAAEARIGHLEAVLTEVAAGLPAYQLLQSIPGVGPTVAAILVAEIGDIGWYTKASQLRKLAGLDIVRLQSGQWAGTPRISRNGRPLLRWALYQAALGATRTAAGRAAHAARVAKRAGDRHAGLKAMVEGAATVLRTVWGIWRSGVPYDPTRAPGGGAAVR

SEQ ID NO: 245023 - protein, 412 aa, unidentified
MNRKARRCCGIDVHKASLSACIRLHGKGRKVSEEIRTFGTTGDELLALHDWLKEHQVTEVAMEATGVYWKPVYYVLEDGFRVILVNPAEIKRMPGRKTDVSDCAWLAQLLDHGMLRPSFIPPREIRELRDLVRYRVSLKHDHTRIANRLHKVLQDADLKLSSVMSDILGVSGRQILSQLAKGNCDPVALADLARANLRGKLPQLRQALSGRFNAHHAFLLSRLLADLDNTEEAMAQVAQRIEAQLVPFAAELERLCTIPGVKQVAAAAILAEIGAEMSWFPSTADLDSWAGMAPGNNQSGGKRRRAKARKGNRWLRTMLVESGNAAGRTRNTALSALYRRMIVRGGRKHAAFVVGRHILNIAYHLLRERTTYRELGPTYFEQRRVEQLKRRCLDQLRNLGFDANLVPLPKAA

SEQ ID NO: 245024 - protein, 353 aa, unidentified
MITIGVDAHKHAHMAVALDERGQVAGQWQGAHSAAGWDEATRWARALGDERQWGIEGGGGYGRGLAQHLVGLGEVVYDINPRLTATERRRSRRMDKSDAFDAQAIAQVVRREDAQLPRVTVEDETVALDLLTAEREDAQAEATRLRNRLHHLLLQLDPEYHLHLPALTSVAGVQAAKTYTTTSASLVQQERAAVVRRLAGRLRLAMEQVAELGGRIEALAQARYTPLTRLCGVSLLTAGSLAGILSPGRRFASEAQLAAYAGIAPLETSSAGRVRHRLNRGGNRRLNAIVYRIALVQARWSPEAKAYLARRVAEGKTKREAFRALKRYLVRAIWRPWGACVPPAAVESVRRAA

SEQ ID NO: 245025 - protein, 444 aa, unidentified
MAGSGMILIREVADAPVIMGISKPAGLKSPCGEVKIVNPLFVGIDVSSKNNVAYLMKPDGSKHSSFSVQNNLGGAKLLSERIVSALGSMQLERVVIGLEATSIYGDSLVYALREDGSLERFQRKIHVLNPKQVRKFKEAYSDLPKNDWVDAFVIADHLRFGRINREVYMDDYRYKALQTLTRARFDVIQNLTREKQRFANYLFLKCSGVAQDKDIQNTSATTIALMERFETVDDLANAILEELTAFIIEAGRGKFVDPDATAKAVRAAAKGSYRLPKTVNDTVNQAMSVSIASMRALKEQIKVLDKAIEQQFEIIPNTLTSIPGIGKVYSAGIIAEIGDIHRFDSQASVAKFAGLVWHKDQSGEFKAEHSRMIKSGNRYLRYYLLEAANSVRRCDSEFRRYYDLKFKEVNKYQHKRALALTARKLVRLVFRLLKDNRLYIPPEG

SEQ ID NO: 245026 - protein, 338 aa, unidentified
MYYTGIDLHKFTSYLTTVDESGAIVKQADIKNVHHNFIQYFSDLGTENITTVESTMTWYWLNDLLSSLKIPLVLAHAKFVKAIAYAKVKTDKVDSHTLAQLLRMDYIPVAHKISNEHRLLRDALRARLKIVQRHTSVTNSMHLLLAKYNLDSPDHLHGVARFQFEQLRELEQILKEQILDLEKQLYPSLIPNDDIQRLLWIPGIGKMNAFTLLLEIDVINRFADVKHFFSYCRLAPSARNSGGKSKQRSSKDGNRYLKMAFSDAAIHAVQHYPEIRSLSQSIGRKKNKFIAKTIIAKEIASIVFYVLKHQTTFNNMFMGKALLQQKSLQWPRIVSPVA

SEQ ID NO: 245027 - protein, 412 aa, unidentified
MDVLVERCAGLDVHRDTVVATVRVPSTRRGQRHQETRTFATTVRQLEALGDWLATFAVTLVGMEATGVYWKPVFAVLEQRFGCWLLNAQHLHNVPGRKTDVADSAWICQLLEHGLVRPSFVPPQEVRDLRELTRLRKAQVEERTRTIQRVEKVLQDSGIKLTSVASQVYSKSARAMLEALMAGTTDPHELAELAKGRLRSKRPRLVEALANRFRVEHHGVLVAGLLAHIDSLENAIAGLDARVAEGLAPVANLVELVCTIPGVSDRTAQVLLAECGWDMSVFASSANLASWAGICPGNNASGGKQKSGQTRRGPKWLRLALTEAAHSAARTKGTYLAAHHAQVRGRRGPAKAIGVTRHDILVAFYYIVRDQVPYRELGPDWAARRYSVEHRTNRLLRQLEALGMNVTVQPAT

SEQ ID NO: 245028 - protein, 367 aa, unidentified
MKKISTVTTKKVEKNASQKLTIGLDLGDRFSWYCVLDEAGEVVLEQKVATTPKAMKEVFGGMPRSRMALETGTHSPWVSRLLSELGHEVIVAHARNVRLIGESRKKDDRLDARMLARLVRIDPQLLAPVKHRSAQAQADLMAIRARAGLVRARTSLINTARGLTKSYGERLRGCNPRNMNPEKAQELSPELRAALGPLLGEIETLSERIREYSERIEQIAKQSYPEVARLTQVKGVGTLIALTYVLTLEDAHRFGKSRDVGCYVGLQPGRRNSGQSEPQLHISKEGDAYLRTLLVQGAHHILGPFGADSDLRRWGLKLAERGGKNGKKRAVIAVARKLAVLLHRLWVSGEAYEPLRNQREVALPAVA

SEQ ID NO: 245029 - protein, 262 aa, unidentified
MQTITTIGLDIAKSVFQVHGVDNDGKVVIRRQLKRRYVLAFFEKLQPCLVGIEACASSHHWSRELQALGHTVRLMPPAYVKPYVKRQKNDAADAEAICEAVTRTNMRFVPIKTPEQQSGLMLHRTRHLFIRQQTSVINAIRAHLAEFGVTAAVGRKGIEELLRVIADPSDKRVPDVVRTCLAALGSQLLSLKKQILDFDRMIMAWHRSNQTSKRLNCIPGVGPLLATALVASVADPKTFRSGRNFSAWIGLVPKQHSSGGSG

SEQ ID NO: 245030 - protein, 417 aa, unidentified
MMRPEAWFAGVDWASEAHHVCVVGGDGSKREERIFRHGGAGLAEMADWIAARCGGSAPEDIPVAIEIPHGPVVESLMDHGFAVYSINPKQLDRFRDRYSPAGAKDDSLDARVLADALRTDLHHFRRIDPVDPVVIELRAWSRIDEELTRERTSLSNRVREQLWRYYPQILEAVGSVVEPWVLDLWAKAPTPAKARRVQRRTLESLLKRNRIRRITADQLLEILRAPAIAVAPGTTEAAVAHIESVSERLRLVHRQLADAKREIARLIDVLAESEDSGSDQPGGQRDVTVLSSMPGVGQTVLATLLAEAPQALARRDYKALRCMCGVAPVTRRSGKYKLVVRRMAAHARLRDAVYHWARVAVQRDPVSKAKYAALRGRGHGHARALRSVSDRLLAVACAMLRTQTCYRPPCPAEENAA

SEQ ID NO: 245031 - protein, 356 aa, unidentified
MLWLINSANGLKELKMETKFMHFAGIDVSKNKLDVCLIVNGQRTDLYYGCFEQSAGGYKAMKKWLSEQTGKALEDLLVLVENTGLYDDALLSWLWEKKIAVCLENATNIKRSVRDHRSKNDKLDSRNIALYLLQHYYELELWQKPREVVSKLKLLLTQRTNLVESLKRLNALQKEWKHYQWSDVHKTNSYGAGIKGLKADIEAIEKDMWNLVRGDAEMLRMFILIVSIPAVGKITAMHFICYTNEFKTVRSGKQLSAYCGVVPFEKSSGKSVKWKPGLPHQANKVLKTLLHLCATTAIKMKGAFAAYYRRKIEQGKHALIAINGIRNKLTLTIAAVIRNNEPYNENYIYQTCLEKP

SEQ ID NO: 245032 - protein, 425 aa, unidentified
MKTTTTYAAFVGLDWADRSHQVCLRTADGTRDEQSKLDQDPRALHAWANALRARFPEGKIAVALEQTKGPLVYALSMHAHLELFPINPAMLAKYREAAKAASGTKNDPLDASLLCELLRVHRDWLRSLPSVPAPARELQMLLETRRGLVDQRTGLCCQLGAALKSYYPQALALVGHDVGSPLACAFLRRWPTLSAVQRARPETLRNFYHAHQVRSEERIEERLAVVCSTVALTDDAAVLATLPVLVASIVAQLEVLAPTIADYDRRIAASFASQPDAALFESLPGAGEQLAPRLLVAFGPDRTRYTSACQLQQYSGIAPVQEQSGKTKVTHWRWHCPKFLRQSFHEFAGCSIPRSRWAKAYYDEQIARGRPHHRVVRALAYKWQRILFRCWQNHEAYDEERYIAALRRSHSPLIARIDSTYADAA

SEQ ID NO: 245033 - protein, 422 aa, unidentified
MSWMAPGCLISEEDARRRDEGTSAARRPATIGGKVFYVGIDLAKRKHSASVVRDDGKRLVRGFAFPNSAEGFAALLARLAKVGATGDSSKVCLEATGHYGRNLIAFLEGRGYEVFEVNPLLTANWRRATSVRKVKNDAVDAEALALWLLAGNPTARRRAKDESDDLRSLARSRTSLSHMIGDCKRRAVAILDVTFPELHGFFSDDFCVAATAVLMRWQSAEALSHARLDSIRKEVREAGGRLSDARIAELRELARDSVGTASAPLAFQLRQLLAQMAFTRAQMAELDAELARMVEGSPITTIPGIGTVCAAVILGEYGDFSRFPNASKMLAFAGCDPSVFESGEFVGSRAHMSKRGSPYLRWALWIAADRARLYDPAMRAYYARKRSEGKCHKVAMSAVVRKLVSVIYAVMRDGAAYVCPAT

SEQ ID NO: 245034 - protein, 405 aa, unidentified
MVEKVWVGIDVGRKAHHAAAVDDSGAVLWSRRIRNDQAEIETLLDRVADVESVVWAIDMTAPESALLRGVLHSHHQQVRYVPGRVVHSMTGAFAGEGKTDARDAVVIAQTARLRTDLAPVSIPDDVAIELELLAGHRTELVAERTRGINRLRVLLTRIFPGLERCFDYSTLTGLAFVTKFVTPSSITAASDKEIYDHLRGHGVRRPTIPKMIGAARTAAVAQRIALAGEATTAALVQQAASSLILLTRQITDLDKQIAEVFSRHRYARILESVPGIGTRSGAELIAITDGDLASFGSAAKLAAYAGLAPVPHDSGNRHGTLRRPQRYHRGLRKVFYMAALNSSQRDGPSREFYQRKRTEKRSAVHALIALARRLVDVVWALIRDDREWTRTVPSRGDTRSAPVAA

SEQ ID NO: 245035 - protein, 424 aa, unidentified
MHNRKENPMKNWKDLTHYAGFDWAKDHHAVLIMNAQGHPVADFEFAHSLEGWNRFAEQTAAWPHLAVAIETSQGAAVDQLLQRGYTVFPVHPVAAQSYRERKAPSGTKTDHLDAWALADALRVDGHGWKTLHPIDPMTHQLRLLCRDEVSLIEQRTSLVNQLQQALAEYYPAALEAFDDWTAAFTWEFVLAFPTPQALVDAGKRRWEKFLHTHKLWRPETTEKRLKLFAQADQFKASKPIVEAKSQLAVSLCKLLCTLNQQLKLYRQQIQALFKEHPDHDLFGSLPGAKEVLAPRLLGAVGNDPERYGSQEVLQCFAGTAPVSYQSGKINKVRVRWSCDKFLRYTIHLWADCFRKASAWGQTYYQKKRSQGMSHACALRCLGQRLLKILFQMLKTRTPYDAELHARNQQKHGSWVIKLVNEATA

SEQ ID NO: 245036 - protein, 371 aa, unidentified
MRFYAQQHRFYCGIDLHGRTMHLCILDHQGNTVFDKNLPCRRDTFLNALAPFRDDLIVAAECMFAWYWVADLCQAENIPFALGHALYMKAIHGGKAKNDRIDANKIARLLRGGNFPIAYVYPKGMRETRDLLRRRTYLVRQRAALLTHLQILNAQYNLAPFPKKLSFAANRTEMDVAQRFSDPSVQKNAAINLALIDQLDGHIGELELYLTRTAKVDDLQTFYHLRSIPGVGKVLALILLYETHDVQRFDSAGQFLSYARLVRCLHESAGKKLGSGGKKIGNAHLRWAFAEAACLFLRSSERAKKWKQRQAAQRGDGKALAILAAKLGRAVYHMLRKGEAFDEARFWQGRTAPSDTGSSSLSPKESDHVGD

SEQ ID NO: 245037 - protein, 353 aa, unidentified
MKCDKYIGFDLHQATTVVAVLDAEGKVVMETIVATEAAAIIRFLKSLSGPLHITFEETTQARWMYDVVRGYVKEVVVCDPRRNKLLGEGSKADKPDARKLAELLRAGLLRPVYHGHEATRQLKELVRGYETLSADTQRMMVRIKAIYRAHGIRTPGSAVYQQRQREQWLQLLTEPGTRQRVNWLYQELDHLRPLRKQAKMAMVAEGRRHQAFRLLRTIPQLGPVRCAMLVATVDTPYRFRTKHQLWAYSGLAIVTYMSSEYEIKSGRVVRSRKPLATRGLNRNCNRRLKELFISAAVAGSRSEPYRSYIEGLQQKGIRAEMARLTLARKIAAVALRVWKEGEAFDPKKLNSTT

SEQ ID NO: 245038 - protein, 359 aa, unidentified
MTSMQDLPRRRRVVVGVDTHKHLHVAVALDELGGRIEARSFAADRSGYEQLIDWANSLGHQVIFGVEGTGSYGAGLASAIRRRNIGVLEVLRTDRRDRRLRGKSDTIDAENAARAVLNGQANAVPKSADGTVEMIRLVKVAKDVAVKARTSAMISLKAVLVNAPGELREQLEPLTKMALIRRCAALRPGAVVDPTTAAKHTLRAIARRWLALDAEVKIHEKVLAKLTGELVPELVAALGIGPDVAAEMLIVAGDNPDRVRSEPAFARLCGVAPIPASSGMTTRHRLNRGGHRQANSALYRTVIVRLQHHQPTQAYYQRRTAEGRTKAEIIRCLKRLLAREIWSYLRPLRQARQPLVLAA

SEQ ID NO: 245039 - protein, 331 aa, unidentified
MTATSQNNNVQRESNETHFVGIDVAKDELVVHILPTNQQRTVPNSLKGINELLTLFKEIKPKQILFEATGGLERELLIQLAAKGFEVVCINPRQARDLAKGLGELAKTDAVDARMLATFAQLQRFTPRPVPSRETQEMNDLVTRKEQLITMRTMEKNRWQQTNQKHIVKSIEKMINTLDKQIADIDDRIKKMIDDNPDWNEKDKILQSVPGIGPKTSQVLISALPELGELNRQEIAALVGVAPFCNDSGKKSAERHIKGGRANVRAALYMATFSAVRHNPTFKIFFDRLIANGKKYKVALVAAMRKLITTLNTMIKTKTAWGEHRVPPQNF

SEQ ID NO: 245040 - protein, 411 aa, unidentified
MDTLYPRCAGIDVHKTNVVVCVRCCDRPGKVFEEVRTFSTMTRDLLALADWLAEQGVTHVAMESTGVYWKPVFNILEGSVQVILVNAEHIKQVPGRKTDVKDCQWIAQLLQHGLLKASFVPPQPIRELRDLTRQRTQLIQERAAAANRIQKVLEDANVKLASVATDVLGVSGRDMLEALIAGETDPEKLADLARKRLREKLPALQLALQGRVTEHHRFLLRMHLDHVAHLEELIGRLGARIEEALAPFAEAGERLVTIPGVSQRVAETVLAEIGPNMEQFASAGHLASWAGMCSGNNESAGKRRSGRIVKGNRWLKRILVQAAWAASHTKGTYLAAQYRRLAKRRGRKRALVAVGHTLLVIIYHVLKRGTTYAELGADFLDRLEPERLTRQLIKRLEALGHKVTLEPRPAA

SEQ ID NO: 245041 - protein, 335 aa, unidentified
MKKLIVGVDVSKEKLDFCLKSQIKIEKEFIVVNQSALIKESLCQILQELKVQIEDLLICAEYTGQYTYPLCCACQELGIDLWLENPSQIKYRSGVQRGKNDKMDARKIAGYAKRFEDEAKLFSMPQKCLASLKQLISERDMYVCDRSKYQGQLTDQKCFMDVDDYKKKSRRLKSLIKDLDTLIVQIENDMQKIIDNDQTLSNQHKLLCSIDGIGERTAVKMIVETNAFQDFTTPRKFCCHAGIAPFAYISGSSQISRYKVSNRADKSIKTLLHLAALVVATRMSGELHEYYVRKVTEGKNKMTVLNAVRAKLVYRMFAVIKNNQPYQKNYLNALA

SEQ ID NO: 245042 - protein, 342 aa, unidentified
MYYIGLDVHKKTISYCVKDASGRVQQEGKVGSTRRELDCWMAGLPQPWTVAMEATIFSGWIYDHLLPHAVEVKVAHPLMLRAIAAAKKKNDTIDAAKIADCLRCDFLPECHMMPREIRDRRRTLRYRHLLVRQMVQMKNRVSGLLMETGVEHTKSRLHKVGYFQEMLSKNAEIEASIRPLLKLSRETIERCQKTEYALVSSLQRDPLLADRIRRLRTVPGVGPITALTWALEMGDVSRFRTIRQAISYCGLCGDERSSADKVMRMPLSKQRNKHIQRVLVEAAKLAPRLSPELAMVHEREKQKGNSNRATLAVARKMVAYLLAVDRQQREFIPAEQRGSRAA

SEQ ID NO: 245043 - protein, 334 aa, unidentified
MDKDGPGDALERRSRALVGIDVAKAELVVATRPGGERWTVSNDERGVRTLTERLRRDGVELIVLEATGGYELLCVAALAAVSLPVVVVNPRQVRDFAKATGQLAKTDRIDADILALFADRVRPEVRALPDAETQELEALLARRRQLLEMLQAERNRLGQVFGRGKAPVKKSLKAHIAFLERELRMADTDLGDQVRQSPAWRERDDLLRSVPGVGPVLSLTLLAHLPELGRLSRRAVAKLVGVAPLSRDSGTLRGRRCVQGGRASVRGVLYMGALVATKRNAVIRAFYARLLAAGKPKKLALVACMRRLLMILNTMMRTGERWSAEHVDRRLIDA

SEQ ID NO: 245044 - protein, 386 aa, unidentified
MQKLNDLSRSLTALEPNGTLIAVIKMSLSSWLVAGIVPGVERQPLKKLAVDESALLKLLHRWREEAEKAGRRIERIAVAFEAGRDGFWLARWLKARGIEAYVIHASSVAVSREHRRAKTDRLDTELLKRSFLGWLRGERDHCKMVEIPTMQDEDAKRPNREHDSLIGERSRIVNRMKAALVRLGIRGFNPKLKRATTRLDGLHTPEGEPIPPNALAELRRDMERRRLVNNQIRQIEEERLERIEQAPCDGAHVMVRLLARVMGVGIETADMLVHEVLSRNMRDRRAVARYAGLTGSPDESGRKRREKRLARSGNARVRRGMIQLAWRFLLHQKNSALTKWFRSRTENARGTRKPMIVALARKLLIALWRLMREGIVPDGVVLRPAQ

SEQ ID NO: 245045 - protein, 318 aa, unidentified
MKTKTNQNINVGVDTGKFQLDIYIRPLDIYFTVTNDDKGIKEAVKTIKKYKPERIIIEATGRLEMPFILACAKANLPFVIANPIHIKRFAGAIGQRAKTDKLDAQLIAHFGEAIQPKLSTLKPENMQAMSDLVARRNQLLTMQTMEKNRLQILPDNLAMTIKPILTAFKNQINKIENKIAELIENCPDYQAKSLIVQSMPGIGKIAAASLIGNLPELGYISSKQASALVGVAPINRESGRYKGQRKIQGGRHQVRTVLYMAMMSAMQCNPVFKATYQRLVAAGKPKKVAIIACVRKMIVILNSMLRDGVMWDATTVNN

SEQ ID NO: 245046 - protein, 339 aa, unidentified
MGLYTAFDLHSNNAYLGIIDETGKRLFKKKLPNETEMIKTTLLPFKAAIEGIVVESTYNWYWLVDMLMEEGYQVHLANPAKIQQYSGLKYSDDKHDAFWLADMLRLGILPKGYIYPKESRPIRDLLRKRSHLVKLRTSLIISLQNIIARNVGSNLKASDIKVLTTDRVKPLLEYNEDLALAGKVSKDAIDSLSQQIKTIEKTIEGRIHLRSPYDHLLSIPGVGPIIGSTIMLETGSISRFPKVGNYCSYCRKVPTGRFSNDKRKGSGNPKNGNHYLACAYSEAAEHAKRYDEESRKFFNRKLKSTNAPIAHNALAHKFSRAAYYIMRDGVDFMPEKAFA

SEQ ID NO: 245047 - protein, 415 aa, unidentified
MRVLLFIGDDWAEDHHDLELEDETGRRLAKVRLPEGLEGITRLHALVAQHAPADWADLPSEEVAGRVVVGIETDRGPWVTAMRAAGYQVFAINPLSSARYRERYSTSGAKSDAGDAHVLAEIVRLDRDHHRQIAGDTDLVDAVKVVARAHQTAVWERTRQVLRMRSTLLEYFPAAVEAFEDLSAKDSLLLLARAPSPARVGKLTRSQVVSALRAARRHHIEAKADALLTVLRAPGLRQPTTTEAAYAAVVVGQVGIITALNVQITQLEEVVDEHFGRHPAADIYLSQPGLGVVLAARVLGEFGDDKNRFHDVRARKNYSGQSPITRASGKKTIVMARYATNRRLGAALHQQAFSALTASPGARAYYDALKARKIGHHAALRQLANRLVGILHGCLKTGTKYDETIAWQHQNIAAA

SEQ ID NO: 245048 - protein, 322 aa, unidentified
MFLGLDVAKRDFHAALLDGKERPRVKAFPNNPKGFEQLFAWLANRSIQNVHACLEATGGWSEALATELYRRGHRVSLVNPQRVRDFGRSEGQRTKTDKADAALIARFCSMHDPAPWSPPRAELLALQAFVRRRESLIDMRTQERNRLSGPITDELVRKSIHDHLAFLDVQIADIEKQIDDLIDNDTDLRNQRDLIKSIPGLGHRSASSITAEFPELAKYRDAKAVAAHAGLCPAIEQSGTSLARSHLSRSGSSKLRRLLYFPAIVAMKHNPAIASFAGRLQSRGKQKMVIVAAAMRKLLVLAYGMVKSRRPFDASLTTQHGI

SEQ ID NO: 245049 - protein, 338 aa, unidentified
MKYYGGIDLHSNNSYLGIIDKKEREVFKKKLPNDLSEIERALKPYRKDLEGIAVESTFNWYWLVDGLMEKGYNMHLANPSAIKQYEGLKHSDDARDAFHLAQLLKLGILPEGYIYPKEERPMRDLLRKRLQLVRQKTSHILSFKNLVSRNLGFQIPSNDIKKLREEDVEDMFKEEHLVLAGQANIATMRFLKEKITEIEKAVLEKAKLKKEYHKLLTVPGIGKILALTIMLETGDIKRFREVGNYVSYCRCVGSTRISNGKSKGEGNRKNGNKYLSWAYVEAANFAIRGYPYVRSYYQKKAAKTNNIVAIKAVSHKLARASYYVIKNQEVFDPKKAFS

SEQ ID NO: 245050 - protein, 385 aa, unidentified
MNSVGIDLHRKRSHIAALDETGAQLLSRRIVNDPQTFLALLEDLGECRIALEATYGWEWLADVLHDAGYELHLAHPMRTKAIASARVKTDAVDARTLAHLLRADLLPEAYIAPRELRDLRDLLRHRVALTRMRTALKNRVSAILAKHGIAAPYSDMFGVGGTQFLAELELHESPRRRLDSHLALIADFTREIDATSGEIDARAKADPYVAVLCQIRGVGRYIAMLIIAEVGDIDRFQTARRLCSWAGLTPTVRSSDGRARLGHISRQGSPPLRWALVEAAQHAARGGGPLRADYERIAKRRGKAVAKVAVARKILTLCFYGLRDGEIRCLAPRAKARTVRPVAVSRDPPRRACAHQPRASESSGELACCQWPLSPPAVTDGRPLD

SEQ ID NO: 245051 - protein, 390 aa, unidentified
MRALCPRPDEHAAIRTDLKAIFVSLELSHSTWVITSLAPGGGEKMSKHAVRSGDIAALLARLSQLKEKARARTGQVFPIIVIQEAGLDGFWIHRVLQTEGIESYVVDPASIATSRRRRRAKTDRIDGEALVRALLAYKRGEPRVCAMVKAPTPHEEDRRRISRERETLTAERVQHVNRIKGLLFAQGIGDYEPLHRNRRERLEELITGDGRPLPECLKAQIRRELDRLELVIEQVKAVEAERDALLAHAQASPGVPAPATQLLALKGIGPEAAATLWSEGLFRTFSNRKQVAAYAGLAPTPWQSGSVHREQGVSKAGNPRLRTTMIQIAWLWLRHQPQSALAVWYRERIKRKGGRLGKTMIVALARKLLVALWKYATAGVLIEGAILKQA

SEQ ID NO: 245052 - protein, 369 aa, unidentified
MKKNSKNSKENARRKALQARSGQTRLTVGIDLGDEWSQCCFLDDKGEIVEECRVKTTREAVKARFGELKPALIAIEVGAHSRWVSQLLSELGHEVIVANARELRAITGSDRKSDRVDAEKLARYARVDPKILRPLRHRGEPAQVDLLVLRGRAVLVKTRTQIVNSVRGMVKSFGYRMPTCSTEKFAQLKGLVPLLIKESLAPMMEALEQVQKKIEEYDERVKKLATEKYPETKVLRQVWGVGEITTVSFVLTIEDKERFGKSRDVGPYLGLRPRRSQSSESDPELRITKAGDCFLRSLLVECAQKILSEKAPDTALKQFGKRIEARGKKKAKKRAIVAVARKLAVLLHKLWVTGEVYEPFPGAKERKAA

SEQ ID NO: 245053 - protein, 385 aa, unidentified
MTVIIGMDPHKRSATIEAIDAQARILAAGGYGTDTAGYAEMFSAGQQFTDRVWAIEGCNGVGRHLAHRLVHDGETVIDVPSKLSAQVRVFATGNGRKTDPVDAHSVALAALHAPNLRRVEADPELVALGVPADRRDQLGRARTNTINRLHRLLLELIPGGAKRFLTAIQARELIAAITPRDPVARVQHRLIVELIEELEALDRKVKAADKELRQLVVDRGSTLMQLHGIGPSSAARLLADTGDIHRFRNRDRFASWNGSAPLDASSGAQQRHRLSRAGNRKINRVLHIMAVVQLRHPTAGRVYYDTRRAGGKTSMEAMRALKRRLSNVLYSQMLADQQRRELAGPGGQSGTTTDSSVTGSNPHTGPSDKPHPGPALKANPSASRA

SEQ ID NO: 245054 - protein, 363 aa, unidentified
MPMKKPAQHFIAEVPRSITKVGMTIGIDLGDVWSHYCTLNEDGEVVDRGRFRTTPSGVEKWFTDLPKARIAMEAGTHSIWVSEQLREMGHEVIVANVRELRAISHSDRKSDTVDAEKIARYARLDAKILRPISHRTVAQQEALTLIRARNLIVRLRTAAVNAVRGLAKPCGYRLPASSTLCFAKRCVAVLPPGLAQALGPVLEQIAEMTKKVKHYDQLIKRLTETEFPETQALIQVYGVGQLTALTYVLTLGSKERFQRSRDVGCYLGLRPKRSQSGDRDPQLGITKAGNIYLRTLLVECANHVLGPHGRDSTLRQWGLHLASRGGKQSRNRAIVAVARKLAVLLHRIWITQEPYIPFYGVAA

SEQ ID NO: 245055 - protein, 368 aa, unidentified
MDTAYCTTIGADVSDRTTKICVMSKESGKPKIVRETTIPTTPDGFRAFLEGQDKSATLVFETGTHCRWIDKVGTGMGFKTIVANPARLRMITESNTKNDKNDARTLARIALADAELLHPVRLRDDEHQKMVNLHEIRDLLVKERTAEVLQIRAIAKSMGFRIPDCSAECFNNIAKNSMPKELSDIVWPLMKELKSKAVTIKTVEKQMQRLAKSETFKAQVERLMEIPNVGFITATCFVAVTGGDMDRFDRPRDIGPWLGVTPRQDQSGDIDRQCHITKAGSKMLRWKLAECAQRVLQKNSADTDLKVKGLRICARGGKIAKGKSITAVARGLAVLMVAMLKKPNAQYVPLSDAKAKELEQIRAAMTAA

SEQ ID NO: 245056 - protein, 363 aa, unidentified
MDNRITWVGMDVHKENIVVTAIPHDSDRATAHFEIPNTDAGVHRLAKRLREMGDVRCAYEAGPCGYDLRRFLASREIPCDVVAPSLIPKKAGDRVKTDRRDAEKLARLHRMGELTPIRVPTQAQEALRDLVRTREDAKEDALRRRHRLLKFLLRQGRRYEGKSWTQRHWNWIRCQKFDDSNAQAVLTEYLVALEQELERIQRLNAMIEEESRRPEIAPAVARLRTLRGVDTLTAMTLVSELVDFSRFATAHELMSFTGLVPSEYSSGGKERRGRITKTGNAHVRRVLVEAAWHYRHAPTGTGVSLRKRREGQPPGVLEIARRAELRLCRKYRKMTAKGKNSRLTVVSVARELAGFVWAIGRSR

SEQ ID NO: 245057 - protein, 346 aa, unidentified
MLYSGIDLHKHSLVIHTVAEDGTRVREAELATARPALSAYFATLPGPHRAVVECLGSWYWVRDLLAPEGIDLRLAHAKYLKAISYAKVKTDRVDARTLAQLLRVGLVPEAHMISPELREVRDLLRARLKLVTRATRARHAIGGLFMQYNVRAAGELPALVQFQVRMLEDEHALLAAQVKRCERELRPRLLPREDVQRLVWIPGIGAVIAYTLVLEIDDVHRFPTARHFHSYCRLVPGADNSAGKTRHKRSRDGNRYLKLAFQHAAVRAIQYVPEIKQEYQRWRRRKGKAIARALVAKELATIVYAVLSKGEPYNGTFRGHVLTQAKRRQWPRLASPPAELTPRKRP

SEQ ID NO: 245058 - protein, 337 aa, unidentified
MYYVGHDGHKDISVFCITTASGNVKETFEVPATPEGMDVLIEKMKGKKFKVLAEASTYTIDLHDHLVSKGMESYLAHPHTLKLITESCRKTDRNDSKTLASYLRLWDRHELDISISFIVDGDNRSLRELCRLRESISEMKGSTMQQIKSHMRINGQYVEFEDLKTIKARKHIRENFCGDLCLMMLLDMYVVFEDKGKILDAEIERQFGDREEVRLLATIPGVGITTAAQLLSMIVDVHRFPTADKMRSYFGMAPIVRDSGGFLKHGHITRRGDPMMRKILSRVVAQMIKNAPNDNLAVYRESHRSAMRPGMLMVACMNRLLDIIYAVLVRGTPYIHM

SEQ ID NO: 245059 - protein, 385 aa, unidentified
MVTGITAYKRRSQMNNTTVYVGMDVHKESFTLCAYTLEKEKGSYSRRTPADYKEVLKYLEFLRTVYGNDTIFVCGYEAGCLGYTLYHQLTDHHVDCVILAPTTMLEQRGKKRIKTDKRDAEIIGKCLAQHNYSPVHVPTASDEEVKEFLRMRDDHKLALKKVKQQILAFCLRHNYRFDGNSHWTAAHINWIKSLTPEALYKEILDEYLLTYTILSDKLERLDKRIEELAAKAEYKEAVKKLCCFIGVKTHTALSVIVEVGDFKRFASAEKFASYIGLVPGEDSSGDGQTRLGITKAGNRHVRMLLTEASQCYSRGQIGYKSKALKARQDGNTPQVIAYADKANERLRRRYYKMVLSKCKKHNVAKTAIARELACFMWGMMTDNIA

SEQ ID NO: 245060 - protein, 355 aa, unidentified
MKRTTKYVGLDVHQATTIASVRDRGGRVIARAILPTEATALTDFFQGMRGSVNVAFEEGTQAQWLHDLLVPLTHAVTVCNLRGEPRRPGNKADVKDADDVSRRLLKGDLRSVYHGSSDRRLLHDYSRAYLNALEDSTRAMQRLKALYRARGISVAGERVYSAEHREEWLNRLPDRGARLRAELLMMQIDLLRQLRPRAQATMVREARRDPVYEILRSIPFFGPIRVALLIATMKTPWRFRTKRNLWGYAGLAVVTETSAEYAYVHGRPVRRRRKPLTRGLNQNYNRVMKNIFKGSAAAALGRPGPFRDMYDRMIRGGMREDMARLTLARKFAAVALRLWKRGELFDATMLTVQSG

SEQ ID NO: 245061 - protein, 317 aa, unidentified
MAQTSTTTAGIDTSKAKLDIVVHGRDEGWEVANDLPGWRKLVQLLTKAGVKRVGIEATGGYECGVVEHLRAAGVIVLVLQPIQVKAFGRSRLRRAKNDTLDAALIAACAASLEEVRSAPDPRLAELAEQLTFLEQIEDDIKRFKTRLEHLDKPGLRRIVLDDIARLKARRLSQIRHIAKQLRAHHDLAVRLDLVMSIPGIGERTALALLVRMPELGRVSREEVAALAGLAPFDNDSGQYTGQRRIAGGRARLRRSLFAAALPAAFRWNKAVMALYARLTAAGKAHNAALIACARKLLIYANTVVQRGTPWTEKLLGV

SEQ ID NO: 245062 - protein, 533 aa, unidentified
MATKRNSRKSRTTGPARLGKPNGIIQARVQEAGPERFGVVAVDCAKARSKWMLCDFYGKVLVPPTEVEHGQAQMQLATARFKEACREHDIRDAVVAVEMTGTYHRPIQRAFRHAGAETRLVHPFASKHYRLPAHGDNKTDDNDLEGIFRAAVNGFGLLEPPWNETYQQLQLFARHRRDLVGKRAKLQCQIRQYLERCLPGYGALFPGDDLWTRPVAMAVARRAATAETIRDAKTAGVVRWLREEELRFQSRTVDKIVAWAGNAADADPLAAHLAGVWRSLHDDWRTKTERIIAVERQLAGILVKTPYVLTLSLPGINVASAAELGGEMGPIEHYAHARAVTGRAGLFPSRYQSDQVDRADGSLAHFRNVRLRAAWMRVADNLIKCNSHYHGKFQLWKQRRVDSRDIRCRVANRVVRPVFRMVSGGKLYRHPGGLDRGYVLDKLLAFHRAHETPPHEIVRDLKHAAEQIPKDAHLEEAVPLRTMHERCRRSRRKGPQAIGTILVAVLARLGVDGLESETEARGSLAAVSEPSSR

SEQ ID NO: 245063 - protein, 412 aa, unidentified
MQDLLNSAMGLDVHRDMIVACLAKGELGGEPEIEIRSFSTLIPEMRKLRDWVLETDCHHVAMESTGIYWQPIYEMLESCFDGEINILVVNARHMKNVPGRKTDMRDAQWIATLLRAGLLKGSFIPDKAFRELRHLTRYRKNIVHDITAQKNRIDKFLQSSGFRFTAFLSDAFGASGRNIIRYLIQHGSMDRVALDSCLKTKTRNRIDEILIALNGTLSPHQRGFLSMAFSHLESLETHKSVIEDAIAAEILEHGEALCLLCSIPGIDVTAAASIIAEIGTDMSAFPDSQHICSWAGLSPGNNESAGKRKSTHINKGNPYVKSMLCEVGWIISGKRTLYLSGWYWRVKQRKGAKRATVALARKLLTLIYTMLKTGQPYNEDRFEQRRKQSERKRENRMVNELQKLGYMVVAPE

SEQ ID NO: 245064 - protein, 402 aa, unidentified
MNAVGIDVSKGKSMVAIMRPFGEIVSAPFEIKHTASGINSLVELINSVEGESRIVMEHTGRYYEALAHQLSEANLFVSAINPKLIKDFDNDSLRKVKSDKADAVKIARYTLDKWQNLKQYNVMDELRNQLKTMNRQFGFYIKHKTAMKNNLIGILDQTYPGVNTYFDSPARSDGSQKWVDFASTYWHVDCVRKMSLNSFIDHYQNWCKRKKYNFSQSKAEEIYGKAKELVPVLSKDAITKLIIKQAVDQLNSASTTVESLRTLMNETASKLPEYPVVMAMKGVGTSLGPQLIAEIGDVSRFTHKSAITAFAGVDPGVNESGTYEQKSVPTSKRGSADLRKTLFQVMDVLIKTHPQDDPVYQFLDKKRAQGKPYYVYMTAGANKFLRIYYGRVKEYLSSLPES

SEQ ID NO: 245065 - protein, 462 aa, unidentified
MPKRKRKSIQGAKPVDPLSQVKLNAAGLDIGAEEIYACVPADRDDQAVRVFGTFTVDLNALADWLKTCGIETVAMESTGVYWIPVYEILESRGFEVYLVNARHLKNVPGKKTDVLDCQWIQQLHTYGLLQRSFRPPDEICALRAVVRQRENLVRYRSAHIQHMQKALQQMNILLTQVVSDITGVTGMRIIRAIVGGERDPQILARMRNHQCARSEAEIAAALQGHYKREHLFVLKQSLDQYDFYDRQIRECDAELQALYAALPSGSDEGNDAPPPPKPRGGKPRKNQAHFDLASTLFRIVGVDLTAIDGIDALTAQTIISEIGLDMSKWPTVKHFTSWLGLAPHTKKTGGKVISTRTKKTQNRANTALRVSAQTLWRSKSALGGFYRRMRARYGPAVAIVATAHKLARIIYRLLKFREAYVDPGEAYYEQQYRERTLRTLKRKAASLGFALVQAVPEPGLVS

SEQ ID NO: 245066 - protein, 364 aa, unidentified
MKRKLYVGMDVHKETIQIAYLTSNSKEILKEQQIKHNEVQIKKFIKKLKSEWNEIHSCYEAGVTGYPLYRYLKSLGVNCILVAPGKIPRQSTDKIKTDKRDAIKLARLMRSGELESIHVPSEEDEAVRDYLRSRDSLRLDLGRNRQRLMKFLLRKDIKYSTTKYWTVSHYKWLNNLHFNNEILQETFNDYYSRVRVQEENLKSMDKKIQEIAESEPYQEKVGILRCFRGVDYLTAMFLLCEVNDFKRFKTAGSFMSFLGLVPGEYSSGSKRKQTGITKTGSPRLRRILTEAAWQHRFPGTGSKIITARRSGQPALVVALAEKASLRLHKKFRNLQLRGKTPQVMITAVSRELSGFLWAAMNLVA

SEQ ID NO: 245067 - protein, 368 aa, unidentified
MRKSIMYVGMDQHKESIEIATADEGRDGEVRRYGRIDGELSSLQRVVRKLLSSGKELQFVYEAGPCGYHLYRYLQTQGLKCSVVAPSLVPKKLGQRVKTDRRDAVNLARLVRAGELTAVYVPEIEDEAIRDLSRAREDAKRAETRARQQLLGLLLRHGLKYGGKTTWTQAHLRWLARVKLPEPAQQIAFQEYVEAITEAAARVERLTTQLRMVVADWRCAPLVEALQALRGVSFLTAVITVAEIGDLTRFTPRQLMAFLGLVPSEYSSGSRRHLGAITKAGNGHLRRVLIESAWAYRLPARVTRTIRARQEHLPKAVREISWRAQLRLCARYRHLSLRGKTKQLVVTAIARELIVFMWAIAKEVKISS

SEQ ID NO: 245068 - protein, 363 aa, unidentified
MHSITNTELSSLEGTRRQFNGGRCTIKLGIDVHQDFYVVVEQVGGTNPKPAQRFHKQAFLHWAAKLKQSAAEVHAVYEACGFGFTLQRQLAAIGIHCHVVCPQKLDERNKRVKTDGLDAKALCLKLDRFVQGNRDALALVRVPSEEEERSRAIHRQREQLVGARKRLEAQGRSLMLNHGVGPVQNWWKPRTFAALPVPHWMRELLANSQPILLALQEKIAALTLQLQSAAGLNQPRGLGKMTSVIIDREIGDWRRFNNRRQIASYTGLCPGEYSSGNTRLQSCVTKHGNPRLRAALVELAWRLVRFQPHYKPIVKWRATLAKGALATGAARKKAIVAVARQLAVDLWRIKTGRLRAEQLGLTI

SEQ ID NO: 245069 - protein, 400 aa, unidentified
MVSPQLQVAVDVGCRRHRVAVGNVAGAVLEEFDVEHNAAGLAEFFARIERLRAERGWPVAVAMEGYNGWARPLDRQVLLRGWRLYNVNNLKLARYKEIFPAPSKSDAVDTRRMLELFRLHGQLRVARNVLQEVAPVPLENDQLKRFTRRRRQLVGEKGRVLNRLQSDLQAVCPGLLSITGEADNLWFLNLLACREDIRKVVGLRRATLLSLQGVGQKYAAVIQGWQKQACFSAEAPWVGPMIVADARRVLELKGQIHALDHAIAGLVQRSEMAGHIDTIPGFGPTCSGELAGEIGTLERFRTEAGLAVYLGMATLDNRSGDSNGAKPPRQVNTRAKAAMMVAVARHVEQVPASRAYYEKKRTEGRTHNQAIRALGRQLVRVIWSMLKRGRDYELRAAVPG

SEQ ID NO: 245070 - protein, 407 aa, unidentified
MEVIFARCAGLDVHKQTVVACVRIAEGGTLRQEVQTFPTTTSGLLALADWLESFGVRQVGMEATGVYWKPVWHILEGHFELVLANAAHVKNVPGRKTDVNDAMWLADLLAHGLIRPSFVPPVPVQELRSLTRTRKQFVRERSAHIQRIEKVLEDANLKLGVVLSDILGKSGRAVLDAIVAGESDPERLLAYVSQRVKTPRAEVLEALRGHIRPHHRFMLKLHLDHIDSLDRAIATIEKEVGLSLEPFRAAARLVATMPGMSEVASHVVIAEIGIDMSRFETPGHLLSWACLCPRNDESAGKRRSTRLRRGGHWLKTTLVQSAWSAVRVKGSYLQAQFHRIRARRGAKKAIIAVAASMLTAIWHMLRDGTEWQDLGAAHFDRADAQKTANRLIRRLQQLGVKVQVATA

SEQ ID NO: 245071 - protein, 379 aa, unidentified
MKNVSIFVGLDVHKDSIDIALVEEDRTATVRFYGTVGGDLTDLEKAVRKIKKAHPGATLHFVYEAGPCGYGIYRYLTKAGHECLVVAPSMIPKRSGNRIKTDRRDSIMLASLHRAGELAAVFVPRAEDEAMRDLVRARQDAVKAERVAKQQLKGFLLRHGIKNAGPGDWKSSYMKWLAGIKMPNPTQQIVLQDYLNAVIDCSDRKMRFNAQIREVLPSWDLAPLVNALQAMRGVALMIAVTVVAELGDLKRFDTPRQLMSYLGLVPSEHSSGGTRRTGGITKAGNGHVRKVLVEAAQTYRLPARVSKILLERQEGLPKVIRDIAWKAQVRLCGRFRKMVARGKKHQTVVCATARELCAFMWAIAKEVSINTSSVATVSQ

SEQ ID NO: 245072 - protein, 382 aa, unidentified
MEMRFIGLDVHQKYAEGCEIGPGKQKRRFRIANTRESWEKFAQTLDPETRVVMEATGNAFWIYDILSDYPAQVVIANTLKTRAIAEARVKTDALDAQILAQLLAADFIPESWVPDKEQYQLRVLLHHRIRLAKIRTMLKNKIHAALIRNGIQSPWSDLFGKNGRKFLESVTLPEMEQIIVCSSLRLLDAVQKEMTALEADLFGRAKENPDVKLLMGIPGISALSALTILAEIGDISRFSSPKKLASYAGLVPSVHQSGKTRYTGHITKEGRSVLRWILVQCAQRAVQSEGKLRAFYLGLKAKKGHKIAIVATARKLLHVVWAVLVRQEEYRDLRKDLLDKKFKTMNRKAKKYEVTTDEFLRIIEDVGEIPDEQTPHWLQGAG

SEQ ID NO: 245073 - protein, 352 aa, unidentified
MRKECSTVSFKNQVIYVGIDVHKSSWQVSIRHCRHHLANFSMNPDALKLAEHLSRNYPEAEYRSVYEAGFCGFEIHRSLCGLGILNIVINPADVPTSGKERANKNDCLDSRKLARELENGSLEGIYIPEPANLELRNLTRRETKLTGNIVRIKNRIHSHLFFLGLKFRSWSGSSLKIMESDAVKRHDFALCSLLRELRFLRLEKLQVVRDEKECLKFLNREKTQENLQSIPGIGFRTAVVLQSELWDLKRFPDKDHLKSYVGLAPRLVGSGEHEEVKSAGNRKKKQLHYLLIESAWRAARFNLEYRARYGLLIAKGISPQCAITIIAKKLLMSIHAVWTQERNFKVLLPGTK

SEQ ID NO: 245074 - protein, 400 aa, unidentified
MASMTSPIPTTQAARMLFGGIDTHKNIHVAALLDSDGGLVGSASFPTTVAGYRQLLGWMRSFGTVARVGVEGTGSYGAGICRQLTSVGVEVVEVNRPDRSQRRRRGKSDVLDAAAAAEAARTGNRISIPKSRDGQVEALRMLRLTRASAVQGRTKAFQQLDQLIVTGPEQLRDQLRDLPKMGLIRCCAAWRSNSHNVADPMVAARIGLKKLARRYLALDEEITDLDKLLAPLVAELAPQLVAVRGAGTETAGQILVTIGGNPDRVHSEAAFAMLCGVAPLPASSGKTQRYRLNRGGDRQANRALHVIAITRKRCEPRTQAYLNKKIAEGHSDREAIRSLKRLIVREVYYLLRPNLTAAPVPPSRPASRRAGAVKVEPPTRGTTLTAPSTGTPSKMEESAP

SEQ ID NO: 245075 - protein, 391 aa, unidentified
MPTAAHLAEAPTAIQTNLAALFVSLELSRSVWLITSLSPGSGGKMSKHSVPAGDIAALLARFAELKQKTLARTGQSFPIVSIQEAGLDGFWLHRVLASEGIESHVVDPASIATSRRRRRAKTDRIDGEALLRALLAYKRGEPRVCVMVKAPTPEEEDRRRLSRERKVLVAERVEHVNRIKGLLFSQGVSGYEPLRRDRRKRLDELMIGDGRALPAHLKTQISRELDRLELLLDHIKAVEGERNALLAEQQAEAPPTVAPGKMLLDFRGIGPEFAAILWLEAFYRHFDNRRQLAAYAGLAPTPWQSGSVDREQGVSKAGNPRLRETLIQLAWLWLRHQPKSALALWFKERVSRNAGRMKKVIIVALARKLLVALWKYVTAGVVIEGAVFNAA

SEQ ID NO: 245076 - protein, 320 aa, unidentified
MKPETLSVGIDVSRDELVIAYADDLRPIQHIANTAAAIQRWLKSLPADTRIGLEATGAHHRLVAELAVAAGHVVYVLNPREVAYYLHSLRSRGKTDILDACGIARFVLNETVQCHPYVPPIALQRDITTLVQRRHQVMKNRIALRLSFSGINDCAKAVNQLLAAFDRLLADIDARLQALVRQDARLAAGRARLATISGIGPLVSTALAVRLSRIDYANSDALVAALGLDPRPKESGQFKGRRHLSKRGNPEERRLICMAAMCACRTTVWRPILDKLLAKGHPRTAAYCIIARKLLRIALAVWKSGQPYQPQLVGQTGQRL

SEQ ID NO: 245077 - protein, 456 aa, unidentified
MGDKGRRAADGGLKVVHARCAGIDVGKSEHWVAVDGSMDARPVRSFGGFTEHLESLASWLSSLGVDVVSLEATGVYWIPLFEVLDRAGFDVRLVDARATMQVTGRKSDVLDCEWIRQLTSAGLLRAAFRPSDRVCELRSYVRQRSRLAADRARCVQHMQKALAEMNVQLDSVLSDLMGATGQRILRAIVGGERDGAALAKHRDRRVKADEATVAASLRGNWRAEHLFALEQALERFDLLTAQIARADGRIVETVESLAGESRRPDGGDGSADGEPEAPPAKPARTAADRRLQGALRAMLGVDLTAIPGIGVGTALAIASEIGPDLSRFPNQAHFCSWLKLAPGTRISGGRPLRGPPPKRTNRAGQALRMAAASVRGSDSYIGACHRSRLRRLDSARANKATAHQLARLVYAMLTQGEEYVAREVDDFEAERRDRQIRHLKRQARRFNLALVDRDAA

SEQ ID NO: 245078 - protein, 494 aa, unidentified
MIKSVGIDLAGNGEHKVRCLDEKAEPCDGFGFETTPAGLAKLEERVFKDGSNPMVVFEPTGLAWVPVAVYLRARHPDCRLVRTQSRNVAALRKYLRRSSKSDKIDSLTLAKMPFVDAERLNDVFLPPAKIYAIQRLARQRRRLESDMAARKTRIISILDGYLPGVRLAFSTLWAPQAKAFLSSRLNPFAVVQDGEKALDRFLTMARSRHRKDTAESHALYIACQAVAMIYERSLSAGTINDDFFTALEEELGRELRLMDAEEAESQSITQRLKELYQELHPSDNLCTIPGVGEQTAPVFLAVVGDPARFHSQSAFANFNGVVPNSKQSSQTESKGLRMTKAGPAIMKWALYQSGQIGRRCDPQLASLYYREMVHNGKNHKQAMGAVMSHIGARILAVLRENKPYELRDVQGKPITWDEAKKLIQLNYHVPEEIKRDRRRRRTLGDSVNRRLRARREMLEAEYARQPKLLNLLSHLPAISLTETNKEVNKKPNPS

SEQ ID NO: 245079 - protein, 336 aa, unidentified
MKEQQIKHNEVQIKKFIKKLKTEWNEIHCCYEAGVTGYPLYRYLKSLGVNCILVAPGKIPRQSTDKIKTDKRDAIKLARLMRSGELESIHVPSEEDEAVRDYLRSRDSLRLDLGRNRQRLMKFLLRKDIKYSTTKYWTVSHYKWLNNLHFNNEILQETFNDYYSRVRVQEENLKAMDKKIQEIAESEPYREKVGILRCFRGVDYLTAMFLLCEVNDFKRFKTAGSFMSFLGLVPGEYSSGSKRKQTGITKTGSPRLRRILTEAAWQHRFPGTGSKIITARRSGQPALVVALAEKASLRLHKKFRNLQLRGKTPQVMITAVSRELSGFLWAAMNLVA

SEQ ID NO: 245080 - protein, 410 aa, unidentified
MEVLHPVCAGLDIHKESVVACVRYMAQGKVTTVVKTFKTTTEALLALSEWLAQHSATHIAMEATGVYWKPVWHILSDGEFQLVLANAAHVKNVPGRKTDVNDAMWLADLMAHGLIRASFVPDEPTQQMRDLLRTRKQLVRERSSHTQRIQKTLEDANIKLDTVVTDILGLSGRRILEALIAGQTTPQALATLAHRNIKASTADLEASLRGRVTAHHRFLLKLHLDQIAAIDVAIASIDKEVEGNIEPFRQAIEQLSAIPGFSQLAARVVVSEIGIDMSRFETAGNLVSWAGLCPRNDETAGKRRSTKMKKGAPWLKTVLIQCAWAAARTKGSYFQAQYHRLRSRSGAKKAIGAVAAALLTTAYHMLKNGTLYQDLGPNHFDQQAKQRHVLRLLNRLENLGFEVQIKPKAA

SEQ ID NO: 245081 - protein, 414 aa, unidentified
MEVLHERCAGMDISKKDVKVCIRLPGGRGGRYRNEVTTFGSMTAQILELRAFLIEQQVTMVVMESTGDYWKPFYYVLEGGPFELMLVNPRHVKGVPGRKTDVSDAQWLADLAAHGLVRGSLVPPPPIRVLRDLTRTHADLTKDRTREYNRLESVLQDAGIKLTSVASKITGVSCRLMLDALVAGERNPKVLADLAKASLREKRDQLTLAMTGRFTDHHAFLVRLHLHVIDEQTAAIDEVTTKIEVVTEPFRAQIALLETIPGVSTQIAYVIIAETGGDMTKFPSAAHLASWAGVCPGHNQSADVTKKAKTRPGNSYLKGALGQAAMSSMQVNDTFLQDRHGRLRNRIGGLKTIVALEHSILRSAWHMLSNNQPYRELGAGYHQRRHPQRAIQSIKRQAARLGYNVRFDLIPQPI

SEQ ID NO: 245082 - protein, 385 aa, unidentified
MQKLNDLSRSLTPLDPDGTLIAVIEMSQSSWLVAGIVPGIERHPLKKLEPNEGELLRLLVRWRAEATKMGCTITRIAVAYEAGRDGFWLARWLRARNIETYVIHPTSVAVSREHRRAKTDRLDTGLLKRVFIGWLRGEPDHCHMAAIPTLAEEDAKRPNREREGIVRERTRIVNRMKSCLARFGVRNFKPTLRKAPERLATLVTPEGVPLPPNTLLELRRDMARLRFVMDQIKQVEDARAQRLEQAPQEKTHAMVRLLAGVIGVGIETADMLVHEILSRSLRDRRAVARYAGLTGAPDESGSKRQEKGLAKAGNARVRRGMIQLAWRFLLFQKDSALAQWYRARTESGGKKRKTMIVALARKLLVALWRLVTTGEVPAGVVLRAA

SEQ ID NO: 245083 - protein, 335 aa, unidentified
MQIYGIDLAKEKFDVSFFDLTSKKVSNQPSHKVVKNNLKSIGRFLETLPSDAVLVAEHTGVYGDTLLKCCMDCNVKIAFVGGYVIHRYRATPDRAKTDVLDCALLREFGERYPDKLKYKTFPEEALYELRQLARHREMLVEQRKQLITADRSEDCRPIRSLAVKRSMDRIKEMLDTEIAETEKEMLKVINGHESIHHNYELVKSVDGVGLITAVELLVKTENFTKITTARQYSAYAGTAPYEKSSGKMDKGAHISKIGNRRSKTLLYICAESARLHNKEIKLYYERRTLIDKKPRHYVLNAIANKLLRIIFTLVEKGEYYDANFIRQDPRVVKYN

SEQ ID NO: 245084 - protein, 433 aa, unidentified
MGLIVPTVMPPERADQPPSYDGFVGIDWGSQQQQVSVLDRDRRRMGERVVDHDGASLAQFVAWLWGLSAGQPQRVAVAIEVPRGAIVEGLVERGFHVFAMNPKQLDRFRDRHSVAGAKDDRRDAFVLADSLRTDQPSFRRLRLDDPQLLVLRELSRAEETLLEAFRRSANQLRDQLHRFYPQMLQLCSAADAPWLWDLIDLAPTPAHAARLREEQVQGVLKAHRRRRLKAHEVLACLQTPARPVAPGAVQAAQAHCRFLLPCLRGLAEHLQACGQQVGALLHTLAEMPGAGEGPSDVAIVQSLPGVGRKMTAWLFAEAAQPLAERDYQVLRTHGGVAPVTKQSGKRRVVVMRRGGNPRLRHALYHMARVARQRDAHFNSVYAALRAKGQRHGQALRSIGNRLLRILMAMLRHRTCYDASRIHREPVVQMGETI

SEQ ID NO: 245085 - protein, 377 aa, unidentified
MKRVKFVGMDVHAETIAVAVAEQDGEVRSLGVLPNREDAVRKLVRKLGPVEDLRFCYEAGPTGYALYWQLAKMGARCAVVAPTLVPVKAGDRVKTDRQDALKLARNHRAGELTAVWVPDAEHEALRDVVRAREAAKKDQLRARHRLNKFLLRHGRRPPLGIKPWTVKYLEWVKRDVHFSLPAQEITLLDYLHEVEHAAGRIARLDAAIAEAVKLAPPKMRAMIAALQALRGIAEISAVTVAAELGEVTRFSKARQLMAYGGIVSRENSSGERIRRSSITKTGNAHLRRVVVEAAWAYRHRPSVGATLRKRQEAVSEKVKEMAWKAQHRLHARYGKLLAMGKNKGVVVTAVGRELLGFVWAIGVQAEAEHQERLQRVA

SEQ ID NO: 245086 - protein, 320 aa, unidentified
MMAQDDLVVVGIDVAKDKVDACIRRFKLRQTFPNTLQGRRKLTVWLRKYQVGKAVMEASGGYEREWRNVLHSAGIEVRIVDPRRVRNFALSARRLAKNDPIDAEMIAWFAETFSQAPGQVPDAAREELAALAKARKALVDVKIRLQAQNEHAAPEPARKAHARILKSLAAEIDKLEAAISAKVKATPEFAERAEIIQSVPGLAQTTSAILIAGMPELGQVSDEVAAALIGLAPYDDDSGKRRGERHIKGGRRWVRNAIYMPCLGAATQNNPVLKAFYQRLIAKGKEPKVALVACMRKLIIVLNTMLARRQKWNPGCHAVA

SEQ ID NO: 245087 - protein, 347 aa, unidentified
MELYAAIDLHSNNSVVMVIDAQDRTLFAERLPNDLSAIVAALRSCPGTLHGVAVESTYNWYWLVDGLQDAGFTVHLVNTAAVKQYDGLKHGGDFSDARHLAHLLRLGILPVGHIYPREQRAVRDLLRKRTQLVRQRTTQILSMHNLIARNLGARMRGDSIKRMEPKDVDAMELLEEQKQALKANLAVMDCIDEQIQQLERSILAKLKPREDFKALKTVSGVGDILALTIVLEAGDIDRFAGPGNFASYARMVDSRRESNGKKKGEGNAKCGNKFLAWAFIEAAHFAVRFDATIKRWYQKKCASRLSVIAIKAVAHKLARALRPYREPQGVGSPFGEATDLCGRLAWL

SEQ ID NO: 245088 - protein, 318 aa, unidentified
MYQIVIGVDIAKLKFDVASLNNGKYKHKTFTHNEQGYEQFINWIALLFANDKPLICMEATGAYSLPLAEFMVTQGYPVSVVNPAKIKFANSELSRTKTDKADAKLIARYAVTMQPPLWTPPPQNIRVLQALTRRVEHLLEMIQMERNRLETATPTIVDSITAVLATLETELKTTRQSIRDHIDNDPDLKQRHDLLITIPSIAEASIPHLLTALSDHHGFTSAKQVVAFARLAPAVRQSGQWSGKTHIAKNGEPTLRKALYMPALVAWRHNPPIRAFCQRLKANGKNGKAIACAAMRKLIHLAFAILKSGQPFNPNYAV

SEQ ID NO: 245089 - protein, 345 aa, unidentified
MKHYCALDVSVKETAVCIVDETGKICRETKVATHPDDLILVMKDPKWQIERIGLEAGPLSQWLYEGLAKAGLPVICIETRHAKAFLKAQPNKTDRNDARGIAQMMRVNLYRPVHVKTLTSQKHRALLTARKLLQEKAIAIENDIRGLLRNFGLKVGLVGKVKFEERIKELVEDRPELREIMQPLLTARKLLREEFTRLHKKVLDLVREDEVCRRLTTIPGVGPVVALTYTATIDIPARFAHSKAVGSVLGLTPRLNESGESKRVGRVSCCGDAMMRSLLYEAAQVLLANVKKWSWLRAWAMNIAKRRGRQKAVVALARRLAVIMHRIWSDGTEFCWTRESLPVAA

SEQ ID NO: 245090 - protein, 337 aa, unidentified
MGPYCGIDLHSNNHVLTVIDDADRRVYERRLPNRLAITKAALEPYRAELVAVAVESTFNWYWLVDGLMEAGYTVRLVNTAAVRQYEGLKHTDDEHDAFWLAHLMRLGILPTGYIYPKSERGLRDLARQRMRLVQHRSSLITSVQNQVWRSTAVRLRSDTIKGRGKQPWPEISDPDLALSVKVGRAAIDTLTVQIERLEKLILKRVDLSPQFRMLKTVSGIGPILAMTIALEVGDIGRFTAVGEFASYCRCVDSQRLSNGKKKGEANRKCGNRYLAWAFMEAAHFAIRVLPAAKRFYERKRRQRHALIAVKALAHKLARACFYVLRDQVPFAPERLFA

SEQ ID NO: 245091 - protein, 451 aa, unidentified
MSDLPVLDARAAFVDVGSEQMHVSVAGGPPQVFGAVTAQLHALRDWLKAQGVRSVAMEATGVYWLPLYGVLEAAGFEVRMVNGRQTRNLPGRKTDMQDCQWGATLHSHGLLRAGFVPPAHIRRMQDYMRLRADHISMAATHVQHMQQALERMNVKLHDVIAKLTGVSGLAVVRAILGGERDPQRLLARCDTQIQRAKAERVKESLRGTWTEEHLFALSQALQSWEHYQAQIAECDRRVEALLHDIDPGQPPNACALATRPSRPGVNAPNIPDLRAILAQICGGQDLTQLPAHTEYGVLQVIAEVGTDLTQWRTEKHFTSWMGLAPGSHQSGKRKRSAKRSRNRAGRLFCVIARSLARSKDIALGGFYRRMAARRGGLVANIALARKLAALFWRVMVKGMDYVELGLQQYEAKVLETKQRSLRRLARQLGQQLVPMTTPAPTKGPSANNATL

SEQ ID NO: 245092 - protein, 346 aa, unidentified
MKILALDLGKYKTVGCEYESESGAHRFKRDFTTPAALQKMVQEVNPDRVVIEVCSIAGWVCDLMGSMGIAIQVANTSDDAWRWRKVKQKDDRRDALKAARLSAVNQLREVYVPSRAVRQWRALITYRRQLVRRRTQIKNHIRDLLLREGQVLARGSQCWNQVGIELLTSLARPLSEVGLTELWRGELHEELQQLELLQARLATVEEKLNAVGKADARVQLLRTAPGVGPRLAEAIVALLDKPERFRKASQVSAYIGMVPKSFDSGESERRGHITRQGSRLVRALLVEVGWAGLRHNAWVRQTYQRLSGGKKARQKIAIVAVGRKLLVRCWAMLRDNRAWDWQPQIT

SEQ ID NO: 245093 - protein, 337 aa, unidentified
MDYFAGLDVSMEETHVCVVDRDGAVIHEVKVPSTPADIKTALAGAPACRRVVFETGRMAPMLHHGLTGCGVPVICIESRQARQALKSFATHKTDRNDARGLAHLARTGFFKPVHVKSLSAHAIRSLIIARKKLVGQRVTLENQIRGLAVVFGVRLPRALSSAFIAKALRASEGIDGLSAAMRGLVAARAAVLSAIAAIDADMKKLVRASHACRRLMTIPGVGHLTALAFAAAVDDPERFRRSRDPGAYLGLVPRRYQSGEVDYTGSISKCGDRRMRTLLYEAANVILTRYKQPLKLKDWALAIARRSTLRKARIALARRLAIIMHAMLRHGTEFKPA

SEQ ID NO: 245094 - protein, 356 aa, unidentified
MSRDVKYIGMDVPKEAIVIAVLNDGGKLAMESIIETKASTLLQFIHGLRGELHVTWEEGTWAAWLYDLLKAHVHQVLVCDPRRNALLKEGNKSDKVDARKLADLLRTGMLRPVYHGEHGLRTLRELGRSYQTISKDLNRVMNRVKALYRGWSIPCAGTQVYAPRCRQEWLDKIEHAGVRRRAELLYEQLDGLQALRRTLRPELLAESRKHKAAKLLRQIPCIGPIRAARLIGLMQTPHRFRSKRQLWTYSGLGIETHDSAQYCYVNGQLQRSKKPQQIRGLNRNHNHEMKEIFKGAATRASCGVGPLRDFYVTLLDKGMKPEMARLTLARKIAAIALTLWKKEERFDAEELKTQAA

SEQ ID NO: 245095 - protein, 347 aa, unidentified
MRFYTKQHKFYCGIDLHAKKMYLCILDEAGEVRLHRNIKTDREVFLKVIEPFREDIVVAVECMFTWYWIADLCKEHSIPFVLGHALYMKAIHGGKAKNDKIDSHKIAVLLRGGMIPMAYTYPAEMRATRDLLRRRNHLMRKRAELYAHIQNTRSQYNLYDFLGRIAKAQNRAGVAERFEDPSVQKMIDADLAVIEAYDPIIAKMERDIISMANHHDPVAYALLKSIPGIGRILGLVILYEIETIKRFPSVQDFVSYCRLVKCRKESNGKTYGTSGKKIGNAHLKWAFSEAAVLFLKGNEPGKRYLDRLTTKHGKGKALSILAHKLGRAVYFMLKNKQAFDQNKFLGL

SEQ ID NO: 245096 - protein, 372 aa, unidentified
MKQSTTTYVAMDTHKKTISVALAEGGRRGETRFIGEIPSRPEAVAKMVDRLAKKHGQLAFCYEAGPCGYGLYRQITMLGHECVVGTPSLIPTRPGDRVKTDRRDAVTQASLFRSGELTPVWVPDDAHEAMRDLSRARQAAVEALRRARQQVLSFLLRHGRVYSEGEHWTRRHRLWLAAQRMEHPARQIAFEELVQAMDEAKGRRDRLAKQMEELLPSWSLAKVVAAIQALRGVAMISAITLVAEIGDFKRFANPRQLMAYLGLTPSECSSGAKTARGSITKAGNTRARRMLVEGAWTYRLPARMGAEILKRNETLPQAIKEIAWKAQARLCARYRRLAKAGKPTNVVCVAIARELAAFVWAIAPNDAIAAVA

SEQ ID NO: 245097 - protein, 356 aa, unidentified
MTGPKHQKEKRSMDHCAGLDVSVNETSVCIVDDSGRIIREVKVASEPGALLQVLKTGSYRFKRIGLEAGPLSQWLYSALAEASLPVICVETRHMRAVLKTQINKTDRNDARGIAQMMRAGLYRPVHVKTLRSQKLRMLLTHRKLLQSKAIAIENDLRGTLRNFGLKVGMVGTTKFEARIKELVENLPDLAALVEPLLVVRRVLREQLGILHRRLLVVVRDDEVCRRLMTIPGVGPVVALTYRATIDVPARFRNSRAVGAMLGLTPCKYQSGESDYTGGISKCGDEMMRVMLYEAAQILLTRTVKWSWLKAWVMTIAKRRGMKKAIVALARRLAVIMHRIWVDGTEFRWTRQETAAA

SEQ ID NO: 245098 - protein, 341 aa, unidentified
MEQYIGLDVSLKETAISVRQNGKRIWRGKCPSDPQLLAEVIRKRAPNAMRVVFETGPLSVWFYHGLTAEGMPAICIDARHAKAALDMAPNKTDANDADGLAHLAEVGFYREVRVKQYDSMLTRTLVSARGQLIKIVTELSNQIRGLMKTFGLVVPKGAGRVFEANVRNLIAGNSGLAQIIVPLLEAWRGVRGRAAELDRQLVAVARENTPCRLLMSIPGVGSVVAASFAAAIEAPENFRTSRSVGAWLGLTTRRYQSGEVDFDGHISRRGDNHLRGLLYQAATVILTRSTADSTLRSWGLKLREKVGFKRAAVAVARKLAVVMHTMLKTGELFDRTAGASA

SEQ ID NO: 245099 - protein, 282 aa, unidentified
MNQRTSVGLDVHARSVVACGLDGDTGELFERRLTPNHREILEWIGTLPGRVAVTYEAGPTGFGLARFLLAAGIESLVAAPSKLQRPAGDRVKTDKRDARHLARLLHLGQITPVAIPDVEQEAARDLVRAREDVRGDLMSARHRVSKLLLRQGIVYYEGKAWTRVHDTWLRRQRFDAPGLQLAYDTAYDTMTAAVDRRDRLDAAIAEMAATSIHTPVVTRLGCLRGVAALTAFALAVEIGDWQRLTGRSIGAYLGLVPSESSSGATRSQGAITKTATGTRADC

SEQ ID NO: 245100 - protein, 416 aa, unidentified
MNGKSPGTLARFIGIDLHKHYLVVGGVNAGQEVVLPPRRVNLGSWLKWAEANLMPTDAVVLEATTNAWEIYDQVAPLVGRAVVANPVQVKWIASARVKTDRVDVGRLACLLAAGLVPEVWVPPVEVRELRSLLAHRRRLVKMQAMIRNRLHSMVHRHNLTLPKGEAFSHEHRGWWLGLEISRTENLRIRQDLATMDHLEPQIAEIDSELHRLSTCAPWADQVPYLLQLPGFGLITTMTLLAAIGDITRFESARKLVGYSGLGAGVHASGQTHHSGRITKQGRAELRWALVEAAWVAVTTHAHWKREFERLSRRMSPKKAIVAVAHKLLVVVWHVLAKRTADTEAVAEMVASKLIGWSGRLGEEGRGGLATRQFVRYHLMKLKLGEDLKGVRQGRTTRLLASPEEMLTLRPELTSVR

SEQ ID NO: 245101 - protein, 350 aa, unidentified
MKSRVTVAVDLAKTVFQVVASDERGNITERRRLTRPQFERFWEQRPPCLVLMEACGSAHHWGRWLMARGFDVLLLPAHSVTPYVQRSKTDERDAEGLLEAVRSPRVHPVAVKSRDQQQIQALHRIREQWKRTRTQRINGMRGLLREFGLICSLGAERLMKSLPVLLQDHAEEVPPRVRTLLWQMHQEVRDLEDRITGVEQELEEIARENQIIQALREIPGVGLLTATAMYAAIGDIQSFKSARHLASWLGLTPRERSSGTKRRLGRISKQGDVYLRMLLIHGARSALLVAQQRQRAEEPISYLQSWALKRAATTHANKAAVALANKLARVIWAVWRRQTRFDGNYLPMAA

SEQ ID NO: 245102 - protein, 345 aa, unidentified
MKNLFIGIDFSKEKIDATIIIASGLEELYARVSETFSSTAAGYNKLLRWVEKNSNGIEQQDWLFCGEHTGDYSMPLSNYLYGKGYDMWLENAKCIKDASGLRRLKTDRADSMMIAEYAMRNHDRAELYVPLSKSLYQLRELFLFRQMLVRQRHGFQIRRAEKNLTLEKCPAKTRISQIEKHMVHECDKQIEKVEKLIKEIVDSDEELKHTYELITTVPGIGPQNAVCLLVFTNNFKRFDFNARKISCYYGIAPFGRESGTSVHSTPHVHYMANKLLKAILTQAALASVKFCATFREYYNRLIDKGKKRQIALNNVKNKLIHTITAMVKNNKEFELNYVNINKTIV

SEQ ID NO: 245103 - protein, 318 aa, unidentified
MSEAMFIGIDVSRDTLEVASSAQAASWRRANDTAGIEALCAELAALAPALVVLEATGGYEFEAACALQASGLAVAVVNPRQARDFARAMGALAKTDSLDARMLAAFARVLHQHPERERFVKPLADAELQCLQALVLRRRQIVGMLTSERQRLRMSHASARPSIEETIAFLKKQLDGIEGQCAGHVQAHHGALAQALSSVKGIGAATVATLLAELPELGSLCRRRIAALVGVAPINRDSGQMRGQRSIWGGRADVRRTLYMATLVAVRHNAVFKTFYQRLLAAGKLKKVALVAAMRKMLTVLNAIAKSGKHWEDSLHTT

SEQ ID NO: 245104 - protein, 343 aa, unidentified
MGEVSTIGLDIAKSVFQIHGVDVDGAVVIRRRVSRAKVSEFFAALPPCLIGIEACPTAHHWSRKLQAFGHTVRLMPPNYVKAYLKRSKNDANDAAAICEAVTRPSMRFVPTKSEQQQSGLMLHRSRQLLVRQRTMLSNAIRGHLAEFGIISAKGRNGTVELLEVIANQEDDRIPAVARFSLEVLARQYAATAAEIGVIEKRIHAWHRSCEESRRLEEIPGVGPIVATALVAEVGDWRAFASGRSLAAWIGLVPRQHSTGGKERLGGISKQGNRHLRWLLVAGAMAVIRYARQHGTKRPWLARLMATRPIKVAAVALANKIARMAWAMMVRGERYKEPTLMIAA

SEQ ID NO: 245105 - protein, 315 aa, unidentified
MEKTTPVPEATYVGLDVAKDRLDYTVDGLRCDHVPNTASGHARLLATLQPLRGVRVICEATGGYERAIVAALLLAKLEVCVVNPGRVRAFAHAEGLLAKTDRLDAQLLRRFGEKVRPRLHAPMDQAAITLRELLDYRRQVSDQLVAVRNRLELAGPLLRTRLDGQVTFLEKELTATDRLIQEHIDHDENLSRKAARLRELKGAGPVLAATLLAYVPELGEIESPQLSALIGVAPFARDSGRSHKTRHVRGERGVVRHVLYMAAVAATQHNPVLRSYYTRLVAAGKPKLVALAAVMRKMLHVLNRLLADPNFALVR

SEQ ID NO: 245106 - protein, 366 aa, unidentified
MNTIYIGVDFHARQQTICYLKTETGELVTCELKHQDKEVVRAFYAQFSGQIIVGLEASGYSPWFERMLEELGCQVWLGHATEIRRRARWRQKNDRRDAELILDLMLHNEFPRLHRPAVQSREVLRMLRYRQKLIKMRTMSKNSLQAIALQAGLAKGSRLFTKAGQQELGTAEMSPVLHWQREHWLQLMEPLNQQLLETMVWFKSQSKDDDRITRLRTHPGIGLLTSLCIVHTLQPVSRFRNTRKVAAYAGFDPIERSSAERKCFLGISKAGSRLLRYLLVEAAQTAVRKDEDLKRFYQRLADRRGRPKAKVAAARKLLIRAYIMMRDEIDYAEFRHRAVAARLARRSQGPANVPEVLIGQPASPEQ

SEQ ID NO: 245107 - protein, 338 aa, unidentified
MTILMGCDQHRAQITTEWVDTSTGEISRARIAPADRAGVRRFLARFRGQELEVALEATTGWRFVVEELGRIGAGVHLADPAETAALRGNKKRAKNDRADARHLCQLLMAGRVPESWIPPDHILDLRARVRARHTLSEQRGEWQQRIQSVLYHHGCPQRGDLINGRGLEWLAAQPLSACAREQVTIALAMIDALDIQLAPLDKELRGYARRQPGCKALTRHYGIGPLTAVTILAELGDVGRFSSSREAVRYAGIDITVHASDQRRAPGRLSRQGPPALRWALFEAAQCARRRSSPDHGYYLQAAERLGGNRACLSVARKLLKRSYHTLRELGEEALQPA

SEQ ID NO: 245108 - protein, 424 aa, unidentified
MNCTQNERINQVSEQTLVIGVDIASELNYARAFNWRGIEKGKVFKFFNNLEGFQAFNEWAHQVMSANKLTNLIVAAEPTGHYWFGLADYLKDEKLKLVLVNPFHVNRAKELDDNHPSKTDAKDPKTIAKLVIEGRYMEPYIPEGVYADLRIMYNCRQKVTKAMISLENQLKRWFKIYFPEYLSVFGNLSGQGSMAVLEKAVLPEDIISLGVDGINKLWRERKLRAVGMKRAESLYEAAVKSIGRREGSVGGRAEFRMLWEDYCHKMEQMEKLNIELESLLHKVPQAEEVLKMKGIGVVSVAGFFAEVGDLRRFESPKQIQKLAGLAIRENSSGKHKGQTTISKRGRARLRAVLFNAAIALVGRNGAFKSIHEYYIGRKANPLKKKQSIVAVSCKLIRIIYAICRHKEAYDEAKMLRDIRREQLA

SEQ ID NO: 245109 - protein, 425 aa, unidentified
MSASDSLASPVEVSDFAYVVGVDIGSQQAVYCVCQPDKSQVVKPTEVANSRAGFEALDHRLRQLAVPPQRMLIGLEATGRYSENLYQFLQEQGYRLCLLHPRQTHQFAQQRGLRAKTDRLDATTIARLLLSGEARPGYVPDELISTYRELERLHSQLTDDSARYQNEIQALLVVLFPEFVQVFADPCRPTALGVLKRYPGAQAILDAGVEALTSTRRELAPRHYGRPTAQELVRLASQSVATPLASSGRALSLKVLCDQLEHTLTNLAQIAHELDQLLDRDHGASGLKSTPEFGRKTVAVLRAELGDVTRFQRVDQVVAYVGLDLQVRQSGKWKGQVKLSKRGSGRVRRVLYMAALRSLALPASAFGAYYRRLVARGLKARDALTAVMRKMLIVAYHLLRSNETYDPTKVCAVAGPPPHTPSSGS

SEQ ID NO: 245110 - protein, 334 aa, unidentified
MGRQYVGIDLHKYRSVIVRMDEAGEAAPAVRIDNDPVALAAEVAKAGEHPEVVLEATVGWYWAADVLEEMGATVHLAHPNGLNWGHRRVKNDERDATDLADMLRMGRLPEAWLAPPKQRELRELVRYRARLVQLRGGLKSQVQSVLTKQGIAQTRRNLWGAKADEHFSELQLDSTFEDKVTSLRILIETFDQEIAWAESEVLPWLQGDTGYHAIQEIVGIGPVLAAVFVAEIGDVTRFSSPEALSSWAGLTPRHRESDTKVLRGAITKQGSALVRWAAVEAISRKRDPVIAPLYASVAERRGRNIARVAAARKLLGLVYFGLRDGEIRCLAKAS

SEQ ID NO: 245111 - protein, 348 aa, unidentified
MPNYNQAHQFYCGVDLHARSMYVHIVNAKGKMVFEKDLPAEPAIFLDAVKPFRKNLVVGCECMFAWYWLADLCQDKRIPFVLGHALAMKHIHGGKSKSDKIDAAKLATMLRGGMFPLAYVYPRAKRQTRDLLRRRSFFVRQRAQLLAHIVNTNSQFNLPPLTKKLTYAANRSAAIAERFADPSTRLSITTDLRLIDAYDAQIAEVELQLLRTAKVDDPVTFGFLRTVPGIGPILGLILLYEIDQIKRFPEVGNFLSYSRLVRCSHESAGKVKGFGGKKIGNAHLKWAFSEAACLMLRCCGQAKLWLKRQEKKRGKRKALSVLEAKIGRTVYHLWRKQQAFDVKRFLQS

SEQ ID NO: 245112 - protein, 408 aa, unidentified
MNPLFVGIDVSSKNNVAYLMKPDGSKHSSFSVQNNLGGAKLLSERIVSALGSMQLERVVIGLEATSIYGDSLVYALREDGRLGRFQRKIHVLNPKQVRKFKEAYSDLPKNDWVDAFVIADHLRFGRIAKEVYMDDYRYQALRTLTRARFDVIQNLTREKQRFANYLFLKCSGMAQDKDIQNTSATTIALMEHFETVDDLANADLEELTAFITETGRGKFADPDATAKAVRAAAKGSYRLPKTVNDTVNQAMAVSIASMRALKGQVKVLDKAIEQQFEIIPNTLTSIPGIGKVYSAGIIAEIGDIHRFDSQASVAKYAGLVWNRSQSGDFEAEHSRMIKSGNRYLRYYLLEAANSVRRCDSEFRRYYDLKFKEVNKYQHKRALALTARKLVRLVFRLLKDNRLYIPPEG

SEQ ID NO: 245113 - protein, 406 aa, unidentified
MKTVIAFDVSKGKSVIVAYDENKEYIFESRINHTREGFILLQEKVDYLSKVYGQTPEFVLESTGVYSNCIEHYLSKLNYSYCALNPLEASVQTKLLRRNKTDVSDAHMLAKTHFSTNRRPKYRQDRYYVEMRAMSRHYHDIELEKNIYKNRIHKLLQETFPEFEKIFRHKSIMFYRIIQEFPHANSLINSSKTIVRNRLKKCTNKNYSIKKLEERAIQLKEAANNSVPSVRETSFTCKQVRRNAKRVLELEEEQQILIEEMALLSEGKTEYKILMSIPGIQKTTACRLIGELGDIRRFKNNKQLNAYVGIDIARYQSGNVHYKDQINKRGNKRLRGILFFMIVSMLGTKKQNHIVDYYYKLKKQPYSKHHKVATIACINKFLKFTHHLIIHEKHYDYGKATNTTQP

SEQ ID NO: 245114 - protein, 371 aa, unidentified
MNTVIDIGIDVHKDSYSLCSYSFATKRTFAQTRIGSDSKLVIKYVRKLQESHPNVEVLCGYEAGPTGYGLYRDLEKAGIGCVVMAPTTLPKASGNHVKNDRLDAMELSKHLAFGTYGAVHVPTSEDEAVKNYTRLRNTQVDALKKAKQNLLAFLLRSGRVFSEGRNYWTKIHYTWLKRQRFTDPVDQETFDEYLQEVHDQQEKVDRYNQRIEQLSQLEAYREKVARLRCFRGIETHTALSLVTEIGDFSRFANAQQFSAYLGLVPGEDSSGQRERRGGITKAGNARLRLLLIEGANATLRGGLYGQKSKRLKARQQGNDADVIAYADRANRRLHRVYNNLTSRGVIKNKATVAVARELACFIWGMMNNRID

SEQ ID NO: 245115 - protein, 344 aa, unidentified
MEQVYYAGLDIHKKIIAFCIKQADGTIVAEGKIDANRKALKQWAESTPGPWIGAMEATIFTGWVYDFLKPYARQLQVGNPLMMKAITAAKKKNDKLDARTIADLVRCNLLPCCYMAGEEMRDLRRVLRYRNLLVRQAVRMKNRMATLLMETGQEYNKKKLHGAKYFRELLEKLSDVPESFKEILQMSRGALELFESCQKRLLKGLVNNEVLRERVQRLMSIQGVGEVTALSWALEIGDVQRFSSIRKASSYCGLCSAQVESGGKITRMPLSKQRNKHLQSVLIEAAKLAPLYNQELADVYNKEQQRGNNHNQATITVARKLVAFLLAVDKSGKAFVKKAEKQAA

SEQ ID NO: 245116 - protein, 325 aa, unidentified
MHYLGIDISKQYFDAMLLTPTGEKHHRRFDNKHPGIQACLAWLQSQGVSELHACMEATNIYWEDLAEALYQAQHTVSVVNPSRIKGYAMSQMRRNKNDKLDSDVIVTFCANTKPEAWTPLPDSTRKLRNLARHRDSLQKTLTQQKNRLTNTQDEAVTSSLQRIIETLEAEIKQVEQKIDALIDSTPETQDAFELMCSITGIGAKTARKVLAEMPDIAHYKSANAVAADAGVTPAEHESGDTVRRRPRISKMGKASIRGALYWPAITAMKHNPPVAAFAQRLRARGKPNKVIIVAVIRKLIHIIYGVLKNKKPFDPNHGVKALVAT

SEQ ID NO: 245117 - protein, 345 aa, unidentified
MKISRIGIDLAKNVFQVHGVDEHGELVWKRSLKRATWIGVFFKTVEPGCEVAMEACTGAHHWARELQARGYKVKLIPPQFVKPFVKSQKNDANDAEAISEAMSRPAMHYVAIKTVEQQDIQAVHRVRSELMSHRNAKANQVRGLVAEYGLVAPQQLGPLRAAIPCWLEDAENGLTDRFRALLHGLWQDLANLDQRIKVLDTEIAAIASTHPDAKRLQQLRGVGPLIATALVAKFGDASHFKQGRQAAASVGLTPRHHGTGGKNRLFGITKHGDPYLRSILIHGARAVVSQAKQRDDRLSRWTTELAQRSHMNVAAVALANKTVRMAWAMLRNGTDYDPELAVAEV

SEQ ID NO: 245118 - protein, 373 aa, unidentified
MHKDTVVARLRCVSEPLADEVRSFSTTTSALLELNEWLGSHGMTHVAMEATGVYWKPVWHLLEEHFELVLANAQHIRNVPGRKTDVNDAAWIADLLAHGLIRSSFVPPRPIQELRDLTRTRKQLVREISQHSLRIQKTLEDANIKLGSVLSNVLGISGRAILNALIAGQNDPEQLADLAQGSARKKRTELVAALHGRIKAHHRRLLKVHLELIAALEQALREIDADVGKTLAPIYSSARLLTTLPGVSDLTAQVMVAEIGVDMARFPSAAHLISWAGLCPRNDESAGKRRSCARAPLGSRPHWSPPPRPQCGSRTPISRLSSIACARAAVPRKPSSPWPPPCSPPPITCSNTGSSTATSVPIASRAAIASKRS

SEQ ID NO: 245119 - protein, 343 aa, unidentified
MEVMIGVDPHKGSHTATMLDRTERELTRIKVRAGRRQVEQLLEWANGHEERTWAVECAGGMGYLLSQQLVAAGETVLDVPATLASRVRVLGTGQSTKTDPNDARSVAVAALHAPSLTMVRAADHVTVCRLLAKRHTDAARWRTKLCCRLHALVGELVAGGIDKEVVVNQARSLLDDIEPDGVAAVERHRQAVELVAEIEHLDVVLQDSRTRITAAVAASGTTLTEVFGVGPIVACMLIGYSGDPTRFTTASRYAAYTGTAPIEFSSGGRVTHRLSRRGNRRLNHALHCAAITQIRHRHSPGRGYYDRKLAEGHTPREAIRSLKRRLSDVVWRHLVADARRVAS

SEQ ID NO: 245120 - protein, 343 aa, unidentified
MDSYVGLDVSLREVSVCVVDEAGTIQSERTVAADPDVIAALVHAQAPTVRRVGLESGPTSAWLWRELAKRGLPVICIDARHAKAALSMQINKSDRNDAAGIARIMQTGWYREVQVKSPHSHAIRGLLNSRSLLVKVQRDLENQVRGLLKSAGLIVGRAKDGVFSARTKQLLAAHIDLAAIALPLLEAREAIHGQLVQLERRVRQLAKEHRQTSAFMTVPGIGPMTALAFLATVDDPRRFRRARAIGAYVGLTPRRYASGEVDWTGRISKCGDTMLRTYLFEAAGVLLTRVQKWCALKAWGLRLAKRSGMKKARTAVARKLAVILLRMWRDGTQFHWTAAPAAS

SEQ ID NO: 245121 - protein, 310 aa, unidentified
MEPIFVGIDVAKDRLDVHVQPSGQAFSVSRDDAGLADLVRRLPPLGATRIALEATGGYEVVVAATLAAAPLPVAVINPRQIRDFARATGRLAKTDARDAQAIAGVAAAVRPAARTVADADARLLGELVARRRQLVDMLGAEHNRRRLIEPPALKRRLDAHIRWLERALRELEGDLDTTVRASAIWRATEDLLRSVPGIGPITAYTLIADLPELGRLDRRTIAALVGVAPINRASGTLRGRRMIAGGRASVRPVLYMATLTAIRHNPVIAAFYRRLVSAGRPGKLALTAAMRKLLVILNAILRDPRPWRPA

SEQ ID NO: 245122 - protein, 349 aa, unidentified
MRYIGVDQHKRFSYIAVMDERGRVVKEGKVVNEREALKKFLSSCKDGKAEGVLEAGPNWTYMYDWLEGEIEGVKLAHPLKVKAIADAKIKTDKIDAKVLAHLLRADLIPEAYVPKGETRKVKNILRQRMFFIRMQTMVKNKIQAALDRHPEVSSEFLGTDLFGKQGMEYLAHIKLPYPDRYIISDSIKFLLVLREHIRRTDRIVEKLSKGDRRVKRLETVPGIGKFFSVLIATEIDDIGRFSDARKLCSYAGLVPSTYSSGNKVFHGGITRSGNKFLRWAMIEAVWPAIKKDSSLRYYYHKIKEKKGANVAKVAVARRLLTIIYYVLKEDRDYRINYPAAPYVPIVKAV

SEQ ID NO: 245123 - protein, 330 aa, unidentified
MDTSKSVFQLHGVDENEAVVLRRRVRRSEMIRYFERLPPTLVAIEACASSHHWARLLVSFGHKVRLIPPQYVKPYVKRGKNDAADAEALCEAVTRPSMRFVPMKSRERQAACMLMTVRERLVGVKSQLSNAFRSYAAEFGIIGPAGRQNVNALIKRVLEDETLPEMARDLFSIQAREYAAIEARLEEIETKLMKWHRADELSRRIATIPGVGPIGSTMLSMRAPPAATFRSGRQFAAWLGLTPKDHSTGGRIRLGGITKAGDPAIRTTLIVGATALLRHVRKGRTKPSPWLAAMLERKPPKLVAVALANKFARIAWRLMMSGGVYNRLPR

SEQ ID NO: 245124 - protein, 343 aa, unidentified
MYFIGLDVHKKTISFCVKDAAGRVHQEGKIGSTRRELDGWIQTMPRPRTIAMEATIFTGWIYDHLLPHAEKVKVAHPLMLRAIAAAKKKNDKIDAGKLADCLRCDFLPECHMASTEIRDRRRTLRYRSLVVKQMVQMKNRVSGLLMETGVSYNKQRLHKVGYFAELMTTNEDMHESIRPLLKLSRDMISRSQKLDYTLISSLERDPLLKERLRRLRTVPGVGPITALTWALEIGDYTRFLSIKQAISYCGLCGDENSSADKVMRMPISKQRNKHIQRVLIEAAKLATRESPELAMIRARELERGNPNRATLAVARKMVTYMLAVERRQQDFVPAEQFSRTAAA

SEQ ID NO: 245125 - protein, 457 aa, unidentified
MDFKQNQKINQVTEETLVVGIDIAKRTHFACFVDDRGRILQKSFSITQSHQGFESFYDRILKALREHEKTEVLVGIEPTGHYWLNLAYFLEERGIPLVMTNPMHVKRSKELDDNLPTKHDRKDALVIARLLKDGRFSYPRILKDVEAELRVGSTFRSKLTEELGAVKNMMIRWLDRYFPEFTQVFPSFGKMALAVLECTPFPSDLYQMQPDELLVMYRQVEGMKSPQKPKAVRLIEVAAHSIGITEGRKMARFEIATLVRRYHQLEQEIECITQHLVELVKTSVEYEWLSTVQGLGDTTIVDLLAEIGSFSHYEDPRQLIKLAGLTLRENSSGQHKGQKRISKRGRRKLRALLFRVMMPMIRHNEAFRKLHEYYTNRTVNPLRKKQSIVVLCGKLLKVLHGISTKHKAFDAQRMMRDVPSLAEAMYLHFLERTRQLDDTEKLALFSPFDLESLKELR

SEQ ID NO: 245126 - protein, 322 aa, unidentified
MASFLGIDVSSLSLDGWVRPQAVRIAVSNNPAGFEELERTLRKFSIKRILLEATGGYERDVLRFLQDAGYKVIRVNPARARKFADSMGVKAKTDAIDAEVLAHYAEVIPDQPTLQISPDRALLRELLMQRDRLVQQRDDDRRRLKQAQSLVVANFLKANLQHFRSQIRLVEQEINQQAAKLNDERIARLTQVKGIGMVTAGKLVALLPEIGRVESREIASLVGVAPFNHDSGKSLGKRSITGGRFEVRRTLYMALLVAVKYNPALKARYEALRGRGKLAKVALVACMRTFIVRLNAMIKTGTPWRDLILPQPAGTTQVEKAA

SEQ ID NO: 245127 - protein, 407 aa, unidentified
MRTIYERCCGLDVHKKTVVACVLTPGNQQTRTFGTMTPDLLQLREWLQSEGVTHVAMESTGVYWKPVFNLLEDQGMELMVVNARHVKAVPGRKTDVKDAEWLSDLLRHGLLKASFIPNREQRELRELVRYRRTVIEQRAHVVQRIQKLLEGANIKLGDVTSDVMGVSGRAMLTALAANDQDPQTLAGMAKTALRNKIPELERALTGSFGPHQRFMLRSQLQLLQALESQIASLDNEVAQRMRPLQAALDHLDEIPGIGVRSAQQIIAELGTDMSRFPTSAHFASWARICPGNNESAGKRRNSSVGGGNRWLRSALLEAAWTVSHSRRQTFFTARHRRIAARRGNKRAAIASAHSLLVTIYHLLRDGTVFQDLGPLHFDNRNREAVRRRSLRRLEQLGYRVTLEEATA

SEQ ID NO: 245128 - protein, 344 aa, unidentified
MGEVSTIGLDIAKAVFQVHGVDVDGTVVIRKRISRVKMLEFFADLPACLVGIEACPSAHHWGRELAGLGHTVRLMPPSYVKAYLKRSKNDANDAAAICEAVTRPSMRFVAIKTKEQQTALMLHRTRQWLVRQRTMLSNALRGHLAELGIVSAKGRNGTAELLRIIADTADQRVPLSARGILDVLARQYGAIGTEIGCIDKSILALHRSCEASRRLAEIPGVGPIVATALVAEIGDWRAFASGRNLAAWIGLVPKQHTTGGKDRLGSITKQGNRYLRWLLVVGATAVIRYAQKHGAKNRPWLARLMGRRPAKVAAVALANKIARIAWAIMVHGDRYNEPALSMAA

SEQ ID NO: 245129 - protein, 344 aa, unidentified
MKVTRVGLDIAKVVFQVHGVNEHDKPQLRKRLQRGSVLEFFAQLPLCLVGIEACGGAHHWARELTKLGHTVKLIAPHLVKPYRTKGKNDANDAEAICEAAGRPQLHCVAVKSEEQQAVLMVHRARELSMANRTAQVNQIRGLLTEFGVVVPQGVTKLHAALPGILEDAENGLPVIARLTLASLLEQLHAFDEQVAGYDRQIREIAAASEPARRLMKIEGIGPQTATALVATMGDPHAYDSGRNYAASLGLTPRQNSSGNKERLGHITRQGDCYLRKLLVLGAHGYLRQVDKKSDRKSAWAKSLKERRHTNVAAVALAAKHARIAWAMLAHGTEYRPAGPEVVAA

SEQ ID NO: 245130 - protein, 357 aa, unidentified
MRCIPTDAVGITLGVDTHKDFHVAVALDCLGRRLGTLSIPTTPAGYEKLMDWANGFGALEGVGIEGTGSFGVGLARSLRAEGAKVLEVDRPKRRDQYRSGKSDPIDAELAARAVLAGTATGRPKGADGEVEMIRTLRVRRRSAVKARAQAINQLKNLLITAPEGLRSELRGLSTAKLVAKVSEFRPGTNPSDVEAATKFAMRSVARRHQRLSEEISELEEQLDRLVAEAAPELVAMEGVGTDTAASLLIAAGDNPERLKDEAAFAHLCGVAPIPASSGKSVRHRLNRHGNRDANRALYVVPLCRMSRDERTRTYVAKRTAEGKTKKEIIRCLKRYIAREIYRVLASLSLNKPPILAP

SEQ ID NO: 245131 - protein, 394 aa, unidentified
MVVSVGIDVSKDKHDCFIVSSEGEVLADAFTIPNTIDGFHCLLQRIQDCTHAQDKIKVGLEATGHYSYNLLGFLLDNGLATYVLNPLRTNLYRKSLSLRKTKTDRVDARTIASMLLSDVGLKPYTDTAYHNEELKSLTRYRFDKVKERAKLKSSIARLVCILFPELEKFVPSLHIASVYALLEEFPGAKQIAAAHLTRLKTLLETTSKGHYKRDMALEIRDASRNSIGSWMPAKSLELQHTIRLIRELDHEIAEIEEQIQSIMDELHSPITTIPGLGFRMAAMILAEVGDFTRFDSPDKLLAYAGMSPSTYQSGQLKNCYPHMEKRGSRYLRYALYNATKYVCHWDPAFAAYLAKKRAEGKSHRVALSHVAKKLLRVIYTLQTKNIPYDPTLIR

SEQ ID NO: 245132 - protein, 340 aa, unidentified
MNINFIGLDIAKQVFHLVGLDHNGKQVLKKKLRRNKMLGYFANLEPCKISLESCASSHYWARELSKLGHDVTLLPAQHVKPFVRGNKNDYNDALAIAEASRFAQIRPVAVKTVEQQSIQGLHRLRRSSVKDRTALCSQVRGLLAEFGIVVNQGVGSLRKAIPCILEDAENGLHPMFRDALALKYTQLTQLDKLIDELTTMIKKDAQQHSEIKLLRSIPGFGPIVASTFFSIVGDGKAFEHGRDVSASLGLVPRQHSSGDKNILLGISKRGDKYLRSLLVHGARSVVKHAHKKEDAMSCWVARLIERRGKNKATVALANKLARIAWAVTTTGQPYKDNYAL

SEQ ID NO: 245133 - protein, 409 aa, unidentified
MRLCAGLDVSSFDMNVCVINQEGAIVARFTVSNDYPGAAELKDRLIHLSLSENATSLKIGLEATSVYSFHPSMYLHHDDELKAYETQVFVINPRQVANFKKSYADMNKTDDIDAFVIADYVRFGRNQMSIVKESQYVALQQLTRARYHLIKGLTREKQHFLQHLTYKFSAFKDEVNSSVFGAAMTELFSEKFSLEELAELPLEDLAAYLREKGRNRFPDAEVVASSIKKAVSESYRPDRVVEDSVDVLLATSIELIRSYQLQIKELDKSITRIMTGLTQTVETIPGIGPVFAAGILAEIGQVDRFEDESKIAKYAGLYWRKRQSGRFIAEDTSLSRQGNQYLRYYLVEAANSVRRQVPEYHDYYKKKYHEVPKHQHKRALVLTARKLVRLVDALLRNHQIFTPDRGVEI

SEQ ID NO: 245134 - protein, 339 aa, unidentified
MQIHSVGIDLGKTTFHVVALGAAGKVLVRKKFTQKQLLAYTANMQTSLIGLEACSGAHFLGRALHKQGHDVRLIPAQFVKPFVKSNKNDFIDAEAIAEAVERKNMRFVPIKTDDQLDLQAIHRVRDRLIARRTAVINQLRAFLLERGLVFARTPAKLKAAMADILENAESDLTSRMRNLISGLWSEWKLVEQQIEELNDELERISAADAGCTRIRKIPGIGPVVATAIVAAIGNGAAFSKGREFAAWLGIVPRQYSTGGKAKLFGISKRGNAYLRKILIHGARAAVLHIKRDRAPIGAWLDALDARAHKNVVVVAMANKLARIAWAVLSSGNEYRPVST

SEQ ID NO: 245135 - protein, 423 aa, unidentified
MLEETHDREEIIQRVAALDIGKAELVCCVRVPSPDAPGRRLQEVRTYATVTRSLLAMSDRLRQLGVTRVVMEATSEYWKPAFYLLEAHGFETWLVNARDVKHLPGRPKTDRLDAVWLAKVAERQMLRPSFVPPPEIRRLRDLTRYRADLVAARTAEKNRVEKLLEDAQIKLSVVAADSFGVSGRAMMAALIAGERDPKALAQLARGRLRAKLGVLEEALTGHFSDHHAFLLATMLARIDQISIDIATLEAKLDQEIAPFAATVDQLDEISGVGRTAAHVLIAEIGVDMGRFPTPAHLAAWARFAPGVTESAGKRKGTAATGHGNPYLARVLGEAAVTAGKTNTFLGERYRRIARRRGTKRAIVAVGRSILVIVWHLLADPDARFHDLGPGFYDTRNNADRTKRNHIRQLQALGYKVTLEPAAT

SEQ ID NO: 245136 - protein, 330 aa, unidentified
MKQYHHVFGVDVSKKTVDITHVINQEFTHRKFSNDEFGMKELIVWLKELHLDFDTTLFCMEATGLYCFTLTNFLASHSIDTWIEHAAQIKKATALARGKNDKVDSQRIAVYATKNLDRLRLWKPVDATLDKIRHLASLRERLVETRKRLATPIKEFEDVGNLVMAKLLTKIIKSSLTAIDKDLKNIETKIIDVINEDDNLKLLYKLITSVVGIGFVTAINLIVHTNGFTMLKDTRKLACYCGVAPFEYSSGSSVRGRTKVHYMANKKLKCNLHMASLTAVKLDADLKTYYERKVAEGKNKMSVLNAVKNKLLSRVVAVVNKQQEYVKKSA

SEQ ID NO: 245137 - protein, 427 aa, unidentified
MSYRIAAVDVHKKMLAVVVTDVAGEGDYQFERRKFGATPGELHLLAQWLVQQEVEEVVMESTAQYWKPVWGALERYWKPARQKREGASKMCGTLHLCQAKSNHGPRGRKNDFADGERMIKRLVAQELVLSFVPDAEQRLWRTVTRRKHQLTCAKVGFKNQLESLLEQAHIKLSSLVSDLLGLSARRMLKAMAEGETDPAALAALADHRLRATSEQLRDALGACAQLNPVYRRLLKMALEELQLIETHIEQLEREAMDLLKEHQDVVQRVAEVPGFGIDSALQMIAEVGPKAAAFRSEKALSSWVGVCPGNEESAGESKSTRSPKGNRQMRRLLNQAAQSAVKVKGSILEVTFHRLLPRLGYKQAIWAIAHRLCRLLWLILHNGVRYEERGPAVSAKSKRTRAARMIKELQKLGHRVEGGPIPAGKQA

SEQ ID NO: 245138 - protein, 356 aa, unidentified
MIVGAFDVHRRQITYDWVDRATGEARRGRIAPATREVLRSWLGELPAGGGHVAVEGCTGWRFVAEELGAAGLTPHLAEPADTATLRGRKRRAKTDRADARHLRELLEQDRLPESWIPPAHILDLRELVRLRKTLIDQRTQWKQRIHAVLFHHGLPKPPGAVGTKASHAWLAGVWLPPASRLLVDVGVAEIDTATHRLDPIAGWLRAYARRQPGCRALMRQLFGVGPLCAPTILAELGDARRFGDGDAVVRYSGLDITVWSSDGERSPGHLARQGPEVLRWALFEAAKSSARQTAPTHQYYALVKDRLTANRATLSVARKLARHARHVLVELGEEALAPVGGDQLPPLLPTPLPEAA

SEQ ID NO: 245139 - protein, 356 aa, unidentified
MESIFVGVDLHKTQFTICILINEEVIDQGQKYPMNDKGYHEFASYMKDLSEIRGQPVSIAIESTANARFFRDLMVKKGFRVTVVNTLRFKVVNLSTKKTDKNDARTLAEFLSKGMLPESYLCSAKSEGLRRVLKSRALMVQNSVALKNQVHAVLLAYGKITKTAQFQSKASRKRLLDSLPPEIKDVVGVIFGTLDTVEQQKKDLERRLKEITSDDENVRLLMTIPGIGVVNACTICAYIDDIGRFQSFKQFSAYCGLVPWVQASNETYKIGRITKHGPPELRTAIIESVIAMVRMEEKTGKYVLMEQYKQMKAEKSSGKAIVATARKLSRIIYVMLTTKTSFNPKMLINRLEKSED

SEQ ID NO: 245140 - protein, 347 aa, unidentified
MAMTIVETRAVTGGVDTHADVHVAAALDPIGGLLGVEEFPVSPAGYARLLGWLGGFGTVALVGIEGTGSYGAGLARHITAAGIRVVEVDRSDRQDRRRQGKSDPLDAVSAARAAQSGRARGAPKGRDGAVEAIRALMVAKRSARSERVQTINQARALVLTGPDDLRIRFAGHTAAGLVSGLASLRPRPGAVVGYATRIALRELGRRAEFLDGQLGRLDELIAPLVAARAPGLLALHGVGPDTAALLLVAAGDHPERLRSEAAWAHLCAVAPLQASSGKVTRYRLNPGGDRQANHALWRIVLTRMSAHPPTLIYVERRTKEGLSKKEIIRCLKRYVAREVYRHLRAAG

SEQ ID NO: 245141 - protein, 323 aa, unidentified
MTMTYVGIDVSKATFVVAYSSAKSSETKTFKNTTKGIREFIRTISPEENHCVLEATGNYSMLLVYLLSKAGFTVSMENPLKIKNFARVMLSVVKTDKLDARLIALYGERMQPAPFKLRSESLLLLKQKRTVLRQLKKQLTANRNLEGSLKILPFIDSKCKKVLEKTIKFLEKQIEEMEEELTSLAEIEYKKQMDLLTSIKGIGATLAAALIIATGGFTYFDNAKQLTRYLGLSPTYQQSGTSVNVKGHINRNGDAYLRSQLYIGAMASLRCNTECKACFDRLRSNGKPGKLAIIAVANKLIRQAFAVVTHEKKYIDGYKSVKP

SEQ ID NO: 245142 - protein, 371 aa, unidentified
MADYREAFIGIDVAKLKNAIAVAESGREGEVRFWGEVDASDTSMRHIIQRIAAKFDRVHFCYEAGPTGYGLHRLIRSLGHECVVVAPSLIPRKPGDRVKTNRRDALALARLLRAGELTAVWVPDEGHEAMRDLVRARAAAVETLRVHRQQISAFMLKHSRIYPRKKGWTMRYLRWLQEQQFDHPAHQIALQEMVEAVRVSKERVERLEKVIEEFVPTWSLAPVIRALQTLRGVDVIVAVTFATEVGDVSRFESPRQLMGYLGLVPGERSTGETVRRGGITKAGNGRVRHMLVESAWTYRHPPKVGTRKLYLMEQAPSKVREIAWKAQSRLTSRYRILATRGKRTTVVCTAIARELTGFMWAVGREALAIKS

SEQ ID NO: 245143 - protein, 346 aa, unidentified
MTHSTTVGVDLAKNVIQVSVISARGKELLNRSLTRRKFAEFLGKQKPALVAFEACATAHYWARTAERHGHVARIIPAKFVAPFRQGHKTDSNDALAVAEAARRPGIKAAPMKTVEQQGLQAIHRSRQLLIQESTALSNHLRGLLMEFGVVIPQGFASLLRAVPEVLEDGENELPDLYRPTLHRMYTRLLELRADIEAITKEVEVLVKQHPICSRLTALEGIGPIGALLLYATLGSGNAFSGGREFAAYLGLAPRQYSSGGKTNIVGLSKKVGNCRLRSILILGARAYTYRLKEPKSAKDRWLKNAIDRNGHSRAAIALANKNVRTAWAMVTQGTEYQRRGQLKMVA

SEQ ID NO: 245144 - protein, 367 aa, unidentified
MKKVSTVAAKPSKKIFQQKLTVGLDLGDRNSWYCVLDETGQIQLEQRIRTNAKALQEVFGAMPRCRIALEIGTHSPWISRLLSELGHEVIVANARKVRLIGESRKKDDRMDAQTLARLARIDPELLYPVKHRGAQAQADLMMIRARAGLVRARTGLVNTARGLAKSYGERLRGCNVRNMNPEKAEGVSPELQRALEPLLAGIEAVSERICEYNQRIEQLAQQSYPQTALLKQVKGVGTLIALTFLLTLEDPHRFRKSRDVGCYLGLQPGRRNSGQSEPQIHISKEGDPYLRTLLVQGAQHILGPFGIDCDLRRWGLRLAQRGGKSGKKRAIVATARKLAVLLHHLWVSGEVYEPLHNSYRMKVAAAA

SEQ ID NO: 245145 - protein, 343 aa, unidentified
MNANMNLTVVGVDLAKNVFQLHFVDEETSEVKRLKLSRQKFQQFFVNRAPCLIGMEACGGSHYWAREFLKLGHQVKVMPVSDVKAFNSGNKSDARDAQAIWAATRAGTTREVAVKTEEQQAILSMHRILELKKVHRVGLTNQIRGLLTEFGLVVPTGFKALREGLPKMLEDLEQQAPKMLCEQIQDLWQDILRLREQENAIDQKLAVWAKTNADCQRLMEIPGVGLLTATAVVATVGNARVFKNGRQLAAFFGVAPAHTGSGGKIQVLGMSKRGDCYVRKLLVHCARTSVLLCKDPPKVVDRLKKKHHVNVVIGAMANRLCRIIWTLMKHETKYVKDYQHLLT

SEQ ID NO: 245146 - protein, 312 aa, unidentified
MVSQQVFVGIDVSKGRLDVHVRPLGIGFSVSNEAAGYAALIARLQPLRTTRIVLEATGGYERALWLALSEAGLVAAVVNPRQVREFARAAGRLAKTDRLDAAVIAHFAETFAPPIGKPDAVADRLGEHVLYRRSLQAELVGLEHQLRRLETPALRQRAERRHAALRAEVKEIEAAMRAIVDGDPAKKALFACLTSLKGVGPVLACTLIANMRELGSLTRQQTAALIGVAPFHHDSGSMRGYRAIAGGRRRVRNVLYVATLSAARSNPAIKEFYRRLRAKGKPAKVALVACMRRIAIILNARVRDHLAAAAAA

SEQ ID NO: 245147 - protein, 379 aa, unidentified
MSSPAAAASIIYLGMDVHKDSITIAVLPMAAKTPTRLERLPNDLPKLKRFLDRLARDGELRVCYEASGAGYVLHRALREWGYACDVIAPSLIPKRPGVQRKHDKRDAADLARYYRAGELTPVRIPTEAEERVRDIVRCRETFQREILKSRHYILKFLARRGFVYRDGTNWCTPHLRWLEHLTSEASPLAPADRLVFREYHALLAYKLQRRDELDREIEQLALTPALVAAVARLQCFRGIALQGAMVLATEIVDWRRFERPGQLAAYLGFVSREDSSGPRERKGSITKAGNSHCRHVLVQAAWCYHYRPNLSVEIRRRQQGQPPAVVAHAWKAQQRLHQRYQHLAYRKQPQIAVVAVARELVGFLWAVMRDLPTPEVTAA

SEQ ID NO: 245148 - protein, 437 aa, unidentified
MALISETSDLCVYGGRAGSVPKLKEILLEEAKVAKYHVGVDVGKRKHKACIRNLHQDSYSGAFSFPVDRHGFEKFLTTMEELSPEKDDLVIGIEASGNCGTTLAYFLLSHGYTVMELNPYRANQFRKAEGRKAKTDRVDARSLAGLLSLENHKPLSMPDPIVDNLKEFTRFRSDLVKDRTSLVNQLHNCLTSLFPEFAALFAEIRSVTCLALLISYPGPQYILAAGEKELTQALSIASHGQRGEAMAKELIKVANATVGITQKQSSLGVRVTILSERILALNAAIERLEREIKTLFSKLPYKVEDFPVGDTIALATIVAEIEDIHRFSTVKQFLSHFGWCPRTFQSGGYTAEHPRMSHAGNRYVRRIIWMLSIAAIRAIPRYHTYFQRRIEAGKAKMDIIVAVGRKLLSVFYAILKRGIPYDPDWEANSCHFTLART

SEQ ID NO: 245149 - protein, 424 aa, unidentified
MKVTYQTCCGVDVHKSFLVATIVKTSGGIEPSYQKKRFSTFNNSILEFKQWLLDNGCHDVCMESTGKYWVPVFNLLEDEINVVIANPKWVKAVKGNKDDAKDSKWIGDLFRLGLVKGSYIPCKEVRILREYTRYRYKLVSCRSSEKNRYQNALTVCNVALDSVVSDIFGKSSTSIIDYLLEQSGTSINHEEIASKLLRSLKSKEDAVIESIEGYQMTDAQKYRMRLVRTHMDYITAEINDVDKMIENMISSNPNFENAVQFLCTIPGVKRDSAITIISEIGTDMSQFSSSKRLCCWAGLTPGSNESAGKKKSVRITRAGVYLKPALVQCAHAAVKSDKSPYYKKKYEFLVKRRGKKRAIIAIARMILTAIYQMLSTGEQWNPCDLYKIDMPVALVEKQKAKAIKQAKKLLQREGILPPDEPLAS

SEQ ID NO: 245150 - protein, 323 aa, unidentified
MTFFLGCDTAKSKFDVSLINEQGLEQWGDTIINEATAIATAILTITGAYPDTELVCVVEATGCFHLALAETCHELGVACRVYNPVLTKQQLRATVRGKKTDKTDALMIARLGLRGEGRVYTPEPYKTTKYYVRGCQKLSVLSSTFRQYKTHICELLDGDLTDDAQELLQGIQTAIKDARAQIFKDMAASAQRPVFNRLQTIPGVGPYIAASLIGEIQDMKRFTTTKSVIAYAGLDPRIKQSGKSLNSTGKLTKRGSSYLRRSLFIAANIARQHDPQFRALYDKKRAEGKRYTVANCVVARKLLTIVRAVWLSETNYDVSFWPH

SEQ ID NO: 245151 - protein, 266 aa, unidentified
MNQSPGPFVGIDVSKDHLDVAVLPSGEGWSAGTQDEDIQSLVKRIRSLKPDLIVLEAIAQLEIPLVGALAARGLPVAVVNPRQVREFARASGILAKTDQIDARVLARFGEAVRPEVRPLKDQQTQALTALVTRRRQLVTMLVAEKNRLAAAPKPVQKDIKAHIAWLEKRLADIDNQLHEAIRESPVWRANEVLLRSVPGVGPVLSVTLLSQLPELGRLNRRQITALVGVAPFNRDSGLFPRPTKRMGRTQPSARGIVYGHPLSHPV

SEQ ID NO: 245152 - protein, 348 aa, unidentified
MSQIIRVGMDTSKHVFQLHGVNAAEEVVLRKKLRRNEMIAFFEKLPPALIAIEACGASHHWARVLSAFGHEVKLIAPQLAKPYVKRGKNDAADAEALCEAASRPTMRFVPAKTAEQQAALMLVGVRDRLVRNQTQLANSIRGFAAEFGLTATAGMDQLAPLLDRLVADENLPTLARELFASQAKEYAQLRAKIEEIDGKLVAWQKAEPRCGRLVKVPGVGPIGSALLTMKTPAPEMFKSGRQFAAWIGLTPKDHSTGGKVRRGVITRAGDEALRSVLVAGATAVVNQVRRGNSKNAFAPWVASLLLRKPPKLVAVALANKMARVAWKLMVTGQGYIDKPAPAVLVSAA

SEQ ID NO: 245153 - protein, 341 aa, unidentified
MQVTTIGLDLAKNVFQVHGIDATEKVVVRKQLRRGQLIKFFEALAPCLIGMEACATAHYWARELTKLGHDVRLMPAKDVKAYVKRNKNDAADAEAICEAVRRPTMRFVAVKSAEQQGRLMQHRVRDLLMRQRTQLINALRAHLAELGMAAAQGREGIKELLAIVAQDGGSRLPADAHASLIVLAAQLQAVQTMIGSIEKRIVLQHRSNEASKRLESIPGIGVLGATTITAVVTDPKIFRSGRDFAAWIGLVPRQDSTGGKQKLGPISKQGDRYLRRILVVGACSVLRRARQQPEKYPWLTQLLARRPFKVVAVALANKMARVAWALLAKGGTYRAPRLTAA

SEQ ID NO: 245154 - protein, 337 aa, unidentified
MNEISRIGLDTSKQVFQVHGVDAGERPVLCKKLRRSDVERFFAALPPTVIGLEACGAAHYWAGVLQRLGHGVRLLPPQYVKPYVKRGKNDAADAEAICEAMSRPGMRFVPVRTAANQAELMLHGARDLLVKQRTMLVNAIRGHAAEFGLAGAKGVGRVTALLERIALEASVPALARGIFARLAEQIEALNKQLSALDTQLLAWHRANERSRRLATIPGVGPIGATALAMKVPDPSVFRSGRHFAAWLGLTPKDHSTAGRQRLGGITRAGDETVRRLLVSGAMAVIQRAKPGRGSPWLLGLLARKPRKLAAVALANKTARIAWAVMLHGEAYRRPAMA

SEQ ID NO: 245155 - protein, 331 aa, unidentified
MFPVGIDVSKNTLDLCMLYDGIKGRIKTRNIQNNRHSVENILRWLRLQHCSAKDVHVVMEATGVYHEQLATELHDAGFRVSLANPHRSREFARGMGIMTKTDKVDAYMLACYAFLKKPHRWEPPAPEIRYLGALLRRRDVLLGDALREENRLEKYLSTDTPADIISSCRRMAQLLREEISNIERQIKAHIKASPALRRDYTLLTSIKSVGPQLGMHMLIVLRSHNFVSAEQAAAFLSVVPIEKRSGTSVRRRPRMSKIGPPQLRAKLYMSALCGKIYNKRMRNIYDEMCLRGKPKMVAIGALMRKLVHWCYGVLKTGTVFNDEDLKPVLST

SEQ ID NO: 245156 - protein, 343 aa, unidentified
MCQHIGLDVSLKDTAIAIRQDGKRIWRGKCPSDPKDIAQIIRKHAPDPERVVFETGPLATWFFHALTAEGLPTVCIEARHAQKILGETLNKTDANDADGLAHLAETGFYKAVRVKSFDAMLVRTLIGARSQLLTITTQLTNQIRGVLKTFGLIVPKGIGSVFDFNVRGLLEGQAQLGQIILPLLEVWREVRERVAILTRHVLAAARQSSHAKLLMTIPGIGAITAMSYVAAIEAPENFKNSRSVGAWLGLTTRRYQSGEVDFNGHISRRGDTRLRGLLYEAATALLTRTSAATESQLKTWGLQLRERLGFKRAAVAVARKLAVIMHTMLKTGESFNPSAGEIA

SEQ ID NO: 245157 - protein, 344 aa, unidentified
MTTIDYIGLDVHKKSISFCAKAQDGRILDEGKIAAQHKDLNAWAKARPRPWVGALEATLFTGWIYDDLKPLAQDLKVAHPAMLKAIAASKKKNDRVDARKIADLLRCNLLPECYMAPSGIRELRRVLRYRNLVVRQSTRMKNRIAGLLMETGTIYNKERLNGKGYFHDLLGNLQETPASVRDLLKLSRKQLEFFETIQKRQLKGLREHGELKERVERLQTIRGIGEVGALTWALEIGEVHRFPSIGDACSYCGLTSAQRNSAGKEQRGPISKQRNKHLQTILIEAAKLAPRHNPQLAAVHERELQRGHGNRATLEVARKLVAYLMAVDKSGQPFQVRTGGAEQL

SEQ ID NO: 245158 - protein, 386 aa, unidentified
MLVQQIAPVAGQEFAPIFVALELSRSKWLVGIGTPQKWAVRRHEVDGGDLEGLLALLRRVAVREEQRAGVPIRVHICFEAGRDGHWLHRALKAAGYDVYEIDPASVAVDRRARRAKSDGVDVDKLVRTLSRLVRGERDACRVVEVPSLEEEDAKRTHREYERLVKERTSHGNRMKGLLFAHGVRDFEPMAPDRLERLAELSLPPKLKAELRRECRRLAMLIADVAEVEAEMKAAVVPSRKAKAKAAAAPPTQRQIVQLFQLKGMGVHFSTVLGGEVFYRKFRNRRGVGQYIGLAPSPFQSGDSARDQGIAKAGNGRARKTMIQLAWLWLRHQPQSALSQWFAERVGAQKGRVRRIAIVAMARKLAVALWRYLETGLVPEGAVLKRA

SEQ ID NO: 245159 - protein, 343 aa, unidentified
MQVVRIGLDLAKYVFEVHGVDGQGNVVIRKTLRRGLVSTFFANLPPCLVGMEASNGAHYWARLLTELGHKVRLISPQFVAPYVKTNKNDRNDAEAICEAVSRPTMRFVPPKSPEQLAIQALHRIRQRLVQSRTRLVNQIRGILAEHGIVIARDIWRLRRALAEITGHATDDLNTLVRVLILAAQAELMELDRRIASCDRRIRELYRTSELCQRLGEIEGIGPVTATALVAAVGDRSCFKNGRQFAAWLGLVPKQRSSGGRHRLFGISKRGDRYLRTLMIHGARAALGKAGGKQDLRSRWLASLRQRRHPNIAAVALANKNARIVWAMLASNVSYEPARSVQAA

SEQ ID NO: 245160 - protein, 417 aa, unidentified
MAMKIVRFNCCGMDVHKNLVVATIGITDSKTNITEYFQRSFSTLNSDLYRLKDWLKSHHCSDVCMESTGKYWIPIFNILEDEINVRLTHPKYVKAIKGKKTDKKDSKWICDLFKHDLIKFSFIPPREIRELREIARYRYKLVCMRSSERNRYQNCMTVSNIGLASVISDPFGKTASNIMKEVMKSNVIDDDKILKLVHRNCKNKDKILDSLHGYRIESDQRFKMEKSLDHMEYLDQLIDSCEVELIKRAYPLRRSFQHITQIKGISALSAILIISEIGIDMSQFESDKQLVSWAGLSPANNESAGKKKSVRISKAGQYLKPLLVQCALSAIKDKASYFGRKYSNIKKRRGHKKAIIAIARMMLVSIYHMILTGEEFQPCDYESFMDPKPNANPSLTVEKALNFLKQSGIDISSILVN

SEQ ID NO: 245161 - protein, 344 aa, unidentified
MKATTVGIDLAKNVFQVHGVNEHGKTVFRKQLKRHQVAEFFANMPACLIGMEACGSAHPWASKLQAVDHTGKLMAPQFVKPYVKTNKNDAADAEAICEAVARPNMRFVPVKNVEQQAVLALHRARQGFVKARTAQGNQIRGLLAEYGLIIPKGIAYIAQRVPELIEDASNELPGVFRQLIQRLTDQLKELDRQAGELEAQIAAWHRESELSCKLAAVPGIGPITASALVATVGDAKNFANGRQLAAWLGLVPRQHSSGGKNVLLGMSKRGDTYLRTLLIHGARAVIFHAGKKVGGWLPTLIGRRNTNVAAVALANKNARIVWALLAHDREYRHDYAVVASASAA

SEQ ID NO: 245162 - protein, 373 aa, unidentified
MPKYSTAFGMDVHLRSTTVCALDADTGEAVTRRFPGNPWGEIAGWMDGFPGPSLAAYESGYLGFAPQRELAGLGVECVVAAVSKIPRSAADSASKNDRNDAARMAKAILAHDISPVWVPSPEVEGIRDLAGAYDGATARLATAKQRLLAFLAKRGFVYGGTTPAGNPRKYWTYDFLRWLDKVRPEDDGGVRALAALRNEVEAAAEARADLLSEYRAAVDASPIAAEAAALQSIKGCAFALAAAFSAEVGDFTRFRSGRQVTAYFGLAPSQRSSGDSVRLGGISGAGNALVRKLAVEGSWCYAAARHQPKLMPRDTGVPLEIRMHGRKGSERLLRRREEMLARGMPAAKANAATAAELVRWLWALGMMCREGAE

SEQ ID NO: 245163 - protein, 339 aa, unidentified
MTHTIVGVDIAKNVMQVHWVDPETGEIVNRPVKRAAFLEYFANRSPCLIGMESCSGSQHWARRLIEMGHRVKLMPAKFVKAFNIRNKNDAADARAIWMATQMDSKEVAVKTEAQQAVLALHRMRQQLVKFRTMQINSLRGLLTEYGEVMGVGRAALDKSVVGVLERLSGRLPAILIDTLREQWKGLDDLDRQIGQIERRLHEWMKDDPSAKAVAMIPGVGLLTATAAVATMGQAKAFKSGREFAAWLGLVPGQTGSGGKIELQGISKRGDTYLRTLLVHGARSIIYHVREPGLWVTQMKQRRPLNVVIVAMANKLARIIWAMLAHQRPYRKDYESVKPA

SEQ ID NO: 245164 - protein, 341 aa, unidentified
MEIAILGIDLGKNSCSVVGLDSNGKVSVRRRMRRETVIAFCSKLSSCVVAMEACCGAHHMGRALASQGHVVRLMSPEYVRPYVKAQKNDDRDAEAIAEAATRPTMRFVQLKSEEQLDTQTLHRVRDQLVGGRTCLINQIRSLLLERGHVIPQGRAKLTASLALLLDDEADGLSPRIRALVLDMRERWAALDKRIKELDVEFAELARGDALAKRLLTIPGIGPLNASALVAAIGDARTFARGRDLAAWLGLVPRQATTGGKPKLLGITKRGSKYLRKMLIQGARAAMPSLSKSNTSVGAWLRGLLARSHNNVAVVALAAKMARTAWALLRHERVYEATLVAA

SEQ ID NO: 245165 - protein, 350 aa, unidentified
MIIGCDWHPRYQIVAWVEEETGEVMRRRLEHENGEAGRFYGSLPPGAVVGIEATFPSHWFERLLRECGHELWVGDAAKIRASEVRRQKYDGRDAEHILDLLLAGRFPRIWVPSMEERDLRQLLVHRMKLVRTRTAVKNQLQALAISQGVCRKRKLWSVRGRAELHSLALLPWASRRRQDLLGGLEQLDRSVEELDRAVEAAARRRAEVTRLRTHPGVGAVVGLAFVLTLGPVSRFANSRKLVSYLGLNPREHSSGGRQRLGAISKQGNSMLRWLLVEAAQTAARYDPELRRAYQRLKFRRASGVAKVAIARRLAVRLYWMLRAQVDYAQLVRMSGSPSSAVVSPRAGSKV

SEQ ID NO: 245166 - protein, 349 aa, unidentified
MIWIGVDAHKQVHEALALSSEGVVGQQRIPNTPQAWAALLAWAQQWPERIWAVEGAWYLGRGLAQYLARSGERVHEVNGRWTARRRRGMRVPGKSDRLDARSVATLLREEASTLPRVYAEEDELAAVQLWSRTQAELTKDLTRLVNRLHELLLQCDPEYKRTLPALTTKAAITALQQYAAPGSGVLAREREALIRATATQLALLDEQDRALRRKLGRASRARFSPLRQVEGIGSIIACAIAAEVGRPQPGFGEEQLAALGGLSPLEASSAGATRHRLNRLGNRRLNMVFHQIVLTQARIYPPARTYLLRRQAEGRTSREARRALKRLIVRRVFRAWRECFQTHTERVAA

SEQ ID NO: 245167 - protein, 407 aa, unidentified
MEIVHTKCAGLDVHQKTVVACARIAAKGRVTHEVRTFGTTTRDLLALAEWLTAHGCTHVALESTGIYWTPVWHVLEASFTLVLANPRHIRNVPGRKTDVNDATWIADLLAHGLIRGSFVPPEPIQDLRDLTRTRKQLMREIARHSLRIQKTLDRANVKLNTVLTDILGASGRAILHALIAGERDPERLAALASGRLKASRVDLVTALHGRVTPHHCFMLQLHLTQIEALEAAVRDLEARLGDALAPFRAAVDRLITIHGIAQTAARVLIAEIGADMSRFPSSAHLLSWAGLCPRLHESAGKRLSTRTLPGNPWLKTTLVQAAWAAVHKKDTYLHAQFLRLKSRRGPKKAIVAVAASILTAAYHILKHGVDYHDLGGDFFDRRDKAKLAKRLIARLHDLGLTVEVRAA

SEQ ID NO: 245168 - protein, 351 aa, unidentified
MEQNEVILGVDTHLDTHVGAVISDTGRLLGTLSVTTDTAGYLALLTWANSLGQLRRAGVEGTGTYGAGLARVLRDHEIEVLEVNRPDRAMRRSKGKSDPTDAENAARAVLAGKATAIPKEQSGAAEAMRAVSVSVARRSAVKAKTQAINQLRALLVNAPQEIRERLLKTKAAECVDSCARLRSLGKTPMLQTLTTTLRLLAKRWLTLAEELKALDTMLDSLTSQHARRLRDRFGVGPQTAAVLVAVAGDNPERLKSEAALAALCGTSPLQASSGKTVRHRLNRGGDRSANNALWTIAMVRMRSDPRTRAYVDRRTKEGMSNKEIHRCLKRYIVRELYPLILADLADSAHVA

SEQ ID NO: 245169 - protein, 386 aa, unidentified
MQRPNDLSQSRIVLKQDSTLIAVIEMSLSSWLVAAVVPGVQRQPLKKLAVDESALLKLLHRWREEAEKAGHKIERIAVAFEAGRDGFWLARWLRTRGIEAHVIHASSVAISREHRRAKTDRLDTELLKRAFLGWLRGERDHCKMVAIPTMEDEDAKRPNRERESLVGEQTRIVNRMKAALSRLGIRGFNPKMKKAAERLEHLRTPEDEPIPPNTLAELRRDMERRRVVSEQIRQIEKARLERIEHAPGHGPHAMVRLLARVIGVGIETADMLVQEVLSRNMRDRRAVARYAGLTGSPDESGTRRREKGLARSGNARVRRGMIQLAWRFLMFQKDCALAQWFRARTENARGTRKTMIVALARKLLIALWRLVHEGIVPDGVVLRPAQ

SEQ ID NO: 245170 - protein, 523 aa, unidentified
MASKRSSKKSRSRATEFLQKPRGVIHPRVQKVGPEHFGIVCVDCAKARSKWMLTDFYGRVLVPPTEVAHNRVELADAAAQVRAALTQHDLRDCLVAIERTGRYHHPVKNTFAQAGFETRLVHPYTTKQYRQPANPDNKTDDTDLAAMQRAAVNGFALQEAAPVESWVQLQLCIRQRRDLVGKCSALACQIRHHLDAALPGYAACFDKLWDSNVAFRLVRQFGSATAIAEQSVTALCHYLNQEKVRFQERTLQTVVLWAKNAAAADIAGDLHRQIALAYEDDRQRKTQEILALERDIAHRLVQTPYVLLMSFPGVNVVSAADFAGEMGPIENYANPRAITGRAGLFPSRYQSDRVDRANGPLVRRANRTLRAVILGIADNLMLCNRHFRMLAGAWKAAGKDPRKSHVKVGMRFCRIAYHMVAGRQVFRHPSLRERGYILDKLLAFHLEHRTPYEQALRDLHLATDQVPTKEHAAEAEPLAARLRTTRAAGKKGPQPLNEILAIVLARLGVGAIPSKPSEEKDLT

SEQ ID NO: 245171 - protein, 311 aa, unidentified
MTSAGIFVGIDVAKAQLDIAIRPSGEYFTAPHDDPGVSGVVQRLGALQPTLVVLEATGGFELDGASALGAAGVPTAVVNPRQVRDFARSTGLLAKTDRLDAQVLAHFGEVLRPAARSLPDAQAQELSAVLLRRRQLVEMLVAEKNRLPMATRRIRPQLQRHIEWLQQQVADLDRDLGALIRSSPLWRAKDDLLRSVPGVGPVLATTLLASLPELGTLNRQQIAALVGVAPLNRDSGTWRGRRTVWGGRAHVRAVLYMSTLVAVRHNPRLRSFYVRLRDAGKVPKVALIACMRKLLTILNAILKHQTPWALP

SEQ ID NO: 245172 - protein, 355 aa, unidentified
MDSTKYIGMDVHKESISIAVMNGAGKIVMECVIETKASMILQFIDGLHGDLHVTFEEGTSAAWLYDLLKPHVTKLVVCDPRKNASMKEGNKSDKIDARRLAELLRLNHLNPVYHGEHGLRTLKELVRSYLTITKDQGRVMSRVKAIYRSWAIACTGKQVYAPRHRAEWLGKIGELGVRRRAEFYYQQLDALRALRQQVRRDLLAESKKHQTWKRLCQIPSIGPIRAAALLGILQTPHRFRTKRQLWTYSGFGIETHSSADHHSVDGQLQRAKKQLSIRGLNRNCNHDLKNLFKGAAIVASSKPGPFQEFYTALLNKGIRPEMARLTLARKIATIVLIVWKRGVCFDAQHLKPQTA

SEQ ID NO: 245173 - protein, 419 aa, unidentified
MEIVRNQNTRNINGQTLIVAVDIGKSVHYGYFRTPMGKEVKPFPFSNTHQGFQEFWQKLFRFQRQQGLKECVIGFESTGPYAEPLLHYLRTCPVKLVQINPMHTKRLKELTGNSPNKTDRKDPRVIADVISLGHALTLVVPEGAAAQLRRLTHARERALKRRTALLNQLHYLMAVVFPEFLEVMKKISTKTATYLIKHHPIPQHIVVLGSESLSKVLKKISRGQMTEQQAQRLFEVAQKSIGIHEGQQSMLLEIQYLVSAVERENGFIADLEKQMIGSLRQIPYSYSILSIKGVGKITTAGLIGEVGDFGKFKTIAEITKLAGLDLYEISSGNRKGQHRISKRGRSLMRKLLYFAVVNMIRSSGLLHEPWHQMVQRGMPTMKVMVALCRKLLRLIFALARDHAVYKENYTQTNTYKLAA

SEQ ID NO: 245174 - protein, 341 aa, unidentified
MQITTIGLDIAKSVFQVHGIDATGEVLLRRRLTRARVLPFFAKLGPCLIGIEACATSHYWARELRKLGHDVRLMPPSYVKPYVKRQKNDTADAEAICEAVTRPTMRFVEVKSPEQQSVMVLHRTRLILMRQRIQLSNAIRGHMAEFGIVAPVGREGLQKLTAIVHDESDDRVPAEARHCLQMIDAQLRLVNEHVLENDRRIRMSARATDTGRRLMAIPGVGPLLASAFVASIPDPAMFKSGRNLAAWIGLVPRQNSSGGKERLGSITKQGNRYLRQLLVVGAMAVIRYAERHGTRRPWLVKLLARRTTKIAAVALANKTARMVWAMMMSGEAYREPELRAV

SEQ ID NO: 245175 - protein, 355 aa, unidentified
MNRYSIGIDISKKDFHACFSGIDNTCLVKAVRSGTFLNNQKGFADFVTWIDGTAKIKDTPLFITMEATGVYFENCALYLFSHGYQVSVVLPNKAKKYIAALGIKTKNDKADAKALSRMGAEQALELWQPMGSFFYELRALTRLYQTTQENITATSNQLEAAELGMYPGKFIISSLKKTIAYMEKQLAALKDAITQQINTEEKVAEKVKNITAIKGIAVLTVAVLLAETNGFLLFENAPQLVSYAGYDVVESQSGIRVGKTKISKKGNSRIRRALHMPALNVVRYDEKIFKVFFERNYERHGIKMKSYVAVQKKLLTTIYALWKKGEKFDSTYGVEHTTREKEVVHSSRHSFAEAE

SEQ ID NO: 245176 - protein, 351 aa, unidentified
MNIIGCDLHTRFQQIAMLDTATGEIVERRLEHETGEAQRFYAALPAPARVGIEATGYARWLERMLAEQGHELWIGDASAIRAARVRQQKTDARDALHLLHLLVEGRFPKIWVSSPAERDLWQLLRHRDKLVRLRTSVRNQLHALAMGEGVCRRKKLWTQRGRQELEALSLGEWASRRRRELQAMLDQLDGSIPELDQAVAQQAARCPAAVRLMQQPGVGPITGLALALAVGPIERFRNSRKLVSYLGLNPREASSGGKQRLGAISKQGNSLVRWLLVEAAQTAARQDPHLRRMYQRLGFRRGKAVAKVAIARKLAVRLYWVLREASQPSPPARMQGSPASPVVPAAPGSTL

SEQ ID NO: 245177 - protein, 410 aa, unidentified
MRSIALDVHRDFCEVAIKEGGEVRSARRLKTSVEELERFARSLAPDDQVALEATGPANAIARILEPHVARVVVANTRRVRAIAEAKVKTDKVDAATLCELLAAGFLPAVWSPDESTRALRGLLGRRDRLVRSRTRAKNAVHAALQRNLKGRPPMSDAFGRVGRDWLARLELPAHERQIVESCLREVDFLSHEIAALESELAKLALDSEAIRLLMSVPGVSLVSAATFVAVVGDIRRFQSSKKLVGYVGLDPKVRQSGEQAARHGRISKQGSSAARHMLCEAAWIAVRTPGPLRAFYERLRARRGAQIALVATGRKLCVLFWHLLTREQGYAFGRPSLTRHKLRRLELMAGDPPRRGQRSGSPASKREQLHERELSERFEQAYRRLVEDWQPKPKKVVRARHRDAHLEGIN

SEQ ID NO: 245178 - protein, 311 aa, unidentified
MAFLHHPPSRCLGFDIAKETIAVCDGSKVITIANRRSDIRRFLSRSNADLAVCEPTGGFETLLIEECQRCGLAVHRCDTRKLKAFIRSKGRIGKSDAIDARELSAYGLERWASLALWCAPDCREVHLKALVRRRGDLMAMRVAERNRSKAPGARRLAATFKATLAVIDRQIAQIDRDIAVLTGTGPLKHRTEIATAMNGIGKTTAAALIATLPELGRMDRRHAASLAGLAPHPNESGKTIGYRRIRGGRPEVRTILFMPAMQAARGKGEFAAFYKRLAASGKKPIVALAAVMRKIVVVLNARLRDDLVQQS

SEQ ID NO: 245179 - protein, 421 aa, unidentified
MDEITEEPTALVERVAALDIGKATLTACVRVPHETKPGRRRQEVRTCATTTRSLLGLRDWLVCQGVTRVVMEATSAYWKPPFYLLEDDIAECWVVNARDVKNVPGRPKTDKLDAVWLAKLAERGMLRPSFIPPRPQRQLRDLTRYRRTLTHERTREKQRTEKLLEDAQVKLSSVISDIFGKSGRDMLDALIAGQRNPYALAALARGTMRAKTSVLQEALTGHFTDHHGFLLAMMLSRIDALTAQIGTLTARIEQAIAPFAHQVAQLDEIPGIGIIAAQDLIAETGADMSRFPTPAHLVSWARFAPKARQSAGRSKAATTGKGNPWLGGTLGESAAAAARTSTFLASRYKRIVKRRGKQRALVAVGNSLLTIAWHLLSDPSARFTDLGPTWHDRHTPQRRKRQLIAELERLSGMKVTLEEAA

SEQ ID NO: 245180 - protein, 423 aa, unidentified
MMKLKYSICCGLDVHKNVIVATIVTTNKDGISEYKQKSFSTINSDIQKFHNWLIENNCYHVCMESTGKYWIPIFNYLENDIDVCLTHPKYVKAIKGKKTDKKDSKWIADLYKFDLVRCSFIPPKDFRQLRELSRYRFKLVCMKSSEKNRIQNCMTISNVGIASVLSDPFGKTATEIISYLLEHTADSMDEKAVRKLIKKGAKSKSDEIIEAIKGYTIETDQAKKLELARGHLEYLDDMITQTEVELYVRIKPYYEFVEFVSTMPGMTELSSTIVLAETGVDMDIFDDAKHLCSWCGLSPANNESAGKKKSVRIAKAGDYLKPMMVQCALAAIKSKKQPYFAIKYGRIKKRRGHKKAIIAIARMMMVCIYHMVSEKKPFTPTDYEELINPQNHVERVVLNENNVFAYLESLGYDSSKLVKRNDN

SEQ ID NO: 245181 - protein, 343 aa, unidentified
MEIYTIGIDIGKTVFNLVGLSVQGEVVVRKKFSRKQLLHFTANLRVGLIGMEACGGSHFLGRALREQGHEVRLIPAQYVKPFVKTNKNDYIDAEAIAEAVGRPRMRFVPIKTDEQLDMQSLHRVREGWVGRRTAVINQLRGLLIERGITVRRGRRYIEAALPGILEDADSKLSGALRVLLLQAYSEMRYLQSQIDEADAVIRRMAGEDEACQRLVEVPGVGPVIATAMISAVGNGAAFKKGRGFAAWLGLVPGQYSTGGKQKLLGISKRGNKYLRRLFVHGAHAVLQQRVKQSSGLSEWLGQLTSRVHRNVAVVALANKLARMAWAVLAKGERYRPPLLAETA

SEQ ID NO: 245182 - protein, 395 aa, unidentified
MKVIVPEAVKTNSKEGLHMAKLEGFDRIIGMDLSKRTFKACLLTREKNFEDRKIFSGSMTNEGRKHILSQLGKTDVVAIEGGTSSNNFARELEKVAGKVFLLNPGKLHIIFQSQRKTDAADCAKIAKFIRDTHEDNICDMEIPTEAESELREVVNSYNFAKKQRTQLINKLHSIFNMNGYPEVRAAHLKDNESRINIIAELLKGVAFNDALLVEGMITSVEFAIEDYLEMMRGFVSANPEVSLPWLSLPGVGMITCASIMAYIGDCSRFYSAKQLRNYVGLVPIIDQSGDHNWQGGTTSFGCMPVRRNIMQCAWSMDHRKSDSCQLKVEWDRIVLRGKRKSSAAIHVANKLLTIGWTLQKRHELYNGFGDYSNLKAKLRREKLEGIDTSKFPDLA

SEQ ID NO: 245183 - protein, 379 aa, unidentified
MLLKCQRRSRAATRLGDVHLRSTTVCALDAETGEAVTRRFRGNPWGEVAEWMSGFPGPSLAAYESGYLGFAPQRELSALGVDCVVAAVSKVPRSAADLSSKNDRNDAARMAKAILSHDVTPVWVPSPEIEGLRDLAAAHDAATARLAAAKQRLLAFLARRGYVYGGTTPAGNPRRYWTYGFLRWLDGIHPADDGGIRALAALRNEVEAADETREAVLAEYRAAVAAGPLSAEVEALQSIKGCGFALAAAFASEVGDFSRFRSGRQVTAYFGLAPRQRSSADSVRLGGISGAGNALVRRLAVEGSWCYAQAGHQPKLMPKGSGVPLEIRMHGRKGSERLLRRREEMLERGMPQAKANAATAAEFVRWLWALGTMCREAGE

SEQ ID NO: 245184 - protein, 346 aa, unidentified
MKKIAYLAMDVHARSCTLGHMDEDGTFIGNRYFATSEKNIIDALKSIRAKNKILTIEEGTLTHWAAQVARPHVIEVIACDPRENALIFKSPNKKDEVDTHRLCRLLRLGELKHVYHTFNDDRAIFKASAQHYLDLRGQLTRLKHKIKAAYRRWGIIDVFSNSIYSTSGREKYLKKIKHKPIRGQIKRLYYLMDQTESMRKSALHSMKQLGLKYPEIREFEKIPGIATINAHVFDAFIQTPHRFATRSRLWRYCRLSITDRTSDGKQLGYKRLESSGVSELKALSFRAFMAAMRGDNEVKRFYLDSLNRTHDRKHARLNTQRKILSVMFGLWRKGEAYRPELFSGSA

SEQ ID NO: 245185 - protein, 340 aa, unidentified
MEGLYAGSDLHGNSNFLGIIDAQGKRVFKRKMPNELGLIRQTLGPFRGELVGIAVESTYNWYWLVDGLMEEGYRVHLANPSAIQQYSGLKHSDDRHDAFWLAEMLRLGILPEGYIYPRQERPVRDLLRKRGHLMRLRTSLMVSLQNILSRNLGHKVNGNEVKGLGEDRVTRLLGESEDLAMAGRISKETIDFLTHQIDQIERRVAQQARLKGAYRFLQTLPGVGKILALTIMLETGPISRFETVGDYVSYCRKVPSQWMSNGKWKGSGNRRNGNRYLAWAYAEASDFARRYYPGPRAYYQCKRQQTNAVVAHSALAHKLARAAYYVMRDQVAFDPEKLFR

SEQ ID NO: 245186 - protein, 393 aa, unidentified
MICVGIDVAKDKHDCFILSSEGEILADVFTIQNNTEGFDTLLQTIRRCARPEDKIKVGLEATGHYSYNILGFLLDNGLNTYVINPLHTNLYRKSLSLRKTKTDRVDARTIAAMLMSDVDLKSYTDTAYHNEELKSLTRYRFDKVRERAKLKQSVSRLVTILFPELEKLVPTLHMASVYALLSEFPGAKQVAEAHLTHLKTVLSNASKGRYRRDMATTLRDTARCSIGSVMPAKSLELRHTIRLIHELDAEIEDIETAIQSIMYEIHSPITTIPGIGVRMGAMILAEIGDFSRFDSPDKILAYAGISPSTYQSGQLSLSGAYSHMEKRGSRYLRYALYNATKYVCLWDPTFAAYLTKKQAEGKHYNVALSHAAKKLVRLIYALEKSKRPYSTAA

SEQ ID NO: 245187 - protein, 384 aa, unidentified
MINPMLQTNDTTTSPATVAVLLVAIEMSLKTWRLVMGAQNQVRRRVKTVDGGDYAALHQEVMEAKERLQLPADTPVIFCYEAGRDGFFPYRRLEEMGFQVWVIDSASIEVSRKQRRAKSDGIDAEKLWELMRRKTGGEQRALRMVHVPSVEEEDQRWLPREREALWHERQQVRNRIESLLFGQGYREIPRHTAPLTVWLDAHPDIQPQLRERVRRDGERLALLDKPIQETEKALRQQVLQERKTEIARVAAALMGLCGIGLIGAWVLASELFGWRTFRNRREVGAALGLTPTPYSSGQEEHEQGISKAGNQRARALLVEWSWLWLRYQPDSALTRWFQERFAGHGKRLRRIGIVALARRLAVALWRYVTQGVVPEGATQKTVTA

SEQ ID NO: 245188 - protein, 422 aa, unidentified
MKNNAARKLRQVPEGYLIIGVDPHKKKHAAVAITQDLTIHDRFKVDNTREGLEFLLQRVKTEMVKSGSRGIMFAIETGGHYWRNIAYYLDERGVPFRFINQYTLKRRREGKDLNKRKNDYRDSEVAAQLLCTGEFVESGIPQGVYAELRTAHNAYRRLVKERTRITNLVKGLLDALFPEFVRVFKDPCGLTSLSVLSTCSTPEIIAEMTEDQFIALIEAAHHGRRLMRKKLGELRSVAKSSIGIKAGAHSVSVEIAFLIEKQKLIKGQIQTIERTLIKLVDASEEGKYLLSIRGIHYIAVAGLLAELGCFKSYRTAKQMIKMAGSNPTESESGGKRRSRTPMSKQGRPVLRYCAWTSVIPMLRLNPDFRAWAKERRERPAHANPLNGREVVGAALNRLLRLCFAMVKNKTYYRSPHLVQVSS

SEQ ID NO: 245189 - protein, 404 aa, unidentified
MKGPIVSIDVSKGKSDYQAFKEMNVKYTGSRSIKHNKEGFDEIVNLVREMEKKLETEVCVVYEATGVYHRVLKKVLEDNNIKQFIINPLLSAKTRKNDSLRSPKTDKLDPKSIAKTYYSHSLHNSHKQETIYHELRELSRYYEDILVHIRKDKVAFRAQLDIVFPGYDTLYDDLYGPVALAIIEKYPHPEMLQKKKINTVSKVIQNKTCHRQAVSDTMADKAIEYSKTIYSGCDKDDIEVLILQRFIKKLNEDMAEAERTIGEMIKLAQELPDFNIIKSIPGIGDNLAARIIAELGDMTRFKKKNELVAFAGLDPRISESGQNDGDHMHITKKGNKRLRCLLYLAVTCSIRLKRDDNSIKDFYIKKKQQSNPMCSKAAKTACASKLVRIIYSMCKTGELYQYNK

SEQ ID NO: 245190 - protein, 336 aa, unidentified
MSIIGCDLHTRYQVIARIDTETGEMTTRRLEHENGEAKAFYASAPKPSLIGIEATGYTQWFERLVAELGHELWVGDPAEIRARAVRRQKTDTRDAEHLLDLLANQRFPRIWVPTPAERDLRQLLKHRDKLVRMQTSIRNQLHFLAMSQGLCRKKKLGTVKGRSELEALSLGDWARQRRQELLELLDRFDPSLEKLSQAVKEQAERRADCRELMKLKGVGPVTSLAYVLTVGPVSRFSNSRARVSYLGLNPSEHSSGGRQRLGKISKQGNQMLRWLLVEAGHGVGQFDAEMRRKYQRLKFRRGGAVASVALARHLAVLLYWKLRQAGTTTTSAGSHA

SEQ ID NO: 245191 - protein, 352 aa, unidentified
MKIIGCDFHPSYQQIVMWDKATGEMLERLERALSHERKEEVRAFYAGLQGPVRVGIEASGQSQWFERLLSELGHEVWIGDAAKIRASCERKQKTDRRDAELLVKLLDEDRFPRIWVPTPAERDARQLLLHRHKLVRMRTQVKNQLQALALNQGVQRKWKLWSEAGRKQLEALPLLPWASRRRAELLVLLDQLEASIGELDGAAAEQANTRPAVRRLMTHPGVGPITALAFVLTMGPAQRFRRGKQVASYLGLIPTEHSSGGRGQRLGHISKQGNPFLRGLLVEAAQSAVRHEPEMRREYQRLAQRKCRALAKVAMARKLAVRLYWMLRADLDYARLIQGSHAGQPESFRGRV

SEQ ID NO: 245192 - protein, 355 aa, unidentified
MEQVIRIGMDTSKRVFQLHGVDEEERPVLRRKLRRGDVLTFFAKRRPTRVGMEACGGSHHWARELGALGHEVALLPPQYVKPYVDRGKNDAADAAAICEAMSRPKVAKRLVPVKTTEQQSAQMLIGVREGLLKRRTQVSNTIRGHAAEFGLVAPKGLAHLEPLLARIAEDEALPLLARELFTMLAGQYRHVSAQIREIDARLLEHHRASQQSRRLEKIPSIGPVIAAALTAKVADPTRFRSGRDFAAWLGLTPKDHSTAGKARQGGITRAGDETLRSLLICGATSVIQKARRCRSGAPSWLSSLMEHKPPKLAAVALANKTARIAWKMMVTGEPYNPCRHRTHPAVGADAFAEAV

SEQ ID NO: 245193 - protein, 343 aa, unidentified
MQAVTTIGLDIAKSVFQVHGIDATGSVIIRRQLKRRHVLAFFEKLPPCLIGIEACATSHHWSRELRASGHTVRLMPPAYVKPYVKRQKNDAADAEAICEAVTRADMRFVGTKTPEQQGCLMLHRTRHLFIRQQTAVINAIRAHLGEFGVVAPVGRRGVEELLDVVADSGDERVPEVARACVGALGVQLRMLKAQILAFDRQIMAWHRSNETSKRLDEIPGVGPALATALVASVADPGAFRSGRNFSAWVGLVPRQHSSGGKDRLGSISKQGDRYLRSLFTAGALAVIRYAKIHGTKHRPWLTALLARRPTKVAAIALANKIARMAWAMMARGERYKEPAALAA

SEQ ID NO: 245194 - protein, 340 aa, unidentified
MITIGIDPHKSSLTAVALDPTGQIAASIRLEVTSTTVERLQAWAQQWDQRQWAVEGAAGLGRGVAQGLAAAGEAVVDVPAQLAARARLLNTGHARKTDPIDAASVATVAQHNPRLHPVHAEDHSVVLRLLSERRDDLAGERTRTANRLHALLRDLIEGGARRNLTAAAAAGLLRTIRPMTSIDAQRKSLARDLVADLRRLDTAIERNTAEIDEAISAHGTTLTEVRGVGPVLAAKIIGHTSVVARFPTRHHYASYCGTAPIEASSGDRRRHRLSRAGNRQLNRALHLVAVCQIRTTGPGRDFYQRKLAEAKTPAEARRALKRRLSDTIYRRILRDQQTLD

SEQ ID NO: 245195 - protein, 356 aa, unidentified
MKEISIIGVDLAKRVFQVHGVDREHKVVVQKQLARSEVLEWFSKQPPCLIGMEACATAHYWGQELSKLGHNVKLIPPAYVKPYVRRQKNDRADAAAICEAVSRPSMRFVEIKTIDQQAIQVLHRARDLLNQQVTQTGNALRAHLAEFGWIYPQGNTGLSQAIDRVQDTKNSVLPVVAQQAMFSLVEQIKTLKQEVAKLDKQMAVWHKAQADSQRLATIPGVGVITASAIVAAIGSGKQFKSGRELAAWIGLVPRQNSSGGKERLGHISKKGNMYLRKLLVLGATAQLRGKYVEKAAGGTWFGQLVRRKSARVASVALANKMARVAWAVLTKGEPYRKPSGASVSANQENALMTAAA

SEQ ID NO: 245196 - protein, 340 aa, unidentified
MLVRKVRQRTATGKSAVEYDHYVAIDWSLKTMAVAQMSRRDQVPRIFERPSNLKELKTYLGSLKGRTMITFEESGTAHWLYLELVDDADRVLICDPFQNRLLFHGPKTDKIDAGKLCELLRAGLLKEVYHSDSALYELRLLVSAYEDVVRSGVRVLNQKEALQLGHRDKGNGAVFVGEILKENIDLYRRSKEQYEQRFHGFARRNKLVRFQREIDGIGTIGAVKVVACVVDARRFPCSAKYLSYCGLVKHEKLSGGHTYGWRKPRYSRVLKSVYKTAALAALRGNNPIREYYDHLLAQGVAEHNARHAVARYIARISYGMLKSGTRYEPYRWRDAERKSA

SEQ ID NO: 245197 - protein, 348 aa, unidentified
MDHIIRIGMDTSKHVFQLHGVNAAEEPVLRRKLRRNDMVVFFERLAPTIIAIEAAGASHHWARLLRSFGHEVKLIAPQLVKPYVKRGKNDAADAEALCEAMSRPTMRFVPVKTAERQAALMLLGLRDRLVRNRTQLANAIRGYAAEFGLAAAKGIAHLAPLLARIQSEESLPGLARELFAAHAQEYAQLQAQIDEVEGKLMAWHKTNPGSRRLAQIPGIGPIGAAMLIMKTPAPEMFRSGRQFAAWIGLTPKDHSTAGKVRLGVITRAGDEGLRSALVVGATAVIRHLRNGKGRSMLSAWVEQLLKRKPPKLAAVALANKLARIAWKLMVTGETYTAKPRPIASAGIA

SEQ ID NO: 245198 - protein, 369 aa, unidentified
MEKASTYVGLDVHKESIDVTLAEEGAAGEVRHFGTIGGDLEAMAKLLRRLRRKNRELKFVYEAGPCGFEIYRFLREQSLSCAVVSPSQIPRRAGDRVKTDRRDSESLARLYRAGELAAVYVPEPEDESIRDLARTLEDVKRARQKSRQQVRALLLRHGKRYSGKCAWTKAHRRWICDLTLDHPAQKIALEEYLAAVDEASARIQRIEGALVEQVSSWRFAPVVDALQALRGVDTIAAIGLITELGDLTRFDSPRQLMAFLGLVPSEHSTGSRRRLGAITKCGNAHARRALVEAAWAYRHPARIGRRLLDRSEKLPEPIRAIAWKAQLRLTARYRRLAARGKPHQVVVIAIARELTGFLWAIARTQATLH

SEQ ID NO: 245199 - protein, 440 aa, unidentified
MNQEDRSRLEEFRQFRKEVRGSTEYLLVGIDVAKDKHHAFFGTAAGKTLFRRLIFENDLEGFRKLLVQAEAMKVQHGLKRVVFGMEPTGNYHKPLGEHLIRCGHGVVLVSGVAAHENRKTLDGRWDTNDTRDAANVADLISQGKCLFYEFPVGALQDLRNLLSLKRRLKRIEHGHRVRIRNHLVAKYFPELDRYYEQSESTALAIVRWCLDPSEMAGLEYERFVQLVGSSRGRSSQERRLQAIWKMAVDSVGCEAGPVVEFEARVMVEGLKQIRESIREIDEKIQEVCSQFPEYEFLLSIPGFGPDVSAKVLGAIGDPFRFQNGKQVLKMAGLDLSAERSGKTSQSAIPVISKKGKADLRYALYQAALIASIRNQGFIVYYTDKLRGREREPGIKTKMRVKLSAKLLIIAWTLMKKKELFDSRFLRVEPQAWEVGGGRGK

SEQ ID NO: 245200 - protein, 414 aa, unidentified
MDQTLIVGVDPHRKKNVMQLMDSQGQPLGSPLRVNNNRPGTAAFVEYVVQQMEQGQYEAIQLASEATGWYWFHLFQSLSQDPLLKQWPLELYLFNPRLTAKFKQTYSERDKTDPNDAFIVADRFRFGRDLPVPFAYEETYLPLRFLTRYYFHVTHNLAREKAYALAIIYLKASDYTHPDKKPFKNIFGAASRAVLQEFASIEEIAALDFTDLVEFIDVKGKRRFADPQDNTRKLQQVVQDSYPLPQALQQPINTILSLSFNHITFLEGQQKRLKATIAEHLTTIPNTLQTIPGIGPVFSAGLISEIGPLERFDGKETKIAKFAGFMWRKSQSDDFTADHTPLIKNCNPYLRYYFCEAANAVRMHDAEYKAYYDRKYHEVRKHQHKRAIVLTARKLVRLVVRLLTTNQPYRPRRA

SEQ ID NO: 245201 - protein, 409 aa, unidentified
MEVLYPRCAGLDVHSETVVSCVRIQEKGRARHEVRTFSTTTKGLRALREWLLAEGVTHAAMESTGVYWKPVWHVLAVSIQLLLANAMQVKNLPGRKSDVNDATWLSDLLAHGLIRASMVPPTQIQELRDLTRTRTQLMAERSRYIRRIQKALEDANVKLTNVMANVMGVTGRALLEALVSGVKVDESVVDACRRGKLKSTKAQMMEALEGDVRPHHRFLLELHIRQYDAMTRDVAAIEKRLEKLVEPFRVEIDLLKSIPGVKAATANALLAEIGPDMSRFPSSSHLVSWAGLSPGQNESAGKRRPSGVHKGPRWLKTTLVQAAWAAARKKDSYFRAQFHRLRARRGPKKAIVAVAASILTSVFHMLSRHVPFRDLGGRHFDHLDRDRTAKSLIRRLKDLGLNVQIQSPA

SEQ ID NO: 245202 - protein, 349 aa, unidentified
MLADEVDYVVGVDTHRDQHVLAVVVASSGGVVGQRSVRSNARGYAEAMRFAGDHAPGARVWAVEGAGHYGAGFARYLSSRGEMVHEVSSTARGERRLQGKDDLLDATRVARSALARTARALPRSGDRQEALRLLLLARRSAVDVRRIAIVQLRSVIVTAPESLRDELRKLPLGELLRRCSRFRRSSSRTPDQLATILVLRSLAQRIQAATHEASELEREILTHVRALVPELLDEPGVGPIVAAQLIVTWSHRGRVTSEAAFARLAGVAPLPASSGLTTRHRLSRGGDRQLNRALHTVILHRRQHDPATKDYIARRITEGKSTRDAVRILKRYLARHLYRVMQNASPATT

SEQ ID NO: 245203 - protein, 418 aa, unidentified
MLSLNVEGASFFVGIDWAAATHAVCVLDDHGRKIAAFTVAHSADGLSGLVRRLARIGAPDVMPIAIERPDGRLVDVLLEAGHPVVPVSPNAIKTWRESETGSGAKSDAGDAYVIADYLFCRARRLSVAVPYTPQTKALRTVIRTRDDLVDMRVSATNQLSALLDAHWPGAKAIFADIESPIALEFLTRYPSARHAQHVNAKRLATFCAKHGYSGRRSGEQLLQRLRAAPAGTLDETLCEAVRDAVIALVTVLKAVNAAVKDLGRSVTATLGEHPDSEIFTSLPRSGQINAAQMLAEWGDCRQAYDGPDAVAALAGATPVTKESGKHRAVHFRWACNKRFRQAITTFADNSRHASPWAAKVYADARARGLDHPHATRILARAWIRVIWRCWQDHVPYDPARHGNAIRLSQTRQNDLLAA

SEQ ID NO: 245204 - protein, 429 aa, unidentified
MNSTQNKKIEQVKETTMIVGIDVGSEKHYFRAFNWRGIELTRKPVAFSNSMEGFNSFYNTIVELMQKSELEEALVGIEPTGHYWFDLGQFMGEKSIKFVMVNPHHVHKTKELDDNSPSKNDRKDPRVIAGLVRDGRYFYSYMPTGVYAELRNASNRRFVLVEEQTRAKNRLQKWIAVYFPEYKGIYTHIDAKGGMLVLKKAPTPEEIVRLGVEGIIKIWKDAKLRGNGHKKAMLILAAAMRSIGLKAGLTEARMEIQDLIEDYELQTKRLERVNDLIKGLCQQVRYADKLLEIKGIGITTVAGFIAEVGDITRFDSTKELQKLAGLELVADSSGKHNGKTKISKRGRKRLRYLLFEAAISVVGKNEEFKEIHRYYTTREKNPLKKMQSLIAVACKLIRVFHAILTKGIRYDASKMLKDIRHPGEQLKAA

SEQ ID NO: 245205 - protein, 321 aa, unidentified
MMFINRSIIHIFKAQFDAAHLDEKGRYRHKKFDNHPEGFAAFLAWVDSLDGAKPPVCMEATGAYSVPLAESLVGRGFRVSVVNPAKIHAFAKSELSRAKTDKADAKLIARYASKMQPPPWNPPPRNIRELQAMLRRVEDLLEMQQMERNRLDTADPVVVGAIKTHLEALEKELDSTRDAIRSHINLDPALKPRRDLLESTPGIGPATSAWLLVVLSEHYHFTDAKQAVAHVGLAPRLRQSGKWAGKTRLSKSGDPLVRKALYMPSMSARRHNPIIRAFCERLKANGKHGMAINCAAMRKMIHIAFAILKSGKPFNSNLVLA

SEQ ID NO: 245206 - protein, 343 aa, unidentified
MKITSVGIDLAKNVIQVHGVDERGKAVLKKQLKRDQVASFFANLPPCLIGMEACASAHHWARKLQSFGHSVKLMAPQFVKPYVKTNKNDAADAEAICEAVSRPNMRFVPIKNGEQQAVLSLHRARQGFVKARTAQANQIRGLLAEYGIVIPQGIGHIAKRLPEILEDGENDLPGAFRQLLDRLGDHLKELDRQVGEQEVQIQSWHREHAASKKLAQIPGIGPITASALVASIGDAKSFENGRQLAAWIGLVPRQHSSGGKQQLLGISKRGDTYLRTLLIHGARAVIRVAERKAGYADSWLARLMGRRNKNVAAVALANKNARTVWALLAHGRAYQADYEPAAA

SEQ ID NO: 245207 - protein, 340 aa, unidentified
MGVFVGIDVSLENSAVCAVDEHGKLLKETKVASDPGALNACIRSLPGVVEAIGIEAGPLSQWLHKSLTDLGLPVVLMETRQVKAALKAAPVKTDRRDAAGLARLLQMGWFRPVHCKSLSAQELRVLLGARRSVQDAAINIEMSIRGMLRNFGLRLGRIGKVSFQDRVRELTEGNKLIQLSIEPMLRARAALRSELVRLERMARDITREDPVCRLLMTMPGIGSVVALTVRSSIDDPDRFRRSKDVGPAIGLTPRRYQSGETDIVGGITKAGDLDMRTALYQAATVVIHRSKKQTWLRAWAERVVRRRGAKRAAVALARRMGIILHRMWVDNTEFQAARQA

SEQ ID NO: 245208 - protein, 335 aa, unidentified
MQIYGIDLAKEKFDVSFFDLTSKKVSNQPSHKVVKNNFKSIGRFLETLPSDAVLVAEHTGVYGDTLLKCCMDCNVKIAFVGGYVIHRYRATPDRAKTDVLDCALLRDFGERYPDKLKYKTFPEEALYELRQLARHREMLVEQRKQQITADRSEDCRPIRSLAVKRSMDRIKEMLDTEIAETEKEMLKVINGHESIHHNYELVKSVDGVGLITAVELLVKTENFTKITTARQYAAYAGTAPYEKSSGKMDKGAHISKIGNRRSKTLLYICAESARLHNKEIKLYYERRTLIDKKPRHYVLNAIANKLLRIIFTLVEKGEYYDANFIRQDPRVVKYN

SEQ ID NO: 245209 - protein, 418 aa, unidentified
MNEEGNTRGSRRYVALDIHKKYSVIGGVDREARVVLHAVRVEHADLEGWLKKNLRSTDHVVFESTTNAWHVYDLLKPLAERVVVANPAKVKQIANARVKTDVRDTFILARLLAANLVPDVWVPPVHVREMRQLLSQRRQLVETHTQIVNRMHSVAHRHHLQHERGKRFNEKNTVWQKDKRLSKVEQFQLELEMENRAYIEKQISRIGKEVAKMSHQKPWAESMTYIMQLPGFGVITAMTVLAAIGEIQRFGSPQHLASYSGLTGGLDQSGTKLVQKGITKEGRKELRWAMVEVAQRAVKSDPHWTRKFQEMEKRMHRNQAIVAIARRLLELVWYVLTRRQPYRHFSQERIAYKYLTWAWQMDDEARDGLTRQQFTRYYLMRLGIGHDLTRIALDPKHPRKIASEAELLAIRPELQHIE

SEQ ID NO: 245210 - protein, 349 aa, unidentified
MTRKNTLKSLPTDTEFRVVGLDLAKSDVSIAAIPVDDNTPSLVDRMTYADLLDWAGKISPTLFAMEPCNGYSLLCLQLENLGHEIKVISGSTVSMWINTHLSGQKTDLNDAIALARLAVSDAELTPIRHKSITEIRIQTVQAVRQQLMSQRSKSIVSFKALAQQWGIPCAAGHRNLKKLRESIEAKVDLITRPVANAMLFLLDAVKSLDRQIGQLNQTLQELVMSDERGRLLQSVLGVGTQISARVITVVGNVERFNSPRSLVAYVRVAPRNFITGHKNLTKKKHGNCPDLSHKGQGKISRRGDKLLRSLFIQGAACLTRSANHQWFSVRTFLPGCQIFKRRTLHRIFP

SEQ ID NO: 245211 - protein, 352 aa, unidentified
MPMLAELIDAVVGADTHRDTHQLEIAHPTGAPIDVRSISNDTCGFTEAVGWIAEHAPGSRVVVAIEGTRSYGAALTRALTEAGLTVIECEQPTRRARRRKGKSDAIDAHLAVLAALRLDAAKLPTPRADGDREALRVLLCARDELTTTGTGQTNRLKALLRDGDDTDRALARGKLTDITLNRLARRRPPREATRAQAVRQTEIRRLAVALRDQRRELKHNRAQLQAIVNDLAPGLTDHNGIGPVCAAQVIVSFSHPGRCRSEAAFAALGGTSPIEASSGRTTRHRLNRGGDRALNKAIHTIARTRMRDCPATQAYVTRRFAEGKNEAEIRRCLKRYIARQLHRFLTTAMAPA

SEQ ID NO: 245212 - protein, 358 aa, unidentified
MQIIGVDLHTRQQTIAMLDTDTGEVLEKTLEHKAEEVREFYSALAGPVQVGIEATGSMHWFLELMEELGIDRLVGHPSEIRKAETRKQKHDRRDAALLLKLQIENRFPSIWMPSTELRDLRILLTHRHQWVRMRTRVQNALQAIALSRGLRRGKTLWSQAGQHAIESLPLPPNAAYRRAELQSLYRTLNEQVDELDKRVSDQAFQRPGAKLLMTHPGVGPVTALATDVFLGDPARFADSKALVSYVGMIPSEYSSGGQQRLGGLSKQGNPLLRFLWCEAALHAVRRDPELQRFYRRKLSQKGLGKARVAAARKLGIRLWILLRDQIDYQEFCRRGQMRQKSGGARAGMPEVAHSPAMQ

SEQ ID NO: 245213 - protein, 416 aa, unidentified
MKGTGKAREIQGRYIGLDIHKEYVLAGGQNVAQEWVMQPRRISMERFQEWVIANLRKGDAVVLETTTNVWDLYDIIAPLVSRTVVAHAGGVRQIAEARVKTDKEDVKRLIRLLIADIVPEVWVPPVEVRQLRGMISYRNRLVKTSTMIRNRLQSLLHRHNLILPNGGLTDKGWWEAQKICVLERIQIRQELAMLEEIDQHKAEVDAELGRQSLGETWGKQAMRLLQLPGFGVVISMTVLSAIGDITRFESAKKLVGYAGLGAGVHDSGKEHIEKRITKSGRKELRWAMVEAAWRAIRISPYWKEQYEKHLHRMRKPNLAIVAIARKLLVAVWQVMTKEETDLHASEEDLAYKMLVLAWDLGENERMGLTYKQFAKYALIKLGIETDITRFVRRNVPRRLAPREEVLARMTELGLTV

SEQ ID NO: 245214 - protein, 348 aa, unidentified
MRFYTNNHHYYCGIDLHAGVLYVCILDASGNVAVHQNIPATSIDLIDVLAPFLRQDLVVRVECMHCWYWVSDLCRDFKIPFVLGHALYMRAIHGGKAKNDKIDSLKIARLIKGGMFPLAYDYPADMRATRDLLRRREHLMRKRAELLAHIKNTNSQYNLSAINLNLRYVQNRAKIKDRFDDPSVQRSMDMDLHLIDFYDHELSVIECFIEKQAKQHGYQDYVSLRLIPGIGQILALTILYEIGDIRRFERVQQFASYARLVKCKAESAGKRYGTSGAKIGNAHLKWAFSEAAVGYLCSPPPKGQAYLAKLQRRMSKAKAQSALAHKLGRAVFFMLKRRQVFDETQFLS

SEQ ID NO: 245215 - protein, 388 aa, unidentified
MAQVNDLSRSLVSFEQSGTLVVVLEMSQSSWLAAGVVPGFERRPLKKISPDPAALLHLVERWRDQAVRAGQTVTRAVLAFEAGRDGFWLARWLRARDIETYVVHSTSVAVSREHRRAKTDRLDTEMLIRVFLGWLRGEPRHCKMVAIPTLDEEDAKRPSRERESLVGERTRIINRMKAALIRLGVRGFKPELLKAPERLEAMRTPEGVQIPPNMLDELRRDMARLAWVREQINAIEQARLSRLEQAPAGGPDAMVRLLARVVGVGVETADMLVQEVLSRNLRDRRAVARYAGVTGSPDESGAKRRERGLAKAGNARVRRGLMQLAWRFLRFQKESALAQWYYARTEGAAGKRKTTMIVALARKLLIALWRMVTTGEIPAGVALRTVAA

SEQ ID NO: 245216 - protein, 354 aa, unidentified
MQQPERAAEVIIGLDTHKDTHTAVALNALGARLGTTTIPVSREGYRQIEAWACSFGSVRAFGIECTGSYGAGLSRALQASGHRVLDINRADRSARRRHGKDDPLDAEAAARAVLSGQATTLAKSGTSSVEMIRHLKLARDSAVKARAQAMQMLKGLIVSAPAELREQLEGIRGKVTLVRHLAALRPGPMTSTTASAKVGLRALARRWLSLSKEIEGHDRDLDALAAAHTPELITAPGIATGTAAEMLILVGDNPERIRSEAAFAKMCGACPVPASSGKTSRHRLNRGGNRQANAALHRVIVTRMRCHQPTIDYVRRRTAEGKTKAEIMRCLKRYVAREVFTHLCKPRQPASETA

SEQ ID NO: 245217 - protein, 426 aa, unidentified
MAGVMIGIDPHKGSHTAYALDEREQRVGQVRVRASAKQVQVLLSWAADWPQRTWAVEGARGLGRLLSQQLLGAGERVLDVPPKLAARVRLLNCGQVNKNDPNDARSVAVAALRARDLAELTAEDHTEVMRIWSRRYHDLGRLRTQLLCRLHAVLCELVPGGFAKKLTVAHAVAILDRITPQTPIAQAKLDLAREMITDLQRLDAQRRDARARAARAVAASGTSITDIRGVGPIIAGAVLGYVRDIGRFADRDHFASYNGTAPIEVSSGNRKIYRLSRRGNRQLNHAIHMAAVSQIRYRGTEGRAYYDKKIAEGMSGKSALRALKRKISDTLYTRMLNDAHRRLAKRPGGQTGNDSASSAAGSHPAPPPALRTSHSRAGTNPRTDTTSQAMPTPRPAPDSRRTSRSAAGVQVEPRPGPRSGRGQDRP

SEQ ID NO: 245218 - protein, 349 aa, unidentified
MKVAVLGIDLGKNSCSVVGLDDTGKVIMRRRMHRDSVIKIASGLAPCVVAMEACCGAHHLGRILRERGHQVRLMSPEYVRPYVKAQKNDDRDAEAIAEAATRPTMRFIELKSAEQLDMQSLHRVRDRLVSERTALLNQLRAILLERGIVIPQGRRKLEDHLRTLLEGQEAILSPRVWSLLNDMQAEWRALDSRIEALTDEFAAQAKTDEAARRLATIPGIGVLNATALVAAVGNAATFARGRDLAAWLGLVPRQMTTGGKPRLMGITKRGNKYLRKLLVHGARAALPSLSASATPLGKWLTSLLERAHKNTVVVALANKLLGLSGRCCAEAKHMRGSRDGRLIEIDRTR

SEQ ID NO: 245219 - protein, 319 aa, unidentified
MKMAKANTISAGIDISKSKCDIAVHGACLPLCVANEEAGWQRAAEHLKRAGVTRVGLEASGKYERGITRYLQHAGFTVVMMQPLQVKAFAKLHLKRAKTDTLDAVLIAACTHILDVGNKVPPEARFDALADHLTFIEQIEEDIVRCKTRLEQTTDKRLRRMSEADIKRLRLRRDAELLRLEANLRKYDDLSRRLDLVESIPSIGRRTALCLVIRMPELGRVSREEAAALAGLAPFVRQSGTYEGQAHIGGGRSRVRRTLYAAALPGAFHWSPELKAFYARLRAAGKSHNSALVACARKLLVFANTVVARGTPWEAKTAT

SEQ ID NO: 245220 - protein, 368 aa, unidentified
MDEIITGFVGLDAHAESTAIGFAAAGRAAPRFIGTVGPQRSELTRALGRLGEPGSLLIVYEAGPCGYGLARELGALGYRCEVVAPSKIPRKPGERIKTDRRDALKLARLARAGELTAVTIPDERDEAIRDLSRARVDAVRARLKARQQLQALLLRHGRRYTGKTAWTAAHERHLASISFAQSAQSIAFTEYRQAVSECDMRVRRLSEALAREVECWRMQPVVGAIMTLRGLDLVAATTVVAELGDLKRFARPRELMGYLGLVPSEHTTGAKRRLGAITKTGNGHVRRVLVEAAWNYRFPARVSRALQVRQEHQPKAIREIAWRAQLRLGHRYRRLKARGLPHNKVCVAIARELAGFIWDLGRHVGPNA

SEQ ID NO: 245221 - protein, 427 aa, unidentified
MSYRIAGIDVHKRMIVVVVADVDVAGDYEFERRQYGSTPAQLRLLAAWLVEQGVEEVVMESTAQYWKPVWASLERYWKPICEKREGAGPMSGSLHLAQAQSNRGARGRKNDFADAERLVRRLVAEELTLSFVPDAEQRLWRTVMRTRYQLKCNQVQLQNRLEALLEEAHLKLSSLVSDLLGLSGRRMLQAVAEGETDPAVVAARADCRLRATQEQLCDALGAYQELHPVYRRLLKTALEEWERIEAQIAQLGQEMASLICPQQEQVQRLAEVPGLGVDSGQQILAEVGASAATFPSGRALASWVGACPGEEETAGVNRNRRSPKGNRQMRRILNQAAHAAVKLKGSIFALLYRRYVVRFGHNQTIAVIAHRLCRLIWKILHEGVHYQERGPAVSQRAKQRRTARMIRQLRSLGYSVELLHAAAGVPA

SEQ ID NO: 245222 - protein, 346 aa, unidentified
MQKIAYLAMDLHARSFTLGQMDEHGTLNKTVTFTTSEKNIIKTLQSIKAKTKYLAIEQGPLTYWAAQVANPYVDQVVPCDPRANALIYKNRNKNDKVDTKNLCRLLRLEELSAVYQPQNDRRAIYKAAALHYIDLRNQLIRLKQKIKAMYRHWGIINIFTDSVYTKAGRERYLNEIKHRPIRNQLVRLYHLMDQTEQMRNKALRAMITRGRNYPEVREFMKIPGIGDIHANLFDAFIQTPHRFAKKSQLWKYCRLSITDRSSDGKPLGYKCLDQAGIGEMKALSYRAYVAAMSGDNEVRRYFLRSLQRTHNKKHARLNTQRKILAVMLAIWKKGAVYRPELFAGSA

SEQ ID NO: 245223 - protein, 406 aa, unidentified
MNMNAVGIDVSKRKSTVAILRPGGEIVKKPFDVPHLSSDFRSLTRLIQDLDGETRIVMECTGHYYEPIARRLSQAGFFVSAVNPHIIRNFQGHDNPLRKVKTDKADSVKIARYTLDSWGNLKQYTLMDELRSQLKTMNRQFSFYTKHKTAMKNNLIGLIDQTYPGANTYFNSPVREDGCQKWVDFVDTYWHVDCVRKMSLTAFINHYQKWCHRRRYIFSKSKAEEIYGKAKELVPVLPKDNFTKRIIKQAIAQLNTTSKTVEELRNLMNETASKLPEYPVVMAMEGVGPSLGPQLMAEIGDVMRFTHKGAITAFAGVDPGVNASGEYSQKSVHASKHGSPVLRKTLFQIMEVLIKNKPDDAVYLFMDKKRAQGKPYYVYMTAGANKFLRIYYGRVKEYLLNLSELN

SEQ ID NO: 245224 - protein, 317 aa, unidentified
MRASAAFFVGIDVSKQQLDIAVRPSGESWTVAHEEASLSALVARLRDLAPTLIVLEATGGWEVTVTGALAAAALPVAVVNPRQVRDFARSTGRLAKTDRLDAQLLAQFAEVLRPAPRPLPDAQAQELTALLQRRRQLVEMLTAEKNRLPLAARRIRPQLQAHIAWLHQQIAQFDEDLRQLIRSSPLWREKDDLLRSTPGVGPVLATTLVAALPELGTLSRRQIAALVGVAPLNRDSGTLRGRRTVWGGRAQVRAVLYMSTVVAVRHNPVLIAFYQRLRAAGKAPKLALTACMRKLLTMLNAMLKHHRRWAPVRAQHA

SEQ ID NO: 245225 - protein, 343 aa, unidentified
MQVTTIGLDLAKHWFQVHGVDAHGHIVVRRRLWRSGVIAYFRSLEPCLVGMEACATAHHWARELTALGHTVKLMPPAYVKAYVKRNKNDAADAEAICEAVTRPSMRFVPVKDAEQQSVLMLHRARSLLVRQRTMLVNALRAHLAEFGIIAPQGLRHVESLTKTIAHQQERLPELARSILQTIVDQLNGTTARVREIEVRLVRWHRESRVSRLLATVPGVGIMGASAIAATVADPSLFRSGREFAAWLGMTPRQNSSGGKERLGRTSKRGDKYIRGLLTAGAVAVLRHARHRPTRDGEWVRALLARKPTKVAAVALANKTARIVWAVMMRADGYRAKEVLGLPA

SEQ ID NO: 245226 - protein, 405 aa, unidentified
MPVYTGIDWSQNKHDVTFLNETAVMMAQLVIPHTQEGFLQLDETCQRMGIAPSECVVGLETAHNLLIDFLWARGYTQVYVVPPQVVKSSRNRYRQSGAHTDASDSFVLADVLRTDRGRLQPWHPDLVLTRQIRAKVSLISFLTRDMVRLHNRLTAVLLRYYPAALHLFSRFTQIGAEFIQAYPTPQAAAALTFEDLLAFARQHQYKRPQKLQTYFARLHADYPQAMPDTVLVYQDEAPLLAATLCKLVKAKAQALSELQSLFEQHPDSPIFRSLPGAADFLAPALLAKFGDDRQRFPTAASLQALAGTCPVTESSGQSKWIHFRRSCDHEFRHITQQWAKASLKTSVWANAYWHQVRPHCRSESHAYRCLANRWLAILWKLWQLRQPYDEAYHCQQRLLRSKPRA

SEQ ID NO: 245227 - protein, 341 aa, unidentified
MQITTIGLDIAKNVFQVHGIDAAEKVVVRKQLRRGQVLKFFAALPPCLIGMEACATAHYWARELTKLGHEVRLMPAKDVKAYVKRNKNDAADAEAICEAVRRPTMRFVGAKSAEQQGRLIQHRTRDLLMRQRTQVINALRAHLAELGIVAAQGREGLKQLLTIIADEKDARLPIDARASLIVLAAQLQALQTMIGSIEKRLTVQHRANEASKRLESVPGIGTIGASAIAATVTDPNAFRSGRDFAAWIGLVPRQDSTGGKQKLGPISKQGDRYLRRILVVGAHSVLRRARQNPEKYPWLTQLLARRPFKVVAIALANKMARVAWALLARGGTYRVPALAAA

SEQ ID NO: 245228 - protein, 385 aa, unidentified
MAQSSGSPQAAMDYNSTIIGALELSEKKWVLAVQLPGVDRHSRHVLDACGERLLSFVERLKTRCASAGWKIARVVLTHEAGRDGFWLARFLARRSIEVHVMQPSSLPVDRRARRAKTDMIDAEMLLRTLMAWLRGEPRVCSMVPIPSEANEEARRAHREREDLTRERRSIVNKIDGILATLGVKGYKALRRDRREQLTSARQPGGDPIPQKARARIERLLDRLDLVLKLIDQVESARDAVLKKAAPADEAERMIRSLTDLRSIGPHVATLLVREAFVRQFRNRRALAGYVGLGGTPFSSGGSEREQGIGKDGNRRVRAAMVELAWMWLRWQPDSALSVWFRARVGAMGGRIRKIMIVALARKLLVALWRYVTDGVVPAGAKLKAA

SEQ ID NO: 245229 - protein, 343 aa, unidentified
MKEVITIGVDLAKNVFQVHGVDADGTVIVRRQLRRAQMLAFFKKQPPCLVGMEACATSHHWARQLIGLGHEVKLMPPRYVKPYVKRNKNDMADAEAICEAVTRPSMRFVEIKTPDQQSVLMLHRTRHLFVRQRTTLINALRAHLAEFGIVAGVGRNGLERLLKVIEDGEDNRVPPTARDCLLALRDQLEMVKHQIIEADRHILAWHRSSEVSLRLDDIPGVGPLIASALVASIPDPHAFKSGRDLSAWIGLVPRQNSTGGKERLGHISKAGNRYLRMLLVVGALSVIRRAKQVGYTRRPWLTKLLQRRSTKIAAIALANKIARTAWAMMAHGTCYQEPRARVA

SEQ ID NO: 245230 - protein, 316 aa, unidentified
MTEEAVCVGVDVAKRTLDLAVSNSTEIRQFENDHEGITSAASYIAGLKPTIIILEATGHFEMPLAAVLQTNHLPVVIVNPRQVRDFTRATGVLAKTDKIDSRILALFGLQIKPQVRLLPDQKVRNMESLLSRRRQLIEMLTAEHNRVLQAEDGIRKSIKIHIKWLEKAISVINDDLDSQIRNSPSWREKDDLLKSVPGVGKVVSTTLLIELPELGQLNRRKIAALVGVAPLNRDSGTMRGKRIVWGGRAKLRTVLYMAALVGVRHNPVITSFYERLLKAGKAKKMALVACMRKLLTILNAMIRSNTVWQEAAMEIK

SEQ ID NO: 245231 - protein, 344 aa, unidentified
MTYYAALDVSLRSVHVCVIDDQGEIVAETKLDSEVTDIIAYLDSLELEVASVGLEAGTLCQYLTYGLQSAGFEVVCMEARQVKAALSAMRNKTDKNDARGIAQLLRSGWYSQVHIKSMASHRIRALLSSRKAVLCKCIDLEQEIRGLFKVFGIKLPPKLGHGAFDAAVRSIIETDATLSFALLPLLEARLVLYHCFRELDNRTRKLANDDSVCRRLMSAPGVGFITALTYKAGVDDPTRFKRSRTVAAHFGLTPRRFQSGEMDIEGHISRCGDRNVRCTLYTAANALMTRSSRWSSLKVWGMQKAKTRGHRKAVIAVARKLAVILHRMWVDDTQFNWGMEEARS

SEQ ID NO: 245232 - protein, 323 aa, unidentified
MSNKATKKRRHFVGIDVSKKLLEVAAHQSDYHFCCPNDPQKFSVLIAELISLRPARIVLEATGGLERALVQALHGAGLPIVIVNPRQVRDFAKALGHLAKTDRLDALVLAHFAAAVQPAVRPVKALQETDLDALMGRRSQLSDMLTQEKNRRGSAATKATRDDIEEHIEWLEERIKELDEKLKDQLECSAVWKQKDEILQSVKGIGFVTSLSLLADCPELGQLNRHQIAKLVGVAPLNRDSGQQRGTRHIWGGRAQVRSKLYMATLAAIRSNPVIKSFYQRLIAHHKPKKIAIVACMRKLLTIINVMVRDNKPWNVKAQPVSA

SEQ ID NO: 245233 - protein, 350 aa, unidentified
MDKISALAGATVVAAGIDMAKSTFSVCGLDAAQRVVLERTINRGTLIELFARLQPCTVGLEACSGAHQLARELTALGHTVRIMAAKFVVPHRTSGKNDRNDARAIVDALIHRRTRFVPVKSEEQQALLSLQRARSGFVEERTALVNRIRGLLAEFGVTLPVHIEKVRHGALRAAQRLPILARQVIEQLHAHLLILDQRIGQYDRQLRELARHSEAASRLTGVLGIGPVTAITTVAMIGDGRGFKNGRQFAAWMGAVPRQYSTGGKTRLGPITRHGDVYLRSLFVQCAKALLAVAPRRNDHLSRWALAVRGRRGFGKAVVAVAAKLARIAWAILAKGERFRVQASVPSATR

SEQ ID NO: 245234 - protein, 366 aa, unidentified
MKKISTVQTFKSEIFKEQELTIGLDLGDRWSFYCVRDEAGQVILEQKLPTTPEAMKQTFGKIPRSLIALETGTHSPWVSRLLTQLGHEVLVAHAQKVQLITKSSRKDDRHDAQTLARLARVDPELLGPVRHRSVQAQIHLTVIRARAELVSARTALVNAARGLVKSYGERLPKGGTYQVSGKLAEGLSTELREVLVPLLTEIESLNERIKEYDERMEKIAKEVYPQVSLLKQVKGVGTQIALTYVLTIEDPYRFPKSREVGCFLGLRPGRRNSGKSAPQKHIRKEGDRYLRTMMVQGAHYILGPFGEDSDLPRWGLQLAERGGKNARKRAVVAVARKLAILLHRLWVSGEVYEPLRNSQKAMRAVA

SEQ ID NO: 245235 - protein, 436 aa, unidentified
MRGCRCSMIMGFTKPIEHFNLQQKKVITTNTLYVGIDVSSKSNVIYLMLPNGDKHSNFSVANSREGSTQLVKRILSALTSHSLDTVLIGLEATSVYGDNLVYFLREDATLAPFNRKIHILNPKQVKKFHDAYNDLPKNDYVDSFVIADCLRFGRINKEVYMGDYRYKALQNLTRARFFAVQNLVKEKQRFMNVLFKKYSTMTQEKVFSDTFSTTALAVYDEFESAEALANMDLHELTDFIIEKGKNRFPDPDAVAKAIQKAARSSYRLPKTVNDSVNQVLSISITSMKALESQIKEFDKAIKAQMELLPNVLISIPGIGPVYSAGIMAEIGDINRFNSQAALAKYAGLAWKQHQSGGFEAEVTRLIPSGNRFLKYYLCEATFSLVRCDKEYSDFYHLKYKEVNRCQHKRALALTARKFVRLVFRLLKDNRLYCPAK

SEQ ID NO: 245236 - protein, 350 aa, unidentified
MWIIGCDLHTRYQQVAALNTESGELVERRLSQEGNEVRQFYAALPQPSRVGIEATGHAQWFERLLAELGHQLWVGDAAEIRASVVRQQKTDTRDAQHLVRLLAEGRFPRIWIPSAEQREVRQLLLHRSKLVGMRTSVRNQLQALAMSQGLRRRRALWSGPGRKQLEALALGCWGIERRKDLLALVEHLDARIATLNQEVAAEAHRRPEAARLMQQPGVGPVTALAFVLTLGPVERFRRSKQVVSYLGLNPREYSSGGHQRMGRISKQGNTLVRWLLVEAAQTAARCDPQLHRVYLRLKHRRGARIAKVAVARKLAVRLYWMLRAFPSYAQPVSPQSCPCTVMVPPAGSNS

SEQ ID NO: 245237 - protein, 317 aa, unidentified
MTKTSTAVAGIDTAKDKLDIAVHGQALHWQVENALRGWKYLRSELAKAGIECVGIEATGGYERGVVRHLQEAGFTVLVLQPLQVRAFARVHLRRAKNDALDAALIAACTAAMEKPRIAADQRLASLADHLTFLEQLEEDMARFKVRLEHINEPGLRCTVLGDIARLKARRLTQIRFIARQLQAHGDLAARLDLVLSIPGIGERTALALIIRMPELGRVNREEAAALAGLAPFDDDSGKHKGQRHIAGGRRRLRRSLFAAALPAAFRWNKALIDLYARLKAKGKAHNAALVACARKLLIYANTVVARGTPWTDRHAFS

SEQ ID NO: 245238 - protein, 348 aa, unidentified
MAHFVGLDVSVKKTSVCVVDAADRVILEQTVPTEPADIIALLTSLGVSFCRIGIEAGPLSQWLVNALTAAELPVICVETRHMKALLTAQQINKTDRNDARGIARMMRVDLFKPVHVKTLVAQEQRMLLTSRKLLQRKLLDLELELRGTLRNFGLKVGIVSGSGYEARVRELVVGFPRLAAIAEPLLNVRRVMRQQLAVLHKMLLDTVRDDPVCRRLMTAPGVGAVVALTYRATVDQPQRFVHSRAVGAHVGLTPKRYQSGETDYDGGVSKCGDALMRTMLYEAAHSLLTHSRKWSWLKAWGIRVAQRRGMRRAIVAVARRLAVVLHRMWVDGSEFRWSKHSVAVPPVA

SEQ ID NO: 245239 - protein, 350 aa, unidentified
MSESYEGRQIVGMDLHRRRSVLVRMTESGERLETVRISNDPEYLKQVMARAGEAPEVVLEACYGWYWAADTLAELGARVHLAHPLGVKAFSYRRVKNDERDAADLADLLRMGRLPEAWIAPPATRELRGWVRHRAKLVGLRSNLKCQVHAVLAAAGTTVVMSDLFGVSGKDLLASVRLAPESRARVDSAMRLIESLDFEIELFGKLVGGRLRTDPGYLAVQQLPGVGPVLAAVFVAEVGDIARFAKPAQLASWAGLTPKHRESDTTVHRGRITKQGSRLVRWAAVEAVQRVGPHTALGAFRDQVAARRGRNIGVVAAARELTELIFYGLRDGQIRRPVAPCSPRRGTPAA

SEQ ID NO: 245240 - protein, 366 aa, unidentified
MKKLSTATAHGIDKLQTHQLTIGLDLGDRSSYYCVLDEAGNIVLEEKVATTPKALGTRFAAMPRSRIALETGMHSPWVSRLLSGLGHETIVAHARNVRLIGESRRKDDRLDAQTLARLARIDPQLLSPVKHRSAQAQADLTVIRARAGLVRARTALINTARGLTKSYGERLRGCNPRNMNPEKASALSPELQRALEPLLAGIESLSEQIRKYNERIEQLAQESYPQVALLKQVKGVGTLIALTYLLTLEDAHRFRKSRDVGCYLGLQPGRRNSGQSQPQLHISKQGDPYLRTLLVQGAQHILGPFGADSDLRRWGLKLAERGGRSGKKRAIIGVARKLAVLLHRLWISGEVYEPLRNSRQLVPAAA

SEQ ID NO: 245241 - protein, 351 aa, unidentified
MIVIGSDPHKRGYTCSALVAGTGELRSSESVQATSAGHERMLAWARGLGGERVWAVEDCRHVSGKLERFLLARGERVVRVPPKLMAGRPRGSRQAGKSDPIDSLAVARAALEEGIDTLPVAALEGPAREIKLLLDHREDLVGERTRIQCRLRWLLHDRWPELELPTGCLDRMVWLDRLAGRLARSSQDADVRVMRDQLRRLKELTRQAVSIERELLLLVGGLQPRLLALPGVGALTAAKLIAEIAGIERFRNPAKLARLAGIAPIPAQSGNSTRVRLDRGGNRQLNAAVHRVAVTQLRIHPPAKDYIARRISEGKTKPEALRCLKRHLVRTIYNTMTPANANTPATALALT

SEQ ID NO: 245242 - protein, 417 aa, unidentified
MKKHSNSLKQSEAPAKRRKLGVVVERKPQEVMAELIVKLAGQLDVEIVPAVEGKKDGRDAVHPNLDRLTVGVDLGDQWSNYCILGLGGETLVEGQFRTRKQEVAEFFQALAMSRVVVEVGTHSAWVREIIAGFGHEVLVANPRLMEGSKRRRRKSDRIDAEKLARLGRMDPKSLHPIEHRSTEVREDLVILRARDALVKSRTELINSVRGQVKSMGGRVTGCSSVAFSQKAIAEIPEEVHETLQPLLRLIATLSEEIKTFDQRIEKLAAEKYMQTQLLRQVSGVGPVTALAFVLTLETPLRFARSGDVGPYLGLVPKQEDSGDIQPQLGISKAGDRMLRKLLVGSAHYILGPFGPDTDLRRFGMRLCERGGKNAKKRAAVAVARKLAVLLHRLWASGEVYEPLGHGSVTRPAQAVAA

SEQ ID NO: 245243 - protein, 394 aa, unidentified
MILVGIDIGKNKHTFSIINKSSGEILLSPSDFSNNLEGFLFLIQKLNNYTKSELLIGMEDTGHYHFALLKYLLDRRYTVALINPTTTDLTRKLQGGITKNDPLDSLTICDVISSNHRNKPYRVTKLNRFDLYEQKQLTRHHHNLKEELNTYKNRLQKCIDIVFPEFNSLFHSKYGIVYMNILKIFSSAKAIANADIRSIRKCFEFKGKGKRIFLSAEQLKLTAKSSIGIPSVAEEIQIRHLVSQIELLKKQISEIDKRIEEFSLKNNSPILTIPGISHFSGTSIISELGEICNYTKASQIIKFAGVAPYHYESSQFTAQHTAITKKGSKYLRKTLYQIILPVISNNEVFHAYYTKKLNEGKGHRCAQGHCIRKLLRVIYHILSTGQPFNPELLV

SEQ ID NO: 245244 - protein, 319 aa, unidentified
MEKKSYVGIDISKDTIDVAVHKDNRHWGFANNQAGIGKIISMLRELPPELVVLEATGSYEVPLAAELGVAGIPTAVVNPRQIRDFAKSVGMLAKTDILDARIIARFAATVQPTPHPIPDIETQELGAIIARRRQVVDMITTEKNRLRTAGKTVKTRIHAHIDWLEQELGDINRNLQQKVKDSPIWREKDELLQSVPGVGPNLSITILAELPELGTLNRKQVAALVGVAPLNRDSGRLRGKRTTWGGRRTVRTALYMSTLVATRYNPVIGCFYERLCAAGKAKKVAITACMHKLLTILNAMLKYRTSWAHSVSQIFGPCH

SEQ ID NO: 245245 - protein, 341 aa, unidentified
MNVTTIGIDLAKTVFSIHGTNQHGKVVVRKRLNRPKLLAFFAQLPPCLIGMEACSGAHYWARQLTKLGHDARIIAPRFVAPYRKSSKNDDNDAEAICEAVSRPNMRFVPIKTDDQQAVLCLHRIRRGLTKERTAQINQIRGLLAEFGLIIPQGRYHARHRIPEILEDAENGLPMLARRLLNNINQRILQLDEEILAYDREIEAMARRDEQAKRLMAIPGIGPQTATAILASAPDPRQFKSGRHFAAWLGLVPRQYSTGGKPRLGRITKRGDKYLRMLLIHGTRAVIAKLADKHDQLSQWAKGLVERRGYKRAAVALAAKNARIIWALLMNQTEFKTQPAEG

SEQ ID NO: 245246 - protein, 353 aa, unidentified
MLIIGCDFHPGFQQVAIFDNQTGEYEERRLGHREEAEQFYRSLAGQQVLVGMEACGHYPWFERLLAELGFELWLGDAAEIRASVVRKQKTDRRDADHLLTLLRENRFPRIWVPSLEERDARQLLVHRHKQVQARTRVKNQLQAMALSQGVQKKRKLWTAAGRGELEKLELLPYAAERRKQLLQSLDELDAEIEQLNRRVEEEARKRPAAVKLQTHPGVGPVTALAMVLTLGPAERFPSGKEVGSYFGLIPSEHSSGGQQKLGHISKQGNSFLRFLLVEAGQTAARYDAELGRFYRRLAVRKHRALAKVAVARKLAVRLYLMLREDWTYAQLCRAVVQASPSHPVVGRQSRALE

SEQ ID NO: 245247 - protein, 364 aa, unidentified
MSSTKYIGMDVHKESISIAVMNAAGKIVMECVIETKANMILQCIDGLRGDLHVTFEEGTSAAWLYDLLKPHVTELIVCDPRKNKSMREGNQNDKIDARRFAELLRVDHLTPVYHGEHGLRTLKELVRSYLTITKDLARVKSRVKAIYRSWAIPCTGKQVYARCHRGEWLGKINEPGVRRRAEFYYQQLDALRVLRQEARRDLLAESKKQKAWKRLCEIPSIGPIRSAVLLGILQTPHRFRSKRPLWNYGGLAIETHSSADHRRVDGQLRRSRKNVLVRGLNRNCNHDLRTMLVHGAHYILGPFGADSDLRRWGLKLAGRGGKNAKKRAVVAVARKLAVLLHRLWVGGEVYEPLRNSQKAMRVAA

SEQ ID NO: 245248 - protein, 358 aa, unidentified
MNRNAGMNAGQIIGTMNGQQVIGLDIAKHVFQMHTVDMGTGEIINVQIKRAKVLEHFANKPPSLIAMEACGGAHHWARALVALGHTVRLLHAKAVRPFVAGNKTDATDARAIWLAVQQPGVKFVGIKTTAQQATLTLHRQRELLMKMRTMQTNALRGLLYEFGATFAQGRQALLKDIEQTLEGLSSQLPQMVADSLREQVERIKALSKDIAAIEQRLALQLKSDADMRRVAQIPGVGLLTATAAIATMGQASAFKSGREFCAWLGLVPKQTGSGGKVRLGGISRRGDTYLRTLLIHGARSVLSHTREAGPWLAQIKARRPANVVIVAQAAKMARTIWAVTAKEQAYQLDFKSVRPLAA

SEQ ID NO: 245249 - protein, 346 aa, unidentified
MKYIGLDVHSTHINCAVIDDQGNLIHHDRFNTSLKNLINLSENLKHPLSLVFEEGELADWLYQGLRSHFEEITIADPIENRMIYGGDQKSDPIDPLKLATLLRGGFINPVHHTWNHHRSQFKQLVFAYHDMARQVTRIKNKLKAYYRKQGLIIKTNSVYHPNKRDLFIKNSPHPEIIEKYYHFLDLFQQEKDRFERTLKKESRRYPIIGRFLKIPGVGIVTATTFFTIVDNPHRFDRKQQLWAYAHLGKAFHQSGNWEVTKHQRKGNRLLKYVIKIAAGDGVRQKTNEFTRAYIHMVNFQHKEPKLAYRILARKLLTIMWTMWKNNQSYKPRENDTLLKETAYDLS

SEQ ID NO: 245250 - protein, 423 aa, unidentified
MKVVYPICCGVDVHKKFLVATIITSEGIMPRYQKKRFSTFNNSILKFKQWLLDNNCLDVCMESTGKYWVPVFNLLEDSINVTIANPKWVKAVKGNKNDKKDSKWIGDLFRLGLVPGSFIPSKPIRILREYTRYRFKLVSCKSSEKNRFQNVFTVCNVALDAVVSDMFGKSAASITDYLIRSDSFDPQHCISLLKGSIKKKADAVIQSIEGFQMTPEQKYRALMIQNHLEFVENSIKRLDEMLNVLAAPYESAIRLLCTIPGVDRTSAITVISEIGTDMSHFSSSKRLCCWAGLTPGNNESAGKKKSVRITRAGVYLKPALVQIAHAAVKSKDNPYYRIKYERIVKRRGKKRAIIAIARMILTAIYHMLSTGEIFNPCDLYQVDMPQELRDKQKEKALKRAIKLLVTQGIIQASDILAISLQSA

SEQ ID NO: 245251 - protein, 348 aa, unidentified
MISMPDSVIDVVGGVDTHADAHVAAAVDRLGRVLGTGAFATTRSGYLELIAWLESFGRVTTVGIEGTGAWGKGLTRVVQDTGIDVVEVIRPNRQTRRRYGKSDMVDAIAAARAVLNGEATATPRDTDGTIEALRLLRIARRSAITTRTRTANQLHAVITTAPDPIKAQLNGLTMTRITRIATNYRPGTNLTNTTHATKYTLKTLAQRWRTLTNEINHLNTQLDTLVAHAAPPGLLDICGVNTHTATDLLIAAGTNPHRITSDQSFAALCGVSPVDASSGHHIRHRLNRGGDRQANAALYRIVIVQLRYHQPARDYMTRRLQQGRTKPEIIRCLKRYVARTIWTHLNPN

SEQ ID NO: 245252 - protein, 404 aa, unidentified
MYNAVGIDVSKGKSTIAVLQPGGTVIRKPFDVSHTSQNLNELADYLGSLEGPSKIVMECTGRYHEPMLKVLYEAGLFVSVVNPHLIKNFGNNSLRKVKSDPADARKIARYTLDNWAELRQYSDMDDTRTQLKTLNSQFSFFMKQKVAAKANLIALLDNTYPGVNKLFDSPTREDGSEKWVDYAYSFWHVDCVRKIGLKTFTERYKAFCKKHHYIFQQDKPEKLFNASKELVAVFPKEKTYKLLIQQSIQQLNLASGHVERLRQEMNALASTLPEYNTVMGIYGVGKTYGPQLIAEIGNVSRFTHREALTAFAGVDPGVDESGHHKSKSNRASKVGSARLRKTLFQIMTTLLQNAPVDDPVYRFLDKKRAQGKPYYVYMTAGANKFLRIYYGKVKECLRNLEQAE

SEQ ID NO: 245253 - protein, 331 aa, unidentified
MSPRRHGKPTAEAILANPVSFITLGIDVSKDELVCCNYAEIDQIDRVPNTLAAIRTWLSTFQGPLRIAIEPTSTYHVEVVEVAIERGFVVYLINPRQLVHYREAVNEVNKTDPVDAYLLARYLDREVDQLRPFQPQDRRAQQLWALLKRRATVVDARKRLQQSLAGIGLPHKALLGQIDVVLKRIDLRMQQLLHELGWWADYLHCKSIPGVGPLNATALIAASHRGAFSSVDAFIAFIGFDIRLRESGRFKGKSKLTKRGEAELRRLLYCAAAPSRSYLPFKLFHQRQLDKGMPKIAANVVLARKIARIAFALIRKHQDFIKLTNEVAIQA

SEQ ID NO: 245254 - protein, 402 aa, unidentified
MNAVGIDVSKGKSMVAIMRPFGEIVSAPFEIKHTASDIHSLVELINSVEGESRIVMEHTGRYYEVLAHQLSKANLFVSAINPKLIKDFDNDSLRKVKSDKADSVKIARYALDKWQNLKQYNVMDELRNQLKTMNRQFGFYMKHKTAMKNNLIGILDQTYPGVNTYFDSPARSDGSQKWVDFASTYWHVDCVRKMSINAFIDHYENWCKRKKYNFSKSKAEEIYGKAKELVPVLPKDDITKLIIKQAVDQLNSASITVESLRTLMNETASKLPEYPVVMAMKGVGTSLGPQLMAEIGDVSRFTHKGAITAFAGVDPGVNESGSYEQKSVPTSKRGSSDLRKTLFQVMDVLIKTHPQDDPVYQFLDKKRAQKKPYYVYMTAGANKFLRIYYGRVKEYLASLPES

SEQ ID NO: 245255 - protein, 357 aa, unidentified
MAEGSWVGLDVHARTTLAGVLDAASGELSLQRVQPRSEETIAWLLSLAQPVRVAYEAGPTGYGLARACARAGIACTVAAPSKIPRAPGDRVKTDRRDAERLARLLRLGELVAVRVPDPVGEAARDLVRAREDARGDLMRARHRLSKLLLRHGLVYEGSAWTRAHDTWLRRQRFAGSVLALACEESYGAVAQAKGRRDALDQASVELAGEPPFCEVVGRLCCLRGVSTLSALALSVELGEWERFRAESLGPFLGLVPSEDSSGERRRQGAITKTGNTHARRLLVEAAWHQRRPLRTSAALERRRQGQPAPVRARADESARRLHQRWHALEGRGKRRTIVAVAVARELAGHRWALATMK

SEQ ID NO: 245256 - protein, 421 aa, unidentified
MKRADRWKVKGVKDDTLIVAIDVGMEMNRGYCTTPDGRSTKPFKFDNTREGLDTLWGMVMASKDRFKCNEVIVGYESTGPYGEPMVHYLMKKPVRVVQVNPMHTKRVKEINDNSPLKTDDKDPRVIADIIKLGRALSVVIPEGDAAYLRRLNNSRERHVRERTALVNQLQQLVFLLFPEFKKVIKDIKCRTPLYLLKKYPTPEAISVLETHVLGEEMRKKSRGKFREQHADMLITLARNTIGIREGVSGFSMDIRHILVQLEMLKDLIAEIEGEMEIALGRIPYSSKLLSIKGLGVVSVAGIIGEIGDFKKFGTQPEIIKLAGLDLYEISSGKMKGQRRISKRGRSLLRKILYYAAIQTIRKNGILHDYYTRLTDRGMKRMMALVAVSRKLLGIIYAIVRDDSEYSVNFESMKRQVIKKAA

SEQ ID NO: 245257 - protein, 333 aa, unidentified
MKIYVGIDIAKLNHFAAAISSDGEIILEPFKFTNDADGFQLLVSKLESFDKNSIIIGLESTAHYGDNLVRYLVAEFYQVCVLNPIKTCQMRKNNIRKTKTDKVDTFVIAKTLMMQDDLRFVSFYDLDMMDLKALGRFRQKTIKQRTRLKIQLTTYVDQVFPEIQYFFKSGLHQHAVYALLKEAPSPKEIASMHMTHLANLLKVNSHGHFTKELAKELRVLAQKSVGANDSAISIQITQTIQQIELLDSQLEKIEAEMTDIMKFNDSVIMTIPGIGYINGGMILGEIGDIHRFSNPNKLLAFAGLDPSVYQSGNFQAKTTRMSKRGSRVLRYAL

SEQ ID NO: 245258 - protein, 314 aa, unidentified
MVQDSAGKTLRSGRVKNDRQSLGGFLERYRENSHAVVEATRNWMVMYDWLDDICDDVVLAHPLKVKAIADAKIKTDKIDATVLAHLLRADLVPEAWAPGEGARELRVALRERMFYVRTITKNRIVTVFDRYPEQTAQLKKLGDLFGKAGRIQLAQVNVSEIDRIQIDRGLDFIGDIDVRIKQSEATIRTMTKANANVRLLKTIPGIGEFFARLIDAEIDDISRFRTPKKLAAYAGLVPSTYSSGGKTFHGKIIKQGNKWPRWAFVEAVSPAIATDSQLRAQYEHLKIRSEQGAGCHRAQAFDDRLPDPAGPARL

SEQ ID NO: 245259 - protein, 306 aa, unidentified
MTKVMGPVFVGIDVSARTLVVALERDHQPGRQRREFLNTAVGHEGLIQWLSKSATAVQVCIEATGLYSLDLALALHRAEGIEVMVANPRAIADFAKALLQRSKTDQLDAEVMLEFARRMPFVAWQPPSSPQLDLRALMRRITGLKLVSQQEKNRLHSVSQSAEITPLVRKDIQSHLVQLERHIEKLEHQAETIVQADRELARQFCHLVSVRGIARVSALHLLAELVVLAPDMTARQWVAHAGLDPRHHESGTSVHKPTRISRAGNRYRRSALFMPTLVATQHDPKIGPSTRSWWTTEKPRCKPSWP

SEQ ID NO: 245260 - protein, 342 aa, unidentified
MDEYDGRQFVGIDLHRQRSVIVRQSESGEQLSAVRIVNDPVALELQLEEAGADPEVVLEATYGWYWAVDVLQACGARVHLAHPLGVKGFRYRRVKNDVRDAADLADLLRMGRLPEAWIAPPETRELRELVRYRAKLVAIRSGLKAQIHAVLAKAGVLIAVSDLFGVTGRQRLAKVPLGPAYAQRIGSLLELIDILDSHEARFAAMIAERLDTHRGYQAIQQVPGIGPTLAAVFVAEIGDVHRFTDPAHLCSWAGLTPRHRESDTVVHRGHITKQGSKAVRWAAIEAVQRHPTTAKIAADKQRIEARRGKNIAKVAAARKLLTLVYYGLRDGQIRALDRARAA

SEQ ID NO: 245261 - protein, 290 aa, unidentified
MSQSRTLFSGMDVHKETIAVAYVAQEHGAEVTSLGTMGTRQCDIDQLVRKRPSKAKHLICVSEAGPCGYWLSRYLTKKGYHCWVVAPSLMPKKSGERVTTNRRDAVQLARLARSGDRPLVSVPNVADAAIRDLTRAREDTIRALKDATFRLKAFWLRQDIRYAGRAHWGPAHLQWLSAVVCPTAAQPSVFHDYVRAIHAHTERLQRLAQALPAQVHVWRLPPVVEALQALRGVPLTVAVTLVADIGDLTRFETPRELRKCLGLIPSEYSTGNHRRQGAMTKAGPPLRDER

SEQ ID NO: 245262 - protein, 449 aa, unidentified
MVDIVLRRCAGLDVHKAQVTACVVVIDDRGELREEVRTYETNMRGLEALRGWLLAEAVTHVAMESTGVYWKPVFNVLEGHVPNVLVVNAKHIKNVPGRKTDVNDCQWIAQLLQHGLLQGSFIPPENVRQWRDITRTRTRLVQEKTRYANRIQKTLEDANIKLSTIASDVLGVSGREMIRALASGESDPLVLADLARGRLRERLPELRSALRGRVTEHHEFMLTFLLDHLEQIERDIGKLDERLRSLMLPFQETLDRLQTIPGIALRTAEILLAEIGPNMAQFPSPQHLASWAGLCPGNNLSAGKRKDLKVKKGSKWLKSALNEAALGAARKKGSYLRAQFYRLKARRGAKKAAMAVAHTMIVAVHEMLTSKRNFADLGESHFDRKNRDRLLRHHLRRLRELGIDPAQLSALGLAQPTPPIDDPAPLAPPNVEAEPRPKQTVLFDKARSA

SEQ ID NO: 245263 - protein, 414 aa, unidentified
MDVLHERCAALDIGKKELKACVRSPNPQRKNSRRQEIRTFATTTNALLELRDWLVAEQVTLVVLEATGDYWRGAFYLLEDVLNVILVNAAHAKGLPGGKTDVSDSAWLCQLGECGLLKASFVPPEPIRHLRDLTRYRATLATERTREAQRLEKELEDAGIKISSVATDILGRSGRAMLTALIDGEPGVHTMAEMARGRMRPKIPALVEALTGNFGEHHAFLCRMHLERIDQISATILELSTRIEEEMLPFSRQLQHLSTIPGVGQATAEVIIAETGGDMTRFSTPEHLASWAGVCPGHHESAGKRKSGKTRHGNKWLGGALGTAALAAARTKDTTYLGARYARLVRRMGGKKAIVAVEHSILTAVWHILTDNVDYHDLGGDYFARRDPETAMRRIIRQANALGYTVRFDPIQAA

SEQ ID NO: 245264 - protein, 386 aa, unidentified
MSKPNDLSRSLIAFEQHSTLIAVIEMSLSSWLVAGIVPGIERHPLKKLDADENALLKLLHRWRDEAVKAGRQITRIAVAFEAGRDGFWLARWLRKHGMEAYVIHPNSVAVSREHRRAKTDRLDTELLKRAFLGWLRGEPDHCSMAMIPTLAEEDARRPNRERENLVGQRTRIVNRMKACLVRFGIRTFKPTLRKAPERLETLNTPEGTPLPPNTLAEMRRDMARLRFVIDQIKEIETTRLQRLKQAPDQGPEAMVRLLARVIGVGIETADMLVYEILSRNLRDQRAVARYAGLTGSPDESGKKSREKGLARAGNARVRRGMIQLAWRFLLFQKDSALAQWYRAVTKDARGAIRKTMIVALARKLLIALWRMVTIGQMPENVALRAA

SEQ ID NO: 245265 - protein, 390 aa, unidentified
MIYVGIDVAKDKHDCCILDDEGRKIYPIFTITNDKVGFDELFSRIEDVTTDKTEIKVGLEATGHYSNNLLASLVDKGFPTVVINPLHTNLFRKGLSLRKTKTDKIDSSTIAMMLMTDRTLKPYSDISYHNEELKSLTRYRFDKVHERSKLKTSLSRLVNILFPELEKLVPSLHLNSVYDLLEELPGATYIASCHLTHLKTLLENSSHGRYGRDKAIEIRNAAINSIGSPMASKSMELVHTIQLIRMLSEEIDEIESSIKMIFDELHSPIMTIPGISYRMGAIILAEVGDFSRFCNADKILAYAGMSPSTYQSGKLESSYSHMEKRGSKYLRYALFNATKFVCKWDETFAVYLAKKLSEGKHYNVAVSHVAKKLIRTIYRMELTGEAYSPR

SEQ ID NO: 245266 - protein, 485 aa, unidentified
MKKRTIFQQQSQELMQIYEEAGNSKKVLVVAMDYAKKEHTVMFCNGNGDILRKPFGVWNSPEGVDYLLKQVKRNCNYHKIKTKHVFFGGEDCGSYTENFAQSLRGRGYLVAGVNAHDAKTQRENIQASTDRLDLLGIARMLISRRGNCAASQSGAYRNLRTLVRHRRKIVTLSTEERNRMHCLVDRLFPGFLQERQSGLMPFHKPSLRMMEKGFSAAQIKRRKQATLVDILARAGAQKPEQKAKQLQAYAGTVLQPPREYVTTWQTSLTEHVSLYRCLLGNITSLEREMALWLAQTQGAFLMSVKGIGLVLAAGVTAEIGNPVTQKPVGHLTSYSGIIPRVTQTGGSDRSGHTGSVAKRCNRILKDYLVQSASHLGLHGVDDLMADHKRREANGQHANFGIARRYLRMILHMMRFSHIYLPPELRMDAACEARGRYYQMIWPYLLDKWKKYDAHEVAFAPENPLGRWRDMVQGLYKITLKIESRS

SEQ ID NO: 245267 - protein, 358 aa, unidentified
MIKYSLGIDISMKIFYACLSVIDNQQQIKVKASRKFTNNAAGFKELYDWMKKHYKQHDIPLHIIMEATGVYYEQCAMYLYKKGFTVIVVLPNKAKKYLQATGLKSKNDKIDAKGLAQMGAEKRLDPWQPMDDFYYTLRSLTRHHESLQNIKTNINNQLHADNAGMYANKQVGKQLKNLIETIDTQIAEIEKSIEDHIVSDSTVQQKVDGIVKIKGIGLMSVATLLAETNGFLLFENIPQLVSYAGYDVIEDQSGKHIGKTKISKKGNSHIRRILHMPAFNVVRYQVSPFLQLFNRTFQKHNIKMKSYVAVQKKILIIIYSLWKNEQPFNEEYYKDHTTRDEELVQPSRLSFEEAVQTT

SEQ ID NO: 245268 - protein, 398 aa, unidentified
MTRKNTLKSLPTDTEFRVVGLDLAKSDVSVAAIPVDNNTPSLVDQMTYADLLDWAGKISPTLFAMEPCNGYSLLCLQLENLGHEIKVISGSTVSMWINTHLSGQKTDLNDAIALARLAVSDAELTPIRHKSITEIRIQTVQAVRQQLMSQRSKSIVSFKALAQQWGIPCAAGHRNLKKLRESIEAKVDLITRPVANAMLFLLDAVKSLDRQIGQLNQTLQELVMSDERGRLLQSVLGVGTQISARVITVVGNVERFNSPRSLVAYVGVAPRNFITGHKNLTKKKHGNCPDLSHKGQGKISRRGDKLLRSLFIQGAACLYMQFCKDQLPECQLKRWILKQLAMQKPYGKLIVSLAAKLIRIVWAVLTYGEKFNIQKAGMTRSMWSEMALETPLNKEVPA

SEQ ID NO: 245269 - protein, 407 aa, unidentified
MNAVGIDISKGKSTVAALRPMGEVAFLPQEFLHTEVGLEQMAGAIVALGEDTRVIMESTGRYHEPVAAALHEYGIYVCVLNPLLIKQSGGGSIRKVKTDKADALKIAKYGLDNWVDLREYTPMDTIRQQLKLCSRQYNLYMKTVVSLQNNLISLTDKTFPGVNELFSSPERADGHQKWVDFVMTFWHCDCICRASEKAFTERYQKWCKRKGYHFSAEKALDIYAGSCGHFTTLPKNENTKLLIVTAAQQLLAGKTTLATLRAEMTRLASQLPEYETVCAMYGVGKITAAQLMAEIGDVRRFPRRSSIVGFAGVDPGVDESGKHSAKSVPTTKRGSPHLRKTLYQIICTYLKKSPADEPVYQFLDKKRAEGKPYFVYMTAAQNKFLRIYYARVKECLEAFDTEPAKQS

SEQ ID NO: 245270 - protein, 327 aa, unidentified
MGHHTEAFVGIDTSKLRNAVAVADSGRGGEVRYLGEFPATEAVIQKLGAKLAAKYRHLTFCYEAGPTGYGLYRLLKSLGHECLVVAPSLVPKKAGDRVKTNRRDAVSLAMLRLGRIYPGKTTWGPAHMKWLMAQKIEHREQRIAFEELLEGIRQESERVERLENAIREVVPEWSLAEVVAALQAVRGIDLIAAVGVLAEIGDLSRFQNPRELMGYLGPVPSENSTGDKVKRGGITKAGNGRARRILVEAAWSYRYPPRVSRDKQPKVEAAPRRVREIAWKAQTRLCGRFRSLERKGKRRTVIATAIARELSAFIWATNRELMAHRQA

SEQ ID NO: 245271 - protein, 430 aa, unidentified
MGRKNPYSLVDVNEIRVDLLTEHRAGQAATLGIDVAKNELVACLVWPDRTFERPWRVKSPGEVRLLVARLIELKQRCSVVVAMESSGTYGDPLRQALSDRDIEIRRVSAKAVKDHSETFDGVPSQHDGKDAAIIGTLCLSGHARDWRWSDRPDPDQATRYWVRKLDASQRIKQIWSGKFESLLARHWPEAGRLLKQSGATLPGAMRHWGDPRALANDPQAVEQLAKFGGHYLLPQKIAQVIESARTSVGVRMTPWAVREMKEIASAILRQRRRIQACRHELKKRTRTNPTIRSQAPVVGLVTACVLWMCLGDVVGYGSAAAYRKAMGLNLKERSSGMHKGKLGLSKRGQRLTRKWLYFSALRWMREPSVKPWIERKKQRDGGRGDKAVVAVMRRLALAAWHVGQGELFEPGRLFPGAHRPAKSKENVTMN

SEQ ID NO: 245272 - protein, 350 aa, unidentified
MIIGIDPHKLSHTATAMDPATNTAASSLRVGASLAGYRELLGWARQFPDRRWAVENAKGLGCHLAQWLVARGEAVVDVATTATSRVRELTRGGRRKNDVIDASAAASVAALQGDAQVVDAADETTVFAVLEERRANLAAQRVRCVNQLHAVMRDLVAGGVRTALTAKAAGEALRKVRPTTRTERIRKIIAWDLVRDVRNLDRQLNTIAAQMTETLDGYDNQLLEIDGIGPVLAFRLIGRTGRPSRFRSPDAFASYTGVAPIEVSSGQRSTHRLSRSGDRRLNSTLHLIAVTQVRMRDSAGHRYFERKIEQGKTRNEAMRCLKRKIASHVWRRMLAAELRRQHHVALPEAA

SEQ ID NO: 245273 - protein, 450 aa, unidentified
MQEVIPVAKSKPYSSVAVKSIEVGVLSAEHAGQACVLGIDVAKFELMAVLRWPDGSFQRPWRIGNPGEVGLLVEKLKALGSALGSTPSPALTVAMESSGTYGDAVRQALSDAGIGVQRVSAKAVKDQAETFDGVPSQHDGKDAAIIADLCARGKGRAWAMETGDAVDQEIRYWVRRVDAAQRVKQVWGGKVEALLARHWPEATRLTPGSSATLSKALLHWGSPAALAADPDAAARLRSFGGHYLTDAKIAALIASAKTSGGVRMNVWETREIRELAREVSARRKEISDSKRRLRSLTRSHPTIRAQTPAVGLVTACVLWTCLGDPHDYGSASAYRKAMGLNLVERSSGRFKGQLRISKRGQRLTRKWMYFGALRWMRDASVKRWTGPKKARDGGKGARAMVGVMRRLALAAWHVAVNGEAFDAGRLFPGAARRPEAAVKAKARTMEAALK

SEQ ID NO: 245274 - protein, 349 aa, unidentified
MTMIGGLDVHRQQITFDYVDRDGLVRWGEIRPATRKTLRGWLAEHCLDGDAEFALEGCTGWRYVVEELCAAEVGAHLGDPAEIAVRRGPKKRAKTDRADARLLRSLLLEGRFPESWIPPAHVLEIRTLGRLYCTLMDERRAWQQRIHAQLFHQGCPPIRALLSAAGRDGLARAELSAAGRQYVDTALRRIDELTAEIDPLRAQLIDFARRQAGCRALQARHYGVGWLCAAIMWAEIGDARRFSGSDQLVRFAGLDVTVYSSAGKCSPGHLSRQGSPELRWAAFEAAKCAARRGSPDYAYYHRVAARPGNGKDPTLAVERKLLRRCYHTLRELGDAALAPPAAQAKEVAV

SEQ ID NO: 245275 - protein, 343 aa, unidentified
MQAVTTIGLDIAKSVFQIHGVDAAGNVIVRRQLKRRYVLPFFQKLPPCLVGIEACASSHHWSRELQALGHTVRLMPPAYVKPYVKRHKNDAADAEAICEAVTRANMRFVAIKTPEQQSCLMLHRTRHLFIRQQTAVINAIRAHLAEFGIVAPVGRNGVEQLLDVVADASDRRLPEVARACLLALGAQLRTLKAQILNFDQQIMAWHRSNEASKRLDDIPGVGPALATALVASVADAKAFRSGRDFSAWIGLVPKQHSSGGKDKLGSISKQGDRYLRSLFTAGALAVIRYAKIHGTRHRPWLTALLARRPTKVAAIALANKIARMAWAMMARGDRYKEPVALAA

SEQ ID NO: 245276 - protein, 352 aa, unidentified
MARTTKFHSVTTTIGIDMGKNTLHMVGLDANGAIVLREKVSRGRIGSRLANLPPCLIGIEAGMATHYVARELAALGHNVKQVPPAYARPFRQGHKNDFRDAHAVAEAVQRPTTRFVPAKTNEQLDLQALHRVRSRLVSERTAVINQIRGFLLEHGIIVRQGQRFLRHLLPDILAKRTDVLSPRMVRIISDLVGDWRQLDERIETMTDEIETLAKSDDSCRRVMTVPGIGPLISSAMVAAIGNGTAFAKGRDYSAWLGLVPRQMSTGDRTILGRITKHGNGYLRMLFMQAARVILLRPTNWSKHGFGAWLVRAAQRLHPNVLAAALANKLARIAWTVLAQERSYEARVTKAAA

SEQ ID NO: 245277 - protein, 438 aa, unidentified
MPSILDNATRIKTFRELKATLRSRRDRLLVGIDIAKAQHVAQVRLAHTRILEPKLTVPNTQAGFATFWARLEAHQTTLHVPEIVCAVEPTGTYHQALATFLEQQGATVVFVNNHVAHLNRRTLDGTWDKNDPKDAHNLCDLLEQGKVLFYSRPDEPLGALRHLVRVLRRARGELSACKTRFTTTLLPQCGPMGDPVPAAVLAALPAPLQGLVPRPRRGPGAAGGPLPPGLAAACTDLAAQLTAVQARITGLEAELVRLAEPLPAYGLLRTIPGVGPTVGAILLAEIGDIGWYTHFAQLRKLAGLDILTVESGQYRGTGRISKAGRALLRWALYQGALGAARTRAGRAWLAALRAKRAGDRFAFFKAAVELAAKLLRIVWGVWRSGRPYDPARALGLPAPARPRPAARRRRGPALPVRLALVAGEDRMRFALRETAAPR

SEQ ID NO: 245278 - protein, 355 aa, unidentified
MNSVRYVGLDVHRDTISVAVLDESGRLIMQSVLATRAAAILDFIGGIRGTAQVTFEEGTHSAWLYDLLARRVAKLVVCNPRKNALLKSGSKSDAIDARKLAELLRAQMLSPVYHGESSGLEVQHLVRSYTMLTEDTTRVMARLKAVFRGQAVACAGTKLYGMRYREQYLAELGTGGLRRRAERLYQELDALQQLRRAARRELILECRKHAAAKWLQSVPFLGPLRAAVLIGRVQTPHRFRTKRQFWSYCGLALETRDSGEYRVIDGQIERRKKPVMIRGLNWNHNHELKNLFKAAATTASACNGVFREFYLGLLDKGMQPEMARLTLARKIAAIALKIWKKGEAFDRQHVKSQAA

SEQ ID NO: 245279 - protein, 453 aa, unidentified
MDRRKSTPVFNETRRFVAGIDLAGAADHYVCGPRRDDGTCEIEHFGTTTPELNRMAEWLRRRRVESVAMESTGVYWIPVWDVLEAAGFEVLLVDTRETRMVPGRKSDVKDCQWLQRLHSCGLLHGCFRPPEEYNAVRSVMRELRNITAMRTQAIQAIQKSCDQMNIRIHHAVSDIDGVTGMRILEAIAEGERDPVKLAEMRDPRCKKSVREIADELTGNWREEHLFTLRQNLDLLKFLTAKVEAFDAKIRQMYAELAMKSDKPDPPPDGPRPHRQKDDKDAEAKLVLAKLAGVDLTRIDGIGYDSAAAIIAEIGVDLRMFPTENHFVSFVGLSPPTNKSAGKNIGTRGKCRNTHPVGQILKDAAKTLWRSNCALGALYRSVRSRSCAKAAAMATAREMCKRIYRGMRYGQTYVDIGAEAFEERRRARMVKSMKSKIEKLGIRPEELGFPQLSA

SEQ ID NO: 245280 - protein, 406 aa, unidentified
MELVPIHKRVIGLDIHQAQVTACAIIEESGGETRLEQRQFGAFKRDRRELAVWAAALDPDEVVMESTGIYWKSPYAALEAVGIRATVVNARHVKQVPGRKTDVGDAQWLATLARAGLLRGSFVPPAQLRELRLIARQRQKLVGLLSSEKNRMHKVLTDAGIRLGVVVSDIHGQSARAMIKGILRGQAPHEVLQLASRRLKASREELHDALQGELTASHVFVLDELLRHIEELEARIARFDARLLAELASEHNALALLQTLPGVDLIGAAMLLVEIGSDMSVFGTSDRLASWVGLCPGNNESAGKRKSGRVRKGNPYVRRLLCEFAHAASRTKSAFQAKFQSLIVRRGHKRAIVALAHKMLRTIFFMLKRGEHYRDSATNYEQLSVQRNASRWIKALTRFGFIPAAA

SEQ ID NO: 245281 - protein, 389 aa, unidentified
MKIYVGIDIAKLNHFAAAISSDGEIILEPFKFTNDADGFQLLVSKLESFDKNSIIIGLESTAHYGDNLVRYLVAEFYQVCVLNPIKTCQMRKNNVRKTKTDKVDTFVIVKTLMMQDDLRFITFFDLDMMDLKALGRFRQKTIKQRTRLKIQLTTYVDQVFPEIQYFFKSGLHQHAVYALLKEAPSPKEIASMHMTHLANLLKVNSHGHFTKEQAKELRVLAQKSVGANDSAISIQITQTIQQIELLDSQLEKIEAEMTDIMKFNDSVIMTIPGIGYINGGMILGEIGDIHRFSNPNKLLAFAGLDPSVYQSGNFQAKTTRMSKRGSRVLRYALVNAAWNVVRNNATFKAYYDAKRAEGRSHYNALGHCAGKLVRVIWKMLTDEVEFNLE

SEQ ID NO: 245282 - protein, 467 aa, unidentified
MQLRLGIDIACRAPHQASLADERGEFVFTGRRFRTSVEDLEQLWAMLPEGTESGDVTVVMEPTRNAWVPLAAWFRRHGARVVLVPPERSADLRAYYTKHTKTDRLDSRLLARLPMLHPEGLHEEHGLGPGDRLRRSTRLHQTLTRRRSQSLARLDAMLEILGPSWVVVFGADLSNKTPLRFLAAGYACPHTIKRLGKARVARFLYRHSRGRWGEEQAEALLAAAAETLVLWADDLEFEELADDIAIEARLALRLDDELKDLDERIAIFLAEADPTGILTSVPGIGRVLGAQILGRLGDPNRFRTLAGVRSFSGLVPSLDASGMSGRHGPPTKRGDACLREAMFMAADQARRCDPSLAARYHRLMVEAGKHHTSALCHVAAVLLTRIVACWRTGEHYVIHDVDGTVVDIAQGRRIVQERYTVPADLRAVRRTSGGAGGRKGTDRRSKGSRGAPSTGPSLVNATALVGA

SEQ ID NO: 245283 - protein, 379 aa, unidentified
MKHGNSAASVPVLTIGIDVGDRRSHACVVDRSRTPLEEFSFATHEVSLCRRLQREGCQVVLEVGPHSRWIQKSLEQMGHKVRVVDARKIQLISKGNSKTDKRDARLLAQLGAGAPEVLGDIKHRSDQAQADLTVLLTRDHFVQLRTATVNRIRGVLKASGVKVPKMATKSFHTRVGQLVPDALRPGIVPLIEELSSLHQRIRALDKEIVAMAGRYPAALKLAAVSGVGTLTALAFMLSLDDPSRFKKSREVGPFVGLTPRKHSSGEKDPQLSITRCGNPFLRRILVQAAHYVLGPFGPDCLLRRHGMRIVERGGKHAKKRAAVAVARKLAVLLHRLWVSETPYDPWYRSKDAPPSPDVKVKARIFERTSKKKEPVVRNA

SEQ ID NO: 245284 - protein, 364 aa, unidentified
MHQLTHIGLDVHKDTIAVAVLRPDAAECDERVIPNTSEAVRRLLARYPDPSQLSTCYEAGPTGYDTHRLITSLGIACDVIAPSLIPKRSGVRVKTDRIDARNLARLHRAGELTAVRVPTPGEEAVRDLVRAREEIKNDRRIARQRIRSFLLRYGRSYPAPRARWSTRFEVWMRALKFDEPAAQAAFEHLVATYFVRDSQLAAIDRQIEQLACLDPLAGPVALLRAFRGIDTLTAVTLVTETCDFRRFGTAGSYMAFTGLVPSEHSSGATRHQGSITKTGNQHIRRVLVEAAWAYRYAPAVRGKLKDRLEGQPPEVVAYSWAAQCRLHSTYRKLAAKKGANKAVVAVARELSGFVWGAMTGNMGA

SEQ ID NO: 245285 - protein, 323 aa, unidentified
MSTKATKKRRSFIGIDVSKKLLEVGVHQSDYHFRCPNEPKNFPALITELISLRPARILLEATGGLERALLQALHAAGLSVVVVNPRQVRDFAKALGLLAKTDRLDARVLAHFAAATQPAIRPVKAQQETELDALMGRRTQLSDMLVQEKNRRGSAATKDARDDIEAHIEWLEERLQELDEKLKEQLKCSAVWQQKDKILQSVKGIGFVTSMSLLADCPELGQLNRHQIAKLVGVAPLNRDSGQQRGARHIWGGRAQVRRQLYMATLAATRFNPVLKSFYQRLLLKNKLKKVAIVACMRKLLTIINVMVRENKLWNVKAQPVSA

SEQ ID NO: 245286 - protein, 343 aa, unidentified
MRTITTIGLDIAKSIFQVHGVDAVGQVVIRRRLKRRYVLTFFQKLPSCLIGMEACASAHHWSRELQALGHTVRLMPAAYVKPYVKRHKNDATDAEAICEAVTRPNMRFVATKTPEQQSCLTLHRTRHLFIRQQTAVINAIRAHLAEFGIVAPVGRNGVAQLLGIAADANDKRLPEVARACVSALGAQLRMLKTQILEFDRMINAWHRSNEASRRLDDIPGVGPALATALIASVADPKAFRSGRDFSAWIGLVPKQNSSGGKDRLGNISKRGDRYLRSLFTTGALAVIRYAKIHGTRHRPWLTALLARRPTKVAAIALANKIARMAWAMMARGERYKESAALAA

SEQ ID NO: 245287 - protein, 417 aa, unidentified
MPANKKRGPGPSHLLLTPDHAGNVVGVDPHKLTLTATVLDPRGGTVLDPRGGVLASEHFRVSGDGHRALEAWARQFGPIARWGVEGAAGWGRHTAIFLAGRDYDVRDVCANRTARNDRARQRGKSDTLDSERIARETLAHPLLPKAFKRAGADSGPDEQQQLLALWHNRRRSILTSRQHLVNEAEGLLCGLPLELREQLPSSKAVRPRLAALARRNRRRRYDAPTSLRLAMLDDYRAQIAALDREEKDVVAQLRTLVRASDSTLGELCGLDTRSVAELLVEVGDPRRFTDGGFARFNGSAPLAASTAEGPGEPVRHRYNPGGNRRINAILHRMAVTQLRCEPRAKKIYANARAEGHTKKEARRVLKRHLSDVIHRRMIRDLASHPAQPLLTAQPRAGAAVKGGPTGPSKASRVAAPP

SEQ ID NO: 245288 - protein, 373 aa, unidentified
MPRYSTAFGMDVHLRSTTVCALDAETGEAVTRRFRGNPWGEVAEWMSGFPGPSLAAYESGYLGFAPQRELSGLGVDCVVAAVSKVPRSAADLSSKNDRNDAARMAKAILSHDISPVWVPSPEIEGLRDLAGAHDAATARLAAAKQRLLAFLARRGYAYGGTTPAGNPRRYWTYDFLRWLDKVRPADDGGIRALAALRSEVEAAAETRDDLLAEYRAAVAAGPLSAEVEALQSIKGCGFALAAAFASEVGDFSRFRSGRQVTSYFGLAPKQRSSADSVRLGGISGAGDALVRKLAVEGSWSYAQAGHQPKLMPKGSGVPLEVRMHGRKGSERLLRRREEMLERGMPQAKANAATAAELVRWLWALGAMCREATE

SEQ ID NO: 245289 - protein, 442 aa, unidentified
MWRFSQRLLFAEITEGGHILKIVYPICCGVDVHKTFLVATIITTNGIVPHYQKRRFSTFNNQIIAFKQWLLENNCRDVCMESTGKYWVPVFNLLEDSINVVIANPKWVKAVKGNKDDKKDSKWIGDLFRLGLVPGSFIPSRDIRILREFTRYRFKLVSCKSGEKNRYQNVFTVCNVALDAVVSDMFGKSAASITDYIVNSDTFDPEHCVSLLHRSLKKKADEVVASIEGFQMTEAQKVRARMVLEHYDFLLEQIQKLDERIDSLAAPFESAIRLLCSIPGIDRNSAITVLSEIGTDMSQFGSSKRLCCWGGLTPGNNESAGKKKSVRITRAGVYLKPILVQIAHAAVKSKESPYYRIKYERISKRRGKKRAIIAIARMILTAMFHMLSTGELWNPSDLRQVDMPPELQAQQLQKSLFKAAKLLVAHGAVAPDTIQIPMAVPA

SEQ ID NO: 245290 - protein, 350 aa, unidentified
MVVGGADVHKRTHTFVAVDGVGEKLGAMVVSATCSGHHQALRWVRERFGVGVVWAIEDCRDLSARLERDLLTAGPKVVRVSSRLMAQTRASARTRGRSDPLDALAVARAFLREPDLPVASHDEVSRELKLLVDRREHLVGQRTSTINRLLWRVHELDPEHAPKPRSLHLLKHRSLLSQWLVTQRGLIAELARDELGDITRLSEMIEALAKRIGERVRKVAPALLALPGGAELTAAKLVGEAAGVARFKSEAAFARHAGVAPIPVWSGNTAGRVRMTRSGNRQINAALHRIAITQARLPAMGQAYYHKRIASGDSTTEALRCLKRRLACVVFHHLHTDHQNRIQPRQPAAA

SEQ ID NO: 245291 - protein, 464 aa, unidentified
MMTDKKLWRNRKERKEWARRLQSDDPGLEVVHPHAAGIDVGNGAHYVAVRPDRDPEPVRRFECFTADLHRLADWLQSCRVKTVAMQSTGVYWIPIYEILEQRGFQVYLVNARHTKNLPGRKSDVQESQWLLKLHTYGLLNNSFQPPSEIRVLRTYWRQRGEHVHGAATCIQRMQKALTQMNVQLANVISDVSGLTGQTIIRAIVTGERDPRKLAELRDPRIHASREEIAKSLEGNWRPELLFVLQQEVEMFDTYQRRIAECDQQLQKHLASFVDTVPPSSSQGEPKRKKAKPAKNAPRFELCSELQRISGVDLTRIDGIDVMVAQTLVSEIGLDMSRWKTEAHFASWLGLCPDNRVSGDKVLGRGTRRVINRAATALRMAAVTLMRSRTYLGAQYRRLRTKLGAPKAITAMAHRLARLVYRMLKYGQGYVDKGAEYYEQRYRRQQIEFLTKRATKLGLQITVAP

SEQ ID NO: 245292 - protein, 345 aa, unidentified
MYNMLTGVDLAKKEIQVCVAKSNKIIRNMAMTPTAFSNWLATQKPMTVVFEACATSNYWYQCAREYGHDARLISAKLVSNIRQNQKTDKNDAEAVLQASQLSNVNFISGKSKEQQELQSLVRMHQLSVKHKVAYGNQLCSLLLEFNIKLSPTDTGLNSAIQSILEDAENGFSAIFRDALHTAWHQYLKSIELVKHYEQSVARASRASEACKNLMKIEGVGPTNAVNLYIALGCCELGVFKKARDAAACIGLTPIQHSSGGKVRLGSIGKNIRNSSLRANLVAGAMSAVNQAVKRDSRTKKDEWIKGLVERRGKRCAAVALANKTVRTAFSLLRNGTEYKAELLAA

SEQ ID NO: 245293 - protein, 322 aa, unidentified
MQGKIPSVRAETAVYVGIDVCKAWLDVYLHPTGRGLRFSNDKEGLKLLCKELAGAGVGLVAMEATGKLHRLAHRMLSRAGYPVAVVNPLRSRKFAEALGQLAKTDRIDAQLLAIYGACLSPGATPVPAKILAELQELVMARQAAKADETALKNRHAAAESKVLKRLLQRQIEACARAIEGLEAAIKPLLESDPALQRRYGILCSIKGVGPAVAAMLAACLSELGLLSAPKIAALAGVAPFDDDSGDRRGQRRIMGGRAHVRRALYMAALSAARCNPDLKAFYERLRANGKAAKLALTAVMRKLVALANTLIREDRHWTPEHA

SEQ ID NO: 245294 - protein, 348 aa, unidentified
MNRLSKSKSDDKVSMFVGMDLHKNYLQIAVMNEEGRVLRNSKIDNNLRQISRFFDVVNNDKAHVVMESSSVWYNIYRYLSEERSFDVVLSNPVKTRAIASAKIKTDKLDAVKLADLLRGGYIAECYVPNNKIMELRELVRHRIVLVRMRTKLKNSIHGIMLMKGIQLSNTCTNTFTLEYIDELKKLNDYRINHYISLIESLDQEIKDVSKKIILLAKENKMAKLLTTIPGIGHYSALFLVSEIDDINRFPDSYHLCSYAGLVPSTHSSGGVTYHGNITKTGSKHLRWIMLECVHAHIRTDKSSNITQFYQRLAKKKGNSKAAVAAASKLLRVVYWVMKERREYQHRCS

SEQ ID NO: 245295 - protein, 368 aa, unidentified
MKTRFHGLDRHKNYSTISTKNREGKEINYIGVCRDLQAWIDKLDGNDCVVMEASNGSFYWADQIEERGASCIIINPYKFKIIKDSWKKTDKIDARNMSEFLVIEYNSENLQLPTVYKPHKEIRELRKYFAGYNLLKRHQISYKNHIQAQLTDEGVKLEKEDKKALFDSEQSEKILENFNITDASKTVIRINLKLLWEVLKEKERIRLEILYFGKFFEKEIRLLQTIKGVSAFLVLAFLSDVADVKRFKKLKQMNAYLGVVCGVKSSGGKSYSGHINKASRKIARSLFTQSIHHIINSNPVYRKKYEELAERRGAGRARIAFIRKIFGVMRRMLINETEFNWKDEKLYTVKLTKYLVEIKNYQEVKESS

SEQ ID NO: 245296 - protein, 465 aa, unidentified
MSRPRSKEKKPSFQVGRGRWVAARRLPRSLNKVNLHAAGIDIGSTAHYVAVPEGRSDDIVRCFGTFTEDLTALADWLKQCGIETVAMESTGVYWIPVYELLESRGFEVRLVEPGKLKSVPGRKTDVLDCQWIQQLHTYGLLQGSFVPQERISVLRNFMRQRAMLVDCAAQHVMHMQKALMQMNVQLHHVISDITGTTGQRIIRAILSGLRDPVELAKLRDPRCKKDERTIALALEGHWREDHLFALEQALELYQFYGCQITELDQRLERYLETFEDRSDGQILPKSPKPKAGSNTPDFDLRNHLYRITGVDLTVIDGLGGQSCLQLISEIGTDMSFWPTEKHFASWLCLCPGNKKTGGRSISGKSRASANRAATVLRLAAQSLANADCALGAFYRRMKSRLGAPKAITATAHKLAKIVYNTLKYGRQYVDVGADYYERQYRQRVLESLQRRAAHFGLRLTPAEHT

SEQ ID NO: 245297 - protein, 402 aa, unidentified
MNAVGIDVSKGKSMVAIMRPFGEIVSTPFEIKHISSDINSLVKLIKSIEGESRIVMEHTGRYYEVLAHQLSEANLFVSAINPKLIKDFDNDSLRKVKTDKADSVKIARYALDKWQNLKQYSVMDELRNQLKTMNRQFGFYMKHKTAMKNNLIGILDQTYPGVNTYFDSPARSDGSQKWVDFASTYWHVDCVRKMSINAFIDHYENWCKRKKYNFSKSKSEEIYGKAKELVPVLPKDDITKLIIKQAVDQLNSASITVESLRTLMNETASKLPEYPVVMAMKGVGTSLGPQLMAEIGDVSRFTHKGAITAFAGVDPGVNESGSYEQKSVPTSKRGSSDLRKTLFQVMDVLIKTHPQDDPVYQFLDKKRAQKKPYYVYMTAGANKFLRIYYGRMKEYLASLPES

SEQ ID NO: 245298 - protein, 321 aa, unidentified
MQTIPVTVYAGVDVAKATLQLHLQGRQAEFSNQAAGLVQLCQQLKTIPHIHVVCEATGGYERLLVQAMHQAQIPVSVTNPAQVRAAAQAQGQRAKTDRIDAALLTDYGQRYQPKPTSPTTASQDQLVALTQWLMQLVQAQALAKTQAEHHQAAFVCGRHTKLMAHYQSQIVAVEKQIRALLAQDAQLQQRVDCLDEIKGVGARTAWLVLAHMPELGQINRQQVAALAGLAPWTRESGTMKGMRCIGGGRPEVRLALYMAALSAARCNSVLKPFYQRLRAKEKPAKVALTAVMRRLLVYMNHQLKALQATQTDTKLQNSKIP

SEQ ID NO: 245299 - protein, 338 aa, unidentified
MMCYAGIDLHATNSVVVVIDEADRVLYQKRLRNELAVILTALEPYQATVQGVVVESTYNWYWLVDGLMDAGYRVHLAHAPALPQYSGLKHVDDQHDARGLAHLLRLGLLPTGYIYPKAERAVRDLLRKRSQLVRHKTMVVLSLQSLLTRLTGSRLSLPRLRPLTPESVQTLVPFPEQGQSVMSSLTVLQCLEQQIHEIEHVVRQASRVQAGYALLQTVNGIGPILALTILLEAGDMRRFPTVGQFASYCRCVGSAHLSNGKRKGAGNTKNGNTYLSWAFIEAAHFAIRYEAVIRNYYQRKQARTHPLVALKAVAHKLARACYHVLREEVPFDLHRAFS

SEQ ID NO: 245300 - protein, 343 aa, unidentified
MDHFAGLDVSVKETSVCIVDDTGRIVREVKVASEPEALLQALGNPAYHFKRIGLEAGPLSQWLFSALAEAGLPVICVETRHMRAVLKAQINKTDRNDARGIAQMMRVGLYRPVHVKTLRSQKLRMLLTYRKLLLSKAIAIDNDLRGTLRNFGLKVGMVGTVKFEARIQELVENLPDLAVLVEPMLVVRRVLREQIGILHRRLLAIVRDDEVCRRLMTIPGVGPVVALTYCATVDVPARFRNSKAVGVVFGLTPSKYQSGEVNRTGAISKCGDEMMRMMLYEAAQVMLTRTNKWSWLKAWAMKIARHRGMKKAIVALARRLAVIMHRIWVDGTEFRWTREVTAA

SEQ ID NO: 245301 - protein, 458 aa, unidentified
MAAKKKGRGAKRTSLRPIRPMVAGIDIGGTEHWVCGPEHKKGERDVRVFGATTPELKKMATWLREQKVESIAMESTYIYWIPVLEVLAAEGFEVVLVNARTLKNVPGRKTDMHDCQWLQLLHSCGLLRGSFRPEDEVCQLRALQRQRANLIDERSRIVHWMQKSLDQMNVRVHRAVSDITGTTGMKIIRAIVDGERDPLKLATFRDKRCKKSEEDIAEHLTGTWRQEHLFNLTSALSLYDQMEASIHAYDQELLRVLDDITPEDRRDEEVPEHPNANKAKAMHRRGETGLRTALFRFAGVDLTTIDGISAESARVILTEVGPDISAFPTEKHFISWLHLCPRTPISGGKPLKGKKNSLGASRVGAILRLAAVAVQRTPSAVGATYRRISRRKSAAVAVFAVARKLAQYVYRLLRFGAEYVDIGAERYEQQFHDRRVAALTKNAEALGLKLVPAAVGAG

SEQ ID NO: 245302 - protein, 319 aa, unidentified
MTIVGFDVGKYTLIAVRIDHSVQSKETFKINNTKEEIDNLLDSLKAKYSHLTIGSEATAEYHKTLALEAIEREIPFRLLHPITTKQFTRATVRKKKTDLTDALVIAKLIYQCEGRLLAKEDFSSSKILFRTAVKLTMHAQSLILMKQHISEHYPEEKKAIEILDNCINVIHSSVKGFRNGSEIESEQDQEILKLLQSIPGIGQALSQIILAEIGDINRFKDSSSLIAYAGIDPKVRQSGAILAKNTHITKRGSPYLRRAVFMAASIGMRYDPEMRAYYDKKRGEGRRYKEAVIALSRKMINRIYAVWKRKTPYVKVQTT

SEQ ID NO: 245303 - protein, 418 aa, unidentified
MVISLAEKRRICMKQIVSVGIEVSKGKSTVCAMIHPNTIIKESFEVLHTVEEMSMLADYIGSLDGEIRIVMESTGHYHLPVAQFLYQKGFFVCVENAYIIRQFSRIMLHGAKTDPLDAKKLAKYGLAYWSELKPYKFHPSCYTELSLLSKQYQTYIKLLIAAKQNVIHLMDEMLPGFKEALDTASSVQFSKVKYVDFAKEFYHVDMIKTMGKEIFRENYKQWCKEKGYRFQSEKADELFHLAEDGIPTLPTEFPSTRLCMEVATEQVSQLGYALEQILSQMQNLAKTLPEYQTIRQMGGMGEKLCVRFIADIGDVRRFHNGKALVAYAGIDAPPYQSGQYTGTKRRISKRGNSALRKTGYEVMKSLKSHPPKTDTRVYDFIIKKENEGKSKKQAKIAGLNKFLQIYYARVIEIYKNIV

SEQ ID NO: 245304 - protein, 368 aa, unidentified
MAKQKTRIQIIKQNVGVDISKDDFKLCFYYLETSGRKFIKASRTFKNNLAGFQAFLKWIEKKRVPELEVRVTLESTGVYYEHLTYFLDAHDYYVSVVLPNQSKAYATSLNQKSKTDKEDARMLGQMGIERDLSRWQTSSPKMRILKQLTRDRVSLIDEKTALSNKLHALDHSYQPHSSVVKRMKQRLKLIKKQVKLVEEEITLAIDADPVLREKVKRICQVKGLGLITVAVVIAETNGFALFTSRGQLTSYAGYDVVQRESGTSIKGPTRISKKGNHHIRRALHFPAISMVKHEPHFKQIFERILDRTAIKMKAYVAVQRKALVLIYTLFKTDAEYNPNYHNEIKKTAEEAIQEGRQDTNPAYTGCLL

SEQ ID NO: 245305 - protein, 413 aa, unidentified
MLKIVYPVCCGMDVHKSFLVACIATTNAQGVTTYLSKRFSTFTGDLRRCASWLKEHNCRDVCMESTGKYWIPIYNILEPSCNIVLAHPKYVKAIHGKKTDKKDAKWIADIFKHDLVSGSFIPPADIRQLRDLVRYRWKLSGFTIGEKNRAQNCLTVSNIKLDDVFTDVFGKAATAITTHLLENPAVRIVDVSAFRTKGMKATDEEVLAAVDGELCVEQAEKLRIIRSHMDSLELCKANLESLILSVAEKYLPQLNLVMSAPGIQSYAAIGIISEIGVDMSVFPTSKNLCSWAGLTPQNNESAGKKKTTRIGRAGAYIKPLLVQCALAAIRSKSNPEIRRRYENLKKRRGHKKAIIAIARMLLTAIYNILKKNEPYNPELYAHINTPPKQRTVSVEEAIFILQRQGYLVTPSAT

SEQ ID NO: 245306 - protein, 352 aa, unidentified
MATVPHEEVRVTLGVDTHEDVHVGVALDQLGRRLGELAIATDAVGFARLRDWTSAYGVIDKVGVEGTGSYGAGLSRWLRAQGLVVVEVDRADRKTRRHGKSDTIDAEAAARAVQSGRATTVPKTGDGPVEMIRVLRVTRRSAVKNRTMTTNQLAALVTTASEELRARLRGLSIAKLVAVAAKFRIGDEPGTVIDATRYALRELARRHQYLSEQIARLDIQLDRLVAAAAPELVAKTGVGTHTAAALLVTAGDNPERLAEEGSFAHLTGSAPLDASSGKQQRHRLNRGGDRDANAALYQIALTRLATHEETKLYMKRRIAEGKTKKEAFRCLKRYIAREVHKTLVRNPLLQPD

SEQ ID NO: 245307 - protein, 342 aa, unidentified
MYVGLDAHKKFCYATLMNKSGNIMDRNKFPTTNGCLDKFMEKIGSGAKVVVEASTSGLRVYDYLDANDADIIMAHPLKVKAIASAKVKTDKIDSEVLANLLRTDFIPEAYVPSREIRDLRGLVRHRTALVKMRTSAKNRIQSILTLEGVDHNFSDLFGKAGRNLLETVELRKYNRVAVDNYLTTLDAIDLKIREVTDIVDREVDNDENSDAKILAAKIKGLGTYTALLCTTEIGDINRFPHYKKLSSYAGLIPSTSSSGGVTRHGKITKQGNKLLRWALVQAAWRVIRYDGNLRDFYNRLAKKKGSSNAITATARKLLKKIYYILLDIQNNNITQVYESQGN

SEQ ID NO: 245308 - protein, 351 aa, unidentified
MTRIAHNREKSERITFSASQAGRRKFIDELKRRSEQAGGTKIVVAYEASGNGFILSDELKKAGVECHVIAPSKIERSSKQKRNKNDDRDAERLLEILRGHYLGGNKLPSVWVPDLETRDDREIVAGRQDLSEKQGKVKTQVKTLLKRHGLEKPEGMGSGWTKRYRLWLEGLTEDSGTGLGVRRRLKSLLRQLEFLEEEMESADEGMKELANKPRWKPIVDELIKEKGVALKAAMKYATDIGDFGRFRRGRQVGAYFGLTPSSAESGESDDRKGHITHQGPASSRKILCQAAWSRVRHDKQEREVYLRIVAKNPKKKKIALVASTRRLAVRLFHIGRQAQLKMQSVPTGSLE

SEQ ID NO: 245309 - protein, 354 aa, unidentified
MVVLGIDAHKRTHTVVAVDQRGRKLGERTVGTTTADHLDLLVWASRFGAERRWAVEDCRHLSRRLERDLLGAGQQVVRVPPKLMANARTAARTYGKSDPIDALAVARAALREPELPTAQLDGPARELRLLVDHRDDLVAERTRVINRLRWHLHELDPTVAPPARSLSRAPATHLAAIEAFLSRFDGDGNQVVVDLAGQLVARVQELNAQIDQLEGDLVPRVRRLAPSLLALVGCGVLTAAKLVGETADVRRFRSKDAYARHNGTAPLPVWSGNKQRYRLSRSGNRQLNLALHRIALTQARHHPDARRYLARRRANGDTPTEAIRALKRRLSDVVYRALLSDASVTDEAGQAAAA

SEQ ID NO: 245310 - protein, 340 aa, unidentified
MLYCGVDLHAKSSNFCLVSRRGKRVAEGLVPSSRRGFTTLMASGKGEEIRVVLEASTRSRWAAGVLEGLSAEVIVVDPRKVRVIAETKHKTDRADARILADLLRTEALPSALWRVPRGTRDLRDEMRLRWGLVQQRSSLLVRARSMLASVGVSLSRRALARDATWDRILKRREVTPKMKRLLEILRQSVEALSSAITEVEREYAPRLEDPDVQRLQGIPGVGPVVALTTLASLGDPGRFRDSRAAAAYTGLIPSERSSGGHQRRGHITKGGPSELRRVWIQAANAALRMRDHPLKAWANKLIYRRGRAVAVVALARRMFRWAFALWRDGKSFDARLVTAC

SEQ ID NO: 245311 - protein, 413 aa, unidentified
MQGYYVAGIDVHKAMLAVVVSEVKPGECEFQRMRFGTTRSQLRELTEWLLGLGVQEVVMESTARYWRPVWVALEETGIKRHLAHARSNGARRGRKSDFRDAERLVHRLVAGELVLSYVPEDEQQGWRYLTRTRYQLVCERGRVQSQIEGLLEDAQIKLSSVITDLLGASGRRILEALAQEQGQHNPAKLAELGHAKLRASREELTDALDGRWLSRHRFLLGLHLDRIRQLDSQIEQLQQQTALAMQSCQEAVARLIQVPGIRTEGALQMLAEIGPTAEAFPSPEQLASWVGVCPGQQESAGESYSRRSAKGNWQMRRLLSQAAHAASHAKGSFFESLYRRLVVKIGPHKAIWAVAHRLCRLIWKILHQGVSYQERGTPTASPKSIQRRQYKLIAEFRRIGFQVQFTPIDPAHP

SEQ ID NO: 245312 - protein, 358 aa, unidentified
MAASETTEITVVGGIDTHTDFHQAAVIDTVGRQLATESFETTPDGYWRLLEWFTSHGEIIAVGVEGTGSYGAELARFLRGNGLTVIEVDRPDRKARRANGKSDPVDAHAAATAVLSGRANGTPKTRDGIVEAIRVLRVARSSAVKARTQAINQIRALMISAPSEVRDRFRGLSAKDLIDGLSSSRPTGSLEDPAYTTKVTLRRLARRYQALDEEIREAEAEIGPLVTKAAPKLVALPGVGPETAGQLLETAGDNPERLRSEASFAHLCAASPIPASSGRTHRHRLNRGGDRQANRALHTIVLVRMKYDLRTQTYVARRTADGLSKRDIIRCLKRFVAREIYRQLPRPQLTTEQLCPRA

SEQ ID NO: 245313 - protein, 413 aa, unidentified
MEVLVDRCAGLDVHKKTVVACVRTPGTGRQKRVSEVRTFGAFEHQLVELRAWLAECGVTSVAMEATGVYWKPVWHVLDEGQPFELLVVNPAHIKNVPGRKTDVNDATWIAQLLECGLLRGSFVPPTEIQQLREVTSYRRQLTEERARETQRLQKVLEDANVKLSSVASDVLGVSGRMILDALCAGERDPEVLAEMAQRRLRAKIGDLRHCVPGRFNDHHAGMVTEIVAHVDYLSAAITRLDARVEEMMAPFRAARELLETIPGIAQRTAEIIVAEIGVDMTRFATPGHLASWAGVCPGNNESAGKHRSTHTRSGDPWLQSALVEAAWSAIRSKNCYLAVRFWRIAKRRGQQRALIAVAHTILIIAWHVLSEGTVYTELGVDYLAGNDNPDRRRRHLINQLEHLGYHVELTPAA

SEQ ID NO: 245314 - protein, 429 aa, unidentified
MSEEKSLELRISVDVGYRRHSVAMGLSSGEVLEEFEIDHRPEGFQEFFSRIEAQRKKRNCAVSVAMEGYNGHARPLDSLVRQRGYRLYNLNNLKFARFKEIFPGAAKSDRIDARKGLELFQLSDHLPLAKEVLQEVSGTAPENEVLKRLTRRRRRLVNERVRVVNNLQADLQAVCPGLLEITGEASNQWFLNFLLSADTLPQLARLKRSTLLKIPSVGVKSAAIIEGWQKRSHFSQEVEWVSEMIQEDAKRCLELDEKIKRLQAKIAEVAKNSKIAQTLRSIPGFGAVCTSELAGEIGTIERFASEGSLSLYLGMSMLDNSSGKYQGTKAPKHVNTRAKAAMMIGVDRHRKYVPESQRYYEKKRSEGKKHNQAIRALGRHLARIIYKMLKQEREYEIRPEKGDTKAKVGPRSFVKTKIRRPKISSKETK

SEQ ID NO: 245315 - protein, 389 aa, unidentified
MKIFVGIDIAKLNHFAAAISSDGEIILEPFKFTNDADGFQLLVSKLESFDKNSIIIGLESTAHYGDNLIRYLVAEFYQVCVLNPIKTCQMRKNNIRKTKTDKVDTYVIAKTLMMQDDLRFVNFYDLDMMDLKALGRFRQKTIKQRTRLKIQLTTYVDQVFPEIQYFFKSGLHQNAVYALLKEAPSPKEIASMHMTHLANLLKVNSHGHFTKEQAKELRVLAQKSVGANDSAISIQITQTIQQIELLDSQLEKIEAEMTDIMKFNDSVIMTIPGIGYINGGMILGEIGDIHRFSNPSKLLAFAGLDPSVYQSGNFQAKTTRMSKRGSRVLRYALVNAAWNVVRNNATFKTYYDAKRAEGRSHYNALGHCAGKLVRVIWKMLTDEVEFNLE

SEQ ID NO: 245316 - protein, 336 aa, unidentified
MFYVGIDLHQKTITLCVVNQERQVIQRKTLLCSATETIRDFFAALGAFEAVVEATASYEWLWQLLEPLAQRLVLAHPQKLRVIAESTRKSDKLDAKTLAEFLALDMIPQAYRPTARQRQHRILVRQRSYVRRRITSVKNKMRRVLSNYNADRKDLFRNEGLVYLATVKVSAADRFVLDQLRALWTFLEEQRRALDQELKRFAEQAPSREAETRAVLESIPGVGPVTIDIVLSEVGDVARFRSAKGVAAYAGLAPGQRESAGHRQELGITKAGSRMLRWALVEAAWRLVRQSRRWQTVHLQLSKRRGKKKAIVAVARRLLGVMVALLRSGQAYRLAG

SEQ ID NO: 245317 - protein, 428 aa, unidentified
MSGKQTVQPEPKFVAFVGIDWADQKHVWSWQKADSTQREAGELEHTPEAVEAWVGELCRRFGYGPIAVAVEQVKGALVYMLRKYDCLHLYPVPSTMSAGMRQALYPSGAKDDPRDADVLLELLLLHRDKLRRLTPDNEATRRVQNLVEERRQLVEEKTAQLNRLTGNLKVYFPQMLKWFAKLDSKLVCDFLERWPSLEELQKVPSAELKKFFRHRRGRHGQLTEWRMAEIGQAMPAIGDRAVIEAKRTVVQVIAQLLRTLLEGIATLDRKIAEAAEAHPDFFIFQSLPGAGDALAPRLLAALGSQRERFGSANEVQKYSGIAPVTESSGKKKWVHFRWACSKFLRQTFHEWAGHSIAQSVWARAYYYQQRERGKEHHAAVRALAFKWIRIVFRCWQDRVAYDENRYLMALAKRGSHLASAFAAATASM

SEQ ID NO: 245318 - protein, 318 aa, unidentified
MDVIGIDISKADFHAYLIQGSRNAARSFPNGPSGYRQLWRWLRNRGTTEVHACMEATGSYWMGLATALFENGLRVSVVNPSRTAMFARSQLLRTKTDKVDAQMIAEFCQTQQPKPWTPPLPQSLELRGLLSYRQQLVRQRIGLKQIANEVHVGAGLQALHTSHLKSVDDAIDALEAQILAILKANPELEAQVARLTSIKGFGLISAVALVAKLPIDRLRDGKAAAAYVGLSPRERQSGTSVRGKPRICKTGDAELRRDLYMPAIVAMRYNPTLSAFAARLKERGKPSKVIIVAVMRKLVVLAYQLLKDPAGPKIAVPA

SEQ ID NO: 245319 - protein, 341 aa, unidentified
MQITTIGLDIAKNVFQVHGIDANEKVVVRKQLRRSQVIAFFKALPPCLVGMEACASAHYWARELRKFGHEVRLMPAKDVKAYVKRNKNDAVDAEASCEAVRRPTMRFVGVKSAEQQGQLMQHRTRDLLMRQRTQVINALRAHLAELGIVAAQGREGLKELLAIIADESDARLPIDARASLIVLAAQLQAVQTLIGSIEKRITAQHRANEASKRLQSIPGIGVIGASAIVSTVTDPNAFRSGRDLAAWIGLVPRQDSTGGKQKLGPISKQGDRYLRRILVVGAHAVLRRAKHNPEKYPWLTQLLARRPFKVVAIALANKMARVAWALLASGGRYRAPRLTAA

SEQ ID NO: 245320 - protein, 403 aa, unidentified
MWFLGIDWGEAHHDLCLLDQDGMVLAARRIADGLAGVAALHALVAAHAEDPTQVAVGIETDRGLLVGALLAAGFQVYAVNPHTMSRYRGRHGSSRAKSDRGDAKVLADLVRTDRHNHRPVAGDSPLVEAVKVLARAHQGLIWARQRHANALRSALREFYPGALAALGAQLAEPEALAVLALAPTPEQGRQLTRAAVRRALVGAGRRRNLQARVVAVHDALAAPQLAAPAPMESAYREVVGALMATLGCLNQQITGLEQQLAARFATHPDATIVRSLPGLGMVLGARVLAEFGDDPHRYATAKGRKAFAGTAPVTRSSGLRTVVVARAACNQRLVDACYLWAFAALTASPGARRCYDAHRTRGASHHQALRALGNRLVGILHGCLAHRVTYQEQLAWPVTATVT

SEQ ID NO: 245321 - protein, 321 aa, unidentified
MTYVGIDVSKATFVVAYSSAKGSETKTFKNTIKGIREFIQTISPKENHCVLEATGNYSMLLVYLLSKAGFVVSMENPLKIKNFARVMLSVVKTDEIDARLIALYGERMQPAPFKLRNDSILLLKQKRTVLRQLKKQLTANTNLEGSLKVLPFIDSKSKKVLEKTIKFLQKQIKEMEEELTSLAEIEYKKQMDLLTSIKGIGATLAAALIIATGGFTYFDNAKQLTRYLGLSPTYQQSGTSVNVKGHINRNGDAHLRSQLYIGAMASLRCNTECKACFDRLRSNGKPGKVAIIAVANKLIRQAFAVVTQEKPYVDGYKSVKP

SEQ ID NO: 245322 - protein, 316 aa, unidentified
MVSSNDGIWIGIDVSKAHVDVAVFGGRQWRETTESTGLLRLTTELVEVGATLAVLEASGGYEVVVAAALAAAGVPVAIVNPRQVRHFGRATGILAKTDRLDARVLARFAAVVQPEPRPLPDAAQVELTELVQRRRQVVDMIAAEKLRRRGASGHVGQQIQAHIRWLETQLDELDHELTDLVRPSPLWRDKDDLLRGVPGVGPTLSATLLAELPELGHLNRRQIAALVGVAPLAHDSGTFRGRRSCWAGRASVRRVLYMAALVATRCNPTIKDTYQRLLHAGKPKKVALVACMRKLLVALNAMLAHNTPWHAEVQTP

SEQ ID NO: 245323 - protein, 391 aa, unidentified
MIYVGIDVSKDKHDCYIVNSDGKVLADVFTVENNLEGFDLLFQRLKSVARDLDNVKVGLEATGHYSYNILGFLLGKGLATFVLNPLHTNLFRKSTSLRRTKTDRVDARTIAAMMMSGVVLKSYTAISYHNEELKSLSRYRFDKVCQRAKLKQSVSRLVTILFPELENLVSTLHIASVYALLAELPGAKQVASCHLTHLTNLLSTASKGHYGRSKAIELRNAARRSIGSAMPAKSLELQHTIRLIRELDAEISEIETALKQIIDQIASPILTIPGISYRMGAMILAEIGDFSRFDSPDKILAYAGLSPSTYQSGKLDNAYAHMEKRGSRYLRYALYNAAKYVCHWDASFCAYLAKKRAEGKHYNVAISHAAKKLVRLIFALQRSGQPYYPAA

SEQ ID NO: 245324 - protein, 365 aa, unidentified
MWEAPVKLQRTSVGLDVHARSVVACGLDGDTGEVFQRRLTPDHGEIVTWLGDLPGPVAVTYEAGPTGFGLARALATAGIACEVAAPSKLIRPVGDRVKTDTRDAAHLARLLHLGQITAVTVPTAAQEAARDLVRARDDCRGDLMTARHRVSKLLLRQGIVYSGGKAWTGRHELWLRAQRFDNPALQLSYEAAFDAMLACLDRRNRLDGAITTLAAGSEFTPVVHRLGCIRGVATLTAFGLAVEIGDWHRLTGRSIGAYVGLVPSEYSSGEARSQGGVTKTGNGHVRRLLVEAAWHHRTRYRPGAEMRRRWDLASPAARARGQAANRRLYTRWAGFDARKKRPVIANVAIARELAGWCWSLAVMPD

SEQ ID NO: 245325 - protein, 417 aa, unidentified
MTEQYAWFLGIDWGYETHQICLIDAAGHMRDTRRLDHDSAAVDVYITWVLAQTGVPPAHIAVAIESPRGALVATLLERGFAVYAINPKQLDRFRDRHTAAGAKDDRRDAWVLADSLRTDQAAFRPVHVADPLVLQLRELAHAEADCARDFSRLANQLRDQVYRIAPPLLRLCPAADEPWFWTLLELAPTPAEQQRLTPTQVLTVLRTHRIRRLIAADVLTALRAPTFALAPGVIEATREALQILIPRLQFVRAQRQRCEARQEAILAELRERPASEAEPGEHRDVAILASLPGVGRMTTVAMLTEATQPLATRDYDGLRTYMGAAPVTKASGKRRLVHMRLACNARMREAAYHWARVSVQQDEASAAYYRGLRARGQTHGRALRSVVDRWLRILVAMLRHRTLYDPTRFMTAVAISA

SEQ ID NO: 245326 - protein, 369 aa, unidentified
MTFFIGVDLHKTQFTVHVRTEEKIESLDQIKQYPTTVAGYAEFFTRIATYKASGAAVKIGVESTGNTRFFKNQVEKAGAEVTVINTLKFKVINESTKKTDKHDASTISEFLSKDMLPESYLCGKETENIRRLLKSRERLVRSVVGQKNEVHALLVSMGLPDELRCLQSKKGRQKILDTLLSHSDLVLEAQSVKLMFQIIDRMTESVKTIEKQLAELTKDDEMVNRLMTIRGCGKITAWTIRAYTEDIGRFASAKKYAAFCGLVPWVQDSNETIHHGKITKRGPQELRTCFVQLVLGIRRCKDTSEWRMMQRYEYMKKNKGSGKSIVAAARKMAEIIWAMLSEKQDFNADKMKGIYKPMTFADEALSAMN

SEQ ID NO: 245327 - protein, 388 aa, unidentified
MPQQRKPNDLGRSLISLAMDTTLIAVVELSLSSWLVAGIVPGVERQPLKKLKTDENALLALLNRWRDEAVRSGHKISRIAVAFEAGRDGFWLARWLKARDIEAHVIHASSIAVSREHRRAKTDRLDTELLKRAFVGWLRGERDHCKTASVPSLWEEDAKRPSRERESLVGEQSRLINRMKATLIRLGIRGFNPKLRHAEQRLETLRTPEGEPIPPNTLAELKRDMQRRRFICDQIQSIEQDRLERLERTPHTEPHAMVRLLARITGIGIETADLLVHELLLRNMRDRRAVARYGGLTGSPDRSGGTNREKGMARSGNARVRRGMIQLAWRFLLFQKNSALAQWYRRRTEHAPKARKTMIVALARKLLIALWRLVREGVVPEGVAMRPA

SEQ ID NO: 245328 - protein, 335 aa, unidentified
MKKYLVTVGIDVSKLKLDVRFVFDINSKEHPHIIVANNEEGIRAIIAFLKTKKVQTCDALFCFENTGLYSMPLAIFFSKHQLDYWDIPAIEIKRSKGVARGKSDKIDAKDVAFYAITHSYQLKLCQVPEQDILKLQLLYSEREKLIKALHAMQASTEVASFLPKEIIKEVIAINKKTTAHLKASLKQIDERIAAIIKSNQSINTCFDLSVSVPGVGKQSAVYLIIKTRCFSRFDNWRKLACYAGIAPFEYSSGSSIRGKTKVSHLADKKMKSLLNMAALSAKKNDKEIGDYYKRKTDEGKNPMLVMNAIRCKVLSRVFAVINRQTPFVNTQKFAA

SEQ ID NO: 245329 - protein, 434 aa, unidentified
MEEITDEPLYRDRVCGIDIGKAGLVATIRVPSDANPARRAAETRSFGTTRREVLALADWLRCWQVPAVVMESTGDYWKGPFYRLEAEGLECVLADAKQVKHLPGRPKRDPSDSRWLAACFERGAVTACFVATEEFRVIRLHTRYRRDLTEERTREKQRAEKLLESAAIKLSSVVTDLHGVTGRDIMDHLIAGETSPKVLAQLARARARRKIAELEAALEGAEFFTPAHAALLATMLDRIDHLNAEIARLTEMIEHLLAPYEEQLAQAESMPGWGRRSAQDALAETGTDMSRFPTPSHLASWAGRTPLDNSSGKRKGKAKSKKGNRYLAAVTGETAVAAGKTQTREGARYRRLARRRGKAKAQVALGNTQLKVYHALLSHPGTRYQDLGPDYYERQAGTRRQIAHHVGKLAALGFEVTLARLPEPDPTGPDNQAA

SEQ ID NO: 245330 - protein, 355 aa, unidentified
MERYIGMDVHAASCTLAVISEKGRKLKDFPVETNGQALVEAIRMIPGHKHLVFEEGLQSAWLYETLNPHVDDIVVAGITTSRGQKSDKIDAYNLAEDLRTGSLDKHVFKAPRQFTRLRELSRSHMTLVSDTVRVQARIKALYRSRGILVSGANVYGVRHRKEWQKQLPSSIQTRATRLYDYFDFLLEQKEQAEADLLREAKKHPITKILETAPGFGPIRAARLLPIVVTPHRFRTKRQFWSYCGLGIVTRSSSDWIQTADGKWVRARVPQTRGLSRQHNHFLKHIFKGAATTVITQRNKDPIYQRYERLLDGGTKPTLAKLSLARMIAATVLRMWKDEKEYDPGRASPIAKTRES

SEQ ID NO: 245331 - protein, 351 aa, unidentified
MERFIGLDVHAASTTCAVIDARGKRVRVDVVETNGQALIEFLKLQPGTLRLCLEEGTQATWLAEILTPHVAQLAVVHVTESRGPKDDERDALALAEQMRTGKLETTVFKSVGAFGALRNLVKTHAMVVRDVVRTQNRIKALFRSRGVPVAGKAIYGAKDREAWVAKLPTTAQGAGRLLYAQYDAINDVRAEAEKKLVEESHRHPITRVIETCPGVGPIRAAQIVSVVVTPERFRKRQQFWSYCGLGLVMRSSSDWVKSEKGTWARATVNKTRGLNFNHNHLLKQVFKGAATTIVTQLSEHPLRADYQRMLDGGTKPNLAKVTLARKVASIVLAMWKHQEVYDTVKHSKPSS

SEQ ID NO: 245332 - protein, 363 aa, unidentified
MKTQSNKKNELIKQSFEGKTISCGIDSHKKNWSVSIYIDDSYYTYVHQVPDAEALKKYLTSNFPGAKYAACYEAGFAGFSIQRKLSATGIGCIVVNPADVPKTNKDVFKKSDKGDSRMLGEALSKGMVRGIYIPAEEIESDRRLVRYRKYTQKNLTAKRNTIKSLLFSSGVSIPANLDNNYVSKNYIEWLKGIDFGYSTVRFTLDQMILDMEYFRKKLLELNKQIRKLSKEEKYKETFEILVTIPGIGLITAMTLITEIADISRFQSFNKFNSFVGLCPSEFSSGENDRKGKMTPRAHKTIRELIIEAAWVAKNHDPALAHKFSDLCKRMTKKRAIIVVARKLLSRIYAVWTTKSQYIKGIQQ

SEQ ID NO: 245333 - protein, 344 aa, unidentified
MEPMYYIGLDVHKQKISYCVKDSGGRVHAEGSLPATRADLDHWMKALPQPWSAAMEATMFSGWIYDHLKPHAAALQVAHPLMLRAIAAAKKKNDRIDASKISDCLRCDFLPECYMVPTAIRERRRTLRYRNLLVRQMVQMKIKTSSLRMEAGVSYNKQRLHKAGYFRELLATNPHIDAGLCSLLRQCREMVVRLGKTESALIRSLQHDQLLVERVERLMSIPAVGPITALTWALEVGDVQRFSSIKKAISYCGLCGAEKSSGNTVQRTPLSKQRNKHLQTTLIEAAKMAPRYSPTLALLYDREKQRGNANRATLAVARKLVAYLVAVDRGQTPFLVVDHEVCAA

SEQ ID NO: 245334 - protein, 393 aa, unidentified
MLYLGIDIGKNTHVASLIDETAKPLFKAFSFSNTTEGANSLIEKLSVHINNQSEVEIGMEATGHYWLSIYSFLVENGFVVHVVNPIQTDGWRKGTEIRKRKTDFIDSVLIADLIRYGDFVETSLSDEDTMSLRNLSRFRTYLVSSISDLKRKVICVLDQVFPEYHTAFSDVFGETSKELLSHFQTADDFENISSEQLENVLKKVSFKGFAKNKITQISELAASSFGLKFCQDSFSLQLRLLIEQIKFIDAQVCDVEAEIKVILDKINSPIMTVPGVGNINAAVILGEIGDISRFSNASKLAAYAGIDASVSQSGEYQSTNNKMSKRGSPYLRKALFQAALIAAFHDPVFSAFYQKKRSEGKHHLTAVGAVARKLCNTIFAVLKYNTAYVPQFK

SEQ ID NO: 245335 - protein, 462 aa, unidentified
MARSKPKASRTAVPVPAFPPPLAAANLHAAGIDIGADAHVVAVPPSDDPQPVRGFGAYPADLNAIADWLATCGITTVALESTGVSWIPLFALLETRGFAVLLVDPQQVQKIKGRPQSDVHDCQWIQRLHTFGLLASAFRPTDQVCVLRRDLRQRAMLLTSAAQHIQHMPKALTQMNRKLQHVISDMTGVTGLAILRAILGGERDPEKLAPLRDDRGKYDEATIARALQGNGRDEHLCAVAQAVALSDVYHQKIIACDRHIEAYLQTFADRSEGQPLPPPPRPRKRGGNQPAFAVRGPLHRITGVDLTQIAGLDETTSLVILSEMGLDMQRWPTVKHFTSWLGLCPHHRVSGGKVLSRRTKPCANRAATALRLAAACRHHSQSALGAFFRRMKARMGAPQAITATAHTLARLLYTMLKHGTAYVRQGMDEYAQQSRDRMVKTMTRRAKALGYTLVKAPEGNLA

SEQ ID NO: 245336 - protein, 344 aa, unidentified
MSNLDTCGIEVSAKELVVRLRRQEDLEPLRNFTNTPEGHLMILRYLRRGGRVVRVCMESTGLYGLDLALALSGQEGIEVMVANPRAVRHFAHALMQRSKNDQIDAGVLEQFALHMPFKPWQRPSVAMLALHALARRLRELVEMQTAEKNRQHAAGLSKAIPAVVRRDLARSPRAQERAIERLTRQARKLIAQDPQLAERFELLDSVPGIGETSAVQLLGELGVLAPDLEARQWVAYAGLDPRQYTSGTSVHKKPRISKAGNKHLRHALFMPALVAVQHDPHLRAFYQHLLAQGKFKMQALVAVMRKLLHALHAMFKTHQLYDGSKLFRLKSAPAQEVTHVLVAC

SEQ ID NO: 245337 - protein, 354 aa, unidentified
MKTYYVGMDVHRASIWIVVLNGAGKLVMQSVIETGAERVRGYLKQLRGKVYVTFEEGTQATWLHDIVRSLVTEVVVCDPRHNKLLQSGNKNDRVDAQKLAELLRNGALKAVYHGDHGMRTIKELVRNYDCLVSDSTRVMLRLKAIYRGRAISCAGHDIYRSDRRAQWLEKLREPGARQRASFLYAQLAALKPLRHEAKLVMVKEARRQAAYPWLMSVPQLGSVSVAQLMAVVGTPHRFRTKRQFWPYVGLAVVTRSSADHEIVNGVLRRSRRPIATRGLNRNHNHLLKKVFKSAATSACHSGPFKAGYDARVAQGMDPSLARLTIARQLAAITLAVWKRGEKFNMQMMKQQLAA

SEQ ID NO: 245338 - protein, 369 aa, unidentified
MEKDTTYVALDDSKRTITAGILRPGEGEPELRQIPNEARLLRRLVERLTREGPVRVCYEAGVSGYDLHRQLTGLGVPCDVIAPALTPRRPGQRIKTDRRDAAKLVRLSRAGELTAIHVPNEAEEAVRDLLRCRDDIREDVVRWRHRLVKFLFRHGRVYRTGTHWRQAHWTWLRAQRFELPALQRTFDATLFAVEQAQARLVELDREVETLAERAPYCEPVGWLRCFRGIDTLGAMILLAELVDFQRFRTPRELMAYVGLVPREYSSGDTERRGAITKAGNTHVRRILVEAAWHSRHGPRLGRAIALRIQHQPRAVVAHAWKAQQRLHRRYRHLVGHGKRAPVAAIAVARELVGFLWAAMTHVDPRLATA

SEQ ID NO: 245339 - protein, 344 aa, unidentified
MPQDVFVGLDVHKNSIVSVAKAQDGRLVDRSRLSSDDAELKTYLEGLPGRKHVVLEAGCVWEHVYDAAAAVSSTVTLAHPHKVRLIAEASLKSDKVDAGALSDLLRLNAVPMAFAPDKPTRDRRQLVRDRLYYKRLATAVKNHVYAVLLRKGLPYEDGILGLKRRREDLRKLGLRVVDRGLDMLVAIEGTCKDLDAEVERAYLTSGEAQLLTTIPGIGKLTALALVAELCPIDRFPNVEKLCSYAGLVPTVHQSGDTSYHGRLKKKDCNVLLRSLLIEAAWAHRRRAPKSDVSKLGRRVARRRGKGKGSVAAARKLLKVVYAVLKRGTPYTPERPGCGGLPAEP

SEQ ID NO: 245340 - protein, 413 aa, unidentified
MEILHTRCAGLDVHKKVVVATILVSDEHGQLTKETRSFETMTASLLALSDWLTGFGITHAAMESTGEYWKPIFNILEENFEILLVNAQHIKAVPGRKTDVKDSEWIADLLRYGLLKASFVPPKGQRELRDLTRFRTTFIKERATLINRVQKALEGANIKLASVVTNIEGVSGRAILDAIIEGKATPEAMAELAKGRLRTKRDALEQALAGRVQAHHRFILQELLCQIDSLDETIERFDTEIQDYCRPFDVAIEHLDTIPGVARETAEVIVSEIGVDMSRFPTANHLASWAGVAPGNYESAGKRLSGRTTKGNQALATALTQAAWAASHTKNTYLSAQYHRIASRRGRKKAIVAVAHSILIIAYHLIMDKQTYQDLGGNYFDRRNSEATAKRLVQRLEKLGYKINLDRPIAVAP

SEQ ID NO: 245341 - protein, 344 aa, unidentified
MKITTIGLDLAKSVFQVHGVDATGQVMVRKSLRRSQMLAFFAKLPPCLVGIEACGTSHHWARELIKFGRDVRLMPPAYVKPYVKRGKTDAADAEAVCEAVTRPTMRFVPVKSPEQQAALSMHRTRDLLVKQRTQLINMIRGLMAEFGVDIPKGLERALLLARQIVEGNAPEVPFEAAKIVGTLSQQALDTHVRLREIDRDLVVWLRGNDVARRLMTIPGIGPVGATALAASVTDPQQFRSGRQFAAWLGLTPLQKSSGGKERLGRITKMGDKYLRKLLIVGMTSLVRRAKYSPGKIDPRLVDLLARKPIRVATVAMANKTARIIWAIMSRGEIYRTGHRPVLAA

SEQ ID NO: 245342 - protein, 389 aa, unidentified
MARAVNFRGIALGSPLEFSNDEVGFQFFHRWIRDLLTSYQLQASIIGMEPTGHYWLSFARWLERNQFEAVLVNPHLVKKNKENRDNTPSKSDKKDALVIADMVKNGYYAPVRFHQEEFEELRVLMANRETVVKRLVSAVNQIHRWVDIVFPELRQVFKILTCTSAIATLRLFPVPSDIIKLTPEDVISGWKQFVKRHSGVRRAQLLIDLAKRTVGIQQATKAFRLHLSQLLEEYDLAQSQLQRIDEAVTSVLNRIPFAAKLLAIKGISTTSLAGVLGESGDLSGYTHGNALLRHAGLNLSEASSGKWRGQMVLSKRGRPRLRHFLYLITMCMVMTNPEFKALHQRNVQVKKLKKMKSIMKLLGKLARLLVGMARTGEAYNPAKTLPLAA

SEQ ID NO: 245343 - protein, 375 aa, unidentified
MPKYSTAFGMDVHLRSTTVCALDADTGEAVTRRFPGNPWGEIAGWMGGFPGPSLAAYESGYPGFAPQRELAGLGVECVVAAVSKIPRSAADSASKNDRNDAARMAKAILAHDISPVWVPSPEVEGIRDLAGAYDGATARLATAKQRLLAFLAKRGFAYGGTTPAGNPRKYWTYDFLRWLDKVRPEDDGGVRTLAALRSEVEAAAEARADLLSEYRAAVDASPIAAEVAALQSIKGCAFALAAAFSAEVGDFTRFRSGRQVTAYFGLAPSQRSSGDSVRLGGISGAGNALVRKLAVEGSWCYAAARHQPKLMPRDTGVPLEIRMHGRKGSERLLRRREEMLARGMPQAKANAATAAELVRWLWALGTMCREGAEWT

SEQ ID NO: 245344 - protein, 466 aa, unidentified
MKKAGESSKTKRRGVPTALQAIRPMVAGIDVGSREHWVCGPARADGEPNVRVFGTTTIQLKEMVDWLAEQGTESVAMESTSVYWIPLFELLESRGIEAVLVNARQLHNVPGRKTDFQDCQWIQLLHSCGLLRGSFRPGNAIVAMRAIHRQWANLVEERTRCVQWMQKALDQMNVQVHRAVTDLTGTTGMAIVRAIVAGERDPVRLSTLRHHHCKKSVEDIARYLTGTWREEHLFNLKSALQFFDAVEALIATHESRLLEAMAVLQPDERKDAAVQPHPNPAKEKAIKNRGDQPARTALWRFAGIDLTRIDGIGIGAARIILTEVGLNLSVFPSEHHFVSWLRLCPRRPISGGKPLKTRRNALGANRISGALRMAASSLQRTKTALGAAYRRIARHKGAYVAIFATARRLAQLVYRMLRYGQDYVDAGEEAYDRQFEARRLAGLREAARSMGFSLTAQPATTPAKSG

SEQ ID NO: 245345 - protein, 444 aa, unidentified
MLRFVGCDVHKRTAVFTILLEEGTVFATYTVPVTREALAAFAQQQLGREDRLVMEATTNTWAVAELLRPFVVEVVISNPLRVRAIAEAKIKTDKVDSRVLAELLRCDYIPRVWQPDPETQRLRRLTHRRAALVSDRTRLKNRLHSILHHTLVPLPPCDLFSQRGIAWLRQVPLEEEEAQSRESDLRLLEQTEREIAAVDDRLVRTAWQDEKVRLLMSIPGIDYTVAQTCLAAIGDISRFANGKKLAAYLGLNPSTRQSGPHCYHGPITKQGNAHARWLLVQAAQHLGQYRGPLGQTFRKIAKRKNRKVAVVACARKLAVLVWQLLSSGEPFRYGEPRSLQAKFSRLRVRATGRRRRGGVPRGTPRSSRYGHGRTRALPSLNQVLEDNGLPQSTLPPRGERRMLDEKRLHAFYTELQVASRVEVNRGSTQVEEQRGNAKTHLTQS

SEQ ID NO: 245346 - protein, 340 aa, unidentified
MQGTTIAVDLAKSVFEIAVSHRPGKIAERHRLNRRRFERFLALQAPATIVMEACGTAHYWGRRAQAGGHRVRLLPARDVARYVKGNKTDRSDVKGILEADRNEDVRPVPIKSVEQQALMSLHRMRSTWVATRTSRLNTLRGLLRELGITIPVGARRVVPAVWSLVSDAESGVPDTLRPVLAEAAREVTELEQRIHEVEAQLEALARKSPVIRRLRTIPGVGLLTATAVVASMGDLERFSTARHFSSSLGLTPRESSSGQIRRLGRITKRGDAYVRTLLIHGARSVLHHAKRRECPDRLRRWALEREGALGHNKAAVALANKLARIVWAISVHEDDYRSAP

SEQ ID NO: 245347 - protein, 298 aa, unidentified
MDHFAGLDVSVKETSVCILDDAGKIVKEVKVASEPQALLKVLGNPTYRFKRIGLEAGPLSQWLFSALAEAELPVICVETRHMQAVLKAQINKTDRNDARGIAQMMRVGMYRPVHVKTLRSQKLRMLLTHRKLLQSKAIDMENDLRGTLRNFGLKVGMVGAARFEARIRELVEGLPDLAVLVEPLLVVRQVLRQQLAVLHRRLLAVVRDDEVCRRLMTTPGVGPLVALTYRTTVDVPARFRKSKSVGAVFGLTCSRYQSGEIDLSGRISRCGDEMMRVMLYEAAQTLLTRSTRWSWLKA

SEQ ID NO: 245348 - protein, 342 aa, unidentified
MTTNTIIGMDISKYSFELWGTDERGHHTLHKRLHRDKVNLFFANLPRCTVALESCSGSQHWARQRKDLGHEVMLIPAQHVVAFRKGAKNDRNDAEAIAEAAARPSMRTVPIKSTDQQDLQAIHRVRERLVHHRTALINELRGLLLEYGIVCAKGVTRFLSWLRDEFAAQVESLSPMAQQTFHFLRDEFRALEAQIKVTDKRLKAVFESHPVCQQLATVPGVGALIATALIASVAEPQRFKNGRQFAAYLGLVPRQHSTGGKSKLLGITKAGNKHLRTLLIHGARSVMFHHRAKDDDRSKWVNKLVERRGFHKANVALANKNARVLWKLLTTPGEQFTERLAA

SEQ ID NO: 245349 - protein, 392 aa, unidentified
MFFIGIDIAKRSHQAAVTDVSGNIIIKPFNFKNSSVGFNQFLSMLASNSVPKDDCIIGLESTGHYWYPLYFFLVEQKFNVKVFNPIQTAAFREITIRKVKNDNLDSIMIADFTRFGRYSETHIPSENMLALKNLSRFRLSVCDICGSLKKRTIVLLDQVFPEYDTVFCDIFGTTSKLLLEKFSTHEEFSEISTTKLANFIHKVSRGRLGREKAELIKAAANNSIGISYAVDTFSFQIKQLIEQIEFMENQLSEIDAEMAKLLALSEYSVITTISGVGPTLGSIIVSEIGDIERFETSSKLVAYAGLDASVKQSGEFNSSQNKISKRGSPYLRRALWMAAFMSLQCDPALYDYYSRLRARGKSHRLATTAVARKLCIIVWAIMKSKQPYSPNI

SEQ ID NO: 245350 - protein, 469 aa, unidentified
MKHNLKRKRTGNQAQGSLSLLQRIQPDAAGIDCGQNSHFVAVPPGRDSEPVREFRTFTADLHKLADWLAQCRVKTVAMESTGVYWIPLYEILEQRGFEVVLVNARDVHNVPGRKSDVQDSEWLRELHSVGLLRASFRPGADIVPLRSYLRQRETLVEEAATRIQRMQKALSEMNLKLHTVLTDITGQTGLTIVRDILKGERDPERLATHRDPRCHASHAEIVAALTGNYRTEHLFALKQNFAAYEFLLQQIGECDTQIEALLTTLAAQQPPPATPLPAARRNKISKHTPSFDIRSPLHRLTGGADLSQIDSIGPQAALQIVAEIGIDMSRWPTEKHFTSWLALAPNNKVSGGRLLSSRTPPSANRAAAALRRCAMSLGRTSTALGAFYRRLGARAGKAKAITATARKLAVLIYRTLSGNLIYNDPGPTAYHQLNRTRELKSLRKRAHFLGCDLLDRSTGEVLLYANPAS

SEQ ID NO: 245351 - protein, 346 aa, unidentified
MAAVMIGVDPHKGSHTAVAISPAEDRLGELRVRACAAQAQRLLDWAQVWPERIWAVEGAAGLGHLLAQQLLSAGEQVLDVQPKLGARVRLLAAGDTNKNDPNDARSVAIAALGSPARWQVTPDDHAAVLRVWAKRHRDLGRSRTQVVCRLHAVLCELVPGGVSKQMYAAHAAQLLASITPSAAVETARCELAADLVDDLRRIDARMREARKKLDAAVQASGTSLTSIFGVGPVVAATVIGAVRDVSRFPGRDHFAACNGTAPIEVSSGQRKICRLSRRGNRRLNHAIQMAAVTQIRYRHSDGRAYYERKLAEGKTPKEALRALKRRVSDAIYARLQADARQAKGSR

SEQ ID NO: 245352 - protein, 347 aa, unidentified
MIIIGCDLHTRVQQIVMLDTETGEVVEKRLEHEKGEAKRFYQSLEPPVLVGIESTGYTLWFAQMLSALGHELVVGDAAKIRASETRKQKHDRRDAWHILELLREGKFPRLWLPSVEEREVRVLLEHRHQLVQLRTRAKNGLQALALNQGLRRRSGLWTEAGLKRLESLPVGEGTKWRRQDLLRLLHQLDAWVEDLDERLRAEVARRPAALRLMTHPGVGPLTALATVLILGPAERFAEARQVSSYVGLIPAEESSGGRQRFGHLTKQGSRLLRFLLVEAGQSASRLDPGLRRTDKRLTFRKGRSIAKVAIARKLIIRLYIMLRDQIDYAEFCRRGSHAGMPGEVALA

SEQ ID NO: 245353 - protein, 336 aa, unidentified
MIVIGLDVHKHSVTAVAVDEAGRPLSEKVIEVGSDELLGWAAALSGERLWAVEDCRQLTRWLERQLLAVGEELVRVPPKLTVPERRAGRTRGKSDPIDALAIARAALREPGLSRPRPDERVCREIKLLVDHRDDLVDQRRRTQQRLRWHMYALDPTFVVPLRMLGRTSHLERVARWLARQEQELQVRLARELVARCRSLNREIAELDQELERRTAQTAPALLEVPGCAAVTAAKLLAEIGPIDRFRSDAQLARHAGVAPLEASSGRIQRHRLDRGGNRQLNAALYRIAITQSRYHAGARAYLERKQAEGKSRREALRCLKRLLARVIFNTLKTSPA

SEQ ID NO: 245354 - protein, 391 aa, unidentified
MTTSERVVIGMDPHKRSVTIEVMTADERVLDGGRFGTDVDGFRAMSEYVKRWPDRIWAIEGCNGIGRHIAMRLLAEGQDVVDVPPKLSARARVFSTGQGRKTDATDAHSVALVGTRMAGLRPVVADDQLAVLRMLADRRRALGEEHTRKVSQLHALLLELLPGGAKKDLSAAQAKALLARVRPRDVVGKIRRRLAAELVADLEQNYARRKAADKELKALVSATGTGLLDLHGIGPSGAARLLVEVGDITRFPDRNHFASWTGTAPIDASSGDRVRHRLSRGGNRQINRVLHTMATVQLRNPTDGRVYFDHKKADGKSSNEAMRCLKRRLSDAVYRVMVDDVAATKRTDPGGQPGNDSDSSATGSQPKTGSSDKPLPGPVEHQPRTPLPAAS

SEQ ID NO: 245355 - protein, 333 aa, unidentified
MEQYIGVDLHKQFFQACSITSTGARAWEMRFPRTEGGLALFCARCGPQTAVAVEACGPTWAFVDAIAPTGTTVCVVDPRKTRLKAGFAAKTDRLDARRLADALRRDSVVSVYVPPPAIRELREVCRGRHQVIRLRTRLAQMIRALLLRSGGPDVPVRRVFSPRGLAWLEEVQLPPDAAASLTRLRHVLTAIQAEAAAAESVVAARAAADPIARALDTMVGIGPVLALTLRAEIGDGLRFPRGAALASYAGLVPRVDASADRYWSGRITREGSPWLRWALVEVAMHAIRRQDPVGRWARQLAIRKGGYKARVALARRLCDDIVQVWRQAGSQDA

SEQ ID NO: 245356 - protein, 369 aa, unidentified
MREGRPQTPRAFLRPSRSKTPSRQDKLQLEQLMESCLAVGPAVNSDHKQESSTSHPAMNQPIPVMPVVYIGIDVSLQTLQLHGLGRRKQLPNTAQGHARLIALLPASAHVIFESSGGYEKTLWLTLLRAGCKVSRLLAGRVYHFRKALGQTVKNDAKDAALLAEYGRRHTPQADVLHPEILLELQDLVARRDQLVRQRAQSDVQAQQLGRDSLRQQAAQLLKFMDRQIAALDQQIRACLKHVDLAPKCQRLQQVVGVGPGLCATLLATMPELGSLTDGQAAALVGVAPYDQDSGAYRAGRHISGGRAPARRALYMAALSASLHNPILRAFHQRLLQRGKPFKVALTAVMRKLIILLNRLIKEPLFTLAS

SEQ ID NO: 245357 - protein, 351 aa, unidentified
MIIIGADYHPSFQQIAFMDYATGECGERRLNHSDGEAERFYRELKQRGVSVRVGMEATGHSRWFERLLAELGFELWIGDPAEIKRKRVRKQKTDRQDAQLLLRLLLENHFPRIWVPSPENRDLRQLLWHRHRLVQMRTRIMNQLQAIALNEGYRWKKKLFSTQGRTLLEELPLAPWASRRRKELLQLLDQLDPKISELTAAVEQEAKKQPEVLLLMTHPGVGPITGLAYVLVIGTPNRFPCGKKIGSYTGLIPCEDSSAGRQRLGHISKQGNTLLRFLLVEAAQAAARCNPDWRRRYVHLMMRREKSIAKVAMARKLAVRLYWMWRNNWQYSQLVEFGSHAGKLGTVHGVK

SEQ ID NO: 245358 - protein, 397 aa, unidentified
MIAVGIDVSKSKSTVAILNSDGSVLVKPYTMAHTQSDMCALADYLRTFDEPLIILMEYTGHYHYPVLKKLQQEGFPVCVINPYQMKKYGDVEIHKAKTDKIDAIRIATYALEKAYKLVPYAALEQKYEDLKFLSRQYNQRISSVSCAKVQLINLLDQTMPGITHLLPLRSRNPEQCVLLLFIKRFKSFDEITKIGKTRFISSYTTLVKKTRDRHALSKGLAIYELAKNSITTRGEDPYIQLAQSQCVDLLSSSQNAADEIILQMQTIAETIPEYKVLRSMAGVGDRLGPVILAEIGDIRRFHSGKALNSFAGNDAPPYQSGQFESRNRHISKRGSATLRKACFEVMQSLKLTKPQDDPVYLFMLKKEQEGKPYNVAKMAGVNKFLRIYYARAMELYK

SEQ ID NO: 245359 - protein, 409 aa, unidentified
MTQSSHEIRVCMDIGSQKHYVAIGLSTGERIDEFEFLHTPKGIEDFFTRLEHLQAKHALPISVAMEGYNGYARPIDSYVLEKGYCLYNVNNAKLARFKEVFPAPAKSDRIDAWKIFELFTMKDTLPLAKNALQEVERPEEAAEKLKAITRRRRELVLEKTRIMNRMQADLEAICPGILSLTGSVDNIWFLNLLTFREDITQLKRLHRSSLLQIKGVGRKYADLIQSWQRTAKFAPNASWIGPMVIKDAARILELVRDMAGLNVEIEALIPYSKAASRIQTIPGFGSICSAEIAGEIGTINRFVKESSLALYLGMGVLDKSSGKQVGTKKPRNVNPRAKAAMMVGVARHIELVPEAKLYYEKKRAEGKKHNQAIRSMGRHLARVIWSMLKQDRDYVVQGQEQKCDELAVA

SEQ ID NO: 245360 - protein, 324 aa, unidentified
MIDGILGIDVSKNTLDASVSSCRKVRARCFANSPDGWRHLLDWLIIQKIRRVHACLESTGRYSLGIACALYAAGHVVSIVNPAQIRDFARTKLGRNKTDGVDASHIREYCELFKPQPWAPPSEAHRRLGELQTIRAGIIAGLTEWKNRKNSGMVDAVAQSLADVTISHFNNQLEAVDEAIAQTIDNDSGLRGKRDLLLSISGVGEILAGVVLAELPGPDVLRSSAAVVAYAGLNPRQHQSGTSIDRVTRISKIGNAVLRAALYMPAMSAMRFNPAIVALVTRLQSRGRLNPKQIVVAAMRKLLVLCFGVLKTGKPFDPAIAMGC

SEQ ID NO: 245361 - protein, 449 aa, unidentified
MSRPRSKPTGLPIVNDKAAAIDIGSRFHVVAVPPDLCDEPVQTFQAFTADLERMADWIVSLGIKTVAMESTGVYWIPSYEILESRGIEVIVANARESRAVPGRKSDVNDAQWLQRLHACGLLRPSFRPSGGIAALRAYLRLRERHMDYAAAHIQHMQKALTFMNLQLHHVVTDITGATGMKIIRAIVGGQRDPSVLAAMRDRNCKSSVGTIRSALVGNYQPEHVFALQQALALYDFYQARIDECDAQIERTLDTLTADKPAPQEPLAKSRSRTQQPNALSFDVRTVMYQLAGVDLTQIHGIGPYLSVRLVAECGTDLSRWPSAKHFTSWLTLSPGRKVSGGKVLSSHTRKTTNRVASLLRLAAVTVGKTNTALGAFYRRLAARIGKAKAVTATARKIAVLFYSAMRFGMKYVDPGADHYERRYKERVIKQLHRRAAELGFSLQPAEGVS

SEQ ID NO: 245362 - protein, 336 aa, unidentified
MKKLIIGIDVSKEKLDLCLQLGEKILKEWILPNTTQAIKSSLKNLPKEYGSEMADLLVCAEYTGQYTYPLSCACEELGLDLWLENPAQIKHSSGVQRGKDDRLDARKIAAYAFRFQDKVRLFSLPEKNIASLKQLISERDMYISDKGKYQGQLTDQKRFMNKKDYEKKSKRLKKLIKELEASILEIEQEIDWLIKSDETLSNQHKLLCSIDGVGEKTAVKMMVETNAFKDFDNARKFCCHAGVAPFRYTSGSSICSRNKVSNRADKSIKSLLHMAALVVTTRKKEGELREYYLRKVAEGKNKMTVLNAVRAKLVLRMFAVIRNNKFYEKNHLYSLA

SEQ ID NO: 245363 - protein, 385 aa, unidentified
MTKLDRTDTPATAEYATVYVAFELSKAKWKLGVIIPGSQKMSRYTIAGGDREALAARLAAARAKAERSGKPVRIVSCYEAGLDGHWLHRWLTEYGVVNHEIDPASIAVSRRARRAKTDRIDLEQMMGALLAYLRGEPRALSVVHVPSEAEEDRKRRSRERERLIKERTAHTNRIKGLLHGQGVRDALPLKAGFIAGLDELRTGNGRALERQLKAEIVREHARLVLVNEQLAEIDANSKAELRAAAPGSAAAKVMQLMDLKGLGPVGAQGLFNEAFYRSFANRRQVGSYFGLVGTPYDSGESRREQGISKSGNARARNLAIELAWLWIRHQPDSELTRWFRERVRDLKGRIRRITIVAVARKLMVALWRYLTTGVVPNGAVLQQSF

SEQ ID NO: 245364 - protein, 420 aa, unidentified
MPATFSIPWTNDLERAMTAVMIGVDPHKGSHTAVVISPAEEPLGEIRVRASAAQAEKLAEWAAAWPERTWAVEGAAGLGRLLAQQLVAAGERVLDVQPKLASRVRLLQAGDTNKNDPNDALSVAIAALRSRTCRQVAAEDHPAVLKVWSKRHRDLARLRNQVACRLHAVLCDLVPGGTSKQISAAQAARILGQVTPSGAAGLARAELAAEFLEDMRHLDAQLRGTRKKLAAAVKVSGTTLTQVFGVGPVIAGTIIGDIADVSRFPGRDHFASCNGTAPVEVSSGNRKIHRLSLRGNRRINHAIHMAAITQLRHKHSEGRAYYEKKLAEGKTHKEALRSLKRKISDAIFARLQADARQAAAATAKGPGGHPGNDSASSAAGSHPARQLFGQATPGPGTSLRPGTTTGTPPKPVSKKTQTTT

SEQ ID NO: 245365 - protein, 342 aa, unidentified
MEHTTIAVDLAKSVFQVAVSHRPGHLDEERRLSRDRLVPFFAQRPPATIVLEACGSAHYWARQLQPFGHTVRLLPAHDVRPYVRRNKTDRTDAKGLLEANRNEEIHPVPVKTIEQQAIASLHRLRSTWLATRTARLNTVRGLLREFGLFIPVGAHHVVPHVRALLAEGPSVPVLLHTTLAAACDEIEMLETNMQAIERQLGALASQMPDVTLLQTVPGVGVITATALVALVADITRFPSGRHFASFLGLTPKEDSSGSRRRLGAISKKGDVYVRMLLTHGARSVVWHAKTATRPLSLQQWAVLTEQRRGRNVAAVAVANKLARIVWAVWTQQRPFAADHRPG

SEQ ID NO: 245366 - protein, 315 aa, unidentified
MFPTIGLDVSKTTLDVCVLKGKDDREFYKFDNSDQGHQQLLDLLANLKVALVVCEPTGGYEASICAVLHRHNYAIHRVNTLSFHNFAKSLSLAKNDRIDAYKLAYYGVSMDIKANYHQSEYQQQLKDLVARREYLVSQLSSEKKNLKHKEYSNIQTSIVKHITYLEGAIKDLDKQIDDFASTETEQAKKVELACSVPGIGKTLSYKLLAFLPELGDDTFDLNELAAITGLAPYCRDSGNKSGKRFIRGGRKIPRDALYMAVLSGCHKIPLLKNLRARLLSKGKPQKVAIVACMRKLLGILHSIFKRREAFVEQIA

SEQ ID NO: 245367 - protein, 403 aa, unidentified
MQTLVERGCGLDVHQATVVACLLIVGKDGKVQKQMRTFGTTTRELLNLREWLLSQGCTHAAMESTGVYWKPVYAILEGGLEIVVANAQHVKKVPGRKTDVKDAEWIADLLCHGLLRSSFVPPKAIRELRDLTRYRRKLVESQAAERNRLLKLLESANIKLASVATDVFGTSGRLMLRALIAGKATAQEMAELARRKLRSKIPQLQLALEGKLEGHHRFLLKLQLDRLERAEGDLAVLEQRIQEKLEPYAAQLALLREIPGVDWTLAAVIIAELGVDMSVFQSVSQVASWAGVCPGNNESAGKRKSSRIPKGNVYLKTALVEAAHAAARTKGTYLRDKFYRLKARRGYKRAVVAIGHKILVSVYHMVSQNVSYNDLGDLYLDKLNKNHLTRNLVHRLAPQQKAA

SEQ ID NO: 245368 - protein, 338 aa, unidentified
MQTYAGIDLHSSNCYLAVIDEQQRRLFSKRLPNSLDHILSALQPFKEELSGVAVESTYNWYWLVDGLQEQGYRMHLANPSAIRQYEGLKHTDDQWDAFWLAQLLLLGILPQGYIYPKAERPTRDLLRRRLLFVRHRTAHILSLQSMLDRCGGRRLSANKIQQLSPSDAEALFSDTQLGFTARCQVEAIGFLTQQIRSIEKAILPKVKLRPEFVILLTIPGIGKILALTIMLEVGDIGRFAKAGNYASYCRCVKSQKISNAKKKGEGNRKNGNRYLSWAYVEAANFAVRYSPRAKAFHQRKCAKTKKVVAIKALANKLARASFYILRDQCAFDEKRLYG

SEQ ID NO: 245369 - protein, 321 aa, unidentified
MNDYIGLDVSLKETAISVRRDGKRIWRGKCPSDPKLLAEVIRKHAPYARRVVFETGPLSVWFYHRLTAEGLPAICIDARHAKAALDMAPNKTDANDADGLAHLAEVGFYREVRVKGYDSMLIRTLVTARTRLIRIATELSNQIRGLMKTFGLVVPKGGGLVFETNVRNLLGSNAGLEQIILPLLEAWRSIRGRAAELDRQLVAMARQSDACQVLTSIPGVGAVTSASFVAAIEDPKNFRTSRSVGAWLGLTTRRYQSGEVDYDGHISRRGDSHLRGLLYEAATVILTRAHADSSLRAWGMKLREKVGFKRAAVAVARMTCH

SEQ ID NO: 245370 - protein, 422 aa, unidentified
MKESGVRIVGFDCAEEDHYTVLLNEEGEIESRGKMVNRRDEVESGLAKLVLAIPPNTELVIVVESKRSHGRLVTDVAKGMGLRVWQMNVVALNHFRDVEGQPRKDDERDAYLLARMVFLRTKGGREVIETTNEERALSRLTRSHARLTADRTQQVLRLRALVLELAPEMLHRSWSGPKVKSKAMERLLERWPGFEGMEKAQLRSIEKILHRCRYGARAAEAARLLRDMARRIGIDGEERSAITLEMGFLVGQIQMCGVALKKLHAEISDRVEKHPIGIKLMEMPGIGVIISGVLISELLPVARTTTEAKSATYSGTTPLSRKTGKTPDNSRLARGINKQILNALYQSGVTAIRSSAVDKAYYQKKLRDYSGHPKPHVAAFIALARQRHKVIFKLMTTDARYDKETLIARHLERLEETRKAAA

SEQ ID NO: 245371 - protein, 390 aa, unidentified
MRQDPAPVRNLQSSKLTHFKVAMIYSLGTDMSKDEFSACLQSYDLQSQSHQVISRKTFNNKPSGFKACMSWLARHTRNDSRPVRLTMEATGVYYEPFALFVGEHHCQIHLSVVLPSQSKKYIESRGLRSKTDKIDAYGLALMGAERKLDAWKGIDPFWRKLRVYSRTRTELLDQRTQLRNQLHALGHSGMEIPKAEQALRECIQTISGQIDELTKLIAKLLRSRKDLRTQIACLRSIPGVGTLTIACILAETNGFAEFHRISQLISFSGYDVKIKQSGSWTGQPKLSKQGSKYIRRAMFMPASVVVRGKQGLLYELYQRLLGKHNIKMKAHVALQKKLLSYMYFLWNRQEAFDPEKIRHDQAVHQALLKQKKVASTNAEATVDTSKAVAH

SEQ ID NO: 245372 - protein, 415 aa, unidentified
MSNPLYVGIDISSKQNVVCCLTNDSEKQALSRFSVCNNRPGIMELQNRIHQLEQKHNFSKILFGLEHTGCYSTHAAVYLHQHLNFGCQDTKVYMFNPSLIKQFKKANFLDAPKNDRADAWYIASKLKAGHLPHPFSLNEPLMALQRLTRARYHIMKALVRESNFLMTNLYLKCSDYTLVFDNTLSATSLAIMEGFDSIEALAEIPLDELTEFLIEHGKNRFEDPTAVAKNLKKAVRSSYRLPKSMNDSVNLAMASSIRVIRTLQEQLKSLKKAISDHLAAIPQTLDSVPGIGPIFASGILAEIGDINQFASHKQLAKFAGLAWTENQSGDFTASQTRMIRSGNRFLRYYLIEAANKVRMHDPVYAEYYAKKKAEPKQFAHKRALALTARKLVRLVYHLLKTNQLYQPKGGNRQIS

SEQ ID NO: 245373 - protein, 425 aa, unidentified
MSELECVKQEPPFAAFVGIDWADQKHVWCLQAAGSEKRESGELEHTPEAVETWVGQLCQRFDNRPIAVAVEQSRGALVFMLSKYEPLHLFPVPSTMAAKMREALYPSGAKDDPRDADLLLDLLLQHGDKLRRLSPDTEATRRVQNLVEERRKLVDEKTAQTNRLRSQLKIYFPQFLDWFEHLDSELVCALLERWPTLEELQKVPPPKLRTFFRKHHCRDEELIEGRILAIRQSIPAIRDRAVIEAKSTVVKVIVQLIRSLMEGIADLDEKIEEAAAAHPDFFIFESLPGAGAVMAPRLLAAFGSQRERFANAAEVQSYSGIAPVTERSGKKKWVHFRWACPKFLRQSFHEWASHSMAYSGWARSYYQQQRSKGQDHQAAVRALAFKWIRVVFRCWKDGVAYDESKYLAALARRGSPLAACVAKTL

SEQ ID NO: 245374 - protein, 399 aa, unidentified
MADLFAGIDAGKSHHHCVVIDTDGNRLLSQKIANAETVITTLIDEVNSLTDPSGSVTWATDLNRGGAALLIALMNAHGQTLLYIPGRTVYNAARTYRGDGKTDAKDAGIIADQARMRRDLQPIRLGDDIATELRLLTAHRTDLTCDRTRAINRMRASLGEFFPGLEAAFDYSTSKAALLLLTGYQTPAGIRRMGAKRLSAWLKKRGARSAARVAEIAVDAAGKQHTTVPGQDAGAMIVARLAAEILRLADDITGIENRIEDRFREHADAKILLSMPGFGPLLGAEFTAATGGGIDQFDSANRLAGVAGLAPAPRDSGRISGNHHRPKRYDRRLLRACYLAAQVASQWCPVSKAFYDRKRAEGKNHKQAILALARRRINVLWAMLRDRTMFGQGISPIPG

SEQ ID NO: 245375 - protein, 408 aa, unidentified
MDKLFVGIDVGSRDNAAYIMLPNGDKHSSFPIQNNLGGAKTVVKRVVSALTEHGLQSTAIGIEATSVYGENLMYFLREDGALAQFERKLFILNPKQVKKFKDSYSDLPKNDPVDAFVIADSLRFGRIGNPIYNVDDYRFAALQKLTRARFYAVQNLTREKQRFMNYLFMKCSGLAQEKVFSDNYGATALAVFEAFESPDDIVNADIEALAAFISEKGRNHFSNPEEVAKTVQAAARGSYRLPKTVNDTVNQVLSITISSIRAMQAQVKALDKEIARQLVNIPNTLTSVPGIGPVFSAGIIAEIGDINRFDNQARLAKYAGLVWKENKSGMFEGQITRQIKSGNRFLKYYLCEAAFSLVRCDTEYRRFYDLKYKEVNKYQHNRALALTARKLVRLVFRLLKDNRLYISA

SEQ ID NO: 245376 - protein, 317 aa, unidentified
MLEGRFIGIDVSKARLDVAFRPGGESFSVSNDSRGIARLIKITKSAEPHCVVLEATGGFELMLLEKLSADSVPVVVVNPRQVRQFARASGRLAKTDTIDAAVLAHFAEVMQPSQRTLPDAKTRELRALLARRRQLVGMITAETNRRAHALELVRRGIAVTVRCLKRQVAALDRELSAFVQEMPAWRRKAELLRTTPGVGPITSATLLAQLPELGTLNRKQIAALVGVAPFNRDSGTMRGQRRIWGGRSQVRTVLYMCTVAALRPNPVIRAFYQRLRAAGKPGHVAVVACMHKLIMILNAMLHQETGWRPPLLVNQVP

SEQ ID NO: 245377 - protein, 360 aa, unidentified
MIVQGTSVGLDVHALSVVAHAVDEETGKVARARLCPDHGEVLGWLHQLRAPVRVTYEAGPTGFGLARAITGAGMECLVAAPSKLQRPAGDRVKTDARDAAHLARLLRLGEITAVRVPEREIEAVRDLVRAREDARADLMRVRHRLSKLLLRQGIVYSGGTPWTCVHEEWLRRHRFDDIHLKAAFDHSFDAVLAATAARDRLDEQIMVVAASPRFADPVNRLGCLRGISALTGLALTVEIGDWSRFSGSSIGAYVGLVPCEYSSGNSRVQGSITKAGNTHVRRLLIESAWHHRKSDSTSGPTLRARWAKVDPALRARGHAGNRRLNKRWRSFTERGKNPLVANVAIARELAGWCWSLATMH

SEQ ID NO: 245378 - protein, 314 aa, unidentified
MQGNGGEGLVGVDVSKAWLDICRSGARQVERIANTPEAAAAWIARARPSLAAMEPTGGYERVLRLALAEAGVRYVKLHPNAILAFRKARGLRAKTDRIDAMLIAQYLADSRERGDSPEAIPIDERLRALAARRRQLVDARQAERRRADLAGDPLVRESLSAIIAALTASLNAIEEAIERRIAGDGALDRLAKALRSVRGVGRVVAATLVADLPELGRLSGKRIAALVGLAAQTCQSGTRSRRAMTSHRRPIVRRALFNAARAAIRHPSPLRDFYDRLVQTNNRPGKVALTAVMRKILVIANAVAGGNPQTTLTL

SEQ ID NO: 245379 - protein, 353 aa, unidentified
MEIVVALDVHRRQITYKALDRETGEVRRGRIAPAARAEVRAWLAQFAGCEAEFALEGTTGWRFVVEEIERAGHSAHLADPAETAARRGRKRRAKTDNADCDLQLRLLLAGELPESWIPPAQILELRTRVRMRKTLIDQRTAWQQRLQAQLFHQGIPAGLRLRTEAGRDALAQAELSPAGRELVALGLRMIDALDRELAPLDRELHAFARRQRGCRALIAGLYGVGPVSATAILAELGDARRFASSDDAVRHSGLDVTVYQSDSKRAAGRLSHEGPELLRWALFEAAVSAARAGSPDHAYYLQVAERLDHTRACLSVARKLCRRAYHILRELGDEALAPIDCDPHAEEAIAAAA

SEQ ID NO: 245380 - protein, 323 aa, unidentified
MFIGIDGGLKHRDLAATEKATALARRVPNTPEGRAGLVVALQTLDPTLIVCEATGTYHLPLLAALLLAQLPVSVINPAQSAAFRTQQLGRNKTDQGDAKLLARFAALSHTDLRRAEPQDPDLARLRQFVGRRDALVKQRTATRNRRHAAKWTEEPEVLEWLDEDLAYLAAQLKAVEAKITAVLARIPEAEVLMAQKGVGAMTAAATLAYLPAGVHGNAKTAAAYAGAHPKQVQSGQRESSRLSKQGCPALRRYLYLAAQCAVRTDPVMRAWYEALQGRGKAKQSAICAVAHKLLRQMMGRLKQARAERAAAEVAGETGLLLAA

SEQ ID NO: 245381 - protein, 409 aa, unidentified
MDRQLERCCGLDVHKETIAACVRIGGRSGRASQHVQTFRTTAADLVILRDWLAAHGVTHVAMESTGVYWKPVFYALESDFTCLLINATHIKQVPGRKTDIQDCVWIAQLLEHGLLRGSFVPPVPIRELRDLTRYRKALIQDRTRVANRLHKALEDAGIKLATVASDILGVSGRAMLQALATGTTDPTMLAELARGRLRGKLPALRAALAGRFRTHHAFLVGQLLTHLDYLDEAIGTLSTEIEDRLAPFADQLNRLDSIPGINRRTAEVIIAEVGVDMSAFPTAAHLASWAALCPGNNESAGKHKSGKTRKGNRWLRTALIEAAAGASRAKDSSLQARFRRVLRHRGPKKAVVALAHALLRIAYHVLAHGTTYRELGGDYYDRGHTQRLTRRAIRLLEGQGYRVTLEPAA

SEQ ID NO: 245382 - protein, 410 aa, unidentified
MELQIRRGCGLDVHQATVVACLLIVLGNGKVKKEIRTFGATTRELLALRQWLEAEGCTHVAMESTGVYWKPVYALLEGHFEVTVANAQRIKNVPGRKTDVKDAEWIADLLLHGLLKPSFVPPKPIRELRDLTRYRRKLVESRSAERNRLLKVLETANIKLASVASDVFGVSGMRMLAALAEGQATPAEMAELARGRLREKIPQLAPALEGRMEEHHRYLLKVQLRRMRDLDQDIADLEARLQERLQPYRRQLDLLTEIPGVDWTLAAVIIAELGVDMRVFASASQLACWTGVAPGNNESAGKRRSGRITKGNVHLKTALVEAAQASTRAKGTYLRDKFYRLKARRGAKRAVIAIAHKILVAVYHMLSRQVSYNDLGDLYLDKLNKTTLTRNLVHRLERLGFNVRLEQRAA

SEQ ID NO: 245383 - protein, 430 aa, unidentified
MAAVSIPIVDWLDKPQSFHFAQGYEDRFLWNTVVANDTRSDAYMIYLGIDVAKNSHVAAAMSSEGEVLLMPFSFANSADGFTLLREKLNNLPKLPLLVGLESTAHYGENLICFLCGNGYHVAMINPLQTAAIRKSAIRKTKTDKVDAFVIAKALMMEGYTELQQSDIQILKLKGLCKTRQNLILMRTRCKIQLGSFVDQLFPELNRFFRSGLHINVSYTLLKAHPRPAEVGALHLTYLSNLLRKASRGKYKKEDAIRLRELARNSIGTDNPAVALRILQAVSQIELFSAQLKQVESEISTIMDSLDSPIMTVPGIGYLNGAMILSCIGNIQRFSSPAKLLAYAGLDPAVVQSGNFSAKSTRMSKRGNSMLRYALINASHNVVRNNETFAQYYNSKIAQGKSHYCALGHTAHKLIRVIFALLTNNIAFDLA

SEQ ID NO: 245384 - protein, 320 aa, unidentified
MTKLEKFIGIDISKENFDVACIQSGTMKTKQYSYSVSDIKKFISLLDTESHCVMESTGVYHLRLSHALYEAGIPVSVVNPLSVKRFIQSKMNRTKTDKSDAIMLVEYGSMMEPELWQPDEAHYTQAQQLLNVQAQLIKNRTSVTNQMEAISLSVNQSNTALDLLKQQLQFIENQLKQTEKELEELIGRHDDEDVNNLQTIPGIGHKTAVALVVYTKGMTGFDDHRQVSSYFGICPRIVQSGTSVRGRGKICKMGMGHIRMLLYMCARSAKKYNRACRELYERLLAKGKAKKLALIAVANKLLKQAFAIVKNKSTYVANYA

SEQ ID NO: 245385 - protein, 418 aa, unidentified
MEIVGIDWAWEKHTCYLLSEKRTLKIEDTVNGYEKLIKLAGDAVFVIEDPNTRIGNYLLGKGKVVYFLSPARSKKAVGYHSNFGKSDKQDARSLALTFKEHSEYCHKLKHDEYGLELKELFNLYGAIGDIIQQSVSRLTDQLHRCWPEYLAIMGGCTSKLNLQFIIALSDKLNSLSEVSVSQVRELMKEIGARPDRKFLKKVARLLDTDYLPISEYRAEHIAKLASDIVELGVRHKKLEKTMKEKLRQSPYKDILSIPGIGTINGMALVVAFTTYSFTSYRELQQYAGTVPVTSQSGSSRYVKLRRNCNHYLRSLLHMAAMSLKRKSFWAKVVYKKKRKQGCSHNLALRELANTLVKISFAVMKNLEPYNEEKFLSSHPKINPHQRLQTQTMQREILPDISQPEVIHSTYCQVLESPG

SEQ ID NO: 245386 - protein, 345 aa, unidentified
MEPMYYIGLDVHKRIVSYCVKDSSGKIYREGSIPATRIDLDRWMKTLPQRWSAAMEATMFSGWIYDHLKPHAAALKVAHPLMLRAIAAAKKKNDRIDANKICDCLRCDFLPECYLAPTGIRERRRTLRYRNLLVRQMVQMKNKIGMLLMETGVSYNKQRLHQAGYFRELLATNPDIDAGLASLLRQSRETVVRLGKTESALVRSLKHDPLLAERVERLMSIPAVGPITALTWALEVGEVQRFSSIKKVVSYCGLCGDEQSSANRVQRTPLSKQRNKHLQTTLIEAAKMAPRYSPTLALLYDREKQRGNANRATLAVARKLVAYLMAVDRRQRHFLVAETTNCVAA

SEQ ID NO: 245387 - protein, 429 aa, unidentified
MKKIRKHAAGIDIGAKQLFVAVEEASVAVFDTFTENMHQLADYLHTHAIQTVAMEATDVYWTVLYDILEAKGFDVWLVDGRQTKQLPGRKTDVKDCQWIQQLHSYGLLNRCFVPTTSIKELRAYQRLREDHLRTASMHVNHMQKALTQMNIRLSEVLSQIHGVSGMRIIEAILAGERDVAVLVELCHTSILKKKREQVRKSLNGCYHPAHLFALEQAYQGYQFYQQQIKACDHQLEQVLQGIDLDKEQPPLEKPRKPIRHNKPDVAHLGKHLLRIFGGKDATNLPGITDYTWMQLLAETGENLTRWPTAKHFTSWLGLSPGQHQSGKSKKRPKLRGKPKAGQIFRQLAQSLMASKKIGIGAFARRLRAKKGPAIAIKATARKLATLYWGYFVHGAEYVERGVEHYEEQVLRNKRKALARLAKELGVQIA

SEQ ID NO: 245388 - protein, 356 aa, unidentified
MNEGSCVGLDVHARSVVAGVIDMGSGEVRSLRVPPGNEGTVAWLKTLPAPVRVVYEAGPTGYGLARGCAEAGIGCVVAAPSKIRPAADRVKTDRRDAERLARLLRLGEITPVRVPGPEEEAARDLVRAREDARGDLMRARHRLSKLLLRHGVVYEATAWTRAHDAWLRRNRFGGGPLAIVFDECYARMLDAKTRRGSLDAAIVELAASEAYVDVVERLVCLRGVSTLTAFALTVELGDWNRFRPESLGAFLGLTPSENSSGERRRQGGITKAGNSHARRLLIEAAWHQRSAPRLSVTLERRRTGKSLAVRAQADRSARRLHGRWGALEARGKPRLIVVVAVARELAGHCWALATME

SEQ ID NO: 245389 - protein, 417 aa, unidentified
MKCFVGLDVSSTKLDVCIMLSDTTTPFTASLPNDLVGAQEIKKQILELNDSQSFERIVIGMEATSLYSFHPAMFFHEDSDLKALMVEVMVEQPNKIKKYREAFEESKNDTIDAFYIADYFRAERFSPAFLKEEKYLALQHLTGTRLQLIEQLTRTKQHFIENIYYKCNTLSTEIKNESLTTSLWSSTIISLMTEDYTLDELATVPLNDLADFIQKLGRGRFKAPEELAKAIQSAVRGSYRLPKLQQDSVNVILGLLAREIRNLEKLIKDIDKAIEEMVEVIPEYQCLTSVPGVGKVYAAGIIAEIGQIDRFKDHPQVAKYAGLNWKQNQSGNTNSQNTELVKRGNRYLRYYLVEAANSVRRHDSEYQTFYKKKYHEVPKHQHKRAIVLTARKFVRLVDALLRNRQLYAPPRRLMEDR

SEQ ID NO: 245390 - protein, 338 aa, unidentified
MGLYCGVDLHSTNSYLAVMDEQLQTVLSRRVPNRLDAVLEALEPFREQILGIAVESTFNWYWLVDGLMEAGYRVQLVNTSAVRQYEGLKYVDDRHDARWLARLLHLGILPTGYIYPKQERPLRDLLRRRAFLVRQRTSNLLSIKNLFSRNTGAQVPANQLKRLSAEQVTEQFADPYLALAITSSLAIVNALNDEIAGIEKAVLQEAKLRPEFKLLESIPGVGVTLALTIMLETGSIARFADAGHFCSYCRCVPSQHLSNGKVKGTGNVRNGNPYLSWAFTEAAHFAIRFEPLAKRFYERKRAKTNELVALRTISHKLARASFHILHDQVPFRAEHAFG

SEQ ID NO: 245391 - protein, 379 aa, unidentified
MDHAITGTPAETILHGALELSKNSWLLALQFPDRAQPSLYPIRGGDTEGLMAKLTAAGDRWAKMSGKAPSIVLCYEAGYDAFWLARFLKARGIECLVVDPASMQVNRRARRAKTDRIDVGMLLRALIAWGQGDRHVWSVVRVPSVDEEDLRRSHRERDRLVRERTAHINRIKGLLFGQGIRGINVKSKYKTLQIDKLVTGDGCPLPPRLASEITREIVRLALIQEQIATLERERDQAPTPCKATEKKRVQLMCLTGIGPAIAAVLTREVYYRQFDNRRQVAGFLGLATSPHDSGDVERSQGISRAGRGQVRGTMIQAAWLWLKHQPKSAITRWFVQRTAGQSGRIRRIMIVAVARKLAIALWRFLEQGLVPQGAMLANR

SEQ ID NO: 245392 - protein, 344 aa, unidentified
MIIIGCDFHPSWQQIAWVDTETGEGGEKKLMHADGEAERFYRQQPERVLVGLESTGNSHWFVDLLAEMKHEVLVGDAAKIRASQVRKQKTDRRDAAHILELLLKNDFPRIWTPSRQERDQRQLLIHRYKLVTLRVRVKNELQHLAMNQGMQKRRSLWSQEGQKLLLDLPLQFWASTRRKNLLELLKQMDQQIAVLDRAVSQAAEQNEEAHLLMTQPGVGPITALAYVLTLGDVSRFPRGKQVASYLGLIPTEYSSAGKQRMGGISKQGNRFMRMLLVEAAQSVVRYDPQFRSEYLHRCHQKPKAVAKVAAARKLAVRLYWMLRTRMPYPEVVRIESSSRGPLAG

SEQ ID NO: 245393 - protein, 411 aa, unidentified
MEVLHQRCAGLDVHKKKVAAAVRLVEENKITVEVETFATTTAGLLALADWLTQNGCTHVAMEATGVYWKPVWHVLSDGEMELILANAAHVKNVPGRKTDVNDATWLAELLAHGLIRASFVPDGQTQELRMLMRTRKQLVHEKHRHIQRIHKTLEDANIKIDAELSDLLGMSGRAILNALVAGETDPVRLAALAHPNVKASQATLQEALRGRVTHHHRFLLKLHLQQIDGIEAALGTIDGEVEANLAPFRIAVELVSTHPGISKLGAQTIVSEIGADMSRFPTAGHLLSWACLCPRSDESAGKRRSTRLRKGARWLKAMVVQCAHAAKNKKGSYYQAQYHRLCGRRGPQKAICAVAASMLTTIYHMLKNGTVYQDLGADHFKRQSKTTQTMRLVKRLENLGYAVEIQRIVAA

SEQ ID NO: 245394 - protein, 340 aa, unidentified
MSISHEPEQLNDRQRSYTSPGTPLLYGEEEQMATSSHVGIDVSKDRLDVAVLGERQETQVENSREGIARLVEQMQDLQPELIVVEATGGYQRSVVDALFHAGLCVAVVNPARVRQFAKACGLLAKTDKLDAQMLAVFGQRVQPKLYTGKSEAEKQLSALLVRRKQVEEMLKAEQNRLRTVFPSLRSSLERMIAILKEEKKRLDEEIRGLMNDQKAWQEQMKILDSAPGVGPVTTATLLAELPELGKMDRKKIAALVGVAPMNYDSGKKRGYRKTKGGRGEVRSVLYMATLVATRRNPLIRAQYQQLLKRGKLKKVALTACMRKFLTILNAMMRDQQPFRL

SEQ ID NO: 245395 - protein, 348 aa, unidentified
MAHFVGLDVSVKETSVCVVDDAGKMILEQKVPTEPSDIIALLTSLGVTYGRIGIEAGPLSQWLFNALTAAELPVICVETRHMKALLMAQQVNKTDRNDARGIAQMMRVGLFKPVHVKTLVAQEQRMLLTSRKLLQRKLLDLESDLRGTLRNFGLKVGVVSGGRYEARVRELVAGFARLAAIAEPLLNVRRVMRQQLAVLHKMLLDTVRDDPVCRRLMTAPGVGAVVALTYRATVDQPQRFVHSRAVGAHVGLTPKRYQSGEIDYDGGVSKCGDALLRTMLYEAAHSLLTQSRKWSWLKAWGVRVAQRRGMRRAIVAVARRLAVVLHRMWVDGSEFRWNKASAAVPTAA

SEQ ID NO: 245396 - protein, 325 aa, unidentified
MALMLLAKVIVRRQLKRRQVIGFFQKLPPCLVGIEACASSHYWSRELHALGHRVRLMPPAYVKPYVKRQKNDMADAEAICEAVTRANMRFVPTKTPEQQSGLVLHRTRHLFIRQQTSVINAIRAHLAEFGVIAPVGRKGVEELLCVVADPNDKRVPEVVRACVAALGSQLLRLKQQILDFDRMIMAWHRSNQTSKRLNCIPGVGPLLATALVASVADPKTFRSGRNFSAWIGLVPKQHSSGGRDRLGSISKQGDRYLRSLFVAGALAVIRYAKIHGSKHRPWLTALLARRPTKLAAIALANKLARMAWAMMATGARYNYPASLRV

SEQ ID NO: 245397 - protein, 335 aa, unidentified
MEFTFFLGIDVGKATFTYCLRNQAGVLDQGEVENTLRAITNWVSSLKKTHKRNLEQFILCMEYTGIYNSILLRVLQQKGLRVCMEGASNIKLSLGMQRGKNDKVDAQRIAEYSLRFTDRLKEWSPRREVVEKLGHLMSSRARLVNARKTLCVPNHEAELFLDKRISRELHHHVAGTLKAIDKNINLIESEMKEVIENDENLKLLMDLSTSVPGIGFITGCTLIVKTNEYKSFDSAKKIACTAGIAPFEHTSGSSIKGKTRVSHRAHKDLKTALHLAAMGAVRSKGVIQDFYIRKVAEGKNKMLVLNAVRNKLVHLVFAVIRDNTMYQKNYQYGNV

SEQ ID NO: 245398 - protein, 360 aa, unidentified
MAKFSLTRLKAFVSGFADQPFWIGIDVHKLSYYIALRRADGRSLTWVANASPDAFATQVVRIGITVAAVAYETGPTGFSLARTLERANIPVIVAAASRIPRSVTSGAKCDRLDCIKLADYAAKGMLKPVAVPTQEEEARRSLLRRRHTLVDSVRRNKQRIKSLLLFLGVTEPVAVTNWNGNASEALLELPLDPMARLTLESYLRELTFHQTELRMVENQLRQMVTSKEECQSVAYLQSVPGVGPTVATSFALELFRPERFMRAEEVASYLGLAPVVRHSGGKTPAGRLVPVGQTRLRSLLIEAAWMWKAKDAAAADLYNRLLARTGIAQKAIAAVARRLAIILWRLLVEQRPYRMAAATS

SEQ ID NO: 245399 - protein, 343 aa, unidentified
MQTVTTIGLDIAKSVFQVHAVDAAGKVIIRRQLKRRYVLAFFEKLPPCQIGIEACASSHHWSRELQALGHSVRLMPPAYVKPYVKRHKNDATDAEAICEAVTRANMRFVETKTADQQSGLVLHRTRHLCMRQQTSVINAIRAHLAEFGVVAPVGRNGVEELLRVVADPDDRRVPEVARVCLVALGAQLRRLKDQVLEFDRMITAWHRSNKMSIRLDECPGVGPVLATALVATVADPKSFRSGRNFSAWIGLVPKQHSSGGKDRLGSISKQGDRYLRSLFVIGALAVIRYAKVHGTRRRPWLTALLARRPAKVAAIALANKIARMVWAMMAKCERYKEPVALAA

SEQ ID NO: 245400 - protein, 408 aa, unidentified
MNTLYVGIDVSSKSNVIYLMLPNGDKHSNFSVANSHEGSTQLVKRILSALTSHSLDTVLIGLEATSVYGDNLVYFLREDATLAPFNRKIHVLNPKQVKKFHDTYNDLPKNDYVDSFVIADCLRFGRINKEVYMGDYRYKALQNLTRARFFAVQNLVKEKQRFMNVLFKKYSTMTQEKVFSDAFSTTALAVYDEFESAEALANMDLHELTDFIIEKGKNRFPDPDAVAKAIQKAARSSYRLPKTVNDSVNQVLSISITSMKALESQIKEFDKAIIALMELLPNVLISIPGIGPVYSAGIMAEIGDINRFDNQASLAKYAGLAWKQHQSGGFEAEVTRLIPSGNRFLKYYLCEAAFSLVRCDKEYSDFYHLKYKEVNRCQHKRALALTARKFVRLVFRLLKDNRLYCPAK

SEQ ID NO: 245401 - protein, 430 aa, unidentified
MNESVSEQPLSPKVAAFVGIDWADQKHDVVLRSAGDPAKAEHQVIKSEINALNDWIAQIQERFGTKGKVLVCLEQSRGALIYQLMAYELFELYPINPSQLANYRKTFFSSGAKDDRPDADLLSELVMCHRDRLKAWKPDDQLTRELASLNEGRRNAVNRRTELANEIKSQLKLYFPVALQILENDITTALAADLLVQWQTLAELQKVSPGKLRKFFYGHNSRQEKKILERLALIKEAKPLTTDVAIIRPNALRVKLLAQQLKSLLPFIAEYERRIAELFGSHPDRFLFDNLPGAGPALAPRLLTAFGTNRDRFEVAGDLLNLSGIAPVRIASGKKTGKNASVHCRRACPKFLRQSFHEFGECSIRYCPWAQACYQAQRARGKGHHAAVRAVTFKWIRILFACWKQRTPYDPQRYFQALQTRGSDYAQTTA

SEQ ID NO: 245402 - protein, 382 aa, unidentified
MYGEEPVMKEKVRFLGLDVHAETIAVAVAEPDGEVRSLGTIANREESIRKLIKKLGSADQLRACYEAGPTGYVLYWQLTQLGVECVVVAPTLVPTKAGDRVKTDRRDALKLARSHRSNDLTAVWIPDGDSEALRDLVRTREAAKQDQLRARHRLSKFLLRMGRRPAVGMKAWTEPYMAWVRQVQFERPAQQATLEDYLHEVDHMAARIKRLEQGITEVVKLASPQIQEVVKGLQALRGIAEISAVTIVAELGNIARFDTPRQLMGYSGVVPSEDSSGKRKRQGSITKTGNAHLRRIVVEAAWSYRHRPAVGPRLRKRQEGVPEPIKEIAWKAQVRLSKRYARLAAAGKDQRKIVTAVGRELLGFIWAIGTRAEATVKQQMAT

SEQ ID NO: 245403 - protein, 340 aa, unidentified
MEKRYFGIDLHRNRFSCCMRLANGRSYFSEWALEQLPRFVKKLRPSDEVAVEVTGNTRLFYEAVAPHVARVVVVDTNQFRVISRSVKKTDERDAALLALYLSKGLLPEVRMKDKEHGQLASLTQTRDTLVKLRTALKNKVNNILSARGMNLPKEALSSEKKLAEVLSLPFDQMVLVELRVIVDQIRSLNKSIAELEKIIGEQGSKLEGHKSLTSIKGIGKITGAILLSVIGDVNDFPDESRLASYFGIVPRVSNSNQTEHSGRIHKRGSKLGRTALVQSALIAANYSPYLRNFYERVKARRGTGKAIIALARKFLGIIYRTLKNKWVFEDFPNFVLAEGA

SEQ ID NO: 245404 - protein, 353 aa, unidentified
MALNHRWCVGVDLHKDTLTACVFCGCCGEVSFQKIACRNRRQIAEYFAALPGPHAVAIESVGFYRWLWEMLEPIVEELVLADATQARALAGRRLKTDREDALNIAQLLAAGRLPRSYAPPIEVQWLRDLTRHRNSFSRQHARVLHRVKSIMNANNRPGPARMQSDGLIRYLKAQGEKLPARHVEMLWQCVDALVLTERQIAQVERTIGQIVQRDSFREVYGILTSFPGVTLVTAATIIAEIGDFKRFSGGKAVGRYAGLNPRVYASGGKQRMGHIAKAGSPDLRWILQQAAWTAIRYDEHVKRIFLRIAKRAGRKAAAVAVARKLLTWMQIAVKKGEPYRTPGPGHTLLPGAA

SEQ ID NO: 245405 - protein, 429 aa, unidentified
MNNNRKRRINQIDEDTLIVGIDIAKNRHAARAQDFRGIEHGKVRYFLNREHDFERIKRWILNLAKKASKKDIIIGLEPTGHYWLPLFKYFTASGFKVVTVNPYHVEKSKELDDNNPTKCDKKDALVIAQLVKDGRYSTPNLPEEKYAELRVAINHRERLMKSLNGVQNRITRWLDIYFPEFSNAFKDWEGKAALSTLKNLPLPEKINQKEVKEIVNIWREAGIKRGVGKKRAKKLKKYAQRSIGLQTGKKMAELEIRNLLKQYEQLSQQLENLEEKIEKILKEIPGAEEMLSIPGVGFMTVAGFLSECGNLDDYNHPKQIIKLAGLNLMEHSSGEHKGETRITKRGRPQLRSLLYRVSMPLVRHNDEFSQIHEYYKNRSQNPLEKKQSLIVICCKLIKILYTLGTREIEYDGEKMLDDIKRPKGYKKAV

SEQ ID NO: 245406 - protein, 405 aa, unidentified
MKRNEVAVYDVFCGIDVGKTSNYFAALRQDDEKPFFKAPVAQDEAEIREALSRVAEEGRTLVIVDQFGAFGRLAVAVAQDMGLDVAHMPPRKFKQVAETYGEDKSDSLDAFILADAARSVPRTIELVEERAAAVTEIKVITSCRDDAVRERTRCYNRLHDLIHQVCPALEAVFSKKKLHNDLEIRLIAHYGGPGGFRNAGKSRAKKWAGGLKYHRVDGPEKVEEVFRALSRQTVELPGAAVIERQIKAIAERVIDLEAAEKALNAELERLADHVPEVAILESMDGIGKVFGATIAAEIGDIGRFESASRLASYGGVAPAKEDSGTTVHKKKKRKGGNRRLKNALIQSAVRAIAKDGSWERAYYDKKITEGKKHRQAIRALARRRVEVIYALLANGTFYEPLSAEG

SEQ ID NO: 245407 - protein, 398 aa, unidentified
MTESSDYESVQVFIGVDVGKDTHHAVAINRSGKRLFDKALPNDENKLRSLISDLKQHGQILLVVDQPATIGALPVAVARSEGVLVGYLPGLAMRRIADLHAGEAKTDARDAAIIAEAARTLPHALRTLKLADEQIAELSMLCGFDDDLAAQTTQASNRIRGLLTQIHPALERVLGPRLDHPAVLDLLQRYPSPEKLASLGEKKLAAQLCKLAPRLGKRLAADIAQALAEQTVVVPGTNAAAVVLPRLALQLITLRKQRDEVALAVEQRVLAHPLYPVLTSMPGVGVRTAARLLTEVACRAFASVAHLAAYAGLAPVTRRSGSSIRGEHPSRRGNKALKRALFLSAFAALREPLSRAYYTRKMSQGKRHNQALIALARRRCDVLFAMMRDGTFYTPQAS

SEQ ID NO: 245408 - protein, 481 aa, unidentified
MIRSVGIDLSRTGSHQVYCLDEQARPCDSFSTDSSLEGLEKLEERIFSDGSCPTIVFEPTGLAWIPLAAYLRARHPECRLVKARLQKVAALRRYLRSRTKSDRVDGITLAKMPFIDSEQLDEAYLPPVKYHALQRLTRQRERLMKSITIRKNRIGSIVNGYLPGLRKAFAHEWSERARVFYRQCLNPYQVSHNGKRALEELFIGIKARGALVESGRVYRECLRLVELYKRSEPAGMINEEFFDDLQDEIACELRLMEGEEEEVKRVSERIEELFRELHPDGHLRTIPGIGVRTAQVFLAVIGDPKRFRNQSVFANYTGVVPGASQSADTEAKGLRMTKAGPAMMKRALFQAGDIGRRYDPQLAYLYYREMVNHGKTHLQAMGAVMSHLGARILTVLRENRPYEIRDIQGQALSRKAAMEVVRSGYTVPESVRKVRRRRKLNEGRFTGLRTREAAEAPQSGPFIPPQKIVYPVEELQSIAKA

SEQ ID NO: 245409 - protein, 315 aa, unidentified
MSEVDCFAADVSKRELVIAVYPGEVGVKRIANQDAAISAWLDTLPAGSVIAMEATGTYHRRLADLAHGRGLVVYVVNPRNVYYYVRGMGARGKTDPSDAKLLARYVAHERAQLHPYVPPSALCERLTTLLERRAVLVRSRQALTQSLAELPALGREKRNLFKAIASLLSGIDRELAALTSSDASTATLVTRLKTISGVGPLVASLLCALFKRFAFRHADALIAYLGLDPRPDESGQHRGRRRLSKRGHPEWRRLLIAAAMSAARTKVWRDYVTLQRAKALPATAVHVILARKMLRTAFALFKNGQEFIPPRVRPT

SEQ ID NO: 245410 - protein, 278 aa, unidentified
MDTHAGAHAAAALDPVGGLLGVQEFPATAAGYASLLDWLGGFGTVCLAGIEGTGSYGAGLARHVVAAWVRVVAVDRRGRQDRRRQGKPDPLDAVSAARAARSGRARGAPKGRDGAVEAIRALMVAKRTARAERTQTINQARALILTGPDDLRARFSQHSPADLVAELAALRPRPGDVPGYATRVALRELGRRAEFLDRQLGRLDELIVPLVTARAPGLLALYGAGPDTAALPLAAAGDHPERLRSEAAWAHLCATAPIPASSGKVTRHRLNPRRRPAG

SEQ ID NO: 245411 - protein, 352 aa, unidentified
MEHFIGNDLHTRYQVVAWVDEQTGEICKRRLEHTGEEVEKFYAQFPQGTVVGIEATLPAYWFERLLEKLGHELWVGDAARIRAYEVRDQKFDPRDAENILDLLQAGRFPRIWVPTLAERDLRQLLVHRMKQVRARTQVKNQLHYLAMSQGLCRKRKLWSTRGRAELEGLVLLPWAARRRKQLLEELDRRDEQVRELDRAVEEAGRERPEVGLLRTHPGVGMVVALAFVLTVGPIERFPHSRKLVSYWGLNPREHSSGGRQRLGSISKQGNTLMRWLLIEAAQTAARFDPELRRTYQRLKSRRNSGVAKVAVARRLAVRLYWMLRTRHNYAQLVHMSGSPSSAVVPPQAGSRL

SEQ ID NO: 245412 - protein, 352 aa, unidentified
MTDQRVLVEVTGGVDTHKDTHVAAAKDALGRVLGTQAFPATTAGFSALWGWLGGFGTVVAVGVEGTGSYGAGLARYLTEQGVPVVEVNRPNRQKRRQKGKSDVQDAINAAAAVQSGDATAIPKAGTGIVAALQAIRTVRAGAVKSRTLAGNQLDSLLVTAPAALRETLTGLTGQARLAACAALPAGTDLADPTHANTTALRRLAQRIQHLTEEIHQADTDLRTLVSRAAPRTLARFGVGPDTAAQLLGTAGDNPDRLRSEAAFAHLCGVAPIEASSGRTDKHRLNRGGDRHANAALYRIVIVRLRYCERTQAYLQKRTTQGLSKRDIIRCLKRYIAREIYNALHADFTALNT

SEQ ID NO: 245413 - protein, 327 aa, unidentified
MEREYIGIDLHKAFFQACAITSTAERRWEQRWPTNERGIAALLARCGPASHIAVEASSPTWAFVDRLVGQVGAVQVVDTRKTRIRAGYAAKTDRLDARRLADALRRDSVVGIYYPPAAIRDLRELGRYRCHLARLQASLKQRIHALLLRQGVETPRALFTQRGRRWLDALVLAGWAGEELRGLRQVLTDVRTQLVPVVSAMRAVAASDPIARALDQRPGFGPVFSVTVRAEVGTMARFPDGPHLASYVGLVPRVARSAGRQWSGRITKAGSPWLRWTLIEAAGHQFRRQDDFGRWARRLAVRVGILKARVAVARALCSELFTVWPRA

SEQ ID NO: 245414 - protein, 348 aa, unidentified
MAITMIGLDTAKSVFQVHGVDSAGKVQLKRKLRRDELLPFFEKQEKCIVVIEACGAGHHWARVLTGLGHDVKLIAPEAVRPFVKKGKKNDPADAAALCEAARRPGIKFVPIKTTEQQAVLALHSVRSLLVKQETMLANAMRGLATEFGITVPKGMSKLEDLITLVDTDMSIPKSARQAVGELPSHCGVVAARIAKLEVQIVDHARHDETARRLATVPGIGPITASLISASVGDNIGAFKSARHFAAWLGLVPRQHSTGGKTRLGRITKAGNKEIRKLLVLGATSMVYRAAQWNSAAGIWVRGILERRPVRLATVALANKMARIAWALMTRKEIYRAKGRVVAAAEAVA

SEQ ID NO: 245415 - protein, 424 aa, unidentified
MKVTYQTCCGVDVHKSFLVATIVKTTGGIEPSYQKKRFSTFNNSILEFKQWLLDNDCHDVCMESTGKYWVPVFNLLEDDINVVIANPKWVKAVKGNKDDTKDSKWIGDLFRLGLVKGSYIPCKKVRILREYTRYRYKLVSCRSSEKNRYQNALTVCNVALDSIVSDIFGKSSTSIIDYLLEQSGTSINHEEIASKLLRSLKSKEDAVIESVEGYQMTDAQKYRMRLVRAHMDYITAEINDVDIMIENMISSNPDFENAVQFLCTIPGVKRDSAITIISETGTDMSQFSSSKRLCCWAGLTPGSNESAGKKKSVRITRAGVYLKPALVQCAHAAVKSDKSPYYKKKYESLVKRRGKKRAIIAIARMILTAIYQMLSTGEQWNPSDLYKIDMPVALVEKQKAKAIKQAKKLLQREGLLPPDEPLAS

SEQ ID NO: 245416 - protein, 308 aa, unidentified
MNNTVYLGVDVSKTDLDLDAQPKTKRFANTDKGIERLLDQLPPGAHLVCEATGGYQNKLLQAAWARQIPISVVMPSRVRAFALSEGTLAKTDSIDAALLTRFAMERRPSPTPEPAPLRQRLRQLLRTREHILTLQRQEANYREHLSEDPTLQLLCEQRVQLYTQQIKALEKQIRLLIGTDRQVDTDICRMQQVDGIGEVSSWTIWADLPELGQLEKGQAANLAGLAPHPKDSGQKKGRRFIQHGRATLRRVLYMAAITASQHNPVLKIYYQRLRAHGKPAKLALIAVARKLIELLNLLIKNPNFLLAS

SEQ ID NO: 245417 - protein, 371 aa, unidentified
MIHTNTFIGLDVHARSIKAVALDVITGEVRSASFLYDYIALAEWIRSLPQPTRCVYESGVTGFDLQKKLASSGIDCVVGAVSKMFKPAADRKRKNDRNDAEFLARMLSVGNITAVWIPDDECEAARDLIRALEDAREECICSKQILSKFLLRHGLVFNETSPTGRRIGNWTLAHWRWIRSITLSNPAANDTFLYYIDRVKASTEEKKRLEALVREEAARPRWKKRVDTIRCLKGIDLMTAADLVFEADEFSRFKNARSFAAWIGLVPSEHSSGESIRQGGITKAGNRHLRKALVESAWHYLYASPGSKDLVKGQDPDRQARRHATKGTRRLIERRRALLERGLDKNKANVATARELACWVWAIGCMVEKGN

SEQ ID NO: 245418 - protein, 330 aa, unidentified
MYNLVIGLDISKSTLDATTVRWNERQSSHDSFLNKKLGFKQLKKWVDKQSLSSDSILFCMEHTGYYTQHLCEFLTLNSLDYALINPVKIKRSMGLRREKSDKADSRVIAMYGLKFQEEFHIGTALKDELLDLQLLIAHRKRLQTREIAFHNQEKHLSHCLSSKVSKVILKNVKSQKKYFAKQRKEIERRIDEFLEETSALKKSYDLLTSIPGVGRIIALYTIVHTHNFTQIYDPRKFSCYCGVAPFKKESGTSLNKGSRVSFFGNKKLKAFLNFGAMNAVKYDPQLREYYQRKVNEGKSKMSVLNAVRNKLIHRMFATVKRGTPYVKYSF

SEQ ID NO: 245419 - protein, 327 aa, unidentified
MHYLGIDVAKAKLDCSLLVDQEQDKYKFKTVENSPAGFAKLLDWIMARGLSVAELHIVMEATGIYHEQAAIALHDAGIKVSVANPAHVKGFAYGLGVRTKTDGVDSRVLARYGLLAKPPCWQPPSLESRILKGLLARREAIKQDLRREQNRLEKAESGKESTLIQQSITDSITFLMAQLKKIQSQIDDHIDQDPTLKNDRELLESIPAIGVQSSTQLLAVMHGHTFNSAEQLAAYLGVVPIERQSGSSLNGRAKLSKSGPSHLRATLYMAAVVAIQHNPHVKAVYERLLAKGKTKMSALGAAMRKLVHLCFGVLKTQQKYQPDYKNA

SEQ ID NO: 245420 - protein, 312 aa, unidentified
MKHDTIGVDVSKDHLDAHRLADGATRRFANDKRGHKALIKWLAQTPADHVVFEPTGPYHRAVERALGASGVPFVKVNPRQARRFAEATGKLAKTDRLDAAMLARMGAVLELEARPARSETLLELRELHIAREALVKDRTAAKNREKVLTLLLLKRQNAQRLEQIDRQIATVEAAILETIEADAGLSDRFAILTSIPGVSSITAFALLIEMPELGALEAGQAACLVGLAPIARQSGRWTGHAFIRGGRASLRQALYMPALVAARFNPDLKAKYAQLVGAGKPAKVALTAIMRKLVVLANALLKANRKWAPKTA

SEQ ID NO: 245421 - protein, 353 aa, unidentified
MIGHLEWRANMDCYVGLDASLRKTSVCVVDASGRVLCEGVADSQPGAIAKFLKSRAPGAVRIGIETGPTSIWLTTELRVLGLPVICIDARHAKAVLKMQINKSDRNDAAGIARIMQTGWFKEVRLKGFDSHAIRALLTSRAMLVKIKRDLENQIRGLLKIDGLLVGTARGAAFSRRALELAKQCPELGVSVVPVLSASEGIDKQLYELDRKVSRLASAGRQTRSFMTVPGVGPVTALCFQATIDDPARFSRSRSVGAYAGLTTRRYASGEVDWTGRISKCGDPMLRSYLYEAAGVLLTRVQKWSALKAWGMRLAKRIGMRKARVAVARKLAVILHRMWVDGTDFRWSAKEATA

SEQ ID NO: 245422 - protein, 406 aa, unidentified
MRVVHERCAGLDVHKSSVVACALLAEGKQLRTFGTLTWQLEQLAEWLHSLDVQVVAMESSGVYWKPVFNILEVAGFELLVVNARHIKAVPGRKTDVKDAEWLADLLRHGLLKPSFIPSREERELRELTRYRRTLIEERARQVQRLQKVLEGANIKLEDVISNVVGLNGRRFLSALVAGEYDPEAVAATANYGLQRKRELLAQALHGTLGSHQRFLLDQLLSHIDFLEQRITALDREVKQRSHPFEAAIAQLDQIPGVGTRAAEEILAEIGIDMSRFPSHRHLASWAKVCPDNNQSAGKRRSGYAGKGNRWLRSILVECAWCATRKKDSYFKAQYHRLAARRGRKRALLAVGHSLLTVIYHLLRDGVLYQDLGPNYFDQRDRSLVARQAIRRLERLGYRVSLSEGAA

SEQ ID NO: 245423 - protein, 352 aa, unidentified
MQYIAFDAHKHYTLASVASRDGQTIREERVEHERDALRQFLERCERGSPVAVDTTGNWYWIVDEIEAAGCVPKLVHARKAKLMLGMINKTDKLDARGLNRLQQAGTLPTVWIPPGELRDRRDLPRTRMVLVRQRTQLKNRIHATLAKYALQCSEVTDLFGRRGLTLLRQRIDQLPPHTAYATRQLLTQVEALDRQVRGFEREIRAVCRPTPEVASLMTLPGVGLTLAVVIALEVGDVSRFPMDEKLAGYAGTTPRVRSSGGKTRYGPLRPDVNRYLKWAFIEAANVVCRTRRRHPDRHASRRYERIARRKGHHKAIAAVARHLAEATYWMLTRQESYREPTCVRQSVSSTEA

SEQ ID NO: 245424 - protein, 312 aa, unidentified
MEKISHGGIDVSKDRLDVMLLPDRRCFSVPNNASGWVELIERLRDLTIVAMGIEPSGGYERGIIRALLAAGLSVRRINPNKLRQFARARGVLAKNDRLDAQLIAEYVAIMPTRAVQRDVAAERLAEIVTMRRQLCDEHVTVQNQAAHIEDALLRRINKRRLTRLKADIALLDKRLAEMVRTDPALAHRYELLTSMPGVGPVLAFTLIALLPELGQMSRKQIAALVGLAPYDFDSGKLRGHRSIYGGRLPVRNVLYMAALSAARYNPALKAFHKRLATADKSSKVVIVAVMRKMIVTLNAMLRENVAWQHGAT

SEQ ID NO: 245425 - protein, 453 aa, unidentified
MAKKAKKIHTKKGIELKIVNPDAAGIDIADSEMQVCVPEDRDGDNNRRFGSFTRDLNEICSWLKACKIKTVAMEATGIYWIPLYFKLKDSGIDVILVNAREVKNIAEKKTDEADAEWLMLLHTYGLLKASYQPENEARKIRNLARHRNNILRALSKEVLHMQKAMEQMNIKLSNVLSDIVGKSGLAIIVAIINGERNPIRLAQLTDSRCKRSREDIALSLEGTWGEDHLFELKQAYDLYKYLQGQMIECDRMIEQLLNSYTALIDTDMVNFKESKKPICKKNAVAFNLEHYGYAIWGVNAMRIPGMSSGSLLQLIGELGHDFVEKFDTPAKFCKWCNLVPNNKISGGKLISSRVSKRKNPVGQVFRLCANTLKDAKNSLGIYFRRIRSRSGHMQAIIATAHKMARIFYTMVKNKSEYDETNVGIDEQELLLKKIERAKITLVRLNAKLCVSAN

SEQ ID NO: 245426 - protein, 415 aa, unidentified
MALKIVYKICCGIDVHKTFVVACIASTNDKGVTSYESHRFSTYTSGLKTLLQWLLDRNCKDVCMESTGKYWIPVYNILEKDCSIVLAHPKYVKAIRGKKTDKKDAKWIADLFKHDLVAGSFMPPADIRQLRDLMRYRFKLTCFKSSEKNRLQNCLTVSNIQLGNVVSDTFGKSAQAILDKLLENPADTSFDLEPLVYKSLKKKLPELRDAIDGYITPEQAGKLKVIKAHYENLESRKAELEELILALAAPYQQELAILQTAPGISSDFTAIGIISEIGTNMEAFPSAKHLCSWAGLTPTNNESAGKKKSVRVSKAGCYIKPLLVQCANAVVTSKKHPEIRNRYLRLKKRRGHKKAIIAIARMLLTALYHMLKNGENYNAELYRKSDLPPVNREITVEQALMIARNQGYKIKSATA

SEQ ID NO: 245427 - protein, 401 aa, unidentified
MVSDFRKGRYNLMKIFVGIDIAKLNHFAAAISSDGEILIEPFKFTNDADGFQLLVSKLESFDKNSIIIGLESTAHYGDNLVRYLVAEFYQVCVLNPIKTCQMRKNNVRKTKTDKVDTFVIAKTLMMQDDLRFITFFDLDMMDLKALGRFRQKTIKQRTRLKIKLTTYVDQVFPETQYFFKSGLHQNAVYALLKEAPSPKEIASMHMTHLANLLKVNSHGHFTKEQAKELRVLAQKSVGANDSAISIQITQTIQQIELLDSQLDKIEAEMTDIMKFNDSVIMTIPGIGYINGGMILGEIGDIHRFSNPNKLLAFAGLDPSVYQSGNFQAKTTRMSKRGSRVLRYALVNAAWNVVRNNATFKAYYDAKRAEGRSHYNALGHCAGKLVRVIWKMLTDEVEFNLE

SEQ ID NO: 245428 - protein, 421 aa, unidentified
MSKRRYTSKKFKQVDWKTVTDRLVGSRVILAVDVAKEDFYAAIMNERHEALVIFSWRHPEQTAEVVDQLRQLRQAHRLEAVLEPSGTYGDVLVWQLRQAQIPVYRVSPKRVHDAAEVYDGVPSLHDAKAASLIGRLHLEGISQPWQEQTEKRRTLKAVTTQLGLCKAREQAVCNRLEAQLSRHWPELPYLLDLGSVTLAALIGAYGDPASVAADPAGAVALMRRVGRSGLGEEKIQAILDSARHSLGVPMVDSERSFVQWLGNEASAIHREVRQIEQKIMQRVGQDSELSGQARAIGKVSAGVILAATGSAIDYPTTSSYIKAMGLNLKERSSGKHKGQLKITKRGPSVVRYYLYFAALRLIAHDPVVRQWYEVKSSRPGAIKNKCVIELMRKLAKALWHIARGESFDSNKLFNLKAVAAA

SEQ ID NO: 245429 - protein, 343 aa, unidentified
MNSTTIAVDVAKAVFEVAVSEHAGQVRERHRFSRERFRRYLGEQPPATILMEACGSAHYWGREAQTRGHRVVLLPPHAVRPYVVRNKTDRTDAKALLEATRNDEVRPVPVKSETQQALAALHRLRSAWLATRTARINIVRGLLREFGVVIPIGARHVVPALGSLEDDDGGVPSLLRPALAEAAREIRELEGRIRTVEHQLDAVAEQTPVVSRLCSIPGVGLLTATALVAAVGDVQRFPSGRHFASYLGLTPRERSTGQHRHLGAISKRGDAYLRMLLIHGARAVLCHAKTKTAPTPDRLRAWALHLERFRGHNKAAVALANKLARIAWAVWKYDTDFTAAPTA

SEQ ID NO: 245430 - protein, 340 aa, unidentified
MGCSQKIRRRKATAKFMYAALDLHEKSIQCVLKDDAGKIVRESKVPKDEERILEFLDGTHASVVMESGYNHQHISDVLKEKGYDVKVAHPLMVKAIAYAKVKTDKVDARTLADLLRADMIPESYVPDEKTREVRDLVRRRHHLVETRTAFKSKVQAEVAKRWVKHEGDVFTKEGRDFLRSLHIDAVDDYLDAIEFLDGKIGELDRKVKEVAQQDRYAKLLVTVPGISYYSGLLISSEIADVSRFSDHEHLCSYAGLVPGLRQSAERSHPTPSKTRSAMLNWIMVQCTRVHVRSCDSSITRFYTELAMRRGEKVAIVAAARKLMRATYIMLKEEKTFRLDG

SEQ ID NO: 245431 - protein, 350 aa, unidentified
MRIIGIDLGKVNSQVSERDEKGEEKRNYRLTTTREALKKALGEGERAKVLIEAGTPARWVASCLREMGHEVVVADPNFLPMYIDAKSKRKKTDKRDASLLSQALLTGNWRGSHERSEAAQINKMRLDARARHVRTRTQLINALKAMLSQWGIPKFRGAPEAVPAGIRALMTELPQDVQALLEPEVKALEAENEMIATLDKKIAETSGADPVVKRLQTAPGIGVITASMFVATVDTPERFRNAHELESFLGLVPSEYSSGERRALGGISKAGPTYLRALLVQAAWAVWRAKNSPDAQGLRRWAEAIALRRGKRVAVVALARKLSGILFAMWKKNEVFKASQSVAPPIPAAA

SEQ ID NO: 245432 - protein, 315 aa, unidentified
MSESKEQMFVGIDVSKSTLEVRIEPLGESFQVANDDEGVKALCSRLKKLDLTLIVMEATGGLEMRAASELAARGLPLAVVNPRQVRDFAKATGQLAKTDRIDTQVLCGFGRAIRPAVRPIKDELTQQLDDLVTRRRQLVDMRVQETARLHRASKVQAKSLKAHIAWLDKRIKQIEADQGSCLRNSDAWRVKDDLLQSIPGVGQITSHSVLSRCPEIGQLSRRKIAKLVGIAPLNNDSGKHRGERHIWGGRADVRSVLYMATVSAKRCNPLIRAFAEKLERAGKPYKVLMIACMRKLLTIMNAMIKNNMPWDPKNA

SEQ ID NO: 245433 - protein, 349 aa, unidentified
MALTIVDTCSVTGGVDTHADVHVAAALNHIGGLLGVESFPTTPAGYGRLLAWLQSFGTVALVGVEGTGSYGAGLTRHLTAAGVRVVEVDRSDRQERYRSGKSDPLDAESAARAALSGKAKGAPRGRDGTVEAIRALMVVKRSARGERTRSINQARALVVTGPDDLRARFEGHRTDDLVADLAGLRPRPGDVVGYATRVALRELGRRAEYLGAQIDHLDSLLLPLIELQAPSLLDMYGTGPHIAAILIIAAGDHPDRLRSEAAWAHLCGACPIPAGSGKTTGRYRLNPGGDRQANHALWRIIFTRLSSHQPTQIYVERRTKEGKSKPEIIRCLKRYVAREVYHHLLATAT

SEQ ID NO: 245434 - protein, 368 aa, unidentified
MKTKNTPSLVSTTTPAVVSGFTLGLDLGDRQHHVCVMDATGRILREASLANTRPALAKLLAEFPQAIVALEAGTHSPWISRFLTGCGATVIVANPRKLHAISRNERKCDRRDAQMLARLARVDPALLHPIQHGSARAQHDLLGLKLRDALVRTRVNLINAVRFTLKSLGHPVRNPSSESFHKTVLADVPADCLPVVQPLLTVLAQVTEQIKGMERDLVQRSRKDYPVTQRLQQIAGVGPLTALCFVLKIGDPQRFSRGRDVGAYLGLCPRRDQSGGTDKQLRISKCGDGLMRRLLVSAAHYVLGPFGPACALREHGQRLTGTGSAREKKRAVVAVARKLAVLLLSLWKHGTDYEPRATTGPILVVTPA

SEQ ID NO: 245435 - protein, 355 aa, unidentified
MKYYTSTTEFNCGIDLHARQMYVCVMDRDGKKLVHTNVKNNDFEFFLKLVAPYRHDLTVCCECMFGWYWLADACQAAGLTFVLAHALYLKAIHGGKNKNDRIDSEKLAHLLRTNLIPPAYVYPADKRPLRALLRQRLFFVWQRSDLLARIQSHQLAHNRPPIKQTRRNRDPWEAQLLAHEAHPLRQLALQNELAMIRHYDQHITALEEQLHRLTKERLPRQYALIQTVPGIGEHLGLTILYEIGDIERFPTVKDFVSYCRLVKGTVASAGKIKGLRGAKLGNPYLRWAFGEAAVIAKRDPHRIGPLAQRLEARMNGNKFKANTVLALKLARAAYFMLKNNTVFDPERLAMALAKD

SEQ ID NO: 245436 - protein, 335 aa, unidentified
MEYYVGLDVSLKQTAVCIVDQKGAVKHEAIAEFVWPHAESVVRIGLESGPTSTWLWTELNKMGLPVICIDARHAKAALKMQINKSDRNDAVGIARIMQTGWYREVRVKALDSHAIKALLVSRALLVKIKRDIENQIRGLLKNLGLVIGRAKMNTFKTRAQELIEGKPALTAVVEPLLVAREAIAQQIADLDRKVMGLARNDAQVRRFMTTPGIGPITALCYLATIDDPTRFNKSRNVGAYIGLTARRYASGETDWTGRISKCGDAMLRSYLFEAANVLLTRVAKWPALKAWGMRLAKRSGIRKAKVAVARKLAVILHRMWIDGTEFNWSSKEVAA

SEQ ID NO: 245437 - protein, 336 aa, unidentified
MRAIGVDLHTTQMTVCYLTDEGQSGENYKLSELANFCKQLTVEDEIAVEATGNTRWFCEQVKGRVGRVWVVNRREFQVIRQSVKKTDERDAEALARFLRAGLLPEVRLKSELAETVQSLQQTREKLVGTRTALLNKVHGLLVRRGRKAKKESLASAVGKRRILAMEWSASERVELEVIFEQIESLTKAVKRLETEISTLGRQLAGFENLVSIKGIGERSAALLLAVIGEVEDFADEDKLASYFGIVPRVANSADAVNHGRITKRGSKLGRTTLVQCALVAVRYSPYLKSYYERLKARRGAGKAVIATARKFLGIIYNTLKNNWVFADFPNFVLAET

SEQ ID NO: 245438 - protein, 407 aa, unidentified
MDGRASPGPRHAGVDWSWEHHAVCILDDVGVVLDRFVVKHEAAGLKELCRRLGGLGVDRVAIERPDGPAVQALLDDGFEVVVIASRQVKALRLRYGSAGNKDDRFDAYVLADVLRTDGHRLRPLRPDSDATRALRALVRARKDLIKHRLALANQLRANLLQAFSGAIGLFAELDSPISLAFLKRFPTAERAAWLTERRLHAWLRSVGYAGRRPTSRLLEHLRDAPAGLTGEVGDGHGIVTVQLVDLLTRVRSRIDVLDERIREALELHPDAQIFTSFPRAGTNRAALLLAEIGDCRERFPDEASLAAAAGVAPSTRASGKHWHVSFRRGCNKKLREALIDFAQDSVQASPWAEDIYRRARDRGMRHPHAARVVARAWVRVLWRCWTDGVAYDPSRHAGFTRLEGVPA

SEQ ID NO: 245439 - protein, 312 aa, unidentified
MPVKSPPSYVGLDVAKDQLDYSLSETEDGRCANTPEGRAQLIQKLRGLPAPRVVCEASGGYEKPIVAELLQAGIEACVVQPGRARAFAYAEGLMAKTDRIDAGVLRRFGQKITLRLVTPQDPVTSTLRELLEHRRQLTTQLAEVAGRLELAGPTLGRLLTVQQQFLEQQIAQVETMITQHIDQNPDLKSKSARLQEIKGVGPVLAATVLAYIPELGQVESRQLSALIGVAPFPDDSGKKPAPRHVRGGRAQVRHVLYMSALCATRWNPILSEFYQRLRANGKPAKVGIVAVMRKMTCLMNKVIQEPDFVLAR

SEQ ID NO: 245440 - protein, 422 aa, unidentified
MLAESVDEEEVIARVAALDIGKAELVCCVRVPGAGGAKRRLQEVSTHSTMTRSLGDLANHLVDLRVERVVMEATSEYWKPVFYLLEAHGLEPWLVNARDVRHLPGRPKTDVLDAVWLCKVAERQMLRPSFVPPRPIRQLRDLTRYRTDLVGARTAEKNRVEKLLEDACIKLSVVASDIFGVSGRLMMAALIAGERDPKVLAEMARTRMRAKIPQLVEAFSGHFDDHHRFLLARMLARIDGIDADIAVLDAQIETHLAPFDLAVERLDEIPGIGPVAAAVIIAEIGVDMTRFPTAGHLCSWAKFSPGIKSSAGKNKSNGSTGQGDRYLARVLGEAAPIAGRTDTFLGERYRRIARRRGKKKAIVAVGRSILVIIWHLLADPQTRYNDLGADHFARHVNTETNKRNHVRQLEALGYLVTLESAA

SEQ ID NO: 245441 - protein, 368 aa, unidentified
MPAVRLQFCLMKNKLISKTVIGIDLGDKKHAICVVDQEGNIVAEFSIENRRRELAELSKNYPGSLVAMEVGTHSPWISRLLTGLGMNVVVANARKLRVIYTNERKCDEYDAQMLAKLARVDIELLHPITHRSKDSQQDLLMIKLRDTLVRQRVTAISSIRSSLKALGFQLPAPSSPSFAGIARAELEQNPELLLLVEPALCAIDELSKRILEFDRMIRGAIKTKHPQAQRLQQITGVGPITSLCFVLTVEDEQRFSETRDVAAYFGLVPRRFQSGDSDKQLPISKTGNRYMRKMLVQSAQYIMGHFGPDCELRRYGLRLTERGGAAAKKKAVIAVARKLSVLLLTLWKNQSDYQPLRDSQTTTVIQAS

SEQ ID NO: 245442 - protein, 333 aa, unidentified
MSASTCTGRRSVIVRKTSDGEVLSKVHIDNDPIALAAAVAPAGPNPEVVLEATFGWYWAADVLAELGANVHLAHPLGNNWGNRRVKNDERDANDLVDLLRLGRLAEAWIAPPEIRELREMTRYRHKLSKLRAGLKAQVHAVMGKNGVLPAWTTMWGPAGTAQLDELELPMAYSLRLESLRDLIEIYGREIEILDRRIQMTLKDDRGYKAIQAIHGVGPVLAAVFVAEIGDVTRFRSPDQLASWAGLTPRHRESDTKVRRGSITKQGSRMVRWAAVEAISRNHGGDKIKADYRRIAERRGRNIGRVAAARKCLSLVFYGLRDGEIRCLKQADEG

SEQ ID NO: 245443 - protein, 338 aa, unidentified
MKLYAGIDLHSNNSMIAVIDEQDRVMFQKRLPNDLERIVLALASFKQWLIGVVVESTYNWYWLVDGLMQAGYTLHLAHPAALVQYQGLKYSADEHDARWLAHLLRLGILHEGYIYPREARAVRDLMRRRMQLVQTRSAQVICMQTQFTRSTATSASSDALKRMLPEEIAPLLNEPNVASGIRANLQVVRTLNGEIARLEREVLGQVRLAAQFEPLLSIAGIGRILALAIMLETGAIERFAKVGNFSSYARCVDSKRLSNDKKKGEGNSKCGNKYLAWAFVEAAHFAVRYNPRIKRFYERKAAKTNKIVATKAVAHKLARAAYHVMRERVPFDEARAFA

SEQ ID NO: 245444 - protein, 341 aa, unidentified
MMIIGCDFHPRFQQIAFVDQETGEYGERRLCHPEEAEQFYRSLKGRQVRIGAEATGNFRWFRQLMQELGHEFLLGDPSAIRAASPRRQKTDKRDARHILNILVEDRFPAVWQPPVENEDMRQLLLHRCRMVRFRARIKNQLDSMAKNEGLLSKRVWCAMRRKQIEELPLSGWNVERRKDLLFLLEELNKRIEPLDEAVLKAAEDNPEARRLMTHPGVGPVVSLFYVLTIGDWQRFPRGKQVASYLGLIPAEESSSDKRRLGHISKQGNTLVRWLLVEAASKAQRYDPSWHRQYVRLSMNKHHGVAKVAIAHKLAVRLYWMLRSGQDYKQVMERGSHAGQSV

SEQ ID NO: 245445 - protein, 338 aa, unidentified
MNHYAGIDVSLEASSVCVIDANGKITWESKVASEPEALIAWFGSLGVEVTRIGLEAGPLSQWLYAAMRQAGLAVELLETRHVRNAFKIMPVKTDRKDARGIAELMRLGWFRPVHCKSMEAQETRALLTARKLVQKELLEVESSLRGILRGFGLKVGKTTPVRFEGRIKELVAGHPSLEVIAQALLSVRTALRREFNGLEKRLRAMARCDTRARLLMSTPGVGVIVALTYACAIDDPSRFKSSKIVGAHFGLTPTRYQSGETDYTGRISKIGDSSVRTALYEAAHVILTKAVRGCTALKSWAMRIAKRGGMNKAKVALARKLAVIMHRMLADGTTFQPA

SEQ ID NO: 245446 - protein, 482 aa, unidentified
MKAKQKEPPEKSTGQSTQLNWRRMNRKQRRDLERKIQSADLTLQLVHPDAAGIDIGNESHYVAVPPDRDNQPVRHFGCTTAELRAMADWLRQCRIRTVAMQSTSVYWIAVYDVLEQAGLEVYLVNARETKNLPGRKSDVQESQWLMKLHTYGLLRNSFRPPQEVRTMRTYWRQRNDLVRSAARHIQRIQKTLTQMNMQLANVLSDVSGVTGQAIIKAILAGERDPQKLAAFRDPRVKASEQDIARSLEGNWQDDLLFVLQQEQAAFEFYRKQMTECDRQLERYLQKMEGRSQGATLPEEKRKDRLQKKKGNEPHFDLQAQLFRMTGTDLTQIDGIDVMTATTILSEAGWDMIKWKDEDHFVSWLRLCPDNRISGDRIIGKGRLPTNNRVTVALKLAASNLRTSQSYLGAQFRRLRARLDTPVAIKAMAAKLARLIYRMLRYGTKYVDQGSPFYELQQRTREIRRLKVKAASLGFQLVQRNAA

SEQ ID NO: 245447 - protein, 404 aa, unidentified
MNMNAVGIDVSKGKSMVAILRPYGEIVSTPFEVKHTVSGIRSLIEHIQAIDGESRIVMEHTGRYYEPIVRELSQADLFVSAVNPKLIKDFGDNSLRKVKSDKADALKIARYTLDSWTELRQYSFMDEIRNQLKIMNRQFDFYMKHKTAMKNNLIGILDQTYPGANTYFDSPAREDGSQKWVDFATTYWHVDCVRKLSLNAFVDHYQKWCKRRKYNFSQSKAVEIYEASKEIVSVLPKDDLTKLIVKQAVEQLNMASQTVEQLRAMMNEAASKLPEYPIVMAMKGVGRSLGPQLMAEIGDVSRFTHKGAITAFAGVDPGVNESGSYEQKSVPTSKRGSSDLRKTLFQVMDVLIKTHPQDDPVYQFLDKKRAQGKPYYVYMTAGANKFLRIYYGRVKEYLSSLPES

SEQ ID NO: 245448 - protein, 424 aa, unidentified
MLGVGIDWSEAFHLVALGRPGEEVIQIRRVEHTPAAVAGLLAHIATLEPDPAEVRVVLETRHGALVERLVDTGFTVLPVNPDLVARRRGPARKKDDAEDARICCVLALDRYTSLRPLIPHGELAAELRAIARDDERAARDQRRLLNRLRADLLATFPAALQVAGDDLGAPTILKLLERWPTHQTLATASWEELLDFARAAHHGWPERFADQVAQALAADHFTPRDYLVRAKADTIRLAAVQLLAIGTQRRAWERRMGALLLGAPRRGRANAPRPEELDQGQAFPGGKVYLSFPGLGDRLAARVAGEIGDHPNQFGSPNALACYAGKAPVTRRSGKSELVVACRLACNRYLAGAVQQWAFCSLQESVWAREFYDAQRTRGKTHQAALRALGNRWLEILWHCLMRGQLYDEPLHIANRNRALGRAA

SEQ ID NO: 245449 - protein, 343 aa, unidentified
MKEVITIGVDLAKNVFQIHGIDAEGGVVFRRQLRRGQMVPFFKKQPPCLVGMEACATSHHWARQLIELGHEVKLMPPRYVKPYVKRNKNDMADAEAICEAVTRPTMRFVEVKTPEQQSVLMLHRTRHLFVRQRTTLINALRAHLAEFGIVAGVGRNGLARLLQVIEDGEDDRVPPTARDSLLALRDQLEMVKHQILGADRRILAWHRGSEVSRRLDDIPGVGPLIATALVASVPDPHIFKSGRDLSAWIGLVPKQNSTGGKDRLGHISKAGNRYLRTMLVVGALSVIRRAKQVGYTRRPWLTKLLERRSTKIAAIALANKNARTAWAMMAHGTFYQEPASQAV

SEQ ID NO: 245450 - protein, 338 aa, unidentified
MYCMGIDHHKQYSFITVVDEGGDVVKSGKVNNMSFELENFLYGMEDVKGVVEAGRSSYTMVDLLEGLGVEMVMAHPKDVKAIAKAKIKTDKRDSHILAHLLRTGLIPEVYRRSGENRSHQRVLRQRVFYVGSMTRVKNRIRAILAQQGEDIRVEVLRAKNIFGREGLVVLKGLRLPAGDKQLIGGLIKTFEHLEKRIRESHALVERLSRQLPEARIIQTVPGFGVFLSVLVAVEIADIGRFEDETKLHCYSGVIPSTHSSGDKTYHGRIIREGNRWLRWAAVEAVWPAIRADFDLRLHYERKKKRKGANMAKVATARRLLTIIYRMLKENRAYIPYKR

SEQ ID NO: 245451 - protein, 341 aa, unidentified
MSTVTVFVGLDYHQDSVQVSVLDPAGNQLLNRGCRNDWEQIVKLTEPLGVVKRVAIEACCGAADLAEELITKAGWPVEMAHPQYVARMKQSPDKTDFSDGRLLADLTRVGYLPKVWLPSAHERDLRQLVNHRQNLIDQRRAAKLRIGAVLREHRAQAQAPTRLSRWTRLWVAWARSVAPLSPQARWIVNELMDEVEHLDKRIRAVDTRLREASGDDSLLKKLMKEPGIGEVTAWALRAFVGRFDRFSTGKQLSRYCGLSPCNASSGTRQADAGLVRGCNRLLRAILIQAGHRLIRTEKRWTDLARTMRGRGKPACVVVAAVANRWMRGLWHRINEEKVTAN

SEQ ID NO: 245452 - protein, 344 aa, unidentified
MTYYAALDVGLHTTALCIVDGDGEIQFERSLPSEVDEIVTCLRGFGAEIASVGLEAGTLTQWLTYGLRDAGFSAVVMEARHVKAALGAMRNKTDRNDARGIAQILRTGWYREVYVKSLESHYVRTLLASRKALLRKCIDLENEVRGLLKVFGIRLRAGIRHGAFDAATREPIEANAALAHALIPLLDARLELYHAFLELDRRVKAQAGHDEVCLLLMTTPGVGYITALTFRAAVDDPRRFRRSKNVAAHFGLTPRRHQSGERDNPGRISKAGDTQVRSALYAAANIILTRSTKWSSLKAWGTRLARSKGRKRALVAIARKLAVILHAMWIDGTPFSYQAPEVAS

SEQ ID NO: 245453 - protein, 416 aa, unidentified
MKLFVGLDVSSEKLDACFMTDDSTCSVLKEASYGNSQLGASQIKEYILEFSQKFEIESLVIGMEATSLYSFHPAMFFKEDLELNQLNLMVSVEQPNKIKKYRDIFEENKNDQIDAFYIADYFRIQRQVNSIIKEEEYLALQHLTRTRYQLIKQLVRTKQHFIENIYYKCNTLSKELKAEGGSVLSATLVTLMTEDYTMDQLAELSLEEFANLIQKLGKYRFKNPEGIAKAISKAIRSSYRLGKVHQDSVDIVLGVLAKEIRSLEKLIKDLDKAIDDLVVVLPEYQCLTSIPGIGPVYAAGILAEIGPINRFSDESKLAKYAGLYWRQNQSGNSEYENTPMAKRGNRYLRYYLVEATNSVRRYEPEYHAYYKKKYAETPKHKHKRAIVLTARKFTRLVDTLLRNHQLYTPPRSVIDK

SEQ ID NO: 245454 - protein, 432 aa, unidentified
MEKMHFHAAGIDIGARKVFVGLEGQPVRSFETFTSDLVSLKNYLLEHKVSTVAMEATGVYWYVLYDILLDGGLDVWLVDGRQTRQLPGRKTDVKDCQWIQQLHSYGLLNRCYVSEGHIKELRSYQRLREDHLRSAAMHVQHMQKALIEMNIRLPEVLSQVHGVSGMALIDAILQGERDPDKLFSLCHKKIRENKGEELLKALQGHYTAQGLFALGQAYKAYGFYQGQIMECDSQIDSVLQRINRDKNLPPGISEGKRKAIRHNKPHINNLGDHLLKIFDGKDATKLPGITDYNWLQLYTEVGSDLSRWPSEKHFTSWLGLSPGQDRSGKKNKSKSKGKPAVGQIFKQMAHGLLNSKYIGWGSFARRLRSRKGPAIAIKATARKLAAQYWRLIVKGADFVEKGLQAYENIIKKQKQRRLEKLAFELNRELVPA

SEQ ID NO: 245455 - protein, 344 aa, unidentified
MELHTIGIDLGKTIFHLVGLNSRGEVVVRKKFSRLQLLRFTANRPVCLIGMEACGGSHFLGRALREQGHDVRLMPAQYVKPYVKTNKNDFIDAEAIAEAVGRPTMRFVPIKTDDQLDLQSLHRVRERWVIRQTAVINQIRGLLLERGITLPKGRCHLEAALPAILEDAEGKLSGLLRLLLVQLKLELDQLAVHLEQADVLIQKAAQDNEACQRLDAIPGIGPITATALLSAIGNGAAFQKGRDFAAWVGLVPREHSTGGKQKLLGIGKRGNVYLRKLFIQGARAVLQFKDKQSPGLRNWLAQLTARTHYNVAAVALANKLARIAWAVLATGEVYRAPVLPSASA

SEQ ID NO: 245456 - protein, 343 aa, unidentified
MSIMIGIDPHKASHTAVAVDSFEFVLDELRIRSCSAQATQLREWANGFRDDRIWAVESAQGLGYLLAQQLIAAGETVLDVPAVRASRVRTLSSGRSQKNDPNDARSVAIAALRADDLVEVLPDDHTRILRLLAKRHRDLGRAKNRDCCRLHALLLEMFPGGAGFKMSYMTRTNAMLDTFVPTASMGRQRLEIARDLVDGIERLGDQMKVSKRRIAAAVAASGTSLTEVNGLGPITAAMIIGYTGNIDRFPTRHRFASYNATAPIEASSGPKVRHRLNPRGNRQLNYAIQIIAISQLRHDSRGREFYDRKIAEGKTSKEALRALKRRLSDVVYRHLVNDARRNR

SEQ ID NO: 245457 - protein, 427 aa, unidentified
MNYTQNQKISQITPSTLVVGIDIAKDKHVARAQDDRGIEFGKRLVFENRIHGFEKLLEWIRHHAKANGKNHIIFGVEPTGHYWLNLAYYLTAKGYDFVLVNPMHVKKSKELDDNSPTKNDTKDAKVIAQLIKDGRYSVPNLLEGIYAELREGVKLRDQLTKQLMIIEGRIQNIIQRYFPEFFDVFGDWEGKAAFCTLRMFPFPSQIQEMTPEGVLMKWKPFVQRGVGIKRATKLVETAKKSIGIKVGLQFAQRELECLLDQYELYKEQVEQLDQELEALVETIPGAKEMMAIPGLGRTTVALFFAEVGDIRNYSHPQQLVNLAGLSLREHSSGKFKGQTRISKRGRSRLRRALYLAIRPLVAHNSTFKALHHYYTKRPDRPLKKQQSLIAVCCKLLRVLFAIGNKQCKFDGSKLLRGLPQINTLQVA

SEQ ID NO: 245458 - protein, 411 aa, unidentified
MHNRQNYLYVGVDLHKEHHTAVIINCWQEKLGEIQFENKPSAFSEFLLEVETYVSNGLSVVFGLEDVGGYGRALAKYLVDHEQVVKEVNPALSFLERKSQVMIQKNDSWDAECVARILVNKFNQLPDAKPNDLFWSIQQLVSRRNALVKAQSALKNQLHIQLNHHYPSYKKFFSELDGKTALAFWQQYPSPSCLEGANIKQLTAFLLDVSNNTCSVKKASEILKLVKEDGHTMKEYQETRDFLVRSIVRDIEFKKTEMKYIERELKQLVKLLDYQLETMPGIELVTASALIAEIGDVRRFPNANKLARFAGVAPVYFGSGGKGKTHKSKQGNRALHALFYNLAVQQVQVAKGSKMPRNPVFHAYYQKKLKEGKTKGQALVCIMRRLVNMVYGMMKYKTAYELPVVEEKEVV

SEQ ID NO: 245459 - protein, 407 aa, unidentified
MHYLGIDISKKSFAVSILDEEGEAISKVLAFPCTGKGFEKLVDKISSLKLKKSEVVIGIEATGNLWENLYSFLKGYKVIILNPYQTRKYHQVLSKKAKTDKVDALVIAGLLRSKEALASYVPEEEVQVLRELVRLRHHLQKDKKNYLRKAYSLLNLVFPEYTNLVKDPFKKVSSMILKKYPTAIHMARARRTDLVKMARRIQGNNYSSELAEKLIQAAKESIYSGKASEVRGMALRIIIDEIQFLKDKIKEIEDKIEEILSSDEPSSPQKRLLKISGVGPKTVAAFLGEVGGDVIRFSSANKLIGFIGWHPKISESGESKNLHPKMSKRGPSALRASLYMAAVASLKHNPYLRSLYHRKISEGKESKQALICVGKKIISIMYSMLKYEEDYDPQRIFFQFEKERILT

SEQ ID NO: 245460 - protein, 310 aa, unidentified
MEQSFVGIDVAKDRLDVHVRPSGDTFALARDGQGVAALVERLRAAIPQLIVLEATGGFEQVVAAQLAAACLPLVVVNPRQIRDFARATGRLAKTDRIDAAVIAHFAEAVRPPVRPLPDKQARVLDELVTRRRQVIEMMTAEGNRARQIDNKRLKKRIERLRSILQAELTAIDADLDEIIRGTPIWRESEELLKSVPGVGNVVARTLIAELPELGTLDRRKIAALVGVAPFSRDSGTMHGRRRVCGGRAPVRTALYMAALVASRRNPVIAAFYRRLVAAGKCKKLALTACMRKLLVILNAILREHAPWQAA

SEQ ID NO: 245461 - protein, 323 aa, unidentified
MQGQKSPERSAEPGVYVGVDVCKDWLDVYLHPIGQKFRAANTPEGLKALKRRIADLPVELIVMEATGKFHRQAHRTLHAAGLAVAVVNPLRARLFAEAVGQLAKTDRLDARVLALMGQALEPSALAPAPEALEALQELARARAAAIADQTALSHRRGASQTAFLKAELGRRLKVLAAHIERLDAEIERRIGADAALKRRYDIVLTIPGVGPVAAVALVIGLPELGACSGKAAALLAGLAPLACDSGEKAGERHIRGGRAFVRTGLYLAALAAARCNPQLSDDYKRLRDAGKKAKVAIAAIMRKLVVLANVLIKEDRPWRPIHA

SEQ ID NO: 245462 - protein, 410 aa, unidentified
MEQVIERGAGLDIHRDSVVVCVRVPGPAGKREQHVRTFGTTTAELIGLRDWLEAHGVTHVAMESTGVYWKPVYYMLEEGCVCLLVNAAHIKQVPGRKTDVKDCVWIAELLEHGLLRGSFVPPPFIRDLRDLTRYRRALIDERTREANRLHKLLQEAGLKLASVASDILGVSGRAMLAALAHGTTDADVLADLARGKLRRKLPALRQALTGRFRPHHAFLASQLLAHLDALDELLDTLTLRIGEVLLPFAAVIHRLDTIPGYSTQTAEEVVAELGFDMSVFPTDRHVSSWTGLCPGHHESAGKHRSGRTRKGNRWLRQTLVRAAHAARYSKDTALAARYHRVARHRGAKKALVAVAHALLVTAYHVIKEQTTYRELGFDYNDRRDAERTRRRAVTTLERQGYRVILEPRAA

SEQ ID NO: 245463 - protein, 266 aa, unidentified
MKAFIGIDVGKEKLDVSWLRDVVKNKQKTKVLKNTIQGYQELVDWVLKNTGLEAQNIVITTEPTGIYSEPLMYFLYEQGFTLLHVNPGKAKQYANSLGLVHKTDKSDATMLARYGHDQQHSLSSWQPEPIEARELKAMVRRLEALEQDLQREKNRYEAAGFSGASARVTQSLKDMIAVLKAEIDKLKNEIDEHINRHPQLKKNRQLLESINGVGEVTSRIMVCLLACKRFKSAKQLASYLGLIPKHNESGKRTGKTTLSKEGPGYM

SEQ ID NO: 245464 - protein, 341 aa, unidentified
MKKFIRIGVDLAKNYFQVHALESEDGRAVTRKLKRSKMHEFFSQIEPCLIGMEACGSAHYWGRELKAMGHEVLLMPPAYTKPYVKRGKNDAVDADAICEAMSRPGMRFVPIKSPEQQATLMLHKTRELLVKQRTMSVNALRGHLSEFGIVAAKGIGRVDELLDLAESDATLPNAARASVKVLAQALEGLDKAIDDLEKEISSAHAQNEMSRLLDKVPGIGKLIASVIAASVPDPSVFKSGRDFAAWLGLTPRQNSSGGKQTLGGITKQGNRYIRKMLVLGATSLLNVLGKRKGALRDWIIGLLAKKPARLVTVALANKLARILWAMMKTGECFRTEMFAKA

SEQ ID NO: 245465 - protein, 360 aa, unidentified
MQEITRVGVDLAKRIIQVLAVNAAGSRVTGRALTREKFLPWCSQLPPGCLVAMEASSSAHHWARKLIAMGLDARIIAAHLVSPYRIQGKSGKNDANDAAAICEAASRPQMHFVAVKSVAQQSMLSIHRLREGFKTERIACINRIRGLLSEFGLVFPQRPAVLRQALPDAIEDASNELGSLARLALQRALAQWQELDEHMDWCDQRIAAHLKTNDQVRQAQQLMGVGPVTASAVVATVGDFRQFKDGAQFGAWLGLTPRQNSSGGKNCLGKITKRGDMYLRMLLIQGAKSIVQTAQKRDDPISRWVLQIREKSGWQKAVVALANKNARILWAVFVRGKAFDVHHVSVKPTGAMAQTGAVPA

SEQ ID NO: 245466 - protein, 357 aa, unidentified
MKIVGVDLHARQQSIAMLDTETGEWTEKVIRHEGNAVEEFYAGLEGPVVVGIEATGSMQWFLELLEELGIQYRVGHPAKIRAAETRKQKHDRRDARLILELLIANRFPEIWMPSTEQRDLRALLRDRHQWVKMRVRLQHTLQAIALNHALRKGASLWSTAGQKALQRLPLPPYTSQRRNQLVSLYAELQKRIQELDRQVEEQARQRPQARRLLTHPGVGPVTALATEVFLGDPCRFSHANQVASYIGMIPSEHSSGRRQRLGKMTKQGNALLRYLWTEAAMHAAGKDPELKRFYRRKLIQKGMGKARIAAARKLGIRLWIMLRDQIDYEEFCRRGKMRQNGEAHAGMPDFNSGPALQ

SEQ ID NO: 245467 - protein, 394 aa, unidentified
MKLIGIDIGKNKHFFCVMDQQTGEIISQPVSFSNDKEGFDFLVQKIKSYPKDSILIGMEDTGHYHFALLKYLLDLQYTVALINPKTTDFNRKMQGGITKNDKLDTINICDVLDTPERKKQYRITKVNSFDLYEQKQLTRHHHNLKEEENVYKNRLQKCIDIVFPEFNKLFNSKYGIVYMNILKMFGSAENIANTDIRTIRKCFEIEGRGNRTSLTPERLKECARSSIGISSSAEVIQIKHLTAQIEPIEEQLTEIDKKIEEFSIQNNSPILSIPGISHFSGTSILAELGDISNYSKPSQIIKFAGVAPLHYESSQFNAQHTAITKKGSKYLRKTLYQIILPVIRHNPVFNKYYQLKISQGKGHRCAQGHCVRKLLRIIYHLLKTNQQFDPQLLR

SEQ ID NO: 245468 - protein, 394 aa, unidentified
MTAAHRQSTPPACVLYVAFELGWENWKLAFATAAADNPRLRTVRDRDLTALRREIAQAKAKFHLPADAPVVCCYEAGRDGHWLHRYLTAEGFRCHEVDSSSIEVNRKQRRAKTDALDAAKLVSMLIRFENGEKRVWRTVRVPSEADEARRHLHRELEDWLDQRRQHNNRIKGLLAGQGLEATVDKTFPQQLDALRCWNGQPVSEELRARLVRQFEGWQFADRQVKDLENQRARSIRTGTDSCLDPVRRLLRLKGVGAASAWLFVMEVFAWRDIANRRQMGAIAGLTPTPYTSSATAREQGISKAGNRRLRAMAVEIAWMWVLHQPQSELTKWFLRRFGTGSRLRKIGIVAVARKLLVALWRYLKEGTVPPGAVLVDWKAKMNSHRKPVAPAAAA

SEQ ID NO: 245469 - protein, 393 aa, unidentified
MVVSVGIDVSKNKHDCFIVSSEGEVLADVFTIPNNMDGFYALLEKIRACTTPQDKIKVGLEATGHYSYNILGFLLDNGLATYVLNPLRTNLYRKSLSLRKTKTDRVDARTIAAMLLSDVGLKPYTNTAYHNEELKSLTRYRFDKVKERAKLKSSISRLVCILFPELEKLVSSLHLATVYALLEEFPGSKQIAKAHLTRLKTLLGNASKGRYGRDMAVTIRSAAQNSVGSCMPAKSLELQHTIRLIRELDAEIAEIEAEIETMMDKIQSPITTIPGMGFRMAAMIIAEIGDFSRFESPDKLLAYAGMSPSTYQSGQLKNCYPHMEKRGSRYLRYALYNAAKYVCHWDPTFAVYLAKKRDEGKHYNVALSHATKKLVRLLFALERSRQPYCSLAA

SEQ ID NO: 245470 - protein, 339 aa, unidentified
MSKLLKNFIGIDISKSYFDVALIILMHPGQHIHHQFSQCKNGFKRMLQWLTQQGVFINEETIFCMEYTGIYNTGLVNFLVEQKALVWVEMPLRIKRSCGFERGSDDKTSAVKIAAYAFRHQDQIQLWRPLDSSIEKIKNLIAQRDRIVNAITGLTVPVKEMLECGCADEARQLEKLQKTPLKALQKARHAIEQLILKIVKQDEHIYKKTKQVESIKGIGKVTAVTLLAYTKGFTTFSTAKQLACYCGVVPFSKTSGSSVRFKPTVSNMANKKLKKLLHLCALSAIKNDPEIKLYFERKVGEGKNKMCVINAVRNKLIHRVFAVVRDDRFFEENYVRKCA

SEQ ID NO: 245471 - protein, 406 aa, unidentified
MQVYIGIDWSEAKHDVIMMNAAGVALAQFEIPHSPEGFLQLDETRWRMKLAPEDCVVGLETAHNLLIDFLWSRGYSKVYVVPPTTVKSNRKRFSSSGARSDPSDAIVIADSLRTDHGRLQPWRPDSLLTRQIRAKVSLVNHLTSSTVRLSNRLRAVLLRYYPAVLNMFRSWPTKVAMEFVRAFPTPKHAESLTFDQFQRFARQHRYPNPKRLPACFARLQAPQPEAAQETVEVYQDEAVLLATMLLTTIRAKKEVLRELKTLFREHPDHAIFDSLPGAGDFLAPALLAKFGDDRKRFPTPASVQALAGTCPVTDQSGKRRIIKFRRACDREFRAIAQQWAMASLNQSSWANAYWQRARPRCRYSSLAYRRLANRWLAILWKLWQTGQVYDEAYHLQHRALRSKRHR

SEQ ID NO: 245472 - protein, 398 aa, unidentified
MKGQDIMIYVGIDVASQKHDCFLLKDTGEVFSKTSFTIKNDFEGYKKLHNSILQFVESTKDSNVRIGLESTGHYSKNILLYLIKQGYQTTLINPILTNMDRKASTVRKTKTDKIDAEAICKFLDKNRFDFKPYTLLSYHIDALKSLTRQRFSLVKQMTQQKLIFQRLVNVIFPELLSHFSNDYGESVLNILYSYPTPKKLAKAHKESITKLLHSRCKITSSEILELAKNSIGQSEEYLGFELKHTIDMILFYQSQIEIYNKQIEIELNETEYGKIITSIPGVGIITGAMIISEIGDINNFTTSDQLLAYAGLDPSVYESGKFESSHNKPSKRGSKYLRWAIHQASSVIWQHDNTFKDYYLKKIKESKHHYGAIGHIDKKLIRVIFSLLKNKSMFIPQK

SEQ ID NO: 245473 - protein, 296 aa, unidentified
MTSTKYIGLDVHKESISIAVLNSAGKVVMECVIETKASTILQFIHGLGGDVHLTFEEGTWAGWLYDLLKPHVTELVVCNPRKNALLKEGSKSDRIDAHKLAELLYMSKLSSVYHGEHGLRMLKELSRSYLTITKDLGRVMNRLKALYRGWAIPCAGTQVYAPHYRSEWLAKIHEAGVRRRAELYYQQLDALRLVRQQARQELLAEARKHRATKLLRQIPGIGPLRAAHLVALMQTPHRFRTKRQLWNYSGLGLETHDSAQYRVVEGQLQRSKKPVTLRGLNDNHNHDLKDIFKVRR

SEQ ID NO: 245474 - protein, 390 aa, unidentified
MIYVGIDVAKDKHDCCILGPDTEELFQVFTIRNNSDGYGELFHKIESVSKDKSQIKIGLEATGHYSYNILGSLLDHGYHTFVINPLHTNLYRKGQSLRKTKTDKVDARSIAEMLVTDKTLKPYTGTSYHSEELKSLTRYRFELVKERAKMKTSVSRLVNILFPELESLVPTLHMNSVYRLLQELPGAYFIASSNLTHLKALLADASKGRYGREKAIEIRETAKSSIGSLMPAKSMELRQTIHRINTLTSDIKEVEQSIQKIMDECGSPITTIPGIKYRMGAMILAEIGDFTRFSNADQVLAYAGLSPSTYQSGKLISSYARMEKRGSKYLRYALFNAAIYLSGWDERFRLYLSKKRAEGKHYYVAISHVIKKLVRTIFRMEITHTSYQPL

SEQ ID NO: 245475 - protein, 354 aa, unidentified
MKHYVGLDVGLEETSLCIVDSEGVTVREVKVSTEPEAIRCALEGSADRLDRVGVEASSLGIWLYRELQPAGVPIIVVEARHMRVSLSTMRNKTDRNDARGIAQMMRLGWYRAVHVKNIDMQKMRSLLANRKLLKRKLIDIENHIRGTLRAYGLLMGAVGRGGYEARVRELLEHSDPVFSVMIEAMLDVRRAIFEGYERLHRVLLQVVQHDAVCRRLMTVPGIGPVAALSFKVGVDDPRRFARSRTVGAHFGLTPRRHQSGTSIDYEGRISKQGDVAVREALCEAAASLLLRVRKWSALRAWGLRIAKRSSMLCAITAVARKLASILHRMWVSETDFHVGFGAKVTQRLRLKPMQ

SEQ ID NO: 245476 - protein, 351 aa, unidentified
MIFVGLDLHKRYITACALDGLGHLVVEERRLATDLTILLAWLGRLTGPVTVVLEATLYWAWLEQQLTAAGYAVQVAHPYQVKLIWHARTKTDPIDARKLAELARVHLLPAIWIPDAATRAQRQLLRGRACLVRQRTVLKNRIHAYLTGENLRAPVVDLYGRAGRAWLETIVLPPVVRRYVDLLLENLDLLSTQILALDKYLQRHVRQDAVAQRLQTIPGVGTFGALLLQAEIGPIARFRSAQELAAYAGLVPSTHSSGGRTQHGHVGRGSPWLKWILIENLQTLKLAPGPVGAHYQKLLRAKGKPKATVAAARKFCTYLYWMLKEEWSYSEWLRQHDRPEVRPVQPLGSVA

SEQ ID NO: 245477 - protein, 343 aa, unidentified
MTYFAGLDVSLEETSVCVLDGNGAVVREAKVSTDPDAIASWLHESGYSASKLGFEAGALSTWLFHELTTRGWDVVCLETRQVHQVLKAHRDKTDRGDAVGIAQLLRSGWYQSVHIKSYEAHASRALLKARVELVRVRQDLENTIRGLLKPFGIRLPRGDRRTLAVRVRTSCAARPALAAATEALLQAREPVMAEIDKLETLLISIARRDETCRRLMTVPGVGPIVALAFLSSVDDGRRFPKAREVGAYFGLTPRRHQSGEIDYQGRISKRGDRMVRTLLYEAATVLLTIVKRFSSLKSWGLRLAKRIGFKRACIALARKLAVVLTCIIKDGTEFWWSDRGVTA

SEQ ID NO: 245478 - protein, 353 aa, unidentified
MSIVADTHPFVVGVDTHARKHVYTILIAATGAFVESRDFPTTIAGINRAISWVARRTQADADTLWVIEGAASFGSILTGTVASHGYPVAEAPRMEAKQRRGVGKSDVLDAHRIAAAALPLPVDKLRRPRLNEGVRQSIQILVTARDSMTKDRTRSVNALTALLRGNDLGLDARKALSTAQIRQVAAWRTRNEELSLSVARAEAVRLAKHTMELDEQLHTNEAQLAELVAVSEAAPLLDETGFQAISAAKCLAAWSHHGRVRTEAEFASLAGVNPIPASSGNTVRHRLNRGGDRALNSALHLVAVTKMTYDRETRAYVEKRRTEGKTHREIRRCLKRYIARRVFRTFNASHHRL

SEQ ID NO: 245479 - protein, 398 aa, unidentified
MISVGIDISKRKSTAAILNVQGEVICNPFEFRHTKSGFEELLMYVKDYPQDEVKFIMEATGIYHLALLEFLKSKGYFVHVANPLLIKKFFDAEIRKGKTDRKDALKLSLYGTEKWFKLDDHLISEKIYSELMMLSREYNQLIAIRTKSKIQLNHLIERIFPGIEKILTDYYTELLLDFLLKYPHVSCVVKQSEKVFTKQFVKMAEKKEHTKGPQLAKKVYDLALECVPAISSSRSLEIAVESCIHVLRSTQTSTDAIITQMRLLAKELPEYDMVRSMPGIGDTLAPRLIAEIGDIRRFKNAKSLIAYAGIDAPPYQSGQFEGTRRHISKRGSASLRKCGFEIMFILMRREPSEDKGIYEYIQKKRAEGKAFKVALFAGFNKMLRIYYARTMEIYSKLT

SEQ ID NO: 245480 - protein, 346 aa, unidentified
MALAAISILGVDLGKNVCSVVGLNSSGAVVMRRKMRRETLIRLAEKLPACVVGMEACCGAHHLGRLFAACGHDVRLMSPEYVRPYVKAHKNDDRDAEGIAEAATRPTMRFVELNRQDQLDMQTLHRSRDRLVGERTALINQLRAILLERGLVAPQGKRKLEQFLAVLMDEQGGAGLSPRMIRLVADTRAQWAEPDRRIMVFDAEFVRWAKENEDTRRLTTIPGVGALVASALVAAVRRAGSFDRGRDLAAWLGLVPRQFTTGGKPKLRGISKRGDKYMRRQLIHGARAALPHVAERDTPLGRWAKGLLGRAHRNVAVVAFANKLARIAWAVLRGQERFAAQMTMAA

SEQ ID NO: 245481 - protein, 341 aa, unidentified
MKSMEITAVGIDVSKRKSTVAIRRPGGVIVACPFDISHSSHDLEKLVSILKTTGGDIRVVMEHTSNYWKPIALTLKNAGFYVSVVNAMLIHDFSDNSIRKLKTDRADSLKIANYALTFWNQLPPFNDEDETRLVLKEQSRMYERLASTATSLRNGLIALADQTFPSIDQAFGHAIKNADGHEKWVDFFSIYWHRDCVLRLSIEKFTESYRKWCLRRNYKFRTNTAHKLYALAQDAVPTLPKNNGTKALVLQACKSLNAVCEAKQSTQEEMNRLASLLPEYEVVMQMEGTGPITGPALMAEIGDVRRFKNKKALVAFAGIDAPPFQSGNPSNATFPSAAHLI

SEQ ID NO: 245482 - protein, 404 aa, unidentified
MKGPIVSIDVSKGKSDYQAFKNLNVKYTGSRSIKHTKEGFDEIVSLVREMEKKLETEVCVVYEATGVYHRVLKKVLEDNNIKQFIINPLLSAKTRKNDSLRSPKTDKLDPKSIAKTYYSHSLHNSHKPETIYHELRELSRYYEDILVHIRKDKVAFRAQLDVVFPGYDALFDDLYGPVALAVIEKYPHPEMLQKKKINTVSKVIQNKTCHRQAVSDTMADKAIEYSKTIYSGCDKDDIEVLILQRLIKKLNEDMAEAERTIGEMIKLAQELPDFSIIKSIPDIGDNLAARIIAELGDMTRFKKKNELVAFAGLDPRISESGKNDGDHMHITKKGNKRLRCLLYLAVTCSIRLKRDDNSIKDFYIKKKQQSNPMCSKAAKTACASKLVRIIYSMCKTGELYQYNK

SEQ ID NO: 245483 - protein, 365 aa, unidentified
MKIIHWIGIDDHADKWTIAHYRGDEERPGKEFELVPDEKGYRRLLSSLKGLEGEVRLVYEAGPCGYELYRRLTKAGYNCQVAAPALTPRKPGERVKTNRRDAAKLARYLRSNDLTFIVVPDPDRESLRDLIRSRQAVQKDVGRMRRQIVHLLLRYGHRYREGQAWTQRFWAWIKKVQLEGVHSRFVLTEMIGELEHRISQLERYDAQVELASQKPEYQPYLSALRTLRGINTLSAMTILSEMGDLRRFATAPKLMAAVGVVPSEYSTGDKTNRFSITKTGNAHLRRVAVEAAWQYQRRPALGRTIKARRKDQPKAIVEIAEKCEKRLHARFYRMTSRNKKSTVAVVAVARELLGFIWAIGQIAHP

SEQ ID NO: 245484 - protein, 350 aa, unidentified
MVTIGIDSHKSSLAVSLVDELGRELASEQFGNDAGAHEALYAWVRARAPGERCFGIESTGWIGRGIACLLLERGERVVDVRGTLTERERKRLRGDGKSDTRDALAIARVSVREELPPVRVDSPSRDLKLLCDYRTQLVGERTRIANRLHVDLVSLHPGYERRVPRLTSGVRLEAAEEILAGDSGVQATLARRRIEGLRRIDLELADVRREIEAKVRASGTGLVRLVGISHLSAARIIGEVGDVARIATKDRFARMNGTAPIPASSGQTQRHRLNKGGNRRLNHAIHMMALTQARMDPRARAYVERRRGEGRTYRDAVRALKRHLSDAVYRQLREDADRATRRCTPGVALT

SEQ ID NO: 245485 - protein, 341 aa, unidentified
MKPELSVVGIDLAKSIFHLVGMDERGTIILRKRLTRGEVMPFMAQLPRVLVGMEACGGAHYWARQLRAQGHEVKLMAPQYVKPYVKTNKNDLRDAEAIAEAVTRPNMRFVPIKNVAQQDLQALHRVRERLMGARTALVNEMRGLLAEYGIVLPTGVNAFRHALVEKLEVEHAKLTPLSQELFGKLCAEFKKLEIEVAYYDEKLQALATTHPESQRLLTIPGIGPITATALLAAVGDVGSFTNGRQFAAWLGLVPKQHSTGGQTRLLGISKRGDSYLRKLLIHGARATLRWARTKTDRRSQWIRGLLERRGWNRTAVAVANKNARIVWALLSRGGVYGESTH

SEQ ID NO: 245486 - protein, 351 aa, unidentified
MLSETTAVPKLFIGMDVHKKSWTVHFKTDLFDNKTVTMPAQPSALINFVGKNFSGHQVSCCYEAGCCGYWIARALKEKGWQVRVVNPADVPRNNKQDWQKTDKIDSRNLCKHLSDGNLKGIFIPEEEQEQLRSLFRRRIHLSRQLRSIKNHIKSQLLYYGIQLPEQYDNPNWSREMKVWIGNIKWKFNSAAESMKSRLKQLEFIWYEELHISNELRAYCRKHYKKDYYLYKSVPGIGGITAAGILSELGDIRRFNRLDELAAIVGLVPGIYQSSENKINLGLTKRSNHQLRSLLVEASWVAVRTDMALQQYYRKHAHKEPNKAIIKVAHKLLSRIRAVIISGIPYQTGLIK

SEQ ID NO: 245487 - protein, 381 aa, unidentified
MMTTTTMLQGHDNKTPVLLVAIEMGLKSWRLAMMAQGGAKQRHKTVNGGDYAALSEALLEAKRKLGLAEDAPVILCYEAGRDGFYPYRRLTEMGYRVHVIDSASIEVSRRKRRAKSDGIDAAKLLELLHRSEGGENKALRMVNVPSEKTEDCRQLPREREELLAERQQVWNRMSSLLFLQGYREIPGSARELKQWLTERQDVGPYLRVRLERERVRLELLESQLKEVERKEATWLKEQGDEALLAKVALLAQVGGFGIISAWVLVTEVFGWRGFRNRRQVGGALGLTPTPYSSGEDEREQGISKAGNWRARKMLIEIAWCWLRYQPDSTLSQWYEKRFGKGGKRQKRVGIVALARRLAVAIWHYLDHGVVPEGARLKGAAA

SEQ ID NO: 245488 - protein, 420 aa, unidentified
MAEVIYFTLPEQELRNSYPKLLAWMSSSYPWYSNEYVRQLESIPSPAPGTGILTRIIEWYSPLDESEIEEEQMMKQQNTKVKSEHTESATHGTKYIGVDISLEHLDIYFEGKYKRLTNNQGGIGQIHKIIQQQEAPVIVAYESTGWLSRILAEKLFMYGIKQACLNPSRVRDYARGIGFKAKTDRIDCETIARFAEQTRVKCNVSENATQLKIKEYQSAFNYYKQRSIQSKTAIAAYKNNSFIREQIQNSIDQDERQMETIQEKMYNLIEAEEELRDRYMFYQSIPGIGPRTASLLVSSMPELGQMTRPQVASLAGAAPYNRDSGKMRGKRRTKFGRKDVKSALYLVVISSLRMKDNPIKETYYRLKERGKPSKVAIIACVRKLIIHLNTATRKWLELKERTGIIGGYDEIPWDVKSTTK

SEQ ID NO: 245489 - protein, 354 aa, unidentified
MDLKYIGMDIHKETISIAVMKGDGKPVMESIIETKASTILQFIQGVRGDLHVTFEEGTWAAWLYDLLKPHVTELVVCDPRKNALMKEGNKSDKIDARKLADLLRGGYLRPVYHGENGLRTMKELARSYLTISKDLTRVMNRVKALYRSWGIGCAGQQVYAPRHRSEWLNKIGETGVRRRAEFFYQQLDALRVLHKTVRRDLLAESRKHGATKLLREIPSIGAIRAALLLALIQTPHRFRTKRQLWTYSGLAIDTRGSAQHRFVDGQLQRGKKPQQIRGLNQNHNHDMKAVFKSAATMASGGEGPFHDFYQGLLTKGMEPTMARLTLARKIAAITLTVWKKGAHFDAKQLKPQAA

SEQ ID NO: 245490 - protein, 335 aa, unidentified
MLYVGLDVHQRTTTMCILDDNGRRVKQQTIRGTWDDVIAVVRELEGPLSICFEATCGYGYLYDALRRIAGRVIVAHPGHLRLIFRSKRKNDRVDAEKLAKLLYLDEVPPAYVPSIDVRHWRQLIEYRRRVVDKRTRCKNAIRALLRGSGIAAPRGLWTRKGLAWLRALAWPDLACRVQRDLLLAELETFNQQVRTVTGVLDQLGRTHPGMTLLQTIPGVGARTAETIIAYVDDPGRFGRTRQLGSYFGLVPSQDASGGYNRLGHITKQGPATARKYLVEAAWQATLRSPTVRAYYQRILNDQPERRKIALVATAHYLLRCMHAMLRSGEVWREAA

SEQ ID NO: 245491 - protein, 370 aa, unidentified
MHQSSTLYLGMDVHKESIAVAYVSKDHDAEVVSLGTIGTRQCDIDQLVRKLQSKAKHLVFVYEAGPCGDWLYRYLTKKGYACWVVAPSLIPKKAGDRVKTDRRDAVQLARLVRSGALTPVYVPTVEDEAIRDLSRAREDIIGDRKAAKFRLQAFLLRQDIRYTGRATWGPAHLRWLSEVVCPTPAQQIVFQEYVRAVTEHTERLQRLEQELHDHVQTWRLQPVVEALQALRGVQFTVAVTLVAELGDLTRFQNPRQLMKYLGLIPSEYSSGERRRQGSITKAGNTHARRALLEGAWAYRYPAKVSRHIQLRLEQLPKPIQDLSWKAQVRLCKRFRRLLARGKHANQVVVAIARELAGFLWAIAKQVPVTP

SEQ ID NO: 245492 - protein, 323 aa, unidentified
MKYCGMDVHKESITACIMDRGGNIIRQHTFPYNEESIKAFLFGISNAEIEIAIEACGIWRGVYKLLKELGYKVRLANPNKTHNIACRKKTDKVDSRILADLLRTNYLPEVYIPDEEMLGLRDITRHKSNLTRLRAEIQAKIKGYLLRKGIKYGKIWNEKALSKLAEDDPDIKNLINVYWSLKEEEKEVMRRIRKIAKNMREANLLMSMPGIGEFSSLMILAEIGDIRRFESPKQLISYAGLCPGIYRSGNTERNVRNNAVNKWLKWIIYECSGRATMLDSRFQEYYYKIKQRKGFKTARRAVARKMLTIIWYMLTNEETYRNN

SEQ ID NO: 245493 - protein, 330 aa, unidentified
MKKWNVILGVDVSKLTLDISSFELGIHIKNDNCSAGFKVFQKWCKTHNINVQETLIVMEHTGGYEYRFIQFCEAFSIAYCRVPGLEIKSSMGITRGKSDESDSFRISEYGEQRIKTIEPSKPLDKNFLTLKQLLSFRKRLIRERAGLKSTVSERRHMYEIKTADAITHISKAKIKSNTKYIDQVEKEITEIIRSNEAMLLNYRIITSIKGIGKVNAWMTIAYTENFTSFPDGRTYAVYVGVLPFGHRSGTSIKRRTKVSKLANKELKQELNQAGKTAMTHDPEIRAYAQRKLKNKCFSLVLNNVKFKLILRMFSLVKRQELFVENYRRAA

SEQ ID NO: 245494 - protein, 400 aa, unidentified
MMTPDDIDVWVGLDVGKSAHHAHALDHDGNTLYDKPLKQDEKAIRTMLGKLSKHGRVLLVVDQPNTIGSLPLTVARNMGIAVAYLPGTAMRRTAQLLPGDAKTDRRDAHVIAWAALKLPETLRDAGPDDETLAALKLLAGHDEDLAHESTRHVNRLRSLLLQTHPAFERALKGERITRDATLALLERYGGPMGVKRAGIEDVKDWARSNGLRAGRIIDDMFKAIGEQTVTVPGTLMAETIIPSIAHDIKTIRDRRREVGRQVEKLLEDHPLLTVLTSMPGIGVRTASNILLGIGGDIANFKSSAHLAAYAGISPVTGQSGTSIKGERPSRRGNKRLKNALWQTAFVASTKHPPSVAYYKRKREQGKHHNAAIICLARRRCDVIYSMLKNGTLYQEPALVA

SEQ ID NO: 245495 - protein, 508 aa, unidentified
MPKRHPRGAPWLLVALIYTLEARGCFAKTPMRKLISISDRVLSITDQEQNMRKKSRRTKGMEEARSFEGMSKVNQNAAGVDIGATEIVACVSGGEGVQLVKAFGNYTLDLQSLAKWFDEHKVKTVALESTGVYWIALFEELERQGFECLLISSRSLRKVAGQKTDVEDAQWIQTLHSYGLLKGSFRPEGDLVALRTLLRHRNQLVEHRSPHIQHMQKALLQMNVQLSQAVTDVTGMTGQKIIRAIVAGIRDPEQLANLRETGCKHTAEEIAKALTGTWRAEHLYVLKQSLELYDFYTHQIEACDAEISHQYGLTRPDGESGELPLVPDKKRNAHSKNAPKAAREIRAHLYRINGVDLSLVDGMGISLAQTVTMEVGSNVGEKFPSEKHFCAWLGLAPKHDITGGKVVSNRTLKTRSRAGQAFRLAANSVKKADCPFGVMYRRLRSRLGPAQATVATAHAIARVVYKMLKYKVEYDPLSVNAYQKQYEEQQVKYMKKRAAKLGYQLVPS

SEQ ID NO: 245496 - protein, 357 aa, unidentified
MSSNMKKYIGLDVHKEAIAIAVLNGAGKLVMESIVETKASTLLDFLHGLRGELHVTLEEGTWAAWLYDVLKPHVEEIVVCNPRRNALLKEGSKSDKVDARKLAELLRGGLLRAVYHGENGLRTLRELARSYLTISKDQTRVMSRLKALYRSWGIPCSGTQVYAPRYREQWLSKIAQPGVRRRAELFYQQMDGLSVVRHTVRGELLAESRKHQAVKILRQIPLIGPLRAALLLALMQTPHRFRSKRQLWTYSGLGVETHDSAQHRYVDGQLQRSKKPQQIRGLNQNHNHEMKRIFKSTALSASRCAGPLQDFYAGLLARGMKPEMARLTLARKIAAITLTLWKKGGRFDAEHLKSQAA

SEQ ID NO: 245497 - protein, 366 aa, unidentified
MQEISTMQASGSDNFKGPQVTIGLDLGDRTSNYCVLNATGEILLEDKLPTTSQAMKQLFGRMLRSRIAMETSTHSPWVSRLLKELGHEVIVAHAQKVGLIVKSRKKDDRIDARTLARLARIDPQLLSPVQHRSAQAQIHLTEIRARAELVRARTALVNSARGLAKSYGERLRKCGTQQVCRELAMGLSAELRAALEPLLREIESLNEHIKEYDRRIEKMAKDTYPEVKLLKQVKGVGDLIALAYVLTIEDPHRFKKSRDAGCFVGLQPGRRNSGESEPQMHITKEGDRYLRTLLVQGAHYILGPFGEDSDLRRWGKKLAERGGKKAKRRAVVAVARKLAVLLHRLWVSGEVYEPLRNSKKAMSTAA

SEQ ID NO: 245498 - protein, 344 aa, unidentified
MNKYAGLDVSLEETAIAVVDESGRVVREAQVASEPEAIDAWFRTEAAGIVRLGLEAGPLSSWLYAGLKARGWPAVCIETRRLRAVTRAMPVKSDRKDAEAIAQVMRTGWYRAVHVKSLASQRLRVLLRHREILQAKRRDLENELRGTLKAFGLKLGKVGQRQFAARVLELVAGEPWLERLVRPMLAARAALGESFAELHALLLKIVRDDAVCRRFMTVPGIGAVNALAFKTGVDDPTRFRHSADVGPHFGLTPRRYQSGETEHIGPISKAGDAMVRSLLFEAAMALLHRVRAPSSLKRWARTLAKRVGTRKAAVAVARRLAVVMHRMWLDGTDFNPELGRATAR

SEQ ID NO: 245499 - protein, 360 aa, unidentified
MMIIGCDFHPRFQQIAFLDRESGEYGERRLMHPEEAAEFYRSLGGRQVSVGVEATGSFRWFQRLLAGLGQELLLGDPAAIHGAQPRKQKTDKRDARHLLRLLVEDRFPAVWQPPQANEQTRQLLLHRCRLVRLRTRMMNQLDALAKNEGLLMRKGWSRARREAIESLPLSGWDIQRRTDLLELLDELDRRVRPLDEAVEKAAWENRDARLLMSHPGVGPIVSLAYVLTIGEWQRFARGKHVASYLGLIPAEDSSSDKRRLGHISKQGNSLVRWLLVEAALNVQKFDVNWHRQYVRLSMTKHHGVAKVAIAHKLAIRLYWMLRSGDDYQQIKERGSHAGQSASTPGAVSGREGDWTPRLPS

SEQ ID NO: 245500 - protein, 341 aa, unidentified
MEKATIIGIDLAKRVFQVHAASKDGRPVLRKKVSRAQLLGFLAKQPPTIVAMEACATAHEWGRAISGLGHDVRLVPPIYVKPFVRRQKNDAADAEAIAEAASRPTMRFVALKTEEQQARSMIFRTRDLLVRQRTQLVNALRGHLAEHGIVAAQGLAKVKVLATAMRDTGSLHPLVRELGQRYLDHIARLDVEIAELDKRLRRPSKDDEAAKRLQSMPGMGPITAAAIEAFAPPMATFKRGRDFAAWLGLVPRQHTTGGKPRLGRTSKMGQRDIRRLLIIGAMTVVRWAVRKGAAKGSWLARMLAKKPRLVVAIALANKMARSVWAMLSKGEEYRGSALAPA

SEQ ID NO: 245501 - protein, 312 aa, unidentified
MDRIVVGIDVSKSRLDVCLLPSGEAFDVARDAGGVDLLVSRLQGRDVALIAIEATGGYETTVAASLASVGLPLVVVNPGQVRHYAQALGQKAKTDPIDAYVIARFAADTNPQVRPLADEATRLLQALIGRRRQIIEMIVAEGQRQRQNNDPRLNKSIARLKAALERELADIDTGINEHMRLSPAWRDKEDLLSSVPGIGPVTARMLIAELPELGLLSGRQVAALAGLAPYARQSGKWRGKSFVSGGRSRVKSALFLAAMAAARFNPALKAFRDRLVQAGKPKMVAIIAVARKLLTILNAIVRDNRPWNPQTH

SEQ ID NO: 245502 - protein, 342 aa, unidentified
MGEVSIIGLDLAKNVFQAHGAGSDGSVVFRRKLPRAQLLKFMAAQPPCVVAMEACASAHHWGRAIGDLGHEVRLIPPAYVKPFVKRQKNDMADAEAIAEAASRPTMRFVAVKSEAQQAAAMAYRTRDLLVRQRTQTINALRGHLAEQGIVAPTGPAHVGRLAVIIDGDDGMLPAAVRDLARLLLDQIAGLAAKIAGLDSELRKRVTNDDTAMRLTTIPGVGAVTAAAITTFAPPMETFSKGRDFAAWVGLTPRQHSSGGKDRLGRTSKMGQRDIRRLLIVGAVAVVRWAARKGAPEGSWLARMLARKPKMLVAVALANRMARTVWALLRKGEDYRDPVMAAA

SEQ ID NO: 245503 - protein, 315 aa, unidentified
MAMPVATAQPIVGVDVAKDELVIYHAQSDRLETIPNTKAEIKKWLRALPAPVDVAIEATNIYHQEFADLAYAQGCVIYMIGGYELSHYRKGVKVRAKTDALDARLLARYLNNEGHQLHPWTPPSPLYCRLISLFRRRAALVQARVSLKQSWSNEPLLKTAFENQIKAMQRLEMLLEKTIQTQLDAAGLGSQLKRCMKVEGIGLLSGARLITSFQRGDFRNADAFIAFLGLDLRISDSGKKKGRRCLSKRGDPEARRLMHNAAMSASRTAAWKGFYEALRARGLSTTEALVALARKLARVVFALLKNQSEYLPKSI

SEQ ID NO: 245504 - protein, 456 aa, unidentified
MAQKELSLQIVNPHAAGIDVGSRSYFVATGQDAGSVREFGVYTKDHLLMIGHLREAGVTTIAMESTGSYWQTLFNALQSAGFEVVLVNGSQTKNVKGKKTDVVDCMWIQKLHSLGLLSGSFILSDHLQQLRTYFSHRQHLIEQTSKYTNKMQKALRLTNIRLDIALNDIAGKSGMAIIKAILAGERDPHHLAALVSNRTKKSREEIAVSLQGQWRPDLLFELRACLSLYNMYEQAILECDRQLEAALLAHVPVNGQQAEQPSLSLKGSRRMKVKRGPSFNVQQIAFAYFRTDLYEIPCVSHTTILCLLTNMGDDLPKFASAKQFASWLRLVPDNKISGGRVISNKTPSGKNQIAHSLRQAANTIGNQKAHPLTPFFKRIAYRRGRIAAITATARKLAIIIWNMITKREPYRHFDYEKANQKNKIQQLKNIQHRLLKLNLNTDELKTLFQRTSISIT

SEQ ID NO: 245505 - protein, 345 aa, unidentified
MEPMYYIGLDVHKRKISYCVKDSGGKVYAEGSLPATRLDLDLWMKTLPQPWSAAMEATMFTGWIYDHLKPHAVALKVAHPLMLRAIAAAKKKNDRIDASKICDCLRCDFLPECYIASTAIRERRRTLRYRNLLVRQMVQMKNKIGTLLMEAGVSYNKQRLHKAGYFRELLATNPDINEGLVSLLRLCRETVVRLQKTESALVRSLECDSLLMDRVERLMTIPAVGPITALTWVLEVGEVQRFSSIKKAVSYCGLCGAEKSSANSVQRTPLSKQRNKHLQTTLIEAAKMAPRNSPELAMLYDKEKQKGNANRATLAVARKLVAYLMAVDRRQGAFQVVETSSGIAA

SEQ ID NO: 245506 - protein, 341 aa, unidentified
MWIIGCDYHPSFQRIAMMNTEGGEYRRLRLEHMGEAEQFYRGLAGEAVRVGMEASGHSRWFEALLAELGMELWIGHPSAIRAAAPRKQKTDARDAAHLLRLLESGQFEGMRIRVPTAEEWDVRQLVLHRHRLVEIRTRVKNQLRSMAVNQGMGRKPGLWSRKGQEQFRELRLLPWTSRRRQDNLELLEQLQERTAPLDQAVMEEAARRPEVARLQTHPGVGPITALAFVLTLGEAQRFAGGKQVASYLGLIPAEHSSGGRQRLGHITKQGNALVRGLLVEAAHSAVLRDAELGRCYHRLAMRKNRSIAMVAVARKLAVRLWWMWKRGLNYGEWRASGSHAG

SEQ ID NO: 245507 - protein, 410 aa, unidentified
MYKICCGIDVHKTFVVACIASTNDKGITSYESHRFSTYTSGLKTLLQWLIDRNCKDVCMESTGKYWIPVYNILEKGCSIVLAHPKYVKAIRGKKTDKKDAKWIADLFKHDLVAGSFMPPSDIRQLRDLMRYRFKLTCFKSSEKNRLQNCLTVSNIQLGNVVSDTFGKSAQAILDKILENPADTSFDLEPLVFKSLKKKLPELRDAIDGYITPEQAGKLKVIKTHYEDLESRKAELEELILALAAPYQQELAILQTAPGISSDFTAIGIISEIGTNMEAFPSAKHLCSWAGLTPTNNESAGKKKSVRVSKAGCYIKPLLVQCANAVIKSTKHPEMRNRYLRLKKRRGHKKAIIAIARMLLTALYHMLKNGENYNAELYRKSDLPPVDREITVEQALMIARNQGYKIKSATA

SEQ ID NO: 245508 - protein, 362 aa, unidentified
MSYHVGMDLHSDNVIVVMIDESERWVLKRKFQPSIPNILSTLEPYKESIVDIGIEATYNWYWLVDGLREVDYNVRLAHPPAIEGNSCKKQTNDYDDAFHLAHLLRMNNFPDAYIYPKEYRPLRDLMRKRLMLVRTRTQYLLSFINLVTRNLGIKIRGNQVKQLSDKDVEQLLEHEYLILSGKANISVMDHLKTEIRKLERAILKEARLKVEFKKLLTIPGIGIVIALTIAYEAGNFSRFKKPGHYVSYCRCVDSKRTSNGKKKGENNRKSGNKYLCWAYIEAANFAKRHCPYAEVYYKHKLKESGLPVLAIKALASKIARASYHVLTTDEPYKPEKVFERYKDEVQALISQKQKKGCGSKPR

SEQ ID NO: 245509 - protein, 417 aa, unidentified
MSTDVRFFVGIDWASETHQVCLVAADGKIIGERAFAHGGAGLAEMCGWLVTTSGEEPPKIAVAIEVPHGPIVEILLERRFQVDAVNPKQLDRFRDRFTVAGAKDDRRDAYVLGDALRTDRHCFRRLAVEDPVVIELREWSRMAEDLSQERNRLANRVREQLWRYYPQALELGDDLAADWFLDLWVLAPTPAKAIRLRKSRVTSLLKAHRIRRLEAAEVLRILHQKPLVVASGTIEAATAHITAVAARLKLVNQQIKQAHRRLDELADKLAEGREEDAPGQISKQRDVTILRSLPGVGRIVLATLLGEAAEPLRKRDYHALRTLSGVAPVTRRSGKRCVVLMRQACHLRLRTAVYHWARVAIQHDARSRARYAELRKRGHGHGRALRSVADRLLAVACAMLKTQSTFNPEHAAEAATA

SEQ ID NO: 245510 - protein, 424 aa, unidentified
MKVTYQTCCGVDVHKSFLVATIVKTTGGIEPSYQKKRFSTFNSSILEFKQWLLDNDCHDVCMESTGKYWVPVFNLLEDEINVVIANPKWVKAVKGNKDDTKDSKWIGDLFRLGLVKGSYIPCKIVRILREYTRYRYKLVSCRSSEKNRYQNALTVCNVALDSVVSDIFGKSSTSIIDYLLEQSGTSINHEEIASKLLRSLKSKEDAVIESVEGYQMTDTQKYRMRLVRAHMDYITAEINDVDKMIENMISSNPDFENAVRFLCTIPGVKRDSAITIISEIGTDMSQFSGSKRLCCWAGLTPDSNESAGKKKSVWITRAGVYLKPALVQCAHAAVKSDKSPYYKKKYEALVKRRGKKRAIIAIARMILTAIYQMLSTGEQWNPSDLYKIDMPVALVEKQKAKAIKQAKKLLQREGILPPDEPLAS

SEQ ID NO: 245511 - protein, 344 aa, unidentified
MEYFAGIDVSLEQSSVCVVDGAGRIVRETKVASEPEALVRFFRGLGIRVIRIGLEAGPLSQWLHAGLVAAGFEGVLLETRHVKAALSAMVNKTDRKDARGIAQLLRMGWFRPVHAKSPGAQEVRALLVARKLLQTKLLDVESSIRGILRGFGLKMGAVSKGRFVARVRELAAGHPMLERITEPMLRAREALRTEYARLHGEMLAIAKPDPVCRRLMTAPGVGALVALTFKSAVDDPGRFTRSRALGAYFGLTPKKYQSGEKDVTGAISRVGDPMVRVALYEAANIMLSRVTRFSSLKRWALDVAKRRGLKRAKVALARKLATVLHRIWIDGTTFHWGKQADAAV

SEQ ID NO: 245512 - protein, 315 aa, unidentified
MTGKSAEIFVGIDVSKTRLDISIGGGHEYWQVANEERGFMKLIERLRSLHPTLIVLEATGGLELPLVAEIASAGLPIAVVNPKRIRDFARSVGQLAKTDKLDARIIAQFAQMVRPGVRHLRTEEEEHLTALLTRRMQVIEMLTAEKNRSYSTRQVMKGVLQRHIEWLQDDLKKLDQTIAEFIQQSPLWSGKEKVLRSVPGIGPVTGATILANLPELGTLNRQKIAALVGVAPVNKDSGKKCGKRRVFGGRAVVRRTLYMAALSATKCNPKIKPFYENLICRGKEKKVALTACMRKLLVILNVMVKNNEVWRCDIA

SEQ ID NO: 245513 - protein, 415 aa, unidentified
MALKIVYKICCGIDVHKTFVVACIASTDSKGVTTYEHHRFSTYTKGLKDLLQWLLKHNCRDVCMESTGKYWIPVYNVLENDCTIVLAHPKYVKAIRGKKTDKKDARWIADLFKHDLVAGSFMPPADIRQLRDLMRYRFKLTCFMSSEKNRLQNCLTVSNIQLGNVVSDTFGKSAQAILDKLLENPADTSFDLEPLVYKSLKKKLPELRDAIDGYISPEQAGKLKVIKAHYENLESRKAELEELILALAAPYQQELAILQTAPGIRSDFTAIGIISEIGTNMETFPSAKHLCSWAGLTPTNNESAGKKKSVRVSKAGCYIKPLLVQCANAVVTSKKHPEIRNRYLRIKKRRGHKKAIIAIARMLLTALYHMLKNGENYNAELYRKSDQPPVDREITVEQAIIIARNQGYKIKSATA

SEQ ID NO: 245514 - protein, 348 aa, unidentified
MVVLGIDAHKRTHTVVAVDEAGRQLGVRVTKSTSTAAHLELVRWAGRFGPERRWAVEDCRHLSRRLEGDLLAAGEQIVRVPPKLMAGARRSARTYGKSDPIDALAVARAALREPGLPVARLEGPERELRLLVDHREDLVAERTRAINRLRWHLHELDPAWDPRPRSLAGARALGVVAARLAGMDGLVAKIAADLTARIAALTSDVKVLEREITARVRQLAPALLALPGVAELTAAKIVAETAGADRFRSKDAFARHNGTAPLPVWSGNRVRHRLARTGNRQLNCAIHRIAVTQKRCHPGAQAYLQRRISAGDTNLEALRALKRRLSDIVYRTLLADTAATAAQLGRAA

SEQ ID NO: 245515 - protein, 354 aa, unidentified
MTVYIGVDLHVRTQTVCWMDTADGEIHHHTLDHARDDLRAFYAQFPAPAVVGVESSGYSLWFHQLIEQAGHRLLVGHAYTIRQFARRRQKNNRRDAELLLDLLRRDEFPIVHRPAPASQDTLALLRYRHRLVRIRTVVKNGLQAVALNHQLQLGFRLFTPRGQQRFAALPLGRAYALQRQQAQVLLATLQAQIAAVEEELQRRAEADPRVVRLRTHPGVGRLTALAVVHTLEPVTRFDRARRIAAYCGLDPQEYSSGDTMRFGHISKQGSRLLRYLLVEAACSAVRHEEDLQRFYRRLRARKKPHAVAAVAVARKLVLRLYRMLREGIDYEQFRSRGRDARRARECTSPVTRPD

SEQ ID NO: 245516 - protein, 330 aa, unidentified
MKNYKEVVGIDVSKKTIDAFCYQAKVHKEFINDVVGYKSLLKWVSKYSKGSAVFYCFENTGYYSLKLALYLSNQSIVYVEESPLKIKRSSGIVKEKTDKLDAALIARYAWLYREELAPSSVKSMSHLELGRLLALRDQLVRNNAGLKGTLKEMKVLLSSPTTDSGCISLKRSIDYLTKQVKAVEDRIKEIISEDESMQKNYELLSSLKGVGLVVASQLIYHTGNFTRFASWRAFSSYCGTAPFEHRSGTSIYKRKQCHYLGDRKMKSLLSMVSVSAIQHDSELRQYYKRKVAEGKDKMLAINNVRNKLIARAFAVVKRGTPYVVLQQHAA

SEQ ID NO: 245517 - protein, 348 aa, unidentified
MKTTTYGLDLAKQVFQVHWVDVTTGEVRRKTLKRAQVSAFFARAPRGVVAMEACGSAHHWGRLLSSFGHEVKLIAAQFVRPFVKTNKTDAADAQAIWEAAQRPDMRFVAVKSEQQQAVLSLHRLREQWIKTRTMQANQIRSLLYEFGVVVPLGWRSLLKAATEQLTESTGGLVPELLREPLLVQLQALRDATARIGALEKQLASWQDSEPDCQRLRAIPGVGPLTATAVVASVGDASQFRSARQFAAALGLVPGQSGTGGRVKLLGISKRGDPYLRTLLILCARSLLISQSRRGRSGDPWLAELLERRPNNVVVVALANKMARTIWALLAHQRTFDAHWHRGVTQASA

SEQ ID NO: 245518 - protein, 327 aa, unidentified
MIRIALDIGSRKHRYAMSVDGKIEEDELVNERPVLLAFFKKLAKRDRDVRVVMEQTGVYHWEAALAAHAAGLEVVLISPRQSVNFARALNTRTKTDRVDARMLLQYLERMPFERWHPPGNHLMELRTIARYLAGLTDQLTATRNQLHACVAQGGAPKFVTHAHQLEIQRLEHRISKGRKEAMKRIEGDEQLKAQFDALDSMVGVAETAAIALVSELALLPTDLKAKACCAHAGLDVRHHESGSSVQKPGRLSKQGNAYLRRALYMPALVAVVHDPAAKAHYEQLVARGKKKLQALCAVMRKMLTAAWSMMKSKESYDGVKLYQAKTC

SEQ ID NO: 245519 - protein, 313 aa, unidentified
MSEPEYFVGIDVAADHLDVAVRPGAQVWGVRNDDEGISHLVGRLEPIAPSLVVLEATGGIEIPLVSALATAALPVVVVNPRQTRDFARATGRLAKTDKIDARILAQFAEAVRPSPRPLPDETTRELNDLLTRRRQLITMLTAERNRLGRARGRVREHIRAHVRWLEDALQTVDSELGERIRSTPVWQEKQDLLRTVPGIGPIVSSTLLASLPELGALNRKEIAALVGVAPFNRDSGTLRGKRTVWGGRAHVRSALYMGALAATRFNPVIRSFYNRLIAAGKPKKVALVACMRKLLVVLNAIVHQGTPWQPNLA

SEQ ID NO: 245520 - protein, 400 aa, unidentified
MVSIHKRVIGLDVHQAQITACAILEEADGETRIEQHQFGAFKKDRRALAVWAAALNPDEVVMESTGIYWKSPYAALEGVGIRVKVVNARHVKQVPGRKTDVCDAQWLATLARASLLRGSFVPSAKLRELRVISRQRQKLVSLLTSEKNRMHKENRMHKVLSDAGIRLGVVVSDLHGQSARAMIKAILDGQPPHEVLNLASRRLKASREELYDALQGELTASHGFVLDELLRPIEELEARIARFDARLLSELASEKNALALLQTLPGVNVIGAAMLLVESGSDMSVFGTSDRLASWVSICPGNHESAGKRKSGHIRKGNPYVRRRLCEFAHAARCTKSAFQFKFQSRIVRRGYKRAIVAVAHKMLRTIFFMLKRGEYYRDSATHYEQLTVQSATLLAGSRL

SEQ ID NO: 245521 - protein, 465 aa, unidentified
MAARKQKRMSAQVVEDEDYQLRYEVAAGIDVAKESAVVCVRMPPAAGRKHRTSHLQTVPATVPAIGELAAELTAAGVQMVSMEATSDYWRIWFAVLEEAGLAVQLVSSSQARNLPGRPKTDKEDARWIARLTEMGMLRSSFVPPPEIRALRVYTRHIWDLTADRTRYWQRLEKLLEDALCKLTSVISRLAGHQTARAVIEAMIAGERDPRVLAALGQGRMRNDKLPALAEALSGMRFGPQHAHAAASLLRSIDLLDAELKELQERVTAHLAAIPGSWGVDSGGVTGPDAGRAADAAALPAAERLDEIPGLGREAAMALIAEIGLDMSRFPTPEALVSWAGLTPTARQSGPRKGRGKKGHGNTYAKRIAVLAAYAAANTDTFPGERFRRLASRPGGGGRTKAGCAVGRSILVIVWHLLNDPAARYHDLGSDWHARHSDRSRKARNAKRQLEALGYDVTITLREDAA

SEQ ID NO: 245522 - protein, 415 aa, unidentified
MEEEQKARPCRYVALDIHKAYSVVAGVNRDGEEVLAPKRVEHVNLESWLPKNLLASDRVVIESTTNAWHVYDLLKPLVAEVLVANPIKVKQIAYARVKTDIRDTLILARLLAANLVPTVWVPPVHVRELRQLIAQRRRLVGMHTQLVNRMHSVSHRHHLGHPKGKRFQEKDMLWREKLGAMERFQLDLDLETKQYLKGQIDRITGELGRMSHAEPWASQMMYLMQIPGFGVVTGMTVLAAIGDITRFETPKALASYSGLTPGLEQSGVKLRGKGITKEGRRELRWAMVEVAQRAVKADPHWQRLFTELERRMHRNQAIVAIARHLLTVVWSVLSSNKAYRHYSDERIAYKYYTWSWQLDDSQRKGLTRPQFVRYYLMKLGIGASLQKVAIDPKHPHRLASQAEILEIMPDFQPPG

SEQ ID NO: 245523 - protein, 407 aa, unidentified
MRYYIGVDWADEEDVVWVANDAGDKVLSRSIPHTVAARGEWGRWLRERQAEGIEIWAAIERPHGRIVDFLLDHAVVVYPINPKSLDRARDRFRVGGAKSDPFDAQVLALFLRSDHAQLRPLYPSSEAAQELKGLTRDHRRQVKLQTRLLNQLTVTLKEYYPRALELCEDLTASWARDFLATYPTPAAAAALTKANWQAFARAHRLGATRAAALWEILQQPQLPLPAHVVRIKARLLQALLRELTPTLATVAEYRQAIDDFFAGMPGADIARSLPVGKSGTTVPSVWAELGDNLDRWTSFRDLQGYGGSVPETVRSGKHLVIHFRFACNTTLRAAIHQLAFLSLPHSPWARAYYDSYRARGHTHHEALRALGAKWLKIIFVLWKRQVPYSETHHLANIGRQHLRQKAA

SEQ ID NO: 245524 - protein, 321 aa, unidentified
MEKERVYVGIDVAKATMDMAVYPSGQQCSFRNDDGGIRKAVSYLKELAPALVVLEATGGIEIRLVAAIVEQGLPVAVANPRHIRNFARATGKLAKTDALDAQVIAHFAAAIKPTPRPLPDEQAQEFSAILSRRRQVVEMITAEKNRLGSATSSVVKGRIEEHIAWLERELGDIDKELRRGVKESSVWREKDRLLQSVPGVGPVLSATLLADLPELGALDRKQVAALAGLAPFNRDSGKLRGKRTIWGGRAKVRAVLYMATLAATRYNHVIKSFYLRLCAAGKHRKVALTACMRKLLTILNAIIKHRTPWDYTASQLIGPCS

SEQ ID NO: 245525 - protein, 399 aa, unidentified
MTPDDIDVWVGLDVGKSAHHAHALDHDGNTLYDKPLKQDEKAIRTMLGKLSKHGRVLLVVDQPNTIGSLPLTVARNMGIAVAYLPGTAMRRTAQLLPGDAKTDRRDAHVIAWAALKLPETLRDAGPDDETLAALKLLAGHDEDLAHESTRHVNRLRSLLLQTHPAFERALKGERITRDATLALLERYGGPMGVKRAGIEDVKDWARSNGLRAGRIIDDMFKAIGEQTVTVPGTLMAETIIPSIAHDIKTIRDRRREVGRQVEKLLEDHPLLTVLTSMPGIGVRTASNILLGIGGDIANFKSSAHLAAYAGISPVTGQSGTSIKGERPSRRGNKRLKNALCQTAFVASTKHPPSVAYYKRKREQGKHHNAAIICLARRRCDVIYSMLKNGTLYQEPALVA

SEQ ID NO: 245526 - protein, 388 aa, unidentified
MFKTVERPDAPAAIRMDIGAIFVSLELSRSTWLLTSVSPGAGEKMSQHATPAGDLRQLFECLAELKRKAMARTGKTYPIIVIQEAGLDGFWIHRALEREGIESHVVDAASIAVPRRRRRAKTDRIDGKTLLRTLMAFKRGEPRVCAMAKPPSVEEEDRRRLGRERKTLIAERVEHVNRIKGLLFTQGAIDYQPLRRDRRARLEALRTGIGDPLPARLKDLISRELDRLELLLAQIKAVEAERDALLAEQSRQAPAAAAMLLAFKGIGPEFATVLWLEGLFRSFANRRQVAAYAGLAPTPWRSGSIAREQGASKAGNPRLRATLIELAWLWRRHQPKSALTLWFEDRVKANGGRVKKALLVALARKLLVALWKYVTTGLVIEGAVMTTA

SEQ ID NO: 245527 - protein, 345 aa, unidentified
MTNMNYIGLDVHKKTISYCVKDAAGQVLQEGKVGSTRRELDCWIKTLPQPRTIAMEATIFTGWIYDHLLPHAEKVKVAHPLMLRAIAAAKKKNDKIDAGKIADCLRCDFLPECHMVSTEIRDRRRTLRYRHLLVRQMVQMKNRVSGLLMETGVEHNKQRLHKVGYFHELLSTNQEVHPCIRPLLKISRETIERCQKTEYALVSSLQRDPILADRIKRLRTIPGVGPITALTWALEIGDVSRFRTIKQAISYCGLCGEEKSSADKVMRMPLSKQRNKHIQHVLVEAAKLAPRQCYELALVHEKEMQKGNRNRATLAVARKMVAYLLAVDRQQRDFVPAEERQAGAV

SEQ ID NO: 245528 - protein, 315 aa, unidentified
MTNLKKSKTTINVGVDVGKDYLDIYIHEKNIHWQEENTELGVKKILNRLSRYNVERLVMEATGRYEFNIAQAAYAKKIPICIMKPLLIRKFAGAMDQLAKTDKIDARVIALFAVKMKPAITPRKSKNLIAIKDLIARRRQLMGLRTQELNRIKIMGKAIEVSCERILRCLDAEIKRMEDKLSKHVEDESEWAAKKLLLKTVPGVGDTLIYTLLGDLPELGDLNKNQVAALVGVAPVNKDSGRLRGKRRVQGGRANVRTVLYMATLSATQCNPVIKSFYKRLVAQGKHKKVAITACMRKFITILNAMVRDQVEWGL

SEQ ID NO: 245529 - protein, 420 aa, unidentified
MEVVHERCAGLDVHKKTVVACVLRPGPGGSVQRETRTFSTMLGALEALAAWLTEAEVTHIALEATGVYWKPLYNVLEGVGRWTILVVNPEHVKAISGRKTDRADAERLAFLVRHDLLQGSFIPERNQRELRELTRARTALVRERARVVQRLEKVLEGANIKLGAVVSDLLGVSGQRMLEAALQGVSDPDELADLAHPRLQPKRDLLVASLQGRLTRPLRFLAQQHLDHWRELDTRIAAFDDEIADQLRPFDELLARLDAIPGVGRRTAEVIATEIGTEVSAFPSDRQLAAWAGVSPGNRQSGGRRKTARTRHGNPWLKGALTEAAWAASRCRHGYLPAQYRRLAGRRGRKRALVAVAHSLVTIIYHLIAEGTQYQDLGTHYFDERERANRERRALAILHGLGYDVSLTPHPHTDAALEVA

SEQ ID NO: 245530 - protein, 434 aa, unidentified
MAKVINFEEIHANVAGIDIGSREIFVSIDGKQVVTFKTFTSDYHSCCKYLKENGIVSVAMEATGVYWMSLYSMLEQSGIDVCLVHPREVQQVKGRKTDVKDSQWIQKLYSAGLLQESIVAEGDLKELRLLTRERLDLIEMGSTYVNKMQKHLELMNIKLRNVISQIHGVSGIRMIKAILSGERDPEKLVLLCHESIQKKKREDVIKSLEGNYNESYLMLLKENLRLWEEHQGSIKNIESLIAKLLQKMNINNTHIEVTSPSKPSRHHNPDIKELHKTMVQMYDGVNLATIAGINDSTMLRLLGEVGKDMSRFPTKKHFISWLGLSPKNKQSGKMKKRLKCSSNNAGLIFRQSAQSLSISKDKAIGVFINRLKGRKGAKVAIKAGARKIAEAFYDALTKGIDYVEQGAIKYKEQLKQREIGLLNKLAKKHNFVFA

SEQ ID NO: 245531 - protein, 470 aa, unidentified
MPRRLVGIDLGIASRHSVRVLEADGRVVCRSSCVPTVESLSAVEQAALGGAAAGTKLAVVFEPTGPAWMPIAVFFARRGHAVYRVSSAKAADLRRFLRRHAKSNGIDAETLARMPLADPRGLQQLELPGPGAAALDRRVRACGRLTEAASKHKVRIKDLVRQLMPMTPLTGDLGKADLAVLERYADPRLLLAAGDGELTRLITTVSGHQQGLQRAGRWRAAAAAAVELYGGHPAVPYDELAAEVATEIRLLRAIQAELAIHAAAREQHYLQVDPGQLARSLPGFAEISAPVLVAAMGRPGRFRDGTKFKSYVGLAPRASETGETDRKGQPMSKAGPSQLRSAFVRAADTARRQDPQLARIYYLQMTERGATHLKACCVVAGHLAERAWTVLNRGTPYVICGNNGNPVTTAEAKAIIAEKWTVPEDVRKRRRSRKIAGKAPQAATTGPHRRGDPPRPRSSRHHGQPVKTAT

SEQ ID NO: 245532 - protein, 348 aa, unidentified
MVADEVDYVIGVDTHRDKHMLAAVTAPTGAVIAGEEVSADARGYRATLRFAARYAASRRAWAIEGSGSYGAGLARYLTQRGEIVLELSRTPRGERRLRGKDDALDAVRTARAALASRELTLPRAGQRREALRLLLLARRSAVDVRREALAQLRAVIVTAPDQLRQELRGLPVGKLLDRCRRLRQIRAAGADELATRLVLRSLALRIAAATSEAEQLERELLGHVRALAPALLDEPGVGPIVAAQLIVAWSHHGRLRSEAAFARLAGVAPVPASSGQTQRHRLSRGGDRQLNRALHTIALHRRQHDARTRDYIAQRIAEGKSRRDATRLLKRYLARHLYRLLQQQPAMT

SEQ ID NO: 245533 - protein, 335 aa, unidentified
MQIYGIDLAKEKFDVSFFDLTSKKVSNQPSHKVVKNNFKSIGRFLETLPSDAVLVAEHTGVYGDTLLKCCMDSNVKIAFVGGYVIHRYRATPDRAKTDVLDCALLREFGERYPDKLKYRKFPEEALYELRQLARHREMLVEQRKQLMTADKSEDCRPIRSLAVKRSMDRIKEMLDTEIAETEKEMLKVIDGHDSIHHNYEIVKSVNGVGLVTAVELLVKTDNFTKITTARQYAAYAGTAPYEKSSGKMDKGAHISKIGNRRSKTLLYICAESARLHNKEIKLYYERRTLIDKKPRHYVLNAIANKLLRIIFTLVEKGEFYDVNYIRQDPRLVKHN

SEQ ID NO: 245534 - protein, 393 aa, unidentified
MICVGIDVAKDKHDCVILNSEGKVLAGVFTIPNNADGFDTLLQKIHGCTSPDDKIKVGLEATGHYSYNILGFLLNQGLPTYVINPLHTNLFRKSMSLRKTKTDRVDAKTIAAMLMSNVDLKSYTDTAYHNEELKSLTRYRFDKVRERAQLKQSVSRLVTILFPELEKLVPTLHMSSVYALLIEFPGAKQIAEAHLTHLKSLLKDASKGRYGRDMATEIRDAAKRSIGSVMPAKSLELRHTIRLIRELDSEIKDIEAAIEAIMEELQSPITTIPGMGFRMAAMILAEIGDFSFFDSPDKILAYAGMSPSTYQSGHLSLAGTYSHMEKRGSRYLRYALYNATKYVCHWDPGFAAYLAKKRAEGKHYNVALSHAAKKLVRLIYALEKSRQPYRRAA

SEQ ID NO: 245535 - protein, 368 aa, unidentified
MMGWMAPLRHLGAKVLVDRKPPANREPSMNEITTVGLDLAKHVFQVHAVDAEGDTVLRKQLRRGQVLAFFSRLPRCLVGMEACATAHYWARELRALGHEVRLMPAQYVKAYVKRNKNDAADAEAICEAVGRPTMRFVPVKTAEQQAAVLLHRGRERLVRQRTMLVNALRAHLAEFGVIAPQGLRNVGRLIAIIRDDDDARLPGLARQVLQVLAVQIEQLEAAIAALEKRLMGWHKSNPVSQRLATIPGIGPIIATAIAAMVAEPSGFRSGREFAAWLGLVPRQNSTGGKNRLGGISKRGNQYLRRLLINGASANLLRSKATNADPWVIGLRRRRPSLVVAVALANKTARIAWAVMHRQENYQRMATAA

SEQ ID NO: 245536 - protein, 426 aa, unidentified
MKSTQNQKISQIKFSTLVVGIDVAKETHYARAFDFRGMELAKLLRFSNTAEGYQKLEEWTQEICRQRQKTDIIVGFEPTGHYWFTLGDHLKSHGHRLAIVNPFHVKRSKELDDNSPSKSDSKDPKTIAMLVKDGRYREVYIPEGLYQEMRVVVAERDRLVQRLITINNNVSRWIDIHFPEYPTVFKDWRGQAGFLTLRHFPTPEKIASAGAEKIEAIWKRYMRRTAGLKRAQHLVEAAQSSIGRQTGLVAAEAGLQNLLTEYELYRQQYADLEQLMLDLLQQVPNGEKLLAIKGVGLVTAATFVGEVGDISRFQDPRQIQKLAGLNLVENSSGKHQGKTRISHRGRKRLRHGLFMAMITILAKNQEFRMLHQKNLTREKNPLTKMQSIIALCGKLIRVFYGLLRTGTDYSAEKMLGDIERGMKTAA

SEQ ID NO: 245537 - protein, 341 aa, unidentified
MSLYAGLDVSVKTTAICVVDRNGRVLLETTVDSSPDAIAERLREFDQPLERVGLEAGPLSQWIYGGLVDIGLAAICVETRHMHAALSARINKTDRNDARGIAQMMRVGLFKAVHVKTPASQHRRLLLTSRKLLQRKIYDIENDLRGSLRNFGLKVGVVGAVKFEGRIRELVADHPVVAAIVGPLLEARAVLRVQFTKLHRMLLALVRTDPICRRLMSAPGVGPIVALTFRTCVDNPARFSRSKCVGAHYGLTPRLYQSGEVARTGRISRCGDVMLRSSLYEAALVVLTRPGRWNPLKAWGIAVARRRGMQKAIVAVARKLAIVLHRMWRDDTDFRWTAVTA

SEQ ID NO: 245538 - protein, 346 aa, unidentified
MDHIAIDLGSRESQICVRAGDGTIQEERRLGTRSLGKFLTGRPKSRVVVEACAEAFVVADAALAAGHETVVVPAALAPSLGVGDRGVKNDTRDARNLSEASCRMSKLPTVHIPAQASRDRKAMCNMRESLIQARTKLINSVRGWVRPQGLGVVRSGAAYTFPLRLKAHVTERGGEIPSYVEHVLLAIENLSKEVIALDDDVEKAAKADATCQLMMSAPGVGPVTAMRFTAAIDQVDRFPNAHRLESYLGLTPGERSSSERKRKTGLTKAGPAKLRWVLVQAAWVARRCYKDDPIVLWSLEVEKRRGKQVAVTALARRLAGVLYAMWRDGKRYDKHHQAMRPAAAAV

SEQ ID NO: 245539 - protein, 352 aa, unidentified
MYYAGLDLHKRYFTLCVLTSEGQVVQDHRRLPADLEPLQSILRDLGGPVTVTVEATLQWAWLHDRLTQAGFAVCVAHPQQVKLISHARCKTDRIDARKLAELTRANLLPTIWVPPPEVRARRQLVRARATLVRLRTRAKNRIHACLAAENCRVPTTDLFGWGGRAWLAAVALPPEVRREIQVQLALITALEEQLRGYDGEVKRLAAHEPAARLLQTIPGVGPFGALLLLAEIGSIGRFGSSHELAAYAGLVPSTRSSGGKTAHGSVARAGSGWLKWILIEAVQTHKQVPGPVRWHYERLLQAKGKPKATVAAARKLCTYIYWMLREQQPYSEWLAQETKRAGRPMQRMASSA

SEQ ID NO: 245540 - protein, 336 aa, unidentified
MKYYSGIDLHWDNCYITTIDDTGAIVKQQRVDNNREDIMNYFGSLPGTHIAVVESTTGWYWLNDLLEELKIELVLAHAKYLKAISYAKVKTDKVDAHTLATLLRLGLIPKAHKISKHLRDLRDTMRARLRMVHKHTACILSANTIGVKFNHPETFSEPYQLQLSLLEQQQALLAEHILTLEKSLRPHLIPNNDIQHLLYVPGIGPISAFTLYLEIDGIERFPSDKHFLSYCRLVPAAENSNRRIHQRSSKDGNKYLKIAFSDIAVHAIQYYPEIKAFYQKMLRRTNKHVARTIVAKELAKIVYYILKNKSPYKGFKGLPISRQKSLQWPRMISPDA

SEQ ID NO: 245541 - protein, 408 aa, unidentified
MAMEVVHDRCCGLDVHKKTVVACVVTPEGRQTRTFGTMTDDLETLAAWLEERGVTHVAMESTGVFWKPVHNVLETSELELLVVNAQHMKAVPGRKTDVKDAEWIADLLRHGLLRASYVPSREERELRELVRYRKSLIRERAAEVNRVQKVLEGANIKLASVASDVMGKSGRAMVEALSTGATDPIALAALARGKLQDKQGELERALRGVVGAHQRMVLATQLRHITYLDEEIERLSGEIVERQRPFADALERLQTIPGVGLRTAEGILAEVGPDMSRFPTAGHLASWAGVCPGQNESAGKRKSGRTRKGCVSLRESLTEAARAAGRTRRTYLSAQYHRIAARRGAKRAAVAVAHTILVITHHLLRDGTTYEDLGANYFDERDKTGTIKRAVARISRLGYDVTLVPKAA

SEQ ID NO: 245542 - protein, 412 aa, unidentified
MYYVGIDIAKRTHVAVIMNEDNTLKVKPFSFENDKSGFKKLLIHLQTLCCDLSDIVIGMEATGLLFENLYRYLQSLDYNVVLLNPYQTAKFREMDTMKRVKNDNIDSVMIAALLKSGRFSEGYVSQEQLQSLRELYRHRNSIENQLKSLKRQTSTILTVVFPELETVIRDPFNVTGLALIEKYPTAKHYHHASVERILKTFRGIKGNNFNRAKAQALLNASKNSIYSGIASEARALNIRMNIAQIRLLQTQLDEILLTMQSLFIDTQVKQEDQEVMEELIDNLRTIPGVADKTILALLAECGNLDRFYAPKALIGFLGLYPTLSQSGDSTRNGRLAKRGASLAKKAIYLASISAIRHNDEMRTIYMNYRSKGRAKKEAIIIVARKLLTIIYTIYTRNVPYDPQRVFVAKPNQ

SEQ ID NO: 245543 - protein, 374 aa, unidentified
MADIIEAFVAFDTSKLRNAVAIAEAGRTGEVRFLGEIENTGAAVAKLVRKLAGKYGRLTFCYEAGPTGYGLYRQIKSLGHECIVVAPSRILKKPGERVKTNRRDAVSLVKQLRGGDLTAVWVPDPRHEAMRDLTRAREVAVEDLRCKRQQVSAFLLRQGLHYPGERTWTKAHRNWLMSQKLEYAEHRIAFEEMLLAMRQAQERIERLEQAIRVAVPDWSLAEVVTALMAMRGIDFISATAFLAEIGDLSRFPTPRELMGYLGLVPSEASTGDTIKRGPITKAGNRRARRILVECSWSYQHPPRVGKEKQERVAAAPQAVREIAWKAQCRLSARYRALTRKGKLKTVAVTAVARELSAFIWAINRQIANPRAVAR

SEQ ID NO: 245544 - protein, 417 aa, unidentified
MEKGEKASTCRYIGLDIHKYYSVVAGVDRDGKEVLSACRVEHMELEDWLKKHLLPTDRVVIESTTNAWHVYDLLEPLVAEVQVANPIKVKQIACARVKTDKKDTFILARLLAANLVPTVWVPPMHVRELRQMVSHRRRLAGMHTQVVNRMHSVAHRHHLSHPKGKDFQEKNTGWQKDGSLSRLEKMQLELDMEMREHLEKQVGRMTRELARLSHEEPWASDMLYLMQVPGCGVVTGMTILVAIGDITRFETPKALASYSGLVPGLEQSGVKLRGKGITKEGRKELRWVMVEVAWRAVKADPHWKKYFETLQKRMHKNQAIVAIARHLLTMVWYVMTRHEPYSHYSPERIAYKYLTWAWALDTEQRQGMTRPQFARYYLMRLGIGNELERVALNPKFPYRLASMEDVLELHPELRPPE

SEQ ID NO: 245545 - protein, 341 aa, unidentified
MMIIGCDFHPRFQQIAFVDQETGEYGERRLSHPEEAEQFYRSLAGRQVRLGAEATGNFRWFRLLMQELGHEFLLGDATAIRAACPRKQKTDKRDARHILKLLVEDRFPDVWQPPEENENLRQLLMHRCRMVRMRTRLKNQLDSMAKNEGLLSKRVWCPMRRNQIEALPLAGWNVERRKDLIALLEEMNRRIEPLDEAVNKAAEQNPEACLLMTHPGVGPVVSLAYVLTIGNWERFPRGKQVGSYLGLIPVEESSSDKRRLGHISKQGNTLLRWLLVEAASTAQRYDTSWHRQYLRLSMTKHHGVAKVAIAHKLAVRLYWMLRSGEDYSKVMERGSHVGQSE

SEQ ID NO: 245546 - protein, 351 aa, unidentified
MVVVGADVHKRTHTFVAVNQVGKQVGQLTVAATTPGHLKALGWARREFGAELIWAVEDCRHLSARLERDLLSAGQQVVRVPPKMMAEQRRTARTRGKSDPIDALAVARAYLREPGLPVASHDEVSREAKLLVDRREALVNTRTRTINSLLWRVHELDPAMAPKPRSLDLAKHQQALRSWLVTLQGVVAEMALDELDDVIALTARVKAFDKRIAVLARRDAPELLALPGCGELSAAKLLGESAGITRFSDEAKFARHGGLAPIPVWSGNTAGRVRMTRSGNRQINCAIHRIAITQLRLSNSMGRAYYDKKLAEGKTTTEALRCLKRRIARTVFHRLTSDHDNRHTACLPAAA

SEQ ID NO: 245547 - protein, 457 aa, unidentified
MSIRIIGIDLAVSAKHKAMVLDPASNKFLGKQISFRSCPNDLERVLKRARKDAPEEVQLIAVMEATGMAWYPVGVYLHRHGVTVYRVNGQKTKDLRRVFWKHAGSDRIDCKVLAHLYQLDPDRLDCWRPACGEQLALQRACRAFARWRELGTALQNRLRAYDQWAWDGLQKLVPADAQDWMRLHWYSPWRVQEAGVNQLTAAWQSTNPRKPVDTDWITGWVGRAEQMTTLYGSEEMVDYDDLQAIMRHSLRLRDQYAQERACLTQERIQPLYHKLFPDCFLESIQGIGPQSAATYMAFIQDIDRFPAVEKFRLWCGIVPASKQSGYAEAKGLRITQAGPNLIKATLYLNAEVARQWDMQIAAIYHRQMVEYGKHHNQAVCACASHLASRIYAILKQQRPYQLRDLENNPLSKMESRTLCKELRVPDEVRKRNNKRFRRAQAEARKDSRPMKQRTLGK

SEQ ID NO: 245548 - protein, 348 aa, unidentified
MPKYSTAFGMDVHLRSTTVCALDADTGEAVTRRFPGNPWGEIAGWMDGFPGPSLAAYESGYLGFAPQRELAGLGVECVVAAVSKIPRSAADSASKNDRNDAARMAKAILAHDISPVWIPSPEVEGIRDLAGAYGGTTPAGNPRKYWTYDFLRWLDKVRPEDDGGVRTLAALRNEVEAAAEARADLLSEYRAAVDASPIAAEVAALQSIKGCAFALAAAFSAEVGDFTRFRSGRQVTAYFGLAPSQRSSGDSVRLGGISGAGNALVRKLAVEGSWCYAAARHQPKLMPRDTGVPLEIRMHGRKGSDRLLRRREEMLARGMPAAKANAATAAELVRWLWALGMMCREGAE

SEQ ID NO: 245549 - protein, 356 aa, unidentified
MINRSQLDFTGQPIYAGLDVHKKSWSVSIFTKHGEYKSFSQPPQVETLAHYLRHHFPGALYYAVYEAGYCGFWIHDQLVKEGVHCMVVNPADVPTKNKEQRRKRDRVDCRKLARGLRNNELEGIYVPPRAKLEDRSLIRTRLSMGRKQSRCKNQIKSMLLFYGVEIPEEKEMGHWSRRFIQWIEGIRMERASGDLALKFHLEELSHLRQILAELNRAILALSRTEEYRPGVSLLRTVPGISTLTAMILLLELGEITRFRSIDQLCSYVGLIPDTQSSGEKEQVGGVTQRRHSHLRWLLIEASWVGVRKDPALMEAFDQYGKRMRKSKAIIKIARKLLNRVRYVLKNQAEYVPCVIE

SEQ ID NO: 245550 - protein, 340 aa, unidentified
MKLYGAIDLHSTNHVMVVIDEQDRVVYQKRLPNDLALILKELSVYQSELEGIVVESTYNWYWLVDGLMEQGYKVHLANTAAIQQYEGLKYTDDHSDARWLAHLLRLEVLPEGYIYPRADRPVRDLLRKRSQLVRQRTTNLLSIQNLLTRNTGSSLSANQIKGLDGQQVDELLPNGDLALAVKANLSVMCSAEEQTELLERTVTQRVKLRPQFSFLKTVPGIGQILALTIMLETGDIRRFCSVGNFASYCRCVGSQKISNGKKKGKGNTKNGNKYLAWAFVEAAHFAIQFNSKVKSFYQRKKTKTKVVVAIKAVAHKLCRACYYIMRDRVAFDVSKAFGQK

SEQ ID NO: 245551 - protein, 354 aa, unidentified
MAHATAAQPITVGVDTHLDSHVAHANDQLGRRVGTRSVPTTPTGYQDLLAWARGLGQPIAWGVEGTGSYGAALARFLAANGQVVVEVNRPDRQARRRRGKSDPLDAEAAARAVQAGQATVAPKAGTGQVEMIRSLRVARQTAIRARTQTINALKALVVTAPAELREQLRDLPTATLVAAAAALVPGPITSPLAAAMLALGTLAHRHQALSREIKALTAELDRLTATAAPKLVALFGIGQDNAGALLVAAGDNPQRLRSEACFAMLCGSSPIPASSGKTVRHRLNRGGDRQANAALYRIVLVRLRYHQPTKDYLTRRLAEGKPKNEIIRCLKRYIAREVFATLQPLRQEFLTPPT

SEQ ID NO: 245552 - protein, 384 aa, unidentified
MYIVGIDIGKNNHEATIIDDKGTIIGKSIKFSNSHNGADKLIEHIAKNIGNSEVIFGLEATGHYWLSLYSFLLGKGYTVNVINPIQSDSFRNLYIRQTKNDTKDSFIIAEVIRFGKYTNTKLADEKVLALRQLCRYRSYLSCEIGQLKCKIITVLDQVFPEYEKLFSDTWGTSSKKLLEEYQTPEDLLSIDIAELASILKKLSRGQLGYDKAEKIHEAAKNTFGIKIAQDAFKFQLKQLIDQVVFLEIQIKDLDEKIDSYYKEFDCHLTSLPGIGSVTAAAILSEIGDIKIFKDASSLVAYAGIDPTVKQSGQFLANNNKMSKRGSPYLRRALFLAASNAVLYDPVLNEYYNKKRNEGKHHLTAVGAVARKLTYIVFRFINTFT

SEQ ID NO: 245553 - protein, 392 aa, unidentified
MALRLIARSCVRKTCQNGERAVLTNRPSLDLSPCALKGLRACRGAWDRSGVLPQPEQLHGLRARTEQGREWMMAQNDRVVVGIDVAKDKVDACIRSLSQRQTFPSRAEGRRKLIAWLRKHKVDKAVMEASGGYERDWAKALRGACFEVWIVDPKRVRNFARSAGRLAKNDVIDAEMIAWFAETFKEAPTQTHDVAREELAALVKARKAVIDLKTRLQSQNEHAVPGAVQKAHARVLKGLDAEIAKLEDAIVITVKATPAFAARAEIIESVPGLAETASAVLLAGLPELGTVRQEIAAALLGAAPYDDDSGKRRGERHIKGGRRWVRNALYMPCLGAATQSNPVLKAFYQRLIARGKEPKVALIACMRKLIVILNTMIARGQKWDPSRRFAVN

SEQ ID NO: 245554 - protein, 340 aa, unidentified
MNATTYGLDIAKRVFQLYWVDAQTGEIANRKFGRDDLIAFLARRPAGRVALEACGSAHWWARKIRALGHEVVLLHAQFIRPFVQTNKTDAADARAIWTAVQQPGMRTVAAKTEDQQVMLSLHRMRSLLVKFRTMQINQLRGLLYEFGVTFRAGRVAGLDEIRERMAELEDTLPRSILLNLLEQLRRINLFEEDINQLKKRIGAWQKHEAACRAISEVPGIGRLTATALVATIGDAKTFRSGREFAAYLGLVPRQNGTGGKIRLGSISRRGDPYLRTLLIHGARSVLCHTKVPTAWQEAIQVRRPANVATVAMANKMARIAWAILAHGTSYEAHHVSNRPA

SEQ ID NO: 245555 - protein, 368 aa, unidentified
MVPTKPRLGRKEPNILIIGCDYHPGFQQIARVDTGTGEFQEHRLEHSLEAEKFYRGLKEQGHKVRVGMEASGQARWFERLLAELQFELWIGDAAEIRSKRVRKQKTDRRDAQLLLRLLLEDRFPRIWVASWENRDVRQLLWHRHRMVQMRTRLMNQLQAVALNEGVRRKKGLWREAGRKQLETFTLAPWASRRRRDLLEMLDRLTPVIAELTQAVEQEADKCPAAQRLTTHPGVGPLTALAFVLIIGEAERFRCGKQVASYLGLVPGEESSGDRQRLGHISKQGNKLLRFLMVEAAQVTVRSDPGWRCKYFHLALRRGRKIAKVAMARRLAVRLYWIWRKQWDYEQWKQFGPYAGQPGTGVGVQSNTE

SEQ ID NO: 245556 - protein, 354 aa, unidentified
MTSTKYIGMDVHKESISIAVMNAAGKIVMECVIETKANMILQCIDGLHGDLHVTFEEGTSAAWLYDLLKPHVTELIVCDPRKNASMREDSQNDKIDARRLAELLRIDHLSPVYHGEHGLRTLKELVRSYLTVTKDLVRVKTRVKAIYRSWAIPCNGKEVYGACHRAEWLGKITESGVRRRAEFYYQQLDALRVLRQGVRRELLAESKKQKAWKRLCQIPAIGPIRAAVLLGILQTPHRFRTKRPLWKYSGLAIETCSSADHRSIHGQLQRSKKNSVRGLNQNCNHDLKNLFKGAAIVASSKPGPFQEFYAALLAKGLRPEMARLTLARKIATIVLIVWKKGVCFDAQHLKPQTA

SEQ ID NO: 245557 - protein, 356 aa, unidentified
MSNEKDNPISFKGQHFYIGLDVHKKSWAVNIRNNGIRLKAFSMDPYPEKLKRFLEENYPEGTYHAVYEVGFCGFWICRKLREMDIDCIVVNPADVPTGHKEKDRKTDPVDANKLARELEKGGLKCIYIPDEADQYLRSLCRLYRQSVQDTTRVKNRIKGHLYFIGVELPRHTSQWSGKFINYLKLLPLDNGPAKECLMISVDELEKRRQTTVHILIKLREYISDHRDPSVFQNLLTVPGVGLKTALVLYTEIIDMKRFRTLDQLKSFVGLVPSTDSSGDNDWVRGLTYRKNKHLKHVIIEAAWVAIRHDPALLHKYNKLIVRMKAQNAIVKIAVKLLDRIRYVWNNNCPYVKGVIQ

SEQ ID NO: 245558 - protein, 367 aa, unidentified
MTKSITVAVQQTRDFAEKKYTVGLDLGDRWSWYCVLDERGDVVFEHKLSTTPKALREVFGAMPHSRVALETGTHSPWVSRLMKELGHEVIVAQASKVRLIGESRKKDDRLDARTLARLARIDPELLGPIQHRSARAQADLIMIRARAGLVRARTALINAARGLTKSYGERLRGCNPRNMDAEKRKGLSAELQLALEPLLRAIESLSQQILDFNERIEQMAGDGYPEVARLRQVKGVGTLIALTYVLTLEDPQRFRKSREAGCYVGLQPGRRNSGSSTPQLHISKEGDAYLRTLLVQGAQHILGPFGVDSDLRRWGLKLAERGGKNGKKRAVIAVARKLAVLLHRLWVSGEAYEPLRNQRAVELPAAA

SEQ ID NO: 245559 - protein, 342 aa, unidentified
MDKITRISIDTSKYVFTLHGSDREGRAVLRRNVRRQDLVGFFEKLKPLEVAMEACGGSHHWGRTLQALGHRVRLIPPQYVKPFVKRSKNDRNDAQAISEAANRPEPRDVPVKSAGVQAEAMLLSVRELLMHQRTQLINALRGHATEFGLTAAKGDKGFAELRAEIATVPDTVLPAAAGEALQLLGGEIDRIAARLAQIDKLMTRRHRASEASRRLGHIPGVGLVGALSFATRVDASQFRSGRHFAAWLGLVPKQHSTGGKTRLGAISRAGDERLRQLLVLGATAVIRHAKPGSPNASPWLLKLLERKPRKLAAVALANKMARIIWAMLARGEDYRRPDQVTG

SEQ ID NO: 245560 - protein, 471 aa, unidentified
MGKGSGGGGTTRGDRRRNARRERLRGLLPRDGAVIGIDLAEDKQAIAVVDHDVRVLARKTVRVKAFRLGEALDWAVAQARAKGFSAVAVACEPTGPRWLQVQRLCAERGLPLVCIQPLVSHIAREQQDYTTHKSDEADCVMIARLAIELHCYIPEELDESWAHLRHLGRRRAQLITAATASVQRIRDFLSVAWPTVAETCAYPLESTTWLAAVQVVTSRCGGQPARLAEMGPEAFTAAVRGAQRGWGGQKAWGPICRRVFAALTDTEGVVVSCRRGLLRRCADELGDLQRTRAQLRAVEADMVAVLGELGLSRLGDIPGLSAVGAAAILAETGDPRRYDSSSSLVKHAGLSPAENASGAFAGQAHISRRGRPGLRLAVWRAVWPMLQYNPVMAAKYAAMTRAAGAAADDAAAADPGSRQVSAAAAAARARRAKARVACAASLLRWIYSMIVHDTRWDAAAAGGAACQPEAA

SEQ ID NO: 245561 - protein, 342 aa, unidentified
MYYIGLDVHKKTISYCVKEVSGQIHSEGALQATRAELDSWMKTLPQPWAAAMEATIFTGWIYDHLLPHAAELKVAHPLMLRAIALAKKKNDRIDAGKIADSLRCDFLPECHMASTAIRERRQTLRYRNLLVRQAVQLKNKISGLLMETGVSYNRQKLHKAGYFRELMATNQDVTARLRPLLKLCREALERSQKTEGALVRSLSRDPLLAQRVERLKTIPAVGPITALTWALEIGDVKRFPSLKQVISYCGLCGDEKSSANIAKRTRLSKQRNKHLQTVLVEAAKMAPRHSADLALIYEKEKQNGNANRATLAVARKIVAYLLAVDRGERDFVALENYKRTAA

SEQ ID NO: 245562 - protein, 311 aa, unidentified
MDEIIIDKGCGLDVHKETVVACVMGSGIKKEIRTFSTKTNDLLRLKTWLSGLGITHIAMESTGPYWKPVFNVLEDGFTLILANARHIKNVPGRKTDVKDSEWICRLLRSGLLSASFVPPQGIRELRDLTRYRRKLTQALASEKNRIQKVLEDANVKISSVLSDTFGVSGSQMIEAIMEGKLQEEGIADLAKGKLRSKKEEIREALVGYFHDHHRFMIRASLEHIKHLEKLISDLDHETKKKLAQYQKEYDLLQTIPGVKEQGAAAIIAEIGADMDIFPSEGHLSTWAGMSPGNNESAGKKKAERQPTAIRI

SEQ ID NO: 245563 - protein, 349 aa, unidentified
MLADEMDYVVGVDTHRDQHVLAVVVSPSGAVLAQQSVRASARGYAQAVRFVERYSGGRRVWAVEGAGHYGAGLARHLSSHGETVLEIGRGRRDEQRLRGKDDSLDAIRAARTALASRTLTLPRAGERREALRLLLLARRSAVDVRREALVQLRSVIVTCPDRLREQLRGLPGQRLIVRCVRLRRSSPGTPDELASKLVLRSLARRVEAATKEAAELEREILAHVRALAPRLLEEPGVGPIVAAQLIVTWSHPGRVRSEAAFARLAGVAPIPASSGQTIRHRLSRGGDRQLNCALHTVILHRRQHDPATKDYIARRLAEGKTTRDAVRSLKRYLARHLYRTLNAETALMT

SEQ ID NO: 245564 - protein, 317 aa, unidentified
MNSKNNQNEINVGVDTGKTQLDIYIRPLDIYFVVSNDEIGIEEAIIKIKMHKVTRVVIEATGRLEQAFIMACAKAKIPFVIANPVRIKRFAGVINQKAKTDKLDAKLIAHYAEMVKPELSKLKAEDIRLMSDLLSRRRQLMGLQTMEKNRLQIMPKEITSSINPVLTVLKNQLEKIDNKLHKLIESCDDYKIKNDIVQSVPGVGNVVAFNLISEMPELGYITNNEASALVGVAPFNRESGTYKGKRMIRGGRAQIRTAMYMAMMSAIQCNPVFKAKYQRLVAAGKPKKVAIIACIRKLVITLNSMVRDGVYWDPQMN

SEQ ID NO: 245565 - protein, 343 aa, unidentified
MDYFAGLDVSVKETSICIVDDAGKIVREVRVASEPEALLQVLTNTIYRFKRVGLEAGPLSQWLFSVLAEAGLPVICVETRHMRAVLKAQINKTDRNDARGIAQMMRVRLYRPVHVKTLRSQKLRMLLTHRKLLQSKAIAIENDLRATLRNFGLKVGMVGTVKFEARIKELVEDLPDLAILVEPLLVVRRVLREQLGILHRRVLAVVRDDEVCRRLMTIPGVGPVVALTYRVTVDVPARFRNSKAVGAVFGLTPAKDQSGERDRSGAISRCGDEMMRVMLYEAAQIMLLRSAKWSWLKAWAMKIARHRGMKKAIVALARRLAVIMHRMWVDGTEFRWTREVAAA

SEQ ID NO: 245566 - protein, 344 aa, unidentified
MSNLDTCGIEVSAKELVVRLRRQEDLEPLRNFTNTPEGHLIILRYLRRAGRVVRVCMESTGLYGLDLALALSGQEGIEVMVANPRAVRHFAHALMKRSKNDQIDAGVLEQFAAHMPFQPWERPSPTSLALHALARRLRELVEMQTAEKNRQHAAGLSQAIPAVVRRDLARSLRAQERAIERLTRQARKLIAQDPQLSERFELLDRVPGIGETSAVQLLGELGVLAPDLEARQWVAYAGLDPRDYNSGTSVHKKPRISKAGNKHLRHALFMPALVAVQHDPHLGAFYQHLLAKGKFKMQALVAVMRKLLHALHAMFKTHQPYDGSQLFRLNPAPAQEVTHVLVAC

SEQ ID NO: 245567 - protein, 426 aa, unidentified
MWDAKRRVLKIKSLKHGIIQDKRGNVMRAVFGIDVSKTSSEVAILVNGEKVHGYTILNDAFGFNRLLGDLKTVHNPEIIFEATGVYSRRLQAFLEEYGYAYTRLNPLEAKKQLDSLRVRKTDKIDAEKLAKSQLVHNRKPTYVQEEVYQHLRDLSRFYQNLTEDLVRAKNRLHKVLQITFPELENLLSTPTGEQYWNLVMAFPCKEFVLRLSQSDLCEIIRQSTSKRISEKRIAYLTDKLIKLAKQSFCAVKKNSPMLEEVRYYAQELLRLSERRQVVLNDMVTLAQPLPEYDILRSIPGIAETTATSIIGELGDIRRFQSTNQINAFIGIDLRHYESGNFLAKEHITKRGNPYARKILFKCIHNIASASHTNPCHIADFYEKRKRQSTIASTKPHAIASIHRLIRTMYYLITHNKLYDYSLTQNR

SEQ ID NO: 245568 - protein, 405 aa, unidentified
MEIIIERGCGLDVHKETVVACIMGAGIKKEIRTYTSMTHDLLRLKEWLRETGITHVAMESTGVYWKPVFNILEDSFEVILVNARHVKNVPGRKTDVQDSEWLCKLLRSGLLKGSFIPPRGIRELRDLTRYKRKLIQTIVAEKQRVEKVLEDANIKLSSIASDTFGVSGKKIIEELIRGELKAQEMAELSKGRLRSKREYLKEALVGEVREHHKFMIKASLKHIRAMEKILLGIERKIREKIERDYKEEYKLLQTIPGVKENASTIIAEIGVDMDIFPNEMHLSSWAGMSPGNNESAGKKKPSSTTYGNKCLKAMLTEFAWVASRVKDTYLRSKYHSLVGRRGKKRALVALGHKILIMCYHILKYRCAYKELGGNYLDERRKGRIARSYIKRLNHLGYEVILQEAA

SEQ ID NO: 245569 - protein, 367 aa, unidentified
MKKISTAAVKQSRNFSQQKLTIGLDLGDRNSWYCVVDEVGQIQLEQRVRTTAKALQEVFGTMPRSRIALEIGTHSPWISRMLSDLGHEVIVANARKVRLIGESRKKDDRLDAQTLARLARIDPELLYPVKHRSAQSQADLTVIRARAGLVRARTGLVNSARGLAKSYGERLRGCNVRNMNPEKAESLSPELQRALEPLLAGIEALSERIVEYNQRIEQLAQQSYPQTALLKQVKGVGTLIALTFLLTLEDPHRFQKSRDVGGYLGLQPGRRNSGRSEPQLHISKEGDPYLRTLLVQGAQHILGPFGIDCDLRRWGLRLAERGGKNGKKRAIVATARKLAVLLHHLWVSGEAYEPLHNSSRTTVAAAA

SEQ ID NO: 245570 - protein, 439 aa, unidentified
MSDRNKPNQESEFAAHIGIDWADQKHFWTMRTADGKLQRGELDNTPEAIQIWAAELERRFDGRPIAVALEQSRGAVIAMLSKYAHLVLFPIHPNTVSNYRKALYPSGAKSDPKDGDLILELLLAHPHKFRRLDPDTVETRKLQFLTEERRKLVNQHTAELQRLLGWLKQMFPQILQWFADPSCAMVGALLLRWPTLPALQKASPKVLRKFFSQHNCRSEEVIQKRLRQIPLAVVATNDAALVESASMCIQNSVHLLEIMREAIAAFDRAILETYRNHPDRALMESFPGAGPALEPRLIAAVGSRRERFESATSMACFSGIAPVKEASGKALWVHWRWACPKFIRQTFHEWAGCSIRTCGWARQFYDGQRDRGNGHHAAVRSLAFKWIRIFFRCWRDRVPYSEDRYLAALKNREPKPAPPTVEIRFKTCAGFSKPSILSS

SEQ ID NO: 245571 - protein, 301 aa, unidentified
MTVVTVGIDLAKNVFAVHGVNAAGKAILVKPLVRRAKLLELIATLPACLIGMEACSGAHYWAREFQKMGHTVRIMVPQLVSPYRMGGRHGKNDAADAAAICEAVARPNMRFVPVKSIEQQGQLFVHRAHQSYVSERTTLINRIRGLLSELGIVLPQAFKAFLSGVAQVLEDLPGYCNQVIGDLLNELFHIEEKIKNSEKLIPQLARDNSAAQLLMQFRGVGPMTATAIVASIGNGHDFRNGCQFSAWLGLTPRQQSSGGKARLGRITKAGDSYLRTLLVLGAKSVLLGAAKNDDPVSKWAL

SEQ ID NO: 245572 - protein, 340 aa, unidentified
MVHIGVDHHKRFSQLAILTETGEVIERRVPHEEPGLRATFASLPGPCKIAFESNGCWYWFVDLLEGVGHEVVMANPKQVKAIASARLKNDRVDAKMLAHLLRTDLLPTVWIPPRAVRESRELLVHRHRLVRIRTQVKNALHALVAKLVPHSEPVRLFSARGQAVLTQLPLEGSFQLMRQHGLALKAQLDRQIQELDRELRHRAERDVRVRRLLTIPGIGVQTASALVAYLCPVARFPSAKHVASYVGLSPTVRESAGKRREGRITKEGAPLLRHLLVEAAGATARQKGVLQRWYRTLAAKKGWRVAKVALARKLVTIAYHVLRAEQDFAGYLTRQGVLAG

SEQ ID NO: 245573 - protein, 455 aa, unidentified
MNRKRSKARIDRKMLMVHPNAAAIDVGATMHMAAVRADRTPEPVRSFGTFTTDLHRLVDGFTECGVETVVMESTSVYWIPIFELLDARGFTVFLVNARDAKHVPGRKTDVSDAQWLQRLHSYGLLRASFRPKGQIAELRAYVRQRERLLEYAASHIQHMQKALTQMNLQLHHVVADITGATGLRIIRAILAGDHDPKVLAQLRDYRCHARAETIEKALTGSYRPEHLFALEQALALYDADHEKVSACDVRIEAVLKELSIGRGRRSDSLLSPRRPRTNPVNGLAFDVRAALFALLGKDLTQIDGLGPYLSLKLVAECGDDLSAWGSAKHFTSWLGLAPSNKISGGKVLSSRTRRCGSRAAALLRLAAVTVGRTDTALGAFYRRLSARVGKAKAVTATARKIAVLFYNAVRHGMEYVDPGASYYETRYRTRVIDNLHRRAKAFGFVLQPVEPSAVS

SEQ ID NO: 245574 - protein, 350 aa, unidentified
MIVLGADTHERSHTVGAVAAATGELLGEQTVPVGLRGFGALLRWARSLDGERAWALEDCRHVSGSLERFLIERGERVLRIPTHLTANARRSARQRGKSDPIDALNVARAALREGLESFPAAHLDGPELDLRLLVDHRERLVRHRVELNSTLLWHLHDLWPELQLPGGALFSKKWSTRISRRLARAEQTMRVRIARDELRRLRELTQAVTGLEREITELVGQLAPQLLSEPGFGPRSPPSSSARSPAPSAFATPARLARAAGVAPIPASSGNTQRQRLDRGGNRQINAALHRVIVTRARCHPPTRDYIQRRRSEGKSTREAIRCLKRYLARRVWRLLQPPTPPRTSTRSIS

SEQ ID NO: 245575 - protein, 350 aa, unidentified
MEQIIKQVAGIDVAKKELVVTMGKMATDLKPKLYARKIFANNPRGFESLIQWVALHTTTAIEVRFIMEATGVYHEQLAYFLDAKQYQLSIVLPSRISNYVRTLEVKTVTDSTSADAIALFGLERHMQLWKKPQKIYKALRQLTRERGQLVVEATAVQNQLHAEQREAEPNAATLKRLQERIAFIDQQETEILKEIKALIKGNEGLKKVVTRLCTIPGIGLLTASIILAETNGFELIKSGRQLTSYTGLDVVEKESGTSVKARPKISKKGNKYLRKAMHYPALAATKHDERFKAIYARIIARHGIKMKAVVAVQRKLLELTYTLFKRQEDYDKNHFLKSAQSPTNQIEVTK

SEQ ID NO: 245576 - protein, 434 aa, unidentified
MDANYANRLQWFRQFKEQVTASTNTLIVGIDIGKDTHHAFLGTPAGRTIHRRLIFENSIYGFDRLLFLIKQKMSEKQLSEVVIGVEPTSVYHKPLSEYLISLGYDVVYVTNTAIKKNRAILDGRWDKNDTKDAANVADLVSRGRCHFYDLPDINLRDIRNLLSLRKRLKKQEHRLMTRIRNNLVAQYFPELDSAWYRCQQENLAIVRYCLSPQQVADLSFEDFCRMVVRRRRGLRQYKRLQHIHQVSEQSIGCRQGSSVAFEAQLLVENLERSREQIQEVEEQLYDICGSYKEYELLQTIPGFGPYVSAVVLGAIGYAQRFDNAKQLLRLAGLDLNASRSGKTSHRAVPVISKVGKADLRYALYQAANVATSRTAEFKAYFKRILKGREKERGIKTKMRVKVSAKMLVIAWTLMKTSQAYKTGLLKTDEPVQQR

SEQ ID NO: 245577 - protein, 331 aa, unidentified
MNQFYIGLDLGKEWTYATMIDENKQAIKQAKIPCTEEAVERFFGGRPKESLNAALEACGIWYSLHDFLLERCQKVKVVNPLQTKMNIGGKKTDKLDSKRLAVLLKGDVIEEAYVPNKEARGYREKVRHRQSMVYISTGIKNAVHGILRRENIKHPEEFDDIFSKKGIVWLKSLKYKEIDSYLELLLSVEAQISKAEEAVPTNMYKHEIKLLKTMPGIGAITAPVIMAEIVDVKRFVDPRMLCKHAGLVPEVIQSGDSDRRGRLVKYCSRRLRTALIQSAQAAVRTKRDHKLKRFFQKLMKRKTYNTAKTAVAHKMIYILWFMLNNNEEFHE

SEQ ID NO: 245578 - protein, 377 aa, unidentified
MIEKLRFLGLDVHAETIAVAVAEPNGEVRSLGTIANREESIRKFIRKLGPPEHLRACYEAGPTGFVLYWQLTQLGVKCDVVAPSLVPKKPGDRVKTDRRDALKLARSHRSGDLTAVWVPDEASEALRDLVRAREAAKQDQLRARHRLTKFLLRTGQRPPLGVKAWTERYVEWVQKVRYTHPAQEATLLDCLNEVEHMGERVKRLEKSIVEVIQLAPASMREVVRGLQALRGIAHISAVTIAVELGNITSRFERARDLMGYSGAFPSEDSSGKRIRRGGITKSGNAHLRRIVVESAWSYRHLPRVGAKLRKRQEGLPAEITEIAWKAQNRLHKRYMTLMARGKDQRKTMTAVARELLGFIWAIGIKAEATACKQQMAA

SEQ ID NO: 245579 - protein, 347 aa, unidentified
MNLVAIDLGKFKSVACLYRSDDDVTYRTIETGPQAVHDLLVEWEPERLVVEVGTVTGWVHDIAVGLGIEVQVANPNTEGWRWKRVKRKTDRDDALKLARLSVLNQLPTVWMPVLRVRQWRALINYRHELVSRRTAIRNSIRSILDMQGYRMAMGARAWTEAGIAALRSLAKPAAECEPEELWKGQLETELTLLEALGRQIDLVESKLDSLAAAEPRTSRLRTIPGVGPRLSEAVVAWIDDPHRFRNARAVGSYVGLVPRRRQLGTYDRSGRVTKHGPCLLRKLLVEVAWIMRQHNPHAAALYNKLNKGEKTRRKQATVALGRRLLTWCWAMLRDETTWDAQKVGIAV

SEQ ID NO: 245580 - protein, 413 aa, unidentified
MLLLIGDDWAEDHHDIEIEDETGRRLAKARLPEGLEGITRFHALVAEHAPAAWAELPAEDVAGRVIVGIETDRGPWVSALRAAGYQVFAINPLSSARYRERHSTSGAKSDAGDAHVLAEIVRLDRDHHRQVAGDTDLVDAVKLVARAHQTAIWERTRQTLRLRSALLEYFPAAVEAFEDLAAADTLILLGRAPSPARAAKLTRSQVVSALRAARRHHAEVKADALLAVLRTAGLRQPPTTEAAYAAVVVGQVGVITALNAQIAQLQEVVAEHFGRHPAADIYLSQPGLGVVLAARTLGEFGDDKKRFVDARARKNYSGQSPITRASGKKTIVLARYATNRRLGDALHQQAFSALRASPGARAYYDALRARKIGHHAALRQLANRLVGILHGCLKTGTNYDENTAWQHHTAAVA

SEQ ID NO: 245581 - protein, 418 aa, unidentified
MTATDTTASTLLVAIDISKHRHEVLIGVPGKKRRRRLTILNTLDDFQRLSATLASYGMPVRIGFEATGNYHRTLAHHLGRTGFELKLVSSVGLARTREALHNSWDKNDPKDAQVILHMLEIGAVQFFHDPMVVGTVDIQELSKTHEIVSRSKTELWHRILTHYLPLYFPEAERFHRSSRTDWFLAFLEKYPSPHMISAMSREAFIADAWDVVGRKVSKEQLLSDIYATAVNSIGLPVHADSDAVRMFRLVLAEGRGLIRQRDAIEARAVELLSDLPDYQLLTTIPGVGPINAMTILAEAGDLRRFRHRRQFLKFCGMDLATVQSGMFRGQSRISKYGNARLRRTLWMAGQTAVLKRTNSFRDKFERYISKDRHNAHLRRKAYTAIAAKMARTVHAVVNHGEPYRPFFEGVSPGGMTSL

SEQ ID NO: 245582 - protein, 367 aa, unidentified
MIVIGTDSHMKTHTCGAVHALTAAALDELTVPARTVGFGRLLRWGRTLDPERVWAIEDCRHVSGTFERFLIARGERVIRVAPKYMAGARRSSREPGKSDSIDALSIARAAIKEGIESLPAAHLDGNALDIRLLVDHREDLIAARGQDQQRLRWHLHDMWPELEIPPGVLDSDKWLGKISRRLARAQPITRVRIARELVRQITMQTKKIRELETELTALVKSYAPQLLAERGCGALTAAKLIGEIAGADRFATDAKLARTSGAAPIPASSGNTQRHRLDRGGNRQLNCALHRLAVNKGNWDPNAAAYLARKQAEGKSRKEALRCLKRHLARRVWKLLRSPTPTTTPPALPKPPSHNTVRGDAPTRCIR

SEQ ID NO: 245583 - protein, 339 aa, unidentified
MKETCCSQVRFRLAITRPILGIDVDSKYLVVHLLLLDGTNRARQFKNGPAGFRELVEWLAQLKASDAIICMEATGRYGEKLAKHCHSLGFKVVVANPNFISRHKESLNKHNKTDPTDALAIADYARCFEGRLRAWEPLSPVREKLRDVLGQIEKLKKARTMFSNRNHCGLNDVLVMDSNNESIAFLTAQIVKLSEYRDSLFEELPALKEARAALMQTVGIGIEIATALVVRVQMQNFASGRELGAFLGCASAEWSSGKQKRRGRQPKAGDSDLRSLLRLGAASAFRTSFYRDFVDRLTKRGLSKGQVIGAVARKMLLIAHAVLRSGKPFDRNYKSPLAT

SEQ ID NO: 245584 - protein, 396 aa, unidentified
MEQGAQRVVVGMDPHKRSVTIEVMTADEAVAGGGRFGTDLAGYRSMLEYLERWPHRVWAIEGCSGIGRHVALRLLANGQEVVDVPPKLSARARVFSTGQGRKTDATDAHSVALVGTRMAGLRPVVDDQQLTVLRVLVDRRRSLGEDHTRMISQLHRLLLELIPRGAKKDLSAAQAKAMLAKVRPRDAAGKTRRRVAAELVGDLERVYQRRKAADKELKQLVAATGTSLMNLNGVGPSGAARLLVEVGDITRFPDRDHFASWNGTAPIDASSGDQVRHRLSRAGNRQINRTIHIMATVQLRNPTEGRAYFDRRKTDGKTSMEAMRALKRRLSNIIYRTMLDDAITATMSSSRTGPGGHTGHDSDSSATGSHPSAGSSDKPLPGPAKPKRRTPLPAAP

SEQ ID NO: 245585 - protein, 428 aa, unidentified
MSNVPRSDEALAPVPALFVGIDWADQHHDVHWIAADGRTGRRRIDQSAEQIEELLDFLRREAPGGLVAIAVEKGRGPLHYALMDRAGLQLYLIDPKQAARYRESFTSGGGKADDTDAALWARLISERHRELKPFTPDDPGTRRLAELCQARRQLVDQRTCLKQNLTALLKTLFPLLLQLGTVDGPLVLTVAQRWADPRTFRRLSPRQLTRLFRNCVTRNDERIAQLVAQVRSTPLITSDGPVLEAGAVRMAAAAAQIAALAPQIETLEELIRQAFAAHPDAPLLEQVPGAGEALAPRLLAAFGSDRDRYANADEVAIVSGIAPRTRQSGQSRQVARRRACSRFLKQTFHEFADAARKWCPWSQAYYALLRQRGMAHHAALRKLARCWIRILYAVWKTRRPYNPDQYLAQLHSQNHPLLAFLTPPNKTS

SEQ ID NO: 245586 - protein, 387 aa, unidentified
MKIIGCDFHPSFQVIAMVDTETGEETTQRLTHADGAAKKFYEALTGEVVVGVESSGNMRWFERLLAQLGHKLLIGDASAIAAGNPRKQKTDKRDAQHILKLLLEKRFPTIWVPSVPELDLRQLLKHRHTLVQMRTRIKNQLQHIALNAGLQKKHKLWTREGRALLQGLELDRWTKRRRDDLLKLLAEMDEYIGELQAEAEKEAKKCPQAELLMSHPGVGPILSLATVLTLGDVKRFERGKKVASYLGLIPQEASSGSCRRLGAISKQGNSFMRFLLVQAGMTAVRGDAELGRAYQRLAHKKHHGVAKVAIARKLAVRLYWMLRTNQRYPETVVRMQGSPSHPVAKAKAEHLSGRPASRSKSRKIGSLHSIIMVVVRRRIDGWCNYRK

SEQ ID NO: 245587 - protein, 428 aa, unidentified
MKNRNIQKLEAITPGTLVVGVDIAKETQWARFVDYRGLELRKVLKFKNHKNGFDSILASIEAICQNRRLDNIIIGMEPTGHYWKPLANYLLKNKVNVVMVNPYHTKRAKELDDNSQTKSDKKDALTIARLVRDGRYYEVYMPQDIFAELRVLSNSRISLMKRSNALKNTITAVMDEYFPEIVTVFKKPLKGKAAMQILKSCPFPSLILELGIEGVLAEIKKAVKKTVGRKKAQQLVETAKNSVGVGYGLVSAKLKLGLMIEELELLIKQLEQLEKAMEKALADTGYGEIILGIPGIGVVTAASFLGEIGDPRRFDHPRQICKMAGYNLIEDSSGKNKSGTKISKRGRKNLRSVLYQMARTMVAVNAEMKELYQYLKTRPNNPLKKKQALVVISKKIVTIIYSLVKKQTGYQAELALGEFRKNQIKQVA

SEQ ID NO: 245588 - protein, 447 aa, unidentified
MRSTSGTAFTETSGGPAPSGPRLYVGIDVGRRFHQVAAVAEARMENGSWERAPVRRIATSGAGFRELTSWLETTAIAPALVRIGCEPTGGGYSRTVAGWLERHGYEVQWLQNWAIHDRRQLMIGKQAKTDALDARLIARLVYERDRLGLVGGFLHRPPRNTDALRTLVRGRLRLMDQHIRFRQQLTAVEDVLFPELKDFYRSSVTSSSARILLESFPTPESVAAADPADLYRVIVAVGRNRRMAPRLLDFQLAAADSAGLTDDREPLVRAQHWLLYQLRLLDRQLEDAEAAIGETLAEWPEQDRRVLDSFPGMSQQRQAVLLSCIGDLSTFNSDRQLRKLLGWYPEAHQSGTAVHKHHLGKSGNRIGRHEVWLWSLQMLSPLFPPNPFRTYYQRLRGRGMSGSVAIGHLAGKLISVLFFCLHSGQPYDPVRHARDLGLGDACAELEA

SEQ ID NO: 245589 - protein, 375 aa, unidentified
MSKVRFIGLDVHADTIAASVAEPDGEVRPLGIIPNRLESIRKLVTKLGPVNQLKACYEAGPTGYVLYWQLTTLGMACEVVAPSLVPVKAGDRVKTDRRDAAKLARSYRAGDLTAVWVPDAAHEALRDLVRAREDAKQDQHRARHRLSKFLLRHGQRPSEDVKKSWTQKYMTWIKEQVHFDQPALEATLLDYVHEVDHMAERIELLEKAIDQAIEKAPAEMRAVIEALQALRGVAKVTAVSIVAEVGSLSRFAEPRQLMGYSGMVPSEFSSGNRIQRGQITKTGNAHLRRVIGEAAWAYQHRPWVGGALLKRQQGLDQEIKDIAWKAQWRLHTRYNKLSARGKNKNQIVTAIGRELLGFIWDIAVRTEARWAARAV

SEQ ID NO: 245590 - protein, 324 aa, unidentified
MKHYAGLDVSVKETSVCILDEMGKVCRELKVTSHPDDLVQVLRDPSWRLERVGLEAGPLSQWLYSGLAMAGLPVSCIETRHAKAFLKAQVNKTDRNDARGIAQMMRVNLFRPLHGKTLASQNRRALLTARKVLQEKAIAIENDIRGLLRNFGLKVGIIGKVRFEDRIRELVAGLPDLAEVIACLLAARQSLRERFAILHRKVLAIVRDDDVCRRLMTIPGVGPVVSLAFSATIDIPARFKNSKAVGPALGLTPVLNQSGESNRIGRVSLCGDAMMRALLYEAAQVLLTRVQKWSWLKAWAMNVARRRGLQKAIVALARRLAVAC

SEQ ID NO: 245591 - protein, 468 aa, unidentified
MALFEKTGNRLKMMCVPIDYAKKDHMVMFCNGYGDIVRKPFSVKNTLEGVKYLIDQVMRSCRQRRIKKEYVFFGGEDANSYAENFANALRAKGFLVANVNAHDAKKQRETLQASTDRIDLMGIATMLLNLRAKCSPAQDGIYRNLRTLVRHRKNLVKMKTEVKNRIHTLVDRLFPGFLNEKNTGINPFSKSSLVLMEDRFSAQQIRRRKQATLIKILKRGATPDAENVVAKLHSYAAQVITTPDEYAPTLQLSLQHHIKHYRCLKENIDQLLSEIALLLAQTQAAFLTSIKGVGIVLAAGVSSEIGNPFEQKPLNNLTSYCGIIPRVKQSGGIEGHTHTGRVSKRSNHLLKDCVVQSAFHIGLRGPEPLLLDYKRREAAGQHADFGVGRRFLRMAMCLMRSGQVYLPPKLRSPKAQMQERAGYYLTMWPLLRDKWKKAHAQQAAFAKDQPLGQWRQMVQELYDIKLKL

SEQ ID NO: 245592 - protein, 292 aa, unidentified
MKITTIGIDLAKNVFQVHGVDEQGKVVLRKALKRHQVLPFFSNMDPCLIGMEACGSAHHWARKLQAAGHTVKLMAPQFVKPYVKSNKNDAADAAAICEAVSRSHMCYVPMKTAEQQAILSVHRARQGFIKARTALANQIRGLLCEFGIVIPKGLVHIAKRVPEILEDAENGLPETMRPLIQRLGAHLNELVRQANELEGQIQAWHRQNKMSRRLEKIPGIGPITASALAASIGDAKSFGNGRQLAAWLGLVPRQHSSGGKPTLLGISKRGDTYLRTLLIHGARAQEGGWDLA

SEQ ID NO: 245593 - protein, 333 aa, unidentified
MKFARVIGVDVSSEKLDLFDSGTGKALELTNSRDAIMRFAKKIENPQETLVICEATGAYEHFLVDVMHELGFQVCVANPRQVRQFANGHGFLEKTDRIDAQILAKFGQQVEVNLATPRTEQEKRLIALVRRRSQVLQMLGQEQNRTDQCFDEVALQLLKQTISFLKNQLKSLDQVIQQALAEVAKTTPKIEILSSVPGVGPVTTATLYCELPELGKLNRCQIAKLVGVAPLARQSGKSDGKRPVRGGRSQARKVLYMAALVATRKNPLIKSYYEKMLKRGKPKKLALVACIRKLLVILNEMVYRQEKWLEPQKKGATATVAKLGPPLATCSIA

SEQ ID NO: 245594 - protein, 411 aa, unidentified
MLYVGIDWADDHHDVCCTDDTATTLAQCQIAHSTEGFAVLHTQIAQQQAHPAEVLVALETARGLLVYDLLCQGYQVYAINPKAVNRYKDRHVLSAAKDDRLDALAMAHLLRTDRHRFKPLAPPPEHYRLLDRLCLDLRKLIDEKTRLSNQITSCLKEYYPQAVGLFRDVASPISLAFLQAFPDPDTVRQTDRSAFAAFFRAQRYTHPQRVDALYARTHAPAPEADPVVIRAARVRLAALVDQLTVVRTHQGTYEHTIQTILEEVPEAQPLATLPGIDTRLVPELVAALGPNRPEEPKRFAAASDLAKLSGCAPITRASGKRRTVLRRHACDKRLRRTFYDWAMASLSWSRWARAYYDHHKAQHQAHATILRGLGQKWAKIVYAVWSSGDAYDEARHIEQLKRHEVVWALSL

SEQ ID NO: 245595 - protein, 344 aa, unidentified
MTYYAGIDVSLRSVHICVIDDHGEAVAEAKLASDVQEIIAYFDGLEVDVDVVGLEAGTLAQYLTYGLQSADFEVVCMEARQVKNALSAMRNKTDKHDARGIAQLLRSGWYRPVHIKSMASHHIRMLLSARRALLARCIDLENEIRGLFKIFGIKLDSHIGHGSFDTAVRAIIEADQTLSHALLPLLDARLVLYQSFRVLDNRARQRAHADPVCQRLMSAPGVGFITALTFKAGVDDPQRFAHSRTVAAHFGLTPRRLQSGEMDIEGRISKSGDTDVRSALYSAANSILTRSSRWSPLKAWGMQLAKTRGHKKAVIAVARKLAVILHRMWIDESQFQWGNEGVRS

SEQ ID NO: 245596 - protein, 407 aa, unidentified
MRLLIGIDWSQDHHHVCFMAPNGSQQASFEIPHTIEGFARLDAERAKFGISAKECLVALETAHNLVVDYLWSRQYQVYVIAPAVVKGSRGRYGASGAYTDASSALLLADLLRTDLARFILWQPDGLLVRQMRAKLSLIEALRRDINRWSNRLLAVLLRVYPHPVGLFSDLTTQIGLHFLMAYPTPQAAQGLSYEDFEAFCRQHRYPASRWPTLYAYLQSPRPDPDAAALLAYQDEVPFLARTLLPLVQHRLQLIREVKELFSQHPDHFIFESLPGAGDLLAPSLLVKFGDHRERFPNAAIPQALAGTCPYTKQSNKKRVVLFRKACDHDFRRIAQQFAMESVKQSVWAATYWQEAYARCRSKSQAYRCLANRWLAIIWKMWQTRKPYDEEYHLKQRLLRRQPRSRKP

SEQ ID NO: 245597 - protein, 460 aa, unidentified
MSKKRPKGKRAEPAPKVDWKALEIVHPDAAGIDVGGSEHWVAISPDRDPKPVRSFGCFTADLREMAAWLVEKGVRSVAMQSTGVYWMPVFEVLEQHGLEVYLVNAQHTKNVPGRKSDIQECQWLLKLHAFGLLNNSFQPTDEIRVARTLWRHRGNLVAEASSTIQRMQKALIEMNVQLSNVLSDLSGVSGMRIIGAILKGQRDPAQLAALVEPEVKATPEDIAKSLEGNWRDELLFVLKQQVELYRLYREKIGDCDVQLRRHLESLGSRVDPRTQPLGPKPKGKRGSRNAPEFDLRTELYRITGIDWAQINGIDVLTAQTVMAEAGDDLEDFDSEKHFTSWLGLCPTNETSGGKILKRRTRKVVNRAAVAFRNAASTLLRSDSYLGAQYRRLRTRLGAPKAITAMARKLACLYYRLIKHGQQYVDKGTAYYESRYREQQIRVLTKKAKKLGFQLVIQQTA

SEQ ID NO: 245598 - protein, 306 aa, unidentified
MHACVGIDVSKATLDVAVHGSSEVRAFANSPAGFRRLAAWLLPERPLQVVLEATGGYEQAALDALFAAGLPVVRANPRQVRDFAKALGQLAKTDRLDARVLAQLAATISLTRYQPAFAWQRRLAQWHQRRGHLLQMLGSERQRLERMVDPALLRWARQHIAMLQRELRRLDTEIKHQIAAQPGLDALRSLKGVGPVLQATLASQLPKLGQLDSKAIAKLVGVAPLARDSGLLRGQRHVWGGRRQIRAALYMASLTAIQYEPRLRAFYQALRARGKLAKVAIVATMRKLLVILNARMRDARIDQQPA

SEQ ID NO: 245599 - protein, 352 aa, unidentified
MNRFFGCDAHKRYSVFASVDEAGQRQAAVRVENNRALFRHYLSTLPPGSPIALETVGNWYWMVEEIEQAEHRPWLVHAAKAKLMMGQVNKTDKLDATALAVLLRNGTLPVVWIPPGELRDQRELARLRMALVQVRTRFKNRIHATLDKYALQILEVSDIFGTRGRILLEQRLAELPPFTRQCVETQLELLDQVQAHIESCEKRIQQVTQKNLAVELLRTLPGVGFILAVVMAMEIGDVNRFPTSAHLASYAGTVPRIKQSGGKTLRGKVRADVNRYLKWAFVEAANSAVVRQARGRSSHVLRLYQRIRQRQGHAKAVVAVSRHLAEAAFWVLKKNQPYQQPREENPLSSTRK

SEQ ID NO: 245600 - protein, 446 aa, unidentified
MKKSSKSARELSIVNPDAAGIDIGSERHYVAIPEGRGARTIENFGCVTAELERMANWLIACRIKTVALESTGVYWIPVCDVLEDRGLEVVLVDPKQVKTIKGRKTDVHDAAWIQKLHSFGLLSGSFRPKTEMQAVRDLWRFRDHLVKDAARQIHIMQKTLEQMNLQLHKVISDITGFSGLRILRAIVSGVRDPKQLAALTTRGLKASLDEIEAALRGHYREQHVFALTQALKIYDFTRERIHDCDAAVEKIMNSLPGDRRDPPRPKRDQSYKNHPDFDLATEQIRITGVDLTRIPCVNALTIQAVISECGVSPGDSFPTEKHFASWLCLAPNNKKTGGRVFSTRTRFRPSSAATALRVAAMSLQRSKTPLGDRFRGLKARIGMPKAITALAHMLAKLIYRGLTRGQLYLDAGLQNLETRSEADKVLALRKRAARLGFELLPSPQVS

SEQ ID NO: 245601 - protein, 403 aa, unidentified
MIYEKLFIGIDVSKLKHDIAIMNEHKKLVRKAFVIKDDYAGYQYLLRIIKQLQETYTTQKFHIGLEATGDYWKNIYYFLKKQSEAFVLTVINPIRTKAFAKTELRRANTDSVAATDIARFMVEKQPKPSIDREPIFDCIKDLHGQIYAVKKQQTMMTNKLRIELTKVAPEIEKAVSYIKGQQILALLAIFPTAEDIVNASLEELRNIRYGKNNWSLPIKFIHKMKLLAANSIAYKIGQGAGYVVQSLVRRIMETKQETELLKQQMVGQYKLVNEHQSLLTSIPGISQEAAVVLEAYVGDVYRFPNAKKMVAYFGMNPTIDSSGTSKKRKGHLQKKGSGIVRHKLYMAILSVIRFKNGPIYDYYARLVKAGKPKLVAMAAAMRKLLVIIYNMLKNQEEFDANKM

SEQ ID NO: 245602 - protein, 323 aa, unidentified
MQGQIQPQTPSAQPVYVGIDVCKDHLDIHLHPLGHGLRLANDRDGVSRLKRLLARHDVARVVLEPTASYHRLVHRSLAQAGWPVAVVNPLRARLFAEVLGSRAKTDRVDAKMLAILGATLAPQATPPAPEALEDLRELVHARAAATQERTALANRLTASHVAVLKAELRRRLAGLDRHIARLAREIGRRITDDPGLARRQAILTSIPGIGATVAAVLIADMSELGQLDRHACASLAGVAPLANDSGDIRGPRHIRGGRAMPRRALYWAALSAARYNPDLAAFYKRLRDNAKKPKVALTAVMRKLIILANTLLKEDRLWTPKHA

SEQ ID NO: 245603 - protein, 335 aa, unidentified
MSRYVGGDLHRRRSQVVILSEDGEKVSSNKIVNDPETLVEAVVVAGPEPEVVLEATWGWYWAADVLSEAGCRVHLAHPLGVKGFQNRRVKNDDRDATLLADLLRMGSLPEGWIAPPPLRELRQSVRYRHKLSQLRAGLKSQIHAVLGKEGAIPELSELWGPAGARWLDDQQLGEAYRDRVESLRRLIRRYDTEVVRLDRKVHARLRDDAGYRAIQQLSGVGPVLGAVFVAEIGDISRFDSAKRLASWAGLTPRHRESDTKVIRGPITKQGSGLVRWAAIEAVARYRGGAPIQASYRRIAQRKGNKIARVAAARKLLTLVFYGIRDGEIRCLKGAV

SEQ ID NO: 245604 - protein, 467 aa, unidentified
MKLYLGGDVSKGYTDWVILSDKKQTVLENFQLDDTYEGHCKLYSTIEAYFDKYPGLEMYAAVESTGGYENNWVHTLKSYQKVFNLKVARVNPAGVNYNRRAGMKRNVTDAISALSIAEYMINHPENIIYDQDEKWKTLCRHWNFVEMQKKQRVQTINQLETILYCANPTLLRFKKNKLPNWLLELIIKCPTAGKLAHSKPEKLAKISFLTLKKAQGLVAEATQNIASATDRNSEILVRQIARQIKAFDENIKSQMKLIEKEFICPGIEILKSFQGIDTTSAIGILLEIGTIERFPTVKGCSCFYGLHPKFKQSGDKIIGVRMSKQGSKNMRKILFNIAKGAITSNPLIRDLYQKKLSEGMSKMAAIGVCMHKILRIIYGMLKNNQAFDPSIDKHNNERSKSKQQEKKQQESANIDKSRRYQKFDATAPISRKQIKKRKEHDLSQCEISSQSTGSICPSDTKILKVKH

SEQ ID NO: 245605 - protein, 344 aa, unidentified
MNKLNRIGIDLAKNVFQLHGTDRHGKVMWKRRLSRNKWINALQEVATTDCDIGMEACGGSHHWARVLHSYGYTVKLIPPQFVKPYVKSNKNDANDAEAICEAMSRPHMRFVAVKTVEQQDIQALHRIRAGLMSDRTGLANRMRGLVAEYGVVAPQTLTALQRSIPDWLEEADNGLSDRFRSLLHDLWVDLKYLTRRIDELDKAIRLLADENAVTQRLQQLRGVGPLVATALVATVASGQQYAKGKQMAAAIGLTPRQHSSGNKDRLLGISKRGDAYLRTILIHGARAVVSQAKHREDRLSRWCTDIARRRHPNVAAVALANKTVRMAWAMMKDESDYDPEFVST

SEQ ID NO: 245606 - protein, 322 aa, unidentified
MTSSTQRVLGIDVSKKRLDLAWSDGAMPPPVSYDADGLRRLLQLLREQPAAMVVLESTGGIERDVVDALLDAEVPVARVEPGRVRHFAQADAELAKTDQIDAQVLASFGQRMKVRLLEQRGKNREELDALVTCRRQLLLVKTEQSNRRRLVRSKPALKAIDAVLKTLQKQIDELDRQIHKLIDSDDDFRDDDRLIQSIPGVGIGLSAIILASFSELGTGHKNRAAGLLGVAPYNHQSGDHDGPRHIRGGRKDVRNVFYMAAYACTKFNPVFKAFAARLSAAGKPFKVMITACMRKLVGYLNVMLRERLTWDQMNVTKNLQQG

SEQ ID NO: 245607 - protein, 391 aa, unidentified
MRKPKQHKLNDLSRSLTTLDVHYTLIAVIEMSVSSWVVAGIVPGVERQPLKKLDTDENALLKLLDRWRKEAERAGHKIRRIAVAFEAGRDGFWLARWLRAHSIEVHVIHASSVAVSREHRRAKTDRLDTELLKRAFLGWLRGERDHCKMVAIPTITDEDAKRPNRERENLVGEQSRIVNRMKAALARLGIRNFNPKLKKAADRLQGLRTPEGEPIPPNTLSELRRDMQRRRLLMDQVRQIEDARLERLEQAPSNGPHAMVRLLARVIGVGIETADMLVQEVLSRNLRDRRAVARYAGLTGSPDESGKKRREKGLARSGNARVRRGMIQLAWRFLMFQKRSALAQWYRARTENARGTRKTMIVALARKLLISLWRFVRDGVVPEGVVIRPAQ

SEQ ID NO: 245608 - protein, 520 aa, unidentified
MATTRSRKRPPRRRPPDSVAKPRGLLHPRVQQVGPEHFGIVCFDCHKARSKWLLADFYGRVLVPPTQVGHTRPDLDAAVGQVRRAFADHQLRDGLVAIERTGRYHRVVQRTFAAAGFETRILHPFVTKQYRQPVDPGDKTDDTDLAAIHRATVTGCAPLEATRDEARATLQLVIRHRRDLVRKGAALNCQIRDHLEAALPGFAACFDRFWESAVPWHLLRHFPTAAQLHAAGVTALCHSLRHAGIRFQQRTLQAACDWADRAAPGEVAASQHHRLAPALYEDRQQKTREIQALEREIAGRLAQTPYVLLLSFPGVNVVSAADFAGEAGPIGHYANAKSLTGRAGLRPARYQSAQVDKANGPLVRRCNHALRAAILGAADNLIRCNHHFRHLATHWAGQGKDVRDIHVRVGLRFCRIAFQMVAGRQVFRHPCLQGRHYILDKLVAFHRDHDTAMPEVLRDLQAAVGQLPPREHAAEAQPLGEELERIHGGRRRGPQLLGDILPVVLARLGVGAVQSTESGE

SEQ ID NO: 245609 - protein, 356 aa, unidentified
MSHDVKYIGMDVHQEAIVIAVLNGSGKLVMETIVETKASSILQFLHGLRGELHVTWEEGTWAAWLYDLLQPQVQEVVVCNPRRNALLKEGSKSDKVDARKLAELLRTGMLRPVYHGENGLRTLRELGRSYQTIGKDLTRVMNRLKALYRGWGIACAGTQVYAPRYREEWLRKIAQAGVRRRAELLYQQLDGLQALRRNLRPEFLAESRKHKAAKLLRQISCIGPIRAARLIALMQTPHRFRSKRQLWTYSGLGIETHDSAQYRYVGGQVQRSKKPQQIRGLNQNHNHEMKEIFKSTATRASCGTGPFHDFYAALLAKGMKPEMARLTLARKIAAITLTLWKKEERFDAEQLKTQAA

SEQ ID NO: 245610 - protein, 341 aa, unidentified
MEKVLFIGIDFSKLSFDVTILHEGRLEESGTHSKFENSKKGISSFIKWMGKIYHGDLKRDALICGENTGIYSKLLADTLFLEGYTFWLESALQIKRSLGLRRGKSDSKDSRDIAEYAARHKDRCKPYRKPSDAIEALQVLFTKRKLLVNQKTSLQRRSGEQEGSFADNRWLSSIDLTDNGIIEVFKKEITAVEQQMKAIIKATPELKRVYDILTSFKGIGQINAVALIVATDNFQRFDFDARKICSYWGVAPFACQSGTSLNGKPHVSGYADRYLKSLLSEAVLTAMQFCPAIRDYAMRLRARGKHRAIIANNCKNKMLHILVAMVKNGTRYGEQKNDDAA

SEQ ID NO: 245611 - protein, 357 aa, unidentified
MMIIGVDYHPSFQTIAFFVEETGECGEQELNHSDGQAEKFYRDLKQRGICVQVGMEATGYARWFERLLAELGFELWIGHPAEIKAKRVKKLKYDREDARLILRLMRENNFPRIWVPGPENRDLRQLLWHRHRLVQMRTRILNQLQALAMNEGYHWRKKLFSEQGRALLEKLSLAPWASRRRQELLELLDRLNPTIEELTAAVEREARKRPEALRLMTHPGVGPITALAYVLIIGTPARFECGKQIGTYVGMIPCEESSGGKQRLGHISKQGNSLLRYLLVEAAQAAAHLHPDWRRRYMHLAMRRHMSIAKVAMGRRLGIRLYWMWRNGCEYSPSLESVRTRDSSVVPLRIPTRTQSA

SEQ ID NO: 245612 - protein, 316 aa, unidentified
MRNYIGIDISKATLDVYDGKKSYKFENNETGFKEIVRLVEDIKNVIFIFEPTGVYSYALTDFCSKENINIVMVGPKESRDFARSLKVRSKTDKIDAKVLYKYQSHIEPSMVKIPVVNHQGIKIQEMLNVYENIKSSKQTFKNQLESTSKSDKYLLRTLNKIIKDLDREALKLFNKIELTLLKDKEVKAKYDAISTIPSIGQKSALYLTAFFLKYPIANAKEMTALVGLDPVIRDSGTFKGKQRISKQGGQQLRNLLFLPTLCAIQHNDRIKSFYERLTSNAKTKKLAVIASMRKLILMAFSLFKSKEVYQPLILID

SEQ ID NO: 245613 - protein, 344 aa, unidentified
MDHFGGLDVSVKETSICIVDDTGRIVKEVKVASEPAALLKVLGSPIYRFKRIGLETGPLSQWLFGALAEAELPVICVETRHMQAVLKAQINKTDRNDARGIAQMIRVGLYRPVHVKTLRSQKLRMLLTHRKLLQSKAIAIENDLRGTLRNFGLKVGMVGKVRFEARIQELVENIPDLAIMVEPLLIVRRVLREQIVILHRRLLAIVREDEVCRRLMTVPGVGPVVALTYRATVDVPARFRKSKSVGAVFGLTCSRYQSGEIDWSGKISRCGDEMMRVMLYEAAQSMMHSKKWSWLKAWAMQIARRRGMKKAIVALARRLAVIMHRIWVDGTEFRWTREQATAAA

SEQ ID NO: 245614 - protein, 346 aa, unidentified
MKKIAYLAMDVHARSCTLGHMDEDGTFIGNRYFATSEQNIIDALKSVRAKNKILTIEEGTLTHWAVQVARPHVIEVIACDPRENALIFKSPNKKDEVDTHRLCRLLRLGELKHVYHTFNDDRAIFKASAQHYLDFRDQLTRLKHKIKAAYRRWGIIDVFSSSIYSPSGRDKYLKKIKHKPIHGQIKRLYYLMDQTERMRKSALHSMKQLGLKYPEIREFEKIPGIATINAHVFDAFIQTPHRFATRSKLWRYCRLSITDRTSDGKQLGYKRLESSGVSELKALSFRAFMAAMRGDNEVKRFYLDSLNRTHDRKHARLNTQRKILSVMFGLWKKGEAYRPELFSGSA

SEQ ID NO: 245615 - protein, 412 aa, unidentified
MEVVYTRCCGLDVHKQSVVACTIVPGAARRPTKTIRTFGTTTDQLEALAEWLLAQKVTHAVMESTGVFWKPVFNILAGRIEVVVVNAQHVKVVPGRKTDVADSEWLADLLRHGLLRASFIPDQAQRQLRDLTRTRVALIDERSRTIRRLHKVLEDANIKLSSVATDVLGVSGRAMLEALVAGTTDPHAMADLARGRLRAKLPALEQALTGRVSEHHRLLLKTHLAHIDFLNQAITQLSEQVTECLRPFEAELERLETIPGIKRRTAEVLAAETGLDMGRFPSAAHLASWAGMCPGNQESAGKRKTGKTRKGSKWLRRALVEAGRAAARKRGSSFFAQYRRLAARRGPNKAAVAVGHALLTTVYYVLARQDTYRGPDPVQQEQHLRARTEKRALRQLQDLGYTVTLTPLAQAA

SEQ ID NO: 245616 - protein, 348 aa, unidentified
MIWIGVDAHKRLHEAVALSEGGVVGSRRIANDAAQWAALLEWAQQWPERVWAVEGAWYLGRGLAQYLAERGEEVHEVSGRWTAQRRRGMRRPGKSDRLDAHSVATLLREERATLPRVYAEDDDLASVQLWSRLEAELSEDRTRILNRLHNLLLLCDPGYAVRLPALTTKAGIAAARTYTAPGTRPVEREREQAVRASAEQVALLDAQIAELRRKLERASKASFRALRAIEGVGAQIACTVIAELGAPRPGFGDEQLAALAGVAPLEASSAGATRHRINRGGNRRLNLALHRIVLTQARTYEPARAYLARRRAEGRTDREARRALKRLICRRIIQAWRACFDQPLAAAA

SEQ ID NO: 245617 - protein, 376 aa, unidentified
MKKGTRFVGLDVHKDTIAVAVAEAERGGEVRSLGTIPNEGDAIRRLLRKLEGPEGLHVCYEAGPCGYVLYWQLAKLGVRCDVVAPTLIPVKAGDRVKTDRRDAEKLARSLRAGDLTPVWVPDAEHEALRDLVRAREAAKADQRRARQRLLKFLLRRGCMAPTKMRSWTDKHREWVMQLKFEQRALEETLTDYAAEVDHQRERVARLERAIDEAVDKVPAAMRAVIDALQSLRGVSKLTATTIVAEVGELSRFDRAAQLMGYSGTVPSEHSSGGKTRRGGITKTGNGHLRRVLIEAAWTYRHRPRIYGALRARQENIEEPVKAIAWKAQHRLHRRYRRLAERGLPHQRVVTAVGRELLGFIWAIGVHVERQHRATSS

SEQ ID NO: 245618 - protein, 363 aa, unidentified
MVEFMTVTVGLDVHARSIRLAAVRADELLEERTLPYDEEAVERLLHRWPVVRCCYEAGPTGFGLYRHLVERGIDCAVVAPGLVPRRPGDRVKTDPRDARKLARLLAGGLLEPIHVPSPELEAARDLVRAREDARLDRMRDRHRLSKFCLRHGRLLPTTAWTITRRKWLSEQRFDYAAEQITFDSYLHAVDLVDARIEALERAIRETAEQGPWRQLVARLRCLRGIDTLTALALVAEIGDFSRFHTAEEFMAFVGLVPSEHSSGEHRRQGAITKVGNSHVRRLLVESAWHARRRPKVGYELARRQRGHEAVVLERAWRCQQRLYQRWQRMAGRGKPQQKIVVACARELAGFVWAIATEQPLRTT

SEQ ID NO: 245619 - protein, 412 aa, unidentified
MDVFCGIDWAEDHHDVALVDRDGGLLARLRISDDAGGLAALLELLATHGDSAEDPVPVAIETPRGLLTACLRATGRQVYAVNPMATARYRDRHAVSGGKSDHGDAVVLASILRTDRHAHRPLPADTELAQAIAVLARAQQDAVWDRITAHNKLRSHLREYYPGFLAAFATAKGGIMRPEARVILAAAPDPGAAAKLTAARLRALLKKAGRSRGIDAEADRLREAFRVPQMRQLPLVEQAMSLQTLALLRQLDAACASADDLEQAAVESFNQHPDAGIITSFPGLGALTGARVLAETGDDRSRFHDAKGLKAYAGAAPITRASGKTRSVTCRRVKNNRLAAAGYIWAFAALSASPGARAHYDRRKDAGDRHATAQRNLFGRFLSCLHHCLATGQHYDENTAFPSPPAKLPNAA

SEQ ID NO: 245620 - protein, 411 aa, unidentified
MAIFISDAIDSPPVVEVVAGVDTHADNHHVAVLTAMGARLGDLQVPATLAGYEQLAEFVRSFGVIRLIGIEATGSYGAGLARYLLASGIEIREVLRPRRAQRRQGKSDPIDAYAAAQQALAEPESLPVAKAGDGVVEQIRVLLTVRRSAIKARVAVIRQLKSLLVTAPETLRNRWSRLSEHALIDGLASTRPGTATDSVLTATAHALRRLARRYQYLTQEIVEFDDELRVLVDHAAPAMIATKGYGVITTATLLVTAGSNPERLRSEASFAALCGASPIPASSGKTTRHRLNRGGDRQANWALHQIALVRLSNDQRTKDYAARLQASGKSKKDIMRCLKRAVAREAFHLIVHPKPAPKTEDLRALRHRRGVTLAQAGINLGAEPARLSELERGKRPNADLAIAYRAWLTAV

SEQ ID NO: 245621 - protein, 402 aa, unidentified
MNKDCSGYLGIDVGKYHHQACLTDNQGEVLFSIQFSANCQGLKKLLKHLNKRIDNQELNKVQTGLEATGIYWMTLYEQLTKLGMKTVVLNPLQVKACQNRNIRGNKTDRIDAQLIAEILRFGQYRPSCVPDEDDFELRQLTRLRSDLVSLTTGLKVKVMGLMDQTFPEYKDLFRDVFSTTSRELLRKAVLPEQIAAISTKRLAQILKKASRGRLGIKKAKDIQKTASCSLGITLGMNALSLSIKILLDQIGHLEGQVSQLEREIEKLFVKRKTTLTSIPGVGKITGAAIKAEIGNFDRFINDKDGAQKLVALAGIDPRIRESGQYRGKTKMSKRGSSYLRKAVRQAAFSAVHVAKDQMFASLYQKHIKKGKHSEVALSHVERKLLHVIYSLLKNKREYQPRL

SEQ ID NO: 245622 - protein, 331 aa, unidentified
MEIFQTVGIDISKLTFDARIHTSKAYKSFKNENNGFKGMLKWVVQNNKFSMGNTLFVFEHTGLYSHLIAKFLSENSCNFTIVPGLEIKRSLGITRGKDDKLDSTKIARYAYRLRDEIIPTQLPIKPIQDLKSLLSLREKIVRQRAGYKASLKEQKRIYDKTEKAILFETQENIISFLSGEIQKIEKTINEIIESNNLIAEHYKLITSIKGIGRQTALHVIVYSENFTKFKTSRQFASYSGVAPFPYMSGTSIKGRTKVSHLANKKLKSLLDMCAISAIKHNPEMRTYYQKKTKEGKHKMSVINAVRNKLLARIFAVVKRKTAYIEIMKFAA

SEQ ID NO: 245623 - protein, 350 aa, unidentified
MLIIGCDYHPSVQQIAFVDTDTGELRERRLGHRDEAEQFYRELKQQNQTVRAGMESSGHSRWFERLLQELGFELWIGDPAEIQSKRVRKQKTDRQDAQLLLRLMMEDRFPRIWIPDAVNRDLRQLLWHRHRLVQMRTRVMNQLHVVALNEGLRRKKALWRPAGRTELEAIVLAPWASRRRQDLLDLLDQLTPKIQQLTQALEEEVEKRPVTRLLMTHPGVGPLTALAYELVIGTAERFHCGKQIASYVGLVPEEKSSGDRRRLGHISKQGNALLRFLLVEAAQVTVRSQPQWRSKFLHLAMRRGRKIAKVAMARKLAVHLYWMWRQGRDYGQLQKFGSHVGEPGNLDGEQ

SEQ ID NO: 245624 - protein, 424 aa, unidentified
MLKIVHPTCCGIDVHNKFVVATIAKTDPKGVTRYQTKEFKTFNYDLERLREWLAENECYQVCMESTGKYWIPVFNYLENSCTVTLANPKYVKAINGKKTDKKDSRWIADLFKHDLVPGSYIPPKEIRMLRELCRYENKLVANRSSEKNRIQNALTISNLAIANVVSDAFGKTASRIIEYVVNCDVFDPEHCKTLIDKKIKASHDEVIKSVLGYNLMPPQASKIRISQSHLNFIDNAVVNLNNTLDELTKPYESQIKILTSMVGVNEKSAVKIISEIGVDMSVFASAKHLCSWAGLTPQNNESAGKKKSSKISRAGVYLKPLLVQCANAAIKSTKTPYFKDKFLKIKKRRGHKKAIIAIARMMLTCMFHMLSKGETFAPSDVNYSDMTTEVFEKRRQKMIQSAISLLQKQGFQISKTTDNEPLVS

SEQ ID NO: 245625 - protein, 387 aa, unidentified
MRVAAHRAEAPSAICVDLGAIFVSLELSRSKWLITSLSPGGGEKMSKHMVAGGDVAGMLSCFAELKRKAQARTGRCLPIIVIQEAGLDGFWIHRVLQAEGIESHVVDPASIATSRRRRRAKTDKLDGEALLRALLAYKRGEPRVCAMLRAPTPEEEDRRRIVRERKALTNERIRHVNRVKGLLFGQGVSGYEPLRSDRRKRLEELKTGDGRSLSPNLKAQISRELDRIELLLTHIKDVEEARDTMLESAQAVAPAPKLLLNLKGIGPEFAAVLWSEGLSRHFDNRRQVAAYAGLAPTPWQSGIVDHEQGVSKSGNPRLRSMLIELSWLWVRHQPQSALTIWFKERVKQNGGRFKKSTIVALARKLLIAIWKYVNAGVVIEGAALKAA

SEQ ID NO: 245626 - protein, 340 aa, unidentified
MNKITKKSEFIGVDISKDYIDCALISESKPGEFQEKRFSNNLNGFESLDKWLSGNLTEIKRALFCMEHTGTYGLLFCAWLSHKGIDFCVEPGLKIKRSIGMVRGKNDRIDARRIADYAFTQKNKLTLFLFPSRLILEVKQLLTYREQMVRFRTSLKNSLKSHKQYEQITGKNKISASIEDQIRKYDIIIDDIEKELIRIIESDQELKTNFNLATSVKGIGLIIATFMMVTTNNFTSFNDGRKYACYSGLAPFENSSGSSIKGRTSTSYLANKKIKALLLNGANAATKCDPELKAYFKRKQQEGKDYKVIMNAIGCKLVNRVFAVVKRQTPYVITYQQKIV

SEQ ID NO: 245627 - protein, 348 aa, unidentified
MLADRLDYVVGVDPHRDVHALAIVEVRTGGVVFETSVAASSGGYAAALELARQHGPGRRAFAVEGTGSFGAGLTRFLVGQDERVLEVGRLRRERRSGGKSDALDAIRAARSVLGQTRPALPRAGGEREALRALMAAREGAVNARRAGLCQLRDLLITTPEPLRSELRPLSRARLLRRLVAVRPERQSDVELRGALLALRTVARRVRQLTAEERELAGEIERLTRKLAPQLLEQPGVGPLAAAQILISWSHRGRIRSEAAFARLAGCAPIPASSGQTVRYRLDRSGDRRLNRALHMILVTRRRAHPPTIAYVERRMREGKSRREASRCLKRYLARNLYRLLEHGAPLAA

SEQ ID NO: 245628 - protein, 346 aa, unidentified
MTIVETTRPVRGGVDTHADVHVAAAVDANGGVLGVCSFATTPAGYGQLYGWLSGFGPVARVGVEGTGAYGAGLARHLRGRGLVVIEVDRPNRQERRRNGKSDELDAIEAARATLSGRASGIAKSADGDVEAIRALLVVHRSGRNVRIKYLNQIRHLGFTAPDELRERLRDVHCDRLARTAASLRPTAGSDTVVYATKLAIATLGRRVVALEADAARLDQQLETLVRRAAPNLLDVYGVGINTAAILLVAAGDNPHRLKSEAAFAHLCGVAPLPASSGKVDRHRLNPGGNRQANHALWRIVFTRMSGDERTRKYVARRLAEGRSIREVMRVLKRYVARELYPHLVPD

SEQ ID NO: 245629 - protein, 365 aa, unidentified
MTTRQRSTSSSTDPPVRREVVLGVDTHGEVHVAAVVSPLGEVMGTESFPATAAGYRQLLVWARKRGAVRRAGVEGTGTFGAGLSRYLLAQQIQVLEVNRPDHTARRMLGKSDPLDAQAAARAVLSGRARAQAKSGGGPVHSARIHKLAKDSAVKARTQAINQLKAVLVIADPALRERLSSLGNAELFPICATLSPPDGGGDEKAVAQATHLTLRMLAERIEQLTAQINELNQRLTRLVEHHAPQLLVPVGIGPDSAVTLLITMGDNPERLNSEASFAALCGVSPIEYSSGRRSTRRLNCGGDRRANAALHRIVFTRLRHDPRTQAYYERRTQEGKTRREIIRCLKRYAAREVFNLVRPVSRAPAL

SEQ ID NO: 245630 - protein, 381 aa, unidentified
MGDHIAAFVGLDTSKLRNAVAIAEDGRTGEIRFFGEIDNTAEGTAKLVRKLAAKYGRVAFCYEAGPTGYGLYRQITALGHDCMVVAPSLIPKKPGDRVKTNRRDALGLARQLRAGELTAVWVPDSRHEAMRELTRARGAAVEDTRQKGQQVSAFLLRLGRHYGAGKRTWTKAHMNWLASQTFEHPEQRIAFEELLLAVRQAQERVGRLEEAIRLAVPEWSLAEVVVALMAMRGIDLVTATAFMAEIGDLSRFRTPRQLMAYLGLVPSEESTGDTIVRGPITKAGNRRARRLLIESAWAYRHPPRVGKDKQAKVAAAPRAVREIAWKAQHRLYARYRALIRKGKLKTVAITAVARELAAFIWAVGREIANADRAAAQHGLRG

SEQ ID NO: 245631 - protein, 412 aa, unidentified
MEVVHPRCCGLDVHKKSISACVITREHGKAEKLERRFGTFTRELEDMAEWLEEHQVTHVVMEATGVYWKPVWNVLEGRFDLMLVNPQHIKALSGKKYDRRDAAHLADLLQHGLLQGSFIPSAEIRQLRDLTRNRVRTVQEAARIKSRIQKVLEEANIKLGSVATDVLGVSGRLMLNGLIAGKQNAGELANLAVGVLRKKRDQLVQALSGKINDHHRLMLDKLLRALKTRETEIAEDEADIRQQIEPFHKAVLAWMQVPGIDEVTAWSLVAEMGPDMAPFETAEQAASWSCVCPGNHESAGKQRDGRTRQGNPWLRSAICEAAWGASRTKKSYFHAQYARVCARRGPHRALMAVAHSMIVVGFYLIKYDSEFKDLGADFFDRRNREHATRRAVKRLNVLGYTVHLEQTVSPPA

SEQ ID NO: 245632 - protein, 357 aa, unidentified
MSVYVGIDVHRKRSQVAVVSQDGEVLANRNVPNGVEPVLSVIGGLPPGTPAAFEAAFGWGWLVELLEDYGFDPHLVHPLQCKAIASARLKNDKVDAAILAQLLRAGLLPEAWIAPPPVRQLRALLRHRAQLVRLRTLLRNRIHAVLADHGHGRPAGCWSGPGRAWLASLELPAVSREVIDDDLALIDALQQPIDRLDWEVHQRAKAEPAVKVLTRLPGVGPFTALVILAETGDVSRFGSARKLAAWAGLTPTVRGSDRTVRHGHISKQGSAWLRWILCEAAQTAKRHPDFAGSYQAIARRRGKKIATTAIARKLLTRAYHLLTDAQITAPLAAVPAPAGALTHREGPPSPGRARVSA

SEQ ID NO: 245633 - protein, 345 aa, unidentified
MPIVGGLDIHRKQITFDYLDTGTGQVRRGQVSPADRAHLRAWLARFAGREDVAFALEGCAGWRYVAEELAAAGITAHLAEPADTAFARGRKRHAKTDKTDARHLRMLLAEGRLPECWIPPRHILECRAVLELYNDLRRERTAWAQRIHAVLFHQGAPALGEGALRTERGVAELRAAAAAHLSPAGQLQVATAVEVIDALEARLHVVRHQLLDAARHLAGAKALAARLYGVGPVTALAITCWLGGAGRFSSSRQAVRFAGLDITVSSSDRKGPPGKLSRQGPPVLRWAVYEAGKAHARTSAPDHRYYAAVKDRKNSKRACLSEARKILRQAHHILAELGDDALAAA

SEQ ID NO: 245634 - protein, 343 aa, unidentified
MTEIAVLGVDLGKNSCSVVGLDAAGRVVLRRRLHRDGVVRLAAGSPGCMVAMEACCGAHHLGRRLREAGHEVRLMSPEYVRPYVKAQKNDERDAEAIAEAATRPTMRFVELKSEAQLDMQSLHRARDRLVGERTALINQLRAILLERGITVPQGRRKLEVYLETLLAEERVPLSPRVRLLVEDQRAEWRELDRRIEAFDEEFAAEARSDEAARLLTTIPGIGPLNATALVAAIGRAETFERGRDLAAWLGLVPRQMTTGGKPKLLGISKRGNVYLRRMLIHGARAALPTLSKGETPLGGWLRGLAARAHVNTVVVALAAKLARIICAVLRSGRRFEMRAAAVS

SEQ ID NO: 245635 - protein, 340 aa, unidentified
MRELYAGCDLHGNNNLIGIVDGEGKRVFKKKLSNDLALVRDTLKPFQGELVGIAVESTYNWYWLVDGLMETGYKVHLANPSAIQQYSGLKHSDDQHDAFWLAEMLRLGILPEGYIYPKEERPVRDLLRKRGHLVRLRTSLVNSLQNILSRNLGRKMNVNDMKAIKEDRVSLLLEMNEDLALAGRVSKEAIDHLTRQIHKIEWVVQKRIALKETYRYLLTLPGVGKILSFTIMLETGPIRRFATVGDYVSYCRKVPSQWTSNEKRKGSGNTKNGNKYLAWAYSEASEFARRLYPEPRAYYNRKMQKTNAAVAHSALANKLSRAGYYVMRDQVPFQPEKLFG

SEQ ID NO: 245636 - protein, 343 aa, unidentified
MKEITTIGLDTAKSVFQVHGVDSRHETVIRRQLKRRQVLAFFAKLSPCLIGIEACSAGHHWARELTKLGHTVRLIPPRYVKPYVKSQKNDATDAEAICEAVTRPNMRFVAPKSREQQALLMLHRTRHLLVRQRTATINAIRAHLTEFGIVAGVGRSGVEALLKIIADDNDDRIPVVARDCLLALGRQLEGIKRQIRDFDAKIMAAHRDNELSRRLEEIPGVGPRVATALVASIADPKVFRSGRQMAAWIGLVPKQNSSGGKEKLGGVTKAGDRYLRSMLMIGALSVIQRVKQLGYTRRPWLADLIARRPVKVAAIALANKIIRMVWAMMVRGESYREPAALAA

SEQ ID NO: 245637 - protein, 343 aa, unidentified
MPHYVGLDVSQKTTAICVVDEQGKRLWRGVCATDPGPISARISQHAGVDAKVGIETGSMTPWLVHGLRAAGLDVACLDARRVKAALQMQLNKTDENDAEGLAQIMRTGWYRAVHVKSLDAHRARALLGARAQLVGMTTRLSNMIRGVLKTFGLLPGAGRGLRFDRKVEALLEGAPEIALVVRPLLATWRQLREQIAVFDKAVLQQVRADPICRLLMTVPGIGALSSLMYVSTVENPSRFSRSRAVGAHLGLTPRRYQSGETDRSGHISRCGDGLARTLMYEAAIVILHRVKRSLHLKDWAEAIERRSGSGKARVALARKLSVILHSVWRSGEPFRWAAPAMAA

SEQ ID NO: 245638 - protein, 370 aa, unidentified
MTRGTTFVGMDVHKATIQVAVLGPGKSAPIEWTVENRGTAIIKLAKRLKSDAGDELDVCYEAGPCGFALMRQLTSLGVPCKVIAPALIPKQPGDRVKTDKRDARKLAALFRAGLLTAVHPPTADQEAVRDLCRARDDARDDRQRARHRLGKYLLRHGITYDGKAWTRAHRAWLTALSFEHVAAQTTFDDYVRTVDAADERIKALDEKIDEIAQTGAYREAVGILRCFRGIDTTSAMIIVSELGDVTRFSSARALMGYLGVTPSEYSSGGREKRGGITKAGNAFVRRILVEAAWHYRHPARVGTALRRRREAKPGWAIAIAEKCQIRLHRRYRRLTDNGKSHNKTVVAVARELIGFIWACLTALAQRAATA

SEQ ID NO: 245639 - protein, 385 aa, unidentified
MDVLYDRCCGLDLHKRSVTACRIVPGRQGQPTTEIRTFGTMTADLLALGDWLEAGGVTHVAMESTGVYWKPIWNLFEDRFTLLLVNAAHVKVVPGRKRDVGDATWLAELLRHGLLQPSFVPDRPARELRELTRYRSSLVRERTAEINRLGKTLEGANIKLGSVVSELTGVSARAMLRALVAGAEDGAALAELAQGQLRRKRPELQQALTGRMSRHQRFMLVQHLSHIDALDAQIAAVGEEIAERMRPFEAELTILDSIPGIGRWSAEVILAEIGPDMGRFPTAGHLASWAGVCPGHNESAGQRRSGRTRKGSPWLRVTLTEAAYAAGRSQDTYLSARYHRLIGARVRRRRPSPWVGRSWSWRTSCSAPANSMTTRGHGPTWPSCP

SEQ ID NO: 245640 - protein, 352 aa, unidentified
MAKNNFDELMSIGIDIGKDTFHLVGFDHSGQRVLRQKFKRLALAATFEELPRCVVGMEACLSAHFLSRTLRKLGFEPRIIAAIYVKPFSKGQKNDYNDAEAIVEAALRPNLLTVSEKTQDQLDLQALHRVRSRLVSRRTATINQNRAFLIEQGIKVRKGLRALKNSFETILEVRKDEISPRMRKILIGLYGDWMWMDDRIDTVSNEIEEISRTEENCVNVMTIPGIGPIISTAMVAAIGDGEAFIRGRDFAAWLGLVPRQYSTGGRTVLGRITKRGSRYLRMLFVQAAKVVLMRQHRWPDFSFGDWLTRASERMHRNKLAVALANKLARMDWSILRHKTAFDTPRNEVMAGV

SEQ ID NO: 245641 - protein, 348 aa, unidentified
MAMTMLEARRVTGGVDTHLDVHVAAALDALGGLLGTESFEVNPAGYQSLLSWLESFGAVGKVGVEGTGSYGAGLARFLRQHGVSLIEVDRPNRALRRRSGKSDSLDAVEAARAALSGRAKSVPKSKDGAVEAIRVLLVAKRSARQARVKAVTQVRHLVITAPEELRRRMKGLSVSALVEEGAKLRPSRSTDPVVAATKAAISSLAHRIQALESELDELAEMINALLVATAPDLLAMFGVGPDTAAALLVCAGDNPERLRSEASFAHLCGAAPIPASSGKSIGRYRLDSGGDRQANSALWRIVMVRIAHDPETTAYFERRVKEGRTKREVIRILKRYVAREVYHHLPRG

SEQ ID NO: 245642 - protein, 337 aa, unidentified
MTIKVLGIDLGKRYFHIYAVDKHGVLVTRKKLTRKALLLFLSNLEPCLIGMEACGGAHFIARKAAEYGHTPKLMAAKFVKPYVKSNKNDFLDAEAICEAVQRPNMRFVTPRSPEQQALGAQVKYRESLVRRRNAAINQVHSFMLEFGIEYPKGRKTILKLSEIIARHEGKIPTQMIVMLYRIAEDYQHITNQISDVEDEIEVYVCADDRGRRLLDIHGVGPITAACLLAWVGDAKQFRSGRDLAAWIGLVPKQSSTGGTTTLLGIGKRGHTRLRCNLIHGARSALQWHIHKPTRWSAWAQALKATKKPNVVAVAMANKMARMIWVILARNEEYRAVA

SEQ ID NO: 245643 - protein, 433 aa, unidentified
MARVIIGMDPHKRSATIEVINDHEKVLAQGRFGTDTVGYQAMLSLGRQYKDHVWAVEGCNGIGRHIAQRLVADGETVIDVPAKLSARARVFATGQGRKTDPVDAHSVAVSALRTEGLRQVTVDDASVALRLLVDRRDRLGRTRTDIISRLHHLLLELVPGGAKKFLSALQARALLNTVRPRDVVGRTRRQLASELITELASVDRKIKAANAQLTELVEATGSRLQELNGIGPSGAARLIGDIGDIHRFASRGHFASWNGTAPIDTSSGDQQRHRLSRAGNRRINRSVHPASSRPSGCAMSRTVRRRICGRWARRCTRRPRAGHRSRGMNRLPRSARPSPRRHRNPADPGCSRLYWNTCWSRTRPYGSQRSGPGPRCAALRTATTPDSRASLLLGPPASPSRGVPPSPPASPSRGVPPSSPASSGSLVGTGRSP

SEQ ID NO: 245644 - protein, 347 aa, unidentified
MITIGIDPHKDTHTAAAVNDASGQLLGELTVPGTDDGHEHLRGWAHELAGTEGGLRFALEDCRHVNGRLERFLLGAGETVLRVGTRMTARSRKTARTVGKSDSIDALAVARAALREPRLPLANHDPTLRELKLLVDHRDDLVSERTAHSMRLRWHLHDLDAGLEPSARLLNDTAVRRGLSQRLRRYGDGVQVRICRELLTRMGELTRAERELRREIADLVRPIAPALLAISGVGDLVAARILVEVGGVGRFPSDAALARHAGCAPIEVSSGRTARHRLSRLGNRKLNATLHVVVLTQARVHPPARAYLAKKRAEGKSNKEAFRCLKRHLVRVVFRALQQSVGVAVSP

SEQ ID NO: 245645 - protein, 369 aa, unidentified
MNRVFVGMDVHKEKIVAVGLPEEGNHPVMREEFGGNDLSRLVKRLRQLAKSHRVEACYEAGPCGYGLTRTLLQAGVECRVAAPSLIPRRPGDRIKTDGRDARELALAFRANTLSFVRIPSREEEEVRGLIRCREDIAKEVRRIKHVIAHWLLIHEQRPPKGVKGWTQAHWRWMRDLELSPLDRTVLDHYLDVLHLLAERLKQIEQQVVAFAETPPYRERVTRLRAFKGFSPLAAMRVIAEVMDFRRFPRAAAFMKFTGLVPSEYSSSDRIRRGRITKAGNSHLRCVLVEAVQRGTRNAHMGRDLLKRMACVSGPLREVALRCLTRLHHKFWKLTRRGVAGGKVKVALARELAGFVWAMMTLPETADAAA

SEQ ID NO: 245646 - protein, 353 aa, unidentified
MLPNSQLRKETLQMKFIGMDGHSRTSTFVVMGKSGKVLRRAKVKTQEDELLAFVRSVKGAKKLAFEEGVMSQWLYLLLKDEVDELVVCQPQEKRGAKTDEIDAGELADLLRVGRLKPVFHADNDLMHLRTLISGYGDVIQELTRTKNRYRALYRQVAIPTNVSGFYESMEMLNLLDTEVRRYVACTLFEQLSLLEEQRRGYVERFEANVRTYKPIRLLTSIPGLGPVRANRIVGVMVTPYRFPKKYNLFAYAMLTKHNRTSDGKLYGKKRAHGQAVLKEVFKSAALSAIRSNTAFRRKYDAMRNAGKTDKAARNAVAKKVAATALGVWKTGKKYNDKHMEVTRRRSQNCHSGD

SEQ ID NO: 245647 - protein, 367 aa, unidentified
MKKVSTAEAKASRNFSQQKLTIGLDLGDRNSWYCVVDEAGQIQQEQRVGTNVKALREVFAALPQSRIALEIGTHSPWISRLLSELGHEVIVANARKVRLIGESRKKDDRLDAQTLARLARIDPELLYPVKHRSAQSQADLMMLRARAGLVRTRTGLVNTARGLAKSYGERLRGCNVRNMNPEKAEGLSPELHAALEPLLAAIELVSERIAEYNERIEKLAQESYPQVALLKQVKGVGTLIALTFLLTLEDPHRFRKSRDVGGYLGLQPGRRKSGQSEPQLHISKEGDPYLRTLLVQGAQHILGPFGVDCDLRRWGLKLAQRGGRNGKKRAIVATARKLAVLLHHLWVSGEVYEPLHNRNRVPVAAAA

SEQ ID NO: 245648 - protein, 345 aa, unidentified
MQYTAFDAHKHYTWARVEGADGTLVREKKILHERGAFQQFLAGCEPGSPVAVETVGNWYWIVDEVEAAGCLPQLVHARKAKLMLGTVNKTDRLDARGLVRLQRTGTLPVVWIPPRELRDARELPRTRMVLVQQRTRLKNRIHASLNKYGILLDVSDLFGQRGRQELRARLSELPPHTGFVVSRLLEQVEGLDREIKGLEQRMEALFAVDDATRVLMTLPGVGFILGTVIGTEIGDVGRFGRHEQLAAYAGTVPRVHESGGRRHYGPVRSDVNRYLKWAFVEAANGVCRTRRPHSQRHTSRLYERIARRRGHQKAIGAVARHLAEATYWMLTKGEPYREPGMSRGA

SEQ ID NO: 245649 - protein, 309 aa, unidentified
MTHSIVGVDVSKDWLDAYRRTDSKNRRFANTKQGRQSLTRWAEGARVAFEPSGPYHRALEQHLAVAGIGAVKINPLQVRRFAEAVGTRAKTDTVDARLIAVMAAQLELPATPPLDQITRDLKALQIARQGLVKDRTTAKNRAQSHECRFLKSQAAARLRHVKSQLAALDAEIATLIAGDEHLARRRDILLTIPGISAITAAALLAEAPELGALEGKAAASLAGLAPMTRQSGKWNGRAMIRGGRAHLRHALYMPALVAARFNPDLKALYDRLISAKKPPKVALTALMRKLLILANALLRDGRPWTEKPA

SEQ ID NO: 245650 - protein, 404 aa, unidentified
MYNAVGIDVSKSKSTVAVLQPGGTVIRKPFDVSHTSQNLNELADYLSSLDGTTKIVMECTGRYHEPMVKALSEAGLFVSIVNPHLIKNFGNNSLRKVKSDPADARKIARYTLDNWTELRQYSGMDNTRTQLKTLNSQFSFFMKQKVAAKANLIALLDNTYPGVNKLFDSPTREDGSEKWVDYAYSFWHADCVRKIGLKAFTERYKSFCKKHHYIFQQDKPEKLFNASKELVAVFPKEKTYKLLIQQSIQQSNLASEHVERLRREMNELASTLPEYSTVMGIYGVGKTYGPQLIAEIGDVSRFTHREALTAFAGVDPGVDESGQHKSKSNRASKVGSARLRKTLFQIMTTLLQNAPEADPVYRFLDKKRSQGKPYYVYMTAGANKFLRIYYGKVKECLRNLEQTE

SEQ ID NO: 245651 - protein, 355 aa, unidentified
MSEQYAGRQIVGMDLHRRRSVLVRMTDTGERLETVRISNDPEYLRQVMARAGEAPEVVLEAAYGWYWAADTLAELGATVHLAHPLGVKMFAYRRVKNDQRDATDLADLLRMGRLPEAWIAPPETRELRGWVRHRAKLVGLRSSLKCQVHGVLAHAGIWVPMSDLFGVAGQQLLAELSTGDRLSVESRSRLDSALRVIAALEFEIELFTKLVNGRLRTDPGYRAIQQIPGVGPVLAAVFVAEIGDIARFHRPEQLASWAGLTPKHHESDTTVHRGRITKQGSRLVRWAAVEAVQRVSGHTRLGQVRDRVAARRGRNIGVVAAARELLTLVFYGLRDHHIRALDTPAPPPAADRSAA

SEQ ID NO: 245652 - protein, 341 aa, unidentified
MRGWNAASAATEARCRWPWKGTTAGRAPLDTLVRSHGYRLFNINNLKLARFKEIFPAAAKNDRIDARKGLELFQLCDHLPVARGVLQEVAATPLENDQLKRLTRRRRALVEERSRLLCRMQADLQAACPGLLAITPNADNVWFLNLLTHSDDLCKLARLRATTLLGIKGIGRKYAALITAWQKSAHFSHDVAWVGPMIIEDARRILELRAAIKALEARCAERVAQSEIAQCIDSIPGFGLVCAAEIAGELGTVARFANDGSLAVYMGMATLDNSSGKHRGSKNPKHVNTRAKAAMMVGIDRHRKQVPESQRYYEKNERRERRTTRPFARLDAISAASFFRC

SEQ ID NO: 245653 - protein, 441 aa, unidentified
MPRRIGLDVHREFAQIAVWEDGLVRQAGQVATTPEALRTLADSLLATDEVAIEATCNTHAIVRLIAPRVARVVISNPMKTRAIAEAKVKTDKVDAEVLAQLLAADYLPAVWMPDERTQALRRQVARRAHIVKQRTRLKNQVQSILHRNLVPRPPVADLFGIKGRCWLANQALPPDEELTVEALLRQLDFHGQELRIIDAELGRVALEREEVKRLMTIPGVDATVALSIVAAVGDFHRFPRPEQLVSYLGLNPRVRQSGGAPASHGRITKHGRAHARGMLVEAAWVAVKTPGPLRAFYERIRSRRGMQIAVVATARKLAVLCWHLIIKGEDYAFQRTSLTQQKLRKLELRAGMPSRRGQKGKAAGYSLKEVRRRERELAEQAEQAYRQLVADWQAKAPKSKPGVAAANGTRVSRPSAGQAARQASVPEPALRSGVDHALTEA

SEQ ID NO: 245654 - protein, 384 aa, unidentified
MICRWALRRGLRKEHRQFGAFKRDRRALADWCAAIDPAEIVMESTGNYWKSPYAALEKVGIRAKVVNARHVKNVLGRKTDIGDAEWLAMLSRAGLLRGSFVPEADHRELRLVSRQRQKLVGILASEKNRLHKVLTDSGIRLGVVVSDLHGQSARAMGKAFIEGRPPEEVIQLASRRLKASRDEMMDALHGELTPTHRFVLDELMQHIEDIEERIRRFDQKLLEGLSGAGDALMVLQTIPGVDLIGAAMLLVEIGTDMSVWENEERLSSWVGICPGNNESAGKRKSGRMRKGNPYVRRLLCEFAHAASRTESTFKAKFQGLLVRRGRKRAIVAIAHKLLRTIFFMLKCGQHYRDTTVNDEEMSVKRKAARWIKKLTEFGFLPKPA

SEQ ID NO: 245655 - protein, 387 aa, unidentified
MTVRSVNNLPAATHGETVRCLFAIELSKQSWVIAFNTPLSEKISRRTLKGCEWKGLLELIEEVRARVSRETGRAVEVISCYEAGYDGFWLHRQLEAHGIRNYVIDPASLQVDRRARRVKTDRIDTERLLRSLMAYLRGEPKVWSVVRVPSVAEEDARRLHRERDRLVSERVQHVNRIKGLCALHGIYDYNPLRPQAMARLEQLRTTQGGALPQRLKSEIKRELQRLELVVEMIATLEAERDAIVEDEASTHLNAKKIQNLHKLKAIGPEFAAVLVGEIFHRDFNNRRQLASYVGFAPSPFQSGNVAHDQGISKAGNRKGRTTGIELAWLWLRYQPDSDLSVWFRARVGTTKGRIRRIAIVALARKLLVALWRYLETGLVPRGAVLKG

SEQ ID NO: 245656 - protein, 490 aa, unidentified
MKRQSTTKSKRMKYRFRRGGKLPKHLECINENAAGIDVGSREHYVCVPDDRDAQPVRTYGCYTPDLEAMAQWLRDCGIHSVAMESTGVYWIPVYRVLEAHGLEVHLVNARHVKYVPGRKTDVLDCQWLHKLHTFGLLSGSFVPSHDINALRTYRRQRKNLVQSASREIQHMQKAMTQMNLHLHVVLSDISGVTGMKIIRAIVDGERDPEKLATLRHPSVRKSAGEIAKALTGHYRDEHIFALTQAVELYDVYQDKIADCDRQIEQRLSQFETKADPCELKDAPSKSNKRRRRKNEPHFDLRSELYRITGVDLTQIPGIDAMTAFTVISECEIHAFPTVKQFASWLGLSPNNAITGGVIHRRSTKTVYNHIAGALRMAAQSLHRSTSYLGAYYRRKRQRLGAPKAITATAHKLARLIYGMLTQGQDYIERGQQQEEREYQERRIHYFIKGLTEMGLEVLNPETGEILTGPQDPKNRKNVTAENKELKPCVS

SEQ ID NO: 245657 - protein, 416 aa, unidentified
MNAVGIDVSSRKSTVAVLRPLGEVVCLPFDVTHDIAVLASLAEKLKAIDGETRVVMEHTGRYYEAVAKALHEAGFFVCAVNPLLIKEYGANSLRRVKTDKADAIKIARYALDNWADLRDFTPMDAIRYDLKTLNRQFQLASKQRTASANNLIALLEQSFPGIRKCFDSPVRSDGTQKWVDFAHSFWHVDCVRKQPFPAFCERYRKWCKLHAYFFKLRNAEKVYALAKSAVVLTPKSKVVKVLVQEAANQLISISRSVEVYRAEMDRLAAMLPEYPVVMAMYGVGKSYGPQLMAEIGDVRRFERKQALVAFAGIDPMPNQSGDKNVRSNKSSKRGSPYLHKTLFNVIRTYLQCAPQDEPVFQFLNRKRAEGKPFYVYMLAAANKFLRRYYAKLRDYFASLDTLQPVAPIPTILKAAL

SEQ ID NO: 245658 - protein, 376 aa, unidentified
MERGSLMLNTTTFVGLDVHARSIKAVALDAMTGEVRSATFAYDAAAVAEWVGSLDPAAKCVYESGVTGFDLQKGLAALGVDCVVGAVSKMIKPSADRKRKNDRNDAEFLARMLSVGNVVEVWVPDDGCEAARDLVRALDDAREDLKRCKQRLSKFLMRHGYAFSETTPTGRRKGNWTAAHWAWIRSIEFPEKADDDVLAYYIDATRQAMEDKKRLEKLVEAEASKPRWKKRVDSLRCLKGVDAMTAADIVFEAGEFSRFKNARSFAAWLGLTPSEHSSGESVRHGGITKAGNKHLRRVLVEAAWHYISASPHPKDLAKGQAPDPAARRHAAKGIRRLVKRREEMLGRGVHKNKANVATARELACWCWAIGRMVENG

SEQ ID NO: 245659 - protein, 312 aa, unidentified
MEITTVGLDLAKNVFQVHAIGSTGGVVVRRSLRRAQVIPFFSKLPPCLIGMEACGTSHHWARELVGLGHQVRLMPPAYVKPYVKRGKTDDGDAEAICEAVTRPTMRFVPIKSVEQQAALALHRTRDLLVRQRTQLVNMIRGLLAEFGIAIPKGITNALAFVRRAAAGEANEVPDLATKVIAALAEQAIEVQCRIRQLERDLLASFRSNDLARRIATVPGVGLLGATAIAATVTDPTQFRSGRQFAAWLGLTPLNNSTGGKERLGRISKMGDQYLRRLLVTGMTSLVRRNKHHPGSADPRINALLARKPPPGL

SEQ ID NO: 245660 - protein, 387 aa, unidentified
MAQVNDLSRSLTAFDPISTLVVVVEMSKASWLVSGAVPGVERQPLKKLEPDATALLRLIERWRNEAVRAGRPISRIALAYEAGRDGFWLARWLIARGIEAHVIHSASVAVSRERKRAKTDRLDAAMLMRVFLGWLRGERGHCGMVAIPTMEEEDARRPSRERESLVNERSRITNRMKSALARLGVRGFKPHLRKAPERLAGLRTAEGTGLPMNIIEEFRRDMARLALVREQISSIEKTRAERLERAPDTGPHAMVRLLARVIGIGIETADMLVREVLSRKLRDRRAVARYAGLTGSPDESGLKRREKGLAKAGNARVRRGLIQLAWRFLVFQKDSALARWYRTRTEGPSGARKTTMIVALARKLLIALWRLVTTGEVPDGVKLRPAL

SEQ ID NO: 245661 - protein, 345 aa, unidentified
MIEQTAAALQEWVAQMRARFPQGRIAIAIETSRGAVISALAAYDFIVLFPVNPAMLCSYREAFCVSGAKDDRTEAMLLEEYLRLHWAKLRPLEPDTELTRKLGGLVENRRGLVDERSRLVNQLHSLVKTYFPLVEALFDELTTPLAAHFLLQWPDLASVQKAGPASLRKFFYGHHCRSDKIMEERLQTIAQARPLTQDAALIEPAVLKAQALAGMLQVLHQSIEQMETLIEQTTDAHPDAALFRSFPAAGPALAPRLLVAFGTKRDRFASAQEVQQFYGIAPVKKQSGQSKVISMRHRCPKSGRQTFHENAGHAVRQEGWAKNVMSSRENEKKAITPPCARWPSN

SEQ ID NO: 245662 - protein, 393 aa, unidentified
MICVGIDVAKDKHDCFILNSEGEVLADVFTIPNNAEGFDRLLQTIRRCARPEDKMKVGLEATGHYSYNILGFLLDKGLPTYVINPLHTNLYRKSLSLRKTKTDRVDARTIAAMLMSDVDLKSYTDTVYHNEELKSLTRYRFDKVRERAKLKQSVSRLVTILFPELEKLVSSLHSASVYALLSEFPGAKQISSTHMTHLKAVLKNASQGRYGQEMAETIRNAARSSVGSVMPAKSLELQHTIRLIRELDAEIEDIETAIQAIVDEMQSPITTIPGMGVRMGAVILAEIGDFSRFDSPDKILAYAGMSPSTYQSGQLSLSGAYSHMEKRGSRYLRYALYNATKHVCHWDPTFAAYLAKKRAEGKHYNVALSHAAKKLVRLIFAMEKSQRPYCAAA

SEQ ID NO: 245663 - protein, 411 aa, unidentified
MQVIYERCCGLDVHKRTITACRLRWLGSEWQKEIRQFGTMTKDLLALSDWLVKEGCTQVAMESTGVYWKPVYNILEGQVELLVVNAQHLKAVPGRKTDVRDAEWIAELLAHGLLRGSFVPPPSVRELRELTRYRSSVVRDRARTVNRLQKVLEAANIKLASVVSDIDGVSARLMLEGLVAGQRDTEQLASLAKGRLKEKHGQLVEALSCRLQPHQSFLIAEHLAQIDYLEGAIERLSGQIEEKLRPFEPQIGWLDTIPGINRRTAEVLWAETGGDMGRFASARHLASWAGMCPGNNESAGKRRSGRTRKGSPWLRHCLVEAAHGAAHTKNKYLRSQYHRIAARRGKKKALLAVGHSILVIAYHLLTRKQAYADLGANYFDERDRQAVTKRCVNRLQKLGYQITLEKLQMAA

SEQ ID NO: 245664 - protein, 367 aa, unidentified
MKKVSIAAARQSRNISRQKLTIGLDLGDRNSWYCVMDEAGHIQLEQRVRTSETALREVFGAMPQSRIALEIGTHSPWISRLLTELRHEVIVANARKVRLIGESRKKDDRLDAQTLARLARIDPQLLYPVKHRSAQAQADLMMIRARAALVRTRTGLVNTARGLAKSYGERLLGCNVRNMNPEKAEGLSPELQCALEPLLSAIAELSERITEYNDRIEALAEASYPQVELLKQIKGVGTLIALTFLLTLEDPHRFRKSRDVGCYLGLQPGRRNSGQSQPQMHISKEGDPYLRTLLVQGAQHILGPFGVDCDLRRWGLKLAERGGKSGKKRAIVATARKLAVLLHHLWVSGEVYEPLHNSKPNMLATAA

SEQ ID NO: 245665 - protein, 321 aa, unidentified
MENEVMVGVDVSLARLDVAVWPNQEIFRIGNDAAGIEQLLARMLELRPRAVIVEASGGLEDLLVSELCAAAIPVARVNPRQVREFARSLGKLAKTDRHDALVLAQFGHSAQQSGRLILTELRPEAEEEIKALVRRRRQIIEMLVAETNRRLRASKVVKKSIVASIRGLKRALAELEQQLRETVQNSPAQQKKVALLRQVPGIGEHLAHTIVAEVPELGKLGRREIASLIGVAPHAHESGKFKGRRMIWGGRRAVRNTFYMAMLSASRYNPLLAPFYRRLVERGKSKKLAYIACARKLLVILNAMFRDHTQWNPSLAFQHSR

SEQ ID NO: 245666 - protein, 413 aa, unidentified
MFCGIDWAERHHDVALVDEAGTLLAKARITDDAAGYHQLLALLAEHGDGPDDPIPVAIETSHGLLVASLRTGSRRVFAINPLAAARYRDRHGVSRKKSDPGDALVLANILRTDMHAHRSLPADSELAQAITALARAQQDAVWTRQQVANQVRSLLREYYPAALLAFQGKQGGLTRADARVILTLAPTPAQASKLTLAQLRAALKRSGRLRGCGTEAERLRDVFRSEYARQLPGVEDAFGHQLLALLKQLDATYQAADDLAKAATAAFHQHADSEILLSFPGLGPMLGARVLAELGDDRARFTDARALKSYAGSAPITRASGKKRFVGRRFVKNNRLINAGFLWAFAALTASPGANAHYRRRREHGDWHAAAQRHLLNRFLGQLHHCLKTRQFFDEQRAFVPMALSPEASSAQT

SEQ ID NO: 245667 - protein, 388 aa, unidentified
MLLDHPSDGLAAIRTQFGAIFVSLELSRSTWLVTSMSPGKGEKMSKHSVKAGDIAELLKLFAALKRKAPARTGESYPIITIQEAGLDGFWLHRVLQLEGIESHVVDPASIATPRRRRRAKTDRLAGETLLRTLLAYKRGEPRVCAMVVAPSAEEEDRRRLCRERKTLIAERIEHGNRIKGLVFAQGISDDAPRRSNRRARLEALRTGDGRWLPAHVKAQIGRELDRLELRLGQIEAVEADQDALLAAAIKPAGETCGPDPVTMLLALTSLGPNFAAVLWSEAFSRPFANRRQVAAYAGLAATPWRSGGIAREQGVSKAGNPRLRTTMIQLAWLGGRHQPQSALTLWFKAHSARGRKRTIVALARKLLVALWKDVTSGVVIEGAVMKTV

SEQ ID NO: 245668 - protein, 353 aa, unidentified
MNLLKYIGMDVHKAMTVIVVLNGLGEKITEAIVQTTSIAIVDFLRGQRGALHVAFEEGTYAAWLYDLIRPHVATVLVCNPRKIVAEGDKNDKIDAQRLAELLRTKALTPVYHGEQSTTAVKELIRSYNGIVQDGTRIKNRVKAIFRGRAIQCSGSALYSSEERESWLRRLKDEAVRARANRLLQQLDSLEPLREDAEKELLAEARKQRAVFRILQSPPGIGPMRAAVIFGIVGTPHRFRTRKQFWTYCGLAVVTKTSSEYEMVNGQISRSKKRPLVRGLNRNYNRALKEVFKGAAKTAAAGEWKSRFDAMVANGTPESLAHLTLARKIAAITLALWKRGERYDEKKLTTAHAA

SEQ ID NO: 245669 - protein, 408 aa, unidentified
MKTLYGRCAGLDVHKVEIVACLRLAKKAKVVREVRRVPATTQGLFELVEWLETAGCTHVAMEATGVYWKPVWHMLEGHFALILANAAHVKAVPGRKSDVNDATWLADLLAHGLIRASFVPPKPIQELRDLTRTRKQLTREIVQHVQRIQAVLEEANVKLSSVITDILGPSGRCILKALIAGETDAQKLAALGSERLRCGRAALCEALTGRVREHHRFLLAQHLKTIEQLEESVVAFDIRIEDAVAPFRDIVNRLNEVPGLGRIAIETIIAEIGTDMTPFPTAGHLVSWAGLVPRLDESAGKRRSTRIKNGAPWLKPALVQAGWAAARSKNTYLQAQFLRLKARRGPKKAVIAVAASILIIVFHMLRDGTCYQDLGPEYFARRNPAKLAARLANRIRNLGYHVEISAAA

SEQ ID NO: 245670 - protein, 344 aa, unidentified
MAEVSTIGLDIAKSVFQIHGVDVEGAVVIRKRVNRAKVLEFFAALPSCLVGIEACPTAHHWSRRLQALGHTVRLMPPSYVKAYLKRSKNDANDAAAICEAVMRPSMRFVATKSEQQQSILMLHRSRELLVRQRTMLSNAIRGHMAEFGIVSAKGRNGTAELLAILANEQDDRFPIAARFSLDVLARQYAVLTTEISIIEKRIHAWHRTCEESRRLQEIPGVGPIVATALIAEVSDWKAFSSGRGLAAWIGLVPRQHSTGGKERLGGISKQGNRHLRWLLVAGAMAVIRYARKHGTKRLWLIRLMGRRPIKVAAVALANKIARMAWAMMVRGERFKEQNLLPAVA

SEQ ID NO: 245671 - protein, 360 aa, unidentified
MKKDSTQSPEGQVIYVGIDVHKNSWRVTELSDGVVRKTYSAPPSAAALGARLRREYPGAEYRSVYEAGFCGFHIHRELEAQGIANIVINAADVPTSWKERAGKNDTVDSRKLGRELANGSLNPIYAPPPENLRLRDVVRAESQSVKEVTRELNRLKGHLALRGEELPGDSGRALKLRLRQAWRDGDRGTSIRIVKVLNRRAERAAVIREERAVLDELGLWPLLLRVTSVPGVGFRTAVVVLSEVWDMSRFPTESRLASFAGLAPRLTGSGEHERLGGIGKRKHRLLQGILVEAAWVAVRKDAELRGKYRELAFRKTQQKAIVAIARRLLMRIRAVWLREEDYAPRPDAGDGVVAEGAAEE

SEQ ID NO: 245672 - protein, 409 aa, unidentified
MMKQNIIFGIDVSSKSSTVCVVIDRIKQGETFKITNDSFGYQDLLDRLNQYLITPLVVFEATGVYSLSLQALLEDYHIKYLKLNPLKAKKLMDNNLRHNKTDKVDAYRLALIQFNAPQKLRAPQPKEYHELQNASRYYEELTQALIINKNQLHRNLQSTFPQIESILSTSSGRVYWTIVSLFPHAQYVLNHNENQIFQSLLAISGIGRQRAHYLTTRLYALARQAYPYDNESSITIRAIQRNIANLLSLSAERDNVINYMEKLAMQANARSLNIYESIPGIAKTTAVRLVAELGDLRRFDTSAQIDAFVGIDPGRYQSGEKDSHLGITKHGNHLARKILYRTITQMETVKATQPCHITDYYDKKKRSSNSRGYKKIAIASVHKLIRTMFALIKHDQLYDYNVATHNQRL

SEQ ID NO: 245673 - protein, 349 aa, unidentified
MGEVSTIGVDIAKSVFQIHGVDAGGTVVIRRRVGRARVLEFFADLPPCLVGMEACATAHQWARELKKLGHDTRLMPPTYVKAYVKRGKNDAADAAAICEAVTRPSMRFVPIKNVEQQSVLMLHRTRDLLIRQRTQLINALRAHLAELGLVAAKGREGVHQLVTVVTECGGERLPSNARFACQAIVTQLHAVQIEISGLDKRITQTHRVNADSKRLDTIPGFGVILSTAVVATMTDPKAFKTGREFAAWIGLVPRQNSTGGKERLGSISKQGDRYLRRLLVVGAISIVRTARMWPDKYPWVIELLGRRPAKVVAVALANKMARIAWAVLAKGENYRAPTRSSNTTIAVAA

SEQ ID NO: 245674 - protein, 379 aa, unidentified
MRFFGIDVHRKYCEGAELLPNNTIRHFRFPNERKAWEKFARGLDDQCKVALEATGNALMIYDILSAHGAKVVLVNPMKTRAIAEARIKTDKIDAEILVRLLAADFVCESWVAPKEERDLRTLLHHRAALKKQVVSIKNRVHAILMRHSIPVPVSDLFGVKGRRFLFSLEGLPEVEKIVMASNLKALEGLEAEVKAIEKELYLRAKTLPGVELLLGIPGIDVLAALTILAEVGDIRRFASAKKLASFAGVVPSVHQSGKVRYTGHITKGGRSMLRWIIIQVALQVVRHPGSLRDFYLRLRGRKGHKIAIVATARKLLTIIWVMLTRNVSYEYSRDDLKEKKIKRMVKRAMPYTVGSDMPQKITSYLATEDDILKIPESAA

SEQ ID NO: 245675 - protein, 360 aa, unidentified
MQPEASQEVKDRMARFVGIDISKTKCRAAIMDPGGIILEEFTFANNHEGIEGLASRLNLDDRVVMESTGSVWTNLYNHLDARHIPVALANPLKTKAIASAKIKSDKVDARILAHLLRSNLIAESYVPPQHLREIRALVRHRVGIVKIRTMIKNEIHALIDKHGLKHEFSDLFGKHGLEWLRNIELPPLDRLILNNHLTHLESLDQQTERVDEEIHNKACEDEDVRLLLSMTGIDVYSALLIRSEIGSIDRFPDYKKLVSWAGLAPSLHQSGNVEYHGSITKQGSRMLRWIIVEAARVAVNHDTRMRGFHERVKHRRGDQKAIIAVANKMLKIIWFMLTRREPYQSRNEKRYQQKLNSIAS

SEQ ID NO: 245676 - protein, 364 aa, unidentified
METAEEHVYSAWQEQKAQEEEKMREKRSIGIDLHRRRFTCCVRLENGRNYLSEWSLEQLPRFLQKLRRTDEVAVEVTGNTRLFYEAVAPFVARVVVADPNQLCVTSHSVKKTDPHDARNLALYLAKGLLPEVRMKDKEQAEVASLTQTRDRLVKLRTALKNKVNNLLSARGIELDKESLSSEKGLTWVLEQKIEPLAHLELDIIVEQIRSLNRSIARLERVIDEAGKKLEGHRNLTSIKGIGSLGASILLSVIGNVNDFAHEGKLAAYFGIVPRVQDSNETEHRGRITKRGSKLGRTALVQCALIAKRYSPYLHRYYERIRARRGTGKAIIALARKFLSIIYHTLKNNWIFEDFPNFVLAEAKT

SEQ ID NO: 245677 - protein, 354 aa, unidentified
MKRTTKYVGLDVHQATTVTSVRESSGRVMARSVVATEAAALVEYFAGMRGSIHVAFEEGTQAQWLHDLLVPVVDRVVVCDRRGEPRAGNKADQLDADKLSRLLQSGSLRAVYHGSTDRITLRELTRAYRSVVEDATRVMQRLKALYRSRAIRARGRRVYSPKQRAQWLEQLPDRGARFRAQALLTQLDVLRVLRPKAKAAMVAEARRDPAWEVLRSIPFFGPVRVALLLATLKTPWRFRTKRNLWGYGGLAVVTESSADYEFGRGRVVRRRRQPLTRGLNPNHNRVVKEVFKGAATAATGRPGALRDFYEARVARGMRPEMARLTLARKLAALTLRLWKTGERYDPAKLTAQST

SEQ ID NO: 245678 - protein, 358 aa, unidentified
MVDKVTEAAVVGGVDTHKDLHVAAVVDQNNKVLGTQYFSTTRQGYRQMLAWMTSFGTLKRIGVECTGTYGSGLLRYLQNAGLDVLEVTAPDRMERRKRGKSDTIDAECAAHAAFSGIRTVTPKTRNGMIESLRVLKTCRKTAISARRVALQIIHSNIISAPDELREQLRNMTRMQLIRTLGSWRPDASEYRNVTNVYRISLKSLARRYLELHDEIADLDVMIAAIVDELAPELIKRNAIGYESASQLLITAGDNPQRLRSESGFAALCGVSPVPVSSGKTNRYRLNRGGDRAANSALHIIAIGRLRTDAKTKEYVARRVAEGHTKMEAIRCLKRYISREVYTLLRNQNRRINSIPITA

SEQ ID NO: 245679 - protein, 467 aa, unidentified
MKHNGRRQSPSRGRVSPTLLTQLNPNVAGIDCGSAEHYVAVPPDRDPHPVQSFKTFTTELNRLADWLAACGVTSVAMESTGVYWIPVFEILEARGFHVLLVNARHLKNVPGRKSDVTDCEWLRDLHSVGLLRGSFRPAEAIVTLRAYLRHRQTLVESASMYILRMQKALVQMNLQLPLVVSDITGLTGLRILRDITAGRRDPVQLAEHRDPRCHASKADIIAALTGNYRAEHLFVLEQNLQLYDTCQAQLATCDAAIEAHLKALTARRAAPPTSLPAARTKKKRSRNEPRLDIRSFLHHLTGGVDLTQIDGLGPHTSLKLIAEIGTDMTRWPTEKHFTSWLTLAPNNKISGGRLLGSRTQPSANRAAAALRLAAEAVGKTQTALGAFYRRLAFRIGKPQAITATARKLAILVYRALSGTLVYHDPGATAYDQQQQARAVRHLHRRAAALGFELVNRNTGEVPSPAGA

SEQ ID NO: 245680 - protein, 455 aa, unidentified
MSKSNRTDTPLRAARAQISNPEITVHATYRSAIGIDVHLNLLVCCHQKQVEGHCEQSESRDFNTDRASIDAFAAWCRECNPDIILMESTGSLWQSPYDALERAGFTSERLALINARDAKAAAGRKTDRKDASRLASLARTGNFRKSFVPEKDFRLQRVISRDLQKNRNDISRTSNRFGKSLNLTGCRPTTVFSDIRGGKAASCILMAKLRDDPHLFEVIKQNSRRLRASPEQIMQALNFEIEPMMKEQILALREKINQLEEYDRSTFERLRQLQAPYEKDIQLLITITGIQERSARMIYAELCANLKEHFPTSEQFASWLGICPGDNTSAGKQKSGKCPKGNKHLRRTLIEAARGLVVGGTAALKEKFQVLKMRRGYRRAMVAFAHLLARIIYSVLTHQKGFEPYQSTAFRDTLIERAKNGVKQLLKLKGTKYVIADGLVVETKTGAILGAVVSS

SEQ ID NO: 245681 - protein, 407 aa, unidentified
MEVVYRCCCGIDVHKKLIVACLNKGGKRELREFGTTTGEIKQLGNWLTEEDCQMIAMESTGVYWKPLYNLFEMMDLEAIVVNASHMKALPGRKTDIKDAEWIADLLRHGLLKASYIPDREQRELRELARYRKSLIEERAREINRLQKVLEGANIKLDSIVKDINGKSSRKLLEKIVSNEAMTADDVSEMIHGRMRPKLDAIMRSIEGITTPLQRMLIAKIVDHIDDMTRRIEELDGMMKEYMEKYEQAIAAIDELPGIARRSAEVIIAEIGVDMSRFPSAAHLCSWAGVSPGNNKSAGKRKSGQITKGSKALKTILTQCAKSAKNCKDSYFSAQYQRIAARRGKNRATIAVAHSMLIAIYHVLNEGVAFRDLGADYYDNFNREHKVRSYLKRLQALGWTPDAIASVA

SEQ ID NO: 245682 - protein, 387 aa, unidentified
MSRNARVPIPVTTLDQDSTLVVVLELSARSWLVGARVPGIGRMSRYALAPSAEALAAWLGTAKARAGAAGRTVVRVVLAYEAGRDGFWLARYLEARGVEVYVIQPSSVLVDRRARRAKTDALDVEMLMRTLLAWLRGEPGVCSMVPIPEVAEEDGRRPVRERQGLIGERLALLNEIDGLLATLGITGYRPLRRDRRAQLAALRTPEGDPLATNAAARIGRILDRLELVMQQIAELEQVRDAVLAKEVASGEAETMIRGLARLKGIGAELATVLVWEAYVRSFPNRKALGAYAGLTGTPFASGSTTREQGISKAGNRRLRSSLVELAWLWLRYQPDSKLAAWFRSRTGSVGSRMRKVMIVALARKLRVALWRFCRDGVLPECAALKAT

SEQ ID NO: 245683 - protein, 347 aa, unidentified
MGYFAGLDVSLEETAMCIVDDAGKIVREARAASEPEALIAFFAECGMKMERVGLEACSLTAWLNTALTEAAIPAICIEARQAKAAMGAMPNKTDRNDARGIAQIMRTGWYRAVHVKSPSCRSWRALLTARRMVLNKRRDVENGIRALLREVGLKVGTPSRKDFPARVRELAADDPVLAALAESLLAVIEVMTKEADKLTKRVIDEVRVEPTCRRLMTVPGVGPLTALAFRATIDQPGRFRKSRDVGAHLGLTPRRYQSGETDIQGRISRCGDELARTALYEAAHSLLIRSTKWSALRAWGMNIAKRRGMARARVAVARKLAVILHRMWVDGSEFRWGKQAAASAAAA

SEQ ID NO: 245684 - protein, 408 aa, unidentified
MKRYYMGVDWGDRLHQVYVGDQEGKKVREMKVQESPQGLAEIGRWLDEKRAEGFELWAAIEKPQGRIVDFLLDHGVEVYPVNPKAVDRVRDRYRMSGSKSDAFDAYVLAEFLRTDQAHLRALRPSSEKAQELKMLSRDQRRVVRHKTRFLNQLTTTLKEYYARPLEVFEDLETEIALDFLQRYPTPAHLSALTRKQFNRFATKQHHLSKQRCEELWEKLNKPQLAVPEHVVRAKAQLVEVLIEQLRASIKAVKIYNHRVESFFASSPAAQFAKTLPGGKSGTLVAAIWAELGDAQGRWESSRHLQAEAGAVPVTKASGKSRVVHFRFACNKHLRYTMYWFSFVSLNHSEWAKLYYRGQRDNGHSHHQALRALGAKWLKIIFVMWRDHKPYDENYHLANIARQKMRQAA

SEQ ID NO: 245685 - protein, 404 aa, unidentified
MSAVSGIDWAADWHDVRIADADSGELLIEQRFAHDEAGIGALVELLIAQRVARVAIERPEGLLVGRLLAAGIRVLAIHPNQVAAARDRFRAGAGKSDRFDAFVICELCRTDQHRFATLAPSGDETIALQALVRTREDLVAVRTHLANQLRAQLDCFWPGAGRIFADIDSPIALAFLARYPSPEAARGLGPKRLHAFLARNAYSGRRPVGELLARLRSAPTAAIGELQAEARHTAVAGLVAALAPIVDQISLLTSQIAGAVRAHPDGPIFLSFFRDPKSTITAAGLLAEIGDNRARYPTPDSLAADAGQAPVAKQSGKRRHATFRWACDKRLRNHFGVLADSTRHWHPWAHDVHARATGRGCEHPHATRVLGRAWNRVPWRCWQDHQPYDPTRHGSLLDLLERRG

SEQ ID NO: 245686 - protein, 363 aa, unidentified
MTPRQNAMFSWGIVLAGRKYWVGLDTGVAETAVCLIDEFGEILFEGKRETHAGQIKDILRPFGVEAVQRITIEAGVGTHMVRELQAQGFPVYVAEVRRAAKFLAIRRQKTDSNDARGLAELGRVGRTIGAEVFVKPLDCQNLRSLLNVRKNLIQQRMKIDALTQSIVRLHGGKLKTNSGVGGLAKGIEDQLEVLRADGLDVDADVRPLISIAENLRSHIGGMDKRLRATALAHPVCSNLMTVPGVGPITALSFYSAIGDPSRFQRNRDVGPYFGLTPSIHQSGVLARVGRISRFGSKLTRTHLVSAATVLLCSTKTESALQTWGLTLRKKVGLSKARVAVARKLAVVMLHMWKSGSSFDPART

SEQ ID NO: 245687 - protein, 399 aa, unidentified
MSLDRPFAEPAAIQTQLGAIFVSLELSRKTWLMTSLSPGGGEKMSKRAIKGGDVAALLARLEELRQKALARTGTSHPVIVIEEAGLDGFWLHRVLEEEGCESHVVDPASIAVPRRRRRAKTDNIDGEALLRALLAFKRGEPRVCSMVRPPTPEAEDERRICREREALIEERVRHVNRIKGLLFSQGVRDYAPLRRDRRQRLDALHAGDGRPLCPHLRAQIERELDRLELLLGQIKAVESARDKLLDRLAERPRKDAPAPAGRQPSPVAQLFSLKGIAEELAVSLWTEGLSRPFVNRRQAGAYPGLTPTPWRSGQLDHEQGVSKTGNQRLRTKMLELAWLWPIHQPQSALARWYRQRLPTMTGKAGRKRLTVALARKLFVALWKFVSAGVVIEGAVMKAS

SEQ ID NO: 245688 - protein, 386 aa, unidentified
MDQATASTASANTLHCALELSKKSWLLAIQFPDREQPSLYPITGGDTEGLMAKLTAARDRWAKTSGALPMITLCYEVGYDAFWLARFLKTRGIECLVIDPGSLQVSRRGRRVKTDRVDVKTLLRTLIAWCRGERHVWSLVRIPSIDEEDLRRSHRERSRLVRERTAHINRIKGLLFAQGIRGINVKSRYKTLAVDKLVTGDDHRLPPRLAGEIAREIQRLAMVQEQIAEIERERDAAPTTCEATERKRDLLSQLKSVGPTISAFLSREVYYRQFANQRQVGSFLGLTPSPYDSGEEEHCQGISRAGSGHARAIMIEAAWLWIKHQPKSALTRWFVERTAGQSKRVRKIMIVAVARKLAIALWRYVELGLVPQGAIINPPMTRKARS

SEQ ID NO: 245689 - protein, 329 aa, unidentified
MRYLGIDVSKAKLDCLLLDPATGKQRSKTVANSAGGLQALLHSLHSWGVPLGEVHAVLEPTASYHEEAALALHEAGLRVSLVNPAQARQYAQALGMRSKTDALDAAVLARFAAAHPPQLWSPPSPAARALKALLSRRDAVAADLQRERNRQEKLLPPPHTPEAVATSVAQSLAFLQTQLDELQRQIEQHIDQDPHLRGKRELLLSIPGVGERVAQHMSALMSVHDFQSADQLSAYLGLVPVQRQSGSSLQGRSRLAKNGPSALRRLLYLPAITAKRHNPCVKAIYDRLIAQGKPKMAAIGAAMRKLACLCFGVLRSGLPFNPQYQAHKA

SEQ ID NO: 245690 - protein, 261 aa, unidentified
MKYTPVGVDIAKHLIQVHFINEHTGEVVDKQLRSKDFLTFFSNREPCLIGMEACGGSQHWARELAKLGHRVRLLQARFVKAFVMGNKNDVMDARAIWMAVQQPGKEIAVKTEEQQSVLVLHRSRRQLVKFRTAQINALHGTLLEFGETIHKGRAAMDREFPAALERMKARLPPYLITVLEDQYNRLSELDTLIDGIEKQLHSVARQNEGCKRLMEIPGVGPLIATAAVATIGEISAFKSGREFAAYVGLVPKQTGSGGKVH

SEQ ID NO: 245691 - protein, 358 aa, unidentified
MKNDTENTSFFEMILLFVGIDVHKAKWVVTVRTYDLELKTFSMKPSAEELEKFLLKNYPGAEYRIVYECCFSGFWIYDYFFEKGYKIIVTPTNRIYKDGSTIKTDKIDSRKLAFQLSRELLREVVVPAKRIREYKYIFRIYDRQKMRQGQILRQIKAFLEQKNHLLKWSRWNKGLLEKLKELKFVDKLFDLKFGNLLKEYEYVASQIKDSEKIIERIKEDAELGGRITRIEKINGIGIISAVRMSVYLFDQKERFENSEKLNHYLGLTPSERSSGDKITRGRTGMCGNRQLRSIIIQLAWMTVRKDGALLDKFERVYKKSGSKQKAIVAVARKLMTKIFAVIQKEEEYRINIRTAKAA

SEQ ID NO: 245692 - protein, 419 aa, unidentified
MFKIFRKNCCGLDVHKTWIYACIGITDTNGRTEYKQARFSSFSKGLRELDEWLTLYSCDEVCMESAGKYWIPVFNVLEKSRKVTLAHPKYTKPQKGNKTDRKDAKWICDLFMCDMVKPSFIPPPAIRHLRDLVRYLRKLTNMETGEKNRAQNCLTVSNLKLDDVFSDVFGKSALSITRHIIDHPGESFDVAPFVHRRCKTPIEEIQAAVDGAISPEQAVKLRQCLDHIEELEAHKESIVMEISRIVEPFSDTLSFLRTVPSFDSNPMTAVTVLSEIGSDMTVFPSAKNLCSWAGCCPRNDQSGGKVKSTRISRAGTYLKPLLVQVANALVKSKKHTEFGERYRRIKARRGHKKAIIAICRMLLTAIWNILKKHVSYTADGFRSERPVNPSRTLTTAQALQMLRARGYTIKDAPDSPATA

SEQ ID NO: 245693 - protein, 341 aa, unidentified
MKTLTHVGVDLHQRFCYLTAVDASGKKLKQSQVVNEGAALRAWLRQVPGPRQVVVEASGFWPAFARAVAPEADQLVMVHPQRTKAIASARLKNDKVDSETLAHLSRADLLPEAWMANERTQQTRLLTRLRITLGQQRAKAKNQLQAVLHQEGFLKPVSDVFGKKGRLWLAGLALSPAGRVVVEVWLKVVDQMDEAIAAQTKALEKMAAADARARWLQTVPGIGPYSAMVILGEVGEIERFGSKRALASYAGLTPSVRESAGKRKRGGIGHHGSGTLRWIMLQVAQVACRCSPAARACYGRLKQRKPAQVALIALARKLLTAVWALLSHGVCFDENVFARQD

SEQ ID NO: 245694 - protein, 558 aa, unidentified
MVLSSPFGSVAPWLAAWTLVSLHPALALGAVIPFGRVCRLSPKAGLAHAKLKNFNHDPNMKKREQSPSVPAGQIRPAKQMPLVHSHAAGIDLGNEAHFVCVPADSVPQGQSPVRQFGVFNPDLDEMVGWLKRCQVRTVALESTGVMWIPVFQKLESAGLEVVLVNTKRLKHVPGRKSDVLDCQWLQQLHSYGLLSGSFRPVDIICRLRTLMRQRQNVIASAGSETQHMQKAMQEMGVHLHVVISDVTGDTGLRIIDSILDGQRDPKELVKLRDCRIRRSTPEEMEAALKGDWRDELLFVLGQSRQAYTFFQDQLAKLDEKIIALLADIPQAPPPQGPAQDVPSVPANEDKGSPAATSNDPCPSETVATQGKRAKKVKSKPSKGGNHLPKDIRPELTKIFGTDLTLIPGLNLVNVLILLSEIGSDLKKRWRDGDAFAAWLGLCPGAKISGGKVLSSRTPHVVNRVASILRLAAVVIGRTETCLGVFYRRMKTKHGAAKAATATARKLAVLIYHLQTTGENYKEPDRKNYDEKVRKYKVMRLTHQAKELGFNLVPLEKAA

SEQ ID NO: 245695 - protein, 351 aa, unidentified
MDRYIGLDAHASSCTLAVIGPSGKRLGSHVVETNARALIEVLRGMPKSRHVCLEEGTLTEWLHEVLEPHVEELVVTGVSKSRGPKSDKRDAFGLAEQLRIGAIKTRVYKGRGQFRRLGNLAKAYGFLVGDTVRVKNRLRSVLRSRGVAYGAGQSVYAKRDREQWLAQLPEAMRAQAELLYEEHDLLVALRQKAEKTMLAEARKHREWHVLTTCPGLGPIRIAELLPVVVTPYRFRSRSGFWAYCGLGIVMRSSSDWVRSPSGHWAKTPVQQTRGLNRNFNHTLKRIFKGAATTVIGRAEDGPLYRHYLSLLDGGTKPNLAKLTIARQIASIMLALWRTGERYDPTRLEATE

SEQ ID NO: 245696 - protein, 393 aa, unidentified
MQRDTKEVLAELVGKLKAKLDPTKVAATSAGEKHQRGELRPNLDRLTVGVDLGDQWSHYCILGLEGETLAEGQLRTTQEDLATFFQGLNGARVVVEVGTHSAWVQEVIRGCGHEVLVANPRLMDGSKRRKRKNDRIDANKLARLGRVDPESLYPIQHRSREVRQDLVMLRARDALVAARTEIINTTRGLVKSMGTRLPKCSSRSFAQKGEEAVAVEMREALLPLVRLAATLSADIKEYDKKIEELGREKYGHTALLRQVKGVGPITALAYVLTLENPQRFAKSRDVGPYLGLVPKQEDSGESQPQLGISKAGDTMVRKLLVGSAQYILGPFGPDTDLRRYGLRLCERGGKNAKKRAAVAVARKLAVLLHRLWVSGEVYAPLHHAMSAPIVAAA

SEQ ID NO: 245697 - protein, 402 aa, unidentified
MNCVGIDVSKGKSTIAVMRPFGEVVVSPFEVCHTASELSELARLLKSLDGETRVVMESTGNYHAPVAWLLHGAGLYVSVVNAMLVHDYGNNSLRRGKTDKKDAVKLANYGLDHWLTLPRYVPEEDARLMLKTCYRQYQQYSKVQTMLKNNLISLLDTAFPDANRLFTSPPRADGSEKWVDFVAAFWHCECVCGLSKKAFTTKYQKWCRKHGYNFSEDKALDIYVSACGRFGVMPKTKTAKLLVEQAISQLQATSAALAALKQEMQSLAASLPEYPVVMGMFGVGPTLGPQLIAEIGDVRRFHSKKALVAFAGIDAPPYQSGQIDVRSRSISKRGSASLRRTLFLVMGVLLQCAPMDEPVYQFMNKKRSEGKPYRVYMMASANKFLRIYYASVKAYLDSLEHN

SEQ ID NO: 245698 - protein, 415 aa, unidentified
MQALYRCIAGMDVHRMLYVVTILVELADGTEEKHQRSFGGFKRDRRALVAWLVELGVELVVMESTGIYWKSIYSTLEKAGIPAHVVNARHVKNVPGRKTDLSDSEWLARLGRYGLVKPSFIPPEDLRELRVVSRYRDKVAQTLAGEKNRLHKVLDDAGIKLGAVVSDIHGVSAQAMIDGLIDGTPIEQLPDLAKGTLREKHELLELSLDGELTPRHLFVLKNIREHIRYLESELASLDAYLIDAMAPYADYWRFLQTLPGLDQISAAMILVEIGTDLQAFDNVQHFASWAALCPGNHESAGKRKTGRIRKGNHMIRHLLCEAANAARRTNSVFRSFYQSLVPRKGHKKAIVAVAHKLLRTIYMLFTRRQAYRDPGIDYQAMVVNRNAPRWIRALKKYGFWPKISTLNAPIAAPVH

SEQ ID NO: 245699 - protein, 432 aa, unidentified
MIQAEIERCAGIHVGKKWLAVCILVGPLDREPRAETRRYGTNVADREQLRDWLQPPRITHVVMASTGSYWKPVFNILEETLTVYLAHPQQVKPRKGHKTDNKDGHWLAHLLRHAMIQPSFLPPRPIRELRDLTRRRKKLIAAGTGEKNRIQKVLADANVKLGNVLSDVFGVSGQLMLEALLEGQAQPEEIARLAQRRARQKIPALVAALQKHRLSEHHRRLIRFSVEHMELLERQILRLDEEIAAQIQQIGLTRQWELLQSIPGVRADSAASILAETGADMQVFGDAPHISSWAGVCPGNNRSAGKSKSSHTNQGNPWLRGTLTECAQGAAKTKNCFLKEKFWRMTTKHGGKRAAAVMAVAHNLLCLVFQVLSTGPPYQERSVGPLEPRRRERMIRHHIRRLGKLGIAVRGSGTGAPARASLRSGNELRHGT

SEQ ID NO: 245700 - protein, 319 aa, unidentified
MSQNDPGVVGIDVAKDKVDACIRAFKLRQTWPSTAQGHRKLVGWLRKHQVNKAVMEASGGYERAWARVLREAGIEVRIVDPKRVRNFALSAGRLAKNDSIDAEMIAWFAETFSEAPSQTHDAAHEELQALVKARLDLIDFRMRLVSRSEHAAPGLVQKAHAHILKSLTSEIAKLEAAISAKIKSTPDFAERAEIIESVPGFAETSSANLVAGMPELGQVSDEIAAALIGIAPYDDDSGKRRGERHIKGGRRWVRNAIYMPCVGAATQNNPVLKAYYQRLLAKGKEPKVALIACMRKLIVILNTMIARRQKWDPSRYALS

SEQ ID NO: 245701 - protein, 413 aa, unidentified
MEVVYPRCSGLDVHKRFLVACLSVVEPSGKRHKELRQVSTMTCDILALKEWLKASGCRQIAMESTGVYWKPIFHLLEDSFEIVLVNAQHMKAVPGRKTDVKDAEWIADLLQHGLLKASFIPGSEQQAVRDLTRTRMRLLQERTRLINRIQKVLEDANLKLASVVSDIMGVTGQAILRALVAGEVDPEQLAQLARGSLVRKTDQLQAALQGKLTPHHRMQLEELLQLIATLDRSIARFDREVAERLRQLDALIERIDAVTGLSRRSIEVLFGELGWDMCHFPDAAHAASWVGICPGQRETGGKQLSGRTRQGNRWAKTVLIQAAHAAGHTQTYLGEQYRRISARRGSKKAAMAVGHSILVIFSQMVKTGEPYHEKGADYFTTINKDKIQQRLVRQLERLGNTVILHPQSETTPA

SEQ ID NO: 245702 - protein, 329 aa, unidentified
MLFVGIDVSKSKHSCYIIDFEGTIYEDNLQISNNIKGFNTLSETINSICKTHDLSNVKIGLESTGYYSTNIKNYLHFKGFEVILFNPMITNSKRKSNTLRKTKTDKTDAKVIAMMLLTDNSKSYSPISYQIIELKSLTRFHHRIVNQRGKDKAIELKQLAAKSIGSSNRATAFEIQTTNNLIHVLDKEIKVIDQKIKTIVDEINTPLITIPGISYTLAAIIIAEIGDINRFANPAKLLAYSGLDPSVYQSGQYNATHTRMVKRGSKYLRWAILQAVKTVAMRDKTFKDYLNKKLKEGKHYFVALSHAGKKLIRVIFYLLKNNTTFVPQN

SEQ ID NO: 245703 - protein, 405 aa, unidentified
MDIIVDKGCGLDVHKGTVVACVMGTGIRKEVKTYTTMTNDLLRLKKWLQEAGITHVAMESTGVYWKPVFNILEDSCEVILVNARHVKNVPGRKTDVQDSEWLCKLLRNGLVKGSFIPPREIRELRDLTRYKRKLIQTIVAEKQRVEKVLEDANIKLSSVASDTFGASGKRMIEELIKGEMEAGEMAELSKGRLRQKRGDLKEALVGGVREHHKFMIKASLNHIRAMEKILSEIEGRIQEKIDRHYKEEYELLQTIPGVKENASTIIAEIGVDMDVFPNEMHLSSWAGMSPGNNESAGKKKPANTTYGNKCLKTMLTEFGWVASKTKDTYLRSKYHSLVGRRGKKKALVALGHKILIMCYHILKYKRPYKELGGDYLDKRRKDRIARSYIKRLNHLGYEVILQEAA

SEQ ID NO: 245704 - protein, 320 aa, unidentified
MAEKKSETFIGIDVSKQQLEVAAHQRDYQFRCANKLSAFGELVAELISWRPALIVLEATGGLETRVVSALQGAGLPVVVVNPRQVRDFAKALGQLAKTDRLDARVLAHFAAAIKPPLRPLKTKEQQELDALTGRRGQLVEILADEKNRRAATASDTIRDQIQEHIDWLEDRIAELDKQIKAQLQTSPRWQLKDQILQSVPGIGPVASFSLLADLPELGTLNRQQISKLVGVAPLNRDSGQQRGTRHIYGGRARLRRVLYMAALTATRHNARLKEFYQRLRANHKPFKVAITACMRKLLAIINVMIRDNTCWKIKEAPVSP

SEQ ID NO: 245705 - protein, 452 aa, unidentified
MEEPQEVQDEEWERVWERVAAIDVAKASGVVCTRVPDEDRPGRRKMHVWTVTATLGAVTGLGDHLRCQGIQIVTLESTSDYWRIWYVVLEAAGLKVQLVNARAVKNVPGRAKTDKKDAVWLAKLTERGMLRPSFVPPYDIRRLREFTRLRAELVHERSRYWARLEKLLERALIKISAVASTLDTQSCRAMIEALIAGQRNPKVLADLAIGKMRAKRAELAGALDGRFEPHHGELARILLDQIDQLTARIDQLSARVSELIEAIPAAQGVDADGTTGPGAGTGPGAPVLPAVARLDEITGCGVIAAQAVIAEMGLDMTVFGTPGRLVSWARRCPQTRQSGKKTSAGKAGKGNPWLNGILGEIAASASRTDTFLGERYRRLARRRGKRKALAAVARSILVIIYHLLADPEARFHDLGPDYYDNRVSRERKIRNHVRQLQALGLTVTITPAQDAA

SEQ ID NO: 245706 - protein, 366 aa, unidentified
MKKTSIVRVNGNMIFKGHKLTIGLDLGDRWSNCCVLDEAGEVLLEQKLPTTPEAMKQTFERIPRSLIALETGTHSPWLSRLLKELGHAVLVAHAQKVELISKSKRKDDRHDARTLARLARIDPELLGPVRHRSAKAQIHLTVIRARAELVSARTALVNAARGLTKSYGERLPKCGTEQVSRELAAKLSAELREVLEPLLKEIESLNERIKEYDARMEKIARESYPQVALLQQVKGVGTQIALTYVLTLDDPRRFAKSRDVGCFLGLKPGRRDSGQSQPQMHISKEGDPYLRTMLVQGAHYILGPFGEDSDLRRWGLRLAERGGKNAKKRAGVAVARKLAVLLHRLWVSGEVYEPLRNSQQAMRAVA

SEQ ID NO: 245707 - protein, 458 aa, unidentified
MRILGIDLAVTAKHRAILGDGRGRFISPIIKFRTRQADLERLYTRARQGMEPNEALAVVLEATDIVWYAVAIYFHCRGATVYLVNPRMAADLARFYQRYARSDRLSAKVLVRLPVVNPDSLYVWTLPGADYLALQRGCKELERLTTQASAIQNRLRSTDHLGWPDLHQRVFPEPFSRAACWFRDHFYDPRRVVEGGASGLRQAWRAAEVYDGDEDWIELLLTLAQEVLSLYGEQGSYLDYRALAEEVQREQRRLAELEADACFVRLQVTRPRYRQLHPSRNLETIKGVGQDGAAVHVAFVGDPSRFATNRAFRGWSGLVPYSSQSGEREGKGLRITQAGPDLVKKYAFLEAESARQWDPQIAAIYYDQMVNKGKHHTQAVCACGTHVLDRIRVVLTEDRPYELRDVDGTLVTPQQARAIIAERYAVSDEVRQRSNHRARRERAERQAERKEERRSRSR

SEQ ID NO: 245708 - protein, 343 aa, unidentified
MQVSTIGVDLAKNVFQVHGVDSAGKVVIIRQLRRKQVIDFLSKIPPCLVGMEACGTAHHWAREVSKLGHTVRLMPPSYVKGYVKRSKNDAADAAAICEAVTRPSMRFVPIKSADQQALLMLHRTRDLLIRQRTQLINALRAHLAEFGLVAETGREGLAQLAAIITDEGNREALPSAMKQALQAIVDQLAALELQIGALDRAIHAHHRANDMSCRLETVPGIGVIGATAIASTVTDPSDFKSGRDFAAWIGLVPRQHSTGGKERLGGISKQGDRYLRRLLVVGATAVVRHARQHPQKHPWVMRLLAKKPAKLVAVAVANKMARIAWAIMAKGGHYRAPELAAAA

SEQ ID NO: 245709 - protein, 417 aa, unidentified
MSSTPDRVVIGMDPHKRSATIEVMGADEAIHGGGRFGTDRNGYAAMLRYGKQWPHRVWAIEGCAGIGRHIANRLLADGEEVVDVPPKLSARARVFATGQGRKTDATDAHSVALVGTRMTGLRPVVNDEQLAVLRILVDRRRSLGEDHTRMISQLHQLLLELIPGGAKKDLSARQAKALLAKVRPRDAAGKTRRRVAAELVADLERIYQRKKSADKELTDLLAATGTSLLDLSGIGPSGAARLLVEVGDITRFPTKAHFASWNGTAPIDASSGDQVRHRLSRAGNRQINRVLHIMARVQIRNPSEGRDYYERKKTDGKAPMEAMRCVKRRLSDIVYQQMLNDAITHTLIPTGTDPGGQQGNDSVSSVTGSHPSVGSSDKPLPGPATTTIRPSTQPVLRPRSPRPLTAPTRSRRQAHSA

SEQ ID NO: 245710 - protein, 335 aa, unidentified
MEITTIGLDLAKHVFQVHAIAADGTVVLKKRLRRGQVYSFFAALTPCLVGVEACATAHFWARQLRELGHDVRLMPAQYVKAYLKRGKNDAADAAAICEAVTRPSMRFVPIKGEDQQAALMLHRARDLLVGQRTQLINAIRGHLAEFGVIEAQGPWNVPRLLAGMEEAGLPDLVPGLVRLLASQLEEVELRVDEIDTQIMAWHKASPVSQRLAGVPGIGPLVATAIVATLPDPTVFRSGREFAAWLGLVPRQNSTGGKTRLGRTSRQGNTYIRRLLVIGAQSALFCSKATKANPWIQALLAKRPRLVVAVALANKMARIAWALMARQTTYQAAAAA

SEQ ID NO: 245711 - protein, 444 aa, unidentified
MAVRKREDEVFPNAAGIDVGASSHWVAVPRHLAEQAGCESVREVGAMTDDLNGLADWLIRCGVDTVALESTGVYWIPVFEVLEQRGLKVCLVDARQMKYVPGRKSDVQDCQWLQKLMSLGLLRAAWRPASEVCVVRAVARQREILVTEQASWVQRMQKTLVQMNIQLTEVITDVMGQTGQAIIRDIVAGQRDARVLARHRHRRVKASQDDLVKALTGNWREEHLFVLGQALAMYDDIARHLQACNAKLDALLAERGAVNVEIGKAPKAGSKARMEFDARQALANWAGVDLTRINGLGVTTVMKLLTEVGPDMSRFATVKHFCSWLGLCPGTKISGGKVLSSGTKRSANRARQALKMAAMTLSHSDSALGAFYRRLCTRMDKPRANTATAHKLARMVYFMLTRGQAYVDQGQQHYDELQRQRSIAALQRRAAALGFQINPVMAAA

SEQ ID NO: 245712 - protein, 310 aa, unidentified
MDGVNAAIEVGKHKLVVALGSAGELWSQDNESRAIRQLCKRLAEAECARVLIEGGSYQNVLVAALRAAELPVIIINPRRVRDFAKGIGQFAKTDRLDARVLALYGERNQPALRELPDQQTQSLRALWVRREQLIEMLGMEENRLEHAPKALQRSLRAHIDYLRKQIKQADDDLDQTIRNSALWDKYELLTSVPGVGPVLGAALLSALPELGRLNRAEIAALAGVAPFPDDSGTLHGPRKIQGGRWRLRRVLYVATVAAVRCNPMLKPFYQRLRARGKMPKVALVAAMRRLLLILNAMLKSHTTWRPPCPA

SEQ ID NO: 245713 - protein, 414 aa, unidentified
MEDILECCCGLDVHKESIVACLMKGPMGGGLKPRSEIREFGTQLKELIALREWLEGQDCHYVAMESTGIYWQPVYAVLEQSFTDDMHLLVVNARHMRNVPGKKTDMRDAERIASLLRAGLLKGSFVPEQDIRDLRQFTRYRKALIRDITSQKNRIEKLLQSSGFRLSSFLSDIFGSSGMAIMHQLVQVGSISSQSLEICLKGRARLKAKEILSSLNGTLSVPQRQLLKMQLAHLQDLRDNLQEVENQIRTDFSKFERPIQLLDSIPGIDLTAAYAILAEISSNMSSFPTAQHLCAWAGLAPGNNQSAGKKRKQRVTQGNNYLKTILCEVAWVIASQKDRYLASWYWRLKQRTDAKRAIVALARKLLVIIYAMLKTDQPYNEQRFMERRAVANQRRINRMVNELAGLGYAVSSTA

SEQ ID NO: 245714 - protein, 349 aa, unidentified
MKRTTIGLDIAKRVFQVHAVDPESGEVKRTKLQRSEVLRHFAQLHPSLIAVEACGSAQHWARELRKLGHEVRLISPQFVRPFVKSNKTDAADAQAIWTAAQQPEMRSVAIKTEEQQAVLALHDIRSRLNKSRNAAINQLHGLMGEFGVELPKGWRKMLPQAATALDSAGSPVPALLRPQLRFQLMEIRGLTARIAEVEGDISAWMRQREDCERIAAIPGVGLLTATAAVATIGEARTFRSGREFAAFLGLVPRQRGTGGRVQLLGISKRGDRYLRTLLIHGARAVISVRKGKYASDPKTWLDRVLHRRPTNVAAVAQANKMARQIWAMLAHGRIYEPNRGVPEVAAAPA

SEQ ID NO: 245715 - protein, 362 aa, unidentified
MRIIGCDLHARQQVVAMLDTVTGEVVSMILKHEGNNVREFYSKLPQPVRVGIEATGSMQWFVNLMEELRIECLVGHPAQIRAAEPRKQKHDRRDADLILKVLVENRFPAIWLPSKELQDLRSLLRHRHQWVRMRTRIQNALQSIALANGLRRGTSLWSHDGQNTIASLPLAPHTAYRRNELQALYAKFEAEIEKLNQRVEEQACKRAGARLLMTHPGVGPVTALATDVFLGDPARFADSKALASYAGIIPREYSSGGRQRLGGLTKQGNPLLRFLWGEAGAHAVRRDPELQRFYRRKLIQKGFGKASVAVARKLGIRLWIMLRDQIEYNEFCRRGQKQQKSSDACAGMPATRYGANSHRPID

SEQ ID NO: 245716 - protein, 404 aa, unidentified
MKNDRSLFAGLDWASKTHAVCVVDDHGQIVVRFEIPNTGKTFAGLIKRLIKLNVLAVAIERCDGPLVEALLDSGMRVVVITPRQVKGLRSRYTGSGAKSDAGDAYLLADVPRTDGHRLAALARDSEATAVLRALSRTRKELVEARVALVNQLQAELERVFPAAIGLFSRLDSDVAIAFLRRYPTQHAAATLTRSRFAAFLRRISYCGRKPVEELFARVQDAPPAGLSPGEAQGRAACVLALLRTIDAVRHEEHELEADIIEHLDAHADAHIFTSLPRAGHGVRAAALLSEIGDVRSRFPDEQSLAALAGVAPVTRASGKMHTVGFRYACDKKLRNAIIDFADDSRHASPWAAKIYQDAIARGKRHPHAVRILARAWIHIIWRCWHDGVAYDPQLHRGAVMLAAA

SEQ ID NO: 245717 - protein, 320 aa, unidentified
MSDSLVIGLDVDSKEFVPAVADCKAGERTPNTRAGIAKWLKTLPPRCRIGMEATGKHHELVARMAGQVGHVVYVINPRLIKNYAKATGARGKTDAMDAQVIARYVKKESDRLREYVPRSNEQQQMHDLLRKRQTLVEARARLEQSFDVTKSDPRELADIFRALASTLSALESDLQRLGRDGEQGPLYKRLLTIPGIGPAVAAHLVYYMTRWPLANANAWIACTGLDPRPNESGGRTGRRRLSKQGAPILRQMLYMAAMGLKRCRNGQPLYDELSKRGHPSTAVFNILARKLARIAWGVFKSGRDFDPAMLKVSQACFQQA

SEQ ID NO: 245718 - protein, 317 aa, unidentified
MDVETKADRFVGIDVSKARVDVHVRPDGIAFGCATDPEGLGALGARLKPLLPCLVVLEASGGYEGAVAAALVEAGLPVAIVNPRQVRKFAGAIGRLAKTDAIDAAVIAHFAQAVRPPARPLPDDLSVRLAELMARRRQLVVMINAEKQRLAKARDPIAQSSFKAVLKRLQAERARIDKAIDRLIEVSPLWCAKQDLLKSVPGIGDVVARTLIAELPELGRVDRHQIAALAGVAPINRDSGRYRGKRKIQGGRVEVRAPLYMACLVAIQHNPVLKSFYRRLREAGKPARLALVAAMRKLLILLNAILRDQRPWAHAQT

SEQ ID NO: 245719 - protein, 344 aa, unidentified
MTYYTGIDVSLRSVSICIVNDRGEVCLEAKVEAEIDAIVDRLRRFSSEVKSVGFEAGTLSQYLTYGLQAAGFEVICLEARQVSVTLAAMRNKTDRNDARGLAQILRTGWYSRVHVKSLQSHQVRALLTSRKAILKKCVDLENELRGLLKVFGIRLPSRVGHGSFDAELRETVSTDEMLACALVPLLDARTVLYKTYLKLDNAVKGLVRVDPICRRLMSIPGVGPVTALTFKAAVDDPNRFKSSRTVAAHFGLTPRRFQSGEVDNPGHISRAGDADVRSVLYIAAHSLLTRNAQWSSLKAWGVRLAKTRGHRRAVIAVARKLAVILHRMWVDGSEFRWGPETASA

SEQ ID NO: 245720 - protein, 346 aa, unidentified
MDHYVGLDVSLKLTAICIVDQTGKIEREGTVASNPEAIAAFVKLHAPHVARVGLETGATSTWLWTELNKMGLPIICIDARHAKAALKMQINKSDRNDAVGIARIMQCGWYKEVRIKGLDSHAIKALLVSRALLVKIKRDLENQIRGLLKNLGLVIGRAKMNVFAVRAAELIEDRPELAAAVDPLLRAREAIERQIVDLDRKVTRMARSDVQVRRFMTTPGVGAITALCFLATIDDPTRFQKSRSVGAYVGLTTRRYASGEIDWKGRISKCGDAMMRSYLYEAANVLLTRVAKWSTLKAWGIRLAKRSGLRKAKVAVARKLAVILHRMWIDGTEFNWSSKEVAAQVA

SEQ ID NO: 245721 - protein, 405 aa, unidentified
MGRVFVGHDWAETHHDIYVVDGEGRRLGKARLVEGVEGVVRFHELVAQFVEEPDEVVVATETDRGLFVGALVAAGYQVLAVNPMSTSRYRQRHSTSGAKSDQGDAFVLAELARSDGHHHRRIAGDSETAEAVKVLARAHQSMIWTRRRQVNQLRSMLREFYPAALVAFDDPGSADALAVLAVASTPALGRQLSRSKIAAALRRGGRQRRIEQRAIEIQAALRSEVLEAPGPVAEAMGTTTRALVAVIGELASQIAGLETELTNRFDQHPDAKIIRSLPGLGTILGARVLAEFGDDPNRYADAKSRRNYAGTSPITRASGKHRVVLARYARNRRLADACYLWAFAALNASPGARQFYDHHRTAGATHNRALRALANRLVGILHGCLHHHSTYNEHTAWAHRTQQAA

SEQ ID NO: 245722 - protein, 386 aa, unidentified
MDAPTHGCAPLDRTVFGREEHGLLFGGMDTHKDTLAVALIDPSGKRRNAITVANTVTGHGELVAWLAVHGPVERLGIEGAGSYGRAVALALLAADIRVVEVPPALTMRERRRCRALGKSDPSDAVAIARITAREDDLPPIAPEGLAEDLKLLVDYRDQLVGERTRVANRVHADLTITHPGYQSQCRDLRSAASLAKARQIVDQDHGVRSELIGKRLDRLAELDTEIRALERRLRALVTDSGTTLTEIHGVGVLLAARILGEVGDIRRFTSKAKFATSNGSAPIPASSGRTQRHRLNRRGNRRLNRALYIIAITQARADHPGRHYLQRKQHEGKSRREALRCLIGELSGAAARRSSRGSLGGARGWPRCRATSMASLSTATPGIPRP

SEQ ID NO: 245723 - protein, 350 aa, unidentified
MPRNFDTAVVTIGIDPGKNTLHLVGLDARGEIVLREKVARTKIVSRLANMRPCLIGIEAGMGTHYVTRDLLALDHDVRQVPPVYAKPFRQTHKNDFRDAYAVAEAVQRPTTRCVPPKTDEQLDLQALHRVRYRLVGQRTAIINQIRCFLLEHGITVRQRLHWLRHALPDILAQRTDVLSPRMVRILEDLAQDWRRLDDRIEAVSGEIDALSKNTELCRHLMTIPGIGPIISSAVVAAIGDGAAFTRGRDFAAWLGLVPKQISTGDRTILGRITKRGNRYLRMLFLQAARVVLLRPRNWMQHSFGPWLAAAAQRLHHNVLATALANKLARIAWSVLVQHRDYEARLSVAAT

SEQ ID NO: 245724 - protein, 370 aa, unidentified
MVWTAPYGIECARMRLSETHSWEPSVSQIIRIGMDTSKHIFQLHGVDASEQVVLRKRLGRKAMLAFFAKLPPTVVAIEACGAAHHLARELGKLGHTVKLIAPQLVKPYVPRNKNDGRDAEGLCEAASRPRMRFVPVKTIEQQAALMLLGVRDQLVARRTQLSNTLRGYAAEFGLIEAKGLDKIAALQAAIARDDSVPALARELFATLARDYAQVQVELKAIEAKLVAWHRANALSRRLAQIPGVGPVTAAALVMKAPDPHAFRSGRLFAAWLGLTPKDHSTAGKTRLGKITRAGDESLRRLLVAGATSVVKQAKGRSRGPRWLLELLERKAPKLAAVALANKMARIAWKLMTTGESYDSARTDSQVASAA

SEQ ID NO: 245725 - protein, 395 aa, unidentified
MQTLFVGIDVSKDSFSVAGLDAQGATAFSLTTGMTRAGFSELFKAISSHSVALSDAVVAMESSGCYHLNLFSFLSSKGLRTLVINPLVIANFSRLSLRKTKTDRKDAFTIARFILSHRDSVEQFTILQAHQDLKDLAREREFTLKMISSIKNEIKRLLQSTFPELEHLGNVFSDTMLQFLSVFPSARLIRMAEPQAISHAFEQRDKRKRISVPPETIRRAARNSIAAVSLAKEMILPGKIETLLHLEERLAQLTKMLVKLCETTMQEDLKILTSIDGINNITAAPFLAEMGDWRGFRSYKQLIAFAGLDPSIHQSGTFLGVSRLSKRGNRHLRRLIWLMTFCAIRMEGPFKAYFIRRKTEGLPFKKALFATAHKLVRVIFSMLNNRTCFVAQPTA

SEQ ID NO: 245726 - protein, 408 aa, unidentified
MNPLYVGIDVSSKSNVVYFMLPDGSKHCNFSVANSHTGSSQLVKRILSAMTSCSLDTVLIGLEATSVYGDNLVYFLREDAALARFNSKIHVLNPKQVSKFKEAYNDLPKNDLIDSFVIADCLRFGRINKEVYLGDYRYKALQNLTRARFFAVQNLIKEKQRFMNVLFKKYSTMTQEKVFSDTFSTTALAVYDEFESAEALADMDLHELTAFIMEKGKNRFPNPNAVAKAIQKAARSSYRLPKTVNDSVNQVLSISITSIKALEAQIKEFDKAIATQMELLPNVLISIPGIGPVFSAGIMAEIGDINRFHNQAQLAKYAGLAWKQHQSGDFEAQTTRLINSGNRFLKYYLCEAAFSLVRCDKEYSDFYHLKYKEVNRYQHKRALALTARKFVRLVFRLLKDNRLYTSAE

SEQ ID NO: 245727 - protein, 389 aa, unidentified
MKYARVHVLPETSPGGLTAGIDWGSADHAVCVVDAAGQVHARFTVCHDRAGIGKLIAGLRAAGVREAAIERNDGVLVDALLEAGLMVVVITSRQMKNLRSRYGSAGARDDRFDAFVLADVLRTDRARLRPLAADMPATAALRAAVRARRDLVAHRIAACHQLRAHLAVVFPGAIGLFAHLDSRISLAFLARFPSQDAVDQLREEDLAAWLCTLPHRGKAPRPGQLHARLQAAAHGTSGADGAARAPVTAALVATLTTLTAQIKALEAGIAAQLAAHPDARIFTSLPRAGTVRAARLLAETGDCRARFPDPGSLAGLAGVTPVTRRPGKHISTGFRRAVNRQLRDAVCDFAADSRHANPWAAAIYDAARARGKDHPHAVRIPARAWIYVL

SEQ ID NO: 245728 - protein, 369 aa, unidentified
MTDLTLFVGLDVHKKTIAVAVIEGVAGAAVRFYGTIANTPETVRTLCRKLSRDGQQLYFCYEAGPCGYGVQRRLTRLGHRCDVVAPALIPRKVGDRVKTDRRDAMMLAQTLRAGQLTAVWVPDEAHEAMRDLVRLRAQAMRDLRKARQQLLSFLLRHGRNSPYGHWTKMHRRWLGELVFAHPAQHLALEEMLQRIERAEALCDRLKQAILELVPQWSLAPVVQAIQALRGVSLIVAAAIVAEVGCFGRFESPRALMAYLGLNPSEHSSGATIRRGAITKTGNTLARTCLVEAAWTYRFPPRVSQIIRDRLKELPEPIRAVAWKAQVRLSARYRKLSAAGKPGPKVVVAIARELVGFIWAIARMVEPKFA

SEQ ID NO: 245729 - protein, 422 aa, unidentified
MNYKQNEKINQVKESTLVVGIDIGSTTQYARAFDWRGIELGKVFPFSNSREGFESFKAWMQHLQDKYKKLDAIVGIEPTGHYWFDLGAYLEDEGILLVMVNPYAVKQTKELDDNSQSKNDRKDPKVIAKLVTEGRYSAPYTPDGVYADLRVMVTNRKRLIREMTQIKNRFARWFAIYFPEYTDVFGDYEAQSSMLLLKKVCTPEAIVELGAEKINQIWRDAKLRAVGMKRATTLCETAKRSIGLKKGSSAARYEMKLLLEDYEYKKAQLDAVMEEIEKLCRKIPESEQMLAIKGIGVITVAGFLAEVGDVRRFESPRQIQKLAGLSLRENSSGKHKGQTTISKRGRSKLRAVLFNAAIPLIAKNPEFKSLHEYYTTRANNPLKKKQSVIAISCKLIRVFYAILAKGVTYDAQKLISDIHRQP

SEQ ID NO: 245730 - protein, 350 aa, unidentified
MEKLIRIGIDTSKSVFQLHGVDAAEQPVLRRKLRRGQVLAFFSSLPPAQVAMEACGASHYWARELRSLGHDVVLIPPQYVKPYVQRGKSDAADAEAICEAASRPKLRKNFVPVKSTEQQAAQMLTKLRAQFIGRRTQLANSIRGYAAEFGITAPKGLSQLGELLAEIRADAAIPDLAMDLIETLARDYARVDEEITALDKKLMQLHRSNEVSRRLAAIPGIGPIGATLLSIKVVDARGFKSGRDFAAWLGLTPKNHSTAGKNRLGVITRAGDEMLRSVLVAGATAVIARMRRGGDRIWPWLKALISRKPPKLVAIALANKMARIAWKLMVSGERYRPIGGPSPMMSPAQA

SEQ ID NO: 245731 - protein, 388 aa, unidentified
MNAINIFAPERTAIHTQLGAIFVSLELSRSTWLVTSMSPGSGAKMSKQSVQAGDIAKLMEHFSLLTEKARARTGQDFPIIAIQEAGLDGFWLHRVLVAAGIESWVVDPASIATSRRRRRAKTDKIDGEALVRALLAHKRGEPRVCAMLRVPTSEEEDRRRIGRERKTLIAERIEHVNRIKGLLFSQGVRDYEPMSRARRARLDELRTGDGRPLPPFLKAQVSRELDRLELLLQQIRTVEMERDALVCPTREGTQVPIEVEMLVGLRGIGPEFANVLYSEGLFRHFANRRQVAAYSGLAPTPWQSGTINHEQGVSKAGNPRLRSTMIELAWLWTRHQRDSALSKWFWERALTEKRRKVAIVALARKLLVALWKYVTTGVVVEGAVMKAA

SEQ ID NO: 245732 - protein, 391 aa, unidentified
MFYIGVDIAKNNHEASIIDSDGKLVSESFSFSNSIRGLEKFQKFISSFSIDSNNCIIGMEATGHYWLSLYSFLIDLGFSCVVINPIQSDAFRKMYIRQTKNDSVDSFVIAQILRFGEFSVSHFSDEDTFALRNLSRFRFALVDEASDWKRKLVAILDQVFPEYSSLFSNIYGVTSKELLSKYPLPEDMISIPADELAKMLSKCSKGRFGIDKAKEIQEKASNSFGVKFALKSFSFQIKQIIAQISFLEDQIFEIEDEISSMINSLCPVITSITGIGDVLGAAIFSEIGDISRFERANQLVAYAGLDVAVKQSGNFNATDTKISKRGSPYLRRAIWLAASVAAFKDPALSVYYQKLRQRGKAHGTAIGAVARKLTNIIFAVLRDNKTYIPNI

SEQ ID NO: 245733 - protein, 360 aa, unidentified
MRIIGCDLHARQQTLAMLDTETGEVVNRTLLHEGSQVREFYVALPRPVLVGIEAIGPMQWFLDLLEELGIECQVGDATKIRAAEPRKQKHDRRDAELILKLLVEKRFPAIWRPRKELLDLRALLLHRHHWVRLRTQIQNALQAIALANGLRRGPSLWSYDGQAKIAFLPLPPHASYRRSALQAMYRKMQEEIENLTEQIAEQARQRCGARLLLTHPGVGPVTALATDVFLGDAQRFADGKALASYVGLIPREYSSGGRQRLGGLTKQGSPLLRFLWGEAGAHAARRDPELQRFYRRKLVQKGLGKARVAVARKLGVRLWIMLRDQIDYEEFCRRGQKHSGDACAGMLETRFGANGHRPVD

SEQ ID NO: 245734 - protein, 346 aa, unidentified
MMIIGCDFHPSWQQVAWVDTATGETAEQKLVHASGDAEKFYRQIPTPARIGMESTGNCQWFVEMVTAAGHEVWIGDAAKIRASDSRQQKHDKRDAALLLQLLMEGRFPRIWTPSSQQRDLRQLLIHRHKLVRLRAQAKNGLQHLALNQGVQKKRRLWSEAGQKLLRELALQPWAGRRREDLLRVMALLDQQIQSLDLAVKEAAEKDADAQLLMTQPGVGPVTSLAFVLTLGDVSRFPRGKQVASYLGLIPREYSSGGHQRLGSISKQGNRFMRMLLVEAAQIAVRCDPQFRSEYLHRCHSKPKGVAKVAAARKLAIRLYWMLRTQKRYPEIVSIESSSRVPLVGAS

SEQ ID NO: 245735 - protein, 411 aa, unidentified
MEVRFERCCGLDVHKRSIAACCIYPDAERLKKEIRSFGTMTSDLLALADWLAQRQVTQVAMESTGSFWKPVWNILEAGFELVLVNPLHIKAFNRDKTDVKDCEWLGDLLRHGLLKASFVPERRQRELRELTRYRTSLREERAAEVNRLQKVLEGANIKLASVASDIMGRSGRDMLAALVSGDKTPAEMAELALGKLREKIPQLERALDGKVAPHQRFLVAQQLAHIDFLDEAIAQVEQEIGERLSPFEAQVAERLDPVPGVALGVAQVVIAEVGSNVDRFPTAGHLTSWTGICPGNRESAGKRGRGKTRKGNQALRTALVNAAHAASMKKGSYLQAQYLRLLPRLGKKKAIIALARRILEIVYHLLRDPQSIFREQGAHYLHEDHRERAKLHYLRKLRALGYKVDPEPITV

SEQ ID NO: 245736 - protein, 353 aa, unidentified
MGVDTHLDFHVAVVLDRLGRRLGESKVPTTLKGYRNLLCWAEGFGPVRCAGVEGTGSYGAGLARHLRAAGIAVVEVERPKRRHLRRSRGKSDPKDAEAAARAVLAGEAAGVPKSGDGKVEMIRTLRSARRSAVKARVQAANLLKAILLTAPEELRQRLRGTPTKELAAVAARFRPGGDPEDVEAATRFALRSVARRHQALSEEIAELDAQLERLVAQAAPGLVRLPGVGTHHAATLLVLAGDNPQRLRSEASFASLCGVSPIEASSGKVVRHRLNRGGNRDANRALHMVCVVRMGSDRRTKAYVARRLVEGKSKWEIMRCLKRYIAREVYRVLLSADAPSPPPSGAVVGAKIA

SEQ ID NO: 245737 - protein, 440 aa, unidentified
MTKSSVRYVGLDVHKRVVEACFLDEKGNVVHRERFALNRQTLATFAKDVLRPADHVAFEATTNCWAVADVLRPHVAKVVVSNPLATKAIAQAKVKTDKVDALVLAQLLRCEYLPEVWQPDEETRQLRELTGRRATLSGQRTMMRNRIHSVLAMRLIEEPLQPRLFSLKGLEWLATVEIDEQGRMLIDSDLRQLAFLQQEIDQIDAELAKRAYKNDPVKLLMTLPGVDVTTANALLAAWGDHTRFANADRAASYLGLVPSTKQSAFRCYHGSITKQGNAQARWMLVEAAQHLGKHPGPLGHFFRKLSRKKNRNVAVVAGARKLATIAWQMLTKNEPYRYAIPRSTETKLAKLRVKATGQRRKTGPCKGTPPKALLPGTPGGSRQIKSLAALCQSEGLPPPKALSAGERRTVRSAGASKFVAEIAKTRRVPRRVGKKSVEVP

SEQ ID NO: 245738 - protein, 371 aa, unidentified
MKSIVYVGMDVHKESYTLSCYSFMEEEIKYQQKMKADYKMVIKYLGQVRSRYAEEVEFICGYEAGCLGYTLYHQLKEHGVKCVILAPTTMAEINNKRVKTDKKDSGNIAKCLAYGTYSPVHVPTEEDEAVKEFIRMRDAQKKSLKGIKQQILALVLRHGCSFEDGKSYWTIKHVSWLKSIGLGGVLQESLNEYLVTYDYLTDKISRLDQRIEELANTERYQEKVKRLQCLIGVKTHTALSVLVEIGDFKRFSNAEKMASYLGLVPGESSSGNKQNRLSITKAGNSQVRRLLVESAQGYTRGKIGHKSADLKRRQTGNTTQVIAYADKANERLRRKFYRMTIKNNTNRNIAATAIARELACFMWGLMTDNVA

SEQ ID NO: 245739 - protein, 344 aa, unidentified
MSISYVGADVDCKMTELAVERRGKIIARDRVPTDIRSLGNFLSSIPGRKIMTIEEGEMAGWLYRNLKSKVDDFIVCDPRRNKLICCDGDKDDTIDAGTLAVLLRGGYLRQVYHTDDEERLALKETVALYHDRVRESVRQINKLKGCCRCHGIQISANILKNPLVRNQWLKELKPATLTHQISILLVGYDAVAKQVKMVKKEIAQRSKSYPIIGFWKDLPGVGPIRAITLFAYLDTPWRFGSSKKLWKYCGIGLKRSASGSDKNGRPKPGKLRLYRGANRKLKDAVMGAALCAVIQPNNPFKDHHERMIRNGMTPSNARHTIARKMLSVMWGMWKTNCRYDENLV

SEQ ID NO: 245740 - protein, 361 aa, unidentified
MNRNTGMNAGQIIGTMNGQQVIGLDIAKLVFQLHSVDMSTGEIMNVQIKRAKVLDYFVNKPQSLIAMEACGGAHHWARELTALGHTVRLLHAKIVGPFVSGNKTDATDARAIWIAVQQPGVKFVGVKTAAQQATLTLHRQRELLMKMRTMQTNALRGLLYEFGATFAQGRKALFKDVEQTLEDLSGQLPQMVRDSLREQVARIKEMSQAMLAIEKRLHLQLKADPHMQRIAQIPGVGLLTATAAIATMGDARAFKSGREFCAWLGLVPKQTGTGGKVRLGGISKRGDTYVRTLLIHGATSVLAHAKEPGPWLEQIKARRPANVVIVAQAAKMARAIWAVTAKEQSYQKGFQSVRPNATAAA

SEQ ID NO: 245741 - protein, 331 aa, unidentified
MAVHVGLDVGSRSTAMGWRDKGRSAGSWEILQTPKGRKAAVKKLLALKPLSVVMEATGIYYLDLAIELSAAGLPVSVINPKSSRNFARLMLEHSKTDAIDAQLLAEYGERMSPRLWLPPSPAQLELRAIGRHVNRLTGHRTRAKNELHALMATETTSPLLIEDEQEAIATFDKRIERFRQAGRDLIASCPVLKAQFDHMLAAPGMGEVSTLAALAEMTALPTFLKAPQVSRHAGLDVRLTQSGTSIDKPGRLSKCGNAYLRSPLFMPAMSAIRCDPLVKAFYDGLVARGKRKMQAICAVMRKYLTGLWACMQTGQPFDTAKLFSEKHLLKA

SEQ ID NO: 245742 - protein, 355 aa, unidentified
MNCEKYIGLDVHQATISVAVMDRMGKLIMESILETKASTILEFLGGLRGTLSVTFEEGTWAGWLYDLLKPHVAHVLACNPRKNAALHQGNRSDKIDARELANRLRLNDLKPVYHGQNGVRMLRELARSYLNIVKDLSRVMNRLKALYRSWAIPCAGRDVYYTRHRSQWLEKIREAGPRRRAEHLYQQLDMLQHVRQQARRELLAESRKHSITAKLRQIPSLGPIRSALAVALIQTPHRFRSKRQLWKYCGLALETRITGEYVYVQGERRRSKKQLSIRGLNKDHNHDLKGLFKGAATRASVIPGPFREFYQRSLAKGIKPTMVRLTLARKIAAITLTLWKKGENFDVEKLKSQAA

SEQ ID NO: 245743 - protein, 373 aa, unidentified
MSDYSAFVGLDVHKDTIAVAVADAGRTGEVRFWGEIANTPDAVASMLRKLGGRHPLMHFVYEAGPCGYGLHRQIMATQHHCEVVSPAHTPRKPGDRIKTDRRDAIILARLSRAGELTSVWVPDTIHEAMRDLIRLRQAMVKDLRAARQRTKSFLLRHGRVFKGTSWKRSHKIWLGNQSFAHPAQQIAFQSYLNAVDQAQARRDEVDVQLHHFTTDWSMAPVVEALQALRGVAFITAVTVVCEVGDIRRFAKPRQLMAFLGLVPGERSSGETRRQGGITKAGNVLARAVLIEAAWSYRTPAKIGAQMMLRQEDIPQAAKDIGWKAQVRLCGRYRRLMARGKKSALAVTAIARELVGFIWAIAQITEPTGSESVA

SEQ ID NO: 245744 - protein, 347 aa, unidentified
MKFYTKQHQYYCGIDLHTKNMFVCILDSGGNIRVHQNTRTDPGALLRILAPFREDIVVAVECMFTWYWIANLCTQENIPFVLGHALYMKAIHGGKAKNDKIDSLKIATLLRGGMLPQAYVYPARMRATRDLLRRRNHFMRKRAELFAHIQNTRSQYNLPDPLGCIAKPQNREGIVERFDDPSVQKSMAVNLEMIEAYDRLLTRLERDIIASAKEHDLRSYALLQTIPGVGRILALVILYEIESIHRFPTVQDFASYGRLVKCLKESNGKSYGPSGKKIGNAHLKWAFSEAAVLFLKGNEPGKKYLERLSRKHGKAKALSILAHKLGRAVYFMLKNKEAFNQKKFLGF

SEQ ID NO: 245745 - protein, 343 aa, unidentified
MKITRVGLDLAKQGIAIHAVDRDERKVFAGTRSREQLLRWFTESVPKGSLVGMEACGSAHEWARRLGALGYRVRLMAPQHVKPYVKGQKNDANDAAAICEAVSRPTMRFVPVKTVEQQDAQAVHRVRALVMKARTAKGNEIRGLLAEYGVVVPKGAAALRKTLPRIQEDAENGLTAGFRALLQGLYDDLVALDGRIDELDRQIKAHVRGHADARRLMTIPGIGVVSASALVASIGDGRAFRNGRHLAAFLGLTPRQNSTGGKTRLYGIHKGGDTYLRKLLVDGARAVQRVVAAKIDPHSQWLIALSQRRHTNIATVAQANKTARIVWAVLTRNEPYRPQSAVA

SEQ ID NO: 245746 - protein, 341 aa, unidentified
MGQVSTIGLDLAKSIFQVHGADASGAVVFRKRLRRSQVRPFLAAQPPCTVAMEACGSAHYWAREIGMLGHAVRLIPPAYVKPFVKRQKNNATDAEAICEAAQRPTMRFVAPKSEQTQAAALVFRARDLLVRQRTQVINALRGHLFEFGIVVAKGPAHVPQLVQAVENPDEPLPEIARPVLQILIDTLHRLDEQIALLDREIAQRAKADETAHRLMTIPGIGPVTAVALTALAPPAQTFRRGRDFAAWVGLTPLQHSTGGKQKLGATSKMGERTLRRLLIIGASAVLRWAARHGAPAGPWIARMLACKPPMLVRVALANKMARIVWALMAKGGTYQAPAARA

SEQ ID NO: 245747 - protein, 288 aa, unidentified
MFPVGIDVSKNTLDLCMLYDGIKGRIKTRNIQNNRHSVENILRWLRLQHCSPEDVHVVMEATGVYHERLATELHDAGFRVSLANPHRSREFARGMGIMTKTDKVDAYMLACYAFLKKPHRWEPPAPEIRYLGALLRRRDVLLGDALREENRLEKYLSTDTPADIISSCRRMAQLLREEVSNIERQIKAHIKASPALRRDYTLLTSIKSVGPQLGMHMLVVLRSHNFVSAEQAAAFLGVVPIEKRSGTSVRRRPRMSKIGPPQLRAKLYMSALCGKIYNKRGDAANLLI

SEQ ID NO: 245748 - protein, 377 aa, unidentified
MGDYSEAFVGFDTSKLRNAVAIADASRGGEVRFLGEIENTPAATAKLVRKLAAKYERLTFCYEAGPTGYGLHRQIKDLGFECVVVAPSLIPKRPGDKVKTNRRDALSLAKLLRADELTPVWVPDGRHEAMRDLTRARETAMLDLRTKRQHVSAFLLRLGRPYPESRKTWTKAHASWIASQKLEHPQQRLVLEEMMLAIRQAQERLARLEQAVAAAVPEWSLAPVVTALMAMRGMDLVSATTLLAEIGDLSRFQTPTELMAYLGLVPSENSTGDTVKRGPITKAGNRRARRMLVECSWSYQHPPRVGQAKQPKVDAAPPAVREIAWKAQCRLYRRYRALIRKGKRKTVAIVAIARELAGFIWAVARAVTTGRVAAATA

SEQ ID NO: 245749 - protein, 347 aa, unidentified
MNAQILKQVVGIDVSQDELVVSLGQLTQDLSTQVVAQKSFVNKAAGFLTLKEWVSKHTNGQLPVLWVMEATGVYHEALAYFLNDQECPVSIVVPNKISNYMRTLDIKTITDKTSAEAIMLFGLQRQLTLWSRPSSTFKQLRQLTRERDQVVDLRTMSKNHLHAEQAEAEPNRETVARIKRQIDFFDKQVAEITTSIQNIVRSNAEVKRRVDQSCTIPGVGLLTAVTVLAETNGFDLIKSKKQLTSYAGLDVQEKQSGTSVKGKPRISKKGNRYLRKCLHMPALAAIKNDERSKAFFARLVSRHGIKMKAAVAVQRKLLELIYTLYKKDENYNEDYYKKLESSLTTTP

SEQ ID NO: 245750 - protein, 390 aa, unidentified
MSQSFDASKSLTAFEQDSTLVAVIEMSQSKWLVAAVVPGIARQPLKKLDADAGALLKLLQRWREEARKAGREVKRIVCAYEAGRDGFWLVRWLQARTIEAYVIHAASIAVSREHRRAKTDRIDTELLMRSFLGWLRGEKRHCSMVAIPTMMEEDARRPSRERESLVAEQTRTVNRVKAALALFGIGGFNPRLRKAAQKLETLRTVEGTPLPENVHAELRRDLERLRLVHDQTRTIESERLRRLAQAPAAATGPHAMVRLIARVLGVGIETADMLVNEVLARNLRDRRAVARYAGLTGAPDESGKRRREKGLARAGNGRVRRAMIQLAWRSLIFQKESRLVRWFRARTADGRSTTRKTMIVALARKLLIALWRLVTTGEMTEGLKLRPAGT

SEQ ID NO: 245751 - protein, 422 aa, unidentified
MSYCPVAGIDVSKRFSDMCILSPDNKIFAQEKIYHDETSINRANALLQKAERLFFSKPVIVMESTSHYHLILFQFFSEHGYDVIVVNPLQSNSMKDFSIRKRKTDCVDAFKLAMMYRTKTLRPSQIPQTATRALRQLCRHRAELLNDVSSYKNRLTALLDQTFPGYDKVFSDVGGVTSCAVLVRFPTPTILLVEEESELVEVIAAASKSGYSFAKKKAGLLISAAQKAQTLGIHSCADETLIVCTIQMLRTLSESVLQIETAIDNLLAQIKEMRNNVSLLQSIPGIGSHSAALLLGEIGDISLFKKPKQLAAYFGLDPTERQSGSFRGTKNKLSKRGSSYARAALHMGIVNSICKRGKDSAANPVLLSYYEKKCKNKPAKVAQAASMHKLVFIIFAVLRDQKPFELKTPEQHAVEQGFVKAA

SEQ ID NO: 245752 - protein, 332 aa, unidentified
MEEEVKRFVGIDVAKAALDVFIGSAGRAFSVANDEVGIRELVRQLTPADFVILEATGGLETPVASALAAGGIAVAIVNPRQVRDFARATGRLAKTDRLDAEVLARFGEAVRPEARPLADEQAQALEALVTRRRQLVEMLTAEKNRRARAPKVLHRSIDEHIRWLEKRLSGFDDELGELIRNTPVWRERDEFLRSVPGVGKVLSSTLLAQLPELGMLNRKQIAALAGLAPFNRDSGNLRGSRCIWGGRAQVRRVLYMATVAGVRSNPTIRTFYLRLRTNGKHAKPALIACMRKFLVILNAMLHKKTHWQTPALTYPTSPLSPLSGAVSEHGCC

SEQ ID NO: 245753 - protein, 456 aa, unidentified
MGHARARKIPAQLVEDEDYQLRCERVAGIDIAKAKADVCTRLPPAREGGRRASRVEEVPATAREILALAARLVADRAELVVMESTSDYWRIWFYLLEAAGLSVQLVSSSQARQLAGRPKTDRLDAQWIARLAEMGLLRPSFVPPPEIRALRDLTRTRLQLVRDRTREWQRLEKLLEGIPVKLSSVVHSLARTETARVILAAIAGGETSPKALAALADYRVRGGRAAVEESLEGMTLAACHPMLIRVHLDHITLLDRQVSAIEDEIEAALGAIPGAWGISAGGVPSPDPGPGAAVLPAAERLAEIPGVSRKLAMAIIAETGLDMTRFPAAAHLVSRAGLAPAARQSGPRNRKPAKGQGDSCLKGYCTQAATGAAGTGTFLGERLRRLSRRIGGTRARCAVGRSILVIIWHLLASPEARYADLGPDWHERKADHDRKTRAHLRGLQALGYDVTITPAA

SEQ ID NO: 245754 - protein, 287 aa, unidentified
MNSEKYIGLDVHQATISVAVMDSGGKLVMESILETKAATILQFFAGLRGTLWVTFEEGTCAAWLYDLLNPHVAKLVVCNPRKNALLKYGNKSDRIDARKLAELLRGNHLKPVYHGETSVRTLRELARSYGTTVKDLTRVRSRLKARYRSWAIPCAGRDVYYTRHRAEWLGKIEPAGVRRRAEQLYQPLDVLQQLRQQIRRELLAESRKHPATAKLRQVPYLGPIRSALLVALIQTPHRFRTKRQLWAYSGLALETRTSAEYSYVEGKLRRSKKLLPSGVSTRTTTMI

SEQ ID NO: 245755 - protein, 385 aa, unidentified
MLLDHLSDGPTAIRTQFGAIFVSLELSRSTWLVTSLSPGQGEKMSRHSVEADDVAELMKLFADLRRKAEVRTGLSYPIITIQEAGLDGFWLHRVLQREGIESHVVDPASIATPRRRRRAKTDRLDGETLLRALLAYKRGEPRVCAMVVAPSVEEEDRRRPCRERRTLIAERIEHVNRIKGLLFAQGISDYAPLRRDRRARLKALRTGDGRELPSHLKAQISRELDRLELLLTQIEAVEAEQDALLAEGKQPATPDPASMLLALKGMGANFAAVLWSEAFYRQFANRRQVAAYAGLAATPWRSGRIEREQGVSKAGNPRLRTTMIQLAWLWVRHQPGSALAIWFKAHSQRGRKRTIVALARKLLVALWKHVTQGVVIEGAVMKSAA

SEQ ID NO: 245756 - protein, 331 aa, unidentified
MQRKEFFVGIDVSKETLDVAVRGTLNHIRIANSSEGFKQLQAWFKALCIDLSQCWFVLEYTGGYEYRIVQFCVSKNITFTRIAGLEIKKSMGMQRGKNDKIDSQRIAEYGYEKREKIKADTAESASILRIKQLLTQRDGFIDDKKANEHRVKELLAMMDFKDNDPLIRNYNQAVAFAQRMIEKTEAALLQIIEKEAELATTFKLLTSIPGIGPVNAWTTIAYTENFKRFANARKYGAYCGVVPFDHTSGKSVKKKSRVSHMANKNVKGKLDMAARASIMHDPEMNEYYQRRIMLGKHHKSVVNEVKFKLVLRMFAVVNKQQIYVKNEKTAA

SEQ ID NO: 245757 - protein, 352 aa, unidentified
MIVLGADTHKRSHSIAAVAATTGELLDELTVQVGRRGFDALLRWARALDGERVWALEDCRHVSGSFERFLIGRGERVLRIPTHLSAGARKSARQRGKSDPIDAIGVARVALQEGLESFPVAHLDGPELDLRLLVDHRERLVRQRVALNSTLQWHLHDLWPELELPGSSLFYDRWAPRVARRLARAEQTMRVRIARDELRRIRELSQAIKALEREIASLVAAIAPQLLSEPGFGPLTAAKLVGEIAGAQRFATPAKLARAAGVAPIPASSGNTQRQRLDQGGNRQINAALHRVIVTRARCHPATRDYIARRQAEGKSTREAIRCLKRYLARTVWRLLQPPHPVQGTPPSPSTS

SEQ ID NO: 245758 - protein, 402 aa, unidentified
MNCVGIDVSKGKSMIAVMRPFGEIVVSPFEVHHTANELSELARLLKSLDGETRVVMESTGNYHTPVAWLLHDAGLYVSVVNAMLVHDYGNNSLRRAKTDKKDAIKLANYGLDHWLTLPRYVPEEDTRLLLKACYRQYQQYSKVQTMLKNNLISLLDTTFPDANRLFTSPPRTDGSEKWVDFVATFWHCECVCGLSEKAFTTKYQKWCRKHGYNFSEDKALDIYASACGHFGVIPKTDTAKLLVEQAISQLRTTSAALAALKKEMQSLAASLPEYPVVMGMFGVGPTLGPQLMAEIGDVRRFHSKKALVAFAGIDAPPYQSGQMDVRSRSISKRGSAALRRTLFLVMGVYLQSAPMGEPVYQFMDKKRSEGKPYRVYMMASANKFLRIYYASVKAYLDSLEHD

SEQ ID NO: 245759 - protein, 347 aa, unidentified
MDHVGMDLGKRESQIAILTDDGELINMRIRTERHRLVEVFGRRPKAKIIVEASTESEWVARCLEDLGHEVIVADPNYAPMYAQRTRRVKTDRRDAHALAHAGKAGTYRPAHRTSTERRDLRARLAVREAVVRTRAAWITRIQSLVRREGSRLRTGAPETSLTRVKELELPPTLTTVIAPLLELLGPLNKQIAALDEELERIVAADEVTRPLTTVPGVGPVTATAFVATVDDVTRFRDAHQVEAYLGLIPCEWSSSEAQRRGHITKAGNGRMRWLLVQAAWCILRRRKRPETAALRDWADRIAGRRGRSIAAVALARRLAGILFAIWRDGTVYDATKVRGPMTARRAA

SEQ ID NO: 245760 - protein, 414 aa, unidentified
MKTESQTRRRRIIGTDLHPDSFSAVQVTGNEISQLKKERLFTKLPTAMWEHFVTKQIPEESIIVCEAGSNSFELMRIARQAGHQTVVLNSVSAGQIAKAYCKNDPKDAFRAAKLYVCGLAEGIWEPDEETQLKREILSAYICAKKDYTRMSNRLKSFLCEHGIREKKKLLKRDGILEKIKQKYNWTPEQLFLLERMFDDLEYTVQQRERFHRMIGKSVLANPEMAKLMRLCGIRLIAAYALLAQIGDIERFRNPKSLVAYLGLAPCVHASGNHQQQGGMQKGGTTQVKAILIQAAHSILKSKNKSGERLRKWGISLGMRRGKVVAAGAVARKLAVACWYALKGFPPEILEEEIEIKAKLKKIATELKTPLIRSIGYEKVGDFVEEYTYLILTRSSEAVERWKNLQKTVFSTLCT

SEQ ID NO: 245761 - protein, 344 aa, unidentified
MGEVSTIGLDIAKSVFQVHGVDSVGEVAIRRRIGRSKVLEFFSDLSPCLIGIEACPTAHHWGRELQALGHTVKLMPPSYVKAYLKRSKNDANDAAAICEAVTRPTMRFVPIKSKEQQAALMLHRTRQLLVRQRTMLSNAIRGHLAELGIVSAKGRNGTSELLGIIADGADNRIPPAARGILDVLARQYSAIGTEIRSVEKSILAWHRSCEASRRLEEIPGIGPIVATALVAEIGDWKAFRSGRSLAAWIGLVPKQHTTGGKDKLGSITKQGNRYLRWLLVAGAMAVIRYAQKHGTKRRPWLGRLMERRPTKVAAVALANKIARIAWAIMVRGERYQEPKLLPAA

SEQ ID NO: 245762 - protein, 401 aa, unidentified
MVAVGIDVAKGKSKVAVIGEGKKVLQKPFDVLHTKTEMLKFAENLRQYDDEAHVVMEHTGVYYKVVAETLHKAGIRVSVVNPVLINQFGNNTLRKVKTDKKDSMKIARYALENRDELYEYESGEDIRDALKSFVKQFNFESKTLSAHKNNLNALLERVFPGIDDFFSSPVKSNGHQKWVDFVIAFWHNDCVSCLSESKFIEKYRKFCKKNRYIFNEETAKAIHAKSRDNLTTMPKNDTTMLLVQGAANRVLRLSEDVELLRAKMIELAKQLPEYETVLSIYGVGETLAAQLIGEVGDVRRFQSKRSLVAFAGVDPDKNDSGKKVSISGSVSRRGDSLLRKTVFQVVECYLKNSPADEPVYQFLDKKRSEGKQFFVYMTAACNKFLRVYYARVMECMNAQSA

SEQ ID NO: 245763 - protein, 328 aa, unidentified
MQTETRPLHIGADVAKDEIVVACEEQHFAPHALANRRPALVAFLKTLPPGSHIGMESTGTYHELFATLAQKMGFVVYVLNPKDTRHYAKGVGQRGKTDRVDAKLIARFVDREHAKLHAWVPPTPEQRQLDRLLKRRAKLSSIKAALGQSLKGLSGFSAELKVLVERVQRVIVRIDANIKAIIEASTERQQNYTRLLSIPSVGSVVGNDVLVHLERLPFAYADAFVAFTGLDPRPDESGRHHGRRRLSKRGPSELRRLLYLAAMSAVHTKTWKPLYEHYLARGLPKTAALVILARRIARTAWSIYTHKTNFDAERLTKQPSTRNAPRHA

SEQ ID NO: 245764 - protein, 369 aa, unidentified
MPHVTSIGLDVHARSVAAAAFNPFTGEVVHRDFGTDAAEIAEWALGFEEPRACYESGPTGFHMARELRALGLDCAVAAVSKMQRPAADARRKNDRRDAEFIARMLATHNIVEVPLPDMAVEAARDLDRALDDATRELRRSRQRLNMFLIRLGHVWDERNADGARKKAWTRAHWRWVSEIRLEGPQRDALEYYVTAARCAESDRRQLERRVVALAGADRWRPAVEALSCIKGIDTLTAFRLAAEAGSFSRFRSAPAFASWCGLTPSEHSSGESERRGGITKAGNALARTALIESAWHYSTCSPRPKAPAPGTDVPPAIRSRADDCTARLHRRREALAAAGKSACKANAAVARELACWVWEIGCRSEGTVL

SEQ ID NO: 245765 - protein, 364 aa, unidentified
MKQLSKKQSAIAAESKPEKVVGLDLGDRYSHYCMLTSTGELMEEGRIQSTTAALGKQFGNEPRMRIALETGTHSPWVSRLLEGFGHQVIVANARKIPTVTASESKNDRNDAEQLARMAAFDPKLLHPVEHRSLERQQDLNLIHTRSVLVRARTMLVNSVRGLVKSAGSRLAAASPEAFPGKARLTMPAELKPACEPLLEQIAQMNATLAAMDKQIESLYKKYAEIGLLRTVPGVGPVVAACYALTLDGPEAIETNRQAGAFLGLRPRQQQSGDSNPQCGITKTGNNYLRTLPVQSAQYILGRFGPDSALRRWGLKLAASGGKRGKKRAIVAVARKLSVLLLSMWRNRKPFQPFPQGAPQISAAA

SEQ ID NO: 245766 - protein, 356 aa, unidentified
MGKDITQASGLTIGLDIGDKQTVGSVLTRSGEVEETFSVATTMSALGRTMTGFKPSRVVLEVGTHSPWISRLVEQAGHEVIIANPRRVRLIAENDSKTDEVDAELLARLGRLDPGLLKPIVHRGERAQHDRILLLARDGLVRARTQFVNQVRGFAKSLGHRMPSSSTVVFPRRVREQFSKDLFPGQSAMLEMIDRLTQEIRCMNREAEKLCKERYPETGVLRQVKGVGPLTALGFVLTLEDPSRFAKSRTVGAYLGLRPRLRQSGGQQPRLRITKAGDKLLRRYLVGASQYILGPFGPDTELRRFGLKLAERGGKAAKKRAVIAVARKLSVLLHRLWVTGEVYQEIGYGQPAQEAA

SEQ ID NO: 245767 - protein, 326 aa, unidentified
MEHELHYIGIDTAKEKLDVDVLRPDGHHRTKKFANTTKGHDELVSWLKGHKIDHAHICIEATGTYMEPVAECLYDAGYIVSVINPALGKAFAQSEGLRNKTDTVDARMLAEFCRQKRPAAWEAPHPLERALRALVVRHQALTDMHTQELNRTETAREVQRPSIDAHLLWLEAELKRLEKQIKDLTDDDPDMKHRRKLLESIPGIGEKTSAVLLAYIGLKDRFAHARQFAAFAGLTPRRYESGSSVRGASRMSKAGHVSLRRALYMPAMVATSKTEWGRAFRDRLAANGKKGKVILGAMMRKLAQVAYGVLKSGVPFDASRHNPVAA

SEQ ID NO: 245768 - protein, 369 aa, unidentified
MEHSTEVFIGIDVAKARNAIAIADGGRGGEVRFFGEVDASLDAMRRTIQRIIAKYRVVHFCYEAGPTGYGLYRLIVELGHSCMVVAPSLIPKRAGDRVKTDRRDAVMLARLLRAGELTAVWVPDAGHEAMRDLVRARAAAVETQRIHRQQVSAFMLKHGRIFPRKTTWGARHFRWLQEQHFDHPAHQIALQELVDAVRVAKERIGRIEAAIEEFLPGWSLAPVVRALQALRGVELIVAVTFVTEIGDMRRFDNPRQLMGYLGLVPGERSSGDTVRRGGITKAGNGRVRHMLVESAWTYRHPPRIGKAKLYRLEQTTPKVREIAWKAQSRLTARYRSLIAKGKKTPVVCTAIARELAGFMWAVAREVQPA

SEQ ID NO: 245769 - protein, 342 aa, unidentified
MKDISIVGLDLAKRVFQVHAAGRDGAAVLRRKLSRGQLLTFFAGLPRCTVAMEACATAHYWAREIGQLGHEVRLIPPAYVKPFVKRQKNDAADAEAIVEAALRPSMRFVVPKTKGQQASSMIFRTRDLFVRQRTQLINALRAHLAEHGVIAPQGVGNLALLTQIVEDDSAGLELLVVETARLYLEQIDMLSSRIVSLEKVLRSEAKRSESTVRLMSMPGMGPITAMAIEAFAPTMTTFRRGRDFAAWLGLVPKQHSSGGKQVLGRTSKMGQRDIRRLLIIGAMTVIRWACRKAPPANSWVARMLARKPRMLVAIALANKMARSIWAMMTKNESYRDSGLAAA

SEQ ID NO: 245770 - protein, 414 aa, unidentified
MVVGWAHWIGTTTEVPVSHDVWAGIDAGKIAHHCVVINDAGEKLLSRKVSNDEADLLRLIKDVAAIANSGRVQWALDLNAGGAALLITLLVEHQLDFVYIPGRTVHHASAAYRGDGKSDAKDAAVIADQARMRRDLHPFRQRDEITMDLRLLCARRTDLAMDRNRAIARLRATLLEYFPALERAFDYAHRRGALTLLTRFQTPAAIRQAGPVKISAWLRRHGAYSPDTIAQTAVRAAASQRTVVPGQQTAAKIAAQLAQQVITLDAEMDTIEADITERFRDHAYAPAIESMPGFGPLLGAELLVGINGDTANYENVDRLASIAGLAPVPHDSGRITGNLKRPRRYDRRLLRACYMAAHNSLRTNPESRAFYDRKRAAGKRHNQAVLALARRRLNVLWALIRDETTYQPVTLKVA

SEQ ID NO: 245771 - protein, 368 aa, unidentified
MHELITGFVGLDAHAESTAIAVAEVGREEPRFVGTVGARVSELTKALGRVGEPQTLQVVYEAGPCGYTLARELIRLGYRCEVVAPSKIPRRPGERIKTDRRDALNLAGLARAGELVSVTIPDERDEAMRDLSRARVDAVRARLKARQQLKALMLRHGRRYSGKTSWSTAHERYLAKVSFEHPAQDIAFTEYRQAVSEGEARVQRLSESLAREVEHWRMHSLVKAVMTLRGLELVAATTVVAELGDLRRFAHPRELMGYLGLVPSEHTSGSKRRLGSITKTGNTHVRRVLVEAAWNYRYPARISPALQLRQERQPAEIRAIAWRAQLRLNHRYRRLKARGLQHNKICVALARELAAFVWDIGRHVAPSR

SEQ ID NO: 245772 - protein, 473 aa, unidentified
MRITCGIDWASDHHDIALVDHDGTLVAKRRVSDDAQGYQQLLDLLADAGDSPHAPIPVAIETPRGLFVACLRASGRPVHAINPLSASRYRERRRVTRAKSDHADAMMLANILRTDAHEHPPLPADTEQARAITVLARAQQDAVWRRTNLVNELRSHLHQYYPAALEAFAGRDEGLHHVDALGLLAAAPGPRAAARMTQARIVAALRRGGRVRYFEHRARQLHEVLRREHLHQPPLIEEAMAHQTKALVAQLRVACEAARDLEQATANAFDAHPDAAIYRSLPGVGDLIGPRLLAEIGDDRTRFSDARALKAYAGSSPVTIASGKTHRVRHRNVKNRRLNAVGYPWAMAAIHTPGPRTHYDRRRATGDLHTAALRNTYNRLLGCLHHCLREGISYDDALAFSSGIQVVGDAVAVNASASRLEPQVPRASQHLIEAKRVPRGPHVQDDALTSRGINVDPGTTGRVCLRSPHSVRA

SEQ ID NO: 245773 - protein, 459 aa, unidentified
MNRKRSKSKAERTLPMMHPNAAAIDVGATMHMAAVRADRATEPVRSFGTFTADLHRLVDWFTECGVETVVMESTSVYWIPIFELLDARGFTVFLVNARDAKHVPGRKTDVSDAQWLQRLHSHGLLRASFRPKGQIAELRAYVRQRERLLEYAASHIQHMQKALTEMNLQLHHVVADITGTTGLRIIRAIIAGERDPEVLARLRHYSCHSSAETIAKALTGSYRTEHLFALEQALALYDVYHEKASACDGRIEAVLKGLSIDRARSGSKELPTPRRHRTDQPNALAFDVRAALFRLLGKDITMIDGLGPYLSLKLIAECGDDLSSWPSAKHFTSWLGLAPSNKISGGKILSSRTRRSGGRAAALLRLAAVTVGRTDTALGAFYRRLSARIGKAKAVTATARKVAVLFYNAVRHGMEYVDPGASAYETRYRARIVNNLHRRAKAFGFVLQPMEPTPNIVVS

SEQ ID NO: 245774 - protein, 389 aa, unidentified
MLLDHPSDRLTTIRTHIGAIFVSLELSRSNWLVTSLSPGKGEKMSKHSIAAGNVAKLLTLFAEFKRKTEARTGQSYPIVTIQEAGLDGFWLHRVLQQEGIESHVVDPASIAAPRRRRRAKTDRLDGEALLRTLLAYKRGEPRVCAMVVAPSPEEEDRRRLCRERRTLIAERIRNVNRIKGLLFAQGISDYAPMRRDRRPRLEALRTGDGRELPSHLKAQIGRELDRIELLLGQIKAVEAAQDALLAAARKPASEEAAPDPVTMLLALKGMGANFAAVLWSEAFYRSFANRRQVAAYAGLAATPWQSGGIRHEQGVSKAGNPRLRTTMIQIAWLWIRHQPQSALTRWFKARSQQGPKRAIVALARKLLVALWKYVTQGVVIEGAVTKPAA

SEQ ID NO: 245775 - protein, 375 aa, unidentified
MNQFIKYVGLDTHKDTIAVAIADAAGGKPRFYGEIANTPAALSKLLKDVSPNGEVVSYCYEAGPCGYGIYRQISGSGHDCSVVAPSLIPTKPGDRVKTDRRDGENLARLHRAGELTPVWVPDQEQEAIRDLTRAREDMKHLERQARQRLSAFLLRHGHRYDSGKSKWTQAYWRWLEHIKFRHRVQQLVFQEYIDSVKQQQQRVADLEQTMQEALSDWSLAPVVEGLMALRGCRLITAMTVVAELGDITRFDSPRQLMKYLGLVPSESSSGPKTRRGGITKTGNGHVRRVLVEAAWCYRFPARKTAALQRRAEHTSDEVQAIAWKAQKRLCGRYQALNKRGLPPQKTCTAIARELSGFIWAIACEVMPKNAYEAIA

SEQ ID NO: 245776 - protein, 430 aa, unidentified
MNSQSEITASGEIVVGIDWADQEHALYTVYPDRRRATQGILEQTPEAIDAWMAGLQEQFPEVPVIVAIERSNGALVAALLKFPQVIIYPVNPTQLHNYRKSQKQSGAKNDPSDARLLCQYLRNYREQMRPLKPDDVGTRELALLAEQRRGAVDQRTAFVLELKEVLKQYFPVVLQLVHTDLCVHFILQLILKWPTLAQLQKVHPQKVRSFFYAHNLRGDLVEHRLTIIADARPLTEDPALVNAGRLRAQKCARLILALNQTIREYDARLKELLESHADYEIVKSLPGSALQMQSRIIAALGTDRERYQNSVEVQCVSGIAPVTIQSGRSKTVHHRFACSKFLKQTFHEYASLSITKSRWARAYYSMQRDHGKSAQTAKRALAFKWIRIIFRCWKDRVPYDEERYIASITRSNSPLLAYLEQDVVQSSTVV

SEQ ID NO: 245777 - protein, 350 aa, unidentified
MKIVGCDFHPSYQQIAVLDTETGEVLEKKLMHGNGEAEKFYRELQGPALIGMEATGNARWFELLVEKLGHELWIGDAAKIRASYVRKQKTDKRDAAHILKLLVEKRFPRLWVPDGQQRDIRQLLTHRHKLVSVRTRLKTELQHLALNQGVQKKRQLWNENGRALLASLPLQGWTQQRRKDLLQLLAVVEPQIVQLDKAVEQAAKTDAQAVLLMSQPGVGPITALAFSVTIGDVSRFERSKQVSSYLGLIPTEHSSGSKRRLGSISKQGNVFLRALLVEAAQSVVRHDPGFRKEYQHRCHHKVKGIAKVAAARKLAVRLYWMLKSNKSYSELVLNGGSPRHPVAAKAKPLT

SEQ ID NO: 245778 - protein, 463 aa, unidentified
MRTGAELWRNRKGKRELARRLQSENPGLEVVHPHAAGIDVGNGAHYVAVRPDRDLQPVRRFECFTADLHRLANWLQGCGVRSVALQSTGVYWIPLYDILEEHGFEVYLVNARHTKNLPGRKSDVQESQWLLKLHTYGLLNNSFQPPSKIRVLRTYWRQRLQHVTGAATCVQRMQKALTQMNIQLANVISDLSGVTGQMIVRAIIGGERDPQKLAELSHPRIQASRGEIAKSLEGNWRQELIFVLQQEIEMYDTYQRRVAECDQELQKHLTAFADTVRLQEELPPKKKKKQNKNNPNFHLAEELQRITGVDLTRIDGVDVMVAQTLVSEVGLDMSRWKTEAHFASWLGLCPDNRISGDKVLARGTRHVLNRAATALRLGASTLLRSQTYLGAQYRRLRSKLGAPKAITAMAHRLARLVYRMLKYGQQYVDKGAEYYERRHREQQIEFIRKKAAQLGLKVTLALA

SEQ ID NO: 245779 - protein, 346 aa, unidentified
MGKSITDLSSVTTVGLDLAKHVFQVHGVDASGRVVVAKAIRRNKLLEFFASLPSCLVGLEASGSAHHWTRELIKLGHDARMMPPAYVKPYIRRQKNDASDAAAICEAVTRPSMRFVGVRSLENQAALMRHKAREMLVAQRTQLLNGLRGHLTEIGVIAPQGPRYARDLAGLIEACDERIPFEVCEALAELVHQLHRLDEAIVRLDRTIAKMAQKNETARRLMSIPGFGAITASAMAATIQDTSSFAGPREFAAFLGLTPKQNSSGGKQKLGRISKMGNRYLRKLLVVGAHAVLFHRKPHSDPLRMWAKKLIEKKPFKLVAVALANKMARIASAILRGKTIYREIPA

SEQ ID NO: 245780 - protein, 426 aa, unidentified
MRSVALDVHRDFCEVAIKDGSGLRLAGRVKSSLEELELFARSLAPDDQVALEATGQALAIARILEPHVGRVVIANTRKLRAIAESKVKTDKVDAATLCELLAAGFLPAVWSPDEWTRSLRRRLQRRAKLVRSRTRAKNECHAVLARNLKGRPPMSDVFGKGGREWLAALELPSDESETVEGCLREVDFLDSEVGLIERELARQALSSQEIRRLMSVPGVSLVSAATFVAVAGDVHRFHSPKKLVSYVGLDPRVRQSGETPARHGRISKQGSAEARHMLCEAAWVAVRTPGPLRAFYERVRARRGAQIALVATARKLGVLFWHLLTREEDYAFRRPSLTRRKLRALELKTEEGWRRGRYSGPRVHETKTERQHEREFAQQAEIAYRRLAQDWQPKPKSGAGATRGRASSKPTSGKQRGRASVPNPAL

SEQ ID NO: 245781 - protein, 344 aa, unidentified
MEVAIGVDPSKSSLAVAAVDPLGRVLGTGEFSNDPRGHRALIRWVHEHGPDRVIGIECSLSYGATLSRVLLRSGEDVREVPTTLTHRQRRRRGSQGKSDLVDSVAIARIVASGEVLPSAHRLEVLADLRALVEYRDQLVRARTQVANRTHADLVNILPGYERQVPNLRAKAHRTTARSLLRGDRSVRGELVRKRLGELSRLEGEIAAMDRRIRATVQKTGTSLTSIPGVGPFIAAKILGEVGDPSRIRSKPAFAVLSGTAPLSASSGQVQRHRLNRGGNRQLNWALHYIALVQCRITPEAQAYMARQREAGKSHKEAMRCLKRQLSNVVYRHLVADARRAELAA

SEQ ID NO: 245782 - protein, 395 aa, unidentified
MREYSKEQNKSEQVVTNRIAGVVLRKIETAQKKKEKEAEAERVEYYIGIDLGDQKSYYCVLGKGGEILVEGSMPTTAAGIEVHFKGLGRSRIAIEVGTHSPWVSEQLEGQGHEVYVANTRKMGSGKKNRRKNDRLDAEMLARQVRTDPKQMYPIRHRKEKTRQGLVVLRVREALVNARTKLVNAVRGIVKSSGQRLPKCGTEVFHNVKVEGLPEDLRSALKPLLEQIGQLTEKIKGYDKEVKRISVKEYPETEILRQVHGVGMLVALAYVLIMEDPEYFQKSRDAGPYLGLVPKQYESGKSSPQLRITKTGDRMMRKLLVQSAQYILGPFGEDSDLRRHGMKIAERGGKNGKKRAIVAVARKLAVLLHRLWQTGEVYNPLYNSQANAENELRKTA

SEQ ID NO: 245783 - protein, 352 aa, unidentified
MRRTTSLHAVTTLGIDMGKYTLHMIGLDTRGAIVLREKVSRGRINSRLANLPRCLIGIEAGMATHYVARDLAALGHDVKQVPVSYAKAFRQGHKNDFRDAHAVAEAVQRPTTRFIPIKTNDQLDLQALHRVRSRLISNRTAVINQIRAFLLERGIIVRQGVRSLRQSLPDILSQRTDVLSPRTIRVIIDLASDWHQLDNRIETVTDEIEALAKNDETCRRAMTIPGIGPIISSALVAAIGNGVAFGNGRDFSAWLGLVPKQRSTGDRTILGRITKRGNGYLRMLFIQAARVILRRPKNWPKHGFGLWLTHAARRLHSNVLATAFANKLARIAWTVLAQGRSYEARATEITTA

SEQ ID NO: 245784 - protein, 379 aa, unidentified
MYRILKIGMDVHTTNYTLCALESKFGTDDQVLANITVGPEHRNILDFIRRIKEKMDPKGQDQIDVECGYEAGCLGYSLYHTLTAYKLKCTILAPTTMLSEQGPRIKTDRRDAALIAACLSNGGFHAVHIPTDEDNAVKEYIRMRDDHKVALKRIRQQIGALCLRFGSIYSGNCWTGVHLNWLRTLKLPEMIREILNEYLATHDHLTATINRLDKRIQEIAAQTQYREKVRKLECFLGIKTHTALSLIVNTGDFQRFRKGNIYAAYLGLAPGEHSSGESGGKRGITKAGNTHLRVLLTEAAEGICKGQIGRKSKVLLARQSGNPVDVIAYADKANIRLRSKYYRLIRHGKKRNIAVTAVARELACFVWGMMTDNIHGNAA

SEQ ID NO: 245785 - protein, 460 aa, unidentified
MNRNRSKSRVDRTMPMVHPNAAAIDIGATMHMAAVRADRAPEPVRSFGTFTADLHRLVDWFTECGVETVVIESTSVYWIPIFELLDARGFAVFLVNARDAKHVPGRKTDVSDAQWLQRLHSFGLLRASFRPKGQIAELRAYVRQRERLLEYAASHIQHMQKALTEMNLQLHHVVADITGATGLRIIRAILAGERDPEALAGLRHYSCHSSAETIAKALTGSYRTEHLFALEQALSLYDAYHEKASACDVRIESVLKELIIHRGHDHGSAPPVSRRRNRTDQANALAFDVRAALFGLLGKDVTMIDGLGPYLSLKLIAECGDDLTSWPSAKHFTSWLGLAPSNKVSGGKMLSSRTRRSGGRAAALLRLAAVTVGRTDTALGAFYRRLSSRIGKAKAVTATARKIAVLFYNAVRHGMDYVDPGASSYETRYRTRVINNLHRRAKTFGFVLQPLEPKAGAAVS

SEQ ID NO: 245786 - protein, 350 aa, unidentified
MLAPNDGADVVIGVDTHKDTHTAAAVSSTGAVLDHLTAPANPAGYRKLIAFGQRHHATLWAIEGTGSFGAGLTTALLTRGERVAEVDRPQRPARRAGAKSDDIDAVRAARQALAGIGLGEPRCRGDREAIRVLLSTRAQAIEFRTRAIAALYALITSAPDTIRERLRALPLGQMLRTCAGLRGSSRQDAEEFATMMALRTTARRALACEQEAAELEIQLDALVRRIAPTLLEQLGIGPVVAAQVIVSWSHRGRIRSEAAFAKLGGVAPIEASSGMVTRHRLNRSGDRQLNRALHTVVMVRMRQDPETKAYVERRLAEGKSTRDIKRCLKRYVARQLFRQLEGLPLALDRT

SEQ ID NO: 245787 - protein, 450 aa, unidentified
MAKRKEKQQRRSVVLEPDAAGIDIGAEEIYVAVPPDRDEESTRRFSSFTCDLHALADWLGRCRIQSVAMESTGVYWIPLFQILEERGFKVYLVNAHYLKSVPGRKSDVSDCQWIQYLHSVGLLRASFRPPEAICAIRTLWRHRGSLLEMAAEHILHMQKALSQMNLQLHHVLSDITGTSGQAILDAILSGQRDPVALAQLCHSRVKSPRDKVAQALVGDYRPEHLFTLKQSLEGYRYYQKLILELDQETARLMQALPSATEDPMPPRTKATAYHRQGNDPQFDLRSELYRIAGVDLTDIPGVSAATAQVILTEIGTDVSRFRNASAFASWLGLCPEKRVSGGKVLSCKTRQVKHRAATALRMGANSLCRAKGYFGEFFRRMRARLGTAQAITATAHKIARILYHVLSTKEPCAETVFHRCDEQAQRRAGMRLRKQAARLGFQLLPIPTGE

SEQ ID NO: 245788 - protein, 343 aa, unidentified
MTQYVGLDVSMRETKLHVLDDAGKRVWRGRCPTEPAAIAAAVRQYAPSAVRIGLETGPLTTWLWTALTAEGLPMVCLDARHAKKALDMKVNKTDANDAEGLAHLVRAGWYREVRVKSRSAMLTKALLGARRQLLGISLALENQIRGVLKTFGRIVPKGAGGLFEKNVGALIMNDGEIAAVIMPLLQARQMARSKCAALDHRLVRLVQGDASCRMLMTMPGIGPITAVAYVAALERPDTFKRSRAVAAWLGLTPRRFQSGEVDYDGHISRRGDSQLRALLYEAASVLLTRVRMESGLRRWGLILWKRLGFKRAATALARKMAVVLHAMWKSGTAFDSKLGVAAA

SEQ ID NO: 245789 - protein, 345 aa, unidentified
MEIHTIGIDLGKTVFHLVGLDARGEVVVRKKCSRNQILGFTANLHVSLIGMEACGGAHFLARALREQGHDARLMPAQYVKPYVKTNKNDYIDAEAIAEAVGRPRMRFVSIKTDDQLDLQSLHRVRERWVSGRTAVINQIRGLLLERGITIRKGRHHIEESLPGILEDADNKLSGALRVLLTQLRLEMQYLQGQIDESDKLIQRIAGELEDCRRMVSVPGIGPLTASATIAAIGNGSAFKKGRGFAAWLGVVPGEHSTGGKQTLTDTSRRGNRYLRKLFVQGAHAVLQQRMKQSNGLNTWLAQLTSRKRIQVAAVALANKMARMVWAVLSKGEAYRPPLWIETAAV

SEQ ID NO: 245790 - protein, 337 aa, unidentified
MKSYEKVVGIDVSKETLSISLYDGKSHTGYETRNTIKSFFNDFVKKEKGVDFSKVLFMLENTGVYHLRLATHLSKECSYIVSVANPLVIKRYSQMNLKRAKTDKADARLIAEYGYINGDDWLFSPRDIDYYKIDMKLKAVEDFHKQINMLSNQIEAIEYLPFKDNSTLNAYKKLIENFKKEIKKIEKELDILLREKYVEEYKLLSSIPGVGLKLTGVILGKLNGFANFDRGKDVTSFVGICPSIYQSGTSVNGRGKISKKGNGYMRTILYLCSLSACKYNKSCAELYERLVAKGKPKKVALIAVANKLIRQAFGVLKSGKPYDPDHANNLTLVAKNA

SEQ ID NO: 245791 - protein, 425 aa, unidentified
MNYKQNEKINQVKESTLVVGIDIGSTTQYARAFDWRGIELGKVLPFSNSREGFESLKAWMQHLQDKYKKLDAIVGIEPTGHYWFDLGAYLEDEGIRLVMVNPYAVKQTKELDDNSQSKNDRKDPKVIAKLVTEGRYSAPYTPDGVYADLRIMVANRKRLIREMTQIKNRFARWFAIYFPEYTDVFGDYEAQSSMLLLKKVCTPEAIVELGAEKINQIWRDARLRAVGMKRATTLCETAKRSIGLKKGSSAARYEMKLLLEDYEYKKAQLDAVMEEIEKLCRKIPESEQMLAIKGIGVITVAGFLAEVGDVRRFESPRQIQKLAGLSLRENSSGKHKGQTTISKRGRSKLRAVLFNAAIPLIAKNPEFKSLHEYYTTRANNPLKKKQSVIAISCKLIRVFYAILVNGVTYDSQKLLSDIHRQPQVA

SEQ ID NO: 245792 - protein, 384 aa, unidentified
MKKDNILFIGLDTHKEFTQIAYCLDHRTSDINDLGRIQSTKTGFVKLARQLQSKFPQATLHFVYEAGPCGYWIYRLLTSLGHCCFLVAPSLIPKKPGERVKTDKRDAQKLARLLKNNDLDPIYVPEPEDESLRDLSRAREAAMQDLNDAKRQLKSFLLRNNIQYKGTASWSLKHLRWLTEMVLPHPCQQIVLQEMIHSISERTNRLKRLDNELTHQVKKWRYYPVVKAIQAMRGIRLLVATGVIAELGDLSRFDTPRKLMSYVGLTPSEHSSGGKRRLGAITKCGNGRVRRLLIEGAHSYRHTARISKELEVRQEGLPKEIVDQAWKAQMRLCRRYQRLIKRGKNYNLVVTAIAREMIAFIWSISREVVLPKVDPKTRLSRVPA

SEQ ID NO: 245793 - protein, 418 aa, unidentified
MDILSPFPYKATVGIDWADQKHDVFVRFAKGDSYRRKIDSRPGAIQEWLLELRSVCAEGKIAIALEQRRGALFYQLCTHLNWIDLYPINPHSLASFRLTFFSSRAKDDPIDSQLLEELVRTHSDRLRAYQPESTTERKLDQYCRHRRSLLDLATKTELKLISTLKQYFPLVVNLFAAVGMKSDIALNFLSRWPTLDELQRAKTHTARSFFYAHNSRSQTLIEKRLQQIADAHNVTDDFALIEPLVVTTKCLVGQLRQFNQVIKEFDHLIKELFKSHPDHFLFESLPGAGAQLAPRLLSLFGSDRSRWADAADIQKYSGIAPVIERSGQSVWVHRRLSRPIFICQTFHEFAQQSVQRSAWADQYYRRQREKGKSHHSAIRALAFKWIRIIWACWKANKPYDESFYVHALEKRNSSLSTT

SEQ ID NO: 245794 - protein, 431 aa, unidentified
MIHPKMKFTYVGFDSHKDSHTAVFLNCFYEKLGEITIGNAPSGFENFLKEAEKYRLKKTKFAFGFEDCSSFGRQFVRFLNSKNQLVKHVNPSLVASERKIRNILEKSDSIDAECAARVLLSQFDKLPDAILQDKYWVLSNLVTRRSSLVKVNTMLKNQLHSLILDNYPSYPQFFCKIDNKTALAFYEKYPSPLALKDVTDSELTALLKTASRGMLKKNKAIQILNTVKSDDLKEAQFQQTRDLVVQSVIRQLKSNLVELSLIEDEILKFLDNFDYKLTSMNGIDFITASELIAEIGDITRFKTSAHLARYAGIAPVTFSSGMTKLQYANQRGNRSLNKIFFRLAISTTVSPRGKGTILNPYLYDYYNRKISEGKTKKQALKCVERRLVNIIFKMMKHKTEYQNPPPYVPEEEKPKEAQTQVFDEETGELLS

SEQ ID NO: 245795 - protein, 426 aa, unidentified
MKYNQNEKLNQIDLSTMVVGVDIGSELHYARAFDYRGFELSGVFKISNDAIGFEAFEKWTHELMEKHGKSKIIVGMEPTGHYWFNLGYSLQENYTKVVLVNPMHVKRSKEFDDNSPTKNDRKDPKTIAMLVKDGRYLEPYMPQGVYQELRVSMEIRERYVKQITVIGNKVQRWISIYFPEFRTVFKDWTGQGAMIALKNFATPEKVLEKGLEGISVAWRTQIKRAVGTKRARRLVKAAETSVGIKEGLKSAEYNLLSLIEEYEFAVKKLEETMEIIEELLNQVPNVKELIDIKGIGIVTVAGFVAEVGDIKRFENPKQIQKLAGLNLKENSSGKHKGKTMLSKRGRKRLRRLLFLAAMVLVAKNPEFRQLHLYYTNRIENQLKKKQSLMAISCKIIRVFYTLLVKGLAYDGEKMIKDIKRPQHKVA

SEQ ID NO: 245796 - protein, 489 aa, unidentified
MSTARKQQEKEKDPTLNARAPKRKARGSRCPQGKGNRRRSKLTITNPDAAGIDVGSQVHYVAVPEDRAEESVRSFGAFTAQLDELVQWLKDCGIKTVAMESTGVYWIPLYQKLEEAGFEVLLVDARQAKHVPGRKSDVQDCQWLQQLHSYGLLRAAFRPEDSVCRLRTLQRHRKNLVESAAMWVQHMQKALNEMNLHLHHVLSDISGLSGMAILDAILAGERDPRKLASLAHYRVQKSQAQIEAALTGDYRPELLFVLSQSLQNYRQVQHQITQCDLSIEKQLAKMSDCKNPSQAAEPTPPSQDLGGGKPRKRKSPVALEISLAGHLKRILGVDLTTIPGLNVLAILTLLSEIGTNMAKWRNEKAFVSWLGLSPNNKISGQRVLSSRTRKVVNRAATILRLAAMIVGKTNTPLGSFYRRKRAQLGGPKAVTATARKLGCLIYRLIKNGQGYNEPDMHTYELKYKDQILNSLRKRANTFGFDLVELPKAA

SEQ ID NO: 245797 - protein, 415 aa, unidentified
MNHPKMRYTYVGVDSHKDMHTAVFIDCFFEKLGEIAFQNMPSRFPAFLKEADKLKLDGTELLFGLEDASSFGRTLAVFLADSGHQAKHVNSVLVARERKNQNITQKTDSIDAECAARVLLQKLSDLPDAGPQDKYWILRTLVVQRDQIVRNNTRAKMSLHMLLTQHYPNYREFFVYITGKTSLAFFKKYPSPATLKNVSNEGLAEFLLAESSDRFGEEKAALILRSIEDTATEYQEIRDMAVRAAIRQIEFNLKEIERMDAVMAVYLDALDCTLTSMAGIDVVSACQILSCIRDVKRFPTPAKLARYSGIAPVTYASGKKNSQFANQRGNRELNSLFFRLAVRLTSPVGPNCKVINTFFYDLYRRKLSEGKTKRQAMKCVQRRLVNIIWAMLAYGEEYVNPPVLDAPLENIKAKN

SEQ ID NO: 245798 - protein, 393 aa, unidentified
MLLVHPSDGLTAIRTYIGAIFVSLELSRSTWLVTSLSPGKGEKMSKHSVAAGNMAELLTLFAELKRKTEVRTGQSYPIITIQEAGLDGFWLHRVLQQEGIESHVVDPASIATPRRRRRAKTDRLDGETLLRALLAYKRGEPRVCAMVVAPSPEEEDRRRLCRERQALIAERITHVNRIKGLLFSQGISDYAPLRRDRRSRLETLRTGDGRELPSHLRAQIGRELDRIELLLEQIKAVEAERDGLLAAARKPAEKPADEKAALDPVAMLLALKGLGANFAAVLWSEAFYRQFSNRRQVAAYAGLAATPWQSGGIRHEQGVSKAGNPRLRTTMIQLAWLWVRHQPQSALTRWFKERSQQGRKRAIVALARKLLVALWKYVTQGVVIEGAVMKPAA

SEQ ID NO: 245799 - protein, 306 aa, unidentified
MNESVGIDVCRQWLDVHVHGLQQARRFANQAAGLRQLRDWLAPLTLHQVVVEATGGAEQLALDTLHAAGLPMVRVNPRQARDFAKATGQLAKTDRLDARALAHMAAVLPLTRYKPLEDWRRQLRAYQQRRMQVVAVVQQQRQQLSTLTDAWLKQQAQIGVRQLQQQLAQLDACIAQQLAARAELQVLRQVKGVGPVLLASLAVQLPELGRLSGKAIAKLVGVAPLARDSGAMRGVRRIWGGRAGIRQVLYMATLVAVRFNPSLREFYQRLRAKGKAGKVALVAAMRKLLVILNAKMRDQLAAAATS

SEQ ID NO: 245800 - protein, 426 aa, unidentified
MKFNTQNAKITAITEKTLVIGIDVGSETHFARAFNWRGYEFSRKPLEFSNTEEGFETLRNWIRELKEKQGMDKVIPGMEPTGHYWFNLGKFLQDEGMRPVHVNPHHVKKSKEMDDNDPSKNDRKDPKVIAGLVNEGRFFYPYIPDGIYAEIRALSGLQVLAQSEITRLKNRIARWFSIYFPNYKDVYGNVGAVSGLMILKEAPLPEDIVKLGVEGVNRIWRDAKLRGVGLKRARTLVTAAEHSIGSREAQEAARIELRILLADYERYTAREKELMALIEEKIAEVPYVDKLLEIRGVGLKTVIGFVAEVGDIKRFDDPKQLQKLAGYAIVRSQSGKHKGESHISYRGRKRLRYVLYEAAVSVVGHSPEFRSIHRYYTTRDKNPLKKMQSLIAVACKLIRVFYLILQTGATYNAEKMMEDIRRPAAV

SEQ ID NO: 245801 - protein, 368 aa, unidentified
MMHTTTFVGLDVHARKIVAAALDTMTGEVHSATFGYDAAAVADWIRSVDPSAKCVYESGVTGFDLQKRLTGLGVDCAIGAVSKMIKPSADRRRKNDRNDAEFLARMLSVGNIVEVWIPDDECEAARDLVRALDDARDDLRRCKQRLSKFLLRHGLVFDETTPTGRRKGNWTAAHWAWIRSIEFSEKSDNDVLAYYIDAVRQAAEDKKRLERLVGAEASKPRWKKRVDSLRCLKGVDIMTAADIVFEAGEFARFGNARAFAAWLGLVPSEHSSGEKIVQGGITKAGNRHLRRVMVEAAWHYNHCSAHSKDLSAGQAPDPAAMRHAAKGVRRLVERRRGLLGRGMQKNKANVATARELACWCWAVGCMAE

SEQ ID NO: 245802 - protein, 344 aa, unidentified
MQFFVGIDVSLDSSNICVIDERGVIIKEGKVASDPAVIARFIRHKGRKIEHVGLEAGALAQWFHAGLSDEGFRVTVMEARHVRAAFAAMRVKTDRNDARGIAQLVRLGWFKAVHVKTLSAQETRALLNARQFLVDKLTGIENSIRAALRNFGHKLGQVSRRIWSARARELAAGIPALELAVESLLHVRDVLLQELRRLNRTLLDVAKSDPVVRMLMTAPGVGAIVALSFRSAVDDPARFRRSRDVGAWLGLTPSRYQSGRTDHSGHITKAGDAVARTALYEAATTLLGRMTKWSSLKSWGVRLARRCGSKKARVAVARKLAVILHSMWRTQSPFHWAALPPNAR

SEQ ID NO: 245803 - protein, 421 aa, unidentified
MHKQRKWFVGVDWASQEHVVSLYDETGTKFGQRKFAHAGTGLSDMIAWLLKASGGTPGEIHVAIETPHGPIVEALLERGFVVYSINPKQLDRFRDRFTVAGAKDDSRDADVLADSLRTDMRAFRKLSVADPVIVELREWSRIDEELKVEHVRLTNRLKHQLWRYYPQMLELADDVGANWFLDLFEAAPTPEKAANVREKTIARILKSHRIRRFDAAYVLAELRKRALTVAPGTIEAATAHIRSLIERIRIINGQLADAQRQLDRLCKKLSEPVADENGETTQGQKNEQPDAAILDSLPGVARTILATLLAEAPDPLQHRDYHALRALCGSAPVTRRSGKSCMVVRRYACNRRLTNAAYHWAQNAIQRDPTSRAKYDALRARGHGHARALRSVIDRLLGVACAMLNNGTLFDPEFASKRAAA

SEQ ID NO: 245804 - protein, 377 aa, unidentified
MKNVRFVGLDVHAETIAVAVAEATGEVRSLGMIPNRAESIGRLVRKLGKPEQLRVCYEAGPTGYVLYWQLSELGVKCEVVAPTLVPMKSGDRVKTDRRDAEKLARSYRAGDLTPVWVPDGAQEALRDLVRARWAAKRDQLRARHRLSKFLLRHGRRAPEGISAWTERYLQWVKTQISFAHHAQELTLSDYLHEVEHAAARVTRLERSIDAAIETLPLKLRAVIDALQSLRGIAQISAVSIVAEVGELSRFEHPRQLMGYSGAVCREHSSGPRIHRGPISKAGNAHLRRIVVEAAWAYRHRPAIGRTLAAPQQRSSAPVIELAWKAQQRLHRRYARLMARGKNKQQTITAVGRELLGFIWAIGIHVEQELSAPVRRTA

SEQ ID NO: 245805 - protein, 360 aa, unidentified
MRRAPIPRTERATTMEVYIGLDVSLACTAICVLGEKGEIVTEAQVASAPEALVSFMRDLPHGIAAVGLEAGPLSQWLHKGLTDAGFEAVLMETRHVKAALKAMPIKTDRRDAEGIARLLQMGWFRSVHCKTVSSQEKRALLSARKSVKDALLNMELSLRGVLRNFGLKLGHVSKGRWEARVRELIAGNAMLEAAAEPILRARTALRRELTGIEKLVRNLAGDDPVCRLLVTMPGVGPVVALSFVSAIDDPERFRRSKDVGPWVGLTPGRNQSGERDIVGQITKAGDVGLRTALYQAATVMLNRGAPNWLKAWALRLAVLRGRKRATVALARRIGVVLHRMWRDGTEFRFTREAAMALHTA

SEQ ID NO: 245806 - protein, 386 aa, unidentified
MNAVSGPNLSVAIRTELSAIFVSLELSKSTWVVTSLSPSGGEKMSRHSVPARDVGRLFERFEQLQEKTRARTGRLFPLIVIQEAGLDGFWIHRVLQGRDIESHVVDPASISTPRRRRRPKTDKIDGEALVRALLAYKRGEPRVCSMIKVPTPEEEDCRRLCRERKTLIVERVRHVNRIKGLLLSQGIADYDPLLRNRRDQLRALTTADGRPLPARIQAQVERELHRLELLIKQVKAVETERDALVAPKHENVPAPMSMLVNIKGIGPEFAFVLWTEGFFRHFDNRRQLAAYAGLAPTPWQSGSVNREQGVSKSGNPRLRATAVELAWLWLRHQPDTGLARWFHECVRQSGGARKRAVVALARKLLIALWKYVRAGVLIDGIVMKNA

SEQ ID NO: 245807 - protein, 409 aa, unidentified
MLFGGIDWSDRFLDYHLRTADGRVLAQGQVESTVEGLAELFTALESHGSATEIGIAIETCHGAWIQPLLDRGYALYPVNPKTVERFREALSVAGNKSDKIDRKVLAMFLVTFHQDCLPLRPDAPEIVSLRMACQDRVRLVEERTAKLNELQAVLKCYYPAFLGLFGNLDSTIALQFLEKFPMQKQMKALTKRRLQSWLNRHHYSWSRRAEDMMDVLKQPAFPVADHLQEAKAPLISSLAASIQILNGELATRDRWITEHLDQLPEANWVRSLPGAGDVLAPALLACLGRDPQRFASVADARALMGTAPVTKSSGTVRSVQFRRGCWKFARRTLHLFADHSRHHCAWAQTFYLKQRNSGHNHHAALRALAHKWLKIILAMRRDGTVYDERVFANSQRRYLLRTPVLEKTI

SEQ ID NO: 245808 - protein, 394 aa, unidentified
MKLVGIDVGKNSHHFCVMDKETGEFNVTPTSFSNNKEGFDFLINSLKPYSKKSILIGMEDTGHYHVALLKFLLSNGYTVALINPKTTDLTRKMEGGITKNDKLDTITICDVLDTPERKKQYRITKVDRFDLYEQRQLTRHHHNLKEELNVYCNRLQKSIDLVFPEFNTLFSSKYSIVCMNLLKTFGSAEAIASTDIRTIRKCFEIKGRGNRISLTPEKLKECAKNSIGISSEVETIQIKHLVSQITLIKEQIAEIDKKIEEFSITNNSPILSIPGISHFSGTSILAELGDIGNYSKPSQIIKFAGVAPYHYESSQYNAQHTGITKKGSKYLRKTLYQIILTVINNNPVFKKYYLLKISQGKGHRCAQGHCIRKLLRIIYHLLETGQSFDPALLR

SEQ ID NO: 245809 - protein, 346 aa, unidentified
MTIVETARAVTGGVDTHLDVHVAAALDERGALLGVESFEATAAGENKLGAWLASFGPLVRVGVEGTGSYGAGLARHLATVGVEVVEVDRPNRQLRRRQGKTDSLDAVEAARAAQSGRALGAAKSRDGHVEAIRALVVAKRSARSTKVKTMNQIRHLGFTAPDPLRERLSGVSRAALATEAASLRPRPGTDPVLFATKTSLRLLGRRVLALDAEKAELDALLDELVTAAAPDLLAVHGVGTDTAALLLVAAGDNPGRLRNEAAWAHLCGVSPIQASSGKVTRHRLNRSGDRQANHALWRIAITRMSSDARTRTYVERRLAEGKSKPEIIRMLKRYIARETYRVLPRG

SEQ ID NO: 245810 - protein, 431 aa, unidentified
MLKINPLSTLYIGIDVSSKSNYVCALDFFKNKYISSSFANNQTGAEELALKILECLKEHSDLTTVVAALESTSVYSIHIANYLSSCEELMRFKPYVFVLNPKCTANYKKSYIGLGKSDPIDAFVIADYARAGNIESEPWRGSQFLALKRLTRHRLHLVECMTREKTYLVSNLYLKFSELQMLEGDDQPFCDIYGATSSSVLMEYLSPEEILNSSEEDLIAFLAEKSRNRIKDISKTADLLKKAARDSYRLDKSLYEPLNVSISSSFNCIETFKREIKVIDNAIEKEIKGLNPNAFIILQSIDGIGPVFAGGIIAEIGDITAFHSSDALAKYAGLTWKSNQSGDFDGEDTPMTKAGNRYLRYYLGEAANSMRKHNVEYGAYYRKKYNEVPKHQHKRALALTSRKFVRLVYGLLARKQLYSGVSLDTSIKDSN

SEQ ID NO: 245811 - protein, 401 aa, unidentified
MKRLSGGIDVGSEFHHITILDEEDHILYNQKVSHKLSEFTKNIKLFKQIEKKEKGEISFALEGKNGYGAPFDQLLINQGFTLYNVDNFKLKRFREAFAGEWRDDERDALMLSKMLKLKDHINSQREKIFIKIEKSSPVTESLKLLSRHQQTLIDEKVRLTNRLRKKLLEVCPEILKLAKLKNKKLIVILVKYPDFSKYKRITLKSLLKIKGIGKKGAFFLLKRLNNIEYMPGLTDIYQMIISSFAKRISELQEEIKDIDRKLDEIGEKDKAVIHLKTVPGVATKLASRLIGEIGNINRFPSEKQLAVYCGIACVNNDSGKVTKAKAVYKANKICKQTLITMAGGSIRLSLQCRAYYLKKRAEGKSHNHTLRCLARQLIKVIYKMLTEDRDYIIQKELKKVA

SEQ ID NO: 245812 - protein, 319 aa, unidentified
MAQNDWLVAGIDVAKDKVDVCIRALSQRRTFESTAAGQRKLVAWLRKHKVTRAGMEASGGYEREWAKALREGRIEVRIVDPKRVRHFAQSAGRLAKNDAIDAETIAWFAETFAEAPSQTYDAARERLAQMVNARQSLLDQQTELTNRSEHSLPDIVQRMHARLSKAFATELATLEAAIIALVKATPHLAELAEIIESVPGLAEITSAGLIAAMPELGQVSNKVAAALLGVAPYDDDSGKRRGERQIKGGRRRVRNALYMPCVGAATRYNPVLKAFYQRLLAKGKKKKVAIVACMRKLIVILNIMIARRQKWNPNLCLVS

SEQ ID NO: 245813 - protein, 360 aa, unidentified
MQYRSGTALIVKTTSMSKLYVGVDWHKRTSTWVAINEEREKVYEKVWDCTPEAVKAAVTSLPAKPEEMKLAVEPVCGWRWMTDLCEAVGIDVRIANTIKLRQIADSGQKTDKKDALTLAELVRADYLPEAYKVPTDIYELRMLVRERAHFISQGTGTKCRIHSVCTGRGNHLTALQPLHKAGREALYVKESPFYEMFQSLEEIKAHVTNLEKKILATVINTNTYHILLSLPGVGPVTASAIYAEVGDFNRFKTPAALISYAGIYPKERSSGDMKRYGSISKAGSRVLRYSIIEAAMRVRDTEQSHNLYTHYQSAKARNKTAKQARIVVAHKLLTIAWHLVHRGTMYDDHMVKPAQREITS

SEQ ID NO: 245814 - protein, 367 aa, unidentified
MEKSSKVYVGMDVHKESIEVTLAEQGGELRRLGQIGGDRVSFLKMVRRLQSKGGERVFVYEAGPCGFWIYRELAALGECCMVVSPALVPKRAGDHVKTDRRDSERLASLARAGELDAIHVPDIRDEAIRDLVRGRDDAVIAQRRVRQQLKALLLRNDIRYVGKTSWTGAHRRWLSELKLPEPAQQIVFEEYVDAIVVATSRIERLTRAIQTETLTWRFAPVVAALQAMRGIQFVHAVTLIAELGDLTRFPSARQLMGYLGLVPREASSGEQRRQGSITKAGNSYARRALIEAAWAYRHPARVTRIIATRQTGLPKAACDIAWRAQLRLSSKYRRMNARHLHHNKIVVALARELSGFVWAIGQSVKPL

SEQ ID NO: 245815 - protein, 410 aa, unidentified
MERVIERGAGLDVHKKSVTACVRVPGPAGSRRQEVQTFGTTAAALLTLRDWLQAHGVTHVAMESTGVYWKPVYYVLEELFTCLLVNAAHVSKVPGRKTDVRDCEWLAQLLEHGLLRGSFVPPVAIRELRDLTRYRAVLVQDRTREANRLHKVLTDAGIQLASVASNVLGQSGRAMLTALVEGTTDPEVLADLARGRLRRKLPALREALAGRFRKHHALLVSQLLAHLDYLDEALELLTGQIEEALGPFASEAARLDAIPGVGPRTAEILIAELGVDMRQFPTARHVASWAGLCPGTHESAGKRRAVRTGKGNRWLRAALIEAALAAINVRDSALAARYRRLKPRCGHKKAIVAVAHKLLTTAYLLLADGRTYQEPGPGYYDARRKNRDIRRALKALERYGYRVSLEPAAA

SEQ ID NO: 245816 - protein, 344 aa, unidentified
MNHVAVDLGSRQSQLCVRSADGQIQQEAKLANADLRAALAALPKSRVVLETSSEAFAVADLALAARHEVNIVPSGLARNLGVGQRGIKTDKKDAQNLSMASCRMETLPQVHLPSMQARELRRLLTSRAQLVAARTSMVNSVRGWLRSQLLRTSRGTRPDNFPERIRELALGRPEGLPVHIDRLLKVVETLNAQLKDADKELEELAKDNLTCQRLMTVPGVGPVTSATFWATVDDAKRFKTAHAVESYLGLTPGESSSGQTVQKLGITRAGATRTRATLIQAAWAAWRTRPSDPMVRWARGIAERRPTQVAVVALARKMAGILFALWRDEERYDPAHGLEKNQHS

SEQ ID NO: 245817 - protein, 448 aa, unidentified
MEVLYERVAGLDIGKATLTVCVRTPGPRGRRAETRTFSTMTRSLQVTRDWLLECGVTVAAMESTSTYWKGALYCLEEVMEVWLVNAAHIKAISRRKTDVKDAEWIAQLLECGLLRPSFVPPPDIRRLRMLTRYRVQLMADRTREITRLELMLEDASVKLSAVVGSLTSVSARAMLAALISGEDDPRVLAELAKGKMRRKIPALTEALTGHFDDGHAQPARSMLARISSVEAALAELNAVLAVAFAPWVHQLELLQTIPGVGQKVAQVIIAETGADMTRFPTPEHLASWAGVSPGTRESAGKRYPVRPPHGNKWLTAMLVEAAGSVGRMKGNNYLAAQYARLTSRRGMARAQLAVGHSILVSAYWMLTPDQPYHDLGPEWLARRNDEAHARRLVAQLERLGHTWSSTRSPDLTPQEQRTGFARPALTRACNSPIHGSVILCDLDRCVGG

SEQ ID NO: 245818 - protein, 366 aa, unidentified
MSNYIMVGADVHDKDILTKWAYNREKPVQRSFNNTQGGTDKMIATLKKQARECGNATVVFAYEASFLGYGLYDKLTDAGIDCRVLAPTKIPRSSKHRKRKTDARDANRLLEVIKGHILAGNELPDIWIPDLETRDDRELVRMRLEVGDKITAVKNQTLVLLKRNKFRKPGKTGKNWTKSHRLWLEESAKPGSDLPSGARCALNSLIRQLSALEQETVYLAEQIQKLSQTPRYAEPVQELVELKGVGTLTAMVYLTEMGDLSRFNNRRQIGAYLGLVPSSKESGGKSDRKGHITHQGSSRVRKVLCQASWARVRTDLHEKKVYERIVERNPKHKNIAVVASMRRLSIKMWHQGLKAQSRTGSFEAVV

SEQ ID NO: 245819 - protein, 343 aa, unidentified
MQIRSVGIDLGKTTFHLVALGDNGKVLLKKKFTQKQLITFAANMQTSLIGMEACSGAHFLGRALRAQGHDVKLIPAQFVKPFVKSNKNDFIDAEAIAEAVDRQNMRFVPIKTEDQLDLQALHRVRDRLITRRTSVINQLRAFLLERGLVFAKSPARLRERIPEILENADETLTPRMRNLLALLWNEWKDLELQIVEMNHEVEQIATSDPACTRLRQIPGIGPLVATAIVAAIGNGAAFHKGREFAAWLGLVPKQYSTGGKAKLAGISKRGNIYLRKILIHGARAVVLRSKRERIVMGSWLTALEARAPRNVLIVAAANKLARIAWAVLSSGQDYRAVQESVAA

SEQ ID NO: 245820 - protein, 318 aa, unidentified
MQIPGCFIGVDVGKFELQVAGHEDAIVSGSLANSRSSIVGWLKRLPAGSVIAMEATGGYQELLARLAHERGFAVYVLNPTHVHHYAISLGNRGKTDRLDAEVIAQYIAQRHATLHRYEPISPELQQVRALQALRSTVVRVGTSLRLSAQRHGCSSEHQKKALASLSAWAEQLERELIAQIKAQSEWAKTYGLLTGICGIGPINGAALTTLFNRIHFASSDAAVAFCGLDPRPNESGRKVGRRRLSKQGDKAARTLLYNAASSAARTAHFKDYYAMLRARGLASTAALVVIARKLLRIAYGVWRTGQAFDPGRLNLKTA

SEQ ID NO: 245821 - protein, 424 aa, unidentified
MDRNDDTRLKEFRQLKNEIRGSTQHLVVGIDIAKDRHAAFFGTATGKTLFRGFAFDNTKEGFDRLLFQADTLKTREGLANLVFGMEPTADYHKPLGEYLIEHGHQVVLVGGAAVKKNRELLDGRWDRHDPKDAANVADLITQGKCLFYELPSLEVQELRSLLSLKRRLKKSEQGYKVRIRNHLIAQYFPEVDSYFGYGEGPGIVRWYLDPKELARLPFEEFSRMVSSPKGGEKQQERLEEIHTKAGISIGCSTHPSVAFEASTLLEGMRRIRTMIEETNARIAAVCKKFPEYPCLLSIPGFGPDGSAKVIGALGNPHRFENHRQVLKTAGLDLSADRSGKRTDVTPVISKKGKADLRYGLYQAAFIASTRNRHFMAYFTGKLKGREREKGIGTKMRTKLAAKMLVIAWSLMKKKEVFNPECIKG

SEQ ID NO: 245822 - protein, 400 aa, unidentified
MKSVLSVDVAKGKSMIMLSTEYGEVLIEPKEIKHNFRDFNELKDKIESFNLEGLTIFMESTGIYHLPVERYFKENNFNTLVINSLTTKNNYDTLRKTKTDTKDCMRLAKLFFVNEVEYHDLSKKDLYANLKAMTRQYFYLTQLNVSCKNRYKRLINICFPEFEEIFKGSRIYEETALNFIKTFPHAYIVKEKRIDALYNNLYKTNSRHDYYYKRLANKIKDIAVNSYPGVDKDHSDVKNLSDMAAILQENIKTINELKEKMIKTAKESPYFDIINSFYGIGEVLTTELLGELGDITRFDNHRQLIAFCGLDPTIIQSGKSINVHGTISKRGNKYARWILFNISQIVVKLGHQCPGHPVYDYYLTKKAEGKHYYENLTACSTKILRMLYTMCKNNTTFKIN

SEQ ID NO: 245823 - protein, 411 aa, unidentified
MRLFVGDDWAEDHHDVELMDEAGRVLARKRLPEGVAGIARLHALIGQQLGDDADDAEVVTGTGTDRGPWVAALVAAGYTVYGVNPLQASRYRERHGVSGAKSDTGDAHMLTDMVRTDSHQLRAVAGDSPDAGAVKVVARTHKTLIWERTRQVQRLRHQLREYFPAALAAFEDLDAPDALELLGKAPDPARAARLTRAQVSAALKRARRRDIPGKAAAILAALRSEQLGQPPAVTAAYAVTARSLIAVITTLNEQVKVLEEQVRAHFGRHPDAEIYLSQPGIGPVLGARVLGEFGDDPGRYASGKARKNYAATSPITRASGKKKVVAARFIRNDRLTDALMAQALSAISASPGARALYDAERDRGAEHNPALRKLANRLVGILHGCLKTRTPYDEATAWPQRENLPQSDLAA

SEQ ID NO: 245824 - protein, 393 aa, unidentified
MVCVGIDVAKDKHDCFIISSEGEILADVFTIPNNAEGFDTLLQAIRRSTRPEDKIKVGLEATGHYSYNILGFLLDKGLDTYVINPLHTNLYRKSLSLRKTKTDRVDARTIAAMLMSDVDLKSYTDTVYHNEELKSLTRYRFDKVRERAKLKQSVSRLVTILFPELEKLVSSLHSASVYALLSEFPGAKQISSTHMTHLKAVLKNASQGRYGQEMAETIRNAARSSVGSVMPAKSLELQHTIRLIRELDAEIEDIETAIQAIVDEMQSPITTIPGMGVRMGAVILAEIGDFSRFDSPDKILAYAGMSPSTYQSGQLSLSGAYSHMEKRGSRYLRYALYNATKHVCHWDPTFAAYLAKKRAEGKHYNVALSHAAKKLVRLIFAMEKSQRPYCAAA

SEQ ID NO: 245825 - protein, 411 aa, unidentified
MLFVGDDWAEDHHDVEVMDASGRRLAKARLPEGMAGMTRLHAMIGQCLGDDADEVEDVAARVKIGIETDRGPWVRALVAAGYTVYPVNPLQAARYRERLALSGAKSDAADAHMLADMVRTDSHQLRPTAGDSAEAEAVKVVTRMHKTLIWERTRAVQRLRHALREYFPAALVAFEDLDAADTLELLAKAPDPAAAARLSINQISAALKRARRRDIASKAAAIQAALRAEHLGQPAVVTDAYAASVRALVALLVTLNEQVKALQGQVEAHFGQHPDAEIILSQPGLGVVLGARVLAEFGDDHARYTSAKARKNYAATSPITRASGKKRTVAARFVHNDRLIDALMTQAFTSLRLSPGARAYYDRQRARGASYNAALRQLANRLVGILHGCLKTGTPYDEATAWSHHLNEAAA

SEQ ID NO: 245826 - protein, 434 aa, unidentified
MSQQNISTSPTPPVYAAFVGLDWGDEKHALSLCVAGATVIERTTLPQTPEALADWANVLRSRFPNGKIALCLEQARGALLAGLMQYEHIVPYPVNPKSLARFREALYPSRSKDDPVDADLLLDLLVKHGEHLRPWQPDTVATRQLALLNEQRRHFVDLRTALTNQLLSHLKAIFPQALELVGEDLASRLATDFLKKWPALQAVQKVKPAALRQFYYGHNSRSQDLITQRLERVKNAVALTRDPALLAVHTLAIQTLAGQLQALRPYLDQHEQQIADLFAAHPDAALFDSLPGAGAALAPRLLAALGSNRSRFPDALSIHCYSGIAPVTEKSGKTQYWVHVRWSCPIFMRQSWHEFANCSLKFSSWARACYDDLKKRMDHHEAIRKLAYKWQRIVWRMWQERQPYDETRYLRSLQKRGLKIYANLAPQPVAAACE

SEQ ID NO: 245827 - protein, 341 aa, unidentified
MKQNVCTVGIDLAKKIFHLVGTDTTGKIVWRKRLTRHALIAFMAQLPPVTIGMEACGGAHSWARQLRHQGHEVQLMAPQFVKPYVKSNKNDMRDAEAIAEAVTRPTMRFVPIKDVAQQDIQALHRVRERLIGARTALINEVHGLMQEYGIVMPKGVAKFRQAVVEKLETAKDKLTPLSQEIFWKLVKEFVALEDQIAFYQEKLETLATTHPESQRLMPIPGIGPITATALVAAVGDVGVFKNGRQFAAWLGLVPKQHSTGGQSLLLGISKRGDSYLRKLLIHGARATLRWVKLQTDSRSQWIRGLLARRGWNRTAVAVANKNARIVWALLSRGGVYGASAS

SEQ ID NO: 245828 - protein, 318 aa, unidentified
MTMSPTRQAFSHVVAFEVSKDMLVVHALPVDEQCTIPNKPQAVRRLLKAEAKRNRRERLGQMLVVCEATGGYERHVLDAAIELGLPVHRAHGTRVRHFGRYCGLLAKTDPIDARLLAQYALKTEELRLYVPPPSEIGALRALHARRSEIQQMMIAETGRLDHAQHKSVLRSLKRHIAELKANLAGENEALRRKVELMRTVIGIGPISAMVLLAYVPHIGRLTKGQVARLAGLAPINNDSGKKRGARHVESGRIAIRRALYMAAVVAIKVNPVLKAFADRLRGKGYPFKYVATAVMRKLVVILNAVLRDGEPWKGAKIA

SEQ ID NO: 245829 - protein, 359 aa, unidentified
MKCNPAVATIAIDLAKSIFQLLAVDARGHVLESHRLSRAAFIAFWHNRAPVRVVMEACGSAHHFGRWLTALGHQVILIPAQYVRPYVRRSKTDAADCLAMIEAARAIDLKPVPIKTELQQVIQLLHRARQQWQETRTARINLARGLLREFGIVVPEGAERGQQAMRAALGHEALDQRMRDLIASLLDEIRALEQRVIDIDRALASTAKDDPVIAQLESLPGIGWVTATAVRASIGDIHRFKTGRVLSSWLGFTPKEHSSGSTRQLGRMSKCGDVYCRTLLIQGARAVLAAAKRAQAAGKPLDRLRTWALALAERRGFNKAAVGLANKIVRILWATWHHARSFDGDYAKRFDQEIAMTSV

SEQ ID NO: 245830 - protein, 327 aa, unidentified
MTMACTELIFVGIDVSKATLEVALGSTATTQCFGNDDKGVKALIGHLTALGDRLAVVLLEATGGLEQRAAVALCTAGVAVMVINPRQAHDFAKSLGYLSKTDHTDARALSHFACTLHASEKRDKLLYKLPTPEQEALLALITRRTQLVGMRVAEGNRLDSAHATQRKSIRAVIKMLDRQLEQIDADIGGRLKEHFKDKLDLLKGLKGVGPATQAMLMAGLPELGTLSEREIAKLVGVAPLNRDSGTFKGKRTTWGGRAHVRAALYMAALSASRFDPTIKAFYERLLRAGKPAKVALIACMHKLLTIINAVIKSGKPWQAGYPQSNNA

SEQ ID NO: 245831 - protein, 354 aa, unidentified
MDIKYIGMDVHKETISIAVMKGDGKLVMESIIETKASTILQFIEGVRGDLHVTFEEGTWAAWLYDLLKPHVAELVVCDPRKNALMKEGNKSDKIDARKLADLLRGGYLRSVYHGENGLRTMKELARSYLTISKDLTRVMNRVKALYRSWGIDCAGQQVYAPQHRSEWLNKIGETGVRRRAEFFYQQLDALRVLHKAVRRDLLAESRKHSATKLLREIPSIGAIRAALLLALIQTPQRFRTKRQLWTYSGLAIDTRDSAQHCFVNGQLQRSKKPQQLRGLNQNHNHDMKAVFKSAATMASGGEGPFHDFYQGLLTKGMEPAMARLTLARKIAAITLTIWKKGAHFDAKQLKPQAA

SEQ ID NO: 245832 - protein, 382 aa, unidentified
MTTHAAVSRMRYVGLDVHAETITAAVADADGAVHEVGTIANEPAALRKVMRMLGPAEALRVCYEAGPTGYVVYWQLVALGVACEVIAPSLIPTKAGDRVKTDRRDAVKLARCYRAGELTPVFVPDAATEGLRDVVRAREAAKQDLLRARHRLGKLLLRHGRQRPAGMRAWTQRHEQWLGAQRFAVATVQLAYDEYRAAVSVLVARVARLEQAMRAGVATLRPAQQALVTGLAALRGVRDVTAITVVSEVTTLTRFAGARPLMAYAGLVPREHSSGRGHWRGAITKTGNAHLRRVLVEAAWGYRHRPVTTGRLRLRQQGQPPAVVAVAERAQQRLCGRYRTLAARGKAPLFVATTIARELLGYVWAIGQVVEGTALRAEACMA

SEQ ID NO: 245833 - protein, 368 aa, unidentified
MNTVKFIGMDVHKKTITIAIIDKGRNQQPRIYGTIENRLEALDKFCRKMLSTTSRLHFVYEAGPCGYGIYRHLTQKGFDCVVAAPSMIPKKSADRIKNDRRDAAMLARLHRSGELTAVYVPDAQDEAMRDLTRAREDAVIAARKAKQRLNAFLLRNGLTFAGRSKWSNAFFNWLCDMAMPYPAQQVALQEYIDTVHENLKRVERLTDQIRQLVPAWRLAPVVSALQAARGVSLIVAATVLAELGDLSRFDKACQLMAHLGLVPSEHSSGESIKKGTITKTGNGHVRKALVEAAWAYRMPARVSSSLLKRQQAVPERVCQIAWKAQLRLCTRFRRLRARGKTKQKVVIAIARELSAFLWAMAKQLQPVV

SEQ ID NO: 245834 - protein, 450 aa, unidentified
MQVVYERCCGLDIHKKLVVACLIVLAANGQRHKEIRTFRTVTQDLLLLKDWLAAAGCTHIAMESTGVYWKPIFNLLEGDFELLVVNAQHIKAVPGRKTDVRDAEWIADLVQHGLLKGSFIPPTPQRELRDLTRHRTSLVEDRARVVNRLQKVLEDTNIKLGDVATDILGKSARAMLEALLAGQTDPKVLADLARGRLRSKIPALEQALVGVVKPHHRFLLTELFTQIDTLDEAITRVGNEIATRMHEEEPARQEPTEHHRGSPNGEQQEAPAEEPGQAGERPPLTWALAVALLCTIPGISRRAAEGILAEIGLNMARFPSAGHLASWAGMCPGNSESAGKRLSGKTRKGSSWLRILLVEAAHAAAHTKNTYLSAQYHRLAARRGKKKAMVAVGHTILVIIYQMLQQQKSYEELGGNYFDERERQDTEKRLVRRLEKLGYQVTLQSDNPAA

SEQ ID NO: 245835 - protein, 394 aa, unidentified
MKLVGIDVGKNSHHFCVMDKETGEFNVTPTSFSNNKEGFDFLINSLKPYSKKSILIGMEDTGHYHVALLKFLLSNGYTVASINPKTTDLTRKMEGGITKNDKLDTITICDVLDTPERKKQYRITKVDRFDLYEQRQLTRHHHNLKEELNVYCNRLQKSIDLVFPEFNTLFSSKYSIVYMNLLKTFGSAEAIASTDIRTIRKCFEIKGRGNRISLTPEKLKECAKNSIGISSEVETIQIKHLVSQITLIKEQIAEIDKKIEEFSITNNSPILSIPGISHFSGTSILAELGDIGNYSKPSQIIKFAVVAPYHYESSQYNAQHTGITKKGSKYLRKTLYQIILTVINNNPVFKKYYRLKISQGKGHRCAQGHCIRKLLRIIYHLLETGQSFDPALLR

SEQ ID NO: 245836 - protein, 356 aa, unidentified
MTRIAQLEPRRVTVGVDTHRDAHVAVALDQLGRRLGQLEIATTRAGYAQLLAWAGSFGEVVVFAVEGCGCYGAGLARHLGAQHVRVVEVMRANRQTRRRKGKSDPTDAEAAGRAVLAGEAAAAPKSGDDVVEMIRVLRVVRVTAMKARTQAINALRSLLVTAPPELRDQLRALSSVKLVRSASRFRPGAQDSPLAASKLALRLLACRYQALDDEIAELDSQLEQLTAQASPELIESFGVGPEAAAALLIAAGDNPGRLHSEAAFSMLCGSSPVAASSGKTIRYRLNRGGNRQANAALYRIVLVRLRYHQPTKDYVDRRTSEGKSKPEIIRCLKRYVAREVYTALKQTGETNLARAA

SEQ ID NO: 245837 - protein, 313 aa, unidentified
MDHDSAFVGIDVSKNKLDSFVSTTGQVEQFFNTPEDIQRLAKHLKAQMPVLVVLEATGGYERLAAAELCAAGLPVVVVNPRQVRDFAKATGRLAKTDALDAQVIAEFAQAVKPEIREMPDEHARELADLLTRRRQLIDMIVAEESRLKQAVFKALRRDIKAHIVWLQKRLKSTDDDLHEAIKASPAWKANYDLLREVSGVGNVLALSLLSMVPELGKVNRKQVAALVGVAPFNCDSGQYKGRRRIWGGRAEVRSVLYMAVLSSKRHNPVIERFYNHLLAAGKTKKVALVACMRKLLTILNAMVRDQKHFAEMA

SEQ ID NO: 245838 - protein, 405 aa, unidentified
MRVYIGIDWSEQKHNICFMNEAGGAIVEIEIKHKAEGFLALDEMRAKLGVRREDSLVGIETSHNLLVDYLVEKGYVVYVLAPAKVKGSQSRRGVAGAKDDRKDARLIADIVRTDHAQMGTWEPQGKLVQQMRAKVSLITFLTHSCVRYSNRLRAVLLRYYPAALKIFSSTHTKIALAFIRAYSDPDLAAKLTLEEFKAFLKQNHSMRSNWVSTYFTRLKSPMPASSAHLTATYQSEAVLLAGLLADSLAEKDREIKELTKLYEQHPDAYIFKSLPAAGLFLEPALLAKLGDHRSQFPTAAVLQAIAGSSPITRQSGKHRSVQFRKACDRELRFISQQWAKASVRSCDWAKTYYLAVYRRSHSKNGAYRCLANRWLAILWKLWQSGQTYDETFLLQQRALRTLPHP

SEQ ID NO: 245839 - protein, 412 aa, unidentified
MEQLHERTGGLDVHRDTVSACVRTIGPKGGVVRVKEQFRTTTIELGRLSAWLVERDVDLVAMEATGVYWKPVYYALEGGPFAVWLCNAHHVKNVPGRKTDLSDAAWLADVAAHGMVRPNFVPPPQVRELRELTRYRKTQIEARVAEIQRMEKVLQAAGIKLTSVASKVLTMSGRAMIEAMIAGQRDPVALADLAKGKLRPKIPELTDALTGRFADHHAAAARQILAHIDFLTASVEALDIEVAQRLTAQQRTVMDLLLPVPGLERLSIETIIAETGADMSRFPSASHLASWAGLSPGNHESAGKRRRAGTTHGNQWLRRTMIESARAAARTKNTYYAAQYRQIARRRGPNKAAVAVAHSLIDVVWHLLSTGEIFTDPGADYFERRSDPEHQARRLTGQLEKLGYQVTLTPAA

SEQ ID NO: 245840 - protein, 415 aa, unidentified
MERIFEVSAGIDVHRDKVLVSVRRVCNTKEEVKTKTFETFHDGLTAMAEWLLAESVEVVGMESTGVYWHPVVRAVERALPKAVIWVVNPAHVKKVPGRKTDVTDSQWLAKLVMYGLVSPSFLAPPELQELRKLTRHRTKLTADQTRYKNRILKEVESSGIKIASVCADVFGKTGRALLNAMIDGKVLGESQIAGLARGTLRNKVPQLARAVQGSLTPSTVFVMRQLLRRFDDLTNDIAALESEIRQRAQPMNAEVRRLSKIPGLDEVAVAGVLAEIGPDMSVFGSAKRIYSWGGLSPGSDESAGKSKKAPTRKGNKYLRTILVQAAMCAKQTKGTFWQRKFRRLARLGPKKAAVALARSLLGVIFHMLADGSDYREPDTVPPPPHRLRARVANLTNQLKALGFNVALSQATSSVS

SEQ ID NO: 245841 - protein, 462 aa, unidentified
MSQRRKKPKRAGQGGAVPSLSCIEPNAAGIDIGATEIFVAVPQGRDPSPVRSFETFTEDLHRLKSWLQQCGITTVAMESTGVYWIPLFQILEKAGMEVCLVNAQHVKHVPGRPGRKSDVIDCQWLQYLHSVGLLRASFRPEERICAIRSLLRHRDSLVQMAAAHVQHMQKALTQMNLQLHHVLSDITGQSGLAILDAILAGERNPAVLAQLRHARVQASEEIITKSLVGDYQREHLFTLRQSLQAYRYYQSLITACDQEIAEQLQNLDSRTPPDASPLPPERYPHRPRKNEFRFDMRSELYRIYGTDLTAIPSINALTGYTVLAEVGTDWSKFRNGDAFASWTCLCPQNKKSGGKILSAHTRRSANRVNRALRLAAQTLERSTSYLGAYYRKMRARHGAPAAITAAAHKLARIIFHLVTTGEAYDESLFAAEEQRQRKRMENKLKRSAQQLGYQLIPLGQTA

SEQ ID NO: 245842 - protein, 421 aa, unidentified
MIPAVLECCAGIDVGKKFIVACVVKGPANGDAQAQTRKFGTNNGNLQQLREWLVGCGCTHVVMESTGEYWRPIFNVLEEAAELQIVLANSQQVKGLRGHKTDPDDAHWLAHLLRHGMIRPSYIPPLAIRQLRDLTRRRKQMVAHGAQERNRVQKTLEGANIKLGNVLSDVFGLSGQLMLEALLEGKATPEQIAQLAQKSARKKIPQIRASLEGHRMTDMQRKLIGFSLDHMAFLEEQISVLDQEIATHIRASQLQAQHSILQTVPGVKQEAASSLLAEFGPDMKVFGSGAKCSAWAGVAPGNNESAGKRKRAPALRGNPWVRSTLVECAWSASRKKGSEFQHQYQRLQPRLGHKRAIVAVAHSLALVIFEVLSTGEAYTKPGASPMPETQAARLIRHHTRRLKTLRSRSRARAKHAVASAG

SEQ ID NO: 245843 - protein, 322 aa, unidentified
MAQDDLVVVGIDVAKDKVDACIRAFALRQVFPSAAQGHRKLIAWLRKHKVTKAVMEASGGYERDWAKVLRQAGIEVRIVDPKRVRSFALSAGRLAKNDAIDAEMIAWFAETFSEAPSQRHDAAHEELLALVKARKGLLDLKTRLQSQNEHAALGPVQKAHARVVKSLATEIAKLEAAISAKIKATPDFAERTEIIESVPGFAETTSANLIAGMPELGQVSNKIAAALLGAAPYDDDSGHRRGERHIKGGRRWVRNAIYMPCLGAATQNNPVLKAFYHRLIARGKPPKVALVACMRKLIIILNSLIARRQKWDPSRYPHSERA

SEQ ID NO: 245844 - protein, 392 aa, unidentified
MSQHCHFDASRSLTALEQDSTIIAVIEMSQTKWLVAALIPGVERQPLKKFDAHEETLLKLLHRWRREAGQAGRNIKRIVVAFEAGRDGFWLARWLRARDIEVYVIHPTSIAVSREHRRAKTDRLDTELLMRVFLGWLRGERRHCSMVAIPTIEEEDARRPNRERQTLVTEQTRIINQMKAIFARFGIRTLRPTMRKVAEKLEDLRTAEGTPLPQNTLAELRRHLARLRIVRDQIRAVEQERLRKLAVAPAAEKKSPHAMVRLIARVLGVGVETADMLVNEIFSRHWRDRKAVARYAGLTGSPDESGSRRRERGLARAGNVRVRSGMIQLAWRFVRFQKNSALAQWFAARTADGRASTRKTMIVALARKLLIALWRLVTRGEVPQGVALRPAS

SEQ ID NO: 245845 - protein, 415 aa, unidentified
MALKIVYKICCGIDVHKTFVVACIASTNDKGITSYESHRFSTYTSGLKTLLQWLLDRNCKDVCMESTGKYWIPVYNILESDCSIVLAHPKYVKAIRGKKTDKKDAKWIADLFKHDLVAGSFMPPADIRQLRDLMRYRFKLTCFKSSEKNRLQNCLTVSNIQLGNVVSDTFGKSAQAILDKLLENPADTSFDLEPLVYKSLKKKLPELRDAIDGYITPEQAGKLKVIKAHYENLESRKAELEELILALAAPYQQELTILQTAPGISSPFTAIGIISEIGTNMEAFPSAKHLCSWAGLTPTNNESAGKEKSVRVSKAGCYIKPLLVQCANAVVKSTKHPEMRNRYLRLKKRRGHKKAIIAIARMLLTALYHMLKNGENYNAELYQKSDLLPVDREITVEQALMIARNQGYKIKSATA

SEQ ID NO: 245846 - protein, 302 aa, unidentified
MGVDIAKSYLDATIGNEKRRFSNDTIGHRQLIKWVKGVTTPVQVICESSGGYERALVQRLARTRVKISLVQANRVRQFARAAGILAKTDCIDAEVLCEFGKVMRPQTITAAKLEQEHLRELESQRRHLTRLLVMEQNRAARVSDACVQKLNRSLINQIKKQIEQLDLLIKGHIEQSHELSAKAAKLMSISGVGARTAALLLAQLPELGKLNRREVAALVGVAPFNRDSGRMRGKRAIYGGRKPVRHGLYMAALVAAHHNPILRNFYLRLRAAGKPAKLALTATMRKLLIALNSALKPDLNYA

SEQ ID NO: 245847 - protein, 333 aa, unidentified
MVDEAGQIELEQRVRTSAKAVQEVFRAMPRSRIALEIGTHSPWISRLLSELGHELIVANARKVRLIGESRQKDDRPDARTLARLARIDPELLYPVKHRSAQAQADLAVIRARAGLVRARTGLVNRARGLAKSYGEHLRGCNVRNMNPEKAEGLSPELQRALEPLLSAIEELSQGICQYNEGIEALAQASYPQVALLKQIKGVGTLIALTFLLTLEDPHRFCKSRDVGCYVGLQPGRRNSGQSEPQMHISKEGDPYLRTLLVQGAQHILGPFGIDCDLRRWGLKLAERGGRNGKKRAIVATARKLAVLLHHLWVSGEVYEPLHNSNRMTAAAAA

SEQ ID NO: 245848 - protein, 366 aa, unidentified
MNQITHIGLDVHKDSIAVAVLRPGSTEVDERVIPNTPEAVRKLLRRHDDPGALRVCYEAGPTGYDTHRLVTSLGVECDVIAPSLIPRRSGSRVKTDRIDARNLARLHRAGELTNVRVPTSAEEAARDLIRVREEVKVDRRVARQRIRSFLLRYGKRYPQGPDRWSQRFEVWARALRFDEPLAQEAFSNLLAAYFVRDTQLSEMGRRIEELAATEAFADGVARLSALRGIGTLTAMTILAETCDFARFGDAGSYMGFTGLTPSEHSSGASRHQGSITKTGNRHVRRVLVEAAWAYRHAPAVRGKLRERLEGQSPEVAAYSWAAQVRLHGTFRKISARKGAHTAVVATARELSGFVWGLMTDNLGPAR

SEQ ID NO: 245849 - protein, 331 aa, unidentified
MEQRKTIIGIDVSKKTLDVFIKTIEVHLQISNDSEGFKKLLALLKATKLKPEDCLFVLEFTGGYEYRLVQFCQSKMYSYVRISGLALKRSMGMVRGKSDKIDAKRIAGYGYEKQSKLEAETGGLADIVRLKRLLSQREDFVTDRKAYDHRYSELQYMMDLNDKDSMLKRYKKLAADLQKLIDKTEEEIRKLIKANDAFQLNFDLLTSIKGIGEINGWTMIAYTENFTSFENGRQFGAYIGVVPYDFTSGTSIKGKSRTSKMANQQIKALLQMAARAAVIHDKELNLYYERRTALGKHHMAVMNEIKFKLVLIMFAVVKKQKPYVDKYKVAA

SEQ ID NO: 245850 - protein, 444 aa, unidentified
MPKCVPERVCECARTSDQHLLISGTDDMNAEKEIVCGADIHRDFLVATMISRSGLKLQEQFGMDEDGLLAFRSWILDHRCRRVAVESTGNYWYPIFSILEGHVEFILANAFQIRNIEGKKTDRLDSERIAIYCLNDLIKPSRIYPKDYRELRSITRSREALVNARSKLKNQIHQLLAVCCIKLSSVISDSFGKSGRYIIEQLLEGKTIDQIISRIPSKRVRKKADELRKAIRNGLDPVQVLLIKTNLDAIDYLSEKIKLLDAEIVIKVKPFEEDLNIILSVPGIGLISAATILAEIGDYRDFKNADKLAMYFGIVPAVYQSAGKLRTGKITKRGSKHMRRILVQVAKAISKTKKSSKLKRFFQRVLTRSGKKNVAAIALARKVLCIIYHLLMKREDYQEPEVKKTKPKIPSCVSPLSMMDIEEMIKTISQAGYLVKKGLKEGCG

SEQ ID NO: 245851 - protein, 349 aa, unidentified
MKKITITGIDIAKNVFQLHAVGSDGTVVLRRQLRRGQVLGFFAKLDPCLIGLEACATSHYWAREFQKLGHDVRLIPPIYVKPYVKRQKNDAADAEAICEAVQRPTMRFVAVKSAEQQGVLMLHRARELLVGQRTALINALRGHFAEFGIVVAQGPQHVGALVQRVMEEQDASLPHPMRTAFASVVAALLNLGGEIGKLDKAILASHRRDQTSVNLATIPGIGPLIASCLSASLPDARRFACGREFAAYLGLVPKQNSTGGKPRLGRISKMGNRHLRTLLVVGAHAALYRMKSGKTQSRLADWARVLLAKKPFKLVAVALANKMARTAWAIMAKKTSYNPGFGRPLEAAA

SEQ ID NO: 245852 - protein, 426 aa, unidentified
MKSTTQNAKIAAITEKTLIIDIDVGSETHFARAFNWRGYEFSRKPLEFSNTEEGFETFRIWIEELKEKHEMDKVIPGMEPTGHYWFNLGKFLQDNSMTPVHVNPHHVKKSKELDDNNPDKNDRKDPKVIAGLVKDGRYFRPYIPDGVYAEIRALSGLQVLAQSEITRLKNRIARWFSIYFPNYKDVYGNVGAVSGLMVLKAAPLPEDIVKLGVDGVNRIWRDAKLRGVGLKRAKTLVAAAEHSIGSREAQEAARIELQILLSDYEMQTAREAELMALIEEKIIEVPYVDKLLEIRGVGLKTVIGFVAEVGDITRFDDPRQLQKLAGYAIVKDESGKHKGESHISYRGRKRLRYVLYEAAVSVVSHSPEFKSIHQYYTTREKNPLKKMQSMIAVACKLIRVFYLILQTGATYDAAKLMGDIRRPLAA

SEQ ID NO: 245853 - protein, 423 aa, unidentified
MDMLHERVAGLDVHKNTVVGCVRLRVGDETRRECRTFATTTEGLLALGGWLEESRCTHVAMEATGVYWMPVWKILCGGDFELIVANAAHIKNVPGRKTDVNDAMWIADLQACGLIKASFVPPEEMQELRSLTRTRKQLVREQTRHAQRIQKTLAEANIRLDSVLSDIMGASGRRIIEAMIDGVRQPRKLAELASKQIKATPKELYDALHGRLTDHHRFLLDLHLRQWDGIDAAIRKIDLEINQRITQMDAQVEPDTPPFRDLMDLLNTAPGISTVAAPSILSEIGRDMSRFPTAGHLVSWVGLCTGHNESAGKRKSSRLRKGAPWLKTMLVQCAWAAKRKKGSYYRAQFFRIQSKRGPQKAICAVAASLLTAIYHMLKYGVPLRDLGADYFDRRPPELKAKRLVAQLAKLGFAVQLQPAAQVA

SEQ ID NO: 245854 - protein, 409 aa, unidentified
MRYYVGVDWADQTHAVWVVDASGPKITARTVPHTAAGFSEWGRELDEWRAQGIERWAAIERPDGRVVDFLLDHGVVVYPVNPKALDRARDRFRLSGAKSDAFDARVLADFLRTDYLHLQALQPSSDVAQELKLLTEDCQRHIRQQTRLVNQLTTTLKAYYPRALEVAELTTALAREFLQAYPTPDALTALTTRQWQRWAHGRRLSEARIGALWAVLQQPQLPVPAHVVRAKARLMLSLVEQVTPVVAAVAQYRKAIDDFFASMPAAQWARTLPIGKHGITAPTLWARLGDAPGRWESFRHLQAQAGTVPVTKRSGKQRSVHFRFACDKSLRHVVDQVAFLSLLSSAWARAYYDQQRARGHAHHQALRAVGAKWLKIIFVMWHRQVPYDEPYHLATMARQQLRQRQQQIA

SEQ ID NO: 245855 - protein, 404 aa, unidentified
MPTYYVGIDVSKFKHTCCVISQHGEIIKKSFDFSNSKEGFDSLIEIFKSIDQSESSFQIVMEATGHYHECLFRYLVANNYLAQIKNPVVIARFKQSEYLDKAKTDNLDALLIAQYASKHPFSPSMLKSYNIERIRRISRAKYFLYQDKERTINHLHRYLDESFPELIPFLRKREDIKRYQGRNFFDSKTTLWLVENFPSAKKFSNARSETAEKLRRMSKGTFSLIKFNELRNIAKNSIGVSFQETEEIIIQLVQELRNIQERNDKLDELLIPLIDETSPNLLTVPGIGYRLAGLLISEIGDASQFPSADKIIKFAGLDVRVYQSGTIEKHGAIRKRGSHLLRYALFQAAEKARIHCPEIAEFYSKKKGEGKHPICALTHTARKILRIVWALLKTGQNYSQFISD

SEQ ID NO: 245856 - protein, 338 aa, unidentified
MKVYAGIDLHSSNNYIGIIDEEDKRLYQKRLPNRLEHILQALEPFKESLEGVVVESTYNWYWIVDGLQDEGYKVHLANPSAIKQYEGLKHTDDKWDSFWLAHLKRLGILPEGYIYPKEERPVRDALRRRLLFVKHRTSHILSLQSAITRNLSYKMSSRDIKQLNQSDASQLFDDPFLILSAENSISAIGFLGERIKEIEKAVKSHMKLKPEFRYLLTMPGIGDILGLTIMLEVGDIRRFPKASDYSSYCRCVKSERLSNKKKKGEGNRKNGNKYLAWAYVEAANFAIRFYPEFQSFYKRKKAKKNGIVAIKALSNKLARSSYYVMRDRVPYDVKKLFR

SEQ ID NO: 245857 - protein, 394 aa, unidentified
MSYRSDPYIRVTKIVLLPFDVEHTAEGLKKLITKLRQLDGEIRIIMEHTGMYWRPIAMTLKEAGFYVSVVNAILIHNFSDNSIRKVKTDRADAMKIANYGLTFWIDLQEYAGEDENRQLLKIQSRLYERTATTAGMLRNGLISLLDQTFPGANKLFRDDSRNSKGHVKWIDFVLRFWHKECVAALSLATFTDTFQKWCKRTGYKFSASDAERIHAIARNAVATLPKNDSTKLLITQATNSLNAIYDSLQAIRTEMDRLASMLPEYELVMGMEGIGKVTGPQLMAEVGDVRRFSHKGALVAYAGVDASPYQSGSFDSKSRHVSKRGSPHLRRVLFVIMSMTLIRANTANPVFCFMDKKRAEGKHFYVYTVAGSAKFLRIYYAKVKEYLNALEETA

SEQ ID NO: 245858 - protein, 341 aa, unidentified
MQISTIGLDIAKNVFQVHGIDGEGRVVLCRKVRREQLLKLFEGIEPCLIGMEACATAHHWARRLTELGHQVKLMPPAYVKAYVKRNKNDAADAEAICEAVRRPTMRFVPIKSADAQSILMLHRARHLLVRQRTAQVSAMRAHLAEYGVVAPTGLAHVRDLLTVLETGSPMLPKLARKTLLLIAQMIDALSQQIRQIEIELLSWHRTSATSQRLETIPGIGFITASALAATVGDARAFRSGRQFAAWLGLVPRQNSSGGKERLGGISKMGDRYLRNLLVIGATAIVRYTKRKATPVSIWANRLLERKPARLVTVAVANKMARIAWAVMARQEVYRAARLAAS

SEQ ID NO: 245859 - protein, 326 aa, unidentified
MEHELHYIGIDTAKEKLDVDVLRPDGRHRTKKFANTTKGHDELVSWLKGHKIDHAHICIEATGTYMEPVAECLYDAGYIVSVINPALGKAFAQSEGLRNKTDTVDARMLAEFCRQKRPAAWEAPHPLERALRALVVRHQALTDMHTQELNRTETAREVQRPSIDAHLLWLEAELKRLEKQIKDLTDDDPDMKHRRKLLERIQGIGEKTSAVLLAYIGLKDRFAHARQFAAFAGLTPRRYESGSSVRGASRMSKAGHVSLRRALYMPAMVATSKTEWGRAFRDRLAANGKKGKVILGAMMRKLAQVAYGVLKSGVPFDASRHNPVAA

SEQ ID NO: 245860 - protein, 343 aa, unidentified
MSIVGGLDIHRKQITFDYVDTETGEVRRGQICPADRAHLAKWLARFAGQDAHFALEGCTGWRYVAEEIIAAGLTPHLADPAEAAHLRGPKRRAKTDRADARHQRVLLEQGRLPGCWVPPSRVLECRALLETYLDLREQRTGWVQRIHAVLFHHGAPNIAGQQLGTAEGAAALRAAAAHCSPAGQLQLAIAAQMLLVYDERLHQVRRQLLDRARHTRGAAELTARLYGVGPVTGLALTCWLGGAGRFSSSRKAVRFAGLDITVYSSDGKRSPGRLSRQGPEVLRWCLYEAGKAHARASAPDHAYYAQVKERIDGKRAALSEARKIIRQAAHILAELGDDALTAC

SEQ ID NO: 245861 - protein, 391 aa, unidentified
MTYVGIDVAKDKHDCYIVNSDGEILADVFTISNDQIGFNLLFQTLQSVAPDLSKVKVGLEATGHYSYNILGFLLDKGLATFVINPLHTNLFRKSTSLRRTKTDKVDARTIAAMLASDVVLTSYTATSYHNEELKSLTRYRFDKVQERAKLKSSVARLVNILFPELEKLIPKLHMNSVYSLLSEFPGAKQIASCHLTRLVHLLSESSKGHYKRDKAIQIREAARTSIGSVMPAKSLELKHTIHLIKVLSEEIDEVETSIREIMDRNPSPILTIPGINYRMGAMILAEIGDFSRFDSPNKILAYAGLSPSTYQSGKLDNAYPHMEKRGSKYLRYALFNATKYVCQWDPTFAAYLAKKRAEGKHYNVAISHAAKKLIRVICAIQKSGKSYCPAT

SEQ ID NO: 245862 - protein, 320 aa, unidentified
MSAAERRDETVGIDVSLGRLDVGIRTAGHSFAVKNDAQGRAELARRLADLQPRLVVLESTGKLELPLALELQEHGVPLRIVNPRQVRDFAKAKGILAKTDRIDALVLARFGHAMEIEPKALPDAARRELKALVMRRLQLIEAKIAEENRLRGETVKRVRKSLEKSVDWLEREIRALDQELDRTITANPEFAAIRELAIDVPGVGPNTVNMLIASLPELGTLSRQAICALTGIAPLNRDSGKAQGKRFCWGGRAEVRGALYMAALVAVRHNPPVRAFYQRLRGKGKAAKAALVACMRKLLVILNAMIRDKTHWRQTAPAAE

SEQ ID NO: 245863 - protein, 325 aa, unidentified
MGTYLGIDISSDFIHIACEDNTTWVFTKVENELKAIDDWISSMPEDIHVIFEYTGTYSHRLAYGLSLRERTFSMITPSQSKGFAASLKNKAKTDAQDAKVLALYGSKMQPEPTILTDESLHQKKQIYKHYNDLIAQKQALNNKIHALSFDPRAAKKVVDSLEVLDKVYQQQIEDFQEQLFDLNDDEFKQLKDKLMQITGIGPKAATGIIIQTNGLKNFHSAKALAAFLGLVPTTKQSGTSLKSRGRLVNTACKQLRSILFCAAQSAAKFNLDCKELYTRLLAKGKSKKAAKMAVAHKLIRQAFAIVKNNAVFQNDFQASKIALAK

SEQ ID NO: 245864 - protein, 340 aa, unidentified
MEKISTIGLDIAKNVFQVHAIDETGKIVVQRRLKRRQVLSFFEKHPPCLIGLEACATSHYWAREIEKLGHEVRLMPPRYVKPYVKRNKNDIADAEAICEAVTRPTMRFVAIKTAEQQSVLMLHKTRQLLIRQQTMLINAIRAHLAEFGIVAGIGRRGVEKLEAIIEAGEDDRVPPAALECLMVLRDQLAVVKRHILDVDRRIMDAHRSNELSRRLAGIPGVGPLIATALATSVPDPHTFRSGRDLAAWIGLVPRQNSTGGKQRLGHISKAGNRYLRTMLVVGALSVIRRAKQLGYTRRPWLARLLERRSTKVAAVALANKIARIAWAMMAHGTYYQEPET

SEQ ID NO: 245865 - protein, 397 aa, unidentified
MYIVGIDIAKRKHEAAVIDGEGAVIIKPFSFTNNCSGYNRLLAMLAKAKLPLDEVSFAMEATGHYWLALFTRLQKEGFRVQVINPVQTNSIRSFYIRQAKTDPRDALLIAEVIRFGHFSESTLHPENIYELRELCRGRHAIVSMQADVKRKVVALLDQVFPEYETAFTNLFSDTSMAILQTCPTPKELSEMPLEELCHLIEVSSHKRFRMAKARELQELAHNSFGFAMAGDVFSTMIRLYAKHLVFLKQQVQEMDRKIAEIMDTLDTPITTITGIGPTLGAYILSEIGDISRFSSAAKLAAYAGIDPTMRQSGEYNGVRNRMSKRGSPYLRHAIWLAASSAVLHDPALKLYFQKKRDEGKPYMASVGHACRKMVSIIYAVMRDNKAYTPCIPNEISA

SEQ ID NO: 245866 - protein, 334 aa, unidentified
MWHVGIDLHRLSVVIAAVDEEGNSFGARRIDCQDRQAIVATMRSLQPFRAVIEATGTYRWLYNLLTPLGTVLLAHPLRLRAMVQRRSKTDKLDSQLLANLLRLNQIPLAYIPPEQYQQLRDVTRHRARLSRQAAAAKTQLRSLLARHNLVAPYKCVCGVRGCRWLARQDFGAMDNLVRDELLLRLEHYRRQLAVMDARLEELRAYVPQVEALLDIHGVGLYTALLVIGELGEVERFRTARQVGSYAGLTPRVRQSGEHCYRGAITREGSPWLRWILVEAAIKATREDPALKNFYQRIRKRSGAKKARVAVARKLAEICWKRLIGWSGRPAISVA

SEQ ID NO: 245867 - protein, 526 aa, unidentified
MVTGSKKRKSAGSKKRFIGKPNGQIQQRVQAVGPEHFGIVAVDCAKRRSKWMLCNFYGKVTVEPTSVEHTTGGLRAMTQLVAEACRSEGLTDSIIAVEMTGIYHKPVYRAFRKAGFDTRIVHPFASNHYRRPLHPDAKTDDHDLEAIFHAAVKGYGLSTPPVGEVYQSLQAVSRHRHNLVKQRARLMVQMRRLLHQTMPGFADLFEDDKLYHNSIALPVALRFASAEAIRHAGVKGIASHLNETKVRFQTRTIERIVAWASTAAEPSELAAMHTRQWQQLNEVRRLLGEQIVAAEQEMAGFLVKTPYILLLSVTGINVVSAARLAGEAGPIEHYATSRAINGRAGLFPSRYQSDEVDRADGSLVRQCNRKLRGAAMLVAENLIKCHPYYRGLSELWKQQKVDPRDRRCRIANRAMRMVYQLVGGRQLWHGKGVNREYLLAKLQEFHRVHKTPIEQAIRDLNEAFAWLPKSAYATEAKPLAELARKKRRGVQHIGDLMIPLLIRLGVAIEETEDKVQSNMSEARSSG

SEQ ID NO: 245868 - protein, 428 aa, unidentified
MEAYYIAGIDVHKKMLAVVIAAVQPGEWEFQRRRFGTTPAQLRELAGGLREQGVSEAVMESTAQYWRPVWAALQGQLRLHLAHAHSNGARRGRKSDFRDAERLTHRLVAGDLVLSFVPDAEQQSWRDLTRTRYQLVVERGRVQSQVENLLERASIKLSSVITDLFGSSGRRILQALSEEAGAPWHSQNLARLAHPSLRASHEQLAEALDGHWSSEHRLLLQLHLERLSLLDRQIETLQQQMAESMKAHQAAVARLCQVPGIRTDAALQLLAEVGPTAASFPSASHLASWAGLCPGQQESAGQSYSKRPAQGNWQMKRVFHQVAHAAALKKGSFFQHLYRRLIVRMGPQKAIGALANRLCRLIWKILHEGVHYVEKGTAPLDPRAIRRRQQKVAAEFRKLGYNVQYVPPTARHHPGNLAVGFRVFDGAL

SEQ ID NO: 245869 - protein, 362 aa, unidentified
MDKHKYVALDVDSANIVAGVYDRQGEALMQCCLRNNGQVISEFFKTMTGVVHVTFEEGTQAIWLYELIRPLVAEVIVCNPRENKLLKAGNKSDRIDVAKLGKLLRLGELKPVYQGPSAVQGLKQLVHGYEALVDDTTRVKNRLKALYRGRGLSCKGELIYGREQRQQWLSQLETKEMQSRAASLYEELDCVLRLRAEAEKVMCRAARKHAAYKWISSAPGLGAIRTAQILATAITPHRFRGKRQFWPYCGLAVVTRSSSDYEWVDGGARRKRKPIQTRGLNQNYNRTMKAVFKGAAISALQQHPEFQEYYQRLCAQGTRPEMARLTVARKLAAIVLILWKKGELYDSKRLNQAAPGAGPAVN

SEQ ID NO: 245870 - protein, 436 aa, unidentified
MRGCRCSMIMGFTKPIEHFNLQRKKVITMNTLYVGIDVSSKSNVVYLMLPNGDKHSNFSVANSHEGSTLLVKKIYSALTSHSLDTVLIGLEATSVYGVNLVYFLREDATLAPFNRKIHVLNPKQVKKFHDTYNDLPKNDYVDSFVIADCLRFGRINKEVYVGDYRYKALKNLTRARFFAVQNLVKEKQRFMNVLFKKYSTMTQEKVFSDAFSTTALAVYDEFESAEALANMDLHELTDFIIEKGKNRFPDPDAVAKAIQKAARSSYRLPKTVNDSVNQVLSISITSMKALESQIKEFDKAIKALMELLPNVLISIPGIGPVYSAGIMAEIGDINRFDNQASLAKYAGLAWKQHQSGGFEAEVTRLIPSGNRFLKYYLCEAAFSLVRCDKEYSDFYHLKYKEVNRYQHKRALALTARKFVRLVFRLLKDNRLYCPAK

SEQ ID NO: 245871 - protein, 409 aa, unidentified
MKMAGIDVHKKVLMVVVVDTSALQEKPARRRFVTLPSELQRFRIWLQEQGVEEAVMESTAQYWRSVWLELEPHMHLHLAQAFSNRAPRGRKHDFKDAERLVRRLIADELILSFVPNGEQRIWRSLTRMKVQLTRDRVRLQNQMECLLEEMRIKLSIVVSNLLGASGLRILHALAQGETDPKKLAELGDERLHCTEEQLVDALTGRVQPMHRGMLALQLQRLQLIDQQMAQLNHMIAQAMKSHQDAVIRLAEVPGLGVDSAQQIIAEVGAQASTFSSAAELAAWVETCPGKEESAEKNQSSRSAKGNKYLRRVLNQAAHAAVAKKGCHFQVVFRRLMPRLGYKSAIWAVAHRLCRVVWKILHEGVRFIEQGREVGPREKKQRAQLLARALRKLGYEVTITPINQLAPKPA

SEQ ID NO: 245872 - protein, 409 aa, unidentified
MQVMYQRCAGIDVHLRFLVVYLTIIEAGQRRKEIRTFANETAGWLALRAWLLQEGCSHVGMESTGVYWLAVYRRLEGFFELVVANAQHIKAVPGRKTDVQDAEWIADLLQHGLLTASFVPSQEQQDVRDLTRMRVSLVQERARLVNRVHKVLEEAGIKLSTVLSDVLGMSGRAILDALCAGESDPVRLAKLMRPNVHAKEEQVVAALSAEVREHHRFLLRELLSLIDAQDRSIKHLELEIERHLHPFEEQVQRCIKINGVSRHVLHVLMAEVGTDLQRFPDAEHLSSWAGVCPGHKESAGKRLSGRTKPGNRYVRAALVQAAHGVRRSRTYLGERYRRLKKRRGSKRAALAVGHSILVIYYQMMKTGQEYQEKGEEFFVKKDRGKVERQLVRRLERMGYQITSPSQPRT

SEQ ID NO: 245873 - protein, 339 aa, unidentified
MTVKTVGLDLAKDVFQVHGISENGRIIFNKAIKRAKLLSFFETLPPCTVGMEACGSSHHWGRQLRKLGHDVRLMSANYVKPYVKRGKTDAVDAEAICEAVRRPTMRFVEIKTEDQQAILSIHRTRDLAVRQRTQLANMIRSLLREFGHILPIGIEAVTAFAKRHLDGDHPDMPEIANGMLGIQCYQFIGLNERIEGYSKMIEQHALLNADARRLMRMPGIGPVTASAIVATIGDAKQFRTGRDLAAWLGLTPLNKSSGGKERLGKITKQGDRYIRKLLVVGMTSRAVMAKRAPEKVDLWTAKIIADKPFRLATVAMANKAARSIWAMLTKKQEYRQPAF

SEQ ID NO: 245874 - protein, 345 aa, unidentified
MKITTVGIDLAKNLFQIHGVDERGKAMLRKQLRRAQVAVFFGNLPPCVIGMEACASAHYWGRTLSRFGHTVRLMASQFVKPYVKTNKNDAADAEAICEAVGRANMRFVPIKNVEQQAILSVHRVRQGFVKARTAQANQIRGLLGEFGLVIPQGIINVTKRVPELLEDASNDLPVPFRHLIDRLTEHLKELDRQVKEFEKEIIAWHRGSELSRKLEDIPGIGPLAASALVASIADPHSFENGRQVSAWLGLVPRQHSSGGKPTLLGMSKRGDAYLRTLLIHGARSAILAAQRKVDNTNGWLTNLLTRRHPNIAAVALANKNVRTVWALLAHGREFKADYTRHRMAV

SEQ ID NO: 245875 - protein, 425 aa, unidentified
MTARVEVTPAATWVAIDIAKRSHAVLIETPDGKQKRFRMGSSQEDHRRLVDHLHACPPPVRVALEATGDYHRTLAYRLLQEGFEVCLVSSVAGARYREAMFNSWDKNDPKDAGVILALLKQGITQRFVDPLIAGHHELQELSKTYYQIGLARTRLQHSLLTHYLPLYFPEVERFFDGTHAEWFARFLMRFPTATSIRTQSFEAFQREAWPIAGRKVNKRAWVRELYDAACTSVGLPVADDNVAIETFRLQLRRYQQLVEQRDELAETAHRILQGRPDYQALRSIPGVGPVLALTILAEAGDLRRFAHHRQFLKYCGLDLAKCQSGQFRGQEKLSKRGNARLRFAFWFAATVAVRMRENSFREKYERYVQPDPLNADRKRKALTAVAAKMARVAYSLVKHQASYRCYFETSLPRGSTPLCRAVGTA

SEQ ID NO: 245876 - protein, 428 aa, unidentified
MLNKLDRLQQFQDLRGTIRGSDSILIIGVDVAKDKHYAFFGTSNGRTLWKKLIFDNSIQGFNKLLSMTQDLSIQHSLNARVFGLEPTATYHKPLAEHLIKKGEQVVYVSNVAAKNNRALLDGRWDKNDTKDAANVADLVGQGRCQYYDLAEDSLRELRSLLAYRAKLKKQEHALRMRIRNSLLAQYFPELDKQMPQGGQDGLILDIIAHDFAPARIAALPFEVFRQQYQMEKRHLIQEQRLRTIWEISQSSVGCALPASAAWEGRMLVEQLRQIRQTKRELEKQLKEVGQTFPAYAYLLSIPGFGPIVSAMTLAAIGDAHRYTSRKQVLRLAGLDLSASRSGKSSNSAIPVISKQGKAGLRYALVQAAQIASYKDDVIRSYFTGLLKGRELERGIKLKMRVKLAAKMLVIAWTLMKRNEYFDSGYFRT

SEQ ID NO: 245877 - protein, 449 aa, unidentified
MPKKTLEMEVINPKAAGIDVGSRSHFVAIGQSDQEVKEFGVCQEDLEDLVEYLKSHDIETVALESTGTYWQNLHALLIASGFDVILCNGKFTKNIQGKKTDVKDCQWIQKLHTLGLLNTSFLPSEDTEILRTYCRHRMTLIERAASCSNKMQKYLKLLNLRLDVVVSDVCGKTGMEIIRAICQGENNAQVLASYRDPRCKASEVEIAKALKGNNRSDYLFGLSQELDIYDTLQSQIRACDQKIIGQITRTIDKNDGKKEHVLEKKTRKKVNKNAIKGIDMDKASYQMFEGVDLLEIEGVSHATVLTLMSELGIEGIQKFNSAKQFSSWLRLSPNNKISGGKVLSSRIPKGSNRTKIALRNAANSIGNLKKDTPLKLFFAKISFRKGRAAAISATARKLAVIIWNMVTKSTPYQKDLGIVDIKKQQEKLIKRIRKQMKNYNIRPIDLKPL

SEQ ID NO: 245878 - protein, 388 aa, unidentified
MNVGADKSEPLTAIHTDLGAIFVSLELSRSSWLITSLSPGGGEKMSKHSVPGGDFAGLMERFAQLQEKARRRTGQSFRIIVVQEAGLDGFWIHRALQNEGIESHVVDAASIATSRRRRRAKTDKIDGETLVRALLAYKRGEPRVCAMVKAPTPGEEDRRHLCRERKALTAERVRHVNRIKGLLFSQGISGYQPLRRDRRQRLEELQTGDGRAFPQHLKALVNRELDRLELLLKQIKTVEAARDALLAVGQTAKPTPAAMLLDIRGIGPEFAAILWSEGLFRHFENRRQIAAYAGLAPTPWQSGAVDREQGVSKAGNPRLRTTLIQLAWLWLRNQPRSALSVWFHERVSRNGGRLRKTTIVALARKLLVALWKYVTAGVVIEGVTMKVA

SEQ ID NO: 245879 - protein, 381 aa, unidentified
MRQVCGLDVHKDSVFACILNENGVIFQEKFGVLTPDLEQLASVLQEHDVSEVCMESTSVYWMPVWRVLEPYVSDLKLVNPYFIKQLPGKKSDVKDAEWIATCLLKDLIRGSYVPADIIQQLRQYDRRISDLNAECVRKLCKLDAALQRCNIRISNYVSTTDGKSYKDVVRLISEGIRDPAALLKVIHGRITNRVGKDVIQASLTGVISDTDIDVIRQLREEVDLAQRHKDECQSKMDAICQQYFPEQLKNLQTIPGVKGRSATAIIAEVGSDVSSFQDAAHLVSWCGLKPRNEESAGKVKARSITHGNRYLRKTLIECAWAASKTQGCYLNKFSYYQTVVRRKNKMKVQVAIARKILTAVWYVLHDNVAYRDYNPDIAPAA

SEQ ID NO: 245880 - protein, 378 aa, unidentified
MATTRSVLRHELTAKPGDLYMSLDLGDKRWHISIGDGRCGLSRYSVGAGQTDELADCIAKAKNRLHSSRKAVVHSCYEAGRDGWWLHRWLREVGVDNIVVDPASIEVNRRARRAKTDRLDADKLLAMLVRHHSGERVWSVLREPSPQDEDARRAHRELQRLTHERVAHTNRIGSLLVLHNLRPNVVIGGRYWSAWWERHRAQVPSSLAAELEREVMRLQLVKQQVRDIEAARTQELLEGQQPQVAQLTRLRAIGTKGAWVLVKEVFGWRTFVNRRELAGSLGLVPTPYASGDSQLEQGISKAGNRRVRGLLVELAWGWLRLQPGSALTQWFNRRFASGGKRLRRIGIVALARRLAIALWRYLKNGEIPAGAQLKPTGA

SEQ ID NO: 245881 - protein, 438 aa, unidentified
MKTKKAKAFPIIYPNAAGIDISSKEHYVAVNPETSLNPIRAFGCFTEDLKSISDWLKECNVNTVAMEATGIYWVSLYLLLEEAGFEVVLVTAKHVKNVRGKKTDVSDAEWIRQLHSCGLLSASFQPDAYTRKLRTYMRHRKNLIEMSATHVRMMHKALEQMNIKLQHVITDITGKSGQEIIQSIISGERNPLKLASLCDGRINKNKKDSIIKSLEGVWKEEHIFELEQSFTIYHMYHKKIVECDIKIENHLREKSGTTKDPNEKMKAKSNKNNLNFEAKEILQNIIGTDLSEIFGITTSNAIEIISEVGLDMNKWHSAKHFTSWLNLAPNNKISGGKILSSRIPKKKNHTGQIFKMAAYAVQRSKNWLALFFHRIKAKKGAPKAIVATARKIATIFYKLVKEKISFSPIPIEKYSDSFRQQQIKKLKRQAQTLGFQLV

SEQ ID NO: 245882 - protein, 369 aa, unidentified
MKGADVRGNVVGVDPHRRTLSATVVDERGGIVAAGHYKVSGDGHRALEAWALSVGPVARWGIEGASGLGRHTSMYLCRQGHDVRDVNPTRTAERARGRFQGKSDVLDSERIARETLAHPELPVAFKRAGDDSGPDETTELIGLWHKERRSLLKTRQHLLNEADALLSELPEELRSALPQTKAVRPRLVALRRRGRRPWPAATALRLRLLAEHGHTILELDRRDREITRELATLIAATGSTLDQLRGLDTRSVAELLVEVGDPRRFTEGGFGRFSGTAPIPASSGEGAGEPVRHRLNRGGNRRVNAVLHRMAVTQLRCDERAQRISDEARRRGHTKREAVRVVRRHLAAVVYRRMIRDLKARPAASAVAA

SEQ ID NO: 245883 - protein, 455 aa, unidentified
MSTGAKHLHGERPEYLSACKRLTRFPSACLNCKANMNEETNKVERVIGFDSHPDSFTAAIARGPTPAATVIEKVFNKLPMNQLQTWAEKHTTAQDLLVLEASGNSFHVVRVLAKVNRRAVVVESGHLGKLKEAHANNDKISAIRIAKAYLAGTARIVWLPDLKTQERRDLLHIHRKAVKRTTQLRNRLQSYLSDNGVRLPKGTRLTQAETSDKIRKAHDWLPRQWQLIEGLLMELRHAQEQRQHWHALIAQEVLDDPLLLSIVRLCGVREIVAFALGAVVGDIKRFSEPKKLVKYIGLNPAFDESGKDKWTGGIGGHGRKDLRCLLIEAAQAILRCSKTPLAQWGKKLLARKGSINLAVAAMARRLAVAAWYLMMGRWTSLEEIDQRLSQKIGKILSRVGTDGLKKLGKTRKSFREQICQTLKTGREYVLDPNKKFTPRPKIDRPLTLAQEYGLG

SEQ ID NO: 245884 - protein, 348 aa, unidentified
MKKIVKQVVGIDVAQKELVVCLGRMYDDWSPELYAHKTFANTVKGFVALLLWLKKMTDETRPVRFVMEATGVYHESLAYFLEEKGFELSIILPNKISNYFRTLDVKTITDKTASEAIALFGLERKLDRWQKPKAVFKKLRQLTREKDQIVEERTMVKNQLHAEQTEAEPNKKSIQRIQERIKMLNRQEKEIKEEVAALIKQDEQVAEHLKIICSLTGVGLLTAAIVLGETNGFELIRNKRQLASYAGFDIREKQSGTSVKGKPRISKKGNRHLRKAMHLPALCAIRYDERFKAIFARLVSKHGIKMKAVVAIQRKILEMMFTLYKTGSVYDKNYLSRQEIKNPVTEVI

SEQ ID NO: 245885 - protein, 346 aa, unidentified
MEYYVGLDVSLKRTSICVVNQTGAIVQEGVVDSDPEAIASFVRSKAPGAVRIGIETGPTTTWLWTELKRLGLPVICIDARHAKAVLKMQINKSDRNDAAGIARIMQTGWFKEVRVKNLDSHAVKALLASRALLVKIKRDLENQVRGLLKNLGLVIGRAKFNVFAVRAEGLIENRPELVAAVRPLLEARKAIEQQVDDLDRKVHKLARHDLQVRRFMTVPGVGPITALCFKATIDDPTRFRRSRSVGAYIGLTTRRHASGEIDWSGRISKCGDAMLRMYLFEAAGVLLTRVPKWSGLKAWGAKLTKRNGLRKAKVAVARKLAVILHRMWIDGTEFNWSTKKAAAEHA

SEQ ID NO: 245886 - protein, 444 aa, unidentified
MSMVHPNAAAIDVGATLLMAAVRADRTPEPVRGFGTFTTDLHRLADWFAECGVETVAMESTSVYWIPIFELLDARGFTVCLVNARDAKHVPGRKTDVSDAEWLQRLHSYGLLRASYRPKGEFAQLRAYVRQRERLLEYAASHIQHMQKALTEMNLQLHHVVADITGGTGLRIIRAILSGEHNPKTLAGLRDYRCHASTGTIEKALTGNYRAEHLFALEQALALYEAYHEKVSACDTRIEAVLKELSIGRGHKADSLPSSRRRADQVNALAFDVRSALFALLGKDITRIDGFGPYLSLKLIAECGDNLSAWPSAKHFTSWLGLAPNNKISGGRVLSSRTRRSGGRAAALLRLAAVTVGRTETALGAFYRRLSARIGKAKAVTATARKIAVLFYNAVRHGMEYDDPGASFYESQYRKRVLQNLHRRAKTFGFVLQPIEPVRGAVVS

SEQ ID NO: 245887 - protein, 369 aa, unidentified
MEDRITYVGLDVHKEGIVVAVAEGGLRGEVREYGRIANTAAALDRLMRKLGSTGVRLRFCYEAGPCGYGIQRHLSAHGHDCVVVAPSLIPKRAGDRVKTDRRDAAGLARLHRAGELTAVWVPDAEHEAMRDLVRARLDAVHALRRARQQLSGFLLRQGCHYGRPAWTKLHRRWLAGLKFEQAVHHIVLEDYIAAVEAAEARRGRLTAQIEAMLPDWTLAPVVAALQTMRGMALVNAATLIAELGDLSRFANPRQLMAYLGLVPCEHSSGASVRRGGLTKAGNSAARRLLIEAAWCYRFPARVSRELLLRQEEQPKPIREIAWKAQLRLCARYRRLARSGKPANVVTAAIARELAGFIWAIARRVPPAAG

SEQ ID NO: 245888 - protein, 472 aa, unidentified
MPGKRRSKTRRAKRARPTAKQRQRFLERVHLNAAGIDVGSQAHWVAVPEDRDERPMQKFSSFTHDLHRLADWLEACGVETVAMESTGVYWIPLYEILEERGFEVLLVNARHVKNVPGRKTDLLDCQWLQQLHSFGLLRGSFRPQAEIAALRSYLRHRDKLVEGAAAFIQRMQKALILMNLQLHNVISDLTGLTGMRILRDIAAGQTDPERLAEHRHTRIRASKQEIADSLRGHYRDEHVFQLRQALEFYDFYQQQIQACDREIEARVRTLEVRCERPTTPLPALQGPRRTSHAPDFEIRSPLFVLCGGVDLTELPGIGPYGALRLISEVGLDMTRWPSEKHFASWLTLSPNAKISGGKLLASATQPSANRAARIFRIAAMSLGRSDHALGAFYRRLAARTGKAKAITATGRKLAVLFYRTLRDKRPYREQSAGDYDARQRSRILRHLRRRAESLGFQLVDRATGELLGAPVS

SEQ ID NO: 245889 - protein, 384 aa, unidentified
MRGNFIPREYDIFTGLDVSKKSISVTFTNHQGFIRSLNMPHKAEPLLNYVRKHFPDQKIAFVYEAGPTGYGLYDGLAAQAYPCLIAAPSMIPRAPGQRVKTNRLDSKALSENLRGGQLKSIHIPSATYRQLRHLTQLRDVLVSELAGMKQRIKSLLLFEGIEFPPAPPGSQWSFLVKDKLRKLPCSGTVRFKLDQLLDSLEFNEKQVLKTITEIRRFCRNDPELSQCMKYLMSLPGIGWITASQLLARIGDWRELKNIRQLAGFLGLVPTEHSTGERVDRGSITRTGDERLRSKLIQGSWSAIRQDGELREFFRSVCRKHPREVASRVAIVAVARKLSVRISVVLMKQRPYEVREKVHSAPLTQEETSPQGTTRRLREPGEKNS

SEQ ID NO: 245890 - protein, 482 aa, unidentified
MKKRNIYQNQSQELLSLFEEAGSSAKVMCVPMDYAKKDHLVMFCNGHGDILRKPFSVKNSPEGIEYLIDQVTRSCRRRGIKKDHVFLGGEDANSFAENFVSTLRFKGWLVAGVNAHDAKKQRVNLQASTDRIDLMGIATMLLNCRANCCPAATGIYRNLRTLVRHRRKLVVMLTEVKNRAHGIVDRLFPGFLNENKSGIVPFTQSSLYLMENRFSPKQIRRRRRQPLIEILKRFGTSKAQETAFKLQQYAAKVLHTPDEYIDTLQISLAQHVKHIRCLKESIVQLEKEIAVNLAQTQGAFLTSVRGIGIVLAAGVSAEIGDPYEQKPLNNVISYSGIIPRVKQTGGVDGKTYTGHVAKRCNRILKDYVVKSAYHLGLYGPEDLMADYKRRDASGQHADFGIGRRYLRMAMSLMRTSQVYLSPRLRKADTALEERAGHYLTSWPFLRDKWKKAGALEAAFSKDRPLGLWRQIVQKLYDIKLKL

SEQ ID NO: 245891 - protein, 363 aa, unidentified
MDVHKNSFSLCAYDGYTGEIVSESTFASDVKLVIKFIETLKSRYENDVEIKCGYEAGCLGYSLYKSLTSRGVDCVILAPTTMQVSAKNKMVKNDRMDALNIAKNLASGSYKAVYVPDEEDVEIKEYIRMIHDFKKELKRVKQEIYAFVLRHGYQYDGKSKWTIRYMNWIRELEMSEIQRETLDEYLAEMDNLNDKIERFMNRIDEMYQSDRYNEKVSELRCFKGIDTFAAMTIQVETADFERFPNAKAYASYTGLTTGEHSSGDKNNRIGITKQGNTVIRKTLVECAQSLVKGNVYTPKSKRLKSRQKGMDVNIIAYADKATERLKKKYQKLIERNVPRNKAIVAVARELACFIWGMETGNIH

SEQ ID NO: 245892 - protein, 390 aa, unidentified
MEARTVNNLLPAAPHHDAVGCLVAIELSKKSWIVAVNTPLADKISRHTLKPGDGKELLDLCERIRTRVTRETKRRVEIVSCYEAGYDGFWLHRLLEAHGIRNYVIDPASLQVDRRARRAKTDHVDVERLLRSLMAYLRGEPKVWSVVCVPSVAEEDDRRLNRERGRLINERIQHVNRIKGLLAIHGIYDYQPLRRDRMLRLERLRTAADGQTLPPRLKAEILRELQRLELILGMIKTIEAERDAIASPKTEVEHTNAKKIQDLAKIKSIGPEFATTLVGEVLYRSFDNRKQLASYVGLTPAHFQSGAMCRDQGISKAGNGKARTVMIELAWLWLRHQPDSPLSVWFRERVGKLKGRIRRITIVAVARKLLIALWRYLETGLVPKGAILKA

SEQ ID NO: 245893 - protein, 374 aa, unidentified
MVDDIALYVGLDVSKEKIAIGLAEAGRKGEVRYYGEIANRADAVRKFVDKLAGRHGRLCFCYEAGPTGYGLYRQLSALGYDCLVVAPSLVPTRPGLQIKTDRRDAVALAALLRAGELSSIWVPDETHEAMRDLCRAREAAVSDLRRARQHLLSFLLRHGRVFEGRSHWTRAHRNWLATQRFDHRAQQIAMEEYIRAIEQIEERRERLTRQMLALLPDWSLNPVVEAIQALRGVAQISAVTLVSEIGDFRRFSNPRQFMAWLGLVPKEHSTGASVSRGSITKAGNTRARRMLVEGAWTYRLPARVGQEILKRTEGLPEAIRATAWKAQVRLCQRYRRMQASGRPTNIVIVAIARELAAFVWAIATTIPIPPTKAT

SEQ ID NO: 245894 - protein, 356 aa, unidentified
MEQLTTVGIDLAKDVIAACVLDVHGAVIERRVLRRAAFERWAEQLPSCKVAMEACGSAHHWGRWFAAHGHTAQLIAAEFVVPFRKGGKNDTADAEAVAIAARQPTMRFVPIKTVDQQAILAWHSVREGWKEERTALLNRLRGLLAEYGVVVGRSANRFLAVLPKLTEDTRLPDPVRALLLEAREQFAALHARLARCDAQIAVHARTSPAAQRAGELLGVGPLTSSALAATVPDATVFKSGRQFSAWLGLTPRQHSSGGKTRLGRISLRGNVYLRTLLIQGARSTLQSAINTEPARASRLQRWIIELYGRKGYYKTLIAIANKHARILWAMLAKDESYDASAWQRHSMNQPSLAGNA

SEQ ID NO: 245895 - protein, 395 aa, unidentified
MKYGVGIDISKGKSTIAILSIEGEVIKEPFEFSHSQNDLDNLDLLLNQYLKEDLKIIMEETGTYHLPVLSYLLEKGYCVIAENAFRIKKYLDRGLRKAKTDKKDSLKLAEYACDNWYKLKMPIIEDSKYKNLRFLSRQYFAFNSIKVQQKVNFSNLTDMLFPGYYGLLDENNYILGLKVFQKYSLETIKNKKLETFINEVDKIAQKIGHKRAGITFAKKVYELARQSVPSCPSSEYTQLIIDNCVVALIQSIETTKEIISKMQEIANTLPEYETVRSMPGAGPRLAPLLIAEIGDVRKFKDSSSLIAYAGIDAPPYQSGQFEATNRHISKRGNKYLRKTGYEVMKAIKSFYSIGNEFYDYMLKKESEGKKKKVAKIAALNKFLRQYYAKLIKLYN

SEQ ID NO: 245896 - protein, 340 aa, unidentified
MNKTNIIGIDLAKHVFQLHGLDRQGRKTLSKRLQRGELLPYLANIPPTTIAIEACGGAHYWASQFDHLGHTVRMLHPAYVKPFVRVNKNDARDAEGIALAASQASIPSVMPKTEDQLDLQAIHRVRERLVKEKTAIGNELRGLLNERGVIIRCGDKAVREDLVQLLSRPDETLSRRFRELIWSLREEWLAKAGRIADYDRELTRMARTHEACRRLMTIPGIGPIVSTLLYCYAGNGSTFASGRHLSASLGLVPAQYSSGGKEVMQGISKRGNKYLRKQLIHGARAAYRSLSKDTESSRLGRWIGRMGDKHVNKVVVGLANKLARIAWVCLAREAEYQGNA

SEQ ID NO: 245897 - protein, 385 aa, unidentified
MTEQSVPTATAFDHNSTLVLALELSGKGWQVGAVLPGVARRPRRNVAPRDVAGLLAQIERWKAEAQRAGRTVLRTVLAYEAGRDGFWIARCLLAHGIEVQIMHPASIPVERRGRRAKTDRIDLDMLLRTLLAWLRGEPRVCSMVRIPSETEEDMRRPERERERLVSERIALENRIENLLCLHGIAGFKPRLKKAAERLDDLRSFAGAPLPPMLQEELHRLMTRHRMLSEQLREIEAAREQAAMAAEPDCAVQQIQMLARLVGLGLATASGLTREVFCRSFADRRAIAGFVGLTGTPFNSGGSEREQGISKNGNPRVRRILLQLAWRWLRFQPDSALSCWFVERTGGAKGRIRKIMVVALARKLLVALWRYVETGEVPAGARLAAA

SEQ ID NO: 245898 - protein, 452 aa, unidentified
MSNKKVALEIVNPHAAGIDVGSRSHYVAIGQSAEDVKEFGVYAEDLKELADWLLENNIETVAMESTGTYWQNLFATLQQAGLKVILVNGKFTKNIQGKKTDVKDCQWLQKLHSIGLLTGSFLPDHATEQLRTYCRHRSSLIDTAADTTRRMQKYLRLLNLRLDIVVKDITGLTGLAIIEAICKGETNAEALSSHRHGNCRKSKEEIEKSLQSNGRQDYLFALQQEFEMYKMLQKKITECDAAINNLLIEQISNDENKKRLKAEKKVHKRINKNAPKNIDINQLAYQHFNGIDLMNIEGVSHNTVIALMSEVGYDGLKKFESAKQFTSWLRLSPNNKISGGKILSNRIAKGSNRLKIALRNAANAIGNLKDTHLSNFFKRVCFRRGRPAAISATARKLAVVIWNMIVKGIPYQPPTTYEFLDQKRKRKVQEMKKLIHKFDIKTHELGLQLIRL

SEQ ID NO: 245899 - protein, 313 aa, unidentified
MIAPTVFVGIDVSKDSLDIALRPSGERWQVAHESRGIEGLLQRLGTLPAALVVLEATGGYEQALAAALASAGVAVVVANPRQVRDFARATGQLAKTDAIDAAVLALFAERVRPEPRPLPDEARQGLEALVTRRRQLIEMLIAEQNRLLHARRAVRRSLTDHIRWLERQLGGVDRNLDHAVRSSPLWRAQDDLLQSVPGIGPITSRTLLAELPELGRLSRKEIAALAGVAPLARDSGTLRGRRTIWGGRASVRAVLFMAASAATRWNPVIRIFYQRLRAAGKPAKVALTACMRKLLTIANAIMRSQSPWRVATA

SEQ ID NO: 245900 - protein, 342 aa, unidentified
MEQYVALDVSLKEISVCIVDSKGEVVFEGKTAAEPAILVELIRSKAPQVKRVGLETGATSPWLFHALASAGLPVVCMDARHAHAALSIRPTKSDRSDARGLADMLRMGWYREVHAKSVTSHERRTILGARHQLVTMRSELDAQIRGILKTFGLILGTGNKDTLMQRAEKLAAGHPVLSGLVAKLAEVRRHVTSQIAAIDHDIRHLVHTEPTLKRLMSVPGVGPITALAFLSSVDDPSRFKHARDVGPYLGLTPTRYQSGETDRQGRISKCGDTFTRTCLYEAAHVLLTRVQRFSPLKAWGMRLAKRIGARKARIAVARKIAVILHCIWTDGTEFWWTREKAA

SEQ ID NO: 245901 - protein, 343 aa, unidentified
MQAVTTIGLDIAKSVFQVHGVDAHGRVVVRRQLKRRQVLPFFKKLSPCLVGIEACATSHHWSRELQALGHTVRLMPPAYVKPYLKRQKNDAADAEAICEAVMRPSMRFVETKTPEQQSCLMLHRTRHLFVRQQTAVINAIRAHLAEFGIVAPVGRNGVEELLDVVADPNDDRVPEVARECVAALGKQLRTLKAQILEFDRHIMAWHRSNETSKRLDAIPGVGPALATALVASIANPRAFRSGRDFSAWVGLVPKQNSSGGKEKLGSITKRGDRYLRSLFTAGALAVIRYAKIHGTKHRPWLTALLARRPTKVAAIALANKIARMAWAMMAKGERYREPVALAA

SEQ ID NO: 245902 - protein, 355 aa, unidentified
MKYYTSTTEFNCGIDLHARQMYVCVMDRQGKKLVHTNVKNNDFAFFLKLVQPYRHDLTVCCECMFGWYWLADACQAAGLTFVLAHALYVKAIHGGKNKNDRIDSEKLTHLLRSNLIPPAYVYPAQKRPLRALLRQRIFYVWRRAELLARIHSHQLAHNRIPAKQTRRVRDPWEEQLLAAEDHPLRQLALKNDLAMIRHFDHQIFQLEEELQRQTKQLASGEYALLQTVPGIGETLGLTLLYEIGDIERFPTVKDFLSYCRLVKGTVASAGKIKGLRGAKLGNPYLRWTFGEAAVIAKRDHFKIRPLAQQLEARMGGNKFKANTVVAIKLARAVYFMLKNKTVFEPERLVAALARN

SEQ ID NO: 245903 - protein, 331 aa, unidentified
MNFTEFVGIDISKLKFDVRIHSNQKASVFENNGKGFLKFIKWIDKNDQCEKAEILIAMEHTGLYSLPLSVFLMENNYRFVLISGLEIKRSLGIQRGKDDVIDAKRIAEYAYQKKDKIKPTQLPVKNILQIRRLLSLRERLVKQRAGYLMDKGENEIFLNQDENKILFEVIEQSIEYLDIQMDKVEKELYNIIKSDELMKNQFELITSIKGVGKLTALFMIAFTHCFTSFDNWRQFASYAGTAPFPYRSGTSIKGKNKVSNLANKRLKTLLNMCARSAIVCNPEMKIYFQNRKAKGENGMSAINIIRNKLLSRIFAVIKRGTPYVNTLKYAA

SEQ ID NO: 245904 - protein, 345 aa, unidentified
MGEITTVGIDLAKSVFSVHGVDAHGKTVLRKTVSRGKLIELMEQLPRCLVGMEACSGAHQLARELQPLGHEPRIMMPKFVIPYRRNPKNDGNDAEAICEAVGRPGMRFVPIKSVEQQAVLVVHRVRKELVELRNGQINQERSLLAEFGVAIAVGRYRFRQQIGAALDDPRVPQLARQVLHEVNARIRVLDEDILAYDRRISVQVRDSDAMQRIVAVCGVGPITASAVVASVGDAKLFRNGRQFAAWLGLVPRQFSTGGKPVLGRITKQGDVYLRTLLIHGARSALPALRRRDDKLSRWASAPIERRGFKKACVALAAKNVRLIWALLAKGEAFQLDPAAGAPHAA

SEQ ID NO: 245905 - protein, 322 aa, unidentified
MSVSVLGIDIAKQKFDAALLSEGKTKHKTCKNSAEGFEMLRLWLEKQGIQEVHACLEATGNYGEELAIYLHEAGHMVSVVNPARIKGFAQSELLRTKTDKLDAALIARFCLAMKPGAWIPPSPEIRSLRALVRRVDSLIDMRSQEKNRISTAHESVSLLIKEHIAYLDQEIEKIRKQIANLIGQDPNLKRKKDLLDSIPAIGKVTIPHILAELDDLEKFNHVSELVAFIGLAPKETLSGSSVKGKPRLCKIGHARLRKALYMPALVSIQCNPVMIAFYNRLKDKGKNGKVIVCAIMRKLVHVIFGVLKSGKKYDPNFQPISA

SEQ ID NO: 245906 - protein, 364 aa, unidentified
MIIVGCDYHPGFQQIAYVDTETGELQERRLRHREEAEKFYRDLASRGVRVRVGMEASGQARWFERLLAELKFELWIGDAAKIRAKRVRKQKTDRQDAQLILQLLLEDRFPQIWVPSWENRDLRQLLWHRHRMVQARTRIMNQLQAVALNEGLRCKKKLWRERGREQLQSLPLAPWASRRRQDLLELLDRLNPTIAELTQAIEQEAEKCPQAQRLRTHPGVGALTALAFVLIIGEAERFDCGKQIASYLGLVPAEDSSGERRRLGHISKQGNCLLRFLLVEAAQVTVRNDPRWRNQFFHLAMRRGRKIAKVAMARRLAVRLYWMWRRGWDYQQLEQFGSHAGQPGTGHGVQSITDVMIERPAPLH

SEQ ID NO: 245907 - protein, 341 aa, unidentified
MMIIGCDFHPRFQQIAFIDQETGEYGERRLNHSEEAEQFYRSLAGRQVRIGAEATGNFRWFRRLMQELGHEFLLGDASAIRACCPRKQKTDKRDARHILTLLVEDRFPAVWQPPVENEQLRQLLLHRCRLVRMRTRIKNQLDSMAKDEGLLSSRVWSPRRRCEIEALPLPGWYAHRRADLLGLLDGLDKQIRPLDEAVREAAAGNAEACLLMTHPGVGPVVSLAYVLVIGDWRRFPRGKQVGSYLGLIPAEESSGDKRRLGHIGKQGNTLVRWLLVEAALHAQRYDASWHRQYVRLSMTKHHGVAKVAIAHKLAVRLYWMLRSGEDYSKVMERGSHAGQSV

SEQ ID NO: 245908 - protein, 354 aa, unidentified
MIIIGVDFHPEFQQIALLNTTTGEVEEKRLAHPEEAEKYYRALASAGETVRIGMEASGHARWFERLVAELQFDLWIGDAAEIRAKRGRKQKTDRQDAQHILKLMLKDDFPKIWVPNWENRDLRQLLWHRHRMVQARTRVMNQLQAVALNEGLHCKKKLWRERGRQQLESFALAPWASRRRRDLLDLLDRLNPSIAELTQAIEREVENYPAAQRLRTHPGVGVLTSLAFVLILGDAERFRCGKQVASYLGLVPLEDSSGNRRRLGHITKQGSSIVRFLLVEAAQVTVRSLPEWRSKYFHLVLRRGRKIAKVAMARRLAVQLFWMMRKEWNYEQLKKFGSHAGQPGNRHGVQSNTE

SEQ ID NO: 245909 - protein, 348 aa, unidentified
MTIVAETYQFVVGVDTHARTHTFAVITTGTTALLAANTFPTTPAGMNRALAWVKRRCTGTTLMAIEGIGSYGAQLAHQASHQGLTVVEPMPTPTNMRAGHGKSDPVDAELIARSVTGIDTTRLRHPRQDDGHRAALRILVTAREQLNHERTAAINALTALTRTTDLGVDTRHPLSTAQIAHIRSWRPRDEPNHVATARHEAIRLARRVTICDTDLTENKHTIDQIVRSSRAAILLDQTGIGPITAAIILLAWSHPGRIRSEAAFAQLAGTAPIPASSGNTSRHRLNRSGDRRLNHALHTIILTRLRCDPTTRAYRDRKTTEGHTPRQTQRTLKRYLARQTYRLLNTTT

SEQ ID NO: 245910 - protein, 338 aa, unidentified
MKVYAAIDLHSNNSVLDVVDEAGGLLHERRYPNELPVIVEALQKYGKDLVGVVVESTYNWYWLVDGLMAAGIRVHLAHTAAIAQYAGLKYSNDYTDARHLADLLRLGILPEGHIYPKEQRGLRDLLRKRGTLVREQTRHCLSLQSLWTRHTGQQLSANSLRRLTPEDLANRFSDAHVRQAAAVTHTLFQTLHKQVDALERSVHRELKRCASLMHLQSAPGIGDILGLTILLETGQILRFASVGDYASYCRCVDSKRLSNGKKKGQGNAKSGNRYLAWAYIEAANFAIRFSPPIKRWYDRKRSKCHRMVALKAVAHKLARACYFMLREQTDFDLTRAFG

SEQ ID NO: 245911 - protein, 410 aa, unidentified
MEVLYPHCAGLDVHKESVVACVRHMAESKVHTAIRTFKTTTQELMALSDWLAAEGITHIGMEATGVYWKPVWHILSDGEFQLVLANAAHVKNVPGRKTDVNDACWLADLMAHGLIRASFVPDEPTQQMRDLLRTRKQLVRERSSHIQRIQKTLEDANIKLDCVVTDILGLSGRRILEALIEGQTVPQALAALAHRRIHASTDQLEAALRGRVTPHHRFLLKLHLDQIDALAKAIVRIDEEVSANVAPFRVAIEQLSAIPGFSPLAAQVLVSEIGIDMNRFKTAAHLISWAGLCPRNDQSAGKRRSTRMKKGAPWLKTVLVQCAWAASRTKGSYFQAQFHQIRARRGSKKAICAVAASLLTTAYHMLKDGTIYQDLGATHFHQNDSAKQVRRLVNRLENLGFTVQIAPKAA

SEQ ID NO: 245912 - protein, 370 aa, unidentified
MTHCTTAKFVGLDVHKDSIVIAVAEAGRASARVVGSVPNEGKALSKVLDKLGPRPSVLCCYEAGPTGYGLARALKAAGWSCDVIAPSLVPKKSGQRIKTDRRDAMKLAQNHRAGELVAVFIPDEKTEAIRDLERAREGAKRAERVARQQLSKFLLRHGRCYPGKTTWNDAHRAWIAQQAFAEPAQQHVLSDGLATVEAATLRCRQLTEKLRELAEDWRLAPLVKALQALRGVEFVTAVTLAAEVGDFRRFAKAGDFMGYVGLIPSEDTSGPHRRQGPITKTGNGHVRHVLVESAWHYRRPPRISKAVRERSVGLSPAVCAIAWKAQKRLHGRLHRLIRRGKNPAEAATAVARELAGFVWAIAREVLPAAS

SEQ ID NO: 245913 - protein, 407 aa, unidentified
MARVFIGVDPHKLSATIEVVDSQERVLATGRFDTNKAGYAQMRKQVARWPDRVWAVEGSGGAGRPLAQRLLADGENVVDVPPKLSARVRLFDTGHNRKTDAHDAHAVAAVAVRTKNLRVLGYNEELEALRMLSERRAELISHRVQVVNRLQRLLSELLPGQAKPNLTAPQAKVILSSRRPRDLANKTRKRMALEQVEDLVVVDARIKAINKELKAMVLATGSHLMDLPGIGPIGAARILADVGDVTRFADRNRFASWTGTAPLDASSGEQVRHRLSRAGNRKINHMLHMAATSQIRLDTEGRAYYRRKRAAGKTHLEAMRCLKRRISDAVYRQLLSDADPAAASAPGEELQASPGGHCGATQESSAVDLPPHIDTSDQPLPDPQPRRYGATTSRRKNETQDVLLRTG

SEQ ID NO: 245914 - protein, 385 aa, unidentified
MKKNTTGILGENKGQITAKAKNASKSKRRRAIGLDLGDKNSCYCIVEREANDVEVEVSKEGKVATTKKAMEQTFGALEPTLIALEVGTHSPWVSRLLSGLGHEVIIANARKVKAISENSKKNDRVDAQTLGRLALADRTLLHPIQHRGEQAQLHLMEIRARAALVETRTSLINSARGLVKASGERLPACDADQMGVKQMTSLPAGMQDTLRPMLETVESLTKQIHGYDERIEQIARTHYPETKLLRQVKGVGVLIALTYMLTVEDAGRFEHSRDVGCYVGLRPKQDDSGDSKKQLRITKEGDIYLRKLLVQGAHYILGRRGPDTDLQRWGRKLAERGGKNGKKRAVVAVARKLAVLLHCLWVTGEVYEPLRNSTREAERQKRAAA

SEQ ID NO: 245915 - protein, 308 aa, unidentified
MPQTYIGCDLSKDRLDVFDPRVGHGTQHANSPTGIRALLRACGPGGTLIFEATSGCDQALLNALATAERPFVRLNPLHAWHFAQSLNLPKTDRVDARMLARFGAERQPAPHLPQDKARAELAELADRRDQLKRMETQEKNRLSKTVSPLIRADIRASLKALGIRIARFEAEIADHLAQSPGLATDAGLLRSVPGIGPVTATGLLARLPELGHLDRRAIASLAGLAPKARESGKFRGKRRIGQGRELVRRLLYMAALSLWRTPGPATTMLRRLQDAGKPAKVILIAMARKLLTIANAVLRDQKPFRTTP

SEQ ID NO: 245916 - protein, 324 aa, unidentified
MIDGILGIDVCKNTLDVSISSYTKVRTKSFTNSPDGWRHLLDWLIAQKIQRVHACLESTGRYSLGIACALYEADHVVSIINPAQIRDFVRTKLGRNKTDGVDASHIREYCELFKPSPWAPPSEAHRRLGELQTIRSGIVAGLTEWKNRKNSGIVDGEAQALADATISHFTSQLGAVDKAIALTIDNDCDLQSKRDLLLSISGVGETLAGVVLAELPGPDVLRSSAEVVAYAGLNPRQHQSGTSIDRATRISKIGNAVLRAALYMPALSAMRYNSAIVALVSRLKSRGRLKPKQIVVAAMRKLLVLCFGVLKTGRPFDAAIAMGG

SEQ ID NO: 245917 - protein, 417 aa, unidentified
MEDWLGGFTCLTKIQYTGGVIVYNLFVGIDVSKDSFSVTGLEPKGNICFSITANMDLNGFSELFKSINSVCKDPSKVFAAMESTGCYHINLFSFLCSKGINTVIINPILISNFTKLSLRKTKTDKKDSLTIAQFILVHKDSISKFSVPQDIKDLRDIARERESLCNMIASTKNEIKRILQFTFPEMESLCNIFTQTMLNFIKSFPSARLIKIAEPKAIEKALENNFSRGRKITITAYDIIRAAQSSVASVSLAKELILPEKISTLLHLMERLDKITDILSNFCQSMMIDELEIITSIEGIDKTSGATFLAEVGNIFNFPSHKSLIAFAGIDPSVFQSGKFEGKSKISKRGNRHLRRVIYIMTVNVIRVNSFFKAYFLKRKQEGLPYKKAILATAHKLVRTIFAMLSHKTLFHVKNSL

SEQ ID NO: 245918 - protein, 395 aa, unidentified
MYSLFIGVDVSKDFFSAVGLDKEGKELFSGTYEMNSNGFSEILRTISSHGQRGDEVMVAMESTGCYHINLFSFLTVEGIRTVVVNPLLISNFAKLSLRKTRTDKKDASTIAKFLLAHQEGILQLSVSQDLQDLRDLSRERESLCHLIAATKVEIKRVLRATFPELESIGNLYTRVMLRFLQEYPSARRVRMAKPRAIAKALKGPYVGNKLRFSSEDILRAARSSVAVVSPAKEVILQGKISTLLHLDERLREVTKLLTDLCKATRKENLKILRSIKGVGPKTAAPFLAEMGQVENFTSHKKLIAFAGWDPSVRQSGNFVGMSKISKRGNRHLRRAIYLITASVVSQNAFFKAYFLKRKKEGLPPQKALFATAHKLIRVIFAMLTQRTYFKPKEVI

SEQ ID NO: 245919 - protein, 382 aa, unidentified
MQASRKSTPTADHCGTIFVAIELSQKTWLITVHSPDRDQFSRHRLEGGDHAGLLALIEKVRARATQQLGSTPRVVSCYEAGYDGFWLHRLLEAAGISSLVFDAASIAVEQRSRRAKTDRIDGELLLRTLMAHLRGEPRVVRIVRVPSVEEEDARRASRERDRLITEQTAHSNRIKSLLRLLGMAVGNPRRRDWLAWLKRQRDWQGHPLPPHLLAEAQREHARLMLVREQLAALEQVQAAQASPVPVPMAERRDLLQRLKALGPAFSATLVNELFYKDFRNRREVASYCGLAPSPWQSGGIDREQGISKAGNRRARHKAIELAWLWLRHQPNSALSHWFRTRTANAGRRAKRIAIVALARKLIVALWRYLTAGLVPEGATMKA

SEQ ID NO: 245920 - protein, 340 aa, unidentified
MEKRYIGIDLHRNQFTCCMQLENGRTYLTKWRLEDLGRFVKKLRTDDEVAVEITGNTRLFHDAVVKHVARVVVVDSNQFRVISRSVKKTDANDARLLALYLSKGLLPEVRMKNKLQAHVASLTQTRDTLVKQRSALKNKVNNILSARGLNLPKEALGSEKRLAEVLSLPFDELVLIELRVIVDQIRGLKKSVAELDKAIAEASSELEGHTSLTSIKGIGATTSAILLSVIGDVNDFPDEGRLASYFGIVPRVSNSNETERSGRIHKRGTKLGRTALVQSALIAANYSPYLKRFYEQVKARRGAGKAIIALARKFLGIIYRTLKNKWVFEDFPNFVLAEES

SEQ ID NO: 245921 - protein, 361 aa, unidentified
MTSMTHDGPQITGGVDTHGLTHHAAVIDQIGRHLADQEFPATIRGYRDLLDWMRTHGTLVAVGAEGTGAYGAELARVLTAAGVTVIDVDRPHRKTRRMKGKSDPIDAYAAAMAVLSGRATGIPKSRDGVVEAVRVLRTARRSAVKARTQAMNQIRGLLVAAPAMLREQVTGLERAVLIRTLARLRPGDDLSRPPAATRAALRRLARRHQALDEEITELDAEIGPLVKQAAPALLELFGVGSETAGQLLATAGDNPERMRSEGAFAHLAGVTPIPASSGRTHRHRLNRGGDRAANNALHTIVLTRMRFDERTRAYVERRTKEGLNKKDIMRCLKRLVAREVYRALTSTPTERTTQTDLTPAA

SEQ ID NO: 245922 - protein, 346 aa, unidentified
MDQIIRIGMDTSKHFFQLHGVDAAERPVLRKKLRRNEVLAFFAKLAPTVIGMEACGAAHYWARELRKLGHEVKLMAPQHVKAYVKRNKNDGRDAEALCEAMSRPTMQFVPVKTEEHQAALMLAGVRQQLIARRTQLSNAIRGYAAEFGLMAAKGLDKIEPLLARIAQDATVPAQARELFAIQGQDYAQLQSELKGLNAKLLAWHRANAASRRLAQIPGVGPIGATTLVMKTPDPRVFASGRHFAAWLGLTPKDHSTAGKTRLGKITRAGDEVLRSLLVAGATAVIQQVRRGRGRPSPWLLALLKRKPPKLAAVALANKIARIAWKLMATGESYDGARMLGASALAA

SEQ ID NO: 245923 - protein, 360 aa, unidentified
MNEITRVGVDLAKRVIQVHAVDATGRVMAAKALPADKFAAWCVQLPVGCLVAMEACGGAHHWARKLRGYGLDARLIAGHFVTPYRMAGKGGKNDANDAAAICEAAGRPHMRFVPIKTPAQQALLAIHRLREGYKEDRTACINRIRGLLTEFGIVFAQSPEALRLGLADVLEDAGNELPGIARLALQEARLQWIELECHIASCDERITAHVRSDEQAKMAAQLSGIGPVTASALVATVGDFKQFKNGAQFGSWLGLVPRQNSSGGKTQLGRITKRGDDYLRTLLIQGAKSAVMTAHKRSDKISQWLVQLLARVGWQKAVVALANKNARIVWALLAKGQVFDANYVSVKPGEVSAIPVATPA

SEQ ID NO: 245924 - protein, 408 aa, unidentified
MRVIGMDIHRTFAEAVMIDGERLIRLGRINMSRDHLAAFAARLTSEDHLVIEATGNAHAVAEAVAPFVGRVIIANPRQVHLIAKARIKTDVIDATVLARLYASGFLPEVWVPDQRTLGLRRQVTRRNQIVRQRVRLKTMIQAILHAHLVPQCPHADILGPKGRAWLLAQSLPDDESAAIERHIREYDRLTDDLRVVERELARDALDSAETKRLMTIPGIDMVVAVGLLAAIGPVDHFSSPGRLVAFLGLNPSVHQSGNSPARHGRITKQGPCHARTMLVEAAWQAVRSPGPLRAFYERVRSRRGTHVAAVAVARKITVIVWHLLTKGEDYAWVRPALHAKKLRDLELRSGQPSRRGQRGASYEYNLTRSRREERQRGERAEAAYRRLTEGWTKRGRRASADASTEERQ

SEQ ID NO: 245925 - protein, 343 aa, unidentified
MEYYVGLDVSLKQTSICVVDQTGSVVREGVVDSDPEAISVYVRSKAPGAVRIGLETGPTSTWLWNELKRFGLPVICIDARHAKAVLKMQINKNDRNDAIGIARIMQTGWFKEVHVKDIDSHSVRALLASRALLVKIKRDLENHVRGLLKNLGLVIGRATFNVFAARAEELIEGRPDLVAAVRPLLEARNAVEQQVSELDRKVMKLARRDAQVQRFMTVPGVGPITALAFKATIDDPARFARSRSVGAYVGLTSRRHASGEIDWSGRISKCGDAMLRSYLFEAAGVLLTRVPKWSPVKAWGTRLAKRNGLRKAKVAVARKLAVILHRMWIDGTKFNWSKKEIAA

SEQ ID NO: 245926 - protein, 375 aa, unidentified
MNNVFNIIESASPEATHSDNSQSHTGKASTIKLGIDVHQHFYVVVMQAGGSTPKPPQRFSPPAFLHWAAKLRAQGQSIHAVYEACGFGFGLYRELAKLGVQCVVCCPQKLDERNKRMKTDGLDAKALCLKLDRYVAGNKDALAIVRVPTEQEEQQRTIHRQREQLLTARKQLEAQGRSLLVNFGFEGTSHWWKPRLFARLQKELPAWIIERLQVSQPVIALLEEQIKALTTQLQVCAPPGVPKGIGALTSVVIEREIGDWNRFKNRRQVASYTGMCPGEYSSGGSRVQGCVTKHGNPRLRSNLVELAWRLVRFQPGYRPVQKWEAVLSKGAQATGAARKKAIVAVARQLAVDLWRLRTGRMSVEQLGFNIQKEAN

SEQ ID NO: 245927 - protein, 327 aa, unidentified
MNEFSKYVGLDVHKETIAVAVAEANGGEVRYVGEIANTEDALDKLVKQLRKGGANLSFCYEAGPCGYGIHRQLTDLGWDCQVVAPSLIPKKAGDRVKTDRRDSLMLARLHRAGELTAVWVPDGAQEALRDLTRAREDLKHLQRQARQRLLAFLLRHGRRYDGGKSKWTLTHYRWMETVKLDHPVQQIVFQEYIDTVKAMTKRIEAVDKHIESAAAESVFWLVIEGLMALRGVSLLTATTIVAEIGDLRRFASAPQLMAYLGLVPSEHSSGGTKLRGGITKTGNGHVRRLLVEAAWTYRHPARKTALLQRRAEKAPEAVQDVSATLFL

SEQ ID NO: 245928 - protein, 422 aa, unidentified
MNTEKNPVFSAYIGIDWADTKHDICIQATNDSMRTFSVIEHKVDKIDEWVQTLRKQYRGSIAVAVEISKGPIVYALQKYDCFVIFPINPATLATYRLAFKSSRAKNDPGDAELALDMLIRYPERFQALTPQSIEMRTLTSLVEDRRNFVNDKIRLTNRLRSTLKQYYPQILEWFDHIDNHLFCNFLIRWPTLLQAKRARQSTFIQFFHKHHMYFQHVQEKRLIAIKASKPLTYDNAVIIPNRMKALALVEQLRLVLDIIEQYDNEIEKISKQHDDYAIFDSLPGAGPILTPRLMVAFGEQRERFKNASDIQKYSGVAPVTEQSGKKHWIHWRWQCPTFLRQTFVEWAAKTINKSLWAGAYYQQQRARGCPHQAALRSLAFKWIRIIYQCWKTKIPYDELLYLKALKERGSKLFDKSLLAESN

SEQ ID NO: 245929 - protein, 382 aa, unidentified
MQSIDNVNPTIHLAIELSASSWLIAARVPGSEKPHLHRIDGGNTAALLALISSLRARVARRLDAAIRVICCFEAGRDGFWLHRVLTAHGIANYVLEPTSILINRRARRAKTDRLDAIGMLRVLAAYLRGDRQSCSMVRVPTPEEEDAKRIHRERENLVQERLRIENRIEALLFTQGIRKRPSLRSWERDLANLRTGDGREMPRHLRAELNRLRRRLVTILELIREVEAERDELVVTTPQDRTSRKIVALCRIRGLGENFAAVLTREVFYRSFGNRRQIASYVGITPMPYQSGGMDRDRRISRAGNPRARTTMIQLAWLWLRYQPGSELAEWFRKRVGTLAGRTRRIAIVALARKLLIALWRYVETGVVPAGVEIRTETVVAA

SEQ ID NO: 245930 - protein, 326 aa, unidentified
MVIIGIDVSKTKLDCLWIRDLQAMKIKGKVQANTPTGHQALLAWAMKQTGEDVSGLDFVMEATGVYHETLAYALHDAGAQVSVVNPARVRDFARSLGAQTKTDKRDSVAIARYGMTQSPRLWVPEPVEVRQLKALIARCDAIKQDIQRELNRLEKATASDASEEVRASIETVRSQLEAEKARLESLIEDHIDNHPDLKNDQVLLESIPGVGPVISQHMVAIIRSRSFKQAPQCAAFLGLIPVERQSGTSVYSPPRLSKHGDGRVRAKLYMAAVVATRYNPDIRRQYQRLLKNGKSKMSAIGAAMRKLVHICFGVLKHQTPYRPQPA

SEQ ID NO: 245931 - protein, 346 aa, unidentified
MKINRVGVDLAKNVFQLHGADCRGKAAWKRRLSRGKWLKVLCDTVEPGTEIGMEACAGAHHWARQLMLQGYPVKIIPPQFVKPFIKSNKNDANDAQAICEAMGRPDMYPVKVKSVEQQDLQAMHRIRDEIKSHRIAKANQIRGLVTEYGLVAPLQLHALRRAIPEWLEDADNGLTFLFRQLLQGLWGDLYALDQRMTELDKQIAVVAQEDPTARRLQQLRGVGPLIATALVATIGDGKQYRKGRDMAAALGLTPRQHSSGGKDRLLGISKRGDAYLRCLLVHGARSAVRTAKDKEDRLSCWIINLQARRHSNVVAVALANKMARMAWVMMTRGVDYDPDLAAASVN

SEQ ID NO: 245932 - protein, 391 aa, unidentified
MSMYFIGIDISKYKHDCCIISAADQKVVSKVTIKNNKAGFNELLTIIHSLANPADIRIGFESTAHYTLNLELFLENSLLTFMEVNPVLISEYKKSKTLRRTKTDSVDCESIARWLMTVEYKPHSKGFYHAYSLKSLTRLRDKLIRQRSFYLVKITNVLDHTFPEFKPFFNERLSKTALYLLENYGSAEKMARMNSASYEKLRSLSRGKFSPQQFLRLKELAANTVGVNNSIFDVELNSLLSLYKSLVKEINTIEKEINKLIEEVHPHYMSVPGIGPLSAAVIYSEYGDISNFTNPGQMLAFAGIEPGINESGTESHGGKMVKRGSSQLRYTLINCCLPLIRFDMTFATYYAKKRGEGKPHRVAITHVAKKLIRVIYALESQDIDFNAQKLR

SEQ ID NO: 245933 - protein, 419 aa, unidentified
MSFKILKNNCCGLDVHKTWIYACIGITDSFKRTEYKQARFSSFTKGLQELCLWLAKYNCIDVCMESTGKYWIPVFNILEKNNIFVTLSHPKYTKPQKGNKTDRKDAKWICDLYMCGMVKPSFIPPADIRQLRDLVRYRFKLTCMITGEKNRAHNCLTVSNLKLDDVFSDIFGKSSRSITEQILQHPGEVFDVAPFVDSRCKTPIEEIQAAVDGAISHEQAVKLRQCLKHIDELEMHKAEIEREIFRLSQKYESVLDLIRTIPGFDKNPLTAIQVLSEIGADMSVFPTAKNLVSWAGCCPRNDQSSRKIKSTRISRAGSYFKPVLVQIANALIKSKKHPEFTTRYRRIKARRGHKKAIIAICRMILTAIWHILTDLKPYTPEGFLESRPVNKEKVLTISQALNLIKQRGYIIKDDAVPVT

SEQ ID NO: 245934 - protein, 324 aa, unidentified
MQGKEKVPAPSAETAVYAGVDACKAWLDVYLYPIAQSFRVANSPEGLRTLRRRLAAYRVELIVIEATGKYHRLAHRHLHQNGLPVAVINPYRSRKLADALGLLAKTDRIDARLLALFGESLRPAAKPPATQLLAAVQELVLARAAAAADQTALANRLQAAESRFLKTELRRSLKRTKAYLARLEAEIARLIGSDVALMRRFEILCSIPGIGPQVAAILIGCMQELGELNAKQSAMLVGVAPVNCDSGSQRGQRHIRGGRAPVRRALYMAASVAARFNPDLKAFYDRLRQAGKPPKLALTALMRKLVILANTLLAENRPWEPRHA

SEQ ID NO: 245935 - protein, 430 aa, unidentified
MKSNTQNAKIEAITENTLVLGIDIGSETHYARAFDYRGIEYSKKPFKFSNTEVGFMSFKAWIQDMKEMHEKDKVVPGMEPTGHYWFNLGKFLQDNEMRPVLVNPHHVKKSKELDDNHPTKNDRKDPKVIAGLVREGRYMIPYLPEGVYADLRTASNIRFQLQAELTRIQNRISRWFNIYFPEYKTVYGKPDAKSGMMILKVAPLPEDILTLGIDGVNQIWRDAKMRAVGKARAKTLMEAAEHSVGSKEGAVSARMEIRMLLEDYESRNVRLQEVMALIEELVKQIPMAEKLLEIKGVGIKTVSGFLAEVGDISRFNNPKELQKLAGLALVENSSGKHKGETRISRRGRKRLRYLLFEVAMSLVSKNAEFKELHIYYTTRRINPLKKMQSLMAVAAKALRIFYAILTKGVAYDPKKMINDIKMPKIYLQAA

SEQ ID NO: 245936 - protein, 455 aa, unidentified
MPKKTSGGRPELKAVNVGAAAIDIGSKMHMVAVNPACIDVPVRSFGTFTQDLHDLADWFKACGVTSVAMESTGVYWIPVYEILEQRGFDVILVNARYAKNVPGRKTDVSDAAWLRELHSYGLLRGSFRPDAEIATLRAYLRQRERLVEYAAAHIQHMQKALMEMNLQLHHVVSDITGATGMRIMRAIVAGERNPDVLATYRDVRCHSSIETIRAALVGNDRHEHVFALTQSLELYDVYQAKMLDCDRKLEVLIAALNDKGAKPVGKLSKPRIKTKQVNTPTFDVRTALYGVLGVDLTEIHGLGPSLALKLVGECGTDLRAWPSAKHFTSWLCLAPGNQISGGKVLSSRTRRSSSRAAALLRLAATTVGRSDTALGAFYRRLASRAGKSKAVTATARKIAVLFYNTLRHGMSYKDPGAEQYEQQYRSRVLANLKRRAKSLGFALQAIPGDANPAVS

SEQ ID NO: 245937 - protein, 455 aa, unidentified
MARKRKQDRQSKQAVLPVMRADAAGIDIGATEIFVAVPPDRASENVRSFPTFTQDLYALAEWLKQCGVKTVAMESTGVYWIPLFQILEERDFEVYLVNARHVKNVPGRRTDVSDCQWLQFLHSVGLLRASYRPEQEVCAVRSLLRHRESLVQMAATHVNHMQKALDQMNLQLHHVISDITGQTGLAIVDAILEGERNPQVLAKLRNGRIQASAEVIAKSLVGDYRPEHLFTLQQSLTAYRSYQKLIADCDREIRRALEQFHPPDPPQASATDIAPASPPTKTRFSDGVLRTELQRAFGIDLTQIPGIRTGIAQTLFGEIGPDFTKFRSASAFASWMGLCPDNEISGGKVLWVGTRKVNCRAATALRMAAQSLHHSKSALGDFYRRMRAKLGAPKAITAAAHKLARIIFHLVTTRQEFDASHFAADQLRFQKRQEAKFRAKARALGFQLVPLEQTA

SEQ ID NO: 245938 - protein, 388 aa, unidentified
MGSTQSDTTTTGGLRPALYVAIELSKKGWLIALRGPTADRISLRRLVAGDAAGLLVLIERFRKLAAEAIGAGVAVLTCQEAGYDGFWLHRVLTAAAITNHVVDPASLHVDRRARRAKTDRIDAQALLRALMAYHRGEGRVWSVVHVPTPEEEDARRPHRERENLIKERGRHVNRIKGLCAQQGILHYEPMRADRHERLAELRTGDGRPFPARLLAEIRRELARLELLLGQIAELEVAREAALRAEQPDVTEAERVKRILTLRRLLAVGPESSTVLGHEVFFRRFENRRQIAAYVGLAPSPHMSGGLSREQGIAKSGNPRARTVLVELAWLWLRYQPRSALSEWFMRRVGEQRGRLRRIMVVALARKLLVALWRYLEIGLIPQGAILRA

SEQ ID NO: 245939 - protein, 343 aa, unidentified
MKLFVGLDVSLEKTAICVISEHGKIMKEAQVASEPEALSCWICDQDGAIAAVGLEAGPLSQWLHRGLSDAGLPVVLMETRQVKGALKAMPIKTDRRDAEGIARLLHLGWFRPVHCKSVSAQEVRAVLSARKAVQQGFITLEMSLRGLLRNFGLKVGTISRGRFEQRIRELAAGNPMLEAATEPMLRARSALRRELAGLERNVRQLSQEDPVCRRLMSMPGIGAVVALTYRSAVDDPARFTSSKTVGPWVGLTPSRNQSGERDVSGGITKAGDVNLRRALCQAATVMMHRGRANWLRTWAAKLARRRGAKRAMVGLARRIAVILHRMWKDDTDFRFDIPVLHAG

SEQ ID NO: 245940 - protein, 316 aa, unidentified
MSTPNSPFVGIDVGKSQLDAACHDSPATHSFSNTPQGLVKILTWIQDVSPALVAVEASGGYERALVHFLSSAGIKVAVVSPNQVLDFARAHNQKAKTDKLDAHNIAYFASIMKPRVFSPPSPVQEKLLALVTRRRQIAHMIIPEKNRLMQASQDIEPRIQEHIDWLEEEEKEIEEKMQDLINSDPDMQEKLKILSSAKGVGTVSAFSMLAELPEMGTIGGKQVSALLGVAPFNRDSGKKKGKRRTGGGRYNARSAFYMATLSAIRWNPVIKCFYERLLSQGKEKKVAIVACMRKFIVILNAMLRDRKPFIVQSSFV

SEQ ID NO: 245941 - protein, 338 aa, unidentified
MTIIATGIDLAKNVFAVHGVTAGGAVQLKQPKVARGKLNALIASLPPGVIGMEACSGAHHWARQFQAHGHTVRLMAPKLVTPYRMSGKRGKNDAADAAAICEALQRPNMRFVPVKTEEQQAQLMVHRARQGFVTERTACINRIRGLLSELGVVLPLKAEVVRRQAREHLEDLPGYANLVIGDLLSEVAHLDERIAQYDKHLRAIARQSTPAQQLMQLMGVGETTATALVAMVGNATEFSCGRQFAAWIGLVPGQYSSGGKARLGRITKAGDPYLRSLLVMGARAVLNAAKSKTDSISRWALAVEQRRGYWKAVVAIAAKNARLAWAVLTKGEAFKLPA

SEQ ID NO: 245942 - protein, 408 aa, unidentified
MADKMAGIDVHKKVLMAVVIDARTPESKPERRRFATMPSELRRLSRWLEEQGVEEAVMESTAQYWRSVWLELEPHMCLHLAQAFSNRAPRGRKHDFKDAERLVRRLIAKELILSFVPDGEQRIWRNLTRMKLQLTRDRVRLQSQIECLLEEMRIKLSIVVSDLLGSSGLRVLHALANGETDAKSLALLGDDRLKCTEEQLVEALTGRSHPMHGQMLALQLERLRLLDEQIAKLNSLIAQVMKPHQDAVIRLAEVPGLGIDSAQQVIAEVGVTASTFSSAAEFTSWVGTCPGKEESAEENSSSRSAKGNKYMRRVLNQAAHAAARSKGTHFQAVFRRLLPRLGYQSAVWAIAHRLCRLVWKILHQGIRYIEQGIESEPKLLIYRAKYLAKQLRKFGYNVQITPANGAPA

SEQ ID NO: 245943 - protein, 323 aa, unidentified
MPSVIGIDIAKHTFDLATLQPNGKYRTKAKLANDKAGFAVLRDWLNKHSEPGAWVVMEATGIHHEALAEWLLEQGYRVCVLNPAQIAHYARSQLQRVKTDKVDAKLIAEYGERHQDELRPWQPEPRAVKRLKALVRRLEDLREIEQMERNRLEVADASVQASIQSVLEHVGQEIEETLKAIDDHIDNDPDLRGKRDLLTSIDGVADKTAALLLAELGDPLRFANSRAITAFAGLNPRLQESGSYRGQTRISKMGSSRLRAGLYMPAISALTYNEAIRAMGERLRERGKTGKQIVCAAMRKLLNIAYGVLKSGQPFDAKLALAH

SEQ ID NO: 245944 - protein, 414 aa, unidentified
MEGEINKSCGLDIHKRFLIATILSRSGEKQQQRFTRDDDGILNLKNWVTSEKCDVVACESTSDFWVPIYEALIDHLPVIVGNARDMKAFTHKKTDKIDSEVIAQLALNKMVQPSRVFPKRHREFRSYVRLRLTLVRKRTDIKNEAHAVLSSEMLHLGDVLTDIFGKNGRAILAGISSGKNVDQIIELLSPNVRKKSVQIREILDREISQSTAIRLQICLDLIKHLDDEIEVLEREIFNYAYQKHKREMEILMSVPGIGELGAATLIAEIGNFSDFPSGDKLTSWLGIVPNVYQSADKYNNGRITKRGSKVARWILTQIAQAAARKKNSRLKEFFNRKKKLIGYAKAIIALARKIATIIWHLITNDEMYEDETGYEKGEIKKRRIVETEIFSVDERITIISGIIAIMGKKEGEST

SEQ ID NO: 245945 - protein, 344 aa, unidentified
MSVTTIGLDLAKSVFQIHGVDAAGHLVLKRRIRRHGLLAFFEALPPCMVGMEACSSAHHWARELVELGHDVRLIPPQYVKPYVKRNKTDAADAEAICEAVSRPNMRFVPIKSRESQGLLTLHRVRSLLVRQRTASVNAARGLLSEFGIVAAKGICRVGALRGDMEAANEEVLPREARAALDALFEHLDALTAKLDAVDQEILAWHKASEASQRLATAPGVGPLTATALIAAVGDASQFVSARHFAAWLGLTPRMSASGNREHIGRISKGGDRYLRTLLIHGARAMVGTSFRRGVKPRPWLQALIGRRPVNVAAVAVAHKTARALWAMIKREETYRQPAVFEASA

SEQ ID NO: 245946 - protein, 355 aa, unidentified
MTSSKYIGLDVHKESISIAVRNAAGKIVMESVIETKASMILEFIDGLRGDVHLTFEEGTWSAWLYDLLKPHVTRLVVCDPRRNALLQEGNQNDRVDARKLAELLQNNQLRPVYHRDHGLRTLKELVRSYLTITKDLSRVMSRVKAIYRSWGILCGGTQVYTARHRAEWLEKIREPGVRRRAEIYYQELDGLRLLRLEVRKDLLAESKKHQVWKRLRGIPSIGPIRAAMLLGIMQTAHRFRTKRQLWTYSGLGVEGHSSADHQVVKGQLQWRKKPIEIRGLNKNCNHHLKNLFKAAAVNASTKPGPFQEFYAALVGKGMRPEMARLTLARKIATIVLIMWKKGECFDANHLKPQTA

SEQ ID NO: 245947 - protein, 387 aa, unidentified
MIYYVGIDISKYKHDFCIISNTGEIIVESSSFDNNIKGFQDFVNQLKSYDKSMVRIAFEATGHYSLNLELFLNNQDYSFMKINPLVVHQYLKARSLRRTKTDKADSLTIANYLMSVPYTPNSSVLYHTYTLKSLCRAREQLIKERSKFIVLLTNELDKSFPELKPFFSNRISTTLLYILDKYKNSSHIALMKDYETLRKISQGKFTYAKFAKLKSLAKETIGYHDQNSDLLISTYVSIINDFNNKIDPIDKQISTIIKELNPRILSIPGLGEISAATILSEYGDISCFSSPGKMLAFAGLEPSIIESGTLQTNGKMVKHGSGHLRYAIMNIATSILRYSPCFYDYYLKKRSEGKCHRVALSHVCKKLVRVIYSLEKYDNDFDPSLLK

SEQ ID NO: 245948 - protein, 355 aa, unidentified
MNSSKYIGMDVHTATISVAVRDAAGKLIMESVIETKASTILQFIRGLRGDLHVTFEEGTWAAWLYDLLKPYVTNVVVCNPRRNALLKEGSRCDRIDARKLAELLRTNLLRPVYHGEKGLRTLKELARAYLTISKDLTRVMNRVKAIYRGWGIPCGGKSVYHPRHREEWLSKITQASVRRRAELFYKQLDALVLLRKQARQELLAEGKKHQAWKWLRSIPSLGPIRVAVLMAIVQTPHRFRSKRPLWKYSGFGVVTHSSADHRYVQGQLERSKKPASVRGLDPDHNHDLKDLFKGAAIHASTRKGPFLEFYEALVAKGMRPEMARLTLARKIAVITLTVWKKGVAFDAKYLKPQTA

SEQ ID NO: 245949 - protein, 382 aa, unidentified
MTTDITWVGLDAHKKAINVAVLVAHQAQPQEWIVENKPATIRRLVKKLVREADGGAVRCCYEAGPCGYALQRQIEAEGPVSCGVIAPALIPRKPGERIKTDRRDARKLAELLRAGLLTEVHAPTPEQEAVRDLCRAREDAKQDLLRCRHRLGKLLLRRGMVYGGGKKAWTQTHRQWLRTLKFEHASEQAAFDDYLLAIEQVEERIQTLAQHMQATAERDPFATPVGWLRCFRGIDTVTALSLVAELHGIERFASPRELMAYVGLVPSEHSSAERIRRGGITKAGNAHARRLLIEASWHYRHPPRIGAVLKARRAGQPAAVIAIADKAQHRLYRRQRHLAARGKRPTQTVVAGARELSGFLWAALLHDRQPPPHDGPSERVTR

SEQ ID NO: 245950 - protein, 403 aa, unidentified
MKNKRYTRFCGIDIAKNKHVACILNRDGEFIVRSQSFYNSAEGYQRILDRLKQACPWGRPLIGMEATGYYWYALRDFLVARGYEVAVMNPIQTHQQAKKGIRKSKTDKIDARHIATLIKNGEHRPALIPGNFAMTCRQLTRLRYRTVGNISRLKLLVWSRLGPVWPEYETLFGNSFCKTSRRLLLTAPTPDDVLAMDRDELAELVYKTSRGRYRPALADRIRESAAHTIGTRRGIEGARIGIRSLITQIEALMPLRRQLEADIEPLADRLPAYYFTLPGISRFTAVSLFGETDPITAFASGSKLVAFAGLDTNVFQTGQCTGEKLRRKITKRGSPFLRHTLWTMAHHACYQEGDLKDYWLRRKRQGLHHLAAVTATALKLCHVVWRILTDERDYLPQQAAGKD

SEQ ID NO: 245951 - protein, 351 aa, unidentified
MDRYIGLDAHSQTCTFAVMGSAGRQLREQTLETNAKVLIDFVRTIPGQRRLCMEEGTLSEWLCEVLEPHVAELVVVQPDKHAGAKNDSIDAWNLASKLRKGDLENVVFKARGRFTQLREAVRAHRVTTADVVRTKLRLNALYRSRGIHGMGDEIYDPDTRDQWLPKLPPARARMAQLLSTELDGLCEVREQAEIWLLEQAREHAEVRRLTTLPGIGPVRAAYIVAIVVTPFRFSTKRDFFGYCGLGIVTRSSSDYERDERSQRWVRRQVAHTRGLNRNRNPLLKAIFKGAALSVIAQTDHPLRRDYDRLLQNSKPPLARLTIARRIASATLAIWKKKEEYDPAKHCTTDAK

SEQ ID NO: 245952 - protein, 347 aa, unidentified
MTEAYDGRQVVGIDLHRRRSVIVRMTEDGRKLETVRITNSPAALRAVIAKAGKNPKVVIEATYGWYWAVDVLESAGAEVHLAHPLGVKAFSYRRVKNDERDAADLADLLRMGRLPEAWIAPPEIRELRELTRYRHKLVKARTSVKDQVHGVLAKLGIPVTHSDIFGVHGQAWLDELKLPQPYAGKVASLRQLAGGLTAEIGLLEQVLGDLLAGHEGYAAIQQLPGIGPVLAAVIVAEIGDIRRFPGPGQLGSWAGLTPRHYESDTKVIRGHVTKQGSRMLRWAVTEAIQRQPAGTRPRQVKDGIIARRGKEARNIAKVAAARELLTLVFYGMRDGDVRRALQRGQAA

SEQ ID NO: 245953 - protein, 352 aa, unidentified
MSTAKLTEVILGVDTHLDVHVGALINVNGQLLGTLAVETQTRGYLKLLTWTRSFGRLQRAGVEGTGTYGAGLALVLRENGIAVFEVNRPDRSKRRLEGKSDPTDAESAARSVLAGSATAIAKTHSGAAEAMREISVVRRSAVKAKTQAINQIRSLLVSAPQEIRERLWDVKPAICVDNCAHIGSLGPAPFLSALTTSLRLLAKRWQALAAELQELDDTLDSLTQQYAHRLRSQFGVGPQTAATLISVAGDNPERLKSESALAALCGVNPLPASSGKTVRHRLNRGGDRSANNALWTIAMVRMRSDPRTRAYVTRRTAEGMSCKEIQRCLKRYIIRGLYPLILADLSESRSTG

SEQ ID NO: 245954 - protein, 318 aa, unidentified
MKTHPATSFVGVDVASAHLDVAVHGQPGVRRFANTASGIAQLLGTVPPSSVLGLESTGRYHAPLAQAAHAAGLRVHVLNPLNTRNYAKSVGQRGKTDRMDALVLTRYVFKEHSTLRPWQPLTANQAALRELLAHRATLVRQRSALAQASSHNKALARVDEPVLQALQQAIQRIDEEIEGEIRADPASRQAFDRITSVPGLGPVCGSLLVMIFGRMPAASADAVVAFTGLDPRPNDSGKKTGQRRLSKKGWPESRRLLYAAAMSAARTKTWKSFYQAQRSKGLSTTAALVVLARKLMRVAFSLFKQHAMFDARLAATVA

SEQ ID NO: 245955 - protein, 449 aa, unidentified
MSSHKGNAAGLPVIHDRAAGIDVGSRFHVVALGADLCKEPVHTFQAFTSDLQRMADWLVAMGIITVAMESTGVYWVPVYEVLEGRGIEVILANAREARAVPGRKSDVNDAQWLQRLHACGLLRASFRPGRDISALRVYLRLRERHVDFAAAHIQHMQKALTFMNLQLHHVVADVTGVTGMKIIRAIVNGQRDPQLLAEMRDVRCKASLETVRAALVGNYQPEHVFALTQALALYDFYQARVEECDAQIEAVLVTLTAEKVVPSAPLPKARHRTVQPNAVSFDVRPVLYQLAGVDVTQIHGIGPYLALRMIAECGTDLSRWRSAKHFTSWLTLSPGCKISGGKVLSAQTRKTTNRVAAHLRLAAVTVGRTNTALGAFYRRLAARIGKAKAVTATARKIAVLFYNAMRFGIDYQDPGATHYEQKYRERVIKQLHRRAAEFGFTLQTAVNVS

SEQ ID NO: 245956 - protein, 319 aa, unidentified
MLLGIDIAKDKFDVALLLASSKYKTKVFPNTPKGFAALASWLGEHQAASVKACMEATGVYGDALALFLVDAGHPVSIVNPAQIKAFAQAELLRNKTDAVDARLIARFAALHQPPLWVPPPRAIRDLQALVRRLDALNDLHNQEANRLDVSELTVRGSIETVLTTLETQIREIKQKINDHIDQNPGLREKRELLESVPGIGAASSAQLLVYLGQDGRFSKAKEFGAFIGLTPRRRESGSSVMGKSRLSKMGESRLRKALYMPAIVAMRHNPVMAAFAKRLLEQGKPKMVIICAIMRKLVHMAFGILKSGKPFDPKLGLAR

SEQ ID NO: 245957 - protein, 399 aa, unidentified
MNAVGIDVSKGHSTVSVLRMFGEVVHSPFEVNHTVSELKALAKTLKSLDGETKVVMECTGNYHFPVARTLQAAGLFVSTRNPILLNKYGNDTIRKDKTDPADSIKCANYCLEKWLKLTEYNPEEAARQTLKVLARQHTKYSKIKTMLKNNFISLLDMSFPGLNKLFTSPARDSDGHEKWLDFTARFWHCECVGDLSLNAFLESYRKWCKKSGYRCVNADEIHKFARQCAAVMPKSDSTKALITYAVAQVNAVVESLAAVACKMKLLAQMLPEYPIVLAFHGVGEILGPQLIAEIGDVRRFSKKSSLVCFAGLEPTNNQSGKFQGDEDISKQGSPHLRKALFQVMDCLLKNSPADDPVYRFLDCKRAEKKHYYCYMNAGAAKFLRIYYARVSEYLNSLEI

SEQ ID NO: 245958 - protein, 402 aa, unidentified
MNCVGIDVSKGKSMIAVMRPFGEVVVSPFEVRHTANELSELAGLLKSLDGETRVVMESTGNYHAPVAWLLHDAGLYVSVVNAMLVHDYGNNSLRRAKTDKKDAVKLANYGLDHWLTLPRYIPEEDTRLMLKICYRQYQQYSKVQTMLKNNLISLLDTTFPDANRLFTSPPRADGSEKWVDFVATFWHCECVCGLSKKAFTAKYQKWCRKHGYNFSQDKALDIYASACGRFGVMPKTNTAKLLVEQAISQLQTTSAALAALKQEMQSLAASLPEYPVVMGMFGVGPTLGPQLLAEIGDVRRFHSKKALVAFAGIDAPPYQSGQIDVRSRSISKRGSASLRRTLFLVMSVILQCAPIDEPVYQFMDKKRSEGKPYRVYMMASANKFLRIYYASVKAYLESLEHD

SEQ ID NO: 245959 - protein, 362 aa, unidentified
MAKGMALVGLDVHARQTHAAVLDPVTGQLGVSRLRMPAVEVVGFLGGLGAGVVAVYEAGPTGFGLARAGRERGIDVRVVAPGSIPKASGDRVKTDRRDAIRLVRLLAAGELSFVFVPSVADERFRDLVRCIEDVRGDLMRARHRLGKLLLRHELRYPGPGGAWTRAHGRWLRALRLPDACAQATLADYLAAVELLMSRRASLLTTLEQQIPHSSHAPVIARLRCFRGIDTLSAAGLCAELGDWRRFAKPARVSGFLGIVPSEHTSDRRRRQGAITKAGPPHARRLLVEAAHHYRHPPRIGAALARRQAGQDPRVIAIAWRAQQRLHARWQHLHLQRRKPASVAAIAAARELAGFLWEAATLD

SEQ ID NO: 245960 - protein, 473 aa, unidentified
MSKGNGMTRGDRRRNARREQLRGMLPRDGAVIGIDLADEKQALAVIDHDVRVLARKTVRVKAFRLGEALDWAAGQARGKGFRSVTVACEPTGPRWLQVQRLCAERGLRLVCVQPLVSHIARQQQDYTAHKTDEADCVMIARLAVELHCYIPEELDEVWADLRHLGRRRAALITSETASVQRIRDFLSVAWPTVTEACAKPFESMTWLAALQAVTSRCGGQPGKLAVIGLEAFTALVRDALPGWGGQRIHGPICKTVFAALTSTEGVVRGHRRGLLRRVAAELGDLQRARAQRQETEAAMTAALGDLGLARLGDIPGLTATGAAAILAETGDPKRYDTSSSVVKHAGLSPSDNASGAFDGEAHISRRGRPGLRLTVWRAVWPVLIHNPVMAAKYAAMTQAADQAAADARAGNSGHATSAAEAARRRRAKARVACAAALLRWIYSMVIHGTCWDPGVAAGRKDTLAAPSCQSEAA

SEQ ID NO: 245961 - protein, 418 aa, unidentified
MSDQKRWYAGVDWGSQNHCVFLTDEAGRKIGERTFPHGGQGLADMAAFLMEASGAPEPGCVHVAIETPHGPVVEALMERGFSVHAINPKQMDRFRDRFTVAGAKDDSRDAEVMASSVRTDPRCFRRLEATDPTVVELREFSRMADELGDERIRLANRLREQLWRYFPALLELEDDMGAEWLLDLWKAAPTPQKAARLREATIAAILKRRRIRRLDAAEVRAALRKPPLSLAAGTVEAACAHIATLIPRIRLVNRQIKDAERRIDALIARLAPPQESAEAEPGRTKQPDGAILASVPGVGRTVVAKLLTEAPDPLRRRDYTALRSLTGVAPVTRQSGKSRTVVRRQACNPRLADAVYHWARVAVQHDPRSRAKYAELRRRGHSHGRALRSVADRLLNVACAMLKAGTLFDPEKARQNAA

SEQ ID NO: 245962 - protein, 348 aa, unidentified
MSKGNQYVGLDVSLKQTSICVIDDADKIVWRGQVDTTPEAIVSAVTQHAPHAVRIGLESGQLSNWLFHGLKQAGLPVICVDARHAKAALSLKVNKTDTNDALGLAQIMRVGWYREVTVKGLDCQAVRALLVARAQIVSQITTLKNCVRGILKTFGRVLPKGLRSQFPARVRAAIEGHPVLGAIIEPTLQVLEAARAQLLVYDRAVIQRARSDDTARQLMSAPGVGTVVALAYMTGVEDPARFKRSSSVAAYFGMTPRRYQSGEVDHAGRISKCGDGMVRGLLFEAAKVLLGRSSRPNALKTWGEALGKRIGLKKATMAVARKLAVILHRMWTTGATFQWNAGTTSSVA

SEQ ID NO: 245963 - protein, 408 aa, unidentified
METEVDIACGMDVHKNNVVVTVVQRKVKNSLLEGKYDTTLTSLLGLVARLKELGVERVGMESTGPYWIPIHRLFHLAFEVHVGNARRMKEHSGKKTDKRDSKWIARLALNGEIEPSHVPEGEFLDLREVERVMKNLIETQSGLKNKLRHEMQLCKLDLLESNGTLSKSLLDLLENLSRGKSIENAIGAIKNKRMRARFTKELSDIAGKLSPSLLAAIGALVALIKSFTEQIERLEEILSSQLEPYQAEVDRIASVPGIGFSTASTIQCEVGNFSAFHSADAFCCWCGLVPSVSQTNGKTFYGRLMHGNRYIKSKIIQCAWVAVTRCGENQFRSYYNDMVKRGKPKGKAIVAVAHKMMKVIYHLMIEKEMYSGSRHIQTKIKRKKRCPSVKEPDPLALLVDGFTLISQT

SEQ ID NO: 245964 - protein, 339 aa, unidentified
MDKLYGGIDLHANNSVVVVLDEEDQVLYRKRLPNELEKILHGLTPFRAQLQGLVVESTYNWYWLVDGLMETGYVVHLANPAAMQQYAGLKYTNDDTDARWLAHLLRLGLLPTGYIYPKEDRAIRDLLRKRSQLVRQKTANLLSVQNLLTRNTGQTMKGNQIKQLTPATVSELVPLPEQALALQVTVAVMQHLTEQIACVERTVHTRVKLRPTFQALLTVPGIGQTLALTIMLETGEISRFPTVGQFASYCRCVGSTKLSNGKHKGQGNTKNGNKYLAWAFVEAAHFAIRYEPQIGQFYQRKRAKTKVVIALKAVAHKLARACYYIMRDTVPFDVTRAFA

SEQ ID NO: 245965 - protein, 425 aa, unidentified
MNYKQNEKINQVKESTLVVGIDIGSTKQYARAFDWRGIELGKVFTFSNSREGFEAFKAWMQHLQDKYRKSDVIVGIEPTGHYWFDLGAYLEDEGILLVMVNPYAVKQTKELDDNSQSKNDRKDPKVIAKLVTEGRYSAPYTPDGVYADLRIMVTNRKRLIREMTQIKNRFSRWFAIYFPEYTDVFGDYEAQSSMLLLKKVCTPEAIVELGAEKINQIWRDAKLRAVGMKRATTLCETAKRSIGLKKGSSAARYEMKLLLEDYEYKKAQLDAVMEEIEKLCRKIPESEQMLAIKGIGVITVAGFLAEVGDVRRFESPRQIQKLAGLSLRENSSGKHKGQTTISKRGRSNLRAVLFNAAIPLIATNPEFKSLHEYYTTRANNPLKKKQSVIAISCKLIRVFYAILANGVTYNPQKMLSDIHRQPQAA

SEQ ID NO: 245966 - protein, 421 aa, unidentified
MEILYQRCAGIDVHKDQITVAVRVPGSGPGGRDTQVRKFRAFYGVLREMTRWLASLGVTHVAMEATGIYTMPVYHALMEPGCFEQVLVCNAAHVKNVPGRKTDAVDAAWLAQLLECGLLAGSFIPPENVKALRDVVRYRKKLVEQRSSEVQRLGGVLQDAGIKLDSVASAIDTVSGLNMIRALIDGERRGAVLADLARGRMRAKIADLSLALEGRFDEHHALMCTLHLEHIASLNEMIARLDAQVEKMMAPFAPQRDLLVTIPGIGPRMASVVISELGPQVAAYFTTDARLASWTGLCPGNHESAGKRKHGRPRKGNRHLKAALVEAAWSAVQSDGRLKARYHRLVLRFGGYKNKTAKKKAIVAIAHTLLVIIWHVLTEGIPYTELGADFYARRIDPQQETRRLIARLEALGHKITIEQAA

SEQ ID NO: 245967 - protein, 323 aa, unidentified
MFYLGVDVAKKKLDCMLLDTSSGKLKSKSVPNTPDGFTALLEWLEKNKFVNPHVVMEPTGMYHEGAALALADAGLVVSLVNPAQLRAFAQGLGVKTKTDKADSAVLARFGATQQPAPWQPPSPSARRLKALLTRRDAVADDLQRERNRQEANDFSSVPETVSDSIAESIAFIEAELKRLEKMITQHINDDPDLRNKKDLLETIPGVGPRVSGHMTALFAGRTFGSAEQLAAYLGLVPVMWESGTSVRGRPHMSKAGPAYLRKVLYMPAIGARRWNPHIKALNDRLLAKGKSKMAAIGAAMRKLAHLCFGVINSGKPYDPKFAM

SEQ ID NO: 245968 - protein, 362 aa, unidentified
MLYVGIDQHRKQLTVSVRDVSGNVVLRRQVSTEWKKVRAFFDELRERAVDHDGYMAVVEVCGFNDWLLKLLPQHGCRETIIVQPGESSTHKTDRRDASALSEILWINRDRISRGLPVRGLRRIQLPGPEMQAVRRLTSLRHDVGRELTRTINRIKAVLRRHNLQQECPTKGIQTQRARKWLNQLSVSAVERSELNHQLARQDLLRKQLKQLQSDILRRYEANPIAQLISTMPGAAAYSALGLASRIGDIRRFQHPRSLANYWGLAPNSHNSGDAKQRLGSITKQGSALARFLLGQLVLHVLRKDAWMRIWFRGIKRRRGSKIARVAVMRRLATILWHMVSRNEAYVCGGPPRTRLNRPATDR

SEQ ID NO: 245969 - protein, 391 aa, unidentified
MYYIGIDIAKHNHEVSIIDADGKILSKSISIANSQKGLDTFNNYLSSFNVTSENSIIGMESTGHYWLNLYSSLVNLNFNVFVINPIQTDAFRKMYIRKTKNDSKDSYIIAQIMRFGEFSSSSISDENIFAIRQLSRYRSSLVDECSNWKRKVITILDQVFPEYSDLFSDTFGVTSKELLSKYPLPENMLEVSTKELTSLLNKASKGRFGIRKAQEIKEYATKSFGISFAKETFSFQIKQIINQISFIESQLKELEKEITNILKTLNSEITTITGIGDILGASILGEIGDISRFEKASQLVAFAGLDVAINQSGEFTGTEMKITKRGSPYLRRSIWIAATIACFKDPALSVYYKKLIDRGKKHLTAVGAVARKMCNIIFSVLKNKKPYTPNI

SEQ ID NO: 245970 - protein, 458 aa, unidentified
MSKNRKKKRRADADQASKKMERFELLNPKSAGIDIGSMLIVVSYTDREGIINLREFDSFTSSLYELAELLQKEEVEKVVMEATGPYWESLYNILEKHGMEMILINPSHYKNVSAQKTDINDAQWLHQLLAHGLIRNSHIAPELYRELRQYLHEREIYQNHKSDSLNRMQKTLTLMNVKFQHLISDVEGVSGMKLLRTISSGVSDPKILLARIDVKKLKASPEDLLSSLQGDYKQHYINILSNTLKSYDFYKEQMLVYEVHIEQTLRELLAYTGEQKAAIQKKTQKARKNQYSFNLKDYLLNIFGIDLTEVEGLDEIGLLTILAVTGTNMKKWPTAEHFVSWLNLSPRPKISGGKVIGYEKRNNNNPATQAFRLAAHCLWQSKGPMGQQYKRLAATKGSKKAIKAVARKLAVIFYHMVLNKQAFDATRLQPDIAQQKARKIARLQKEAAKLGLTIQKAA

SEQ ID NO: 245971 - protein, 363 aa, unidentified
MSVQYVGMDVDKQKIVLARLGSGRETKVIEHVIANTPSAVKKYFASLLGGGEVHATYEAGCFGFGLYRQLSAMGVSVVLAAPGLIPRKPADRVKTDRRDAHSLSLALRAGQLVGIYVPTQQDESVRDYLRMYEAFRGDLRICKQRILQFLLRRSLCYDGGGPWTVKHRHWLSALEFEQPRDRQTLDMYLSQMQELEAKCAEAAAEVESIAAQDCYRQQTKKLTAFKGIKTLIALSFITDIGDFRRFANARQFMAYLGLVPSEHSSGNKRRQGGITKAGNTHLRRLLVEAAWHYRSYHPSSRDLTERRRGVAAAVLSYANRAGRRLNRNYMHILLRGKRSQVAVTAVSRELAGFLWGAMTDQVA

SEQ ID NO: 245972 - protein, 319 aa, unidentified
MTANAIEFEQFVKRGCGLDVHRDTVVATVMGQGIKTETKTFNTTTSSLKELGEWLEHLKITDGAMESTGVYWKPVLHVLRDYPINLIVVNARHIKNVPGRKTDKADSEWICKLLISGLLKGSFIPPENIQELRDLHRYKKKLVGTVASEKNRIIRVLEDANVKLSSVVSDTSGVTATYLINGLIEGRKDLANLVSECYHKKLQASPQQIKEAINGRLTAHHAFILRSMQKHIASVEAQIAEIDVEIEKYIKDFEKEIELLQTIPGVGKEGAIGIVSEIGVDMDVFPNEHHLASHSGMCPGNNESAGKKKVHEHDKGTNT

SEQ ID NO: 245973 - protein, 363 aa, unidentified
MTRKRLSGNHLLDFIGVDEKTPVWIGLDVHKKSYHVALRRADGVCQSWVSAADPIVLAQQLSAISQRISLIVYEAGPTGYCLERVLKANGYKVAVIAPSRIPRPVTNQVKTDKLDCLKLAEYAAKGMIEAITTPTAQESAERSVLRRRNQLVDSTRKTKQRIKSFLLFHGIEEESGLRYWNQSAKTKLSKLPLQCDLKFVLKSLLRQLSYEEEELAKITNRLTRIAKRSQHWEVVKNLKTVPGVGDIVACAFRTELFRPERFRRAEEVCSFLGLAPAIRQSGEKRQGGWLMRSGQTRLKSLLIEAAWMWRAKDPWARKKYQTHLSRCGITQKAITALARRLAVILWRLSVENRAYVMLQVDSV

SEQ ID NO: 245974 - protein, 344 aa, unidentified
MDFEFIVGVDMSKEWFDFCLLDRRFNSLSQGRVENTKQAILQFIIQILAQLGQSEMDKVVLCMEHTGVYVKHLAKMWMQQGGRLSLVHARKVSQQMAGQAGWVEKTDQLDAQRLAHYGIRFSDQLELWQAKGITLERLQAYQRQRERLIKVIKLLEAPLKESRVFDEDEVYQDLLKNQAQSIKALKDDLKSLESNLNRLIEQDEQLAPLFKLVCSVEGIGPVTARELLIATQCFTRFESNQAKAFARYAGVIPLKRQSGKRLRKKERIPSQANKTIKSLLTMGATALIGTQSELGHYYRRKLQEGKDHLCVINAIRNKIILRVFAVVRNQVMYQKKLNLCLHKP

SEQ ID NO: 245975 - protein, 333 aa, unidentified
MNMHPQVRVSNGEQRPNAGVDVSKQHLDACWGEHEERVGNDAGGWSELIAKLQAAQVDLVVVEASGGYERGLVCALQEAGVCVARVNPRQARDFAKSMGALAKTDRVDARCLRDLAEVLARHPQRHKYITEPAEPRRQELHELMVRRRQLVDMRTAETHRLAQVSHKLAKRSLVKVARLLDQQIEEIDREVQRHIDDHFDGQRELLDSVKGVGPVTILTLTAALPELGRLDRRAIAKLVGTAPLSRDSGTKRGSRHIWGGRATVRAVMYMATLAALRCNPVIREHYRRLREAGKPKKVALVACMRKLLVILNAMLRDGTTWNPAKHPAVIAHA

SEQ ID NO: 245976 - protein, 370 aa, unidentified
MTTTTATVTVIGGVDTHKHTHYAAAIDDHGRLLGHHEFPANDSGYQALLGWIRQHGTVQAIGVESTGSFGATLTRALTTAGERVVEVNRPNRAARRMDGKSDRLDAEQIARAVLGETSTATPKAKSGAVEVIRTLRVTRTSAVKARTQAFNTLFGVMIGSPSPLRDELVILSKRTLVNRCLGLRPETDDLQSLAHDPNRMLMAGVKTALRDLARRWKGLDAEIKTLNKQIEALVQAAAPELLELHGVGVEIAGQFLVTAGDNTDRIRNEAAFAKLCGVAPQPASSGRTRGRHRLSRGGDRAANSALYIVTLVRMRHHQPTREYVERRTAEGLSKREIIRCLKRYIAREVFNNLPTPAIADPLARTVETAA

SEQ ID NO: 245977 - protein, 363 aa, unidentified
MYKTSHTRGHRNPPSGSVVVGIDTHLDIHRAALVDAATGAPVADQQFPATPAGYLELLDWAVGHGRVSRAGVEQTGTYGAGLTAVLHAAGIEVIEINHTERGDRARHGKTDELDAYRAATAAAAGTQKGLAKHYHPAIAALRPLMVLRAHHRSSRQRAWGRVGGMLVTCPDDLADQVRGLNSAQKRARIAAWRPDLTRLHDPVNSYKLALRDLARACLDHDRAIVEIDAQLLRILTPIAPTLLAQHHVGPVTTAQLLITAGHPGRITSGDAFAKLVGVAPLPVQSGKSSRWRLSRSGDRQANSVIHRVVIGRLGTDPRSKTYIQRRVSEGKTRSEAIRALKRHVTRDLWTALQTDLNNLPHTT

SEQ ID NO: 245978 - protein, 396 aa, unidentified
MPEIWAGLDIGKTHHHAVVIDTEGKRLLSRRVRNDETELLTLIGDVLEISDDVLWALDLNRGVAALLIGLLLNHDQPVAYLSGFAVHRASGTYRGEGKTDAKDAFVIADQARVRRDVRLLRPGDEIAVDLRILTSRRLDVVFDRTRQINRLRAQLLEIFPALERSLDLTNHGPVMLLTGYQTPAAIRRAGAKRIETWLKNRKVRGAAALAKTAVEAAEAQHTALPGERLAAAMVLRLAKGVIALDEEIAELDAFIEARFREHPHAEVIISMPGMGPRLAAEFIAATGGDMATFGTADRLAGFAGLAPQPRDSGTVSGNLRRPRRYHRGLLRSMYLAAQVSLRCCPASRAFYDRKRSEGKGHKQPVLALARRRLNVLWAMLRDGVCYQATPPATAAA

SEQ ID NO: 245979 - protein, 360 aa, unidentified
MNATTVAVDLAKSVFQLAVADEHWRVVETQRLTRTQFERWFANRQVDLVIMEACGSAHHWARWLNGLGIEVRLLPAQYIRAYVKRNKTDAADAAALLEAARASDIRPVRVKSVEQQALQGLHRIRSLWMGTRTSRINALRGFCREFGIAIPVGARTGIEAISRVLADPGTAVPDLIRGTAKLLVEEIRLLEARIAQLERELTQIAKLSPACTTLLSIPGIGLLTATALVAATSGDVSHFKDARHFSSWFGLTPKEYSSGNSRYLGRISKRGDRYLRMLLTHGARSVLRAAAVASNAGREVCGVRRWALEVQSRTNHNKAACALANKLARICYATLRDKEPFGESQRLNKKINRESFVMPA

SEQ ID NO: 245980 - protein, 344 aa, unidentified
MEGEGTHYRVYVGVDIAAETFTAAWLVPGGQPTTPFTSEQTSAGFAALRHRLQGTGSPPAATLVVLEATGNYWVALAVALHEAGYRVAVVNPRQAHHFAKAQLRRAKTDALDARDLAQLAAALRPAPWTPPPAVYHEVRQRLVARDGLLAMRTQARNQRHALVQWPVVVAAVRQHLDELIADLDRRIAALEAEIGAVLKESAWAESLACLRSAPGVGLVTASWLLVGTLNFALCDGPESLTAYAGLAPVPRESGRSVRSRPRIGHDGNGRLRTAFYMATLSAARYNPAIKAFYQRLRAAGKPPKVARCAAARKLLHQAWALGSKLQRFDPDHQQQHEVLPELAA

SEQ ID NO: 245981 - protein, 373 aa, unidentified
MPRYSTAFGMDVHLRSTTVCALDAETGEAVTRRFRGNPWGEVAEWMSGLPGPSLAAYESGYLGFAPQRELSGLGVDCVVAAVSKVPRSAADLSSKNDRNDAARMAKAILSHDISPVWVPSPEIEGLRDLAGAHDAAAARLAAAKQRLLAFLARRGYAYGGTTPAGNPRRYWTYDLLRWLDKVRPADDGGIRALAALRNEVEAAAETRDDPLAEYRAAVAAGPLSAEVEALQSIKGCGFALAAAFASEVGDFSRFRSGRQVTSYFGLAPKQRSSADSVRLGGISGAGNALVRRLAVEGSWCYAQAGHQPKLMPKGSGVPLEIRMHGRKGSERLLRRREEMLARGMPQAKANAATAAELVRWLWALGAMCREATE

SEQ ID NO: 245982 - protein, 387 aa, unidentified
MMLIGIDPHKSTHTAAAVEPETNREVGSIRVDATLREYRRMLAWASQWPQRRWAIENAEGLGRHLASWLLARGEQVVDVSSTATARVRQLSRGGGRKNDRIDAAAAACVAALQGDARPLMTEGSADALALLDERRTNLAQARVRAVNQLHALFRALLAGGASRDLSAAKAAALLRTIRPAGQIERIRKQLAADLTTEIRSLDAKLKANADAMSELVQQSGSTLTETIGIGAITAACLIGRTGKPSRFPSSAAYANYVGTAPVEIASADRTRHRLSRSGDRQLNSALHTIAITQIRMLDSLGHTYYKRKIAEGKTPREAQRCLKRRLADHVWRTMIADEQRARKGGPGRTPGATLTSSAAGSTPTASSSEKSLPRPADTDPTTPNPAG

SEQ ID NO: 245983 - protein, 417 aa, unidentified
MFRRCVSGIDVHKKMLAVVVRRQEGGQVTYVKRKFGTTKSEIGHLAAWLKHEGVEEVVMESTAQYWRPVWYGLEPHFRLHLSHPLKTKAPLGRKRDYRDAQRLADRWCSGDLEESLIPLSEQRGWRWMTRARVDLKRKVTRVRNQVEGVLEEGGIKLTSVASDVFGVSGWAMLERIADGETDVEVLVGEARAALRKKKAELQEALAGYLGPAYRMLLKQYLDQVRLLRKQIEELNKEIALAMKDYTEVLCRLCKVPGIQLEAAQELLAEIGPKAAAFPSAPQFASWAGVCPGCQESAEVCYSRRSAKGNRYLRRVLTQVAWAAVRSKDNFFGSLFARLKPRIEAKGAAWAVAHRIAKVVWLLMHEGVEYVEKGPGQPSVKSLTNKLRRMTKQFAAHGLDIANVLAQVSATTLSEPAS

SEQ ID NO: 245984 - protein, 359 aa, unidentified
MTSLALERTDVIVGVDTHKDEHVAFAIDGLGGRLAEPLQIRATNDGYAVLLAWATSLGTIRGFGVEGCGSYGIGLARFLRRNGHHPIEVSRPARKGERRLSGKSDAIDAEHAARAVLAGEATVVPKLADGQVEALRLLKVARDTAVKAQSTAIIALKATLVTAHHEVREQLEPLTDFKLITACSELDNDGAVGDPTVAMRHVLRSLARRWLELHAEIKTHTRQLKQITAQVAPQLIDAYGIGSDIAAEMLITAGDNTDRVHSEAAFAKLCGACPLPAGSGKTNGRHRLNRGGNRQANAALYRAVIVRMRWHAPTIAYVERRTKEGLSKREIIRCLKRYLAREIYYLLPPPAAVELRQVA

SEQ ID NO: 245985 - protein, 466 aa, unidentified
MKRNGRTGTATRRRGRARSIQRVNPNAAGIDCGSESHHVAVPPDRDPEPVRRFKTFTTGLRELADWLAACQIETIAMEATGVYWIPIYEILEERGFEVILVNARHVKNVPGRKTDVVDCQWIQELHSFGLLRGSFRPSAEIATLRAYLRHREKMLQNAGDHVRRMQKALVHMNLQLHNVLSDITGETGMRILRDIVDGITDAKVLASHRHSRCRASEQEIEASLTGHYRREYVFVLRQHLEIYDAYQRQIAACDTEIESLLQQMASRQDDPKAPLPRPRSRSSRSDNAPRFEIRALLHRLTGADLTQIDSLGPYSALRLVSEIGTDMSRWPTEKHFTSWLTLAPKNKISGGKILSSKTQPSTNRAAVTLRMCAMSVGRTSTALGAYYRRLAYRVGKAKAITATARKIAILVYRVLRGDLDYSDPGAQAYEAQHRSRVLRNLRNRAQNLGFGLVNLETGELVPGTVS

SEQ ID NO: 245986 - protein, 361 aa, unidentified
MQQTMTVVGLDVHARSTQAAAIDLLSGELRRERFGPGTEGVVEWLRGLVGPVRAAYEAGPTGFGLARLAAAAGVEVVVVAPSKTPRARGDRVKSDRKDAELLARLLLAGGLHPVTVPPDWLEAIRHLARTREQVRRDLGRARQRVSKLLLVEGRVDPGVTTWNQEHRRWLSRQQFAFEETGLAVIDLLAAVDGLAARRQVLDEHLSRLAQDDRLWPTVSRLRAFRGVDTLTALCLHLELGGDWKRFRSPRQLGSWLGLTPSLEQSGESLTQGAITKSGSGIARRLLVEAAWHYLREPRIGATLQNRQAGLPDHILQIAWRAQRRLHRTHQRMRDRSKPANVATVAVARELAGFLWAAATAP

SEQ ID NO: 245987 - protein, 402 aa, unidentified
MIFINCLGIDIGKSESVVAHYKDEVLVKEMVIQNNQNGYRYLKNYIKHLDSLFILFESTGIYSRGMKRFCEIHKIDYLEMNPLEAKFKTSSLRSWKTDKSDAHKLALLAFRMKDSKVQRQSEEIYFELRERARFHLEMEINQNRLKVELVETLHQTFPGLEKLFTNRYSKIALSIAKAFPHSDFVSTLTHDELVEKVLHSTDKGISVNKAHKYVQKLIEIQINSFPNVDKSSFLLQKVQYLCDKLLIGIEEMKEFDQEMIDLAKNTTEFENIISIPGIGELTAALLIGELGNIREFKTNKQLNAFVGIDIKRYQSGTSKSRDTINKRGNKKARRLLYLIIMNIIRGRNHYQSHIVDYYYKLREQPHGKTHKTAVIASINRLLKTIHYLIVNNKLYDYQKAPH

SEQ ID NO: 245988 - protein, 462 aa, unidentified
MAHRKKKIPAQLVEDEEYQLRHERVAGIDIAKDKGDVSVRLPPAREGGRRRSRVEESVPARSRDILELGARLLADGVELVVMESTSDYWRIWYYLLESLGLAVALVNSSHARQLAGRPKTDRLDCQWLARLAEMGLLRPSFVPPPEIRALRDLTRARQQLVRDRARAWQRLEKLLEGALIKLSSELSSLARVKTARLILDALADGERDPRALAARALGKLAGRRGDLEEALHGMAAGPHHSLLIRAHLDQIDSLGRSIGAIEDEIAAALQAVPAAWGVSAAGEPSPDPGPGAAVLPADARLAEIPGVSLDLARAIIAETGLDMSVFPTADHLVSWAGLAPVARQSGPRSRKPGKGQGNAFLRNHCSQAANGAGKTDTFLGARFRRLNGRIGGARAHCAVARSILIIVWHLLNDPAARYHDLGADWHDRKASRDKKIRGHLRQLQALGIDTSGLTATLSSAAS

SEQ ID NO: 245989 - protein, 410 aa, unidentified
MRLCVGDDWAQDHHDIEVMDEAGQVLARRRLPEGVAGIGQLHELVGRFVPAGGDAEVQVGIETDRGPWVTALLAAGYAVFPVNPLQASRYRGRHGVSGAKSDGGDAHMLADVVRTDAHQLRPAAGDSPAAEAVKVLARTHKTLIWERTAVVLRLRAQLLEYFPAAVAAFEDLDAPDALELLSKAPDPARAAKLTRAQVSAVLKRAGRYKIAERTDAILAALRSPQLGQPPVLTAAYAATVRSLAAVIATLNEQVTSLQGQVEAHFGQHPDAEIYLSQPGLGAITGARVLGEFGDDPHRYTSAKARRNYAGTSPITCASGKRKIVAARFVRNNRLIDALMIQAFAALRVSPGARAFYDAQRAKGLEHNDVLRRLASRLVGILHGCLKTRTRYDEATAWGHRENIPQSDAAA

SEQ ID NO: 245990 - protein, 391 aa, unidentified
MIYVGIDVAKDKHDCFITNSDGEALFKSFTIPNNRKGFETLFQKVQSVSDDLTKVKVGLEATGHYSYNLLGFLLDKGLPTYVINPLHTNLYRKSLSLRKTKTDKVDAHTIASMIMSDVDLKPYSDTSYHNEELKSLTRYRFDKVQERAKLKTSVSRLICILFPELEKLVPTIHMASVYALLSEFPSAHAVASAHLTRLTNLLSESSHGRYGKDTAVMFREAARNSIGSNMPAKSLELKHTIKLIQELTSEIDEIETEIKSIMDEVNSPILSIPGINYRMGAMIIAEIGDFSRFDSPDKILAYAGLSPSTYQSGQLDGCYSHMEKRGSRYLRYALFNATKFVCIWDNQFSAYLAKKRSEGKHYNVAISHAAKKLVRVIYQLEKSGQLYHRAA

SEQ ID NO: 245991 - protein, 343 aa, unidentified
MNGTQIGVDLAKAVCEIAVSHTPGRVQERRRLSRATVMNFFAEHAPAQVVMEACSSAHHWGREFQRLGHSVLLLHPSDAARYRDGNKTDRADAKALLEAVRNEALDPVPVKSLEQQAVGALHRLRQGYLQTRTARINAVRGHLREFGCVIPIGARHVLPQAYAALESGAIPQLLRPALTTVLDEIAALEAKADAVRHELTQLAEQMPEAQLLLTVPGVGVLTATALVALVGNIQRFPSGRDFAAYLGLTPREHSTGQARRLGAITKRGNSYIRMLLVHGARSALRAGTVVQQPDDLRTWARTIALRKGHNVAAVALANKLARVCWRVWRDGRPFERREAAERR

SEQ ID NO: 245992 - protein, 407 aa, unidentified
MHAQPTSPKRFIGLDIHKHYLVAIGVDAQQNQVFGPMRVPLSRLDAFISKQLTPTDAVAIEMTTNAWQLYDRLEPHVASVTVVHPPHVALIVRAQVKTDKKAALTLAQLHAAGLLPGVWVPPKAVRDLRALVAQRMKMVRLVNQAKNRLHAVIHRYAFSLPEGPLFGKDNRAWWEALPLSHLELALIQCDLDTLDFANAQIHHLELVMARMAAQDERTPLLIQLPGIRMINALTILAAIGEIERFSEPKKLVGYAGLGAKVHHSGQTKRNGKITKAGRRDLRSTMVRAAFSAAQTHPHWKAVFKKMEPRLGRNKATVAIARKLLIAVWYVLTYQEPDRFAVPKRVARDLMVFTMRTGRANRPEGWTTMAYVRHHIDRLGLGDQVDYVQWSPSRRMILPPPGSVPDPV

SEQ ID NO: 245993 - protein, 356 aa, unidentified
MATYSLSALQAFISIHQADPFWIGVDVHKCSYHIALLRADSKTFTFTTTASPDAFIEQLRRLNLPVAGVAYEAGGTGFSLARALLAEKIPVTVAAPSKIPRSVSAGSKTDRLDCLKLAHYAAKGLIRPIAIPTAEEEAQRALLRRRHQLVDRVRQCKQRIKGFLLYHGFKETEAIRNWRSDCDEQIAALPLLPEGRLTIESHLRELRFLQQELSEVAMQLHYLNRQPEHRTVIKALTSVPGVGQVVATSFHLELFRPERFQRGEEVTSYLGLAPTVRHSGEKTPRGYLAPCGQKRLRSLLIEAAWMWRTKDAKAGELYNKLLGKTGIPQKAITALARRLAIILWRLSIEQRTYRPI

SEQ ID NO: 245994 - protein, 326 aa, unidentified
MMNYLGIDVSKEKIDCCLFINGISGKGKSKIFSNSESGFIKLTDWLSHLNINTNDLLVTLEATGIYHENLCYFLHDLKINIAISNPMRTRRFAQGMSILTKTDKVDSEVLAKYGALAPIKYWKPDSKNFRELRDLMIRRDALSTDLVRESNRLEKSTFTKTSLHVISMIKESIDSLQSRINHIDVIINELIKNDSELTNEMNLLISIPAIGQRTALQMLTLFHGKDFDNAGAAAAYVGLVPIQKQSGTSVRGATRISKSGSSRIRAALYMAAIVAIRFNPQSKVLYNRLLKNGKSKMSALCAVMRKLVYLCYGVLKNKTPYQPDYA

SEQ ID NO: 245995 - protein, 427 aa, unidentified
MHYTQNDKIRQATEGTIVVGVDIGSEKNYARAFKGNGIEITRKAFYFSNTLEGFKSFEEMVTKLTVPLAEKKIIVGVEPTGHYWFNFADYCQGKQMTVVTVAPQHVKHSKEMDDNTQRKDDRKDPRVIAKLVIEGRYCIPYRPKGIYAELRVAYNRRCEIVEAETRAKNRIRRWFDLYFPEYRTVYGNVAAITGIVILKQAPLPQDIVSLGVDGILQIWRANKLRAAGLKRAKTLFEAAQRSICPPDAGRAVRMQLWQLLEEYEYIRKQLQEADIMIGIVTADIPEVNELMKIPGIGLITAAGMISEIGDMRRFDDPRQIQKLSGLAIIVNESGKHKGQSEISRRGRKRLRKILFQAALVLVRSNKEFKSIHDYFTTREKNPLKKKQSLMAVAAKLIRVCFGIVKNGTPYDPTKVLKDIRRAEPKVA

SEQ ID NO: 245996 - protein, 345 aa, unidentified
MQIKSIGIDLGKTTFHLVALGARSQVVIRKKFSRQQLLTYAANLPSCLMGMEAGVGSHFLGRALREQGHEVRLIPAQFVRPFVKSNKNDYSDAEAIAEAVERENMRFVPIKTEDQLDLQALHRVRERLVSRRTSVINQIRAFLLERGISFRKGPASLRRQMPEILENADERLTARMRRLLDFLWQEWKHLQLQIESLSEDLEKIANSDAACVRLQQIPGVGPLVATAVVSAIGNGAAFHKGRQFAAWLGLVPRQWSTGGKPKLLGISKRGNPYLRKMFIHGARAAVLRVKREGSCLGQWMSGLETRAARNVVIVATANKLARISWAVLSSGNDYRPMHRALRCSS

SEQ ID NO: 245997 - protein, 410 aa, unidentified
MQVLYPCCSGLDIHKKFVVACVMTTNAEGHVQKESRTFSTMTQDLLALLDWLHAAGCTHVAMESTGSYWRPVYNLLEGQFTLLVGNAYHMKTVPGRKTEVKDAEWIADLLRHGLIRGSFIPTPAQRQLRDLTRYRTHLVEERARLTNRLQTVLEDANVKLASVVTDIRGVSARAILAALIAGETAPVVLAELARGRMRSKREVLAQAVVGRFTPHHAFLLTEHLSQLDYLEEAVARVSAEIAQRLQAEQEALELLDTIPGVGRRAAEIILAEIGTEMARFPSAKHLASWAGMCPGNKESGGKRLSGKTRKGNPWLRQVLIEVAHAASKTKDTYLAAQYRRLATRRGKQRALVALGHTILVIAYHLLTRRGPYHELGPLYFDVLDRQRVQQRLVQRLERLGYTVNLQPSAA

SEQ ID NO: 245998 - protein, 361 aa, unidentified
MKNSSQHLIAEVPGRQFRVEMTIGIDLGDVWSHYCTLNQEGEVIDRGRFRTSPKGVEKWFTDVPPARVAMEAGTHSIWISQQLQELGHDVIVANVRELRAISHSDRKSDQVDAEKLARFARLDPKILRPIAHRTVQQQEALTLIRARDLIVRLRTAAVNAVRGLTKSCGYRMPTSSTRYFAGRSLAVMPPGLAQALSPVLDQIAEMTIKIKQYDRQIQQLGQTEYPETQALLKVYGVGHITALTYVLTLGSKQRFQRSRDVGCYLGLRPRRSQSGDRDPQLGITKAGNVYLRSLLIECANHILRPQGKDSSLRRWGLDLAARGGKRAKNKAVVAVARKLAVLLHRIWITQEPYMPFYAEAA

SEQ ID NO: 245999 - protein, 414 aa, unidentified
MQALQCVAGIDVHKKMLAVVVGRVREQTIEVERAKFSTTTQDLKVLQDWLEAHGVGEVVMESTGQYHKPVWLQLEERFRLHLAQAQSNRGPRGRKRDFTDALRLVKRFLSGDLILSYVPDAEQRLWRSMTRAKVSLSEQRKRLQGQIEGLLEEMMIKLSSVVSNLLGVSGRRILKALAAGEEDSVKLASLGDHQLRVSREGLQEALTGRVRPAHRLLLGLYLQQVELIDAQIAVLEREISAAMRPHQAAIERLADLPGVGVDSAHQIIAEMGPEAATFPSAGQAASWVGVCPGREESAGKSNNNRSPKGNRPMRRLLNQLAWAAVHTKGSYFQDLFRRLVVRKGPKLTIWAVAHRMLRLIWKVLHQKVRYMEHGPRNCNPQALQKRKRRLLSEFRRLGYNVQLTPLQGPASVGL

SEQ ID NO: 246000 - protein, 422 aa, unidentified
MKVVYPTCCGVDVHKSFLVATIIKTEGLTPQYQKKRFSTFNNDILRFKQWLVDNECYDICMESTGKYWVPVYNLLEDKIHVVVASPKWVAAVKGNKDDEKDSRWIGDLFRLGIVPGSFIPPKAIRVLREYTRYRYKLTSCKSSEKNRFQNCFTVCNVALDSVVSDMFGVSASSITDYLVKTDHFDPEHVKSLLKGKLKAKADSVVESIEGYLMTLAQKERAIMVRSHLDYITKAIAELDAKLDTLVVPCEPQIALLRTIPGVDRQSAITIISEIGVDMSMFDGSKRFCCWAGLTPSNNQSAGKKKSVRITRAGVYIKPALVQCAHAAVKSKDSPYYRNKYERISKRRGKKRAIIAIARMILTAVYNMLKNGEVWNPGDLCRVDMPPVLSEQQKRKAIKNAFKLLLAQGLLDPAIIPADISVA

SEQ ID NO: 246001 - protein, 347 aa, unidentified
MRFYTRAHKHYCGVDLHARTMYVCVLDRDGNVLVSKNIASAPEAFVELIAPWREDLVVAAECMFTWYWLADLCAREGIEFVLGHALYMRAIHGGKAKNDRIDAHKITALLRDGMLPQAYVYPQAMRATRDLMRRRNYLMRQRAELLAHITNTNHQYHLPALGVRPARPAERSGLLEHFAEPQVRRSIAADLSLIEHYDRELPALERYLESNAQAHDPVALAIVRTVHGLGKVLGLSILYEIQDIARFGRVQQFLSYGRLVKPTKESGGKILGHSGKKIGNAHLKWAFSEAAVCFLRANKPAQALRSRLAAKHGKGKSLAIIAAKLARAVYFMLKRGEPFDAERFFAH

SEQ ID NO: 246002 - protein, 411 aa, unidentified
MSHEITWLFVYGSPRVIIFTSEVIFMVFVGIDVAKDKHDLYAVDSDGVVLCDNFTFANSAAGFASFLKQVSPWGKIKVGIEATGHYSSNLLSFLKTHDFEVVVFNPLSVSRLRSAASLRKTKTDKNDSRYIARLLLTGVANPYQSQSYNISVLKSMTRARFRLFQEIQPLKNRFRRLLHVLFPELQGFFSNLYGNTSLNLLSVLPSAKDIAECNILKLTKILSEFSRGMLKRGRAEQLKSLAQNSIATYNYGDAFELKQTVRRIQFLSSQMSEIESEIDSVMAELNSPITSIPGIGNLLGATILSEIGDIKNFDNPDKLLAFAGCEPSTYQSGKYTATNTPMVKHGSRYLRRALYCAADMAYVNSPSFRSFIDRKRAQGKHYYVAMSHGMKKLVRIIFAVLSRNIAYSDPI

SEQ ID NO: 246003 - protein, 351 aa, unidentified
MPRTTSGASVIATIGIDIGKNTFHVIGLDDKGAIIFRHKLSRGQVYARLANIAPCLIGMEACVGAHHLGRQLSTLGHDTRLMPARYVRPYSKGQKNDFRDAEAIAEAVQRPTMKFVAIKTVEQLDLQGLHRIRERLVCQRTSVINQIRAFLLERGIAVRQGLRTLRSEMPIVLAKTDKLSQRMIHMIEDLCTDWRHLDRRIETVSKEIETLSEQDDGAKRLMTVPGIGPIISTATVAAIGTGEVFSKGRDFGAWLGLVPKQMSTGGRTILGPISKRGNRYLRMLFVQAARAVLLRPQSWEKHGLKLWIEAAARRLNRFKLAIALANKIARIAWGVLHGGRNFEIRPMNQAA

SEQ ID NO: 246004 - protein, 369 aa, unidentified
MRTSVVYVGLDVHKDSIAIAVAREGREPAETWKTIPYDGVRLRKALKMLVKSGELLKVCYEAGPTGFGMCRRLRKAGIDCIVAAPSLVPAKPGERVKTDRRDARKLAHFLRSGDLTEVHVPEEAVEAIRDLERARDDAKNAERAARHQLSKFLLRHDRRYEGSTWTLKHRDWIRTQQFAYPAQQRVLEDYLKTVEDLAERVGRLTGALEALVQETVLAPMVKALQAFRGFSVVSAVTIAAEAGDLRRFPTPKHFMSYVGLVPSEDSTGKRRRQGPITRCGNRFLRRILVEAAWHYRHVPAMSKELRRRNQGVAEGVRQIAWKAQKRLHQRMYRLIYAGKSTQKAATAVARELAGFVWAVGQQPSLLEAG

SEQ ID NO: 246005 - protein, 337 aa, unidentified
MKYVGVDLHKNQFSVYWKTEEGKGVFKKYPMTKKGIEEFKKNLDKETEVAVEATGNSRFFYNSIVSQVKKVRIINPSQFKVISESVKKTDQHDSEIIAEYLSKGLLPEVRVLSKENRELKSLIQTRDKLVKLRSTLKNKIHGILLEHGITTRREMFSSDKALEEVRNAAVSETSRFEIGVIVDQIKSLNEGIKKIEEKIKENGEGLKGQKNLQSITGIGKLSSTIILSNIGDINDFDNSKKLCAYAGLVPRVYDSNESIRHGRITKRGDKILRTTLVQVALTAIKYSPYIRGFYERLKHKKGSGKAIIATARKMLSIIYETLKNDWVFEDFNNFILA

SEQ ID NO: 246006 - protein, 343 aa, unidentified
MQAVTTIGLDIAKSVFQVHGIDATGNVVIRRQLKRRHVLAFFQKLSPCLVGIEACASSHHWSRELKALGHIVRLMPPAYVKPYVKRQKNDAADAEAICEAVTRKNMRFVETKTPEQQSCLMLHRSRHLFIRQQTAVINAIRAHLAEFGVVAPVGRKGVADLLDIVADPSDRRLPEVARACLAALGVQLRLLKAQILEFDRRIMAWHRSNETSKRLDEIPGVGPALATALVASVADPKAFGSARNFSAWIGLVPKQHSSGGKDRLGSISKQGDRYLRSLFTAGALAVIRYAKIRGTKHRPWLTALLARRPAKVAAIALANKIARMAWAMMAKGERYREPAALAA

SEQ ID NO: 246007 - protein, 340 aa, unidentified
MERLVIGVDMSKASFTAAVWDGVNAIALGEYCNTQTGYADLSRQVAEWQQRTTSLAIHVIVEVTGGYELGLVTYAYTQGWAVSLPGCPLGPKQVRDWAKGEGKRAKTDRLDAQLLTRFGVKQQPQPQQPLPTEVRELDNLLARRQDLEQMLRQERNRQGDLQGRPGVPASVTNNLQRVIEALEQALAEIEQAIQQLLQVHNHLQVAMERLLALPGIGKKNVLPLLVLLERWHTLTNGQGSAKGLTALAGLDPQVYESGSSVRKHRAISRMGDKEVRRLLYMGVLGGVRGDNPLRTFYQRLVGRGKAKKLALVAASRKLLTWAWAVFSTDADWNPALYPVT

SEQ ID NO: 246008 - protein, 428 aa, unidentified
MDKDMDNWRQRTAFVGFDWAGDHHDVVLVDQHGKIVEDLRFDDTAEGWQQLIKTLSKHPDPAVAIETSGGMTVQRLLEAGYAVYPVNPKAAKRYRERKAPGGTKTDHLDAWSLADALRLDGHTWRQLKPDDPLTVELRLLCRDEVTLIEQRTALICQLKAALHEYYPVVLEAFEDWTFRSAWAFVEAFPTPEALAKAGKRRWEKFLHTHKLYRPETYGRRLDLFARAETFCGNRATTNAKSMLAVALAGQLRVLQNHLDKFRDKIEKLFAQHPDHDLFGSLPGAGEKLAPRLLAELGDDRERFDSPQALQCYAGTAPVSYESGQIKRVRFRRACQKALRHSVHLWANLSRATCPWAEAYYRKKRDEGQTHACALRCLGQRWLKILWKMWQTRKRYDPELHQRNQVKHGSWVIALTTVTPEQRTTADVG

SEQ ID NO: 246009 - protein, 336 aa, unidentified
MFQLGIDVSKKTLDLCLLREGVKGRVKTRKLQNDINAVSAVIAWLSKQHCKPEDVHIIMEATGVYHESLAYGLHKAGGRISLANPHRAREFARGMGMLTKNDRVDAYMLACYGALKAPEPWLPPPEEVRHLSALLRRRDALVADSTREKNRLEKYLATDTPSVIAESVEAMIGQLNAEIKRLDSLIRSHLNQHPELKKDFDLLTSIKSVGYQLGLNMLVILRSHDFTTAEQVAAFLGVVPVEKYSGTSVRGCPKLSKIGPPEIRAKLYLASLCGLRFNPLMKAMYERLCLRGKGKMCAIGALMRKLVHWCYGVLKTQKPFDVGYLSSYARSACKAA

SEQ ID NO: 246010 - protein, 368 aa, unidentified
MRNNVLYVGLDVHKNSMDIAIAAADGEVRYYGRIDGEPKDLDKVIRKLHSKGSEFHFAYEAGPCGYQVYRHLMAKGYSCLVAAPALIPRRPGDRIKCDRRDALTLARLFRAGELTAIRVPDVDDEAMRDLTRAREDAISVERRAKQRTTALLLRHGRRYPGKTTWGKGHWSWLLQQVMEHPAQQIVLQEYLDAVREASLRVQRLTGQIRELLPQWRRAPFVAAYQALRGVSLITATTVVAEIGDLSRFHNPKELMAYLGLVPSEHSSGTSVRRGRITKAGNGHARRVLVEAAWAYRLRARVTRPLLQRQEGLPESIRQIAWKAQLRLCARYRRLLARGKTKQTIVTAIARELAAFLWAIGQAVVPVTA

SEQ ID NO: 246011 - protein, 445 aa, unidentified
MFIQSQDDSHCCYSFFIKVVILMMKLKYSICCGLDVHKNVIVATIVTTNKDGISEYLQKSFSTINSDIQRFHNWLIENNCYHVCMESTGKYWIPIFNYLENDIDVCLTHPKYVKAIKGKKTDKKDSKWIADLYKFDLVRCSFIPPKDFRQLRELSRYRFKLVCMKSSEKNRIQNCMTISNVGIASVLSDPFGKTATEIISYLLEHTADSMDEKAVRKLIKKGAKAKSDEIIEAIKGYNIETDQAKKLELAQGHLEYLDDMITQTEVELYVRIKPYYEFVEFVSTMPGMTELSSTIVLAETGVDMDIFDDAKHLCSWCGLSPANNESAGKKKSVRIAKAGDYLKPMMVQCALAAIKSKKQPYFAIKYGRIKKRRGHKKAIIAIARMMMVCIYHMVSEKKPFTPTDYEELMNPQNHVERVVLNENNVFAYLESLGYDSSKLVKRNDN

SEQ ID NO: 246012 - protein, 416 aa, unidentified
MTNQERWYAGVDWASESHHLFLTDGDGRRIGERVFKHGGEGLAEMAAWLMATSGASEPGQVSIAIEIPHGPVVETLIERGFAVHAINPKQMDRFRDRFTLAGAKDDSRDAEVMASALRTDARCFRRLAAADPIVIELREHSRIAEDLGAERTRLTNRMRELLWRYFPAMLELDSDLGAEWLLDLWDIAPTPDKAARTREATIAKLLKRHRIRRFDAAHVLAVLRQPPVQVAPGTREAASAHIETLVARIRLTNQQLRQTHGRLDALTAQLASSEETEPGQAKQHDVEILTSLPGVGRIVLATLLAEAWDALQRRDYAALRSLTGVAPVTKRSGKSCSVVRRQACHDRLANAMYHWARVAVQHDPRSRAKYAALRSRGHSHGRSLRSVADRLLNVACAMLKAGTPFNPSLATSKTAC

SEQ ID NO: 246013 - protein, 349 aa, unidentified
MNHYVGLDVSLEETAICVVDGTGRIVEEARAASEPEALIAALREIDLPLERVGLEACSLTAWLHDELHSAGLPAVCIETRQANAAMKTMPNKTDRNDARALAQIMRTGWYRQVHVKSRQCRLWRSLLVARRTVLNEMRSMENVVRAVLREAGLKLGVPGRAAFAGRVRELTEGDARVTTLVEPLLAILATMLDQFAHLTKQVQDIVRQEAVCRRLMSVPGVGPITALAFRATIDRPDRFRRSRDVGAHLGLTLARYQSGETDIQGKISRCGDELARTALYEAAHTLLVRSRKWSALRAWGMKVAKARGMARARVAVARKLAVILHRMWSDGAEFRFGKEPGAGVAHVSA

SEQ ID NO: 246014 - protein, 314 aa, unidentified
MKSQEIKYVGIDCGKKTLEVIRIGDNSLHQRQQFSTTEIGISKLINWLNPNDVVGLEAGSQSFRIAKSILNKGVQVIVLNPGNLATIYQSLKKTDKEDSLKIARLIQRHPIEELPTVPIPNDEEEDNRRLCSEHENWTKQLTQGKNRLHSLFTQAGLTQITKKHLRTKANREISVALLPSRYQKEAERILKVLDLVEQNLKLIEEEIKEALKKNKAYAQTIMSMPGVGMITSLAIMSYMGNCKRFSSAKQAAYYVGLVPRVDISGDSAYYGRIVNRGCHSIRRVIVQAAWSLVRCQYGGKIKEFYQRLYPKKGD

SEQ ID NO: 246015 - protein, 406 aa, unidentified
MFQRENKKACVSLDVSKGSSHVQAFYSVGQKATDVCVIKHTKSGFEKLKEIIVALENTTGEKCVVVFECTGVYSKPVENYLQKIGRKYFLIPPLLSAKVRKSDIRPTKTDSKDCETIANVYYLKKIKPAKPFEKLHDKLKSFCSYYLFLMNRTTCMKTKYRHYLDNVFPRIDEYFNVYSPFFIDLIIKNPNPQKLKKKNDEFLYKFITSYDYFGNGKAAVFINSFHRYFEDAAIDINEDDAAIDVLSSAAKKLQEDMKTLDNLLEEIILLGMKTEEYKYLITIPGMTKNTASRIAAEISGIDRFPTASKFIAYAGIDPTVKESGKMTSEHLPITHKGNQRLRCLFYLVASGTSKSKSEGNPVRDFIIKKKSDGLSAKAAIIAGCNKLARIIYAVCSKREPFSLQNQ

SEQ ID NO: 246016 - protein, 376 aa, unidentified
MNEKLRFLGLDVHAETIAVAVAEPNGEVRSLGMIANREDSIRKFIRKLGSPEHLRACYEAGPTGFVLYWQLTQLGVKCDVVAPSLVPKKPGDRVKTDRRDALKLARSHRSDDLTAVWVPDEGSEALRDLVRAREAAKQDQLRAKHRLTKFLLRTGQRPPLGVKAWTEKYVEWVQQVRYTHPAQEATLLDGLNEVQHMEERVKRLEQSIVEVIQLAPAPMQEVVRGLQALRGIAHISAVTIAVELGNITSRFESARDLMGYSGAFPSEDSTGKRIRRGGITKSGNAHLRRIVVESAWSYRHRPAIGARLRRRQEGLPAEITEIAWKAQNRLHKRYMTLMARGKEQRKTMTAIARELLGFIWAIGIKAEAACKQQMAA

SEQ ID NO: 246017 - protein, 379 aa, unidentified
MSTGEGFRQCVGIDISKEKFTASLYMYDRLSDEGCCTGSIDFTNTKQGFNQMVKWSRKEALKGHPLTYLMEPTGVYYEPLAYHLNKIGQTLYVVLPNKARKFCEAEGIKTKTDAMDARCLALMGCTSRKLRPWSPPKAIYHELRQLTRFRTDLCKLRTSVTNRQESLQHMEGASKNVQKGCEKLVAEIDKLMEKNEKDILAKIAEDKELEARINRIATVKGIRVPTVTCIVAETQGFHLIENRKQLTSYAGLDVMAKQSGKEDPKHAISKKGNANIRAVLYMPALSAAHCNRQAKAAYGRICQKHPKEKMIGITAVMRRLLLLVYTLWKSGEEYDENKDVNSKPKKKEHALDHTQEDCILNTNEPVDWNATDENGQPPF

SEQ ID NO: 246018 - protein, 241 aa, unidentified
MDDITYVGLDVHKPAPRKRGATVCVAVAASGRSGEVRQIGVFENRPQILCKMAARLGKGGRRLSFCYEAGPCGYRLHRLLTGRGRSCVVVAPSLIPLKSGDRVKTDRRDAMMLAKLHRAGELTAIWIPDAAHEAMRDLVRARATAGRVRSKARQPLWRKWGDFRRFTNARQLMAYLGLVPSEYSSGSTIRRGGITTAGNALARRVLIEGAWTYRMNARVSRKLHDRLEPLSAAIRDIAWKA

SEQ ID NO: 246019 - protein, 356 aa, unidentified
MDSSFGERQMSVVHWVGVDVSKATFDAALVRMGQKFPSTRLCDVPARSFERSSHGVECFLGWLSALTENDVEQSRVRVAMEATGKYSIELAVWLLEQQPSLEPAIVCPSHTAAFIKSLGLRNKTDKLEARALAFYGVEREPVAYEPPTPEHAELQALSRYRDALVRERTAAGNRAKEGSASKVVRQMQAKRLRLFDGDIKLIEAEMKLVVEAAPQLKHDIELLSSIYGVGFIVAVVIIAELGDLRRFRKARQLTAFVGVSPRIYQSGTSVNGRPRMCKKGNPRVRHVLYLSAMVTIRGSSDLQRTYQRLLEEGKSPMAALGAVMRKLLILMRALLITETTYNPNWKLRRKRQPICA

SEQ ID NO: 246020 - protein, 451 aa, unidentified
MGLGTPEAAPSVATFRKVSRRGRISGKRGIPPAVWEVARMQVLYERCAGIDVHKKSVTVCLVTPGQRGEPKKEKRSFGTMTRDLLALADWLAQSGCTHVAIESTGVYWKPVYNILEGICEVVLANARDVKNVPGRKTDVSDAEWLAELLRHGLIRGSFIPPKPIRDLRDVVRYRKALIRERASEVNRLQKILEGMNIKLASVASDVLGVSGRSMLEAIAAGCTDAEALAEMARGRLRKKIPELEKALEGRVDPHHRFLLTRQLRHIDFLDELIEECSARIEEMMHPFREEASLVCEITGVEKRTVEAVIAEIGVDMSRFPSEKHIASWAGVCPGNNESAGKRKSGRTRKGSPWLKEALVEAAHAASRAKGTYLYALFHRIAARRGKKRAAVAVAHAILVIVYHMLKNRSHYRELGQQYFDRLNRDAVSRRLVRRLESLGYEVQLKDLEGAA

SEQ ID NO: 246021 - protein, 415 aa, unidentified
MEAMEVLHHHVAGIDVHRKSLSVGVRHVGADRKVHQEVRTFGTMTRDLLELRDWLESQAVTYVAMEATGVLWKPVYNLLEGHLEVLLANAHHVKQVEGRKTDVKDCQWLAQLLSCGLLRASFIPPKPQRELRDLTRMRSQLVGERTRVANRIHKVLEDANIQLGAVATDILGASGREMIEALIRGEQDPEKMAQMARRRLREKLPQLRLAMDGHVSEHHQFLLQMLLEQYDNMTKQIGRLTERIEKVCAPFASAIQKMIEVPGYSRTSAQNVIAEIGTNMNQFPSADHLCCWATICPGNRESAGKRKSGRTVQGNRWLKAALCQSAWAAVRTKGSYFGAQYHRLAGRRGKKRAIIAVAHAQLKVLYHLLKSGESYRDLGADYFLKLNAERAAHYHRKVLESLGYTVILPPADQVA

SEQ ID NO: 246022 - protein, 361 aa, unidentified
MKSTTIIAFDQHAATTVAAVLLPGHRTPALHTLASDSPTILRFVERLRRQGPMVCCYEAGPCGFELQRALSARDIACEIIAPALIPRRAGDRIKTDRRDARHLAVLYRAGALTAIHIPTEQEEAARDLLRCREDIRADLLRARHRLSKFLLRHGRRFTGTKKAWSKRHETWLRAQTWPLPALDQTHRAYLRAVEETIARLRAVEEDLRALLDLEPLRPRVVRLRCFRGIDDLTALTIAAELGDARRFPTAPSAMAFVGLVPSEHSSGAKRAQGGITKTGNGHLRRVLVEAAWHYRHHPFVSAAVRHRQRGAPDTVVAQAWTAQQRLHRRYHRFAARGKPKQHIVTAIARELTGFVWAALTQ

SEQ ID NO: 246023 - protein, 314 aa, unidentified
MSENPEIFVGIDISKDTLDIGFQPSRHTGELPHDEQGISEATRRLREAEPRLVVLEATGGLETELAASLMAAGLAVVVVNPRQVRDYAKATGQLAKTDRIDALVLADFARAVRPEVRPMKDALTRELDELVTRRRQLVEMRVQESLRLGRASKVQQKSLKSHIAWLDKRIEEIDTDLRQRLRASPAWRTKDDLLRSIPGVGATTSATLLAKLPELGTLDRKGIAALAGLAPLANDSGKQRGKRVIWGGRAEVRCVLYMSAVTAIRCNPVIHAFAQRLKAAGKPVKVVIVACMHKLLSIMNAMLKSNTPWNPKIA

SEQ ID NO: 246024 - protein, 387 aa, unidentified
MKKNSNSKNQQKKALANEQSKQKLLTLGAFWKNNPAVGEQLTIGLDLGDRASCWCALDGKGEVLARGEVVSERQPLEQFFKQVPASLVALEVGTHSPWISRLLEKAGHEVVVANARRVKAITENSKKNDRIDAELLARLVRVDRKLLSPIRHRGETAQADLMAVRVRAQLVEMRTKAVNGVRGLVKSFGQRLVKCDADSLTVEHAKHLDEAIRPYAEQMLGVVEQLSKEIDKCDATLKKINQARYAEETARLEQVQGVGPVTALTFILTLDDAARFQRSRDVGCYVGLRPKSKQSGDSEPEMRISKEGDVYLRKLLVQCAQYILSQRGPDTDLKRWGLEIAAKGKKKAKRRAVVAVARKLAVLLHRLWVSGEKYEPLRHNRAVAKAA

SEQ ID NO: 246025 - protein, 354 aa, unidentified
MAIVGGFDVHRGQITFDYLDTETGEVTTGQVRPATRQTLRSWLGRFAGLTDVAFAVEGCTGWRFVVEELVRAGVEAHLAEPAETATLRGRKKRAKTDRTDARLMRELLRQQRLPESWIPPAAVLEVRTQARLYVALLAERRAWRQRIHAQLFHQGAPAIAKLLTAEGQAALAQAALSPAGREVVDTALAAIAALTALLDPLRARLQATGARQPGCRALTAHYGIGPLCGTIIWAELGDCRRFARADQAVRFAGLDVTVRSSDSRRAPGRLARQGAPALRWALYEAAKSASHATAPDHPYYLAARDRLDGKLATLSVARKLARRCYHTLRDLGDDAWPTTANQAAPASTAESAAA

SEQ ID NO: 246026 - protein, 354 aa, unidentified
MAQSSTLYIGLDVHKESIAVAYAAKDYGADVVYLGSIGTRQCDIDKLVRQLQSKAKRLVFVYEAGPCGYWLYRYLTKKGYDCWVVAPSLIPKKAGDRVKTDRRDALQLARLMRSGDLTPVYVPKVEDEAIRDLCRAREDVLRDLKAAKLRLKAFLLRHDIRYTGQATWNPAHLRWLSEVVCPTPAQQIVFQEYVRAVNEQTERLQRLEQELQEQVKSWRLNPVVEALQALRGVQFTVAVTTVAELGDLTRFENPRQLMGYLGLTPSESSSGERRRQGSITKAGNTHARRALVEGAWAYRYPAKVSRHLQLRLENQPKAIQDISWKAQGRLCPRYRRLLARGQHANPVVVAIARA

SEQ ID NO: 246027 - protein, 340 aa, unidentified
MKITTVGLDLAKSVFQAHGIDETGATALLKRLHRKQMMPFFSRLPPCLIGVEACGTAHYWARILAAMGHEVRLIPPSYVKAYVKRGKSDALDAEAICEAVQRPTMRFVPVKTIEQQSILMTHRARSLLVRQRTMIANALRAHLAELGLVANPGIANLAKLAELALSDENALPAHARTSLGILVRQIMALNDEIAELDRQLMAWHAESEASRRLAGIPGLGVITATALAATVTDPDQFRSGRQFAAWLGLTPQQHSTGGKTRLGGISKQGDRYLRRLLVVGATAVIRHTKDKPTPMANWIRKLMEKKPFKLVSVALANKLAWIAWVVLTRKEAYRPYELRA

SEQ ID NO: 246028 - protein, 457 aa, unidentified
MKPQKGKCLKTDGSPDFPVLHGHAAGIDVGNAEHYVAVPPGSDPQPVQRFGSFTADLHRMAHWLKSCGIQTVVMQATGVYWIALFEVLQTYGFQVQVVNAQHTKNLPGRKTDVQECQWLQKLHTFGLLNASFRPAEDINVLRSYLRQRENLVTGASICVQHMQKALTQMNLQLANVISDITGVTGMAILRAIVDGERDPRRLAALKHKQIHASPQEIARSLEGHWRPELIFVLAQNLALYDFYLASIEQCDHRIQSHLSTLRSKVDASTQPMPASRHHRKIRKHGPRFDLRQQLYRIAGVDLTQIDGFDVQIAQSVISEIGVDMSCWPSEHHFASWLGLCPDNRSSGGKVLKRGTRHVVNRAATALRIAAWNLIRSQSALGAKFRRLRSRLGAPKAITAMAHQLARLVYRMLKFGHAFVDRGQQYYEQKYRLQQRKWLEKQAAAFNLQLVPLPGVTQ

SEQ ID NO: 246029 - protein, 385 aa, unidentified
MKKHTTAKRNQKTLTKTDKQQIRGLATRQRLTIGVDLGDRTSRYCIVDEVGEVVSENSLPTTKGGFGSLFGKMPSSRVALEVGSHSPWVSRHLAAMGHEVIVANPHKVKLITQSVRKNDRIDARKLARLARVDPELLSPIRHRGEEAQALLAVIRARAEVVEGRTALINSARGFAKPMGERLKKCDAGQVKEALADALSESIRQIIGPMLKVVQAMSEQIAVYDGKIEAMAKGYPETALLTQIYGVGTLIALTFVLTIEDAGRFAHSRDVGCYLGLQPRQRESGESAPELGISKAGDGLLRRYLVQASHCILRKGAPDSDIRAWGLAKAESGGKRAKRRAIVAVARKLAVLMHRLWAAGEVYDPLYNRKAAEAAVRGMGKAKVAA

SEQ ID NO: 246030 - protein, 317 aa, unidentified
MSLPTASFVGIDVSKQQLDVAVRPSGETWSVAHDEAGLSALVAQLRALAPALIVLEATGGWEVALASALAAGPLPVVVINPRQVRDFARSTGTLAKTDRLDAQILAQFAEVIRPQPRALPDAQAQELAALLQRRRQLVEMLTAEKNRLTMASRRIRPQLQAHIEWLHKQIAQFDEDLRQLIRASPLWREKDDLLRSAPGVGPVLATTLVAALPELGTLTRRQIAALVGVAPLNRDSGTLRGRRSIWGGRAQVRAVLYMSTVVAMRHNPVVAAFYQRLRAAGKAPKLALTACMRKLLTILNAMLKHHTRWAPVMAQHA

SEQ ID NO: 246031 - protein, 412 aa, unidentified
MEVLHLRCAGLDVHKETVVACVRIVSGGEVSRAVRTFETTTARLIELAEWLEANGCTHVAMEATGVYWKPVWQVLAGSGFELVLANASHVKNVPGRKTDVNDATWLAELLAHGLIRASFVPGPEIQELRGLLRTRKQLVREKASHVQRLQKTLEEANIKLESVLSDVMGRSGRAMIQALIAGETDPGKLAALAHPKVRAPQARLREALRGRVKRHHRFLLDLHLQQIDALDAGIAAIDREVDAGLASFRDAVKQLSTIPGVSELSAQVILSEIGTDMSRFATAAHLRSWAGLCPRNDESAGKRRSTRLRTGAPWLKATLVQCGWAAARTKATYLNAQFVRLRIRRGPKKAVCAVAASILTAAYHMLKDGTFYQDLGATHFDRRRPDAQARRLVKRLADLGFSVQLKPAEAVS

SEQ ID NO: 246032 - protein, 396 aa, unidentified
MTTIGIDIGGRTHVVARCRDGQARADREILHVSQSRAGFASLDAWLERQAQPVTLVTMESSGHYWMALAAHLRRQAVPVAVVNPLAAKYFARSRLARTKSDPADARSLAEMAMRDTPAARDPLAGAELRQAARFAMTLVVEQAKVCQRLIRLVELGFPELGEVFDDPTCRTAREVLRIAPTARAATRRRTATLANANAGPGHRRLGQAKAERLQAAAADSIAVPELDAEVAFEVGLLLDQFDLLEGQIEAADRHVAGLLDGALARRLRTIPGVGPSIAATLLAEIGDIERFTDFDQLLAYAGVHPAERSSGHKGANPETAWHMSKAGNSHLRAAAFRMAVVGVQYNPVIAAHYARKRAAGKSKMNALGHCMRKALSLVWGVWRNGQDFDPNWGVES

SEQ ID NO: 246033 - protein, 347 aa, unidentified
MNYIGVDCHISSLDFAVVNEKGTITQKAKVNTGVKEFMVFVKSMPKPRKIFIEEGELAGWMLETSLKFGEELIITDPKINKWIGKAGQKDDTIDAEKLALLARGKYIKEIYHPINNRRRFKELVFAYHDTVKSQTRIKNKIKANFRRNGIRCSVDTVYSDKYRDKWREKLSKNKVTHLIVEELWVQLDQLRESKEKLKRNIRVRSKQYSEIKRFMKVPGIGLIHASTISAIIETPHRFANKKKVWMYAGIALMERSSGEKVYSRKLTREYNRPLKNAVKKAAEAAISSKDNQFRRQYLRLTIEKGIASHKAKLTVARSMLAALYGMWKKGEEYDPEIDVKRGKGDKK

SEQ ID NO: 246034 - protein, 358 aa, unidentified
MIEEDGIRHVVGGVDTHKDLHVAAVVDERDLVLGTQCFATTRQGYRQMLDWMRSFGELQRVGIESTGSYGAGLLRFVQKAGIEVLEVTTPDNQDRRRRGKNDDLDAQNAAHAAFAGKRTVTPRSRDGMVESLRVLSACRKTAVAARRVALQMIQNTVVCAPDGLRETLRAMTRMQLIRTLAAWRPDLSAYRDVEAAYRISLKSLARRYLELHDEIADLDTMIGTIVDELAPDLIARNSIGHSGAAQLLLTAGDNPERLRSEASFAALCGVSPIPASSGKTVRHRLNRGGDRHANSALHIIAIGRLRTDPKTKAYVAKRVAEGHSKLDAIRALKRYIAREVFGLIARRQKEINQTRIPA

SEQ ID NO: 246035 - protein, 356 aa, unidentified
MLYLGIDQHATQLTVNIRDETGDAIERRQVSTREPEVRQFLEWVREQADLAGGYMAVLEVCGFNDWLIERLKEYGCREIVLVQPEHRPRQKTDRRDAAKLSELLWINRYRLLGGGRAAGLRRVEIASQADDEDRRLTARRQRAGSELTRTINRVKHLLRRHNLQHDCPTRGIQTNKARTWLEQLQLSELDRQEMDDLLKRWDLFGSEITRLEKLIRERAAGNIAAKVLMTIPGVAEYTGLALACRIGNIQRFPRPASLANYWGVAPGIDQSGDPRKGRVGSITKQGSATARFLLGQVVMHVIRKDPQMRSWYRSVRKRRGTKIARVAVMRRLATIIWHMLRTGEAYRGVASMRAAA

SEQ ID NO: 246036 - protein, 388 aa, unidentified
MNKIIYIGMDVHSTNFTLCSFEPGYGFEADKIFGQTQIKEDIFNSTVKYINKLKSMRTDVDVVCGYEAGCLGYNLHRKLKAKEIESVILAPTTMAVSRNCSKKKNDYRDAITIAKCLASSAYKAVYIPDDKDEDVRDFIRMRDDHKTALKQIKQQLNAFCLRHGHHYDKTKWTGLHLNWLRKLELSKLQRETVEEYLVTYETLTSKITALDIRIEDIASEERYAEKVNKLKCIKGIKTHTALSFVCEIGDFNRFKSADKFAGFIGLVPGECSSGNTERMLGITKAGNRHLRRLVVEISNTYRRGTVGRKSAALKERQKDMPKDVVAYADKATNRCQRKYQRMMFKGKNSNQAVAAVARELCCFIWGMMTGHHSRTAQAEASVYRSELD

SEQ ID NO: 246037 - protein, 342 aa, unidentified
MEFYVGMDVSLKETSICVVDDDGKIQCEGTVISEPAAIAGFIKENADGAKRIGLETGPTTTWLWHELRALDLPVICIDARHAKAVLSMQINKSDRNDGVGLARIMQCGWYKEVQVKSVTCHEIRAVLNSRAQLVKIKRDLENQIRGLLKNLGLRIGKAGGNVFSHRVAELVADQSLLQQAVRPLLAVRESVRREIADLHRKLLDLAREDEDVRRSMTVPGIGPITALAFHAAIDDPSRFQRSRSVGAYVGLTPRRYASGEVDWSGRISKCGDRMVRTYLFEAAGVLLTRVHKWCKLKAWGHRLWKRIGFKKAKIAVARRLAVILHRMWRDRTDFIWSSKAAA

SEQ ID NO: 246038 - protein, 338 aa, unidentified
MAIVMGLDQHRAQITADWLNTETGEVSRARVTPAHRDRVRQFVGRFAGQDLEVALEATTGWRFVVEELQAIGADVHLAEPAETSTLRGSKKRAKTDRADARHLRELLMVGRLPEAWIAPGHLLDLRARVRLRHTLVDQRGEWQQRIQAVLYHHGVAQRRDLLTAGKRQWLEGLELPAAAREQITVALTVIDALAAESAPLTRELRAYGRRQPGCRALMRHYGIGALTAVTILAELGDARRFSSSRHAVRYAGLDITVHQSDQRRAPGHLSRQGPPALRWALYEAAQLARRPGSPDHAYYEQAAARLGGNRACLAVARKLLKRSYHTLRELGDEALQPA

SEQ ID NO: 246039 - protein, 349 aa, unidentified
MLYVGIDFHKNYSFITEMDETGDIGRQAKLANDRATLTNYINKLPSHSKLAIEATCNWYYFYELVEDHDLDIFLAHPLKTKAIASARLMNDKVSSETLAHLLRADLLPTAYIPDQNTRDIREVLRTHAFFIAQRTRLKNRVHAILMKNGLAGPYTDIFGKKSLAWLNDLTLRACYQDAIASYTRLAEAFKYEIELLKQRIQELAYEHPYARILDTHPGISHYSGLLIAVEIGDIKRFPNAGKLCSYAGLVPTMHASGGKVRMGSITKQGSKWLRWILVECTLHAIKKSPHYQGLYTRVAQKHGKGTARVAVARSMLRGIYAMLTFDRPYRERQLRPAPWGHNLIKGSEI

SEQ ID NO: 246040 - protein, 418 aa, unidentified
MTVFVGDDWAEEHHDVELLDDTGRRLGRARLPEGMGGMTRLHEMLAEHLDDTDVDSETGMLAAGAVVVGIETDRGPWVAALVAAGYEVFAINPLSAARYRERHSTSGAKSDPGDAHVLAEIVRLDRAHHRPVAGDSAQVEGLKMIARTHQSLVWDRTRHAQRLRQALREYFPAALDAIAAGRLELADPDALELLERAGGPDRAARLSRSTIAAILKKSRRRDVDARAEQIQTALRAPALRQPPALESAYAVVAGTQIRLLLGIIAQLPALEEVLGEGFGRHPDAEIYTSQPGLGVILGARVLAEFGDDPHRYRDAKSRKNYAGTSPITRASGRRTVVLARYARNKRLGDAVHQWAFCALTNSPGARAYYDELRSRKVGHHAALRQLGNRLVGILHGCLKTRTTYNETTAWAHRFTAAA

SEQ ID NO: 246041 - protein, 348 aa, unidentified
MNATTIGLDLAKSIFQVHGEDGQGRIVFQKKLRRGQLDAFFAKHPRCVVAMEACGSAHYWGRTIAALGHEVRLIPAAYVKPFVRRNKNDARDAAAICAAIGRPDMRTVAVKSVAQQAMRSVERGRELLVKQQTQLTNCVRGLLTELGIVAAQGRRGFAQLRTEVEAGDARVPELLRATLQELMHQLDSLAEGIAKLEARIVATAKQDLAMQRLCKIPGIGPLTAHAIVAAIGDGRRFDTARDFAAWAGLTPRENSSGGKTTKLGISRQGDRRLRSLFALGASTVMRSARASEGRATPWQRGILARRPVKVAVLAQAAKTARIAWAVLVSGEAYRRPASPPVQAAAQAA

SEQ ID NO: 246042 - protein, 330 aa, unidentified
MTDANELIFVGIDVSKATLEIALDDSARTRTLGNDETGLKTLVAELSAMKPRVAVVLLEATGGLERAAATALCASGLAVMVVNPRQAHDFAKALGYLAKTDSTDARALSHFARTLYHSDKRERLLHRLPTPEQELLLAMVTRRSQLVGMRVAESNRLSGAHPSQRKSIQAMLKQLDRQIGRIDDDADRHLRHYFKDKLALLKGLKGVGPGTQTMLMAALPELGRLGQREIAKLVGVAPLNCDSGKFKGKRTTWGGRANVRAALYMAALSAVRYDPCLKAFYERLVQAGKPKKVALTACMHKLLTIINAVIRSGKPWQAGYPQACRCLRKA

SEQ ID NO: 246043 - protein, 409 aa, unidentified
MQQLFERVAGLDVHRQTVAVCVRVPGPGDERAQHIRTFGTTAADLVALRDWLEAHQVTHVAMESTGVYWKPVFYVLEEAVSCLLVNALHVQKVPGRKTDVQDCVWLAQLLEHGLLRGSFVPPPPLRELRDLTRYRKVLIQERTREANRLHKVLEDAGIKLASVATDILGASGRAMLHALVAGTTDPEVLADLARGTLRKKLPALRQALAGRFRAHHAFMVSQHFGHLDYLDEAIAALSARIEEALRPFAVEHQRLDSIPGVAQRTAEVLIAEIGVDMRQFPTAQHLASWAGLCPGQNESAGKHRSGRIRPGNRWLRMALIEAASLAARSRTTAFGARYRRIARHRGHKKAVVAVAHAMLVTAYHLLDRQVDYREPGVDYFERRHAERTTRRAVRALERQGYRVTLEPAA

SEQ ID NO: 246044 - protein, 431 aa, unidentified
MKNTTAEKCKQIPKGYLIVGIDPHKKKHAAVAITQDFTAHSKFKFNNSKGGFEMVSGRIREKMVEVGCTGVFFAIETGGHYWRNLAYFLDERGIPFRFINQFTLKRRREGKDINRRKNDYRDAEVAAQLLCTGEFTETKLQHGVYAELRAAHNAYRRLVKERTRITNLVKGLLDGLFPEFTHVFKDPCGRTALSVLSICSSPMVIAMMAEEEFVSTIEAEHQGRLMRRKLHALYYAARHSIGIEAGSKSVASELSFLVEKLQLIKRQVCRIDETLVRLVDEAEEGKYLLSIRGLNYISVAGLLAELGSFRSYRSAKQLIKMAGSNPIESESAGKRSSHTPMSRKGRPVLRYCAWTAVIPMLRFNPDFRAWAKERRERPAYANPLNGREVVGAALNRLLRLAFTLVKNQTFYQVPQREIESMPELELLPVAS

SEQ ID NO: 246045 - protein, 333 aa, unidentified
MIIIGVDFHPEFQQIAFVDTDTGELEERRLHHPDEAEAFYRALVSQGKTVRVGMEASGHGRWFERLMSELHIELWVGDAAEIRTKRVRKQKTDRQDAQLILKLMLKDDFPKIWVPSWENRDLRQLLWHRHRMVQARTRIMNQLQAVALNEGLRCKKRLWRTERPRLESFQLAPWASRGRRDLLELLDRLNPTIAELSQAVEQEVEKCPEAQRLATHPGVGPLTAMAFVLIIGQADRFQCGKQVASYLGLVPMEDSSGNRRRLGHITKTRQFDLALPAGGSGASHGAQSSRMAQPILSLDDAARTEDRQGRDGSATGRLFVLDDAPGVGLSAMG

SEQ ID NO: 246046 - protein, 344 aa, unidentified
MNIIGCDYHPSFQQIAWVDTETGETQERKLTHSDGEAERFYRQLRGPVRVGLESTGNCHWFVDLLGEIGHEVWVGDAARISAKQVRQQRTDRRDAAHILELLLRDDFPRIWMPSRQERDQRQLLIHRYKLVTLRVRVKNELQHLALNQGMQKGRSLWSKAGQKKLLDLPLPLWAGTRRKNLLELLKQMDQQIVVLDQAVKKAAEENEKARLLMTQPGVGPITALAFVLTMGDIARFRRGKQVASYLGLIPREYSSGGKQRMGGISKQGNRFMRMLLVEAAQAAVRHDPGFRSEYLHRCHHKPKAVAKVAAARKLAIRLYWMLRTNTPYPEVVRIESSSRVPLVG

SEQ ID NO: 246047 - protein, 340 aa, unidentified
MSKIKGMLSKRTINPANFSGLIMENISQWVGIDISKATLDVYLRPLGKAMKVANTKEDISKLVETLKSYTVNLIVLEATGGLETELVIQLQEADLPVALINPRQGRDFAKATGKLAKTDAIDAQILAHFGEAMQPQILAVESEESRQLGDLISRRRQLVEMRTAEKNRRERARGKALVDIEAHLEYLDNCLEKLNQEIEELTQANQQWLEKVNLLKTVPGIGQVISTTLVSDLPELGQLTAKQISRLVGVAPINHDSGQHKGKRMIQGGRAQIRATLYMGAVVAMRHNPVIKTFYECLVGRGKSKKLALTACVRKILVILNAMVRQNQPWQLADNLPPCS

SEQ ID NO: 246048 - protein, 451 aa, unidentified
MVATTRPLITHKKARAMANLYVGIDIGKASHAASLLSSDLLRKHHTYEHCPTLTFTESRTGFEKLLTTLRTYASPANICVLVERTGHYGRPLEQYLQEQGIQVYQVHVQERPKGSKSDKRDAQALAVLLYNQLERGILVAEKYQQARLLIAPSGSTQLLRGLVQHRSELVRERTRRKNKLVAICDELFPELAQVYLNPNNESALALREKYPTPADILAATIDDLLATRKHTRPGREAMARLQQLAKATIGTKDTNRITALSLETKQLIAELRLLTAHIEELDTEIIKAVEESREGQILTSIHPIGPLQAGMLIAGIGNIANFESAAKLRAYAGWSPRQNQTGTSYDSMTLNRDGNRTLKHVVYLIAIGAIRRETAWKSLYDRLVPIKCTYDERLGRYRGRMKVVGRIAGQMITVMYTLLKRDHDLLLATPVGKEPASPELYDISKHHIKRK

SEQ ID NO: 246049 - protein, 314 aa, unidentified
MSNDAPSTATVPVHVGIDVSKTRLDVCLLPMNHTFGVDNTDDGIASLVETLKQHTIALVLLEATGRHERRVASELLEAGFSVAVVNPRQARDFARALGRLAKTDTIDAKVLAEFAQLGHARPCEKMPENRLLLDDLVGRRRQVTAMLASEKVRWQVPQDKSTRAMIARVIRVLEQQREDLDRRIAELIESDDDWRNKRELLSSVPGVGPTTASQLIADLPELGKLNRRQIAALVGVAPVNRDSGQFRGRRTIFGGRATARCTLYMAAFTAVRLRAAGKPFKVIVVAAMRKLLTILNLMIQENQSWNPLAALHSA

SEQ ID NO: 246050 - protein, 359 aa, unidentified
MQTQSNKIDFNGQNIYVGFDVHLKSWTVTVMTEKLIHKTFSQSPKPEALYHYLIKNFPGGTFHSAYEAGFCGYWIHNKLTKFGINSMVVNPADIPTTGKEIVMKDDTRDSIKIARSLRNGDLKPIYVPSLPTLEDRGLVRTRATLVKDLTRYKNRIKSFLYFHGIELPEAFNKPKTYWSNRFNKWLEDVQMTESSGKASLNVLLDQSRHLRASILQVTRQIRELAKTERYKMQQELLGSIPGVGLLTAMVILTEIETINRFDSIDQLCGFIGLVPSTNTSGDHEIIGDITPRGHSVLRTAIIESAWMAARLDPALNKCYHDYCKRMEPNKAIIRIAKKLVSRIRFVLKNNQPYVCSVVK

SEQ ID NO: 246051 - protein, 324 aa, unidentified
MIDGILGIDVSKNTLDASMSSCNKVRARSFANSSDGWRHLLDWLITQKIQQVHACLESTGRYSLGIACALYEAGHVVSIVNPAQIRDFARTKLGRNKTDGVDASHIREYCELFKPQPWAPPSEAHRRLGELQTIRAGVIAGLTEWKNRKNSGMVDAVAQSLADVTISHFNNQLEAVDEAIAQTIDNDSGLRRKRDLLLSISGVGETLAGVVLAELPGPDVLRSSAEVVAYAGLNPRQHQSGTSIDRVTRISKIGNAVLRAALYMPAMSAMRHNPAIAALVARLKSRGRLNPKQIVVAAMRKLLVLCFGVLKTGKPFDPAIAMGC

SEQ ID NO: 246052 - protein, 412 aa, unidentified
MQTLVQCGCGLDVHQATVVACLLVALKDGKVKKQVRTFNTTTRELVNLREWLLSEGCTHLAMESTGVYWKPVYAILEGAFELVVANAQHVKKVPGRKTDVKDAEWIAELLCHGLLRSSFVPPKPIRDLRDLMRYRRKLVESRAAERNRLLKLLETANIKLASVATDVFGVSGLLMLRALVDGKATPQEMAQLAKKKLRSKIPELELALEGKIEEHHRFLLKLQLDRLQAVEKDLTRLEQRIQDKLQPYAAQQVLLREIPGVDATLAAVIIAELGVDMSVFKSVSQLASWAGVCPGNNESAGKRKSSHIPKGNVYLKTALVEAANSAARAKGTYLRDKFYRLKARRGYKHAAVAIAHKILVSVYHMLSQQVSYNDLGDLYLDKLNKHHLTRNLVHRLERLGYTVTLTLEQKAA

SEQ ID NO: 246053 - protein, 298 aa, unidentified
MDDYIGLDVSMKETAVSIRRGGKRVWRGKCPSDPKLIADLIRKRAPSAKRVIFETGPLSVWFYHALSAEGLPAICIDARHAKAALDMAANKTDANDADGLAHLAEVGFFREVRVKGFDSMLTRTLVAARTRLVRICTELSNQIRGLMKTFGLIVPAGKGSTFEKNVRSLLVDQDGLSAIVLPMLEAWRGLRIRADELGRQLVAEARQNQACRILMSIPGVGAITATSFATAIEDPENFKRSRSVGAWLGLTTRRYQSGEVDYDGHISRRGDRQVRGLLFEAATVILTRSSAEGTVKLA

SEQ ID NO: 246054 - protein, 352 aa, unidentified
MEKRNTIGMDMGDRKHSICVLDHEGEVISRNTVSNTAVALRKCFKSQEPALFAIEAGTHSAWVSRVLEGLGHAVLVGNPRKLRAIWGSNEKSDVRDAEMLARIARADPKLLYPIQHRSREAQFDLLNIKARDLLVKTRKMQIAHVRCVVKSFGERISKCSAPCFPRRANEELPAELLEVLASVLGSIEELSSKITQYDKQIKQLGMEKYPETTVLRAVAGVGPITALAYVLTLEDPKRFKKSRDVGPFLGLVPRRDQSGDMDKQLSITKAGNVALRRLLVGCAQYILGAFGPECELREFGLKLAERGGKNAKKRAVVAVARRLAVILRRLWVDEAVYDHCHQQTRKKPAKAA

SEQ ID NO: 246055 - protein, 348 aa, unidentified
MKENHHASRSDRLGLSKVRFEVHGVDGQGNVVIRKTLRRGSVSTFFANLPPCLVGMEASNGAHYWARVLTDFGHKVRLISPQFVAPYVKSNKNDRNDAEAICEAVGRPTMRFVPPKSPEQLAIQALHRIRQRLVRSRTRLVNQIRGILSEHGIVIARDIWRLRRALAELTGNTPDDLNALVGVLMMEAHAELIELDRRIASYDRRIRELYRSSELCQKLGEIEGVGPVTATALVAAVGDRSCFKNGRQFAAWLGLVPKQRSSGGRNRLFGISKRGDRYLRTLMIHGARAALGKAGGKQDPRSRWLCSLRQRRHPNVAAVALANKNARIAWAVLSGNVSYEPARSVQAA

SEQ ID NO: 246056 - protein, 338 aa, unidentified
MGYYVGIDLHSNNNFIGIIDQENRRVLKKKSINDLSEITKTLYPYKREIQGVVVESTFNWYWIVDGLMDAGYKVHLANPSAIKQYEGLKYTDDTWDSFWLAHLLRLGILPEGHIYPKETRPIRDLLRKRLMLVHHKTAHILSMQSMVSRNNGIQMDGNAIKRMDVKELSGLFTDKHLLMSASCNYQVINFLSKQIVKIEKTVLSKVKLQETYKKLLTVPGIGKILAITIMLETGSINRFREVGNYSSYCRCVSSANFSNGKKKGKGNKKNGNRYLAWAYIEASLFARRYSPEAQRWYQRKISKSNRVVAAKALSNKLARACYYIMRDQVPYDSAKIFQ

SEQ ID NO: 246057 - protein, 344 aa, unidentified
MIYIGLDVHKCFSRMGCFDPATGEVHDLGSVGNDASALEEALEKVPSPRTVVLEAGRSSYHMAGLLESMAQEVWIVDPGEVRRLQHTISKTDRRDAAALAWWAAKGVLKPQWRPDAQTMDLRELTRGKTALTRLSTQVRTMIRLLLARHGHDCPHRDLMSERGQLWLEEVELEGHAGKMLAGLREILVVVQAKVDDFERMVEQMSKQHPEARRLRTIPGVGPFLSLALAVEIGDINRFPGPTQLRGYSGLVPTVYQSGDKDARGPLTKAGNRWLRYAAVLAAQRIGQMREPDPRLKRIFLSVAFRHGRNPAKIAVARRLLDLIYYMLKKGQDYRVSEPRAVTTA

SEQ ID NO: 246058 - protein, 446 aa, unidentified
MKKSSRMSVIHPHAAGVDIGAEFHVVAVPPDADAEPVRTFQSFTGDLHRMSDWLKSCHITTIAMESTGVYWLPAFEILEAAGFNVILVNARDAKNVPGRKTDVNDAQWLQKLHSFGLLRASFRPEHDISVLRSYLRQRERLTEYRAAHIQHMQKALMQMNVQLHHAVSDITGVTGLSIVRAIVSGERDPSVLIQYRDVRCKKTPEVLQQALTGNWQPEHLFALEQSVAFFDFYQEKIRECDDQIETSLLQLSTGTEEPEEVLPSARHRTKQPNQLSFDVRPLLWKITGADLTQIHGFGPYLALKFVAECGTDMNRWPDASHFTSWLCLSPGNKISGGKVLSSKTRRSSSRIAAALRLAATTIGRSDTALGAFYRRLSSRIGKAKAVTATARKLAILFYNALKYGQKYVDPGADYYEERYRNRVLDGLKRRAKSLGYSLQQDPELCV

SEQ ID NO: 246059 - protein, 418 aa, unidentified
MTKRKIGGHPDLNVVNPNAAAIDIGSTMHMAAVNPDAAAMPVRAFGTFTQDLHDLADWLRSCGVTSVAMESTGVYWIPAFEILEAHGFEVILVNARYAKNVQGRKTDVSDAGWLRQLHSYGLLRGSFRPAAEIATLRAYMRQRERLTEYAAAHIQHMQKALMEMNLQLHHVVSDITGATGMRIIRAIVDGERDPEVLAAFRDIRCHSSLDTIKAALVGNDREEHVFALTQSLELYDFYQEQIEVCDRRLEAAVGALTARADGELAPLPKARIKGRQHNAPSFDVRAALYGVLGTDLTQIHGLGPSLALKLVAECGTDLRAWKSAKHFTSWLCLAPGNKISGGKLLSSRTRRSSSRAAALLRLAAVTIGRSDTALGAFYRRLSSRIGKQKAVGSGQNMGVMRRVFCLRRSADHRELRPL

SEQ ID NO: 246060 - protein, 459 aa, unidentified
MYRKESKSKVDRTMPMVHPNAAAIDVGATMHMAAVGPDHALEPVRSFGTFTADLDQLVKWFVECGVETVVMESTSVYWIPIFELLDARGFAVFLVNARDAKHVPGRKTDVSDAQWLQRLHSFGLLRASFRPKGQIAELRAYVRQRERLLEYAASHIQHMQKALTEMNLQLHHVVADITGATGLRIIRAILAGERDPETLACLRHYSCQSSVETIAKALTGSYRAEHLFALDQALALYDAYHEKASACDARIEAVLKELTIHRDHDHGSAPPVSRRRNRTDQANALAFDVRASLFALLGKDVTAIDGLGPYLSLKLIAECGDDLTSWPSAKHFTSWLGLAPSNKVSGGKMLSSRTRRSGGRAAALLRLAAVTVGRTDTALGAFYRRLSSRIGKAKAVTATARKIAVLFYNAVRHGMDYVDPGTSSYETRYRTRVINNLHRRAKAFGFVLHPLEPGAGAVS

SEQ ID NO: 246061 - protein, 374 aa, unidentified
MSKIARIGIDTSKGSFELHGVNEKDEVVLRRTVRRRQFLEFMAKLEPTVIGLEACGASHHWARELGRLGHRVMLIPPQAVKPYVSPGRKNDKNDAEAICEAMSRPRVRARLVPVKSVEQSASQMLMGVRDSLLKRRTQLCNTIRGHAAEFGLVAAKGLDKIEPLLARIAGDEGLPALAREIFADLGQEHAELSKRIAQIDRKLAAFHRSNELSRRLMEIPIVGPVGAGLLITRIINPRGFRSGRLCAAWVGLTPKNHSTGGKQRLGGITRAGDESLRAVLVSGATAYIQQVRRGRIVPSPWLAALLERKPPKLAAVALANKTVRIAWKLMTSGGRYDPTHRVDREGPGASLYGGLRAEPLAPSPTAGHSHAVAA

SEQ ID NO: 246062 - protein, 348 aa, unidentified
MLADELDFVIGVDTHRDEHALALVACPSGARVQERLIGADERGYAAALAFAVERAAGRRAWAIEGTGSYGKGLARYLTQRDERVHEVERPKRQGGRARAKSDRLDALRAARSLIAAEKPALPRAAGLRESLRVLLQVRTSAVAARRVALNQLRALLVTCPEPLRAELRPLTRARLLRLLRAKRPRRHTDPQLRGTLLAMQLLAVRIEALTLEERTLKQEILPLARELAPQLLAEPGVGPITAASILLAWSHKGRLRNEAAFARLAGAPPIPASSGKVVRHRLDRGGDRKLNRALHTIILTRRRTDPDTIAYIQRRISEGKSDRDAVRCLKRYLARSLFRQLEAMPQPA

SEQ ID NO: 246063 - protein, 430 aa, unidentified
MNSNTQNKKIEAITEKTLVVGIDVGSETHYARAFDHRGIEYSKKPFKFSNDEAGFASFKAWILEYKEAHDKDKVVPGMEPTGHYWFNLGKFLQDNGMKPVLVNPHHVKKSKELDDNSQTKNDRKDPKVIAGLVREGRYMIPYLPDGVYADLRTASNMRFQIQSELMRILNRISRWFNIYFPEYKTVYGNLDAISGMLVLKTAPLPEDILTLGVDGINKIWRDAKLRAVGKKRAQILVNAAEHSVGSKEGAIAARMEIRMLIEDYESRNARLQEILALIEELVNKIPMTEKLLAIKGVGIKTVSGFLAEVGDISRFKSPKELQKLAGLALVENSSGKHKGETTISRRGRKRLRYLLFEVAMSLVAKNREFAELHNYYTTRKQNPLKKMQSLMVVAAKLIRVFYAMLTKGVDYDPKKMSEDIRRPMISLQAA

SEQ ID NO: 246064 - protein, 425 aa, unidentified
MASMTSAIPTAQPDRVVIGGIDTHKDIDVAALLDCAGMVLGTAEFPTTRAGYRQLLGWMGSAGHLGRVGVEGTGSCGAGICRQLSAAGVEVVEVNRPDRSQRRRRGKSDALDAAAAAEAACGGQRLAIPKSRDGQVEALRVLRLTRASAVKAGTKALQLLQQLIVTAPEQLPDQVGELPRMELIGCCAAWRPHSHDAADPSVATRIALKKLARRYLQLAEEISDSDTLLDGLVTDLAPQLIAVTGIGTDTAGQFLLTAGDNPERVHSEPAFAMLCGVAPLPASSGKTQRHRLNRGGDRQANRALHVIATTRKRCDHRTQAYLKKKIAEGHTRREATRSLKRLIAREVYYLLNPAPHTGRFLHPGQPAGAQTRSRWSPHARNDLDRAEAPAHHQKRRNRHLDKQGSIVGCTRSAQVAAHADRQKPR

SEQ ID NO: 246065 - protein, 397 aa, unidentified
MKGFCISLDVSKGSSFYQGFKGLDEPITKPKKIEHNLEGFKELLNLKEKIKKQYNEDCVVIFESTGIYHKPLQTYLDEHDFKYTIISPLLSAKVRKSDIRGTKTDAKDCASIAKVFYLKELRIYTKIDEIYADLKEKSRYYDFLVDEMKRWKIEFRRVLDIIYPGFDRVYDDLYGDFIQTFLLEYSHPEMIRKRRLDTIAKFLEKHTCHKEAYCIRQAQIIKEYAENCASGCSSKSYLVNQFDTVIHNLNAQIKHLQIVLEEIIELAKTLPNYDSIASIPGIGENLAARILAEIGDISRFNNVSQLVAFSGVDPQIYQSGQVSGLHLRISKKGNKKLRCLLYLAVTCMIKTSRDTSIVDFYKKKKADGLASKSALVASMNKLIRIIYSLCKNGCLFE

SEQ ID NO: 246066 - protein, 370 aa, unidentified
MGKSSTIYVGLDVHKDSIAVAYAAEDRDAEVSYLGPIGTRQCDIDQLVRKLQSKGGELVFAYEAGPCGYGLFRYLRKKGLRCLVVAPSLIPRKSGDRVKTDRRDAVQLARLLRSGDLTSVYVPEPGDEAIRDLCRAREDSMADLKAAKFRLKSFLLRHDIRYTGKADWRPAHLRWLAEVVCPIPAQQIVFQEAVRALAQAFERVERLELLLRDQASSWRLAPVVEALQALRGVQFTVAVTTVAELGDITRFSRPAQLMSYLGLHPSEHTSGVNRRQGGIAKTGNGHARRVIVEGAWAYRYPAKVSRQIQERQESLPDPIRDIAWRAQVRLCQRFRTLIARGKHPNVAVAAVARELSAFMWSIAKQVPIAK

SEQ ID NO: 246067 - protein, 338 aa, unidentified
MAIVFVGIDLAKNVFAVHGVDHTGRAALVRPAVARDKLLGLIAELAPCTVAMESCSGAHHWARQFSAFGHTVRLIAPKFVAPYRMSGKTGKNDAADAAAVCEAVQRPQMRFVPPKSLEQQSRLMVHRTRQGFVEQRTATINRIRGLLSEFGIVLPLKAATVRRRACECLEDLPGYGNTVIGDLLSELARLDERVARYDELIAKMATDDDRAKHLMRLPGVGPTTATCIVAMIGQGQEFDCGRQFAAWLGLTPRQYSSGGKQRLGRITKAGDAYLRTLLILGARSVLAAAKGKADAVSRWALALQERAGYWKAVVAIAAKNARMAWAALRRGEAFALPS

SEQ ID NO: 246068 - protein, 415 aa, unidentified
MAANLKLIGQRGIKEMNAVGIDVSKGKSTVAIMRPFGEVVAEPFEVSHTDVELRKLACFLEKLPGETRIVMEYTGSYWQPIAKVLHDSGLFVSVVNALLIYKYGNNSIRKGKTDKLDAVKIANYCLDRWTDLERYAPADQIRQTLKTCRRQYDQYIRLKVNLKNNLIALLDGTFPGLNTLFKSAPRDTDGHEKWIDFAAKFWHIECIYGSSEKAFTNQYQKWCARAGYRFSEEKAASIYAYAGSQVNTLPMTDAVKCLVTLAVSQLNTIIETVSMIQHEMLSLAAQLPEYPVVMRMFGVGPVLGPQLMAEIGNVRRFDRKQSLVAFAGVDAPPCQSGTFESKNRHISKRGSPRLRKTLFQVMSTIIQHAPADDPVFQFLDRKRQEGKHYYVYMTAAANKFLRIYYGTVMAYLEKL

SEQ ID NO: 246069 - protein, 464 aa, unidentified
MEVVQRRCCGIDVHKKKLMVHVLPAEGQKESKPLEREFRTFTRDLRELRQWLKECGVSEVVMEATGQYWRPVWNVLEEEISGLMLVNPQHVKALAGHKTDRIDSKRLARYLERGELVGSFIPPRSIRELRDLTRGRIHLVEEVNRVKNRISALCETGNIKVSSVATDLFGTSGRRMLRAVADGNRDAGWMADYAQGRLRQKRQQLALALEEDFTECQRWMLREALAHLKFLEGEIAVLDAEIGSRMQPYEDRIQHLITIPGVDRIVAWTILAELGPDVSVFPDAQHAASWAGMCPGNRESAGKQMNGRTRKGNPYLRRDLCQAAWAASHTKETCLAALYRRLRVRCGHTKAIFAVAHHILIVAYQMLRNGEDYKEQGENYFDRQNKPKAVFRLVRRLSGLGYEVTLHPVTASAPTSIAPTPPQDALRPRKGRPCKCQSRGIACKHKSGPTPPDSKLPDRSNPGT

SEQ ID NO: 246070 - protein, 424 aa, unidentified
MKVTYQTCCGVDVHKSFLVATIVKTSSGIEPSYQKKRFSTFNNSILEFKQWLLDNDCHDVCMESTGKYWVPVFNLLEDEINVVIANPKWVKAVKGNKDDTKDSKWIGDLFRLGLVKGSYIPCKIVRILREYTRYRYKLVSCRSSEKNRYQNALTVCNVALDSVVSDIFGKSSTSIIDYLLEQSGTSINHEEIASKLLRSLKSKEDAVIESVEGYQMTDAQKYRMRLVRAHMDYITAEINDVDKMIENMISSNSDFENAVQLLCTIPGVKRDSAITIISEIGTDMSQFSSTKRLCCWAGLTPGSNESAGKKKSVRVTRAGVYLKPALVQCAHAAVKSDKSPYYKKKYESLVKRRGKKRAIIAIARMILTAIYQMLSTGEQWNPSDLYKIDMPAALVEKQKAKAIRQAKKLLQREGILPPDEPLAS

SEQ ID NO: 246071 - protein, 408 aa, unidentified
MKTLHRRCAGLDVHSDSVVACARVIVRTKVTHEVRRFSTATRDLLEMADWLAAQGITHVAMEATGVYWKPIWHILEGRFELILANAAHIRNVPGRKSDVNDAVWISDLLAHGLIRASFVPPAQIQDVRDLTRTRTQLAREIAQHIQRIQKTLEDANIKLTSVISDIVGMSGRRILKAMIAGETNAAKLAELGSTRLKCPRAELTAALDGRVTAHHRFLIAHHLSLIEDMERHIAAFDARIEELLVPLRDALAQLITIPGVSRVSAQVILAEIGADMTPFSTSGHLLSWAGLVPRLDESAGKRRSTRIRKGAPWLKPVLVQCAWGAARTKGTYYQAQFLRLKARRGPKKAAIAVAASLLTAVYHMLKNGTFHQDLGADFLVKRDKARIATKLANRIKDLGYDVSFTPAA

SEQ ID NO: 246072 - protein, 377 aa, unidentified
MSKVRWIGLDVHADTIAVAVAEPTGEVRSLGVIPNRPESLRKLVKRLGPAEQLRACYEAGPTGYVVYWQLTALGVRCEVMAPTLVPVKAGDRVKTDRRDALKLARSYRAGDLTPVWVPDAAHEALRDLVRGREAAKRDQLRARHRLSKFLLRHGWRPPVGTKAWTQAYLTWVKQAVHCAHLAQEATLLDYIHEVDHVAERVARLDRAITEAVVVAPPAMRAVIDALQALRGVALVSAVTIVAEVGTLSRFRRPPQLMGYGGLGPREASSGARTWRGGITKTGNAHLRRIVVEAAWAYRHRPAVIGALRRRQAGLSEPVKALAWKAQHRLHGRFRKLLGRGKCPQQAATAVGRELLGFIWAIGMAVEAEHRQAPAAAA

SEQ ID NO: 246073 - protein, 426 aa, unidentified
MGISKPAGLKSPCGEVKIVNPLFVGIDVSSKNNVAYLMKPDGSKHSSFSVQNNLGGAKLLSERIVSALSSMRLSDVVIGLEATSIYGDNLVYALREDGGLGRFRRKIHVLNPKQVKKFKEAYPDLPKNDWVDAFVIADHLRFGRIAKEVYMDDYRYRALRTLTRARFDVIQNLTREKQRFANYLFLKCSGMAQDKGIQNTSATTIALMERFETVDNLANADLDDLTAFDAETGRGRFADPESTAKAVQAAARGSYRLPKTVNDTVNQAMSVSIASMRALKEQVKVLDKAIEQQFEIIPNTLTSIPGIGKVYSAGIIAEIGDIHRFNSQASVAKFAGLVWTQHQSGEFEAEHSQMIKSGNRYLRYYLLEAANSVRRCDSEFRRYYDLKFKEVNKYQHKRALALTARKLVRLVFRLLKDNRLYIPPEG

SEQ ID NO: 246074 - protein, 345 aa, unidentified
MDKMAACGIEVSAQELVVALTGKKGEAVLHRFANTAVGHGQLLRVLTRGGKRVSVCLEATGMYGLDVAVLLSAQEGIEVMVANPRAVRHFAQAMMQRSKNDQLDAVVLWEFVARMPFTAWARPEKNTLALWALARRLEALTKQCTAEKNRQHAAGASQAIPECVRRSIARTLRFLQREIKQLRAEALRCIAAEARLQKRYDLLRSVPGIGEVSAMHILAELLLLPGDRDVRQWVAYAGLDPREYSSGTSVRKYTRISKVGNRHLRNSLYMPALVASRREPHLRGFYQHLLARGKKKKPALTAVARKLLHAIYGMFRSGRAYDGALSYALPASARFPTVAPVQSST

SEQ ID NO: 246075 - protein, 348 aa, unidentified
MKYYCGLDVSLNKTAVCVVNQDGTIFREGEIPSEPAAISQWLEKLGLPIERLGLEAGGLSPWLCHELLASRWPVICIETRHAKAAMKAQQVKTDRNDARGLAHIMRTGWYREVHVKSHDSQELRMLLKNRRFLLGKRIAIDNDIRGSLRTFGLKLGKVTPATYERRIRELVGDNERFQACIFPMLEVRRVLIEQCKKLEKLILDTVKEDETCQLFMTIPGVGPLTALAFKTFVDRPQRFHKSKSVGAALGLTPRKYASGEVDYDGHLTKCGDAFVRAHLFEAAKSLLCRSSKSSELKSWGLRLAKRSSKKKACVAVARRLAVIMHAMWRDGTEFQFSEAGPKTAAAGG

SEQ ID NO: 246076 - protein, 258 aa, unidentified
MQNVALIGIDLGKHSFHIHCQDKSGNALLRKKFTRTKLMQFLATCPSSVVVMEACAGAHFMARRISDIGHEAKLISPQFVRPFVKSNKNDFIDAEAICEAASRPSMRFAQPRTETQQAMRALHRVRESFIRDKVKTTNQIHGFLLEFGISLPTGDAAIKRLSLVLAEHEVPEYLSRLLMKLHAHYLYLIEQITELESELNQSIKADATAQRIMTIPGVGPMTASLLSSQLGDGKQFSCSRDFAASTGLVPRQYSTGGK

SEQ ID NO: 246077 - protein, 346 aa, unidentified
MLHAGLDLSRKRLDYHLLDGEGETVEVGTAPPDADGLRGLASRLHRHGQPLRAAIESMTGARFVHDQLELYGLEVEIADAVKVKGLAPLACKTDRIDAWVLAELSRRELVPAIWLPDPAVRAERERARFRLHLARHRAALKQRVHATLMTHGTPCPVSDLFGVRGRELLERLDLPEPWAGDVEASLRLIDDVEREIAAIERELQALGAEHRYLPLLTTIPGIAWVLAYTIAAEIGDIARFSSPRKLCGYTGLCPRVYQSGERDRRGPLGKNGPRYLRWALVEATSHASRHPAYHERYERTRARLGKQRGARVAQVELARRLAEAIWHMLTHNRPFAPAGAPAPMTA

SEQ ID NO: 246078 - protein, 417 aa, unidentified
MALKIVYKICCGIDVHKTFVVACIASTNDKGVTSYESHRFSTYTSGLKTLLQWLLDRNCKDVCMESTGKYWVPVFNILEERGITTTIANPKWVKAVKGNKDDTKDSKWIGDLFRLGLVPGSFIPSKEIRVLREFTRYRYKLVSMKSSEKNRFQNAFTVCNVALDSVVSDMFGKAATAITDYLISADSFDAEYCTSLLQRSLKKKADSVIESIEGYSITDEQKLRMRIVRSHLDYIQSAIAEVDSAIDAMVTQHEGLLALLQTIPGVDRNSAITIISEIGTDMEQFGSSKRLCCWAGLTPGNNESAGKKKSVRITRAGVYLKPALVQVAHAAVKATDNSYYRLKFEQISKRRGKKRAIIAIARMILTAVFQMMSTGEVWNPTDLFKVDMPQALKEKQLEKAIKQATRFLEKQGVFTPA

SEQ ID NO: 246079 - protein, 345 aa, unidentified
MTRIHTIGLDVSKNVFQVHGADKSGARVLKRKLQRKEVAGYFKRLKPCVVGVEATGGVHYWGRLLTAMGHTVKIMPAAYVKPYVKTNKNDVIDAEAICEAVRRPTMRFVPVKSETQQAVLTMHRARSTLTAQRVQVSNAMRGFLSEFGIIVPRHRQGTDEVLRLADGEPSRVIPPMAQDVLRLLAEQYRLMMKQIKTIDSLIGKWSRANPECKRLETIPGVGPIAATALVASIGDASQFRSGRQLAAWMGLVPRQYSSGGKTILGHIPKRGNSYLRRLFFMSSMSLIISKSKHRLTRWAHKLLRRKPYRVAVIALANKLVRIAWAILVRGGEFRAKARGPLPART

SEQ ID NO: 246080 - protein, 390 aa, unidentified
MNRTEGKRIIGLDMHPDVFAAAALSADALRQHADWVHDRLPTGGLEAWAKKHLSKDDVVVLEASGNSFEVAARLHALGHTAVVLESAQAGKIRENFCNDDRHSALKLAKVYRSGLAKEVWQPDAKTREYREVFFAHRNAVKDATRCRNRIRSFLNEHCVRLKTGVRLTEASGEATAKAAKAWTPLQAELLSDAFAQLREVEVRRKKLERVMVRELIANVRWASLWRLMGIRHRVAFALMAMVGDVHRFPTAKKLVGYLGLAPRKDQSGNDKKGHDTGVGRFGRGDVRGLLIQSAHNALTQRQSPLHKWGWKLLVKKHRNQAAVAVARKITVSVWHLLMGHFSPLVDATEHLRMKLLKLATLIGRDVLNSLGFANREAFVNTQIKSIQLSP

SEQ ID NO: 246081 - protein, 349 aa, unidentified
MKQVITIGLDLAKHVLQVHGADAEGSPVFNRKLRRSEVLRFFEKLPPCLVGMEACGSAHYWAREIAALGHEVRLIPPAYVKPFVKRGKTDAADAEAISEAVTRKTMRFVPIKTAEQQAAAMVLKTRALLVRQRTQAVNALRAHLAELGIIATAGLAKVEALVAIIRDETDARLPAAARFALMAIADEIEASADQIERLERAIVVEAKRDEDMRRLTTIPGVGAITAATIKALVPDPGGFKSARHFAAWLGLTPRSHSSGGKERLGRISKMGNPELRSLLVVGATAVLRVVRNDVRARPGLKALLARRPFKVAAVAQANKTARIIWALLNKGGSYRRPDPFPLAVTAVTQ

SEQ ID NO: 246082 - protein, 411 aa, unidentified
MDVFCGIDWAEGHHDVAVVDRDGNLLAHQRISDDAAGLAALLELLAGHGDTPDDPVPVAIETPRGLLVACLRATGRKVYPVNPMAVARYRDRHSVTGRKSDKGDAAVLAGVLRTDMNMHRPLPADSELAQAIAVLARAQQDAVWDRTTAHNKLRSHLREYFPGFLHAFAQVRSGIMRPEARAILAAAPGPAAAATLTPAQLRALLKKAGRVRGIDAEARRLRDAFRQEQMRQLPLVEQAMGRQTLALLRQLDAACASADDLEQAATESFNQHPDAGIITSFPGLGLLTGARVLAEIGDDRSRFQDARGLKAYAGSAPITRASGKTRSVTHRKVKNNRLASAGYAWAFAALTASPGARAHYDRRRDAGDRHTAAQRNLFNRLLGCLHHCLATGQHYDETTAFPNQAATSAAA

SEQ ID NO: 246083 - protein, 346 aa, unidentified
MEVLHECCCGLDVHKKSITACIITPKGKEIRTFATMTQNLIELVDWVKSQHCSHVAMESTGDYWKPIYNLFEPEDLHPMVVNAQHIKAVPGRKTDVKDAEWIARLLRHGLVQGSFIPNREQRELKEIVRYRRSIIEERTREVNRLQKVLEGGNIKLSSVASNVLGVSGRNMLEAMIKGERDTSVLADFALKKLKAKKEQLKLALEGRLETHQLHMIEKQLAHIDYLNELIGELDEEIEKRMTPFTEDLKIVDSIPGVGKRTAEQILAETGVDMSRFPTPGHLCSWAGMTPGHDESAGKKKSTKTRKGNKKLRSALTEAAKAASRQKNTYLSAGVPEGTLLLANLVF

SEQ ID NO: 246084 - protein, 401 aa, unidentified
MNAVGIDVSKGKSMVCVMRPFGEVVLEPFEVLHTAQNLRDLAEKLKALDGETRVVLESTGNYHKPVAFVLHDAGLFVSVVNPVLIHDYDNNSLRRVKTDRKDAVKIANYTLDKWTRLRQYLPEDDTRLALKNCYRQYQQAVAIRTMLKNNLISSLDLTFPDANKLLASPPKSNGCEKWVDFIGDFWHSECVSSLSEEVFAKKYLKWCQKHGYIFTRSKSDEIYACALNSASLPKSPTSKLLIQQQVAQLKAVSQSVAAFQQEMLRLSQQLPEFDTVMEMYGVGPSLGPQLMAEIGDVRRFSSKKSLIAFAGIEPLPNDSGKVVGNDKGISKVGSAVLRRTLFLIMSVILQTQPQDEPVFQFMNKKRSEGKPYKVYMMASANKFLRIYYARVKAVMDSERSQ

SEQ ID NO: 246085 - protein, 396 aa, unidentified
MVTVGIDIGGRTHVVARCRDGQARADRETVRVSQSRAGFASFDAWLERQPEPVTLMAMESSGHYWMPLASHLRRREIPVAVVNPLAAKYFARSRLGRTKSDPADARSLAEMAMRDSPATRDPLAGAELRQAARFAMTLVTEQAKVCQRLIRLVELGFPELGELFDDPTCRTARGVLRIAPTARAATRRRTSTLANANAGPGRRRLGVTKAERLQAAAADSIAVPELDAEVAFEVGLLLDQYDLLERQIEDADRRVATLLDGETARRLRTIPGVGPSIVATLLAEIGDIERFSDFDQLLAYAGVHPAERSSGKKGSNPETSWHMSKAGNSHLRAAAYRMAIVGVQHNPVIAAHYARKRAAGKSKMNALGHCMRKALSIVWGVWRNGADFDPDWGVEA

SEQ ID NO: 246086 - protein, 389 aa, unidentified
MYFVGIDVSKYKHDCFILNDLGEVVVSHLVIANSQTGFSVLLSTLKSLDDSHNIRIGFEATGHYTSNLKRFLENAHYSFMESNPALISKYIHSQTLRKTKNDSIDARSIAHWLMTVDYKPYPIGFYHTYSLKSLTRLRDTLVRQRTLYMVKLTNILDHIFPEFKPFFKNRFSQTALFLLEKYHTPDKMARMKTTSYDPIRCVSRGKFSMQRFLVLKDLAANTVGDSNDIFETQLLSVLNLYRLVDTEVQRLESEIISLITELNPRMLTIPGIGPISAAIIYSEYGDVNQFPSPSQMLSFAGLEPGYFQSGTMAFTGKMVKRGSSHLRYALMNCTMPLIMNNMVFAAYYHKKRKEGKPHRVALSHVAKKLIRVIYTLETTNVPFDPSKLR

SEQ ID NO: 246087 - protein, 337 aa, unidentified
MKRYLGVDLHRTQFVVCTRWEHGEQEIRQWRIGELSKFVAQLQGEDQIAVEAMGTTARFYDAVAGRVARVVVVNPHQFKVISESVKKTDRKDAAALALYLEKDLLPEVRMKPKQNRELMHLAETRDLLVKQRSALKGKINNLLAMQGIELKREALSSKIALERVLALPVSGMVQLELRILVEQIRSLSESIAELDERLEEEGQQLPGYENLTSIKGIGWLSATVLLTVIGKISDFADESKLAAYLGLVPKIANSNESERSGRITKQGNKLARTALVQCGLVAKRYSPYLQAFYERIKQRRGGGKAKIALARKLVKIVYDTLKNQWVFEDFPSFTLAA

SEQ ID NO: 246088 - protein, 374 aa, unidentified
MAITTDRDGGDSHHQHAAPPDRPADHHRRGHPRRRARRGRARPARARLDELPIPTTQAGYDQLERWAISFGPVDAFGVEGTGSYGAELARVLRRRGYRVIEVNRPDRATRHRRGKSDPIDAEMAARAVLSGVAAGTPKHADGDAEMVRMLKMAKDSAVKTRTQALNQIKAILVTAPAQLRESLAGLAVGKLLDRCAAFEPGELTTPTAVAQHTLRLLARRNLALRAEVKALQADIARLATRAAPHLLDIFGIGPDGAAQILVTAGDNPQRLRSEAAFAALCGSNPIPASSGKTNRHRLNRGGDRQANATLHRTAVVRLRWHQPTQTYTARRLAEGKSKAEIMRCLKRYIAREIYQVLCPTPRKDGVGKDLAWAA

SEQ ID NO: 246089 - protein, 345 aa, unidentified
MKITTIGIDLAKTLFQVHGVDKQRKAGLKKQLKRKDVMSFFANLEPCLIGMEACGSAHYWARKLSELGHTVRLMAPQFVKPYVKTNKSDRNDAEAICEAVGRPNRRFVPVKTAPMQAVLALHRARQRFVKARTAQGNQIRGLLAEFGIVIAKGISHITERLPAILEDGENGLPGMMRELLQRLDENLKDMDKQVAELERQIKLWHRGHEPSRQLEAIAGFGPITASAFVATVGDAKSFKNARQVPAWLGMVPRHEGTGGKAKLGRISKRGDVYLRTMLIHGARSVIAHIERKPDHADEWLKKLLARRNKNVAAVALAAKNARIAWALLAHERSYQHDYVATRKAA

SEQ ID NO: 246090 - protein, 387 aa, unidentified
MPQPNDLSRSLVALDHDSTIIAVVEMSQSSWLVAGMLPGIERQPRKKLEPSAERLLGLLHRWRDEAVKAGRNITRIAVAFEAGRDGFWLARWLEARGVEAHVIHPSSVAVSREHRRAKTDRLDTELLKRGFLGWLRGERGHCTMARVPTIAEEDAKRPNRERECLVGERTRIVNRMKGTLARLGIRNFKPTLRKAAERLATLHTPEGSALPPNVSAELRRDMARLGFVVSQIKEIEEARQERLEQEPETGPHAMVRHLARVVGVGVETADMLVNEVLSRPMRDRKAVARYAGLTGSPDESGAKRREQGLARAGNARVRRGMIQLAWRFLRFQKESALARWYQARTADSRAGTRKTMIVALARKLLIALWRFVTTGETLEGVILRPAG

SEQ ID NO: 246091 - protein, 343 aa, unidentified
MQAITTIGLDIAKSVFQVHGVDAAGNVVVRRQLKRRYVLPFFQKLSPCLVGIEACASSHHWSRELQALGHTVRLMPPAYVKPYVKRQKNDAADAEAICEAVTRATMRFVATKTPEQQSGLMLHRTRHLLIRQQTAVINAIRAHLAEFGIVAPVGRNGVEQLLGVVADPSDKRVPPIARACLAALGAQLRALKAQILEFDRMIIAWHRSNETSKRLDDIPGVGPALATALVASVADPKAFRSGRNFSAWIGLVPKQHSSGGKDRLGTISKQGDRYLRGLFVAGALAVIRYAKIHGTKHRPWLTALLARRATKVAAIALANKIARMTWAMMAKGERYKEPVALAA

SEQ ID NO: 246092 - protein, 343 aa, unidentified
MKFSRFGVDLAKNVYQLHGVDRSGRMMLKRRLKRHQWMQVLLDKTDPDCVIGMEACAGAHHWARQLQARGYTVKLIPPQFVKPYVKSNKSDAKDAEAICEAMSRPNMRFVTVKRVEQQDIQATHRIRAELMTQRTAKANQIRGLVAEYGLVAPKHLSSLRAAIPCWLEDAENGLTADFRALLQGVWKDLLLLDDRVGEMDKLIKRLAESNEDCVRLQQLRGVGPMIATAMIATVGDARQYRTSRQMAAAIGITPKQHSSGDRDRLLGISKRGDVYLRTLMIHGARAVVASAKHKDDPLSRWVTGIATKRHPNVAAVALANKTARMAWAMLRNETDYDPDFAIR

SEQ ID NO: 246093 - protein, 340 aa, unidentified
MQITTIGFDIAKHVFQVHGIDADDKVVVRKQLRRSHVMAFFEGLAPCLVGMEACATAHHWARELTKLGHEVRLMPAKDVKAYVKRNKNDAADAEAICEAVRRPTMRFVQVKSAEQQGQLMQHRTRDLLMRQRTQLINALRAHLAELGIVAAQGREGVKQLLATVASERDPRLPVDAHASLIVLAAQLQAIQTLIGSIEKRLVAHHRSNEASRRLATIPGVGLIGATAIAATVTDPKAFRSGRDLAAWIGLVPRQESTEGKHKLGPISKQGDQYLRRILVVGAHSILRRAKHDPEKYPWLTRLLARRPFRVVAIALANKMARVAWALLAKGGTYRPQLAAA

SEQ ID NO: 246094 - protein, 355 aa, unidentified
MSLPIEEREVILGVDTHLDVHVAVLIDVVGRVVATHSVPTTAIGYEQLIGWTGSFGRLSRAGVEGTGTYGAGLARYMRERGVQVLEINRSDRSRRRLRGKSDPTDAENAARAVLAGDANAIPKAQSGVVEAMRAINMARRSAVKAKTQAINQLRALLVTAPESIRTTLWKVKPEQCVARCARLQSLGETPLLKALTSTLRMLARRWMSLAKELRQLDTALDELTKRAGRRLLTRFGVGPQTAATLLVTAGDNPDRLRSEAALAALCGVSPLAASSGKTTRHRLNRGGDRAANNALWTISMVRMRSDPRTRAYVARRTTEGLSTKEIQRCLKRYIVRELYPLILADLADAARPNLT

SEQ ID NO: 246095 - protein, 370 aa, unidentified
MLDTTTFIGLDVHARSIKAVSLDVMTGEVRAATFGYDAGAVAEWVRSVDPRARCVYESGVTGFDLQKRLSGLGVDCVVGAVSKMIKPSADRRRKNDRNDAEFLARMLSVGNVVEVWVPDDECEAARDLTRALEDARDDLSRSKQRLSKFLLRHGLAFDERTPTGRRKGNWTRAHWSWIESIRFAEGADNDVLAYYVDAVRRAAEEKARLEGLVEAEALEPRWRRRVDSLRCLKGIDTASAADLVFEAGEFSRFGNARSFAAWVGLTPSEHSSGESDRRGAITKAGNKHLRKTLVEAAWHYLTCSGRPKGLAKGQAPDPGARRHAAKGVRRLVERREALLARGVHGNKANVATARELACWVWAVGLMAEEA

SEQ ID NO: 246096 - protein, 336 aa, unidentified
MGIDVAKAELVIAKGNIRTNGKNTAASKNTAAPQTIANRERNIKRWLKALPQGSALIVESTGIYHRLICDLAFELGFTVYLINPHWLCSYRKAQGKRAKTDRCDAQLLLQYGEQNHQELRPYQPVSPEGQRLTQLLRERSQVMSQLVALRQSLAPLKGNRISPLDIPIEEKAGSIIQELKKLVALFDLRIENLVKTQSGWDEQAQRLRQMPGLGPLSVAALLAAFERGDFETSESFVAYLGLDPVACDSGTHHGKRRISKKGDPIVRKTLYMAATAAMRTKTWKEFAQRYQDRGLHHNQVACIVARRMAVTVWCLLKRGTEFNPEKLFRLNPCTQT

SEQ ID NO: 246097 - protein, 349 aa, unidentified
MTTQRLSYVGQSVYVGVDVHKDTYAVTCVCNKQIVKTATVKADPAGLTASLSQWFPGARLYTEYEAGFSAFVLHRALTKAGIMNIVVNPASIAVAANDKVKTDRRDSKKLALDLSDGRLQGISVPTEDEELARLLPRTRAQIVEHRATIARQIKAKLHQFGLIAPASRRLISNRYVREIDAWPLPPDLRVSLTFLAEQWRFATRQLIEMRRLLREQAKAHPAIEQVYRSVPGIGEVVARTLATELGDMTRFANERALFSYTGLTPSEYSSGPSVRRGHISRQGSSRVRHLLIETAWRARPRDAVLKEIFDRIAATRGKKRAIVAIARRLTGRIRACFRQGTTYAVGTYA

SEQ ID NO: 246098 - protein, 346 aa, unidentified
MRKTICAGIDLHGNNVMIGVVDEKGKRLKHQKLPCDLERIDNFLHPWKEQLKSVAVESTYNWYWVVDGLRNRGYPVQLANPGAMQQYSGIKHADDKNDAFFLAELQRLNILPTGYIYDPALRPVRDLLRRRMGLVRQRTALLLSFKSLYARTTGQTMPLVRLKAMSPEESKGLYQHQDNCLIACLHKQHIDHLDQSIGLIEKRVLSCARKLPRYEKLMSLPGVGRILGMTIRMETGEINRFKTPGQFASYCRTVEAKRLSNNKKKGENNTKCGNRYLAWAFVEAANFAKRYDEDCRRWFDRKSAKTNKILATKALGCKLAKVAWYVMSQGGLYDRERMFAQLKREK

SEQ ID NO: 246099 - protein, 400 aa, unidentified
MLLFFEVITMIFVGIDVAKDTHYAAVSDDSGAVLVKPFAFQNNAEGFCLLLKKLSEFDRSKLLIGLESTGIYSENLICFLYESGFRLAVINPIQTATLRKTAIRKTKTDKVDTMLIIKSLMVNSYRLYSQRDADSLKLRTLCRFRQNLKKSKARLKIQLAGYVNLVFPEFGKFFKSGIHIAASYALLKKYSSPKEIAALRTSTLCTLLSKASHGRFGKDTAEALKSLALSSVGVKNPYISIQIAQTIAQIELLEQQIKDLNSAIEEAMESINSVLMTVPGIGAVNAACILGEIGDIKRFSKPCKLLAYAGLDPTVRQSGQFTAKSTRMSKRGSALLRFALINSAWQLTLNDTTFKAYYDLKRSQGLNHYGALGHVAHKLTRVIFKLLTSVTPFNPAKLVA

SEQ ID NO: 246100 - protein, 339 aa, unidentified
MLIIGCDYHPSFQQIAWLNTATGEFGNRRLEHHDEAEAFYRGLRGQAVVVGMEATGGTGWFRQLLRECGHGLQVADAARVRARATRRQKTDERDAELLLELLLDPKFVWLTMPTAEQRDRRQLLLHRHRLVQMRTRVKNQLQSLAMDQGVRQQKKLWSSKGRTQLQALSLPPWTAVRRGDLLQLLDDLDQRLVGLDREVRQQAYGSAEVRRLMTHPGVGPVVGLAFQLIILDPARFAGSRQLTSYLGLIPSEHSSGGKQRLGHITKQGNALLRGWLVEAAQVAVRRDPQWGRQFRRLAMRKNRSIAIVATARKLAVRLWWMWKRGLDYRQMVQSGSHVE

SEQ ID NO: 246101 - protein, 430 aa, unidentified
MCYRISGIDVHKKMLAVVVSDVEVDGEFRFERRMFGSNPEQLRSLAAWLLEQEVEEVVMESTAQYWKPVWEALERYWKPIREKREGARRKSGTLHLAQAQSNRGRQGRKRDFPDAERLVKRLVARELTLSFVPDAEQRLWRTVTRKKNQLRRDRVRLHNQLESLLEEAHIKLSSLVSDLLGASARRMLKALADGETNPAALAALADQKLRATPEQLCDALGVCTDLKPVYRRLLKMALEQLQFLEQQIGQLDQELATLLHPYQDAVQRLAEVPGLGVDSAQQIIAEVGPAAAVFPSAKQLSSWVGACPGDEESAGVNYSHRSPKGNRQMRRILSQTANAATKTKGSIFDIVYRRSVTRLGHNQAIGAIAHRQCRLIWLILHQGIRYEERGPAVNKQSKQRRTWKMVRQLRSLGYRIQPPNPEQPSQAQAQ

SEQ ID NO: 246102 - protein, 332 aa, unidentified
MENFYFIGVDISKKKLDFCVMFEGKVVHEEETANHQNAIMSLIRHLAKDYGIDGSRMLICAEHTGQYTFPLACACKAAECKLWLENPAEIKYSSGIQRGKNDKVDAKRIAVYASRFQDKVQYYERPSEDIERLKQLESERSLYVTDLAKYKGQLKDQREYMPTALYERKVKRLTALMENLEQAIQAITNEMDEVITSCPVLFRQMELLMSIDGVGRVVATNMIITTEAFTRFDDPRKFNCYAGVAPFSYSSGTSQQSKARVSHRADKVMKRLLHMAAIAVTHRNGGELKRYYDRKVAEGKNKMSVINALRAKIVARMFAVIKRNELYKPILS

SEQ ID NO: 246103 - protein, 356 aa, unidentified
MTESSDYESVQVFIGVDVGKDAHHAVAVNRSGKRLFDKALPNDEIKLRALISDLKQHGQILLVVDQPATIGALPVAVARSEGVLVGYLPGLAMRRIADLHAGEAKTDASDAAIIAEAARTLPHALRTLKLADEHIAELSMLCGFDDDLAAQSTQASNRIRGLLTQIHPALERVLGPRLDLPAVLDLLQRYPSPEKLASLGEKKLATQLSKLAHRLGKSLAADISQALTEQSVVVPGTNAAVIVLPRLALQLITLRKQRDEVALEVEQRVLAHPLYPVLTSMPGVGVRTAARLLTEVACRAFASAAHLAAYAGLAPVTRRSGSSIRGEHPSRRGNKTLKRALFLSAFAALRDPISRA

SEQ ID NO: 246104 - protein, 310 aa, unidentified
MSSSVYVGIDISKHRVDVATEPATPPTHFPQTEAGIGALVTHLQPLGPALIVLEATGGFETAVVTALAAADLPVVIINPRQVRAFARATGRLAKTDAIDAAVLALLAARLQPPQRPLPDAALQDLKARVARRRQIREMITAEQQRLPQTRGRIRADIEAHIAYLKARSDEIDTDLRTLIAESPHWRATDDLLQSVPGIGPTTAAALIADLPELGRLAARPLAALVGVAPLNHDSGTRTAPRITWGGRAPVRSALYMATLTATRYNPVIKAFYQRLLAVGKPRKLALIAAMHKLLTILNAIVKTQKPWVHA

SEQ ID NO: 246105 - protein, 433 aa, unidentified
MQDVHDEPLFAERVAGLDIAKAEVEVTIRVPSDTQPGRRQQEIRTFATTRRELDALAGWLRSWGVTKAGMEATGDYWKPVFFLLESRGLDCDLYNAAQVKALPGRPKTDRADSIWLAKITERGMISSSFVPPEPIRRLRTCTRYRRHLTQARTAEKQRVEKLLEDGHLKLSSVISDIHGVSGRDMLDAIAAGQRDPRALAQLARGTMRGKIRRLEEALDCSFFTDEHAAVLAMMLTTIDYYTAQIEQLTAKIEVLIEPYLHQAGQLDEIDGIGAICAQDIIAEIGTDMTVFPTASHLVSWARWSPQVKQSAGKRKGSNATGRGNPYLGAALGESTASAGRTQSFLGAKYRRLSRRMPKKKALVATGNSMLTIMHALLSDPDVRYTDLGADYYEARTHTRRQARNHVKSLERLGYQVTIQALNPDTGEPLAAAT

SEQ ID NO: 246106 - protein, 316 aa, unidentified
MSEPVYVGIDVAKASFEVAASGEMQTLSLGNDQAGHAELCQVLIPLAPRLILLEATGGHERLLALALAAAGLRVSVINPRQARDFARCMGRLAKTDHIDAQVLRGFAELLDAQGHEPRALADEQQRELTALVTRRRQLVAMLVAERQRLALAHPKAKASILVIMDAIAAQLNDVDGQLREHVQAHHADLAKLLTSVKGVGPTTASTLLAQLPELGRLHRKQITSLVGLAPMNRDSGTLRGQRHIFGGRADVRRVLYVAALVGTRFNPVLKAFYAKLLAAGKPKKVALVACMHKLLIILNAIARTKSPWSNELAGIV

SEQ ID NO: 246107 - protein, 430 aa, unidentified
MEASIATTGAVTAYIGIDWADQKHAIALRSAAEPNKIEHQLIDQKPEALMEWIGGLEQRFGTQGKILVCLEQSRGALIYHLMGYDFFELYPVNPLQLARYRETFSPGGAKDDRPDSELLCELLYCHRERLRVLKPDSVLGRKLNFFNEGRREAVDQRNRLSNAIKSQLKVYFPLALELLDQDTSTALAADLLLGWPTLEAIQKQPAHRLRKFFYGHNCRGEQRMLKRLELVQKAKPLTQDSAVIEPAALRVQLLARQLKNLLPDIARYEDKIAQLFAAHPDRFLFENLPGAGEALAPRLASAFGSDPQRWESALEIATLSGIAPVRRASGMKSGKKGQRKASVHFRQACPKFLRQSFHEFAGCSIRYCSWAKAHYDALRARGKGHHAAVRAVAFKWIRILFACWKQRTPYDPQRYLQALQRRGSPLATAC

SEQ ID NO: 246108 - protein, 402 aa, unidentified
MVKPSGQIVDPRGLFTNGNVRMHYTACSPTLAMPRERLLFVGMDVHKDTHAAVGATAFGEKLFEISLENNRADFDRLIKQSRLVASESGLGLVFGLEDSTAYGLRLAKHLFANNLLVKTVSPIYVDRERKYETHPEKNDSLDAYAAAKVLIQRIDTLPTYTITKQNELAKEIKELTLDREFLVKEQSRLKCHVHRLLHRAWNSDYQKKFKNLFSLKGLKFWLAHPLPTGAAKDDIIGTPDILKNQIKRKIKRLLAIREELKEIEIELQSLIEQTGQKITTLNGCGIALGAKVLAEVKDITNFTSPSALAKYAGLCPRERSSGKTFRHVKTKSGNRQLNTAIHRIALSQIARSGNHFAKDYFQRKISQGKTKAQALCCLKRRLVDIIYMMLKHKQAYRQPDTL

SEQ ID NO: 246109 - protein, 371 aa, unidentified
MSELPAETRPARLKVEASPRPPGARKPETELGAVSTTAVPHPDSRSGPSPHLQGRVMDEQRTVFVGIDVSKDRLDVHLRPSGEAFCVPREGKGMDDLVIRLQGLSVALVVLEATGGFEATVAAALAGVGLPLCVVNPRQIRDFARAMGRLAKTDTLDAEVIALFAERVRPQARPLREPERVHLAELVGRRRQIIEMIGMETNRGRQAIDKPLARRLARHIAYLQKELDAIDHDIGDAIKHSPAWREAQALLKSVPCIGDVTARTLLAELPELGTVSRHQVAALVGVAPINRDSGLMRGRRAIAGGRTSVRAVLYMAALTAIRRRSPFRAFYDQLTAHGRPKKVALVAVMRKLLTILNAILRDHTPWRPLNA

SEQ ID NO: 246110 - protein, 382 aa, unidentified
MKATKCKTTKRKTAPSIANKQESAIISGAGMQDHNGLYTIGVDLSDRTCVVCVLDVLGEVVEREKVNLERPDLKALARKYPGARVIIECGTHSPWVSRWLTKHGMEVVVANPRKLRAIWQAEYKTDERDAETLARIGRVDVKLLRPIQHGSEEAQKQMLSMKMRDVLVRRRRDIINTIRGTLKALGWRVSNPDSARFHKVVLEQLPAEQHEVIAPCVKVLALLTKQIKEYDKMIEEAAAAHPAASRLQQIVGIGPITALYFVLKIEDPERFGKVRDIASYLGLCPRRDQSGDVDKQMRITKAGDSYLRRLLVSASQYLLGFYGKDCALRRHGLKLCERGGPRAKKKAVVAVARKLAVLMASLWKSGANYDPMRGCEELAADA

SEQ ID NO: 246111 - protein, 367 aa, unidentified
MKKNSTVKQSPKRAGVLARGPITIGLDLGDKTSRYCVLDENGEVEAEGSVATTKKGMAAKFGCLGRCRIAIEVGIHSPWLSRLLSSLGHEVIVANARQVRLISASSRKDDRMDAQTLARLARVDPQLLRPIRHRGEKAQQDLLVIRGRAALVDARTGLVNAVRGLVKSAGERLPSCDTDSLGVERLEPLPEKLREPLKPLLQQVESLTEKIQEYDRQVEQIARTEYPETQLLRQVSGVGPLIALTFVLTLEDRDRFEKSRDVGCYVGLRPKRSESGESPPQLRITKEGDIYLRKLLVQGAHCILSRRGPDTDLKRWGLKLAERGGKNAKKRAVVAVARKLAVLLHRLWVTGEVYEPLRNSAAKKAAA

SEQ ID NO: 246112 - protein, 353 aa, unidentified
MEFDFELQTEGASTMDITTIGFDLAKTVFQVHGADGQGRVVLRRKLRRGKVLAFFAGLPSCLVGMEACASAHYWARELHALGHEVRLIPPQYVRPFVKTNKNDAADAEAICEAVTRPTMRFAPAKSAEQQSVLMLHRARELLVRQRTMVINALRGHCAELGLIVAQGASKVEELVAIIEDPGDGRLPPLAREALGSLVEQLRSAQARIKTLEATLLAWHRSNEASLRLATIPGVGVITATALVATIGDGAQFRSGRQLSAWLGLVPRQHSSGGKPKLGRISKRGDGYIRRLLVHGARTVLRWRRAKPGTHPGWTDQLLARRPTNVVLVAMANKTARVVWALLRYERIYQPTSA

SEQ ID NO: 246113 - protein, 377 aa, unidentified
MPKPSTIDIDPVIYLAIELSASTWLVVSKIPTSEKTGLHRMEAGNSQALIALIADLRKKVSAKLGVESAVMSCFEAGRDGFWLHRLLSEHGVINHVVEPTSILVNRRARRAKTDRLDAQGLLRILTAHAKGDHDVCSVVHVPTIEEEDAKRQHREREHLVQERVRIENRIAALLTTQGVRKRPSLRSWQKDMEEMRTGDGHPIPPLLRAEANRLRRRLVMTLEMIREVEAEREQALQKQDDTASRTIQALRQLRGIGDNFAAVLTREVFYRSFENRRQIASYLGLTPTPFQSGGMDRDRRISRAGNARARKTLIQLAWLWLRYQPDSSLACWFRERVGNLQGRTRRIAIVAMARKLLIAIWRYATDGIVPEGAQISI

SEQ ID NO: 246114 - protein, 362 aa, unidentified
MNKHIFVGIDLGDKNSVARIGVDLEKSERFGFVNTNAGRARLILEVKRRSEQVGGAVVVMAYEASSCGFVLRDQAQVAGIDCKVLAPTKMEKSVEQKRNKNDDRDADDVLEKLRGHVLAGNRLPIVWVPDPETRDDREVLRTRLALSEHQTQVKTQIQMLLKRHGLEKPSDLGSTRSKQYRQWLEGLSRWESLGWGTRQSLASLLRQLSGIEGEMENLDKLVRELGSQLRHQPIVEALMKEKGVGLLAALVYRTEIGTARRFHRGRHVGKFVGLTPTSHESGQQNDRKGHISRQGPPRLRKVLCQASWVHVRYDPHSREAYQRLVAKNPKKKKIALVAVMRRLAVRLWHRMREAESLQQTSL

SEQ ID NO: 246115 - protein, 349 aa, unidentified
MTEQRRSSAGECVYVGVDVHKETYTVTCVCHKQIVKTATVQAEPAGLAASLLRWFPGATLYSAYEAGFSAFVLHRVLTTAGITNIVVNPASIAVAANDKVKTDRRDAKKLAIDLADGRLRGIYIPTEAEELARLLPRTRAQIVEHRATIARQIKAKLHQFGLIAPSSRRMISNRYLREIAAWSLAPELRVSLTLLAEQWRFATRQLIEIRRLLQEQAAAQAELEKVYRSVPGIGAVVARTLATELGDMTRFANERALFSYTGLTPSEYSSGASVRRGHMSRQGSGRVRHLLIETAWRALPRDIVLQEIFDRIAATRGKKRAIVAIARRLTGRIRACFRQGTTYAVGTYA

SEQ ID NO: 246116 - protein, 412 aa, unidentified
MNAVGIDVSKGKSMVAILRPLGEVALAPREFPHTQIGLERLTDAIYEAVKLGGDTRVVMEATGRYHEPVAAALHEAGYFVSILNPILIYQSGGGSVRKVKSDKKDAVKIAKYGLDNWVDLPEYTPVDALRQQLKLFSRQYNLYMKTQVGLQNNLISLLDKTFPGANELFSSPDKADGRKKWVDFSTTFWHCECISSMGSGAFTERYRKWCKRKGYNFSAAKADDVYISALGHWTTLPKSTGAKLLITSAADELNAVSRVLATVKAEVIRLAMELPEWETVFSMYGVGEITAAQLMAELGDVRRFKNRSSVIGFAGIDPEVNQSGSYSRESNPTTKRGSPHLRKTLFQVVSTYLKRSPVNEPVYQFLDKKRSEGKLFYVYMTAAANKFLRIYYARVKECLNESIPEAESLPFS

SEQ ID NO: 246117 - protein, 372 aa, unidentified
MKSTTKFIGLDVSKEKISVAIADEGHDKPRYYGTIAHTAAALRKLIKELGPASTLSFCYEAGPTGYETYRWIESMGAACVVIAPSLIPKRSGDHVKTDRRDAEQLARLFRAGELTPIYVPAREDEALRELVRARESAKEDAHRARQRVLKFLLRHQIHPPEHIKRRWTKKYRVWLGQLTFPNVPMQIAFTEYLHAMDEIEQRIGRLEKALIEEAATSSKADLIQILQSLRGIGFLTAVTLAAEIGSFARFRSPAQLMAYLGLVPREHSSGIRTQRGSLTKAGNGRLRRTLIESAWSYRHRPAIKGDLARRLEGLPADIQLISWKAQERLHRKFRRLVYGLNKHKNVAVTAVARELTGFIWAVARTLELPNAQ

SEQ ID NO: 246118 - protein, 484 aa, unidentified
MAKRKMSTFERLKRGELNRKQRRDLGRKVAAGDPGLTIENPNAGGIDVGNESHYVAVPPDRDPNPVQEFGCWTEALQRMAEWLKACRIDTVAMQATGVYWIALYDVLEQHGIRVVLVNAQHTKNVPGRKTDVQESQWLMKLHTYGLVRDSFRLPEQIESVRTIWRLRDRHVKEAGRTVQHMQKALTKMNIQLANVISDIFGVSGQAIIGAILKGERDPYKLADLKDYRVKASREEVARSLEGNWREDVLFELQQAVNSYQFVHQQMQESDRKLECYLASLPTRILDVPAQPEGAPAATPKKKKRAKKPQGNEPQLDLKVELKRICGVDLTSIDGINVMTAQTIVSEIGTDMSGFKDENHFASWLGLTPSKDISAGKTVRRGKKKVNNRVAVALRTAATTLLESDSYLGARYRHLRRQLPTFASAVKAMAHYLALLVYRMFTKGEAWVDRGAAQFERRRTEREMVSLNSRARANGFKLIPIAEAS

SEQ ID NO: 246119 - protein, 339 aa, unidentified
MQLYAGLDLHSRNTYIGIMDKEFKRIFGKRVLNKLPVILDTLAPFRDQLKGIVVESTFNWYWLIDGLMDAGYQCVHLANPSAMKQYEGIKHTDDQHDAFFLAQMLILGILPQGYIYPKEDRPVRDLARKRLFLVRHKTSHILSLQSLIARCCAQRISANDIRKFTVEDLQQLLKEEYIVLSAQANLDTIVFLKQQIKRLEKTIQKKVKLNKAFQQLMTVPGIGLILAMTIMLEVGDIGRFAQVGNFASYSRCVSSQRLSDGKSKGHGNRKNGNRYLSWAFTEAAHLSRRYNEHFRSYYNRKVAQANTSLATKALSNKLARICYYIMRDQVCFQENLLSQ

SEQ ID NO: 246120 - protein, 341 aa, unidentified
MLIIGCDYHPGFQQIAFVDTATGECGERRLNHTEGAEQFYRDLCARGVEARIGMEASGHARWFERLISELGFELWVGDAAAISTKRVRKHKNDRQDAELLLTLLVENRFPRIWIPSCENRDLRQLLWHRHRLVQTQTRLRNQLHAVALNEGVRRKKALWRPKGRAQLESLVLAPWASRRRQDLLQLLDQVDSTIVELTAAIGKEAEKRPEVLRLMTHPGVGALTALAFVLVIGTPERFARSKQLSSYIGLVPSEESSGERRRLGHISKQGNTLLRFLLVAAAQATVRSDPDWRRRYLRLAMRRERAIAKIAMARMLAVRLYWMWRNGWDYAQLPKLGSYAG

SEQ ID NO: 246121 - protein, 359 aa, unidentified
MRIIGCDLHARQQTIAMLDTTTGEVSTLTLMHEGNQVREFYSQLPRPVLVGIEATGSMHWFLNLMDELGIECQVGHPATIRAAEPRKQKHDRRDAELILKLLVEKRFPAIWRPSKELLDLRALLLHRHQWVRIRTRIQNALQAIALANGLRRGPSLWSYDGQAKIAFLPLLPHASYRRSALQGLYRKMEEEIENLTQQVAEQAEQRCRSRLLMTHPGVGPVTALATEVFLGDARRFVDGKALASYVGLIPGERSSGRRQRLGKITKQGSPLLRFLWGEAGTHAVRRDPDLKRFYRRKLVQKGLGKTRVAVARKLGIRLWIMLRDEIDYEEFCRRGQKQSGEACAGMPETRMVNDRRPID

SEQ ID NO: 246122 - protein, 428 aa, unidentified
MKQEQPSAAAEPRFAAFVAIDWADQKHVWCAQAADSRTRDHGEIDHSPEAIESWVGMLSARFGNQPIAVAVEQSRGALVFMLSKYAQLYLYPIHPRAAAQFRAALFPSGVKDDPLDADLLLDLLVQHRRHLRRLDPDTEETRLVQNLVEARRKLVNEKTRQTNRLTEKLKLYFPQVLNWFQRVDSPLVGDFLERWPTLENLQRARPATLRSFFAQHNCRHQEEIERRLEEVRKAIPAIRDQAVIRAGVVTVKVLVRLIATLREGVHELDREIEGAAAAHPDFAIFDSFPGAGSVLAPRLLAAFGSHRDRYSSVVELQAFSGIAPVTQRSGKSEWVHFRWACPKFLRQTFHEWAAHSIPYSVWARAYYQQQIAKGNDHHAAVRSLAFKWIRIAFRCWKDSVPYNESIYLAALRRRGSALAVAVANPVNR

SEQ ID NO: 246123 - protein, 468 aa, unidentified
MAFKILRRNCCGLDVHKTWIFACIGITDANRRTEYKQARFSSFSNGLRELAGWLTKHSCADVCMESTGKYWIPVFNILEKTCWVTLAHPKYTKPQKGNKTDRKDAKWICDLYMCGMVKPSFIPPADIRQLRDLMRYRTKLTNMLTSEKNRALNCLTVSNLKLDDVFSNVFGKSSCSIVQHILEHPGEQFDVAPFLDRRCKHSVEDVQAAVDGAISREQAAKLRECLLHIDQLNGHRETIETEILRLAQPYSHQLELLRTVPGFSAAPLTAVALISEIGVDMSVFPSAKHLASWAGCCPRNDQSNNKVKSTRISRAGSYLKPLLVQIANAVIKSDKYPECKERYRRIKARRGHKKAIIAICRMLLTAIWNVLSKLEPYSAKGYLEDKLTEHSVVISKSQGLELLRKRGYIFKDEVSADSGWLRFQYCFCRRPCGCVAAPFFAIPAILMLFQTLPPVIITKRPQSINSPI

SEQ ID NO: 246124 - protein, 509 aa, unidentified
METLYVGGGNGHYELKVTLYIKLEVGQTIKGDIEKIYLVCYPILEKKETSCKEIVWGHTTQNYLDRRFPMNQEDRNRLEDFRQFRREVRGSSEYLLVGLDVAKDKHHAFFGTATGKTVFRRLVFENNLEGFRKLLAQTEAMKVREGLKKVVFGMEPTGNYHKPLGEHLIRCGHGVVLVSGVAAHENRKTLDGRWDTNDTRDAANVADLVSQGKCLFYEFPVGALQDLRNLLSLKRRLKKQEHGYRVRIRNHLLAKYFPELDRYYEQSESTALAIVRWCLDPSEVAGLEYKEFVQRVSSIRGRSSQEKRLQAIWKMAVDSVGCEAGPTVELEAQVMVEGLKQIRESIRQIEEKIHEVCSQFPEYEFLLSIPGFGRDVSSKVLGAIGDPYRFQNGRQVLKLAGFDLSAERSGKSSERAVPVLSKRGKADLRYALYQAALIASVRNPDFIVYYTEKLRGREREPGIKIKMRVKLAAKLLLIAWTLMKKKEPFHPSSFRTARQPFSAGDGRER

SEQ ID NO: 246125 - protein, 401 aa, unidentified
MNAVGIDVSKGYSTVCVMRPLGEIVTSPFKVKHTIGELNSLVNSLKSLNGETKVVMECTGNYHLPIANALHVAGLSVSAVNPVLINQFGNDTIRNHKTDPADSIKIANYGLSAWLKLPKYIPEEEIRKSLKSFSRQYNKYNKVKTIFTNNLISLLDQTFPCLKDLFTSPAREKDGHEKWLDFAAQFWHAECISKLSLNAFTEKYRKWCKRNGYRAVKAAEIHAVARACAFTMPKNETTKMLITHAVGQVNFVVESLATIARELTRLATLLPEYPVVIDFFGVGKVLGPQIIAEIGDVRRFVQKSSLVCFAGLEPQSNKSGTYQGNEPISKKGSPHLRKALFQVMDCILQNAPLNNSVYQLLDRKRAEGKHYRSYMNAGAAKFLRIYYARVNEYLNNIESVA

SEQ ID NO: 246126 - protein, 417 aa, unidentified
MTENSLMQRRSAIKPDTLIVGIDVAKFNHVARTLVPGGVIGRPLEFPNSREGFVVLSAEIEARKPTSASAVIVGLESTGIYWINLALWLAEQGYQVVQVSGLYVHHAKKLADNSRGTSDGKDALLIADLVAQGKYLGFVRPAGVLADLRQLVGLRQRLVRERAARYNLLHQSVDLLFPEFPTVFKGVTGPGARRVLRRFPTPAAALVHSPGEMRRLLSEDGRVQASVAKLARLQVADQQSIGTCEGTAGLRYALNDTLLEVDSLDTRVKQVELEIDRLLAQVDETPVLTSLVGRMTAAVILSETGGLRQYSCAAAVLKLAGLNLYQISSGQYCGDRHISQMGRPLLRQALYLAVLQHTHPGMPLYPYYAEMLRRGKPKPVALIALCCRLVRLLYALVRDGRFYSPRPPDKNQQTQAA

SEQ ID NO: 246127 - protein, 338 aa, unidentified
MGIVGGLDVHRSQITFDYADDRTGEVMTGQIGGTRVQLAEWLGRFEGRSDVRLAFEGCTGWRYVAEELTTAGIEAHMAEPADTALLRGTKKRAKTDRADARHLRVLLTDDRIPESWIPPAHVVETRVLGRLYERMLRDRREWKQRVHAQLFQQGTPAVGDLTSETGRRQLAGASLSPAGHRLVAESMGIIDELTSRLDGLRSDLVLIGRTEPGARALQALWGVGPLLGPIIWAEMGDTRRFRSSTQAVRYTGLDITVSDSDGNRLPGKLSRQGSPTLRWALVEAAQHASKRSSPDHAYYQATRVRQGASRAALSVARKHARRVHHILRRLGDVAFQPS

SEQ ID NO: 246128 - protein, 356 aa, unidentified
MSRILAIDLGKFKSVTCLLDSDTNQTEFWTMATDRHYLLAVLKNYHPDLVVIESCGLAGWVHDICTEEGYEVLVCNPNQEAWKWKHIKRKTDRDDALKLAKLAALGQLVPVYIPCRQQREYRRLVKYRQVVLGRINRVQNNIRAIFAQRGMEMVRGQKAWALERLELIAQHRKPLADCSLDDLWRGELDLELVQLEHLRQHQYEIHKQLKALARADQRVQLLQTIPGVGRKTAEVVVAYLDDPHRFQNSRQVSCYAGMVPRRYQSGEMDRHGRIHKRGPRQLRSALVEAAWLMLRYNPWAKSVYDRLTSGQRTRKKKAIVAVARKLLVRCWVMLLRKEPWNKETMIRQPAGIAVAV

SEQ ID NO: 246129 - protein, 360 aa, unidentified
MTIVAHAHPFVIGVDTHARTHTLAVLVAATGELVATEQFPATDAGTDRAVAWAARRTDGELATLWVIEGVATYGAHLASAVKRAGFEVVEAAAMDARAHRGTGKSDPLDARRIATAVLPLEPEQLRRPRSDDGIRTALRVLVTARAHMTTERTATINALTALLRVAALSIDARKPLTAKQIGEVARWRTRVEDLATITARAEAVRLAKRVVDLNEELSANQVQMIDLIRASKAAVLLDKTGVGPVTVAVVYTAWSHAGRVRSEAAFAALAGVNPIPASSGNTIRHRLNRGGDRRLNRALHMAVITRMTHDPETRAYVERRRAEGRTTKEIRRCLKRYLARHLYRTLERLHTEAGAYPQAA

SEQ ID NO: 246130 - protein, 353 aa, unidentified
MNDQSITSEVILGVDTHLDAHVGAVISEAGKLLGTLSVPADAAGYLKLLIWANSFGCLLRAGVEGTGTYGAGLTRVLRDHEIEVSEVNRPDRTTRRLRGKSDPTDAENAARSVLSGSATAIPKTQSGAAEAMRAVSVARRSAVKAKTQAINQLRALLVSAPQEIRERLWKGKPAECVDGCARLRSLGSTPLLQTLTTTLRLLAKRWLMLAEELKALDAMLESLTSQHARRLRERFGVGPQTAAVLVAAAGDNPERLRSEAALAALCGTSPLQASSGKTIRHRLNRGGDRSANNALWTIAMVRMRSDPRTRAYVDRRTKEGMSNKEIHRCLKRYIVRELYPLILADLADSTRLA

SEQ ID NO: 246131 - protein, 413 aa, unidentified
MEVKENMNRQYLGVDWADEAHQVWVSDHEGNKVAEMTVAQSFEGMSEFSRWLHERSAQGIELWAAIEKPEGRIVDFLLDHGVVVYPINPKAVDRTRDRFRVSGAKSDSFDAYVLSESLRTDHGRLKALRPNSEQAQELKMLTRDYQRLITQRTRVLNQLVATLKEYYPRPLDLFDDLSTNKALAFIKQCPTPEAATALSRKQWNRFAQAHRFSQDQTQELWKTLKAPQLPIPPHVVRAKAKLVAVLVEELEVMVKATSHYAAEVQRFFASTPAAKLVSGLPGAKTGTTLATLWAELGDAAGRWQSFRHLQAQAGSVPLTKESGKCRIVQFRFSCNKRLRHAVYWLAFTSLNQSEWAKAYYREQRSKGHTHHEALRALGAKWLKIIFVLWKDHKPYDENYHLANITRQRMRQAA

SEQ ID NO: 246132 - protein, 394 aa, unidentified
MKLIGIDIGKNKHFFCVMDQQTGEIISQPVSFSNDKEGFDFLIQKIKSYSKDSVLIGMEDTGHYHFALLKYLLDLQYTVALINPKTTDFNRKMQGGITKNDKLDTINICDVLDTPERKKQYRISKVNSFDLYEQKQLTRHHHNLKEEENVYKNRLQKCIDIVFPEFNKLFNSKYGTVYMNILKTFGSAENVANTDIRTIRKCFEIEGRGNRISLTPERLKECARSSIGISSSAEVIQIKHLTAQIELIEEQLTEIDKKIEEFSIQNNSPILSIPGISHFSGTSILAELGDISNYSKPSQIIKFAGVAPLHYESSQFNAQHTSITKKGSKYLRKTLYQIILPVIRHNPVFNKYYQLKISQGKGHRCAQGHCVRKLLRIIYHLLKTNQQFDPQLLR

SEQ ID NO: 246133 - protein, 358 aa, unidentified
MTRKRLSSNHLLDFIGVDEKTPVWIGLDVHKKSYHVALRRADGVCQSWVSPADPIVLARRLSTISQRISLIVYEAGPTGYSLERVLKANGYKVAVVAPSRIPRPVTNQAKTDKLDCLKLAEYAAKEMIEAITTPSEQESAERSVLRRRNQLVDSTRKTKQRIKSFLLFHGIEEEYGLRYWSRSAKAKLSKLPLQSDLKFVLKSLLRQLSYEEEELAKITNRLSRIAKRRQHGEVVKNLKTVPGVGDIVACAFRTELFRPERFRRAEEVCSFLGLAPAIRQSGEKRQGGWLMRSGQTRLKSLLIEAAWMWRAKDPWARKKYQTHLSRCGITQKAITALARRLAVILWRLSVENRAYVMR

SEQ ID NO: 246134 - protein, 410 aa, unidentified
MDLLHSRCAGLDVHRDTVVACVRVQVEGRTSNEVRTFGTKTGELLELSAWLSDREVTHVAMESTGVYWQPVWHILDGEFTLLLANAAHVKNVPGRKTDVNDATWIASLLAHGLIRGSFVPETPIQELRMLTRTRKQLVRERASHAQRVDKVLQDANIKLGSVLTDIMGASGRAMLLAMIDGVTDPEKLADLANTRIKASREDLVAALRGKVTANHRFLLKLHLGQVDALGATIAEVDKEVGERIEPFRDAQRRVTQIPGIESVAAAAVLSEIGVDMARFPSAGHLISWATLCPRNDESAGRRRSTRVRPGAPWLKPLLVQCAWAASRTRGTYLRAQYLRLKARRGPKKAAVAVAASILTAIYHMLKNGTEYMDLGPHHFMKDRTRTANQLIRKLDRLGFDVPEIRDRMTA

SEQ ID NO: 246135 - protein, 338 aa, unidentified
MEKYINVLGIDLSKLTFDVGVIINDQKDNVRYKKFKKTEEGLHEFSDWLKQLDVILDEHTLVCMEFTGLYNRMVLNFLEKTDIVIWVEMAAHIKKSLGLQRGKSDKLDAKRIALFAWRNQDSVRAWSSVDKDAQKVKDLLAQRERLVDTKKRLLVPLEEMIQEGFGKEAEQLKNYQKPVITQLDNSIDKIERAIKDIINNNEKLKSKSELVQSVKGVGLVICWYLIAFTNGFEHLKSGKSLACYCGVVPFDNTSGTSVRSKARVSNIANKKLKSLMHMGALSAVKYDPELKAYYERKVTAGKNKMSVLNAVKNKLLLRIAAVVRENRKFEENYVNKAA

SEQ ID NO: 246136 - protein, 355 aa, unidentified
MTANRACVIGGVDTHGRSHHAAVIDSAGRVLGSAEFEANAAGYRRLLAWMRRHGELAQIGVEGTGTYGAGLTRHLLAEGVPVVEVDRLNRRLRRQRGKSDPIDAEAAARAVLAGTATVPPKDRGGIVESIRALRTARSGAVKARGAALNALKAMIVSAPAELRAALDDLHAVPLVTTCAALRPDQQRLSDPLQATKAALRSLARRIVALDAEITELDAALTQLVHRAAPHTISLLAIGVDHAGQLLVTAGERPERLRSEAAFAHLCGVAPVPASSGQTQRHRLHRGGDRAANRALHLAVVVRLRCCPRTRAYVERRTQEGLSKPEIMRCLKRYLAREVFHTLSADLQELHGLDGI

SEQ ID NO: 246137 - protein, 315 aa, unidentified
MANLKKSKTAVNVGVDVGKQYLDVCIHEKDIYWREDNTAAGIKRIFKRLSYYQVERLVMEATGRYEFELAQLAYSRKLPVCIVKPLLIRRYAGANDQLAKTDKLDAQIIAEFGAVLKPRVTPAKSKNLIAIKDLITRRRQLVNLRTQETNRGGIMGKTLAVSCRRIIRYLNAEIKRIEKQLARHVAEQAEWTEKQSLLKTVPGVGDTLVYTLLADLPELGDLNNKEISKLVGVAPINRDSGRMRGKRRIQGGRANIRAVLYMATLSATQCNPVIKAFYRKLVAQGKHKKVALTACMRKFIIILNTMVKNKTEWAF

SEQ ID NO: 246138 - protein, 372 aa, unidentified
MEKANTVVSFVGMDVHKESIDVTVAEEGPSGEVRHVGTIGGDLEAVAKLVRKLRRKNRELRFVYEAGPCGFEICRFLREQSLACSLVSPSQIPRRAGDRIKTDRRDSEMLARLFRAGELSAIYVPEADDEAIRDLARARADILRARQKARQQLQALLLRSGKRYPRKCAWTLAHRRWLCDLRLDHPAQKIALEEYLAIIDEATHRIERVETALAEQTSTWRMAPVIEALQALKGVRLLTAITLVTELGDLSRFDKPRQLMAFLGLVPSENSSGERVRRGSITKAGNTHARKALIEAAWAYRHPARIGRRLQMRSETLPTSIRDIAWKAQLRLTSRYRKLSARMKPPTVVITALARELAGFVWAIARLRPIGS

SEQ ID NO: 246139 - protein, 347 aa, unidentified
MEKYQIGIDVSKKKLNAALLLVPASLKKKTKVVANNPEGFKSLIEWIERQVKDQKAFRFIMEATGSYHQALALFLSDHGFEVCVVNPALIKRHGESMAARTKTDEKDCVIIAHYGATMNPRPWAPPSAQYRALEQLLRRLDQLDKMIRQEKNRLESLGSGPADQDILDSIEKTLSYFDKEYKDLFKKIHDHLERHPDLKDDVKLLTSIPGIGELTALRMSSVLEGGSRFISARQFAAYLGLTPRQNQSGIIKGKSRLSKMGPSALRKALYMPSVTASRCNPDVHALYERLLRAGKTKMSALGAAMRKMAHLVFGVLKSRKTYTAFFTPILEPEVGNEANPIAVGLLS

SEQ ID NO: 246140 - protein, 345 aa, unidentified
MNITTVGIDLAKTVFQVHGVDARGKVALCKQLKRAQVAVFFANLSPCLIGMEACGSAHHWARKLQGFGHTVRLIAPQFVKPYVKTNKNDVADAEAICEAVSRPNMRFVPIKSIEQQAILSVHRVRQGFVRARTAQANQIRGLLGEFGLVMPQGIYNVAKRVPEILEDASNELPVPFRHLIDRLTLHLKELDRQVKEFEQEIIAWHRSSELSRKLEKIPGIGPLAASALVASIADPHSFENGRQVSAWLGLVPRQSSSGGKPTLLGMSKRGDAYLRTLLIHGARSAIVAAKKKVDNTNGWLTNLLNRRHPNIAAVALANKNVRTVWAILAHGRDFKPDYVPTRMAA

SEQ ID NO: 246141 - protein, 367 aa, unidentified
MIVNEVAKNVEKIISIDTAKNSFQVLVVNQKTGKKKNTKVQRSKFVEYILKQGPCLIFMESCSASQHWARLFESFGFTVKLIAAQHVKAFLRNRRVKNDERDAEAIYKCGIQPDTKFVRIKTVEEQTVALLHTLRKAAVSQRVELSNRIRGILAEFGIVVARGKGSFNSEIEALFNECEKIHDVYLRSAISSLFEDYHYLEQREKELSEKIEALNKDNELVKIALTCPGVGHLTASAIVAEVGDASQFRNGREMAAWNGVVPSQHSTGGRSTLGGITKTGNRYLRTLLAQCACAVIQNASRHLEQGKDTHLDRFALRLKLNGKPVKKIMIAIANKIIRILWAMLTQRKTFENKANEISDTSAELQLA

SEQ ID NO: 246142 - protein, 343 aa, unidentified
MKITRVGVDLAKKVFQVHGVDRAGRRVWQRQLKRSNWLSVLTEAVEPGCEIGMEACGGAHHWARELKSRGYQVKLISPQFVKPYLKSLKNDVNDAEAICEAMARHHMRFVAVKTVEQQDIQAMHRVREGLMNHRKAKANQIRGLVAEYGLVAPRQMAPLRRAIPCWLEDAENGLRQPFRVLLHGLWEDLQRMDERLKVLDKEILMLSESHPDAKRLKQLRGIGPLTATAMVAQFGDGRHFKRGRQASASVGITPRHAGTGGKNYLFGITKKGNPYLRSILIHGARSVVSKAKHKDDRLSRWVTELAERKHVNVAAVALANKTVRIAWAMLRNGTDYDPELAMA

SEQ ID NO: 246143 - protein, 368 aa, unidentified
MNTVKFIGMDVHKKTITIAIAEEGRQNQPRVYGTIANDLGALNKFCRKMVSTSTQIHFAYEAGPCGYGIYRHLNEKGFDCIVAAPSMIPKKSGDRIKNDNRDAVMLARLHRAGDLTAVFVPDAQDEAMRDLSRARGDAVIVAKKAKQRLKAFLLRNSVVFNGRSQWSKAYFSWLADIAMPHPAQQIALQEYLDAVHESLNRVNRLTDQIRQMVADWRLAPMVSALQAARGVSLIVAVTVLAELGDLSRFKKPSQLMAYLGLIPSEHSSGSNIKKGGITKTGNGHARKALVEAAWAYRMQARVSRVLLKRQKDLPQQICRIAWKAQLRLCARFRRLAAKGIPKQKVVTAIARELSAFLWAIAKQVPSVV

SEQ ID NO: 246144 - protein, 323 aa, unidentified
MTSPTPCFGFDVSSTELCLTQADPFTLNTAVKSIPNTAPQILRWLKTVPAGCRIGMEATGTFHRLLADLAHQAGHTVFVLNPAHVATYLRSLRARGKSDVLDTRGIARYVLNEGASLHPYTPPTALQDTLALLIHRRHQFVKQRQSLRMSMAGLSLCKPQFDALIQSFDALLVEFDARITQTIAQDAELQAQRQRLCTICGIGPLVSASLTARLSRIPYANSDAFVAAYGMDPRPRDSGQYVGRRVLSKHGNPEDRRLIYLAAVSACNNPEWLAMRDKLVARGLSKIAAYCVIARKLLRIAFAVWTSKSSFDPQRLRGACAAP

SEQ ID NO: 246145 - protein, 416 aa, unidentified
MTDQRQWYAGVDWASESHHVFLTDGDGRKIGERVFKHGGEGLAEMAAWLMAASGAVEGSKIQVAIEVPHGPVVETLIERGFKVHAINPKQMDRFRDRFTLAGAKDDSRDAEVMASALRTDPRCFRLLAVADPVVIELREWSRIAEDLGAERNRLTNRLREQLWRYFPAILELENDLGAEWLLDLWETVPTPDKAARIHETTIAKLLKRNRIRRFDAVHVLDVLRKPPVQVAAGTTEAASAHITTLIARVRLVNRQLKEAHHRLDALTARLIPTEEAEPGQRKQHDVEILASLPGVGRIVLATLLAEAFDALQRRDYAALRSLAGVAPVTKRSGKSCIVVRRQACHDRLANAMYHWARVAVQHDAKSRAKYTALRSRGHSHGRALRSVADRLLNVACAMLKAGTTFNPSLAPQESSC

SEQ ID NO: 246146 - protein, 412 aa, unidentified
METIIRRCAGLDVHKASVVACVRVIDDNGELQSFTQSFGTTTSDLLKLNDWLMSYAVTIVGMESTGVYWKPVYTLLETEFECWLLNAQHLHNVPGRKTDVADAAWIAQLVAHGLVRPSFVPPKEIRELREVTRYRKAVIQDRSREAQRLHKTLESAGIKLATVATDILGVSGLDMLQGLIAGTHDPDVLAELARGRLRKKIPALRKALTGWFSPTHRLLVGELLAHIEYLDESIERLSDDVAKIIAPFAQAIDLLDTIPGVNRRTAEVLLAEIGADMSRFPSSRNLASWAGLCPGNNESAGKRFSGKTRKGSKWLRATLVESAQAAARTKGSYLASQYTRIKGRHGHNKAIIAVAHSILVIAYHILQRQEPYNELGGDYFIERQNKDAYQRRLVKQLERMGYDVTLDAKSAA

SEQ ID NO: 246147 - protein, 461 aa, unidentified
MAKQLGKRKKDGAKADATEGLPPLNLHAAGIDVGSAEHYVAVPPDRDAEPVRKFGSFTADLHRMARWLKDCRIKTVVMQSTGVYWMALYDVLESHGLEVNVANARHTKTLPGRKTDVQECQWLQKLHTFGLLNNSFRPPDEIRVLRGYLRQRENLVAAAATCIQHMQKALTEMNIQLANVISDISGTTGLAILYDIVRGERDPYKLAMHKHSRIRASRQEIARSLQGTWRQELLFVLEPSLDLYQTYQQKIQTCDERIDGQLRSMEPRIDPLSEPIPEPRRGKDARGHQSGFDLRGQLYRIAGVDLTRIAGIEVQTAQTIISEVGVDMSRWKTEKHFASWLGLCQDNRISGGKVLKRGTRHVVNRASTALRLAASALLRSQSALGAKFRRLRSKLGAPKAITAMAHMLARLLYRMLKFGHDYVDRGIAFYENKSREQQLKRIAKQAAALRMQLVPLAEVVS

SEQ ID NO: 246148 - protein, 389 aa, unidentified
MLCVGIDVAKRKHDCCIIDSDALKTVESFTFPNSREGFDMLLSKISELGIPKDKIRVGLEATGHYSSNLAHFISEHDLPLLTFNPLLTNRYKQGFSLRKTKTDKVDACAIAQMIVSGKGSQTYSSSLYHNEEMKSLSRYRSQTMQKCSKLKISVSRLVTILFPELEGLTSSIHLASIYALLKAYPGHEQIAHCSMKRLTRLLSDASQGRFDKSKALEIHQAACHSIGTVSLSASMELVHAITDIEVLKQHIDEIDEKLKEMVDQEESSIIDIPGIGYTLCASILGEVGDFKRFPDVDKLLAYAGMSPSKHDSGDYHSKHNKMEKRGSPYLRKTLYLAARLVAQNVPKFKEYLEKKLSEHKPYKIALSHVAKKLIRLIYRLGISGCPYLA

SEQ ID NO: 246149 - protein, 355 aa, unidentified
MTSLQEFAEVVIGVDTHVHSHSAAAVDARTGGVLAELTVPATPGGYQALVDFAGEHAGLRAWAIEGTGGHGAGLARLLAGRGELVVELDRPERAKRRHGAKSDPLDAIRAAREALSRARLGTPRSAGDRQALSVLLAARRSAVDASTGAQRQLFSLVIAAPECLRGRFRGHKLPAMLRLAARIRLSPRWDAETATTARVLRDLAQRALTLGAEAARHEKDILALVRRWRPDLLAQFGVGPITAATILCAWSHPGRIHSEAAFAMLGGAAPLPADSGSGRAPVRFRLNRYGDRQLNRALHTIALARLRYDPVTQAYARRRTAEGKTPREIKRCLKRYLARDLYRLLENPPRPLDNP

SEQ ID NO: 246150 - protein, 329 aa, unidentified
MSAFVCGLDVHKDSTYATILSPEGKIVNQMKMNNEKVLSYLSHFNVGKVAMEASTPVAALYRQLAGKGFDVVVSHPKKTRYIAEAKIKSDRVDSRAIAELARLDALPLAYMPDREISVLREQVRRRAFLVRQRVKLKVKIKSVLTYEGVKWPSEYGLFTRKGVEWLHLLNLDPIESYLRIMRAFDDEIRLLSRQLRGLAKEDEDVKLLMTIPGIGYYSALLVKSEIGDVNRFPFGDRLCSYAGLVPSTRASGGVVRHGGVTKEGSRWLRWVMVEAAQAHVHKYDTAITRAYHRIAERRGRRAATVAAAHKLLLCCYSVLKNKREYYDQT

SEQ ID NO: 246151 - protein, 403 aa, unidentified
MSPIGASQLWAGIDVGKAHHWVCVLDEQGRVVLSRKVANNEADLAAVIAEVTAASMALTWAVDILDTLSALLLTLLTGSGQDVRYIAGRVVNTMSTAYTGEGKTDAKDAYVIAETARLRRNLPVVAATADSDRDLALLTARRADLVADRVRMLNRLRSLLTGVAPALERAFDYSTHKGALVLLTGYPTPQRLRRVGQARLAGWLRARRVRGYAQVAARAIEASNAQHGRLPGEGVAAALVVEMANDILSLDARLATLEVQLTAAFRAHPHACAIESMPGFGPVLGAMLLVAAGDLRSYPGPGHLAAAAGLVPVPKDSGRRVGNVHKPRRYSRPLRHALYLSALSSLRTPGPNRDYYEKKRAAGRTHKQALIALARRRVDVLWALIRDERSYTTKPPLRARAAA

SEQ ID NO: 246152 - protein, 429 aa, unidentified
MNCTQNKKIEQVKETTMIVGIDVGSEKHYFRAFNWRGIELTRKPVLFSNSMEGFNSFYNTIVELMQENKLEEAMVGIEPTGHYWFDLGQFMGEKNIKFVMVNPHHVHKTKELDDNSPSKNDRKDPRIIAGLVKDGRYFYSYMPTGVYAELRNASNRRFVLVEEQTRTKNRLQKWIAVYFPEYKGIYTHIDAKGGLMVLKQAPTPEEITKLGEEGIIKIWKDAKLRGNGHKKAMKILNAAMRSIGLKAGLTEARMEMQDLIEDYELQTKRLERVNDLIKELCRQVRYADKLLEIKGIGITTVAGFIAEVGDITRFDSTKELQKLAGLELVADSSGKHNGRTKISKRVRKRLRYLLFEAAISVVGKNEEFKEIHRYYTTREKNPLKKMQSLIAVACKLIRVFHVILTKGVRYDASKMLEDIRHPKEQLKAA

SEQ ID NO: 246153 - protein, 340 aa, unidentified
MSLVLQPLLPFPDSCQGMSPHQQGRGTKMTEHCYGGIDVSKDRLDVMVLPERKSFSVDNNAAGYSELVKRLRGLSIAAIGIEPSGGYERAVIRALLAADLSVRRINPNKLRQFGRARGVLAKNDRLDARLIAEYVAIMPTRVVQRDPATEQLAEVVTMRRQLCDEHVAVENQTAHLEDAMLRRLNKRRLARLAADILLLDRRMAQIVASNANLTRRYELLTSMQGVGPTLAFTLVALLPELGQMSRKQIAALVGLAPYDFDSGRLKGHRCIYGGRLPVRNVLYMAALSACRYNPALKVFHHRLAATNKKPKVIIVAVMRKMITTLNAMLRDNVAWQPKSA

SEQ ID NO: 246154 - protein, 390 aa, unidentified
MIYVGIDIAKLNHFASAISSDGEILMQPFKFTNDGDGFHLLASKLETLSLVSDSIIIGLESTAHYGDNLVRYLVAGNFKVCVLNPIKTSSMRKNNIRKTKTDKVDTYIIAKTLMMQDSYRFVTFYDLDLMELKTLGRFRQKTVKQRTRLKIQLTSYVDQVFPELQYFFKSGLHQKSVYALLKEAPTPEAIASMHMTHLAHLLEVSSHGHFTKEMAKELRVLAQKSVGASDSAISIQITHCIAQIELLDSQLKQVEAEMTDIMKFNDSVLMTIPGIGYINGGMILGEIGDIHRFASPSKLLAFAGLDPSVYQSGNFQAKRTRMSKRGSRVLRYALMNAAHNVVKSNATFKAYYDAKMAEGRTHYNALGHCAGKLVRVIWKMLTDEAEFNLA

SEQ ID NO: 246155 - protein, 389 aa, unidentified
MKIFVGIDIAKLNHFAAAISSDGEIIIEPFKFTNDADGFQLLVSKLESFDKNSIIIGLESTAHYGDNLVRYLVAEFYQVCVLNPIKTCQMRKNNVRKTKTDKVDTYVIAKTLMMQDDLRFITFFDLDMMDLKALGRFRQKTIKQRTRLKIQLTTYVDQVFPEIQYFFKSGLHQNAVYALLKEAPSPKEIASMHMTHLANLLKVNSHGHFTKEQAKELRVLAQKSVGANDSAISIQITQTIQQIELLDSQLEKIEAEMTDIMKFNDSVIMTIPGIGYINGGMILGEIGDIHRFSNPNKLLAFAGLDPSVYQSGNFQAKTTRMSKRGSRVLRYALVNAAWNVVRNNATFKAYYDAKRAEGRSHYNALGHCAGKLVRVIWKMLTDEVEFNLE

SEQ ID NO: 246156 - protein, 347 aa, unidentified
MTEDYAGRQVVGMDLHRHRSVLVRMTEDGRKLGTARITNSPAALRAELARAGENPRVVLGATYGWYWAADTLQAAGAEVHLAHPLGVKAYGYQRVKTDARDAVNLADLLRMGRLPEAWITPPQIRELRELTRYRQKLVGLRTSCKDQVHAVLAKLGIAVACSDVFGAWGTAWLDGLVLPQPYAGKVTSLRQLIGELDTEIGMLSEVISDLLAGHPGYRVIQQLPGIGPVLAAVIIAEIGDVTRFRTAAQLASWAGLTPRHRESDVKVTRGHVTKQGSRLLRWALIEAIQHAPAGFPARDAKDAIIARRGRQARNIAKVAAARRLLTLVYYGLRDGQIRCLPEPARAA

SEQ ID NO: 246157 - protein, 419 aa, unidentified
MRAHRNCCGLDVHKKIIAACLLTEDADGNSVTEKRLFGSMTRELHALAQWLCKAQVTAVAMEATGVYWMPVWNVLEQYGLQLLLINPEHYKAVRGKKTDLKDGTRIAELLQDGRLEGSYVPPVAIRVLRDLTRYRTKLVQHQSAIANRIQKLLEQCNIKLASVASDTLGVSAMAMLRALAQGETDAARMADMAKRQLRKKIPELQLALEGCLLPHHRLLLSEMIEDLDHVGAKITRIEQTIEQQMRPFQKSVNTWLTVPGIKHRLAWTLVAEVGPTVEAFPSAADMVSWAGVCPGNNQTAGKRKSGTTRAGNPWLRRALCEAAWAASKSKGTYLQAQFRRLAALRGPKRALIAVANSILTAGYYMLQRATTYQELGPDYFDKRNTLRTTNRLVKRLEALGHRVTLQPRFTAYAPQASGT

SEQ ID NO: 246158 - protein, 350 aa, unidentified
MIIVGCDFHTRYQQIAWLDTNTGEIQQRRLEHRGDEVRAFYAALPGPVLVGVEATGYTQWFERLLRELGHELWVGDAAAIRASVVRKQKTDSRDADHVLDLLATKRFPRIWMPTPAERDLRQLVLHRVKLVQMRTKVQNRLQALAMSQGVCRKRKLWTVRGRAELERLPLDRWAQRRRQELLQLLDQLDRSIEELQGAVEQQARQHPEATQLMTHPGVGPVTSLAFVLTIGPVSRFARSKQWASYLGLNPKEASSGGRQRLGAIGKQGNSTMRWLLVEAGQTAARYDPALGRMYQRLKFRRGSAIAKVAVARKLAVRLYWMLRNQSDYAHLVRWLGSPSSAVVPMAESGC

SEQ ID NO: 246159 - protein, 341 aa, unidentified
MLEVNTIGLDLAKNVFQAHGADGSGAVLFRRKLRRDQVLRFLADQPACTVAMEACAGSHYWAREIAKLGHEVRLIAPGYVKPFVKRQKNDAADAEAICEAAQRPTMRFVAAKSEEQQAAAMVFRVRDLVVRQRTQTINAIRGHLAEFGLVAPQGLFHVAKLVTAIEQMDPTIPEAARPILSLLVEQLRSLDARVAELDREIARRAREDAEAKRLMTIPGIGPVTATALAALAPPAQTFKRGRDFAAWLGLTPLQRSSGGKQKLGETSRMGERTLRRLLIIGASAAVRWAMRKGSTGDPWLSRMLERKPPMLVIVALANKTARIVWALMAKGGTYRTPAIAG

SEQ ID NO: 246160 - protein, 396 aa, unidentified
MYAVGIDISKGKSTISIITTEGEIIEKPFEINHDQEGFNILLSKVERYKKDEIKFLMEATGHYHLPLLNSLVEHDYFVCVENALVVKKYCDMDLRKVKNDRKDSLKIAQYCSEKWYKLRKFQPSNEIREQLQFLSRQYTQYIKIKTDLKIQLTNLIDKTCPGIKKIIDEENRYELLLDIYEKYSYPSLILEKSKREFVEDIDKMAKKYGHKVGKIIGEALYEKAPTIITSCPYNESLQLSINSCILLLRSTIKVTNDIITKMDKLASNLKEFETVCQMKGVGVKTRSRLIAEIGDINKYRNANCLVACCGIDTPPYQSGSFNATNRHITKRGNKYLRKVGYEIVKCIKSSKPKTDNAVYLFIIKKENEGKHKMTAKIAGLNKFLRIYYARVKELYK

SEQ ID NO: 246161 - protein, 327 aa, unidentified
MNSYCKKEMTSSDQQNNNDDHNITFVGLDISKARLDIHTSGKHREEKNNPEGHAAFIKHLRSLHHPRVICEATGGYESAIVTELLAARIEVCVVQPGRVRNFADSRGLFAKNDRIDAKLLATFGESNKPRLEIPTNPENVRLREMLEYRKITTDQISEMNNRLELASGYLREGLETRKATLKEDLKRVENDLAAHIASQPDLAAKAERMKELKGVGPVLAATLLAYMPELGEIEGRQISSLAGVAPHPKDSGTSKPRRRVAAGRVQVRNVLYMAALSAARSNPILKAFYQRLKTDKGKPHKVAIVAVMRKMLNVLNKLLAEPKFSLA

SEQ ID NO: 246162 - protein, 354 aa, unidentified
MKRTTKYVALDVHQATTVASVREESGRVIARSVLPTDRGALTEFVRGMRGARHVTFEEGTQAQWLYDLLAPLVDRVVVCDRRGAPRQGNKGDQVDADQLSELLRRGALRAVYHGSADRATLKELTRTYRNLVEDATRVMLRLKALFRARAIPTRGTNVYQARARGQWLAQLADRGARFRAEALYAELDVLRTLRPKAKAAMVTEARQDPAWPVLRTIPFLGPVRVALLLATMQTPWRFRTKRNLWAYAGLAVVTRSSADYTLVAGAPVRRRRAPMTRGLNRNHNRVLKDVFKGAATAATARAGPLQDFYHSVMARGTREELARLTLTRKLAALTLRLWKKGERYDPTKLTTPAR

SEQ ID NO: 246163 - protein, 425 aa, unidentified
MNTKQNERISQVSSDTLVVGVDIGEEKHYARAFDYRGIEFSRRALPFSNSAVGFNVFYKWLEDMKERTGMKKVIIGCEPTGHYWFTFQKFLYDHKLKLVVVNPYSVNRSKELDDNSPEKDDIKDPKTIAQLVREGRYSIAYIPEGRYAEIREAQVCRDQIMKQHIRLANQIQAWLQQYFPEYLEVYKKFDTESGLLVLEQAPLPADIRKLGAEEIRQIWKDAKLRGRLGISRAQTLIEAAQKSVGLEGGEAARFRIRVLISDYRRKQEQLARVDEILQKKVMLVPNVEKLLAIKGVGIGSVAGFIAEVGDIGRFTDPKQIQKLAGLEITKISSGKRKGKPGISRRGRRRLRRVMFEAARALMQWDTAFSDLFLYYRTRIHHPLGSMQAKVAVECKAIRVFYAILKHGCDYDPEKLRRDIKRPVTE

SEQ ID NO: 246164 - protein, 379 aa, unidentified
MYDAITGMPAETILHGALELSKNSWLLAVQFPDRAQPSLHPIRGGDTEGLMAKLMAARDRWAKLSGKTPSIVLCYEAGYDAFWLARFLKARGIECLVVDAASMQVNRRARRAKTDRIDVGMLLRALIAWGQGDRHVWSVVRVPSVDEEDLRRSHRERDRLVRERTAHINRIKGLLFGQGIRGINVKNKYKTLQIDKLVTGDGCPLPPRLASEITREIARLALIQEQIATLESERDQAPTPCKATERKRVQLMCLTGIGPAIAAVMTREVYYRQFDNRRQVAGFLGLATSPHDSGNVERSQGISRAGRGQVRGTIIQAAWLWLKHQPKSAITRWFVQRTAGQSGRIRRIMIVAVARKLAIALWRFLEQGLVPQGAMLANR

SEQ ID NO: 246165 - protein, 596 aa, unidentified
MLPQHTPAPQSPRRFGVGIDTSRYGHYAVFLREDLQPAVDELAVAESAAGYALLQQRLQGIVARYGPLAFAVRLDVAGPYADNLLHFLHQLATPHADATNAAQSLALSISCGDPQRNKNYRVAFFGNQKSDPVEARAAARFALSEKPRSDKPLTLELRILRQVAGRLQAVVRQRTRLINQFHHLLALTFPELALLTKEVAAGWVVELIHRYPSAARLAQATPTTLAAIPYLPDAQVMPLLEQAHRSVASLRGEAIDELVRDQVRQLRDSAARQKRLESLLVSAYRALPQANYLDTIPGIGPVTAAVLTAFIVDIDRFATPGKLVAYFGVLPIEASSGVDRDGRPRSPRRWIMSRRGNDLVRRYLWMAALSALRCNPAVRALYSRVVAKHPQHKAVAVGHAMRKLLQLVFAICKSGRPFARDHYPWQTTAHVEASDNGLSVENQVSDNGMSVKSQAAGHKPDVVPAQPVVTAACADSVAEAATVGESTAVDFAHVKGQLSLAQVLDQLGLSTRLRGNGPQRRGACPLHRGDGRGRTFSVNLEANVFQCFDKQCGNKGDVIDLWAALHGLSLREAALDLVRTFGLEACARPATEKRNG

SEQ ID NO: 246166 - protein, 412 aa, unidentified
MKDLLEISCGLDVHKDKIVACILTGPLGKPTNSEIREFTTLIPDMIALRDWIVSQNCHHVAMESTGIYWMPIYEILEEAFGGDITLLVVNARHMKNVPGKKTDMRDSEWISTLLRAGLLNGSFIPEKRIREFRDLNRYRKSVIRDITSQKNRVEKFLQSSGFRLSSFISDIFGASGRNIIRHLIEHGQIDRSALDSCLKTKTRNRIDEILMSVNGTLSEHQKAFLKILMDHYDSLKEHLAEIEKSLEADMAPFALQVEQLSSIYGISTTASCAIIAEIGIDMKPFKTAEHICSWAGLCPGNNESAGKRKSTSVTKGNPYIKSMLCEIAWVIAGKRNTYLSAWYWRIKQKKGAKKAIIALARKLLVIIYTMLKQGTLFDESCFEARRKSCEQKQLSRYIRELEKHGYHVEAQA

SEQ ID NO: 246167 - protein, 341 aa, unidentified
MMIIGCDFHPRFQQIAFVDQETGEYGERRLNHPGEAEQFYRSLAGRQVRIGAEATGNFRWFRHLMQELGHEFLLGDASTIRAACPRKQKTDKRDARHILTWLVEDRFPVVWQPPAENEDLRQLLLHRCRLVRMRTRIKNQLDSIAKNEGLLSSRVWSPKRRSEIEALPLPGWYAHRRADLLGLLDELDKRIRPLDEAVHEAAEDNQEARLLMTHPGVGPIVSLAYVLTIGDWRRFPRGKQVGSYLGLIPEEESSGSTRRLGHVSKQGSVLVRWVLVEAAVHAQRHDASWHRQYVRLSMTKHHGVAKVAIAHKLAVRLYWMLRSGEDYSKVMERGSHAGQSV

SEQ ID NO: 246168 - protein, 348 aa, unidentified
MAMSEGAAHVRAIGGVDGTDSTDEVVLGVDTHLDVNVAVALDRLGRRLGVLKVPTTTRGHEGLLRWAEGFGPVGCAGIEGTSSYGAGLARHLKDAGISVMEVERPKRRHLRRNGKSDPIDAEAAARAVLAGEAVGEPKSADGKVEMIRVLRSARHSAVKARSQAANQLQALLVTAPEDLRHRLRRSPTKELVATCARFRLGDDPEDVRTATRFALRSLARRHVALSEEIAELDAQMDRLVAEVAPELISRPAIGTHHAATLLVLAGDNPQRLDTEASFASLCGVSPIEASSGKVVRHRLNRGGNRDANCALHMICVVRMGSDRRTQQYVARRTAEGKSKREIMRCLKL

SEQ ID NO: 246169 - protein, 345 aa, unidentified
MTEYVGLDVSKEETSFCVMDEGGKILVRGKALSDPQSLFGALRKETLCPERIVLETGTLSNWLARGLRDYGLPVDVIDARQAHAVMKLQHNKTDANDAELLATIARTGFCRPISVNSEAAQKQRILLKARYHLICQRVDTLNTVRGLLGSLGLRFPKGTAKLVGLVRSALLERSDLQVMIEPLLANVEALEVQIKHLEAEVKAQAAASPAALLLQTIPGVGPVVSLAYAASMEDPERFAHSRTVGVYLGLTPRRHQSGETAYNGRISKYGDGMMRCLLYAAANSLLSTVRKAHPLKAWARRIRNRKGYKKACVALARKLAVIMHRMLITGEAFRWPEAATIKTAH

SEQ ID NO: 246170 - protein, 430 aa, unidentified
MEVIYPKACGVDVHKSFIVAVICDSTSVKPQYLRNRFSTFNNSLIEFRNWLLANDCQNVCMESTGKYYVPVYNALEGHISNVVVANPKWVRCIKGEKDDNKDAKWIADLFKLGIVRGSFIPNKDIRILRELTRYLYKLTNMRTSEKNRFTNALTVGNCKLDLVFSDIFGKTSSAIINTILSQNEYDDEDILKNIDKHCKSSNEDILNSISGISWESSQKQRMNVIQEHIDYLDKSIKTVREIIDSIIAPYESAINLLCSVPGVDRKSAITIISEIGTDMSQFSSHYRLASWAGLAPGCNESAGKKKSVKISRAGVYLKPALVEVAHCAVKDKSNDYYAKKFNLISKRRGKKRAYIAIARKILVAIYHMLSTGELFNPSDASKVETTDKDKIKFTKNNFIQSTKQLISLGLTIDDLQTLIQSKISESTPVI

SEQ ID NO: 246171 - protein, 406 aa, unidentified
MSKELLYLGLDVHAENIAVALAEAGRDGEVRNYGEIPNTFHSIEKLLRKLGHPDKELRVCYEAGPCGFVLARFLKKKGIACDVIAPSLTPKGAGDKIKTDRRDARMLARLHRAGELTAVHIPDERDEAIRDLCRARTDAVQDQRSGRNQLKAFLLRNGYRYGEKTSWSAAHMRYLRELILPHPAMKIVLEEYLQCIDAAAERIERLEVHMKALLEEWHMKPVVLALMGFKGYQTVAAMITVSEIGDIHRFPHPRQLMAYLGLVPSESSSGGSRAQGGITKCGNGHLRWIFNECAQHYRLPPKISQELTTRQEAIPKAYRRQVKEISWRCQNRLHERGRKLAARGKTRQKAQIAMARELAAFVWEVMRAVMPKADGTQATSTARPPKAAESARPAMKKKGREYTLKG

SEQ ID NO: 246172 - protein, 345 aa, unidentified
MQGMYYIGLDVHKRTISYCVKDVSGRVHREGTIPATRMDLDRWMSTLPQPWTVAMEATVFSGWIYDHLTPHAAAVKVAHPLMLRAIAVAKKKNDRIDANKICDCLRCDFLPECYMASTEIRERRRTLRYRNLLVRQMVQMKNKIAVLLMEAGVSYNKQKLHKIGYFRELLATNPDINDELRCLLRLCHETAVRLGKTESALVRSLQRDSILRERIERLMSIPAVGPVTALTWALEVGDVQRLSSIKKAISYCGLCGAEKSSGAMVQRTPLSKQRNRHLQTTLIEAAKMAPRNSAALAMLYDREKQKGNANRATLAVARKLVAYLMAVDRGQRSFQAVEASSCTAA

SEQ ID NO: 246173 - protein, 325 aa, unidentified
MDVNGIDISKLKFDLVLIIGERSKHAVFSNTEGGFQQLLAWLGKQRPDPACPLHACMEATGNWGLDLADFLHGQGMQVSIVNPLRIKAFGQSELARNKNDKLDAGVIARFCRAQNPPLWVPPAPHLRELRELVRRCNALKDARVQETNRQKSGFASPAVAHSIEIHLAWLDQQIEEVSGAALQLIQGDPTLRKNLSLLRSITGFGDVSAAILLAELPNIADFTPKTLAAFVGLSSQEHSSGSSVRRPGRISKVGAERLRGTLFMCAFSAKRFNPRLADFVRPMTDAGKAPKVILIAVARKLLVYAHAVIRTQKPFQPFPDVPSLI

SEQ ID NO: 246174 - protein, 358 aa, unidentified
MKKDIKIESTGQFTIGIDVSDRTSCYCMLDHAGEICGEGKLLSTPEGYRQQFGGMAPAVIALEAGTHSRWMSALLTECGHEVIVANPRRLRLLTTSDKKNDPEDARTLAEMAWAKPALLSPVRHRSAEAQRDLNLVRARDLIVEARTKLINGVRCLVKGFGARVPKCASGQFTKHADLHLPPEARPATAPLLELIDELSERILEYDEMLEHEAQTRYPQTALLTQISGVGTLTAMAFVLTIEDPHRFARSRDVGCYLGLRPKQQDSGDRSPQLRITKAGDSYLRKILVSSAHYIIGPFGPDTDLRRWGLKLCERGGKNAKKRAVVAVARKLAVLLHRLWVTGEVYEPLRNQAKEAVAA

SEQ ID NO: 246175 - protein, 318 aa, unidentified
MDAAGEKLFCERIDNDALRLLEVVSVAGDGAEVVIEATYGWYWAVDLLRDAGFNVHLAHPSGNDWGKRRVKNDERDARDLADLLRLGRLAEAWIAPPAVREARELVRYRARLVQLRSGLKAQVHSVMAKEGVLPETSDMFGPKGRQLLDAMELADAYQVRVESLRDLIEGYDREVAMLERQIHELLRDDRGYQAIQALDGVGRTLGAIFVTEIGDISRFRSPEALCSWAGLTPRHRESDTKVVRGKITKQGSKLVRWAALEAIVRYHGGRPLRDGFHRIAERRGTNKARIATARRLMTLVYYGLRDGEIRCLQQRAVA

SEQ ID NO: 246176 - protein, 341 aa, unidentified
MKKFIRIAVDLGKTYFQVHCLESEGGRSISRKLKRSKMPEFFSQVEGCRVGMEACGSAHYWARELVAMGHEVVLIPPAYIKPYVKRGKNDAVDAAAICEAMSRPDMRFVPIKSADQQAVLMLHKTREMFVKQRTMSVNALRGHLAEFGIVVAKGIGRVDELLALAQSDATLPQIAKSAVAGLAQHLEGLDQSIEAVEEEIARAHGRNPTSCLLDEIPGIGTLIASVIAASVPDPGVFKSGRDFAASLGLTPRQNSSGGKEKLGAITKQGNRYIRKMLVTGSTSVLRVAGKRKGALADWINALRARKPERVVAVALANKLARICWAIMTTGESFRVDTYVKA

SEQ ID NO: 246177 - protein, 395 aa, unidentified
MKHILSFDIAKGKSVYCFIDELKNTIIDATLIEHNKNEFDKLYNSIKNYSNLIVIMESTSIYHLPIENYFRSKAIDTIVINPKLVKQFKDTLNKSKTDKLDCFKIARCYLGTIDNFYFKNDEYFMYNPLAHQYWSLVEGQTRLKNRYKQLIEIVFPEFNLIFNDLYSDLALNFIHDFPHPSLFVNRRIDYLMNYLKEKNGTTQAFRFKNKVLKMKELASNSLCFVAFDSLQVQNLVQTIEMIQYHKSEINKIKNQLINEMKNKKLFKIINSIPGFGEFSTALFLAEVGDITRFDDKYQFISFIGIDSVTSQSGVSAYHGPISKTGCKFGRTILFNIVTTIIQISAHTNKSNPIYLFFRKKQSEGKHHYKCIIACETKLCKIIYKLCTSDCLYENK

SEQ ID NO: 246178 - protein, 327 aa, unidentified
MACLMVFVGIDVSRDWLDVHIHLLRQDLRVANTKAGWQELAEHLAQYPNATVAAEASGGYEKGVLRYLDAAGLDTHCLDAARVRQFARAAGRRAKNDCIDARVIAHFIATFPLTPARFEAAIERLAEHVTYRRQLVEQRVAVANQARMIRDPKLARLSRSHIRQLDQAIARLDRRLVELIAADPALSAKAAVLLAVKGVGPTLAATLLALLPELGTVCRRAIAALVGVCPYDFESGKFQGQRHIAGGRMPVRNALYMPILVAIRHNPGLKAFYERCRENRGKPQDGKEQKKPAVIAAMRKFLTILNAKMRDHLIERRNNPETAIGTA

SEQ ID NO: 246179 - protein, 313 aa, unidentified
MSDQYVGVDVSKEHLDVAASDGTRLRVGNDDAGHQELVAWFSVAPPVLVVMEATGGLERALAVQLSAAGIALRIINARHVRHFAKATGLLAKTDRLDAQSLVRFAQTLKPEPRAIQPEQTLALQALIVRRRQLVEMLTMERNRLRTAHRGVRKDLQASIRWLEKRLAGVDDDIDGALRECGVWREKVALLESVPGIARVTSVSLLASLPELGQLNRHQISALAGVAPFNRDSGRWQGRRSIYGGRPLVRSALYMAALVGARHNPVLRAFYQRLRGAGKPAKVALTACMRKLLIILNTMLKTGQPWRPNLPTDA

SEQ ID NO: 246180 - protein, 413 aa, unidentified
MEIIYQGCCGLDVHKRSIAACVRRLLEEGGIHQETRTFGTMTRDILELADWLAAAGVTHVALESTGTYWKPVYNLLEGRFRMVLVNARHVKHVPGRKTDVKDCQWLAQLLQAGLLRGSFIPDRPQRELRDLTRHRSQLVGERSRAANRIQKILEDANIKLASVATDILGASGRDMLRALIRGETDSEKMADLARRQLRSKIPELRPALEGKVTEHHRFMLGELLNHLEYLESRIEGFSRRIEEVSRPFAPAIAKVATLPGFDQRSAQNVVAEIGADMDTFPSAQHLASWAGVCPGNNESAGKRKSGKTTKGNRWLGSALSQSAWAAARKKDSYFQAQYRRLAGRRGKKRAIVAVAHSLLTIIYHMLKDASEYRELGCHYFDKLNAHRLLPHLLQRIKDMGYQVTLQELSQEAA

SEQ ID NO: 246181 - protein, 589 aa, unidentified
MAMTTPLDRIGVGIDTARYGHRVSFLRPDRQPAAKPLTVLENRAGYLALQARMIKLHEQHPQAHFHVRIDAAGQYAVNLEQFLRGLDLPMTLSIGEPKRNKDYQKAHFPKRTTDDTESQAMARFAVVEQPDPTPAPSTEMILLREVAGRLQAQVKQTTQAINRLHNLLARVFPELATLTDDIAAAWVLRLLDQYPTAERIAAAQLASLEKIPYLPAEQAQALHQAAGQSVASLRGPVAEALVGELVAQVRQGQKAEKALRKLLAAAFAKLPASPHVQILTVPGIGTATAAALVAKIVDIDRFATADQVVGYFGVFPEENRSGVDKRGNPLPPGTLFMSRKGNDLVRSYLWNAARTAIRHNPAVGALYRRLRARGKRGDVALGHCMRKLLHLVFAVWKTDRPFDEKHFPWEDPGDTPSSTTIPHDSSAGATSSVNENAGGHKRDMPAERVVTPAGSSVEPARPSVKPASPPTAAVAVARPQVDFAFLRQQVSLEQVLAHLGLLGQLRGSGPQRRGPCPVHSHPGDRERTFSVHLGKGAFRCFQADCGAQGNALDLWAAIHRLPLYDAALHLAATFGLARNREEEPVNGTR

SEQ ID NO: 246182 - protein, 343 aa, unidentified
MGDAITIGLDIAKSVFQIHGVDADGTVVIRKRVSRAKVLEFFAAVPRCLVGIEACPSAHYWSRKLEVLGHTVKLMPPSYVKAYLKRSKNDANDAAAICEAVTRPSMRFVSTKSEQQQSGLMLHHSRRLLVRQRTMLSNAIRGHMAELGIISAKGRNGTGELLEVIANAKDNCIPAAARFSLEVLARQYIAIATEIGVLEKRIHAWHRSCEESRRLEEIPGVGPIVATALIAEVGDWKTFASGRSLAAWIGLVPKQHSTGGKERLGGISKQGNRYLRWLLVAGAMAVIRYARRHGTKRLWLTRMMERRPIKVAAVALANKIARMAWAIIVRGERFREPRLLLAA

SEQ ID NO: 246183 - protein, 342 aa, unidentified
MDHFAGLDVSVKDTSVCIVDDTGKIVREVKVASEPKALLAALKNPVYHFKRIGLEAGPLSQWLFSALAEAELPVVCVETRHMQAVLKAQINKTDRNDARGIAQMMRVGLYRPVHVKTLRSQKLRMLLTHRKLLQSKAIAIENDLRGTLRNFGLKVGMVGKVKFEARIKELVENLPDLAALVEPLLIVRRVLREQIVILHRRLLAIVRDDEVCRRLMTTPGVGPVVALTYRATVDVPARFRKSKAVGAVFGLTCSKYQSGEIDRSGRISRCGDEMMRVMLYQAAQSMLRSKKWSWLKAWAMQIARRRGMKKAIVALARRLAVILHRIWVDGTEFRWTREQAAA

SEQ ID NO: 246184 - protein, 317 aa, unidentified
MEAPLIFVGIDVSKAQLDVAIRPIAQALSVTNDKAGIKTLVKHLEKLQPSLVVLESTGGLERQVMTALIGAEIAVTMVNPRQIRDFAKSTGQLAKTDRIDAAVLAHYAEAIRPKPRPLPDELTLELRERITRRRQIIDMIVAEKNHLATACKAIKKRITAHIAFLEQELDDADRDLDRFIQKNPVWKDNQEILCSTPSIGPVSSRTLLAELPELGTLGRKQIAALVGVAPFPSDSGTLKGRRTIWGGRASVRSALYMATLVATRFNPIIRDFYKRLKAKGKASKVALVACMHKLLTILNSMIKNKTRWSQDFSLKTT

SEQ ID NO: 246185 - protein, 337 aa, unidentified
MIFINCLGIDIGKSESVVAHYKDEVLVKEMVIQNNQNGYRYLKNYIKHLDSLFILFESTGIYSRGMKRFCEIHKIDYLEMNPLEAKFKTSSLRSWKTDKSDAHKLALLAFRMKDSKVQRQSEEIYFELRERARFHLEMEINQNRLKVELVETLHQTFPGLEKLFTNRYSKIALNIAKAFPHPDFVSTLTHDELVEKVLHSTDKGISVNKAHKYVQKLIEIKNNSFPNVDKSSFLLQKVQYLCDKLLIGIEEMKEFDQEMIDLAKNTTEFENIISIPGIGELTATLLIGELGNIREFKTNKQLNAFVGIDIKRYQSGTSKVGIRSTKEEIKKQDVYCT

SEQ ID NO: 246186 - protein, 430 aa, unidentified
MKSNTQNAKIEAITEKTLVLGIDVGSEMHYARAFDYRVIEYSKKPFKFSNTEAGFATFKEWVLDLKERHEKDKVVPGMEPTGHYWFNLGKFLQDNEMKPVLVNPHHVKKSKELDDNNPTKNDRKDPKVIAGLVREGRYMIPYLPEGVYADLRTASNIRFQLQAELTRIQNRISRWFNIYFPEYKTVYGKPDAKSGMLILKAAPLPEDILTLGIDGVNQIWRDAKLRAVGKARAKTLIEAAEHSVGSKEGAVSARMEIRMLLEDYESRNTRLQEVMVLIEELVRKIPMAEKLLEIKGVGIRTVSGFLAEVGDISRFNNPKELQKLAGLALVENSSGKHKGETTISRRGRKRLRYLLFEVAMSLVSKNQEFRELHNYYTTRRLNPLKKMQSLMAIAAKLIRVFYAMLTKGVDYDSKKMVSDIKRPAVYLQAA

SEQ ID NO: 246187 - protein, 345 aa, unidentified
MHITTVGLDLAKSVFQVHAVDASGDVVVRKTLRRSQVLPFFTKLPPCLIGIEACGTSHHWARELTKLGHEVRIMPPAYVKPYVKRSKNDAVDAEAICEAVTRPTMRFVAMKSTEQQAALSLHRVRDLLVKQRTQLVNMIRGLLAEFGIDIPVGLERALGLARQIAVSEAEPDVPPMAKQILDLLSAQVLDTHARLQVIDRAIIALQRTDEVARRLSTIPGIGPVGATALAASVADPGQFRSGREFAAWLGLTPSQNSSGGKDRLGRITKMGDRYLRKLLVIGATSLVRRARYKPEAADPYLLALLARKPARVASVAMANKMARVVWAVMTRGEVYQARHVPSLAA

SEQ ID NO: 246188 - protein, 411 aa, unidentified
MERIVERPGALDVHKASVTACVRIWHDRRCEELVQEFPTTVRGLLTLADWLAAHDVKTVVMEATGVYWKPIWAVLEERFELMLVNARHVKQVPGRKTDVLDAQWLCQLLEAGLLRASFVPPKPIRTLRNITRYRKTQIQARQRETLRLHKILEDTGIKLGCVATDIMGKSGRAMLDALVSGTKDPDVLADLARGQLRKKLPALREALEGRFDAEHRLVIGQILAHIDFLDEAIDRLSDAIEEQIAPFAAARDLLMTIPGVKQRTAEVLIAEIGVDMTAFPSAAHLASWAGVCPGNDQSAGKRRSGTTRKGSKWLRATLTEASLAATRKKDTYLSARYQRLRGRRGHSKALTAVSHSILTAAWHMLTTGETYREAGADYYTRQNPDRATRSLVRRLEALGHNVTIQPRQEAA

SEQ ID NO: 246189 - protein, 451 aa, unidentified
MYQRPFYRNEHAQETYRDAVYNPEKCSDTRCGEDLPRIYARKEIPMKGPVITVDVSKGSCHYQPFLEKGKPFRKPKVLHDTIEGFADLNAIIEKTKEKSGEDTVPVIFEATGVYHRCLQKYLDDHKIPYYIISPLLSAAYRKTSLHSNKTDSLDCMHIAKAYYDEDALLPFQKPSDQFAVLQKLNRFYETELTHLRMRKVTFRRYLDIIYPRLDKCFKGRASLYDPVPMEVLKKYPHPSLLLKHRETTIIISITKKTCHRPKFISEIVHKMYECAKYCYSGADINDIEVIRLPEMIDELQKQIGLCDTILSELIREAEKVPYFPCIASIVGIGENLAARLIAELGDMSRFKNRRALAAYAGLNPKILQSGDTDGTHLKISKKGNRHLRCLLYLGASCNYRLKKKDPIYLFNQKKRQQSQSPLKAKAANIAAAHKLLVIIYALSRSGELYRS

SEQ ID NO: 246190 - protein, 336 aa, unidentified
MPEYQASRTVDRVNQARIVQGREKTDMDGVYAGLDVSKDFIDVAVLPIREEHRYANDEAGTGKLVARLKELSPMLVVMEPTGGLEAMVASALAADGINVAVVNARQVRDYARATGKLAKTDKLDALVMAEFAAVIKPAVRQLRDEESAEIKAMVSRRRQLLEMLTAEKNRLAVARRNLKSHILAHIEWLKKEIADLDLDLRKRIEGSPIWRVKDNLLQSIPGVGKVLSATLLAELPELGQLNRRQIAALAGVAPFNRDSGRMKGKRSVWGGRSSVRAVLYMATLASTRFNPVIRSFYQRLLARGKANKVALVACMRRLLTIMNAILKHQRAWQYMH

SEQ ID NO: 246191 - protein, 348 aa, unidentified
MLHAGLDLSRRRVDVCLISSDGEVVGEFACPCDHDGLRQLVERVGLGGRVRAVIESMSGARFVHDTLEQLGWEVLIADALKVKGLAPLACKTDRIDARVLAVLSYRDLVPEIWLPDPRVRRERELARFRLHLVKHKSMLKHRVHSTLISFGKPCPVTDLFGLAGRNLLAELAVPEPWRSTLTASLSVIDDLDHQIDSINRQLRATAPDHPYVPVLMTAPGIGWVLAFTIAAEIGEIERFPTPKKLVGYSGLCPRVIQSGEKDRRGPLTKSGPKYLRWAMLEATMHALRHPAYAERYQHTKRRLGKQRGAKVAQIDIARRLTEAVWHMLTANKPFSPTAAGGAALRLAA

SEQ ID NO: 246192 - protein, 455 aa, unidentified
MSIRIIGIDLAVNAKHKAMILDPAGNKFIGKPITFRSRHDDLERLLKRARAGAPEEVQLVAIMEATGMAWYPVGVYLHRQGVVVYRVNGQKTKDLRKVLWKHAGSDLIDSQILAHLYQLAPSRLERWWPADGDQLALQRACRAYARWRELDVAEQNRLQSYDQWAWGGLHKLVPAVARDWMRLHWYNPWRVFEAGVDRLSDAWQAAAPKAAGSDWIAPWVDRARQMTLLYGSEEMVGYDDLQAITREGLRLRNHYAQEQACLTNQLIRPLYRQLYPDCFLESIRGIGLQSAATYMAFIQDIARFPTIEKFRLWCGIVPASKQSGGAEAKGLRITQAGPNLVKATLFLNAEVARQWDAQIAAIYHQQMVDYGKHHNQAVCACASHLASRIYAILKQQRPYQLRDLQGKPVSAAQSRALCKKLRVPEEVRKRNTKRFRRAQAVVQKEAGFNSQRLLK

SEQ ID NO: 246193 - protein, 342 aa, unidentified
MDNITIIGLDLAKRTFQLHGGCGDGSVAFRQKVSRDKVLAFLGHQPRCVVAMEACGSAHYWGRAIRELGHEVRLIPPVYVKPFVKRQKNDAADAEAIAEAAIRPTMRFVAVKTEDQQARAMLFRTRDLLVRQRTQLINALRGHLAEHGIVAPQGPANLKALAKVVEEPETSLPILVVELARVYLDQIEQLSKKIADLEKATASEAERGVLTRRLQTVPGVGPITAMAIETFAPPMEVFNRARDFAAWLGLVPRQHSTGGKQLLGRTSKMGQRDIRRLLISGAMVMVQWACRKGAPEGTWLHRMLARKPRMLTAIALANKMARSIWAMVTKGEDYRVPSAAKA

SEQ ID NO: 246194 - protein, 353 aa, unidentified
MPRSTNLSVATMGIDIGKNSFHVVGLDQRGAIVVRQRWTRSQIRARLANMPPCLIGMEACVGAHHLSRRLHSLGHDARLMPAKYVKPYRKGQKNDFRDAEAIAEAVQRPTMKFVATKTADQLDLQALHRVRARLVSQRTGIINQIRAFLLERGIAVRQGLRFLRAQLPEVLGKRTDVLSDRMVHVIEDLAADWRRLDERIQGLSGEIQIVASQDPGCKRLMTVPGIGPIISSAMVAAIGSGAVFSNGRDFGAWLGLVPRQLSTGDRTILGKVSKQGNRYLRVLFVQAAWVVLIKPQIWEGYGLKPWITAAKRRLHPNVLAIALANKLARIAWAVLSNDCDFRCEKTDETPRCA

SEQ ID NO: 246195 - protein, 341 aa, unidentified
MSVASIGLDFAKSVFQVHGVDASGHAVLRRKLARGGLIAFFTKQPRCLVTMEACSSAHHWARELVRLGHEVRLIPPQYVKPYAKRNKTDAADAEAICEAAGRPNMRFVPIKTREQQSVLVLHRVRALLVRQRTAAVNAALGEFGLVVGKGIRKVDELRQRMDKLEPELLPDEARSAIGCLFDHIDGLGERIGAVEARIIAWHKSSEVSQRLASAPGVGPMTATALVAAVGDGRQFRSARHFAAWLGLTPRIQASGGKERIGRISKGGDRYLRTLLVHGARAIVGTTFRKDVAPRPWLTALIGRRPVNVAATALAHKTARALWAMLTRAETYRRPSAVPAAA

SEQ ID NO: 246196 - protein, 370 aa, unidentified
MTKIAKFVGLDVHKTSISIAWCEGGARSEAVSLGKIDHDVARLVKKLRPLGSPADVHVAYEAGPTGFGLYRKLRELGYPCVVVAPNRTPTAPGPRVKTDRRDAASLAFHLRSGTLTAVSVPDEQTEALRDLTRYREDVREALQRARQQVVMFLLRQDRRYDGKSHWTIKHRDWIRAQRFEHECQKQVLEESYQEVVRLEEKVERLEDLVERTALEHQQFAPLFRALQAFRGMRIVTAATLIAELGDLRRFASAPKLMSFLGLTPREHSSGSKVSRGSITKAGNGHVRRVLVESAWHGRHRPAKTKSLLARTKGLPEEVLALAWKAQHRLHERWLRMRYSGKEVNRIVIAMARELAGFVWALGQIVLPKPI

SEQ ID NO: 246197 - protein, 418 aa, unidentified
MLLAGIDWSDQALDYHLRTADGRVLAYGQVAVSPEGLAELFVSLETHAPPDQIGIAIETAQGAWMQALLDRGYLIYPVNPKAVDSFRKAMSANGDKSDKIDRRVLAMFLGVFQEKLRPLKPDDPEIISLRIACQDRVRLVEERTAKLNELGAILKVHYPAFGPLFGELGSRIALEFLQQFPTQKQMRKLTERRLRSWLRRHSYTCPQRIDRMLAVLKQPALPVADHLQTVKARLIQYLAGNLIALKAEIAEREEEITRQFEQLPEADWIASLPGAGPNLRPALLACLGRDRDRFADTRAARAFMGAAPVTKASGKSRSVKFRRGCWKFARRTLQLFAEQSRRQCAWADRFYQKQRDSGHKHHQALRALAHKWLKILLAMQRNATPYNEAVFLNSRRAYLLKTPEIRTSAKAFFAAGLT

SEQ ID NO: 246198 - protein, 478 aa, unidentified
MIYSVGIDLHKGRHRVYCLDEKAQVHDAFSFQTTPEELAILEQRIFHDGSNPIVVFEPAGLSWLMIAAYLRSQHPECRLVKAKGQKVAALRRYLRGSVKSDRIDALTLAKMPFIDPERLDELYLAPAETHALQRLTRQRKRLEDYITARKNRIMTIVDGYLPGVRQAFSHRWSAQARAFLHSRINPFAVIRDGEEALHSFLSQAKPQNKQKKVESHQVYRACQKVLTLQELCQAAGSVDEDFFVDLQDEIDRELRLMEVEEAETKALDQRIEELYRKLHPSDNLRTIPGVGEHTAPVFVANIGDPTRFSCQSAFANWTGVVPGAKQSAETESKGLRMTKAGPATVKWALYQVGQIGRQWDPQLASVYYCQMVHHGKNHKQAMGAVMSHMGARIFTVLREDRPYELKDTEGNPMSKMAARALILAKYHVPEEIRQERRRSKRRKANIPVAQKREGMVAGSIHEAAEAPQPAATTPSRNN

SEQ ID NO: 246199 - protein, 347 aa, unidentified
MLIIGCDFHPGFQQVAIFDNRTGEIQEKRLQHRAEAEQFYRGLAGQEVLVGMEACGHYPWFEGLLQELGMELWFGDAAKVRASVVRKQKTDRRDAEHLLDLLRENRFPRIWVPSLEVRDVRQLLVHRHKQVQARTRTKNQLQAMALSHGVQKKRKLWTKAGRAELEQLPLLAYAAQRRKKLLEALDELDVEISELDRRVAEEARERPEAVRLMTHPGVGSVTALAMVLTLGPAERFGSGKQVGSYFGLIPSEESSGGKQRLGKISKQGSSFLRFLLVEAGQTAARYDPQLKRFYRRLAVRKNRSVAKVAVARKLATRLYLMLREQWTYAQLSQAVMQVSPSHSVAGE

SEQ ID NO: 246200 - protein, 350 aa, unidentified
MEYVGIDWSYRRAAWCALSDAGAIVGEGAVSTDEDGLARLVIKRGTEVRAVVEMMSGAIWVRDTLATAGWEVQIAHARKVRDVAPLACKTDKVDARVLAELCRRDLVPELWVPALADRELRERLRRRMHLVRMRASAMNRIFGLLTQWGLRLSLKRLREPDAMTLLEQRGVPLVWRRSIAEALDVIELLDARIGPIDAELGPLARADTRVALLDTIPGVGALLGLTLASEIGDVARFGSPRKLVGYAGMAPKVSQSGDRSRTGALSKAGSRTLRWAAVEAAQHAWRPTNPWHQLYTDVAKRAGKNPAKSAVARKILIATWHVLSRQQPFKPAAPRRPHPASASSRCFLAA

SEQ ID NO: 246201 - protein, 359 aa, unidentified
MQRNKISFKEQKIFVGIDVHKTTWEVAVLTESGLLKRHPQEASAKVLFDFLRKHYPDGEYHAVYESGFSGYATYYALKELGIECTITHAADVPTTQYETVMKTDKIDAEKLARALKNGEIRRPVYIREKDNIDDRAVIRIRKTIQKQLSGYKARVKHMLHCNGVEIPERFSKPSSHWTRAFITWLMQDVKLLSSTRRSLDLLIRQVEVIRGTLLDATRELRKLSQTERYKHRFELLMTIPGIGQHISMCILTEVWDVNRFPNERAFAHAMGLVPTCHDSGPHKSSGEQTFRGNRYLGPMIIEACWVAIHKDMGLAACYAYHKQRTNPQKAIVRVARRMSNIIYSVLKNDKAYEPYQWDK

SEQ ID NO: 246202 - protein, 340 aa, unidentified
MDKVTTIAVDIAKRSFSMFWVDTETGEIGAKAMTRAKFEEFMRTREPSRVVLEAGGSAHYWGRWLEPHGHEVRLIAAQHVRPFVRTNKIDGADARAIWEAAQRPEVKWVAVKSEASQAVLALHRMREQLKQMRRMQSNQLNALLYEFGVVARGKIAQAQLRAWVAAGRVPELLAASLGEQIERIARLKREELQITRAIERHNASDALAMRLLEVPGIGALGASALSAELAAGAKGFANGRQYAACKGIAPSLSGTGGKVRAGAISKRGDPYVRTLLIHGARSVITHQRRAKRLSPWLSALLERRPLNVAVVALANKMARIAWALAAHGRSYQQNYGAQAA

SEQ ID NO: 246203 - protein, 309 aa, unidentified
MEPTVGIDVSKDRLDVHVLPSGEAFSVSNDHAGMEELAGRLAALSPTAIGLEATGGYEQLAVATLADAGLAVVVVNPAQVRAYANALGKRAKTDAIDAAVIAAFIAATKPELRPLRDAEARTLADLVTRRRQIVQMIVAEENRARTIGARQAQKSIKRLLAALRRELESLDADLDDHIRKSPLWRVREKLLSSVPGIGATIARTMIAEMPELGSLDRRQIAALAGLAPWTRQSGTWRGKSFIGGGRSRVRAVLFMAALVAIRHNPTLKAFRDRLVEAGKPKIVAVVAVMRKLLTILNAIIRDQKPWQTA

SEQ ID NO: 246204 - protein, 413 aa, unidentified
MKLFVGIDVSSEKLDVCFLDSSDTTLKEVTLPNNINGASSIKEDVLQFHQSFNYEKIVIGMESTSIYSFHPATFLSEDLELKSLGLVEVVIQNPKSIHRYKGLFEEDKNDRIDAFRIADFLRIERFNKTVLKEERYVALQRLTRSRYQMVHQLTECKQHFLENLYYKCNTLSKELDTSVFGATMLDLLSDALTLDEMAEMELEDLANLLQEKGRGRFSDPQKLAKTIKKATRDSYRLGKVVQESVDMVLATYARLIQTLKKQIKDLEKSIVALFEIVTEAQCLKSIPGIGIVYAAGIVAEIGQIERFENEAQLAKYCGLYWKKNQSGNFESERTPLTRTGNQYLRYYMVEAANSIRRHEDTYRLYYQKKYDEVPKFKHKRALVLTARKLVRLVDTLLRNHQLYTPERSVSLKS

SEQ ID NO: 246205 - protein, 453 aa, unidentified
MQSKDLNSGVFELLRPNAAGIDIASQMHYVAVPSDRDEQSVRKFGSFTDDLHEMARWLKSCKIDTVAMESTGVYWIQPFLVLEEYGFDVFLVNARHIKNVSGRKSDVKDCQWIQQLHSYGLLNKSFQPEDLTRELRTYVRQRKNLTQGYSTQVQLMQKAFDQMNIKLHNVIADITGKSGLLMIEAILQGERDPHILAALADSRIKASKEDIVKSLRGIWRQDNLFELKQAYEIYQVYRDKIVDCDKQIESVLKEIADKANNVNNADNTSRDNNRRKANGKNKFNFNASSYLKDISGVDLTEIFGISELTVAEIVSEIGTDMSKWATEKHFTSWLNLAPNTRTSGGKRLKSKPMKKKNKAGQAFLIAASSLKASNNWLGEFYRRIKAKNGSPVAIKATARKLAIIFYKMLKDKVDFNPLPLEEYNQYFKERKLKYINKQAVNYGFKLVPVDFVS

SEQ ID NO: 246206 - protein, 309 aa, unidentified
MIAAPTVAGIDVSKDRLDVHVLPGSDVLGVDHSPKGLARLAAYLHRLGVERIGLEASGGYERQALNTLAEAGFEVCLVPPARVRALARALGRHAKTDPIDAWMIARYVQLTPGQHDYQPDPARQRLDELAGLRRQLVAERNKLVSRLDIAKDKLVRTLLSRMHIMVQANIARLDREIVDHIRASHLNERYTILMTIPGVGPVLAATLLCDLPELGHATHKQLASLVGVAPHARQSGRTARAGRCSGGRASVRNVLYMATLSALKARVPALRTFYDRLRANGKPFKVAITAAMRKFISILNAIIKQSTVA

SEQ ID NO: 246207 - protein, 411 aa, unidentified
MKKTVEYEQVFERGCGMDIHKDSVYATVMGEGINTETRVFKTTTRGLRELGAWLTELDVKAAAMESTGIYWKPIFHVLSEFPINLMVVNASHIKNVPGRKTDKADSQWICKLLISGLLKGSFIPPADIQKIRDLYRYKKKLVHYISSERNRIIRALEDANVKLSSVISDTSGVMATHIIEGLLAGRKDLKNLVMERYHHRVKASPEEIVEAIDGKITPHIRFLINCIQKHISALHQQIAEVDAEIDKYVKAYETQIELLESIPGVGREAAISIISEIGVNMDFFPSEHHLASYGGMCPGNNESAGKKKSSRTRKGNQHLNTYLVELAWSAVKTKNTYYKAKYEILVKRRGKKRALIAIGRKILCAIYHMLKNNESFKELGSNYLAEKTQKNRIEYLKRELRQYGYKIERVA

SEQ ID NO: 246208 - protein, 357 aa, unidentified
MEQSKGISFKGQNIYVGIDVHLKSWSVTILSETSVLKQMSQGADPDALYRFLTSHYPEAEYYSVYEAGFCGFWIHDRLTELGIHNIVVNPADVPTMSSEKLRKTDAVDSKKLAVSLRAKQLKGIYTPDSEALEIRSLIRLKNSITKDMTRQKNRIKSQLRYLGVEIPVEYLEPHSNWSKRFLNWLKQVGMRTPSGRQTLDILIMQFEALRKQKAEMTRKLRALSHTERFEETLELLMTVPGIGQTTGLALMAEIVDITRFDNAEQLAAYVGMIPMCHSSGEHEGVGDITLRKHAILRSNIIEAAWVAIRKDEAMQLCYLNNCKRMVPSKAIVKVARKLVNRIYFVLKRHQPYVNAMA

SEQ ID NO: 246209 - protein, 343 aa, unidentified
MQTITTIGLDIAKSVFQLHGIDAAGTVVIRRQLKRRYMLGFFEKLPPCLVGIEACATSHHWSRELQALGHTVRLIPPAYVRPYVKRQKNDCSDAEAICEAVGRPNMRFVPTKTIEQQSGLVLHRTRSLLIRQQTSVINAIRGHLAEFGMVAPVGRNGLETLLSLVATEDDTRLPEIVRASIEALALQLRALKAQILEFDRKIIQWHRSNELSKRLDEIPGVGPALATALVASIADPKSFRSGRDFSAWIGLVPKQHSSGGKPRLGGITKQGDRYLRSLFTIGALAVIRYAKIHGTQHRPWLAALLARRPTKVAAIALANKMARMAWALMVKGERYREPAALAA

SEQ ID NO: 246210 - protein, 451 aa, unidentified
MLPSVTPPNETESLISVNPDAAGLDIGHDEIWACVPAERATPAVRPFATYTPDLNALADWLVACDIKTVALESTGVYWIPIYEILEARGLKVYVVNARHLKHVPGRKSDIQDCQWIQRLHTYGLLTASFRPVADICAIRSYVRQRALLIEYRAAHIQHMQKALQQMNLQLTQVLSDITGKTGLAIIRAIRAGEHDPRQLATLRDERCAKTEAEIVKALTGHYRAEHLFALQQAVALYDMYTTQIQECDTELERLWTALQPPRDQDLPPLDTRDKRNTHSKNAPTYDARTLLYEVVGVDLVAISGLNASTVQTILSDTGLDLSAFPSEKHFCSWLNVAPRNDISGGKVLRSRTLKSGNRAGQAFRLAAQAVSRKQDEFGAYYRRQRGRLGPEQAIVATAHKIARAFYHVLKHRTPFRSVSADDYNQRVRDREVAHLKKKAAQLGFTLAPAPA

SEQ ID NO: 246211 - protein, 351 aa, unidentified
MMIIGVDYHPSFQAIAFLMEETGECGEQELKHSDGQAEKFYRDLKQRGISVRVGMEATGYSRWFERLLAELGFELWIGDPAEIKAKRVKKQKTDRKDAQLLLRLMLENNFPQIWVPSPENRDLRQLLWHRHRLVQMRTRIMNQLQALAMNEGYRWKKKLFSEQGRAQLEKLALAPWASRRRQELLELLDRMNPTIEELTTAVEREARKRPEVQRLMTHPGVGPLTALAFVLIIGTWERFSRGKQIGTYVGMIPSEDSSAHKQRLGHISKQGNSLLRFLLVEAAQAAARCNPEWRRRYMHLAMRRHRSIAKVAMGRRLGVRLYWMWRNGCEYSPKLEFGSYAGQLVTGHGVK

SEQ ID NO: 246212 - protein, 317 aa, unidentified
MNATNPTVVIGIDVAKDTLEVATSTGEHWPCANDPKGHRALRERLMAMNCSLIVLEATGGYEAALVGTLAQAQLPVVAVNPRQVRQFARAVGKLAKTDRIDAAMLVRFGEQTSPEVRPLPDEQTRLLDALLRRRGQLLEMIQAERNRLLQAVGPVRTDIRETIHFLVKRLKQTDRDLDDQLRSSPIWREKEKLLKAIPGVGRQTVLTLLATLPELGRVPRKKLSAPVGVAPYNCDSGTLRGQRHCWGGRTQTRRVLYMAALTATRHNPQIRAFYQRLTAAGRPTKVALMACMHKLLLIMHAIVRDGVAWSPEMQTIN

SEQ ID NO: 246213 - protein, 321 aa, unidentified
MQSYHLGIDVAKAKLDCALRLPDGKHRNKVVNNNASGFKTLLEWLQKHGGASAHVCMEATGVYWEEVAAYLAQQGLPVSVVNPAQIKAFGASHLVRTKTDRVDAQLIATFCFERGPALWQAPSASEQALRAMVLRLDALQNMRTQESNRLDVAREAVKAGIASHIAWLDKEIDQLARQIRQHMDGDPDLKGKQELLDSIPGLGERTIACLLAFYGDLQRFDNARQAVAFAGLDPRQHESGSSVRGKPRLSKVGHRFLRKALYMPAMVALHRTAWGGVFRQRLAAAGKPPMLIIGAMMRKLIHVAFGVLKSRKAFDPTLHGA

SEQ ID NO: 246214 - protein, 350 aa, unidentified
MLIIGCDYHPGFQQIAFLDSESGEWNERRLGHREEAEQFYRDLKVRGVKVCVGMEASGHARWFEHLLGELQFELHIGDAAEIRSKRVRKQKTDRQDAQLLLTLLVEDRFPSIWVPNGENRDLRQLLWHRHRMVQMRTRIMNQLHVVALNEGVRLKKALWRPAGRAQLESLLLAPWASRRRQDLLELLDQLTPKIQELTRALEQEVEKRPVTRQLMTHPGVGPLTALAFELVIGTPERFGSGKQIASYVGLVPCEESSGDRRRLGHISKQGNSLLRFLLVEAAQITVRCDPDWRRQFLHLAMRRERRIAKVAMARKLAVRLYWMWRKGWDYEQLKKLGTHAGEPGNRQGVQ

SEQ ID NO: 246215 - protein, 329 aa, unidentified
MVSHVLFSVVGIDVSKATLAVCYQVGEQVKHLEVPNTKAGFQQVIKTCGAHCRFVMEATGTYNLALAYYLHEQGGQVAVLNPLVIRRFIQMHLSKGKTDRKDAQWLLRYGQQQTVTVWQPEESVLVECRQLEQVTEQLLKQKTMVSNSLEALQRQPVISKLACKRLQRLLKALTQQVAAVETELLTLLEQRFAAEMTLLCSIPGIGRKTAGMLLLFAGGFTRLDNYRQLIAMAGLSPREHSSGTSIRGKVRITKMGGGLIRGKLFMCSFAAKKTNAACSALFDRLVAKGKNKKLALIAVCNKLLKQAFAIVKSGVPYQADFTSKLALNA

SEQ ID NO: 246216 - protein, 359 aa, unidentified
MREQRNKISFRGQKIYVGIDVHLKSWSVTVLSETSVLKKFSQHPSPEALYGFLTRSYPGAEYHSVYEAGFCGFWIHERLTALGIDNIVVNPADVPTKSSEKLRKTDTVDSGKLARSLRANELKGIYTPDSVSLEMRSLIRLKNSITKDTTRQKNRLKSQLRYLGIEIPQEFLTPFSNWSKRFFAWLKEIETLTPSGRQALDIHIRHLEELRRQKLEMTRALRTLAKTDRFREPLRLIMSVPGFGQSTGMAFLSEICDITRFRNAEQLAAYIGMIPMCHSSGEKDGTGDITIRKHAVMRCNLIEAAWVAVRQDPAMNLFYTEQCKRMPKSKAIVKVARKLVNRLFFVLKHQTEYVNSIVS

SEQ ID NO: 246217 - protein, 350 aa, unidentified
MIIIGCDYHPGFQQIAFVDSETGEVNERRLEHPEEAEKFYRDLRAQGMSVRVGMEASGHARWFERLLGELQYELWIGDAAEIRTKRVRKQKTDRQDAQLLLRLLLEDRFPRIWVPSWENRDLRQLLWHRHRLVQMRTRIMNQLHVVALNEGVRRKKALWRPAGRAELESLVLAPWSSRRRQDLLELLDQLTPKIQELTRALEQEVEKRPVTRQLMTHPGVGPLTALAFELVIGTPQRFHCGKQIASYVGLVPSEESSGDRRRLGHISKQGNSLLRFLLVEAAQVTVRSDQEWRSKYFHLAMRRGRTIAKVAMARKLAVRMYWMWRKEWDYEQMTKFGSYAGEPGNPHGVQ

SEQ ID NO: 246218 - protein, 323 aa, unidentified
MDIAIDLGKRKSYVVMEDNGRLVKEGYVETTKDGFSTFFGDVENPKIIVEASSIMNRIANMFEGYDLTVAHPAKVRLIAQSVKKTDKNDAHVLMDLYKKDYLPKSDLPSREVKDARDLCRDRSLIVRQRVALINKIKYHAFCLGMDVKQIGKKRIKKLKEEPKLELLLMQPESADAAIKMYEGKIVDIVKNGNSTVSHYARLIDTIPGFGPYGSFAIAAEIGDINRFADEFRFFSFAGVVPRTYQSGEKEWKGHITKGDTFLKTTLLQCTNVHIRRSINSAVTYRYEENRDRIGKKKAKVGSMKRLLRIIFWMFKRNEEYHDR

SEQ ID NO: 246219 - protein, 311 aa, unidentified
MRSKSFVGIDVSKHQLEIFVLPTQENLAVPNTEEGIGSLIPILRSAKPSLIVLEATGGLERPTVESLTSAGIPVAVANPRQVRDFAKAKGILAKSDRLDAQVLAAFGEALRPEPRPPKSPEIQDLEALTTRRRQIVDMITAEKNRLGTTPKRTRLQIQEHIYYLEKALKEITRELNQALKKHPQFREKNQIIRSLPGAGPILSVTLLSDLPELGSLNRKAIGALVGVAPLNRDSGLFRGKRCIWGGRARVRAVLYMATLAATRCNPVIRAFYNRLTKAGKEHKVALAACMRKLICILNTMIKDQTPWRLAH

SEQ ID NO: 246220 - protein, 393 aa, unidentified
MRFIGIDVGSDKHVLAIVDEAGKVIRKPTPITEDAKGYEALSTVLGDPADAFVAMEATGHYWRNLFAFLHGRGFPVVLLNPARTANFAKEEMRRAKTDALDALGIARFAQQKRPEATQLPDEATLELREMVRLRSRLMQDLGDRARQLHRALDLTFPEFTRHVGDLTSYVATAILAQYSTGKHLRHAKLRKLAELKTDGKHVVGEALAQALWDAAQRTVGGQHGPSIELQVRYASEDIATLRSRIAKLDKDISGAVDRHEIGRLLTTIDGVGNTTAALMISVVDLARVSSARQLAAYIGITPNVRQSGKSQPQRGAICRVGNATLREKLWMPTLCAVTHNPWLKAFYDRLVAAGKPRKVAMVAAMRKLLTAMVSVARTRKPFEVRLANLPNEA

SEQ ID NO: 246221 - protein, 321 aa, unidentified
MNKFNQISNRQTFVGIDVAKETLAVFIDSTAQHLQCLNQPKDLRKLARRLKKLAPSLIVLEATGGYETPAAEIFSEFGLPFAVVFPKRVRQFALGLGIIAKTDDIDAQTIAYYGRIADIQAKPLPSDELRHLNAVTTRRTQLIEMRIAEQNRFDVSHPAMQKNIKKHLCRLESQIIAIETEIDALIKDDQALREKDDLLQTVPGVGKVLSSTLLTQLPELGILSNKEISALVGVAPFPRESGNWKGKRFCQGGRNSIRKVLYMATISASRFNPVIKQFYEHLLERGKLKKVALIACSRKLITILNAMVRNNSNWNPKLESI

SEQ ID NO: 246222 - protein, 409 aa, unidentified
MCKLFIGIDVSSKDLKASIMNRDGDVLKSLTVDNNLPGAEFLRDQIVALADKYSSQEIQIGMESTSVYSWHPAMFLNEDKELRKRQAKVYTINAKLIRKFKDAYVDLDKTDDIDAWIIADRLRFGRLPLSMIMQEQYIALQRLTRSRYHLVKSLTREKQHFLQHLFFKCNAFTSEVESSAFGNAMMELFLEKYSLDEIAAIDISLLADFLKEKGKNRFNDPEKVAKCIQKAARSSYRLSKCVEESIDILMATSIETIKSTKTQIKQLDKAIERLLTGIPNTLKSIPGIGPVFCAGILAEVGHIHRFKDQASLAKYAGLTWSKHQSGKFTADETNMIRSGNRYLRFYLVEAANSVKNNEPEFRDYYYKKYHEVPKHQHKRALVLTARKLVRLVDALLRNDQIYTPRRKVK

SEQ ID NO: 246223 - protein, 362 aa, unidentified
MQSTTTIIAFDQHAATTMAAVLLPGHRTPALHPLTSDVATILRLVARLQRQGPVRCCYEAGPCGFELRRALEHKGIPCDVIAPALIPRRPGDRVKTDRRDAGQLAVLYRAGALTAIHIPTEQEEAARDLLRCREDIRADLLRARHRLSKFLLRHGRRFTGTKKAWSKRHAAWLRQQTWPLLALDQTHRAYLRTVDETLARLRDVEGDLRALLDLEPLHARVQRLRCFRGIDDLTALTIAAELGDPRRFATAPSTMAFVGLVPSEHSSGAKRAHGGITKTGNAHLRRVLVESAWHYRHHPFVSASLRARQKGASAAVIARAWAAQQRLHRRYARLAARGKPKQHIVTAVARELTGFVWAALTL

SEQ ID NO: 246224 - protein, 405 aa, unidentified
MRVIGLDVSRSVGEIAYLEDGQLREGGRVVLRHDALKQFGEGLRSSDEIVLEATGNTSAIVTALKPHVAKVVIANPLQVRLIAEARVKTDKIDAAILAQLYASGFLPQVWMPDDYTQALRRQVARRSQIVRHRTRLKNQIHAVLAAHLIPQCPAADLFGRKGRAWLAQQPLPMDERLAVEQRLRELDRLDEDLSAIDKLLCESVLQDVQLKRLLTITGVNCIVAIGLLAAIGDISRFASPQKLVSYFGLNPRVRQSGLQPAQHGHISKVGRAHARAMLVEAAWSAANAPGPLRAFFLRIRGRRGQQIAAVATARKLAVIAWHVLAGQQDFEWARPALTAKKRRELELRAGLPVRKGHRGSAAEYSIKEVRSRERAAAELAEHAYMRFVSNWKPRKSSPKSATEAP

SEQ ID NO: 246225 - protein, 416 aa, unidentified
MDAIVERCAGLDVHLDTVVACVLYGKLDIKPKKEVKTFSTTTKGLLELLDFINQKECTHVAMESTGIYWKPVWNILESGAFDLIVANAKKIKNVPGRKTDVKDAEWIASLLRGGLIEKSFVPPERIRDLRDLTRLRKELLGEVNRNKNRIHKVLQDANIKISSVLSDVFGETGKSILNQIIGNQCITEEFIYSLYEGRGKSKLKSTLMEMYEALNGKIRGHHVILLGMHNSNIVFLEKQINELEKEIDILLQKERDSLELLETIPGISKISASSIIAEIGTSMDVFKTEKHISSWAGLCPKNNESAGKKKRSGTKSGNNWLRSMLCECAWSATKKKDSRFKNKYWSMVPRMGRKKALIAIANMMLRLIYHLLKTKSTYKELEIQYFIDKDKRREDRIIKELKSKGYLVEKDSLQMA

SEQ ID NO: 246226 - protein, 320 aa, unidentified
MIPPAIFVGIDVSKARLDVAQAPAAPAWAAANSGEGISELVQRLQRLAPALIVLEATGGYESAAVAALMAASLPVVVVNPRQVRDFARAKNRLAKTDKIDAQVLADFGEAVRPELRPLPDVAAKELGALVRRRQQIVEMLTAETNRSLLATAAVGKDIEDHIQWLRNRLKDLNRDLNEAIRSTPGWRERDDLLRSEKGVGPVLSLVLTADLPELGQLNRKKISTLVGLAPLNRDSGQFRGKRKIWGGRPTVRAALYMGTLVATRHNTVIRAFYQRLIASGKPKKVALTACMHKFLIILNGIARDAEALSLTPGLASQDSC

SEQ ID NO: 246227 - protein, 354 aa, unidentified
MTSTKYIGMDVHKESISIAVMNAAGKIVMECVIETKANMILQCIDGLRGDLHVTFEEGTSAAWLYDLLKPHVTELIVCDPRKNASMREDNQNDKSDARRLAELLRIDHLSPVYHGEHGLRTLKELVRSYLTVTKDLVRVKTRVKAIYRSWAIPCNGKEVYAARHRAEWLEKIKELGVRRRAEFYYQQLDALRVLRQGVRRELLAESKKQKAWKLLRQIPAIGPIRAAVLLGILQTPHRFRTKRPLWKYSGLAIETCSSADHRSINGQLQRSKKNSVRGLNQNCNHDLKNLFKGAAVIASSKPGPFQEFYAALLAKGMRPEMARLTLARKIATIVLIVWKKGVSFDAQHLKPQTA

SEQ ID NO: 246228 - protein, 346 aa, unidentified
MRTIAYLGIDLHARSFTLGEMDGEGQFRGNLQFTTNENNIINALKSVKAKQKYLTIEEGPLTYWAAQIAHPFVDKVIACDPRENALIYKSSIKNDKIDTRKLCRLLRLGDLHQVYHPENDDRAVFKAAAQHYIDLRNQKTRLKQKLKAMFRHWGVVDIFTDAVYSNHNREKYLNQVKHFPIRDQLLRIYFLMDQTEAMRNLALKSMKHLGRKYSEICEFIKIPGIADINAHIFDAFIQTPHRFAKKSRLWKYCRLSITDRSSDGKPLGYQRIDRSGIGELKAVSYRAFIASMKGDNEVKKFYLQSLNRTHNRKHARLNTQRKILSVMYTIWKKGVAYRPELFIGSA

SEQ ID NO: 246229 - protein, 370 aa, unidentified
MDSIIYVGLDVHKATVSVAVAESGRDDEVRHVGVFANRPEILLKLAARLSKGGHRLSFCYEAGPCGYELHRLLTGCGHECVVVAPSLIPVKVGDRVKTDRRDGLMLARLHRAGELTPIWIPDAAHEAMRDLVRARATAGRILSKTRQHLQSFLLRHDQIYRGVRAWTLAYRRWLTTVRFAHPAQQIILQDYIHAVQDAEARLERLTRQIEELLPNWSMAPVVATLQAMRGVALVVAVTVVAEVGDFRRFANARQLMAYLGLVPSEHSSGASVRRGGITKAGNVLARRVLIEGAWTYRMPARVSRKLHDRNENLPPAVRDIAWKAQLRLCSRYRRLAAAGKPKVVVTTAIAREMVGFIWAIARIAQPTLQG

SEQ ID NO: 246230 - protein, 386 aa, unidentified
MQKLNDLSRSLAPLKPDGTLIAVIEMSQSSWLVAGIVPSVERQPLKKLAVDESALLKLLHRWREEAEKAGRRIERIAVAFEAGRDGFWLARWLRARSIEAHVIHASSVAVSREHRRAKTDRLDTELLKRAFLGWLRGERDHCKMVAIPTTKDEDAKRPNRERESLVGEQTRIVNRMKAALIRLGIRGFNPKLKKAAGRLEDLRTPEDEPIPPNTLAELRRDMERRRLVSDQIRQIENVRLEHLKQAPSDGPHAMVRLLARVIGVGIETADMLVQEVLSRNMRDRRAIARYAGLTGSPDESGTKRREKGLARSGNARVRRGMIQLAWRFLMFQKNSALAQWFRARTENARGTRKLMIVALARKLLIALWRLVREGVVPDGVVLRPAQ

SEQ ID NO: 246231 - protein, 386 aa, unidentified
MKQHTTTETGKSKVTKATIREIRKQASQQKLTIGLDLGDRSTHFCILNEQGEILMEDQLATTKTGWNRLFEKLASTRVAMEAGTHSPWASRHLSSLGHEVIVANPRQVAMISDSKRKNDRIDAEKLARLARVDPELLCPIQHRSEQAQQDLAHIRVRNELVQARTSLINAARGQAKSLGHRLEKCDADQAGVEMTKEFPEPIQAILNPMLELAAEITVKIKAAEQKIHQIAQRYSKDLKVLDAICGVGELTSLAFALTIDEKQRFGKSRQIGPYLGMVPGQSQSGARDPQQRITKQGDRMMRFLLVQCAHCILRRDAPDCDLKRWGWSKIEVLKNGKGKPRKKKVIVAVARKLAVLMHRLWVSGEVYDPLYNAKQQAALAKSKTAA

SEQ ID NO: 246232 - protein, 430 aa, unidentified
MKSNTQNAKIEAITEKTLVLGIDVGSETHYARAFDYRGIEYSKKPFKFSNTEAGFATFKEWVLDLKERHEKDKVVPGMEPTGHYWFNLGKFLQDNEMKPVLVNPHHVKKSKELDDNNPTKNDRKDPKVIAGLVREGRYMIPYLPEGVYADLRTASNIRFQLQAELTRIQNRISRWFNIYFPEYKTVYGKPDAKSGMLILKAAPLPEDILTLGIDGVNQIWRDAKLRAVGKARAKTLIEAAEHSVGSKEGAVAARMEIRMLLEDYESRNTRLQEVMVLIEELVRKIPMAEKLLEIKGVGIRTVSGFLAEVGDISRFNNPKELQKLAGLALVENSSGKHKGETTISRRGRKRLRYLLFEVAMSLVAKNPEFRELHNYYTTRRLNPLKKMQSLMAIAAKLIRVFYAMLTKGVDYDPKKMVSDIKRPAVYLQAA

SEQ ID NO: 246233 - protein, 388 aa, unidentified
MIYLGIDIAKLNHFASAISSDGEILIEPFKFTNDYDGFYLLLSKLAPLDQNSIIIGLESTAHYGDNLVRFLISKDFNVCVLNPIQTSSMRKNNIRKTKTDKVDTFIIAKTLMMQDSPRFLTLEDLDFIELKELGRFRQKTVKQRTRLKIQLTSYLDQVFPELQYFFKSGIHQNSVYALLKEAPTPNAIASMHMTHLASLLTRTSHGHFNKETARNLRVLAQKSVGINDSALSIQITQTIAQIELLDSQLFHTELEIANLVTCLHSVIMTIPGIGSTNGGMILGEIGDIHRFSTPNKLLAFAGLDPSVHQSGNFQAQRTRMSKRGSRVLRFALINAAHNVVKNNLTFKTYYDKKRAEGRSHYNALGHCAGKLVRVIWKMLTDNVEFNLE

SEQ ID NO: 246234 - protein, 472 aa, unidentified
MRSSDRDAAPVQKSKRTSPSQGSGIRSTGNRPGAAISSGLSNKGVAHVDTPPSAFTQLQHFAGFDWATDKHDLAVVDRDGKIVLQFQFQDSAEGWAQLTDKLRPLGKIGVAIETSRGPAVERLLAMGVSVFPMNPKAAERFRDRKAPSGIKDDQLDAWSFADALRSDGQAWRPLLPDDPQTQLLRMLCRDEIGLIEQRTALILQLRQALREYYPAALEAFDDLAMPGVWEFVLQFPTPVELIKAGQRKWQKFMHAHKLYRTEVTEKRMEIFARADRLVSPSQSVTIAKSLLAVTIAKQLRTLQAQITEYRARIEKLFNDHPDSDIFRSLPGSGKKLGPRLLGEMGANRQVFDSAQALQCYAGTAPLTRQSGRTCFATIRLMCNKVLRATVHLWADQSRSDCVWAEAYYQQKRESGKSHAQSLRCLGQRWLKILWRMWMEHRPYDEARHMKNMVKHGSWVLGHLPNLQPAAAL

SEQ ID NO: 246235 - protein, 350 aa, unidentified
MNYAQINQRYLCGIDLHANSMYLKILDREGQVLYKRNMPNNFAQFKQILTPFLPDIAVGVESTFNYYWLYDGCVESGIPFYLGHAAYMKAIAGNKKKNDPLDAETIAHLMRSNLFPQAYPYPGEMRAVRDLLRRRHRQVRHRSEAYTHVQLLLRQQGICDFRGKDVKSVSGKEQILKSLTDPDVYYLVNSDMLLIEQLDNLLSDIEKQIKERAYHHNGMDYSLLKSVTGVGDMLALSILYETHDITRFPRVQNYASYCRVIRVQRTSAGKNQYGRNQKMGNPYLKWAYGQIITHARQSSERINAYYQKLEAKRCGKLARGIMSHKFAVAVYHMLKQKVAFDENRFLKVAS

SEQ ID NO: 246236 - protein, 344 aa, unidentified
MINVGMDVHSVNTVLHFFDPQAAEDRQHRSLTVPTTAKDLTVALRPLKGQCRVAYEVGVQAQWVASVVRPLAAEVQVANSSRIPWLFRDGRKNDKLDAKKLATLLYLRQLPTVHLPAADVSAWRALINHRRSLIKRRTMLKNQVRSILRAFQERCPHKSCWTKVDRVWLKSLNFDSARNIMMNSLLWELETLELHIDKVEEQLNQIAASQPAVALLRTIPGIGPRSAEAIVAFADQVSRFRNRKEFASYFGMTPTQDSSGLVDRHGHISKRGPSVVRWVLVEAVHRVIQYCPVMRAFFERIWQGKKDRYKKAIVAVGRKVLAVAFAMLRENKAFDPNRVLPNAA

SEQ ID NO: 246237 - protein, 326 aa, unidentified
MKIMTGIDLHSNNALCGLMDQSGRRLLHKKLPCDLPAILQVLEPYKARIAQVAVESTYNWYWLVDGLEDHGYPVVLANPARMHQYDGLKHTDDVSDAYFLCELMRLGILPTSHLYHRQTRPVRDLLRRRMLLVQLRTSLILSFKSLNERTLGPRVPLALVKKMSIEEAQARFTAPADQLLGGEQIGLMGHLQESIPQIEKHIVEATKEWKTFQRVQDVPGIGKILGLTIALETGDPKRFAGAGNFASYCRCVKSLRQSNRKKKGENNRKNGKPLPGLGVCGSGALRLPARCAVPALLRAQETKDQPRGGDQGAGLQTGQSRLARDA

SEQ ID NO: 246238 - protein, 341 aa, unidentified
MSVIAPVFSFGLNGYAGSGLALQDKAEKRLMQITIGIDISKETLDAYRFPDNHHIQVANGRAGHKTLVRWIGKQNGSLVVFEATGAYHRNLEAALAANGTAFAKVNPRQARRFAEATGRLAKTDRVDAIMLAKMGAILGLKVHEPKSEVLHILRELVTARRALMKDKVAARTRLQTTRQTLLKNQINARLKQIKIQIQQVDAAITEKVAQDEALSNKLDILTSIPGIAETTAFSMLIEMPELGTLEGKQAASLAGLAPMSRQSGKWQGKERIQGGRAFLRRAIYMPALVATRYNPGLKAKYDQLIRAGKSGKVALTAIMRKLVVMANALLRDGRTWSELRP

SEQ ID NO: 246239 - protein, 343 aa, unidentified
MQIRSVGIDLGKTTFHLVALGDNGKVLLKRKFTQKQLIAFTANMQTCLIGMEACSGSHFLGRALREQGHDVKLIPAQFVKPFVKSNKNDFIDAEAIAEAVERENMRFVPIKTDDQLDLQALHRVRDRLMTRRTALINQIRAFLLERGIVFAKSPIRLREALPEVLENVNENLTPRMRNLVAMLWSEWKDLELQIVQMNDEVERIASSDAACRRLRQIPGIGPLVATAIVASIGNGAAFRKGREFAAWLGLLPNQHSTGGKVRLYGISKRGNSYLRKILIHGARAVVLRSKRDRIAMGAWMSSLETRAPRNVLIVATAHKLARIAWAVLSTGQDYRAVPEALTV

SEQ ID NO: 246240 - protein, 321 aa, unidentified
MKIKNLVGVDTHKDSLACFCNGKFKEFKTNKVGFKQAINWAKSSHWAIEGAYCFGQAFSNFLIKNGCEVYEINPLLTKSWRTALKVASPKNDFGDAKVISIFANMDNMNKVSFETIKLKEKLTTRKALIKQKTQITNHLKMLFYTRGEELPFKALDTQKAINWMLEQDDVIVKTNGKILESIMAGIKSLEVEIEKEMPEPAKALTKMEGISTITACTIYAETKGKLTRKEQFASYCGVAPIDCSSGQTTRRRNNKGGNRVLNSIFYSLSIAQKRYNEKAKAYFEKKLSEGKSPRHARKCLARQLTNIVFKTLKDATEKRKP

SEQ ID NO: 246241 - protein, 410 aa, unidentified
MEDWPGGIPAFQKCEGGMHMALFVGIDVSKEKFDACGIGEQGEKVFVVSLRMNKSGFEDLLRRLSYSDTRLLVGMESTACYHIPLFSYLTAKGYRVAIINPLLINHFAKRSLRKTKTDRKDAYTIAQFLMREEETLSVQAPTHRSSELKDISRRREKLVDQMTSVKNDMKRILSVTFPELETITGIFTKSTLRLLSQHPSAHAIGQAGHDVVADIFITQSRGARPRATIKTLMDAATSSVGVTSPAKDLIIRQEAASLLHLEQQTQETTKLLIKLCDESMKKDMNILTSIKGIGKKTALNFLIEMGGDAKLFKNDKKLIAAAGLDPSTYQSGKYEGKSRISKKGNRHLRRVIWLMTRRVITSNELFRVHYYKRRKDGLPYKMAVLATAHKLIRVMYAMLIHQTYFEQRRN

SEQ ID NO: 246242 - protein, 337 aa, unidentified
MKFSGIDLHSNNSVVVVSDETDKVMVEKRLPNDLPTILATLAPHRDELAGVVVESTYNWYWLVDGLQAAGYLVHLANTTAIKSYEGLKHSGDETDAAHLAHLLRLGILRTAHIYPKEQRATRDLARKRMQLVRSRTQHILAVENIVARETAAHIKSNDVKRRTVEGVSALGLRDDVILAVQSNVAVIQTLSEQIDRLEKRLQERVRPSPEYALLTSTPGIGQTLATTILLEAGAIERFRAVGNFASYARCVDSVRISNGKKKGEGNTKNGNVYLAWAFVEAAHFARRYCPEAKRFFDKKRTKTNNAVATKALAHKLARACYHMLKDKQPFDVKRCFA

SEQ ID NO: 246243 - protein, 357 aa, unidentified
MKNSNTNRPQLSIGLDLGDKRSRFCLMSDTEEILVENSVATTKIAMSRVFSKFERARVVIEASTHSAWVSQAIEDSGHEVIVANPREVGRKYLSKTKKNDKTDARTLAHLGHVSEFFLSPIKHRSRSCQVDLTLIRARDALMKTRTLLINHVRSTVKIFGERLPSCTADAFARKVLPDIPSDLAEPLVPLLKQIGGITQQIKEFNKKVEELCETKYPETETLRRIPGVGPLTSLAFVLTLEDPKRFRKSRQVGAFLGLVPRQHDSGDVAPQLRITKAGNEHLRRLLVSAGQYILGHFGEDCDLRRFGERISARGGKAAKKRAVVAVARKLSVLLHKLWSTGQVYEPFHSTTQRKKAS

SEQ ID NO: 246244 - protein, 461 aa, unidentified
MPQRNSSNPDRRRPKRTRKIEIAHPDAAGVDVHSEFHFVAVPDDRDEEPVRRFGAFTEDLEKLANWLTACGITSVAMESTGVYWIPLFEFLEKRGFQVVLVDPRKLKSVPGRKSDVLDCQWLQQLHTFGLLAAAFRPDDQTCVLRAYLRQRGLLVEEAARHIQRMQKSMEQMNVKLEKVLSDISGVTGMLIIDAILDGERDPHKLAELRDPRCQNDEATIAKALYGQWRDEHLFTLRQAREQYRMCGALAAECDARIEEHLRTYADVPPSDPSTAVPRRTGMPRKGKTYLRFDAQPLLVQKTGVDLTRIDGIDSYTALKLISEIGLDMSRWPTEKHFASWLALCPDNRESAGRRKSGKTRPSANRAAAALRMAAQGLHHSASAMGAFLRRMKASLGPTKAITATARKIALMVYRVLKNGMRYVDPGQDWYERQYRARVLKTISRKAQQLGYVLTPISPIKT

SEQ ID NO: 246245 - protein, 344 aa, unidentified
MEYYVGLDVSLRSCAMCIVDNKGKVYLERELPCEVEDIADCLAAFEHPIERVGFEAGAMSQHLFFGLQSKGFEVVCMEARQVSAALSAMRNKTDKTDAKGIAQILRTGWFSPVHMKSREAHGLRALLSTRKALLKKTMDLANEVRGLLKIFGVRLPRTVKHGSFDGLVRPMIEMDDVLAHAIIPLLDARAVLFQHYLELDRRVKRAASQDEVCMRMMTVPGVGPIAALTFKAAVDDPSRFKRSRTVAAHFGLTPRRFQSGEHDNPGRISKAGDRDVRATLYAAANALLMRTMAGSQIKSWGMRLMRTKGRRRAVVAVARKLAVLLHRMWIEGSEFRQEQVGGTA

SEQ ID NO: 246246 - protein, 413 aa, unidentified
MQTLVERGCGLDVHQATVVACLLIVRKDGKVQKQMRTFGTITRELLSLREWLLSEGCTHVAMESTGVYWKPVYAILEGGAGGLEIVVANAQHVKKVPGRKTDVKDAEWIADLLCHGLLRSSFVPPKPIRELRDLTRYRRKLVESQSAERHRLLKLLETANIKLASVATDVFGVSGRLMLEALVEGKATPQEMAELAKGRLRQKIDELGPALEGKLEEHHRFLLRLQLDRLEAAEKDLAILEHRLQEKLKPYEAQLTLLDEIPGVDLTLAAVIIAEMGVDMSVFGSVSQLASWAGVCPGNNESAGKRKSSRIPKGNVYLKTALVEAANAAAKAKGTYLRDKFYRLKARRGYKRAAVAVAHKILVAIYHMFSHQVCYNELGDAYLDKRNKHHLTRNLVHRLERLGYTVTLEQKAA

SEQ ID NO: 246247 - protein, 345 aa, unidentified
MLYVGVDIHKKNLQVCVVDERGNQVSGCKVANERDSVVNYFSRIELPSAVAMEPTHNWGALYDLLEGMRLDVHVAHPRNVDLIGKCRVSTDKGSAYKLAALLRAGFLPEAYVADPEGRELRRLVRGRASLTRSSTQIKNQVHALLRENWIKTSFSDVFGVAGKRFLRKLELAPTSKLLLRLRLDLLEKTQSKIAVLDEEIVRRAYCDKRAVLLMTVKGIAEYSAILILAEIGRISRFARAESLVRYAGLNPTEDSSGERIRRGRLEKAGSSWLRWILVEAAQHTIKEEGKIRELYLRVLAKKGHNWAIVAAARELLVSIYWMLQRMEPYRPSGKRQEVLRVGEAR

SEQ ID NO: 246248 - protein, 350 aa, unidentified
MTKSNKTKKKTTIGLDLGDRKHTYCVLDPAGRIHKEGTIANTRPHLESLSKSYPGAVVIMEAGTHSPWVSRFLEEQGMEVIVANPRKTRAIYQNERKSDQRDAVMLARIGRMDRALLCPIEHGSEEAQRDLVQIKLRDALVRSRVSLINSVRFTLKSLGYAVSNPSSQRFHKTVLTEVPAHYQVMITPSVKALEALTAQIKTLEEEISRLAKERYPETLFLQQVSGVGPITSLYFVLKVGDPWRFGNVRDVGAFVGLCPRRDQSGECDKELRISKCGDRYLRRLLVSAAQYILGPFGSESALRTQGIQLAKDGTARAKKRAVVAVARKLSVLLLTLWRKQLIYEPFHAMA

SEQ ID NO: 246249 - protein, 404 aa, unidentified
MKRIKRIKRIIAVGIDVSKDKLDVSIYDGKNHITKIYTNKEEGIENLIRDSKEASKKIIDSELHFVMEATGTYHTKVLFTLTNNNYPVYVLNPLISKRYSEEQLRRTSTDKIASKLLAEYAYSSISSHLLGIQNERYNILVSSKFDKSNEDRLNLKILLRTLEGLKKTKTRILNQLEALNQYPDQLGIDAIKSLKSILEEIDKEIKNLENKISEIVKKEENRNLYEKLKTIPGIGDRAASAIIAYFGSFSSFDSPKQAPSYAGLTPLIKKSGKSVGAKEIYHISKIGSPYLRQILFMASLSAARYNDQCHILYERLLKEGKAKKLIYVAISCKLLRQTFGIIKNGRVYDPNFGLMDVEKGNNSNNNNDNESIKDNKVNIPFPKNPCLYNPLINKQGTSRCVTGF

SEQ ID NO: 246250 - protein, 393 aa, unidentified
MYLVGIDIGKLKHSFCLLEKETGEILVEPVFFENNKDGFNVLLSSFKHLPQKAILIGMEDTGHYNLALLKFLLDRNYQVALINPVATNLTRKMQGGISKNDKLDTLTICDVLASNQRIKSYRISKYNSFDLYEQKMLTREHHNLKEEENQLSNRLQKCIDVLFPEFNSLFKSKYGIVYMNILKEFGSADAIAHADIRTLRKCFDTGRGKHIALTAEELKEAARNSIGFPSASEATQIKHLVARIELIKEQIAEIDKKIEEFSIQNNSPILSIPGISHFSGTSILAELGDIHNYSKPSQIIKYAGVAPLTYESSQFTAQHTAITKKGCKYLRKTLYQIITPVIQYNPVFKKFYLLKIAQGKGHRCAQGHCVRKLMRVIYHLLSTGTQFDPALLR

SEQ ID NO: 246251 - protein, 387 aa, unidentified
MIYVGVDIAKLNHFAAAISATGETLVEPFKFTNDNDGFCKFVSVLSGLGKDNLVIGLESTAHYGNNLIEFLVSNNYKICVINPIQTSTMRRNNIRKTKTDTVDTLVIARTLMTQPHRFFTAYDVQLLHLKNFGRFRQKLIKQRTRLKIQLTSYIDQVFPELQYFFKSGLHHKACYSLLKQAPSAKLIASMHLTHLTNLLKCASKGHFKKDTAVELRVLAQKSVGSSDKSLSIQVIQSIEQIELLDSQVKTVESEMQQIMTALDSILMTIPGIGFVNGGMILGEIGDIHRFPDPTKLLAFAGLDPSVYQSGNFQAKHTRMSKRGSRVLRYALVNAAHNVVKNNLTFGNYYVKKMAEGRTHYNALGHCAGKLVRVIFKMLTSNSAFNLA

SEQ ID NO: 246252 - protein, 412 aa, unidentified
MKQQAERAAGLDVHRDNVVAATRVNDPSGEVAVTKKRFPTTRRGVRELAAFLSEAGVTRVAMEATGVYWKTIYYALEGLFDELWLCNAQHVKNVPGRKTDLGDAEWLADVAAHGMVRPSFVPPPEIRELRELTRYRKTQVDARAREIQRLEKTLQDAGIKLTSVASAVWSVSSRKIIEALIAGERNPAVLASLVLGKLRPKIAQLEEALDGHFGPHHAIVCRQVIEHIDFLDGSIAALSEEITARLIPFEAAVTLVCSITGIAELSAQAIVAEIGVDMSRFPTAGHLCAWAGVAPASHESAGKRRPAGTRHGSTWLKRVLIEVAQAASRTKGSYFSAQYSRIARRRGPNKAAVAVANSILAVIWHVLTNGCIYEDPGADYFERRHDPAVEAKRLQARIEALGFDVTLTLKAA

SEQ ID NO: 246253 - protein, 345 aa, unidentified
MQPMYYIGLDVHKRTISYCVKDVSGTVHSEGTVPATRFHLDRWMKTLPQPWTAAMEATVFTGWIYDYLRPHAAGLKVAHPLMLRAIAAAKKKNDRIDASKICDCLRCDFLPECYMAPTALRDRRRTLRYRNLLVRQMVQMKNKIAVLLMEAGVSYNKQRLHKAGYFRELLATNPDINEGLCSLLRVCRETVVRLQRTESALVRSLERDSLLKERLERLMTIPAVGPITALTWALEVGDVERFSSIKKAISYCGLCGAEKSSANSVQRTPISKQRNKHLQTTLIEAAKMAPRYSPQLALLYDQEKRKGNANRATLAVARKLVAYLMAVDRGQHNFQVTEARHCAAA

SEQ ID NO: 246254 - protein, 388 aa, unidentified
MLITEDDGHVTEDIREFGAFTDELYLLKQWLLDAGCHVVAMESTGVYWKPVHNVLEDIAHVILVNARHVKHLPGRKTDVSDSRWLASLLRHGLLKGSFIPERHVREWRDLSRLRRVYVESLSDYKRRVHKLFECANIKIDSIASDLFGATGKNLINLLVSGKDIELEDIYACTRGKLKGKEDELLKSIRGFFSDHHRFQLVSMLDLINAVEKQISTVHDRLKKFLSDRKNKIDLLMQVPGISELSAHSILSEIGDTLEQFESSAALASWCGLCPGNNESAGKRHSGRSPVSSNYLKTIMTEVAWGAVKKKGSYYREKYYSLRTRKGSKKAIVAIAHRILKAVFHILKYVTPYRELGENYLISLNNEARLKSLHKHAAKLGYALVPLTA

SEQ ID NO: 246255 - protein, 342 aa, unidentified
MEQYVALDVSLKEISVCIVDSNGEVVFEGKTAAEPATMVELIRSKAPQVKRVGLETGATSPWLFHALASAGLPVVCMDARHAHAALSIRPTKSDRSDARGLADMLRMGWYREVHAKSVTSHERRTILGARHQLVTMRSELDAQIRGILKTFGLILGTGNKDTLIQRAEKLAAGHPVMSGLVAKLAEVRRHVTSQIAAIDRDIRHLVHTEPTLKRLMSVPGVGPITALAFLSAVDDPRRFKHARDVGPYLGLTPTRYQSGETDRQGRISKCGDTFTRTCLYEAAHVLLTRVQRFSPLKAWGMRLAKRIGGRKARIAVARKIAVILHCIWTDGTEFWWTREKAA

SEQ ID NO: 246256 - protein, 408 aa, unidentified
MWVEIQLQKNRSVVVMISVGIDVSKGKSTICIMKPYGEIISTPFDIDHNDVSLNELKQMLMRFNDDVKIVMEATGVYHLPILYYLIEADLFVSVVSPLVMKKYRNRDIRKVKTDKRDAMNIADYGIDYWYRLEKYEIQVAVYDELKLLGRQYRGYMEMRIKALLNLTHLLDYTMPGIKGLLKNDKLIDFVSEFWHFDNVKKLSESRFIERYNKWAKKNGYHQSVDKAEKIYYLASNGIPTIPSTVPSTKMLVEEAVRVLSSVNDTLDTILSRMQELAKTLPEYEVVRNMGGVGEKLAPKLIAEIGDVRRFHSKGAIIAHAGIDAPPHESGQFVGTRRRITKRGSSLLRKTGYEVMRSLKSMKEPEDGAVHRFINKKEAEGKPKKVAKIAGLNKFLKIYYARVMEVYQN

SEQ ID NO: 246257 - protein, 343 aa, unidentified
MDYFAGLDVSVKETSVCIVDDAGKIVREARVASEPEALLQVLTNTIYRFKRVGLEAGPLSQWLYSVLAEAGLPVICVETRHMRAVLKAQINKTDRNDARGMAQMMRARLYRPVHVKTLRSQKLRVLLTHRKLLQSKAIAIENELRASLRNFGLKVGMIGTMKFEARIRELVERLPDLAVLVEPLLIVRRVIREQLGILHRRLLAIVRDDDVCRRLMTIPGVGPVVALTYRVTVDVPARFRKSEAVGAVFGLTPAKYQSGENDRTGAISRCGDEMMRIMLYEAAQSMLVRTAKWSWLKAWAMKIARHRGMKKAIVALARRLAVIMHRMWVDGTEFRWTRELPVA

SEQ ID NO: 246258 - protein, 413 aa, unidentified
MDVLYPRCAGLDVHKRTVVACALWSGPGRLTEKEIVTFGTDTFELQRLAGWLLEHDCLEVAMEATGAYWKPVFNILEEYPALSPRVLNAEHIKNVPGKKTDVNDAEWIATLLRYGLARASFIPHRQQRDTRELTRFRTALTHEKTAGINRLQKTLEAANIKLASVLTDIRGLSGQRILEAVAAGEDDPATLAALADFRVRATPESIERAMTGRITSTLRFVVRQHLQHLTDLDEAIGRCDQEIARLMLPFAAEVQRLDPVPGINAVAAYNLLAEIGVDLSRFASHLQFTAWAGVAPGNKRSGGKRRRAPTRKGNPWLKTTAVEIAASAIRKKDSFLSIKYHRIAARRGHMRALVAIAHQILVIVYHLLVDKTEYQDLGAAYFDQRDHDAIRSNSVRRLERLGYRVELTPVAAA

SEQ ID NO: 246259 - protein, 344 aa, unidentified
MKIKLLGIDLAKNVFQLCALNQANKVLYNRTVRRARLSSTIAKLEPITIAMEACSSAHYWGRTFEAMGHKVLLVPAQHVTPFVRGGKSDARDALAICEAAQRPGIHLVPIKSIDQQDIQLLHRLRQRQVQHSTALANQIRSLGREYGVIFPAGIKSLISHLPEALEDGSNELSPVARYALADQHCCLIAVRQAMKDFLNQIEQLAGQHPAYVNLLPLPGIGPMIASAYIAAIGNGNQFKCGRQVSAWLGLVPRQYGTGGKIQLKGISKSGDRYLRTLMIHGARAVITRGLKNSPELTQWVQPIIDRQGFNKAVVALANKMTRICWVIVTTGEAFDMKQAFKPVT

SEQ ID NO: 246260 - protein, 411 aa, unidentified
MDTPYCVGIDVALHDHRVAILGSDGEARGKSFSILASQEGFADLVRTLHAREATPGHTLVGLEATGHFWENLEAFLSGAGYRVVVLNPLQTRRYREVLRRKAKTDDIDAYVIAGLLRSEAAAACYVPDEQIQSLRELARLRARLMRERQDYLRQLVAQLDVVFPEHRESLGDATTARARGLLTVFPTARHLADATPATLRRTAAAAGARGFSLQDATALRDRARHSTYSGKAADARGHVVRTLIAQFERLTASIADLDQTLQALLPPADPEGGPSDATLLQTLPGVGPYTAGTLLGELGSLTRFTDARALVAYVGFYPVIKESGEHATTPFLSPAGSRIARHALYLAAVNAVRRSAEWRRFYQRKLAQGKKPKQALIAVAVKWLHTAYAMLKHRAPYDPSRLVATLVTISP

SEQ ID NO: 246261 - protein, 369 aa, unidentified
MTFFIGVDLHKTQFTVHVRTEEKIESLEQIKQYPTTAAGYAEFLTRIETYKASGAAVKIGVESTGNTRFFKNQVEKAGAEVTVINTLKFKVINESTKKTDKHDASTISEFLSKDMLPESYLCGKETENIRRLLKSRERLVRSVVGQKNEVHALLVSMGLPDELRSLQSKKGRQKILDTLESHSDLVLEAQSVKLMFQIIDRMTESVRGIEKQLAELTKDDEMVNRLMTIRGCGKITAWTIRAYTEDIGRFASAKKYAAFCGLVPWVQDSNETIHHGKITKRGPQELRTCFVQPVLGIRRCKDTSEWRMMQRYEYMKKNKGSGKSIIAAARKMAEIVWAMLSEKQDFNADKMKGIYKPMTLADEALSAMN

SEQ ID NO: 246262 - protein, 413 aa, unidentified
MDVLHPRCCGLDVHKSSISACILLREAGRVQKHQRRFGAMTQDLQELAEWLGRFGVTQVAMESSGVYWKPVWNILEGQFTVVLANAQHIKNVPGRKTDQKDAEWIAQLLQYGLLRPSYVPCEIIRDLRDLTRMRASLSQEASRLSSRIQKVLEDANVKLASVATNVLGKSGRAMLEDIISGEDDPEHLASLALGHLRVKIPQLRLAFEGKIRSHHRFLLRRLLDQVQFVEQEIALLDQRLEDIGGQRPELAQAVERWDTIPGIDRVAAWALLAEISDNMAQFPTAEHLASWAALCPGNHESAGKRLRGTTRQGSPWLRRMACQCAWAAARTKNTYLSSQFRRLAARRGKKRAIIAVAHTIIVIGYHLQTNQSNYEDLGGNYFDRIHSDGLKRYLVKRLQQLGHKVTLEPMEAA

SEQ ID NO: 246263 - protein, 418 aa, unidentified
MAKVLQKVFDQLHERVAGLDVHKAQVTAAVRVSGPDGGRLMEVTEFRTTVQGLLALRDWLSAHGVTYVAMEATGVYWKPIWAILEDGFECVLCNARDVKQVPGRKTDVCDAEWLAQLAEAGLLRASFVPPKPIRALRNLTRYRKSQIEDRQREANRLHKILEDTGIKLDCVASDILGRSGRAMLDALVAGTTDPEVLAELAKGRLRSKLAALREALEGRFDAQHALIVGAILSKLDFLDEQITLLSDAIEEQIAPFEPAVTLLCTIPGVQRRTAEVIIAEIGADMTVFPTAKHLASWGGQCPGNDLSAGKRRSGRTGNGSRWLGIALTEAALAATRTKDTYLGEQYRRLRGRRGHKKAVGAVRHSILVAIWHMLTTGELYVDPGADYFDRRIDPQRKIKRLIAQLEALGQNVTVQEAA

SEQ ID NO: 246264 - protein, 410 aa, unidentified
MKIPGIDVHKKVLMVVVVDDSVAEEKPARRRFVTLPSELQRFRIWLQEQGVEEAVLESTAQYWRSVWLELEPHMRLHLAQAFSNRAPRGRKHDFKDAERLVRRLIANELILSFVPSGEQRIWRSMTRRKVQLTRDRVRLQNQMECLLEEMRIKLSIVVSNLLGASGLRILHALAEGESDAKKLAQLGDERLQCTEEQLVDALTGRVQPMHREMLALQLQRLQLIDQQMAQLNRMIAQAMKSHQDAVIRLAEVPGLGVDSAQQIIAEVGAQATTFSSAAELTSWVGTCPGKDETAEQNHSSRSAKGNKYLRRVLNQAAHAAVCKKGSYFQALFRRLLPRLGYKSAIWAVAHRLCRLVWKILHEGVRFIEQGAEIGPREKKKRAQMLARALRKLGYEVTITPINQLAPKPVV

SEQ ID NO: 246265 - protein, 383 aa, unidentified
MQILTFGAPTAANIGTIFAAIELSQKTWLITVHSPDQGRMSRYKLEGGDHAGLLALIAKIRVRAAQKLGSEPRVASCYEAGYDGFWLHRLLVAAGIDNLVFDPASIAVEQRARRAKTDRIDGELLLRTLMALLRGEPRVVRIVRVPTVEQEDARRISRERDRLVTEQTAHTNRIKALLRLSGLQVGNPRRRNWLTWLEQQRDWQDQPLPPHVMAEVKREHARLMLVREQLAALEQSQDTTQASAVPARMATRREQLQRLKGVGPAFATTLAGELFYKEFRNRREVASYCGLTPSPWKSGGIDREQGISKAGNPHVRQKAIELTWLWILHQPDSALSRWFRARTLNAGKRARRIAIVALARKLIVALWRYLETGLVPEDALMKA

SEQ ID NO: 246266 - protein, 403 aa, unidentified
MRATCGIDWASDWHDVHISDEHGQLLVAEQFSHDETGISALIRLLLAHRVECCAIERPDGLLVGRLLAAGIVVLAIHPNQVKAARDRYRAAAGKNDRFDAFVLCELARTDRHRFPVLAPSSDETLALKALVRTREDLVDARVALANQLRAQLQAFWPGAERIFADIDSPIGLAFLERYPSPTDTRGLGEKRLESFLARHAYCGRRAPAELLARLRNAPNAVVGELEQDARRSAVIGLVAALRPIVEQISQLTSQIAGATRAHPDGAIFLAFFRDPKSVVTAAGLLAEIGDNRARYPTNDSLAADAGQAPVTIQSGKRSNATFRWACDKRLRKHMSVLADSTRHWHPWARDVYQRARARGCTHPHAIRILGRAWSRVLWRCWQDHTPYNPTQHNALNTLLAQKG

SEQ ID NO: 246267 - protein, 367 aa, unidentified
MKQQTSATTETGIKGRNIIDFTGKTIYVGIDVHQKDYQVAKVLNGFCLGNHRMESNREKLIEHLKSHYPGATFKCVYESCAWGFTLQRTLQASGMECIVVHAADVSTTDKEKRRKTDKVDALKLAHGYASGSLKGIHIPNEETQKDRSLIRYRKQLTGDINRSKNRLKSLLKYQGIDLPPQYAGNNWSRNFLNWVEQQAEKDALLKETLMLLLEQIKLLRQLLLKTERKLREMRKTKYAQKADLACSVAGIGPTTAMLFLLETGDINRFKGFDSLNDFVGLCPDTDSSGDTHRDRGITTRRHKQLRSALIEAAWQAIKTDPALMDSYQTLLKRMKGTQAIIRIARKLLRRLRAVLLSGRPYQKGVIA

SEQ ID NO: 246268 - protein, 482 aa, unidentified
MKKPNIYQNQSQELLHLFEEAGSGEKVMCVPMDYAKNDHLVMFCNGHGDILRKPFSVKNTPEGIAYIDDQVTRSCRRRGIKKEHVFFGGEDANSFAKNFVSTLRCKGFVVANVNAHDAKKQRGNVQASTDRIDLMGIATMLLNCRANCCPAQFGIYRNLRTLVRHRRRLVQMLTEVKNRVHGIVDEIFPGFLNEKNSGIIPFTQSSLYLMQDRFSPKQIRRRKRQKLVEILKRFGTSKAEYTAAKLQQYAAKVLHAPVEYVDTMQLSLAQHVKHIRCLKESVVQMEKEIALNLAQTQGAFLTSVRGIGLVLAAGVTAEIGDPNAQKPLNNLASYAGIIPRVKQSGGLDGKTYIGPVAKRCNRILKDYVVKSAYHLGLHGPQDLMNDYKRRNASGQHADFGIGRRYLRMATNLMRTSQVYLPPNLRKDGYTRQQRAGYYLMSWPYLKEKWKKVGALEAAFENNRPLGLWRQIVQELYDIKLKL

SEQ ID NO: 246269 - protein, 410 aa, unidentified
MDLLRREVPASSLVVAIDPGKALNRVWLTTGERGLIGEPVSLPVLRDGIEQLEQLIARSGVAGAPVIGLEATGALHRAWATEIEQRWPGSLRLFAPSETTAARAQLGSRRFKTDDRDCAAMVWLLRQGAGRPAQPDAVEALLGTVRHRRQLVDARKKLQQRLHDQLNALCPGLSAPASQGRALKIESPTGQAVLACAAALAGRAPSARSLIARAPGRMTAATAAFWTARWKRLLAPPADAELRAARLGRDLRRWQDLQPDIALGEQQLELLLAQTPGQVLRSLPGVAVVRAAAFSAFTLPIERWPTPEHLYSATGLAPATYQSSTLTRRGRISRQGLPEHRDALMGIAWGLALNSDAFRVRDAELRARGFRPIQARVALARHACRLCWRLLNSQQPFDERRYAHARQRGR

SEQ ID NO: 246270 - protein, 343 aa, unidentified
MGEISMIGLDLAKNVFQVHGVDASGAVVVRRQLRRGQVEKFFAQLPACTVGLEACGSAHHWARVIGRYGHQVRLMPPAYVKPYVKRNKNDGRDAEAICEAVNRPTMRFVPVKSVEQQATLAVHTARALLVRQRTMLANSLRAALSELGIVAAQGIKGLRELMVKLEAPNQEIPEMMRGALLMLAQHWQAIDVDERALEQQIAKAARSDREARRLMEVPCVGPIIASTVLAKVPDATVFRSGRDFAAWIGLTGRDHGTGGRHRPGRISKQGDRTLRALLINGASAYLRHQRVRGVSNPWLRGLLARRPYKVVMVALAAKTARILWAMLVKGEPYRDRASAPAAA

SEQ ID NO: 246271 - protein, 311 aa, unidentified
MKEAQRFVGIDISKEELVVAVRPTAELQSFPNTEEGLAALVRFLQPLSAHAIVLEATGGFARAAVNAMALAALPVVVVNPRQIRDFARSVGLLAKTDAIDARIIARFAEAVRPEFRPLKDLETQKLEALNNRRRQIVEMLTAEKNRLGASPEWCHKDIRSHIAWLEKRLKRANDDIDDLIQQSPIWRQKEKILTSVLGVGPVVTTTLLCGLPELGALSARKLAALVGVAPFNRDSGQSRGRRSCWGGRAQVRAALYMAALTASRCNPVIRDFYLRLRSAGKPAKVALVACMRKILVILNAMIKSNSCWQQA

SEQ ID NO: 246272 - protein, 412 aa, unidentified
MEVMYPRCAGLDVHKETVVACVRIVEGGDVSRSVRTFATTTASLIELGEWLEVNGCTHVAMEATGVYWKPVWQVLVDSSLELVLANAAQVKNVPGRKSDVNDATWVSELLAHGLVRASFVPEPAIQQLRGLLRTRKQLVREKASHVQRLQKTLEEANIKIESVLSDVMGCSGRAMIQALIDGESDPAKLAALAHWKVRASAATLRAALHGRIKRHHRFLLRLHLQQVDALDAAIAEIDREADAGLACFRDAVKQLSTIPGVSELSAQVILSEIGTDMGRFATAAHLRSWAGLCPRNDESAGKRRSTRLRRGAPWLKAVLVQCAWAAARTKATYLHAQFVRLRGRRGPKKAICAVAASILTAAYHMLKDGTFYEDLGAVHFDRRRPETQARRLVKRLAELGFSVELKPAAAVS

SEQ ID NO: 246273 - protein, 469 aa, unidentified
MTTYPMRRRFANPMMEQAMAQRKRGVTLKPGKGQAALTVTHAAGIDIGSAAHYVAVPPDRDEQPVREFASFTVDLEAIAAWLSACGVDTVAMESTGVYWIPLYELLESRGFTVLLVNARHVKNVSGRKSDVLDCQWLQQLLTYGLLSGAFRPADQVCVLRELWRQRGRLLREQARHVQHMQKALTQMNIQLANVISDVVGETGQKILRAIVAGERDGQVLAKLKNRLIHASQDEIAKSLQGNWRSEHLFSLKQALGAFDFVGTQLAEADREIEAQLKVLQVHDANPAKGKKRSRARNEPRFDLRTQLFRVCGVDLTRIDGINVTTALAVISETGTDMSRFPSVKHFTSWLGLCPGTRITGGKTISGRTKQCANRAAQALKLAAMALRTSRSALGAYFRRLCAHMDKPKAVTAAAHKMARLIYTMLTKGQEYVDQGQDYYEERYRERVLRNLAQRANKMGMRLVTAEPVA

SEQ ID NO: 246274 - protein, 372 aa, unidentified
MTGYRERVAVPHSDGLTGSERVGPKHRGGTAVEYFAGIDVSLEESSVCVVDGTGKIVREAKVASEPEVLAAWFAESGLKFTRIGLEAGPLSQWLHAGLTAAGGAVILIETRHLKAALGAMTVKTDRNDARGIAQLMRMGWFRPVHVKTLPAQEVRALLIARQLLLRKLRDVELGIRGLLRGFGLKVGKVSTGKYEARIRELAAGHPMLEPVTAAMLQARASLRAEYAKLHRMLLRIVRADAVCRQFMTAPGVGPVVAVSYRTAVDDPTRFRKSRDVGPYFGLTPSKYQSGEVDRTGRITKVGDAMVRTALYEAANVILTRVTRFSSLKAWALRIAKQRGVKRAKVALARKLAVVLHRMSVDGTDFRWRKAPA

SEQ ID NO: 246275 - protein, 322 aa, unidentified
MEVLHAHCAALDFHKQTVVACVRHMSGGKVKTAVRTFATITGALLDLSAWLATEQITHVAMEATGVYWKPVWHILADGEFQLVLASAAHVKNVPGRKTDVKDAEWLADLMAHGLIRASFVPDQPTQQMRDLLRARKQLVRERASHTQRIQKALEDANIKLDSVITDIVGLSGRRILEALVKGETVPQALATLAHRRIHASTDELEAALRGRVTTHHRFLVKLHLDQIDAIDAAIQSIDKEVDGNIEPFRAAAELLTEIPGISHLAARVVLSQIGLDMSRFETAGHLVSWAGLCPRNDESAGKRRSNIGVPTDRRVPSGWSVG

SEQ ID NO: 246276 - protein, 291 aa, unidentified
MQGNGGEVLVGVDVSKGWIDVCRSGSRRVERVANTLEALAAWVARARPTLVAMEPTGGYERALCSALAEAGVRYVKLHPNTILAFRKARGLRAKTDRIDAMLISHYLADAKRRGDLPTTFGADERLRALAARRRQLVDARQAERCRADLASDPIVQQSLATVVTALTQSLAKALRAVRGVGPVVAATLIADLPELGRLTGKRIAALVGLAPQTHESGKRSWQAKTGHGRPLVRSALFNAARAAIRHPSPMQDFYNRLVQTNHRPGKVALTAVMRKILVVANAVARDHFKAA

SEQ ID NO: 246277 - protein, 346 aa, unidentified
MCEFNLITGGEVMDEITTVGIDLAKSVFSLHGVGGLGRVLLRRTIRRDQLEEAVAKLQPCLIGMEACSGAHEWARRFVAYGHTVKLMAPKFVIPYRKSGKNDGNDAEAICEAVTRPNMRFVSVKSVEQQALLSLHRVRRGFIAERTGTINRLRGLLSEFGVVLPLRSKTVRRQASAVAESLPALARRAIEDLLEHLRLLDGRIEAYDEEIEGQAKLCEPAKRLMKIRGIGPTTALAIVATVGNAKEFNNGRQFAAWIGLVPSQHSTGGRSRLGHISKQGDSYLRGLLFQGARSVLHSAAGHQDRMSRWALELQARRGYNRTLVAIANKNARIAWALLNKNEELRMA

SEQ ID NO: 246278 - protein, 386 aa, unidentified
MQASTIGTPTIGHSGTIFVAIELSQRSWLVTIHSPDRDRISRHKLAGGDHCGLLALIEKVRQRAAHKLGTRPAVVSCYEAGYDGFWLHRLLTAAGITNHVFDPASIAVEQRGRRAKSDRIDGEQLLRTVMAHCRGEPRVVRIVQVPSPEQEDTRRATRERGRLVQEQTAHINRIKSLLRLLGMAVGHPRRRDWLGWLAAQRDWQGQPVPARTMAELEREHARLMLIGEQLAALEQQSAQAKPTPAAAEMARRQDLLLRLKALGPALSGTLTNEVFYKDFRNRRQVGAYLGLAPSPWQSGKTDREQGISKAGNPRARQAAVEFAWLWLRHQPGSALAQWFAQRTAQASKRVRRIAIVALARKLVVALWRYLTTGLVPEGAVLKPAKA

SEQ ID NO: 246279 - protein, 405 aa, unidentified
MAVMIGVDPHKASHTVTAIDETETVLGELKVRSGANQVERLLGWAAQFEERTWAVEGAGGLGYLLAQQLVAAGERVLDVQPKLAARVRLLSNAATNKNDPNDARSVAIVALRSPKPVAVHAEDHTAVMKLWAKRHRDLARHRTRMACRLHAVLCELVPGGYSGEIYASRAEKLLGELETQGAVATARRELAVELLSDLRRIDEQMRDTKERIAQAVTASKTTVTEIFGVGPIVAAIVIGEVGDVARFTSSDRFAAYNGTAPIEVSSGPRKIYRLSLRGNRRLNHALHMAAITQIRYGHSEGRAYYDRKTAEGKSGKEAIRALKRRISDAVYRQLQLDARQAREVTAMGSGGQAGNDSVASVTGSHPESRLFGEATPEPATTLRPAAIAHRSRTSRTSPRSVKRAS

SEQ ID NO: 246280 - protein, 401 aa, unidentified
MHKTCGLDVHKDTVFCGVFDGKRHQEVKEYSTLTSSITAMGEYLQSEGIEDVALESTGMYWIPVWNILEEMGFKLTLVNPYLIKQMPGRKSDVKDAQWIATLLHKGLVRSSLIPCKEIRELRTYSRKYIRLQQRLTSILQEMERNLEMCGIRITSFVSNISGKSVIKVIHALIEGESDPEVLAGYIHGRIVNKHKRKTIVESLRGHITPQHRFQLELSLEEYELLCRQRDRCEEEMKRLIQQHYTEELALLQTIPGISLLSAMIVIAETGASMKAFENSGKFAGWTGLRPRNDESAGKFKSTSTTKGNRYLRAILVQIAWAAARTKGSFFKEKFTRLCLRKNRKKALIAIARKMAVLIWNVLCHQEEYNPQKLIVYEPGKVQAKMDYHMKELKRLEKLIEN

SEQ ID NO: 246281 - protein, 429 aa, unidentified
MDYPPVAGIDVGKNFSEMCILSPNNEIYHRIKIYHDSIDSIKKAIGLLQKAEKDFAIRPVVVLESTGHYHKILFHYLSDSGFEVSIINPIQFDSIKNIGIRKVKNDKFDAHKIALLYRFSFIKTTVVPDDVIDCLKSLCRQYYKLGDELTTYKNRLIGIIDQVMLNFTDVFQNVYSNTALAVLDRYPSPKQILKANKQTLISLIEKTSKKGLAWSTEKYELLVLKAKEFKDLSINNPGNLAILKVNISMVRTLQDAQKDILDAINEIILADSLEDNPVLAPIINLLCSIPGIGILTAATILAEVGDFSAFSSPNKLVAFFGIDPSVNQSGEFIGTRNKMSKRGSRLLRRVIFTTALANIRSKRNGDKTNPVLYEFYQKKCTNKPKKVALGAVMRKLVNIIFAVMRDKKPFELRTPEEHEELLLTRSSVA

SEQ ID NO: 246282 - protein, 480 aa, unidentified
MSPSFIAIGCDSSKGRIDVEVRNHHGTVLHTGIFDDTPNDHAAVRRLIDELRERYPEAFFLVGIESTGGMERNWLAFFRKEKRWTKCMHVFKLNASSVHAYRLSQLHRAPGDAAAASDIARFLLEKCSKRTPVTEPESGPLVFYRMIRALIGERICASQRLQTLLVAVHPDLVRFCRYGLPTWILLLLERYPTAALLAQAQISTVDAIPHIDTTRAGELIANAGQSVASLTDSATSAAIRLLVRRLRDTEKCIDEAQAELLTIITSDPQSQLAKAVALLDGMPGIATWSAACLACEIGDPSRFPHGKSIVAWAGLDPVTEASGDDHHSLGISHRGNAHVRAMLFPLAMSGIQYNPVLKAFYERLTTTNGKTKLAALVAVMAKILRIAHAILLSEKAFDPTHEANRQQLAQATQANRSPVPAAAPAPPQAPRLEAPISRREANKRKKAAAPSASVRDQSPKRMTGREPHSKHHAQPTHAKG

SEQ ID NO: 246283 - protein, 414 aa, unidentified
MDVVHPRCAGVDISKRDAKVCVRIAGAGRAKAKSTVTTWGAVTNQILALRDHLVAEQVTLVVMEATSDYWKPFYYLLEDGPFEVMLVNARHVKNLPGRKTDVSDAAWLAQLGAHGLVRGSFVPPEPIRQLRDLTRTRTTLVRARAKEIQRLEKLLEDAGIKLSSVATDITGVSGRAMLAALIDGQRDPKVLADLAKRRLRSKIPELTEALTGRFSEHHGFLAQIHLELIDNHTLAIDELTGRIEVVVEPFRHVRDLLVTILGFSTLVADVVIAETGGDMSRFPTAGHLASWAGTCPGSNESAGRIKSTQTRPGNPYLKGALGIAAMSAARSKDTYLAAKFRRIASRRGPVKAIVALEHAMLVATWHMITADVPYGDPGGDYFTRLNPDKAKNRALDQLRKMGYSVALEPLAVAG

SEQ ID NO: 246284 - protein, 391 aa, unidentified
MIYIGIDVAKDKHDCFITNSEGEALFNAFTIPNNADGFNDLFQKISSLTNDFSNVKVGLEATGHYNYNLLGFLIDKGLPTFVINPLHTNLFRKSLSLRQTKTDKVDAHTIALMMMSGVNLQSYSDTSYHNEELKSLTRYRFDKVQERAKLKTSISRLVNILFPELEKLVPTLHMVSVYALLAEFPSSAQIASCHLTRLTNLLANASKGHYNKEKAIEIRNVARRSVGSNMPAKSLELKHTIRLIQELTSEIDEIECSIKSIMDDIRSPILSIPGINYRMGAMIIAEIGDFNRFNSPDKILAYAGLSPSTYQSGQLDGCYSHMEKRGSRYLRYALFNATKFVCIWDNQFSAYLAKKRSEGKHYNVAISHAAKKLVRVIYQLEKSGQLYHRAA

SEQ ID NO: 246285 - protein, 400 aa, unidentified
MLSIGIDVSKGKSTVCGMKPGGEIVYTPFEIQHTREGMSDLVSLLRSSGEEVRAVLESTGSYHCPVVAALLENGIFVSVVNSLRMKRFCSQSIRKVKTDRIDAMQIALYGLAYWQELQPARLPEDTYRELQLLARQYYQMTSLLIKAKVDFNAICDQVLPGMQELMNDHAGRHKLSDFVLQYCHTTHILEMGETRFRKDYCKWAEKKGYRNCERMAALIFATAQNGIPVLPNAPSTQIVITEAIRVLHTVEASRDAILTQMQALAKTLPEYSLVREMPCIGDTLAPRLIAEIGDVRRFHSKRALIAYAGIDAPPYQSGKFCANNRHISKRGNRYLRKTGYEVMQSYVMHKPANDPIFTFIEKKRGEGKSGKLAMVAGLNKFLRVYYGKVTELYRSLPAIE

SEQ ID NO: 246286 - protein, 398 aa, unidentified
MTESSDYESVQVFIGVDVGKDTHHAVAINRSGKRLFDKALPNDENKLRSLISGLKQHGQILLVVDQPATIGALPVAVARSEGVLVGYLPGLAMRRIAELHAGEAKTDARDAAIIAEAARTLPHAPRTLKLADEQIAELSMLCGFDDDLAAQTTQASNRIRGLLTQIHPALERVLGPRLDHPAVLDLLQRYPSPEKLASLGEKKLAAQLCKLAPRLGKRLAADIAQALAEQTVVVPGTNAAAVVLPRLALQLITLRKQRDEVALEVEQRVLAHPLYPVLTSMPGVGVRTAARLLTEVACRAFASAAHLAAYAGLAPVTRRSGSSIRGEHPSRRGNKALKRALFLSAFAALRDPLSRAYYTRKMSQGKRHNQALIALARRRCDVLFAMMRDGTFYTPQAS

SEQ ID NO: 246287 - protein, 403 aa, unidentified
MYKYFLGIDISKDSFDFSFTDETEKVLYKDHYQMDMTDFTKLSDYLSPFSKNEILIVMEATGIYHLTLLSYLLEQGLNVSVVNPLFIHAFTKSMTIRKTKTDAKDAHIISIFAKRNYATIRLSSASDIETIKPIVREKEKLTDQMSAIKTDIKSIVNQVFPEMLKNTNIFLKSSLNLLLQAPSKRIIRNLKEKKIASYLSCDTKRGAKPKVDAKEILLMAKNSIGINNQSLEKILVSKIKQLEFLQIQLDEFNEIIEKFVDKHHHDNMDLLTSIGGVGKPSAASFLTELGNIENFATYKQLTAFIGTDPTIYQSGTSVNVKGSISKRGNSHLRRVLWHMARAATVWNETLKAYYDKKRNEGKTFKQSVIAVANKLIRIIFSMLKNNTKFDTNFSSLAIKSVSN

SEQ ID NO: 246288 - protein, 484 aa, unidentified
MAKRKQSTFERLRNGKLQWNRKERREVERRLNSADPGLEIINPHAAGIDVGNESHYVAVPPGRDAQPVREFGSWTAGLEEMAQWLKSCGVETVVMQSTGVYWIAVHDVLERHGLEVNLVDARGTKSVPGRKSDVQECQWLLKLHTYGLLRSCFLPAPEIHGVRTVWRLRDQHIKDAGRCIQHMQKALIEMNVQLHIAISDLSGVTGQAIIRALLSGQRDPRKLAALRDRRIQATEEEIIHSLQGNWKQDVLFELQQAVDAYDFYQKQMAACDTQLKSYLAALPTREALPTTAAGSEPAAVAATGKKRRPRKPQGNQPDFDLAAELERILGVDATRIDGIEVMTIQTVLAEVGPDLSAWKTAARWCSWLNLAPKRDISGGKVIRHRREYRTNRVGNAFRMAAQSLVRSQSYLGARYRYLRARLGGLKAVKAMARVLACLYYRLVKQGQIWIDRGTLEFEQRRQQRDLASLQRKARSLGMQLVPAA

SEQ ID NO: 246289 - protein, 431 aa, unidentified
MLHANTFISAGIDVGADFSFMSLALPNQTFIGKPFKIVHNDFKSLERAVLAIKEAEELHSMKVRIVTESTGIYHYPLFCYLRDKGFDVAVINPIITKNSTNMNIRKVVNDKSSSKNLALIGLKPDLKTSVMPSDAVLDLRNVVREYYNLMDFRSAYVNKLSGLLRVAFPWYLGIFSKVTVKTSLALLEKYPSPNDFLSARKSTIVSIIRKTAMSGKAYAEKQCQAIVEAAKSARVFGHFVSSYSTQIRLCVSFIKKYDEEIAGVLALMHKLVDERSGETFVKQIRLIETIPGAGFLSAVTVICEIGDFSVFKSPKQLFAYFGLDPAVKQSGNFTGTKVKMSKRGSAVARRAIYTIARVGVGVTCKGIANNPVLRGYYLGKCQSKRKMVALGAVMHKVCNIIFAVLRDNKAFTLTTPEQHIKDYDNSLSSAA

SEQ ID NO: 246290 - protein, 437 aa, unidentified
MDNSYPYDLVIGLDRSDRKADLHLIEPRSDQRRSETISTSPEALWQWLLQLRQQHPQARVALCLEQPAVHLVAFLEAYQWITLYPINPITLQKYREAFVTSRAKDDAKDAFYLAELLRTHHTKLKPWAPEDSQTRAVQQLVFHRRAVIDERTGLTNRLQALLKQYFPQALVLCGEDLWRPLGTRFLLKWPSLQAVQKARPETLKQFYYLNGSRSAKLLEQRLTLLEKAVAVTDELALIESFILRVQLICRQLQLVQQTIHRYEKQIAQAFVQHPDHQIFASLPGAGPVLAPRLLASMGSQRERFQSAANLQRYTGIAPVTKQSGGKRHIHRRYLCPKFHRQSFHEYAKESILWCRWAAAYYLQQRTKGTPHHTAVRALGYKWQRIVFRCWMIHTPYKDEIYEAALRKSSSPLVALLSKVELGKSPFKSTAEKNPKTC

SEQ ID NO: 246291 - protein, 387 aa, unidentified
MPQPNDLSRSLVALDQDSTIIAVVEMSQSSWLVAGMLPGIERQPRKKLEPSAERLLGLLHRWRDEAVKAGRQITRIALAFEAGRDGFWLARWLRARGVEAHVIHPSSVAVSREHRRAKTDRLDTELLKRGFLGWLRGERGHCTMARTPTITEEDAKRPNRERECLVGERARIANRMKATLARLGIRNFKPTLRKAAERLATLHTPEGSALPPNALAELQREIARLGFVTRQIKEIEEARQKRLEQEPETEPHAMVRHLVRVVGVGVETADMLVNEVLSRPMRDRKAVARYAGLTGSPDESGAKRREQGLARAGNARVRRGMVQLAWRFLWFQKESALARWYQARTADSRAGTRKTMIVALARKLLIALWRFVTTGETLEGVILRPAG

SEQ ID NO: 246292 - protein, 416 aa, unidentified
MKLFVGIDVSSEKLDICFLTDDDQLSILSEISIANDIEGASLTREMILEFNENYHFDQIVIGMESTSMYSFHPSMFFHEDAELKKLNTLVTIENPFRVKQFSRMFDEDKTDRNDALRIADFLRIQRFTTSSIKEEKYMALQRLTRTRYQIIKQLTRTKQHFLENLTYKCNTLAREMRDESTSLFSATVISLMTEDFTLDELAELPLEAFCDLLQEKGRGRFKEPKKIAKAIQRAITMSYRLGYLAQESINVVLSVLVREIRALEKNIKDLDKAIEQLVVVIPEYQCLTSIPGVGKVYAAGLIAEIGQIERFEDQTKLAKYAGLSWKVKQSGNYQSQNTPLTKQGNRYFRYYLVEAANSVRNYLPEYKAFYQSKCKEVPKHQHKRALVLTARKFTRLVDTLLRNHQLYMPPRSVIDK

SEQ ID NO: 246293 - protein, 400 aa, unidentified
MLSIGIDVSKGKSTVCGMKPGGEIVYTPFEVQHTREGMSELVSLLRGSGEEVRVVLESTGSYHCPVVAALLENGIFVSVVNSLRMKRFCSQSIRRVKTDQIDAMQIALYGLAYWQELQPTRLPENTYRELQLLARQYYQMTSLLIKAKVDFNALCDQVLPGMQELMSDHAGRHKLSDFVLRYRHTTHILEMGETRFRKDYCKWAEKKGYRNCERMAALIFATAQNGIPVLPNAPSTQIVITEAIRVLHTVEASRDAILTQMQALAKTLPEYSLVREMPCIGDTLAPRLIAEIGDVRRFHSKRALIAYAGIDAPPYQSGKFCANNRHISKRGNRYLRKTGYEVMQSYVMHKPANDPIFTFIEKKRSEGKSGKLAMVAGLNKFLRVYYGKVTELYRSLPAIE

SEQ ID NO: 246294 - protein, 334 aa, unidentified
MENIALIGIDLGKNSFHIHCQDHRGKAVYRKKFTRPKLIEFLATCPATTIAMEACGGSHFMARKLAELGHFPKLISPQFVRPFVKSNKNDFVDAEAICEAASRPSMRFVQPRTESQQAMRALHRVRESLVQDKVKTTNQMHAFLLEFGISVPRGPAVISRLSTLLEDSSLPLYLSQLLLKLQQHYHYLVEQIKDLESQLKRKLDEDEVGQRLLSIPCVGTLTASTISTEIGDGKQYASSRDFAAATGLVPRQYSTGGRTTLLGISKRGNKKIRTLLVQCARVFIQKLEHQSGKLADWVRELLCRKSNFVVTCALANKLARIAWALTARQQTYEA

SEQ ID NO: 246295 - protein, 456 aa, unidentified
MARRNKAKGTRQRTKLRMIYTRAAGIDVGSTFHVVAVPPELAAEPVQTFQSFTGELYRLATWLVEIGVTTVAMESTGIYWIPVFDILEAHGLEVLLVNARHVQTVPGRKTDVNDAQWLQQLHTYGLLRGSVHPAQDWSALRVYLRHRECFVEYAAAHIQHMQKALMHMNLQLHHVISDITGMRGMKIMRAIVAGQHDPAVLATYRDARCKASEETIREALTGHYRREHVFALRQALELYDSYQARIEACDQEIKSTLEALQPDEISMDTLPAARHKKRQSHEPLFDVREALFRVLGVDLSQIDGFSAYTALKLVGECGMDMSRWPTAKHFTSWLTLALGNKISGGKVLNTKTRRSANRAAAIFRLSAMNVGQTNTALGAFYRRLASRAGKAKAVTATARKLAVLFYNTLRYGMAYEDPGAAYYEDRYRQRVLKGLHRRAKEFGYKLTEVGALEGVS

SEQ ID NO: 246296 - protein, 424 aa, unidentified
MRNRAYSATHVNQVNVQELIKGRDGQAVWIGTDVGKYELKMVVHWGERQFERPWNVPNPFGIPQVMDLLKELKAGRSLVLAMEPSGTYGDALRQAAADAGLVVQRIHPKAAHDYAEVFDGAPSQHDGKDAAVLAELARVGKGAAWAYATGDRTRQQLEYWVDRMDVHRRLLSVWSGRLEGALARHWPEVGQVLKVNSPTLLKVLIEHGTPGALGADPQAEAKLRRWSRWLLSDATIAKVIESARGTVGVRMGELDIRRLRDNAQAAQSARREISLCKRRLAQAAAGQVSIAAMGQVVGLATACVLWVYLGEARDYHCGEAYVKAMGLNLVERSSGTYRGRLKISKRGYGMVRYWMWLAAMRWVKDGGVRRWYEAKKKRDGGYGGRALVGVMRRLGMALWHVGCGEVFEAWRMFPGLSRGQKKGR

SEQ ID NO: 246297 - protein, 429 aa, unidentified
MIDIEETDEAVDLVERVCALDIGKAALTVCIRVPHDDKPGHRRQEVREHATTTRSLLDLAARLHAAGVTLVAMEATSDYWKPAFYLLEAEGFTCWLLNARHVKNVPGRPKTDKLDAVWLAKVVERGMCRPSFVPPAPIRRLRDLTRYRRTLIRERTREKQRVEKLLEDAQIKLSSVASDIFGVSGRHMLQAMIAGQRDPKVLAQLARASMRAKIRQLEEALTGHFDDHHGFICQMMLERIDELTSRIEELTARIDEQVAPFAAQVAQLDAVTGIGGVCAQELIAELGVDMAVFPTAAQLVAWAKFAPQANTSAGKAKTAATGKGNPWLAASLGEIAVTAGRTNTFLGERYRRIAKRRGKQRALVAVGNSVLTIVWHLLADPHASYCDLGPDFYQSRSSRHRQEHNLIRQLQQLTGKTVTLTPRPATPAA

SEQ ID NO: 246298 - protein, 342 aa, unidentified
MQITTIGLDIAKNVFQVHGIDANEKVVVRKQLRRSQVIAFFKALPPCLIGMEACATAHYWARELTKLGHQVRLMPAKDVKAYLKRNKNDAADAAAICEAVRRPTMRFVRIKSAEQQGQLMQHRTRDVLIRQRTQIINALRAHLAELGIVAAKGDAGVYELLAIVADEADTRLPIDARASVIVLAAQLEALQTLIGSIEKRIKMQHRSNETSQRVETIPGIGVLGATAIVATAADPTVFRSGRDFAAWIGLVPRQDSTGGKQKLGPISKQGDRYLRRILIVGAIAVLRRAQENPGKYPWLTQLLARRPFKVVAVALANKMARTAWALMVHGGTYRAPELVEAA

SEQ ID NO: 246299 - protein, 413 aa, unidentified
MDAIVERCAGLDVHLDTVVACVLYGKLDIKPKKEVKTFSTTTKGLLELLDFINQKECTHVAMESTGIYWKPVWNILESGAFELIVANVKKIKNVPGRKTDVKDAEWIASLLRCGLIEKSFVPPERIRDLRDLTRLRKELLGEVNRNKNRIHKVLQDANIKISSVLSDVFGETGKSILNQIIGNQCITEEFIYSLYEGRGKSKLKSTPMEMYEALNGKIRGHHVILLGMHNSNIVFLEKQINELEKEIDILLQKERDSLELLETIPGISKISASSIIAEIGTSMDVFKTEKHISSWAGLCPKNNESAGKKKRSGIKSGNNWLRSMLCECAWSATKKKDSRFKNKYWSMVPRMGRKKALIAIANMMLRLIYHLLKTKSTYKELEIQYFIDKDKRREDRIIKELKSKGYLVEKDSL

SEQ ID NO: 246300 - protein, 408 aa, unidentified
MEIVHGRCAGLDVHKRTVVACVITPEVRETRTFGTMTKDLLELGDWLAEHGVTHVAMESTGVFWKPVFNVLEEAFTVWVVNAHHIKAVPGRKTDVKDAEWIADLLRHGLVRPSFIPDRPQRELRELLRHRQSLVQQRAQVAQRIQKVLEGANIKLSAVATDILGVSGRAILDALAGGEHDPERLAALAKGRLQEKREALVAALQGRMGRHQRLILKSLLRQLRFLDEEVEGFSDEVSQRMGGPFDEALERMDEIPGMGRRTAERLLGEIGLNMSVFPSSEHLASWARLCPGNHESAGKRKSGRTGHANRWVRSALVEAAWGASRTRGTYFSSQYHRIAARRGKKRAIIAVAHAMLVTIYHMLRHGTRYRDLGADYLDQRSREAVRRNAVRRLERLGYTVTLQPQPAFS

SEQ ID NO: 246301 - protein, 371 aa, unidentified
MSIVMGIDQHRAQITAEWIELDTGEISRARVSPADRVGVRRFLQRFAGQQLEVALEATTGWRFLVEELRAVGAVVHLAEPAETAARRGNKKHAKTDRADARHHRELLLAGRLPESWIPPDHILDLRAQVRLRHALIEQHSEWQQRIQAVLYDHGCPQRRQLMKGDGRDWLQALALPDAARQQITVSLQILDALDLQLAPLTKQLRDYARRQTGCRTLVERYYGIGELCAVTILAELGDCRRFQNSRDAVRYGGMDITVFQSDRRRAPGRLSRQGPPALRWALYEAAHAARRPGSPDRDYYVQAAERLGGNRACLALARKLLKRCYHTLRELGDDALAPPAAGSAAARRASSGSPRSTERPATDQREDALAA

SEQ ID NO: 246302 - protein, 324 aa, unidentified
MVEMLAPVLGIDVSQKTLDVTLLTDKGGKRRKRFANTPEGINKVEEWLQKQTKEVVHVSMESTSVYWEEVAEALHEAGHRVSVVNPVRIKGYAMSQLRRSKTDPLDGDVIADFCRTQRPEEWTPPTKEQKKLRALVRHLEALKKSRTQQMNRLDTCRDEEVKTSLETLLSVIEGKIEAVTKRIDEFMDQHPDLKEKKQLLESIKGIGSKTAIHLLAEMYDLDSYKHAKAVAADAGVTTSHYQSGTSVRRRPKISRMGKASVRSALYFPAITAIQHNPIVQKMAERLAARGKSKAVIRVAAMRKLLHLAYGVLKNKQQFDPAYGT

SEQ ID NO: 246303 - protein, 402 aa, unidentified
MIFINCLGIDIGKSESVVAHYKDEVLVKEMVIQNNQNGYRYLKNYIKHLDSLFILFESTGIYSRGMKRFCEIHKIDYLEMNPLEAKFKTSSLRSWKTDKSDAHKLALLAFRMKDSKVQRQSEEIYFELRERARFHLEMEINQNRLKVELVETLHQTFPGLEKLFTNRYSKIALNIAKAFPHPDFVSTLTHDELVEKVLHSTDKGISVNKAHKYVQKLIEIKNNSFPNVDKSSFLLQKVQYLCDKLLIGIEEMKEFDQEMIDLAKNTTEFENIISIPGIGELTATLLIGELGNIREFKTNKQLNAFVGIDIKRYQSGTSKSRDTINKRGNKKARRLLYLIIMNIIRGRNHYQSHIVDYYYKLREQPHGKTHKTAVIASINRLLKTIHYLIVNNKLYDYQKAPH

SEQ ID NO: 246304 - protein, 351 aa, unidentified
MPRRSTVHAVTVIGVDLGKNTLHLVGLNSFGAIVLREKVSRGRITLRLANLPPCLIGIEAGMATHYVARELAALGHDVKQVPAIYAKPFRQGHKNDFRDAHAVAEAVQRPTTRFVPAKSDEQLDLQALHRVRSRLVSDRTAVINQIRGFLLERGVIVRQGLRFLRHSLPDILAKRTDVLSLRMVRIVADLADDWRRLDERIETVTDEIETIAKNDDNCRRVMTVPGVGPIISSAMIAAIGNGVAFARGRDFSAWLGLVPKQMSTGDRTILGRLSKRGNGYLRMLFMQAARVILLRPRNWPKHSFGGWLARAAQRLHPNVLAAALANKLARIAWTVLAQQRSYEARVSKAAA

SEQ ID NO: 246305 - protein, 386 aa, unidentified
MPRLNDLSRSLVTLEQDATLIAVIEMSLTSWLVAGIVPGVERQPLKKLGVDERALLKLLHRWREEAEKAGHRIKRIAVAFEAGRDGFWLARWLKAYGIEARVIHASSVAVSREHRRAKTDRLDTELLKRAFLGWLRGERDHCRMVAIPTIEEEDAKRPNRERESLVGEQSRIVNRMKAALIRLGIRGFNPKLKKAAERLDGLRTPEGDPIPPNTLAELRRDMVRRRLVSDQIRQIENARLERLEHASGDGPHAMVRLLARVIGVGTETADMLVQEVLSRNMRDRRAVARYAGLTGSPDESGKKRHEKGLARSGNARVRRGMIQLAWRFLMFQKDSALAQWFRARTENARGTRKTMIVALARKLLIALWWLVREGVVPDGVVLRPAQ

SEQ ID NO: 246306 - protein, 392 aa, unidentified
MTVYLGIDVAKRQHRAMLLDGRGETLLKPFSVNNDRTGIEGLLQRLSQVSEPVEIGLEATGHYWLALYDQLTHAGYPVYVLNPLQVHAYQRSGIRKRKSDSIDALWIADFIRVGGTRQPTDPQTLPIYLQLRQLARFRFTLADQVGDAKRRILSVLDQVFPEYETLFSDIFLVTSRTLLAEAVMPQDFVDFDLDELTHLLQNASRGYFGQSQAEAIQAVAIQSIGVTLLADAARVELSCLLAQLDFLEQQIMQVDEVIEQLVTALPNQHLTTIPGIGAVVAATILGEIGDIRRFPSMEKLVAYAGIDPTLYQSGQFQASEAHMSKRGSPNLRRALWLAATIARQRDPQLKAYYQKKRAEGKSYGTAVGAVCRKLLQRIYVVLREQRPYVIRP

SEQ ID NO: 246307 - protein, 425 aa, unidentified
MREHDTRAEAGTVNTPGRGTMFEIEDVGVFLGLDVGKSNHHGHGLTPAGKKVFDKPLPNSEPKLRAVFDKLTAKFGTVLVIVDQPASIGALPLTVARDAGCRVAYLPGLAMRRIADLYPGEAKTDAKDAAVIADAARTMPHTLRSLELTDEITAELTVLVGFDQDLAAEATRTSNRIRGLLTQFHPSLERVLGPRLDHQAITWLLERYGSPAALRKAGRRRLVELIRPKAPRMAARLIDDVFDALDEQTVVVPGTGTLDIVVPSLAASLTAVHTQRRAMEAQINTLLEAHPLSPVLTSMPGVGVRTAAVLLVTVGDGTSYPTAAHLASYAGLAPTTKQSGTSIHGEHAPRGGNRQLKRAMFLSAFACMNADPASRAYYDKQRARGKTHTQALLRLARQRVSVLFAMLRDGTFYQSRTPNDVELAA

SEQ ID NO: 246308 - protein, 292 aa, unidentified
MAKVFENGPDGIAALVSQLKQRRVARVVLEATGGLEFPAARALCDAGLSVTRVQPGRVRGFRTFVGKRGKSDTIDAELIARFALAMTEDSRPSVPSEKAEAIRSLSARRRQLVDLLVQEKTRLRMTRDAFVLQSLKTVIAALKAERDRVEEALSKAITADDAAARKAELLRSVPGIGPVVASVLITDLPELGTLNRHQVASLAGLAPHPQRSGTSQRGDHIRGGRACVRTALYMAAVSAVRCNPVYKTFYTRLIDEGKPSKLALIAVARKLIVLANAITRMGKPWNPNLAID

SEQ ID NO: 246309 - protein, 550 aa, unidentified
MNRERARGSSMYAKKRIESEREPSQVTQVDLLASAPSLNKNLTGIPGATTKCRPQLRSTQRKFFLDGIPPFLVATETFSEFMLMEDSMQIVYDRCCGLDIHKKLIVACVLRRTPQGTQKEIQTFSTMLEELFRLRDWLQANDCQAVAMESTGVYWKPIWNVLEGEMELLLVNAQHIKAVPGRKTDVKDAEWIADLLQHGLLRASFVPPRPQRELREVTRYRTKVVEERARLVNRIQKVLEDANVKLASVASDITGVSGRAILNALLAGQDDPKALAELARGRMRSKREELAQAVQGTLREHHRFLLVSHLRQLDFYDGQIADLDGEVARRLCVQAEPEAPDPKVDEATTDPTVPLADPEPVGAQAPTPLSSQPSSHPARSQAEVIRILDEVTGINGRIAEIVVAELGIRLDQFPSEGHLVSWTGLCPAAKISAGKRLSSKTGKGNRWLRQALIEAAHGAARSKNTWSLGLLSTPQETPGQQESHHGLGPSHLDHHLSPAQRTAILPRTGTGSCPGTSSRIVQALGHPAARAPGLHCDVDPYRPGGGLTCH

SEQ ID NO: 246310 - protein, 399 aa, unidentified
MDRNRTVPGLDVHKDTIYLCIMGHDEAIIFEKTYGVLTTELRQMCNDMVEHGVTEAAMESTAVYWVPVWNELCESMDLKLVNPYFIKQLPGRKSDVKDAQWIAECLLKNLIKGSFVPKPIVQDMRKLNRRIMDLNEDINYNSNKLDAALQRCGFRLSNYVSGTNSKSYQKVLQAIINGERDPEVLVKMVHGRTTNKHGKGTIKAAVMGSFSQTDITVFRQLKEMLDTINRQIDECQKELTDLCEKHFPEEYKRIQTIPGVKERAATAIIAETGVDMKMFATAAMLVGWCGLKPRNDVSNGRYKSRKVTHGNKYLRRILIEVAWAASRKKNCFFSNFSYVQVTQKHKSKMKIQVAIARKILVAVWHMLSKGEDFIDIYHRRLEQQRQMEEQLKSLASKMA

SEQ ID NO: 246311 - protein, 345 aa, unidentified
MTVYIGVDFHARQQTVSYLTTEDGEIRRLQLDHGVPAAVRAFYEQFAGSLVIVGFEASGYAAWFEEMLEELGHEIWIGHATAIRLFARRRQKNDRRDADLILDLLLRGDFPRIHRYSAESRAVLQQLRYRHRLVKMQTMIVNSLVFLGASRGISLRTRLKSRRGLARLQQMRLPEPLGEQRDELCQLLLELRTRIEQVERWLTVKAESEVRVQRLRTHYGIGPLTGLCLAHTLECPERFANPRKVTAYVGFDPVEDSSGERRRIGSISKQGSRLLRFLLIEAGQIAIRKDQDLARVYRRVLVRRGHAKAKVAVGRRLLVRAFIMLRDEIDYAEFQRRGVAARSSR

SEQ ID NO: 246312 - protein, 392 aa, unidentified
MRYVGIDVGSDSHVVAAVTADGTVAVKPTGIAEDAAGYAKLFALLGQAPVALVAMEATGHYWRNLFAALAAHGYAVALLNPLRTRRFAGENLERTKTDSIDALGIARFGAQKRPAATRLPDAAADELRELVRHRDRLVADFGDRVRQLHRLVDLGFPEFTRHVKSLDSMLACTLLAEYPNAQAFAGAPPRRLAKLVYDGVHKVGPELAAALIAAAKVSVGRHHGPAYRIQVRHTCQDLDLLRRRIRELDDDIARQLDDHEVGALLTSIDGIGTNTAARLIAELGDFSRFRNAAALAAYVGVVPGLKQSGKRRGQKAGLCPIGHARLRAALWMPLLVAVRRNPWLEAFYDRLIGRGKLPKVALVAALRKLLGAVFAVVRDRKPFVPRLGPAAA

SEQ ID NO: 246313 - protein, 349 aa, unidentified
MRFYHHSHRFYCGIDLHARLLAICVLDNDGAIVLQTQIPARQQLLLDTLAPYRPDVVVAVECLFAWYWVADLCRAHHIPFVLGHALYMKAIHGGKSKNDDIDAEKIARLLRGGNIPVAYVYPKGLRETRDLLRRRMHLVHKRAELVTHIQIVNAQNNLPEFGKKLIYAKNRAELKIAERFENPQVRKSVEVDLALIDALDEQIGDLELYLERTAKVEDPHTYHLLKTIGGVGKILGLVLLYEIHDIRRFAEVGEFLSYARLVRCVHQSAGKKLGYGGKKIGNAHLKWAFSEAVCLLVRNYPVVKIWQARHQKKHGKKKTLGILAAKLGRAVYHMLRKKEAFDVRRFLGQ

SEQ ID NO: 246314 - protein, 407 aa, unidentified
MNPLFVGIDVSSKNNVTYLMKPDGSKYSSFSVQNNLGGAKLMSEKIVSALEAMQLSDVVIGLEATSIYGDGLVCALREDGRLGQYQRKIHVLNPKQVKKFKDSYPDLPKNDWVDAFVIADHLRFGRIGKEVYMDDYRYKSLQTLARARFDVVQNLTREKQHFANYLFLKCSGMAQDKDIANSSATTIALMERFETVDELAYADLDELTRFIDETGRNFADPAAKARAIQAAARNSYRLPVTVNSSVNQAMAVSIATMRALEKQIKVLDKAIEQQFQIIPNTLTSIPGIGKVYSAGIIAEIGDVHRFNSQASVAKYAGLVWTQHQSGDFEAQHTKLIKSGNRYLRYYLLEAANSVRRCDSEFRRYYDLKFKEVNQFQHKRALALTARKLVRLVYRLLMDNRLYIPPES

SEQ ID NO: 246315 - protein, 348 aa, unidentified
MTSLTEIAEIVIGVDTHVDTHTAAIVETTTGGVLAEITVPTTPAGYQELLDLADEHSPLRAWAIEGTGGHGAGLTHLLEGEVVIELDRPQRAKRRNGAKSDPLDAIRAAREAMARPHHGTPRTGQERQALSVLLTARRSAVTAATDAQRQLFSLTIAAPERLRAKLRDRKLPEMVEIAARFRIQAGWDVETTTTAQVLRDLARRAQALQAEADEHEKQIRAIVRSWRADLLTETGIGPIVAATVLCAWSHSGRVRDEAAFAMLAGVAPLPANSGKVTTRYRLNRYGDRQLNRALHTIVLSRQRYDQDTKDYTARRTSEGKTPREIKRCLKRYVARDLYRRLEYPPLST

SEQ ID NO: 246316 - protein, 326 aa, unidentified
MEMLQNDAAFVGIDVSKQTLDCALLIEAQVQHRCEFSNDPSGQAALLEWLRSTQPALVVAEATGGYETLMAATLGTAGVPIAVVNPRQVRDFARALGVLAKTDRIDAQVLARFAQRIQPQVRPVKAEALAELEALLVRRRQLVDMFSAEQHRHRMARGRIARQIANHMSWLERQIDAADDDLNGMVEHSPLMQRQLDVMVSIPGVGKLTAISMLALLPELGTLNEKQISALVGVCPFNRDSGTIRGRRMIWGGRSRVRTALYMAALSATRFNPVIRAFYQRLLSAGKAKKLALVACMHKLLLILNAMLKTNSMWRDSHSATSNQST

SEQ ID NO: 246317 - protein, 354 aa, unidentified
MSQTPNTALAVIGIDIGKNSFHVVGHDARGAIVLRQKWSRGQVEARLANIPPCLIGMEACVGAHHLSRKLASLGHDARLMPAKYVRPYSKGQKNDFNDAEAIAEAVQRPTMKFVATKTAEQLDLQALHRVRERLVSQRTGIINQIRAFMLERGIAVRQGIGFLRTELPTILATRTDALSPRMLRVIEELAGDWRRLDQRIDGLSGEIEALARQDQACSRLMTVPGIGPIISSAMVAAIGTGDVFSKGRDFGAWLGLVPKQISTGDRTILGKISRRGNRYLRVLFVQAAWVVLVRIKDWERYGLKSWIEAAKRRLHHNVLAIALANKLARIAWAVLAKGRAFELTRTDDERVRPA

SEQ ID NO: 246318 - protein, 388 aa, unidentified
MAGNVVIGMDPHKRSATIEVMAGDESVLGGDRFATDAAGYRSMLAYVRRWPERVWAVEGSKGIGHHIAARLVRDGEHVVDVPAKLSARARVFISGQGRKTDAWDAHSVALVGVRMSGLHPVVNDEQLGLMRVLVDRRRALGEEHTRMIAQLHQLLLELIPGGAKKDLSAAQAKVLLASVRPRDVVGKARRRVAAELIADLERIYQRSKAADKELKQLLAATGTTLTDLEGIGPSGAARLLVEVGAITRFPTKAHFASWNGTAPLDASSGDQVRHRLSRKGNRQINRVIHIMAIVQLRNQTIGRAYFDRRTADGKTSMEAIRALKRHLSDAIYRQMLLDAQRAGTSPGGQSGNDSDSSATGSHPIAGSSEKPLPGPVTTGPRTGALAAS

SEQ ID NO: 246319 - protein, 405 aa, unidentified
MNAVGIDVSKGKSMVTVLRPFGEIVSHPHEVRHTSGQINALIRELQSLDGHTRIVMEYTGRYHEPMARWLTDAGCFVSVVNPKLIKDFDNSSLRKVKTDKADSVKIARYALDKWYDLKQYGRMDELRDQLKTMNRQFGYFTKIKTAMKNNLISLLDQTFPGANTFFDSPARSDGSQKWVDFVDTYWHVDRIRCMSLSAFTEHYQKWCRRKGYAFQPDKPEEIYEAVRDIIAVLPKDEVTKFLVRQAVTQVNTVSAAVEELRARMNETASQLPEYPVVLAMKGVGTSLGPQLIAEIGDVTRFAHKGALTAFAGVDPGKNESGSYAQKSVRTSKRGSASLRKTLFQVMDVLIKTMPQDDPVYAFMDKKRSQGKPYYVYMTAGANKFLRVYYGRVKEYLLEHTESSEN

SEQ ID NO: 246320 - protein, 345 aa, unidentified
MQIKSIGIDLGKTTFHLVALGAHSQVVIRKKFSRQQLLNYTANLPSCLMGMEAGVGSHFLGRAFREQGHEVRLIPAQFVRPFVKSNKNDYCDAEAIAEAVERENMRFVPIKTEDQLDLQALHRVRERLVSRRTSVINQIRAFLLERGISFRKGPASLRRQMPEILENADERLTARMRRLLDFLWQEWKHLQLQIESLSEDLEKIANSDAACVRLQQIPGVGPLVATAVVSAIGNGSAFHKGRQFAAWLGLVPRQWSTGGKPKLLGISKRGNPYLRKMFIHGARAAVLRVKREGSCLGQWMSGLETRAARNVVIVATANKLARISWAVLSSGNDYRAMHRPLRCSS

SEQ ID NO: 246321 - protein, 357 aa, unidentified
MDKLIRIGIDTSKSVFQLHGVNASEDAVLKRQLRRSQLGPWFAKLEPTKIGIEACGGSHHLARQLAALGHEVVLVPPQYAKVYVARGKNDAADAEAICEAMSRPKVQKRFVAVKTAEQQAAQMLVHTREAFIRRRTQLSNAIRGYAAEFGLVVPKGLAHLEPLLARIEEEEASVPALARELFRLHNAEYVHVQIQLRRIDAMLMVFHRQSEMSQRLTRIPTLGPIGASLLVAKVTDPKSFKSGRDFAAWIGLTPKDHSTAGRHRSGGITRAGDERLRSTLVVGAMAVIQQVMRGNTRLASPWLIELLKRKPPKLVAVALAGKTARIAWKLMVSGESYHAGKAARKNVADPNNLQEAA

SEQ ID NO: 246322 - protein, 342 aa, unidentified
MDHFGGLDVSVKETSICIVDDTGRIVKEVKVASEPAALLKVLGNPTYRFKRIGLEAGPLSQWLFSVLAEAELPVVCVETRHMQAVLKAQINKTDRNDARGIAQMIRVGLYRPVHVKTLRSQKLRMLLTHRKLMQSKAIAIENDLRGTLRNFGLKVGMVGKVRFEARIQELVENIPDLAVLVEPLLIVRRVLREQIVILHRRLLAIVREDEVCRRLMTTPGVGPVVALTYRATIDVPARFRKSKSVGAVFGLTCSRYQSGEVDWSGEISRCGDEMMRTMLYEAAQSMMHSKKWSWLKAWAIRVARRRGMKKAIVALARRLAVIMHRIWVDGTEFRWTRETAAA

SEQ ID NO: 246323 - protein, 359 aa, unidentified
MIVIGVDPHKQTHTAAAVDRQTGELLGELTVRGNEEGPTRLLEWARELAGERGFALEDCRQVSCRLERFLIGRGEPVVRVPPKLMAGARRSARSRGKSDAIDALAVARAAIREPDLPEAHLEGASRELRLLVDHREDLVCERTRIQNRLRWHLHEIGPELEPSRRSLGTLKVLDGLGRRLARRQQSVQVRVARELVGHCRELSRQADRLEREIETLVRREAPQLLALPGCGALTAAKLVGEVAGIERFRTDAQLAMHAGVAPLDVSSGRQQRHRLNRAGNRQLNRALHTIAIVQKRVYAPAKAYIARHQAAGKSNKEALRALKRQLARRIFNILHLIAGRANNPQRIQISTAPLVPCLT

SEQ ID NO: 246324 - protein, 339 aa, unidentified
MNLYAGLDLHSSNTYIGVLDPQFNRIFKKRVSNDLDLILKSLEPFRDRLKGIVVESTYNWYWLVDGLMDAGYACVHLANPCAIKQYEGLKHSDDQHDAFFLAQLLILGILPQGYIYPKETRPVRDLVRKRLFLVQQKTAHILSLQSLLARCCGQRVSSNQLRKVTGHDLRQWLKEEHLVLSGQANLDNIVFLKQQIGRLEEAIQKQVKLSDAFNCLLTVPGIGKILAMTIMLEVGDIRRFATVGNFASYCRCVSTQRLSDGKSKGSGNRKNGNRYLSWAFTEAAQMARRFNSRFRSYYDRKAAQTNSILATRALSNKLARVCYYIMRDQVEFREESVSH

SEQ ID NO: 246325 - protein, 342 aa, unidentified
MKKYFIGIDVSKETIDVSFVESDFQQQPEYLAQYPNGKKGYRSMIRDLKLALRGASSGQWLFCCETTGAYDRQMCHWLVEHGMHVWRESALQIRQSLGIRRGKNDKADSMAIADYARRHPDKVNLFQLPIKELSALKDLYLYRQTLVDKLKGVKNRQKALKSQGEAASPAARFIRRDSNNETKRLERSIAECESAMMEVIRSDEQLMSNYEHVRSIKGFGLVVTVALMVYSGNFQTVPTANKMATYCGVASFRNKSGTTLDARQDVRHLSNLRLKGVLTMAARTAIRHDEAIRQYYQRKIAQGKQHGVAINNVKNKLLHIAYALVRDGQLYQSGHVANGDAA

SEQ ID NO: 246326 - protein, 355 aa, unidentified
MTSVKYIGLDVHKESISICVRNSVGKVVMESVIETKASTILQFIDGLRGDLRVTFEEGTWAAWLYDLLKPRVSGVEVCNPRKNALLKDGSKSDRIDANKLSEQLYMNNIKSVYHGEHGLRKLKELARSYLTISKDLTRVMNRLKALYRSWAIPCAGKEVYAPHHRAEWLGKISESGVRRRAEFYYQQLDALCLLRQEVRRDLLLEVKKHKAWKLLRQIPGIGPIRAAVLMAVMQTPHRFRTKRQLWTYSGLGLETHDSGEYRAVEGQLQRAKKQATVRGLNRDHNHDLKDIFKGAAMRASTAAGPLHDFYENLLAKGRKPTMARLTLARKIAAITLIVWKKEVRFDANYLNPQAA

SEQ ID NO: 246327 - protein, 336 aa, unidentified
MRYIGVDLHTTQVTVCYLKTLDEYSFKQYRLDEIEAFLDSLAAEDELAVEATGNSRWLVKLVEPRVRRVVVVNPSGFEVIKRSAKKTDKRDALNLARFLAVDMLPEVRVKSELAEAVQRLVETRNKLVGLKTSLLNKIHALAVSRGWKLKKESLASKKGLARVMEFEWTEIERLELEIIVEQIQALKASLRRLDEAIGENSQKLAGFESLITITGIGARSAGVLLAVIGAVEDFESENKLASYFGIVPRVSNSNERTSHGRITKRGSKSGRTTLVQCALVATRYSPYLKKFYEQVKGRRGHGKAKIAVARKFLGIIYNTLKNNWVFADFNNFVLAE

SEQ ID NO: 246328 - protein, 361 aa, unidentified
MRIIGCDLHARQQALAMLETTTGEMVAMTLKHEGDNVREFYSKLPRPVRVGIEATGSMQWFVNLMEELGIECQVGHPANIRAAEPRKQKHDRRDADLILKLLVENRFPKIWLPSKEQQDLRALLRHRHQWVRIRTRIQNALQAMALANGLRRGPALWSQEGQRTIASLPLAPHAAYRRSELQAMYAKFAKEIEKLNQRVEEQACERPGARLLMTHPGVGPITALATEVFLGDAARFADSKALASYVGMIPSEYSSGERQRFGGLSKQGNPLLRFLWAEAAIHAVRRDPELQRFYRRKLVQKGLGKTRVAVARKLGIRLWIMLRDEIDYNEFCRRGQKQQKSSEACAGMPDRGHGAKQSPAI

SEQ ID NO: 246329 - protein, 354 aa, unidentified
MPEKPWKLSTAVIGIDIGKNSFHVVGLDRSGAIVLRQKWSRNQVHVRLANMPPCLIGMEACVGAHHLSRQLQALGHDARLMPAKYVRPYSKGQKNDFRDAEAIAEAVQRPTMKYVATKTVEQLDLQALHRVRERLVSQRTGIINQIRAFLLDRGIAVRQGLRFLRAELPGILASRSDLLSTRMAYMIEGLAGDWRLLDERIDRISDEIHTLARQDAGCDRLMSVPGIGPIISSAMVAAIGKGDAFSKGRDFAAWLGLVPRQISTGDRTVLGKISKRGNRYLRVLFVQAAWVVLVKPTTWERHGLKSWIEAARKRLHRNVLAIALANKLARIAWSVLARDRDFEPQSALTAVQPV

SEQ ID NO: 246330 - protein, 463 aa, unidentified
MARNNKSKKRKKPVRSLKTIQPDSAGIDLGSREHWVAGPPLEDNTPNVQRFGTTTPELVRLADWLKEQKVKTVAMESTGVYWIPLFEILDNRGFEVILANARQVSHVPGRKTDMLDCQWLQLLHACGLLRGSFRPSDDICHLRALLRERNTMVDQRSDWIRRMQKSLDQMNVCVHHAVSDITGVTGMAIIRAIVDGQRDPRTLAQMRDRRCKKSEQQIAEELTGNWRAEHLFNLRQALKMYDQFCKVVAEYDAEILAYIKSLPSSVDDDQSAPPPASKSKASDIAKKGQGPMRQALYQLTGFDLTTIDGIGVDTAAVITSELGFDYSAFPDEGHFVSYLRLAPNLSISAGKKVPSKLKGTTTSRVAAALRIAALAVRNSKTALGAYYRRISRRKGASVAVFATARKLAQIIYRLVCHGQAYIDIGAKAYEAQFNNRRLKYYTKALKDMGYKVKPLAAEEAQAA

SEQ ID NO: 246331 - protein, 435 aa, unidentified
MKRIRKNASGIDIGAKKVFVALENQPVVSYFTFTEDFETLRDYLLENKIESVAMEATGVYWVILYAILEESGIDVWLVDGRETKQVPGRKTDIKDCQWILQLHCYGLLNRCFVADPDIKELRSYMRLREDHIRSASMHINHMQKALTEMNIRLKEVLSQIQGKSGLTIIEAILAGERDKDVLVNLCHGSILKNKKELILKSLQGRYSSTGLFALKQAYEAYLFYNNQIKECDSQVNRVVNRMGDYGNEQLETRSRKPIRHHKPKIEKFGSNMLSIFDGKDATLISGITDYTWLQLLSETGRDLTKWTTEKHFTSWLGLAPGQNNSGNKRKRPRKKGRPAAGQIFRIIAQSLINSKDIAIGAYGRRLRARKGPSIAIKAMARKLAELYWRTMVKGLDYAEYGVKKYEQQLIAQKMKTTLRLAKELNLQIIENQVYA

SEQ ID NO: 246332 - protein, 310 aa, unidentified
MDATYVGIDVSKEKLDVHLRPSAEAFAVARDGKGLHELVERLRGVAPELIVVEATGGFETIVTAALAAAALPVVVVNPAQVRHFAKALGQRAKSDPIDAAVIADFAAAVKPQLRPLPDVAARLLAELVGRRAQLVEMLAAERQREERVANARVRKSLKRHIAALAKELKTIEDDIDGLIRSSPLWREKEDLLKTFPGVGETLARVFLADLPELGQLDRRKIASLVGVAPFTQQSGHWKGKSMIAGGRAAVRSAVFMAAMSAIRCNDVLRAFYQHLLALGKPKMVALIAVARKLLTILNAMLRDQKPWQHA

SEQ ID NO: 246333 - protein, 351 aa, unidentified
MPRASTVHAVIAIGIDMGKNTLHMVGLDSCGAIVLREKVSRGRIASRLVNLPPCLIGIEAGMATHYVARELAALGHDVKQVPATYAKPFRQGHKNDFRDAHAVAEAVQRPTTRFVPAKTDEQLDLQALHRVRSRLVSERTAVINQIRGFLLERGIIVRQGLRFLRQLLPDILAKRADVLSPRMVRIVAELAGDWRRLDERIETVTGEIEALAKSDDSCRRVMTVPGIGPIISSAMVAAIGNGVAFARGRDFSAWLGLVPKQMSTGDRTILGRISKRGNGYLRMLFMQAARVILLRPANWPKHGFGAWLARAAQRLHPNVLAAALANKLARIAWTVLAQERSYETRVTKTAA

SEQ ID NO: 246334 - protein, 310 aa, unidentified
MDTNSVFVGIDISKATLDVDSYPTGEPRRFLNDDASREELCEWLKKRTPTLIVMEASGGLEIPVAGMLAAAGLPVAVINPRQARDFAKAIGVLAKTDAVDAVVLARFAQAVRPAVRALKSEEAQELEAVLTRRRQIVDMITAERNRQITAQARIAKQIKGHIAWLEKRLDEANADLDQLIRKSPIWHHKSELLRSVPGVGRVVATTLLAELPELGTLNRRQVGALVGVCPFSRDSGSRRGKRLIWGGRSSVRAALYMAALCATRFNPVIKAFYQHLVGVGKHKKVAIVACMRKLLVTMNVMIRTDTSWKY

SEQ ID NO: 246335 - protein, 412 aa, unidentified
MEVVYPCCCGLDVHKKSITACVLWAQGKGKSRKEKKRFGTFTHDLLQLADWLGQCGVTHVAMESTGVYWKPVWNILAEQFEVLLVNAQHIKAVPGRKTDQKDSEWIADLLQHGLLRGSFVPPQPIRELRDLTRYRVSLVQEINRVANRIQKVLEDANIKLASVATDALGASGRAILEAMLAGEQDSARLAEMSKGLLRNKIPELKLALEGRMTEHHRFLLRQLFEHLRFTESKLNEIEQEIDKRMRPFEDKVTRLYTIPGVDRVTAWGMLAEMGMNMNQFPSSGHLASWACLCPGSFESAGKRLSGKMRKGNVSLRRCLAQAAWAISMMKNNYLSALYRRIAARRGAKRAVMAVAHALLEIAYHMLKRKEDYRELGADHFDRIDVNRIRRSLVRRLERLGHKVTLEPLAQTA

SEQ ID NO: 246336 - protein, 350 aa, unidentified
MQIIGVDLHTRQQTVAMLNVETGEIVEKTLQHEGGSVREFYSTLAGPSRVGIEATGSMQWFLELMEELGIDCQVGHPAKIRAAEPRKQKHDRRDAALVLQLLVENRFPSIWMPSREQRDVRSLILYRHQWVRIRTRVQNALQAIALSHGLRRGSSLWSKEGQQAIASLSLSRYTAERRTALQSLYRHLEEQIDDLNRKVEELAWQRPQARRLMTHPGVGPITALATETFLGEPKRFLDGKAVASYVGLIPSEHSSGGRQRLGGLSKQGNPLLRFLWCEAVGHAVRKDVELQRFYQHKLVQKGLGKAKVAAARKLGIRLWILLRDQIDYQGFCRRGQLRQKHGGAHAGMPA

SEQ ID NO: 246337 - protein, 407 aa, unidentified
MRTIYERCCGLDVHKKTVVACVLTPGRQQTRTFGTMTPDLLQLREWLQSEGVTQVAMESTGVYWKPVFNLLEDQGMELMVVNARHVKAVPGRKTDVKDAEWLADLLRHGLLKASFIPNREQRELRELVRYRRTVIEQRAHVVQRIQKLLEGANIKLGDVTSDVMGVSGRAMLTALAADEQDPQTLAGMAKTALRNKIPELERALTGSFGPHQRFMLRSQFQLLEALESQIASLDDEVAQRMRPLQAALDHLDEIPGIGVRSAQQIIAEVGTDMTRFPTSAHFASWARICPGNNESAGKRRNSSVGGGNRWLRSALLEAAWTVSHSRRQTFFTARHRRIAARRGNKRAAIASAHSLLVTIYHLLRDGTVFQDLGPLHFDNRNREAVRRRSLRRLEQLGYRVTLEEATA

SEQ ID NO: 246338 - protein, 395 aa, unidentified
MFIVGIDVAKRNHEVTVITSAGQVVCKGFRISNTCTGYNRMMERLGKLTNLKSQFIFAMESTAHYWLALYTRLKKDGHQVIILNPIQTHTMREMFLRKSKTDAKDSLVIAEVIRFGRYAASDVPQEKLLALKELCRNRAYLMDMASDLKRKTVAILDRVFPEYETLFDSVFCKTSLAVLAKYPMPDKLSRAQLGKLTEVLQKSSNGRFGEWKAREIKELAHGSFGVADCEGVYSTLIQLFLEQIHTLLETCSSLERQINELLLQFDTTLTTIPGVGTLLAATILSEIGDISRFSSADKLAAYIGVDPAVNQSGEFVGSHVHMSKRGSPYLRRAVWMASMIAVQRDPMFKAYYEKKASEGLRYMNIIGHVTKKMTAVIYAIMRDNKAYVPVMPVVA

SEQ ID NO: 246339 - protein, 366 aa, unidentified
MKKTSTVRVNGNMIFKGHKLTIGLDLGDRWSFYCVLDEAGQIILEQELPTTPEAMKQTFGKIPRSLMALETGTHSPWVSRLLSELGHEVIVAHAQKVQLITKSNRKDDRHDARTLARLARIDPALLGPVRHRSVQAQLHLTVIRARAELVSARTALVNAARGLVKSYGQRLPKCGTYQVSEKLAEGLSAELREVLVPLFKEIESLNERVKEYDERIEKLAKEVYPEVALLKQVKGVGTQIALTYVLTIEDPCRFPKSRQVGCFLGLRPGRRNSGESEPQKGISKEGDRYLRTMMVQGAHYILGPFGEDSDLRRWGLKLAERGGKNAKKRAVVAVARKLAVLLHRLWVGGEVYEPLRNSQKAMREVA

SEQ ID NO: 246340 - protein, 418 aa, unidentified
MKSIKPEKIKTINEKTLVVALDIGKKVHYGYFRTPKNQDIKPFPFHNTGQSFNKFWEKLCRFKEKHMLDEVVIGFESTGPYAEPIANYLRKKPAKLVQVNPMHTKRVKELTGNTPNKTDKKDPRVIADVISLGHSLTVVVPEGSAAQLRRLTHARERAMERRTAMNNQLQDLVFVIFPELGDIIKPSTKTGMYLIKNYPDPEAVVSIGIEMICNIVKKISRGKFGIDRAEELYNAAEESVGITEGKESILLETSHLVSNIETENRYINSLEEQMIAYLDQIPYSHSILSVKGIGNITAAGLIGEVGDFRKFTTISEVMKLAGFDLFEVSSGKHKGRHHISKRGRALMRKLLFFAAINAVKSHGIMHTRYQKMLNNGTPKIKALIAVSRKLLRIIFALARDNAQYEENYNRKHDFKLAA

SEQ ID NO: 246341 - protein, 365 aa, unidentified
MEQITRALGNVEGRQREIARVGADLAKRIIQVHGVDGAGVLVCRRAVPCEKFLAWCARLPAGCVVAMEISSGAHHWARRLTALGLQPRLMSAQLVEPYRSQGSTGKNDANDAAAICEAASRPTMRLVPVKSIEQQSMLCVHRLREGLKAERTACINRIRGLLAEFGVVHAQGSEALRRVLTDMIEDATNEMNALARRVMQRAQAQWRELDAHIVWCNERIAEHARDNPAVRRAAALTGIGQIGASAAVATVDDFSQFKNGAQFGAWCGIVPRQHSSGGKTQLGRITCRGDSYLRSLLVQGAKSAVFTAHRRSDPISRWTLALRERSGWQVAAVALANKNARILWAVMTKAERYDSHHVSGKPSAA

SEQ ID NO: 246342 - protein, 354 aa, unidentified
MLEYQLEEQVMRIAVLGIDLGKNVCSLVGFDENGAVVMRRRARRDLLVDFVVKLPPCTIGMEACCGAHHLGRLFTATGHDVRLMSPEYVRPYVKAQKNDDRDAEGIAEAATRPTMRFVEIKTEAQLDMQTLHRSRERLVGERTALINQLRAVLLERGIVVPQGKRKLEQYLVDLMQEPEGRKLSARMRMLVTDLQAQWQELDRRIAAFETEFVAYAKESEDARRLITIPGVGVITATALIAAIGKAETFKHGRDLAAWLGLVPRQSTTGGKPRLMGISKRGNRYLRKLLIHGARAALPHVAERDTPLGKWVKELLTRVHPNVAVVALANKLARVSWAVLRTGQQFNAKARHLAA

SEQ ID NO: 246343 - protein, 324 aa, unidentified
MANRTMICAGIDTGKYKLDVAIDGSSEQLQVDNTPEGYKVLSDWLRQHRVKRVGIEASGAYEQAVVVELRRKRFVVVVFQPAQVRAYARFKGQRAKNDKIDAALIAACTAAVKKVHDAPDPRLLPFAQQLTMIDQIGEDIARLKNRLESCRNTRIQQVWQEDLARLEKRKRAELKALVAAIREHRDLAERLDLISSVNGAGLPTAVAILVRMPEIGKITREQAAALAGLAPYDDDSGQRAGGRHIQGGRERLRRALYTAALPASMRWNPQLKELYNRLIAAGKEHKYALVACARKLLIFVNTVVARGTPWQNQTPQRNEVPATA

SEQ ID NO: 246344 - protein, 287 aa, unidentified
MNSEKYIGLDVHQATISVAVMDSGGKLVMESILETKAATILQFFAGLRGTLWVTFEEGTCAAWLYDLLNPHVAKLVVCNPRKNALLKYGNKSDRIDARKLAELLRGNHLKPVYHGETSVRTLRELARSYGTTVKDLTRVMSRLKALYRSWAIPGAGRDVYYTRHRAEWLGKIEPAGVRRRAEQLYQPLDVLQQLRQQIRRELLAESRKHPATAKLRQVPYLGPIRSALLVALIQTPHRFRTKRQLWAYSGLALETRTSAEYSYVEGKLRRSKKLLPSGVSTRTTTMI

SEQ ID NO: 246345 - protein, 401 aa, unidentified
MQETTQHDAVDVFVGVDVGKGQHHAVALDRNGKRLYNKALPNDEVKLRALIAELKTHRRLLFVVDQPSTIGALPVAVARAEGVLVAYLPGLAMRRIADLHAGEAKTDARDAAIIAEAARSMPHTLRSLRLADEQLAELTMLRGFDDDLAVQLTQTSNRIRGLLTQIHPALERVLGPRLDHPAVLDLLERYPSPSALAAANEKTLANRLTKLAPRMGKNWAAEIVQALNEQAVIVPGTQAATIVMPRLAQQLAALRKQRDEIAAEVERLVLAHPFWPVLTSMPGVGVRTAARRLTEAAQKAFATAAHLAAYAGLAPVTRRSGSSIRGEHPSRRGNKVLKRALFLSAFAALRDPVSRAYYSRKIQQGKRHNQALIALARRRCDVLFAMLRDGTIYPPKSAPDA

SEQ ID NO: 246346 - protein, 341 aa, unidentified
MMIIGCDFHPRFQQISFVDQETGEYGERRLSHPGEAEQFYRSLAGRQVRIGAEATGNFRWFRRLMQELGLEFLLGDASAIRASCTRKQKTDKRDARHILTLLVEDRFPAVWQPPMENDDLRQLLMHRCRLVRMRTGVKNQLDSMAKNEGVLSPRVWSSKRRSEIEALPLPGWYAQRRSDLLGLLEELDERIKPLDKAVGEAAEGNAEARLLMTHPGVGPIVSLAYVLTIGDWRRFPRGKQVGSYLGLIPAEESSGNSRRLGHISKQGSTLLRWLLVEAATTAQRYDASWHRQYVRLSMTKHHGVAKVAIAHKLAVRLYWMLRSGEDYSNVMERGSHVGQSV

SEQ ID NO: 246347 - protein, 454 aa, unidentified
MRKPQVVPDEDHEVIYERVAAVDVAKASGVVCLRTPDPARPGRFVNRIWDNVPATRAQIAGLGRELLRCQVQMVTLESTSDYWRVWHYVLESIGLAVQLVSASQAKNLKGRPKTDKLDAMWLARLTQWGMLRPSFVPPAAIRRVRDFTRARTDLVAERTRCLQRLEKLLEDAMIKITSVAKDGMKAKSVVAMVAALAAGQRDPHALADLAKGPLRAKKDALAEALDGMFDSHHGVIARMLLGQVAFLDQQITQMEDQAIAALAEVQESWGVDASGQTGPGCGVTPGSPVLAAAHRLAEIPGLSLWLAIVIIAEVGLNMAAFPTPAHLISWMGLCRSAAQSGTRHGKGKPKKGNSYARAAAGQAAIGAARTATFLGERYRRIARRRGKAIAQAAVARSIMIIVWHLLADPQARYRDLGPDWHATRINRDKKIRNHLRGLQALGVTVTITEDEQVA

SEQ ID NO: 246348 - protein, 351 aa, unidentified
MNKKYLCFGLGLDISKATFDACFGGKLSNGDFKVIRTKKFKNNPTGFEAFITWIEQNRVKNKLEKLDFKIMMEVTGVYHESVLYCLYRKGYQVCLELGSRVKHYCKAIGLESKNDNIDSKGMCQMAYTLNLKLWKPVSESILNIRSLLRHRKALLKTKTSLGNQLHANMISEVKDPEVANSLIKMIKQLKQEIKIIEARAKLLSKSDKEFHRKVMMVTKSVFGLGFISVLTVVSETNGFKEFRNRKQLESYAGLDIIENSSGVFSGKTRISKKGNANIRTVLYMSVLTIIRSKSKPYYDLYSRLMKRNGGISKKANVAVQRKLLLIIYTLWKKDEAFDLSHYESVKEVVPA

SEQ ID NO: 246349 - protein, 380 aa, unidentified
MNTTTVGIDLAKSVFAVCEGDYRGHGSRSSILKSGEFLKWLRTLPTGTVVAMEACSSAHSWGRTMQALGLEPRLIAAEFVRPYRKNQRIKNDTRDAEAVLTALHAPGMRFVTIKTEDQQQRLAWHRLREGWKAERTALFNRIRGLLTEFGIVVELGAAKIRRKLAELESDTAYPQSIQLMAQSVRAQIGILDQRLAECERQIARQSKSDPAVVRLRSRPGIGPLTADAIVATVGNARQFKNGRQFAASLGITPRQHGSGGKTHLGAITRRGDSYLRCLLVQGARCVLQAALRLHKNKPDTLNRLQLWMITLNERVGYHKAAVAIANKHARQVWAMITRGEAYNAEAYKDWEAAHATVRPGDIQEASDYDLSTAALAAASV

SEQ ID NO: 246350 - protein, 343 aa, unidentified
MWSIGLDVHQRWSVICILDENGHVVKERRIVGHWQELLTVLKGLGQPFAICYEASCGYGSLHDALSTVAARIVVAHPGHLRLIFRSKRKNDRVDARKLAMLLLLNQVPQVHVPSGEVRHWRSLIEFRQRLIGKRVRGKNALRALVRGQGLTLACGKRLWTKKGLAELAILELPGIIGVQRDMLLEELKELDSKVARVTRELDRLGRQHPGVLLLRTIPGVGARTGEAVMAYIDQARRFTRNRQIGSYFGLVPCQDQSADKNRLGHITRQGPATVRKLLTEAAWQGIRRSPQIRSFFERVQHGDPQRKKIALVATAHYLARVMQAMLRTGEVWRHEGQIKKKVA

SEQ ID NO: 246351 - protein, 355 aa, unidentified
MIIVGCDYHPSFQQIAFVDTETGELKEQRLVHREGAEEFYRALAATGQRVCVGMEASGHARWFERLLAELKFELRIGDAAEIRRKRGRKQKTDRQDAQHILGLLLKDDFPPIWVPSWENRDRRQLLWHRHRMVQARTRIMNQLQAVALNEGLRCKKRLWRAGGREQLESFRLAPWASRRRHDLLELLDRLNPTIAELSQAVEREAENNPEAQRLKTHPGVGALTALAFVLIIGDPERFQCGKQVASYLGLVPLEDSSGNRRRLGHITKQGSSMLRFLLVEAAQVTVRSLPEWRRQYSHLMMRRGRKTAKVAMARRLAIRLYWMWRERRDYQQQKSSVRTQDSPEIAMVCTTTPRN

SEQ ID NO: 246352 - protein, 348 aa, unidentified
MRSYNGRHRYWCGIDLHAKTMYVCILEAEGQVLVHKNLPTSPDAFLAAVAPYRDDLVVAVECIFTWYWLADLCAREGIAFVLGHALMMKAIHGGKAKNDRIDALKIATLLRGGMLPQAYAYPAGMRATRDLLRRRLHLVRKRGQLLAHIQMTSHQYNLPPLGKRIAYPSNREGVADHFEDRVVKKSIAVDLALLERYDALITDLELYLVRQAKQHDAQAFHRLRTIPGVGKVLALTILYEIHDVHRFDRVQEFASYARLVKCAKESAGKKQGTSGAKMGNVHLKWAFSEAAVLFVRHCGEGKKLLTRLELRHGKGKALSILAHKIGRAAYFMLAREKAFDLQRFATAS

SEQ ID NO: 246353 - protein, 335 aa, unidentified
MSKSEAGKRCYVGVDVSARELVVAISDGGEAKIERVSNDAAGHERLQARLRAVAAPVTICLEASGTYSLDVALALAQPAAGWQLSLVNPRLARRFAESLGQRSKTDPVDARMLAQYAARMQPEPWQPPSAAALHLRTITRTIAALVRQCVQHKNRQHALSASAALPALLVRELEVQVAFVDKRIRYLRRQALRRIEQQPELRRCWQHLQTIPGVGEASGLSILGELAVLPATLDERQWVAHSGLDPKQHRSGSSVEQQTRISKAGNRYLRAALYMPALVALQHDPWLRGFYQRLVARGKAKMQALVAVMRKLLHAAWGMLHHDQPYDGAKLCPQI

SEQ ID NO: 246354 - protein, 341 aa, unidentified
MQITTIGLDIAKNVFQIHGIDAAEKVIVRKQLRRGQVTAFFEALAPCLVGMEACATSHHWARELTKLGHEVRLMPAKDVKAYVKRNKNDAADAEAICEAVRRPTMRFVRIKSAEQQGQLMLHRARDLLMRQRTQVINALRAHSAEFGITAAQGREGIKELLAIVAQEEGSRLPSDAHASLTVLATQLQAVQTMIGSLEKRIVAQHRSNEASKRLETIPGIGVIGATTIAAVVPDPRVFRSGRDFAAWIGIVPRQDSTGGKQKLGPISKQGDQYLRRILIVGAHAVLRRARQQPETYPWLTQLLARRPFKVVAVALANKMARIAWALLAKGGTYRAPQLVAA

SEQ ID NO: 246355 - protein, 270 aa, unidentified
MKFYTQQHKFYCGIDLHARTMYVCILNQAGETVLHRNMKTDPALFLKVIAPYREDLVVAVECIFTWYWLADLCVQQGIPFVLGHALYMKAIHGGKAKNDKIDAHKIALLLRGGMMPQAYVYPAEMRATRDLLRRRMHLMHKRAELLSHIQNTNHQYNLPEMGKKIAYKANREGVAERFVDTAVQKSIEVDLALIDHYDKLLSDIELYIVNTAKQHDVNAFYRLRSVPGIGKILALVILYEVQDIGRFPRVQDFVSYCRLVKCTKESAGKK

SEQ ID NO: 246356 - protein, 328 aa, unidentified
MRADAYHISEYILKEGGDMDVIIDKGCGLDVHKETVVACVMGEGIKKEIRTFSTMTGDLFRLKGWLSEKGITHVAMESTGPYWKPVFNVLEDTFEVILANARHIKNVPGRKTDVKDSEWICKLLRSGLLAASFVPPKAIRELRDLTRYRRKLTQSISAEKNRVQKVLEDANVKISSVVSDTFGVSASRMIEAIMAGTLDTEAISDLAVGKLKGKKEELKKALVGNFQEHHRFMIQASFNHIGSLEKIIAELDQEIARKLKDYHKEYELLQTIPGVKEQGAASILAEIGADMDIFPSEGHLSAWAGMSPGNNESAGKKKAERRPTAIRI

SEQ ID NO: 246357 - protein, 315 aa, unidentified
MDTAAVFIGIDVGRDWLDVAVRPLGHAHRLANDEAGIAALVAELRALTPTLIVLEATGGLELPVAAALAAAAFAVAVVNPRQVRDFAKAVGQLAKTDALDAGVLARFADVVRPTPRPLPDADLQALAAVLTRRRQVVAMLAAEQQRRRTTPAAVRPRLEAHIAWLQAERDELDRELAQRIRASAVWQADDDLLQSVPGVGPVLAATLIAELPELGRLNRKQIAALVGVAPLNCESGTLRGRRIVWGGRAQVRAVLWMGTLAAVQHNPVLQRFYDRLLAAGKPKKVALTACMHKLLTILNAIRQHRTPWQDPTAAA

SEQ ID NO: 246358 - protein, 423 aa, unidentified
MAYRIAGIDVHKKKLAVVVADVEVEDEYQFERRWYGSNPEQLRVLSEWLIEQQIEEVVMESTAQYWKPVWGTLERYWKPKCQSREGAGRMSGTLHLAQALSNRGRRGRKKDFRDAERLVKRLVSQELVLSFVPDTEQRMWRTLTRTRYQRTRDKVRLQNQLEALLEEAHIKLSSLVSDLLGASARRMLKALADGETDPAALAALADQRLRATPAQLHDALGACTELNPVYRRLVKMTLDGLQFVEQQIGQLDQEMASLLRQHQDAVERLAVVPGLGVDSAQQIIAEVGAKAATFPSGEKLSSWVGACPGEEESAGVNRSRHSPKGNRQMRRVLNQAANAAVKHKGSIFEIVYRRLVPRLGHNKTIGVIAHRLCHLIWIILHKGVRYEERGPAVSEKSRQRRTARMVRTLRILGYRVEPLANPT

SEQ ID NO: 246359 - protein, 316 aa, unidentified
MDGANQAWIGIDVAKATLDLHILPAGQAHHLPNTDAGHGQLRKLLPPPSTCLIVLEATGGYERQLVADLTDAGYKVAVINPKRARDFAKALGLLAKTDRIDARVLALFAEKVQPAPLEKTPEKQAEIQQLVARRRQLIDLRTQESNRWELTCAKLARKSIQAVLNTLERQVRDIEKAIEALVEADDDWRHKAQLIQSVPGLGGVTATTVLAEVPELGKLNRQQISALVGLAPYNRDSGPLKGKRCISGGRKSVRSVLYMAALAATRFNPVIKAFAARLTQHGKPFRVMLTACMRKLLVILNSMMKSDRPWTPQLAS

SEQ ID NO: 246360 - protein, 356 aa, unidentified
MKSYHLGIDLHKSFGYWTIIDSDKNKLFQGKVPTTERDTLKTLASLPINSCDIQAGIEPVSQWGWFAEILEKQGVEVKLIDPAKTKLIAASKLKHDKVDSEIIADLLRIDFVATAYLAPQAVRDLRELLRWRMFFIRLRSSIKNRVHSVLWKHGLESPTTDLFGKKGRAWLPQQTFHKLYGEEVTSLMQTIDWMNGQIKELDILVKRKAETDERARTLMTIPGVAELTALTIVAEVGDFERFKTPEQLASYAGLVSSSHSSGGKMRFGHITRKGSPFLRSIMVEAACQIRPSGGYLYDFYERIKDRKGAKTARVALARKMLTVMWCLVKKKEPFLAHFLGGSGNMKSGDLVARVVH

SEQ ID NO: 246361 - protein, 377 aa, unidentified
MGKDTAFVGLDVHKETIAVAVAEDRRGGEVRYLGEIANTRETIRKLVAKLSKAHEALHFCYEAGPCGYGIHRQLTDMGHDCELVAPSMTPSRPGDRVKTDRRDAVLLARLHRAGELTRVWVPDEGHEAMRDLVRARTAAMENLRRARQQLSGFLLRHDRVFRAGCNWTKKHRVWLSGLRFQHPAHQIVLQEYIHAVDDAATRLARIEDQIRTLVPTWSLAPVVEAIQAMRGVSFISAVTVMAETGDLGRFDNPRQLMSWLGLVPSEYSSGPRTARGGITKAGSKDARRVLVEGAWTYRCHAAVGKEHMARLEGLPQEIRDIAWKAQIRLCARYRRLSARGKPATLVVTAIARELAAFIWAIARKVTPNTRPEPAAAC

SEQ ID NO: 246362 - protein, 385 aa, unidentified
MKEQNFVPREFEIFGGLDVDKKSIAVTFMSHQGVLQSFSMPYRAEHLLSYVGKHFDGKKVAFAYEAGPTGWGLYDRLTREGHLCVVAAPSMIPKVPGQRVKTNRLDSQKLSEHLRGGQLKSVHVPSESYRQLRQLTGLRDTFVQDIVAMKLRIKALLLFEGLEFPPAPPGSQWSLIVRGKLKRLSCSSAVRFKLDRLLESLESSEKQALQTIQEIRRFYQQDPELCQAMKYLKSIPGIGEIVASHLLARVGDPQQIGNVRQLAGFIGLAPSEHSTGDRVARGHITRGGDGRLRRKLIQAAWSAIRQDPELREFYRSVYQRHPRDRAARKAIVAVARKLTTRIYAVLKQQRPYVVREIVHSAPLTQEETSPQGTTRRRAEPGDTFS

SEQ ID NO: 246363 - protein, 393 aa, unidentified
MQRDTKEVLAELVGKLKAKLDPTKVAATSAGEKHQRGELRPNLDRLTVGVDLGDQWSHYCILGLEGERLAEGQLRTTQEDLATFFQGLNEARVVVEVGTHSAWVQEVIRGCGHEVLVANPRLMDGSKRRKRKNDRIDANKLAHLGRVDPESLYPIQHRSREVRQDLVMLRARDALVAARTEIINTTRGLVKSMGTRLPKCSSRSFAQKGEEAVAVEMREALLPLVRLAATLSADIKEYDKKIEELGREKYGHTALLRQVKGVGPITALAYVLTLENPQRFAKSRDVGPYLGLVPKQEDSGESQPQLGISKAGDTMVRKLLVGSAQYILGPFGPDTDLRRYGLRLCERGGKNAKKRAAVAVARKLAVLLHRLWVSGEVYEPLHYAMSAPIVAAA

SEQ ID NO: 246364 - protein, 371 aa, unidentified
MIQRFHGLDRHKKHSTICVLNREGQEVEFVSKCPDLRGYIEQLGPEDAVVMEAATGAFFWADIVESTGAVCHILHPYKFKIIRDSWNKTDKQDARNMAKALWVYLVTGEFGIPTVYKPRVAIRELRRLFGQYQLLNRQVTILKNTVQEILNDNGISLTYRQKTMLSSETEAIEMMDEFELSPASLLTIQINLAVLWKVEEQKKKLKKEILLAGEPFAAEVKLLITVRGITPLTALAFLADVADIRRFKTLRKMNAYLGLVPTVNESGGKSKTGHITRQSRRLTRTLFTQSIMHFADASPYLRLYYSNLISRRGVGRARIALIRKICGMMRRMLLEQKEFRWMQSSNFERKLKRYECQMKKIKKSTEERKIA

SEQ ID NO: 246365 - protein, 346 aa, unidentified
MLHVGLDLSRKRLDVHAVDEAMTTVEVTGMLPDRDGLRSLVNRLAVHGQPVRAAIESMNGARFIHDELERLGWEVEIADAQRVKGLAPLACKTDKIDARVLAELSCRGLVPAIWLPTPEARAARERARWRQHLVRHRKSLKCRIHAVLMTFGHQCPVSDLFGVKGRRLLEEMQLPEPWSTSVTTSLRLIDQLTQEIDECERQLRLHGAEHPDMALLMTVPGVSWILASTILGEIGDITRFASPAKLCGYTGLCPRVYQSGSKDRRGSLSKNGPKYLRWALIEAATNACKHPLYRDHYQATKKRLGKQRGKKVARVQLARKLAEAIWYILARHQAFAPAGPSRPMAA

SEQ ID NO: 246366 - protein, 349 aa, unidentified
MKAVNAELFAGQEVFVGMDVHKNSWTITELYGGNVHKAYSMKPDPLELSKHLSREYPGAKLKSVYEAGFCGFWVHRELIKLGIENIVVNPADIPTSNKEKLYKNDVRDSKKLARELANGSLHPIYIPSKEQLKLRDLVRLETQIVNNTTRWKNRIKSHLNLSGEKLTSRSVNTLKYMRKNAKTDNNITFYFLLDGFLTEQERKLAVVKEQKRLIHKLGKDKLLNCLMSIPGIGIRISTLLIAEIWDMNRFKSKDNLCAYIGFSPRLFGSGDKERMKGSGNRKHKQLQSKLIEAAWRTIGVDVELRAVYCQFTSRGSAQRAISVVAKKLLLRIRSVWLHEKIYKLNSIQK

SEQ ID NO: 246367 - protein, 516 aa, unidentified
MKSKPEEQNKRATNHPTQHHWHEMNRKQRREMTRQIQSEDLSLEVIHPDAAGIDIGNESHYAAVPPSRDSQPVREFGCTTAELKAMAAWLKKCGIRTIAMQSTGVYWVAVYDILEQAGLEVYLVNARDTKNLPGRKSDVQESQWLMKLHTYGLLRNSFRPSQEIRVMRTYWRQRNDLVQSAGRHILRIQKALTQMNLQLANVLTDISGATGQAIIKAILAGEHDAHKLAEFRDPRVKASEEQIAQSLEGNWQPDLLFLLKQEQDGYEFCHKQMAECDRQLAQYLQQREDRSHGAPLPEEKRKGRLKKKKGNAPQFDLREGLFRMTGTDLTRIDGIDVMTATTVISEAGYDMSKWQTENHFVSWLRLCPDNRISGNKVIGKGRLPTNNPISIALKMAATTLRESKTYLGAQFRRLRTRLGAPIAIKAMAAKLARLVYRMLRYGMKYVDQGAAFYELRHRELQIKRKARIPSHPNTGRGLTSSSFWRASDDPERDVARCRNSPWSGRFAKLEKTSNSS

SEQ ID NO: 246368 - protein, 446 aa, unidentified
MSQPTSATSANLIPSTASAANDGAFARLTHFGGFDWAQSEHQFVLVDARGQIVLSLRFANDAEGWVLFRQKVAALVPAFVDGHLGVAIETSCGPAVERLLDMGLRIYPMNPKAAERYRDRKAPAGAKSDELDAWSFADALRTDGHAWRALLAQDPLTAELRLLCRDEIKLIEQRTALINQLRAALCEYYQAALDAFDNWTVEGPWRFVIAFPDPQALAKAGKRKWEKFLHAHKLYRPQTADERLKIFAGAMTFANPNAAVTRAKSLLAVTIARQLCLLESQLDEYRKRIVGLFGDHPDHDCFGSLPGAGPKIAPRLLSELGANRDVFQTAESLQNYAGTSPVTKQSGRSRIVILRRACNKTLRATVHLWADLSRRACVWAEAYYQKKKADGMNHTAALRCLGQRWVKILWKMWQTGTPYNEALHLKNQTRHGSWLIQLLPATPAKT

SEQ ID NO: 246369 - protein, 422 aa, unidentified
MNEQEVIGYSVYVGIDWADKKHDVCICPRDSDTREFDVIRHCAKAIDAWVKDLHQRYGGRIAIAVELSKGPIVSALQKYEFIDLFPVNPSTLAKYREAFQPSKAKDDPTDAAIAVDMLLRHPEHFKVLKPQSAEMRALATMVEQRRRLVNDQGRITNRLRSALKQYYPQVLEWFEHIDTPLFCAFVKRWPTLTQARRARANTLKQFFREHHMYREDVLERRRKAIKAASPLTLDEAVIVPYRMQVLVLVEQLELMFKAIDQFDDAIAKLSSQHADYALFQALPGAGPSLTPRLMVAFGEQRERFSSAGDVQKLSGIAPVTERSGQKHWVHWRLQCPTFMRQTFVEWAAQTINKSYWAGAYYRQQRDKGSTYQAAVRSLAFKWIRILYRCWQTGVVYDESRYLKALERRGSPLVKRREMLESA

SEQ ID NO: 246370 - protein, 468 aa, unidentified
MTPHYRPDGQVPAHAEPLQVANPHAAGIDVHAAVHFVAVSPDAVPAGSVNPDPALPAHVRKFGACTADLEMLADWLAACGVTSVAMESTGVYWIALFELLERRSFQVYLVDPRQTRHAPGRPKTDVLDCQWIQRLHSYGLLTASFRPDDQVIVLRSYLRQRQMLISYSGQHVQHVQKALEEMNIKLTEVVSDVVGVTGLAILKAILRGERDARELAKLRHENCKRTEAEIARALQGNWRDDHLFALKQALELYEFYHGQLRHCDAKIEAHLRTFADKSAGQTLPPKPRRRGRRANEASFDVCGALYRMAGVDLTVIEGIDAATALVILSEIGTDMSKFPTVKRFVSWLGLCPQHQGSAGRIKSRRVRRGANRAARALRLAGQGCHRAKNALGAFYRRIQARAGGGKAVVATARKIAERVYRLLKYGEEYVRQEQTACEEAYRARQVLGLARKAAELGYRLEPETLATT

SEQ ID NO: 246371 - protein, 350 aa, unidentified
MGHYIGVDFHKQFSSICVMDKDGVLIDERKLYHDNRNEMISYFSQFNRDTSVSIEATRNWYWLADLLQEQGLTVKLVHAKKTRIIAESTIKTDKIDARVLAHLDRCNFLPQAYLADKQTRSERELLRYHISLVKVQTSIKNRIHAILAKHNIQHGFSDLFGTSGRVFLKELALPKIFRLELDGYLNLLDEIAVTIKRAKKEISAHCRAWPEAQLLTSAPGIGDLTGLMLAAEIADIHRFKTFKKFCCYSGFASSTHQSADTEYHGHVIKDSNKYIRFAMLEAVPHAIKKDPRLWRFHTKIQRTKGHNKARIATARKLLNAVYCMLKHNVPYRTACCQDMRQVNPCIVLGA

SEQ ID NO: 246372 - protein, 441 aa, unidentified
MIRRNVAGIDLGSERHWVCAPTADESGREIASFGATTAELIRMAEWLKARRVESVAMESTGVYWIAPHEVLEAQGLQVLLVDTRQLARVPGRDKKTDPTDCEWIQRLHSCGLLQGSFRPEEAVCMLRTLVRDKANLVAERGDWLRRMQKSLDQMNVRVHRAVSDLDGVTGMAILRAIAGGERDSQKLAKLRDPRCSKTEQEIAEQLRGHWREDHLFSLQQALQMYDAVEERIAAYEKEILRKLGDMEREEHRGQTAPPLQNANKAKAIKKRGQEPMRQALYRMSGVDATHIDAIGVETLEVVLSEYGPDLSRFPTEKQFVSHVTLAPHVPTSGGKPLRKRKRNSASTRVAAALRMAALSLRHSQTAVGAYYRKMAQRLGGDIAVFATARKLATLIYRLLRWGQPYLDEGATAYEARYHQQRIGRLAATAKQLGYQLAPINA

SEQ ID NO: 246373 - protein, 346 aa, unidentified
MGKSIINLSSVTTVGLDLAKHVFQVHCVDASGCVVVARAIRRNKLLEFFASLPPCLVGLEACGSAHHWARELIKLGHDARMMPPAYVKPYIRRQKNDASDAAAICEAVTRPSMRFVGVRSLENQATLMRHKTREMLVSQRTQLLNALRGHLTEVGVIAAQGPRHGRELAELIEACDETIPFEVCEALAPLVVQLRNLDEAIARLDRTIAKMAQKDETARRLMSIPGFGPITASAMAATIQDASSFTGPREFAAFLGLTPKQNSSGGKQKLGRISKMGNRNLRKLLVVGAHAVLFHRKPHTDPLRMWAKRLLEKKPFKLVAVALANKMARIAFAIMRGKTVYREIPA

SEQ ID NO: 246374 - protein, 342 aa, unidentified
MKDMMIGVDLAKNVFQVHGALRTGEVQFRKKLTRKQFHAFLARQDPCLVIFEACGSAHYWAREIEALGHEVKLIAPQYARPFVKRQKNDAADAEAIVIAARQPEMRFVQPKTIEQQSRAAVFRGRERLVHQRTADVNALQALLSEHGHVFPAGIHYLDRMTALAEEEASDLPVLIREECKDLLAQIAETTARIAERTAKLKALAARSDRARRLQTMPGVGPLTAVAVEAFGPDMAQFKTGRDFAAWLGLVPRQHSSGGKERLGRMTKAGQADIRRLLIIGAMSRLNWLGQRSIVEGSWLSCMLTRKPKMLVAIALANKMARQIWAMLTKNEDYRDPVLASTA

SEQ ID NO: 246375 - protein, 353 aa, unidentified
MQDVVSAVDLAKDVFEIAVAKRRSGRIIERRRMTRAQFERFWSTREPCSVAMEACGSAHHWARHLIGLGYEVTLLPAKYVKPYRQRNKTDRADCEAILEAFRSPWIKPVAVKSQEQQAILALHRAREQWKDTRTMRINGIRGMLREFGIVAPKGADRFLARLPQLLESHRTRLPEAIRRLVHAYWAEAEELAGWMEEIERELKGIARANPVMRTLLEIPGIGAITATALYASIGNIHLFENGRQVASWLGLTPKENSSGSRRRLGRMSKRGNAYLRTLLIHGARSALTAAQGRQKKGRPLTRLEAWALEKSTSLRHSNQAAVGLANKMARIVWAIWAHERRFDGNHVPLPRAA

SEQ ID NO: 246376 - protein, 317 aa, unidentified
MVEIFVGVDVSKERLDVGVWPEGVGVSSFWVRNDEGGIRELVGRLLELRPCLVVMEASGGYEGEVALGLKDAGLRVCVMNARKVRDFARASGVLAKTDRVDARVLAMYGWALRPEPRDLGDEETRRLRALVVRRRQVVEMLMGERNRLCRASYGVRGNIERVIGALEEALEEIEGEIRGLLEGNPTWREKWELLVSVPGVGFAVASVLLGCLRELGSLSRRKIASLVGVAPFSRDSGQRRGKRSVWGGRSYVRSTLYMATRVAVVHNPVIKAFYERLIQQGKPRKVAITACMRKLLTILNAIVRTGKPWNPKLAINP

SEQ ID NO: 246377 - protein, 343 aa, unidentified
MYYIGLDVHKKTISYCVKDAAGHVHREGKIGSTRRELDAWIQMLPQPRMMAMEATIFTGWIYDYLLPHAEKVKVAHPLMLRAIAASKKKNDRIDAGKIADCLRCDFLPECHMASTEIRDRRRTLRYRHLVVRQMVQMKNRVSGLLMESGVSYDKQRLHKMGYFTELISTNEEISDSIRPLLRVGREHILRGQRLDRALISSLERDPLLSERLRRLRTIPGVGPITALTWALEIGDYTRFPSVKEAISYCGLCSAEKSSADKVMRLPISKQRNKHIQHVLVEAAKLAPRYSHDLALLREKEIQRGNKNRATLAVARKLVAYMLAVDRRKQDFVPAEELIAKAVA

SEQ ID NO: 246378 - protein, 352 aa, unidentified
MNKCNVSYLYSNKKVFIGIDVHRKSYSVTAICDDLVVKRWRMLADAQGLVSALKRYFPGAELISCYEAGFSGFGLHRTLTLAGIKNLVINAGSIEISARNRVKTDKRDSLKLAQHLSLGRLKGIRIPSEEEDRHRQLCRTRTQQVRNRTRIMNQIRMKLHYHSLLPADYQGVLKLSFVESVAKEQPREIAESLNSLCEVWKVLDSEISTLTKKLSAQAKQDRGEKIYRSVPGIGSIASRILSTELGDMSQFPNEKSLFSYTGLTPMEFSSGETRRLGHISRQGNSRLRAVLVECAWVAIRMDPALHKTFLRISVRTGKKKAVVAIARKLIGRARALFREDKLYELNFIKSAA

SEQ ID NO: 246379 - protein, 357 aa, unidentified
MDKLTRIGVDTSKNVFVLHGVNAAEQPVLRRTLRRRQVIEFFGKLEPTKIGLEACGAAHYWARELQALGHEVVLLPPQYVKPYVKRNKNDAADAEAICEAMSRPTMRFVPVKTPEQQAALMLAGTRDALIRRRTQLTNTIRGYAAEFGLTAAKGLDKIEPLLARIAANAALPELAQELFAAYGRDYAQLQVQVRKIEARLMAWHKHNELSRRLVEVPAIGPIGASLLAMKVTNPHAFRSGRDFSAWMGLTPKDHSTAGKRRLGVITRAGDEALRRVLVVGATAVIQQVKRGRGHPSLWLVELLKRKPPKLAAVALANKMARVAWKLMVSGERYNPARRTTGSASRTTSRETIAMTNA

SEQ ID NO: 246380 - protein, 405 aa, unidentified
MAIIGMDIHRSFAQAAFLQDGRVKREQRVDLVHDRLVRFGKSLSVEDEVVIEATGNSAAVERILRPFVKRVVVANPRMVRAIAYARVKTDKIDAVILARLHAGGFLPEVWVADDNTQRQRRQTVERMGVLEQVVRTKGRIHAILHANLIPKYSGHLFGKAGKKWLAGLPLPEEEKAIVGRLVDELERNSDQLAKLDITIIGEALANPRVVRLMTIPGIGPIVASTVLASIGDISRFETPEKLSCYFGLTPKVRQSGDRPARHGRISKQGNTHARKMLVEAAWSAKTAPGPLKAFFQRVQRNRGAPAAAVATARKLAVMIWHVLTDGTEYAYARPAFTAMKLRKAALKAGAPREYGKAGPGRDYWIKEIREREADYVRRAEHAYERMVAAWKEKPPTAPAMTATPG

SEQ ID NO: 246381 - protein, 342 aa, unidentified
MEHYAGIDVSLECSSVCVVDANGKIVREAKVASEPEALIAWFGSLGFGLERIGLEAGPLSQWLFAAMKAAGLAVELLETRHVRNAFKAMPVKSDRNDARGIAQLMRLGWFRPVHCKSLSAQETRSLLTARKLVQAKLLDVENSLRGILRGFGLKVGKVTARTFAGRIQELVAGHPHLERIAAALLAVREILRKEFAAFEKQTRRMVRADQQARLLTSVPAVGPIVALTYASAIDDPGRFTSSKQVGAHFGLTPKKHQSGETDYTGRISKIGDGAVRTALYEAAHIMLTKPVKGCAQLKSWAMRIARRAGMSKAKVALARRLAVIMHRMLVDQTPFNAAAAAA

SEQ ID NO: 246382 - protein, 355 aa, unidentified
MKKVDPTIWQDKPLYVGIDMHRKRWHISIRSADGQVLFSQSIEGRWPVLKHRLEKYPGAQFMAVYEAGYFGFWLYDELTAYGVTTCVTPPSLIPSASGNKVKTDRLDSDRLAQLLQAGLLTSVHVPTEEERAHRQVVRRRRQFIQDRIRVKNRIKAELRLYGLELSGETKGSWTQRLLSQLRAVRFADAFHQASFEALLSHHDFLSRQIDHLAQQLKILAESEIYQERVEILTSIPGLGWLSAMEILLELQDVARFQRAEQLAAYVGLTPGQHSSGEHVRLGRITRQGKSIVRTLLVLAAWRLIDKDGAMREKYERIKARAGGKRAIVAIARTLLVRLRRLLLNREPYALGLVSG

SEQ ID NO: 246383 - protein, 344 aa, unidentified
MSREIKYIHKVVIAVLNGSGKPVMESIVETKASSLLQFIHGLRGELHVSWEDGAWAAWLYDLLQPQVTRVLVCDPRRNALLKEGNKSDKIDARKLADLLRSGLLRPVYHVEHGLGTLPELGRCYQTISQDLNRVMNRIKVLYRGWSIPCVGTQVYAPRYREEWLHKIEHAGVRRRAELLYQQLDGLHTLRRTLRPELLAESRKHKASKLLRQIPCIGPIRAARLIALMQTPHRFRSKRQLWTYSGLGIETRDSAQYRFVRGQLQRAKKPQQIRGLNHNHNHEMKAIFKGAATRASWGVGPLRDFYVALLAKGMKPEMARLTLARKIAAIALTLWKRRNVSTPNN

SEQ ID NO: 246384 - protein, 370 aa, unidentified
MSNATTFVGLDVHARSVKACAFVPETGETIRRSFGYEPCEIASWASSLPQHAKCVYESGVTGFHLCRELRSMGVDCVVGAVSKMHKPAADRGRKTDRRDAQFLAVQLALGVVTEVHVPDAECEGARDLTRALADARDDAVRAKQRLSKFLLRHGFVYDERNSAGQRRNRWTRDFWAWVGRIDLGDGAAMATLDHYCERVREADAAKAALEAKVKELAQQPRWKPTCDALKCLKGVDAVTAVSIACEADGFARFAAASGFAAWVGLVPSEHSSGESQFRGGITKAGNKHLRKLLVEAAWHYKGASRSPKGLAKGQIVDEATRRHANAGVRRLVDRRRAMDDAGKQSSVANVAVARELACWCWAVGRMAEGA

SEQ ID NO: 246385 - protein, 449 aa, unidentified
MHIEHYHNKITMAKVINLNAAGIDIASNVHYVAVAEDKCKNHVRNFKAFTHDLHELAKWLVSLNIETVAMESTGSYWFQLYTILLDYGIEVYLVNAYHVKNVPGRKTDVIDAQWLQELHASGYLKACFQPDNITRELRTYVRLRKQIIRDMAKETLHMQKAMINMNIKLHDVISDINGQTGSAIVNAIINGERNPKHLALFRNSRIKCSEKILIKSLEGNWRDEQLFCLKMARDRYRQLEQHLINVDQESERVIKLLAQENIEEKTIKPRTYKNKQPTFNVGQHLFNVHGVDVMEIYGFKQTTALTVLSETSANLKEKFPTVKQFLSWLNLVPDNKISGGKILSSRVRKRKNHAGQAFREAANGLWNAKNPFGDYIRTKKAKSGAGQAIVATAKKIASIYYKMVTEKIEFNPFIIDGNRQAYLQKRAKSLSKTLDKLNMQLSEIERIAS

SEQ ID NO: 246386 - protein, 370 aa, unidentified
MTLIRKEPSMTATYYIGADVHSNTTELAIEKSKKIVARYSVPTTIPAISNVLDSLQGKRLLAFEEGPMAGWLYRNLNEKVDELIVCDPRRNNLISSDGDSDDKIDAAKLALLLRGGYLRAVYHSDNDGRAELKHWVNLYHDRVRDAVRNINKIRARCRMFGLSIPRAVLRNPAHRLKWLLQINHPVLTRQLKMLWIGYDATAKQARIGKRQLSVLGKEHDIIKLWGRLPGIGLIRATTLFAYLDTPWRFKRKNKLWKYCGVGLQRAASGTDKKGRPKPARLQLPWAVNRTLKNAVLGAAISAINQKDNPFKDYYERMVQNGVITSNARHAVARKMLTAMWGMWKTSSQFDGKLLCLLSDHNRPTASVPSR

SEQ ID NO: 246387 - protein, 363 aa, unidentified
MENVRFVGLDVHAESIAIAVAEPGRGEPEVLATIPNDTRKLLKRLRALGKVKCCYEAGPTGYGLHRDLTAAGIDCMVVAPSLVPRKGGERVKTDRRDAVRLARFLRSGDLTEVHVPDVDTEAMRDLERARDAAKRAERVARQQLTKFLLRHGRRFPEKKWSRAHLRWLHAQTFDHPAQQTVLEDYMNTAEALTARVNALTKRIAELVEGWHLGPLVKAFQAMRGISLVSAVTLAAEVCDFARFDSAPKFMSFVGLVPSEHSSGEGRHQGRVTRAGNGFVRRILVEAGWAYRHKARMSEAIRERNKGLPPEIQQIAWRAQERLCARYRKLTGRGKNRNKTVVAIARELAAYAWSMARHPALAAA

SEQ ID NO: 246388 - protein, 345 aa, unidentified
MSKVRVIAIDLAKSVFQVCLFDRSMTVLSNRTMSRKQLSSFLAKQPPARVAMEACGGAHYWGRLAQACGHEAVLIPPKRVTPYREGQKTDGNDALAIGVASQQSQLKTVGIKSVEQQGLQTSKRVQEHLSDQLTASGNVLRALLAEFGLVIPKGMASLRRRVPELLEDAENGLPMAARHSLAVLWSQWGEQAERLAQAERLLQAHSATVEPCRRLQAIEGVGYKNAIGLYLRLGDGQHFRNGREAAACVGVTPQQHSSGGKVRLGGIGRYRGDQRLRSSLIVGCRAAVNALNKREPRNATEQWLKQLVARRGPGRAAVALANRNIRTAWAMLRHSTAYAPAALAA

SEQ ID NO: 246389 - protein, 417 aa, unidentified
MADETNASPCRYVALDIHKHYCVIAAVNRDGQIVLEPVRMEHEDLEAQLNQKLLPSDQVVIESTTNAWHIYDLLEPLAAKVLVANPIRVKQIACAKVKTDIRDTLILARLLAANLVPTVWVPPVEVRDLRYLLSQRRRLVGMHTQTVNRMGSVAHRHHLNHPKGKRYIEKNTEWQQDDELSDSEKFQLELDMATGEHLDGQAKKIAEKIARMSQEEPWAANMMYLMQLPGFGVITGMTVLSAIGDIARFESSGKLSSYSGLTAGVEQSGTKNRGKGITKEGRKELRWAMVEVAQRAVKSDPYWKSRFQALERRMHRNQAIVAIAHQMLELVWHVLTHKQAYRHFSEERIAYKYLTWGWQLDEEARDGLTRQQFARYYLMRLGIGHDLKRIALNPKYPRKLASEAEVLALKPELNQTR

SEQ ID NO: 246390 - protein, 342 aa, unidentified
MSEKRYIGVDLHRRVFTCCVRLENGRQFLSEWRLEQMPQFLKKLRGTDEVAVEVTGNTRLFYDAVAPHVARVVVVNANQFRVISQSVKKTDPNDARNLALYLAKGLLPEVRMKEKQQAQVASLLQTRDRLVKLRTALKNKINNLLSARGIELEKEELSSEKGLTRVLAKDVEELTLFELQVLVEQIRSLNHSIAELEKVLDREGQKLKGHGNLTSIKGIGSLGASILLSVIGDVRDFPEEGKLAAYFGIVPRIHNSNETEHSGHITKRGSKLGRTALVQCSLIAKRYSPYLASYYEAIRCRRGTGRAIIALARKFLGVIYRTLKNNWVFEDFPNFVLRETAA

SEQ ID NO: 246391 - protein, 431 aa, unidentified
MKYKLKEKQNQRILDITDQTLVVGADIAKDTHVARAIDFRGIELGKDCVFENSRKGLSKLVSWMKALQRQYAKTDIVFGIEPTGHYWFPLAEFLQDKGIRIVVVNPHHVHKSKELEDNSQTKNDYKDAKVIADLVRNGHYTEPQLPTSVYADLRILMNMREKTMVSLGQVQRRIQNWLDRFFPEFNNVFKSWEGKAALVTLTEFPLPQEIVALGATAILGRWKQDVQRAVGIKRAEKLVEAASESIGLTEGTTAAKLELHTWMQQYALFTQQLEEIMNQVELLLKQIPGTQEMLTIPGVGITTLAGFLAETGDLSRYSHGQQIIRLAGLNLRENSSGKKKGRTTISKRGRSRLRALLFRAVLPMVAKNPEFKAMHQYYTQRQVNPLKKKQSIVALCGKLIRILHTLGTRKIVYNAADVLGPVRRAQLQLAA

SEQ ID NO: 246392 - protein, 316 aa, unidentified
MNNKVQVVVGIDVSKAMLDVAVSPSGEVLQFANDPNGIDELGKRLKSLAADLVVMEATGGYETAVATALVGSGLRVAVVNPRQIRDFAKATGRLAKSDRIDAQVIAAFGQAIEPEIVRLPDEDARELEALLVRRRQLVAMRVQEVNRLGLMQGAMRKRIKAHIEWLEKEIGKLDIDLTAGLRSSPAWRAKDELLRSFKGVGPITSSTLLIALPEIGQFDRRVIAALVGVAPYNCDSGVMRGRRSIYGGRSQVRTVLYMAATTAIRSNPVIRAFYERLRSRGKPHKVAIVACMRKMLTILNAMVRQSTPWTPETNPL

SEQ ID NO: 246393 - protein, 354 aa, unidentified
MIIIGCDYHPSFQQIAFVDTDTGELQERRLEHREEAEKFYREVAVQGMKVGVGMEASGQARWFERLLAELNIELWIGDATEIARKRERKQKTDRQDAQHILHLLLKDDFPQIWVPSWENRDLRQLLWHRHRMVQARTRIMNQLQAVALNEGVRCKKRLWREKGREQLESFRLAPWASRRRHDLLEWLDRLNPTIGALSQAIEQEVEKCPEAQRLRTHPGVGPLTALAFVLIIGKPDRFQCGKQIASYLGLVPLEDSSGNRRRLGHITKQGNSLLRFLLVEAAQVTARSLPEWRSKYVHLTMRRGRKIAKVALARKLAVRLYWMMRKGWDYEQLKKFGSHAGQPGNRDGVKQNIE

SEQ ID NO: 246394 - protein, 347 aa, unidentified
MENSTTIAVDLAKAFFQISISTVPDRVNERARLTRQKFVSFLATRPPSEIVMEACGSAHFWARTARELGHQPVLLPAHYTKKYVLRDKHDRADADAILEARRREAIRPVPIKTVEQQTIAFFHRMRSSWIQTRTARINAIRAILRELGKVIPVGPRNVVPHLPELMADIPEALHPVLLAMADEIRQLESSIKDADRQLKALLVDSDGARSLLSVSGIGLITCSAMIAFVGSPSRFRPCRAFSSYLGITPKEHSSGAKRRLGSINKEGDTYLRTLLIHGARSVLVAAKRSKNPDRLQAWALRVQERRGHNRAAVALSNKIARIAWAVWSKGTLYQPRPAAAGPAAATN

SEQ ID NO: 246395 - protein, 431 aa, unidentified
MLKINPLSTLYVGIDVSSKSNYVCALDFFKNKYINSSFANNQPGAEELALKILECLNQHPDLTMVVAALESTSVYSIHIANYLSSCEELMRFKPYVFVLNPKCTANYKKSYIGLGKSDPIDAFVIADYARAGNIESEPWRGSQFLALKRLTRHRLHLVECMTREKTYLISNLYLKFSELQMLEGDDQPFCDIYGATSSSVLMEYLSPEEILASSEEDLIAFLAEKSRNRIKDISKTADLLKKAARDSYRLDTALYEPLNVSIASSFNCIETFKREIKVIDNAIEKEIKGLNPNAFIILQSIDGIGPVFAGGIIAEIGDITAFHSSDALAKYAGLTWKSNQSGDFDGEDTPMIKAGNRYLRYYLGEAANSMRKHNVEYGAYYRKKYNEVPKHQHKRALALTSRKFVRLVYGLLARNQLYSGVSLDTSIKDSN

SEQ ID NO: 246396 - protein, 324 aa, unidentified
MEPTASDLACFVGIDVSKDRLDVHVRPSGEAFWVNRDAGGLDDLIARLKPLLPTTIAVEATGGFESVVVASLSAAGLPMVIVNPAQVRSFAKALGRHSKTDAIDAAVIAHFVEATRPPLRTRSDEQTQHLADLVMRRRQIIAMIVAERQREKRCTNKGMKRSIARLVTALEKELSLLDKEIDTNVRGRPDWVEKEGLLRSVPGIGKVIARSLVAELPELGTLDRRQIAALVGVAPFTRRSGKWQGKSFIGGGRTAVRAVLFMGAMTACSRNPVMRSFYQRLLARGKSKVCAIIAVARRLLVIMNAMLREKLAWTEERAHAEASI

SEQ ID NO: 246397 - protein, 346 aa, unidentified
MAIVETTRSITGGVDTHLDTHVVAALDPNGGVLGVAAFAATRSGYSSLWSWLGEFGTIARIGVEGTGAYGAGLARHLRSLGVEVIEVDRPNRQLRRARGKSDTIDAIEAARAVLSGRATGVAKTADGNVEAMRALLVAKRSGREARITCLNQIRHLGFTAPDELRERFQRVSRGMLAAQAASLRPRPDSDAVVYATKLAMRSLGRRVLVIDEEIARLEVVLGELVTATAPGLVGLYGVGVDTAAILCVAAGDNPQRVRNEAAWAHLCGVAPLEATSAKVTRRHRLNRGGNRQANHALWRIVFTRLGSDPRTRTYVARRLDEGRSRPEIIRSLKRYVARETYRHLPR

SEQ ID NO: 246398 - protein, 365 aa, unidentified
MVKSISNLSSVAVVGLDTAKNVFHVHCVDEGGFVVLAKALRRAQVLTFFASLPSCLVGLEACSSAFHWARGLIELGHRVKLIPPSYVKPYVRRGKNDAVDAAAICEAVGRPSMRFVPVRSIDNQAQLMRHRARELLAGNRTRMLNALRGHLAEIGVVAAQGAQHAYELKRLLVDGADENGEVVVPDCVRQALAPLVRQIDAIDGEIATIDDEIKALVKADDTARRLMTIPGIGPITASAIVATVQDMGAFASGREFAAFLGLTPRQNASGGKERLGRITPAKPSVLLGMGDRYLRKLLVVGACATLSHRKGHRDALRVWADQLLARKEVRYKFKLAAVALANKVARIVFVLMTRGGEYNEMPVAA

SEQ ID NO: 246399 - protein, 443 aa, unidentified
MKPLPVLDSKAAAIDVGSERLHVSIAGDTPKVFATFTTDLEALRAWLQGQGVHTVAMEATGVYWLYLYEVLEAAGLEVLMVNGRYVQNVPGRKTDMSDCQWLATLHAHGLLRAGFVPPAQIRCLQDYQRLRADHLIGAAAQIQKMQQALERMNVKFHDVISDVTGVSGLKVLRAILTGQRDPAGLLALCDPQIQKRKSGPVQESLRGCWRAEHLFALRQALELWETFHQKISDCDRELEKLLQELAGPLPPPGPSTSSPLKLAPAKDPGKNAPVIQRFQELVARLCGGRDATQIPGLSVYLVLQLVSEVGTDMTRWPTEKHFTSWLGLAGGRKQSGKRKGSVKVHRNRAGRMFCAAARALAQSVDKALGGFYRRLRGRLGGLAANVALARKLAQLFYRLLRYGMEYVEKGLKAYEARVLATETYLLRKLAKKQGYVLIPSTPR

SEQ ID NO: 246400 - protein, 310 aa, unidentified
MDKVIAGIDVSKDQLDVHLLPSQTAFSVPRDSIGLDALAERLVVLQPKLVVMEATGGFETIVAAAMAAANLPVAVVNPRRIRAYAQALGRLAKTDLLDAATIAAFGEAAKVEAQKVPDDAALMLGELVARRRQIVEMMGIERNRRRSLTRSRLVKGVDRILSILQKELSDLEREIDDTIRGTPAWREKDELLQSFPGIGPNLSAMLIAELPELGTLTRRKIAALVGVAPMADDSGKHRGRRHIQGGRSVVRRGIYMAALVASRRNEAIAAFHQRLLTAGKSPKQALTACMRKIITILNAILRDNRPWQSA

SEQ ID NO: 246401 - protein, 410 aa, unidentified
MEVLHAHCAGLDIHKETVVACVRHMSGGKVKTEVRTFATMTGTLLDLSAWLATEQITHIAMEATGVYWKPVWHILSDGEFQLVLANAAHVKNVPGRKTDVKDAEWLADLQAHGLIRASFVPDESTQQMRDLLRTRKQLVRERSSHTQRIQKTLEDANIKLDCVVTDILGLSGRRILEALVKGETVPQALATLAHRRIHASTEELEAALRGRVTTHHRFLVKLHLDQIDAIDAAIQSIDKEVDGNIEPFRAAAELLTEIPGISQLAARVVLSEIGLDMSRFETSGHLVSWAGLCPRNDESAGKRRSTRMKKGAPWLKTILVQCAWAAARTKGSYFQAQYHRLRSRRGSKKAICAVAASLLTTVYHMLKNGTCYQDLGPNHFDQQDKERHIKRLVSRLENLGVEVKILPKAA

SEQ ID NO: 246402 - protein, 413 aa, unidentified
MDVLHPRCCGLDVHKSSISACILLREAGRVQKHQRRFGAMTQELQELAEWLRQFGVSQVAMESSGVYWKPVWNILEGQFTVVLANAQHIKNVPGRKTDQKDAEWIAQLLQHGLLRPSYVPCEIIRDLRDLTRMRASLSQEASRISSRIQKVLEDANVKLASVATNVLGKSGRAMLEDIISGEDDPEHLASLALGHLRVKIPQLRLALEGKIRSHHRFLLRRLVDQIQFVEHEIALLDERLEDIGRQRPELAQAVARWDTIPGIDQVAAWALLAEIGDNMAQFPTAEHLASWAALCPGNHESAGKRLRGTTRQGSPWLCRMACQCAWAAARTKNTYLSSQFRRLAVRRGKKRAIIAVAHTLIVIGYHLQKNQSNYEDLGGNYFDRIHSDGLKRYLVKRLQQLGHKVTLEPMEAA

SEQ ID NO: 246403 - protein, 364 aa, unidentified
MHSINNTELSSLEETRCQFNGGRCAIKLGIDVHQEFYVVVMQEGGANPKPPQRFQKQAFLHWAGRLKQKSGAEVYAVYEACGFGFTLQRNLSALSIHCYVICPQKLDEQNRRVKTDGLDAKALCLKLDRFVQGNRAALAMVRVPSEAEERSRAIHRQREQLVGARKRLEAQGRSLMVNHGVEPVQQWWKRRAFSQLQVPEWMRAMLSNSQPILLGLEEKIRALTVLLQSAAGTKQPRGLGLMTSVIIDREIGDWHRFNNRRQVSSYTGLCPGEYSSGNTRLQSCVTKHGNPRLRAALVELAWRLVRFQPNYKAVVKWRQILAKGALATGAARKKAIVAVARQLAIDLWRVRTGRCKPEVLGLEI

SEQ ID NO: 246404 - protein, 416 aa, unidentified
MTSMGLPNTRDQLRGAHDHAPLHDDRADDDASTRLQPPLVSYIDGMDSSYDSVGISCQSRCWQAKEGAHPVQNDTLVAVDIAKEVFEVGVSDRPGRIVLRKRLLRDRFIAFFAQLPQATVVMEACGTAHYWARRIEELGHVVVLLPPQYVRPYVVRNKNDRMDVNGLLEAFRNEQIRPVPIKNVTQQVIASLHRLRSGWLADRVRSINTLRGLLRELGFFIPEGRQHVLPEAWEIIQDDRRGLPVALKPSLAALCEEIASLSTRIEDVEAQLEALARQIPVVARLRSVPGIGLLSATALYAFIGDPSRFPSGRHMASFVGLTPREYSSGLRRRLGRISKRGDAYLRMLLIHGARSVLYHAKRMKNRDRLRSWALNLERKLGHNKAAAALANKLARVTWAVWTNEREFEPVFEPQAA

SEQ ID NO: 246405 - protein, 351 aa, unidentified
MYTLGIDLHKKSSVWILIDQQRTEIWKEDVLCSPNYISTIIKSLPVSPPEIQVAIEPVGGWRWVTQLLEASGMQVHIAHPRKIQLIAQSNKKTDTEDARILANLLLAGYFPEAHKSSEDIYQLRLLLRERAFIIQKRTSVKNQIHGIATTQGLHLIDGGNPLFKKGKADIMKSDNFVLKQLHYLIEDLDRRVMPFDEQLLLESKKHPLTQLLMTFPGVGIVTALTIIAEVDDFSRFSSGKKLASFAGLVPRQRSSGEMIRYGSITHAGSAPLRTALVETAMRIRVGNAPELYSFVSRLTPVCGAKKARVALARKLLVIMWKMVITNTPYQSKIVPSLCTTNLSDLDTEAGM

SEQ ID NO: 246406 - protein, 427 aa, unidentified
MNESEVIRYEKFCQFKAEIRSSRDYLVVGIDVAKERHHAFFGTAAGRTLLRRLLFDNNQDGFKRLITRALQLQVEHGLSKVVYGLEPTGNYHKPLSSWLLAQDQMLVLVSSKSISDNRQTLDGRWDKNDTKDSANVADLIVQGKCQFFETPDPQLVELRNLLSLRRRLKKDEHSVRMQIRNGLVCKYFPELDRHWGSCLTENLAIVRWCLDPRKINAMGFEKFVRQVTRRDRGIRQQKRLMKIYEAAGVSIGCPMDKAAHFEAHILVERLERISEKIGQTEAEIKDLCDGFPAYRRLLTIPGFGPYVSSIVLARIGDPHRFIGRRQVIRLGGFDLNAKRSGKRSNDAVPVISKRGNSELRYALYQAALIATYHNDRFRALFSGYIEGRQQERGIKTKMRVKLAAKMLVIAWTMMKTDTDFDPSLIQV

SEQ ID NO: 246407 - protein, 310 aa, unidentified
MTKNYVGIDVCEKKLDIFIHPSKKYVQFNNTQQGIMQLYEYLKAFDIELIVLEATGKLEALCADILMDLGYKVSVVNPARVCYYRKSLGYKAKTDLIDAEVIARFAEALRPDASNPSSATERRLRELSARRKQLVILRDSERNRLRRVRDEYAKEDLQINIAFLNERLHKIETIMVELIKQNKAKKEVFDILQSIPGIGEIMALTLMSYLPELGQLNQKQIASLAGVFPLNMESGSSKGHRKMCWSGRPKIRSTLYLATLVGIRHNSFIRSKFNDLVAKGKAKKVAMGACMRKLIIIANSMIKEKRCWHD

SEQ ID NO: 246408 - protein, 421 aa, unidentified
MEIVVKLENMTGPASDSCVVSSSRGESEVPEPPATVLLSPPRGDQPMSSAATIYLGLDVHKESVTIAVLPSGAVAPTRVDKLPNDLAKLRRFCERQASQGTVCACYEASGAGYVIQRAMTAWGYHCDVIAPSLIPTKPGQQRKHDTADAIQLARLYRAGELTVVRIPTEVEERVRDVVRCRETFQREVLRSRHYILKFLARRGFVYREGTPWRQAHYEWLRQLARADAPLALEDRQVFGEYLGLLEYKLSRRDALDEQIEALALTPALATAVATLQCFRGIQQQAAMVLATEISDWQRFASPRQLMAYLGLVPREHSSGERERRGSITKAGNTHCRHVLVQAAWAYRFQPKIGVALKARQRGQSPVVIAHAWKAQHRLHTFYQRLAFRRRPQIAVVAVARELVGFLWAVMRDVTPLAPATT

SEQ ID NO: 246409 - protein, 425 aa, unidentified
MTETEHASGARVLVGIDISKHRHEVLIAAPGKQRRRRVTLTNTKADFERLVDVLSGYGLPVRIGFEATGNYHRALAHHLSCAGFQPKLISSVGLARTREALHNSWDKNDPKDAQVILHMLRIGAVQFFHDPLLAGVNDIQEISKTHEFVSRAKTELWHRILTHYLPLYFPEADRYHRSSRTDWFLAFLEAFPSPHFIAAMDKQAFIAAAWTVVGRRVSKTELLSDIYETAKTSVGLPVDPDSDAIAMFRMVLAEGRSLTRQRNAIEARSVELLSGLTDYRLLTSIPGIGPINAMTILAEAGDVRRFRHHRQFLKFCGMDLATVQSGMFRGQSKISKYGNARLRRTLWMAGQTAVLKPTNSFRDKFERYIARDRHNPHLRRKAYTAIAAKMARTVHAVIKHGEPYRPFFEGASPGGRTPLDRAVEA

SEQ ID NO: 246410 - protein, 383 aa, unidentified
MKYAHVSRPGTPPGGVTAGIDWASAGHAVCVVGAFGEVVSRFSVEHTVEGLRTLVQRLAKARACEVAIERGDGPVVDALLEAGVTVVVITPRQIKNLRSRYGSAGNKDDRFDAYVLADVLRTDRARLRPLIPDSPATVTLRQACRARQDLVRHRVAVTNQLRAHLLSAFPAMVGLFCRLDSAISLAFLARFGCQDRADWLSQKRLAAWLKGAGYSGRTGPADLYQRLMSAPRGATGEAGAASAQVTRALAAVLASLNTQIKALDAQIAAQLASHADGHIFTSLPRSGTVRAARLLTEIGDCRARFPEPQSLICLAGAAPSTRQSGKHKIARGKDHPLAVRILARAWLYVIWNCWHNGVAYDPARHRGLQRLLTAQATGADQAA

SEQ ID NO: 246411 - protein, 341 aa, unidentified
MEVYYIGLDLHKKIIAYCIKAGSGTIIRRGTIAATRSALADWTESLPKPWIAAMEATMFTGWVYDFLKPYAQELKVAHPEMLKAITAAKKKNDRADAEKICDLLRVDLLPQCYMAPQELRELRRVLRYRNHVVSMATTVKNKMSGLLMEVGAEYSKKRLHGRSYFANLLETVEDVPPSVKELLRFSRAGLEIFTAVQKRLVAVLRENNLIHERVQRLMTIPGVGEVTALTWVLEIGDPGRFSTRQAISYCGLCSAQRESAGKETRGPISKKRNKHLQTILIEAAKLAPHWNPHLAQIHVRELTKGNRNRATLAVARKLVTYLLAVDKTGLDFITPCELAAA

SEQ ID NO: 246412 - protein, 315 aa, unidentified
MGTPVFVGIDISKKHLDIFLTPPDTSFTVSNTEAGMVKLLTRLRQVTPQIILLEATGGYEFRVVAALREAELPACCINPRQVRDFARSLGILAKTDRIDARVLAHFAEKLRPEPRPLPEAQQQELKHLMARRRQLLEMILMEQNRLQISPFPRVQQSIQAALQALKEQLRQLDRDIDDFFRRYSVWLDQDQLLRSVPGIGPQTSLSIMAWLPELGRLNRREIAALVGVAPFNRDSGAWRGKRSIRGGRPQVRRSLYMATLAALRFNAVIRTFYQRLLLNGKAKKLALTACMRKLLTILNAIMKNHQPWLPQDQTA

SEQ ID NO: 246413 - protein, 427 aa, unidentified
MKELTNVCGIDVHKMFLQVCILSRSGEYSQHRFHNTPTGILALKDLVLAEGCEVVAMESTGIYWYRLFLELESDIRTIVANARQIKSIPGRKTDMNDARWIAELALHGLIRPSRIFPRQDREFRDLTRNRETLVRTRTTIKNRIHKILDSAGIRLNVALKDIFGKSGRHLLSSIAEQKDLETTLAAIPSPRILRRADQLREILQDSPLSPTQLQLLTIQLHLLEEIEEKIAHLDELILASLEDSQLDALPICTSVPGISITAATTLLAELGDVRDFSSADRLVSWAGLAPSVYQSADTLVCGKITKQGSKSLRWILVQVAQAASRTTNTVFSRFFRRIAFRRGRNKAIVALARKILTILWHLLVNRELYVEPGVQRVRKLPARATLSKISIDDATEILLNAGYRIYSPESQKSAGKGVGAKRATHPL

SEQ ID NO: 246414 - protein, 350 aa, unidentified
MTMVGGFDVHRQQITFDYVDDDGLVRWGQIRPATRKTLRGWLAEHCPAGDAEFALEGCTGWRYVTEELAAVGGGAHLGDPAEIAVARGPKKRAKTDRADARLLRTLLLEGRFPESWIPPAHVLEIRTLGRLYRTLMDERRTWQQRIHAQLFHQGCPPIRALLSAAGRAALASVELSAAGRQYVDTALRRIDELSAEIEPLRTQLVSLSRRQAGCQGLQRQFGIGWLCAAIIWAEIGDARRFVSSDQLVRFAGLDVTVYSSDGKRSPGHLSRQGSPELRWAAFEAAKCAARRGSPDYPYYHQLAAKHDGHNGKNPTLAVERKILRRCYHTLRELGDAALALPDTQPQEVAA

SEQ ID NO: 246415 - protein, 352 aa, unidentified
MKRYKESPAKGKRIFVGIDLHRLQWHVTIRTEDVELFAGSIPGNWQSLRKLLDRYPGYEKEAVYEAGYFGFWLHDHLLEYGAKCIVTPPSLVPQEYGNHVKTDRRDSRKLAHLLAKGMLKRVWVPTGQERYERQVIRRRRQLIGDRVRTQNRIKAELRFYSIDLPAPTGQWTKTYVENLHRLHFNDHWMQESFERLLEEYQFLTDQIQRRTTLLRELADSPDYRERVKILRSVPGIGLIAAMELVLELQDVERFRRADQLAAYVGLTPSQYSSADKVRMGRVTCIGKSSLRATMVEVAWRLIAKDPAMRQKYERIKTRAGSKRAIIAIARMTLLRTRRMHLDHRPYVVGLAA

SEQ ID NO: 246416 - protein, 438 aa, unidentified
MSNKVIFNLDELFISVGIDVGADFSWMSIALPNQQFVGKPYKILHNSIDSLTTAVSKIKEAEELYSLESRIFLESTGIYHYPLFCYLRDKGFNCSVINPIITKNSTNINIRKVHNDRFDSKKAALVGLKPDLKVSLMPSDLALNCRNLCREYYDLMDNRSAYVNKLQGELRMAFPQYLGIFSKVTINTSLTLLETYTSPSAFLKADKQEIIDIIKSTARFGLTYAQNKYNAIIQAATDANQFGYIIDSNIKRIRLYISFIRKDDEEINSILESLHELVDANEDSDFVKQIHLIETFKGAGFLSAVSIMGEIGDFSAFSKPKQLFAYFGLDPAVKQSGKFEGTKVQMSKRGSAIARRVIHTLTLQSISISRNREAKNPVLREYYLKKCDSKPKLVAMGAVSHKVCNMIFAILRDNKPFKIIAPQEHIKQYNSAKCDIAA

SEQ ID NO: 246417 - protein, 347 aa, unidentified
MTYFTGIDVSLRSVSICVVDDRGEVCREAKVDAHVDVIVDWLHAFSPELKSVGFEAGALSQYLTYGLQAAGFEVICLEARQVKNTLDAMRNTTDRNDARGIAQILRTGWYSRVHIKSLHSHRVRALLASRKAILAKCVDLENELRGLLRVFGIRLAPRVGHGSFDAQVRQTFADDEMLSCALVPLLDARTVLYKTYLKLDNAVKALTKADPLCVRLMSIPGVGPVAALTFKSAVDDPARFKSSRNVAAHFGLTPERYQSGETDNPGHISRAGDADVRSALYVAAHSLLTRNAQWSSLKAWGMRLAKTRGHRRAVIAVARKLAVILHHMWVDGSEFRWGSQEPIAVKA

SEQ ID NO: 246418 - protein, 352 aa, unidentified
MNTQRKDWTGQTLYAGIDVHKAKWVITVRTKEIQLKTFVTGADKEALLKSFRHLFTGATIEAVYEAGSFGYHLAEYLNANGIKTIIVAPHTIPTAPGQFVKTDVIDSRKLASELAKSSLSSIYLHHTEDLYDRSLLRKRRQLVKRRVQLQHQIASDLRFFGLESQVDIKSYWSRWLITDLKEMEFSNEYYQEAFRMLVDDYVTVRAQIYTLDRLLVTVANTDKYRKQVELLRTIPGFGRLAALTFLVEIGDIKRFPSAEKFASYLGLTPSEYSSGEHIRKGSLTGMGHTMLRAVLIQIAWQSIRRDPVLLMKFQHLCLGKSKCQAIIPIAKSLANRLRRVLLFNEPYVIGVA

SEQ ID NO: 246419 - protein, 415 aa, unidentified
MTCRSDTGGGTLFFVGVDWAEKHHDICVMDEAGTTLESFRIEHGVKGIERLHAAIADRSEEPGEVVVGIETDRGLLVAALIAARYEIFAINPLSVNRYRDRHSNSGAKSDPGDAKVLADLVRTDRHNHRHVAGDTELAQEVKILARAHQSFIWDRQRQVNRLRSTLREFYPQALEAFGTDLAAWEAVAVLSVAPTPELGKRLSRSKIAGALRRGGRSRRIEASAVKIQQALRAPQPQASAGLSAAFGTVVASLVEQIGSLNARITALGAELQEHFESHPDAEILTSLPGLGVVLGARVLGEFGDDRTRFKDARARKNYAGTSPITKASGTRRVVLARFARNEHLFDACYRWAFCSLTASPGARAHYDRQRAKGKTNSQALRTLANRLVGILDGCLRHRQTYREDVAWEQSLDVAA

SEQ ID NO: 246420 - protein, 362 aa, unidentified
MRIIGCDLHARQQTLAMLDTTTGVVLEATLKHEGDNVREFYSSLPSPVRVGIEATGSMQWFLNLLEELGIECLVGHPAQIRAAEPRKQKNDRRDADLILKLLAENRFPAIWLPSKELQDLRSLLRHRHQWVRMRTRIQNALQSIALANGLRRGTALWSHDGQSRIASLSLAPHTAYRRSELQAMYEKFEVEIEKLNQRVEQQACQRPGARLLMTHPGVGPITALATEVFLGNPARFADSKALASYVGMIPREYSSGGRQRLGGLSKQGNPLLRFLWGEAGAHAARKDPELQRFYRRKLVQKGLGKASVAVARKLGIRLWIMLRDQIEYNEFCRRRQKQQKSSDACAGMPETPYGAKSHRPVD

SEQ ID NO: 246421 - protein, 342 aa, unidentified
MSVYVGIDVHRKRSQVAVINQDGQVLANRNVPNGAEPILKVIGGLPPGTPAAFEAAYGTSWLVELLEDYGFAPHLVHPSRCKAIASARLKNDKVDAAILGQLLRADLLPEAWIAPAPVRQLRALLRHRVALVRLRTRLRNRIHAIVADYGYDRPGGGYWTGPGRAWLASLELPAVSRELVEDYLGVIDALQQRIDRLDWEIRQRARADPRVKVLTQLPGVGPFTALVILAEVGDISRFGSARQLASWAGLTPTVRGSDRVAHCGHISKEGPVWLRWVLCEAAQTAKRSPEFAVTFQRIAKRRGKKIATTAVARKLATRAWHLLADAGHAAAPPPAAPQTAAR

SEQ ID NO: 246422 - protein, 440 aa, unidentified
MNRVIPTNAAITQRKESQMKTWNDITHFAGFDWAKDHHDVLVLDGAGKIVAELRFDHTASGWALCQEKLAQFPQVAIAVEGGHSAAIERLVTLDYRVYPVHPRSSKSYRTRKLPSGTKTDRADCWALADALRLEGESWRVLTAPEPLVQQLRLLCRDEVALIEQRTALVNQLQQALYEYYPAALEAFEDWCAPSAWAFVERFPTPQSLVQAGKRKWQSFLHAQKLFHPEWNQKRMEIFAKADQFCGAEATIAAKSVLAVATVKILQTLEAQLARYRALITERFKQHPDHALFASLPGAGPKLAPRLLGELIALKPLADAPQALQCLAGMAPVSYQSGKVSVVYLRRQCNRFLRATVHLWVDLSRHYCDWARIYYETHRKKGQSHACALRCLGMRWLKIIAAMIRSQKPYDAAIHTRNQLQHGSWVMQLQPVKVVKKNGSD

SEQ ID NO: 246423 - protein, 450 aa, unidentified
MKPDSFQTHSTPTTEPAPLPPILCWVGLDWADQKHCLVVRTRPAGPSQTHYLDQKPEQLEEFFLGLRAQHPQGRIAVAIEQSRGPVLYALMKYDFLALYPVNPRTLADYRRAFKLSGAKADPLDADLLCELVGQHADRLRSLAVEDAATRQLRLLTEARRGFVEERTGLSNQLGATLKGYYPLARELVGEDLTIPMALAFLRRWPNLAKLQTAKPSALRAFFYGHNSRSEEKIAARLEAIKKARPLTEDPALLEPLQLQMQRLVAHLRTVQQTIDQYDERISQVFATHSQAWLFAPLPGAGAALAPRLAAVFGTVQANFEAALDLLCFSGVAPVRKQSGNQEVVHFRYARPLFVHQSLVEFAKCSIGQCAWARLLYEHELKQGKSKWRAIRKLAFKWIRILWRCWTAGQPYDETKYLRSLQRDGVQLYRSLYEALPPLPTPIVNNSQKHV

SEQ ID NO: 246424 - protein, 430 aa, unidentified
MKSNTQNAKIEAITEKTLVLGIDVGSETHYARAFDYRGIEYSKKPFKFSNTEAGFVTFKEWILDLKERHEKDKVVPGMEPTGHYWFNLGKFLQDNEMKPVLVNPHHVKKSKELDDNNPTKNDRKDPKVIAGLVREGRYMIPYLPDGVYADLRTASNIRFQLQVELTRIQNRISRWFNIYFPEYKTVYGKPDAKSGMLILKAAPLPEDILTLGIDGVNQIWRDAKLRAVGKARAKTLIEAAEHSVGSKEGAVSARMEIRMLLEDYESRNIRFQEVMTLIEGLVKQIPMAEKLLEIKGVGIKTVSGFLAEVGDISRFNTPKELQKLAGLALVESSSGKHKGETTISRRGRKRLRYLLFEVAMSLVAKNPEFRELHNYYTTRRLNPLKKMQSLMAIAAKLIRVFYAMLTKGVDYDPKKMVSDIKRPAVYLQAA

SEQ ID NO: 246425 - protein, 360 aa, unidentified
MQKQDNNISFFGQELNLGIDVHKKQWRVTIMCGNKTLKQMSTNPSAGQLADYLKRNYPGSTYKAVYEAGFSGFTACRALNQADVKCIVVHPSDVPVTAKEKQQKTDSIDSKKLARCLTNNELVGIHIPDIQLEIDRALVRQRERIVKDIARIKNRVKSMLFQFGVDVPDQFTVSQTRSWSKRFTTWLLNIDGVTPSMSQVIGNYVQIGMQLRSQLLVLTKQVRALCLEERYANNMRLVTSIPGFGMMTSILFLTQIGDVHRFKNEDQMNSYIGLIPKMHGSGDRMKTGKITNRGRKGMKIDLIEISWKGIEKDPALKMKFDELIKTMTKNKAIIRIARKMLSRFRHVLIHQTEYVNAVIE

SEQ ID NO: 246426 - protein, 321 aa, unidentified
MHTFHLGIDVAKAKLDCALRRPDGKLRSKVVANNLGGFKALIEWLSKQGAVTLHVCLEATGVYWEAVAEVLAAQGITVSVVNPAQIKAFGASRMVRTKTDKVDAQLIAGFCFERHPEPWQAPSPNEQALRAMVLRLEALQTMRTQESNRLEVARDAVKPGIAEHIEWLDKQIDALAKTIRDHINDDPDLKDKQALLDSIPGVGERTIATLLAFYANVERFGNARQAVAFAGLDPRQHESGSSVKGKPRMSKVGHAFLRKALYMPAMVALYKTTWGKRFRERLAAAGKPPKLIIGAMMRKLVHVAFGVLKSGKMFNPALHGG

SEQ ID NO: 246427 - protein, 427 aa, unidentified
MSTLFVGIDVSSKTNAVYAMDFEENKYISSSFGNNQPGADKLVNMIAECMHKHKNLNTILIVLESTSVYSVHISNFLSTSEVLMPYKPYVFCVNPKATSNYRKSYIGMEKTDPTDAYLIADFGRVGRTKKLEPWRGGQFIALKRLTRHRMHLSECITREKTYMVSNLYLKFSELQLLEGDDKPFGSLYGATSSAVLTEFLSPQEIIDMPEEELLTFLAGKSRNRISDLSKTSELLRKAARDSYRLDKCMYEPLSISLASSFNCIHAYQKEIKLIEQAIEKCINGMNPNALLILQSIPGIGPIWASGILSEIGDITVFHSSDALAKYAGLYWPKGDSGDFTSEDNKMSKAGNPYLRCYLGEAANSVRKHIPEYADFYARKYAEVTKHQHKRALALTSRKLVRLVFGLLVKNQLYTGEKLDTEYNIESN

SEQ ID NO: 246428 - protein, 373 aa, unidentified
MEPSPLDVIEAVLGVDTHRDFHVAAVLAMTGRTLGIERFPASVSGYQQLHAWATQLGDIHRAGVESSGNYGAALARYLLSRGIEVLEAPGLGRAARRRRSKSDRGDAEAAARAVLSGRAHSPVKSGSGPAEIARLYLVAKDSAVKAQRQAANQLKATLVTADPTLREELAALSRRALVRACLELSEGDDSTDPVVRATRFTLRVLAERIEQLRAQARVLEGRLSDLVRCHHPRLIDGVGIGPHSAAVLLTAMGDSSDRLRGEASFAALCGASPVEYSSGNRQHRRLNRGGNRQANAALHRIVLSRLRWDARTQAYYERRVMEGKTRREVIRCLKRYVAREVYRLVQEDRRDPEAHTGSATHITAGRDPAVRVT

SEQ ID NO: 246429 - protein, 412 aa, unidentified
MVHARCCGLDVHKDTVVACLLTPGSGGRAQVEVRTFGTLTDELLALGDWLAEVGCTHVAMESTGVYWKPIWNLLEGQFELLLANAQHIKRVPGRKTDVQDAEWIADLLRHGLLTASFVPDRAQRELRELTRYRLALVRERSREVQRVQKTLEGANIKLGSVATDIMGKSGREILAGLAAGRADAAALADLAQGQLRKKLPTLERALVGRFGAHQRFLVARQLAHLDELDGLIAEVSAEIAERVRPFEDAIARLDSIPGVGRTTAEVLVAEIGADMARFPTDAHLASWAALCPGHHESAGKRASGKTRKGNRALRTALVEAAKAARRTRETYLGAQYRRLAARRGPNKAAVAVAHSILVIAYHLLKDGGTYDDLGADFFDRRDQDALERRLVHRLEALGNKVTVEKVAVEKVA

SEQ ID NO: 246430 - protein, 372 aa, unidentified
MSKYSTAFGMDVHLRSTTVCALDADTGEAVTRRFPGNPWGEIAGWMDGFPGPSLAAYESGYLGFAPQRELAGLGVECVVAAVSKIPRSAADSASKNDRNDAARMAKAILAHDISPVWIPSPEVEGIRDLAGAYDGATARLATAKQRLLAFLAKRGFVYGGTTPAGNPRKYWTYDFLRWLDKVRPEDDGGVRTLAALRNEVEAAAEARADLLSEYRAAVDASPIAAEVAALQSIKGCAFALAAAFSAEVGDFTRFRSGRQVTAYFGLAPSQRSSGDSVRLGGISGAGNALVRKLAVEGSWCYAAARHQPKLMPRDTGVPLEIRMHGRKGSERLLRRKEMLARGVPAAKANAATAAELVRWLWALGMMCREGAE

SEQ ID NO: 246431 - protein, 310 aa, unidentified
MATRSEAYVGIDVSKARLDVAELGGGVWQADNAPKGIAHLVKQMADLHPELIVVEATGGYQRAVVEALFRAGLSVAVVNPARVRQFARACGLLAKTDKLDAQVLAVFGQRVQPKPYTGKSEAEKQLSALLVRRKQVEEMLKAEQNRLRTVSPSLRGSVERIIAILKEEKKRLDEQIRDFLKEQKAWQEQTQILSSAPGVGPITTATLLADLPELGKMDRKKIAALVGVAPMNYDSGKKRGYRKTKGGRTEVRSVLYMSTLVATRYNPVIQTQYQHLLKRGKEKKVALTACMRKFLTILNAMMRDQQPFRA

SEQ ID NO: 246432 - protein, 403 aa, unidentified
MRIETQLNDHPTATAAETATLLISFELSQSKWVLTMQRPHSSKLSRFTVPARDTAKVLSLLTTQRQQAERRCGQPVKIVSIYEAGLDGFWLHRWLEAQGVESHVVDPASILGPQRKRNAKTDRIDGVKLVRSLASWLGGDRQACSMVVPPSVAQEDLRRLSRERGELVDERTRLSNRIGGLLANQGIAGFKPLKKGARQALDALRTGDGRELAPHLRTAIERILQRLELLGEQIKAAEVERDALLRVAPADAVQADAAPAAAKSASPDAAIGQSLLRLRGIGPEFATVLPMECLYRRFDNRRQVAAFTGLAPTPWSSGSVEREQGISKAGNRRLRKTLIEAAWSWQRHQPRSALTQWFHNRVKGQGKRERRIAIVALARKLIVALWRYVNDGVVPEGAALKAA

SEQ ID NO: 246433 - protein, 375 aa, unidentified
MMKHSEVFVSFDTSKLRNAIAIAEGDRAGEVRFLGEIENTPAATTKLVRKLEAKYERITFCYEAGPTGYELQRHIHGLGHQCIVAAPSLIPKKPGDRVKTNRRDAVSLVKLLRAGELTGVWVPDPRHEAMRDLTRAREAAVIDLRAKRQRVSALLLRQGRSYPADKKTWTKVHMNWLASQRFEQPELGVVFEEMMFAIHQAQERIERLEQALRTAVPEWSLAEVVTAFMAFRGIDLVSATCLLAELGDLTRFPTAPEVMGYLGLGCSEGSTGDRIKRGGITKSGNRRARRTLVECAWSYQHPPRVGIAKQAKVAAAPAKVREIAWKAQCRLNRRYRVLLRRGKLKTVAITAVARELAGFLWAAARELSSPERVAK

SEQ ID NO: 246434 - protein, 331 aa, unidentified
MVYAGIDVHRKRSQVAVLDEAGTELVNRNVDNGSEAMIDILEELEVGTPVAFEAAYGWGWLADLVERYELEPHLVHPSACKAIAAARLKNDKVDARMLAHLLRTDLLPEAWLAPKEVRDLRSLLRHRAALVRMRTALKNRIHAVLADEGLKAEGEALWSDIGHQWLVRVPLRVKHREIVDDCCGMLDALAIPIGRLEAEIHSLAKADPRVDALCQLPGVGILTAMTLVAEIGDIARFPTARKLCAWAGLTPTVRNSDTKVHHGHITKAGPAAVRWILTEASYQARRFPPFSATFEATTKRRGKRIAGVAVSRKLLARSFHVLKSLEEAPIQ

SEQ ID NO: 246435 - protein, 316 aa, unidentified
MAESVVETFVGVDVSKSTLDVCIDSPSEMLHVEYDDQGLKAICTRLKALAPTLIVMEATGGLEMRLACELSALGLNVAVINPRQARDFAKATGQLAKTDRVDAAMLAAFAKAIRPPVRPLKDEQTRELDDMVSRRRQLIANRVQETLRLNTAASKPLQKSVKAHITWLDKRIAELDEDLSHRLKASDVWRTKDDLLRGIPGVGAVTTLTMLAKCPELGTLNRREIAALTGVAPLANDSGKHHGKRSVWGGRADVRAVLYMATLSAKRSNPALKAFADRLKQAGKPAKVIIVACMRKLLTIMNAMLKNNEPWRSKMT

SEQ ID NO: 246436 - protein, 357 aa, unidentified
MGKSIQNLSTVTRVGLDLAKRVFQVHAVEAKGEIVVVRKLTRSQLIPFFAELPPCVVAMEACSSAHHWGRALIELGHEVRLIPPAHVKPYVRRNKSDQVDAAAIYEAMSRPGQRFVPVRSIDNQAELMRHRARELLAGQRTAALNALRGHLAEIGLIAPQGAQHAYGLKRMAVDGFNENGEIVVPDCVRGALRSLVGQIDGLDEAIGAIDRELAASVKADETAKRLMTIPGVGPVTASAIMATIQDAGAFASGREFAAFLGLTPRQNSTGGKTRLGRITKMGDRYLRKLLVVGACATLRHRRGHSDALRLWASGMLERKTVKYKFNLTAVALANKVARIVFVLVTRGGQYDGRPVAA

SEQ ID NO: 246437 - protein, 359 aa, unidentified
MLYLGIDQHRKQLTVCVRNEEGDVTLRRQVSTEWPRVRAFFAGISEEAGGEGFVVILEVCGFNHWLVQLLDEHDCRELIVVQPEKRSKKKTDRRDAGALCEILWVNRQRLIAGKPVQGVRRIHLPNEEDADARQVTELRKRLGQLRTRTVNRIKHVLRKHNLEQECPTKGLDTIRGRKWLAKVTLGPMDRLEMDLLLKQWAMWDEQIERLAAEIRKRQAKHADAAIVATIPGCAAYSSLALASRIGQIKRFPHPGSLANYWGLTPGCRNSGEATGRLGSITKQGSATARFILGQLVLHVLQRDPAMKAWYGRIKRRRGSKVARVAVMRRLATIVWHMVKYRQPYVIGGPPSGRLRSASR

SEQ ID NO: 246438 - protein, 343 aa, unidentified
MQAVTTIGLDIAKSVFQVHGVDAAGQVLIRRQLKRRAVLAFFEKLPVCLVGIEACASSHYWSRELQALGHSVRLMPPAYVKPYVKRQKNDMADAEAICEAVARANMRFVPTKTPEQQSCLMLHRTRHLFIRQQTAVINSIRAHLAEFGIVAPVGRKGVTELLHIVADPSDKRVPEVARACLAALGNQLLSLKEQIVKFDRMIMVWHRSNETSKRLHYIPGVGPMLATALVASVADPRTFRSGRNFSAWIGLVPKQHSSGGKDRLGSISKQGERYLRSLFVAGALAVIRYAKIHGTKHRPWLTALLARRPTKVAAIALANKLARMAWAMMAKGERYRQPVALAA

SEQ ID NO: 246439 - protein, 322 aa, unidentified
MSQPNPLCVGIDVSKATLDIAASSDVAQFTVSNDSDGFDAVITGLRRHSVALVLMEATGGLEVAVACSLQAEGFEVAVVNPRQARDFARAMGYLAKTDRIDARVLAQMAEVINRHPERKRFIRALPDAERQALAAMVVRRRQLIAMLVAERNRLHPSHPQNKKSINTIIKALEDELVRLEKEMDSHIRNHFKEIAERLSSIKGVGTMTVSAMLAEIPELGTLSRREISALIGVAPVNRDSGTMRGRRTIFGGRAGVRSALYMAALVATRFNPVIKTFYVRLLAAGKAKKVALVACMRKLLTILNAMLRKNEEWDESYHHVAP

SEQ ID NO: 246440 - protein, 316 aa, unidentified
MSATPWFVGIDVAKAQLDIALRPTGERWAVANDDVGIAALVERLQAVPPTLIVLEATGGYQRAVVAALAAAGLPVAVVNPRQARDFAKATGQLAKTDALDARALAHFAEAVRPTPRPLPDAQADELRALLARRRQLVAMRTAEQNRLGSAPPRLQTDIQAHITWLNTRLAALDDDLDTTLRASPVWRERDELLRSVPGIGPVCTRTLLLDLPELGTLSRQRLAALVGVAPLNRDSGTLRGSRTIWGGRAHVRATLYMSTLVAVRYNPVLKVFYERLRAAGKTAKVALTACMRKLLTILNAMVKHHTPWQPQEALGA

SEQ ID NO: 246441 - protein, 442 aa, unidentified
MIRAEIERCAGIDVGKERLSVSVMVGPLAGEPRVEYREFGTITAELEGLRQWLQAEGVSHVVMESTGSYWKPVFNVLEDSVRVYLANPQDVKNRKGHKTDKKDSWWLAHLLRHAMIRPSFVPSRGLRELRDLTRRRGKMIGVGTSERNRVDKMLQDANVKLSSALSDIFGVSGQLMLEALLEGKAQPAEIAQFAKNRAQRKIPQIVAALEGHRMSDHHRQMIRYSLEHLRFLEQHILDLDEQIVAKIEALGYTPQWKLLQTVPGMRENSAASVLAEIGPDMGQFGSEKKLSSWAGVCPGNNRTAGKNLGSKTTKGNRWLRAALTECAWGVSNRKNCFLKEKFWRLATKKHRKPPATMAIAHTLLVLCYQVLKSGKPYQERGMPPMDQTQRDRLICHHVRRLGKLGIRVRSLTLPEDSKKAKPKKVPADSGKPKTKKARAKKN

SEQ ID NO: 246442 - protein, 323 aa, unidentified
MELKRIAIDTSKHVFTIHGIDVNDRPVLRQELRRGRVETFIAKLPPTDVVLEACAGSHHWGRIFERLGHRVSLIPPQYVKPFVKRGKNDRNDAEAISEAASRPTMRFVPVKGVEDQAAMLVVKHRQMLVAQRTQAINALRGHASEFGIVVAKGGQHVATLLTLLDENAAIPVVARAMFGEIGQHIADLDDKTAALDKQLLEQHKANPVSRLLAEIPSVGPITAITMALTVNPADFGSARHFAAWLGLTPREHSTGGKRRLGRISKAGNERLRQLLVVGATAVIRYARPGSKSASGWLLQLLDRNRLRSRRWLWPTRWPGSSGP

SEQ ID NO: 246443 - protein, 361 aa, unidentified
MADSITWVGLDVHKESIIAAVVGSDGSLLGRFETTNSPKGKDRLIARMKTFPGVQCAYEAGPCGYDLKRFLEQESVPCEVIAPSLIPRRPGDRIKTDRRDAEKIARMHRMGELVPIHVPTPRQEALRDLLRAREDASEDLLRKRHRLTKFFLRQGRRFEGKSWTREHWRWIRAQVFDDTNAADVLVEYILAVDQEVERVARFDQRIEEASKDPEIAPVVSRLTALRGIRTLTAVTLVAELVDLRRFSSPRDLMSFAGLVPGERSSGGKVRRTGITKTGNAHLRRVLVEAAWHYRHPTQKTGETIRKRREGQPPEVLETVRKADIRLHRKFFRLVTKGKRSTVAAVAVARELVGFVWAVGKA

SEQ ID NO: 246444 - protein, 424 aa, unidentified
MSQRTLTERVTMVKRGMLLVGIDLGRDDNVAVVLTDTAQRLARFKFPHTRAGYDFFYRQLEQLRAQHPGQGLLIGMEPTNHYWKWLAADLEAHQPPLPYRLVNAYTVRKHREGEQLERAKDDLRDAFQIAELLRTGKFTETQLLQGAYAQLRQYATLHMRLQHDAAQLQNVLTTAVDLGFPELRQVFKDLSGETALALLRTASCASTIRELPLSEFLAQVREQLQGHRLSVSKLKQAHALAQTSVGLVDTGALHFTIQVYSEQLAHAHESLKRTETALVELFLTLPEAPYLLSLPAISPLFAALLLAELGDPRDFSCASQWVKLAGVQPVADSSGHRTRSPTPMSHKGRSRLRELLYWLVLRWVQHDPYFKAEYERLQTRPQHPLTKMEALGALMNKALHVIWAVLRDRTFYDPQYRQAGAGAL

SEQ ID NO: 246445 - protein, 395 aa, unidentified
MRKDVTIYVGIDFSKEKFNACLLMEAGIMGESEFPNTKAGYLKLLRWVRKTSELGCLFDVTSVLFCGEHTGTCSIGLCEYLYSAKMKVWLETPLKIKYGSGLNRVKDDKADAEMIAYYAKRFYEPDSCELFEPDSEDLKSLRSLYQFRNRVVSDRVAMGNRILSGAFDCSPLVKARMKKHHKAALEDEKEIEREMVKIMESSPELASNYRILVSFKGIGPITAAALIIYTSNFKKFNSPRKFACYCGIAPFGKQSGTSINTKPHVSRFAHIGIKAALVQACKSAIQHNPVIKEYARKLYGKGKHEGVVMNNVKNKVIHIIFKMIQTQTCWNPNYQEAHMNKKEENLKEHEKGATKVTPFIDDYSNILPPNQAECAFMEENIFFQEKSPLFICIKT

SEQ ID NO: 246446 - protein, 317 aa, unidentified
MAEVVVGVDVAKARLDVGVHPSGESWAVGHDEAGVAALVERLAGEGPTLVVVEATGGLELGLVGALVAAGVPVRVVNPRQVRDFAKATGHLAKTDRLDALVLARFGAALRPEPRPIPDAALQEVRALVARRRQLRGMLSAETNRRASAPRRLHAQLDEHLRWLKRAVADLDKDLGRTIRGTPAWRASVARWTSVPGVGPVVSATLLADLPELGALTRQQVAALVGVAPLNRDSGARRGTRACWGGRAHVRTTLYMGALVATRCNPAIGAYYRRLLAAGKPKKLALIACARKLLTILNAMTRRGTAWRPGPAAPAVAA

SEQ ID NO: 246447 - protein, 385 aa, unidentified
MDVLMECCCGLDVHKDMVEGCIIQGDLENPSIYRSQFQTDQISLSALVQWLTEHQCYHIAMESTGVYWRTIYEAIEEHSPRWDCLMVVNAKHMRNLPGRKSDVKDAEWIATLFRHGLLENSFVPPKDERNIREFSRLHRSLVSEKNRCANQLEKFLQIHGFKLSTALNDIHSVTGRKLLDTLAEQGYLSEGDVLRCAGHRLKKPLSEICACVCSTLNSAGQRMLQILLRRLDEVRANIALVDEEMLALAEPYQRQVEILDSIPGVDKLSAVTILGEIGMQPQQYFPTAECLTSWAGLVPRNDESAGKVKSRKILPGNPYVKCILCQVSWVSVRTRKSHYHDWFWCRQGRLGRKKAIVAVSRKILKLIYFLLSTNQLYDLSLAKAV

SEQ ID NO: 246448 - protein, 353 aa, unidentified
MKCDKYMGMDVHQAMTVVVVLDADGKVILETMVPTEAAAIIRLVQSLSGPLRVTFEESTQAAWLYEVIRAYVTEVIVCDPRRNKLLEDGSKADKVDARKLAELLRAGLLRSVYHGHEATRNLKELVRAYETLSIDTQRTMARIKAIYRARGIRTPGRGVYQPKQRERWLELLTDAGIRQRATWLYEQLDQLQPLRRKAKQAMLAESRRHRAVSLLRTIPQMGPIRCAFIVATVDTPHRFRTKRQFWSYVGLAVVTHMSSEYEMTAGRVVRRRKPVATRGLNHNCNRRLKEVFISAATGGSLHEPYKPFLERLKQNGMRAEMARLTLARKIAAVALIVWKKGVAFDSTKLNWTT

SEQ ID NO: 246449 - protein, 343 aa, unidentified
MKLTRVGVDLAKQVFQVHGVDRAERPAWCKRLKRARWIADLERDVEPGVEIGMEACGSAHHWARLLQSKGYRVKLIAPQFVKPYVKTNKTDANDAEAICEAMSRPSMRFVAVKTVEQQDLQAVHRVRSSLIRERTAKANQLRGLVYEYGLVAPREISSLRRAVPQWLEDAENGLTVRFRSLLAGLYGDLKQLDERVRELDKEVAAITREHEPVRRLMQINGVGPLIASALYALVGDARQYRNGRDLAVALGLTPRQHSSGGKEKLLGISKRGDKYVRTLLIHGARSALRTAPGRTDRISRWALALAERSHPNVAVTALANKTARVAWAMLRHGANYEPERVAA

SEQ ID NO: 246450 - protein, 371 aa, unidentified
MGERITFVGLDVHKATIAVCVAEAGRDGEVRFVGEIPNEPAALDKLLARVGRGGRTLRFAYEAGPCGYGVYRHLRDRGHDCVVVAPSLIPRKPGERIKTDRRDATALARLHRAGELTPVWVPDPEHEAMRDLVRARADMVEALRKARQRLMGFLLRHGRSYDAKRWTWPHRKWLMEQTFPHPAQQVACQEYLDAVNELEARIERLTGRIRDLVPCWSMAPVVEALQAMRGVSLIVASALVAEVGDFGRFNNPRQLMAYLGLVPSEHSSGAKRRQGAITKAGSPLARRMLVEGAWTYRLPARVSAQMKARLAGLPREVRETAWKGQVRLCARYRRLQAAGKRPQVVVTAIAREMVGFAWAIARMVMPTAIAA

SEQ ID NO: 246451 - protein, 479 aa, unidentified
MTPSKDAFPEPCPPVPTVPEPLVLRPSSSLPLSNPHAAGIDIGEAEHWVAVPPDRSPEPVRRFGTFTVDLDVLADWLLDCGVTTVAMESTGVYWIPFFELLEARGVQVFLIDPRQAKRAPGRPKTDRLDCQWLQRLHAYGLLAAAFRPADQVCVLRSYLRHRQMLLTYGAHHIQHRHKALQQMHLKLSQVVSDLTGVTGMAILHAIIAGERDPLTLAQLRNPHCQHREDEIAKALQGTWRAEHLFALQQAIALYHFSHQQLTVCDQQLHAHLGTFADTSDGQPLPPKPRRHKKANEPRFDARTPLYRLAGVDLTTIEGIEEGTALVILSEIGTDMSRWPSVKHFCSWLGLSPQHKISGGKVLSRHVRPGAHRVAVALRLAARTVQQARTALGAFYRRMRSRLGAPKAITATAHKLARLVYSLLKHGSAYVKQGLEAYESQYRERTVKAVARQAKALGYTLVALAVPATPGNDAVAPATP

SEQ ID NO: 246452 - protein, 343 aa, unidentified
MELYVGMDVSLKETSICVVDGKGEIVSEGTVISEPWAIAAFIKAKAGSALRIGLETGPTTTWLWHELRALGLPVICIDARHAKAALSLQINKSDRNDAVGLARIMQCGWYKEVQVKSVSCHEIRAVLNARAQLVKVKRDLENQIRGLLKNLGLVIGKAGGTVFRRRVEELLGRHGLLWEAVRPLLEVREKVRREIATLYRKLLDLARNDADSRRSMTVPGIGPINALAFCAAIDEPARFRRSRSVGAYFGLTPRRYASGEVDWTGRISKCGDAMVRTYLFEAAGVLLTRVPQWCKLKAWGHRLWKRIGFKKAKIAVARKLAVILHRMWRDGSDFIWSTKKAAA

SEQ ID NO: 246453 - protein, 316 aa, unidentified
MTQISTTAGIDTSKAKLDVAVHGRAERWQVENTATGWRHLAAALGKAGVTRVGIEASGGYERGVVGHLREKGLTVLILQPIQVKAYARMHLRRAKNDKLDAVLIAACAASIGQPRLAPDVRLAKLADHLTYVEQIEEDIARFKVRLEHVDDPRLRRLVVTDIARLKARRAAELLRIVTALRAHDDLARRLALVLSVPGLGERTALALIIRMPELGRLSREEAAALAGLAPYDDDSGKHKGQRFIAGGRGRLRRALFAAALPAAFRWNKALIALYQRLTGRGKAHKVALIACARKLLIYANTVVQRGSPWIEKPAAA

SEQ ID NO: 246454 - protein, 426 aa, unidentified
MSAANQSSQEPIAAFVGIDWADEKHDIALRATEPEAKVERTKIANQPEALSDWVLALRERFKQGKILICLEQSRGALMHFLMGYDCFELYPINPTQLENYRKAFKPSGAKDDPTDGELLCKYLSLHHQELRPWRPNDKQTRKLALLCEKRRQAVDARSALSNQLKSELKQYYPLALAVLDNDLTTVLAADFLLKWPNFASLKKASAHKLRGFFYGHQCRSEQKIEARIQRIQSAQPLTRDSAIIEAGTLTTQMLARQLQALAPFIRQYDQQIAELFSQHPDRALFDNLPGAGDALGPRLLSAFGSEHDRFDNVLEPLSFFGIAPVTERSGKTTFVHFRWACSKFLRQTFHEFAGCSVHFCAWAKAFYDQQRARGKDHHAAVRALAYKWIRILFRCWKTRQPYDPQRYLAALAQHGSPLARAVNNSP

SEQ ID NO: 246455 - protein, 329 aa, unidentified
MATTNTIGVDLAKNVIQSSIVSTSGIELQNTELTRTKFAEFLAKQKPSLVAFEACATAHYWARYAQAQGHRTKIIPAKAVTPFRQGHKTDKNDALAVAEAANRPNIKEAPLKTIEQQGIQAIQRSRELLVQERTSLSNHIRGLLLEFGVVIPKGFAALNYRIPFVLEDAENGVPHIYRPTLHRMFNRYLKLREDIDFLNEQVKQIVKQNDGCNRLTAIEGVGPISAVLLFSTLGTGEAFKNGREYSAYIGLTPKQYSSGGRANMIGISKHVANHRLRSVLIQGARAYVHKLKEPKTPKQRWLWELIQRAGYGKAAVALANKNVVRHGHC

SEQ ID NO: 246456 - protein, 351 aa, unidentified
MEARRLARNLARVTAGGRRCRIDGRRRVLLERTCVGLDVHARSVVGCAIDAEAGEIRTLRLPGKTEQIVEWVTSLPGPVAVTYEAGPTGFGLARALGSLGLRCEVVAPSKLERPPGDKVKTDRRDAERLARLLRIGELPAVRVPSEAEEAARDLVRAREDARGDLMRTASGLEAAAAPRPGVGPQRLDRRARAVAARAPLRASRGGAGLRRGLDAVLATHARRDRLDVAIAEMALEPEFAGPVGRLCCLRDVSTLTAVGLCVEVADWRRFTGSTIGAYLGLVPAEYSSATRRAQGSITKAGNGHARRLLVESAWHHRRPLRPSRARTRRADAQPPMVRERAEAGNRRLHQR

SEQ ID NO: 246457 - protein, 375 aa, unidentified
MRELIRIGMDTSKRVFQLHGVDEAEQPVLRKKLRRQQVIGFFEKLPRTRIGIEACGAAHHWARELGALEHEVVLLPPQHVKPYVMRNKNDAADAEAICEAMSRPRMRFVPVKSAEQQAALMLAGVRDQLVARRTQLSNMIRGHAAEFGLVAAKGHAKVEPLLARIAADAKLPELAKQLFATLGEDYAQVSARLRRSEVQLLAWHRGNELSRRLAEIPSIGPVGAALMAMKVTDPRAFRSSRDFSAWVGLTPKDHSTAGKTRLGVITRAGDEALRRTLVVGATAVIQQVNKGRGHASPWLSALIKRKPPKLAAVALANKTARIAWKLMVSGEHYNPAAAVRAGRRAPLAAGFAARPARTARVISRSPIAPAERTDA

SEQ ID NO: 246458 - protein, 351 aa, unidentified
MGKIITDFSSVTTVGLDLAKHVFQVHCVDASGRVVVAKSVRRNKLLEFFASLPPCLVGLEACGSGHHWARELVKLGHDARLMPPAYVKAYVRRQKNDAADAAAICEAVSRPSMRFVPLRSLENQAALMHHRVREMLVAQRTQVLNAVRGHLAEIGVIAAQGPKNARDLAKLIATDEDTLPYLVRAALAPLVRQLDRLDEDIGLADDAIKAMAKADESARRLMSIPGIGPVTASAIAASVQDVSSFSGSREFSAYLGLTPRQNSSGGKERLGRVSKMGNRYLRKLLVVGAHAVLYNRKGHDDALRTWASKLMETKPFKLVAVALANKLARIAFAVMRDQTPYSAKPFSPAQA

SEQ ID NO: 246459 - protein, 482 aa, unidentified
MKKKNIYVHQSQELLGLFEQAGNAAKTMCVPIDYAKKDHVVMFCNGHGDILRKPFSIQNTPEGVQHLVEKVSCSCQHHKIKLEHVFFGGEDGGSYAENFAETLRAKGCLVAGVNAHDAKKQRENLQASTDRLDLMGIARMLLNRRGTCCPAQSGVYRNLRNLVRHRRKLVVMTTEVRNRIHTIVDRLLPGFLSERKSGIAPFSKSSLWLMENRFSALQIRHRRRNALIEALRRNGTPKPDQAASNLQKYAARVLNTPSEYIETLQLSLSQHIKHYRCLQENAGQVEKEIAVWLAQTQGAFLTSIRGIGIILAAGVTAEIGDPNMQKPLNNLTSYAGIVPRIKQSGGSEGQVYTGKVGKRCNRILKDYVVQSASHMGLHGPDELMADYKRRDVAGQHADFGIARRYLRIGMCLMKTSQVYIPSRLRKNNVKPEERAGYYLMSWPYWRDKWHKAGALNAAFEATRPLGQWRNMVQRLYDIKLTL

SEQ ID NO: 246460 - protein, 350 aa, unidentified
MSMLAELVEVVIGVDTHSQTHTAAVLDARTGAVLAGVTTTADPDGYAELVALAEAHSGLRAWAMEGTGGYGAGLARHLADAGELVVELDRPKRPARRAGAKSDPIDAERAARDALARTRLAQPKTGPERGALQMRLTARCAAVEAATAAQRQLLAMVITAPETVRARFRGQTTRAMITTAAALRPTVSSGDVEVITALTVLRDLARRIRFLEAEALGHEKAIRALVRSWRPDLLELDGVGPIVAATALAAWSHPGRCRDDAAFAMLGGAAPIPASSGKTVRHRLNRAGDRQLNRALHTVALSRLQHDERTRAYADRRRAEGKTDREIKRCLKRYIARELYRRLESPHSTA

SEQ ID NO: 246461 - protein, 450 aa, unidentified
MPQGRQVEVEEQEELLARVAAIDVAKASGMVCTRVPHQAKAGARVTTVWDVAATTSAIMELADRLVCQGIQRVVVESTSDYWRPFVYLLQAHGLLVWLVNARDVKQVPGRPKTDKLDAVWLAKLNERGMLRPSFIPPEEIRRLRDLTRLRVDLTEERSRHKQRLEKLLEDALIKLGTVATDIFGVSGRAMLEALIAGQRDPKVLAELARGRLRVKRAALVEALTGQFSDHHARLARILLDQIDGLAAQLDQLTTLIEEAIAAIPAAHPPADGPEVGPTVGAGAPAQGPLPAMQRLDEVPGIGPKAAQVIIAELGLDMGQFPTPGHLVSWAKIAPQTIQSGAKHRAGPTGKGNPYLRGTLGEVAAAAAKTDTFLGERYRRLVRRRGKLKALVAIARSILVIVWHLLADPTARFRDLGADYHTSRIDTGRKTRSLVRQLEALGHTVSLQPAA

SEQ ID NO: 246462 - protein, 423 aa, unidentified
MKVTFLTCCGVDVHKSFLVATIIKTTGGIDPSYLKKRFSTFNNSILEFKQWLLDNDCHDVCMESTGKYWIPVFNLLEDEINVTIANPKWVKAVKGNKDDTKDSKWIGDLFRLGLVKGSYVPCKAIRILREYTRYRYKLVSCRSSEKNRYQNALTVCNVALDSVVSDIFGKSSTSIIDYLLEQPGTSVNHEEIASKLLKSLKSKEDAVIESIEGYQMTDAQKYRMRLIRTHMDYITAEINDIDSSIEKMISSNPDYENAVWLLCTIPGVKRDSAIAIISEIGTDMTQFCNSKRLCCWAGLTPGCNETGGKKKSVRIMRAGVYLKPALVQCAHAAVKSSKSPYYKKKYESLVKRRGKKRAIIAIARMILTAIYQMLSTGEQWNPCDLYKVDMPAPLIEKQKTKAIKQAKKLLLREGIISESQLVS

SEQ ID NO: 246463 - protein, 326 aa, unidentified
MSRIQGKTSSSQLTTSQVYVGIDVSKSHLDVYVHPIGTARRVTNDKNGLASLVKLLRPHVPEMVVLEATGRYHRLCHRHLHDAGFNVAVMNPYRTRKFSDVLGQLAKTDEIDAKMLAQFGATIQPEKTAPPTPAIAALNELLTARRQVGAEKTALQNHLHDVTSSLVKQQIRARLKMCERHQAALEKEIRAAINEHKELKCRFDILTSIPGVALITAATLLAELDELGAANASQIAALVGVAPMNCDSGVWRGQRRIRGGRQNVRNALYMAALAASRACPDIALFYNRLRNNGKPFKVAITAVMRKLAILANTLVTENRKWELNRP

SEQ ID NO: 246464 - protein, 374 aa, unidentified
MKQVTFNQVVSRGCGLDVHKKVVVATIDGEGIQKVTKEFGTFTSSLTELRDWLLEHGITHVAMESTGVYWKPVYHILEPTGMKVWIVNARHVKYVPGHKTDKKDSSWLCKLLLAGLLKPSYIPPREQRELRDLTRYRKKLIESVAANKNRINRILEDCNVKLSSVMSHTSGVVAIKLINKMIDGMQITMEDIDHVYHHKLHASKEELFEACNGYITDHHVFMLQTIRDNIDSTETDISKIDIRIKDMLSSYDNVLELLKEVPGLNTKNVEDLVAEIGLDMSVFPNEKHLCSWVGIAPSNNESAGKKKRTDNTWQQTGQGCDCRSGMGGNKNKKYVLQREVSPVGSKTRQKESFDSRRTFDPEVCLPHTEQHGIL

SEQ ID NO: 246465 - protein, 331 aa, unidentified
MKNYQLAVGIDVSKKTLDVFLHNHSKHRVFDNTRSGYISLIKWVGKFSENEKSILYCFEHTGNYSLKLAIFMQTNGLDYVQENPIVIKRSSGLVRTKSDRVDAQMIARYAWLHREELECSSIRDEALLELGRLLSLRDQLVRNRTGLMGTLEELTGFLSSPSTDVSCKSLKHTIAYLSKQILKLEKQIDQLLKREQDLGKNYKLLTSLKGVGRILACQLIYHTCNFERFSSWRQFSSYCGTAPFEHSSGTSVFKRAKGHPMSDRKMKSLLSMASVSAIQHDGELREYYQRKVAEGKPKMVALNNVRNKLLSRVFAVIKRQTPYVDLCKYAA

SEQ ID NO: 246466 - protein, 430 aa, unidentified
MTEHDHAAPLPPFAALVGIDWADRKHDVCLLDVDTGRREHLVLAHTPEAIDDWACQLRSRFGGRPVAVCLEQSKGALVYALLKYDFLVLFPLNPARLKSYRQAVSSSGAKDDPTDAQFLLEYLECHRAHLVAWRPDDARTRQLGLIGEERRKAVDLRTRLGNRLRTCLKNYFPQALDLVGEGLHTRMACDFLLKWPTLAVAQKATPKTLRRFYHSHNSRQEGLIDRRIEALRAARPLTTDTALVQSYRLTATLLARQLLELAGAIEAYDKELARLMAEHPDAALFEGLPGAGAALAPRLLVAFGSDRQRFAGSGDVQTYSGIAPVTRRSGRSSSVHRRTACPRFLRQTFHEFAGHSVPRSAWAGAYYRQQRARGRGHHAAVRSLAFKWIRVIYRCWKERTPYDEETYLASLRRRGSPLLAYLPAPSPAKS

SEQ ID NO: 246467 - protein, 422 aa, unidentified
MFSESQDDEQIIERVAALDIGKAEVVCCVRLPSPGPGKRRVQEVTTHTTMTRSLTELANRLVGLGVERVVMEATSDYWRPPFYLFEAHGLQPWLVNAKDVKHLPGRPKTDVLDAVWLCKVAERQMLRPSFVPPHEIRRLRDLTRYRVDLVGARGAEKNRVEKLLEDACIKLSVVASDIFGVSGRAMLTAMIAGERDPKVLADMARSRMRPKIGQLEEAFTGYFDDHHRFLLARMLGRIDAIDADIDALDTEIEAYLAPFGEAATRLDEIPGIGPVAAAIIIAEIGVDMTRFPTPGHLASWAKFAPGIRASAGKNKGNGSTGHGNRYLARVLGEAAVAASRTDTFLGARYRRIARRRGKKKAIVAVGRSLLVAIWHVLSHPETRFVDLGADHFDRHVDTATKKRNHIRQLEALGYRVTVEPAA

SEQ ID NO: 246468 - protein, 348 aa, unidentified
MKNNTPKRAVKVLGIDLAKKSFQLHGVDKHGHVVLTKKLTRAKLKAFVAQMPVCLIGIEACGGANYWKRVFESYGHTVKMMAPQFVKPYVKSNKNDAIDAEAICEAVQRPSMRFVPSKNIEQQDIQSLHRIRSQVVARRTAQANQIRGLLMEYGIIIPKGIAYVRKEIPGILEDADNELTGLFRSLLRELYDEMVHLDERLEKLEDELKIICRDNVHCQRLLTIPGVGLLSATALVAAIGDISTFKSGRELAAWLGLVPRQHSTGGKPTLLGISKRGDSYLRTLLIHGGRAVVRVSGKYLDKRSQWISDLEKRRGNNITAVAVANKNARIAWALLTNQTSYQASVIKG

SEQ ID NO: 246469 - protein, 355 aa, unidentified
MKYYTSTTEYNCGIDLHARQMYVCVMDRQGKKLVHTNVKDNDFAFFLKLVQPYRHDLTVCCECMFGWYWLADACQAAGLQFVLAHALYVKAIHGGKNKNDRIDSEKLTHLLRSNLIPPAYVYPAQKRPLRALLRQRIFYVWRRAELLARIHSHQLAHNRIPAKQTRRVRDPWEEQLLAAEDHPLRQLALKNDLAMIRHFDHQILQVEEELQRQTKQVSCREYALLQTVPGIGETLGLTLLYEIGEIERFPTVKDFLSYCRLVKGTVASAGKIKGLRGAKLGNPYLRWTFGEAAVIAKRDHFRIRPLAQQLEARMEGNKFKANTVVAIKLARAVYFMLKNKTVFEPERLVAALARN

SEQ ID NO: 246470 - protein, 422 aa, unidentified
MLEETQDDQEIIARIAALDIGKAELVCCVRLPGQGGSSRRVQEVTTYSTMTRSLQVMADRLMDLGVTRVVMEATSDYWKPPFYLLEAHGFEVWLVNARDVKHLPGRPKTDRLDAVWLAKVAERQMIRASFVPPVPIRRLRDLTRYRAALVADRTAEKNRVEKLLEDAQIKLSVVASDIFGVSGRAMMAALISGQRDPKVLADMARSRMRTKIPQLQEAFVGHFTDHHSFLLSAMLARIDQTSADITDLDTRIDEQIAPFAEAVTHLDAIPGVGVTAAHVIIAEIGVDMTRFPTSGHLTSWARFAPGIKESAGRKKGTGATGHGNRYLARVLGEAAVAASKTDTFLGERYRRIARRRGKKRAIVAVGRSILTIIWHLLSDPTTEFVDLGPGFYDNRMGTERAKRNHIRHLEALGYTVTLQPAA

SEQ ID NO: 246471 - protein, 401 aa, unidentified
MFYVGIDWADAQHRVSIIDSQGVEKANFTIPHTREGLECLKEKLLKIAQNPQSIACIIETKHGLLIQFLLEQGFAVYPVNPKVVDRRRKPSGAKSDPIDARILAELGRTDIKRLRQLKPDSELIQELKTLTRDLNTLIRESTRLTNRLIACLKEYFPVALELFTKPTLPVTLDFLKLYPTLEAAQQASVPELAAFLKSHKHPKPNQTAVAIYQKLHSPQLKASPVVTRTKARLMIALISQLEPPLEQIKEYDKEIERLFKLHFDSKLFTSLPGAGLRLAPRLLAEWGDDRQRFLNASTVQALAGTSPVLYQSGKYRFAKQRKSCVKSFRNALHQFAYQTVQRVGWAREYYDKKRSQGKSHHEAVRALANIWVRIIFAMWKNYKPYDESIFLASKAKHSLVA

SEQ ID NO: 246472 - protein, 345 aa, unidentified
MNAITLLSIDVGSKELVTAVRAGPDRIKVGAFPNDRSGRVRLVAEAMRRAEPGAVVRVGLEATGTYSQEIALLLGGTPGVEVSVVNPKVIKAFLRAQGIRGKTDKIDAAGILRYLELMPFRRWTAPSEGILALQGIGRRLYQLNAEHTREANRLEAAEAQGAAGRIVAADLRKALKQIEARQEALEQAALELIRADAVLRQKHELITSVTGIADKTAIRLLGELLVLDSQMKGPQWVAQAGLDPRVRQSGTSLDGHRYISKAGNRYIRAALYMPALVAIRRDPVIKAHYQHLVEQAKKPKMIAIVAIMRKLLLCIHAILKSNTPYNSALLAPKRTLEAQAVENTA

SEQ ID NO: 246473 - protein, 503 aa, unidentified
MNNSAAGENSAGGRPASARTRSREGHRKTVKRRLPGEPEALAKTSNRTKPPEGCNISAMDGRAKRRQELKLERPPMNNPQQPSGSWLEQRGFGGLDWASQHHSVVVVDPQGKVLEDFQIEHSALGWKKFRERIAPYGSIPFAIETSQGAAVGQLMEAGLQVYPLNPKSAQRYRERKAPSGVKDDRLDAWSFADALRMDGQNWKSLRPEDALIKELRLLCRDEVALIEQRTAFINQLRHALAEYYPTALEAFEDWASVSAWMFVQRFPTPQALKEAGKRRWEKFLHSRHLWRTESGPRRMELFAHSTDLCGSVPTANAKSRLALSLVDMLFALEKQLGLYRQRIEQLFGRHPDHDLFGSLPGAGPKIGPRLLSEIGDDRTRFGEDAQALQCLAGTAPVTRRTGKARSKPPRWPCHQRWACDKYLRHAMYLFAEQTLTRCVWAEIYYRHHREKGCSHADALRRLGQRWLKIIFRMWMDRTPYDPILHNQNQLKHGSWVLQLNPTN

SEQ ID NO: 246474 - protein, 344 aa, unidentified
MENRPEFIVGIDVSSEYFTCAAGQAKEKWKISILPQDFDNKTSGFNKFSQWLQKAGIEKEKAVICMEKTGVYNELLVAFLCKQGYRVCVEDPIKVKKAFKPHGIKSDSVDSKQIAEYGWRFFDQLHYWKPLSETIEKVKTLLSVREDLVKANTADKNRLHTFRRKAYRVQLAEDILDSNIAERDKEIKAIEKEINNLIHQLPYLAQTFRNLQTIPRCKLLLAANFLVFFHEFDGEITYKKAAGRLGICPYEHSSGSSIKKRAKSFGHGTGTIRKLLHLAACSLCKYDPRYQQYMAEKLAFGKPKMVIYNNVANKLVKIIVKIYRSNMQYNPNHQSVHPRFLTKS

SEQ ID NO: 246475 - protein, 393 aa, unidentified
MFNPLKVRLMRAVCGLDVHKDSVYLCILTGEGELIEKVFGVLTFQLQQMRDLLLAHNVDEVSMESTSVYWIPIWRVLAPHFHMRLVNPYFIKQLPGHKSDVADAQWIAECTLKNLVSGSFVPPEDIQQLRQYDRRIFDLDEEIVRKLSKLDAVMQRCNFRLSNYVSNVDCKSYKDVVRKISEGVTDPESLIGEIHGRIIKHHGRETILASLAGVISQAEIDVLRQLREELALAEEHKRECLERMLEICQEKYPDELRRLQTIPGVKERTATSLIAEIGTDMSKFETANHLSAWSGLRPRNDESNKKFKSRRITHGNIYLRKNIIQCAWAASRTKGCFFSRFSYHQTQVRKKNKMKVIVAVARKLLVAAWHVIHDKTDYADFQKQDRQAPASNG

SEQ ID NO: 246476 - protein, 323 aa, unidentified
MQGQSLLEARSAQPVYVGIDVCKDYLDAYLHPLTDRWRVANDRDGIRQLKRRLRGHEVTLVVMEATATYHRLAHRSLSQSGLAVAVVNPLRARLFAQANGTLAKTDRVDAKMLAILGQALGPQARPPAPETIEVLQELVHARNAATAERTALANRRAASQAAFLRKELRGRLKSLEGHIERLETEIAARIAADPALARRCEILLSIPGVGPGVAANLLADLAELGLLNRHAIATLAGVAPFADDSGEATGQRHIRGGRASPRRALYWAALSASRYNPDLSAFYKRLRESGKKPKLALTAVMRKLVILANTLLKENSLWVDHCA

SEQ ID NO: 246477 - protein, 313 aa, unidentified
MSNDLSQTIGIDISKANLDCHAYPAGAERQFANTAKGHKALIAWLGQWQVERIAFEATATYHRALEVALADWPCVKLNPERARRFAQATGTLAKTDRIDAMLLARMAATLQPPVRPAQSAEQAQLAELINARDGLVRDRTALKNRDKNLTIAILKRQCKQRLEQIERHIDALDAEIASLIAADAKLARRHEILTSIAGVGTLTANQLIATMPELGSLDNKQAASLAGLAPVARQSGQWKGKSFIRGGRANVRQALYMPALVAARFNPDLKAKYQQLVGAGKPAKIAITAVMRKLIVTANALLKADRCWQQSIA

SEQ ID NO: 246478 - protein, 483 aa, unidentified
MKKKNIYVNQSQELLRLFEEAGNGANVMCVPIDYAKKDHVAMFCDGYGHILRKPFPVKNSPEGIEYLTEQVTRSCLHRHIDLKHVFFGGEDVGSFAENFIHTLRSGGWIVAGVNAQDAKKQRSNLQASTDRLDLMGIASMLLNRRANCSPAQSGIYRNLRTLVRHRRKLVAMSTEVKNRVHTFVDQLFPGFLDDKKSGISPFSNSSLYLMENRFSPRQIRRRKRPKLIEILHRYGTEKPENAAAKLQEYAARVLLPPDEYISTLQVSLAHHVKLFRCLQDSIHQLEHELAVWLAQTQGAFLTTMRGIGIVLAAGVCAEIGNPDAQKPVNNLVSYSGIIPRVKQTGGPEGKTHTGKVAKRSNRILKDYVVQSANQLGLHGPEDLMTDYKRREAAGQHADFGIGRRYLRTGMCLMRTSQIYLPPRLRNNTAATQEERAGYYLMTWPALRQKWNKADALDAAFDKDRPLGRWRNMVQELYEIKLKL

SEQ ID NO: 246479 - protein, 337 aa, unidentified
MQKSYLGIDVSKLSFDLSVLIVENGVKKDMLTTKFENNAEGLKAFKKYLVDNGVPFDENSILVIENTGIYHRLIWQFCSDYSLPIYIGNAADLKWSFGIARTKNDKVDSMRLCDYAYKNREDLKPTTALNKNFVILKDLLTNRTKLVRQQNAIRQTIKELKISNDKATQKMLESVNKSAIDGLKKSIKLIEVQMRKMVKADPEVLANYTLMISVPGIGEITAIFILCCTNNFAIKISGKQLASYAGVVPCEHTSGTSVKGRNKVSHMANKELKSILSMGALSAVQTYPEFGDYYERKKTEGKHHNKIMNAIKNKMLLRIVAVVNSRTSYVNNYKKTG

SEQ ID NO: 246480 - protein, 433 aa, unidentified
MKQKYKECAAIDIGSKNIFVAILNKDGFKVFGTTTVDFQSAVDYLLSENIKDVAMEATGVYWMGLYDILEQRGLKAVLVKAGDAKQLPGRDKTDGEDCQWLCHLFSGGLLRNSVVPKDSIRTLRQYMRMRNDHIELAAQHKQHIQKNMIMMNLRLPETLSDITGVSGRKIIEAILTGERDPQKLVLLCHGAIGPKGDKILKALQGIYKDEYLFGLKQSYRCWLFYQSQIEECDRMINDWLEKQIKDQPIIVSSDKLKKSSGANKLRIQNVEEKILTLNGGIDVTRLPGISCNNALKLYSELGPDLSKWFSDKSFVKYLGFAVQKANSGKIKKNKRLSVPRAGQIFREAAQTLMRSNKTALGAFARRINARRGPYIAIKATARKLAILYYNLFTKGVDYVEKGVELYSQQLQATELKRLQKLAKKHGMILLNNN

SEQ ID NO: 246481 - protein, 390 aa, unidentified
MTITNSTEDFVRLIAILRDYGMPVRIGFEATGNYHRVLMYHLGVAGFDLKLVSSVALARTREALHNSWDKNDPKDAQVILHMLQIGAVQIFQDPMVVGTNDIQELSKTHDAVSRTKTELWHRVLTHYLPLYFPEADRFHRSSRTDWFLAFLEMFPSPHMISAMTKEDFIEAAWEVVGRKVEKSLLLSDIYETAKASAGFPVAPDSDAIRMFRLMLAEGRSLIRQRNAIEDRAVELLADRPDYLLLRTIPGIGPINALTILAETGDLRRFRHHRQFLKFCGMDLATVQSGMFRGRSKISKYGNARLRRTLWLAGQTAVMKKANSFRDKFERYIAQDRHNPDLRRKAYTAIAAKMARTIHAVVKSGEPYRPFFEGVSPGGRTPLCRAVEAGS

SEQ ID NO: 246482 - protein, 345 aa, unidentified
MDQISRIGMDTSKHIFQLHGVNAAEAPVLRKKLRRKEMVSFFEKLAPTVIGIEACSASHQWARLLQSFGHSVKLIAPQLVKPYVKRGKNDAADAEALCEAMSRPTMRFVPVKTAEQQAALMLAGVRDRLIRNRTQLSNAIRGYAGEFGFTAAKGKAHLDPLLERIQADESLPALARELFAAQAKEYAQLQAQIDEVDARLMTWHRADECSRRLAKIPGVGPIGAVLLTMKTPEPELFRSGRQFAAWIGLTPKDHSTAGKVRLGVITRAGDEGLRSVLVVGATAVIQHAQRGGRPSLWLTELLKRKSPKLAAVALANKMARIAWKLMVTGENYAAKAVPTALAGAG

SEQ ID NO: 246483 - protein, 334 aa, unidentified
MKKYIGIDAHCKYCDIAVVDEKGKLLSHTSVKTSAENLIEAVKQVKGERAVVVEESTLAGWLHRTLSPYCDEFEVSDPQHNEVIAKSEKKSDRHDARMLAQLYRGGFTKPVHHTQDMQHLEFKEAVQHYHDCVNQVVRWKNKLKALYRKHGILSLNEDVYDPRRGIQFVKLLPNPSSRQRAGDYLQVIKALEQLARRAERRMKRLSSHNGAVEMFQGVPGVGPVVAAAVVAIVETPHRFPDKRHLWSYSGLGIAKHESGGQSAKGHASKKGNRLLKKVLMQAALSASKTNSRFGRRYRELKHKGTSVAQRTVARSILATMYAMWKTGELYRERD

SEQ ID NO: 246484 - protein, 389 aa, unidentified
MSQSFDASKSLTTLEQDNTVIAVIEMSQSKWLVAAVVPGVKRQPLKKLQADEEALLKLLYRWRTEAGQTGREIKRVVVAYEAGRDGFWLARWLRTRGVETYVIHPASIAVSREHRRAKTDRLDTELLMRAFLGWLRGEKRHCSMAAVPAAEEEDARRPNRERENLVTERTRIANQMKAILARFGIRSFKPTLRKAAEKLDGLRTAEGTPLLENTRAELSRHLARLRVVREQIRAIEQKRLHKLAAAPAEENGPHVMVRLIARVFGVGVETADMLVNEVFARHLRDRKAVARYAGLTGSPDESGKRRRERGLARAGNARVRRGMIQLAWCFIKFQKDSALAKWFDARTADGRGSTRKTMIVALARKLLIALWRLVTTGEVPEGVILRPAA

SEQ ID NO: 246485 - protein, 421 aa, unidentified
MTSAHDRLGQDDVIVGLDLATREHQAVVISSTGKRLTRFRVPHSRKGLEELLRRTTPSILGRPNGKRVFAFEATGHVWPAVAFVLEEQGERYVIVNPLATFRVREARQLDRQKTDVNDSEQIAELARTGVVTRTQLDPRAYLELRRMWGEYARLRSERARLKTLLTHQLYGLFPEFIGNWSDVLQPGALAVLRRGLTPTEIAALPLNDFIAQVQQARCGRRVWRFKVIQVHERAQISVACPLGLKALAHEVQRVVARIDQISAQMEELAAEIQGHLASIQEAQYLGTIPGLAWSSIAGLIAHIGAIDKYRHGRQLVKLAGTNPSRRDSGLTVGRIQSMTHRGRAGLREVVFLATLSCLQHNSRLRAHYDRLIQREERPLTKMQAIGACMNKLLLYAFAVMKRRQTFESSHVCSRQGGNQAA

SEQ ID NO: 246486 - protein, 384 aa, unidentified
MQSILVVGIDVAKEKLDVAIFNGKEFISKIYANTKEGIEKLMKDVETKTIEEVHFVMEATGSYNTKVLYALSKQGYPVYVLNPVISKRYSEEQLRRTTTDKEVSKLLASYGYSSILSFLSNIPSESYNTLMSFKFNPSNEEKLELKVFIKTLESLMRTKTRILNQIEALNQYPEGYAEEAIESLKRVLEEIEKEIKNIQDKIDAIINREENRDLYRRLTTIPGIGKRTASTLIAYFGSFSTFENSKQVASYIGLTPSIKESGKSVKRKGYSISKIGNPYLRQILFMASLSASKHNHQCSILYDRLLKEGKDKKLILIAVAHKLLRQTFAVAKYRRVYDPNYGLEGIEKEDISTTQNTKRDDKICTNFSYDLPFIQNKPLRIADY

SEQ ID NO: 246487 - protein, 325 aa, unidentified
MIDGMLGIDVSKNTLDASMSSCNDKVRAKSFANSPDGWRHLLDWLIGQKIRRVHACLESTGRYSLGIACKLNEAGHVVSIVNPAQIRDFARTKLGRNKTDAVDASHIREYCELFKPAPWAPPSHAHRQLGELQTIRAGIVAGLTEWKNRKNSGMVDAVTQSLVDATISHFTSQLGAVEKTIAQAIDNDSDLRRKRDLLLSISGVGETLASVVLAELPGPDVLHSSAEAVAYTGLNPRRHRSGTSIDRQTRISKIGNAVLRAALYMPAMSAMRHNPAIVALVTRLKARGRLNPKQIVVAAMRKLLVLCFGVLKTGKPFDPALAMGC

SEQ ID NO: 246488 - protein, 368 aa, unidentified
MMGWMAPLRHLGAKMLTGRRPAANGEPSMGEITTIGLDLAKHVFQVHGVDAEGAAVLRKQLRRGQVLTFFSKLPRCVVGLEACATAHYWARELDALGHEVRLMPAQYVKAYVKRNKHDAADAEAICEAVARPTMRFVATKTAEQQAALLLHRGRDRLVRQRTALVNALRAHLAEFGVIAPQGLRNVGKLIAIVRDKEDTRLPDVARKVLQVMAEQIEQLEAAVVALEKQLVAWHKSNPVSQRLATIPGIGPIIATAIAATVAEPSEFRSGREFAAWLGLVPRQNSTGGKHRLGGISKRGNHYLRRLLINGASANLLRSKATNADPWVIGMRRRRPSLVVAVALANKTARIAWAVMHRREDYQRVAAAA

SEQ ID NO: 246489 - protein, 469 aa, unidentified
MTRRKNAARKKRSAVPTSLPILRPRVAGIDVGSSQHWVCGPARADGVPNVRVFGTTTDQLNELADWLVEQQVESVAMESTYVYWIPVYELLESRGLEVVLVNARQLRNVPGRKTDFSDCQWLQLLHSCGLLRGSFRPGEAVTRMRAMQRQMANLVAERTRCVQWMQKSLDQMNVQVHRAVTDLTGATGMAIVRAIVAGERDPSRLATHRDRRCRKSAKEIAQYLAGHWREEHLFNLACALRLYDAFEKEISSYNARLLQELEALQPPERHDDPVPSHPNPAKEKAIRSRGEQPARTTLWRFAGVDLTRIDGVSAGVAQIVLTEVGSDLSAFPSEDHFVSWLRLCPRTPISGGKPLKKRRNGLGANRIAGALRMAATALQRSKSALGASFRRVARHKGAAVAIFAIARQLAKLIYRMLRFGQDYVDVGEKAYERQFELRRLASLKEAARSLGFTLASQTPTTLTPEVASG

SEQ ID NO: 246490 - protein, 316 aa, unidentified
MTSQVTVIGIDVAKETLSLCDARTGEVFELPNEARVIKAWLKTLPPNCAIAIEATGIYHVMVASLAHARKHRIYIINGFRLSNYRKGIGGRNKDDRSDAQLLARYLSHEQAQLEPWQPPSQVYCRLQALLHRRAVLVRNVTSLRQSFSQDPMLARALRPVLKRMAVLEQRLEKAIQAALEEAGLKEQSKRCQAIEGIGPLTAAALNLAFLRGRFRNSDAFIAFLGLDVRLKESGRYSGRRKLTKQGDPEIRRLLHNAAMAAARTHRWRELYQGYLARGLKTTEALTILARKLARIAFALMQTQTAYQPREAKPSLT

SEQ ID NO: 246491 - protein, 328 aa, unidentified
MPMYQLGIDVSKNTLDLCLLREGIKGRIKTRKLKNTADAAKVVAEWLKKQSCELGEVHIIMEATGVYHEPLAYGLHFAGAKISLANPHRTREFARGMNILTKNDKVDAWMLACYGSLKEPEAWTPPPKSVRYLRALLRRRDALVADSTREKNRLEKSVFTDSPDAVRASIENMLQELSNEIEHLDVLIQEHIETHPELNQDFRLLTSIKSVGYLLGLNMLTILKSHSFESAEQAAAFLGVVPVERRSGTSVKGKPKLSKIGPPEIRTKLYLAALCGLRFNPVMKQMYTKLCQRGKSKMCAIGALMRKLVHWCYGVLKTQLPFNTEYNQ

SEQ ID NO: 246492 - protein, 364 aa, unidentified
MVVVGTDAHKYSHTFVATDEVGRQLGEKTVKATTAGHATAIMWAREQFGLELIWGIEDCRNMSARLERDLLAAGQQVVRVPTKLMAQTRKSARSRGKSDPIDALAVARAVMRETDLPLATHDETSRELKLLTDRRDVLVAQRTSAINRLRWLVHELDPERAPAARSLDAAKHQPALRTWLDTQPGLVAELARAELTDIIRLTGEINTLAQRISARVHQVAPALLEIPGCAELTAAKIVGEAAGVTRFKSEAAFACHAAVAPIPVWSGNTAGQMRLSRSGNRQLNAALHRIALTQIRMTDSRGQAYYQRLQDAGKTKRAALRCLKRRLARTVFQALRTVHQPSSEHTQPAAACHRSYCSRSCLSG

SEQ ID NO: 246493 - protein, 352 aa, unidentified
MNSSIVTYRTTKNNSPNQYDYYIAVDWSQNNMAIATLNQKSKQLHTLDLRSNLHDLKDYLGNLKGSKIITIEECPAAQWLYVELTENVDKVLICDPYRNRLLSDGAKNDVLDAEKLCLLLKNGLLKEVYHTHNKLFELRKYVSAYEDIIKAGVRLKNQRSALFRSEGKNPRKESVKKTNVSTFIVDILDKNIENYEQDRKQYQSLFSQIKQHNTRLKNLCKIPGIEIVSAVKILADVVDAHRFPGKGNYLAYCGLVKHKRVSGQKTYGLRKPRYSRILKSVYKTAALVAITMSNNPIKDYYEYLLTKGIEIHNARNAVARHIAAITYGMLKSGEKYQPYKWRKENKSESNTK

SEQ ID NO: 246494 - protein, 401 aa, unidentified
MSKKNTRNALDTSLSYAVIGLDLAKADCAVAAVPCSDDDLGLIDRMDYESLFEQAEKLKPTLFAMEPCCGYSQISLRLQNMGHEVKVISGHAVKNWIATHKSNQKTDLNDATALAKLALYDHDLQPIRVKNVEECRIASVQAIRIQLRTQATKSLVCFKSLCQCWGIVIRRGSLNTKKMAEAVAAVEKLLGAEVASSLMILRDAYKFTMKQINALDKLLDALVEANEQARTMKTVLGIGTQTAARLAVTTGDIKRFPMPRSYVAYFGLAPRNIITGHSGTPSPSKRGALKPVSSRGQGKVSRRGDRVARSFIIQGAATIYMLYCKDMLPECQLRRWLHEQIKRGKPYGKIIVSLAAKLLRIVWALLTYGEKFDSHKAGVPRSVLAAMEKPLKHDAAAESAA

SEQ ID NO: 246495 - protein, 335 aa, unidentified
MKKIHVGIDISKEKCNLCYRSGLEIVREEECPNDVKALKKAFKAALKVLGASFEDVLVCAEYTGRYIYPLTVACQELDIFLWMDDPTRIKNSMGLTRGKNDAIDAARIAEYAFRYSDKAERYAIPDAALVSMKSLLADREFLLIDRKRYQSQLTDQKKYMAPGDFKHKNNRWKKVIKSIDEQIAAIDAEIESLIAADPVLARQKELLVSIDGIGEHIAINMIAIIGGFTRFQNARQFCSFAGLSPYKYDSGTSVRSKAKISKRANQTMKALLHMSAVNVATRMKAGEYKDYYERKLKEGKHIMCILNVLRAKLVHRMFSVIKRDTEYTKEYKPAC

SEQ ID NO: 246496 - protein, 364 aa, unidentified
MNSVHYVGMDVDKEKIILARLGPGNAKEVQEQVIANTPSAVKKYFSALLAGAEVHASYEAGCFGFGLYRQLSAMGVAMLVAAPGLIPRKPSDRVKTDRRDARSIAVALRAGQLTGIHIPTVQDESVRDYLRMYEDLRGDLRICKQRVLHFLLRRGIRYEKGGPWTVRHKNWLASLEFADARDRKTLDMYLSTMQELEGKCSEAAEEVEQIAAQERYREQTKKLCAFKGIKTLIAVSFVAEIGDFRRFPNARQFMAFLGLVPSEHSSGNKRRQGGITKAGNSHLRRLLVEAAWHYRSYHPSSRILIERRRGVDPQVLSYANRAGRRLSGKYMHMVLRGKRSQVAVTAVSRELAGFLWGAMTGQVA

SEQ ID NO: 246497 - protein, 343 aa, unidentified
MKEDGRMSEVHVLAIDLAKRSFQLCGTDCGGAVLFNRTVSRSKLEKTLRGQPPCIVAMEACATSHYWGRMARACGHEVRLIPPIYVKPFVKRQKNDAADAAAIAEAALRPNMHCVAVKSAEHQARAVAFRAHQCFVGQRTQLINALRGHLAEFGLIVAKGPANLKSLASMMDDASLDVPEAVRDVAQLFLDQIETITRTIDDLALRLRNATRENEEMRRLCTVPGVGPVTAGAVLAFAPDLRVFSSARNFAAWLGLVPRQHSTGGKTRLGAVSKMGQNDIRRLLIIGAMSRIRWIVRKGVMPDNWLGRLLGRKPRMVAAVALANKMARIIWAMMTREQNYRMA

SEQ ID NO: 246498 - protein, 341 aa, unidentified
MEEYIGLDVSMKETAVSIRRLGGRIWRGKCASDPKIIAGLIRKRAPAVKRVVFETGPLSVWFYHALCAEGLPAICIDARHAKAALDMAPNKTDANDADGLAHLAEVGFFREVRVKGFDSMLARTLVAARTRLVRITTELSNQIRGIMKTFGLVVPAGKGSIFEGNVRSLLAGQEGLASIVLPLLDAWRSIRIRAADLARQLIETARQSQACRLLMSIPGVGAITATSFVAAIEEPSNFKKSRCVGAWIGLTTRRYQSGEVDYDGHISRRGDSHLRGLLYEAASVILNRSKKESALRTWGLKLRERLGFKRAAVAVARKLAVIMHVMLKTGEYFDPNAGVAA

SEQ ID NO: 246499 - protein, 362 aa, unidentified
MTKHNTNPKTRKTRATPCSIGIDLGDRFSELCVLDGEGALVSQARLRTTRAALQEYFSAQAPARVALETGTHSAWVSRIAAVCGHEVTVANAREVRKIHQSNRKNDRADAEILARMVRFDPQLLAPIVHRNEQMQTDISLIRARDALVSARTKLINAARGLTKALGGRLPRCSSPCFAQRVREQMPEELASTLAPLVAAVDALTEQIRSCDQRVETVAQERYPETALLQQITGVGTLTSLAFVLTLFDKGRFARSRDVGPYLGLVPRQDQSGDRSPQLPITKAGNGYMRRLLIGSAHYILGPFGPDSDLRRFGQRLAGRGGKNDKKRAIVAVARKLAVLLHRLWVTAEIYDPLRLGKVEAAG

SEQ ID NO: 246500 - protein, 419 aa, unidentified
MKIVYPVCCGVDVHKNVIVATVAVTDKDNITQYYAETFGTLNTELIRFRTWLLGYKCFNVCMESTGKYWIPVYNILEEANIKVLLTHPKYVRAIKGKKTDRKDSKWIADLFKFDMVRSSFIPPKDIRALRELARYRYKLVCMRSSERNRYQNCMTVSNIGLASVLSDPFGKSASNIMQYVLNSKVFDEEHCKTLIQKTAKRKTELILQSIRGNSIESDQRFKMKEATAHMKYLDKAVLRTEVELYVRIQPYYHIVEHLSSQLPGISQLSAALIISEIGADMSVFESAKHLNSWAGLAPANNESAGKKKSVRISKAGQFLKPLMVQCALASVKNQKEPYFANKYYKLKKRRGHKKAIIAIARMMLTCIYHMIKNGDVFNPSDYQDLHAPTPRKHVLTDETAIAFLAAHGYDVSALTKFPV

SEQ ID NO: 246501 - protein, 343 aa, unidentified
MNHTVIGIDIAKHVFQLYWIESDTGEVKNLKLKRDKFLAYFVNLSPCLIGMEACGGAHHWARELTKLGHTVKLVSGRLVKSFVMGNKNDAADARAIWTVTQQPDTKEIAVKTVTQQAIITLHRMRENLKKMYTMQVNELRGFLTEFGEVMPQGQAGLSKGIAEAIDRAAQKLPGVVVEALRDQWKRIGELRERMADMERKLQSWLKTNVDASRLMAIPGVGVLTATAAVANMGDAQRFKSGRQFSASLGLVPAQTGTGGKVRLLGISKRGDVYLRTLLIHGARSALIHSKNPPRWIQELKQRRPMNVVVVALAKKMARMIWAMMAHDRAYDEHWVSQELSTAM

SEQ ID NO: 246502 - protein, 319 aa, unidentified
MPQQGRIVGIDVSKLKAEACIRSLQLRLSQPSTPAGEQELIAWLSDNRVGLAVMEASGGYERGWAQALRKAGIAVRIVDPKRVRYFAKSAGRLAKNDPIDAEMIAWFAETFATEAPPAPDPDRDGLDRLVTERRMLVRLSAQIGQLGEHQQPRVVETAQRAIIKAIGAQLAKLETAIGAQIQANAVFAARRAIIQSVPGFGAHFVAGAIAWLPELGRISNKAAAALVGIAPYDDDSGAHHGERHIKEGRREIRDLLYIATLGAATRHNPVIKAYYQRLRARGKRAKVALVACMRKLIVILNTMLARAQMWNPAGATAIA

SEQ ID NO: 246503 - protein, 500 aa, unidentified
MKTKRSKAKIGAGHKRRSVLSSNSEQKLEILRPDAAGIDCGAEEHYIAVPPDKVSAGEPAVRCFSAFTEGLEAAVDWLKDCRVTTVAMESTGVYWIPLHQKLEAAGIEVYLVNARHVRQVPGRKTDVQDSQWLRQLHRFGLLNASFRPQDIICRLRSLHRHRDNLVSSSASEIQHMQKALQQMNLHLHHVVSDITGMTGLRIIDAILNGQRDPEQLVKLRDKRVYKSTPRQMQAALVGDYRAEHLFVLSQSLQAYRFYQARIEECDREIEPLLEKLAQQVETASAKLKLDGLKASSAKREARTPEPLADSKPACGLKANSQRKPRANEPKIDLAGLLERICGIDLTRVVGLNVLNVLLIVSEIGVDMSKWRSAKAFCSWLGLCPGNKISGGKLLDSRTRQVVNRVTDALRLAAQSAGRTQTSLGIFYRRKHAQLGAPKATTATARKLACLIYHLLKYKQPYQEPDPVTYQLRLKKSALTKLQRQATALGFTLLPTTSVPA

SEQ ID NO: 246504 - protein, 336 aa, unidentified
MEIIKQVIGVDVSKDTLAVCYGAVDQQQNQQIIEPETFTNTRKGFQELMFYAKKKAGQLKAPLYFVMEATGVYYENLAYFLNEKHQKVIVILPNKTKNYSKTLSIKSKTDPLDARMITQFGLERQMHLWSVPSPLMKAIKALTREYQSKKDIAAQIKNQLHAEKHSHKPLKESLKRNQASLAFFEKQLTEIEKQIKDIVKQDDDLNDRINKVDKIEGVGFMTIVSIISETNGFALIENAKQLASYAGLDVVYNESGLKKHKTTISKKGNKRLRKAVYMPALSACRHNPKLKELYIRLIAKKGTKKVALIAVARKLLLLIYTIFTKNVDYISNYNPA

SEQ ID NO: 246505 - protein, 528 aa, unidentified
MLQAVKTSRRDRCKSKSRARRYESTQKPSGTISRRVQKVGGEHFAIVCVDPAKHRSEWMMADYFGNILIDPQTLEHQGPYFKAAVELICQAQRQHQIEDLIVVVERTGNYHLPPKRAFAGAGFETRVVHPFATKQYRIPANPGNKTDETDLHAQHRAAVAGFGLCEFELESPYRELQLRVRHRRNLVVKGAGIACQIREHLHLAMPGFASMFDHFFEREVPLAIAGCCDSPAKLLQLGRTSISKYLRKKQIRHQLRTIDKVLAWAAQAAGDPIQDGPMHHAIWTDLIELYRHFHRQITVLEQGLASDLVRTPYIRLLAISGINVVSAADLAGEMGPMKQYANANAITGRAGLYPSRHQSDQTDNNSGPIIRQANRRLRCVLMRIADNLACHCHYYRAQADIDLARGVDKRASRVKIAKRFTRLALACVAGDQPMNHSCFQKPDSILEKLRKFHYEHQTPLDRVLVDLEATVEQLPYNTCGREAQVVAKVLEKNTPRRRDAVAIGEILPAVLARLNIRTTPNIKNRDRS

SEQ ID NO: 246506 - protein, 341 aa, unidentified
MELQLYGGIDLHSTNNHIGIIDAQDRRVLKKKLPNDPRIIVATLEPFNRELVGVVVESTFNWYWLVDLLMEEGYRVHLANPSGMKRYEGLKHCDDTHDAFWLAHLLRLGILPEGYIYPKEQRPLRDLLRKRGHLVRLRTSLILSLQNIISRNCGCKVNVNRIKRIRENEVTPLLVGHGELELSGRVSKEAIDFLTRKIRDIETVVEKKLRVKEPFTFLKTICGIGKILTLTIMMETGSIARFPTVGDYVSYCRKVPTRWTSNDKTKGKGNKKNGNKYLAWAYSEAAECARRYDPFARSYYNRKAAKTNFMVAHSALAHKLARAAYYVMRDQVPFDHHKLFV

SEQ ID NO: 246507 - protein, 354 aa, unidentified
MTVQLKRTFGDIIVGVDVDKKHYVFTVREQGVNIMHKTLVATPAILHNYIKKQFPGKKPIYVYEAGPTGFGLYDHLTALKVPCHVISTLSMPVAKCETVKNNGIDSRKLAEYMEAGKLRSIRVPMNEYRELRHLTKVRELCVSYRTKAKQRIKGLLLYSSISNSKLDASKHWSTGYIETLRDLKITPAERYRLDCLLEDLDYARRSLIKTHKELKTFCKTYPNVRENVKYLESIPGIGFITAVTILGKIGDPSLLRYSKEIASFLGLTQWEYSTGDVQSRGSITHFGNKVLRKLLVECAWSAIRKDVRLNQFYHRIKNRNNPKYASQIAIVAVARKMTQIIYRVLKEQRCYVQY

SEQ ID NO: 246508 - protein, 339 aa, unidentified
MKITTIGLDLAKNVFHVVCFNDHGKEIKKRMLRRNQVLEFFTQLPPCQVSMEACAGSHYWGRQLRALGHNVKLISPQHVKPYLRGNKNDYNDARAIAEAAMRPDMPVVGIKTVEEQDMQALHRMRSQCLRDRTALSNSIRGLLGEYGIVFAKGVPTLRKKIPEILEDAENGLSLGFRNLLVRRYEQLVELEDHIAFYTKELEGLSRQDEACQRLQTVPGFGPIVASAFRSVIGDGRTYARGRDAAASIGLVPRQCSSGGKNVLLGISKRGNKYLRKQLIHGARSVVLQAANKEDSLSCWINRIRKERGWNKAVVALANKMARIGWAVLRYRSQYQPASR

SEQ ID NO: 246509 - protein, 498 aa, unidentified
MSTALSSGGPVSITVVMTEGDEMSSRRLVGIDLGIASAHTVRVLDETGKTLAKRKAWPIEQSLSDVEKTALAGAPDDTVLEVVMEPTGPAWLPLAVYFTARGHRVYRVSSAKAADLRRFLSRHTKTNGIDADTLARLPIFDPDGLQPLVLPGAEQAALDRRVRAADRLTRAAADHKRRIKDLVRQLLPMTPLTGDLGMADLAVLERYADPTTLIRLGLKRLTALIEKASHGHQGVERAQQWLEAASLSVELYAGHPAVAFADLAAEVVTEIRLLRAVQAELAGHAAAREDAYRWVDPLELARSLPGVAEISGPALAAAIGDPTRFPNGKTFRSYTGLVPKASETGDTDRKGQPMSKAGSSLLRTTLIRAADNARHQDPQLARIYHVQMVERGKDHLGALCVVAATLAERFWTVMNRGMPYVICDTNGHPVDPSEAKKIIAEQWTVPPEVRARRRSKKTVKTKTGKAPQTVPTGQSARGDLPRPRSSAAPRTKVNQRTA

SEQ ID NO: 246510 - protein, 464 aa, unidentified
MRSPASPFDQEKVHGQTEAISSHEGHLSHPSERRSNRHRRQMHVAAVPPDRDADPVRTFGTFTGELHRMADWFESCGVLTVAMESTGVYWIPAFEVLDQRGFEVVLVNARDAKHVPGRKTDVSDAQWLRQLHEYGLLRASFRPKGELATLRAYLRQRERLLDYAASHIQHMQKALMQMNVQLHHIVSDITGATGMRIIRGIVAGERDPAALAAHRDRRCHASAEEISAALAGNWREEHIFALGQALDLYDLYQAKVAESDARIEQVLARLRTALERPACRLPPARHRDNSANAPAFDARAILYSVLGVDLTQIHGLGPSLVLKLVGECGTDLSPWPDAKHFTSWLCLAPSNKISGGRVLSSRTRRSGSRAAALLRLAAVTVGRTQTALGAFYRRLSARIGKAKAVTATARKIAGLFYNAVRHGMVYADPGASYYEERYKARVLANLRRRATSLGFVLQEAPSSA

SEQ ID NO: 246511 - protein, 338 aa, unidentified
MWLMKTLLTSGCTNQRGAGHGIDIASKKFDVAELCDGNYRCRAFANTSAGFLAFYKWLNTENKQDIHACLEATGDYGTGLATFLYERNLKVSVVNPARIKGYGASELSRTKTDRADSKLIARFCKAANPERWKPMPAPVRKLQALVRRISALNGMLRMECNRRENADANIQASLDRIINQLKKEIESVRQELHAHVRSHDELKKQDELIQSVPGIGAISSHLILSFISGKEFRKAKEVTAYLGLNPRHHQSGSSVRGKTRMSKMGDARLRSALYMPALTALKHNPDIKAFGQRLLLAGKPRMLVVGAVMRKLIHIVFGVLKSNIAFSSRIALDSVTTS

SEQ ID NO: 246512 - protein, 373 aa, unidentified
MGKQTKQADPLEPERHQCARAEVSSNHSRDRGSAMNVTTYGLDLAKRVFQVHWVEPDTGELKRKALTRGEVAAFFARRAAGVVAMESCGSAHYWGRVLSGLGHQVRLIAAQFVRPFVKTNKTDAADAEAIWEAAQRPGMRFVALKSEEQQAVLSLHRMRAQLVKIRAMQAYQVRSLLYEFGVIAPKGFRALKTKAGGVLADPTGCPVPELARVELLSQLEGLQSLTARIEALERRIGSWQRREVECERLTAIPGVGRLTATAVVATVADARSFRCGREFAAFLGLVPRQSGTGGRVKLLGISKRGDPYLRTLLIHGARSVLLTQGRADRAMDPWLRDMLLRRPKNVAIVALATSMPKHEDVTCHQGGVHIRHY

SEQ ID NO: 246513 - protein, 393 aa, unidentified
MVVSVGIDVSKNKHDCFIVSSEGEVLADVFTISNNMDGFYALLEKIRACTTPQDKIKVGLEATGHYSYNILGFLLDNGLATYVLNPLRTNLYRKSLSLRKTKTDRVDARTIAAMLLSDVGLKPYTNTAYHNEELKSLTRYRFDKVKERAKLKSSISRLVCILFPELEKLVSSLHLATVYALLEEFPGSKQIAKAHLTRLKTLLGNSSKGRYGRDMAVTIRSAAQNSVGSCMPAKSLELQHTIRLIRELDAEIAEIEAEIETMMDKIQSPITTIPGMGFRMAAMILAEIGDFSRFESPDKLLAYAGMSPSTYQSGQLKNCYPHMEKRGSRYLRYALYNAAKYVCHWDPTFAAYLAKKRDEGKHYNVALSHATKKLVRLLFALERSRQPYCSLAA

SEQ ID NO: 246514 - protein, 342 aa, unidentified
MLHAGIDLHKKFSVVTVISDDGEVLVKGLRLENAETAVRDFLAGFDSEVRVALEAGPNWNWMCDLLDEIGVENKLCHPLKTKAIGSAKIKTDKIDSLVLARLLKSDFIAEAHKADYATRQLRELVRMRAYLVKSRTGYKNKVHAVLTRMNIANPYSDLFCSKGIAYLKDLALAPAYRNSIDAYLLMIEALDLQVARADELVHRAFGQRQDARLLATTPGIGEFLALMIAAEIGDISRFISAKGLASYSGLIPSTSQSGDTTRHGRITRQGSAWLRYALVEATIHAVARPGPLKAHYIRLSARKGKYVARAATARKLCTYVYHMLNEQKTYDEVMAFGRGDLG

SEQ ID NO: 246515 - protein, 326 aa, unidentified
MEHELHYIGIDTAKEKLDVDVLRPDGRHRTKKFANTTKGHDELVSWLKGHKIDHAHICIEATGTYMEPVAESLYDAGYIVSVINPALGKAFAQSEGLRNKTDTVDARMLAEFCRQKRPAAWEAPHPLERALRALVVRHQALTDMHTQELNRTETAREVQRPSIDAHLLWLEAELKRLEKQIKDLTDDDPDMKHRRKLLESIPGIGEKTSAVLLAYIGLKDRFAHARQFAAFAGLTPRRYESGSSVRGASRMSKAGHVSLRRALYMPAMVATSKTEWGGAFRDRLAANGKKGKVILGAMMRKLAQVAYGVLKSGVPFDASRHNPVAA

SEQ ID NO: 246516 - protein, 412 aa, unidentified
MEILYAICCGLDVHKDSITACLRRLGAAGQVTKGLRSFGTTTGALLTLCDWLVEAGCTHVAMESTGQYWKPVFQILEGHFAQVLVVNARHIKALPGRKTDMLDAEWIAQLLQHGLLRGSFIPPAPIRELRECARYRTQVIRARADEANRIQKLLEAANLKLGSVASNVLGVSGRAMLAALVRGETDPTALAGLAKGRLRKKQDQLVAALTGRLTPGQRALLGQQLAHVEYLDRAIAELDALIATQMAPYQAEAARLQTTTGIDTRTAEALIAELGVDMAVFPSDRHCASWVGLCPGNNESAGKRKTGKTRKGNKWLRSALVAAAWAATHTRTYLGAQYHRLARRRGKKKAIVAVAHSLLVIAYHILKEGTVYRELGHDYFDKRDTVRLQRRLITRLESLGLRVTVEPLPQAA

SEQ ID NO: 246517 - protein, 493 aa, unidentified
MVVAFGPTPIRRLQWILPRWSRRGGPGASRKRTKSKPKATSRRRKNQLQPVTQPPQIRPDACGIDISPNVIYVAVDARKDVTPIRHYGTVTEELYRIANWLKACGVRTVAMESTGVYWIPLYQVLEERGLEVYLVNARHYKNVPGRKTDVCDAAWLQYLHAVGLLQGSFRPALEICAFRTIPRHRGSLVEAASKHIQHMQKALDQMNVQVHRVLSDLTGVSGLAILDAILAGERDGQRLAALCDPRVKASQESIMAALQGDYRSEHLFTLRQSLESYRHYQKLIAACDREIREQLEALEGQAEDKEPPESRKTMRTANDEELRKEFFRIVGVDLTAIPGMNVGTVQVLLSEVGPDLGRFRSAGAFANWLGLCPNNEITGGKIQSSKTKQCENRLAGALRMAAESLCRDQSYLGQFYRRMKVQLNGGPQAIPAAAHKLARIIYAMVTQRAEYDEKRFAENEKRNRERARRRLIKQARTLGFVLTPLQPAAEVVS

SEQ ID NO: 246518 - protein, 411 aa, unidentified
MDVVNARCAGLDVHKATVVAGLRVPGPQRGERCGETKTFATTTRGLRELIDWLMAHGVTAVAMESTSVYWRPVHAVLEGHVQLVLVNARHVKMVPGRKTDVRDCEWLAQLLECGLLRASFVPPRAVRDLRDLTRLRKTLIRERGHHVNRIEKTLELAQIKLSGVVTDLMGKTGRAILQALSAGLKDPVQLAEYAQGLLRKKRAALREALVGRLTPHYAFLLQQHLSLIDAVNAHIATLDARIETAMAPFAESAAIVQTMPGVGARATQAILAETGVDMSCFPTPAHFASWARLCPGNHESAGKRQSTTTGKGATWLRATLQEAAWAAVRSKKSYYRALYHRLKARRGAKKAIVAVQHAMIVALWHMLKHGVAHHDLGADYFERRNTARVRRHHVRRLEQLGYDVTLTEKAA

SEQ ID NO: 246519 - protein, 356 aa, unidentified
MSRDIKYIGMDVHKEAVVIAVLNSSGKLVMESIVETKASSILQFIHGLRGELHVTWEEGTWASWLYDLLQPQVKQVLVCNPRRNALLKEGSKSDKVDAQKLAELLRTGMLRPVYHGENGLRTLRELARSYQTISKDLNRVMNRLKALYRGWGIACAGTQVYSSRYREEWLNKIPHAGLCRRAELLYQQLDGLQGLRRTLRPELLAESRKHKAVKLLRQIPCIGPIRAARLLALMQTPHRFRSKRQLWTYSGLGIETHDSAQFRFVGGQLQRSKKPQQLRGLNRNHNHDMKEIFKGAATRASCGRGPLHDFYAALLTKGMKPEMARLTLARKIAAIALTLWKKEERFDAEHLKPQAA

SEQ ID NO: 246520 - protein, 422 aa, unidentified
MNEADGKRQEEQRCWAGLDWGTEEHTVSVVSDAREVLGGFRVEASLKGLEQLVKRLGEFGRLAGIAVEATRNRVLNYLVSAGFTVYPINPKLSKNWRACNSVAGVKNDERDGLVLAMELAGRHASLRALEREEPAVAELAGLCEKLRGLVDERTSLLQRLKATLGQYYPGVLGFFTDWTSPVAWRFLQQFPRPEALAHARKDTLIRFLKANRIGIKPLWLAQIEARGEVTHWPHPGDQVALEAMTLAILAQLQALQPHIDKMDRLIAESARHLPHAYLLKSLPGVGKRLAPVLAAITAPVASGKTEIEAIRCVSGVAPVEDQSGKRHRVCIRRRCNKHWRDVMHLFACSSTHWCSWARAFYDMHREQGDRHASALRKLADKWLRIINRMLETGEPYDDQRYVDALRRNGSPLYLRLAGKTCG

SEQ ID NO: 246521 - protein, 354 aa, unidentified
MLAELVDHVIGVDPDKDWITTAVIDAKTTGVVDTARFEANSAGYLDAIAWAEQHTTPGERVWAIEGSASFGRGLTARLASDDEWVVEFDWAREKASKDGGKSDELDAIRAAREMIGRDALNAPRAHDGHREALRVHTVARAGAVRARTAAINELKALVVTAPDDLRAELRGLTTRALVNKCGRFRSSSTRSISRQGTQLTMRSLAQRITNLNAEIADHDRAMTALISETAPQLLAEIGIGHVTAATFVLSWSHHGRCRSEAAFARLAGAAPVPATSGLTQNRHRLNRGGDRRLNHALYIVATTRLRQDPTTREYVARRVAEGKTQREIVRCLKRYIARRVWRLLEHAPPGELPT

SEQ ID NO: 246522 - protein, 394 aa, unidentified
MDILVDSCAGIDIHQKIMVACVLKSPSKGTRPKKWIESFDSTTKGLLQMHDWLKSHQCTVVAMESTGVYWKPVWHVLQEDFELILANPRMIKNVPGRKTDMKDAEWIAKLTRVGLVPPSFVPPEPIQDLRDLTRHRKHLTEDLTKEKNRAHKVLQHAGIKLTTYIRDLYGISGRNLLDALVNGEVLTPEKVEKLVYTSLKKKVPELIEALQGFVRKHHRFLLQIHLDKIDFIQEQIHTIEKAIRDTLEPHDNTVGILDEIPGINVTTASVILAEIGLDMSAFPSSKHLASWAGLAPGNHESAGKNYNARIRKGNAYLKKVLTQAALALSRGKDNRIKAFFWRIAKYKGSKKAIIATAHLLLRITYRLLKDNSRYIEFGEHYLQKRGDALLSPQS

SEQ ID NO: 246523 - protein, 346 aa, unidentified
MKDNNLKGAVVVLGIDLAKQSFQLHGVDANGSTVLTKKLNRHKLSEFIARLPNCLIGIEACGGSNYWARVFKRYGHTVRMIAPQFVKPFVKSNKNDAVDAEAICEAVQRPSMRFVPAKSVEQQDIQSLHRIRSQAVARRTAQANQIRGLLMEYGVVIPKGISYVRKEIPCILEDATNELTFVFRELLNELYDEMVHLDKRIKMLEDKLEIICRENKNCQRLLTIPGVGLLSATAMVAAISDISVFKNGRELAAWLGLVPRQHSTGGKPTLLGISKRGDTYLRTLLIHGGRTVVRVAEKYQDKRNKWITQLDQRRGKNISAVAVANKNARIAWALLTNKTTFQASAV

SEQ ID NO: 246524 - protein, 333 aa, unidentified
MDNLSHGRVIGIDVSRDWLDVHCLPDGHRCKLPNAPAGHAAVADLARNRESVVCFESTGGQEWQLWAVLEAEGIAARQVPPAQVKAFAQSRGSRAKTDRIDAELIARFFAFRPEAGRSLPAEKLRLLRALTTKRAQLVEMRKRLLAQIRAHQKLGTAVMFEDVDTELKQRIDSLIKELEDRITLAITNDERLSETAGVLRSIPGIGPVASSMLVAEMPEIGTITGEEAAALTGLAPVAHDSGTLRGKRAIAGGRRALRHVMFQAALVAAHHNPSLSTFADLLRKAGKPHKVIITAVARKLVTIANALGKNRQKWTAAATSEIQLLGSGLILSS

SEQ ID NO: 246525 - protein, 313 aa, unidentified
MAQMVVYAGIDVSKQWLDVVLWPTIKRHRVSRDDAGLVELAAWFTAHEVIRVGLEASGGYERAVIDALEAKKFEVCCFNARQVRRFAQATKGRLAKNDSVDARVVAQFTATMVQAPPPGRRRELDPLVEHLTVRRQLRGWIIDCANQLERLRDARLRRKIVARRASFERDLAALDVKLATLVAAHDDWRALEDRLRTVPGVGPVLAQTLIALLPELGRLSRRAIASLVGVAPFDDESGGRRGERHIEGGRAAVREVLYMAALAAKRHNPVLAAFAKRLAGKKPKVIVVACMRKLLVTLNAMLRDGKDWKPKAA

SEQ ID NO: 246526 - protein, 475 aa, unidentified
MNLKGTKKKNQVVTTNIFEQQELLKKAEVIRKNLTASTWHELETNGKFDKNAKLSFISDDMLILGCDIGSETHYLRAIDTRGRELSKSAYPFSNSSEGFQSAKEWAIEIAAKNNKKQIVLGLEPTGHYWFCLATWMIANGISVVQVNPYAVKQTKEVEDNSQLKDDTKDPKLIANLVKDGNFGVPYLPEKVYAELRRLSMFRDQLNEDRIRAINRMHREMKIYFPEYKEALGKVEGTFSLELLKQTPFPEGIQALGEEGIREIWHNAKLRGRGYSRARDIVEYAKGSVGIKDGAEASEMAVKWFVKEIRELDKKLEEIEKLMHEKYQEIPYAKNILEISGIGENTLTGILAETGDISRFSNAKEIQKLSGLSLVACSSGKHKGETKISHRGRKRLRYWLFQAAKSIVAHAEEYKELHAYYTTRDENPLKKKQSLIVIACKLLRIIFAILTKGVVYDPQKMLKDIRRLEKQEMIAA

SEQ ID NO: 246527 - protein, 460 aa, unidentified
MTLLARLGEQLPERNYLGVDVGYKEHVAVVITLQNFAQDGSRWKRTPCLHFPSTRVGLDKLQTYLDGFSIDRETFFGICEPTGGFYGATMFQYLLDQGYPMWLIENAITRHMREKIMGHIPKTDEIEARVMARIGYLHEAVGEEFTLRPLTLAEPEDADLLALCRDCWRLKTMISRARNQLSQLMAVVFPELKTFFTGSVTSIAPVRLIAAYPTPAELAAASAEEVRSVLWEAGAYRHAKRVDELQALAQNSSGLLPDPQRAWRLGWVTDFLLANFKANAALDKQIEMLVTQRKEYPWIVDVPYTGPATLGLILAATGDVNRFRNYRQYVAYTGYFAGLETSQTIDRTRMSKRGNRDLKRALFQIAAPLVWFDRGENPYKALFERKEAEGRPWYRAMPNVCAALARHIYHCLKFQEPYDVEKAFGEPASSRAFEQAIEDLRADLEDSFEVMEAQLSQEVE

SEQ ID NO: 246528 - protein, 325 aa, unidentified
MSRMQGKALPKGAQAPNYAGIDVCKDWLDAKLRPSDKAMRVANDASGHKRLSRFMADNGVVLIMMEATGKYHRAAQRSLYANGFAVAVVNPKRARSFAESIGALAKTDEVDASVLAMMGETLRPDATPPASKALGKMQELVRARQAALADRTAMQNRMGESTCDAVRESLNAVIEAINSAVAKLDAEIAKLIAGDGGLSRRMEILVSIPGVGPVTAASLIADLPELGECDDKAIAALVGVAPFAADSGDFRGQRRIRGGRSALRSTVYMAAVAAARSNPDMKRVYERLKTAGKASKVALTAVMRKLVILANALVKTDRKWTPRTA

SEQ ID NO: 246529 - protein, 366 aa, unidentified
MKTSITPIGTPVGVDVHKRRCKVVELNRGEIKVRKPMANAREEWLEMLTELPPDAEIGLEVSTAGYFAMSVLEEAGWRERTHWVHTAGIDSNRRQKNDRLDAERLARKLAAHHLDPLPEAWFPPPEIRALRLRARARCWLALLRTQCKNHLQSLLQMHGLLLPGSDPLGAAGQNWLAQQTLPLPLTESIPQIQRLLKLLEEEIAISEKYLQAVEAQFPELALLRTIPGIGAILAPVIWSEIGKIERFRSAKALANDTGLVASFYDSGEVKVSGPITRQGSRWLRWAFVTAANVAIQYRNPFARRYHRLRRGKKPNVAKAAIAHSLARCVYGVLKHGCPYREDRWGRKVGALEQEARGSARSTKTVL

SEQ ID NO: 246530 - protein, 341 aa, unidentified
MTLVMGMDQHRAQISAEWIDTITGEISRERVAPADRAGVRKFLARFEGEDLEVALEATTGWRFVVEELQRVGADVHLAEPAEASGLKGKKERPKTDWADARHLRELLLIGRLAESWIAPAHLLDLRARVRCRHTLSQQRTECQQRIQAVLYHHGIAQRRDLLTLEKRGWLAALKLPAAAREQITISLAIIDALDLQLVPFDLDLRAYARKQSGCRALIDQIYGVGGLVAVTILAELGDTRRFANSRDVVRYSGLDITVRQSDEHRAPGHLSRQGPPALRWALYEAAQRARFPTSPDRAYYVQAAERIGGNRACLALARKLLKRSYHILRELGDPALEPVAG

SEQ ID NO: 246531 - protein, 341 aa, unidentified
MQIHSIGIDLGKTTFHLVALGAAGKVLVKKKFTRKQLLIYTANLQASLIGLEACSGAHFLGRALRQQGHDVRLIAAQFVKPFVKSNKNDFVDAEAIAEAVERKNMRFVPIKTDDQLDLQAIHRVRDRLVSRRTAVINQIRAFLLERGLVFAQSPAKLKTAMPEVLENAEADLTLMMRNLIHVLWSEWKLIEEQLNDLNDELERICAADAGCTRIRQIPGIGLVVATAIVAAIGNGAAFRKGREFAAWLGIVPRQYSTGGKTNLLSISKRGNVYLRKILIHGARAAVLRIKRDRAPIGAWLDALDARAHKNVVVVAMANKLARTAWAVLSSGNEYRPIAQPA

SEQ ID NO: 246532 - protein, 430 aa, unidentified
MKSNTQNAKIEAITEKTLVLGIDVGSKTHYARAFDYRGIEYSKKPFKFSNTKVGFATFKEWILDLKERHEKDKVVPGMEPTGHYWFNLGKFLQDNEMKPVLVNPHHVKKSKELDDNHPTKNDRKDPKVIAGLVREGRYMIPYLPDGVYADLRTASNIRFQLQAELTRIQNRISRWFNIYFPEYKTVYGKPDAKSGMLILKAAPLPEDILTLGIDGVNQIWRDAKLRAVGKARAKTLIKAAEHSIGSKEGTMSARMEIRMLLEDYESQNMRLQEVMVLIEELVKEIPMAEKLLEIKGVGIRTVSGFLAEVGDISRFNNPKELQKLAGLALVENSSGKHKGKTTISRRGQKRLRYLLFEVAMSLVAKNPEFRELHNYYTTRRLNPLKKMQSLMAIAAKLIRVFYAMLTKGVDYDPKKMISDIKRPTVYLQAA

SEQ ID NO: 246533 - protein, 373 aa, unidentified
MDQEIIFVGLDVHKATIAVALAPDGRSNEVRFQGSVPHRPGAMADLGRRLQSKHPGARLTFCYEAGACGYGLARELTDAGYECLVIAPSLIPSRPGDHIKTDKRDATMLAKMHRAGELTTVWVPDASHEAVRDLVRAREAAMYWRNRARQALSSFLLRQGYRYGGRSAWTASYWRWLATLVLEHPAQQIAMQEYILAIHEADARHDRLVKQIEGIIPTWSMAPLVTALQAMRGIAMITAATIVAEIGDLGRFATPRKLMAYLGLVPAEHSSGAKIRRRGITKAGNPRARRLLVESAWTYAKSPRVSQVIQRRQEGVELEIVKIAWKAQLRLHDRYRRLAATGKPKNVVITAIARELVGFIWAISQRISPPATA

SEQ ID NO: 246534 - protein, 443 aa, unidentified
MCGIRPTVRYKKFWGYHFLNTSLEYNARIRCRKKGRVFLHRKKHGAFYGQLDAIVWIIIPVMGKVRPKLWQQPKPSFTAVRWMRGSSIERPITSANAVADSRHSTRIVNWVSNPHFARQSQLIMKQQNTQDIIEEINIGVDTGKHQLDIYIRPFNLCFSVSNDEQGIKKAMTEIKKYHPTRIVIEATGRLEHAFIVACSKANLPVVVANPLHIKKFAGAIGRLAKTDQLDAQLIAHYGEAIKPDLSQLKPESMRLMSDLLSRRRQLTRMQTMEKNRLTIMPKKITGTINPVLTVLKHQLEKVDQHLSKLIEACPDYHQKNEILQSMPGIGHVVAFSLLADMPELGNISSKQAAALVGVAPFNRESGTYKGQRKIRGGRYQVRTVMFMAMMSAIQCNPVFKAKYEQLVADGKPKKIALIACVRKMIVILNSMLREGKKWDLNHA

SEQ ID NO: 246535 - protein, 380 aa, unidentified
MSLQLNNTTNSAILYMAMELSASKWKLCFGVATGNRKRLRNVNAGDLKALELEIGLAKEKLHLSEKARVISCYEAGRDGFWIHRYLEQQGYVNFIVDSSSIEVKRKKRKRKTDRLDAQGLLRLLIRYDTGEKEAWIVCHVPDEAEEDKRRIDRERERLQKEKSAHSNRIKSLLILHGIVLKSLTGFKEKLKHWHTFDGHPLPIDLTSELLREYNRYELVSEQFRALQRTMLKELKTGTSRGAEISRRLYQLRGLGLIASWLFSHEFFAWRHFNNRRQVGSCAGLTPTPYNSGDSEVEQGISKDGSKRIRGLAIEIAWLWLRYQGQSKLSLWYAERFASGGKRMRRIGIVALARKLLVALWKYVEFGLIPEGAVLKAIGIR

SEQ ID NO: 246536 - protein, 408 aa, unidentified
MEVLYPRCSGLDVHKDSVVARIRCVSEPRHDEVRTFATTTTALMEMGEWLGSHGVTHVAMEATGVYWKPVWHLLEGDFELILANAQHIRNVPGRKTDVSDAAWIADLLAHGLIRSSFVPPAPIQELRDLTRTRKQLVREISQHSSRIQKVLEDANLKLGSVLSDVLGKSGRAILQALIEGETDPQKLADLAQGQARKKRAELVEALHGRIRDHHRGLLKVHLDLVAALNHALAELDASVGKALASIQEGARLLSTIPGVSDITAHVIVAEIGLDMTRFASDAHLRSWAGFCPRNDESAGKRRSTRVRKGAPWLKTTLVSAAWAAVRVKDSYLQAQFHRLRARRGAKKAILAVAASMLTAAYHMLKHRVEYKDLGAGHFARRDRLKMIQRLVRRINDLGCQVQLTPVAA

SEQ ID NO: 246537 - protein, 370 aa, unidentified
MPEAQASIYVGIDVSKDRLAVAIATGERRDEVLSLGTFENTPGSVDKLLKKLSGRGNVSVCYEAGPTGYGLYRQVRAFGYDCCVVAPSLIPVRAGERVKTDRLDAMRLARLLRAGELTPVWVPDETHEAMRDLVRARESAAEDQRHKRQLVSAFVLRHGRTYQRTKPWTMRYRRWLQSLAFDHPAHQIALQEMLQAERNATERLERLTGHIEALVPEWDLAPAVNALQALRGVALISAVTFMAEIGDVRRFETPVKLMAYLGLVPSEYSTGQTTRRGSITRAGNARVRHKLIEGAWTYRLQARPGERKLYILKEQPAEIQDIAWKAQSRLTARYRKLVQRGKKSTVVTTAIAREMAAFMWDIARRTMPAH

SEQ ID NO: 246538 - protein, 347 aa, unidentified
MKRIAVDLAKSVYQVAESFRSGQVVQRKRLNREAFRRYIQEQAEPVEWVMEACGTAHYWGRVAQALGHQVRLLHPRYVRPYRRRNKTDRNDCDAMLEAARCTDIHPVPVKSHSQQQLQQLHGLRETWKKSRTQRINLLRGLLREAGIEAPASTAAFIRAASERVDQPELAPLSRLLHIVLAEINLYEQCMTECEQQLKRWHADDDIVRKLDEVSGIGLLTASALTAAVGRPERFASGRQLSAWLGMTPREFSSGERRKLGHISRQGNVYVRTLLIHGSRAALLAAQRCQARTPEKLTQLQRWAVATAARIGHNKAAVALANKLVRICWAVWCHERRFNGNWQSTKPA

SEQ ID NO: 246539 - protein, 343 aa, unidentified
MAIVTGYDVHRNQITFDALDTESGEVSRGRIDATPEAVRAWVGRFLGQEVHVAVEACTGWLFVCDALAEAGAVAHLAEPAETAARRGTKRRAKTDRADARHLRELLALGRLPEAWIPPAHVREWRTRTRLRKTLVDERNHWLQRIQATLFHHGVPAAALPARLLTPAGRDVLDHIALPAAARERVTVALALIDAIDTQLAPLEREIRQLARRQTGCKALMRIFGIGELTAPTILCALGDVSRLSASRKAVRMVGLDIGVHRSDRRSRPGKLTRQGPPEARWALYEAAQSACRASSPDHAAYLELRARGLSHTRASLTIARKLTRRCFHTLQELGPAALEPLID

SEQ ID NO: 246540 - protein, 354 aa, unidentified
MNIKYIGMDVHKEAISIAVMNGDGKLVMESIIETKAITILQFIQGLRGDLHVTFEEGTWAAWLYDLLKPHVTELVVCDPRKNALLKEGNKSDKIDARKLADLLRGGYLRSVYHGENGLRTLKELARSYLTISKDLTRVMNRVKALYRSWGIFCGGQQVYAPRHRSEWLNKIGEAGVRRRAEFFYQQLDALRALRQAVRRDLLAESRKHGATKLLRQIPYIGPIRAALLIALIQTPHRFRSKRQLWTYSGLAIETRDSAQYRYVAGKLQRSKKPQQVRGLNQNHNHDMKAIFKNAATMASSREGPFHDFYEALLTKGMKPAMARLTLARKIAAITLILWKKGVHFDATQLKPQAA

SEQ ID NO: 246541 - protein, 362 aa, unidentified
MNRNTGMNAGQIIGTMGGKQVVGLDIAKHVFQLHTVDMSTGEIANVQIKRAKVLEHFVNKPKSLIAVEACGGAHHWARELTALGHTVRLLHAKIVRPFVSGNKTDATDARAIWLAVQQPGVKFVGIKTAAQQATLTLHRQRELLMKMRTMQTNALRGLLYEFGATFAQGRKALFKDVEQTLEDLSAQLPQMVRDSLREQVARIKAMSDDILTIEKRLGLQLKADPHMQRIAQIPGVGLLTATAAIATMGEASAFKSGREFCAWLGLVPKQTGTGGKVRLGGISKRGDTYLRTLLIHGARSVLAHAKEPGPWLAQIQARRPANVVIVAQAAKMARTIWAVTAKEQSYQRGFQSVRPNASMQAA

SEQ ID NO: 246542 - protein, 348 aa, unidentified
MPIVTADTPTVIGGIDTHQDLHAAAVVSRDGTVLGSQSFSTTRAGYRAMLRWFRSYGELVRVGVEATGTYGAGITRHLALAGVPVLEVTGPDRSLRRAKGKDDSLDAIAAAQAALTGQRVQVAKDRSSAVEALRVLRTTRKTAIKCRRATLQQLHNTIVASPDEVRDQVRNLTRMQLLRTCASWRPDTVGYRDPVVATRIALKSLARRVLDLNDEVADLDRLIEPLVEELGSTLTQLEGVGPNSAGEFIVAAGENSDRLRSEAGFAMLCGACPIPASIGKTQRQRLNRGGNRQANSALHIVVLSRMRTDPRTKKYVERRLNEGRTKREIMRCLKRYVAREIYHAIITT

SEQ ID NO: 246543 - protein, 346 aa, unidentified
MHFIGMDCHITTLDFAVVNEAGRLVKANSVATSVNGFMAFVKTVPPPRTIYMEEGTLAAWALETCVRFREKLVITDAKKNRWIGSSGQKGDAIDALKLAQLARGGYIKEVHHSVGQRRRFRELMIAYHDTVRSTTRVKNKIKAKFRQNGIQCTGVTVYSETYREEWKGKLPQEATLLLILDGLWRQLEQSEQTEKELLAAARAQAKHYPEIKYFEALPGIGFISAATISAILETPHRFADKRKVWMYAGLGIMTRSSGSKIYSEKLSTDYNRLLKYTLKQAAEAAIRDKDNPFRRKYLDMTLLHGIAPHRAKLTIARDMLATMWAMWRKGEKYNPEIREKAAYKQG

SEQ ID NO: 246544 - protein, 532 aa, unidentified
MATKRNSRKSGKKRPAVLGKPNGIIQPRVQAVGPERFGIAAFDCAKARSKWMLCDFYGRVLIEPVIVEHQRTALDLATAQLREACQKHGLRDVIVAIEMTGTYHRPVQRAFRKAGNETRLVHPFASSHYRQASHVDTKTDDNDLEGIFRAAVNGFGLLEPTWSDTYLQLQLLARHRRDLVQKRAKLQSQIRQYVERSLPGYADLFPDDNFWKQSLPIFVARRVNSAGELRAAGVSAVRRWLDEEKIRYQSPSVDRLVAWSANGADADPLSPHLARVWHALHDDWLAKTAQIERIERDLAELLVKTPYILLLSHPGINVVSASELAGEMGPIEHYAHAKAITGRAGLFPSRYQSDQVDRADGALAHLRNARLRAAWLRMADNLIKCNAHYRGKYQLWKSRGADARDIRCRIANRLTRTVFQMVSGRRIYHHPSRLDRQYVLDKLLTFHQEHKTPPHEILRDLKQAADQIPEQERAAEATPLRQRYEKCRRSRCKGPQQLGTLLLGVLAHYGIIGLELEVEARGPDAAKSDTST

SEQ ID NO: 246545 - protein, 346 aa, unidentified
MQHCGFDLAKTSSQLCLRTEDGQLVEHRLKTTREELTRFFAERPPTRILIEAATESEWVAQHLEGLGHEVIVADPNFAPMYATLSKKIKTDKRDARALCDACERGTYHPAYRSTDAQRQVRAELIARETLVATRTKYISVIRSMLRREGIRVQSCGAQYFRTHVELLDLPAHLRSAIAPLLAVLCVLGEQIGQADEQLAAVSKSEPLIKRLCLIPSVGPVTSITFVAILGEASRFSSAKQVRAYLGLVPKEDSSGERQHRGHITKAGNSRVRSLLVEVAWSMLSSKKREVQALKQWALRIAERRGKRVAVVALARKLAGILYALWRDGTEFDPARLRQPVTEAAAS

SEQ ID NO: 246546 - protein, 334 aa, unidentified
MEQITTVGIDLAKRVFVLHGVAAQGRVMLRRTVRREQLLETIATLPPCLIGMEAGSGAHEWGRRFETFGHRVRLMAAKFVAPYRQNGKNDGNDAEAICEAVGRPKTRFVPLKSAEQQAVLSLHRVRQGFVTERTATMNRIRGLLAEFGVVLAQRSPTVRRQALKAAETLPVLARRAIEDLCAQVRILDERIDSYDRDLQQQAQTSEAARRLMQIRGIGPLSALAIVATVGNARDFNNGRQFAAWIGLTPQQHSSGGKTRLGHITKRGDAYLRSLLVQGARSALHTATRHRDRVSRWACELEQRRGYHRTLVAIAAKNARIAWALLSKGETLRPS

SEQ ID NO: 246547 - protein, 381 aa, unidentified
MSIVALDIASKSATFCVLGTQGIRSQGSLTFDHDGFSSFIASGQVSDASLFVMESTGGYHLPLYHFLLNHGRKARIINPLLIKRFHDGQTLRRTKTDALDAVVIARYAQANLSALQEDRMQLDSESKMLARRRARNAEDLAKAKTILKSDLSVAFPELLRFNVFTKTLLEFLSVYGCAKDVLAATEEQLHQALYVPKGRKSDVVTVQKIQELAQVSIGVSYRAAMVRDSAKAVLACQQRDDDLTKALVELEQTLHQRQMEILTSIPGIGEVTASHFLSEIPDISRFATYQKLIAFAGSDPGIYESGNTSKQLRISKHGNPVLRKYLYLMADSCMRHNVVFNAYYHKKREEGFPHRKAMVATMNKLVRTLHALLSKDETYSL

SEQ ID NO: 246548 - protein, 310 aa, unidentified
MDDMVIGIDVSKDRIDGHIEPGGEAFSTDRDAQGLAALAERLKVLPVKVIAVEATGGFEGVVVAHLVEAGLPVAVVNPERVRAFAKAEGLRAKTDAIDAGVIARFARAVNPPVRAPADAETQLLADLIARRRQIVVMLTAERQRLKRATLGRARKSITRLIAALERELAVCDADIGDAVRQMPLWRLHDELLQSVPGVGPVLSRTLIAEMPELGHLDRRQIAALAGLAPFTRQSGKWRGKSFIGGGRSAVRSVLFIAATVAARHNPVIRALAERLTAKGKPWKLVIIACARKLLVILNAIIKSGKPWQIA

SEQ ID NO: 246549 - protein, 318 aa, unidentified
MSEPKNTKVSVGIDVSKKTLDIAVHETGETWSSPNDSSGCTALATKLKQLKATSIVLEATGGFETLVTATLSAADLPVIVVNPRQVRDFAKATGQLAKTDRIDCRVLAHFAAAIDPPMRPVKSAETQHLEALLARRRQIVEMLVAEKNRLANNRDRAVVKDLNAHIAWLERRLRSSDDELQRVLKTSPAWRERDNLLRSVPGVGPVLSLTLMAQLPELGQLNRREIAKLVGVAPFNRDSGQWRGSRHIWGGRAAVRSPLFMATLCAIRINPTIKYFYRRLIAAGKAPKVAITACMRKLLTILNVMVKTQTSWRTTCSS

SEQ ID NO: 246550 - protein, 352 aa, unidentified
MIVLGADTHKRSHTIAAVSVTSGELLGEQTVPSGAKGAAGLLRWARGLGDARVWAIEDCRHVSGSLERFLIERGERVLRVHSTLMSASRRQARGRGKSDSIDALAVARAALREGLDTLPAAHLDGPELDLRLLVDHRERLVRQRVAINNTLQWHLHDLWPEIHFPGSALFHGKWGPRIARRLARAEQTMRVRIARDELRRIRELTQTIKALEAEIADLVAQIAPHLLSEPGFGPLTAAKLVGEIAGAQRFSSDAKLARAAGIAPIPVSSGNTDRHRLDRGGNRQLNATIHRIAVTRLRCHPETRDYIARKRADGKSTKDAIRCLKRHLTRRIWHLLQAPAPITGQTLTPSIS

SEQ ID NO: 246551 - protein, 352 aa, unidentified
MKIIGCDFHPGFQQISMLDVETKQRVKKKLHPASGAAEQFYRSLQGQRVRVGIEACGNTRWFERLLQRWGHELVVGDAARIRAAAVRKQKNDERDADHLLELLATGRFPAIWVPSPEERDLRQLLLHRHKLVQMRTRIKNQLQHVALDQGLQKKRQLWTERGRQWLLEVSLPPWTERRRSDLLVLLDGLEPAIAELSQAVEMAAQQDPRVQLLRTHPGVGPITALAFVLVIGDVQRFARSNQLASYLGLIPSEDSSAGRRRLGAISKQGNTLLRTLLVEAGQSAARCDPQLKRAYQRCCHRKSLTGIGKVMVARKLAVRLYWMLKSNQPYTPARMQGSPSHPVSTREGSSIV

SEQ ID NO: 246552 - protein, 355 aa, unidentified
MTSTKYIGMDVHKESISIAVMNAAGKIVMECVIETKASMILQFIDGLRGDVHVTFEEGTWAAWLYDLLKPHVTKLVVCDPRRNALLQEGNQNDRVDARKLAELLHNNQLRPVYHADHGLRTLKELVRSYLTITRDLTRVMTRVKAIYRSWAIPCTGKQVYGPNHRAEWLAKINEPGVHRRAEFYYQQLDALRCLRQQVRRDLLAESKKHPAWKRLCGIPSIGPIRAAVLLGILQTPHRFRTKRQLWTYSGVGIETSSSADHQVVKGQLERKKKQVEIRGLNSNYNHDLKNLLKGAAIVAATKPGPFAEFYAELLTKGMRPEMARLTLARKIATIVLIVWKRGVSFDAQHLKPQTA

SEQ ID NO: 246553 - protein, 334 aa, unidentified
MKQVSQVGVDVDSEELVCAMQRAGQRLPLATFANTAAGHKKFIRWATKGARSVRVCLEATGIYSLEFALALHHAKNVEVMVVNPRAIKDFTRACMQRAKTDAVDAGGILDYLERMPFSAWQPPAPEILELQAINRRIDQLHTELTREKNRRHAAEFAGAGADAIVHDIEINIRHLERRIERMQESGLQLVHGVPALAAKLAHLVSAKGIADASAMRILAEVLVLPDDLAAPQWVAHAGLDPRPYESGTSVHRPRRISRVGNRHLRAALYMPALVAIQHDPNVKAFYNKLVTAGKKPMQAVVAVMRKLLHAIWGMLKHDQDFDGNKFFRLTEKTA

SEQ ID NO: 246554 - protein, 422 aa, unidentified
MSSVTPAAGPIHLGMDTSKNTIVVGILMPGDEVPVIDRIWNEEGSVRHLVSRLGDPAALRACYEAGPCGFELHRLLASMGVACDVVAPSLIPRRAGDRVKTDRRDASRLARLHRAGELTPVRVPAAAEEAVRDLVRVRAALLADRKRAQQRLTAMLLRHGRVWRSGSSWTQAHEQWIAGQRFEEPALAAALAHYRAGLDTRRAELDAIEAELAPWAGREPLAGPVAQLGCYRGIAELHSLALAAEVVDWHRFPSARAFMGFTGLVPGEYSSGDKTRRGSITKAGSEPVRTALVEAAWAYRFKPAIGVTLRRRQRGAEPDTLARSWKAQRQVQGDDGPRQTAGRGRYRGRPRARRLRLGRDDQLTGAGKAAICDDLRGQDRAHQGQHGPGQPGCPPQPVACRDARRRRNDPRAHYERVRDARI

SEQ ID NO: 246555 - protein, 462 aa, unidentified
MKRRSRKRKAVKLPAELKRVNLNAAGIDVGSASHYVAIPEGRDTETVREFKSFTADLHELANWLSDCGITTVAMESTGVYWIPLFEILEARGFEVYLVNPKHLKNVPGRKSDVVDCQWLQQLHTFGLLSASFRPDQQICELRAYTRQRDGLVKSVSSHIHAMQKALGLMNIQLHNVLSDITGETGFRIIRAIVAGERNARKLAEFRDRRCKNSVEIIEKSLVGNYKPEHLFKLRQELALYDVYQTMLAECDEAIEQCLSGFAPKINVAEKPLAPKAAKKRRKNELYFDSREYLYKMVGVDVTMIDGLDSYSVLKLIGEVGLDMSRWPTANHFSSWLGLAPGTKISGGKRLSGKTKPSANRAAEVFRMAAFTLSNNSSALGGFFRRMKTRLGAPKAITATAHKIARLFYTMIRFGKDYVDTGANHYEEQYRSRVIKNMQHKAQKLGLSLVLITTEVPMGLEVS

SEQ ID NO: 246556 - protein, 404 aa, unidentified
MIFVGVDWAEAHHDVCVLDERGMVLGRRRVSDGVAGVAELHALVAEHAEDSAGAAVGIELDRGLLVGALVAVGYEVYAVNPLASARYRERHGVSGAKSDRGDAKVLADLVRTDRHNHRRIAGDSDLVEAVKVLARAHQSAIWSRQRQLNSLRSALREYYPGALAAFGTDLASNDAVSVLAIAPTPELGRQLSQSKIASALRRGGRQRNSQARAAEIQAALRSDQLAAPGRLSDAYGVVARSGVAVIVSLTREIAALEEALGEGFDEHPDAKIVRSLPGLGTVLGARVLGEFGDDRTRFATAKCRKNFAGSAPITKASGRSLVVLARVARPRRLADALDQWAFCSLNQSPGARHYYDLLRARNKTHRQALRQLANRWVGILHTCLEHNHLYDEHLAWSHLTAIAA

SEQ ID NO: 246557 - protein, 431 aa, unidentified
MSRFRPYTPKRPEGRFKYVPGLAGFEAVHSRLEDRHRSEREEDWMGQVIIGMDPHKRSATIEIMAADESVAGGGRYGTDAAGYRAMLAAARRWPQRIWAIEGCQGIGGHIAHRLLADGEQVVDVPPKLSARTRVFATGRGRKTDATDAHSVALAAIRMTGLRPVVNDGQLAVLRILADHRRSLGEDHTRMTSQLHQLLLELIPGGAKNDLSTAQVKALLARVRPRDAAGRARRRVAAHLISDLERIYQRKKAADKELNELLKATGTTLTCLHGIGPSGAARLLAEVGDVTRFPTRAHFAPWNGTAPIDASSGDQVRHRLSRAGNRQINRALHIMAVVQLCNPTEGRAYYDRKVAAGKTPREAMRALKRRLCDIACHQMTPRGRARQTGPGGHSGTTLTSSVTGLTPVAGSSDKPLPGPATHQPKTPFLTAH

SEQ ID NO: 246558 - protein, 353 aa, unidentified
MKRTTKYVALDVHQATTVAAVREQGGRVIARSILPTEAGPLVEFFRGMRGSIHLAFEEGTQAQWLHDLLAPVVDQIIVCDRRGEPRGNKADQRDADNLSHRLLTDDLRAVYHGSSDRLTLQELTRAYSNIVEDSTRAMLRLKSLFRARAIRAPGTRIYGKKDRALWLRKLSDRGARFRAEALYAELDLLRELRPKAKALMVAEARRDPAWEVLCSVPFFGPVRVALLLATMKTPWRFRTKRNLWAYAGLAVVTESSADHEFIAGRPVRRRRKPLTRGLNKNHNRVLKDVFKSTATSSIGRAGEFQDLYRAMIARGMREDMARLTLARKFAAITLRLWKTGEPYDPAKLTVQAT

SEQ ID NO: 246559 - protein, 385 aa, unidentified
MRSEATRAGETSVGEQVLYMVLELSERSRKVLFASAAGRRRERAVAGRDVAGLLEEIAAAKRRLGLSAQARVVSCYEAGRDGFWLDRALRGHGIENLVVDSSSIEVPRRARRAKTDRVDLVKLMGLLLRWAGGEKKVWSVVRVPDVDAEDVRQLSRSIERLKAEHGRHVTRIKALLATQGIKLGHIGGRDWAKRVGELRRWDGSALGVWLQRDLVLEGERLAVAAAQLAALKAERDKLVAQGGEVAAVKARELARLGAIAKESSFVFAAELFGWRTFANRRELAGSVGLTGTPYSSGDSAREQGISKAGNRRMRTMLVEIAWCWLRYQPTSALARWWQGRFADSGGRTRKIAIVALARKLLVALWRYLERGVVPEGAVLKTRVSA

SEQ ID NO: 246560 - protein, 348 aa, unidentified
MYDSKDIILAVDYHDENLVIRQFNCHTGQERLLKYRTTARNVRKVICDSASEAAEVGGRVFWIMESTTGWARVKNAIGSTGKLIVANVLQMPLPPKAYRRKTDKIDTGRILREFLNGSLPVAFQPSDELRQIRRLVATRESLVSRRTALRNWINRYLAHETWRSRAGLWSAKGMRSLKRFAASVEGPDKVVLSVKLKELEHLVELQTIVETEMLAIYKQWPEAQWIDEIPGVAEISAVSILARVGPIERFDSPEELISFAGLAPGIQQSDGTRREGRIGGGGTDKHLRHYLIEATFWARRVPRYRTTYERMLDKRGPKIARVVVARMMLRSIHKMLRAQVHFNPLRAA

SEQ ID NO: 246561 - protein, 432 aa, unidentified
MPFAALDLHKKIVEAIVLDDAGNIVHRDRFPATGEALLAFARKHLAPDCQLAIEATTNTWPVVALLQPLVHSITVSNPMATRAIAQSKVKTDKVDALVLAQLLRCDFLPKVWTPDAQTQQLRQLCTERATLTADRTCVKNRIHSLLHQRLIEAPAGDLFSKENLAWLARLDLDPIGKQALDRQLFFLDMISTEAEMFNDHLAGIAYKSKEVQLLMTLPGVDFPVAETLLAMIGDWRRFPDGDKAAAYFGLVPSTRQSADKCYHGPITKHGKGHARWMLVQAAQHLDSHPGPLGVFFRRIAKRKNRNVAVVATARKMVSIAWHMLKNNEPYRYADPKTTEAKMSRLRVRATGKKRKGGNPKGQPRPASYGTGRPTRAVHALGDVYAKEGLPPLRELSAGEKKMCQQHGVDGYAAAIRQTRRVPRKEKPATPKA

SEQ ID NO: 246562 - protein, 358 aa, unidentified
MAKRTTKSENGKQLVVTAKDRVFVGLDVHKKSYHAAVRINGREVATRVLAPTAEAVLVFLEPYRSGRLHVVYEAGPTGFALVRALREAKVSADVIAPSKTPQTPAKANKTDRLDCRQLTFYDEKGMLKTVAVPTAEEEADRQVIRLRDQVVDARRRIKQQIKSFLLQHGVTQPAGLANWSKESVEMLRQLPLVAALRFCLDAMVAELKDFDERLGQVNREIERLSQEPRHAEAVTRLRKYSGVGVITAMQYRTEVFRPGRFANERQVAAYLGLAPRVSESGERHRTGPLLKAGHGRLRSLLVEAAWIWIQKDETAKATYKRLLQNTAQPNKAITGMARRLAIQLWRTLVPPEERRGAA

SEQ ID NO: 246563 - protein, 465 aa, unidentified
MKTKKISRANKKKKSADHQMVAICEANAAGIDIGAQAIYVAVPPDRAPQQPVRCYGTFTVDLISAIGWLKECGIESVAMESTGVYWVGLYQLLSDHGLKVCLVNARHVKNVPGRKSDVSDSQWLQYLHSVGLLRGSYRPPQAICALRSLYRHRQNLLQFGAQHIQHMQAAMEQMNLKLAHVIDDITGLTGMRIIEAILSGERDREQLAKLRDRRVKASQATVAKALQGDWRAEHLFVLEQALSSWKQVQEQIAQCDTELQKLAQQLESKIDLSQAPLAPSTKPNAKSKAKNEPTGPWREEQYRIFGVDLTAVPAINVATVQTLLVEVGPDWSAFKTAAHFSSWLGLCPDNKITGGKVFRRSTRRIAHRVSTALRLAASSLHKSQTLFGQRYRRLRSRLGAPKAITAMAHQLARVLWHLVTYKTPYDESLFARAEEAHSAFKTRQLKNLADSLGFALVPKTSNATV

SEQ ID NO: 246564 - protein, 387 aa, unidentified
MYFVGIDISKFKHDCAIVDEFGDVITPSWSFQNDREGFSLLKELLDALDGEKKIGLEATGHYGQNLKLFLENNDFSFMEFNPLLINRFVHSKSLRKTKTDSIDALMIAQYLMTVEYKPYPPSFYTFEKLKSLTRFRDSLIRQRSRQLVELTNILDKVFPEFKPFFKGRFSATALYILSHYASPEKISNMNSKSYEPLRRLSRGRFSMVDFVELKTLARNTVGSTSDYLLQEMEITIDIYNQLQSKAEEIELQIHDCVLDLAPPMLTIPGIGAASAAVILSEFGDLSKFNNPSKLLSFAGMEPGYFQSGTSESTGKMVKHGSSHLRYAMMNCAQTVINNEPTFAAYYAKKRAEGKEHRVALTHVAKKLLRVIYTLQTKELSYNPDLVR

SEQ ID NO: 246565 - protein, 362 aa, unidentified
MGKIPAVKSRRETVRPLVLKTVGEQGSPPVIPLTRTVARAGPGRARISKDGIMENIFVGIDVSKDRLDVCVRPQGESFVIARDDEAVAGLSVRLGALSPRLIVLEATGGLQVKVAGALAAAGLPVAVVNPRQVRDFARATGQLAKTDRLDAAVIARFAEAVKPDPRPLPDETSSALMALVSRRRELVQLRVAERNRRRQATSRWVQRDLEASIEALTLRIEAIDLEIEDQVKGSPIWRLKEDLLKSVPGVGDIVSRTLIAELPELGHLTRRKIAALVGVAPMARESGAWKGRRQIAGGRPSVRTVLYMAAVTASRCNPVIGALYERLIAAGKAPKVALIAAMRKLLVILNAIARDQKPWTTA

SEQ ID NO: 246566 - protein, 310 aa, unidentified
MEATVVVIDVSKDRLDVHVLPSDEAFFEANDAAGLEKLAGRLAALSPRLVVLEATGGFERLAVATLGAAGLPVAVVNPAQVRSFADALGKRAKTDPIDAEVIARFGVASGVKPRPLPDEQSRLLADLVARRRQIMGMIVAEEARLKRADNRQLKQSIRRLLTALRRELKSVDADLDGQVHASPAWRTNEDLMSSVPGVAKTISRTLLAGLPELGTLDRRRIASLAGLAPFTRQSGKWRGKSFVSGGRTSVRAALFMGALVASRHNPVLKAFRDKLIAQGKPRMVALIAIARKLLTILNAIIRDQKPWQTA

SEQ ID NO: 246567 - protein, 327 aa, unidentified
MKTSTVGLDLAKNVFQVHSIDEAGAVVERRALRRRQVLPFFSKLEPCLVGMEACGTSHYWARELSALGHRVKLMPPAYVTPYVKRGKTDAGDAEAICEAVTRATMRFVAIKSPDQQAVLALHRVRDLLIRQRTQLVNMIRGQLAEFGIVVAKGIQHALRLVERLLDGEALELPELAAKIMITLAQQVRDLQARLRDLDKDLMAWFRGNEIARRLETIPGIGIITASALAATVTDPHQFTSGRQFAAWLGLTPRAHSSGGKERSGRISKMGDRYLRRLLVSGMTSQLQSVRRHPDRHPWTTGLLHRKPAKLVAVAMANKAARVVPGLS

SEQ ID NO: 246568 - protein, 330 aa, unidentified
MMLHSIDLHKRSLEVATMCADGEGEPRVVRMPACERALGSYLRQWPASRHRVVVETTGSWYWIADFLREQGAELKLAHAAKVQAITAAKVKTDSVDALTLLTMLRLNLVPEAHVISPELRGPRDLLRQRLQLIEKRTSSLNSIARLLEKYNRASVEALPEFAQVQAGFHREQIALLRTQLKALEKRIHRELRPNPTVKRLLRIPGIGRLSAWTLYLEIDGIERFATERNFFSYSRVVPGADNSGGRTRSKRSRAGNRYLKLAFSHAAVRAVQRYAEVGAAYRKKLRKKNKPLAQAWVRKELARIVYHVLKDDVDYDDRFRGVALSRPKRA

SEQ ID NO: 246569 - protein, 423 aa, unidentified
MENTVARKRKQIPEGYLVIGVDPHKKRHAAVAITQDFTTRAKFKFDNTREGLETMLHGVRKEMVASGCRGVIFAIETGGHYWRNIAYFLEGRGIPYRFINQFTLKRRREGKDLNCRKNDYRDSEVAAQLLCTGEFTESKLPQGVYAELRTAHNAYRRLVKERTRITNLVKGLLDGLFPEFTHVFKDPCGLTALSVLSNCSIPSVIAGMTEEEFITTIEARHRGRLMRRKLRALHNLARRSIGIDAGAGPVSSEISFLVEKLGLIRQHIHIMEETLVRLVDVTEEGKYLLSIRGLNYTAVAGLLAELGCFKLYRSAKQMIKMAGSNPTESESAGKRSAHTPMSKKGRPVLRYCAWTAVIPMLRLNEDFRAWAKQKRERPAHANPLNGREVVGAALNRLLRLAFAMVKNQTYYQVPKQELELVAV

SEQ ID NO: 246570 - protein, 325 aa, unidentified
MCKVIGIDISKQTFDVCIRKERKLIHLIFENNFKGFKAFLKKMDLETDFVVMEASGPYYVRLASFLFESNVVVSVVNPLIIKRFSQMKFYRAKTDKKDASIIMEYGETEFSNLRVWQPESKEVLQLKQLHSTIELLRKQISQSKNQLEAFSSSGLLDPTVKKSLEKSIKQLTKNVELLESAMLEICEEHYSESLSLLTSIPSIGNKTAIQLIAITDNFSKFEHYKQLIAYVGFSPRTYQSGTSVRGKGHICKMGSSQIRKLLYMCTWTAKKCNKGCVTMYERLKEKGKPERVIKVALANKLLKQAFAVATSKQKYNENYQLKICI

SEQ ID NO: 246571 - protein, 340 aa, unidentified
MTITTIGIDLAKNVFAVHGVDQNGKTVLVKSRVTRAALPGLIASLPPCVIGMEACSGAHYWARLFLQYGYEPRLMAAKFVSPYRMAGKSGKNDAADAQAICEAVRRPHMRFVPVKDESQQAMQCLHRTRQGFIEEKTATYNRLRGLISEFGVIAPQSTDALRHMVSAQKSSLPLQVQQCVDDLLEHVDRIEANITEYDRILSRIAKTDHRSQRLMKLKGVGPTTACALVACIGNAHDFKNGRQLAAWLGLTPSQYSSGGKSKLGRITKAGDSYLRTLLVQGARSVLIGAEKRTDSFSRWVCSLVERRGYWRAVVAIAAKNARLCWASLHYGDDFRLYSAS

SEQ ID NO: 246572 - protein, 360 aa, unidentified
MEQAHAGMPSICPRDFALFAGLDVDKHSLAVTVMNHEALVKSMKMPYDPEAFGQYLAKHFAGQRIALAYEAGPTGYGLYDALVASGHTCLVAAPANIPREPGRRVKTNRLDSVQLATALRGGTLRGIRVPSRMYRDLRHMAHLRQAHVSEATATKFRIKALLLSEGLPFPPAPPGSQWTDRVLKKLAAMSCPLTVRFAMDSLLQTLALHQGQAKKVLDQMLRFCQENPELSDSLRFLQSAPGIGPVVAIVLIAHVGDWRGLTRVREMGAFVGLVPCESSTGEEVGKGAITRAGDAYLRSILIEAAWTAIRQDPELKAFYRRVYRRHPRDRAARVAIVAVARKLASRLFCLLKERRCYLYP

SEQ ID NO: 246573 - protein, 414 aa, unidentified
MSDVFSSPKDQPVQPNGRHVVGIDIGLQTHAAAGLTTAGQPFGRQLAFTNDRAGIDRLEKDLLIPLGGAAKLLIGMEATGHYWMPLYFELQRRGYYSIVINPIQTRAKFRTRIRKTKTDKLDARSIARLVLSGEAHAARIPSEEVFALRLQARQRWRLVDLSSDLKRFAYSLIDRLFPEFHDHFCSPLNATGRGLLRQLGLAPQALADQPDQVMAVAKTASRKRIPAASITALLDKARHSIAPRRAENVLIAQLRDTLTLIEQIESQTVALETELAALPAVSSSPLQSLGLSVALIATLHAEADPILDFKHPWQFAAYAGLDPSCYDSGNMHGTRTPISKRGSPYLRRALYLGACSVYRRHRTFQSLYQAHRKKGRHHTSALVIVAHKLARVIWRLLTDRRDFRARQPKPITTK

SEQ ID NO: 246574 - protein, 412 aa, unidentified
MEQIHERVAGLDVHRDSVAACVRVPGPRRGTVTHKQRFSTMTSGLGQLAAWLSEHRVEVVGMEATGVYWKPPYYALEGREFELWLCNAHHVKNVPGRKTDMSDAEWLADVVAHGMVRPSFVPPPAIRELRDLTRYRRTQVDMRSAESQRLEKVLQDAGIKLSSVASKVLSMSGRNMVEALIAGQRDTGVLAEMAIGRMRNKRSELSEALNGHFGPHHAVAARQILDHVDFIDTGVTTLSQQIAVLTKPFASVFDLLDPVPGLGRLSIEVIIAETGADMSRFPSAGHLASWAGVCPGNHESAGKRRRVATTPGNPWLRRALIESAHAAARTKESYFAAQYRRLAHRRGPNKAAVAVAHSLLVVIWHVLSTGERYQDLGSDWFERRRDPERETRRLVGRLEALGHRVELVKPAT

SEQ ID NO: 246575 - protein, 341 aa, unidentified
MSDLALVGIDLGKHTFHLHGQDKPGRELFRKKLSRQQMMRFFANLPACTVVMEACAGAHFVARELTALGHQAKLISPQFVKPFVKGNKNDFVDAQAICEAASRPSMRFVSPKSEAQQTLSVLHRLRESLIRDRTKSVNQMHGFLLEFGIGLPQGLAVMKRLSAVLAEHELPVRLTVLLQRLHDHFVYLDEQIKALDKELIGQLADDDLGRRLLSMPCVGPITASLLAVEMGDGQQYGCSRDFAASLGLVPRQYSTGGKANLLGISKRGDKNLRRLLVQCARVYMQNLARQKGALADWVRALMTRRHSNVVACALANKFARIAWAISAHHTQYETGPGALNA

SEQ ID NO: 246576 - protein, 307 aa, unidentified
MEKEEISFVQVVKVGCGIDVHKDLITATIRKSNDKLETREFNAYTSSLKSLRDWCKKEKVTHVAMESTGVYWKPVFNVLETDLEVILVNARHVKNVPGHKTDKKDSRWLSKLLLSGLLKGSFIPPVEIRELRDLVRYKRKVVAQASSEKNRIIKILEDANIKLSSVLTNVNGVVGAKIINSIIAGKTDIDELMKFYHGKIKVSRKEFRLALEGRITKHHRFMLQLHKDSIADKERLIERIESEIDEATKAYQVEVDFLQTIDGVGKASAISIISEIGVDMTRFPDETHLSSWAGVSPGNNETGGKKK

SEQ ID NO: 246577 - protein, 327 aa, unidentified
MVYLGIDVSKAKLHTCLRREGEDKQKTKVVTNSRDGVTALIDWLARQGTVPTQVHAVLEATGVYHETTAEALHAHGVTVSIVNPAQAKRFAQGLAVRTKTDAVDAGTLARFGALVRPAPWTPPPPEVRTWRALLARQQALSEDLRRERNRLEKAGATTMPPPVLDSLADSLAFLEQALAKLQQEIDHHLDGHPQLQADVALLTSIPAVGPKVAHQLLALLYARPFQSAEQLAAYLGLVPVERQSGTSVHARARLSKAGPARVRATLYMAAVVATRYNPHIKALYERLLARGKAKMAALGAAMRKLVHLCFGVFKTRQPYQADYAPQA

SEQ ID NO: 246578 - protein, 401 aa, unidentified
MHAVIGIDVSKATSQVAVAVDGKVVQNFKITHDVFGFNQLNTVIMQFNTFPDIVFEATGVYSRRLKNFLEAHNYPYTYLNPLTVKKQLDQLRPNKNDLNDAKHLAETQFILKRAKSYVQNPIYIELQDMSRFYQQLNHDIVSAKNRLHRLLQLTFPEIETLFSTTDSQQYWEIVSLIPHATMAKHARQTLSDTIQSSVSRQIGVARLTRLVDKLVALGSLSAPAVAVASYNVTEVRYYAQRLIALSQSKANVLATMVDQTKDLPEYDIYQSIPGFSDKTVVSLIAELGDLHRFATSNKLNAFVGIDLRFNDSGDYKSSGFITKRGNTIARKVLFKAISNIASTATYGHQNHINDWYQKKKQSSMSKRTKKIAIGAMSRLLRTMHYLVLNNQLYDYDTASKR

SEQ ID NO: 246579 - protein, 343 aa, unidentified
MEHIAIDLGARESQVCVRAADGTILLEGRHPTVALRAFLGQRPSSRVVLETCAEAFGVAAVARELGHEPVVVPASLARALGVGTRGLKSDVRDARHLSEASCRMARLPAVHVPALQSQARKGECALREALVTTRTKLVNTVRGWLRGQTAGPLRRCTPPRLPARVRAHLAAHGQAVPDAVERVLHVIEALNGQIRAADAALTALAQADAVCRRLMTVPGVGPVTAVRFAAAVDDVQRFPRASAVQSYLGLVPGEDSSAERRRITGITKAGPSRVRWTLIQAAWCVRRLRPQDPAVQWARRVESRRGRPVAAVALARKLAGILYAIWRDGAVYDPQHSATRRAA

SEQ ID NO: 246580 - protein, 409 aa, unidentified
MQVMHCQCAGLDVHKKSVAVCVLLGEAGPQPQVFRRSFGTTTGALLELHDWLRELGVTHVAMEATGAYWKPVWAILEDSFDLTLSNAAHIKQVPGRKTDQKDADWIADLLRHGLLRKSLVPPTVQQDLRDLTRHRIQVTGDRSAVSNRISKLLEGANVKLGSVASDVMGVSGQRMLDAIIGGETDAEKLAELALGTLRKKHEALVEALRGRIRPHHRTMLRLLMAEWRFLDRLLAETEQAIEEAVGPFMEAVKLLETMPGMKATAAYSLVAELGMNMEVFPDSAHAASWAGICPGNNESAGKRYSGRTRSGNRWLKRTLCQVAWAASHTGGCYFQAQHRRIAAKRGKKRAIVALAHSILVTAYTMLKRRCTYQDLGADYFEKIHAEGLKQYCIRKLEQLGHRVLLESVA

SEQ ID NO: 246581 - protein, 343 aa, unidentified
MQTITAIGLDIAKSVFQVHGVDATGQVVIRRQLKRRSVLAFFQKLPPCLVGIEACASSHHWSRELQALGHTVRLMPPAYVKPYVKRQKNDMADAEAICEAVTRANMRFVPTKTPEQQSCLMLHRTRHLFIRQQTAVINSIRAHLAEFGIVAPVGRKGVTELLHIVADPNDKRVSEVARACLAALGGQLLSLKQQIVEFDRMILAWHRSNQTSKRLHYIPGVGPILATALVASVADPSTFRSARNFSAWIGLVPKQHSSGGKDRLGSISKQGDRYLRSLFVVGALAVIRYAKIHGTGHRPWLTALLARKPAKVAAIALANKMARMVWAMMARGGRYKEPVALAR

SEQ ID NO: 246582 - protein, 446 aa, unidentified
MSHRRQVPSRGVARRNAKLKALRKLVSRDRAILAVDLASAKQAAVVLDHDSVVLGRRMFTGSAWCISEILAWAGPIAAKAGFSGLVLACEPTGHRWKPLVVTARAASIPVVCVQPLLVHRGREGEDFTRNRSDFDDAVIIGRLTAELRCYVPYLPEGPWARLRHLGARRAELLVRATAARQGLRDLLECAWPALLAAAAEPLDSMTWRAALAVGADPEVIASTSVETFTAALRGQVRALGGQRVCHRIARAIHAAAAEPGGIAAERAAALERAGFAYGDWMSALAAIAEVEARMVTVLDELHLTCLVTTIPGLSAIGAAAILAETGDPARYDSPRTWVKHAGLAPRANESGTYRGQTKTSGRGRPGLRTAAWRALWGALRNNPVWSARHAYLISRDRNRLNDGQARTAVAAALLRQLFIVITRRVPWDPAIAGASASRPEVTTAAA

SEQ ID NO: 246583 - protein, 347 aa, unidentified
MEQIIRIGMDTSKHVFQLHGVNAAEQPILRKKMRRKEMVDFFAKCPSTVIAIEACAASHHWARLLTEFGHEVKLIAPQLVKPYVKRGKNDAADAEALCEAMSRPTMRFVPVKSADQQAALMLVGLRERAVATQTQIANTIRGYAAEFGLTAAKGMSHIPLLLERMMIEDNIPALARDLFASLAEEFAQLGERLKEVEAKLMAWYRDNECCRRLAKIPGVGPIGVILLVMKAPAPEQFTSGRQFAAWMGLTPKDHSTAGKVRLGVTTRAGDEALRKTLVVGATSLLRQVRAGRGRNASLWLIALLKRKPPKLAAVALANKIARIAWKVMATGEAYKGNAARPAMACVA

SEQ ID NO: 246584 - protein, 351 aa, unidentified
MVVSPSSKVLLKKLLRQFESKYPEATLHVVYEAGPCGYWIYRLITSLGHCCYVVAPSLIPKKSGERVKTDRRDSLKLVKLLTSEDLTPIYVPEPEDEAVRDLSRARGVAIKDLKQAKQQLKSLLLRNNIRYEGTADWSKKHLRWLTELVLPHPAQHIVLQEQLQTIEERIHRLERLDNELTHQVHQWRYYPVVKAIQAMRGVRLLVAVGVVAELGDLNRFDHPRKLMAYLGLVASEHSSGGKRRQGGITKCGNGRARRLLIEDAHSYRYPANVSAELQRRLEGLPKDIVDIAWKAQLRLCRRYQRMSQRGKHLNLIVTAIAREMAAYMWAISREVQLTPVNPKLRLSRVPA

SEQ ID NO: 246585 - protein, 368 aa, unidentified
MKKRITFVGLDTHKNSIEVALADDGRNTEVRLYGSIGGDLASLDKMIRKLQTTGAELRFVYEAGPCGYEIYRHLQAQGFHCDVVAPSMVPKRSGDRIKTDRRDACNLARLYRAGELTAIYVPREDDEAMRDLVRGRQDAIHAQRKVRQQLGGFLLRHGFRYPGKCVWTLAHRRWLAGVRMPHPAQQIMLQEYIHSVEECTQRVHRLTEQILQLMPDWRMHPLVGALQALRGVAPVVAATAVAEIGPMGRFEKPRQLMAYLGLVPSESSSGGSVRRGAITKTGNGHARRALIEAAQAYRHPARVSRVILKRQEAVPEPIRQIAWKAQLRLCARFRKLIARGKSRNRVVTAIARELSGFMWAIAKQVPVP

SEQ ID NO: 246586 - protein, 433 aa, unidentified
MLKINYMSTLFVGIDVSSKTNAVYAMDFEENKYISSSFGNNQPGADKLVNMIAECMQKHKNLDTLLIVLESTSVYSVHISNFLSASEVLMPYRPYVFCVNPKATSNYRKSYIGMEKTDPTDAYLIADFGRVGRTKKLEPWRGGQFIALKRLTRHRMHLSECITREKTYMVSNLYLKFSELQLLEGDDRPFGSLYGATSSAVLTEFLSPQEIIDMPEEDLLAFLAEKSRNRISDISKTSELLRKAARDSYRLDKCMYEPLNISLASSFNCIHAYQKEIRLIEQAIGKCINGMNPNALTILRSIPGIGPVWASGILSEIGDIAAFHSSDALAKYAGLYWPKGDSGDFTSEDNQMSKAGNPYLRYYLGEAANSVRKHIPEYADFYARKYAEVTKHQHKRALALTSRKFVRLVFGLLAKNQLYTGEKLDTEYNIKTN

SEQ ID NO: 246587 - protein, 343 aa, unidentified
MLRLMPPVSPDRVCVGIDVSKDKLDVQADNAKRGFGVPNTPAGHAKVIQRLRSLPLAFVVVESSGGYERPVLFNLLDAGLPVAHVNPRVVRDYAKSFNLLAKTDPIDAKVLSCYGRERQPRLFTRTDKLRHMLQDLNRCRRQLIEQITALKTQAQTTIHPTAKKVLQDAAKALEEQLDVVDRDVQGEIDKLPELKRRQDRLLEVDGIGPITSRTLVIELPELGTIDRRRLAALVGVAPFNDDSGTISNRRIIKGGRPHVRAALYMATVTGVRCNPVLSAHYKHLVEAGKPPKVALVACMRKLLTHLNAVLARVDEAAAPAQTPDDAALPEAKSTPVRGGGEKE

SEQ ID NO: 246588 - protein, 452 aa, unidentified
MPSQPRVLRSQRKIIGHFEVVNPRAAGVDAGSEKHLVSVPEECRDQPVRTFGTLTKDLEALADWLVECGITTVAIEATGVYWIPLYEILEQRGLDPRLVDAHSIGKRNKKTDVLDCQWIRQLHTYGLLDAAFRPPAQIRPVRALTRQRRMLIEHAAQHIQHMQKALEMMNVKLHLVLSDVVGVTGLRIIRAIIAGKTTPAELATLREPNCSASEQMFIDALQGNYRAEHLFALRQALTLFEVHQTLIAECDTRIESELRALQRVEVKSNSPKQQKKRSRRKNEPHFEATALLHQMAGVDLTAVDGLESSTVLTILSEVGTDMSSWSSAKQWAAWLNLAPNNRITGGKPIRAKGKVIRPNRAAQALRLAAQTLERSKCALGAFFRRIQARHGRQAAIKATAHKLALIVYSMLKNQTEYRDPGVDYYERRYRDNLLKSLTKRAAELGFNLVPAT

SEQ ID NO: 246589 - protein, 457 aa, unidentified
MVCKEMAAVMEPQEIEDEEHEQILERVAAVDVAKSAGMVCTRVPHEMRPGKRRTRVWQVDAATNAILELADHLRCQGIEKVTLESTSDYWRIWFYLLEAAGVDVQLVRARDVKQAPGRPKTDKLDAVWLAKLTERGMLRPSFVPPVEIRQLRDYTRLRTDLTRERTRHYSRLEKLLEDALIKVSAVASKLDTLPVRDMLEALIAGERDPQALARLARGKMRAKHDRLAQALTGKFDDHHAELARMLLDQIDALSAQIGKLTTRIEELIAAIPAAQGIDPGGTTGPAAGQGAGAPVLPAVDRLDEVSGIGREAAQALIAEVGLNMAQFPTPPPLVAWTKISPQTLQSGARNPARHTGKGNPYLKGILGEAAAAAGKTDTFLGERYRRLARRRGKLKALVAIARSILVIVWHLLAGRSTRYHDLGAGYYASRIGKNRKTRSHVRQLEALGYTVTLTQAA

SEQ ID NO: 246590 - protein, 343 aa, unidentified
MSINTMIGVDLAKSVFQVHGASMNGETRFQRKLSRQAFRTLMARHPAAAVVMEACGSAHYWARVLSGFGHEVRLIAPRYVRPFVKRQKNDAADAEAIVVAAQRPEMRFVEPKSEAQQSAAILYRSRQRLVRQRTETVNALRAALYEFGHVIPQGIQHVGRIHAILEAPNSDLPALMREECLAMLEQLAVLNGWIDTKTAKIKELAAATPVSKRLQTMPGIGPLVAMAVETFAPDMASFHNGRDFAAWLGLVPRQFSSGGKERLGRITKAGQADIRQMLIIGAMSRLNWMGRKSILESSWLARMMARKPRMLVAIALANKMARQIWAMLTNNEDYKNPMPVMAA

SEQ ID NO: 246591 - protein, 350 aa, unidentified
MAMTTMTETPRRITGGVDTHRDTHVVAALDDNGAELGVESFPTTPAGYRAALRWLRRFGQVERIGVEGTGSYGAGLTRFLRGETIEIVEVSCPNRQLRRSHGKSDPVDAVAAARAALSGSADTEPKSRDGKVEAIRALRTADRSARHARVKALNQMRALLLTGPDELREQFRGSTVWQLARGAARLRPGDPTTAVGGTKYALRLLARRVLELEAELAELKAILKPLVAATAPELVARHGVGTDTAGALLVAAGDNPERLRDERAFAHFCGVAPIDASSGTVVRKRLNRNGDRQANAALWRIVMVRMVSDPATRHYMERRTKEGLSKREAIRCLKRYVARELYPLLAQNAP

SEQ ID NO: 246592 - protein, 423 aa, unidentified
MPATFASSPDERDLEDVLMAAVVIGVDPHKGSHTAVVISAAEQPLGEIRVRASKTQADELVAWAAAWPERTWAVEGAAGLGRLLAQQLVAARERVLDVQPKLASRVRLLQAGDTNKNDPNDALSVAVAALRSTASREVIADDYPAVLKVWSKRHRDLARLRNQVACRLHAVLCDLTPGGHSKEISAAQAAKILERVTPSGAAALARAELAADFLADLRHLDAQLRDTKKKLAAAVRASGTSLTKVLGVGPVIAGTVIGDVADVSRFPGRDHFAAYNGTAPVEVSSGNRKIHRLSLRGSRRINHAIHMAAITQIRHRHSDGRAYYDKKLAEGKTHKEALRCLKRQISDAIFTRLQADARQASARLAVKGPGGQPGNGSASSAAGSHPARRLFGQATPGPGTTIRPATTAGTPSKPVSKKTQATT

SEQ ID NO: 246593 - protein, 372 aa, unidentified
MQQTIIHVGLDVDDTQYHGSALDKYTGEVIDFKCRPTLKGLLNQLEKLDRHFPGCTLKLCYEASYIGYTLQRDLAEKGYHCDVVAPTSIPSPRGRQVKTDRIDAAQLAQFYANDLLTYVSIPELEQEQDRDLLRSRQKLLDQQTELRKHLQALLRRNGRHFKAETHYKTHWTLPHYAWLERTIEAASGSFKVNLSLLVRQLKALNAVLAEYDEQIDQLANTPRYIKPVQALTCYKGIKNLFALTMITEIGDVKRFPHPRQLASWIGMDIREYSSGGKHNRFGITKQGNRFLRTAFVEANQRGYRTAGISQRLKARRKDTDTELVSIADRCLRRLNKKGNRLLMAGKHPNKVKVACAREMVGFIWESLQKVAA

SEQ ID NO: 246594 - protein, 412 aa, unidentified
MKDLLEISCGLDVHKEKIVACILTGPLGKPTRSEIREFSTLIPDMIALRNWIVSKNCHHVAMESTGIYWMPIYEILEDAFSGDITLLVVNARHMKNVPGKKTDMRDSEWISTLLRAGLLNGSFIPEKRIREFRDLNRYRKSVIRDITSQKNRIEKFLQSSGFRLSSFISDIFGASGRNIILHLIEHGQIDKTALDSCLKTKTRNRIDEILMSVNGTLSEHQKAFLRILMTHYDSLKKHLAEIETSLEEDMAPFALQVEQLNSIYGISTTASCAIIAEIGIDMKPFKTAEHICSWAGLCPGNNESAGKRKSTSVTKGNPYIKSMLCEIAWVIAGKRNTYLSAWYWRIKQKKGAKKAIVALARKLLVIIYTMLKQGTLFDESCFETRRKHCEQKQLSRYIRELEKHGYHVETQS

SEQ ID NO: 246595 - protein, 358 aa, unidentified
MTTKNTDTIGIDLGDNSHEVCILNKAGKVIATTTLLNCKSERDAFSAENAGAKIIFEAGTHSPWISRLFEELGHKVIVANPRKLSAIYKSDNKTDERDAEILARMGRFDPKLLHAIQHSSLKHQRDRKVADTREALVDARTKLINYVRSSLKSFGVFLPKGTSTATFAKKAREYLAEEDYDLFASAIETIADLTERIKAADKEIEILIEEDYPEALRLQQVAGVGPITSLTFVLTIGTPDRFDKARDVGPFLGLVPKRDQSGESDKALRITKAGDRQLRRLLVSCAQYALSDKGPDCALKRSGLKRAKDGGKTDKKKAVIKTARKIAVLLLALWKDEHGEYLRFPDQPNENAAKEEAA

SEQ ID NO: 246596 - protein, 412 aa, unidentified
MGRVIGIDIHRTFGEAVIWEDGALRRVGRVDMTRSALEGLGARLLPTDEVVIEATGNCMAVSRVLSPFVRRVVIANPMQVKAIAHARVKTDKVDAGTLASLFAAGFLPEIWTPDAATERKRRLTARRYQVVRHRTRIKNEVHGILHAHLIPKCPHADLFNRRGREWLARQPLPDDERGAINRHVRELDRLAEDLAILDREIAESALDDGAIKRLMTITGVNLTVAAGIMAAIGDISRFHSPGKLVSYVGLNPRVRQSGLGPAHHGRISKVGRSHARAMLVEAAWAAAKAPGPLHAFFVRVRARRGHQIAAVALARKLTVLCWHLLIKDRDYLWARPALVANKTRAMELQAGKPQSKGNRRGPAYAHNVKTLRDQELRLAEQAERNYARFVDRWKTRPSNAEVRERLNSARTE

SEQ ID NO: 246597 - protein, 438 aa, unidentified
MSNKVIFNLDELFISVGIDVGADFSWMSIALPNQQFVGKPYKILHNSIDSLTTAVSKIKEAEELYSLESRIFLESTGIYHYPLFCYLRDKGFNCSVINPIITKNSTNINIRKVHNDRFDSKKAALVGLKPDLKVSLMPSDLALNCRNLCREYYDLMDNRSAYVNKLQGELRMAFPQYLGIFSKVTINTSLTLLETYTSPSAFLEADKQEIIDIIKSTARFGLTYAQNKYNAIIQAATDANQFGYIIDSNIKRIRLYISFIRKYDEEINSILESLHELVDANEDADFVKQIHLIETFKGAGFLSAVSIMGEIGDFSAFSKPKQLFAYFGLDPAVKQSGKFEGTKVQMSKHDSAIARRVIHTLTLQSISISRNGEAKNPVLREYYIKKCDSKPKLVAMGAVSHKVCNMIFAILRDNKPFKIIAPQEHIKQYNAAKCDIAA

SEQ ID NO: 246598 - protein, 340 aa, unidentified
MEQIIGIDLAKRVFQVNIVSAQGEKKANKMITREKLTAFIVQQPPSRIVMEACGSANYWSRQFRQYGHEVKQISPQYVAPFRMGSKNDKNDAAAIVEADSRPGMRYVPEKSIEQQDIQCLHRVRQRLMKNKTALINQIRGLGLEYGIAIPEGAHKIMAHLPEHLEDAENELTTLSRELFHEMLQELQDNQQRIKTLDLRLALISQQNEDTLRLKSIPGIGPLGASALTVALGDSADFQNGRHFASYLGLVPKEHSSGDKVRLLGITKRGDGYLRGLLIHGARSVVYRVINLPEERCGGLQRWLKGIIARSGVNKAVVALANKNARIAWALINQKTEYIVK

SEQ ID NO: 246599 - protein, 395 aa, unidentified
MKRQENKACGADIHKRFLMACILSRDGSKVLNRFDMTVEGVLCFASWLKDNNCKKVAVESTGNYWHLVYQVLDDEFEFILGNAFKTRRHSGAKTDKRDAEWLAELCLNNKIEPSMILPKEDRELRALTRARKGYVDFRSKLKARTIQELEACTIKLASELSDVFGKSGRHVLQGLVDGRSADVIVESIPSKKVKKNKEMIKQAIIAGLSPISIFLIKSHIQMIDEVDKKLVQLDAQISRLLKARKRDVEIAMSIPGIGFVSAAAILSEIGDYRNFASGKKLAAFSGLDPSVYESAGKRYNGKITKMGSKYLRRMIIECAHALSRTKAKTQLKRFFLRIMARRGKNIATVALARKMLVVLHHLLINQEMYKDDGLAKPKNVKVSFSEESKLDPSSL

SEQ ID NO: 246600 - protein, 309 aa, unidentified
MNSFVGIDVSKLQLDVCCLSSEERSWTIPNEPAAIAKFVVEMQEEQPVLIVLEATGGLEMLVSSALAVVGLPVVVVNPRQVRDFARASGLLAKTDKLDARVLAQFGRVMNPTPRSIPDECAQQLQALIARRRLILDMITAENNRLSLSPRPVREDIRKHITWLQRRLKQIDKDLDGAVRNSPIWREKDNLLKSVPGVGPVLSMTLLANLPELGTLNRRKIAALVGVAPFNRDSGTLRGRRTIWGGRSAVRAVLYMATLSAVRFNPVIRQFHERLKAAGKAPKVALTACMRKLLVILNAVIRNERPWQPV

SEQ ID NO: 246601 - protein, 384 aa, unidentified
MTTAARESTIREQASELLASFELSQTSWIITIRLPGSERLSRHSLKAGDTAALSALLARQRERSARTLGQACGVVTIYEAGLDGFWLHRWLTAQGIDSHVVDAASIAAPRRKRRPKSDGIDGETLLRTLAAWRRDEPRVCSMVAPPSVADEDRRRLVRERAQLISERTALTNRINGLLLNQGITGYQPGKRDAPARLADLRTGDGRPLAPHLTAEIGRMLERLELLRSQIRQVEAERDALLAEEQQSNPLGPIAMLLTLRAMGPEFSAMLGLECFTHSFPGQRQVGAFAGLAPTPWRSGSVQHEQGIGKAGRPRLRAMMIEAAWLWLRYQPDSALSRWFRAKAGEARGRARRVAVVALARKLLVALWRYVTQGVLPEGARLKAA

SEQ ID NO: 246602 - protein, 337 aa, unidentified
MSKITLIGIDTAKNVFHLVGIGERGNYVYRKKVSRRQLLPALVRLDPCEVVLEACAVSHHWARQIAQIGHRVRLISPQHVKPFRRGQKNDYRDAEAIISAALSPGIHFVGVKSVDQQAEQALHRVRSRLLSHRNAAANGLRGLLSEYDLAFSKGIKPLRRGAAEFAASEQAQALGLVGLVWDVLEELDRLQQRLDEYTRQIEQRVRNDAVSQCLCAELLGVGPLSASALRVKVADPRDFTNGRNFAAYLGTAPGHSGTGGKVKIGKIRKSHDPYLRQLLIHGARSAVQHLGDKQDPQSRWLRGVLDRRGFNIAAVAQAHKNARQAWAILAREQTPQA

SEQ ID NO: 246603 - protein, 347 aa, unidentified
MRFYNQQHKYYCGIDLHARKMYVCILNSKGKVKVHQNIKTDPEVFFDLIFPFLDDIAVGVECVFCWYWLADLCAEHHIRFVLGHALYMRAIHGGKTKNDKIDSYKIACLLKGGTFPVAYAYPAAWRAARDLLRRRMYISRRCGELVAHIVNTNTQYNLPAFKKKLSRKYNHDGVPERFANPQVRKSVEVDLALIAFMNQELNKLEYYIEKTAKHHDYHTLYLLRSIPGVGQILALVILYEIHDIKRFARVQDFSSYARLIRPVKESDGKWAGHSNKKIGNHHLKWAIKEAAVIMLRDSNQAKYYVSKLTHKYNKGKAMGIFAHKLGRTIYFMLKNKKAFDMKKFFDQ

SEQ ID NO: 246604 - protein, 449 aa, unidentified
MKEPQEIADEEYEQVVERVAAVDVAKASGMVCTRVPDPSRPGRRRTRVWEVAATTNALMELGGQLAREGIEKVTIESTSDYWRPFFYLLEAAGLQVQLVNAHDVKNAPGRPKTDKLDAVWLAKLTERGMLRPSFVPPAEIRRLRDYTRLRTDLTRDRARHWQRLEKLLEDALVKVSAVASTMDTLSVRDMLEALIAGERDPKVLAGLARGKMKAKRAALIEALTGRFEDHHAELARILLDQIDFIGARITQLTTRIGELITAIPAAQGIDADGTTGPGAGAGPDAARPDALTRLDEIPGISAHGAQIVLAEIGLDMTRFPTAGHLVSWAKLCPRTIQSGAKHRSGKAGKGNPYLKGVLGEIAAAAAKTDTFLGERYRRIVKRRGKLKALVAVARTILVIIWHLLADPAARYLDLGAGYYASRTDTDRKTRNHVQQLEALGYTVTLTNAA

SEQ ID NO: 246605 - protein, 357 aa, unidentified
MTTYYIGADVHSNSTELAIEKRKKIVARYSVPTTIPAISNVLDSLQGKKQMALEEGPMAGWLYRNLCRKVDKLIVADPRRNKLITSDGDKDDKIDAAKLAALLRGKYLRSVYHSESDARSELKHWVSLYHDRGKDAVRNINKIRARCRMYGLTIPRLALRDPSHRGQWLFKINQPVLARQLNMLWIGYDATAKQTRMAKQQLIQLSKRYPVIHLWEELPGIGLIRATTSFAYLDTPWRFKKKNALWKYCGVGLQRTTSGTDKKGRPKPARLQLPWAVNRTLKNMILGAAISAINQKDNVFKAYYERMVQDGVISSNARHAVARKMLTVMWGMWKTNSRFDERLCQESNRPTASALSR

SEQ ID NO: 246606 - protein, 344 aa, unidentified
MSIKVVGIDIAKNLFQVCVLSADGQILSNRKVKRDKLLDTVRQLPEQTAIAMESCATSHHWGRIFQELGHSVALIPAQHVKPFVGRQKNDANDARAICEAFSRPDIHFVPVKSVEQQDLKAIRSVRKRLVENRTALANQIRGLAAEYGVMFPLSIKALRSHLPLALEDAENDLTPVMRNLLQTLYRDFVSISEKIDEMTQSVTMLSQQSPRYDAIRNIPGFGPILTAALISEVGTGNQFQNGRQFSAWCGLVPKQNSTGGKNSLGSLSKNGNRELRALLIHGARAVVRCGANKTDAMGVWLRGLIARRGKAKAIVALANKIGRVAWHILAKNSEYDINQAFKPV

SEQ ID NO: 246607 - protein, 326 aa, unidentified
MHTHFLGIDIAKSKFDCALVRPDGKVRNKVLSNNAQGFAQLLTWLDAHGVSSCQLSQLHVCMEATGIYWEALAEFLCDQGIAVSVINPAQIKSYGASRLMRSKTDKIDANLIAHFCKERLPQPWKAPAPHERVLRSLVLRLEALQNMLTQESNRLQVANAAVQPQIQNHIDWLNAEIKAVAKLIKDHIDKHPDLRQKRDLLQSIPGIGERTLAIMLAYFGSTEQFDNARKAVAFVGLDPRQHESGSSVKGKPRMSKVGHAFVRKALYMPAMAALYKTDWGKCFRDRLASAGKPPKLIIGAMMRKLIHVAVGVLKSNKPFNSALHCA

SEQ ID NO: 246608 - protein, 392 aa, unidentified
MSKCTIPSFVGQVIFCGFDVHKDKWSVCVRHCGREIAAYPAPADARAIAGKLRRDYPDAEIRSVYEAGFSGFEAHRILVEEYGIRNIVINPADVPTNNKERTRKSDRIDCRKLARTLEAGLLEPIYVPSRDHLQFRNLVRRYTRTTSSLTRTINQLKSHWYFNGEPVPTRVCRRVLASRREQALRNGDYTSVSLIDQYFFLIELRKTIRTWEHETILQLNLSAKMKNLVSIPGIGFRTATVILSEIWDVRRFPDKDHLASYAGFAPYLVGSGEKEETVGADCRKHKLLHYILIQAAWRAARSDPEMICLYGKLQKRRHSPQRIACIIAKKLLFIARAVLLEDREYRSAGAGKKKDPLRTGSGAAASCPPPSPTGQGGVPFPPPAEPSISRGD

SEQ ID NO: 246609 - protein, 453 aa, unidentified
MAQRNCSLSRKADKSRQALTITHPNSAGIDIGSASHYVAVPPDRDDEPVREFASFTADLHRLADWLAACGVDTVAMESTGVYWIPLYELLDARGFTVLLVNARHVKNVSGRKSDVLDCQWLQQLMNYGLLRGAFRPADEVCALRALARQREMLLKSQARHVQHMQKALTQMNLQLANVISDVAGETGQKILRAIIAGERDGHVLAALKDTRIRASNEQIAKSLQGNWRAEHLFALKQALASFDFYATQLAECDHEIEQQLQRLHVHRGECAKGRKRGRTRNAPKFDLRAHLFKLCGVDLTRIDGIDVTTALAVISEVGADMSKFPSVKHFTSWLGLCPGTKITGGKLLSGKTMRVANRAAQALRLAAAALRSSHSALGAYFRRLCSRMDKPKAVTAAAHKLARLIYTMLTKGEEYTDQGQDYYEERYRERVLRQLSKRAQKLGMKLVVSEQPA

SEQ ID NO: 246610 - protein, 357 aa, unidentified
MGKFIKNLSSVTSVGLDLAKNVFQVHAVDAHGAVIVAKPVRRGQLLKFFASLPTCLVGLEACSSAHHWARSLIALGHRVKLIPPAYVKPFVRRNKNDAADAAAICEALGRPNMRFVAVRSVDNQAQLMRHRARELLVGQRTQALNALRGHLAEIGVVAAQGAQNAYVLKRLAADGCDENGEIVVPDCVRAALAPLIRQIDALDEESDMIDAEIETLVQADEKARRLMTIPGVGPVTASAVVATVQDVSGFASGREFAAYLGLTPRQYSSGGKKKLGRISKMGDRYLRKLLVVGACAVLCHRKGHHDALRVWADRLLERKDVKYKFKLTAVALANKPARIVFALLTRGGVYAGQPVGA

SEQ ID NO: 246611 - protein, 342 aa, unidentified
MKNMMIGVDLAKTVFQVHGALRTGEVQFRKKLTRMQFPAFMAQQEPGMVIFEACGSAHFWAREMEALGHEVKLIAPQYVRPFVKRQKNDAADAEAIVIAARQPEMRFVQPKTVEQQSCAAVFRARERLVHQRTADVNALRALLYEHGHVFPIGMSYLNRMTALVQDETADLHALIREECLDLLVQIAEKTARIIERTAKLKTLAAQSDRARRLQTMPGVGPLTAVAVEAFGPDMVDFKTGRNFAAWLGLVPRQYSSGGKERLGRMTKAGQADIRRLLIIGAMSRLNWLGQRTIVEGSWLSRMLMRKPKMLVAIALANKMARQIWAMLTKNKDYTDPAMAVVA

SEQ ID NO: 246612 - protein, 345 aa, unidentified
MEQQRQYVGIDLHRRRSVIVRRSAAGETLEVTKVDNDDLLAFEQAVMAAGEHPEVVLEACYGWYWATDLLEELGCKVHLAHPLGNSWGNRRVKNDTRDAEDLADLLRLGRLAEAWIAPPEVRELRELVRYRAKLVCLRTNCKLQVYAVLAKEGVNVPMTDLFGVLGTELLETCRLSTAYRTRVESLRDLIEVFDHEIAKLEGDVRHELRGHAGYQAIQQIPGVGPLFASVFVAEIGDVTRFRSPAQLASWAGLTPKHHESDLTVHRGPITKQGSRLVRWAAVEAAQRQANGTKLRADFARIAAHHGDSAGARKIARVAVARKIVTLVYYGLRDGTIRSKAISEAA

SEQ ID NO: 246613 - protein, 400 aa, unidentified
MLSIGIDVSKGKSTVCGMKPGGEIVYTPFEVQHTREGMSELVSLLRGSGEEVRAVLESTGSYHCPVVTALLENGIFVSVVNSLRMKRFCSQSIRRVKTDQIDAMQIALYGLAYWQELQPTRLPENTYRELQLLARQYYQMTSLLIKAKVDFNAICDQVLPGMQELMSDHAGRHKLSDFVLRYHHTTHILETGETRFRKDYCKWAEKKGYRNCERMAALIFATAQNGIPVLPNAPSTQIVITEAIRVLHTVEASRDAILTQMQALAKTLPEYSLVREMPCIGDTLAPRLIAEIGDVRRFHSKRALIAYAGIDAPPYQSGKFRANNRHISKRGNRYLRKTGYEVMQSYVMHKPANDPIFTFIEKKRGEGKSGKLAMVAGLNKFLRVYYGKVTEFYRSLPAIE

SEQ ID NO: 246614 - protein, 343 aa, unidentified
MQFFVGIDVSLESSSICVIDERGIIIKEGKVESDPQSVAKFIRHKGRKIEHVGLEAGQLSEWLFVGLSKEGFKVSVLESRHVRAAFAAMRVKTDRNDARGIAQLIRLGWFKSVHVKTLNARETRAVLNARQFLVDKITAIENTIRSSLRNFGLKMGQVTRRGFAPRARELADGSSCLQLVTGSLLKVRETLLDELKKLDRKLIDAARADPVTQMLMTAPGVGTIVALTFRNAVDDPGRFAKVKSIGPWLGLTPRRYQSGETDRTGHVTKAGDLGTRTALYEAATTLLGRNGGWSTLKRWGLHIAARHGIKKARVAVARKLAVILLCMWQSNCPFRWSNQGAVA

SEQ ID NO: 246615 - protein, 425 aa, unidentified
MNYKQNEKINQVKESTLVVGIDIGSTTQYARAFDWRGIELGKVFTFSNSREGFEAFKAWMQHLQDKYRKSDVIVGIEPTGHYWFDLGAYLEDEGILLVMVNPYAVKQTKELDDNSQSKNDRKDPKVIAKLVTEGRYSAPYTPDGVYADLRIMVANRKRLIREMTQIKNRFARWFAIYFPEYTDVFGDYEAQSSMLLLKKVCTPEAIVELGAEKINQIWRDAKLRAVGMKRATTLCETAKRSIGLKKGSSAARYEMKLLLEDYEYKKAQLDSVMEEIESLCKKIPESEQMLAIKGIGVITVAGFLAEVGDVRRFESPRQIQKLAGLSLRENSSGKHKGQTTISKRGRSKLRAVLFNAAIPLIATNPEFKSLHEYYTTRANNPLKKKQSVIAISCKLIRVFYAILAKGVTYDAQKLISDIHRQPQAA

SEQ ID NO: 246616 - protein, 367 aa, unidentified
MKKVSTAATEQNRNFSQQRLTIGLDLGDRNSWYCVVDEAGQIQLEQRVGTTAKGLREVFGAMPRSRIALEIGTHSPWISRLLSGLGHEVIVANARKVRLIGESRKKDDRLDAQTLARLARIDPELLYPVKHRSAQAQSDLMMIRARAGLVRVRTGLVNTARGLSKSYGERLRGCNVRNMNPEKTEGLSPELQAALEPLLAAIESVSQRIAEYNQRIENLAQQSYPQVGLLKQVKGVGTLIGLTFLLTLEDPRRFRKSRDVGGYLGLQPGRRNSGRSEPQMHISKEGDPYLRTLLVQGAQHILGPFGPDCDLRRWGLKLAERGGRNGKKRAIVATARKLAVLLHHLWVSGEVYQPLHNSCRVAVTAAA

SEQ ID NO: 246617 - protein, 346 aa, unidentified
MLYAGLDLARKRICFDARRPDGEIVDRGASPTDADGLDRLAQRLLAHDCKVLAVVESMNGARFVHDQLELQGVEVQICDAERAKGLAPLACKTDKIDAGVLAELARRDLVPEIWLPDPGTRADRERARFRLHLVRKRTALKNRVHSTLITWGKPCPVSDLFGRQGRELLQRLSIPEPWRSTLQASLELIDALDGEITAQERDLRALGANHPYVPQLTTVPGIAWVLGFTIACEIGDIARFPSPKKLTGYTGLCPKVNQSGEHDWRGRMKKNGPKYLRWALIEAAQHAGRSAHYRDLYERTRKRHGPQRGAKVAAIVVARKLSSAIWHMLMNDESFAPASAAVTLAA

SEQ ID NO: 246618 - protein, 334 aa, unidentified
MSKIAVSVGLDYHPGSVQICVLDEHGKVLTNGTRENSSQELNRVARLYGEQIQAAIEVSPGAANLADELVTRFGWSVDLAHPGYVARITQSPDKTDFGDARLLADLTRVGYLPKVWLAPLDVRELRELVRYRQQLVRERRSTKLRVRALLRNQRLNGPGNAWTKAWLEWVRNEAALPDHSRWVMTQQLSNLERLQREIRQVEQRLEEVTKEDVIFQKLLEQEEVGLVTAVTLRAEIGRFDRFRSGKQLCRFCGLSPRNASSGARQADAGLIKASNPELRCVLIELGQRLMNHSDKWSERSAEMRARGKPRSLIAAAVANRWLRKLYHEMKSTHE

SEQ ID NO: 246619 - protein, 489 aa, unidentified
MQSKGFLGIDVSKGYADFLLLDPNKKVLEESFQLADNPGGRKQLKELIEKWFSWGIEILYCGVESTGGYENNWYNFLKGKSVQANVKVARLNAKGVKAVSDAALKRTITDAVSAENIAVYMISFPEKINYEKPSVGEAETKFKEGRGHYTCIRMLQKQKVQLSNQLEKLLYQYFGEMLIYCRHGIPGWLFRMLSHYSCATAVIKAGENKLSAIKGISAAKAQALMQKATVSQQIVSRQVQHVIAVTSKEILHKEQLLKTEKNYLTEMYQEDDQVKLLSSIPCVGVESAVALMLEIENVEQFESAKKLAAYFGVHPTFKQSGDGLWGSHMSKKGRGEVRAVLYMAALTGIRHNIILKQLYARFRAKGMKHYQAMGAVMHKLLRIIYGVLKNKTEFDAAIDQKNTEQAKEKQQQEDKQIRQTKKNKRTKKAQVPICNNRCTYIPNSSTKNKKAGSVPSFITEENTGLLSAPTQTYKKCLKKHLDFNGITMW

SEQ ID NO: 246620 - protein, 340 aa, unidentified
MTITTVGIDLAKNVFAVHCVDQHGKTVLVKPKVSRAALPELIASLPPCVNGMEACSGAHYWARLFRQYGHEPRLMAAKFVSPYRMAGKSGKNDAADAQAICEAVRRPHMRFVPVKDESQQAMQCLHRIRQGFIEEKTATYNRLRGLISEFGVIAPQSTDALRHMVSEQKSSLPLQVQQCVNDLLEHIDRIEDNITEYDRILSRMAKTDHRSQRLMELKGIGPTTACALVASIGNAHDFKNGRQLAAWLGLTPSQYSSGGKSKLGRITKAGDSYLRTLLVQGARSVLIGAEKRTDLFSRWVCSLVDRRGYWRAVVAIAAKNARLCWASLHYGDDFRLYSAS

SEQ ID NO: 246621 - protein, 347 aa, unidentified
MSHSKKGDRTMQVERIGLDIAKQSFQVHGVDAHGKVLVRKQLSRSKVLPYFAQLPSCLIGIEACGGAHYWARELQKLGHDVRLMAVPMIQPYRTGQKNDQNDAEAIGEAVSRPQTRCVPVKSEAPQAVLTVHRARELLVTERTALANQIRGLCMEYGIVIAQGIQRLRRALPELLAAAETLPPLVCEVVEELRERLLELDRRIADYDHRIEHLAKQNAAATRLMQVEGVGPITATAVVATIGEDHAFQHGRQFAAWLGLVPRQHSTGGKTSLGRITKHGNVYLRTLLIHGARAVLQFSAKRSDQKSRWVEQVRQRRGNNIAAVALAAKHARILWALLARGQEYQLAA

SEQ ID NO: 246622 - protein, 314 aa, unidentified
MMKITFIGGDVAKSQILFAQHGKDRVEQVANSKTDLRRFFKRLPTGSALAMEATNTYHELAAQLAYDLGIDVYVLNPRDVSHYANSIGMRAKTDPCDARMIARYLAREHTDLHRWKPATQAQEALKALINRRSTLVSSRVAMQQSMGTESELKPVLNGLKKAFAKAVAAIDKAILRRLKEEPELARHADMLKDIPGIGPVVSAALATLLSRHPFASADAAVAFVGLDPRPRESGTWRGQRKLSKRGPTEIRRLLYVAAMTTARNVAMRGEIDRHKAKGLSATAIYNIIARKLLRTAWSMLKHQTPFAMDRFSAA

SEQ ID NO: 246623 - protein, 400 aa, unidentified
MSGLKGKFDCIVGIDISKDKFDACGITGEEKKLFQISVAMDRKGFEKLKRHFADFSVSSVLIGMESTASYHVNLFSYLVAEGYKVILINPLLISNYMKMELRKTKTDKKDAVVIARFLLSNGNTLMQKATPSLISDLRDLSRQRESLVDEMTSLKIEIKQLLNITFPELEHMAGIFTKSILRLLQQYPSAFAIKHADVGQLSQALITDSYGHKREEFAKTLIKTARFSIGINSPAKEIIIKQKIGLLLHLEDALDEITDMLIEMARKLMEEDINIITSIKGIGDKTAANFLVEMGGDINQFECSGKIIAMAGLDPAVYQSGQHEGRGRITKRGNRHLRRIIWMMTTGVIQYTDIFKAYYLKRRKEGLPYKKAVLATAHKLIRVIYAMLTKRTTFCPQVNS

SEQ ID NO: 246624 - protein, 359 aa, unidentified
MDSLPPHNRIDNKMTHNPLQETSSQSTPRLFAGIDVGSEELVLLVRKNGKPLDPQKYANTRADHARMVKKLGKLPGVIVCMEATGAYHFDLAIALHDAGIKVMVVNPKVSHNFAKVLMKNSKTDAVDADTLAVYAERMDFVAWARPADEKIALRCFSRRIAALTRQKAAAKNQLHALGATAETPEGVMRDVKLAIAQLEKRIDSLTVLALALALIGKHPELARVLQLLVGIKGIAEASAIALMGELLLLPPGLSHREWVKFAGLDPKAFESGKSVHKKTRLSKAGNSHVRAALYMPAMSAIQHDRHVKAYFQHLTEMGKLPLQGYCAVMRKLLHAIHGMLKHDKPFDNTRFYAIPISVG

SEQ ID NO: 246625 - protein, 411 aa, unidentified
MDKVYDICCGIDVHKKLIVVCFKKGNKQEIREFGATTRELLELADWLKEGGCEMCAMESTGSYWKPLYNILEASDLKAMVVNAQHMKAVPGRKTDVKDAEWIADLVQHGLLNPSYIPNKDQRELRELVSYRKSLVGERTRELNRLQKMLEGANIKLSGTIKDINGMSARNILEYILTGKAFDEKKYDEMYEQRLISHNLKASKEQIIDDLNGVMSPLQRRMMRELLAHLDELNQHIRNLDDEIDNFMKPEDKNAAQAIQSIPGIGNSSAQAIIAVIGTEMDRFPTDAHLASWAGLCPGNNQSAAKRKSGKTRKGNALLRTTLITCAHSAVKNKKSYFYAQFSRISAHRGSKRAYVAVAHSMLIAIYHMLKYGLAFEDLGADYYNQFNKDRKIAAYLKKLKGLGWEAPVVAA

SEQ ID NO: 246626 - protein, 410 aa, unidentified
MKVAGIDVHKKVLMVVVVDASVPEEKPVRRRFVTMPSELQRLLTWLQEQGVEEAVMESTAQYWRSVWLELEPHMRLHLAQAFSNRAPRGRKHDFKDAERLVRRLIANELILSFVPDGEQRIWRSMTRMKLQLTRDRVRLQNQIECLLEEMRIKLSIVVSNLLGASGLRILHALANGETDPKRLAQLGGERLQCTEEQLADALTGRAQPVHGEMLALQLQRLQLIDQQMARLNSMIAAAMKPHQDAVIRLAEVPGLGVDSAQQIIAEVGAQAGTFPSAAELTSWVGTCPGKEESAEQNHSSRSAKGNKYLRRVLNQAAHAAVAKKGSHFQAVFRRLLPRLGYQSAIWAVAHRLCRLVWKILHEGVRFIEQGHEVAPREKKKRAQMLARALRKLGYEVTITPINQLVTNPVV

SEQ ID NO: 246627 - protein, 423 aa, unidentified
MNCSTLCIGADVHLDEIVLCAVDQAHGHEVTDRFRVTNNLPGAQAAATTIVRLATDLGYSRIEIAWEATGMLWIPFHRYLSRCPQLQSFELELVCLNPQLVAKFKEGLVLRRPKNDPLDAAAVAARLRFGELPLSYVPGDFWQGLRRLTRHRFHLSRSLSREKMRFQAYAFLKCSDWKRVKPFADVFGATSVTLLTEYTVAELTQMTHDQLVDLIRRHGRKHFADPAATARKVRQALRSSYPVDPQLDEMLTATLATAWEHIRFIQRLMKRLDQHIARAIEPVPNPLITVKGLGAVITAGLLAEIVDISRFAEHKHLAQYAGITWEKRSTGNFVSQNTRLTKVGSKYLRYYFILGANSLRRFNLEYKAFYWRKHDEVAKYQHKRALVLTARKLVRLVHALLTKNVAYVRPQSLAIVQEDGALQ

SEQ ID NO: 246628 - protein, 403 aa, unidentified
MNSVGIDISKGRSTVAVMRPFGEVVISPFEVRHTDSELSELARQLKSLDGETRVVMEATGNYHAPVAKLLHDAGLYVSVVNAKLVHGYGNNDLRRVKTDKKDAVKLANYGLDRWLTLPRYVPEEDTRLLLKNCYRQYRQYSKVQTVLKNNLISLLDTVFPNVNRLFSSPIRGDGSEKWVDFVAEFWHCRCVSEKSKKAFTNRYQHWCRKHGYNFSEAKAHTIHAEASGCIGVMPKSETTKLLVEQAVAQLRATSVALTALKREMLALAAQLPEHPVVMGMFGVGPTLGPQLIAEIGDVRRFYSKKALVAYAGLDAPPNDSGDVTGKHKSMSKIGASSLRRTLFLVMSVYLRNAPLDEPVYQFMDKKRAEGKPYRVYMMASANKFLRIYYATVKAYLESLEHTA

SEQ ID NO: 246629 - protein, 315 aa, unidentified
MQNGRTFKEFIGIDVSKDKLDTFDTRTGEIIQVTNSVEEVNAFVKTLPFSEELLVVIDLTGGYENVCVKSFYKAGFHVHRAEGRRVKAFLRAMNQKAKTDVIDAIALAKYGEKMQENLILYVPPQDGIKAHVERLCDLKNLLQMEKNRYQAPAQKDSTLDSIGRHIDFLEHEISEFENEVRRIIATDEVMVKQQEVITSVVGVGKKSSMMLLAYLPELGRINRRKIAALAGLAPFARDSGKISGYRTTKGRGGRPQVKKALFMCALVAIKHDPKMRCFYEKLRSNGKQKLVAITAVMRKMLITINARSKFILQVG

SEQ ID NO: 246630 - protein, 312 aa, unidentified
MEAKFVGIDVSKATLDVDCLPVSTARQFSNDAGGIAALVEWLLGSGVERIVVEATGGYEIAVASALAAAGLPVVVVNPKRVRDFAKAQGVLAKSDRLDARVLALFGERIAPPVRALPEAAQRELTELLDRRHQLVTMRAQEQARLATVLPVARGDVEQHIAWLDQRIRKHETVLLKRLRANEIWDAKVKLLDSVPGIGPVNLFTLVGRLPELGTLNRQQIAALVGVAPFNDDSGKRRGQRYIRGGRAEVRCALYMATLTAKRCNPVIAQMFERLIAKGKPFKVAMTACMRKLLTILNAILKSTQPWENRLAT

SEQ ID NO: 246631 - protein, 368 aa, unidentified
MSKTEVYRMCVGVDLHKTQFTVCALDEETGAVELERKFSTDPKGYADFIKCMHDIEEGRGHVIELAVESTGNARFFKNKMESEGFGVIVVNTNKFKVITMSTKKNDANDAATLAFYLLKEMLPESHLCDQTSEEIRRMLKTRSILVQATVKMKNQIHGMMLGYGIETKAAQFQSKKKRQELYQDLADHNFSELTASSLKVILDILDDLQRQIKTIEEQLQKMVVENKNVEILMSMPGIGPIGAMTIAAYTNDMNRFGGDFKRFASYLGIVPSVHNSNETVRMGKITKHGPQELRTAFVQVAMGIIRQPQNTSEWKLMKDYYRMKKEKGSGRAIIALTRKVARIVFSMLNKREKFDPTLMVREKIYQTA

SEQ ID NO: 246632 - protein, 408 aa, unidentified
MLKIVYPICCGIDVHKTFVVACIASTNDRGVTTYKTKRFSTYTKNLNELAAWLDANDCKDVCMESTGKYWHPVWNVLEKTCKPVLAHPKYLKAIRGKKTDKKDAKWIADVFKHDLVSGSFIPPAIIRQLRDLMRYRSKLTNYTTGEKNRAQNCLTTSNIQLDHAFSDVFGKSATRILNHILEHPGENFDVTPFVDRRCKTPIEEIQLSIDGNISPEQAEKLKIIRSHMDSLELCKINLESAILFLADPLLPQINLVASVPGIKDFSAISVIAEIGFDMSVFPTAKHLCSWAGLAPQCNESGGKKKSSRVSKAGAYIKPLLIQCSNAVVKSNKHPEIKNRYLSIKKRRGHKKAIVAIARMLLTAIFHILSKSEPYNPLLYKTFDASPVDSTERAIKLLQKRGFTVSVSA

SEQ ID NO: 246633 - protein, 391 aa, unidentified
MIYVGIDVAKDKHDCFITNSYGEVLFKSFTIPNNRDGFETLFQKVQSVSDDLTKVKVGLEATGHYSYNLLGFLLDKGLTTFVINPLHTNLYRKSLSLRQTKTDKADARTIASMLMSDMNLKSYSDTSYHNEELKSLTRYRFDKVQERAKLKTSISRLVCILFPELEKLVPTLHMASVYALLSEFPSAHAIASVHLTRLTNLLSESSHGRYGKDTAVIFREAARNSIGSDMPAKSLELKHTIKLIQELTSEIDEIEAEIKSIMDEINSPILTIPGISYNMGAMIIAEIGDFSRFDSADKILAYAGMSPSTYQSGQLDNCYSHMEKRGSRYLRYALYNATKYVCHWDESFGTYLAKKRAEGKHYNVAISHAAKKLVRTIYAMEKSKQSYNLVA

SEQ ID NO: 246634 - protein, 421 aa, unidentified
MTPPSHDTFAAFIGIDWADARHDGCLQAAGTAKRECFQLEHTPEAIDAWVTTLRIRFNGQPIAVCLELNKGPLVSALRKYDFLVLFPINPLTLARYREAFTPSRAKDDPTDAELQLELLLTHRDKLQPLQPQSPPMRVLAQLVEHRRRVVGDKVRITNRLPSALKNYFPQVLHWFQEKDTRIFCDFLSRWPTLKAAQLARRSILERFFRDHHVRTADVLATRLHAIKTATPLTTDEGVIAPNVLLVQTLVSQLRVTLDAIEAFDQAIAQRAQHHPDFPLFQALPGAGPVFASRLLVAFGEQRERYASAAALQKYAGIAPVTERSGKKAWVHWRLQCPKFLRQTFVEWTAESMRHSFWAQVYYQQQRDKGNTHQAAVRALAFKWIRILYRCWQEHTPYDESTYLQALMRRNSSLIQNRAKVS

SEQ ID NO: 246635 - protein, 406 aa, unidentified
MTLIFVGDDWAEEHHDVYVMDEAGKRLAAKRFPEGLAGIRGLHALIATHAEESDQVVVGIETDRGLWVDALTAAGYQVFAINPLAAARYRDRHHLSGAKSDPADAKLLADLVRTDRHNHRPVAGDSGGAAAVKVLARAHQSLIWARTRHTNMLRSALREYYPGALETFDDLDDRDALAVLGRAPTPAEGARLSLVKIRSALKAAGRQRNIDARALEIQAGLRTEQLTASDAVTAAFAASTRAAVGIIAELNHQISDLETELATHFETHPDADIYLSLPGLGVILGARVLGEFGDDPNRYTTAKCRKNYAGTSPLTIASGRKRAVLARHVRNRRLYDAIDQWAFCALTTSPGARAFYDQRRDADDLHHQALRALGNRLVGILHGCLRHHTLYDEHKAWAHRQPTAAA

SEQ ID NO: 246636 - protein, 355 aa, unidentified
MTSTKYIGLDVHKESISIAVLNSAGKVVMECVIETKASTILQFIHGLGGDVHLTFEEGTWAGWLYDLLKPHVTELVVCNPRKNALLKEGSKSDRIDAHKLAELLYMSKLSSVYHGEHGLRMLKELSRSYLTITKDLGRVMNRLKALYRGWAIPCAGTQVYAPHYRSEWLAKIHEAGVRRRAELYYQQLDALRLVRQQARKELLAEARKHRATKLLRQIPGIGPLRAAHLVALMQTPHRFRTKRQLWNYSGLGLETHDSAQYRVVEGQLQRSKKPVTLRGLNDNHNHDLKDIFKGAAMRASTAAGPLRDFYEALLAKGRKPTMARLTLARKIAAITLIVWKKEVRFDANYLKQQAA

SEQ ID NO: 246637 - protein, 457 aa, unidentified
MSRKSKRTSGIEEAHPFSGMSRIHPHAAGVDIGAIEIVACVPGDENTQVVKAFGNYTVDLQALAQWMKSHHIQTVAMESTGVYWIPLFEELERQGFECLLISSRSLRRVAGRKSDITDAQWIQTLHTYGLLEGSFRPQGDLVALRTLLRHRSQLLEHRSPHVQHMQKALLQMNVQLSQAVTDITGLTGQKIIRAILVGVRDPHTLAAMREPGCKKSAEEIGKALTGTWREEHLFVLKQSVLLYDFYTQQIQACDEEIERLYGLTRPEWEAGNIEPFTRGKKNSHSKNLPQHPEEIRKHLKRISGVDLSAVDGFGVSLAQTVIMEVGTDMSKFPDEKHFCSWLGLAPKHEISGGKVLKNNTLKTKNRAGQAFRMAAQSVKRAECVFGVFYRRLRARLGPSQATVATAHALARVVYRMLKYKVEYEPLNVNEYQRQYEAQQLKYLKKRAAKFGLQLVPT

SEQ ID NO: 246638 - protein, 406 aa, unidentified
MKFCGIDWANDHHDALAIDEQGRQLGSIRVAHTPEGLQRLHAYLQEQAGEAGQEHMACIIETTHGLLISFLLERGWPVYPVNPRTVDRHRAPSGAKTDTIDAYLLAKTGRADFADLRRLNPDSELIAELKELTRDQDTLVQMQTRLLNQLTACLKAYYPVALSLFSKLHQPSTLAFLRLAPTPEQARELQAQEVEALLKQHRYPGARSAASRIVAQLQSPALQANQVTTRTKSRLMLAILDQLEPLLKQIAAYDEEIERLFFQHEDHERFLALPGAGTRLAPRLLAEIGDDRSRYPSAQSLQALAGTSPVLYQSGTYAKAHRRLGCIKPLRNAMSQFAFHSTRWEPWAKQYYQRKREEGKSHTVAVRALANVWVRILFAVWSKKEDYQAKTFEAAQIAHAQPRHVA

SEQ ID NO: 246639 - protein, 344 aa, unidentified
MKINLLGIDLAKNVFQLCAVNQANKILFNRSVRRAHLRSSIARLEPTTIAMEACSSAHYWGRAFEDMGHQVVLVPAQHVTPFVRGGKSDARDALAICEAAQRPNLHRVPIKTIEQQDIQLLHRLRQRQVQHSTALANQIRSLGREYGVIFPTGIKSLISQIPSVLEDGDNELSVVARHALNDQYRCLRQTRQAMVTFLHQIEELAAQHPAYCDLQVLPGIGPMTASAYIAAVGNGRQFKRGRQVSAWLGLVPRQYGSGGQIQLKGMTKSGDRYLRTLLIHGARAVITRGLKTRPLLAQWVQPVIDRQGFNKGVVALANKLARISWVVLTTGEPFDMQQAFKPAQ

SEQ ID NO: 246640 - protein, 375 aa, unidentified
MEHHSEAFVALDTAKLRNAVAIADAGRNGEIRYLGEIDNTEAETRKLVAKLASKHARLTFCYEAGPTGYGLYRLIKSIGHDCIVVAPSLIPSKPGDRVKTNRRDAVNLVKLLRAGELTAVWVPDERHEAMRDLVRARDAAVKDYRIKRQNVSSLLLRLGRPYPGKKTWGRTHINWLTGLKLEHREQRIAFEEMLLAVRQVRERIERLEQAMREAVADWTLAPVIEAVQAMRGIDMVGAIAFLAELGDLSRFENPRQLMAYLGLTPSERSTGENVKRGGITKAGNTRARRLLIEAAWSYRFPPRVSKDMQTRIGAAPRTAREIAWKAQMRLCGRFRTLTRKGKRPTIVVTAIARELSAFIWAINREVVGSHATANQ

SEQ ID NO: 246641 - protein, 410 aa, unidentified
MELLHRRCCGLDVHKDTVVACLRLVSDGKMTTEVRTFQTTTADLFHLSGWLAVNCCTHVAMEATGIYWKPVWHILDDGEFELVLVNAAHVKNVPGRKTDVNDAMWLGELLAHGLIRASFVPNAQTQEMRNLLRTRKQLVREQSSHVLRVQKTLEDANIKLDSVLTDVMGKSGRAMIEALIAGETNPAKLASLADRRVKASAEELREALRGRVTKHHRFLLRLHLNQIDALEAATATIDVQVEANLGPFRTAVELIMSIPGVKNVGAHVIVSEIGTDMSRFPSAAHLISWACICPRNDESAGKRRSNRQRKGANWLKTTLVQCALAAVKKKGSYLQAQFHRIKARRGPKKAIMAVVASILTAIYHMLKDGTMYHDLGCDHFKRRSTDQQKKRLVKRLSELGYTVELKALTA

SEQ ID NO: 246642 - protein, 326 aa, unidentified
MDKESAMSTGTGTQCGGIDVSKDRLDVGIWPSGETFSDSNDAAGRKRLAQRLVKLNLRIVVLESTGRLEVPMALELQELGIPCRIVNPRQVRDFARATGRLAKTDRIDALVLAHFADAMGVEPKALPDAARRELRALVIRRAQLIEAKLAEENRLQGELVKDVRKSLKASIVWLERQIAALDRNLDRTIKGHPEFRALSEVVQSVPGVGPQTARMIAASLPELGTLTRQKIAALVGIAPLNHDSGKVQGRRFCWGGRAEVRCALYMAALVAARHNPVIRALYVRLRAKGKAAKVALVACMRKLLTILNAMVRDGAPWRQTSPAATA

SEQ ID NO: 246643 - protein, 427 aa, unidentified
MKELTKVCGIDVHKMFLQVCILSRSGEYSQHRFHNTPHGILALKDLVLAEGCEVVAMESTGIYWYRLFLELESDIRTIVANARQIKSIPGRKTDMNDARWIAELALHGLIRPSRIFPRQDREFRDLTRNRETLVRTRTTIKNRIHKILDSAGIRLNLALKDIFGKSGRHLLAGIAEQKDLEATLATIPSPLILRRADQLREILQDSPLSPTQLHLLTTQLHLLEAIEEKIAQLDALILASLEDSQMEALPICTSVPGISITAATTLLAELGDVRDFSSADRLVSWAGLAPSVYQSADTLVCGKITKQGSKSLRWILVQVAQAASRTTDTVFSRFFRRIAFRRGRNKAIVALARKILTILWHLLVNRELYVEPGVQRVRKLPARATLSKISIDDATEILLNAGYRIYSPESQKSAGKGVGAKRTTHPL

SEQ ID NO: 246644 - protein, 378 aa, unidentified
MNRIIKIGMDVHTTNYTLCIFEPSFEHDGTVHCITQVKPEIKKIIHVIETFKKKHENEELNIVCGYEAGCLGYSLYHELKEKGIECVILAPTTMKTEKGGRKLKNDYRDAKMIAECLAYGGYSAVHVPTELDNSVKEFIRMRDDIKENLKSIKQQIIAFLTRNGKQFEGKSFWTRKHIDWINTISFSEPLLQDTLKEYMIEYNHLCDRVETLDKQIEEISLKEEYVEKVQQLQCLIGIKTHTALSLIVETSDFNRFKKGNMYSAYLGLIPGDDSSAGHENKLGITKAGNSHLRKLLVEAAQGYTRGKVGFKSKDLKSRQEKCSSEVVAYADRANERLRRKYYRMTLRGKRYNVAKTAIARELACFVWGIMTDHIDLCN

SEQ ID NO: 246645 - protein, 413 aa, unidentified
MAAVEFTQVVSRGCGMDIHKEVVVATVRGEGIQKETRSFDTFTSSLTELREWLVSLGITHVAMESTGVYWKPIYNVFEGHIPHVWIVNARHIKNVPGHKTDKNDSEWICQLLMAGLLKPSFIPPREQRELRDLTRYRRKVIQMVSANKNRIIRTLEDGNVKLSSVLSDTSGKTGTELIEMLCDGKELTLQDIEDVRHGRCRHTSEDMLEACTGYMNDHKRYMLQRIRECNRKLTVEITELDRRIKEIVAPCAEVMERLDEIPGLHDRTLEDLIAEIGLDMTVYPSAESLCKWAAMCPGNNESAGKRKSGKTNHGDKYVKATLVEAAWAASRTKGTFYKERFERLSKRKGGKKALIAVGHSILKAVHYVISTGGRYHELGEQYVPSKIEKKRKDYLKSELQKLGYEVSLIKKKD

SEQ ID NO: 246646 - protein, 340 aa, unidentified
MYYTGIDLHKKTSFITTIDEDGKIVTRANLQNVEEAILAYFADLGEETRIVIESMASWYWLYDLLTDNGFDVVISNPLKTKAIASAKIKNDKVDSHMLAQLLRADLISSVHVSSLESRKLKELLRHRSKLVRDATRMKNRIHILLMKNNFQSPFSDLFGVKGLRYLGEIDLPDYHRQQVETYLLLYEKLQKQIKPLTKTVRALARENHTARLLMTIPGIGPITAMFIVAEVDDISRFRSYRNLASYAGLVPSLDASAGKEKRGRITKQGSRYLRTALVEAAQAAARMQNCRLRIFFRRRIVKTGYQKAIVATAHKILQYAFYVWKNQTPYQETYPVCVTR

SEQ ID NO: 246647 - protein, 349 aa, unidentified
MLILAIDLGKFKSVACVYDTNKLTHRFQTLPTRPQTMHDLIVEVQPQRLVIEVGPAAGWIRDMAEALEVPIEVANANHEAWRWKNVKRKTDRDDALKLAQLSAMGQLPQVRLSSCRVRQWRSLMTYRHTLVGRRTAIKNSIRAILDRQGMMHASGKSGWTKQAIAVLSELASPLLDVPADQLWRGQLHVELSALQQIESLIKPVEQKLEALASSDARVAQLQTIPGVGPRLSELVVAVIDDPHRFANGKQVGAYVGLVPRQIESGTMSRQGRITGRGNKLLRGLLVEVAWLMRRYNGYLRDVFDRVCRGIKTRRKIAVVATARRLLVICWAMLRDGTNWREPTPVAPAT

SEQ ID NO: 246648 - protein, 368 aa, unidentified
MSATRMPRSGVKWVGLDVARDAIAVGVLDGSSDSAPRLEKVAHDEVSIRRLVARLGEPSRLRACYEAGPTGYELYRLLASMRVPCEVVAPSLVPVAPGEKVKTDRRDARRLVRLYRAGELVTVRVPTREEEGCRDLCRLRGAVVFDRGRARQRLASFLLRRHLVYRDGSTWTLKHRRWLRSLSFDDTGAQATFAHLLATVEERELRVTAIDADLTGFFERGLFVEEVARLAAYRGIDQLSALSMASEVCDWRRFPAPAKFMGFVGLVPSEYSTGASTRRYGITKAGNAHVRRTLVEAAWAYQYPARVSPELARRHHGLPPDVVARSWAAQVRLCGRFRRLAARKDRRTVVATAVARELAGFVWAEMTA

SEQ ID NO: 246649 - protein, 347 aa, unidentified
MRFYTEQHKHYCGIDLHTNKMYLCILNQEGETLLHRNIKTEPDTFLQAIRPYREDVVISAECMFSWYWVADLCGKENIPFILGHALYMRAIHGGKSKNDKIDSHKIAALLRGGLIPMAYVYPQHMRATRDLMRRRNHLMRKRAELFAHTQNTASQYNLQIPLGRIANPQNREGLLDRFADPAVKLSIAANLEMIDAYDRVLEVLEKDIINNAKEHDPTAYALLKTIPGVGRIIALDLLYEIEDINRFPRVQDFASYCRLVKCPKESNGKKYGTSGKKIGNAHLRWAFSQAAQLFLKSNEPGKQLYSKLTNKHGKGKALSILAHKLGRAVYFMLKNREAFNMAKFLTE

SEQ ID NO: 246650 - protein, 405 aa, unidentified
MRFIGLDVHLAFCEVAICEDGRVRSAGRVPSSPAGIDLLARSLAADDHVALEATGNALKIARLLEPHVARVVVAPTKELSAITTAKTKTDRLDAKKLARLLAAGLLTGCWLPDEDTRSLRRWLSRRAQLVRQRTRSKNEIHAVLMRNLKGRPPMSDVFGKGGRIWLAALELPRDERHTVDGCLRHIDFVNGEIAILEREVANHAIGSPEIERLMTVPGVSLMTSATFMAAVGDIHRFRSPSRLVSYLGLDPKVRQSGSGNTKIGRISKQGASAVRGMLVEAAFVAVSTPGPMRAFYQRVSARRGKAIAIVAVARKLAVLFWHLLIGEKDYAFARPSLTAHKLRELELRAGAERHVGSRSLKHKSGYHQQHNRDREREIAAQAELAYTRLVSDWQRTNPERAAAVT

SEQ ID NO: 246651 - protein, 371 aa, unidentified
MDEDIRFVGLDVHKETIAVAVAEAGAGPARSLGTIPHTPEAVAQLVRKLGVPGRLRCCYEAGPCGYALYRQLRARGVACQVVAPTLIPVRPGDRVKTDRRDAEKLARLLRSGDLTAVWVPDEAHEALRDLVRAREAAQGDLRRARQRLAKLLLRQGCRTPQRWTPWGEKHLDWVRQLTLPGAAQEAVRQDYLAEVEHLTERVQRLERALTATVATAAPRLRVVVAALQTLRGVGLLTATTVAAEVADFTRFVRPRPLMAYAGVVAREHSSGARPRRGGITKTGNAHLRRVLIEAAWHYRHRPGLPRALRQRRVGQPAAVCAIADKAQRRLHERYRRLLARGKSKQKVVVAVGRELLGFMWAIACQAEREAA

SEQ ID NO: 246652 - protein, 345 aa, unidentified
MVIGCDYHPSWQQICWVDTATGETGEQKLEHASGEAARFYRQLRAPALIGMESTGNCQWFVEMATEKGHDVWIGDAAKIRASDSRQQKHDRRDAALILKLLLEGRFPRIWIPSGEEKDLRQLLIHRYKLVRIRAQVKNELQHLAMNQGVTKKRKLWSKTGEKVLRELPLKPWASQRRKDLFRIREMLNAQIDVLDQAVVEVAEKNEKARLLMTQPGVGPITSMAFVLTMGDVNRFQRGKQVASYLELIPREYSVGGQQRFGSISKQGNRFMRMLLVEAAQCAVRCDPGMRSEYLHRCHRKAKGVAKVAAARKLAIRLYWMLRTNTGYPGVVRVESSSRVPLVSAS

SEQ ID NO: 246653 - protein, 384 aa, unidentified
MVTGITAYKRRPHMNSIVYVGMDVHKESYTVCCYSFDTDEVLYKQKISADYKLILKYLEQLRKRFADEIEFVCGYEAGCLGYSLYHQLTEHGVKCIILAPTTMAITNTNRVKTDKRDAGNIARCLAFHTYSEVHVPTDEDNSIKEYIRMRDDQKINLKKTKQQILAMVLRLGKKFEGGKTYWTIAHMKWLKSLKLGGVFQETLDEYLITYEYFTEKIERLDQRIEELASGEQYQEKAKKLGCLIGVKTHTALSMIVEVGDFERFAKPEKFTAFLGLVPSEETSDEKQNRYGITKAGNSHLRRLLVEAAQAYTRGNIGHKSVALKKRQQGNTPQVIAYADKANERLRRRFYKMTLNKRLNRNVATTAIARELACFIWGLMTDNVA

SEQ ID NO: 246654 - protein, 373 aa, unidentified
MKKVRFLGLDVHAETIAVAIAEPDGEVRSLGIIPNREESIRKLVKKLGPAEQLQACYEAGPTGYVLYWQLTALGVKCEVVAPTLVPVKAGDRVKTDRRDATKLARSYRAGDLTAVWVPNEEHEALRDLVRAREAAKQDQLRARHRLSKFLLRQGRRAPAGIKVWTQKYQEWIKKQVHFEQPAQEYTLLDYLHEVEHMADRIRRLEQATEEAVKLAPQRMQEVIQALQALRGIAQISAVTVVAELGEISRFEGARQLMGYSGAVSSEHSSGKRTQRGPITKTGNAHLRRIAIEAAWAYRHRPTIGPALRKRQEGLSEEVKEIAWKAQHRLHKRYRTLTAAGKEKQKVVTAVGRELLGFIWAIGVQVERNGQRVA

SEQ ID NO: 246655 - protein, 346 aa, unidentified
MMIIGCDFHPSWQQVCWLDTETGDTGEQKLVQASGDAERFYRQLPAPALIGMEATGNSHWLVDLLAELGHELWVGDAAQIRASYVRQQKTDQRDAAHIMKLLLEGRFPRIWMPSSAVRDLRQLLLHRYKLVIMRARVKNELQHLCLNKGVQKKRKLWSQAGQKLLRELPLKPWAARRRDDLLGLMAMLDQQIEPLEQAVKEEAQGDKMARLLQTQPGVGPITALAYVLTMGDVSRFPRGKQVASYLGLIPREHSSGGRQKLGAITKQGNRMLRMLLVEAAQIAVRYDPQFRKEYLHRCHQKPKAVAKVAAARKLAVRLYWMLRTQTPYPEIVRIESSPRVPLVGAS

SEQ ID NO: 246656 - protein, 416 aa, unidentified
MDAIVERCAGLDVHLDTVVACVSYGKLDIKPKKEVKTFSTTTKGLLELLDFINQKECTHVAMESTGIYWKPVWSILESGAFDLIVENAKKIKNVPGRKTDVKDAEWIASLLRCGLIEKSFVPLERIRDLRDLTRLRKELLGEVNRNKNRIHKVLQDANIKISSVLSDVFGETGKSILNQIIGNQCITEEFIYSLYEGRGKSKLKSTPMEMYEALNGKIRGHHVILLGMHNSNIVFLEKQINELEKEIDILLQKERDSLELLETIPGISKISASSIIAEIGTSMDVFKTEKHISSWAGLCPKNNESAGKKKRSGIKSWNNWLRSMLCECAWSATKKKDSRFKNKYWSMVPRMGRKKALIAIANMMLRLIYHLLKTKSTYKELEIQYFIDKDKRREDRIIKELKSKGYLVEKDSLQMA

SEQ ID NO: 246657 - protein, 336 aa, unidentified
MIGLDIAKHVFQVHGADAVGHVLFRKRVTRAKLIGFLAAQTPCVVAMEACAGGHYWAREISKLGHRVQLIAPAYVKPFVKRQKNDAADAEAICEAAQRPSMRFVPVKTEEQQANGIVFRARDLLVRQRTQCVNALRGHLFEYGYVFPQGITHVATLVALVEDPRSSLPESVRTILKLLVDTFTALEGQIAELDAEINRRSKADPTARRLMTIPGVGPIASTAITALVPAAEGFAAGRDFAAWLGLTPLQKSTGGKQKLGAVSKRGERTIRRLLIIGASAVVQQASRRGAPKGSWLAQMLARKPKMLVTVALANKMARIVWALLVKGGIYRAPVAAA

SEQ ID NO: 246658 - protein, 447 aa, unidentified
MVPDGRQVEVDEHEQIVERVAAIDVAKASGMVCTRVPHPTTAGKRLTRVWEVAATTNAIIELADQLAGQGIERVVVESTSDYWRGFVYLLEARGLSVWLVNARDVKQVPGRPKTDKLDAVWLAKLNERGMLRPSFIPPAEIRQLRDYTRLRSDLTQERARHVQRLEKLLEDALIKLSTVATDIMGASGRDMVEALIAGQRDPKVLAELARGRMRGKRAALVQALTGRFNDHHAELARMLLDQIDALGVQIDRLTSRIEELIGAIPAAQPPSEKASHTGEDTYQPALPAVSRLDEVPGIGVKAAQVIIAEVGLDIGQFPTAAHLVSWARLSPRTIQSGAKQRTGATGKGNPYLKGVLGEAAAAAAKTDTFLGERYRRLVKRRGKLKALVAVARSILVIVWHLLADPTARYHDLGSDFYASRIDTDRKTRTHIRQLQALGFTVTLTPAA

SEQ ID NO: 246659 - protein, 339 aa, unidentified
MKLYAAIDLHANNSVLVILDETDRVVYEQRHPNELSVILAGLAPHKESIQAIAVESTYNWYWLVDGLMEAGYEIKLVNTAAVKVYEGLKYTGDEHDARHLAHLLRLGVLPTGYIYPKEDRAVRDLLRKRAQLVRCRTMQILSIQGLISRNRGKGISADGVRKLNDETIGQVCGGDGVRALAIQSNLAVMRCLDEQICGLEEVVLKQAKLKPEFKKLLTIDGIWHILGMTIMYEAGSMERFAKVGQFSSYSRCVGSSRWSNGKKKGEGNRKNGNKYLAWAFIEAAHYAVRYNERIRSFYQRKKAKTNKIVAAKAVAHKLARACYHVLKEQKPFDETRAFA

SEQ ID NO: 246660 - protein, 358 aa, unidentified
MSDATKGALPMIAGLDLGDRQSHLCLLDVESGEVLEESRIPTSSKAFRLRFDSQQPLKITLEAGTHSPWVSRLLEECGHEVLVANPRKLRLIYGGKHKTDRLDAEKLARMARLDPKLLYPLKHRGEDSQAHLALIRSREALVGSRTQLVNHVRGVVKSFGARLPKCSTASFPNKVAGQIPESLKEALEPVLETISLLTQQIKDYDRRLEQLAQEHYPETALLRQVQGVGTLTALAFVLTLEDPSRFEKSRAVGAHLGLVPGTDSSGEHDTEKRISKEGDGLMRRLLVSSAHYILGPFADDSDLRRHGEKIAGRGGKNAKKRAVVAVARKLSVLLHHLWDTGELYEPLYNARRAGKEAA

SEQ ID NO: 246661 - protein, 431 aa, unidentified
MLGGNQEKLMSENQPEIQYAAFVSIDWADQKHVWSLQEANSSTREHGEVGHMPEAIEAWIAQMSQRFAGRPMAVAVEQSRGALVFMLSKYEQLHIFPVPPAMTANLRKAFYSSGAKTDPADTDLLQDVLQMHREKLRRLSPDTEATRLIQNLVEERRKLVDEKTAQSNRLEAHLKIYFPQIPQWFGDVDSPLVCALLERWSALEALQKARPDTLRSFFRKHHCRKEELIESRIKAIGEAMPALKDRAVVEAQLAVVKVLVQVIQVLHQGIEDFNRQIQEAAEAHPDFFIFESLPGAGAVMAPRLLAAFGSQRERYRNAAEVQTLSGIAPVTESSGKSSWIHFRFACSKFVRQSFHEWAALSITQSQWARAYYELQCRRGKRHHAAVRALAFKWIRIIFRCWKERVAYDEKVYLAALAQHNSPLLAATKIAL

SEQ ID NO: 246662 - protein, 410 aa, unidentified
MEVLHRICAGLDVHKETVVACLRRMVGGQVKAEVRTFSTMTGSLLDLSAWLGAEQVTHIDMEATGVYWKPVWHVLADGDFQLLLANAAHVKNVPGRKTDVKDAEWLADLLAHGLVKGSFVPDEPTQQMRDLLRTRKQLVRERTSHTQRIQKALEDANIKLDMVVTNILGLSGRRILQRLIDGETLPQALATLAHRNLKASPDELEAALRGRVTRHHRFLLKLHLDQIDAIDSAIASIDKEVEGNLEPFRHAQQLLSAIPGISRLSACIILSEIGLDMSRFETAGHLVSWAGLCPRNDESAGKRRSTRLRKGAPWLKTILIQCGWAAMRTKGSYFQAQYYRLRSRRGSRKAICAVAASLLTTVYHMLRNGACYQDLGANHFDQKAKAKHVQRLVIRLENLGYDVKIRPKAA

SEQ ID NO: 246663 - protein, 465 aa, unidentified
MKSKTPTFKNRKKKISVDQGWETINFHAAGIDIGSKEHFACVPVGAASKNVRSFGTFTSDLKALADWFQQCGITSVAMEATGVYWIPVFQILEARGFEVILVNARQTKNVAGRKSDVQDCQWIQRLHTYGLLQGSFRPEDPYCILRTYLRYRDELISARSTQCQHMQKALQQMNVQLTQVLSDVTGVSGRAIIQAILAGQREPAKLAALVDCRVRATALQIQKALEGDYRPEHLFVLQQAFSLYGTYDEKINACDEEIVRETARLSDKVDRPRQPLPPRKEGRPANKDKMQGQDMREVLYRKFGADLTAIEGIGITTALVVLTEIGPNVDGFKTEKHFCSWLGLCPDNRISGGKVLSSHTRRVINRASDALRMAAVTLERSQSALGGFYRRMKGRLGAAQAITATAHKLARIIYRLIKHGEPYVRQGMEDYEKKYHERKLHSLKKTALSMGFNLVAQAQVASPVS

SEQ ID NO: 246664 - protein, 394 aa, unidentified
MIPMDITMIVGVDVGKTHHHAVGCDRTGATRLNQVVANDEAAIRTLLTAAGPAATVLLVVDQPASIGALPVAVAQAMGITVGYLPGLTMRQLAEILPGTAKTDARDARVIAEAAWRMPETIRRIVSLAEHLAEVRLLSGFDADLAQQGTALQNRLRGLLTQLHPALERVLGPRLQAAGVLALLQRYPTPAALQQAGRGRIRTFLARHGSRQADALTDAIREALARQTVVVAGTGAADLIVPRLAGQLATVLTDRAAIEQAIEARVVSHPLYPVLTSLPGLGLRTAATILVETDGKVFPSAAHLASYAGVAPVTWQSGTSVRGTRRPRHGNTRLKDALFQSAFSSLHAPASRTYYDRKRASGASHTQALLALARRRTDVLYAMMRDGTPYLPPAP

SEQ ID NO: 246665 - protein, 346 aa, unidentified
MGMDIAVLGVDLGKNVCSVVGLDASGAVVMRRKVRRETLIRLAEKLPPCVVGMEACCGAHHLGRLFAAHGHDVRLMSPEYVRPYVKAQKNDDRDAEGIAEAATRPTMRFVELKSQDQLDMQTLHRSRDRLVGERTALINQLRAILLERGMIAPQGKRKLEQFLSVLMDEQDGAGLSPRMVILVADVRAQWAELDRRIAAFDGEFVRWARENEDARRLVTIPGFGAIIASALVASVGRAEAFDRARDLSAWLGIVPQQFTTGGKPKLLGISKRGNKYLRRQLIHGARAALPYVAERDTPLGRWAKALLERAHRNVAVVAFANKLARIAWAVLRRGERFVATGMPRAA

SEQ ID NO: 246666 - protein, 406 aa, unidentified
MEVVYERCCGLDVHRNTVVACLSVVEAGQRRKEIRTFRTVTKELLAMRQWLLSEGCSHVGMESTGVLWRPVYDRLTGSFELVLVNAAHMRQVPGRKTDVQDADWLADLLQHGLLTPSFVPDQSQQDLRDLTRLRVHLVQDRAQLINRILKVLQQGGIKLSGVLSDVVGVSGRAILQALCKGERDPERLALLVHKSVAHKHVQLVEALTGDLRSHHAFLLHELLRLLEGMELSIKHVEIEIAQRLHAEEEKLDRLEKITGVSRHTLHLLCAEVGLDLSRFPDAAHLASWAGMCPGQKESAGKRQSGRTRQANPYVKAALVQAAHTTVRTQTYLGEQYRRLRKRRGAKRAAVAVGHSILVIFYHMMTTGEPYHEKGVDYFRRTPDKVEGQLVKRLMRLGYQVTAPLPV

SEQ ID NO: 246667 - protein, 320 aa, unidentified
MKHKVGKDNTLARFIGIDVSKQWLDVATLPERETRRFSNDGAGQEQLGAWLIQLAPELIVMEATGGFETRVATALAAEGLALAVVNPRHVRDFARAFGILAKTDRIDASVLAAFAEKVHPPVRPLPDEDRRELIDLVDRRRQLVTMRAEEKTRLSQATASARQDIKEHIEWLDERLRRLDIDLTAKLRSSSLWKAKEEILISVPGVGRVTVFTLLARLPELGALNRRAIAALTGVAPFARDSGQHRGRRMIWGGRADVRSVLYMAAVTAARINPVIKSFYLRLKQAGKPAKVALTACMRKLLTILNTMLRTNQSWHAPTT

SEQ ID NO: 246668 - protein, 392 aa, unidentified
MICVGIDVAKDKHDCFIMSSEGEVLADVFTVSNSKEGFEHLLQTINTCTGIGNSKIKVGLEATGHYSYNLLGFLLDNSLPTYVINPLHTNLYRKSQSLRKTKTDRVDARTIASMLKSDVSLKPYTNIAYHNSELKSLTRYRFDKVKERATLKSSVARLVNILFPELDKLLPTLHTASSYALLSELPSAKQIVEVHLTHLTNLLYVASKGRYSKDKAIQIREAARNSIGVYMPAKALELKHTIKLIKEFNNEIAEIESEIQSIMDKIDSPITTIPGISLRMGAMIIAEIGDFNNFDSPDKILAFAGLSPSTYQSGQLNNCYAHMEKRGSRYLRYALFNAAKFVCYWNSLFADYLAKKRSEGKHYNVAISHAAKKLVRLIFALQKSGQAYMPKL

SEQ ID NO: 246669 - protein, 355 aa, unidentified
MNSGKYIGLDVHQATICVAVMDAKGKVVMESILETKATTILEFLAGLRGTLSVTFEEGTWAAWLYDLLKPHVANLVVCNPRKNALLKHGNKSDKIDARKLANLLRLNDLEPVYHGESGVRMLRELARSYLTIVKDVSRVMSRLKAIYRSWAIPCAGRDVYYTRHRGEWLGKIPEAGCRRRAEQLYQQLDMLQPLRQQARRELLAESRKHTITAKLRQIPSLGPIRSALAVALIQTPHRFRTKRQLWTYSGLGLETRDSGEYHYVEGQVRRRKKQVFIRGLNKDHNHDLKGLFKAAATRASVRPGPFQDFYQRSLAKGIQPTMARLTLARKIAAITLTLWKKGASFDVEKLKAQAA

SEQ ID NO: 246670 - protein, 376 aa, unidentified
MNEKLRFLGLDVHAETIAVAVAEPNGEVRSLGMIANREDSIRKFIRKLGSPEHLRACYEAGPTGFVLYWQLTQLGVKCDVVAPSLVPKKPGDRVKTDRRDALKLARSHRSDDLTAVWVPDEGSEALRDLVRAREAAKQDQLRAKHRLTKFLLRTGQRPPLGVKAWTEKYVEWVQQVRYTHPAQEATLLDCLNEVQHMEERVKRLEQSIVEVIQLAPAPMQEVVRGLQALRGIAHISAVTIVVELGNITSRFESARDLMGYSGAFPSEDSTGKRIRRGGITKSGNAHLRRIVVESAWSYRHRPAIGARLRRRQEGLPAEITEIAWKAQNRLHKRYMTLMARGKEQRKTMTAIARELLGFIWAIGIKAEAACKQPMAA

SEQ ID NO: 246671 - protein, 346 aa, unidentified
MNSTTVAVDLAKNVFELAVADAEWRIVERHRLNRTRFARFFVHRAPCQVVMEACGSAHHWARRLVAEGHTVRLLPAHYVKPYVGRSKTDRADAAALIEAARSSQIRAVPIKTLQQQQLQSIPRLRSQWLSTRQRYLATLRGILREFGIVIPLGPSVAKAQVGATLAAADSAIPEGLRPALAQMLQEIAPLEEKILSVERQLATLTRADERAQQLREIPGVGLLTSTALLSTVGDIQRFPSARHFACWLGLTPSERSSAERRRLGKISKQGDVYCRTLLVHGARSALLAAHRAQRAGKPLDRLRHWALNCERVRGHNKATVALANRLARIVWATWKYQRSFDGNWAA

SEQ ID NO: 246672 - protein, 343 aa, unidentified
MQVTTVGLDLAKRIFQVHGVDAAGKVVIRRRLQRSEIAAFFADLPACLVGIEACSTAHHWARLIGASGHQVRLIPPSYVKPYVRRSKTDAADAEAICEAVGRPSMRFVPVKSAHQQAALLHHRARDLLVRQRTMLINAIRGHLGEFGIIAPAGRHRVADLLNLLQGADDAEVPALAREALQSLFAELSALEIRIKVVEAVIMREHRSNAVSRRLTTIPGIGPITASALAGTIADPLAFKSGRELAAWIGLVPRQHSSGGKQKMGRVSKQGDRYLRRLLTVGATAVMRRLPGKTDGLSLWVRALLDRRPFRLVSLALANKMARIAWAIMVRPETYKASAMTAAA

SEQ ID NO: 246673 - protein, 313 aa, unidentified
MTLPQNTIGCDVSGQRLDVYLHPAARSCSFSNDPAGIAALIGLALEHRAFVVLEATAPWDQPLVRALEKAELSFHRANPRRARDFARSIGMLAKTDAVDARMLAFYGANLDLPATAPVSPERLKLQGLNSRRDQLVAMRKAERIRLKGVADPVVTESLEAVIALLDVQIRALERQIANAIKETCDLARDAALLRSAAGVGPVCTAIILASLPELGLVDRRAIAALAGVAPIARESGLMRGKRHVQGGRKRVRDALYMAALAAIRTGRWKQDYDHLRSRGKAPKAAIVAIARKLLVALNTAIREQRPILNAQTT

SEQ ID NO: 246674 - protein, 443 aa, unidentified
MKTKKKIKVSMVNPNAAGVDIGSSFHFVAVPADRSETPVRRFGSFTRDLHELAKWLQQCNIKTVAMESTGVYWLQLFLILEEYGFEVFLVNAQHIKNVSGRKTDVLDCQWIQQLHSYGLLSASFQPEDMIRTLRGYMRHRKNLTQDYSTQVLRMQKAFEQLNVKLHNVITDITGKSGQLIIRAILAGERDAETLASLASDRVKAKKEDIILSLEGNWKEGPLFELRQSYELYLIYKQKIAECDNQIKEHMEILVSKENTEIGQDSARKVYSKNRLNFNATPYLKGIAGVDLTEVFGISEVCAMEIVSETGLDMSKWPSVKHFISWLNLSPNNRISGGKLLSNKRKKSKNKAGQAFRMAAFALQRSEHYLGSFYRRMKAKGGPMYATKATARKLAVIFYYMISNQTEFTPIPIEEYDKKFMDKRMAYLKRQATKLGMELVEAEP

SEQ ID NO: 246675 - protein, 420 aa, unidentified
MDVVSERCAGVDIGKDEVVACVRTPGPNGKGRRKQTRTFPSFTGNLEAMADWFVAEGVTDVVMEATGSYWKPVWYVLEERSFELKLVNAQHVKILPGRKSDVLDAEWLAELLEHGLLRGSFVPPPAIRELRDLTRYRKRLIQAHTAECQRIQKTLEDAGIKLDSVASDVLGVSGRAMLHALVAGERDPDVLAQLAKGVLRKKIPELRQALRGRFRDHHALLIGLCLDHTAHLEAATAKLDERVDAIFAATTSGAGVPFERARDRLDTITGVGKRAAETIIAEIGVDMSRFPTAGHLASWAGMAPGTNITGGKRQSGRTTKGDAWLRDVLTQCSWSAARTRDTYLSAQFWRLARRIGRKKAAIAVGHSILVICWHLLTNDCNYNDLGGDYFQRRNGHDRHRDHLIEQLHRLGYAVTVKKTA

SEQ ID NO: 246676 - protein, 339 aa, unidentified
MTKATTIGLDIAKQVFQVHGADKAGRAVLRRKLRRSEVSRFFSEQPPCLVGIEASGSAHYWARVLGGLGHSVRLMAPQFVKPYVKSQKNDANDAEAICEAVTRPTMRFVPQKSIEQQDLQCLHRVRSRLVANRTQLINQIRGLLAEYGVVLPQHPGQVRRGLPAVLEDAESQLTGFGRELFQNLYEELAQLDEKIGDADARIQTAFQSTPDCRRIAAVEGVGPLIATAIVAAISNGHAFENGRQFSAWLGLVPRQNSSGGKSRLLGISKRGDPYLRTLLIHGARSVVYRAKAKTDKRSLWINDKQQRLGTSKACVAVANKNARIIWSLIAREQEYQRAA

SEQ ID NO: 246677 - protein, 418 aa, unidentified
MRAVGRSVGLDVHRDFCEVAIAEDGAVRSAGRVETTPEALELFARSLGADDRVALEVTGGAWEIARLLEPHVERVVVVSPDDTGIRQARAKTDRLDARSLARLLAAGELDAVWMPDDACRVLRRRLARREQLVRSRTRAKNEIHAVLIRRLEGRPPVSDLFGVKGRRWLRELELPVEEAETLESALRHVEFLDQEIAAVERLIAREALRSPDARRLMTVPGVNVICAASFLAAIGDVRRFRSARRLVAYLGLDPRVRQSGTEPARSGRISKRGSASARWALVEAASSVVRQPGPLRAFYERIRARRGHGKAVVASARKLAVLFWCLLARGEDYAHQQPSLTAKKLRLLEIRAGVPPLKGERTGTWATHERMRQAERELAQQAEASYTRMVSDWQAARPQKATQAAPAKEGASVTAGRA

SEQ ID NO: 246678 - protein, 439 aa, unidentified
MNKRRDRVCGADVHKDLIVATITGDDVLPIRENFGTTKAELKRFRNWLVANKCEQVAFEATGVYWMPIYDALSKTIDTIVANPLQIKTIPNDKSDSKDSNRIATLCLNGQIKRSRVFTDEDRDLRMLTRARSGYVKTRTQFRNRIHKYLSSSGIKLSSTMDDMFCKSGRYILNGLAEEKPLEEILKGIPSGKIRKKQDLIRAALENTLIDTNRMLLIDALEILDNLESKMEKLSLEVLKKVQQKSKDLAIVMSIPGIGFVSASVILSEIGNYHDFKTPEQLAKWCGLNPGENESAGKKKKCGITKRGSKHIRVVLVQAAQTLSNMKKTGLSRFFQRLIKKKEHNVAIIAVARKLICLIYHLLINQELYQECECRKRGSSQDKSCQAPSFKEEHLTDRVAAIVDAFYHLKESSRKNALMRGIADISEIKVGQKRPSKGGG

SEQ ID NO: 246679 - protein, 358 aa, unidentified
MTQVKKLDFSGTTIYCGVDVHKKSWRVNIQDSEFELEDFIQNPDAVLLHKHLNRRYPGANYKIGYEAGFSGFSMQRALSQWGCECWVVNAADIPTADKDKKQKQDKADARKLCNYLQSKKLKGIHIPDTQWEHARTLVRTRERIVNNQTRCKNRIWQLLHFSGLPVPSGQQEGKYWSKRFIDGLQKMDCSGSIHLQQSLQLHIKDYLQTRALLLEASRSIRALCREEKYARGIKLLRSIPGIGEINAAVMLFELQDVRRFKRFDYLCSYAGLVPDTSDSGDTKRTKGITHRHNYYLRTALVESSWSVVRKDPALLMKYKDYCRRMEKNKAIIRIAKHLLSRISFVLKNKKEYVTGVVA

SEQ ID NO: 246680 - protein, 418 aa, unidentified
MTATDTNSSTLLVAIDISKHRHEVLIGIPGKKRRRRLTILNTLDDFQRLFASLASYDLPVRIGFEATGNYHRALAHHLGQAGFELKLVSSVGLARTREALHNSWDKNDPKDAQVILHMLEIGAVQFFHDPMVVGTIDIQELSKTHEIVSRSKTELWHRILTHYLPLYFPEAERFHRSSRTDWFLTFLEKYPSPHMISAMDRDAFISDAWDVVGRKVSKEQLLSDIYATAAASVGLPVQADSDAVRMFRLVLAEGRGLVRQRDAIEARAVELLSDMPDYQLLTTIPGIGPINAMTILAEAGDLRRFRHHRQFLKFCGMDLATVQSGMFRGQSRISKYGNARLRRTLWMAGQTAVLKRTNSFRDKFERYISKDRHNAHLRRKAYTAIAAKMARTVHAVVNHGEPYRPFFEGVSPGGRTSL

SEQ ID NO: 246681 - protein, 335 aa, unidentified
MSQEKYIGMDVHQATISVAVMDGNGKLVMECLLETKAETILEFVQGLRGTLSLTFEEGTSAAWLHDLLKPHVSRLVVCDPRKNALLKEGNKSDRIDARKLAELLRTNQLKAVYHGEHGIRTLKELGRSYLTLSKDVTRTMNRIKSLYRSWAIPCAGTSVYAPRHRAEWLAKIVEPGVRIRAERLYQQLDGLQSIRQQARRELLQESHQHPAVELLRQIPSIGPIRSALLVALLQTPHRFRSKRQLWAYSGFAVETHDSGEYRYVRGKVQRNRERITVRGLNDNHNHDLKNLFKGAAISASTRPGPLHDFYVARVAQGMRPTMAASLWHEKWPPSP

SEQ ID NO: 246682 - protein, 335 aa, unidentified
MYYLGIDLHKDESHVAVLDDDAEVVEEIRVKNANLDDVAEEYAGAKAALEATSNYYTVYDTLDEHLDVVVADPTQTKAIGYAEVKNDRLDAKLLAQLRRAGMIAESYVPSEELRERRALVRGRKRLVEKRTDFKNEVHALLDKHGITYDWDPFSVNGRDILAGEDVSLGVVGDQLMESFLSIIDELTAQIEELESLIEETAASLEETQLLMTIPGVSFYSSLLITSEIGEIDRFDEAKQVVSYAGLDPVVRESGDSRTEGSISKRGSGDLRWILVQCVQTAVHRCNDPYLERFYARLKQRKNHQIAIVATARKLLVSIFHMLDRTEVYDPPEVSA

SEQ ID NO: 246683 - protein, 406 aa, unidentified
MELTTLHKRVIGLDVHQAQITACAIIEDEHGERHVEQRQFGTFKRDRKALAEWAAALKPDLVVMESTGIYWKSPYAALEAAGVRTLVVNAKHVKNVPGRKTDIGDAQWLATLARAGLLRGSFIPPAQLRELRLLSRQRQKLVGQLAAEKNRLHKVLTDGGIRLGVVVSDVHGAAARKMVKALIAGKSAPDVLELASKRFKASREELFDAVQGELTPSHRFVLDELMRHIEEIEARIARFDAKLLAEMHEQRNALALLQTLPGVDLIGAAMLLVEIGTDMDAFGSPDRLASWVGVCPGNNESAGKRKSGRAGKGNPYVRRLLCEFAHSARRTTCVFKSKFEALHIRRGHKRAIIAIAHKLLRTVFFMLKRGQCYRDSATDYEALAVKRNAPRWIKALKKFGLIDQPA

SEQ ID NO: 246684 - protein, 320 aa, unidentified
MSNLSDEIWVGVDVCKAQLDVAVGEGGETWSSDNDEQGIARTVARCKLLQPRLVVVESTGGLESSLVSALYLAGVPVALVNPRRVREFAKAAGLLAKTDKLDARLLVRFAQAVKPAPTHLPTQEEQLLSAMITRRRQLIDMRTAETNRLTTAHVSMRPNIEALLSWLSEQIKELDRKIDEFIQNQPDFKAKDDLLRSTPGIGPVAAAIIIADLPELGKLDRKKVAALVGVAPFNDDSGFRKGKRRVKGGRPDVRSVVFMSTVSASRFNPIIAAFYNQLLNRGKLKKVALVACMRKLLTILNAMLRDNKPWRYSSLSPNAS

SEQ ID NO: 246685 - protein, 391 aa, unidentified
MPQPNDLSRSLTALDQDSTLIAVVEMSQSSWLVGAIIPGVERRPAKKLEASEGMLLALLHRWRDEAAKAGCTIDRITVAFEAGRDGFWLARWLRQRGIEAHVIHATSIAVSREHRRAKTDRLDAALLQRAFLGWLRGERGHCTMVAIASLAEEDAKRPSREREALVGERTRIGNRMKSTLARLGIRGIRPGLRKTAERLEQLRTPEGAPLPPNTLAELRRDLARLRLINDQIGEIEAARLERLRQQPDEARHPMILLLARVVGIGIETADMLVQEVLSRKLRDRRAVARYGGLTGSPEESGARRREKGLARAGNARVRRGMLQLAWRFLMFQKDSALAQWYRARTADARGATRKTMIVALARKLLVALWKLVTTGELPNGVVLRPAIQAAL

SEQ ID NO: 246686 - protein, 419 aa, unidentified
MNNIYPVHPRMTRTYVGCDSHRDTHTLIFLNCFHEVLGEVTIGSAPSEFPKFIKRAKKYLQPNTTFAFGFEDVSAYGRAFVKFLVEKGYLVKHVDASKVATERGQVLHKTDRFDAECCARVLINQFDKLPDANPQDKYWILTNLVTRRNFIVKINVMAKNSLHSAIAESYPHYKKFFSRLTTDSALAFYEAYPAPHHLDNVSIESLATFLHSASKGRLSASKAELILNHVQRDKVRQVEYQDTKDFTVRSLVRQVKNNLAELDAIDEEIEMILTHFSYPLTSIKGIDTLTAAKLISEIGDINRFKNAKALAKYSGVAPVTFASGMSKLEMANARGNRKLNEIFYRIALTSVMPIGINKALINPIFYDYYMKKISEGKLKNQALKCVQRRLVNIIYSVMKHKRPYENPQMGYVPSETASA

SEQ ID NO: 246687 - protein, 414 aa, unidentified
MEVLYPRCCGLDVHKSSITACALLREQGRIRTERRRFTTMTQELKSLAAWLRQLQVTHVAIESTGVYWKPVWNVLEGHFTIVLANAQHVKNVPGRKTDAKDSEWIAELLQHGLLRSSYVPPEIIRDLRDLTRGRATLSQEASRLASRIQKVLEDANIKLSSVASNTLGKSGRAMLDALVAGQIDPEQLADLALGHLRAKIPQLRLALEGKIREHHRFLLKRLLHQLRFIESEIDLLDQRLEELGQEDPALAAVVARWSTVPGVDRVAAWSLAAEIGIAMEQFPTAAHLASWAGLCPGNCESAGKRLSGKTRKGSPWLGRMACQCAWAAARTKNTYLSAQFRRLAAKRGRKRAIIAVAHSILAIAYYLQKKRCDYRDLGSGYFDRLHADGLKRYLVRRLEALGHKVTIEAVGNAA

SEQ ID NO: 246688 - protein, 457 aa, unidentified
MSHKRKVKRSGQPGRLETIPILNPNAAGMDIGADEIYVAVPADRDRQPIQSFGTFTSELGRLSEWLQQCRIETVAIEATGVYWIPVYQILESCGFEVCLVNARYFQNVPGRKTDVSDCQWLQRLHSAGLLRGSFRPAQEICVLRSITRHRDKLIRLASTHVLHMQKALDQMNIQLHHVLSDITGLSGLAILDAILAGERDPKVLVQLRDGRVKASEETLILALTGDYRAEHLFTLKQSLAAYRHYQKLIAACDLEIEQQLKLFDDKLDGKREPLTPLKVRRKKPFSNEPNFDLRNHLYRIFGVDLTAVPGISVLTAHTILSEIGPDLSKFRNSSAFASWLGLCPHNDISGGKVLNVKTRRVNNRVSHALRMAANALFRSQSSLGDFFRRMRAKLGAPAAITAAAHKLARIVFHMLTTREGYDESSFTKNERRFRARAEARLRAQAKALGYSIVAATA

SEQ ID NO: 246689 - protein, 420 aa, unidentified
MQIIYRRCAGLDVHEKSVSACIRIVKGKQVETVEATFPTFTEDLEQLRDWLIRNRIQRVAMESTGVYWRPVWNILERQPAKLDLLLLNPQHVKALPGHKTDRVDAARIAELTQYGLVRASFVPPQEIRELRDLVRRRVHLQQDRSRVSSRIHRLLELQNIKISSVLKKMTSATARSILEGLATATTIKPEALALLATHKKVRGKREQLKKALRCHPTDHFRFLLRELLEELDRLTAKMKLMEERIGGRMAPYSELIERLCGIPGVKELTAWTLIAEIGVDMARFPTAGHLASWCGLCPGNAESGGKRRSGRTSKGNRYIRRALLQAAWGVERITSRRTFLTSFFFRVSRKAGRRKAAVAVAHKILTLAYVMIRDGSAYYEQGVDYFDKVHPERTKKRLTARLEQLGFTVRLEPKLSPETS

SEQ ID NO: 246690 - protein, 340 aa, unidentified
MNTTRIGIDLAKSVFEVAISRTPGRVDERQRLARSRMHTFFAQQETAEIVMEACGSAHHWGRELEAMGHRVLLLHPGDVARYRDGNKTDRADAKALLEAARNEDIDRVPVKSVDQQALGALHRLREGYLRTRTARINALRGHLREFGVVISVGAKHVLPEARAALDRDVVPAYLRDALEELLVEIETLRAKAEGLRAELERLADRMPEAQWLMSVPGIGVLTATAFIAFVGDVRRFRSGRDFAAYLGLTPREHSSGFSRRLGSITKRGNTYVRMMLIHGARSALRAGKVAKEPDNLRTWAIAIERRSGHNVAAVALANKLARVCWRVWRDQRPFERRLAA

SEQ ID NO: 246691 - protein, 358 aa, unidentified
MTEITRVGVDLAKRVIQVHAVDASGKLVTNRALARDKFVLWCAQLPTGCLIAMEASSSAHHWARKLVCLGLDARIIAAHVVAPYRLQGKSGKNDANDAAAICEAASRPTMRFVPIKSASQQGMLCVHRLREGLKEERTACINRIRGLLAEFGVVVPQSPKVLREGLREIIEDADNELSGLARLVIERAQTQWRELDEHLQWCDEHIAGHLKADEQAQAAMQLSGVGPVTASAVVATVGEFRQFKNGAQFGAWLGLTPRQNSSGGKNNLGGITKRGDMYLRMLLIQAAKSAVMTAHKRDDPISKWVCQLREKSGWQKAAVALANKNARILWAVMTKGRPFDARHVSVKPGVPSAAPAAA

SEQ ID NO: 246692 - protein, 334 aa, unidentified
MITEPSPIVGVDIAKDKFDVCLVLPGKRLCAVFPNTASGVARLVAWLAKTGAEPASTRVCMEATGVYSRTPCALLHAHGYTVHLENPARVAAHAKALGKRSKTDAEDAFVIADYCRANLDKLHAWKPPEKNIALLRELLRHREQLTGLLTAQRNMREACADAVVVASCKRVERTLCAELKATLKRIAELLASDEILAAHRDHLTAMKGVGVLTAAELICHVLTHEYENARACAVHTGLTPAHRESGKSIHGAPRISRRGDAHIRHALYMPAVAMTRYNAAARAWVGALLLRGKAKKAALCALMRKLVQVAYGVITTNTAYDPFKAFPTVAGRLT

SEQ ID NO: 246693 - protein, 429 aa, unidentified
MNYTQNEKIEQVTDSTMVVGVDIGSQIHYARAFDNRGRELTKRVFSFYNDLEGFNSFNLWAETLKTENNKTAVLIGCELTGHYWFAFAKYVNNHQKRLVMVNPFSVKKIKELDDNSPKKTDSKDPKTIAKLVVDGRYSIPYMPEGIYAEIRDLVYSRDRIMKQHNISANGIQRWLAIHFPEYLGLYTRFDAISGLAVLEKAPLPKDVIALGVNGIRKIWHDKKMRGRGVTEDRAKTLVEAAHNSVGLGGGIGTKSELYMLLEEHRLWTSQLEAVNKVLEKMILKVPYVEKLLAIKGVGSITIAGFIAEVGDIRRFDSPKQIQKYAGLELVENSSGKHKGRTRISKRVRRKLRKILYQVMVPLLAGNREFREIYDCYVTRVKNPLKRRQAMVAVSCKLIRVFYAVLTKGVDYDRVKMMSDIHREGNFIAA

SEQ ID NO: 246694 - protein, 312 aa, unidentified
MANLVYAGIDVGKDKLFVNIHLDSQVRDFPNTRSGLERLSRFLIKNAVNLVVMEASGGYERLPASDLRARGLSVAVVNPTYVRRFAQGMGSLAKTDTIDARLIAHFASVKQPKPQQAKTVEEEELAALVERREQLVSLLSVEKNRLSKASDYSKASLQISIQFLTGQVASIETEIKALMAKSPERLARMRCMCSFIGVGDITAVTLLTEMPELGMESGKHIAALAGVAPINRDSGKMKGKRRTYGGRARVRRTLYLAALSASRHNPIIKAFYERLLAAGKEKKVALVACMHKMLTILNAMLKKGELFNPEYS

SEQ ID NO: 246695 - protein, 403 aa, unidentified
MKHVIAFDVSMGKSYMVIYNAQKQCVFESEIKHSKPDFKKLQEKIHKLTDETGESPEIVFEATGIYSRQLERFMQNNQYTYCLLNPLEAKIQCDSLRIHKTDRSDAHRLALTHFTVTRRVSTGTDNLFYQLKSLSRLYSELDDELSIIRGRMHKVIQLTFPELERIFTSKSDLFLNFVQLFPHPDCVLGLSKTIIKDRIRANTNKKISNITAEKKAIQILEIAKICYPAVSQNDVLCDQLKLYARRYQELLHQKESCISKMVYVAEQRAEYDIIRSLPGIGPNTAVRLMAEIGDITRFNNNKQLNAFAGIDIRRFQSGKTFFKDKINKRGNKHLRKLLFLIIQNMIKQRRYGQNHIVEYYDKLKTQPYNKCHKVASIACVNKLLKLLFYLITHNMHYDYRLAA

SEQ ID NO: 246696 - protein, 372 aa, unidentified
MNYNTVYVGMDVHKESFTLCAYTIDAEKGSHFQRTEADYKNVLKYLEFLRTVYGNDANFICGYEAGCLGYTLYHQLTEHDVNCVILAPTTMLEQRSKRRIKTDRRDAEIIGKCLAQHNYSPVHIPTATDEETKEFLRMRDDHKLALKKVKQQILAFCLRHNYRYDGNSHWTAAHIKWLKSLNPEALYKEILDEYLLTYTTLSDKVERLDKRIEELASKDEYRESVKKLCCFIGIKTHTALSVLVEVGDFQRFASAQNFASYLGLVPGEDSSGDGQTRLGITKAGNRHVRMLLTEASQCYARGQIGFKSKELKSRQAGNSPQVITYADKANERLRRRYYKMVLGKSKKHNVAKTAIARELACFMWGMMTEHIA

SEQ ID NO: 246697 - protein, 367 aa, unidentified
MKKVSTEAAKQSRKISEHKLTIGLDLGDRSSWYCVLDEAGTIALEQKLGTTPKAMKEVFGGMPRCRIALETGMHSPWVSRLLSELGHEVIVAHARNVRLIGESRKKDDRLDAQTLARLARIDPKLLCPVKHRSARAQADLAVIRARAGLVRARTALVNTARGLAKSYGERLRGCNVRNMNPEKAQGLSPELRTALEPLLAGIESLSERIRECNERIEQLAQESYPQVALLKQVKGVGTLIALTFLLTLEDAHRFRKSRDVGCYLGLQPGRRNSGQSEPQMHISKEGDPYLRTLLVQGAHHILGPFGADSDLRRWGLKLAERGGKSGKKRAIIAVARKLAVLLHHLWVSGEVYEPLRLSKPRVMPAAA

SEQ ID NO: 246698 - protein, 462 aa, unidentified
MKIRLGVDVACRAAHQASLADEQGRFLFVGHRFRTDPDELDTLWARLPKDAERIEVVMEPTRNAWVAAAAWFRRHGATVVMVPPEQSADLRDYYNKHTKTDRLDSKVLARLPLLHPEGLHREDSLGPGDELKRAVKIRSGLVHRRTACMARLDALLEILGPAWIAALGSDMTLTALRFLARYANPVQVKRLGKARLAAFFRRSSRQAWADERADAVIEAAATTLRLWGADGGELDFDALAADVAAEARLALTLTDEINGFDKRIGALYDKADPAGIVRSVPGAGRVCAPQILGRLGDPTRFANLAAVRSFAGLVPAADSSGQADGHRGPTKAGDCCLREALFIAADHARKVDPTLAVRYQRLMLAGKHHDSAVCTLAAVLLTRIAACLRAGTHYLLRDTDGRVITEAQGRAIVAERYTVPPEVRAARRKVTPHRHPRRNERNERAKTGVATRSKASPVPQPA

SEQ ID NO: 246699 - protein, 340 aa, unidentified
MAITTVGIDLAKNVFAVHGVDQNGKTVLVKPKVSRAALPELIASLPPCVIGMEACSGAHYWARLFRQYGHEPRLMAAKFVSPYRMAGKSGKNDAADAQAICEAVRRPHMRFVPVKDESQQAMQCLHRTRQGFIEEKTATYNRLRGLVSEFGIIAPQSTDALRHVVSEQKSFLPLQVQQCVADLLEHIDRIEENITEYDKILSRVAKTDHRSQRLMDLKGIGPTTACALVASIGNAHDFKNGRQLAAWLGLTPSQYSSGGKSKLGRITKAGDSYLRTLLVQGARSVLIGADKRTDSFSRWVCTLVERRGYWRAVVAIAAKNARLCWASLHYGDDFRLYSAS

SEQ ID NO: 246700 - protein, 664 aa, unidentified
MSRSCQNRRRAAARTATNQDAGGAVHAAAMPTEGPVPSTTDPKTSRSRAAPGDTPAATPVAIGVGIDTSRYGHHAIFLDADLQPAAPELKFVESAQGYQQLQSRLAALRHKHGPVHFHFRLDVAGSYADNLLAFLHGLPEPRTISCGDPQRNKNYRAAIFGHKKSDATEANATARYALTEKPKPMPVVAPAVQQLCQIASRLESQARHCTRVVNQLHNLLGRTFPELALLVKDLSAGWVLTLLDRYPTAAKLAAARPSSLEKIPYLPHEHIARLREQARTSIAALTGPVTEELVRELVGQLQDAHVRHKALEKLLVSAYRQLPEPNHLDSIIGFGEVTAAILTAKMVTTGRFVEPAKLTGYFGIYPVEASSGIDRDGQSRLPLRMVMSRRGNDLVRRYLWMAALSAAQHNPAVRPLYQRVRAKHPDKPGIAIGHAMRKLLHLALAVWQTGKPFDPEHYPWDQAAHLPGSQQPATAEPVAPSPTHEHTGPHAQAAGHKNPVTTPVRSVVTAACVPTSVTEAASAGNDSTRSVASEHPEATACDMPMSQDAQAEATALAWIDFAHLKTQLPLQRVLEHLNLLTDLRGRSSQRKGPCPVHAPSGKSRTFSVNLDKNLFQCFDPHCGSKGDVIDLWAALHKLSLRDAAADLIQTFNLEPASRTEKRHG

SEQ ID NO: 246701 - protein, 416 aa, unidentified
MEVVHRRCCGLDVHKKSVVACVLLSDPSGPPQREVRTFGTFTHEVLALADWLAEQEVTHIALESTGVYWKPIWNLLEDRFALLLVNPRHIKAVPGRKTDVHDAEWLAELLRHGLLTPSFVPDRAQRELRELTRYRTSLINERSAAVNRLQKTLEGANIKLASVASDVLGVSSRQMLAAVVEGTTLEASALAELAHGQLRDKVPQLEQALSGRVGPHQRFLLAEQLAHIDALDASLERLSTEIAERMRPFDELIERLDAIPGVGRTVAEVLLAEIGADMTRFPTANHLVSWAGMCPGHNESAGKKRSGKTRKGSPWLRAALVQAAHAAARAKQTYLAAQYRRLTARRGTKKAAVAVGHSILVIVYHLLTDPDCPYVDLGATYFDQRDPGAVQRRLIHRLEALGYHVQVTPLAESSAA

SEQ ID NO: 246702 - protein, 398 aa, unidentified
MLSIGIDVSKGKSTVCGMKPGGEIVYTPFEVQHTREGMSELVSLLRGSGEEVRVVLESTGSYHCPVVAALLENGIFVSVVNSLRMKRFCSQSIRKVKTDRIDAMQIALYGLAYWQELQPTRLPEDTYRELQLLARQYYQMTSILIKAKVDFNALCDQVLPGMQELMNDHAGRHKLSDFVLRYRHTTHILEMGETRFRKDYCKWAEKKGYRNRERMAALIFATAQNGIPVLPNAPSTQIVITEAIRVLHTVEASRDAILTQMQALAKTLPEYSLVREMPCIGDTLAPRLIAEIGDVRRFHSKRALIAYAGIDAPPYQSGKFCANNRHISKRGNRYLRKTGYEVMQSYVMHKPANDPIFTFIEKKRSEGKSGKLAMVAGLNKFLRVYYGKVTELSRSLPQ

SEQ ID NO: 246703 - protein, 351 aa, unidentified
MMIIGVDYHPSFQTIAFFMEETGECGEQELKHSDGQAEKFYRDLKQRGICVRAGMEATGYSRWFERLLAELEFEVWMGDPAEIKAKRVKKQKFDREDARLLLRLMRENNFPQIWVPGPENRDLRQLLWHRHRLVQMRTRIMNQLQALAMNEGYRWKKKLFSEQGRAQLEKLALGPWASRRRQELLELLDRMNPTIEELTAAIEREARKRPEALRLMTHPGVGPLTALAYVLIIGTPTRFQRGKQIGTYVGMIPSEDSSAGKPRLGHISKQGNSLLRFLLVEAAQAAARIQPDWRRRYIHLAMRRHKSIAKVAMGRKLAIQLYWMWRNGCEYSPSLEFGSYAGQLGTGHGVK

SEQ ID NO: 246704 - protein, 336 aa, unidentified
MNTNEKNKAYLYYVGVDLSKEKFDAVLIGNSQDPQHRIFDNKKSGIKRFLSWLEKQGSFSFKESLICMEHTGIYSRLLVRTLMEINAPVWLESSLQIKKSLGFLRGKNDKIDAHRIAYYAEKYADRARLVQLNNETLQTLQDLLSARDRLLKSIGQLQRPLRELKRIDPDTYKVLQRINQPVINQLRESLCQIKNEILQVINADELLKRMYTLVTSVKGVGMVLCVQLIVYTHAFTRLRNSRQLACYAGVAPFEHTSGSSIKGRTHTSNFANMTLKSTLHLAAISSVQHNPDLKKYFERKVAEGKNKMLVINAVRAKLLYRVLAVVKRGTPYKNVA

SEQ ID NO: 246705 - protein, 438 aa, unidentified
MKVLHERVAGIDVHKDMIKVAIRSPGEKPWTRKTEVFEFRTFYGVLQEMARELRRRGVTHVAMEASGVYTEPVYHALCEQDFAEVIVVNPAHVKAIKGHKTDAKDCARLAELLECGLLHGSFIPSAEQKQVRDLTRYRMKVVQARTSEIQRLHKALESAGIKLSSVLTDITGVSGRLMIDALIDGERRAQVLADLARGTLRSAGKQADLSMALAARFTDHHAMLCRLHRDQIKLHDHAIAGLDGQIADRAGRWPRELGLLKTVPGFGDVVSAAWLAEIGPEPHRWFPSHDKLASWVTLCPGNNISARKRKSGRTGEAGTYIKPVLVQAAWAAIQARGRLQARYRRLVRRFGGDKNPGAKKKAIIAIAHTLLKIAYQVLKTGQAYTELGADFYTRRESPQQQHAYLERRLQKLHPGCTVTVTISPPPDSHPPGTAPEAA

SEQ ID NO: 246706 - protein, 410 aa, unidentified
MNAAGIDVSKGKSMVSVMRPFGEVVAKPFTVRHTGSELKELADYLKSLDGETRIIMEHTGRYYEPVAQFLHDAGLYVSAVNPKLIKDYGNNSLRKVKTDKADSRKIAKYGLDNWVELRQYVSMDKIRYQLKTLNRQCNLYGKTKTMMKNNLIALLDQTYPGVNDLFDSPVREDGTQKWVDFAASFWHLECVKNMSLDAFTGRYRKWCKRNKYNFSSDKAAEIYAGVQDQIAMLPKDALTKLMIRQAINALNAVSATLEKLKAEMLELSSQLPEYPAVMGMRGVGDSLGPQLMAEIGDVMRFARRSAITSFAGVDPGADQSGGHEAKSVPTSKSGPPELRKALFLVMDHLIQTKPLNDPVYQFMDKKRAEGKPYLVYMTAGANKFLRIYYGRVKEYLAKLEQPLAPNPEQH

SEQ ID NO: 246707 - protein, 333 aa, unidentified
MEKKWFIGIDISKKTLDVVIYVPTKKHADETNYERFLNKEEGYKSLLCWLKKKNMAKKRLVISMENTGIYSFDLCLFLEAASIDYCSFNPLHLKRSLGLVRGKNDRVDAERIAYFAYLHRDELSYSKLSGSSIIRLRDFAAERKRFVKQQAEYKGFLTDRKDCEMTSTIGRAAHMVKILDEEIASVEEEMLQIINSDPSILRNYELLNSIKGIGTINAMNTIIHTNNFQAFETARQYACYLGIAPFEHSSGTSIKGKTRVYPTGAKLLKADLSQAANSAIVWDKEMKEYYERKRKEGKAYGVVLNAVKFKLVGRMFAVVKRGTPFVELMTYKK

SEQ ID NO: 246708 - protein, 316 aa, unidentified
MGGQGIYVGGDVSKARLDVAVRPSGEGFAEANAKPAVSRLVKRLKALDCTRVVVEATGGYETIIVAALYAAGVPVVVVNPRWVRNFAKGMGWLEKTDRIDAKLLALYAERAELKVQQLPDEATRQLAELCARRIDVLEMMETERNRLEHASSAVRRAINSHIDYLRKQLKRIEHDIDGAVRGSELWRHKDELMDSVPGVGPTLRACMLAWLPELGQLNRGEAGKLVGVAPLPDDSGTVRGVRRIFGGRAPLRKVLYMATMGAMRHNPHLRAYYDGLRARGKLHKVALVATMRKLLLILNAIIKTDTPWSESCLQSA

SEQ ID NO: 246709 - protein, 343 aa, unidentified
MDEVRRFVGIDVAKVALDVFIGSVGAAFSVANDEVGIRELLRQLEPADFVILEATGGLETPVASALAAAGIAVAIVNPRQVRDFARATGRLAKTDRLDAEVLARFGEAVRPEARRLADEQGQALEALVNRRRQLVEMLTAEKNRRARAPKVLHRSLDEHIRWLQRRLSGFDDELGELIRNTPLWRERDELLRSVPGVGKVLSSTLLAQLPELGMLNRKQIAALAGLAPFNRDSGSLRGSRCIWGGRAQVRRVLYMATVAGVRSNPTIRTFYLRLRANGKHAKPALVACMRKFLVILNAMLHHKTHWQTPALTSPTSTLSPLLGAVSEHGCSLPAGFSPPAIPI

SEQ ID NO: 246710 - protein, 424 aa, unidentified
MNLTQNDRLKQVTGDTLIVGVDVGSQTHFCRAFDWRGFELSRRVFKFSNTGMGFLTFLRWTEELMNKTEMKKVIVGCEPTGCYWLTFQKFLQDHDIQLVTVNPFTVNRSMELDDNSPEKSDLKDPKTIALLVKDGRYSTSYLPSGVYAEIREASVCRDQIMKQHVRLSNQIQGWLQKFFPEYFECYAEWDSTSGLMLLKEAPLPQDILKIGAGGINQIWRDAKVRAAGIKRAQTLVEAAQNSVGLEAGEAARLEIWVLVNDYILKAEQLKRLDEYLEEKVKEVPNVEKLLAIKGVGMSTVIGFIAEVGDIGRFTDPKQIQKLAGLEIVKKSSGKKKGQPRISKRGRRKLRRTMYESARALMQWNPAFQDVFLYYRNRTRKPLGSMQAKIAVACKAIRVFYVVLQTGCDFDEEKFRRDIIRPEAA

SEQ ID NO: 246711 - protein, 405 aa, unidentified
MDIIAEKGCGLDVHKETVVACIMGIGIKKEVRTYTSMTHDLLRLKGWLQEAGITHVAMESTGVYWKPVFNILEDHFEVILVNARHVKNVPGRKTDVQDSEWLCRLLRSGLLKGSFIPSRGIRELRDLTRYKRKLIQAIVAEKQRVEKVLEDANIKLSSIASDTFGASGKRIIGELMRGKLKVEEMAELSKGRLRQKREDLKEALVGEVREHHKFMIRVSLKHIRAMEKILLGIERKIREKIERDYKEEDELLQTIPGVKENASTVIAEIGVEMDVFPDEMHLSSWAGMSPGNNESAGKKKPGSTTYGNKCLKAILIEFGWVASRMKGTYLRSKYHSLVGRRGKKKTLVALGHKILIMCYHILKYRRPYKELGEDYLDKRRRDRITRSYIKRLNHLGYEVILQDAA

SEQ ID NO: 246712 - protein, 354 aa, unidentified
MTGESLAQPVVIGVDTHDLVHVAVALDQLGHRCGDISIPATPSGYEGFVTWALEHGSVAAVAMEGTGSYGGGLCALLQRRGVRVVEVVRPSRQHRRNRGKSDLLDAEAAARAFLGGEATAQPRGGDAAIAMIRSLRVAREALVNQRTQTINQLRALIVTAPPDLRQSLVQLSAPRLIQRVARFRLDGMAAPADASRFALRQLGRHVRALDVQIDELNDRLTPLVANRAPELLALHGVGVEVAGNLLVAWDNSERIKSEAAFAALCGVAPIPASSGKTSRHRLSRGGDRSANRALWRIVLTRLRTDDRTRDYLARRRAEGKSHREVVRCLKRYVAREVFHVLQRVAPSSLALDAT

SEQ ID NO: 246713 - protein, 359 aa, unidentified
MLPEQRVLDFHGRHVFVGLDVAKQSWKVSILVGTDQVHRSFTQPPRPEILAQYLERNFPGATYHCAYEAGFSGFWTYEALTAQGIDCMVVNPADVATTNKERQSKTDRIDAQKLARELANGGLRAIYVPHRSAQEDRSLVRLRASFVRKQTRSKNQIKALLEYYGITPEDIAGSAERHWSRKYIQWLQEAPFYNPSGRAALDALLTELLSLRESIARLTRQIRTLAEQDAYRRRIELLLTVPGVSLLIAMTFLTELVTIDRFDGLDSLASFVGLVPGERSSGDRQIVTGITRRQNKVLRAMLVESAWVAIRHDPALMMAFLRLSSRMPKQCAIVRIARKLLNRMRTVLTTQAPYQMRTV

SEQ ID NO: 246714 - protein, 380 aa, unidentified
MPEAVIGLDVGKSSHWACVATRDGEILLSAPVANREGDLDSLFGRFPDALVVVDQSRNIGALALARAKAAGMSAAYLPGLATHGAARLFAGDAKTDERDAMVIAKTALGIPDALLPVGDPGPTVAAARALAAQRNFLTCENTRSKNRLRSILLESCPAFEALVDLSDGPQLRLMASLGGAWSVADAGPRRAAALTRGAARGKIEALVRSTASSTRPDAAAIAAEDRAVRLLARRISENSAEIDVITAEISALLEGDDTYRCLLTVPGIGPKTASELAISIDIEDFPSHDRLASYCGLAPRNRQSGTSISSVTASRQGNKRLKNLLIFSCNCLTRTEGRWGDYYTRCRERGMSHGKALKALARKRLKVIYAVMRDRVPYAA

SEQ ID NO: 246715 - protein, 354 aa, unidentified
MKRSTKHVALDVHQATTLASVREDSGRVIARSILPTEEPAIVEFFRGMRGTIHVALEEGTQAQWLHDLLTPLVDRVIVCDRRGETRQGNHGDQHDADALSEQLRRGGLRAVYHGSGPGAGLKELTRSYQNLVADATRVMLRLKALFRARAIRTPGKSVYAPTRRAQWLAQLPDGGARVRAAALYAELDVLRTLRPQAKAAMLAAAQQDPGWTVLRTIPCFGPVRVALLLATMQTPWRFRTKRNLWAYAGLAVVTHSTADYELVAGRPQRRCRAPLTRGLNRNHNRVLKQVFKGAATAAKARPGPLQDWYDGLVARGMREELARVTLARKLAAITLRLWKKGERYDPTQLTTPAR

SEQ ID NO: 246716 - protein, 333 aa, unidentified
MQDLSTKQHFVGCDVSKDTLDLALYQPKTDYRKFEHVQISNDTEGFKQLFQWLKARKIKKNEVAIAFEHTGAYSIALAEWLHKKKITFSMLHPLDVKNACSRGRNKTDEVDAKFIADYAYTMREKLAPSGPEPKNIKHLRELRNERDLCVRCRASYLCQIKVQTEAQTIARMHKMVDFMTVQIHQIEEEIKKIIAADETIATNYHLLISIPGIGMVNAVNTIVATGNFTRFQTSRQYAKFCSVSPMAVQSGTSVHSGNHVCKKGHNELKATLSEAARSAIIHDPQLRHYYQRKRSQGKSHGCVMNAVKFKLICRMFAVIKRQQPYVNTECYRG

SEQ ID NO: 246717 - protein, 311 aa, unidentified
MNSEAFVGVDVSKDRLDVNVLPSNDAHQFANDDAGIIQLIKLLKKVVPKLIVFESTGGIEMPAISSLIEHQLPVVMVNPRQIRDFAKATGRLAKTDALDAQTIARFARDVRPELRPLKDEHTQLLSALNARRRQIVDMLVAEKNRLHTAHKKNKKSIHKHIQWLEKSLANINDDIDKTIKKSPAWRENDKILQSFKGVGPVVSATLLCDLPELGTLDRKKIATLVGVAPLNCDSGRYRGTRRIKGGRANVRRQLYMAAVAAARHNPAIKDFYNRLIEAGKPPKLALTACMRKILTILNAMMKNQSYWIASS

SEQ ID NO: 246718 - protein, 360 aa, unidentified
MRIQRTSVGLDVHARSVVGCAIDEDTGEVIRHRFGYDPAAVVEWVRSLPQPAAVTYEAGPTGFALARLFTAAGIECFVAAPSKLQRPVGDRVKTDARDAMHLARLLRLGEIVAVAVPTIEQETARDLVRAREDNRGELMAARHRLSKLLLRHGIIYDGKQAWTGAHDAWLRRQRFDHPGLQAAFDADYEAVQQVRARKDRLDAIIEQMAAASTYAPVVRRLGCLRGISTLTGFGLAVEIGNWERFTGSSIGAFVGLVPSEHSSGQSRSQGSITKTGNTHARRLLVEAAWHHRKPYRPGAVMQARWAAAPSLAASRGDDGNRRLHQKWQHFTARKKRPTIANVAIARELAGWCWSLAVMPD

SEQ ID NO: 246719 - protein, 405 aa, unidentified
MPIYYAGIDVAKYKHTCCAADSNGEVVVRSFDFANSAEGYALLLKTLDALGPRGSVKVGMESTGHYHENLCRRLLAEGYPVRAQNPKTIVSFRKSRNVSKAKTDGNDALEIALYFATFGFTPSTGKSYTHESLYGLAKDANALVSDRTVLYNRIQRHLDITFPELLGFLRENADGSRRNSTRGRNVLGSPTTRWIISNFPSARAVSAMTEADYAALKRASHSSFSPIRFARMKALAASSVGTPIAHDSAMVAMLAAQCGLIDSQLASIESEMEGLLASEPHEFTKIKGIGPGYASAILGCVGDFSRFPTADALLKYSGMVPSLYQSGTVERRGRMEKKGPPLLRYALVQAAQKVVLHYPKWAEYYRRKCSEGKYYKVALVHLAAKLLRTIWLIETRGLEFDEARF

SEQ ID NO: 246720 - protein, 351 aa, unidentified
MVSILADRVDVVVGVDAHADTLTATLVTAVGVFVDELTVPADGRALSLLGAWADRHAAGQRRVWVIDGSRSYGVGLLRQLRATGEAVAEAPRIGRGARRGTGKSDSIDAALIARAALAAGTVAEPRADGIREALRILLVTRRHHSDTRTATVNLLKSLIVTADEDLRQQLRGRSTAVQLGYLLDLDDQPTSNQLTRIIRQQLVDLARRTAELDRILKANKAEINALVGQSCPALLDEPGVGPITAATALCAWSHRGRVRNEAAFAALAGTNPIPASSGKTVRHRLNRGGDRTLNRALHTIATVRRRVHQPTRDYVARRTHEGKTDPEINRCLKRYLSRRLFRIMQANATLA

SEQ ID NO: 246721 - protein, 356 aa, unidentified
MPAAPENVIARHGVIIAVDPHKASWTAVVVTPDLAAAGTIRVEVNRSGYRRLRRFAAAWPDARWAIEGAAGLGAPLAERLREDDLAVIDVPAKLARRVRLLSTGHGRKSDPADALSVGIAAWSAQTLRSVQIDEAVAALRAVTEHRDDMVRTRTQLVNRLHAVMVKLIPAGLPRGLSADTAAGALRRVRPRDTLRRTLRAIAVDLITELRRLDRRITEATQSLSDTVQTSATTLTSLLGIGDVVAAKILARTGAIARFPSAAAFASYCGVAPIEVSSGDVVRHRLSRAGDRQLNYALHVMALAQIRYAGPGRDYYERKRAAGKSHKEAMRCLKRRLSDLVYRTMINDTVSSLTAVS

SEQ ID NO: 246722 - protein, 457 aa, unidentified
MAFMSLPAVMAKIDWPPAVPRRRDRELRDAIGSLCKDTTAWSSAGLLIGTTASREVVVGQPLWAGVDAGKSDHYCVVIDADGKRLLSRRVANDEAALLELINAITALADGDEITWAIDLNAGGAALLIALLIGAEQRLLYIPGRTVHHASGGYRGEGKTDAKDAAVIADQARMRRDLKPLRPQDDIAVELRILTSRRTDLVTDRTRAINRLRAQLLEYFPALERAFDYSASKAALILLSGYQTPDGLRHAGAARLAAWLRKRKARNADAVAATAIEAAKSQHTVVPGQQVAAAMVARLAEEVMTLDTEIGDTDAMIEERFRRHRHAEIILSMPGFGVILGAEFLAATGGDIAAFGNTDRLAAVAGLAPVPRDSGRISGNLKRPRRYNRRLLRACYLASHIAIRTDTASRIYYDRKRAEGKRHTQAVLALARRRLNVMWAMLRDHKPYQPTAPNTAAA

SEQ ID NO: 246723 - protein, 320 aa, unidentified
MEKAKLYAGIDVAKASLDMAVHPSEQRWSFTNDDRGISEAVSCLQRVSPALVVLEATGGIEMPLTAALVVAGLPVAVVNPRQIRDFARAMGKLSKTDVLDAQVMAHFAANVQPKPRPIPDAQTRELSDIMTRRRQIVEMIVAERNRLLTARGVVSEGIQAHIAWLEQEMANIDHDLRGKIRKSPIWREKDNLLRSVPGIGPVISATLLAELPELGTLDRRQIAALVGVAPLNRDSGNFRGKRSVWGGRAKVRAMLYMGTLVASRHNPIIRAFYQRLCAAGKEKKVALTACMRKLLIILNAMLRHRTSWCYPNTQIIGPCS

SEQ ID NO: 246724 - protein, 431 aa, unidentified
MKTDKKSTMPVVHPQAAGIDIGSTFHVVAVSEDKSSEPVRTFQSFTTDLHDMAKWLKSCGITSIAMESTGIYWIPAFEILEEYGFEVFLVNSREAKNAPGRKTDVNDAQWIQRLHQFGLLRASFTPDKEIAVMRAYIRQRERLLESRASHIQHMQKALIQMNLQLHHVVSDVTGATGMKIIRAIVAGERDPHKLADYRDVRCKESNATIARSLVGNYQEAHVFALKRALELFDYYNEKVMECDQRIEATLIALKREDKSPDSPLPKAKHRTKQPNALNFDVRSSFYQALGIDLTQIQGIGPSLAVKLVAECGTDMLRWPSSKHFTSWLCLSPGNKISGGKVLSSRTRRSSNRAAAALRLAATTVGRTDTALGAFYRRLSARIGKAKAVTATVRKIATLFYNTLRYGMYYIDPGANYYEERYQKRVLDNSSK

SEQ ID NO: 246725 - protein, 387 aa, unidentified
MRRQSRIRKEPVVDTDATTYVGLDVHKRTIAVAMLLPGRTEPIEWQEPHDATAARRLARRMVRGAPGKVVCCYEAGPTGYVLQRRLRAEKVMCIVVAPSLTPVQPGKHVKTDRKDARKLASLLRAGLLTEVHPPSEEQEALRDLCRCREDVQQDLIRARHRLSKFLLRRHLVYNQTKHHWGTRHMAWLQQIRFEGDPASQAVFDSYMLAIEQGDERLLQLENKIGEFGCQEPYREAVGWLRCFRGIDMVTAVSLVAELHDFRRFTSARQLMSYLGLVPRESSSGERERRGAITKAGNGHVRRLLVEAAWHNRSRPAIGLPLRQRRQDQPARVIAIADRAQERLHRRFVRMTFKGKPSQVVIVAMARELVGYIWSVLSWEPEVSATRG

SEQ ID NO: 246726 - protein, 341 aa, unidentified
MNVTTVGIDLAKNVFSVHGVDAHGKAVLKKTVSRGKLLECFANLPPCIVGMEACTGAHHWARLLRELGHDARIIAPRFVIPYRKNGKNDGNDAEAICEAVSRPAMRFVPVKSSEQQALLCLHRIRQGVVSERTAQINQIRGLLAEFGLIMPKGRYPAQHAIPDILEDAENGLPSLARRLLHDVWQRILQLNQQILAYDREIESLARLCPKAQSLMTIPGIGSITATALLASLGDPRQFHNGRQLAAWLGLTPRQYSTGGKTRLGRITKQGDKYLRTLLIHGTRAVLAALRDKQDRISCWLRELVARRGYKRAAVALAAKNARIVWAMLTSGEEYRSQAVAA

SEQ ID NO: 246727 - protein, 406 aa, unidentified
MAVVFLGVDWAEEHHDVCMLDEQGKVLGRAQVANSLHGVGRIHALVAERSEESGEVVVGIETDRGLLVQALLAAGYQIYAINPLAVDRYRDRHSVSGAKSDAADAKVLADLVRTDRNNHRPVAGDSAEVEAVKLLARAHQSLVHSRQRQVNQLRSALHEFYPAALEAFKDDLGGRDAVAVLEYAPTPSRGRSVSQAKLISALRRAGRERNLKARATELQGILQQPHLEQPATLVAAYGVIVKSCVRLIRELNAQTTELEQELTKSFELHPDAELYLSLPGLGFVLGARVIGEFGDDPNRYSDAKGRRAYSGMAPITRASGTRHVVLARYARNRQLADACYLWAFSSLKRSAGAHQYYRALRARGKSHAQAIRALGNRWVSILHGCLRHRQLYSEKVAWRAPVAVAA

SEQ ID NO: 246728 - protein, 312 aa, unidentified
MVVIAGIDVSKDKLDIHVLPSNQTFVVGRDPRGLASLARRLRKAGVEQVALEASGDYERIVIEALEADGFVVQLLNPARVRAFAEAIGMLAKTDPIDARLIALYCQHFPDTGLTRRPEQARKLGEFLNMRAMLLKLAGEIRNSLEHVREPGLKALADTLSADIAAKLKDVDDRIAKVIAGHDATMRKARIIRSFTGAGPVLTSGLLARVPELGGVTRHAAARLCRAAPTDRQSGRTRHRSSIEGGRDQVRPVLHMAALAAIRSNPIIKAFAHRLSAAGKPKPLVIAACARKMVVILNAMLRDNTEWKYAKAA

SEQ ID NO: 246729 - protein, 345 aa, unidentified
MPAAYFIGVDLHQSVIQVCVLDSKGEIVEERRFRGESLQSGLDVVKFICRHRGARVAVEAIGMNRWFVDALKGKCDVVVVDALKLNLRSLGKKTDRRDAYEIARRLQLGDIDRNAKTYYPTDEEYGVRRILRTRRALVKIRQMLVNNIRSILRAYRIPQPLGHLYTKRAIKTLREVSGLSEALSFCLLELVEQLASVQTRIANFKKRIEVEAQHPKIAALAQELPQLGPQTALTLVTELGDVSRFRGTRAAASYAGLVPRVSQSADKAHHGPITKRGNRDLRWVLSEWAVRLMAKNAIARAWAAPRLKRMHKNKVRTALARRLLVGLFITLRRGEVFSLEHCLAA

SEQ ID NO: 246730 - protein, 411 aa, unidentified
MQTLVERGCGLDVHQATVVACLLMVRRDGKVQKQMRTFGTTTRELVSLREWLLSEGCTHVALESTGVYWKPIYAILEGALEIVVANAQHIKKVPGRKTDVKDAEWIADLLCHGLLRSSFVPPKPIRELRDLMRYRRKLVESQAAERNRLLKVLETANIKLANVATDVFGMSGRLMLRALITGKATPQEMADLAKGLLRKKIPELQLALEGKLEEHHRFLLELQLQRLEAAEKDLAALEQRIRQKLEPYAAQLALLDEIPGVDWTLAAVIIAELGVDMSVFGSVSQLASWAGVCPGNNESAGKRKSSRIPSGNVYLKSGLVEAANAAARAKGTYLRDKFFRLKARRGYKRAVVAIAHKILVAIYHMLSQKVSYNDLGDLYLDKLNKNHLTRNLVHRLERLGYQVTLTQQKAA

SEQ ID NO: 246731 - protein, 412 aa, unidentified
MKDLLEISCGLDVHKEKIVACILTGPLGKPTRSEIREFSTLIPDMIALRNWIVSKNCHHVAMESTGIYWMPIYEILEDAFYGDITLLVVNARHMKNVPGKKTDMRDSEWISTLLRTGLLNGSFIPEKRIREFRDLNRYRKSVIRDITSQKNRIEKFLQSSGFRLSSFISDIFGASGRNIILHLIEHGQIDKTALDSCLKTKTRNRIDEILMSVNGTLSEHQKAFLRILMTHYDSLKKHLAEIETSLEEDMAPFALQVEQLNSIYGISTTASCAIIAEIGIDMKPFKTAEHICSWAGLCPGNNESAGKRKSTSVTKGNPYIKSMLCEIAWVIAGKRNTYLSAWYWRIKQKKGAKKAIVALARKLLVIIYTMLKQGTLFDESCFETRRKHCEQKQLSRYIRELEKHGYHVEAQS

SEQ ID NO: 246732 - protein, 420 aa, unidentified
MPNIEIGVDFMVKENFIYVGIDLHKETHTAVMIDCYNQKLGEITFPNRPADFPKLVTKVKKCNTDAKEVVYGLENAYGYGRPLAVWLIDKGYFVKDVNTAISHRQAKHRGAMYRKSDSDDAEAIALATLNMLDKLPDACPNDAYWSLGQLVHRRDNIMKQRTRLVNQLHEQLCIAYPSYKQFFNDISRPTALYFWEHYPSRKYLKGKSVEDLRAELVPVSHNKCSTRTCEKILDAIAGDKVKNNAYQDARDMVTLSIVSDLQHYDKQLAEVDKMLEQMYKMLGCTLTTIPGVNVITAVKILAEIGDIKRFSNANKLAQFAGIAPLHLSSSGKGKDVATKQGNRRLQATIYFLAIQMVQVSSKGTPRNSVVRAYYEKRKAEGKTSQQALICISRRLISIIYGMLKHGTEYRMPVVESAGEK

SEQ ID NO: 246733 - protein, 323 aa, unidentified
MSTKATKKRRSFIGIDVSKKLLEVGVHQSDYHFRCPNDPKNFPALITELISLRPARILLEATGGLERALLQALHAAGLPVVVVNPRQVRDFAKALGQLAKTDRLDARVLAHFAAAIKPPLRPIKSKEEQELAALTGRRDQLIEMLVDEKNRRTSAASDTVRDQIKEHIDWLEGCIAELDEQLKALLQCSASWQAKDDILQSVPGIGPVVSFSMIADLPELGTLNRQQISKLVGVAPLNRDSGQQRGTRHIYGGRAELRRVLYMAALSASRHNLVIKEFYERLCAKQKPFKVAITACMRKLLSIINVMVRDNTCWKSPQQTVSA

SEQ ID NO: 246734 - protein, 330 aa, unidentified
MKQEIVYVGIDVAKAHLDVAWEKQFHRLPNDVAGTKQLLCLLKAIAGQVQVIWEASGGYERSVMQTLQRGGIKASVVQASRVRQFARAIGILAKTDCIDAAVLCAFGKAMQPQVTAPSNPQQERLREMESHRRHLSRLLVAEQNGRAQLTDPTVLALTERLVGQIQKQIERIDLLIKELIEGSPGLSSKAQKLMALTGVGPRTAALLLAQMPELGQLNRREAAALAGLAPFNRDSGKLRGRRTIFGGRRAVRTGLYMAALVATHHNPILAAFYRRLRAAGKPPKLALSATMRKLLLALNTSQTPTNPRLNSTQLLQLQNAATWHRRLNHH

SEQ ID NO: 246735 - protein, 331 aa, unidentified
MKESKIILGCDLSKDKIDIASIDKRSRKTLSEKTETNNLKGFKNIIKPYSSTLGELHIIVEATGNYHIKFTDYLEKANIKFSIVNPLRIKRFAQMKMLRLKTDKADAMIIAQYGVEQTPEAHKPLTTAQKELKALGTVRNHLIKQRTMTKNLLHSHNLLTDTTKESISAIKSTLKTFNVEIKKLDDKIEALIKEHYNDTYSKLLSIKGIGPKTASGTIAYLGDLNNFESHKQMASFIGITPAIRQSGKSLNKTSGITKQGNANLRTLFYLAALSASRSNSACIELYNRLILKGKQKKTALIAVANKLIKQLFAIIKFNRTFINNYNIKLVS

SEQ ID NO: 246736 - protein, 413 aa, unidentified
MESNYRIAGIDVHKKMLAVVVARLVNDELQFERQKFGTTAEHLRLLQQWLAQRKVQEVVMESTAQYWKPVWRELEPYHRLHLAQAQSNRAPRGRKRDFADAERLVRRLVAGELILSYVPDPEQRLWRTLTHSKIQMSRDQGRIVSQLEAVLEDAHLKLSSFVSDLLGVSARRILKALAEGETDPAKLAALADRSLRATPAQLCDALSASATLGDLHRQILRQFVERWELLERHMEEVEQSIASMLLPHQQAVARVAEVPGLGVASAHQILAEIGPQAAAFASAAQLASWIGVCPGQEESAGHSSSNRSPKGNRAMRRILNQAANAAVKAQGSVFHGFYRRLVARIGHNKAIWAVAHKLCRVVWHILHCGESYLERGIRLNKKALKQRTNRLVAELKRLGYTVQLSPLPSEVSA

SEQ ID NO: 246737 - protein, 366 aa, unidentified
MKQVTTYVGIDAHKKDLFVAMLNGPGAAPVTWQLANEPAAVRRLVRKLEREASGPVHVFYEAGPCGYVLQRQMTTARVHCDVIAPALMPRKPGERVKTNRRDARKLAELGRAGLLTVVQPPTPADEAVRDLARARDDAREDLQRGRHRLGKLLLRRGLHYAGRNWTQAHRRWVDSLTWTHVAERAVVDDYLLAIDHTEARLLELDARLAEIAEQEPYREPVGWLRCFRGIDTLTAMLILAELHDFRRFGSARALMAFLGLVPGEDSSGEKHRRGRITKMGNALVRRILVEASWHYQHRPGVGRALKARRTAQPARVIAIADKAQQRLCRRFRRMMAEHKPAPKVAVAIARELAGFIWAALQPPVVA

SEQ ID NO: 246738 - protein, 350 aa, unidentified
MLIIGCDYHPGFQQVAFVDTATGECGERRLNHTEGAEQFYRDLHARGMEVRIGMEASGHARWFERLISGLGFELWVGDAAEISTKRVRKHKNDRQDAELLLRLLVENRFPRIWVPSCENRDLRQLLWHRHRLVQTQTRLRNQLHAVALNEGVRRKKALWRPKGRAQLESLVLAAWASRRREDLLQLLDQVDSTIVELTAAIGKEAEKRPEVLRLMTHPGVGALTALAFVLIVGTPERFASSKQLSSYIGLVPSEESSGERRCLGHISKQGNTLLRFLLVAAAQATVRSDPEWRRKYLHLAMRRERAIAKIAMARMLAVRLYWMWRNGWDYAQLPKLGSHAGQPGNRLGLQ

SEQ ID NO: 246739 - protein, 343 aa, unidentified
MPHYVGLDVSQKTTAICVVDEQGRRLWRGVCATGPVPISDRISKHAGVDAKVGIETGSMTPWLVHGLRGAGLNVQCLDARRVKAALQMQLNKTDENDAEGLAQIMRTGWYRAVHVKSLDAHRARALLGARAQLVGMTTRLSNLIRGVLKTFGLLPGAGRGLRFDRKVEALLEGAPDIALVVRPLLATWRQLREQIAVFDKAVLLQVRADPVCRLLMTVPGIGALSSLMYVSTIEDPSRFSRSRAVGAHLGLTPRRYQSGETDRSGHISRCGDSLARTLMYEAAIVILHRVKRSLCLKDWAKAIERRSGSGKARVALARKLSVILHSVWRSGEPFRWTPQATAA

SEQ ID NO: 246740 - protein, 371 aa, unidentified
MEHTRFVGLDIHKERISIAVAESGRSGAVEYLGEVANEPDAIRKLCDRLGRPGKPLVFCYEAGPCGYGVHRQLTSLGHRCDVVAPSLIPVKAGDRVKTDRRDATMLARLHRAGELTPVWVPDADHEAMRDLIRLRSVVRQIVTRARQHLQGFLLRHGRKHGRGTAWRMAYRRWLSTLAFEHPAQQIAFQDYVDAVTDAERRLQRVEEQILSLLPEWNLRAVVDALQAMRGIALINAVVLVTEVGDFTRFSNPRELMAYFGLVPGERSSGETVRRGGITKTGNAHARRALVEGAWAYRMKPRIGRHKVDRIEALPKVVRDIGWKAQVRLCARYRRLSARGKTANVVNVAIAREMVGFIWSIACTIQSAPKAA

SEQ ID NO: 246741 - protein, 361 aa, unidentified
MESTKYIDRTKYIGMDVHKETISIAVTNSTGKLVMESIIETKTATILQFIQGLRGDLQVTFEEGTWAAWLYDLLKPHVTKIVVCDPRRNALLKEGNKSDKVDARKLAELLRAGLLRPVYHGENGLRTLKELSRSYLTISKDLTRVMNRLKALYRGWGICCEGATVYAPHHRSEWLGKITEAGVRRRAEFFYQQLDALQALRQQVRRDLLAESRNHSARKLLRQIPSIGPIRAALLIALIQTPHRFRTKRQLWAYSGLAIETHDSAQYRYVAGQLQRSKKPQQLRGLNRNHNHDLKAIFKGAATKASSGAGPFHDFYEALLAKGMRPSMARLTLARKIAAITLIVWKKGAHFDAEQLKSQAA

SEQ ID NO: 246742 - protein, 355 aa, unidentified
MREVRKISFKGKSIFVGIDVHKKSWKVCIYCEGVEHNPFSQDCSAEVLGKYLRRNFPDADYYSVYEAGFCGYWVHEALIAEGIKNIVVNPADVPTTDKEKRRKTDGVDCRKLARCLRNRELSSINIPERVKQEDRSLVRLRTLMVKDQTRSKNRIKSALSLFGIVIPEEKVGSHWSKKYIEYLRIEIKKTGTLSETVELLLIDLEKKRMMVADVTKRIRQLSLEPRYSKYVDLLRSVVGISILTAMTILTEFGDFWKYKRLDQLVSYVGLTPDERSSGETENRLSITKRGNKFLKHVIIEAAWTAVRKDPSLMLAYINYSKRMLKTKAIIKIARKLVNRVRFVLMQEEEYKLSVI

SEQ ID NO: 246743 - protein, 370 aa, unidentified
MKQCITMQYVGLDVHKDSIVIAVAEEGRKPGRVVGTVAYDMKALRKVLDKLGPRSSVSCCYEAGPTGYGLARSLKAGGWICEVIAPSLVPKKSGERIKTDRRDAVKLAQNYRSGELVPVFIPDNQCEAIRDLERARDAAKKAERVARHQLSKFLLRNERRFSGRASWTPTHRAWIAKQAFSEPAQQHVLADGLATVEAATLRVEQLTQRLRELTESWHLAPLVKALQALRGVEFVTAVTLVAEVGDFRRFARAVDMMGYVGLIPSEQSTGKTKHQGPITKTGNAHLRHVLVESAWHYRRQPRISKALRDRSVGLAPGVCAIAWKAQKRLHHRLNRLVGRGKNRCEAVTAVARELAGFIWAIAREEKLLAS

SEQ ID NO: 246744 - protein, 343 aa, unidentified
MKIHVLGIDLGKTVFHLVGLDSVGRVVIRKRCSRTQLLAFAANLQVQLIGMEACSGAHFLGRALREQGHEVRLMPAQYVKPYVQTNKNDYLDAEAIAEAVQRPRMRFVPIKTVEQLDLQTLHRVRERWVMRRTAVVNQIRSLLLERGLTLPKGRSHLHEQLPRILEDAELNLSDSFRVLLAQLKLELEQLAARIEEMDRVIQKAARENEACQRLTEIPGVGPVTATALIAAVGNGSAFGKGRKLSAWMGIVPGEYSTGGKQKLLGISKRGNKYLRRLFIQGARSVLQQRHKQAPGLSEWLAQLLSRTHQNVVVVALANKLVRMAWAVLCKNERYRAPVFVATT

SEQ ID NO: 246745 - protein, 410 aa, unidentified
MEVLHQRCAGLDVHKKTVVAAVRLATENRLVTEVKTFATTTAGLLALSDWLAENGCTHAAMEATGIYWRPVWHVLSDGEIELVLANAAHVKNVPGRKTDVSDAGWLAELLAHGLIRPSFVPDGQTQELRALLRTRKQFVRERTRHAQRIHKTLEDANIKIDAELSDILGRSGRAMLEAMIAGESDPVRLAALAHRNVKASQGELQQALRGRVTPHHRFLLKLHLEQVDHLDAAITTLDGQVEVNLAPFRTAVEFVSTIPGVSTLSAEVIVSEIGLDMNRFPTVGHLISWAGLSPRNDQSAGKRRSTRLRKGAQWLKTTLVQCAWAAKNKKGSYLQAQFRRLLARRGPQKAICAIAASILTAAYHMLKDGTVYEDLGPDHFSRRSKTTHAQRLVRQLQRIGYAVEIRPMPA

SEQ ID NO: 246746 - protein, 283 aa, unidentified
MQQERQYVGIDLHRRRSVIVRMTGEGEKLDLVRIENDPVALAIEIAKAGPNPEVVLEACYGWYWASDVLEACGARVHLAHPLGNNWGHRRVKNDERDAVDLVDLHRLGRLAEAWIAPPEVRELRELIRYRAKLVALRSGLKAQIHAVLAKEGVRVPMTDLFGVAGRVLLGSCPLGDAYAIRVESLLDLIDLYNREIEMLEGRIGQRLDGHRGYRAIQAVPGVGPVLGAVFVAEIGDVTRFPSPDKLTCWAGMTPRHRESDVVVKRGSITKMACGGGAGSPTRR

SEQ ID NO: 246747 - protein, 309 aa, unidentified
MSAYAGIDVSKATLQVALFPKADELCVPNTEEGLASIAEYLSAHQVERVLVEATGGYEKLSVKLLANAGFKIQRINPVRSRQFALAMGKRAKTDPIDAQMLAMFASSLEAKGFAKPDEEREALLELVNLRNNLLQQRDDNRRRIKQAILPSVVDIYLALEASLKVQIKAVDQLVDAQARKVDSELLQRLHAVKGVGPVTIASLFCYLPELGDLSRGQIAALAGVAPYNNDSGSKVGKRQIYGGRTKLRRATYMCALVMVRYNADFKERYARLRAKGKCAKVALVACMRVLLIRLNAMVRDGTPWRDHAV

SEQ ID NO: 246748 - protein, 425 aa, unidentified
MKKTDYLSTLFVGIDIGSRTNVVSAIDFNREYFIRMKPVPNAKEGAEILESLLVDVLSAHHEFKHVIIGMESTGFYGVHIANYLSASDMLSPFGTEVYCLNPKEVAKYKESFNSINKNDGIDSFVIADFARVGRITIKPWRGAQYLALQRLTRHRLHIAECIAREKTYVLNNIFLKFSEFAMLKSEDHPFSNKYGATAEAIIEQYVTNDDIIRASIDELVELIESKSHGRITDPEETSKLLQSAAKGSYRLDKVVAKPITLSISSSFNCIRAFEKELKAIEKAIEQTVQGINPLEYQVLKSIPGIGPTYAAGILAEIGTIKAFPNNDALAKYSGIIWKENQSGNFRAEDTKMSKAGNRYLRYYIIEATGSVINHCPEYKAFYGKKFAETTTHQHKRALALTSRKFLRMLFGLLDKTQLYSLEKSR

SEQ ID NO: 246749 - protein, 279 aa, unidentified
MRTYYVGMDVHRATIAIVALNGAGKVVEQLVVETSATRVRNYLKQLRGRVYVTFEEGTQAQWLYDVVQPLVTEVLVCDPRHNKLLKAGNKSDRIDAQKLAALLRNGALQAVDHRDHGVRALKELVRNYDCLVSDTTRVMNRLKAMFRGRAIACGGHEVYRQDRREVWLSKLTERGAKERAGSLYRQLAALRALRQEAKLAMVREARRAAAYSWLMSVPRLGAVSVAQLLAVVGTPHRFRTKRQFWSYVGLAVVTSSTADMEVVEGVLRRSRRARWPPGA

SEQ ID NO: 246750 - protein, 393 aa, unidentified
MRKPKKQKKPLNDLSRSLTPFDPNQTLTAVVELSKKSWLVAGIIPGVERQPLKKVAADANQLLKLLERWRAEAEKAGHKITRIAVAFETGRDGFWLARWLRARGIEAHVIHAASVPVSREHRRAKTDRLDTEQLKRAFLGWLRGERNHCKMATIPTFREEDDKRPHRERETLVGEQTTIINRVKATLTRLGIRNFDPKLEKAPERLQELRTPEGEPIPPNTLAELKRDLARKQLVAEQIQQIEKARLEQLKKAPKTGPNLMVLVLMRVIGIGIETADMLVKEILSRNLRDRRAVARYGGLTGSPDESGSRSREKGLSRSGNARVRKGMIQLAWRFLRFQNESALAKWFEIRTKNARTSRKKMIVALARKLLIALWHLVHDGVVPEGVVLRPAH

SEQ ID NO: 246751 - protein, 385 aa, unidentified
MKNTIVHHEGAASLEAAVKKVKLSGSIIKIGLDVHARLYVAVAQYDCLLPKPVRRLGPSEFVPWVKQLLRAGHTVHVVYEACGFGFGLYRELKAAGAHCYVIAPRKLDEQCTRVKTDPRDATTLCQRLSRYLEGNTRELAVIRVPTEAEEQARHVSRQREQLVRLRHKLEAQGRSLLVNHSLPSPAHWWKNQTWSRLLKLLPCWICLRLEVHRPVLLGLEQQIGALSAQLEATAPADVPAGVGKLTTVIMTREICSWERFTNRRAISSYTGLCPGEHSSGSKRVSGSVTKRGNPRLRAALVECAWRMVRFQPQYPPVKKRLAILAKGAHATGAQRKKAIVAVARHLAVDLWRVHTGRCSAAQLGLKSAETLIVRGEQKAELNALA

SEQ ID NO: 246752 - protein, 474 aa, unidentified
MAARRLLTRGPNPLEPPEAQPQTVPVGKRTALKVQEKVAPRRAGIRATCRSCSAAACAKSEGGELVRYYLGVDWADQTHAVWVVDERGTKLTARAVPHTAEGLSEWGRELDEWRAQGIELWAAIERPEGRVVDFLLDHGVVVYPVNPKALDRARDRFRQSGAKDDPFDARVLADFLRTDHAHLHALQPSSEAAQELKLLTEDYHRQVRQQTRLVNQLTITLKAYYPRALEVAELTTALAREFLQAYPTPEAVLALTKRQWQGWARAHHLSETRTRVLWEVLQQPQLPVPAHVVRPKARLMRTLVAELAAVVAAVGEYREAIEDFFASMPTAQWVRTLPIGDHGITAPTLWARLGDAPERWESFRHLQAQAGAVPLTKRSGKQCVVQFRFACDKALRYVVDHVAFLSLRSCEWARAYYDQQRARGHSHRQALRALGAKWLKIIFVMWQRQASYDDQYHLASMARQQLRQPQKKIA

SEQ ID NO: 246753 - protein, 356 aa, unidentified
MSNRNKLDFTGQPIYIGLDVHKKSWSVSILSEHCEHKTFTQPPEVDKLVNYLGRNFPGALYHSVYEAGYSGFWIHDQLKEKGIHCIVVNPADVPTKNKERATKRDRIDCRKLARSLRSGELDEIYVPARSKLEDRTLVRTRQSMVRKQTRCKNQIKAMLLFYGIHLSEEVTMSHWSRRFLGWIEDIQMERASGDIALKAHLEELKHLRQIIASLNRTILALARAEEYRVPVGLLKTIPGISTLTAMTLLTELYEITRFPSLDELSSYVGLIPDTHGSGEKEYTGEITERRHPQLRCLLIEASWVAVRKDPALLMAFHQYCKRMRKTKAIVKIARKLLNRIRYVLKNQMEYIPTVVQ

SEQ ID NO: 246754 - protein, 391 aa, unidentified
MVYVGIDVAKDKHDCFITNSDGEVLFNVFTIANNLEGFTELYQKIVSVESNPDNVKVGLEATGHYNYNLLGFLIDKGLPTFVINPLHTNLFRKSLSLRLTKTDKVDARTIALMMISGVNLQSYSDKSYHNEELKSLTRYRFDKVQERAKLKTSVSRLMVILFPELEKLVPTLHMASVYALMTEFPSANAIAEAHLTRLSNLLQQSSRGRYGKNDAIRFRDAARSSIGSSMSAKSLELKHTIKLIQELSSEIDEIEEQIKLIMNELNSPITTIPGINLRMGAMILAEIGDFSRFDSPDKILAYAGLSPTTYQSGQLDSSYSHMEKRGSRYLRYALFNAAKYVCIWDPTFSAYLAKKRTEGKHYNVAVSHAAKKLVRVIYQLEKTRQPYVKVS

SEQ ID NO: 246755 - protein, 341 aa, unidentified
MKNLFIGIDFSKEKVDVAIIFAEGLVETSVRVFNEFKNSVSGYKQFVKWVEKNANGIDSSLWLFCGENTGDYSKPLCNHLYGKGYDMWLENSKCIKDASGIRRLKSDRADAAMIAEYAMRNHDKAIIYEPLSESLTQLREYYLYRQMVIRHRCSFEVRRGEKRLMMEKSAAKTVIAQSGKHIVSELNKEIAKIDRKIASLIESSDELSEVYSIVTSVPGIGTQNAVCLMVYTDNFRKFNYDARSIACYYGIAPFGQDSGTSVHVDPHVHHMANRHIKAMLTQAALAAVRFNPVIAQYYQRLIGRGKKMPVAMNNVKNKLLHIVTSMVKNKQVYNPEYRFSA

SEQ ID NO: 246756 - protein, 342 aa, unidentified
MKDTMIGVDLAKRVFQLHGASMTGHVKFRKKLTREQFRRFMSDQSACVVVFEACGSASYWAREMEALGHDVKLIAPQYVRPFVKRQKNDAADAEAMVIAARQPEMRFVAPKTAEQQAKAVVFRSRERLVHQRTELVNALRAVLYEYGHVFPTGLVHLKRIEALLDDPASDLPLLIIAECQDLLAQIAEKTERIDSKTKGLKALADETDTARRLQTMPGVGPLTALAVEAFAPDMAQFKCGRDFAAWLGLVPRQHSTGGKQRLGRVSKAGQADIRRLLIIGAMSRLNWLGRRTIPEDSWLSRLAARKPRMLAAIALANKMARAIWAMLTKDEEYRAPAQGAAA

SEQ ID NO: 246757 - protein, 396 aa, unidentified
MICFGVDVSKGKSTVTALSSDGEVLYPTATVEHSAKDIHNLIKTIKELENNSEIRVVCESTGYYHWPLVNPLLQNGIWVTVLNPIVTNKFSKNTLRNSKTDKIDSCKIASYGLLYWHSLTLSLQFGEIYDELKTYSRQYYQYLSLRIKAKVNLVTILDYTMPGLQPLLKEETNNHKLSDFANQFWHFDNITKHRYKTFEKMYHEFCIKKGYLFHSSKAETIYNLAKNSIPILPCTPSTKVLVQEAVSTLRFQEESTVLILTHMIELAKQLPEYSVVIDTPGIGDALATRFIAEVGDVRRFHDKHALVAYAGIDAPPFQSGKYEGKNRHISKKGNKYLRKTGYEMMRCITSVKVQSESNEVYEHICRKRAEGFVFKKACIAGLNKYLRTYYGKVMSM

SEQ ID NO: 246758 - protein, 352 aa, unidentified
MTVTIVETPACTRAITGGVDTHADVHVAAALDPIGGLLGVQEFPASPAGYAQLLGWLGGFGTVCLVGVEGTGSYGAGLARHITAAGVRVVEVDRADRQDRRRQGKSDPLDAVSAARAAQSGRARGAPKGRDGAVEAIRALMVAKRTARAERVQTINQARALVLTGPDDIRARFAKHATGALMAELAALRPRPGSMVRYHTLLSLRELGKRAQFPGQQIERLDELIVPLVTARAPGLLARYGVGPHTAAMLLIAAGDHPERLRSEAAWAHLCAAAPIPASSGKVKRHRLHPHGDRQANHALWQIVITRMSSHPPTRAYVARRSKEGLSKKEIIRCLKRYVAREIYPHLRAPAG

SEQ ID NO: 246759 - protein, 350 aa, unidentified
MENSVTIGLDIAKHVFQVHGVGEDGSVLIRKRLRRAELLPFFAKLKSCLVGIEACGSAHHWARELERLGHTVRLMSPTYVKPYIKRGKNDAVDAEAICEAVTRTTMRFVPVKTEEQQAVLAMHRTRALLVRQRTMLANGVRAHLAEFGIIAPQGIERMAKLVAQVLGPEGDEFAIPPLVRCIVKAFNTQLEGLQAEIDSLEEKIRERHRTNDDSRRLAAIPGVGLITASALSATVQDAAAFASGRAMAAWLGLTPRQSSSGNKSRLGRITKAGNAYLRTLLVVGATAVIRSAKTKGPGPLCDWVRRLLEKKPARLVSVALANKIARIAWAVLSRKAAYRSNALTGAAAGA

SEQ ID NO: 246760 - protein, 407 aa, unidentified
MDRLFVGIDVGSRDNAVYIMLPDGSKHSSFGVQNNLGGAQTVSQRIQSALAGKSLTDVTIGIEATSVYGDSLMCFLREDGALGCFDRKLFILNPKQVNKFKAMYSDLPKNDPVDAFVIADSLRFGRIGSPVYMDDYRYKALQNLTRARFHAVQNLTREKQRFMNYLFMKCSGLAQEKIFSDNYGAAALAVFEEFETPDDIVDMDVEQLAAFIAEKGKNRSPRPDEIAKEVQAAARGSYRLPKTVNDSVNQVLSISISSMRAIQGQIKALDKEIERQFANIPNTLISIRGIGPVYSAGIIAEVGDINRFASQARLAKYAGLAWTQHQSGQFEGQHTRLIKSGNRFLKYYLCEAANSLVRCDTEYRRYYDLKYKEVNKYQHKRALALTARKFVRLVFRLLKDNRLYIPA

SEQ ID NO: 246761 - protein, 400 aa, unidentified
MSTSHARIWVGIDAGKGHHWAVAVDTGGETLFSTKVINDEAQILALIDTAREKAGEVRWAVDISGRASALLLALLIAHGQQVVYVPGRTVNRMTGAYRGEGKTDAKDALVIADQARMRRDFTPIQTPPELVSTLQLLTAYRRDLIADRVRLINRMRDLLVGICPALERAFDYSAAKGPVIMLTEYQTPAALRRIGVKRLTTWLERRKVRSAGTVAAKAVEAAQSQMAALPGEGRAAKLVRDLAHQLLALEERIKDNDREIRETFRTDDRAGTIESLPAMGPILGAEFVAITGDLSGYRDAGRLASHAGLAPVPRDSGRRTGNYHRPQRYNRRLRWLFYMSAQTAMMRPGPSRDYYLKKRGEGLVHAQALLSLARRRVDVLWAMLRDKRLFTSAPPATQTA

SEQ ID NO: 246762 - protein, 332 aa, unidentified
MKFKSIIGVDVSKSTLDAYLKINQCHAVFENNEKGYQELVEWVMENSGLILAEELLFGFESTGIYSSELALFLEKHSLPFYIISGLELKRSLGIRRGKSDKADSKDIAEYLYEKQEKIIPTVPPKKVIQDLKKLFNYRERLVKDRAAYITRIKEYEAVVSENKLKVYQKSNTEVIACLDKQIETVEKEIDKLLRKDELLMNQYKLINSIKGIGPQTAVALIVLTEGFTLFDSWRKFASYAGTAPFPNQSGTSYRGRTKTSPLANKRIKTLLTLCAGTAIQYSTEMKTYYKRRTGEGKSKMSTLNIIRNKLIARAFAVVNRNSSYVDILKYAA

SEQ ID NO: 246763 - protein, 384 aa, unidentified
MSENILYVGMDTDKNHVDVAVAEPLPGGEVRYWGKVANAPAALDRVIKRLRRDGRQLQICYEAGPCGYGIYRRLNGKPNVSCQVVAPSLTPRRPGVRVKTNRRDCLTLAKLLRAEELTAIWVPDAAHEAMRDLIRARGAAAQDLARSRQRIGSFLLRQEIRYVGKPWTKKHRAWLGRLEFAAPAHRLLFGELLEALDQAVARRDRLNDHIAELVPSWSLAWLVEALQALRGYRLINAVSLVAEIGDPRRFANPRQLMGHIGIVPSEHSSGDKVLRGPLTKTGNRRARKVLIEAAWTYARAAKRPAARALAQPPAVRAIAEKARHRLGGRYRQLTARGKLRVVAIAAVARESLGFIWAIAQAAGPATIIQPCRPANGTGRGSGSR

SEQ ID NO: 246764 - protein, 458 aa, unidentified
MVKRKKKAKSRSFQIKKLPAQLQHINLNAAGIDIGSERHMVAVPEGRDEVSVREFGTFTADLEALAAWLKKCGITTVAMESTGVYWIPLFEVLERRGFEVKLVDARHVKNVSGRKSDVLDCQWIQQLHTYGLLAGAFRPPDEVCVLRSYLRQREMLTQTASMHIQHMQKALQQMNLLLHNVVSDITGVTGMKIMKAILAGERDPRVLARNRHEGCKNSSATIAKSLVGNYREEHLFALRQAVELYEMYQAKIADCDQAIVKQLEKQPDVTDDGPPPPDKPIQARDRLRDGADVRELIFKKSGVDLFAIPGLAADTLLTLASEVGFDMTPWKTEKHFSSWLGLCPGTKRSGGKVLDAKTKRNPNRAAQAFRMAASSLYASRTALGAFHRRVKARTGGQQAVTATAHKIARIYYAMLTNGTSYVELGQQAYEQRYKQRRVDHLNRQAKSLGFQLVPCAMS

SEQ ID NO: 246765 - protein, 366 aa, unidentified
MGWTPPRRPWCGRVVAFVTTEQEASVSEVSMIGLDLAKHVFQAHGADASGKVVFRKRLRREKVLEFFAGKPACVVAMEACSSAHHWARELARLGHIVRLIPPAYVKPFVKRQKNDTADAEAICEAAQRPTMRFVAVKSATAQANAVVFRARDLLVRQRTQAINALRGHLGEYGLVVAKGPGHVIKLVEHVEDPGSDVPDAARLVLRTLVEALRFLSERIDLLDREIARRAREDDEVRRLTSIPGIGPITATALAALAPPADAFRKGRDFAAWVGLTPSQHSTGGKQKLGTTSKMGERTLRRLLIIGASSVVRKAVRQGTTAGSWLGRMLARKPRMLVIVALANKMARIAWAVQAKGEVYRAPAVVA

SEQ ID NO: 246766 - protein, 316 aa, unidentified
MDGEKVFIGVDISQDSLDMVAYPTGQIWQYKNSKGGITKAIAKLRGLELKLIVMEATGGLEKPLCEALFQVGLPAAIVNPRRIRDFGRSMGILAKTDKLDAKVMAYFAAKIEPAPRPVQDEASQKLENLLTRRSQISDMIIAEKHRLKQGSDKIVQKHIQDHVNWLESELKDLEKELKDSIRQNTNFAEKVKLYKSMPGVGDNLSYNLVANLGELGHLNQREIAALVGVAPLNRDSGKQRGRRMIWGGRATVRKALYMPALSAIRCNPVIRDLYQRLIAKGKLKKVALVACMHKMLTILNSMAKNYTPWNYAGAKY

SEQ ID NO: 246767 - protein, 405 aa, unidentified
MNAVGIDVSKGKSMVTILRPFGEIVSSPHEIRHTSDQIDTLIREIRSLDGDTRIVMEYTGRYHEPVARWLSDAGLFVSAVNPKLIKDFDNDSLRKVKTDRADSIKIARYTLDKWNNLKQYGFMDELRTQLKTMNRQFGYYSKLKTAMKNNLISLLDQTFPGSNTFFDSPARSDGSQKWVDFVDTYWHVDRIRSMPLSAFTEHYQKWCKRKGYNFQPDKPAEIYESIRDIIPVLPKDDVTKFLIRQAVTQVNTASLAVEELRTRMNDIASQLPEYPVVLAMKGVGTSLGPQLMAEIGDVTRFNHKGALTAFAGVDPGKNESGSYAQKSVHTSKRGSAPLRKTLFQVMDCLIKTMPQDDPVYAFMDKKRSQGKPYYVYMTAGMNKFLRVYYGRVKEYLAELSETEEN

SEQ ID NO: 246768 - protein, 343 aa, unidentified
MPHSIGLDVSQKTTAICVVDTEGRRVWRGSCPTDPGSISKLISRYGGADARLGVETGAMTPWLVHGLRSAGLNVVVLDARRVKVALQMRLNKTDQNDAEGLAQVVRTGWYRSVHVKSLDAHQARSLLGARAQLVGMRTRLSNMVRGVLKTFGLLPGANRGLRFDRRVEAMIEDTPDVALIVRPLLATWRQLREQIAVFDAAVQRRVKADATCRLLMTVPGIGALSALAFVSTIEDPARFSRSRSVGAHLGLTPRRYQSGEIDRSGRISGCGDVLARTLMYEAAIVILHRVKRALHLKDWALAIAERAGPGKARVALARKLSVILHSVWRSGEPFRWEPVASAA

SEQ ID NO: 246769 - protein, 356 aa, unidentified
MYDEYASVNGGVVSVDCVSELYVGVDVHESKSQVAVYKSDGTLLEERRIRTKRLPRYISSLPGEKHVGLESVGFIYPIYDALVKEGCDVAVANPNNILLIARTRIKHDRVDARVLGELLRTNFFPRSHIPGEETREKRLLARERVRYGVKRANLKNSIKWLLKRRGIRVKKPFSMLGRERLRSLGIPEISYRLEELELVERFVKELDLKIKHVVSRDHNAKLLDTIPGVGAYTALFLSSALDDVDRFPDSKHACAYVGLVPSLHQSGSKSRSGHITRQGSGWLRRNLVECARWAVRKDPHMKAFYERVKGRKGKKKALVAVARKIVSYAFWMLKRNLTYEELAPWKNDWGGSPNLE

SEQ ID NO: 246770 - protein, 412 aa, unidentified
MLKIVYPICCGMDVHKSFIVACIASTNAQGVTTYKSKRFSTFTSDLRRCAAWLTEHNCKDVCMESTGKYWIPIYNILESTCKIVLAHPKYVKAIRGKKTDKKDAKWIADIFKHDLVSGSFIPPADIRQLRDLVRYRWKLTSLTTGEKNRAQNCLTVSNIKLDDVFSDVFGKAATAITTRLLENTDEKITDISEFLTKGIKATNEQILAAVDGEICAQQAEKMRIIRSHMDTLSLCKAELESLILSTAEKYLPQLYLITTVPGIQSFAAIGIFSEIGADMSVFPTSKHLCSWDGLIPQNNESAGKKKTTRISRAGAYIKPLLVQCALCAIRKKSNPEIRKRYLNLKKRRGHKKAIIAIARMLLTAIFNILKKNEPYNSDLYTKSDGPPVHREVSLEEAIFILQRQGYIVTAPT

SEQ ID NO: 246771 - protein, 365 aa, unidentified
MSSVTQPGPIHLGLDVHKDSISVAVLPWGQDTAEVDKIFHDEPSVRRLVARFDDPGHLRACYEAGPTGYELQRLLARMRVRCDVVAPSLIPRAPGDRVKTDRRDARRLARLHRAGELVAIRVPSEVEEAVRDLCRARADVVDDRRRARQRLGKFLLRHGRVYRGGAAWTVGHERWLAGQSFTEPALAATYARYRAAVAARDAELAGIDADLAVWYDREPFAEQVARLAAYRGVDRLGALTLAAEVCDWRRFGRATAFMGFTGLVPSEYSSGETTRRGHVTKAGNAHLRTQLIESAWAYRNKPLVGVGLRARQEGLPAQTLARSWTAQQRLCGRFHRMAARKNVKTVVATAVARELAGFLWAEMTA

SEQ ID NO: 246772 - protein, 336 aa, unidentified
MTGGAGTHAGTHMAAALDRIGGLLGVQEFPAAPDGYARLLAWLRGFGAVHLVGIEGTGSYGAGLARHVAAAGIRVVEVDRSDRQDRRRAGKSDPLDAVSAARAALSGRASGAPRGRDGQVEAIRALMVAKRTARAQRTQTICQARALIVTGPDGIRTRFTGQTPAGLVAELAALRPRMGSMVRYHTLLTLRELGRRAQFLDAQLERLDELIVPLVTARAPGLLSLFGVGPDTAAMLLIAAGDHPDRLRSEAAWAHLCAAAPIPASSGKVARHRLNRGGDRQANHALWRIVITRMGSHPPTRAYVARRSKEGLSKPEIIRCLKRYAARETYRYLRPS

SEQ ID NO: 246773 - protein, 471 aa, unidentified
MSTTPTFSKQRRGVRIVSKTKVPLPPQLKRVNLNAAGIDIGAEEHWVAVPPGRDTEGRDVRRFGAFTGELCALADWLKQCGIQTVAMESTGVYWIPLYELLVERGFEVLLVDARQARNVPGRKTDVLDCQWLQELQTYGLLRGAFRPVDQVCILRSYLRQRSMLVSYGSHHIQHMQKALEQMNLKLSHVVSDITGLTGMGIIKAILSGERDPVKLAKLRDPRCKSSEAIVARSLEGHYREEHLFTLQQAVELVEFYQQQMTACDRQIEACLRQFEEKRSETPVTTRRRKRRRGGIAFDARSYLYRMTGVDLTQINSIEANTALTVIGEIGLDMSRWPTEKHFGSWLGLAPGSKVSGGKRLSGRTKPSANRAAAALRLAAQSLNQSQSALGAYFRRLKARLGAPKALTAAAYKLARIVYRMLKYGAGYVDQGEAAYEERYRDRLLRNLKRRAAELGLQLTAIELNSGQAALT

SEQ ID NO: 246774 - protein, 309 aa, unidentified
MKEQLVYCGVDIAKSHLDAAIGKEKRRLPNDATGHRQFIKWIKQIEAQVQVICEPSGGYERRLIQALVGAQIKVSLVQANRVRQFARAAGILAKTDTIDARVLCAFGEAMRPQTFSASALEQERLRELESQRRHLTHLLVMEQNRGARLSDASVQRLNRSLINQIKKQIDQFDLLIKGHIDQSHELSAKAAKLTSISGVGARTAALLLAQLPELGELNRREVAALVGVAPFNRDSGKMRGKRAIYGGRRSVRHGLYMAALVAARHNPILRGFYLRLRAAGKPAKVALTATMRKLLIVLNSALKPDLSYA

SEQ ID NO: 246775 - protein, 456 aa, unidentified
MKNRIKPAEPIEIVHPNAAGLDIGAREIWVCVPPDRDEEAVRAFGTFTPDLDRLADWLVSCRIDTVAMESTGLYWLPIFEILEARGLKVCLVNARHIKNVPGRKSDVQDCQWIQKLHTLGLLTASFRPDAEMCVLRAYLRHRAQLIQHRSPHVMHMQKALTQMNIQLAQVVRDMMGETGQRILRAIVAGERDSLKLAQYRDPRCKSSEETLAKALTGDWKAEHLFALQQSLELYDFYTRQLAACDAEIMGQFSLMKPRWEIVPAGETADAPTTAPKKYKNKNDLAFDGQTEIMHLTGIDLSAIPGIGVSLALNILSEIGTDMSRWPTAKHFASWLGLAPHNDISGGKVLRSRTLPTANRAGQAFRQAATVVSRTNTSLGAFYRRKRAHGEPQFAQVATAHKIARLVYYLLAHHVPYAELGTQAYEQKQRDRELANLRKKAAKLGVTVVVPESAPVA

SEQ ID NO: 246776 - protein, 430 aa, unidentified
MEVIHPRVAGIDVHKKIVWVAVRLPGQRPAERTVTVRRFKTFWRSLRQMAAWLAELGVTDAAMESTGVYWWPVYHALAQAGIEVCVCNAAHMRNVPGRKRDVMDCQWIAGLHEHGLLRASFIPAGAVAELRARTRYRKKLIEQRVSEGQRLAKVLEDGIKIDSVASRLLGVSGRAMIEALVAGERNPGRLADLALGRLRRKTEELQLACDGRFTAAHAQMCRLHLDAYDHLTAKIAELDGLVAEAAAPFAALIARLQTIPGIGRRTAEVIVAETGGDMARFATAARLAAWAGLAPGDNESAGKRRHAAARKGNRHLRVAMVESAWATARTRTRPGARFRRLARRFGKGNEKKAAVAVAHTLICIAWAVLSRGQDYADAGEDYYEQRDRRDREHLIRHHQQALARLGYQVTLTPPGDGSPPPSATSPQPAA

SEQ ID NO: 246777 - protein, 355 aa, unidentified
MASITLLGIDLAKDVFQLHGLDELGRPQLKRTLRRRALVQFVAKLPACTIAMEACSSSHHFSRKFQQFGHEVKIISPQFVKPFVQGNKNDAADAEAICEAASRRNMRFVATKSVVQQDIQCLHRVRKRLVHNRTALTNEIRSIVGEFGIVFAKKRSALVEGIKGLLNGSCPREELSSEGLTLLQDLYSELLELEQRIENCELKLKKISSQPQCQRLFKVGGLGLLSVTALAVALADPGQFKNGRNFAAWLGLAPRHQGTGGKNRILGISKRGDMDLRTLLIHGARAKLRGINAKCRAERKLDPLEDWAYRLCQRQGYNKATVALANKNARIAWSISAHKTEFESHKAVVSLKEGA

SEQ ID NO: 246778 - protein, 449 aa, unidentified
MNKSSSESHDLPVIHDRAAGIDIGSRFHVVAVSADITEERVQTFKAFTADVECMANWLVDLGITTVAMESTGAYWIPVYEILESHGLHIVLANVRDARAAPGRKTDVNDAQWIQRLHACGLLRASFHPDREIAAVRSYLRLRERHLDYAAAHIQHMQKALTHMNLQLHHVVADITGATGMRILRAIVAGERNAVTLATMRDTRCKSSVETIQNALVGNYQPEHVFALAQALAMYDAYQAQLEICDQQIAQSLRGLSQQKPPPGEPLPKPRHRTRQPNVLNFDVRTLLYQLTGVDLTQVHSIGPYLALCLVAKCGTDLSRWRTTHHFTSWLTLAPGCRISGGKVLSAHTRKTKNRVTAHLRLAAVTIGKMNTALGAFYRRLSARIGKAKAVIATARKIAILFYNAMRFGMTHQDPGADHYEQKYRERVVKGLHRRAAEFGFTLQAVEGVS

SEQ ID NO: 246779 - protein, 344 aa, unidentified
MTSMNFIGLDIHKKTISYCVKDAAGEVLAEGTILSTRQSLDVWMRTLCEPWTVAMEATMFTGWIYDYLLPHAAAVKVAHPLMLRAIAAAKKKNDRIDACKIADCLRCNFLQECYMASTEIRERRRTLRYRKLLVRQNVQLRNKVSQMLMESGVVYNKQKLHKVGYFKELMTTNPDIGEGLRPLLTICRETIVRIGKTEGALVRSLARDPLLSDRVQRLMTIPAVGPITALTWVLEVDDVARFGSVKQAISYCGLCGAERSSADMVKRMPISKQRNKHLQSVLVEAAKLGPRLSPDLALVYETEKQKGHANRATIAVARKLVAYLLAVDRSGREFVVAGERREAA

SEQ ID NO: 246780 - protein, 386 aa, unidentified
MHHPTTLPVSEQTCSREDFATLFVSLELSRSTWVATSLALGSRKMSKHTLVGSDARKLLDLLARLKSRAEQRIAAPVKVVAIQEAGLDGFWIHRLLEANGVESHVVDPASIAVPRRHRRAKTDAIDGETLLRTLMAWQRGEPRVCAMTVPPTPSEEDRRRVSRERATLLRERIRHTNRIRGLLFGQGITNYNPLHKNRREGLEKLRTGDGHPVPVHLKAEILREIDRLELVLRHINEVEAERDEMLRPGQASSPVALLMRLKGIGPEFAAVLYLEGLFRHFENRRQLAAYAGLAPSPWKSGSVDHEQGISKAGNPRLRTTMVELAWMWVRYQPASALSCWFRQRVGSERGRIRRISIVALARKLLIALSRYINHGEIPAGAVVKPV

SEQ ID NO: 246781 - protein, 360 aa, unidentified
MTQHTFIGLDVHARSVRAAVLDGESGELRSCAAPVAAAELVPWLRAQGESISVAYEAGPTGFVLARACAAAQIPCLVAATSRIPKAPAERVKTDQRDAVKLVRLLRLGELTAVRVPSLTQEGARDLVRARDDARRDLMRARQRLSKLLLRRGLLWAGAKSWTCAHERWLAAQRFEERPLQIAYEEAQAAMLSVKARRAALDAAIAVEAQGEPWKGVVGRLCCLRGVSTLTAFGLATEIGDWERFDGRSIGAYLGLCPSESSSGERRHRGAITKTGNSHARRLLVEAAWQQRRPLKRPSRELARRRAGQPPLVRARAEAAGRRLNQRWQSFDARGKRSTVAAVAVARELAGWCWSLATMEA

SEQ ID NO: 246782 - protein, 408 aa, unidentified
MKVFVGDDWAEAHHDVHLMGETGEKLAAKRLPEGLDGIAGLHALIAEHTTDPTEVIVGIETERGLWVQALIAAEYQVYAINPLSVSRYRDRHNVAGAKSDPGDAKLLADLVRTDRHNHRPVAGDTDQADGLKVLARAHQNLIWDRTRHTNRLRNDLREFFPAALFAFESLADRDTIAVLTKAPHPDQARRLSIAQIRSALRKGGRQRNLDRRASEIQQALRTPQLDAPPAVTTAFAATTKALVEVIAGLNTSIAELETELAAHFDEHPDADIYLSLPGLGVVLGARVLAEFGDDPDRYDNAKSRRNYAGTSPLTIASGKKHAVLARHVRNRRLYDAIDQWAFCAITASPGCREFYDQHRAAGDLHHQALRALGNRLVGYLHGCLRTRAHYDEHTAWAHRQPAQTQIAA

SEQ ID NO: 246783 - protein, 333 aa, unidentified
MELFVGLDVSVRTTSVCVMDASGKLIRESKVETEPEAIGALLHRIGGPYKRVGLEAGPLSQWLYGGLAVAGYPVICVETRHMKAALSAQINKTDRNDARGIAQMMRVGLYKPVHVKTIRSQEIRMLLTARKFVQTKILDAENNLRGLLRNFGLKVGAVTKLQFERRIIELLEQSPHLRLVIEPLLEVRRVLRKQYQRLHKAMERLAESDNICKLLMTAPGVGPMVALSFRAGVDEPARFSRSRSVPAHFGLTPSRYQSGEIDRDRGISKCGDAGIRWVLVEAAGILLRISKRSSPLKVWVHTLARRRGLAKASVALSRRLAIILYRMWVDNTP

SEQ ID NO: 246784 - protein, 346 aa, unidentified
MMIIGCDFHPSWQQVSWLDTESGDCGERKLVHASGDAKKFYQQLALPVLIGMEATGNSQWFVELIEDLGHEIWIGDAAQIRASYVRKQKTDKRDAAHMLKLVVQGRFPRLWTPDREQRDLRQLVLHRHKLVEIRSRVKNELQHLSLNKGMQKKATLWSQAGQKLLRELPLKPWAACRREDLLGLLSMLNQQVGQLDAAVQHAAEENPQARLLMTQPGVGPNTALAYVLTLGDVSRFARGKQVASYLGLIPREHSSGGRQKLGVITKQGNRMLRSLLVEAAQIAVRFDPGMKKQYLHRCHQKPKGVAKVATARKLAVRLYWMLRTNVAYPEIVRIESSPRVPLVGAS

SEQ ID NO: 246785 - protein, 359 aa, unidentified
MSERTSVGLDVHARSVVAAAIDGVTGEVFRQCLVPDHGQIESWIKSLPGPWRATYEAGPTGFGLARHLNAAGVQTLVAAPSKLQRPVGDRVKTDAKDALHLARLLKLGEIVQVAVPSVGQEAARDLVRAREDARGDLMSARHRLSKLLLRQGIVYSGGKAWTMTHDQWLRRQRFDQPGLQHAFDAAYDAVAAVIDRRDRLDAAIAGMAADSEFTPVVDRLGSLRGISTLTGFGLAVEIGDWHRLDGRRIGAYLGMTPTEHSSGASRSLGGITKTGNTHARRLLIEAAWHHRQPYRPSSPTMRARWDKAPASARRRGDEGNRRLHARWLAFDARGKRSVVANAAIARELAGWCWSLAVIE

SEQ ID NO: 246786 - protein, 341 aa, unidentified
MKKFTRIGVDLGKSYFQVHCLESEGSGSISRKLKRSKMLEFFSQVERCRIGMEACGSGHYWARELVAIGHEVVLIPPAYIKPYVKRGKNDVVDAAAICEAMSRPDMRFVPIKSSDQQAVLMLHKTRELLVKQRTMSVNALRGHLSEFGIIVAKGIGRVDELLVLAQSDAALPQIAKSAVAGLAQHLEGLEQSIEAVEDEIASAHKQNPTSRLLDQVPGIGTLIASVIAASVPDPGVFKSGRDFAAWLGLTPRQNSSGGKEKLGAITKQGNRYIRKMLVTGSTSVLRVAGKRKGALGDWINALRARKPERLVAVALANKLARICWAIMTTGEDFRTEMYVKA

SEQ ID NO: 246787 - protein, 453 aa, unidentified
MRSKPNHGPVPEEIPDAEHELVIERVCAIDVAKDSGKVCVRVSSRAGRRVSKVWDVAARSGAVGELAQHLVDEGIEKVTVESTSDYWRIWFYLLEAAGLSVQLVNARDVKNVPGRPKTDKLDAVWLAKLTEKGLLRPSFVPPAPVRELRDYTRLRIDLTRERSRYWQRLEKLLEDALIKVSAVASTLDTLSVRDMLEALIAGERDPRRLADLARGRMRAKHGALVEALTGRFDDHHAELTRMLLDQIDALNTQIATLTTRIEELLTAMQPEDVNDGDTTGGANPASRNAGGLTTIERLDEIPGIGPGAAQIILAEIGLDMSRFPTAAHLVSWAKLCPRTIQSGAIQRGGKTGKGNPYLKGALGEAAAAAAKTNTFLGERYRRIVKRRGKLKALVAVARSILVIIWNMLNDPTARFRDLGADYHTTRINTERRTRNHVTQLMAMGYRVTLEPAA

SEQ ID NO: 246788 - protein, 394 aa, unidentified
MFFVGIDVAKRKHEAVVIDDKGRIVQKSFSFPNSLSGYNSLISCVKRITSTRKDIVFGMESTSHYWLALYSHLIKDGYTAHVINPIQSDAFRGLFIRQTKTDPIDAVIIAEVIRFGKYSSTHFPQHKILALREMCRNRLYMVDAISDLKRKTIALIDQVFPEYDQLFSDTFLVSSIEVLYRYPTPKKLLHIRRNTLTNLLIKTSGGHFGSAKADEIIHAAKNTFGIDDPYDVYADLIQTFIKQIKFIQKNVAEIDQKITAIMDEIASPITSIPGIGATLGAVILSEIGDISRFKSADKLAAFAGIDPSLKQSGDYSSIRNHMSKRGSPYLRRALWMACIPATQVDPMFHAYYLKKRSEGKSHMKTMGHVAKKMICVIYAVLRDNKEYQPVLTAA

SEQ ID NO: 246789 - protein, 321 aa, unidentified
MAIWVGIDVSKDTLDFGLTVDGRKFHQKVPNTQKGFAEILKQVPPDAHFVMEATGTYYLNLALHLHEQGRYVAVVNPFRIKSHMNCDLRRTKSDKADAYSIAQFGKEKEPSAWVPVKRETFQIQQFQSLYDLITHQITQYTNQVHAFKRAEISSPKVIRECLTIIKDLRKRRAVVMAEMEKLAESVLAREIELLESIEGIGRKTAIRVASAIGDFRRFPTSRQLISFAGLSPLTQQSGTSIHSKGHISRMGGNRIRGALYMCAVVAKTYNPQCKAMWDRLKAEKKHGKIIIVAIMCKLLRQMHALVTKDVAYDPNFFAKVA

SEQ ID NO: 246790 - protein, 343 aa, unidentified
MKSYVGLDVSLKQTSICVVDESGSVVREGVVISDPEAIAAFVRLNAPGAARIGLETGPTTTWLWTELKRLDLPVICIDARHAKAVLKMQINKSDRNDAAGIARIMQTGWFKEVRVKDIDSHLVKALLVSRALLVKIKRDLENQIRGLLKNLGLVIGRGKFNVFAVRTEELIEDRPELVAVIRPLLAARKAIEEQVHNLDRRVLKLARHDMQVRRFMTVPGVGPVTALCFTATIDDPTRFKRSRSVGAYVGLTTRRYASGEVDWSGRISKCGDAMLRMYLFEAAGVLLTRVPKWSALKAWGMRLAKRNGLRKAKVAVARKLAVILHRMWIDGTEFNWSKEEASA

SEQ ID NO: 246791 - protein, 347 aa, unidentified
MTILADSVDIVIGVDPHKHTHTAAFVAADTGKHHDSRTSSADPDGFAALLRSAQQHAGTRCWVIEGCGSWGRGLATWLQAVGEDVREIDSPARPARRMGKKTDDLDALRVAREALGRNDLATPRNAGDRDALAALLVARRSAVEMTGDTERQLVSLAVTCTEQLAERLRGKTTTQIVDTCTRWRPTGDASITATAEAMRGLARRIRDLRAEADAHQRRIEELVKAWRPDILELVGVGPVVAATALVVWSHQGRVHNDGAFAMLAGAAPLPASSGMTTRHRLNRRGDRHLNCALHIIAIQRQRHDPATKAYFERRRAEGKTDREIRRCLKRYIARQLYRTLESGLDSQ

SEQ ID NO: 246792 - protein, 323 aa, unidentified
MSPVVGIDVAKRSFDLAIDLANSKYRTKAKLPNDPKGFQILQTWLQTHAQADSWIVMEATGTYHEALAEFVYGLGYRVCVINPAQMALYARSQLTRVKTDRSDAKLIASYGQRHAAQLRPWQPDPPALKRLKALVRRRDDLLQMLQMERNRLDVAALVVRDSLLENIGQLQARIAQIERAIDDQIDQDPTLRGQRELLVSIDGIAGTSAALMLAELGNVERFAHASAVTAFAGLNPRLQESGKRQGQVCISRTGSPRLRAGLFLPALVAMTHNPVVRALKQRMRERGKANKQIICAAMRKLLHIAYGVLKSRTPFDPQKTLVC

SEQ ID NO: 246793 - protein, 384 aa, unidentified
MQKPNDLNQSRIVLKQDSTLIAVIEMSLSSWLVAGIVPGVERQPLKKLAVDESALLKLLNRWREEAEKAGRRIERITVAFEAGRDGFWLARWLRARGIEAHVIHASSVAVSREHRRAKTDRLDTELLKRAFLGWLRGERDHCKMVAIPTTKDEDAKRPNRERQSLVGEQTRIVNRMKAALIRLGIRGFNPKLKKAAGRLEDLRTPEGEPIPPNTLAELRRDLERRRLVSDQIRQIEEARLERMEQAPGDGPHAMVRLIARVVGVGIETADMLVHEVLSRKLRDRRAVARYAGLTGAPDESGSKRREKGLAKAGNARVRGGMIQLAWRFLLFQKDSALAQWYRTRTEGGRNRKTIIVALARKLLIALWRLVTTGEVPAGVVLRAA

SEQ ID NO: 246794 - protein, 359 aa, unidentified
MPEKRRRIGQLIGVDYHPSFQTIAFLMEETGECGEQELNHSDGEAERFYRDLKQRGISVRVGMEATGYSRWFERLLAELGFELWIGDPAEIKAKRVKKKKTDREDARLMRKLLLEDRFPRIWVPDPENRDLRQLLWHRHRLVQMRTRIMNQLQALAMNEGYRWKKKLWSEQGRAQLEKLSLAPWASRRRQELLELLDRMNPTIEELTAAVEREARKRPDVMRLMTHPGVGPLTALAFVLIIGTWERFPRGKQIGNYVGMIPSEDSSAGKQRLGHISKQGNSLLRFLLVEAAQAAARCNPDWRRRYFHLAMRRHKSIAKVAMGRRLAVRLYWMWRNGCEYSPKLEFGSYAGQLGTGHGGK

SEQ ID NO: 246795 - protein, 455 aa, unidentified
MYLPDWKWIPIRKGLLLMSNKVIFNLDELFISVGIDVGADFSWMSIALPNQQFVGKPYKILHNSIDSLTTAVSKIKEAEELYSLESRIFLESTGIYHYPLFCYLRDKGFNCSVINPIITKNSTNINIRKVHNDRFDSKKAALVGLKPDLKVSLMPSDLALNCRNLCREYYDLMDNRSAYVNKLQGELRMAFPQYLGIFSKVTINTSLTLLETYTSPSAFLEADKQEIIDIIRSTARFGLTYAQNKYNAIIQAATDANQFGYIIESNIKRIRLYISFIRKYDEEINSILELLHELVDANEDADFVKQIHLIETFKGAGFLSAATIMGEIGDFSAFSKPKQLFAYFGLDPAVKQSGKFEGTKVQMSKRGSAIARRVIHTLTLQSISISRNREAKNPVLREYYLKKCDSKPKLVAMGAVSHKVCNMIFAILRDNKPFKIIAPQEHIKQYNSAKCDIAA

SEQ ID NO: 246796 - protein, 366 aa, unidentified
MDRIYIGVDFHARQQTICYLKTETGELVICELKHQDKEKVRAFYAQFPAPVVVGLEASGYSPWFERLLEELGCEVWLGHATEIRRRARWRQKNDRRDAELILDLMLHHEFPRLHRPALESREVLRMLRYRQKLIKLRTMSKNSLQAIALQSGLAKGSGLFTKAGQQELSTAEMTPVMQWQREHWLQLLQPLNQQLLETMGWFKAQSKGDVCITRLRTHPGIGLLTSLCIRHTLQPVSRFRNTRKLAAYAGFDPVERSSAERKCFLGISKAGSRVLRYLLVEAAQTAVRKDEDLKRFYKRLAERRGRPKAKVAAARKLLIRAYIMLRDEIDYAEFRRRAVAARLARRGQGPTNVPEVLIGQPASPAP

SEQ ID NO: 246797 - protein, 360 aa, unidentified
MRVQSKAISFKGQNIFVGIDVHLKTWAVTVLTESGGYKSAFTQPASSKSLFEHLAKNYPDGIYHAVYESGFSGYSSCYELRELGVDCIVAHAADVPTSQKERLAKTDPVDSAKLARELRNGSLKAIYLPPKERLGDRELMRTRQTVMKDMRRVKSRIKHLLYNNGVQYPERFKSSRSHWTRTFIAWLQNDVELLSQKRMALDMEIEELLHLRGMVLKINRSIREMSRSDVYKDQYNLLIGIPGIGMITAMTVLTEIVDPQRFSSLKKFLSYLGLIPTMDNSGDTVKDGSITPRGNQKIRRMMIESAWTTIRYDRELAASFGNYSKYMKKNQAIVRIARKLAGRVWHVFKYGEEYKKCQLE

SEQ ID NO: 246798 - protein, 353 aa, unidentified
MTKSAASTASKTYAGLDVSLKETAVCIVDDAGRILCERMLPTDPQVIAKCLGKHAPTLERFGLESGATSAWLWREFRALGLPVVCLDSRHAHRVLSMKRNKNDRNDARGLADLVRMGWYREARVRSLDAQLIRSLLLSRQQLLQSRRAIENQMRGALKTLGVMTGSTKGRGFMPRVVELRADNDWLSSVLDPLLAAHASIAKQLKAMSASVLDTARRDGDVRRMMTVPGVGPMTALAFKAAIDDPQRFTSSTKVGPYLGLTPRQYQSGESEWIGGIGKSNDPLLRSYLYEAAGVLMTRLRRSCPLQQWALRLAKRIGWKRASIAVARKLAVILHAIWRDGTVFEWSTTEPAVA

SEQ ID NO: 246799 - protein, 438 aa, unidentified
MPTTFARLLDPSFEDEDDPLRHYDARGEPLEDRLYLPCGIDPHKKACAAVFVHPLPHRQDILCQRQIHNQYLPDALWLIDEGRRLAEPFHATPLYIFETSGPFWRPYRHFLHQLKLPTATVTGRQTRKAQGTGTRKTHNDLKAAYLIAKVFKQGESHATRIPPEPIASLREYTRLHLFFAEQSVAIQNRMFDLRYQIHPTFDDLFSQPIMPTTLALAKEELVHPVRILKSEPDTLQQVIRRASHGKLGDRLAEALHHSALTAFYTPYAPEAQSVNLKLLAQAYEHIHHQILPQLQTHIHDCLQNLPFQQFLTEIPYFGPVVTGTFLGELGLPGWFRTVDSVVAWFGLDPSLSESAEHDTGVSHLTKRGTKYGRRMMWMVARNWSRFVPEGRHLFKKERYVNKLSYDGAICVVAAKLVRMAFAMARDGSQFDMSKAFPS

SEQ ID NO: 246800 - protein, 385 aa, unidentified
MSAHPTPIQAAAQLQANTLFASLELSKARWLVTVSAPGSDKLSRHQVPGGDGQALLELLWRLQAAAARRTGAPVMIIVIQEAGLDGFWIHRLLVQNGITSHVVDPASIAVNRRHRRAKTDKIDGVKLLRTLMAWMRGERQVCTMVQPPSPEDEDRRRLARERARLLKERIQHTNRIKGLLSGQGIPDYDPLHRDRRGRLAALTTGDGRPLPKRLETEIGRELDRLELVASQLAAVERERDALMAQTAEADARAAPAALIRLRGIGPELAALLWLEALFRRFENRRQIAAYAGLTPSPWKSGGIDREQGIAKSGNPRLRRAMIELAWFWTRHQPGSALSRWFAERVGAARGRVRRIAIVALARKLLVALWRYVTHGVVPEGAVLKA

SEQ ID NO: 246801 - protein, 288 aa, unidentified
MLIIGCDFHAGFQVLSIFDNRSGEITEKRLAHPQEAIAFYQGLKEPARVGIEAGAPCQWFRRLLAECGHELWVGDAAKIRAAETRKQKTDRRDAELIMRLMVEGRFPRIWVPSEEERDVRQLLMDRHHRLRARTAAKNQLQFLAMNQGVQKGQRLWTEAGRQLLANLEMMPHAARRRDQLLGWVGLLDQQSAALDVLIAAEVKQRAEARRLMTHPGIGSQTALATVLTLGDVSRFAHARKVPSYRGLVPSEYSSGASSGWDTSASRDRRCCAFSWSRPARRRCDSTRS

SEQ ID NO: 246802 - protein, 386 aa, unidentified
MKKHTKNETTKIQRETKKVAELESAGWREQEANTLVIGIDLGDRSSAYCVRTLGQQIIREATVATTATAILKEFEGLRRQRVVIETGTHSRWVAQLLEMMGHEVIVANARKLKLISENNQKSDKVDARLLSQLGCMNVDWLHPVYLRSQDAHCDLLLARARELLVETRTGLINHVRGSVKSFGSRLSTCGSESFVEVARVGLPDALKPALSGVLAALEEINEQIYDYDCRIEHLCNTKYKEAAKCLLQVNGVGPLTALTFVLTIENKDRFEQSRDVGPYLGLVPKSRQSGQRDPQLGITKAGDEMLRKLLVNCAHHILGANGQDSDLRRGGLELVRAVERKGKQGARKLAATAVARKLAVLLHALWVSGAKYEPLRNRGVQQAPAA

SEQ ID NO: 246803 - protein, 357 aa, unidentified
MKHRIKIEVDGRNCIGLDVGDLKSQYHVEDPVGKEVETGKVVTTREGIMEKFMSMAPARIALEVGQHSPWLSELLSSLGHEVFVANAYRVALIAKNNKKSDQTDAKFLSWLLRVDPRLLFPIRHRGVKARAHLEVIRARDLLVRQRTGSINFVRGTVKAFGARIASGIQPPSFAHKARAFLPASLRKTLMPILEMIAHQTSLIQAADREIERLCTEEYPETDRLRQVNRVGAITALAFVLVVDDPKRFHRRRDVGAYLGLVPRRRSSGESDPELSITKAGDRLLRRLLVQVAHQQLSRMGQDSELRRWGLALARRGGKNAKKRAVTAVARKLGVLLLALWVTGEDYVPLREEVEAAA

SEQ ID NO: 246804 - protein, 372 aa, unidentified
MCKQHFLTIQTETMIKANQLDFSGTNIYCGIDVHLKNWQINIRDENMELRNFSHNPDPAALAHFLKKNYPGAIYKVGYEAGFCGFGIHRQLSALDITCVVLNAADIPKGNKDKRQKNDKRDARNISEEIKKRDVHGIYVPLLDWEYGRTLVRTRHQQINDSTRMKARIWHFLYFHSLAVPQKEDTGKYWSRRFIQKLENHSCNNNIQLRTTLQIMLSDYLQKRKLLLLTTRAIRALCRQDVYKKDMQLIISIAGIGEVNAAIILFELQNINRFQTFDHLCSYVGLIPDTGDSGDVKKDLGLTHRHNSRLRKALIESSWMVIRKDPALLMLFKKYCRTMHKNKAIIRVAKHLLARIRYVLKEQKPYVEGVVAG

SEQ ID NO: 246805 - protein, 342 aa, unidentified
MTMIGIDPHKATHTAVAIDSNEHVVDKFQLRASSRQAERLRTWADKFGEREWAVESANGLGYLVAQQLVAAGEVVFDVPPVLAARVRVLGSERSQKNDPNDARSVAIAAMRSDRLSLVRPDDHSRVLRLLAKRHRDMARLRNKHCTRLHALLLELEPGGISSEITVTKANTLLSRITAADQVTRHRVMIANELVDDIARLDTLLKASKKRVEQAVVASGTTLTDIVGIGPICAAIIIGYTGDVNRFPTKGHFASYNATAPVDASSGPRPKHRLNQRGNRKLNHAIHIAAISQLRFDTEGRAYYERKLAEGKSSKDAIRSLKRRISDRVYRHLNIDAQRLAAS

SEQ ID NO: 246806 - protein, 312 aa, unidentified
MEKLSYGGIDVSKDRLDVVVLPEGWFFSVSNDTAGWAELVARLRPLAVCAIGLEPSGGYERGIIRALLAARLSVRRINPNKLRQFARARGVLAKNDRLDARLMAEYVAIMPTRAVQRDDAVDRLAEVVTMRRQLCDEHVTVENQTAHLEDAMLRRLSKRRLVRLEADIRLLDKRLAEMVATNAAFARLYELLTSMPGVGPVLAFTLIALLPELGKMGRKQIAALVGLAPYDFDSGKLRGHRSIYGGRMPIRNVLYMAALSASRYNPALKTFSNRLAHANKKSKVIIVAVMRKMITTLNAMLRDNAVWQPQSN

SEQ ID NO: 246807 - protein, 371 aa, unidentified
MKENSTFIGMDVHKNSIDIAIAPKGRKAQVRHYGKIDGTLAALDKVVRKLVSQGDRPHFVYEAGPCGYQIYRHLTAKGFDCSVVAPSMVPKQSDNRIKNDRRDSLMLARLHRAGELTAVYVPVAEDEAMRDLSRAREDAKGDEKKSKQRLLAFLLRSGHRYSGRSPWSQAHMRWLADIKMVHPSQQIVLQEYIDTLSHCTLRLQRLTEQIRQLLPQWRLFPVVQALQSLRGVSLIVAATTVAEIGDFKRFQNPEELMNYLGLVPSEHSSGEKTRRGSITKAGNSHVRRMLVEAAWAYRFRARVSRALLKRQEGLPQEIRDIAWKAQVRLCARYRHLWAKGKVKQVVTTAIARELCGFIWAIANETDVPMTA

SEQ ID NO: 246808 - protein, 427 aa, unidentified
MPYKIAGIDVHKRMLHVVVSDVQVDGEYDFTRRVFGSLPEALRSLAAWLVEQQVEEVVMESTAQYWKPVWGTLERYWKPICQTREGALATSGTLHLAQALSNRGRRGRKKDFRDAERLVKRLVAHELTLSFVPDVEQRLWRTVVRTKYQLTRNRVQLQNRLEALLEEAHIKLSSLVSDLLGASARRMLEAIAGGETNRETLAALADRGLRATQEQLQDALGVCQELNPVYRRLIKMVLDEVASIDKRIDQLNQEMASLLRPHEDQVKRLAEVPGLGVDSAQQIIAEVGATAATFPSEKHLSSWVGACPGEEESAEVNHSRRSPQGNRHMRRILNQAANAAAKHKGSIFQILYGRYVPRLGHNQTIGIIAHKLCRLVWKILHRGIRYEERGPEVSKASKQKRTRKMIRQLRRLGYRIEPSPSQSAITA

SEQ ID NO: 246809 - protein, 397 aa, unidentified
MYIVGIDIAKRKHEAAVIDGEGTVIIKPFSFTNNCSGYNRLLAMLAKAKLPLDEVSFAMEATGHYWLALFTRLQKEGFRVQVINPVQTNSIRSFYIRQAKTDPRDALLIAEVIRFGHFSESTLHPENIYELRELCRGRHAIVSMQADVKRKVVALLDQVFPEYETAFTNMFGDTSMAILQACPTPKELSEMPLEELCHLIEVSSHKRFRMAKAQELQALARNSFGFAMAGDVFSTMIRLYAKHLDFLKQQVREMDRKIAEIMDTLDTPITTITGIGPTLGAYILSEIGDISRFSSAAKLAAYAGIDPTMRQSGEYNGVRNRMSKRGSPYLRHAIWLAASSAVLHDPALKLYFQKKRDEGKPYMASVGHACRKMVSIIYAVMRDNKAYTPCIPNEISA

SEQ ID NO: 246810 - protein, 346 aa, unidentified
MAVKVAVLGVDLGKNSCSLVGLDETGAVVKRRRIRPQSIPALTSSLPACVIAMKACCGAHHLGRLLALQGHTVRLMSPEYVRPYVKSHKNDDRDAEAIAEAATRPTMRFVELKSERKLDMQTLHRARDRLVGERTALINQLRAILLERGRTVPQGRHKLEQYLAAMPEPETDPWLTLRIRQLIEDMRAEWRELDRRIAAFDNEFAAQARNDPAARRLATIPGIGVLNATALVAAIGNGQTFARGRDLAAWLGLVPRQVTTGGKPRLVGITKRGNKYLRKLLIHGARAALPRLANSGSPHGEWLRALMGRTHKNAAVVALANKLARIAWAVLRRGEVFDAGAAAARA

SEQ ID NO: 246811 - protein, 344 aa, unidentified
MECYVGLDVSLKQTSICVVNEKGLVVREGVVDSVPEAIAGFVRSKAPGAVRVGLETGPTATWLWTELARLDLPVICIDARHAKAVLKMQVNKNDRNDAAGIARIMQTGWFKEVRVKDLDSHAVKALLASRALLVKIKRDLENQVRGLLKNLGLVVGHGTFNVFAVRAKELIADRPELTSAVSPLLTARTAIEQQIGELDRQVLKLSRQDAQTRRFMTVPGIGPITALCFKATIDDPARFRRSRSVGAYIGLTTRRHASGELDWSGRISKCGDAMLRMYLFEAAGVLLTRVPKWSALKAWGTRLTKRNGLRKAKVAVARKLAVILHRMWVDGTEFNWSNNKEVAA

SEQ ID NO: 246812 - protein, 427 aa, unidentified
METIFKNCAGIDVHKKFLVVCWRHIDAEGRLHTEKRRFGTMTADLEALAAWLAERGCTHVAIESTGVYWQPVYNILEDHFEVWLVNAQHVRHVPGRKTDMTDAEWLAQLMQYGLLKPSFIPPRPQRELRELVRYRQSLVEERTRVVNRLQKVLEDANIKLASVVSDIQGVSAQAMLKALVQGTTDAQALAELARGRLRCKLEELERALTGRVRPHHRFLLAELLAHLAFVDERIAHLEAEIERRLAEMPEFVAAIARLETIPGVDRLTAITIVAEIGVDMSRFPSERHLTSWAGMAPGNNQSGGKQRSGKTRKGNRYLRRALVQAAHAAARAKGTYLKARYHRLAARRGKKRAAVAVGRTILRIAYFLILREETYRELGEDHFDRLDKERTTQRLVRRLENLGYTVELHEVHLQETTALPAVEAVAP

SEQ ID NO: 246813 - protein, 427 aa, unidentified
MYYKQNDKIAQLTEQTLIIGIDIAKNKHVARAQDFRGIQFGKALYFDNSWEGFESLMCWKDELCVQHGKINIIIGMEPTGHYWLPLAHWLREKQIKVVVVNPAHVKKSKELDDNSPTKNDVKDARVISRLIQDGRYSEPNLPEGIYAELREGMNLYEQLMKDFQTIKGRVHQWIDRYFPEYTTVFSKWEGKASLEVLKMGLFPDEIAETEDITILNAIRKAVKRGVGLKKVRQLQEVAGHSVGIQEGKILARFKLKTLMEQYMLIQEKIEEAWAMIEQFLDTIPGVNEMDDIEGIGKVTIAAFYAEVGDLENYTHPEQITKLSGLNLKLATSGKWKGRTIITKRGRPKLRALLFKVILPLVNHNRAFKALHEYFTTRKENPLKKKQSLIALCCKLIRVLFAIGKKQVAFSPEKMLQDIPHFRLKDAV

SEQ ID NO: 246814 - protein, 482 aa, unidentified
MPLLVTNIERQTSNVSNKTFEPTELLASKRILRDRPPRLSIRPARNETYAHSIYNFTRWSIKMKAYNVDDFAALIGVDWADKKHDICEHPKNTEQYHYTVIKHKPEALHKWAMDLKQRYPNQKIAVVCELKKGPLIYALAKYDHLVLFTVNPSAVANYRKAFSPSGAKNDPTDAFIQTEIIKFHMDKLSVIEPESSSMRALAQLVEYRRSLVQDSVDLSNKITATLKNYYPQALEWFKEKDTFIFCDFISKWPSLAAVKKARKQTLVDFFNRHNSHYETVNNARLLSIKSALPLTEDEGVIAPNQLLIEVLITQFKVLLKGIEQLDKTIKQLYKKQNDKAIFDSLPGAGPQLAPRLLVAFGHNRERYTDASQMQKYAGIAPVIESSGKKTWTHWRYSCPTFLRQTFVEWAGFSIRYSFWAKAYYEQQKSKGKPHNSIIRSLAFKWIRIVFRCWKTNTPYDESKYLEALKRRGSPLLKFAINS

SEQ ID NO: 246815 - protein, 493 aa, unidentified
MEDRRLVDPDLGIISAHTVRVLAGDGCLVCRCKAIPTVDSLEQVERAALAETPVGTLLEVVVEPTGPAWLPIAVFFTARGHTVYRVSSAKAHDLRRVLSRHAKSNGIDADTLARLPLVDPAGLHPLQLPDAARAALDRRVRACDRLTQQAATHKRRIKDLVQQLLPASPLVGELGQADLAVLERWADPHALVAAGHARLQRLLATASAGQQSAHRAAQWLAAAHAALQLYGDHPAIAFTELAAEVTSEVRLLRATQAELAAHARQREACYRRVDPAALARSLPGLATIGGPALVATMGKASRFATAGKFRSFTGLAPKASETGQVDRKGQPITKAGNKLLRTTLVRAADHARRQDPQLARIYWIQMVQRGKDHLGATCVVAAHLAERAWTVMDRGTPYVVCDTDGTPVTPAQAKAIIAEHWTVPEQVRRQRRSRKGRPLSKSSPDMRMALEAQRGDPPPHRPLLVASPAASSRPTRNLDSQASIGNQTISIRE

SEQ ID NO: 246816 - protein, 330 aa, unidentified
MKNYVDVIGIDVSKLTIDAYMHKRGLHRLFTNNTKGFKELLNWANKHLGLILHFYCFENTGNYSLNLSIYLDERSIDYVEENPLLIKRSAGIVREKTDKLDSAMIARYAWLHREELSLSSVRDNKHQELGRLMALRDQLVRNRTGLMSSLKELKSLLSSPSTDVCCKSILRSISYITKQILMLEKRMKEIIKSDTRLDRNFKLLNSVRGIGLILSCQLLYHTSNFKRFNRWRQFSNYCGTAPFAYSSGTSVKRANKCHHIGDRKMKTLLSLASVSAIQYDSELRLYYKRKIEEGKPKLVALNNVRNKILARAFAVIKRGTPYVELHQYAA

SEQ ID NO: 246817 - protein, 344 aa, unidentified
MKALKSHVAGIDVHKEMLAITVLIGELDGEPKEYQFESSTFTDDLMALGLKLKEMGVTDVAMESSGIYWKPVFNVFNPLGLKVVVANAAHIKNVPGRKTDMNDSRWIAELHRFGLIRASFIPDGEFQRMRLLSRHRTNLTEDLARVKNRIQKVLEDGNIKLSIVVSDIFGVSGLKVLKQIAGGYTHPNILITEVTTKIKRMEEMKKALTNCLTTEHCFVINVLMKQYEELKNRIEEVENELCKKVEPYAHLVEELDKIPGIDAILAMGIIAEASANMSSFKDERAFAAWSGVASGNNESAGKKKRAKCRKGNPALRKMLIQAAQKATTARNPFIALNTTNSAFA

SEQ ID NO: 246818 - protein, 338 aa, unidentified
MKEYKLISIDLAKNVFQICAFSDFNKIAFNQRIHRGKVLAKLRNIPSTTIVMEACYSSNYWGREIQKLGHTVKLIPPFKVKPFLIGNKNDANDAVAIAEASLRPKSRFVSVKTLAQQDTQTLLRVREQLQKIRIMTSNQIHGFLSEYGVFCAKGHKSLMTTLAEALAPESNLLSPIAIEAIRMQSDYYSELKAKEDEITKRLIMLCEGSPIYRYLKTIPGIGPIVAATLISSVGDPRYFRNAREFSAWIGLTPLQHASGETSRMGKISKRGDQHLRKMLIHGARSIVNWVKHKEDKLSLWIKSLEERMCPNKVTIAVANKLARIAWAVMTYQVEYHAK

SEQ ID NO: 246819 - protein, 345 aa, unidentified
MWIIGCDFHPGFQQVAILDNQTGEIKEKKLLHSAQATEFYRGLEGEVRVGMEAGAPCQWFRRLLQECGHQLWVGDAARIRAAETRPQKTDRRDAELILKLMLEERFPRIWVPTEAERDVRQLLMDRHHRMRMRTKVTNQLQSLALNQGVQKGRRLWSAQGMQQLQDLSMMEHAARRRDQLLQTLASLEQQIAALDVVVRREAEARQEARRLMTHPGVGPQTALAMVLTLGEVSRFASSKQVASYLGLTPREHSSGGKQRLGHISKQGSSFVRFLLVEAGQTAVRGDAELRRAYRRLAARKSSRALAKVMVARRLAVRLYWMLRNQWSYAELARHAGKPGSFRGEW

SEQ ID NO: 246820 - protein, 418 aa, unidentified
MNTKNDNFSAYVGLDWADKKHDICVQVKDEESRAFSVISHSPESINDWVEALHKKVKGNIAVAVELNKGPIVYALQKYSFVTVYPIHGLTLARYRQAMFPSGSKDDPSDAELALDMMLNYPKKITPLKPSSEKTRTLALLVEQRRLLVDDKRRHANRIINALKQYYTQPLEWFSHRDTELFCNFLIKFPNLNELKRVRTNTVAKLLNSRGGPTVKKTPERIASIKEATPLTNDESLIIPYQTFVIALAKQMLVLINNIREYDSQISSIFTSMDDASIFASLPGTGPCLAPRLLAALGEDKSRFSSAQEIQNYAGLSPVTERSGQKSWVHWRWQCSKFVRQSFIEWASKSVGQSYWAGIYYAQQKAKGNSHQSAIRALAYKWVRILFRCWKTGKAYDESKYLKALKEKGSPLLVVEKTC

SEQ ID NO: 246821 - protein, 375 aa, unidentified
MNYNTVYVGMDVHKKSFSLCCYTNEKEQAEYPQKTAPHYSKVLNYLEAMRFHYGDDVLFICGYEAGCLGYTLYHELMDHNVKCILLAPTTIPQPTSRKKVKTDKRDAALIARCLAHHDYSPVHIPSEKDEQVKEYIRMRNDHKIALKKVKQQISAFCLRHGYRYDATVNQWTQAHLKWLRALKPEGLYRDILMEYLSTYDQLTDKIERMDRRIEELAGEPQYREGVKKLSCFLGIKIQTALSTMVEVGDFKRFSSAQRFAAYLGLVPGERSSSESQNRLGITKAGNSHIRTLLVEAAQSYTRGRVGFKSKALKERQYGNPADVIAYADKANERFRRKYYTMVLTKGKKVNVVKTAIARELACFIWGMMVGNLTER

SEQ ID NO: 246822 - protein, 362 aa, unidentified
MSKISRLGIDTSKSSFELCGVDDKGEVVLRKTLRRKQFVAFVSKLEVGEIGLEACGASHHWGRELQQLGHRVVLVPAQYVKSYVPRGKNDKNDARAICVSLSQPWVRERLVPIKSLDQSAGQMLLGVRDSLIKRRTQLTNSIRGHASEFGLVAAKGLDKVEPLLERIAADEGLPALARELFAGLGEEYAELAQHIARIDKRLMAFQRDNELARRLLEVPTIGPIGACLWVTKMVDPHAFRSGRDCAAWLGLTPKDHTTAGKHRMGGITRAGDESLRSTLVAGATALLRHVRSGRIKPSPWLAGMLQRKPPKLVAVALANKTARIAWKLMTSGERYDPQHRLAREGLDAPQYGGLRAEPLAAT

SEQ ID NO: 246823 - protein, 391 aa, unidentified
MIYVGIDVAKDKHDCFITNSDGEVLFKAFPIANNLDGFNELYRKIESVMEDVTKVKVGLEATGHYSYNLLGYLIDKGLPAYVINPLHTNLYRKSLSLRQTKTDKVDARTIASMLMSDVNLKSYSDISYHNEELKSLTRYRFDKVKERAKLKTSVSRLVCILFPELEKLVPTLHMASVYAMLSEFPGAKQVATAHLTRLTNLLSEASKGRYGKDTSITFREAARASIGSNMPAKSLELKHTIKLIQELDSEIDEIENEIKVMMDEINSPILSIPGINYRMGAMIIAEIGDFSRFDSPDKILAYAGFSPSTYQSGQLDSAYAHMEKRGSRYLRYALYNAAKYVCHWDPTFAAYLAKKRAEGKHYNVAISHAVKKLVRVIYHLEKSNQQYIKAA

SEQ ID NO: 246824 - protein, 321 aa, unidentified
MTHHTTLTAGIDTAKDKLDVAIHGLPTHFTVENRQSGWRRLAGALTKAGVKRVGIEATGGYERGVVGYLRAADFTLLVLQPLQVKAYARLHLRRAKNDRLDAVLIAAGAAVLDVPRIAPDPRLPPLADVLTVIEQTEEDIARYKTRLEHIAQPRLRRLVLADIKRLGARRAAELKRLVQAVRRHDDLARRLDLIQSVPGIGERTALALVLRLPELGRITREEAAALAGVAPFDDDTGQHHGERRIAGGRSRVRGSLFAAALPAAFRWNSALIALYRRLTAKGKPHKLALIACARKLVIYANTVVARGTPWRLTPGLAAAAD

SEQ ID NO: 246825 - protein, 303 aa, unidentified
MQHLEVANTLAGFRQLVRCGGATSLYVLEATGPYYLAVAYHLVAVGAQVALLNPLVVKRFIQMHLGKGKSDRKDAQWLLRYGQQQATPRWQPEEAVLVECRQAEQVVELLIRQKTMVHNALESLQAQPVVSPAVLEQLRQTLLHLEEQVQQLETKLLTTLETRYAPEMQLLCSIPGIGRKTAAYLLLFAGGFTSFQNHRQLIAKAGLCPREFSSGTSVRGKARISKMGGALIRSKLFMCSWSARRANSACRLLYDRLVAKGKNGKLALIAVCNKLLKQAYAIVTSGVPYQADFTKKVVAPLAF

SEQ ID NO: 246826 - protein, 460 aa, unidentified
MQQPIEVEVEEDEQIVERVAAVDVAKATGMVCTRVPHESVPGKRVTKVWQVRSTTRALVELGDHLRCQGIQRVVVESTSDYWRPFYYLLEAAGLTVWLVNAAQAKNVPGRPKTDKIDAVWLAKLAERSMVSPSLVPTEPMRHVRDLARARFDLVEDRTRVKQRIEKLLEDALIKISCVLTDIHGVSGRAMIEALIAGRRSPQTLAELAKGRARARREALTEALEGRFTDHHARLARMLLEQLDDLTARIVEVTALLDAAITALPDGSPSTDPAAGTHPHNGADPEDTQPPGPTASYTSAIARLCSIPGAGPDTVRAVIGEIGLDMTVFGRHQRLCSWAKVSPRTVQSGRKNGRARTGKGNPYLKAALAQMATGAAKTDTFLGERYRRLIKRMPKAKALVALQRSILIIIFHLLADPTAAFTDLGPDYYTRRIDLARRTHHLTCQLQALGYNVELTPTKTA

SEQ ID NO: 246827 - protein, 415 aa, unidentified
MKVVYPICCGVDVHKSFLIGTIITTTGGVEPHYQKKRFSTYNNDLHRFCNWLLSNNCKNVCMESTGKYWVPVFNILEERGIATTIANPKWVKAVKGNKDDTKDSKWIGDLFRLGLVPGSFIPSKEIRILREFTRYRYKLVSMKSSEKNRFQNAFTVCNVALDSVVSDMFGKSAAAITNYLISEDSFDPEYCKSLLQRSLKKKADSVIESIEGYSITNEQKLRMKIIRSHLDYIQSAIADVDSAIDAMVAKHENLIALLQTVPGIDRNSAITIISEIGTDMEQFGSSKRLCCWAGLTPGNNESAGKKKSVRITRAGVYLKPALVQVAHAAVKATDNSYYRLKYEQISKRRGKKRAIIAVARMILTAVFQMLSTGEAWNPSDLFKVDMPQPLKEKQLEKAVKQAMKFLEKQGIFVPA

SEQ ID NO: 246828 - protein, 370 aa, unidentified
MSSVTSDHGVVHLGLDVHKNTITVGKLEPGSDDPVVDKISSDEDAVRRLVGRFDDPRRVRACYEAGPTGYELARLLRGWGMGCEVIAPSLIPTAPGDRVKTDKRDARRLVRLFRAGELVAIRVPSVAEEAVRDLCRARADMVIDQTRGRHRLGKFLLRHGRVWRGGDNWTQKHQAWIAAQRFDDPALTATFGHYRATLTAREAAVAAIDADLAGWFTRAPFADPVARLGAYRGITHLGALTLASEVCDWRRFPSAGAFMGFCGLVPSEYSSGERTRRGHITHAGNLHLRTQLVESAWAYKSRPAVGAQIAGRHRDLPADVLARAWKAQLRLCGRFRRLDARKTSRNVVVTAIARELAGFVWAEMTTPTTV

SEQ ID NO: 246829 - protein, 335 aa, unidentified
MDRQYVGIDFHRRRSVIVRKNRAGEKLSSVRVPNDASSIAAVLADAGPCPEVVIEATYGWYWIVDWLQEQGASVHLANPSGLNWGQRRVKNDERDATDLIDMLRLGRLPEAWIAPPATRELRELVRYRAKLVALRSGLKAQVHAVMAKEGVLPTVADMFGPAGNAQLDQMPLGDAYTIRVESLRDLIELHDREVTMLEAQIRSRLRGHRGYRAIQAINGIGPTMAAILVAEIGDVTRFRSAPALCSWAGLTPKHTESDTTVRRGSVTKQGSRLVRWAVIEGTVRYHGGGKLAADYRAIAERRGKNKATVAIARKVLTLVYYGLRDGEIRCLARAA

SEQ ID NO: 246830 - protein, 417 aa, unidentified
MDREVALDKIRGRVAGLDVHKKTVVACALTLEPDGSMVRSKASFSTTSNGLVELAGFLDRAGVTTVAMEATGVYWKPVYYSLEGMFDELWLCNAHHVKNVPGRKTDMSDAEWLADVAAHGMVKPSFVPPPDIRELRELTRYRKTQISERGREIQRLEKVLQDAGIKLSSVTSRVWCVSTRQMIEALIAGERDPEVLAEMARSKMRSKRPQLAEALSGRFGPHHATVARQIIAHIDFLDASIAALSADIARRVAPFEQAVKVITSIPGIATLTAEVVIAELGVDMSHWPTGGHCCAWGGLAPASHESAGKRKPVGTRHGGNWLQKALIEAAWASVRSPGTYHNALFKRIARRRGPNKAIVAVAHSMLNTIWHLLSTGELYQDPGADFYDRLDNPAREAKRLTRRLETLGYTVTIAPAA

SEQ ID NO: 246831 - protein, 350 aa, unidentified
MTRTVYCGVDFHARMQTIAYCDSADGEIQLAQLDHRKDDVRDFYSKLTGQVIVGLEAGGYSSWFEAMLEELGHTVWTGHATEIRRRANWRQKNDRRDAELILEIMLKGDFPKVHRHSRESVEVLRMLRYRARLVKMRTMISNNLQAIAISSGLTERSRMLSRAGQQRLKNARMTPAIKHQSEDLVSLLIPLNERIGRVDRWLKEQALTDERVKLLMTHPGVGVLTSLGVVHTLEPFNRFSRQRSVVAYVGLEPMERSSAERKRFIGISKAGSRLLRFLLGEAAHTAVRIDEDLKQFYERVGKRRGKSKATVAVARKLLIRCWIMLRDNIDYAEFRSRGVEARLARNTRRP

SEQ ID NO: 246832 - protein, 441 aa, unidentified
MVNPHAAGLDIGAREIWAAVSPHHEGETARCFATFTPDLEALADWLLSYGVTTVVMESTGVYWIPIFELLEARGIVCYLVNARHIKHVPGRKSDLADCQWLQKLHTLGLLNGSFRPDAEMRTLRTYLRHRQQLIEHRAPHILHMQKAMQEMNIQLHHVLSDTTGVTGMDILRAIVAGQRDPQVLATFRQRTCKADEATIIWALTGTWQAEHLFVLQQSLQLYDYYTTQIADCDKVVEQQYATMKPRWKAPEKLPVLPPVKKRSRSKNKPPDSTRQELFRISGVDLVAIDGFSASLAQTILSEVGTDMSRFPTEKHFCSWLGLAPHNDISGGKVLRSYTLKTDNRAGQAFRQAAASVVRSDSAFGAFYRRKKGRLGKMQAMVATAHKLARTVYHMLKYKTPYRELDAETYETQQREREVAALKRKAAKLGFTVVEPVVELAA

SEQ ID NO: 246833 - protein, 345 aa, unidentified
MELHTIGIDLGKTVFHLVGLDLRGEVVVRKKFSRTQLLRFTANVHVGLIGMEACGGSHFLGRALREQRHEVRLIPAQYVKPYVKTNKSDYIDAEAIAEAVARPTMRFVPIKTDDQLDMQSLHRVRERWVMRRTAVINQIRGLLLERGITLRKGRHHVDAALPLILEDADANLSGAVRLLLTQLKLDLDQLSVRIDEADAVIQKTAHENEACRRLVAIPGIGPVTATALIAAIGNGGAFHKGREFAAWMGVVPREHSTGGQQKLLGISKRGNSYLRRLFVQGARAVLQQRTKQSSGLSVWLAQLTSRTHRNVAAVALANKLARIAWAVLAKNEQYRPLVVADVAAA

SEQ ID NO: 246834 - protein, 407 aa, unidentified
MEVIYRRCCGIDVHKKSITACLNIGGKQELREYGTTTRDIKELANWLIESECEMIAMESTGVYWKPLYNLFELLDLDAMVVNAAHMKALPGRKTDVKDAEWISNLLRHGLLKASFIPDREQRELREIARYRKSLTEERAREINRLQKILEGANIKLSSIVTDINGKSSRMLLDTIISGETPNAEDLERKLHFKLRPKLDQIMLSIEGVTTKLQRKLIEQIVDHIDDMTRRIEGFDDIIKDYMGEYETAVASIDDIPGIARRSAEVIVSEIGIDMSRFPTSAHLCSWAGLSPGNNESAGKRRSGKTTKGNKTLKTTLVQCSKAAVKNKDSFFAAQYQRIAARRGKNRATVAVAHSMLIAIYHIFKNNVPFKDLGSDYYDNFNREHKIKGYLKRLNVLGWSPEAALSTV

SEQ ID NO: 246835 - protein, 413 aa, unidentified
MDVIHDRVAGLDVSKADVKVCVRTPGRRRGQRHTEVRTFDTTTAGLLAAREWLEQQQVTKIAMEATGDYWRSPFYLLEGLCDLDLVNAAQVKAMPGRKTDVTDAMWLAQLTECGLTRSSFVPPEPIRQLRDLTRYRSALVAEQTREKNRLEKELEDAGIKLSLVATDIFGVSGRLMLDALIAGERDPQALAELAKGRLRPKRDALQRAMLGRFNQHHAFLCRMHLDRIDQITRDVDELSRRISEVMAPFHPTITLLTTVPGINTQLAEVITAEIGADMTVFPTPPQLCSWAGVAPGNHQSGPRRKRAKTTPGDSWLRAALGVAAMSATRTNNTYLAATYRRYLRRMPKLKALVALQHSMLHAIWHMITNNKPYQDLGADHHHTRRDPTRVVQQALRTLNACGYTATLHPIAAA

SEQ ID NO: 246836 - protein, 365 aa, unidentified
MYIALELSNTKWKIAFGNGFKIRLKTIGAREREQFELEVQRSRRHFGMAEEVPVYCCYEAGRDGFWIHRYLCTLGIHNLVVDSSSIEVNRRSRRAKTDRLDAGKLLTMLIRYINGETKLWSVLRVPQKDHEDARRLHREIERLKKERTAHTNRIKSLLALHGVVMEVGIGKTFPEYIEKVVLWNGEHLPSRVKEEMIREYCRYDLIQQQLQASEQEKKEALKGESESSKKVLTLQNLKGIGPVSSWVLVYEFFGWRLFKNVKEVGAAAGLAPTPYDSGGSQSEQGISKSGNRRVRALMIEVGWYWLMHQPKSKLSQWFMERYGQGGKRMRRIGIVALARKLLIALWKYLEQGIMPEGATVKAYFD

SEQ ID NO: 246837 - protein, 312 aa, unidentified
MNKTICGVDVSKEWLDVRVEPSKAEGRFGNEADGIAALAAFCREHGVELVVMEASGGYERLPFLILWEAGTACAIANARNVRYFAEAMGFLEKTDRIDAGMIAHYAQAKRLTPTPVPSAAQQRLKALVSRLSQVTGDLTIQKQRKSAASDAETIASLDEVIVLLKRQRRRLEGEIASLIDDDPLWARLDQAFRSFKGVASRTVARLMAELPEIGILSNKAIAKLAGLAPIADDSGKHNGRRKVRGGRVGPRNILFLVARLVARHDPHLNAFHQRLQAAGKPKMVIRVALAHKLLVKLNAKARDARIAFANAT

SEQ ID NO: 246838 - protein, 433 aa, unidentified
MDEVRDEPLHRDRVCGIDIGKAAMAATIRVPLDGDPSRRAAETRTFGTAKKDVLALADWLRCWQVPAVVMEATGDYWKPVFYRLEAEGLECVLADARQVRNLPGRPKRDPSDSRWLAACFERGAVAGCFVATPEFRVIREHTRYRRDLTGERTREKQRAEKLLESAAVKISSVLADVHGVTGRDIMDHLIAGERDPWVLSGLARGRARVRIRQLEEALEGAEFLTPELAALLKVMLGRIDRIDADIAALTAVIEALLAPYEEQLQQAESMPGWGRRAAQDVIAETGVDMTRFATPGHLASWAGRTPLDKQSGKRAGPARHKHGNRYIGAVTGETSAAAGKTQTREGARYRRISRKRGKAKANVALGNTQMRVLHVLLSNPGTRYHDLGPDYYERERNTARQVSHHVGMLGALGYEVTLCRRPDPDGTQDTQAA

SEQ ID NO: 246839 - protein, 412 aa, unidentified
MRVIIERCCGLDVHQETVVACLLIGAPGDRPTKEVRTFRTVTRDLEVLRDWLAAAGVTHVGMESTGVYWRPVYAVLEGHFDLIVGNARHIRNVPGRKTDVKDAEWIADLVRHGLIAKSFVPPRPLREMRELLRYRRKLTESQAAERNRLLKLLETANIKLASVMSDVFGVSGRAMLRALIEGRASVEAMADLARGQLRRKRSDLILALEGRMEEHHRFLLAAQLRRLEAIEQDIATLDLRITERLEPYRMPHALLMQIPGVDWLVAAVLIAEIGVDMSVFLSVHHLSAWAGVCPGSHESAGRQQSGRARKGNVHLRTILVGAAISAARTKGSYLKDKFHRLKARRGAMRAALAIAHKILVSAYHMLAKGLPYRDLGEAYLDQIGQTRTVANLKRRLERLGYHVTLERTTQAA

SEQ ID NO: 246840 - protein, 294 aa, unidentified
MPTRKLQNSDDFQGQKFYVGIDVHKKSWSVVVRSLGLLVDHFTQPPSVKALMTHLQRQFPGGEFYSAYEAGFSGTGLHEQLCKLGVKNILVHPGDIPRTDKEKKNKTDIHDSRSIAFNLEKGNLHGIFIMPKEQQEFRALFRLRQAKVKDMSRAINRLKGFLLYFGIDYSSNFEGYISAKVITWLRKLRLASEAGNLSLKKYIDDLVYQRAELAKVTKIIRSQAKKDYAHPYKCLLSVPGIGFTTAIGLLAEIGDFNRFKDPAEYCSFLGLIPWQHSSGDSIQDMPLKTVGMPL

SEQ ID NO: 246841 - protein, 324 aa, unidentified
MTKDRNYFGIDVSKDVIDICDDNGNHYQFKNSITGFKSLVNLLKENTVCVMEATGYYHLKLAYFLLEQNHHVSVVNPLKIKRYIQMQLSKIKTDKSDSKMIQAYGVACRPSLWFGQSKTQQDSLQLSRLLTIYVKQTTQLKNKIHGEEVLGFPSKEVVRSLNRQLKSLKKEIKLLEAKLLKNVKLEHQESLTLLKTIPGIGDKTALMLLVFTDGFNRFESSKELCSYAGITPVIRQSGTSVNGRSRMSKIGNPKLRNLLFMCSFNACKYNKACKALFDRIVAKGKSKKLALIAVCNKLLKQAFSIVKNGVPYNDEHRSTLAINN

SEQ ID NO: 246842 - protein, 337 aa, unidentified
MNTSTTVHNKTCHVGVDVSKEKLQIDAGDLFRGVIPNTPAEIAKHLKALQKKAAPHVCCEATGPYDRALVNTCHTLGLPVSRLNPARTASFREAMGIGAKTDKEDARVIRLFAETFAPATVPPPDKTRNMLRQLHLLRDALVAQHTVLSNLRATLDLPAVRKTLDAELRGLDARIEKLEAHIRTATDEAGPAFSGLVDALDGIKGVAMLTATKLAAHVPELGTLTRRRAASLVGLAPFPDESGPRDGPRHIRGGRKPARDALYMAALSASRHNDVLAGVYKRLMARGKHHNVALTAVMRKLFLYANLVAAQHLRSLESPAAGTPPGDASQGAPSTDA

SEQ ID NO: 246843 - protein, 426 aa, unidentified
MDLIYRSCAGLDVHKKSVQACVRQVSAGGQVHTETRLFGTMTRDILALGDWLAQWQVTHVAMESTGVFWKPIWNLLEGRFELVLCNAREVKQVPGRKTDVKDCQWLAQLMQYGLLKASFVPSRPLRELRDLTRQRVQLVNEHTATANRLQKVLEDANVKLSSVATDVLGVSGRDMIRALIAGEEDPARIADLARRRLRNKLPELTAALEGTVDDHHRWLLQMYYEHLTHLEEMIARFEARIDEMLQEPALNAACSGGDVLPFPDAVRLLTTIPGVDECLAEAILAETGTDMSRFPGPDNLCSWTGICPGNNESAGKRHSGRTTKGNRWLRRALTQAAWAASHTKDTYLSALFRRLAARRGKKRAVVAVAHSILVAVYYMLTRGETYQELGSDYLDRLHPERLARSLTKRLETLGFAVTLEPLQLAA

SEQ ID NO: 246844 - protein, 364 aa, unidentified
MKIIGCDFHPSFQQIAMVDTESGETTERRLLHADGEAQQFYESLSGPVLVGIETSGNTLWFERLLEKLGHQLRIGDATAIRAAAPRHQRCDPRDARNVLQLLLEKRFPTIWVPTLAERDLRQLLKHRHTLVQMRTRAKNQLQHIAMNQGMQKKRQLWSKAGLEQLKSLALEPWTKRRRDDLLKILEQMDSHIAELSKAVAAEAQHWPQAVLLMSHPGVGPIVALATVLTLGDVSRFARGKHVASYLGLIPREDSSGEHRRLGSITKQGNSFMRFLLVQAGMSAARGDAELGRVYKRLAQRKHHGVAKVAVARRLVLRLYWMLRTNRRYPEVVRMQGSSSHPVAEVKADRLSEHPASRCCTHPGL

SEQ ID NO: 246845 - protein, 320 aa, unidentified
MSKKKSKGFIGIDVSKNLLEVAAHESDYQFRCANKAQAFGELIVELIALRPALIVLEATGGLEIPVVAALHAAGLPVVVVNPRQVRDFAKALGQLAKTDRLDARVLAHFAAAIKPPLRPIKSADELELDALVGRRGQLVEMLTAEKNRRGSAATDTVRDEIKEHIDWLEDRIAELDQQLKAQLKNSTLWQGRDDILQSVPGIGPVVSYSLIADLPELGRLNRQKISKLVGVAPLNNDSGQQRGTRHIYGGRTRVRSMLYMAALTATRFNPVIKEFYERLLANKKLFKVAITACMRKLLCIINVMVRDSTLWKIKNDPVSA

SEQ ID NO: 246846 - protein, 352 aa, unidentified
MKKSNKKSAAVAAPQLVIGMDVSDKKSQLAILKGDRLRFDTVQNTRNALRLQFCSLPASRVALEAGTHSPWLSRELEALGHEVIVANPRKLALITQNVRKSDTRDAETLARLAKADPKLLSPIHHRGEDAQKALALIKVRDRLVSARTSLINCARGIVKPLAHVLPSCDAARFVKRVSEAMDAELAPILTPLLKSLVPINEQIKGLDREIELLAKDNIAARCVRQIHGVGPITALSFVMTIDDPARFAKSRDVGAYLGLTPARSQSGEEDPQMHISKQGDVMLRRLLVSCAQVVMKRNAPDSALKRFGTRLAQRGGKAAKKKAMVAVARKLAVLMHRLWVTGEVYEPKRGCK

SEQ ID NO: 246847 - protein, 363 aa, unidentified
MGEGICFAGLDVHARKTVAAAVQLGSGEVWKAQLPGSSTAAIEWLQSLPGPVRAVYEAGPTGFDLARAARAAGVEVMVCAPGAIPRQPGDRIKTDTRDALKLARLHAAGQLRAVLVPAPELEALRDLVRAREDLRGDLMRARHRIGKLLLRQGLLWAGPGAAWAQRHLQWLSKVRFEQPLQEVVFGEYLAHHEVLLARRERLDGLILEQSTQGPWAPTVARLRCLRGIDTLTAVGLIAEIGDIGAFSHPKQLASYLGLVPSEQSSGTKRRQGSITKAGSSHARRLLIEAAWHYRLTPRISLTLKRRQNAQPPAAIEAAWRAQLRLHRRWAHLDAGRAKKRTTVAVAVARELACFVWEIANQPD

SEQ ID NO: 246848 - protein, 412 aa, unidentified
MEVIVERPAALDVHNASVMACVRAPGDGRRRVEHVAEFHTTVQGLLALRDWLEAHEVDQVAMEATGVYWKPVWAVLEDRFSCLLVNARHVRQVPGRKTDVQDAQWLCQLLEAGLLRASLVPPKPVRTLRNLTRYRKSQIRDRQREMNRLHKVMQDTGIKLDCVATDMMGKSGRAMLDALVSGTTDPVVLADLARGQLRKKIPALREALQGRFDSEHSLVVGRILAHIDYLDEAIDELSGAIEEQLGPFAPAVELLCTIPGVGRRAAEVIIAETGGDMSVFPSAKHLASWAGMCPGNDESAGKRRSGKTRKGSKWLSQTLVECAKSANRTKNTYLAAQYARLRARRGANKATIAVCHSILTAVWHMLTTGETYTDPGGDFFARRDPERTRKRLVGQLERLGYTVTLKEEAAAA

SEQ ID NO: 246849 - protein, 424 aa, unidentified
MYNMKTSLSKNLAGQLEKVRTACVDISKASFTWATEERNEGMVPQKNKAVREWIRAQLEEARSYGYTGLRVVCESTSGYHKRLLRIARAEGCETALVSAEQVKAMQVVESNDTGKADWKDPRTMLLLVKLGKTLTDRQLTGEWAGLRELNVDYEHVERRGTQIKNRIHGMLLQLFPDLSFKKDWLFESDSARAVLTVYGFDPYAIVAAGQAAVRRTLRKLGVRKKTIERIFHDAQESILQPSEALWREIKAEQLRDAYADLSVVQHRRENLRSRMIALLEALQAKGEVKIKPQKGLIGPFLLARILAETGPLNDFENLAKLLRYAGMNLRPQQSGEHRGKERQAKRGRARLRAVLAQAVLKLVVRTELYGPYYHKKKAAGTPGAVAMTAVARKFLKLLFGLNRSEQAFDPARVFKCQNEYAKAA

SEQ ID NO: 246850 - protein, 381 aa, unidentified
MTTAVTHKTNVHTTEATLFVAFELSEKTWKLGFTIGHGQKPRERNVTARHHERVLDEISLAKHRLGLPETAPVVSCYEAGREGFWLHRFLLAHGITNHVVDSSAIEVSRRQRRAKSDGLDVRKLLSMLIRYEQGEHQVWQVVKVPSVEAEDQRHLHRDLETLKRERASTTTRIQGLLSSQGIQVSTLAKLPEQLDTLRLWDGTPIPPGLRRRVLRVYAHHTFLNEQIAAIEAERRAQLQTSSEASIDQIRQLMMLKGIGINGSWLLVMEFFGWRAFKNRREVGGLAGLTPTPYQSGESAREQGITKSGNPHVRWMITELAWSWLRFQPESALSVWFRERFGDGGKRLRRIGIVAVSRKLLIALWRFLETGVLPEGAVLKEG

SEQ ID NO: 246851 - protein, 344 aa, unidentified
MTKTPIAVLGIDLGKNSCSVAGLDMHGAVVLRRRMTRESLVAFASKLPACIVAMEACCGAHFLGRTFAAQGHTVRLMSPEYVQPYVKSQKTDDRDAEAIAEAATRPTMRFVTLKSEEQLDLQVLHRARERLIAARTRLTNQLRAVLLERGVILPKRRAPLRHRLHELMAGELPISPRVIRLLEDLRDEWASLDERIRAYDDELAALTRENQQARQLATIPGIGVINATAFLAAVGDGSAFAKGRDLAAWLGLTPRQHSTGGRTKLLGISKRGNKYLRTQLIHGARAALTHFAKTPTRIGAWTRQLLTRAHPNVVVVALAAKLARIVWAVLRHGRAFEHQGHAVS

SEQ ID NO: 246852 - protein, 375 aa, unidentified
MKNNNLLVSGIGESQASIEQKNSRLLKLGLDMHYRQVTVAIQEEDGRIKAVGKMGHEAFVSWLEKKRKEGWEIYSCYEAGASGYWLHRLLVEMGVKNLVVVPKAMDQAGQKQKTDRRDAGELCDALDRYLRGNGKALSAVAVPTVEQEEQRALIRYHRQIMADRSRYEARGKGLLCAQGIEVQGKWWQAKGWKELHHDPRLKDWMKEQLEGWRGKLLGAEQQQQKLRCRIEALAPAILPKGVGAYSAVVLEYEMKGLGRFKNARAVSSYTGLCPGIHSSDGRGKEGSINRCGNAVVRWNLVEMVWRLLKWQPDYEPVRQLAAGLVRSKRAKKRLVVKAARQLAIDLWRLRTGQTTPQKLSLVMQCNPMKSERASR

SEQ ID NO: 246853 - protein, 428 aa, unidentified
MPLSELRKRGRVMSSLVEIVYPTCCGIDVHKNFLVACIARTDERGHTTHLMKRFSTNTGDLRRLADWLATHNCKDVCMESTGKYWIPVFNILEKTCNVCLTHPKYVKAIKGKKTDKKDAKWISELFKCDLVRSSYIPPFDIRQLRDLCRYHAKLTYMVSSEKNRSQNCLTTCNFKLDAVFSDVFGKSASRILDSIITLGNSDFDIEPLLHKGCKASVEEIQAAIDGEFSFAQAEKLKIIRKHMESLESLKDTLENLIYKLADKYQTEITLLLSVPGIASPLTAIRIIAEIGNDMSVFETAKKLCSWAGVTPQNNESAGKKKTTRISRAGAYLKPLLVQIALAISKSAKHPEIRDKYQTLKKRRGHKKAVIAIARRLLTAIWHMLSNGELFNADAYQKADKPPSNRVLTPEQAFALLRSKGYQITDPAA

SEQ ID NO: 246854 - protein, 367 aa, unidentified
MSSVASAAGLIHLGMDTSKNTIVVATLLPGEDSPATDRIANEEAAIRRLVGRFADRSVLRAWYEAGPGGYELWRLLASMGVACQVVAPSLIPKGASDKVKTDKRDSRRLARLGRAGELTPVRVPSPAEEAVRDLVRARDAMLADRKRAQQRLTAVLMRHGRIWRGATYWTAAHRAWIAAQRYGEPALAAAVGYYRATLAVREAELAALEAELAPWAAREPLAGPVARLACYRGIAELSALVLAAEVVDWRRFPAARAFMGWTGLVPAEYSSGERTRRGHITKAGSEPVRTALTEAAWAYRHAPAIGAGLRRRQAGAGPDTLARSWKAQRRLHDRYVHLTHAGGKAAPEAATAVARELAGFAWAEMTA

SEQ ID NO: 246855 - protein, 358 aa, unidentified
MQSNKINFKGQNIFIGIDVHLNSWSVTTITPSGYKRQTSHRADALELYAYLTKNFPGGIYHAVYESGFCGYSCCYELRELGIDCVIVHAADVPSTQKSRLSKTDSNDSMRLAMSLSNGELNTIYIPPKEVLGDRDILRYRTIVQKGMSRTRSRIKHLLHTNGVSYPLDFREPYRHWTRRFIKWLREDVKLLSGKRLELDFLLEDLKHQRSQLLKATGKVRELSRTSRYAEDYGNLISIPGIGLITAMTMLIEVTDIHRFSSQKKFMSYVGLIPVMKDSGETIRQNEITPRGNQRIRRMLIESAWSAVRYDAQMAAAFGTFCRRMKKNRAIVRIARMLASRTYHILKTRTKYDTALCTA

SEQ ID NO: 246856 - protein, 385 aa, unidentified
MSQLNDLSRSLTSLEQDNAIIAVIEMSQSSWLVAGIVPGIERHPLKKLEPNEGELLRLLMRWRAEATKMGCTITRIAVAYEAGRDGFWLARWLRAHDIETYVIHPTSVAVSREHRRAKTDRLDTRLLKRVFIGWLRGEPDHCHMVTIPTLAEEDAKRPNREREGLVRERTRIVNRMKSCLARFGVRSFKPTLRKAPERLAMLVTPEGVPLPANTLLELRRDMARLRFIMDQIKEVEEARGQRLEQAPQEKSHAMVRMLARVIGVGIETADMLVHEILSRSLRDRRAVARYAGLTGAPDESGSRRQEKGLAKAGNARVRRGMIQLAWRFLLFQKDSALAQWYRTRTESAGKKRKTMIVALARKLLIALWRLVTIGEVPAGVVLRAA

SEQ ID NO: 246857 - protein, 417 aa, unidentified
MKAILACCSGLDVHRSTIAANLRRESSRGKKSIDEVRVFGTMTRDLLELCDWLKKAGCTHIAMESTGVFWKPVFNILVSEFEVILVNARHIKTVPGRKTDVEDCRWIAQLLQYGLLRASFIPPQPIRELRDLTRQRRRLIQEKTSVVNRIHKVLQDANIKLSSVLSDLMGKSGVDILENIVLGVTDPQSLADCAKGRLKAKREELILSLEGHVTDHHRFMLAQHLKQIRFIEQMDEIFSRQIEDKIKSQGEEFAALIPLLTTVSGIDQRSGEELLAEIGANMNQFPTSANLCSWAGMCPGNNESAGKRKSGKTTNGSRWLRATLGEIAWGAARTKNTYLSMQFKRIAKRRGKKKAIVAVGHTVLTTVYYIIKNRVSYHELGGDYYEKVLNRDPSKWYIKKLEKLGYKVAIEKKDNAA

SEQ ID NO: 246858 - protein, 441 aa, unidentified
MPTVAYLGLDISQADVSVCFLLGDGHEPGPRWTIPNSQPGGEQLSAGLAQLCHTHHVDELRIGLEATGLLWWHLACLLTNAAPLQPYCPQVYVLNPHLVTTFRRNYGALPKTDRADAFLIAERIRFGRQLPPPFQMDLRYAPLQRLTRFRFHLAHNLAREKSYFLSFLFLTFSSFGQVQPFGDPFGATSSAVLSELTTEDLAQQSLEELAAYLQAQGHGHFAEPAALAETLQRAARDAYRLDQVLAEPLRIVLSTTLANIRSLTQQLKTLDKTIAVELQAIPQTLGSVPGLGPVWTAGLIAELGDIQRFADDDAIAQFVGLTWPAHESGQFQAEDTPLSQRGNRYLRYYLVEAANSVRRHCPEYADYYAAKYAETPKHPHQRALVLTARKLVRLIDALLRSQALYRSPTERAASGTAPVSATRPAQRPQRQRRQRRAPAVT

SEQ ID NO: 246859 - protein, 319 aa, unidentified
MAQNDLAVVGVDVAKDKVDLCIRALALRQTCPNTAQGRRRLVGWLRKHQVGKAVMEASGGYEREWRKVLHDAGIEVRIVDPKRVRSFAQSAGRLAKNDTIDAEMIAWFAETFSETPSQTHDAAQEELAALVKARLALVELKVRLQSQSVHAASGPVKKAQARVLKTLATEIEKLELAISAKVRATSHLAERAEIIESVPGFAETTSAILVAGMPELGQVSDKIAAALVGIAPYDDDSGKRRGERHIKGGRRWVRNAIYMPCLGAATQNNPVTKAFYRRLIAKGKEPKVALVACMRKLICILNVLIARRQKWDATRYMLA

SEQ ID NO: 246860 - protein, 443 aa, unidentified
MMRIVVKRGAGLDVHKKTVVATRMRVNDDERMVWETQTFGTMTTDLLGLHDWLQEWECTHVAMESTADYWKPVFNILEGSFEVLLVNAQHVKHVPGRKTDAKDSEWLAELLIHGLLKPSFIPPKPQRALREMTRYRSTVVRDRARVVNRVQKQLEGMNIKLASVATDVMGASGRAMLAAIIADRLTPQEMAELARGRLRNKMPELEKALTGIVEPQQRKVLALQLEHIDFLDEQVEELSAEITRHLQGMDQPPPSGDGGVGSHASEETDGGELPAPMNYEEAITLLDTIPGVNQRVAETAVAELGVDMRRFATPEQASAWTGIAPGNNESGGKRYSGRTRKGNQALRSALIQAAWAAVRKKDTYLKAKYDHLVVRRGKKRAIVAVAHSILKSMWYMLAYHVPYQDLGGGYFDKRRQESKINYHLRQLQKLGYSVQIEPQLATG

SEQ ID NO: 246861 - protein, 454 aa, unidentified
MGKALPLQIVNPHAAGIDVGSRSYFVATDQVRENVRSFGICTKDQEELIQHLHDSGIRSVAMESTGTYWQTLFNALQKAGFEVLLVGGSQTKNVQGRKTDVLDCMWIQKLHSLGLLSGSFLLSDTLQELRTYYYHRQHLVEQISRYTHKMQKALRLMNIRLDVAIRDITGKSGLAIIEAILAGNRDPQHLASLVDVRMKKSKQQIAEALHGSWREELLFELKACLHFYRLYEEALRECDQAIESALMKHAPQVSISEPEEKALRQSKKKSSKNAPEFNIPRIAYQYFKTDLLAISGISHGTVLCLLTTMGRDLHRFPTAKSFASWLRLVPNNKISGGRIISSRTPSGKSFLAIALRQAANSIGNQKDHELTPFFKRIAFRKGRIAAITATARKLAVIIWNMVTKAEPYQKNEIKVSNEKSRRTRLRQVEKRIYALKLNQSELEKLFSKGSFLAT

SEQ ID NO: 246862 - protein, 408 aa, unidentified
MEVLYPRCAGLDLGKDTLVACVRIHGREVQQECRTFGMTTRELLALSDWLSTHAVTHVAMEATGTYWKAVWHLLETAFTLVLANAAHIKGVPGRKSDVNDAMWIADLLAHGLIRGSFVPPEPIQDVRDLTRTRTQLVREIAQHTQRIQKTLDIANLKITGLISDVLGVTGRSILRALIAGETDPVRLADLARGTLKAKRAALIEALTGRVTAHQCRLLKLHLHLIEQLEAAVAELDQQLGDALAPFRDAVTRLDAIPGINTIVAQAIIGEIGLDMTRFPTHEDLVSWACLCRRLNDSAGKRKSTRTRKGGGWLKTVLVQAAWAASRTKDSYLRAQFLRLRARRSPKKAAVAVAASMLTAIYYMLRDGTEYRDLGANYFDTLDHSHLTKRLVTRLEHLGYRVELRKVAA

SEQ ID NO: 246863 - protein, 412 aa, unidentified
MKDLLEISCGLDVHKERIVACILTGPLGKPTRSEIREFSTLIPDMIALRNWIVSKNCHHVAMESTGIYWMPIYEILEDAFSGDITLLVVNARHMKNVPGKKTDMRDSEWISTLLRAGLLNGSFIPEKRIREFRDLNRYRKSVIRDITSQKNRIEKFLQSSGFRLSSFISDIFGASGRNIILHLVEHGQIDKTALDSCLKTKTRNRIDEILMSVNGTLSEHQKAFLRILMTHYDSLKKHLAEIETSLEEDMAPFALQVEQLNSIYGISTTASCAIIAEIGIDMKPFKTAEHICSWAGLCPGNNESAGKRKSTSVTKGNPYIKSMLCEIAWVIAGKRNTYLSAWYWRIKQKKGAKKAIVALARKLLVIIYTMLKQGTLFDESCFETRRKHCEQKQLSRYIRELEKHGYHVEAQS

SEQ ID NO: 246864 - protein, 364 aa, unidentified
MKKHSKVPTNRSVKPEFTVGLDLGDKSSHYCILNSDGELMEEGKVRSTEAGLRKQFGDEPRMRIGLEAGTHSAWVERLLTELGHEVIVANPRKLRAITANESKNDRNDAEMLARLASCDPQLLSPIRHRGVDKQQDLNLVRTRAALVRARTMLINAVRGLVKSAGGRLRSCSSDSFADKARASVPPELRSACEPLLEQIAHMKLTIRAMDKQVEALEEKYPEIAILRTVPGVGPLVAACYVLTMDSPHLLHTNRQAGAFLGLRPRQSQSGESDPQNRISRTGNTYLRSLLVQSAQHVLGPFGPPSALRQWGLQLAGRGGKSAKRRAIIAVARKLAVMLYSMWRSGSKFEPFPQGSIQTAASVAA

SEQ ID NO: 246865 - protein, 341 aa, unidentified
MTLYIGVDIHARQQTLSYLETEDGTTGQLELQHERDDVKGFYRKLQGEVIVGIEACGYTNWFEELMEQLGHKLLVGDAAEIRRLARRRQKNDRRDADLLLELLVHNEFPALFRYSRESREVLRQLRYRHKLVKLRTMVANTLHALAINAGVSLRAKLLTKGGRQQLSTLQLSAISQQQRDELLSLADELTRRIQTVEQWLQTQARSDARVLRLQTHPGVGLLTSLCLVHTLGDLSRFSSTRKVAAYVGFDPMEDSSAERKAYGGISKAGSRLLRYLLVEAGQTAAKHDEHLKQFYQRLLPRRGKARAKVAVARKLLIRCFIMGRAEIDYAEFLRRGQKEAE

SEQ ID NO: 246866 - protein, 348 aa, unidentified
MESVAGLDVGVKKSALCVVTRDAASMRPVGRHRTATDPSSIGTWLASQGVVRVGLEAGAQSSWLARELEHRGFEVTVMEARRQRAFGAYSKVKTDERDARLIGEALATGLYTRVHVRSVWSQEARALLGARLQLKRQVQQARQFVRGHLRAIGVELGQVTGKKWLVAAEAAVTARGGVLGLSLTAMLEACHALGKQVSVLDKEIRRLVRQDAPCRRMMTAPGVGLLSALALRASLDDAERFGRSAEVGPYLGLTPSRWQTGKTDHRGPITKQGDSLVRAYLYEAATSLLERQKRDCPLRRWGLAQQERLGKRRTRVAVARKLAVLMHRLWRSGETFDWNRGMEARKIH

SEQ ID NO: 246867 - protein, 450 aa, unidentified
MGNASGVSRGDRNRNARLARLRSLVPVTNAIVGIDLADAKQMVVVTDHDSKVLARKTFRCRAWDLGAALGWAAERAAAKGFSGVTVACEPTGHRWRVLGQLAADRSMPFVCVQPMLSSWARRSEDLTSDKTDEKDAVLIARLTAQLRCYVPEPVDETWGRLRHLGARREQVIVEMVSQIQQMRALLECVWPAALDTAKQPFRSKTWVAAMSAICERDGGDLDRTRRLGPARFEQAVRREILKRGGQKPALRIARRLFAALTDPTGVIAHRPGALERVAFLLVDWHTAGDKLTDTEARMISVLGELKLTALATSIPGLSPVGAAAILAETGDPNRFASGRALVKHAGLAPREKLSGTFVGRTKLTGAGRPGLRLAAWRAVWGTQRGNTVYAARYRHLTSREQNKLTATQAQTVIAAAILRQLHAVITTGQAWDPDIATHGTGHRKQMPIAA

SEQ ID NO: 246868 - protein, 416 aa, unidentified
MSVALPEARFFTGIDWASAEHAVCVLDAAGKVTAQFTIKHSAEGIASLVRRLARYGDPADLPVAIERPSGRLVDLLLEAGHPVVPVSPNAIKTWREGEVLSGAKSDAGDAAVIAEYLRLRSHRLAPAVPYCDETRALRTVVRTRDDLVEMRVAATNQLSALLEAHWPGATAIFADVESPISLEFLTRYPTPAAARHLGEKRMAAFLVKHGYCGRKPAVQLLDRLRQAPPGSTGEALTEALRDAVLALVAVLRAVNGALKDLDRSVAAHLGEHPDGKIFTSLPRSGQINAAQMLAEWGDCRQAYAGPDSVAALAGVTPVTRQSGKHRGVEFRWACNKRFRRAVTTFADNSRHASPWAAQVYAQARASGKDHPHAIRILARAWIRVIWPCWVNGVPYDPARHGAAAALAKQGSSQPAA

SEQ ID NO: 246869 - protein, 353 aa, unidentified
MSKQVISTGKPAISDNKLTDPGQASVFCGIDVSRETLAVAVIARDQSIEQREFFNTIGGHKALLVWLGKRKALVRVSLEATGIYSLDLALALDATDGIEVAVLNPKMVNRFAQTLRRSKTDRADAQVLAEYSRRMPFQPWQRPRLMALQLRAVTRQIESLTVQHTREQNRLHASEGSEATPRCVIHDLRQSMAGLKRRIEKLRREAIKLLQGDDEMRLRFGLLIAMPGIGEVSALHLLGELATLAPEMKVRQWVAHSGLDPAHRESGSSVHKAARISRAGNRHLRRALYMPALTAVRWNPHLKAFYEALLARHKRKLQALMAVARKLLHAIYGIFKTRTPYDGKKLFPQLDIA

SEQ ID NO: 246870 - protein, 356 aa, unidentified
MRIIGCDLHARQQTLAMLDTVSGEVVNRTLMHEGKEVREFYSELPRPVLVGIEAIGPMQWFLNLLEELGIECQVGDATKIRAAEPRKQKHDRRDAELILKLLVEKRFPAIWMPSRELLDLRALLLHRHQWVRLRTQVQNALQAIALANGLRRGPSLWSYDGLAKIAFLPLPPHTSLRRSALQALYRHMDEEIEKLTVQVTEQAEHRSGARLLMTHPGVGPITALATDVFLGDPERFDDGKSLASYVGLIPQERSSGRRRRLGKISKQGNPLLRFLWTEAGVHVVRRDPELRRRKLVQKGMGKARVAVARKLGIRLWIMLRDQIDYEEFCRRGQKPSGAACAGMPGTGLVHDRRPVD

SEQ ID NO: 246871 - protein, 420 aa, unidentified
MKTLHQRCAGLDVHKQEVVACLRLVTQGRVHREVRRFPTTTRGLLELAAWLEAARCTIVAMEATGVYWKPVWHILDGSFELVLANAAHIKGVPGRKSDVNDATWIADLLAHGLIRASFVPPQPIQDLRDLTRTRKQLSREIVRHTQRLQAVLEEANVKLASVITDILGASGRRILKAMITGETDPSHLAELGSRRLGCSRDTLVEALDGRVRDHHRFLLDQHLKTIEQLEETMAAFDARIEAALAPFRDTVERLTQVPGLSTRAAEVVIAEIGLDMSRFPTAGHLLSWAGLVPALDESAGKRRSTRVTKGAPWLKPVLVQCAWAAANKKNSYFEAQFLRLKGRRGPKKAAVAVAASILTTVYHLLRDGTCYQDLATRTSARTTSLAAIRPAPLASSQTASAASVTSSKSGAPHDPSRSSF

SEQ ID NO: 246872 - protein, 348 aa, unidentified
MTMVGGFDVHRKQITFDYVDDDGLVRWGQIRPATRKTLRAWLGEHCPDGDGEFALEGCTGWRYVSEELAAAEVGVHLGDPAEIATLRGPKKRAKTDRADARLLRTLLLEGRFPESWIPPVQVLEIRTLGRLYCTLMDERRAWQQRIHAQLFHQGCPPIRALLSAAGRDALARVELSAAGRQYVDTALRRIDELTAEIGPLRTQLVNFARRQVGCQALQAHYGIGWLCAAIIWAEIGDARRFASSDQLVRFAGLDVTVYSSDGKRSPGHLSRQGSPELRWAAFEAAKCAARRSSPDYAYYHQLAAKRDGHNGKNPTLAVERKILRRCYHTLRELGDAALALPIPEEVAA

SEQ ID NO: 246873 - protein, 411 aa, unidentified
MTQAEYLVRVGIDWASESHQICILDKDGNRTEHPVPHTSAGLMALATELAALNPEDPGRVAVAIEVPRGPVVDTLLERGLHVFALNPKQLDRFRDRHTVAGAKDDRRDAFVLADSLRTDRPAFRRVQLDDPLIVELRELSRLDDDLREELSRLSNRLRAQLHRFCPETLALCPAADEPWFWALLDRAFPPPRPKPLSIKAVTAVLKVHQIRRLTVDTVHAALQVPPLRVAPGTIEAACTHIALLLPRLRLVHDQRHRTVGARIEKLLAELAKEDGEGKHRDVTILRSLPGVGRLVAATVLAEASRPLAERDYQTLRAQAGSAPVTRQSGKKATVSMRLACNRRLRNAVYHWARVSVQVDPRCREHYDRLRQGGHAHARALRGVVDRSIGVLVAMLITRTLYDPERRYPKAA

SEQ ID NO: 246874 - protein, 344 aa, unidentified
MQINSVGIDLGKTTFHLVVLGEAGKVLVRKKFNQRQLLTYTANLPTSLIGLEACSGAHFLGRALRKQGHEVRLIAAQFVKPFVKSNKNDFVDAEAIAEAVERKNMRFVPIKTDDQLDLQAIHRVRDRLISRRTAVINQLRAFLLERGLTFARTPAKLRNALPGILENPEVDLTTQMRNLIDLLWAEWKAVEDQIEGLSRELERISAADAGCTRLRRIPGIGPIVATAIVAAIGNGAAFRKGRDFAAWLGVVPRQYSTGGKTRLLGISKRGNVYLRKILIHGARAAVLRMKRDRAPIGAWLDALDARAPKNKVVVAMANKLARIAWAVLSSGEDYKPASNLVKAS

SEQ ID NO: 246875 - protein, 455 aa, unidentified
MARAKRSRGSSRLSPVHPDAAAIDVGATLHVAAVAPDRDKEPVRTFRTFTADLHSLADWFANCGVKTVVMESTGVYWLPVFEILEQRGFEVMVVNARDAKHVPGRKTDVSDAEWLQRLHEYGLLRPSFRPQADIAGLRAYLRQRERLLDYAASHIQHMQKALMQMNLQLHHVVTDITGVTGMAIIRAIVAGERDPQILASHRDRRCHASVETICQALVGNYRDEHVFALTQALELYDVYQTKVEACDKQMEVILKRLRQSALPSKTKLASARRRTQQPNALGFDARAALHAILGVDLTDIGGLGPYLALKLVGECGTTLAAWPTAKHFTSWLALAPHNKISGGKVLSSKTRRTSNRAASLLRLAAGTVGRTDTALGSFYRRLSARVGKAKATTATARKIAVLFYNTLRHGMSYADPGASYYEERYRQRVLHNLRRRAKALGFVLQEQNAAQPVVS

SEQ ID NO: 246876 - protein, 413 aa, unidentified
MSVTQQGVPARVCAGVDWAKDDHAIAIIDPSGEVLDRFAVTHNAAGLKSLVRRLLKAGVDEVGIERGDGPVVEALIQAEFTVLVIPPGQLKNLRSRYGSAGNKDDRYDAYILADVVRTDRRRLRPLVRDSAATTALRTTVRARRDLIEHRVAAANQLRAHLQIVFPGATSIFAAIDSAISLTFLERFTTQAKADWLSPKRLGAWLSSVSYSGRTDPEILHTRLLAAPQGTTGAEAEIHTVTTLAFVAILRSLNTQIEALAASIGEQLAIHPDAHIVTSLPRSGTVRAARLLAEIGDARGRFPTAESLACLAGVAPSTRQSGKVKAVTFRWGANKELRDAVCDFAGDSRHANPWAADLYAKARARGHDHPHAVRILARAWIHIIWRAWQDNVAYDPTKHGALQALLNNTTEKAA

SEQ ID NO: 246877 - protein, 345 aa, unidentified
MAMVHYVGLDVSLKQTSICVVDEAGSLVREGVVDSDPEIIASFVRSKAPGAVRIGLETGPTTTWLWTELKRLGLPVICIDARHTKAVLKMQINKTDRNDAAGIARIMQTGWFKEVHVKDIDSHLVKALLVSRALLVKIKRDLENQIRGLLKNLGLIIGRAKFNVFGARAEELIEDRPELVAVIRPLLAARKAVEEQVDDLDRRALKLARQDVQVRRFMTVPGVGPITALCFKATIDDPARFNRSRSVGAYVGLTTRRHASGEVDWSGRISKCGDAMLRMYLFEAAGVLLTRVPKWSTLKAWGMRLAKRHGLRKAKVAVARKLAVILHRMWIDGTEFNWGKKEATA

SEQ ID NO: 246878 - protein, 369 aa, unidentified
MEDCRTAFVGIDVAKARNAIAIAEGGRGGEVRYFGEVEATLDNMRRIVRRIASKYDRVEFCYEAGPTGYGLHRMIMSLGYGCVVVAPSLIPRKPGDRVKTNRRDAMALAKLLRADELTAVWVPDESHEAMRDLIRARAAAVETLGIHKQQVGAFMLKHGRVYPRKKAWSMRYLRWLQEQKFDHPTHQIALQEGVEAVRIAKERVERLEKNIEEFLPAWSLALVVRALQTLRGVDLIVAATFVAEVGDVRRVESPRQLMGYLGLVPGERSSGDTVRRGGITKAGSSRVRQMLVESAWTYRFPPRVGKMKLYRLEEEPPKVREITWKAQTRLTARYRALTARGKKATVVCTAIARELAGFMWSAAREAQTA

SEQ ID NO: 246879 - protein, 506 aa, unidentified
MQKDLHNKQPRLSELIRNPDSVIEDFDTIPDDDIEYVKEYGIGIDCHSRFIEVCVRYRNGKLINKAQGRFSTDWTSLVAAREWCINILSTKADPVPDLSEPLHYLVESTASYHMPVCMAFNGNPTIINPTIAGATKRKTDVLDSRLLALHDQINIWSECYMPSEDVKTLRILIDQRERFIHDANAAGNRINNIITRFGFTVGRSGSVVKDPMIRAIVEDQISDDPSSIEGLCPIPIPLEVRMVLRNEYEKYDYFTARANECKSRIFQKARSMEWETDTTRIPGDEMIRILATAPQIGELTAVLWLARVITPRRFRNAKALSAYCGLDPSLKISAGKVTSTVKRGGNKPLHKALNMCAHRLIHRHNEMFGIWGYNLQQQTGKKKKAANAVARKLSVAMYYMMKTGSEFTYDNYHSIRNIDVFDIPVEDLVLINGDFKRYIRILKENDIYTTTDLATAYISCSLGSCHGLGKKFFGLLKDFLDHHVTYKEMYDDIKSKLNHKEETVYE

SEQ ID NO: 246880 - protein, 365 aa, unidentified
MNKCHSNTELSSHEGTRSQFNGGKCAIKLGIDVHQEFYVVVMQEGGANPKPPQRFQKEAFLQWAGRLKQKSGAEVYAVYEACGFGFTLQRNLSALSIHCYVICPQKLDEQNRRVKTDGLDAKALCLKLDRFVQGNRAALAIVRVPSEAEERSRAIHRQREQLVGARKRLEAQGRSLMVNHGFEPVQNWWKPRPFAALEVPQWMRELLSNSQPILVALQQKIAALSVQLQCAAAPEQPRGLGKMTSVVLDREIGDWNRFSNRRQIASYTGLCPGEYSSGNTRLQSCVTKHGNPRLRAALVELAWRLVRFQPNYKPVLKWRAILAKGALATGAARKKAIVAVARQLAVDLWRIKTGRLRPEELGLIN

SEQ ID NO: 246881 - protein, 328 aa, unidentified
MVIIGCDLHSRYQVIAMLDTETGEIGTRRLEHEGGEAERFYRGLEKPALIGIEATGYTQWFERLGQELWVGDPAEIRARAVRRQKTDTRDAEHLLELLINKRFPRVWVPTPEERDFRQLLKHRDKLVKMQTSVRNQLHFLAMSQGVCRKRRLWSTRGRRELEGLRLGPWASRRRQELADLLDGLGPRIEELDGAVKAEALRRAEAVRLMEQQGVGPVTALAFVLTVGPVERFPSSRKLVSYLGLNPREDSSGGHQRLGHISKQGNEMLRWLLVEAGHTAARLDPELRRVYQRLKFRRGGRVAKVAIARRLAVRLYWSLRRSAAGSHVQ

SEQ ID NO: 246882 - protein, 341 aa, unidentified
MKKFIRIGVDLAKNYFQIHALASEGGDAVTRKLTRVKMREFFSQIEPGLIGMEACGSAHYWARELKAMGHEVLLMPPAYTKPYVKRGKNDAVDAEAICEAMSRPGMRFVPIKSAEQQAMLMLHKTRELLVKQRTMSVNALRGHLSEFGIIAAKGIGRVDELLDLAESDATLPAAAKTGVKVLAQTLEGLDKAIDDLEDEIASAHAQNEMSQLLCKVPGIGKLIASVIAASVPDPSVFKSGRDFAAWLGLTPRQNSSGGKQTLGAITKQGNRYIRRLLVLGATSLLHVVSKRKGALRDWIVALLAKKPARLVTVALANKLARILWAMMKTGECFRTEMFAKA

SEQ ID NO: 246883 - protein, 347 aa, unidentified
MNHYAGLDVSLEETAICMVDSTGQIVKEARAASEPETLIAALREIDLPLERVGLEACSLTAWLHDELHSAGLPAVCIETRHANAAMKTMPNKTDRNDARALAQIMRTGWYRQVHVKSRQCRLWRSLLVARRTVLNEMRSIENVVRAVLREGGLKLGTPSRAAFAERVRDLMAEDASVKPLVDPLLTILVTMLDQFARLTKQVLDIVRREKVCRRLMSVPGVGPITALAFRATIDRPDRFRRSRDVGAHLGLTPARYQSGETDVSGRISRCGDELARTALYEAAHTLLVRSRKWSSLRAWGMKVAKTRGMARARVAVARKLAVILHRMWSDETEFRFGRNPAAALAAA

SEQ ID NO: 246884 - protein, 350 aa, unidentified
MSQYIGVDIHRKFSQVCVMEKDGQVVQQVRLDHDNPAGVEEFFGDVAEGSQVTMEATCGWMWLSDLLEELGHEVHLAHPAGVALIAQSRLKTDKVDARALAQLLRTGFLPEAYRAPGAVRDQRLLLRYRQALVAIRTGLKNRVHALLMRYNVHLEQSDIFGAKGTPLLRGLDLPDAGRRVLDGYLDCIEFLNEKIAQHERHLGEVLESDARVELLRSLPGVGRLTAYFLVAEIGEIERFASAKKLVSYCGLCPSTRASARMLVHGRTGPAGRSLLKWSLVEAAHTAVRRDSHFAKVFHRIARKRGNQKAYVAVARKMAQMIWRMMVEQRPYEAKRKQSRVGSTHPVVVRS

SEQ ID NO: 246885 - protein, 343 aa, unidentified
MIYIGMDVSSKEFFIHAIDQRQQKIFEGKISPSCAGLRKLVKDLGVGPKLFVFEAGNQMKWIALMLMKQEGVRIHVVHPNEIKWINQSSGKTDKVDARKMAQLARGNLLPRQVHVVEGKARQLRELVSVRGQLQSKRVALINTVRGYMKQEGVGLPEKFFQRSDWKSALGEKSLGDTQKLIVRSFMDGIDAMERSEGEITEKMTEIRDSRCELLETIPAIGKIASRVLVGALDDANRFDNKKCVANYGGLAPTIYQSGDTTNLGRINRDGRREVRKVLLQCAHTIQRMVSHDAAPVREFFERIEKRRGKKRAVVATARKLLTIAYGVLKSGVPYDPMRLRAFA

SEQ ID NO: 246886 - protein, 414 aa, unidentified
MSYKTAGIDVHKKVLMVVVLDASTPEEKPERRRFATMPSELRRLSIWLREQGVEEGVMESTAQYWRSVWLELEPYMRWHLAQAFSNRAPRGRKHDFKDAERLVRRLIANELILSFVPGGEQRIWRNLTRMKTQLTRDRVRLQSQMECLLEEMRIKLSIVVSNLLGASGLRILRALAEGETDPRKLAELGEQRLPCSEEQLVDALTGRPHPTQRDMLALQLERLQLIDRQIAKLNGMIAQAMKAHQDAVMRLAEVPGLGVDSAQQVIAEVRVKASTFPSAAGLTSWVGTCPGKEESAEENHNSRSAKGNRYLRRVLNQAAHAAVKKNGSHFQVVFRRLLPRLGYQSAVWAIAHRLCRVVWKILHEGVQYIEQGREPDPQAKKRHARRLAQALRKLGHKVAITPINLATTENGMQM

SEQ ID NO: 246887 - protein, 430 aa, unidentified
MKSNTQNAKIEAITEKTLVLGIDVGSEMHYARAFDYRGIEYSKKPFKFSNTEAGFVTFKEWILDLKERHEKDKVVPGMEPTGHYWFNLGKFLQDNEMKPVLVNPHHVKKSKELDDNNPTKNDRKDPKVIAGLVREGRYMIPYLPDGVYADLRTASNIRFQLQAELTRIQNRISRWFNIYFPEYKTVYGKPDAKSGMLILKAAPLPEDILTLGIDGVNQIWRDAKLRAVGKARAKTLIEAAEHSVGSKEGAVSARMEIRMLLEDYESRNIRLQEVMGLIEGLVNQIPMAEKLLEIKGVGIKTVSGFLAEVGDIRRFNDPKELQKLAGLALVENSSGKHKGKITISRRGRKRLRYLLFEVAMSLVAKNPEFRELHNYYTTRRLNPLKKMQSLMAIAAKLLRVFYAILTKGVGYDPKKMVNDIRRPAAYAQAA

SEQ ID NO: 246888 - protein, 365 aa, unidentified
MNATAALPVVGIDVAKSVFQLAVADGAWRVIEEHRLTRTQMERWFANRAVGLVVMEACGSAHHWGRWLNALGIEVRLLPALYVRAYVKRNKTDAADACALIEAARCADIVPVKIKSIEQQALQGLHRARSLWMGTRTSRINALRGFCREFGIDIAQGARLGVERIERVLADPHSAVPELIRGTMKLLVEEIRLLEARTAQLERELTILARQSPTCTTLLSIPGVGLLTATAMVAATSGSVQHFKDARHFASWFGLTPKERSSGTTRMLGRISKRGDRYLRMLLTHGARSVLHAAHRATLAGKQLDPLRQWALGVQGRTNHNKAACALANKLARICYATLRDAQPYGEPVRRPNKKIERTSFALAA

SEQ ID NO: 246889 - protein, 362 aa, unidentified
MLYLAIDQHSKQLTVNLRDEAGDVRLRRQVSIKRPGMEEFGQQLAAYHEPYVAIVEVCGFNDWLLQWLPQHGCQEIVLVQPGHRSKKKTDYRDANALGELLWINRQRLLGGQRVHGLRRVQISSPQDQADRQLTALRHVAACRKTRCTNRIHHLLRRYNFEQDCPTKGMHTIKARKWLRQLSLPILDRLELNQQLDQWDLCLLQLADLDAQIAERHAQSKSAQRLTTLMGFGAYSALALAARIGDISRFQRPRSLANYFGLTPGCRNSGDVKQRLGSITKEGSALARFLLGQMVVHLLKRDAWMRAWYLRIKKRRGSKIARVAVMRRMTTIIWHMLTHDEPYQPGGGGRTRARRQAQRVQPA

SEQ ID NO: 246890 - protein, 372 aa, unidentified
MGDNSVAYVGFDTAKLRHAVAIAEDGRSGEVRFLGEIESGEAATVKLVKKLASRYRHLTFCYEAGPIGYELYRLIKRLGHECIVVAPSLIPRKPGDRVKTNRRDALSLAKLLRAGELTAVWVPDARHEAMRDLTRAREAAVEDLTSKRQQVLSLLLRLGRCYAGKRNWTRMHMNWLASQKLDHAEQRIAFEEMLLAVREAQQRVARLEQAIRAALPDWSLAEVVTALMAMRGFDVVSASAFLAEMGDLSRFPTARDLMGYLGLVPSEQSTGEKVKRAGITKAGNRRARRILVECSWSYRHPPRLGKEKLSKVAAAPRDVREIAWKAQHRLTARYRALTRNGKKPTVAVTAIARELSGFIWAINRAVRPTTSG

SEQ ID NO: 246891 - protein, 403 aa, unidentified
MRTIGMDIHRSFAQVAILEDGAITRQLRVELVHEPLVAFAKTLRLDDEVVIEVTGNSAAVERLLRPDEPWVAVANPRLVRAIAYARVKTDKVDAATLAQLHAAGFLPEVWVADDDTYGRRRQIAERAGVLAQVVRIKGRMKAILHANLIPPYKGHLFGKAGQRWLDGLPLPAEERAMLQRLIEELERVSHQLSEIDKALAQQALDDPRALRLMTIPGVSSVVASTVLASIGDIARFPSPDKLSSYFGLTPRVRQSGDHPARHGRISKQGNGDARRMLVEAAWSAKTAPGPMRAFFNRMQKKHGAAAAAVATVATARKLAVMIWHILTSGKGYAYARPAFTAMKMRKVALKAGAPRAYGKAGPGRDYWIKEIREREAGYVARAEQAYERMVAAWKTAPKKNATG

SEQ ID NO: 246892 - protein, 363 aa, unidentified
MNGGEQRMAVYVGIDVHKKYCQAAVMNDNGNVVRELRFDNTSEGATSLVNLARSVDPHVKAVVEPSANFWIRIYDRLEDEGVEVKLSNPLRTKAIAEARIKTDRIDAKTLATLLRGDLVAESYVPTRKNRERRALIRHRASLIQMRVDIKNRIHALLDKHEHTNNYSDLFGKQALEWLRNLQLPTPDHEILQSNLQIIETLNQQIRIMDIQIAKDAVTEDQAKLLMTMPGVDYYAAMVLLSEIGDVKRFSSDEKLVSWIGLAPQVHQSGETSWTGHITRKGSKRARWILGQCAQSARQHDPRMREFYERIEHKHGPSKAIVAVARKMLAIMYVMLIRNEPYHGENRKLTEQKHKRLNNIANTA

SEQ ID NO: 246893 - protein, 342 aa, unidentified
MYYIGLDVHKKTISYCVKEASGQVHREGTIGANRNELDWWMKTLPQPWTVAMEATIFTGWIYDHLLPHAAQVKVAHSVMLRAIALAKKKNDRIDAGKIADCLRCDFLPECHMASTEIRDRRRSLRYRHLLVRQMVQMKNRVSGLLLETGVSHNKQRLHKVRYFQELISNQEEVPESIRPLLKLSRETIVRCQKTEYALVSSLERDPLLAERIKRLRTVPGVGPITALSWALEIGDVSRFRSIKQAISYCGLCGDEKSSADKVLRTPLSKQRNKHVQSVLIEAAKLAPRHSSELALIHEREKQKGNANRATLAVARKMVAYLLAVDRRGKDFVPSEQRSTAAA

SEQ ID NO: 246894 - protein, 426 aa, unidentified
MITVVLENCAGLDVHRDSVVACVMWGAAHAEAQWEIQRFGTTVPELLQLKTWLREHGCQHVVMESTGAYWEPIFNILEDELTVQLANPREVKNRRGHKTDKKDAWWLAHLFRHDMIRPSYLPPRAVRELRLLTRRRREVIRDAAQEKNRLQKLLEQTNIKLRGVLSDVFGASGQAMLEALILRGEGDPAKLAALAQGTARKKTAEIAAALEGHRVPDTHHFLMRQTMQHLAILVQQIETLDAEILRKIQAEGFQKSFQLLQTIPGIREVGAAEALAEVGPNVDAFPSPAHLSSWAGVCPGNDESAGKRHSRRTTKGNPYFRAMLNQSAWASSRKKGSSFEARYQRLTPSIEHKGAIIAVAHALAYAIYEVLAHQTPYRPPATQVLDRNKTARLIRHHSRRLRTLRAWLPKAPAPSEYGRILRRLQE

SEQ ID NO: 246895 - protein, 342 aa, unidentified
MEQYVALDVSLKEISVCIVDSNGEVVFEGKTAAEPAILVELIRSKAPQVTRVGLETGATSPWLFHALASAGLPVVCMDARHAHAALSIRPTKSDRSDARGLADMLRMGWYREVHAKSVTSHERRTILGARHQLVTMRSELDAQIRGILKTFGLILGTGNKDTLIQRAEKLAAGHPVMSGLVAKLAEVRRHVTSQIAAIDRDIRHLVHTEPTLKRLMSVPGVGPITALAFLSAVDDPRRFKHARDVGPYLGLTPTRYQSGETDRQGRISKCGDTFTRTCLYEAAHVLLTRVQRFSPLKAWGMRLAKRIGGRKARIAVARKIAVILHCIWTDGTEFWWTREKAA

SEQ ID NO: 246896 - protein, 447 aa, unidentified
MATKRAHAPKNQRAVLNRINYNVAGIDLSSEDMFIAVIEKNVCQFSTFTKGLEDAVVYLKSEGIEKIVMEATGVYWIPVFEYFEKQGFNINLVNGAHAKNVPGRKTDVLDSEWLRELHTYGLLRASFIPDEKIRELRYYVRLRDDHISMGATHINIVQKNLDMMNIKLHKVIDSIMSVSGLLIVQAILDGERDPERLWSLCERNIDNKKKDGLICSLKGNYREEYLFGIKQALEMWQHYQELQKQCDAEIEKILRKMTSDIEEPKNLGTEKPIKKRNKPVIEDFHLLMTKLTLGKDTTAIAGINDYSALKIIAEIGTNLDKFKNEKHFTSWLGLSPSAHQSNKKKRKKGRRHCNRAGMIFRQIAVNVGNGKHTALSSFYKRIRARAGKMVAIKATARKIAIYFYNLLNKGVQFVEEGIRRYEQRYTEQQEKYLQRKASEMGYMLVKA

SEQ ID NO: 246897 - protein, 412 aa, unidentified
MKDLLEISCGLDIHKEKIVACILTGPLGKPTHSEIREFTTLIPDMLALRDWIISENCHHIAMESTGIYWIPIYEILEDAFSGDITLLVVNARHMKNVPGKKTYIRDSEWISTLLRAGLLNASFIPEKRIREFRDLNRYRKSIIRDITSQKNRVEKFLQSSGFRLSSFISDIFGASGRNIILHLMEHGQIDKISLDSYLKTKTRKRIDEILMSVNGTLSEHQKSFLKILMCHYDSMKEHLIEIETHLQEDMLPFALQIEQLNTIYGISTTASCAIIAEIGTDMKPFKTAEHICSWAGLCPGNNESAGKRKSTSITKGNPYIKSMLCEIAWVIAGKRNTYLSAWYWRIKQKKGARKAIVALARKLLVIIYTMLKQGTNFDENCFEVRRKNCEQKQLSRYIRELEKHGYTVEAQV

SEQ ID NO: 246898 - protein, 421 aa, unidentified
MTPTSHTTFAAFVGIDWADAKHDGCLQAAGSAKRECFQLEHTPEAIDAWVTTLRTRFHGHPVALCLELTKGPLVSALRKYDFLVLFPINPLTLARYREAFTPSRAKDDPTDAELQLELLLTHRDKLQPLQPQSPTMRALAQLVEHRRRVVGDKVRITNRLTSALKNYFPQVLHWFQDKDTRIFCDFLSRWPTLKAAQLARRSTLETFFRDHHVRTADVLATRLHAIKTATPLTTDEGIIAPNVLLVQTLVSQLRVTLDAIEAFDQAIAQRALHHPDFPLFQALPGAGPVFASRLLVAFGEQRERYASAAELQKYAGIAPVTERSGKKAWVHWRLQCPKFLRQTFVEWSAESIRHSFWAQVYYQQQRDKGNTHQAAVRALAFKWIRILYRCWQERTPYDESTYLQALMRRNSSLIPNRAKVS

SEQ ID NO: 246899 - protein, 330 aa, unidentified
MSVFVGVDIAAKSFDLVSREAGKSSRVHQFSQTPQGHAKAIEQLRVLQPVLIVMEATGIYYLDLAVALADAGLPVAVINPKSFRHFAALKLTGSKTDAIDAALLAEYAERMEPKLWTPPSKERLALRDIGRQINRLTATRTQAKNRLHALQATRQTMPLLIEDEQEGIEWLTRRIQRLTQAAQALIAQDEALSRQLSHLLAAKGIGETSALAILAELSVLPADLKAPQVSRYAGLDVRLTQSGSSVQRPARLSKAGNAYLRAALYMPAMSAAQHDPRAKAFYEALVSRGKKKIQAQCAVMRKYLTGLWACIQTDTAFDSTRLFSEEHMKS

SEQ ID NO: 246900 - protein, 365 aa, unidentified
MQKAELSCEADSENYLGGSSETMYYIGLDVHKKTISYCVKDASGKVYQEGKIGSTRRELDGWIKTLPQPRTIAMEATIFTGWIYDHLLPHAEKVKVAHPLMLRAIAAAKRKNDKIDASKIADCLRCNFLPECHMASTEIRDRRRTLRYRGLLVKQMVQMKNRISGLLLEKGVTHTKRRLHKVGYFAELMAGNKEIDQSIRPLLKLSREHIVRAQKLDYALVSSLERDPLLVERLKRLRTVPGVGPITALTWALEIGDVARFRSIKQAISYCGLCGAEKSSADKMLRTPISKQRNKHIQHVLVEAAKLAPRQCHELALIYEKEMQKGNRNRATLAVARKIVAYLLAVERRQQDFVPTEEFGGTAAA

SEQ ID NO: 246901 - protein, 456 aa, unidentified
MKIPQSTIRLLTGRLVKILLNREVSTMKSNTQNAKIEAITEKTLVLGIDVGSETHYARAFDYRGIEYSKKPFKFSNTEAGFVTFKEWILDLKDRHKKDKVVPGMEPTGHYWFNLGKFLQDNEMKPVLVNPHHVKKSKELDDNNPTKNDRKDPKVIAGLVREGRYMIPYLPDGVYADLRTASNIRFQLQAELTRIQNRISRWFNIYFPEYKTVYGKPDAKSGMLILKAAPLPEDILTLGIDGVNQIWRDAKLRAVGKARAKTLIEAAEHSVGSKEGAVSARMEIRMLLEDYESRNTRLQEVMVLIEELVKGIPMAEKLLEIKGVGIRTVSGFLAEVGDISRFNNPKELQKLAGLALVENSSGKHKGETTISRRGRKRLRYLLFEAAMSLVAKNPEFRELHNYYTTRRLNPLKKMQSLMVIAAKLIRVFYAMLTKGADYDPKKMVSDIKRPAVYLQAV

SEQ ID NO: 246902 - protein, 421 aa, unidentified
MKVLRAKRLRMVRESTLIATVDIGIANNTGYCTTLDGRSIKSFSFDNTKQGFEKFWYMTVASKNRFGCDEVLVGYESTGPYAEPLVHYLAHKQVKIVQVNPMHMKKMKEVSDNSPLKTDDKDPRVIADIIRLGRALTIVVPEGDAASLRRLNNARERHVGEQTALLNQLQQLVFLIFPEFKTVLKNMKGKTAQYILKRYTTPERIGTLSKEALGEEMRKRSMGKFGIKEAESLIGLARETVGIKEGIAGIFMDIRHILMQLEAEGQFISEIEGEMRTTLERIPYSGRLLSIKGLGTVSVAGLIGEVGEFSKFSTQSEIMKLAGLDLYEISSGKRKGQRRISKRGRSLLRKILFYAAIQMIRKNGIMYDYYVRLTGRGMERMRALIAVSRKLLRIIHAIVRDNRDYVGQYQTPERRVLKEAA

SEQ ID NO: 246903 - protein, 338 aa, unidentified
MKLYGGIDLHSNNSVIALSDEEDKIVYRRRLANDLELVLGEIEPYGDAIEGLVVESTYNWYWLVDGLMEAGYRVHLANTAAIVQYRGLKYADDDSDACWLAKLLRLGLLPEGYIYPKEQRPVRDLLRKRSQLVQQRTSNLQSVQNLLARNRGCSLGANQVKRLSYEDVDRLLPEPDLALAVKSNLAVMGTLDDMISALEKAAKARGRLRPAFKPLLTVSGIGQILGLTIMLETGEIERFAKVGNYASYCRCVGSERLSNGKRKGRGNTKNGNRYLAWAYIEAANFAVRYNPQIKRYYQRKRARSNGIVAIKTVAHKLARACYYILRDQVSFDVNKAFT

SEQ ID NO: 246904 - protein, 426 aa, unidentified
MWDAKRRVLKIKSLKHGIIQDKRGNVMRAVFGIDVSKTSSEVAILVNGEKVHGYTILNDAIGFNRLLGDLKTVHNPEIIFEATGVYSRRLQAFLEEYGYAYTRLNPLEAKKQLDSLRVRKTDKIDAEKLAKSQLVHNRKPTYVQEEVYQHLRDLSRFYQNLTEDLVRAKNRLHKVLQITFPELENLLSTPTGEQYWNLVMAFPCKEFVLRLSQSDLCEIIRQSTSKRISEKRIAYLTDKLIKLAKQSFCAVKKNSPMLEEVRYYAQELLRLSERRQVVLNDMVALAQPLPEYDILRSIPGIAETTATSIIGELGDIRRFQSSNQINAFIGIDLRHYESGNFLAKEHITKRGNPYARKILFKCIHNIASASHTNPCHIADFYEKRKRQSTIASTKPHTIASIHRLIRTMYYLITHNKLYDYTSTQNR

SEQ ID NO: 246905 - protein, 411 aa, unidentified
MKVVHEICCGIDVHAKMLVACLIAANGEKKIRTFSTMTAELLQLRDWLVAAKCTHVAIESTGVYWKPVFNILEDPLAVILINPEHARALRGRKTDVKDAEWLADLLRHGLLKASFIPPGEIRELRELTRYRESLVREQSGVANRVQKLLESGNIKLGQVASDALGVSGRAIIKALAKGENDPRKLAALARGKLKEKSLSLERSLEGRLTVNQRYVLGELVKRWEELEAADARVTSEIDKYVQARPKLARAREILDGIPGIGLRVAEVIIAELGITMAVFGDAAHLASWAGLCPGNKATGGKRMSGRTRKGNTYLRAALVQAAWGVTMKKNCYLSSQYFRLLKRLGRKKALVAVAHSLLVIIFHVLQSDQTYTELGGDYFDRHHVEQQREYYLRRLQMLGLKVTVEELPTAA

SEQ ID NO: 246906 - protein, 337 aa, unidentified
MSYLGVDLHTNSFTVCYRSSKGTERIATFEVRRIGQFRKTLRKHDELAVEATGNTAWFVERISDRVSRVVVVNPHQFKVIRKSVKKTDKHDAKTLAFFLSKDMLPEARMKSKENAQLHSLAGTRDKLVKQRTALINKIHNILNGHGMKYKKETLSTDKHLKIVLSFDWDVIVRVELEVLAEQIRSLTKSIKKLDEQMSEHGKNLKGHKNIASIKGIGERSATVLLSVIDDVNDFADEDKLAAYFGMVPRVSDSNETVHHGRITKNGSKIGRTTLVQCTLVAKRYSPYLRQYYERIKRHRGSGKAIIATARKLLGIIYQTLKNDWIFEDFPNFVIANT

SEQ ID NO: 246907 - protein, 321 aa, unidentified
MTATDTQAAGERAVGIDVSATTLDVAVHGGRGWQAENAAGGIAALVAALDALHPAVIVLEATGVYHQAVTSALAAAGLPVVVVNPRQVRDFARSTGQLAKTDRLDAAVLAQFAAVVRPTPRPLPDDALLELRALLERRRQLVEMLTAEKNRLAVARRSVRPSLQRVMRTLERALAEADDDIGQWLRRSPVWRAQEALLRSVPGVGPQTARSLIAQLPELGRLTRREIAALVGVAPLARDSGTLRGRRTCWGGRAPVRAALYMAVISGIRCNPVLRACYQRLRAAGKPAKLALTACIRRLLTIINAMLKTQQRWQPTQAATA

SEQ ID NO: 246908 - protein, 423 aa, unidentified
MKVTFLTCCGVDVHKSFLVATIIKTTGGIDPSYLKKRFSTFNNSILEFKQWLLDNDCHDVCMESTGKYWIPVFNLLEDEINVTIANPKWVKAVKGNKDDTKDSKWIGDLFRLGLVKGSYVPCKAIRILREYTRYRYKLVSCRSSEKNRYQNALTVCNVALDSVVSDIFGKSSTSIIDYLLEQPGTSVNHEEIASKLLKSLKSKEDAVIESIEGYQMTDSQKYRMRLIRTHMDYITAEINDIDSSIEKMISSNPDYENAVRLLCTIPGVKRDSAIAIISEIGTDMPQFCNSKRLCCWAGLTPGCNETGGKKKSVRIMRAGVYLKPALVQCAHAAVKSSKSPYYKKKYESLVKRRGKKRAIIAIARMILTAIYQMLSTGEEWNPCDLYKVDMPAPLIEKQKTKAIKQAKKLLLREGIISESQLVS

SEQ ID NO: 246909 - protein, 412 aa, unidentified
MNAVGIDVSKGKSTVTIRRPGDVVLMPPRDIPHTKSAINELIKQIQSLDGETKACMEHTGRYYEPLAAWLSDAGIFVSAVNPVLIRDFADDSLRSPKTDKADSKKIARYTLDHWAKLKQYGIMDKTRNQLKTMNRQFGFYMAQKTAMKNNLIALLDQTYPGANDFFDSPARSDGSQKWVDFVHTYWHVDCVRSRSPEAFKKHYQNWCKRKGYNFSAQKAENIYHASSDLIAVFPKDDNTKMLIWQAVAMLNTASRTVESLRLEMDKAASALPEYPVVLAMDGVGPTLGPQLMSEIGDVTRFTHRGALTAFAGVDPGKDDSGQRIRKSVPTTKKGSPYLRKTLFQIMDGLIKRSPADDPVYAFMDKKRAQGKPYYVYMTAGANKFLRIYYGRVKEYLASLPQTSDTEAEKDGI

SEQ ID NO: 246910 - protein, 343 aa, unidentified
MQAVTTIGLDIAKSVFQVHGVDVGGQVVIRRQLKRRYLLAFFEKLPRCLVGIEACASSHHWSRELQALGHTVRLMPPAYVKPYVKRQKNDAADAEAICEAVTRANMRFVPTKTPEQQSGLMLHRTRHLLIRQQTSVINAIRAHLAEFGVTAPVGRKGVEELLGVIADPSDNRVPDVVRACLAALGSQLLGLKKQILDFDRMIMAWHRSNQTSKRLNCIPGVGPLLATALVASVPDPKAFRSGRNFSAWIGLVPKQHSSGGRDRLGSISKQGDRYLRSLFVAGALAVIRYAKIHGTKYRPWVAALLARRPTKVAAIALANKLARMAWAMMATGERYNYPASLRV

SEQ ID NO: 246911 - protein, 377 aa, unidentified
MRNVRFIGLDVHAETIAVAVAEPGGEVRSLGTIPNRPESVGRLIRKLGKPEQLRVCYEAGPTGYVLYWQLSELGVQCEVVAPTLIPVKAGDRVKTDRRDAEKLARCYRAGDLTAVWVPDAAHEALRDLVRARLAAKRDQLRARNRLSKFLLRHGRRAPEGASAWGTKYMAWVKSLRFEQPAQQLTLEDYLHEVEHAAERILRLERSIDAAIETLPVKMRAVIEALQSLRGIAQISAVSIMAELGEVSRFERARQLMGYSGAVSWEDSSGDRVHRGAISKAGNAHLRRIVVEAAWSYRHHPAIGKTLASRQRDLSPQVTELAWKAQHRLHQRYIRLIARGKCKQHAVTAVARELLGFIWAIGIEAERARSTKEVRRAA

SEQ ID NO: 246912 - protein, 409 aa, unidentified
MDVLHERCAGLDVHKDMVMACMRWQHGGKPEREVRRFSTMTKGLLELSEWLSSHQCTHVAMEATGVYWKPVWHILEGSFELVLANAAHIRNVPGRKTDVNDATWIADLLAHGLIRGSFVPPQPVQQMRDLTRTRKQLVREVAQHVLRIQKTLEDANIKLDSVLSDVVGVSGRTILNALVEGKTDPSELAALARTRVKASPEQLREALRGRVTDHHRFLLKLHLAQIDALHSAVREVEARMGEALEPFRDRVDLLLTIPGVKRTTAETIAAEIGFDMTRFRTAGHLVSWAGLCPRMDESAGKRRSTRTRPSTQWLKPMLVQAAWAAGRKKNTYTQAQFQRLRARRGGKKAAVAVAASILTAAFHMLRDGTTYQDLGGNYFDKRDKAKIVKRLLRRLEDLDVHVAPVAAAT

SEQ ID NO: 246913 - protein, 348 aa, unidentified
MAMTIVEGARPVTGGVDTHLDTHVAAALDPAGGLLGVESFAASVIGYRELLAWMSTFGPVARVGVEGTGAYGAGLSRYLHRNGVAVIEVDRPNRQARRQAGKSDPADAVEAARAAQSGRARGRAKTRDGNVEAIRALLVIKRSARSMRIRTLVQIRHLSFTGPDELRERLKGVSSRMLAREAAALRPRATGDPVMYATKLSVQTLGRRVLALEDEAERIDELLAELVTETAPTLLALHGVGVLGAAALLVAAGDNPERLRSEAAWAHLCGVSPIEASSGKVTRHRLNRGGNRQANSALWQIVMVRMVSHPPTRAYVERRTKEGRSKLEIMRMLKRYVAREVYRHLPRA

SEQ ID NO: 246914 - protein, 384 aa, unidentified
MRTEQAYTGSGDVLVLAVSLELAAAKWKVALHDGRRDKPAVHTVAEPQAAARLQEVLDLIEAHKEKWSLPADVRIAVSYEAGQEAFWICRALQARHIECYVVDPASIPVERHQRRAKTDRLDVIKLVINLRAWLRGERDRMHVVHAPSPQDEASRQLMRERGQLQKEVLQHLDRMRKLLATLGCWDAVNHRAFAGRLQRDEVCCHDGAPLPRQLRERLLRECERLALVEQQLAALEKTRQTEVPALARQRCDALERLHGIGEVGASRLALELFWREFKNRREVGACVGLVPQPYDSGDSQADQGISKQGNRRVRALLIEIAWNWLRYQPNSALTKWFNQRTQGTGPNRRARRIAIVAVARRLTIALWRYLRDGELPKGAQLKSI

SEQ ID NO: 246915 - protein, 372 aa, unidentified
MKESTSTTRKARKDRFWVGMDDHAATIVVAVLKNEEKAPVSRFTVSNDEKGQRDLVKRLREFKGEMRCVYEAGPCGYGLQRRLVKAGIHCDVAAPSLTPQRPGRRVKTDPRDALKLAEMLRGQLLMMVTIPDVEREALRDLVRAREDAVSELLQARHRLSRLLLRHGQQYPNRNRWSRAHWKWIREVKLEQTHSQEALDHYIKVVTTRLDQLEELNKLVKAASEEHQPVISRYCALRGVDWLTALTIYAEFGDLRRYEGAPAFMGSLGLVPSENSSGPSQRRGSITKTGNAHGRRVLVESAWHARHYPRVGATLRKRRQNLPEEVVRIAEKAEVRLHRKFSRMLYRNKRSTVAAVAVARELAGFLWAIAQLP

SEQ ID NO: 246916 - protein, 360 aa, unidentified
MSKISKPAGRKKTTTDKPEMTMGIDVGDRYSHLCLLDEEGEVVERDRVRSTEAAFRRHFEGTPRLRIALECGTHSPWMSRLFKQLGHQVVVANARKIPTITESESKNDGRDAEQLALMAAFNPKLLSPLEHRSLARQQDLNLVQARAIPVKARTMIVNALRGLVKSAGGRLPACSSESFPDRAAGAVPPALADVAAPLVEQIARLNMQIGVMDQQIEKLANKYPEIGLLRSVPGIGPVVASAYVLTLDRPDAVPKSRSAGAFLGLRPGQSQSGDSDPQRRITRTGNTYLRCLLVQSAQYILGRFGPDSALRRWGLKLAAIGGKRAKKRAIVAVARKLAVILHSMWRSDQRFQPFPQPVQA

SEQ ID NO: 246917 - protein, 411 aa, unidentified
MTKEDFIYVGIDLHKETHTAVMIDCYNNKLGEITFPNRPADFPKLVTKVKKCNTDAKEVVYGLENAYGYGRPLAVWLIDKGYFVKDVNTAISHRQAKHRGAMYRKSDSDDAEAIALATLNMLDKLPDACPNDAYWSLGQLVHRRDNIMKQRTRLVNQLHEQLCIAYPSYKQFFNDISRPTALYFWEHYPSRKYLKGKSVEDLRAELVPVSHNKCSTKTCEKILDAVASDKVKNNAYQDARDMVTLSIVSDLQHYDSQLAEVDKMLEQMYKMLGCTLTTIPGVNVITAVKILAEIGDIKRFSNANKLAQFAGIAPLHLSSSGKGKDVATKQGNRRLQATIYFLAIQMVQVSSKGTPRNPVVRAYYEKRKAEGKTSQQALICISRRLISIIYGMLKYGTEYRMPVVENAGENR

SEQ ID NO: 246918 - protein, 371 aa, unidentified
MNEFNKYVGLDVHKETIAVSVAEGNGGEVRYVGEVANTPEALEKLIRKLRKGGANLSFCYEAGPCGYGIYRQLQDLGWECLVVAPSLIPKKAGDRVKTDRRDSLALARLHRAGELTAVWVPDGAQEALRDLMRAREDMKHLQKQAKQRLLAFLLRHGKRYGGQDNWTQKHYRWLEQTKFDQPLQQIVFQEYLDTVKAMNRRIDALDQQIQGSAAESVFWPVIEGLMALRGISLITATTIVAEIGDLRRFASAPQLMAYLGVVPSEHSSGSSKSRGSITKTGNGHVRRVLVEAAWSYRYPARKTAVLQRRAERTSEAVQEIAWKAQKRMCGRYQLLQSRGKLKVQVTTAIARELAGFVWAIGQTVPQPVAHA

SEQ ID NO: 246919 - protein, 432 aa, unidentified
MMNIKEIAAGIDISKSKLDVCIKNHGGTVATADFSNDMMGGKLMLEFLVKHGCFEVAMESTGPYWNGLYDYLTENGVRVTLVNPAKAKAHLLNKSDKLDCNVLATLHMINQLKASYVPDHNVRRLRRLTRFRPWLVDMKTAIKNQTAATVSKYSSSVLSVFSDAFGVSGRMFLEMLAESRSEEELIKELDGLKLTEEKRRKINGAIANAFKPNLDPWIVQFSSSLISQIEAWVKILNDAIAKAVDSIPQMKGYVTKLLTIPGVGLETAQAIAAEIADISRFKSSGSLVRYSGINPTVEQSGSVKRYGRLEKCGPPCLRRALYQAANNMAFQGPENFQRHYIAVRTRYGVKKGHGVGVVSTARKLTRLIWAMLTNGTDFIDFPKALTEMKKRRLRNRVKRFDSNNENSKPTLRDLLINIHKLDPGIVQMLAEL

SEQ ID NO: 246920 - protein, 345 aa, unidentified
MSEVRTIGLDLAKRVFQVEGRDAGGSVVLRRQLRRSEMVKFFRKQPRCVVGMEACASAHYWGREIAALGHDVRLMPPTGVKPYVKRGKKNDQADAAACCEAVSRPSMKFVPLKTPAQQAALMQHRARQLLVEQRTRLGNAIRAHLAEFGIIARKGAGGFQALLALLGRAEDPVVPALIRPILAPLVAQWHAAGEQIAVLERQIAAWHKANGDSQRLATIPQIGPIIASAFVATVVDPTRFEGGRQCSAWLGLVPSQHSTGGKACLGPITKAGDRYLRQLLVVAGSGLIRRVKADPAVSPWVAALLHRMPAKRAAIAVANKLARIAWALLAHGETYKASAQAVAAA

SEQ ID NO: 246921 - protein, 365 aa, unidentified
MTSVTSVGTVHLGMDTSKDTIVVAVLLPGEELPAVDRIVNREEAVRRLIGRFAGQERLRACYEAGPGGYDLYRLLASMGVACDVVAPSLIPKGGSDRVKTDKRDAVRLARLHRAGELTPVRVPTPAEEAVRDLARVRAAVLADRKRAQQRLTAMLMRHGRIWRDGSYWTGAHRAWIAAQSFGEPALATTLAFYRATLDTRETELACIESELAPWARRDPLAATVARLGCYRGIAELNALTLAAEVVDWRRFPCARAFMGYTGLVPCEYSSGQRIWRGHITKAGSTPVRTALIEAAWAYRCGPAIGAALRRRQHGAPPETIARSWKAQRRLHGKYAAMTARGKAAPEAATAIARELAGFVWAEMTS

SEQ ID NO: 246922 - protein, 397 aa, unidentified
MYIVGIDIAKRKHEAAVIDGEGAVIIKPFSFTNNCSGYNRLLAMLAKAKLPLDEVSFAMEATGHYWLALFTRLQKEGFRVQVINPVQTNSIRSFYIRQAKTDPRDALLIAEVIRFGHFSESTLHPENIYELRELCRGRHAIVSMQADVKRKVVALLDQVFPEYETAFTNLFGDTSMAILQTCPTPKELSEMPLEELCHLIEVSSHKRFRMAKAQELQELARNSFGFAMAGDVFSTMIRLYAKHLDFLKQQVREMDRKIAEIMDTLDTPITTITGIGPTLGAYILSEIGDINRFSSAAKLAAYAGIDPTMRQSGEYNGVRNRMSKRGSPYLRHAIWLAASSAVLHDPALKLYFQKKRDEGKPYMASVGHACRKMVSIIYAVMRDNKAYTSYIPNEISA

SEQ ID NO: 246923 - protein, 348 aa, unidentified
MQSKTQIKSIGIDLGKTTFHLVALGIRAQVVVRKKFSRQQLLTYTANLPSSLMGMEAGVGSHFLGRALREQGHEVRLIPAQFVRPFVKSNKNDYGDAEAIAEAVERENMRFVPIKTEDQLDLQALHRVRERLVARRTSVINQIRAFLLERGISFRKGPASLRRQMPEILENADEKLTARMRRLLDFLWQEWKHLQLQIESLSEDLEKIASSDAACVRLQQIPGVGPLVSTAVVSAIGNGAAFHKGREFSAWLGLVPGQWSTGGKTKLLGISKRGNPYLRKMFIHGARAAVLRVKREGSYLGQWIGGLESRAARNVVIVATANKLARISWAVLSSGENYRPRPALAVAS

SEQ ID NO: 246924 - protein, 343 aa, unidentified
MSIVILGVDLGKNACSVVGVDAAGAVAVRRSMRRQTLIDYVAKLPACVIAMEACCGAHHLGRLFAAHGHEIRLMSPEYVRPYVKAQKNDDRDAEGIAEAASRPTMRFVELKSQEQLDIQTLHRVRSRLVAERRNLINQLRAILLERGTIFPVGRRKLELGVDGMLADEDTTLSPRLRQLVGELRAEWRELDERIEALNTEFIELARNDAAARRLTSIPGIGVLNATALIAAVGDASSFAKARDLGAWLGLVPRQHTTGGKPRLLGISKRGNTYLRTLLIHGARAALPSLSQSDTPLGRWLKAMIERGVHRNAVVVALANKLARIAWAALRKGATFERGYSVVA

SEQ ID NO: 246925 - protein, 461 aa, unidentified
MKRKKRCKKAPAEPAGSVGLPKIRLLVAGIDVGSENHYVCAPSSDGGTEVRVFGASTPQLLAIAEWLEQAQVESVAMESTGVYWIPLFEVLESRGIEVLLVDARQLSRVPGRKTDVQDCQWIQILHSCGLLQGCFRPEDAICHLRSLVRGKAVLTSERSDWLRRMQKCLDQMNVRVHRAVSDVDGTTGMAILRAIVGGERDPAQLAKFRDPRCHKSEAAMAEQLAGNWREDHLFNLGQALRMYDIVEERMADYQREIQRKMEQLHCGQADLHPLQPVKRKEKAKAIKRRGQEPMRNVLHGMTGVDLTTIDGIGVETAEVVVTEYGRDLSRFPNERQFVKHLRLAPRQAITGGKPMRKGKGRKNSTRAGRALRMAATTLQHSQTALGAYYRRFAANKGADIAVFATARKLATLIYRMLRWGQTYVDDGAAAYEKRYQATRIRRMNAAANQLGYQLVPKVEVA

SEQ ID NO: 246926 - protein, 403 aa, unidentified
MTVTALDPGTIFGGIDTHADTIHVAAIDPWGRELDDAEFPTTPSGYQDALEFLTSLGEVASVGIEGTSSYGMGITCAARDVGLEVSEVIRPERTVRRREGKSDSLDAYQAAHAVLSGRATAAAKTADITALRALHNARRSAVKARAAAQVQIGQQLITSPVTIREKYRALTVGHLVPALADCRPGARNDTAERLVLTALKSLAQRHQQLSQEITKLDTELTSLVERTAPHLLHLHGVGNTTAAQLLITVGGNPDRLRSEASFAALCGTAPVPASSGKTTRHRLSRGGDRHANNALHTIALVRMRSHPPTKTFVQRQRDRGRSTPEIIRILKRAIAREMFKQLTRPQTGLGIKDLRPARQAKNITLQAAAHALGLDTMTISRTERGKFITPEVVNRYRDWLKTA

SEQ ID NO: 246927 - protein, 312 aa, unidentified
MAMLSFCGIDVSKDRLDVVVLPEGWFFSVSNDTAGWAELVVRLRPLAVSAIGLEPSGGYERGIIRALLAAGLSVRRINPNKLRQFARARGVLAKNDRLDARLIAEYVAIMPTRVVQRDAAVERLAEIVTMRRQLCDEHVAAENQSAHLEDAMLRRLSKRRQMRLEADIRLLDKRLAEMVAANVALAQRYELLTSMPGVGPVLAFTLIALLPELGKMSRKQIAALVGLAPYDFDSGKLKGHRSIYGGRMPVRNVLYMAALSASRYSPALKTFHKRLAAADKKSKVIIVAVMRKMITTLNAMLRDSAAWQPRSA

SEQ ID NO: 246928 - protein, 361 aa, unidentified
MPGTMTYVGFDVHARSTHAAAVDVMTGELSRVRFGPGVETPVDWLRTLAGPVRACYEAGPTGYGLYRAVVAAGVGIEVIAPGKTPRGRGDRVKSDRKDAELLARCLMAGSLSAIAVPSPAVEAARELTRAHDACRRDLMNARHRVSKMLLRHGRVYPKTSTWTQQHRRWLAAQRFPEPVSELAWADLVACVDGLTARKTTLAERIGELATDPAWWPTVARLRAFRGVDTLTAFAIHLELGADWARFEKAHRVGSWLGLTPSREQSGAHDRHGAITKTGSTLARRLLVESAWHAAREPRVGATLANRQQGQPDHVLQIANRASQRLHRVYTGMRARGKPHNVTVVAVARELACFLWAAATAP

SEQ ID NO: 246929 - protein, 400 aa, unidentified
MISVGIDVSKGKSTVCILKPYGEIVSKPFNITHTQKDLSELSSMLFRLNDEVKIVMEATGIYHLPVLTYLQEKGFFVSVINPYLMKSYRNESLRKAKTDKIDSRIIANYGIDHWFKMKEFQTSGEIYEELKLLGQQYRHYMKLHLLSLAELTHLLDLTMPGIKNLLASWNETNRKDKRSDFVERFWHYDVITSMSEQEFTEKYILWAKEKKYVPSQEKAKVIYTLAQESIPTLPSETSSVKMLVTEAVRVLKEVDATLGLILSRMQEIAKTLPEYSVVREMGGVGNTLAPKLIAEIGDVRRFRNGKALVAFAGIDPPPYESGQFVGCNRKISKRGSASLRKVGYETMRSLKMRSRPEDPVYRYVVKKESEGKSKKSAKIAGLNKFLRIYYARVTELYKNI

SEQ ID NO: 246930 - protein, 353 aa, unidentified
MTYDYHIGVDYHKAYSHIVVQDTGGKMLRSGRVRNDRRSVAGFLAPFSASAHAVMEATRNWTVMFDWLDENCDEVVLAHPLKVKAIADAKIKTDKIDATVLAHLLRADLVPKAHAPSHRAREIRLALRERMFFVRLRTMVKNRVVTTFDRYPEQTAALKRCTDLFGAAGRKQLAEIEVCEIDRIQIDRSLAFIDDINGRIKECESTIKVLSKGNANVKLLKTLPGVGEFFARLIDAEIDDISRFRSASKLAAYAGLVPSTYSSGGKTYHGRIIKQGNKWLRWAFVEAVAPAVAHDPDLKHYYERLKATKGTNRAKVATARRLLTIAFQLLRDGRSYERRGAGLESETKLSRLS

SEQ ID NO: 246931 - protein, 415 aa, unidentified
MPKSGETLRLFVGDDWAEAHHDVELMDASGRRLAKARLPEGVAGMSRLHAMIGEQLGEQAEEAEVIVGIETDRGPWVAALVAARYTVLAVNPLQAARYRERLSVSGAKSDAADAHMLADMVRTDSHQLRPVAGDSPQAEAVKVVARMHKTLIWERTRHTQRLRHALRDYFPAALVAFEDLDAPEALNLLARAADPASAAKLTISQISAALKRAGRRGDLAAKAAPIQAALRTEQLSQPEVVTAAYAASVRALIAVLTALNEQVTALHKEVEAHFGRHPAAEIICSQPGLGPILGARVLAEFGDDPYRYASAKARKNYAGTSPITRASGKKKVVAARFVHNDRLIDALITQAATAVRFSPGARAYYDRQRARDADYNTALRQVANRLVGILHGCLKTGTLYDEATAWSQHSGSLAA

SEQ ID NO: 246932 - protein, 376 aa, unidentified
MREKLRFLGLDVHAETIAVAVAEPDGEVRSLGTIANREDSIRKFIKKLGSPEQLRACYEAGPTGFVVYWQLTQLGVECAVVAPTLVPKKPGDRVKTDRRDALKLARSHRSDDLTAVWVPDEGSEALRDLVRQREASKQDQLRARHRLTKFLLRSGHRPPPAVKAWTERYMEWLQQIHYTQPAQEATLVDCLNEVEHMGARVRRLEEAILEVVKLAPQPMQEVIRGLQALRGVAHISAVSIATELGNITSRFQSARKLMGYGGTFPSEDSSGKRIRRGGITKSGNAHLRPIVVESAWSYRHRPWIGAKLRRRQEGVPAEITEIAWKAQKRLHRRYMKLMATGKDQRKIMTAIGRELLGFIWAIGIKAEAACKQQMAA

SEQ ID NO: 246933 - protein, 304 aa, unidentified
MAKKLSVLGIDIAKQVFHLVGMDEHGTIQLRKRLARAQVMTFIAQLPPTLIGMEACSGAHYWARRVREHGHEVKLMAPQFVTPYRKAHKNDMRDAEAIAEAVTRPTMHFVPVKAVDQQDLQALHRVRERLMKARTALINETRGLLHEYGIIVPQGAATFRTHVQEKLATEETKLTAHSRALFQQLLEELAALDTRIATYDAQLAQVAQAHPVCQRLMTIPGLGELTATALVAAVSDATQFKNGRQFAAWLGLVPRHTVRAGSHACWASANMVTVISANCWCMGPGAVCAGWVESATAGATGSGR

SEQ ID NO: 246934 - protein, 333 aa, unidentified
MSLEQSSVCVVDADGQIVREAKVASEPEALISWFGSLGLQLTRIGLEAGPLSQWLYAAMRAAGLAVELLETRHVRTALQTMPVKTDRNDARGIAQLMRLGWFRPVHCKSAGAQEVRALLTARKLVQSKLFDVEMSLRGILRGFGLKVGPTTPKRFSGRIRDLVAGDARLEVIATALLAVHAVLLRELSGLARADGRVRLLMSTPGVGAIVALTYASAIDDPSRFKSSKMVGAHFGLTPKKYQSGETDVTGRISKIGDSGVRAALYEAAHVILTRPIKAAGPLKSWGMKLAKRAGMKKAKVALARKLAVILHRMLVDGTVFAAETPRDFAAAAA

SEQ ID NO: 246935 - protein, 320 aa, unidentified
MTVPSKAPGPSKVPGSFIGCDVGKTSIVVFDSRDGRIRTVPNRPDELAAFAGELDQTCLVICEATGGHEAVLLRAMIMAAIPAHRADARKVKAFIRSFGTLGKTDAIDARALARYGQERDGRLARWQAPDEHRDQLQALVLTRQDFVAGQQAARNRLTAPGAEIVTPYLEQLLDCLETEIRAIEAAIEALIGRHKPLDEAAKTLRAVAGIGPTTAAGLVALMPELGRLNRRQAAALAGLAPHPRQSGASDAYRRTKGGRPEVKRLMFMAALSAVKHHQNLKAFYQRLVSNGKKKLVALTAVMRKLIVICNARLRDAPGAI

SEQ ID NO: 246936 - protein, 430 aa, unidentified
MKSNTQNAKIEAITEKTLVLGIDVGSETHYARAFDYRGIEYSKKPFKFSNTEAGFVTFKEWILDLKEKHEKDKVVPGMEPTGHYWFNLGKFLQDNEMKPVLVNPHHVKKSKELDDNNPTKNDRKDPKVIAGLVREGRYMIPYLPDGVYADLRTASNIRFQLQAELTRIQNRISRWFNIYFPEYKTVYGKPDAKSGMLILKQAPLPEDILTLGIEGVNQIWRDAKMRAVGKARAKTLIEAAEHSVGSKEGAVSARMEIRMLLEDYESRNIRLQEVMTLIAELVNQIPMAEKLLEIKGVGIKTVSGFLAEVGDISRFNNPKELQKLAGLALVENSSGKHKGRTTISRRGRKRLRYLLFEVAMSLVAKNPEFRELHTYYTTRRLNPLKKMQSLMAIAAKLIRVFYAMLTKGVDYDPKKMVGDIKRPAVYLQAA

SEQ ID NO: 246937 - protein, 332 aa, unidentified
MSIIGCDLHSRYQVIAMLETGTGEVITRRLEHEDGEAKGFYAGLAKPVLIGIEATGYTQWFERLAAELGHELWVGDPAEIRARAVRRQKTDTRDAEHLLDLLLSKRFPRVWVPRPEERDFRQLLKHRDKLVKMQTSVRNQLHFLAMSQGVCRKQKLWSVRGRQELEGLELGPWASRRRQELLELLDRLGPRIEELEAAVKAEAARRPEAVLLMEQKGVGPVTALAFVLTVGPVERFATSRKLTSYLGLNPREDSSGGHQRLGHISKQGNEMLRWLLVEAGHTAARLDPELRRVYQRLKFRRGGKVAKVAIARRLAVRLYWSLRRYAAGSHVQ

SEQ ID NO: 246938 - protein, 391 aa, unidentified
MVYVGIDVAKDKHDCFIMSSEGEVLHDVFTIPNSMDGFNDLFQKIRAASGTLGKVKVGLEATGHYSYNLLGFFLDKGLATFVINPLHTNLYRKSLSLRKTKTDKVDARTITAMLMSDVNLKSYTDTAYHNEDLKSLTRYRFDKVKERAKLKSSISRLVNILFPELEALVPTLHLASVYALLSEYPGANQVANAHLTRLKNLLHDASRGHYDRDMAVAIRDAASRSIGSRMPAKSLELRHTIKLIGELSAEIDEIETAIQSIMDEMGSPILTIPGISYRMGAMILAEIGDFSRFDSPDKILAYAGLSPSTYQSGQLTSSYSHMEKRGSRYLRYALFNATKYVCHWEPSFAAYLAKKRSEGKHYNVAVSHAAKKLVRLIYALEKSGQPFINAA

SEQ ID NO: 246939 - protein, 411 aa, unidentified
MQVINQRCCGLDVHKRSITACRLKWLGSSWEREIRQFGTMTKDLLGLGDWLAQEGCRHVAMESTGVYWKPVYNILEGQFELLVVNAQHLKAVPGRKTDVRDAEWIAELLAHGLLRGSFVPPAPIRELRGLTRYRSSVVRDRARTLNRLQKVLEAANIKLANVVSDIDGVSARQMLEALVAGERDTEQLASLAKGRLKEKREQLVEALSGRLKAHQSFLIAEHLAQVDYLEGAIERLSQEIEERLRPFEQEIGWLDTIPGVSQRTAEVLWAETGGDMSRFASARHLASWAGMCPGNNESAGKRRSGRTRKGSPWLRHCLVEAAHGAAHTKNKYLSSQYHRIGARRGKKKAQVAVGHSILVIAYHLLTRKQPYSDLGANYFDERDRQAVTKRCVTRLQRLGFQVSLEKLPVAA

SEQ ID NO: 246940 - protein, 387 aa, unidentified
MQKPHDESKACLTAFVQDSTLTVVIEMSLANWLVAGMIPGVDRQPLKKIAPNPEVLLQLLHRWRDEATKAGKEIARIAVAYETGRDGFWLARWLRARGIDAHVIHATSVAVSREHRRAKTDRIDTAVLQRGFLGWLRGERGHCSMAYVPTVEEEDAKRPHRDRESLLKLRTSTVNRMKSILIQFGVRKFNPILRKAPENLASVRTPEGIPLPPNSVTALRRHMERFRVIKEQIKAIERTRLERLQRDPAEKLNAMVFLLVRIIGLGIETAEQLVHEILSRNLRDRKAVARYARLTGAPDESGSKRRDKGLSRSGNRRVRNILIQLSWRLLRFQPESDLVLWFKKRTANAQGSRKPMIVAFARKLIIALWRYVNTGLVPEGFQLRSAT

SEQ ID NO: 246941 - protein, 377 aa, unidentified
MKKNIRFIGLDVHGETIAVGVAEPSSEVRSLGVIPNRPESVRKLVKKLGPASSLRACYEAGPCGYVLYWQLTQMGVHCDVIAPTLVPTKSGERVKTDRRDAQKLARSYRSGDLTPVWVPDPEHEALRDLVRAREAAKKDQLRARHRLQKLLLRRGLRPPEQMKPWTTGYLAWIKSLRLQPPALEATLLDYLSEVDHAGERIKRLERTIDQAIEAAPAAIRAVIDGLQALRGIARISAATIVAEVGMLSRFSRPKQLMGYTGVVSREHSSGDRIRRGAITKTGNAHLRRILVEAAWSYRYRPAVGPQLRARQARQSAEVKEISWKAQHRLHYRSASLAGRGKPKQQVVTAVARELAGFIWAVGVQVEKQLPIGNVRAA

SEQ ID NO: 246942 - protein, 426 aa, unidentified
MVENEYQIYVGIDWATEAHQACVLDSRGRILAERSFAHTGDAIAAFAQWLHEVAGDEPGQVAIAIEIPRGAVVETLVERGFHVYAINPKQLDRFRDRHSVAGAKDDRRDAFVLGDSVRTDRACFRRVRLDDPLVIQLRELSRVHDDLGREANQLTNRLREQLHRYYSQALALCPAADEPWLWAVLELAPSPSVARHLRPQRVERLLRQHRIRRLSAHEVVAALRACALQVAPGVVEAASEHIALLLPRLRLLHTQRQGCGVRLEALLDKLGAAEDDDGQQGEHRDVEILRSLPGVGRVVAATVLAEASAALAERDYQALRAYAGIAPVTKQSGKRRMVLMRYACNGRLRNALYHRARVAAMRDPSSKTYYAGLRQRGHSYARALRSVADRLLRVLIAMLKHGSLFDSARTRPSVGAAAREEVICTS

SEQ ID NO: 246943 - protein, 370 aa, unidentified
MLDTTTFVGLDVHARSIKAVSLDVMTGEVRAATFGYDAGAVAEWVRSVDPGARCVYESGVTGFDLQKRLSGLGVDCVVGAVSKMIKPSADRRRKNDRNDAEFLARMLSVGNVVEVWVPDDECEAARDLTRALEDARDDLSRSKQRLSKFLLRHGLAFDERTPTGRRKGNWTRAHWSWIESIRFAEGADNDALAYYVDAVRRAAEEKARLEGLVEAEARKPRWRKRVDSLRCLKGVDTASAADLVFEAGEFSRFRNARSFAAWVGLTPSEHSSGESDRRGAITKAGNKHLRKTLVEAAWHYLTCSGRPKDLAKGQAPDRGARRHAAKGVRRLVERREALLARGVHGNKANVATARELACWVWAVGLMAEGA

SEQ ID NO: 246944 - protein, 441 aa, unidentified
MRRCIGLDVHREFAQVAIWERGQVGQAGQIATTPEALRLFADSLCEHDEVAIEATCNTYAIARLLEERVARVVVSNPQKTRAIAEAKVKTDKVDAAVLAELLAADYLPGVWLPDEETHALRRQVARRAHIVRQRTRLKNRVQSILHRNLVPRSPAADLFGRKGRAWLAEQPLPADERQAVETLLRQLDFHGEELKLIDADLAQTALARAEVKRLMTIPGVDATVALAIVGAVGDFGRFLSPGRLVSYLGLDPKVRQSGGQPASHGRISKQGRAHARGMLVEAAWVAAKTPGPLRAFYERVRARRGMQIAVVATARKLAVLCWHLIVKDEDYAYQRPSLTAQKLRALELRAGMPSRRGQRGSTHAYNLKEVRARERALSEQAERAYRQLVADWQAKAPTSGAGVAAANGARLSRPAVGPAARQDSTPTPALRSGVGHAHTEA

SEQ ID NO: 246945 - protein, 411 aa, unidentified
MVREPGRAIGLDVHREFCEVAICEEGKVRSAGRVDSSPEAVEALAASLGADDRVALEVTGGAWAIVSILERHVARVVVVSPGDTGIAQARAKTDRLDARTLARLLWAGGLEGVWAPDELTRLLRRRLARREQLVRARSRAKNEIHAVLMRCLVGKPPFSDLFGVAGRKWLRRLELPVEECETVEACMRHIEFLDTEVAEVERVVARYALSCSDARRLMSVPGVNVICAATFLAAVGDIGRFRTSRQLVGYLGLDPRVRQSGSSPAKSGRISKRGSGSVRWALVEAAASVIRQPGPMRAYYQRLRVRRGHQIAVVAVARKLAVLFWCLLSREEQYAHQQPSLTAKKLRLLEIRGGAPTKKGSPTGTWATREKMREAEKALALQAEASYVRMVSDWQAAAPKRAGAGVTPGRA

SEQ ID NO: 246946 - protein, 324 aa, unidentified
MNIIGIDVSKAKLDCAWLREDEKLKTKVVDNTKDGWKELIEWSLKNTGLTIEQLHFVMEATGIYHQRLATYLFDAGAKVSVINPAQVKFYGQSLGVRTKNDKKDSVILARYGLKESPKLWQPEALEISELKALVTRLEGIEKDLQREKNRREKALCGETPQVVLDSISHMIELFETEKQSLEKLIEEHIDKHKKLKEDKALLESIPGVGNVIATRMLMVINSRQFTKASQCAAYLGLVPVQHESGSSVKGRVRLSKAGNPAIRAKLYLGAVTAKTYNPDVKALYERLLSRGKSKMSALGAAMRKLVQICFGVLKCQENYQPQTG

SEQ ID NO: 246947 - protein, 429 aa, unidentified
MPYRIAGIDVHKKMLAVVVSDVEIESEYQFERRMFSSNPEQLRSLAAWLVEQKAEEIVMESTAQYWKPVWETLERYWKPLCEKREGARRKSGTLHLAQALSNRGRRGRKRDFVDAERLVKRLVARELTLSFVPDPEQRLWRTVTRKKYQLRRDVVRLNNQLEALLEEAHLKLSSLVSDLLGVSARRMLKALADGETNPVALAALAHERLRATPEQLCDALGACTELKPVYRRLLKMALEQLQLLEQQISQLDQELATLLHPHQDAVQRLAEVPGFAVDSAQQIIAEVGPTAATFPSEKCLSSWVGACPGEEESAGVNYSHRSPKGNRHMRRLLNQAANAAVKVKGSIFEIIYRRCVSRLGHNQAIGVIAHRQCRLIWLILHQGTRYEERGPAVTKRSRYQRTWRMIRQLRNLGYQVELPDPQPDPAQAR

SEQ ID NO: 246948 - protein, 472 aa, unidentified
MFSWLGHHRVLPVSNARLFGVLHIVDALIHTEMKGCVSLSKFINDFVVGIDVSSEFSVVAMLEPNGSLIRKPFRIDHNPKGFNKLLEILKKEEERLKQKPIYFVESTGIFHLPLFFFLRSNDLKGFVLNPLSVHSTKNFDLRKVKNDAKDAESIARLAKFQEVKYSLVPEPQILALRMMSREYYAMSDMLTEMKNRLCTDLYLLFPGYLDVFGNPFGKASLEILKTYSSPRALSEADSSELALMISKLSRKTVSWAMKKVDALFEITTQALSMPMEFDILSLKIKTHVENIESFQDRLDGLIKQLKTMIQSPDFPAKERRYVELLEDMPGIGFITAVTLIAEIGDFSKFHSPKAFVAFFGIDPSVNQSGKFNGDRNRISKRGTRFGRRVLFTAALASIRTTRNGDAINPVLREYYHQKCENKKKKVALVAVMHKLLNYIFAVLRDEKPFALRSPKDHQSWRHTKETVLKLVA

SEQ ID NO: 246949 - protein, 546 aa, unidentified
MAGYLADTLSKVIHQSAEGGPFPGPLPPSIVNNFAADIASVGDNLSSSAHPDGGNASDVARSYFAYPSRVQRRTPARPQASTPRSDRTNASEAPRISSTHGEGQAPRPNTTTRKRMEQHEQLTHFAGFDWAKDHHDIIVIDAKGTVVADFRFDHTPSGWKLWHDKIAAWPKLGVAIETSFGTVIEQLLESGVTVYPVNPMNAKRYRERKCSSGNKTDRHDAWALADALRMDGHAWRSLGVQDPIIAELRILCRDEVALIGERTALVNQLQQALHEYYPTALEAFEDWTSPNAWAFVEAFPSAAALLKAGKSKWDKFLHSHKLFRPQTYAARIAAFEKAAEWKASMPMVAAKSLYAIARCKQLRVLQNQLDEYRQRIEAIFASHPDSGLFGSLPGAGPKLAPRLLGEIGSDRSLYDDAQGLQCMAGTAPVSYQTGQVHKVNLRRRCNKNLRHAMHLFADKSRAQCAWASKYYESLRERGKSHAQALRCLGQRWLKIIWKMWQTGTSYDPELHMKNQLAHGSWVLQINPQTTPSNHANNIQKKNTCNR

SEQ ID NO: 246950 - protein, 343 aa, unidentified
MKHIGMDLGGTTTTVTVLNARGKRLLDRTIPTREDALVSFLSKVPGDKRVVVEESQLADWVVRAIQPYVSEVIRCQPQHNALISRSEDKCDEEDCHALARLSYLGELKPVHHTDWGYRQLREGVREYWKSSWDLTRAKNRLKAHFLFNGVPTAGEAIYVSRWREAFYDRLRQGSANLKLTELHYQRLDDCRSLKAAQVGLLRELAQPYEEEIRCLKTVPGIGPIGACTMVAYLENGWRFSNKRQLWKYCRLSIRRHESQGKGHRGASYQGNRYLKCSLMTGVASLITRPQDTNALTKLWYQGLTRGVEPQRMRRNLARKLVVVAHHILRYRRNYQDELIPVAG

SEQ ID NO: 246951 - protein, 407 aa, unidentified
MDDGSNYAFIGVDVHKEQHTAVVIDWWTRVLGEFTFESKISVYPEFIKELKKKIPENLNLIFGLEDVGGNGRSLAVFLKENGYIVKEVNPSYSSSERKSYPTTLKNDTWDAKCIAEVLVKKVDILKEANPSDLYWTLKQFVYRRDSIVKSLSITKIQLHEQLTKSYTSYKKFFAEIEGKTALAFWEKYPSPSKLKNITTKELKEFLLEASNNSCSTKKAESILSFIAGDGDTFREYQEHRDELVRSYVRYIRFCREEIEELEIHMKKIISKLDYKLETLTGVGIVTASQIIAEIGDINRFESADKLAKYAGVAPTNFSSAGKGRDVKSKQGNRRLNGVLFLLAKQQVQLTKNTGKPRNPILYDYYLRKTGEKKSKSKVPALICIMRRLVNIIYGMMKNKTEYVMEYR

SEQ ID NO: 246952 - protein, 419 aa, unidentified
MSFKILKNNCCGLDVHKTWIYACIGITDSFKRTEYKQARFSSFTKGLQELCLWLAKYNCIDVCMESTGKYWIPVFNVLEKNNIFVTLSHPKYTKPQKGNKTDCKDAKWICDLYMCGMVKPSFIPPADIRQLRDLVRYRFKLTCMITGEKNRAHNCLTVSNLKLDDVFSDIFGKSSRSITEQILQHPGEVFDVAPFVDSRCKTPIEEIQAAVDGAISHEQAVKLRQCLKHIDELEMHKAEIEREIFRLSQKYESVLDLIRTIPGFDKNPLTAIQVLSEIGADMSVFPTAKNLVSWAGCCPRNDQSSRKIKSTRISRAGSYFKPVLVQIANALIKSKKHPEFTTRYRRIKARRGHKKAIIAICRMILTAIWHILTDLKPYTPEGFLESRPVNKEKVLTISQALNLIKQRGYIIKDDVGPVT

SEQ ID NO: 246953 - protein, 338 aa, unidentified
MVVIGIDPHKGSHTAVAIDEDETKLDEVRVRADRRQLERLRTWATTFPERSWAIESANGLGALLSQQLVGAGEEVFDVPPTLSARVRVLGTGKSQKNDPNDALSVAIAALRSARLRPVVAEDHMAVLRLLWNRHKNLTSLHTQAVCRLHALLAGIVPGGTRRRLSADRASAVLSGFRPSTAVEKARRDQARDLVGDVRRLDALLKASKRTIVEAPSVVPTGLGDLSGVGPVATCIILAHTGDIGRFGNEDNYASYNATAPIEASSGPRKRHRLNPRGNRQLNHAMHIIAFSQLSHAGPGRDYYERKLAEGKSQKEAVRALKRRISDVVYRQLVRDAHR

SEQ ID NO: 246954 - protein, 318 aa, unidentified
MQAIKTHVAGVDVHKEILAITVLIGAADEVPREEQFECSTFTDDLMACGLKLKEMGVTDVAMESTGIYWKPVFNVWNPLGLKVIVGNATHIKNVPGRKTDMNDSRWIAELHRYGLIRASFIPDGEFQRIRLLSRHRTNLTEDLTRVRNRVQKVLEDGNIKLGSVVSDVFGVSGRQVLEQISQGYTHPDVLMAAVTTKIKRMEDVKKALTNCLTKEHIFVIAQLMQQLKDIEARITDVEMELVDRIQPYAHLIEKLDEIPGIDKILAIGIIAEASKDMTSFPSERHFAAWAGVASGNNESAGKKKGQSADMATPICKSS

SEQ ID NO: 246955 - protein, 354 aa, unidentified
MIIIGVDFHPEFQQIALLNTTTGEVEEKRLAHPDEAEKYYRALASAGETVRIGMEASGHARWFERLAAELQFDLWIGDAAEIRAKRGRKQKTDRQDAQHILKLMRKDDFPKIWVPSWENRDLRQLLWHRHRMVQARTRVMNQLQAVALNEGLHCKKKLWREHGRQQLESFALAPWASRRRRDLLDLVDRLNPAIADLTQAIEREVENYPAAQRLRTHPGVGVLTSLAFVLILGDAERFRCGKQVASYLGLVPLEDSSGNRRRLGHITKQGSSIVRFLLVEAAQVTVRSLPEWRSKYFHLVLRRGRKIAKVAMARRLAVQLFWMMRKEWDYEQLKKFGSHAGQPGHRDGVQSNTE

SEQ ID NO: 246956 - protein, 389 aa, unidentified
MNEPTHNKHTMKNSLLFVGLDVHAQSITIGLAPGDGAQARLYGGIAHDLHALEKVFAKLRKAHPGVELRVCYEAGPTGFVLARRLGQLKVSCTVVAPSLIPVRSGERIKTDRRDALKLARLHRAGELTAVHVPEASDEAMRDLCRARTDAVQDLRRGRAQLKAFLLRNGYRYTGKSAWTEAHRRYLRELVLPHPAQRVVLEDAIAMIGGAEERIARLEEQMAALLPSWPMQPVVAALMGMRGFALVGAMVLVSELGGAWRFAHPRQLMAYLGLVPTENTSNEKRRQGGITKTGNSHARWLLIEAAHHYRLSPKVSKELSVRQQGLSQDIKACAWKAQTRLHQRMMQLQARGKQRNKVTVAVARELVGFVWQIFQLMAPRMTQEAAAAKP

SEQ ID NO: 246957 - protein, 396 aa, unidentified
MYYLGIDIGKNNHVASMMDDEGQVIFKAFSFPNTTDGGNALLEKFNRFASSTSSVEIGMEATGHYWLSLYSFLHEKGYMIHVVNPILTDGWRKGVEIRKRKTDGIDSVLIADLIRYGNFMETSLSDETILSLRNLCRFRSYLVDSIGDLKLKTICVLDQVFPEYQSVFSDIFGQTSRELLKNFQSLDDWVNLDMKKLLGVLEQIKLKTFARKKIDQVSSLAKSSFGVSFCKDSFSFQLKLLIEQISFVDDQVKVVEKEIEALLEKMNSPITSITGIGFITGATILGEIGDISRFSSPAKLVAYAGIDASVSQSGDYHSTNNRMSKRGSPYLRRALFQAAFVASQRDPILKAFYLKKRAEGKHHYTAIGAVSRKLCYVIFAILKENRPYEVRPVSVD

SEQ ID NO: 246958 - protein, 407 aa, unidentified
MIFVGVDWAEAHHDVCVLNGDGNVLGRRRIGDSFAGIGELHALVAEHLGVDDEPDQVVVGIEKDRGLIVTALVAANYQVYGINPMAAARYRDRHHVSGSKSDPGDAKVLADLVRTDRQNHRQVAGDSALINGVQVLARAHQNAVWGRQRQVNALRSALKDYYPGALEAFGTDLSHKDAVAVLGVAPTPAIGRTLSRAKLVATLKRGGRQRQLDERAEKIQTALRKEQLSEPQVLEDAYGKVTSSIVRTIALMTAEIAELEKALSESFEQHPSAKIVRSLPGMGTVLGARVLGEFGDDPNRYFDAKSRRNYAGTSPVTKASGKSRVVLTRRSRNKRLAAALDQLAFCSLISSPGARRYYDEMRAREKTHRKAVRQLANRWVGILHTCLERGCLYDEEIAWPTREEIAA

SEQ ID NO: 246959 - protein, 386 aa, unidentified
MQRNDLSRSLVAFDQNSTLVAVVELSLNRWVVQGLVPGLSKQPLKALGPDASALLALVNRWQLEGTKGGGRIKRIVVAFEAGRDGFWLARWLRSRGIEVYVIHATSIPVSREHRRAKSDRLDTELLMRALLGWLRGERKHCQMVRIPTIEEEDARRPNREHQTLVGERTRNVCRIKSTLVLHGIRDFNPKRLKASERLETLRCPEGGSLPPNTLAELRREMAQLRLISGQLREIEKTREERLKRAPRQGTHPMVLLLAKILGIGIETADMLVHEILSRELRDERAVGRYAGLTGSPYDSGAKRREKGMSRAGNARVRRGMVQLAWRWIRFQKDSQLTQWYNKRTESARGDIRKTMIVALARKLLVSLWRYVTTGEVPVGAKLKAAA

SEQ ID NO: 246960 - protein, 347 aa, unidentified
MRFYTGQHQHYCGVDLHARSMYVCVLDREGNTVLHRNLRTDPDLFLQAVRPFADDLVVGAECMFTWYWLADLCRDAGIPFVLGHALYMKAIHGAKAKNDRIDSAKIAALLKGGTFPLAYVYPREWRSTRDLLRRRLHLVRKRGELVAHIQNTYHQYNLAAPSVKLRYRANRAGAADAFSDRSVQKNVAVDLALADRLDQVIRDLEGFLTQNVKIHDPDNFYRLRSIPGVGKILALTILYEIHDIDRFPRVQDFASYARLVKCAHTSAGKRSGTGGAKIGNAHLRWAFGEAVLLMLRECDELKKRRERLERKHGKGKSLAILAHKLGRTVYFMLKRKRVFQMERFLAD

SEQ ID NO: 246961 - protein, 341 aa, unidentified
MSVIAPVFSFGLNGYAGSGLALQDEAEKRLMQITIGIDISKETLDAYRFPDNHHIQVANGRAGHKSLVRWIGKQNESLVVFEATGAYHRNLEAALAANGTAFAKVNPRQARRFAEATGRLAKTDRVDAIMLAKMGAILGLKAHEPKTEALHILRELITARRALMKDKVAAKTRLQTTRQTLLKNQINARLKQIKIQIQQVDAAITEKVAQDEALSNKLDILTSIPGIAETTAFSMLIEMPELGTLEGKQAASLAGLAPMSRQSGKWQGKERIKGGRAFLRRAIYMPALVATRYNPGLKAKYDQLIRAGKSGKVALTAIMRKLVVMANALLRDGRTWSELRP

SEQ ID NO: 246962 - protein, 454 aa, unidentified
MSRKKTRLQSVTEAPQIRRDACGIDISPEVIYVAVGPQQDAPAVRAFGTFTAELYRIANWLRACGVRTVAMESTGVYWIPLFQVLEDRGFEVLLVNARHYKNVPGRKTDVCDAAWLQYLHAVGLLQASFRPPQTVCSFRTLLRHRAGLVQAASQHIQHMQKALDQMNVQIHRVLSDITGVTGLANVDAILQGERDGKQLAGLRHGGVKASEREIMAALQGDYRAEHLFTLRQSLESYRHYQKLIGECDQQLRQALDEFDSKQGGPPSAPSAQKKLRTKQDEELRQQYYRILGVDLTAVPSLNVGTVQTFVAEVGPDLSRFRSASALASWLGLCPDNQISGGKILSSRTRKVDNRLAAALRMAAESLCRDKSYLGQYYRRMRARLGGPQAITAAAHKLVRIIYRLITTGEGYNEGHFARIEARNSERFRLRLAQQARKLGFTLVPATRTVAEGVS

SEQ ID NO: 246963 - protein, 340 aa, unidentified
MRFYNRQHPYYCGIDLHVKTMYVCILDGAGQVLVHRNIPSTPAAFLEVVGPYRGDLAVAAECMFTWYWLADVCAAEGITFVLGHALAMKAIHGGKAKNDKIDSHKIAVLLRGGMLPQAYVYPAAMRATRDLIRRRLHLVRKRGQLLAHIQNTRAQYNLPVFGRKLAYRANRDGVVEHFPDPSVQKSIEVDVALIDQYDALVNDLELTIVREAKRHDADAFHRLRSVPGIGKILALTILYEIHDITRFDRVQEFASYARLIKCTKESAGKKLGTGGTKMGNVHLKWAFSEAAVTFLRHNRDGQKLLARLEKKHGKGKALSILAHKIGRAVYYMLRVDEPHA

SEQ ID NO: 246964 - protein, 319 aa, unidentified
MNTTNRIYIKSSHRNIGIDVGKDTLDIYVYELSLHWQEANSPEGIRRLMSRLKRFQLTRVLVEATGGYERLLIEAATEQSMPIIIVQPIQVRQFARAQGAFAKNDKIDARLIAQYGVLLQPEVRVLPGKKVRRVRDLLARKRQLNAMRTMELNRSHKTQKIIAASHRRLLKLLDKEIAEINEKLTREVSDIAEWRRTYDVISSVPGIGDGVAFTLLGELPELGRLTNRQIAALCGLAPFNRDSGKMRGKRRIRGGRAPIRTVLYMAMLSAIQHNPVIKQFYQHLVAQGKNKKVAITACMRKMMTILNTMVRNDQEWQMN

SEQ ID NO: 246965 - protein, 463 aa, unidentified
MKKVMQPSKNVQLPSHLQQLNLFAAGIDIGSKSHFVAVPEGTDEKSVREFACFTADLHRLVDWLVSCLVTTVVMESTGTYWIPLFEILESRGLEVKLVNARHVKNVPGRKTDVLDCQWLQQLHTYGLLEGAFRPPEQVCALRAYIRHRMNQVRYCAAHIQHMQKALIQMNLLLHNVVSDITGVTGMQIIKAILAGERNTQVLAGMRDRRCKNSIATIAKSLEGNYRPEHLFSLKQAVETFEFYQSQIAKCDQEIEALLVTFDAKVADSPPTNSGTEADTPSKAVFNLKDELYRVAGVDLTKINGIDSATVLKIISEIGVDMDRWKSEKHFASWLGLSPGSKVTGGKRLSGKTKPVVNRAATALRMAASTLYRSKCALGAYYRRMKARLGAPKAITATAHKLARLIYSMLKHGKEYTDLGQDYYEQQYKSRAVKSLKSRARELGFELIESNKQNINNNKNMVLA

SEQ ID NO: 246966 - protein, 354 aa, unidentified
MIVGGLDVHRRQITYDWVDTETGEARRGRLAPADREHLRVWCAQFVGRRAAFALEGCTGWRYVVEELQRAGIEAQLAEPADTRALRGPKRHAKTDQLDARHLRELLTAGTVPQSWIPPAHVLEQRIRVRTYQDLRDERTAWQQRMHAQLFHQGVAADRDLLVPERRQRLEQGTGLSPAGREQVAVALRVIDALDVDLDLLRRELTRFARRQPGCRALLEHYGIGPVTAVAIWAELGDVRRFTSSRQAVRHTGLDVTVYSSDAKRTPGHLARQGPPVLRWALFEAACCAARAGAPDHAYYLQVKERLGGNRAVLSVARKLARRCYHTLHALGERALLPVEPDPTPSCREPLTAVA

SEQ ID NO: 246967 - protein, 342 aa, unidentified
MYYIGLDVHKKTISYCVKDASGQVHQEGKVGATRRELDSWIKTLPQPRTMAMEATIFTGWIYDHLLPHAQQVKVAHPLMLRAIAAAKKKNDRIDAGKIADCLRCDFLPECHIASTQIRDRRRTLRYRHLLVRQMVQMKNRISGLLMETGVSYNKQRLHKVGYFRELLATNEDVHESIRPLLKVSRDTVVRLQKTEYALVSSLQRDPLLADRVKRLRTVPGVGPITALAWALEIGDVARFRSIRQAISYCGLCGEEKSSADKVMRTPLSKQRNKHIQRVLVEAAKLAPRQDHDLALVYETEKQKGNANRATLAVARKMVAYLLAVDRGERDFVPAENYQRAAA

SEQ ID NO: 246968 - protein, 322 aa, unidentified
MNTCSIPFEQQVERAAGLDIHKVEIVATISGVGITTATRDFKSTTSSLTELKDWLLTNGITHVAMESTGVYWKPVCNILESGGFTILVVNARHIKYVPGHKTDKKDSAWICKLLRAGLLKGSFIPGVEQRNLRDLTRYRRKLVQQQSAETNRMIRVFEDANLKLSSVFSNVHGKTCSTVIEAILSGRTDADYLSSLCTHRNLKCTQEEIRAAVEGRFTEHHKFMLEVIRENIDHLEAQIITLDKRIDELVAPIGDEIARMAEIPGMGQTSAKELLAEIGVDMEVFPTEGHLASWAGVCPGNNESAGKKKARKRIMGTKPRKR

SEQ ID NO: 246969 - protein, 342 aa, unidentified
MGQVSTIGLDIAKRVFQAHGADSAGNEVFRKKLTRAKVLIFLASQPSCVVALEACGGAHHWGREIAKLGHRVKLIAPKYVKPFVKRQKNDAADAEAICEAAQRPTMRFVAVKSAEAQASALVFRTRDLLVRQRTQIINALRGHLTEYGLVVAQGPAHVAELIEYIKDPRCELPQKARPILCVLTASLQDLNEKITLLDREIAKRAHEDPVACRLTTIPGIGPITATAIAALAPPVETFKRGRDFAAWVGLTPQQRSTGGKQKLGATSKMGERTIRRLLIIGASAVVRQAVRRGAPQVSWLARMLARKPRMLIIVALANKMARIAWALLAKGEVYKAPVAVAA

SEQ ID NO: 246970 - protein, 370 aa, unidentified
MRPPQSREGPTALILDCGDLTKHPYFVGLDVHKQIIAYCVKKVDGQLVTEGTIKATRTALAEWVKSLPQPWVGGMEATMFSHWIYVALQPHAAELYMGHAARMKAISAGKKKSDKLDSRTIADLLRCNVFPKCFVIAPELGRLRQQLRFRQLVVKQQVAFMNKTAGLLMETGIEYERRRLHGKRYFSELMATTHWVNQELKPLLKFSRQQIESLAGMDKRLIRMLEKHPQLRARVAALRTIEGVGPILALSWALETGTPERFPSIKDAQSYCGLTSAFWESAGQQKRRPLSKQRNQHLQTVLIEVANLAPLYNEKLKALYQKEKAAGADSNQATLEVARKLVAYLLAVDRLFGDRHSSNARPEPMRRLRF

SEQ ID NO: 246971 - protein, 402 aa, unidentified
MNAVGIDVSKSKSVVAIMRPFGEIVSTPFEIKHTASDIHSLIELINSVEGESRIVMEHTGRYYEVLAHQLLEANLFVSAINPKLIKDFDNDSLRKVKSDKADAVKIARYALDKWQNLKQYNVMDELRNQLKTMNRQFGFYMKHKTAMKNNLIGILDQTYPGVNTYFDSPARSDGSQKWVDFASTYWHVDCVRKMSINAFIDHYENWCKRKKYNFSQSKAEEIYGKAKELVPVLPKDAITKLIIKQAVDQLNSASTTVESLRTLMNETASKLPEYPVVMAMKGVGTSLGPQLMAEIGNVSRFTHKSAITAFAGVDPGVNESGTYEQKSVPTSKRGSADLRKTLFQVMDVLIKTHPQDDPVYQFLDKKRAQGKPYYVYMTAGANKFLRIYYGRVKEYLASLPES

SEQ ID NO: 246972 - protein, 376 aa, unidentified
MEATSMTNVIHIGIDVHKDSFSLCSFSFLTKRLFGQTKIASKASLVIKYVQRLQKEQPEREVLCGYEAGPTGFGLYRELEKIGIPCVLMAPTSLPKAPDNRVKTDRLDAQELAQHLAWGTYSAVHVPTSENEAVKDYTRMRNARVLALKKAKQNLLSFLLRTGRTFTEGKTYWTQIHFNWLRKQAFVDPLFQDTFKEYLQEVFDQQEKVDRYNSKIEEIANQDEYRERVSKLRCFRGIETHTALSLVAEIGDFSRFISPAQFSSFLGLVPSEESSGQRERRGGITKAGNTRLRLLLIEGAKASLRSGIYVKKPKRLQARQKGNDAEVIAYADRANRRLHRVYSNLTSRGVHNNKATVAVARELSCYIWGMMNNKIQ

SEQ ID NO: 246973 - protein, 371 aa, unidentified
MKDTRFVGLDIHKERISIAVAESGRSGAVNYLGEIANDPGAISKLCDRLRRPGKPLAFCYEAGPCGYGVHRQLTSLGHRCDVVAPSLIPTKSGDRVKTNRRDATMLARLHRAGELTPVWVPDADHEAMRDLIRLRSVVRHIVTRARQHLQGFLLRHGRKHGRGTAWRMAYRRWLSTLAFEHPAQQIAFQDYVDAVTDAEGRLKRVEEQIFGLLPDWNLCPVVDALQAMRGIALINAVVLVTEVGDFTRFSNPRQLMAYFGLVPGERSSGETVRRGAITKTGNTHVRRALVEGAWAYRMKARIGRHKVDRIEALPKIVRDIGWKAQVRLCARYRRLSARGKTANVVNVAIAREMVGFIWSIACTIQSAPKTA

SEQ ID NO: 246974 - protein, 358 aa, unidentified
MKGTGLMIVLGADMHKSSHTIAGIAAATGEMLGDKTARVGTRGFGEVLVWARGLGADRVWALEDCRHVSGSFERFLIARGERVVRVPTRLMASSRRSSRERGKSDRIDAVAVARAALAEGIETLPTAALAGPELDIRLLVDHRERLVRTRCALNNTLQWHLHDLWPELELQGSSLFYGKWGPRIARRLARAEQTMRVRIAHYELRRLRELTQAIKALEAEIAKLVGQVAPQLLTEPGFGVLTAAKLVGEIAGAGRFASDAKLARSAGLAPIPVSSGRTDRHRLDRGGNRQVNAAIHRVAVTRARCHQETIEFIARKQSEGKTHREAIRCLKRHLARRIWQLLRAPHPESETAPHPSIS

SEQ ID NO: 246975 - protein, 344 aa, unidentified
MDHFAGLDVSVNETSVCIVDDTGRILREVKVASEPDALLPVLTNPTYHFKRIGLEAGPLSQWLFGALAEAELPVVCVETRHMQAVLKAQINKTDRNDARGIAQMMRVGLYRPVHVKTLRSQKLRTLLTHRKLLQSKAIAIENDLRATLRNFGLKVGMVGKVRFEERIKELVKSLPDLAVLIEPLLVVRRVLREQIVILHRRLLAIVREDEVCRRLMTTPGVGPVVALTYRATVDIPARFRKSKAVGAVFGLTCSKYQSGEIDRSGRISRCGDEMMRVMLYEAAQSTLRSKKWSWLKAWAMQIARRRGMKKAIVALARRLAVILHRLWVDGTEFRWTREQATAAA

SEQ ID NO: 246976 - protein, 341 aa, unidentified
MKRPKYYVGVDISAENFMVAVGEEPWRVVAKGEEFRNKLEGYEKMKAWMKKRGIGEENAVLCMEATGVYGEGLAYYLQANGYQIAIEAPLKVKRAFMPTGHKNDRVDSQQIAEYAYRFYDELVYWKPREEILEQIKVFLEIREQYVVQKTGHFNALKALKRKVVQTPLAEALHERSIDQIKKNIKEIDAEIRRLIDQDPKYGDIIRLLMSVPGVGLLLASNMLLIIESAPDEVPPKQMAAYIGISPYEHRSGNSVYKPDSSRHYGPTKVRKLLYLASLSVRTHQEQFKKYFLRKVDEGKPKKVVLNNIANKLVKIMCAVVKTQTPYIPNYRSIHPSLYKMS

SEQ ID NO: 246977 - protein, 339 aa, unidentified
MSAIKTLGIDLAKNVFQLHGVDAAGKAVFKKRLSRKEFIEFMPKVDCECIVMEACGGANHWARKFFSFGHTVKLISPQFVKPYVKTNKNDAKDAEAICEAASRPSMVFVHPKNIDQQDIQSIHRIRQGYLGHRTELTNRIRGILQEYGIVVALGVIKLRKALPLIIEDGENELTMRIRLILQDLYEELLHLNEKIQKYDTVLESIAKEKASCERLMTIPGVGVMTATCLYSTLGDGKVFNNGRHVAAFLGLVPKQQSSGNKQCLGSISKRGDKYLRTLLIHGGRSILRVAEKREGKLFDYAKRLKQTKHSNKVATAIANKLARTAWAVLVSEQKYREIV

SEQ ID NO: 246978 - protein, 403 aa, unidentified
MNNVAGIDVSKGKSMVSVLRPFGEVVAKPFSIGHTGSELKELADYLKSLDGETRVVMEHTGRYYEPVARFLHDEGVFVSAVNPKLIKDYGNNTLRKVKTDKADSRKIARYGIDNWAELRQHTPMDTIRMQLKTLNRQQSLYTKTKTMMKNNLIALLDQTYPGVNALFDSPVREDGSQKWVDFATAFWHVDCVRNMSLTAFAERYRKWCKRHGYNFSQSKAVEVHAGAQDLIAMLPRDALTKTMVRQAIDALNAISASMERLKAEMQALAAQLPEYPVVMAMHGVGDSLGPQLMAELGDVTRFTHRNAITAFAGVDPGADQSGTHEAKSTRVSKSGPPELRRALFLVMDCLLKTQPQDDPVYRFMDKKRAEGKPYLVYMTAGANKFLRIYYGRVKEYLASLEGN

SEQ ID NO: 246979 - protein, 344 aa, unidentified
MQHYVGLDVSLNETAICVVDENGVVIREGKVPSEPEAITAWLIKLDCSVARVGLEIGGLARWLYTELRSAGWPAICIDPRRLRGLTKTMPVKTDRNDARAVAQVMRVGWYSIVHIKSEVSQELRMLLTNRKTLLIKKIDIENEIRGTLRVFGLKLAGRVTQASFEERALELVADKPRLSAMLRPMLAARSALAKQCAVLHKMLLDVVRGEPTCRRLMTVPGVGALTAVTYLTTIDDPARFRRSRDVGAHLGLTPRKYASGEIDHNGAISKCGDSLLRTTLYQAALALLTRTQHWSTLKAWGVTVAKRRGLRRAVVAVARKLAIVMHRIWADGSEFRWSREEVTA

SEQ ID NO: 246980 - protein, 320 aa, unidentified
MTQDLFIGVDVSKATLEVVVLPGEHAFSVDNSEEGIHHLVTKVSQLGIPKIILMEATGGLERRALALLGAAGFPVTAINPRNARDFAKSIGLLAKTDRVDAKALALFAQRNLPPCRPLPDQQTRALQDLIQRRRQMLDMLSAEQSRLPVVENPKVRREIQSHITWLKKRIQVVDHDIDQSIKDSPAWQPKSDLLRSARGIGPVMASTLIGQLPELGKLTNKQIAALVGVAPFNRDSGTIRGRRCIWGGRADVRNVLYMATLAAIRFNPTIKAFYQRLCQAGKLRKVALVASMRKLLTILNAMVRDKQPWRSSPTEISLES

SEQ ID NO: 246981 - protein, 430 aa, unidentified
MLPVINALEVQKGKPAMKQNTTELENPRRRVVRKNKQRELTIGVDLGDKTSRYCVLDREGNVLFERSTATTKKGLAQAFASMGASRIAMEVGTHSPWVKRLLESWNHEVIVANAHRVRLITESTRKDDRLDARKLARLARVDPELLSPIRHRSEGAQADLVMIRARAALVEARTKLVNSARGVTKSFGERLASCDPDQMRVKCLVGLPSSLQSALQPLVTAVESLTRQIHEYDNKVAQIARSEYPETARLRQVTGVGELIALTYVLTLEDPQRFRRSRDVGGYLGLRPKRRDSGASRPQLRITKEGDVYLRTLLVQGAHYILGWHGVDTDLRRWGLKLAARGGKNAKKRAVIAVARKLASGVDERVQHDFYRPPSSSDCARATSQGAHMALKGRFRDSSTRIRIEDPNWHGATGSRQSANGSRASRRNWK

SEQ ID NO: 246982 - protein, 359 aa, unidentified
MDKYIGFDIDSKKTVACVVEKGKKEMYATMGSDVRSMRNFLKAQKADGSRVHLTFEVSGQAGFLYDSLIDCADTITVSNPSKMTWIYRTARKNDRIDARKQAVLLSIGEIPRVHMPMVEVRQWRGVILHRRNLVNKVTEVKNRIRAVLKSQGFSRPFQKGSWWKRSNRLWMRELSGQRIISMEPWRMNFGNLIEQLDLLEGQVKRVTEYLDEYLGRQAGGKLLMSIPGVGPRTAEAVLAYTDDVDRFGNTRGYCSYFGLTPRLDESGTSRRLGHISKQGPSVVRWLLCESSWKVIRKSRALRGFYERVKCGQENRKKIAIVAVCRKLLAIMRAMLTTGELYNEKLVGRECWNNETVKAS

SEQ ID NO: 246983 - protein, 414 aa, unidentified
MALVRWVGRAIGLDVHRDFCVVAICEDGKVRSAGRVPSTPEGLAALTESLLPSDRVALEVTGSCWEVARILEPHVQRVIVVSPDDTGISSARAKTDKLDSRALAVLLWRGELDAVWVPDERCRILRRRLARREQLMRARTRSKNEIQATLQRRLVAKPPFADLFGVTGRRWLVDLELPVEERESVDAGLRHIAFMDSEIAAVDRLIARQALAWPEIRRLMTVSGVNLICAASFLAAIGEPSRFMASRKLVAYLGLDPKVRQSGETPARSGRISKRGSASARWALVEAAWSVVKQPGPLRAFYERTRARRGHGKAIVATARKLTVLFWCMLTRGEDYAHQRPALTKKKQRQLELTAGAPARTKQAAGIWSTNRAILHAERALAEQAEVSYKRMVTDQQAGAPSRKVGASATPERA

SEQ ID NO: 246984 - protein, 353 aa, unidentified
MATGRQHGPGERPRHYSVASGDLGAVQERLARARTWWGLPAATCVVSCYEAGREGFWLHRALTAQGVRNVVVDATSIERDRRAKAVKTDRVDAERLLELLVAWTEGRKRLRTVRVPSAADEDARHADRELATLKGVRTALVNRITGLLGAQGIPVRLTPARRVDVAALRDWAGAPLGPGLAGRLTRELAELTAVRARIAGLEQARQTAIATAATPATAQMAQLVQLRGIGANGASRVVVEFFAWRGFRNGREVGALAGLTPTPYQSGAVAREQGISKAGNARVRTMVIELAWCWLRFQPQSALAQWYQARFGAGGRRQRRIGIVALARKLLIALWRYLDAGVIPDGAIVTGAA

SEQ ID NO: 246985 - protein, 419 aa, unidentified
MSFKIYLKNACGLDVHKTWIYACIGIADANNIVHYHEKRFSSFTKGLNELAEWLAFYGCKDVCMESTGKYWIPVFNILEKNCNIVLAHPKYTKPQKGNKTDRKDARFICDLFMCSMIKPSFIPPADIREIRDLVRYRFKLTNMITGEKNRAHNCLTVSNLKLDDVFSDIFGKSSLSITEYMLAHPGEKFDVTPFVNGRCKTPVEEIQAAVDGAISDGQAAKLRECLDHISQLEKHKEKIEQEILSFTGKYKDSLDLIRTVPGFDKNPFTAIQILSEIGADMSVFPTDKNLVSWAGCCPRNDRSASHVKSTRISRSGSYLKPVLVQIANAIIRSKDHPEFRDRYRRIKAHRGHKKAIIAICRMLLTAIWHILTDKKPYTADGFTISTPVREKTVLTRSQALYLLRQRGYIIKDDEPQTAS

SEQ ID NO: 246986 - protein, 347 aa, unidentified
MNIIGCDFHSRSQTIEMLDTDTGEVVEKELDHENGEARRFYEGLKGPVLVGIESTGYTRWFADLLAKLGHELVVGEAGKIRAQDPRKQKHDRRDAEHILNLLVKGNFPRIWLPPAEERDVRVLVEHRHQLVELRTRAQNGLQAMALSYGLRRRKRLWTAAGQEELQNLPLREGMKRRREDLVQLVRQLSVWIKQLDQRIAEEVSRRQDAQRLMTHPGVGPQTALAAVLVFGPVERFPDDRHLTSYLGLIPAEDSSAGRQRFGHLTKQGNRLMRFLLVEAAQTASRYDERLRRVYRRLAFRKGAAVAKVAVARKLAIRLYIMLRDRIDYTEFCRRGSHAGMLGDVALA

SEQ ID NO: 246987 - protein, 336 aa, unidentified
MNSVTLGIDLGKRWFHVVGCDAAGKVVLREKLGRNQLLQLMAQHPPCLVGIETCCGSQYLARKFQGFGHDVKLLPAQYVKPFVKSQKNDFNDAQAIAEALRLPTMRFVPLKSEEQMDVQALHRARERMLQQRLALTNQIRGLLLDRGIEIAQGFYALRTVLPALLEKEDAGLTPMMRDLGHMLLDMWNHTETTIEQMNDRLKCLSRESDLCRRLQTIPGVGVLLSTAIVSAAGNASTFRRARDLAAWVGLVPQQHTTGGKPRLLGITKRGNSYLRRLFVQGARALWVWKDKHPNDPIQPGKSNLPNAGMRTLQSAHWQTNSYALHGLSCEAARSLT

SEQ ID NO: 246988 - protein, 341 aa, unidentified
MKLIRVGVDLAKNIFQVHGVGDHEKAVWRRKLTRASWLKVLLETAEPGCEIGMESCGGAHHWARQLQAHGFKVRMIAPQFVKPYVKSNKNDANDAEAICEAMSRPHMRFVAVKTVEQQDIQAVHRVRAELTKQRTAKANQIRGLVAEYGLVAPKELEHLRRALPCWLEDMENGLSERFRRLLNGLWGDLQALDERMAELDREIAVIAQNDPVAKRLQQLRGVGPIIATALVAAVGNGEQFANGRQMSAAFGLTPRQHSSGGKERLLGISKRGDVYLRVLLIHGARSVLRTSKDKADRLSQWVTRLAARSHPNVAVVAMANKTARMAWAMLKNGTDYQPGTS

SEQ ID NO: 246989 - protein, 337 aa, unidentified
MTLYCGIDLHANNSVVAVLDESDQTVYEKRLPNDLATIIHVLCIYQAELAACVVESTYNWYWLVDGLMAAGFPVQLAHTSALPQYAGLKYTNDFSDARQLAHLLRLGILPTGYIYPKEERALRDLLRRRLLLVRQRTLHHVSLQSLIARHSGQRLSAYQIKTLTLPQIADYLQGPALLGGEITHQARCWLDGAIKRIERELQHQIKPRQDYQLLQSIPGVGPVLGTTIVLETGTIERFASPGNYASYARCVKSEKISNGKYKGQGNKKNGNKYLAWAFMEAAHYGAIWNPRIKQYYRRKQAKAHILVAKKAVANKLARACYHMLKRGEKFDVKRAFG

SEQ ID NO: 246990 - protein, 466 aa, unidentified
MPIDKKQWQNRKERKELARRLRSEDPNLEVVHPHAAGVDVGNGAHYVAVRPDCDSQPVRRFECFTADLHRLAGWLQSCGVQTVALQSTGVYWIPLYDILEESGFEVYLVNARHTKNLPGRKSDVQESQWLLKLHTYGLLNNSFQPTSEIRVLRTYWRQRAEHARGIGTCILRMQKALTQMNLQLANVISDLSGVTGQKIVRAIVAGTRDPRKLAELSDPRIQASKEEIAKSLEGNWRQELLFVLKQEVEMYDTYQRRMVECDQQLQEHLTSFADTVAPQVKAGETQKKTAKQKNKNAPQFHLSGELHRITGEDLTRIDGIDVMVAQTLVSEVGLDMSRWKTEAHFASWLGLCPDNRISGDKVLSRGTRHVVNRAATALRIAATTLLRSQTYLGAQYRRLRSRLGAPKAITAMAHRLARLAYRMLKYGQQYIDRGAEYYEQRNRQQQIEFLRKKAAKLGLQVTAAHP

SEQ ID NO: 246991 - protein, 345 aa, unidentified
MEIHTIGIDLGKTVFHLVGLNVHGEVVVRKKFSRKQLLRFTANLQVALIGMEACGGAHFLGRALREQGHEARLIPAQYVKPYVKTNKSDYIDAEAIAEAVARPTMRFVPIKSDDQLDLQSLHRVRERWVMRRTAVVNQIRGLLLERGITVRKGRCHLEAALPGVLEDATAKLSGALRLLLAQLQLELDQLALRVEEADALIQKIAQESEACRRLDAIPGIGPVTATAIIAAIGNGAAFGKGREFAAWVGLVPREHSTGGKQKLLGISKRGNSYLRQLFIQGARAVLQFREKQSSGLSAWLAQLTSRVHHNVAGVALANKLARIAWAVLAKGEVYRPPTLASGASA

SEQ ID NO: 246992 - protein, 312 aa, unidentified
MNKIVCGVDVSKGWLDAHVEPSGAVGRFGNDAAGIADLAAWCQSHDVELVVMEASGGYERLAFLLLWELDVCCGLANARSVRYFAEAMGFLEKTDKIDAAMIARYGAVKQLKAMPPPNAAQLRLKALVARLSQVTGDLTVQKQRKSAALDAETIASLDEVIALLTRQSRRLEGEIASLIDDDPLWACLDRAFRSLKGVASRTVPRLMAQLPEIGIVSNRAIAKLAGLAPIANDSGKRSGRRSVRGGRAGPRGVLFLVASIVAKYDPHLAAFKQRLQAAGKEKMVIRIALARKLLVILNAKARDARKQFANAT

SEQ ID NO: 246993 - protein, 464 aa, unidentified
MRNKRVSGKGARRSRPLLERVNANAAGIDCGASAHYVAVPPERDSEPVRCFKTFTADLHRLADWLVACGVKTVAMEATGVYWIPIYEILEGRGLAVLLVNARHVKNVPGRKSDVSDCEWLQQLHSVGLLRGSFRPSAEIAALRSYLRHRETLIQSAATTVHRMQKALVLMNLQLHGVISDITGTTGLRVLRDILRGERDPVLLAQHRDPRCQASEGEIAAALAGHYQPEHLFVLGQNLELYDVLQGQIRSCDTQIETYLRRLAIDAPVPRDPLPPARSRRKLSRNEPTFDIRSVLHQLSGADISQVHGIGSYNALRLVSEIGHDMARWPSEHHFTSWLTLAPDNKISGGRLLSSRTQPSANRAAAILRGAAMSVGRTQTALGAFYRRLAYRIGKAKAITATARKLAILVYRILKGTLIYKDPGADAYDSRHRESVLRRLRNRAAGLGFSLVSQQTGEVLEEEVS

SEQ ID NO: 246994 - protein, 422 aa, unidentified
MKKIQTKKLKFVNDKTLIATVDIGKGLNMGYARCPDHSVVKPFEFANNRAGFDKFWDCLEKARDSKNLDSIIVGFESTGAYGEPLQHFLKNKPVRLVQVNPMHTKRVKELQGNSPNKTDRKDPKVIADIIELGHSLTVVIPEGAAAELRRLTLARERANKRCTALYNQLQDLIFISFPEFSQVIKDVKTKTARYLLQTYPDPQDIIDLGLESLGAVIKRVSRGKMKPAKAKDLFEAARTSAGITEGRFSVALEIQATLEAIASSDDFVSRLGEEMSRHLEDIPYSHLLLSMKGIGRVTVAGLIGEIGDFNSFDTQRELLKHAGFDLFEISSGKLRGSRRISKRGRPLLRKLLFFAALNTVRKGGVMHAHYQRHLKKGMKKIKALVAIARKLLGIIFALVRTKHEYQEDYQKIQAAATIPMAA

SEQ ID NO: 246995 - protein, 434 aa, unidentified
MIQSMSSSSNLKGGFAMKVVYPICCGIDVHKTFLVATIITSKGLTPHYSKKRFSTFNNSILQFKQWLLDNNCFDVCMESTGKYWIPVYNLLEDTIRITVANPKWVKAVKGNKDDTKDSKWIGDLFRLGLVPGSYIPPKPIRILREYTRYRYKLVSCKSSEKNRFQNAFTVCNVALDAVVSDMFGKSAYSITDYLISSDSFDPKHCSTLLKKSLKKKADIVTESIEGYQMTQEQKERILMIRSHLEFVQESISKLDEKLNEMVVPFESAISLLRTIPGIERNSAITIISEIGTDMSQFASSKRLCCWAGLTPGNNESAGKKKSVRITRAGVYLKPALVQVAHASVKSTKSPYYKNKYERIYKRRGKKRAIIAIARMILTAIYNVFVTGEEWNPCDLFKIDMPQELLDKQKQKAIKQATKLLISEGIIKSSDVSVA

SEQ ID NO: 246996 - protein, 427 aa, unidentified
MAYRIAAIDVHKKMLAVVVADVAGEGEYQFERRKFGATPDQLHLLAQWLVQQEIEEVVMESTAQYWKPVWGALEQYWKPARQKREGATKMSGTLHLCQAKSNRGRRGRKNDFVDGERMIKRLVAQELVLSFVPDPEQRLWRTVTRRKHQLTRHKVRFQNQLESLLEQAHIKLSSLVSDLLGVSARRMLKAMAEGETDPAVLAALADYRLRATPEQLRDVFGACAQLPGVYRRLLKMALEELKLVEDQIEQLEREAFDLLKEHQDKVQRVAEVPGFGVDSALQMIAELGPAAAAFASEKALASWVGVCPGDEESAGESKSTRSPKGNRPMRRLLNQAAHAAIKVKGSIFQVTFQRLFPRMGYQQAIWAIAHRLCRLLWMILRKGIHYEERGPAVSAKSKRTRAARMIKELKALGYRVEGGPLPAGAPV

SEQ ID NO: 246997 - protein, 440 aa, unidentified
MSYRGKEDENTTMSDKQTVQPEPKFVAFVGIDWADQKHVWSWQKADSMQREVGELEHTPEAVEAWVGELCRRFGYGPIAVAVEQVKGALVYMLRKYECLHLYPVPSTMSASMRQALYPSGAKDDPRDADVLLELLLLHRDKLHRLTPDNEATRQIQNLVEERRKLVEEKTAQLNRLIGNLKVYFPQMLEWFGKLDSKLVCDFLERWPSLEELQKVPPAELKRFFRHRRGRHGQLTEWRMAGIRQAMPAIGDQAVIEAKRMVVQVIAQLLRTLLEGIATLDRKIAEAAETNPDFFIFQSLPGAGDALAPRLLAAFGSQRDRYGSANEVQKYSGIAPVTERSGKKKWVHFRWACSKFLRQTFHEWAGHSIAQSVWARAYYYQQRERGKEHQAAVRALAFKWIRIVFRCWQDRVAYDETRYLMALAKRGSHLASAFAAATVSM

SEQ ID NO: 246998 - protein, 388 aa, unidentified
MNTQTVNQLTPSATSTCFMAIELSNTSWLIGMMTPLSDKISLRKIDSGAVQQLIEIIDRAIEKVSRATGRAPQIVSCYEAGYDGFWLHRVLEARGVVNHVLDAASLMVSRKARRAKTDRLDAEKLVRTLMAFWRGEPKVCSILRVPSIAEEDAKRLHRERQFLMKERVQHMGRIKGLLATQGIRDFWPNRRDWAQQLRASITGDGRPLPPQLTAEISRHCQRLALVNTMLNEIDAQRDAAAEAKTKVDSSQPQCDDSIRRLVQLRGIGPQVATVLEREVFYRRFKNRRALSSYLGLTPSPFQSGSMDRDQGISKAGNPRARTVSIELAWLWLRYQPQSALAGWFKQRTGSLKGRIRRIIIVAVARKLMIALWRYLEAGLVPDGAVLKA

SEQ ID NO: 246999 - protein, 368 aa, unidentified
MKQQTSATTETIIKGRNIIDFTGKTMWVGIDMHEKDLQVAKVLDGICLGNHRMPANGKALIEHLRTRYRGAAFKCVYESCAWGFTLQRELTAAGIECIVVHAGDVSSSDKERKRKTDKVDALKLASNLASGDLTAIHVPDKDLQKERNLIRFRKKLVGDLNRSKNRLKSLLKYQGINIPERLGKKNNWSLNFMNWIEDEAKKDILLQDTLLLMLEEIKLLRQLLLKTEKALRKLRQDKYDEQSKLLMSAPGVGRTTAMLFLLEIGDIKRFGPFDKLNDFVGFCPDTDSSGDTEHDTGITSRRHKQLRSALIEAAWTAIRIDPALMDAYQKLIKRMKGQHAIIRIARKLLRRMRAILISGIPYQKGVIV

SEQ ID NO: 247000 - protein, 328 aa, unidentified
MDPTTTTTVALFAGVDVSKDRLDVCLRWSEPESHQKEETFFVAYDDNGIDALLSRLLREPTVLVVLEATGGFERTVVGALAAVGLPVVVVNPRQVRDFARATGTIAKTDRIDASILARFAEAVRPAPKPLPDREIRALQAIVARRRQLLGMIAAENNRLSSAAKPVAKRIKAHIRWLEKELSRTEGDLEAAIESSPALGENEALLRSVPGVGPVLARTLLAGVPELGTLTHKRVAALVGVAPLNRDSGTLRGHRSVWGGRAEVRGALYMGALVAARRNPVVKEFYERLLVAGKPKKVALVACMRKLLSILNAVLKHRTPWRSPQYLSP

SEQ ID NO: 247001 - protein, 349 aa, unidentified
MIVIGVDTHKRNHMLVAVDGQTGGLRGQREIPASDAGSLEALRFAAGLGEERVWAIEDCRHVSARLEAALIAAGEQVIRVPAGMTGQTRKVSRQAGKSDPIDARAVALAVVRDGIESFPVAFTDEHAMEIRVLCDYRDQIICERTRMINRLRWHLVTIAPELEVQLGQASLRGPRICARLSRQLARLAPSPQLRVARLQLKRISEIVREERQLFAELTTLIQTQVPQLLDQPGCGTVTAAIIIGRTAGARRFPTDGHFARHAGTAPVPASSGKTQRHRLHRGGDRQLNRAIHIIALSRAKTDPETRTYLARKHAEGKTKLEAIRCLKRHLARRIWHLLYNAEISAARPH

SEQ ID NO: 247002 - protein, 343 aa, unidentified
MYYIGLDVHQKTISYCVKDAAGRVYQEGKIGSTRRELDAWIKTLPQPRMMAMEATIFTGWIYDHLLPHAEKVKVAHPLMLRAIAAAKKKNDRIDAGKIADCLRCDFLPECHMASTEIRDRRRTLRYRNLVMRQMVQMKNRVAGLLMESGVSYDKQRLHKMGYFTELFTTNEEISDSIRPLLRLGREHILRGQRLDRVLISSLERDPLLSERLRRLRTIPGVGPITALTWALEIGDYTRFRSVKEAISYCGLCSAEKSSADKVMRMPISKQRNKHIQQVLVEAAKLAPRYSHELALVREKEIQRGNKNRATLAVARKMVAYMLAVERRQQDFVPAEEMAGKAAA

SEQ ID NO: 247003 - protein, 418 aa, unidentified
MTEFDFYLGVDWATEQHQACILDSQGQLLEQRKIEHSGQGILDFIAWMEGLAHGQVQRIAVAIEVPRGPLVEAFLEHQWAVFGINPKQLDRFRDRHTVAGAKDDSRDAFVLADSVRTDQHCFRRLTADHPDIVRIRELSRTEDSVGADLRRSVNQLYQLLLRYYPQLLQLCPTPDEPWLWALLELAPTPTRGAKLKTARIRQLLAKHRIRRWSAEEIADILAAPPLPLAPGSVEAVSEHALLLIPQLRLLATMRKQIGERMEELLDRMAASASEVPATKLCRDVSLLRSLPGIGRVVTGALLAEAAGPLEQRDYHAIRAHGGIAPVTRQSGKTKQVSMRYRCNTRLRNALYHWARTSVQHDPYSKHQYARLRACGHSHGRALRGVGDRLLTVLISMLKTGQPYDPKRRSSTASDTTAA

SEQ ID NO: 247004 - protein, 316 aa, unidentified
MNSPVFIGLDVSKQHLDVAVRPQNRHFVTSNDDRGIRQLLKRLAALKPQLIVLEASGGYEFLVTAALAEAQLPVALLNPQAVRKFAGATGKLAKTDKIDAQVLAHFAEALRPEPRPLPDQALQVLKAALQRRLQVVKMIGQEKNRLEKTFIPSVRQDIQEHLAWLQKRLKELDRDLNDQVRQSPLWRDRDRLYQSVPGIGPAVSRAVIAQLPEIGTLSGKKAAALVGVAPFNRDSGRFRGKRMIRGGRSYLRNMLYMAAVVASQWNPVIRAFYQRLLAAGKPPKLALTACIRKLVLILNAMVKNNQPWNQFINQVP

SEQ ID NO: 247005 - protein, 343 aa, unidentified
MVHYIGLDVSLMRTSICVVKQVGSVVREGVVESEPEAIAAFVRSNAPGAVRVGLETGPTATWLWTELKRLGLPVICIDARHAKAVLKMQINKSDRNDAAGIARIMQTGWFKEVRVKDLDSHSVRALLASRALLVKIKRDLENQIRGLLKNVGLVIGRAKFNVFTVRAEELIEDRPELMAVVRPLVKARQAIEQQTDDLDRKVLKLARYDAQVRRFMTVPGVGPITALCFKATIDDPTRFKRSRSVGAYVGLTTRRHASGEVDWTGRISKCGDAMLRSYLFEAAGVLLTRVPKWSALKAWGIRLAKRSGLRKAKVAVARKLAVILHRMWIDGTEFNWSTKKAAA

SEQ ID NO: 247006 - protein, 374 aa, unidentified
MSKIARIGIDTSKGSFQLHGVNEKDEVVLRRTVRRRQFLEFMAKLEPTVVGLEACGASHHWARELARLGHRVMLIPPQAVKPYVSPGRKNDKNDAEAICEAMSRPRVRARLVPVKSVEQSASQMLMGVRDSLLKRHTQLCNTIRGHAAEFGLVAAKGLDKIEPLLVRIAGDEGLPALAREMFADLGQEHAELSKRIAQIDRKLAAFHRSNELSRRLMEIPIVGPVGAGLLITRIINPRGFRSGRLCAAWVGLTPKNHSTGGKQRLGGITRAGDESLRAVLVSGATAYIQQVRRGRIVPSPWLAALLERKPPKLAAVALANKTVRIAWKLMTSGERYDPTHRVDREGPGASLYGGLRAEPLAPSPTAGHSHAVAA

SEQ ID NO: 247007 - protein, 358 aa, unidentified
MVDKVTEAAVVGGVDTLKDLHVAAVVDQNNKVLGTQYFSTTRQGYRQMLAWMTSFGTLKRIGVECTDTYGSGLLRYFQNAGLEVLEVTAPDRMERRKRGKSDTIDAECAAHAAFSGIRTVTPKTRDGMIESLRVLKTCRKTAISARRVALQIIHSNIISAPDELREQLRNMTRMQLIRTLGSWRPDASEYRNVTNVYRISLKSLARRYLELHDEIADLDVMIAAIVDELAPELIKRNAIGYESASQLLITAGDNPQRLRSESGFAALCGVSPVPVSSGKTNRYRLNRGGDRAANSALHIIAIGRLRTDAKTKEYVARRVAEGHTKMEAIRCLKRYISREVYTLLRNQNRRINSIPITA

SEQ ID NO: 247008 - protein, 348 aa, unidentified
MLADELDFVIGVDTHRDEHALALVACPSGARVQERLIGADERGYAAALAFAVERAAGRRAWAIEGTGSYGKGLARYLTQRDERVHEVERPKRQGGRARAKSDRLDALRAARSLIAAEKPALPRAAGLRESLRVLLQVRTSAVAARRVALNQLRALLVTCPEPLRAELRSLTRARLLRRCRELEPERTDDPELRSTLQALRLLAARVESLTAETRELEQELRAEAEQIAPALLAERGIGPIGAAQALVSWSHKGRFRSEAAFARLAGAPPIPASSGKTVRHRLDRGGDRKLNNVLHQIVITRRKHDPRTIAHIERRRREGKSEREAIRSLKRYLARHLFRLLETTTTPT

SEQ ID NO: 247009 - protein, 411 aa, unidentified
MYYVGIDIAKSFHVVSIIDETETMVVKKPFKVLNNLDGYHKFIDKLDNISTNSADFIIGLEATGIYGENLWEFLSSKGYNVKLLNPFQTSRYREQITMKKVKNDNIDSKIIALLLKDGKFSSGYVTDDEYQSLRTLYRNRASIQSDMKEVKKRILTQVTVTFPELENFIDIFTISGLALLDKYPTAKHYERSSVDRILKIFRHIQGNNFNQTKALEVLNLSQVSVYSGKAKDARAIAIRSSIRLLKMYQSELSILENEINILLDKKSIQSSQDDTTEPNSLIDNLKTIPGVADKTIAAILSECGDIARFNNVTKFIGYLGLFPTENSSGNSTKTGHLSKRGSSLVKHALYMSSVSCLIHNSQLKQLYDTKRSQGKSKQEAIVTVSRKLATIIYAIFRYNTPYNPARVFAKS

SEQ ID NO: 247010 - protein, 409 aa, unidentified
MDRQLERCCGLDVHKETIAACVRLGGRSGHATQQVQTFRTTAADLVVLHDWLAAQGVTHVAMESTGVYWKPVFYALESDFTCLLVNAAHIKQVPGRKTDVQDCVWIAQLLEHGLLRGSFVPPVPIRELRDLTRYRKALIQDRTRVANRLHKALEDAGVKLASVASDILGVSGRAMLQALAEGTTDPVLLADLARGRLRGKLPALRAALAGRFRPHHGFLVGQLLAHLDYLDEAIATLSAEIESRLSPLADQLTRLDSIPGINRRTAEVIIAEVGVDMSAFPTAAHLASWAALCPGNNESAGKHKSGRTRKGNRWLRTALIEAAAGASRAKDSALQARFRRVLRHRGPKKAVVALAHTLLRIAYHVLANGTVYRELGGDYHDRQHHQRVTRRAIQLLQRQGYRVTLEPAA

SEQ ID NO: 247011 - protein, 370 aa, unidentified
MEETITFVGLDVHKNSIAVAVADGGLAGEVRYLGVIDNTTKALDRLIARLKRPGRVLRFCYEAGPCGYGVYRHLQGRGYACMVVAPSLIPRRPGERVKTDRRDATTQARLLRAGELTAVWVPDADHEAMRDLVRTRAAAMRARHRARQQLSGFLLRHGRVRSGKNWTLAHRRWLSTVRFDHPAQQIVLQDLIDAVDDADARCARLVAQIVELLPQWSMAPVVEALQGMRGVALIVAVTLVAEVGDLRRFDNPRQLMAYLGLVPSEHSSGPRVRRGAITKAGNGEARRVLIEGAWTYRLQARVSRSLLDRLQGLPKPVREIAWKAQVRLCARYRRLSAAGKPQPVVTTAIAREMLGFAWAIARHVQPRTTN

SEQ ID NO: 247012 - protein, 346 aa, unidentified
MKILAVDLGKFKSTACIYQTETAQHTFETLPTRPQAVHDLIVEHAPDRLVIEVGSQAGWVSDLAEALEVGDIQVANTNHEAWRWKNTKRKTDRDDALKLAKLSAVDQLPQVKLPSKSVRQWRSLIAYRHTLIRRRTAIKNSIRAILDREGLRMPGGKNGWTKKSIKALQLLAQPVLQTCGDDLWRGQLHVELQALEQLKVLTDQVEEKLAILAYQDKRVRQLRTIPGVGPRLAELVVATIDDPHRFKNGKQVGSYAGLTPRQYESGTMSRQGKISGQGNKLLRALLVEVSWLMRRYNGYLRGVFDRVCRGSKTRRKIAVVATARRLLVICWAMLRDGTCWREPTTA

SEQ ID NO: 247013 - protein, 348 aa, unidentified
MTEAYDGQQVVGMDLHRRRSVLVRMTGDGRKLETARITNSPAELRRQIARAGKSPRVVLEATYGWYWAADTLAAAGAEVHLAHPLGVKGFAYRRVKNDERDAADLADLLRMGRLPEAWIAPHQVRELRELTRYRHKLVRIRTSCKDQVHAILAKLGIPVTCTDIFGVWGATWLDELVLPQPYAGKMASLRKVCAVLADEIAVLETVIAGLLEDHQGYQAVRALPGIGPVLGAVIVAEIGDVTRFPRPAELCSWAGLTPRHRESDVKVSRGHITKQGSRILRWALIEAIQHVPAGHPLRQRKDDIIARRGVQARNIAKVAAARQLLTWIFYAMRDGQVRSLAAAARQAA

SEQ ID NO: 247014 - protein, 337 aa, unidentified
MNKSESNFLPCGMEVSSPTLLVALGSKPRREFPNTPRGHQAILHFLEQAGKPLRVCLEATGHYSLDLALTLHQAGVPVMVANPRAVRHFASALMARSKTDPLDAEVLRVYAARMPFQNWQPPSPTALKLVAVARRLQALTEMITAEKNRLHAASLSVALPASVRLEIARHLRVLERHVQRLTAAANELIADDPLLTERYRLLLSIPGFGPTSALHVLAELSLLAPDLNVRQWVATAGLDPREHRSGTSVHSPARISKLGNARLRQGLYMPALVATQHEPHLAAFYQKLLERRKAKMQALVAVMRKLLHAIYGMFKHHQPYDGSKVHPLAPHQEALCA

SEQ ID NO: 247015 - protein, 350 aa, unidentified
MVMLGIDVHKDTHTAVGVDQVGTQEAVRTVRATDAGHRQLVRWARTQWPDERTWAVEDCRHVSGRLERALLAAGERVVRVPPKLMAGARQAARTRGKSDPIDALAIARAALREPGLPVAEHDEPSRELKLLVDHREDLLAERTRMQNRLRWHLHELDPELDVPARGLDRLVVLDRLTDWLSGRPAGVVVRLAAELLADIRAATVRITALEREITERVTRVAPALLGLPGCGALTAAKIVGETATITRFRSEACFAMHAGVAPIPASSGRTQRYRLARGGNRQLNAALHRIAVTQIRLPDSLGQAYYQRRRGKGDTTMEALRVLKRRLARVVFNLLQPTTTRTTGDLPVAA

SEQ ID NO: 247016 - protein, 357 aa, unidentified
MIKINQKADFSNHTIYVGIDVHLKSWNVSLYCDQQYLRSFNQPPKPIALRSFLESSYPGATYKCAYESGFCGYWIQRELLENKIDCMVVNAADVPQTDKNAKNKTDINDSKRIALALQAGLLHPVYIPDDEVEADRQLVRCNDRFNNDLVRIKNRIKGLLYQLGIELPVSFSNNNWNNQFITWLKNIEHKNVSVKIALLHQITMLETIRKQKLLLLKDIRKLLAKPRYADTASYLCSVPGIGPLTAASLLTEIDDMKRFATFEKLNSFIGFYPTQFSSGENIHQGNITGRQHKRLRSLLIEAAWVAIKTDPAMTKCFIEFKNKTGAKRAIIKIARKLLSRIRFVWINKIKYEKGVIQ

SEQ ID NO: 247017 - protein, 454 aa, unidentified
MSNKVIFNLDELFISVGIDVGADFSWMSIALPNQQFVGKPYKILHNSIDSLTTAVSKIKEAEELYSLESRIFLESTGIYHYPLFCYLRDKGFNCSVINPIITKNSTNINIRKVHNDRFDSKKAALVGLKPDLKVSLMPSDLALNCRNLCREYYDLMDNRSAYVNKLQGELRIAFPQYLGIFSKVTINTSLTLLETYTSPSAFLKADKQEIIDIIKSTARFGLTYAQNKYNAIIQAATDANQFGYIIDSNIKRIRLYISFIRKYDEEINSILESLHELVDANEDSDFVKQIHLIETFKGAGFLSAVSIMGEIGDFSAFSKPKQLFAYFGLDPAVKQSGKFEGTKVQMSKRGSAIARRVIHTLTLQSISISHNGEAKNPVLREYYLKKCDSKPKLVAMGAVSHKVCNMMQQMGYRRCNLAVCDCLGCRMDRTCDWNCNLKATKLRPQPALQLTDTA

SEQ ID NO: 247018 - protein, 333 aa, unidentified
MKNYDVFIGIDVSKLTLDICGIDNCNEVRIKHSVIKNSVNEIKSYFKKVIKNQRKNIIVGFENTGIYGALVASVLNELCIDYSQLPSLEISKSKGISRGKSDKIDALQIAQYLLSHRFKIKLSTIAENHITEMRLLYTHREKIIKSISQYHREFENKNFLPKEIQKDLIKSTNSILKNLNNNLEKIEKKLSDLIKENKTIEKNFNLIKSVPGVGKQTAIYLLLVTKNFTAFKEARQLACYAGVAPFPYQSGSSINGRNKVNNLADKKLKSLLNMCALSANKYDYDLKEYFEKKVTEGKNKMLVLNNIRNKILTRVFAVINRQEPYVNLKKFAA

SEQ ID NO: 247019 - protein, 341 aa, unidentified
MSIITVGIDLAKNVFAVHGIDNSGKAALVKPRVSREHLLPLVAQLPPCVIGMEACSGAHHWARLFLQYGHSVKLMAPKFVTPYRMGGKRGKNDAADAAAICEAVTRPNMRFVPIKEEHQQIILCLHRTRQGFVEERTATYNRLRGLIAEFGIVLPQKVANLRRHIGARLEDLPGFANRCVSDLLSHADQLNVRIAEYDPLIAKAAREDARSKRLMQCSGIGPVTASALLASIGGGHDFKNGRQVAAWIGLTPGQHSSGGKDRLGRITTAGDHYLRTLLVLGARTILNTLGDKQDPFSRWARNLVVRRGYGRAAVAIAAKNARLAWAVLRYGEDFRLSPSAA

SEQ ID NO: 247020 - protein, 342 aa, unidentified
MKNISVIGIDLAKNTFALCAMTAQGKVVWRKSLKRSLLAEFAAQHPTTLIAFEACGGSHFWARQFANQGHQVKMMSVVRVKPFAPPHKKNDPSDAEAIALAALQDGVPSVRVKGIEQQDIDILLNYREQLMKQRVAQVNQAHAIALEYGVMLPAGKSVKRLEDFFEHLEDASNHLTEVARSTIQKLLKNAKQLNDEANALEVQLSERLKGDSNLKLLKSIPGVGALTAAAILAHTGADVRSFKNGRQFAAYLGLVPRQYSTGGKTRLGGVTKSGSETIRRLLVIGTRSVINRSERKKDKVSQWISEKRKTRGYLRANLALANKTARIVFAVLKHQEKYRTTA

SEQ ID NO: 247021 - protein, 398 aa, unidentified
MDLPVYYELETNNANRDYRIQIGGHYMNYNTVYVGMDVHKESFTLCSCKYEDEKASHYQRTPASYKNVLRYLAFLRTIYGEDTRFVCGYEAGCLGYSLYHQLENFNVECVILAPTTMLEQRSKRRIKTDKRDAEIIAKSLAQHNYSPVHIPTKMDNQTKEFIRMRDDHKAELKKIKQQILAFCLRQGYQYDGSGNWTAKHVKWLRSLKTEGLYKEILDEYLLTYTILTDKLNRLDQRIEELASKEEYKESVSKLTCFLGIKIHTALSVIVEVGDFQRFVSARKFAGYLGLVPGQHSSGDDRNGLGITKAGNTHVRRLLVESAQSYTRGKIGYKSRVLRSRQAGNSPQIINYADRANERLRRRYYQMVLKDGKKYNIAKIAVARELACFIWGMMTDNIY

SEQ ID NO: 247022 - protein, 344 aa, unidentified
MEAKELLYYWVGLDVGKREFSAAVELGMGDRKLGVGSLPCRKFNHTKKGVAEFLKWVDKTTGGRPFKVVMEATGHYSVALCKLLQGKRKGLECSIVNPYLTSNFLKSLGLPHKTDDGDARGIARFGMERRPPATPLLPRQMEEMRELFRQRAALVETRSEFKNRAESRVGEVAQALNDELLETLDEYIARIEKALEELAGKIPWMKRQVELMLSIPGVGAITAIGLSAELGDLGLYTRQGISAASGLAPRLHESGTSVKASWIGRRGSRHVRHLLFLSSNQAIRKIPYLNAMYDRLLAKGKTKMQVKCACMRVLIQIIRSVVVHERPYSEDFSYKSLEKSLKTA

SEQ ID NO: 247023 - protein, 363 aa, unidentified
MSESRTVTVGLDVHARSIRLAAVRADELLEERTLPYDEEAVERALRRWPGVRCCYEAGPTGFGLYRHLIERGIDCAVVAPGLVPQRPGDRVKTDPRDARKLARLLAGGLLGPIHVPSPELEAARDLVRAREDARLDRMRDRHRLSKFCLRHGRRLPGLSWSVVRRKWLGEQRFAHAAEQITFDTYLHTVDLVDRRIEALERAIRETAEHAPWRELVARLRCLRGIDTLTALALVAEIGDFGRFTCAQELMAFVGLVPSEHSSGEHRRQASITKVGNAHVRRLLVEAAWHARRRPKVGYELARRQRGQDAIVVERAWRCQQRLYQRWQRMAGRGKPQQKIVVACARELAGFVWAIATDQPLRTI

SEQ ID NO: 247024 - protein, 335 aa, unidentified
MKNIVETLGIDLSKATLDAYLHLSKKHEQFENNKKGFQAMLTWARKTGKVKTTELLVCFEHTGIYGMELAAFLEKKNVFYCMVPALEIKRSLGMVRGKNDRVDATRIAEYAHLRRDTIKETKLPSALLQKMKKLIGLRSKMVGQRAGYMASVGELKRIYKKSDHSHLFVIQDNMIKQLTKSIDTVEAELKVLIKSDEEVYKTCHLLMSIKGIGPIVAYNLIVVTQCFHAFENSRQLACYCGLAPFSYQSGTSLNSKAKVSNYANKNLKALMTTAANSAVGCDAELKAYFHKRLAANKNKMSTLNIIRNKLLHRAFAVVKRGTAYVETYQHKVSLC

SEQ ID NO: 247025 - protein, 361 aa, unidentified
MLYRTSIWLDVHALSIAAAAFIPETGEIVQKAFPYDAGKVAEWAKGMPQPARCVYESGPTGFDLKRKLDKAGVPCVVGAVSKMLRPSGDRVKTDRRDATFLARMLAVGNIVEVAMPTEAMEAARDLARAREDCRHDLMRARHLLSKFLLRKGIVYPGKTAWTKAHREWLGRLEFADPCERLVFGEYLESVRSLELRRARLDGAIEERAAREDMAPAVSALRCVRGISTVTAFSIAAEIGDFSRFPDARSFMSFVGLVPSESSSGESVSRGGITRTGNIHVRTLLVEAAWQHARPLRPTSAAAMGDAVGVPADVAEAAARANRRLHSRAAHLRGRGKPASVVNAAIARELAGFVWALARMAG

SEQ ID NO: 247026 - protein, 338 aa, unidentified
MEQVITIGLDLAKNVFQVHGIDAAGKVLVRRQLRRGDVLRFFGGLPRCLVGMEACATAHYWARELTKLGHTVRLMPPAYVKPYVKRGKTDVADAEAIAEAVTRPTMRFVAVKTADQQAALMLHKVRDLLVRQRTMLINALRGHLAEFGIIAARGPGGVTAAIISLHEAQDSLPELARVALHGLIDQLRIVRDEIARVEKRIVAWHRASNASRRLATIPGIGPITASAIAAAVPDATLFQSGRQFAAWLGLTPRAHSSGGKERRVGISKQGDGYIRRLLVTGATAVIRLARQGNASKTWAAKLLERKSARLVSVALANKTARIAWAVLARNQSYVARAM

SEQ ID NO: 247027 - protein, 412 aa, unidentified
MPLALPEALFFTGIDWAAATHAVCVMDAAGKITAEFTIAHSADGITQLIRRLARYGDPACIPIAIERPNGRLVDLLLEAGHPVVPVSPNAIKTWREGEVLSGAKSDAGDAAVIAEYLRLRRHRLQVAVPCSGETQALRTVVRTRSDLVDLRVAATNQLSALLEASWPGAKAIFADVESPISLAFLTRYPTPAPAAHLGEKRIAAFCASQGYSGKRPAAELLARLRSAPAGTADPALTTALGTAVLAMVAVLRALNTAVRDLDRSAAARLGEHPDGAIFTSLPRSGQVNAAQMLAEWGDCRQAYGGPDSVAALAGCTPVTKESGKHRAVHFRWACNKRFRKAMTTFADNSRHASPWAAKIYNDARAAGKDHPHAVRILARAWIRVIWPCWLNHTPYDPARHGAAAALAEPIAA

SEQ ID NO: 247028 - protein, 311 aa, unidentified
MTSVIVGIDVSKSKVDVAVAGNGTVREWSNDERGRQVLSSWLSEQGVELVVLEASGGVESALVSELVEQAIPVAVVNPTRVRAFARAEGQLAKTDHIDAQVIARFGATMKPRAKAIRDQAQLALSQQVTRRRQMVQMVTAEKNRAQTALGPMKDQIERHIAWLQSEIEQLEHDINQAIISDPAWQETSERLQSMPGVGAVTAATLVAELPELGRLNRQKITALVGLAPFNHDSGKRHGQRRIFGGRASVRTVLYMAALSAIRCNPVIRAFYQRLVDKGKVKKVAITACMRKILVILNTMAKTGQAWRPPTP

SEQ ID NO: 247029 - protein, 424 aa, unidentified
MKVTYQTCCGVDVHKSFLVATIVKTSGGIEPSYQKKRFSTFNNSILEFRQWLLDNDCHDVCMESTGKYWVPVFNLLEDEINVVIANPKWVKAVKGNKDDTKDSKWIGDLFRLGLVKGSYIPCKIVRILREYTRYRYKLVSCRSSEKNRYQNALTVCNVALDSVVSDIFGKSSTSIIDYLLEQSGTSINHEEIASKLLRSLKSKEDAVIESVEGYQMTDAQKYRMRLVRAHMDYITAEINDVDKMIENMISSNPDFENAVQFLCTIPGVKRDSAITIISEIGTDMSQFSSSKRLCCWAGLTPGSNESAGKRKSVRITRAGVYLKPALVQCAHAAVKSDKSPYYKKKYESLVKRRGKKRAIIAIARMILTAIYQMLSTGEQWNPSDLYKIDMPVALVEKQKAKAIKQAKKLLQREGILPPDEPLAS

SEQ ID NO: 247030 - protein, 433 aa, unidentified
MKTNRLQVGIDFSQKRADFCLLFPDGQPLLSHQAFANTQPGYQKARQMLLDSLQAYPLDGLDVSGEATSYYWFPFFWQMAHDAQLGAYDLSLFLLNPRQVHWFKKSLPPDDKADSTDPFYIAERTRTRRPKAPWDPQDDWLPLRFYTRLRFHLAQALTREKNYYLVHLFLLHNTYRRGQPFSDPFGVTSQQVLGGEQSLSELVSLPEEALAERLDAWSGGKLDDPLEAARQLQQVAQESFPLEEPLLTPVQHILDLTLEHIRFLEAQMAQVEGWIAAEVQAHHPEVLFLTTVPGVGLVLAAGMTAEIGDLGRFFRTPKWDKKRKRYRTKTLREVEDAVAKLAGLWWPRADSGDFVAEDRHLAKTGNRYLRYYFVQAANGMRRHIPAYARFYGLKFREATRHKHKRALVLTARKSIGLFMGLLHRKEAYRSQEG

SEQ ID NO: 247031 - protein, 404 aa, unidentified
MSVHVAPVTSSTIVVAVDVGKTSAVLSATDSARERVFGPVEFAMTCSGLIGVVRRVGAVVPPCAQVKVGIEAAGHYHRPVLDYRWPAGWEVLEFNPAHVAEQRRVAGRRRVKTDAIDLEAITELVLAGRGQPMTERAVLIGELAAWASHRSRRVATRSATKNQLLGQLDRAFPGLTRALPDVLGTKIGRLIAAEFADPARLSALGVSRLIRFAAVRDIRLCRAVAERLVTAAAEALPTRDAAVARRVLAADVGLLADLDTQISAAEAELARLVPRSPFATLTSVPGWGVVRVSNYAAALGDPGRWPGPRQIYRAAGLSPMQYESAGRRRDGTISREGSVALRRALIDLGIGLWLTEPAAKAYAAELKSRGKHGGVIGCALAHRATRIAYALVRDHATYNPSRWA

SEQ ID NO: 247032 - protein, 346 aa, unidentified
MQHYVGLDVSLKQTAVCVVDQTGKIKREAMVASDPDAIAQFIAAHAPHAARIGLETGATSTWLWTELNKRGLPVICIDARHAKAALKMQINKSDRNDAAGIARIMQCGWYKEVRVKALDSHAVRALLSSRALLVQMKRDLENQIRGFLKNFGLVIGRAKMNTFTAKTVELIDGQPLLAAAIEPLLKAREALARQIAGFDTKLLRLARSEPQARRFMTVPGVGAITALCYLATIGDPERFKKSRSVGAYVGLTTRRYASGETDRTGRISKCGDSMLRCYLFEAANVLLTRVSRWSSLKAWGMRIAKRTSLNKARVAVARKLAVILHRMWIDGSEFCWSAQEPALQAG

SEQ ID NO: 247033 - protein, 412 aa, unidentified
MNPVVGIDVAKGESQAQIFLDRNKLYGKGFRFSHTITDLEWLHGRLKEVEKDSGCRPAIILEATGHYHLPIVEWAEEKNYDLYILNPLLAQRAKKTHLRKVKTDKLDAVHLGELYYKEEFEPYQKQETHWLHLRHLTRQHEAMTDMYVQTKLQFRAVLDQVFPTYEGVFGDLYSTVSLGVLEMYSTPGAVKTAGVDKLAECMNTKLVRGRSPKWAKEKAIDMMAAAEKSPFQEGVHESYVLSLRMFITLLLQYQEHLSKLEKQIDALAEEKKEYDLLRSIPGVGNKIAATILAEIGEIERFDHAKKLVAFAGVDPSVTSSGKFTASTNRITKRGSKRLRRALYQAVQCGVRRRKGCLLQSSVNQRLREYYDVKKGEGKPHKQVVIACVNKLIRWIYCILTRSEPYKADFQSA

SEQ ID NO: 247034 - protein, 354 aa, unidentified
MTELSGGVPPAVIIGVDAHKRTHTAVAVNHLGQPLGQVTVEATDAGHAKALRWAQTKFGPHPALWAIEDVRMVSRRLERFLMDAGLTVVRVPTQVTATTRASNRTHGKSDPIDATAVAVAALRYPDLPRAFHDQLSYELKLLMDHRETLIKQRSATINRLRWRIHQLDPQYDCGPSLKADIHRAKLRDWLIRTQSGVLADIALSDVDDIARLTQHIRPLERDIENRVAAAAPNLLAVPGCGSFGAARLVAETANVTRFRTEAQFAMHVGVAPIPWWSSNDPHVQRGRAGNRRLNATIHVIALSQIRGGGAGRPYFDKRIAAGDTPRGALRRLKRRLARVLFIALRKDYALRTGP

SEQ ID NO: 247035 - protein, 342 aa, unidentified
MSTEYDGRQYVGVDLHRRRSVIVRMTPEGEQLGWVRLDNDPVALGVELAKAGPDPEVALEATYGWYWAVDALQAAGARVHLAHPLGIKGFSYRRVKNDVRDAADLADLLRMGRLPEAYIASPAERELRELVRHRAKLVALRSGLKAQVHGVLAKQGLLPQVADLFGVTGSQWLRQAPLDLVYRQRVDSLLELIDAYDGEVETFRGMIAGRLAGHRGYRVIQQIGGIGPTFAAIFVAEIGEVGRFTRPEKLTCWAGLTPRHRESDTTVRRGPITKQGSTLVRWAAIEACQRTPAGTKLAADWARIIAARGRNIGVVAAARKLLTLVYYGLRDGQIRALAQGAA

SEQ ID NO: 247036 - protein, 356 aa, unidentified
MSKIIRVGVDLAKNVIQVHAVDAAGKVVMNRALKRDKFLAWCADLPAGCLVAMEACSGAHHWCRKLIEHGFDARMIPAQFVAPYRIQGKSGKNDANDAAAVCEAASRPHMNFVPPKTLDQQGMLCVHRLREALKEDRTACMNRIRGLLAEFGVVLPQTPAILRQHLNDVLEDASNDIAGMARLVLQRAQEHWRELEAHIQWCDERIAAHQKDDEQVQRAAELKGVGPITASALVAMVGDFKQFKNGAQFGAWLGLTPKQNSSGGKTSLGGITKRGSNYLRNLLIQGAKSVVLVGKHNDDPISQWAQRLRERCGWQKAAVALANKNARILWAVMTRDKRYDDHHVSVLPAGAMPAAA

SEQ ID NO: 247037 - protein, 365 aa, unidentified
MEKISTAKMKRQVAARRKKRTIGMDLGDRSSRYCVLDENGDVIAEGSVATTKPAMGKLFGAMVGCRIAIETGCHSPWVSRQLQGFGHEVIVANPRNVRLIGESTRKDDRLDARTLARLARIDPNLLGPVRHRGAEAQAHLAVIRARHALVKARTLLVNAARGLTKAFGERLRKCDPEQLGVHAVSGLSAETQAAVAPLLAEVETLNEGIAAYQRQIERLAKEHYPEIALLKQVKGVGTLSALTFVLTVDDPHRFRRSRDVGCYIGLRPGRRNSGKSQPQMRISKEGDTHLRSLMVQGAHYILGPFGSDCDLRRWGLKLAERGGKNAKKRAVIAVARKLAVLLHKLWVSGEAYEPLRNNSEVVTAA

SEQ ID NO: 247038 - protein, 458 aa, unidentified
MSRQKKKKIKKSKSVKSLHVLQPDAGGIDVGATEIYVAVPDDRSPESVQRFDTFTEDLHSAAKWLKTCGIKSIAMESTGVYWIPIFQILEDYGFEVFLVNARHVKNVPGRKTDVQDCQWLQYLHSVGLLNGSFRPAKEVCAVRSLLRHRDNMVKTAARHVQHMQKALTQMNLQIHHVISDITGVTGLAIMDAILNGERNPGKLAELRDPRIKADKKTITKSLVGDYRSEHLFTLKQALQSYRHYQDMIRDCDVEIEKHLNEFDSRIDTEQNPLPSSYSGKKKPGRNEPGFDLRTHMHRIFGTDLTEIDGINVITAHVLFTELGPDLSGFPTASRFCSWLGLCPNNKISGGKILSSQTTPVANRAAQALRMAAQSLWNSQSYLGQYYRRMRARHGAPKAITATAHKLARLVYHLIKTQKPFDETVFAEQEKTHKRRLENKLRVQAKFLGFQLVPVNTQS

SEQ ID NO: 247039 - protein, 459 aa, unidentified
MARHQRKGNGLPAQLAAVNLHAAGIDIGAQEHWVAVSPDSDSQPVRRFGACTADLEALASWLQQCGVQTVAMESTGVYWIPLFELLEAQGFAVVLADAREVQRAPGRPKTDVQDCQWLQRLHTYGLLAAAFRPPEQICVLRSYLRQRAMLVTYASQHIQHMQKALTQMNLKLQHVVSDVTSVTGMAIIKAILSGEHNPTTLAQLRARNCHHSEAEIARALQGNWRAEHLFALQQAVELYEFYHHQIAECDRQIEAQLQTLADHSAGRTLPPAPRPPKRRRNEHHFDARLPLFRATGVDLTAIEGINEHTALVLLSEIGTDMTRWPTAKHCAAWLGLSPLHKISGGKVLSRKVRPSANRAAVALRLAASCLHHSHSALGAFFRRLKARLGTPKAVVATAHKLARLVYRLLKHGEAYVVQGMAEYEHAYRERVVKNLIRKAKELGYQLLPTSEQTAQEAPA

SEQ ID NO: 247040 - protein, 311 aa, unidentified
MTNHTIGIDISKNNLDAFRMRDGESRTFSNDRTGHKALIAWIGRTDERIVYEPTGPYHRDLEARLAQAGFPLVKVNPRQARRFAEATGKFAKTDRLDAAMLARMASLLGIEARPVASPTLAGLKELQAARDALVRNRTRARNRAKTLSQTLLKRQNQAQLRQIQRQIAAIEKEILGRINANPDLERRFQILVSIPGVSTLTACAILIEMPEIGTLDQRQAASLAGLAPVTRQSGTWKGRAFIRGGRANLRQALYMPALVAMRFNKDLKAKYEHLIAAGKPAKVAITAIMRKLIILANALVRDDRVWLPSLP

SEQ ID NO: 247041 - protein, 368 aa, unidentified
MESTGKRFVGIDLSKRTYEAVAMTAETQTVTRWNGKLDLRGRKCLMDKLSPGDIVALEAGTASFKIAKEMQSKPGVRVVVLNAANLAIIHASLKKTDKEDALKLARLVQKYSPEELPVVPIPTDQEMERRALVAHETRFRQDRVRLINRLHAVFLRAGFPDHTKRQLGISESREKLIIAELEGFNLVEAMNLHHMIVEYETILADLDKQINDTVVACGKDAEILLSIPGFGIKTTMAVLAYAGDMRRFENPSQLVNYIGFSPRLYASGNIERSGSITKRGNPQVRWLLIQSAWCMVQSKAPNPLKDRFEAMLKRGKAKSVAIVALARKLLELVFILLTRQERYRFIDPDLYAIKLRRAGFAFVGAGSC

SEQ ID NO: 247042 - protein, 410 aa, unidentified
MLLKNIKEVLFINYLGIDISKKNSVIAHYHQEKFHKEFTIQNNRNGYNYLLNYLNKINNPKLIFESTGIYSRGMVQFCRVNKINYIEINPLEAKFKTSSLRSWKTDKSDAHKLAMLATNIENHQSSNISDDIYFELRERARFHLEMESEQTRLKVEIVEALHQTFPGLEKLFKNRYSIIALNIAAQFPHPEIMKKQDLEALIESVFNSTDKGLSVIKAENYAKKLIALANESYPTVEEHSFLIKKVKILIQQLKQSILQMKQLDEEMILLAKQLDCFESIYSIPGIGELTAAMIIGEIGDITQFKSNKQLNAYVGIDIKRYQSGSTQYRDTINKRGNKNARKLLFWVVMNIIRGQRHYDNHIIDYYYKLKKQPNEKSHKTAVVACMNRLLKTIHYLVTNNKQYDYQMSPH

SEQ ID NO: 247043 - protein, 319 aa, unidentified
MADHSLPILCGVDVSLATLDIALVDQPVTRIPNTVAGITDWQASLPGHARIAVEATGRYHELLLGLAVAAGHEVFLINGLQLNHYRQAVGQRAKTDPDDARLLLRYLMHEQAELRPANPLNAKEKCLWSMLQQRATLVKVRSQVKQSLRGSSETEAIGQYVTTHLDQAITQIEHRMTELATELGWQASIRLCQTIPGVGPLSALALTACFHRGEFTRADQWVAYMGLDVRVRDSGTCRGRRKLSKRGNPELRRLLYNGAMSAAKMPSIRPRYEQYRERGMSSTEALVAMSRKLARIAFAVLSKGEAYDEKMPGWTCACP

SEQ ID NO: 247044 - protein, 344 aa, unidentified
MDISVLGVDLGKNVCSVVGLDASGAVVMRRKVRRETLIALAEKLPPCVVGMEACCGAHHLGRVFAAHGHDVRLMSPEYVRPYIKAQKNDDRDAEGIAEAVTRPTMRFVELKSQDQLDMQTLHRSRDRLVGERTALINQLRAILLERGMVAPQGKWKLEQFLAVLMDEQGGAGLSSRMIVLVADARAQWAELDRRISAFDAEFVRWVKENEEARRLTTIPGVGPIVASALVAAVGRAESFDRGRNLAAWLGLVPRQFTTGGKPKLLGISKRGNKYLRRQLIHGARAALPYVAERDTPLGRWVKGLMSRTHRNVVVVALANKLARIAWAVLQRGKPFDARAVSVAA

SEQ ID NO: 247045 - protein, 427 aa, unidentified
MAYRVSGVDVHKRMLAVVVAEVDGEGEYKFERRKFGSTPDQLHLLAQWLIQLEVEEVVMESTAQYWKPVWAALERYWKPARQQREGASKMSGTLHLCQARSNRGPRGRKDDFVDAERMVKRLVAQELVLSFVPDPEQRLWRTVTRRKHQLTGDRIRLQNQLEALLEQGHIKLSSLVSDLLGLSARRMLKAIAEGATDPAAVAALADCRLRATPAQLSDALGACTELNGIYRQLIQMALEQLKLLEEQMERLEKVASGLLQAHQDAVRRVAEVPGFGVDFAIQVIAEVGAGAATFPSAGELSSWVGSIPGSEVTAGKSHSTRSPKGNTTMRRLLNQAAQSAVKVKGSIFDVKFRSLLPRLGYKQAIWAIAHRLCRLLWMILHQGIRYEERGPAVTARSQRTRTARMIKELKKQGYVIAGGPLPAGAQA

SEQ ID NO: 247046 - protein, 335 aa, unidentified
MVLESSSVCVVDATGKVIAEAKVASEPEALVSWLRERPETLKGIGLEAGPLSQWLIAALEAAGLPAVLLETRHVRAAFKTMPVKTDRKDALGIAQLMRLGWFRPVHCKSLGAQETRALLTARKLLQAKRLDVEMSLRGVLRGFGLKVGPTTPKTFEARVRELVEGHPTLEAVAEALLAARAELVLRFKDLEKRLMAVARADPRARLLMTMPGVGALVALTFSSAVDDPRRFRSSRQVGAHFGLTPKRYQSGETDVTGRISKIGDHGVRTALYEAANVMLTRPVKGSSLKDWALAIARRAGPKKAKVALARKLAVVLHRMLADGTCFEARPGAAAA

SEQ ID NO: 247047 - protein, 349 aa, unidentified
MIRNKPRGATLYGIDLGKNIFHVVGTDSAGNVVQRVKFRRDTLRAFFERAERALVGMEACPGSQWLARKLQAMGHTVRIIPAQFVKPYVKSHKNDTIDAAAIAEAVTRPTMRFVQVKQPEQVDLQSLHRIRDQMVGSRTRLICQMRAFCLEYGVAIRQGAGLFKSDLPRVIADECNDLTPTMRRLLNELFEDLMRLEKRIAQVTREIEALAARDEKARRLMTIPGIGPLGATALLAAAGNGQQFKKARDMAAWLGLVPQQYSTGGKPQMFGISKRGNRYLRRLLIHGARSCVMHLDRSRDRLGAWLRQLHSRMHVNKVTVALAAKIARIAWVVLNRPGAIYERRDPALA

SEQ ID NO: 247048 - protein, 386 aa, unidentified
MKKKGLKKAKDADFVPMAVVNPHAAGIDVGDTIHAVAVPVGRDEQSVRTFGAMSCDLEQIVAWLEKCGVDTVAMESTGVYWKSLATVLIQHDFEVYLVNARHVRNVSGRKTDQGDAEWLQQLHSCGLLKSSYLPDDIQESLRTLVRFRRTLTQESSRFILRMQKALELMNVKLHTEISDLTGKTGMAIVEAIIAGERNAANFLPLVDYRIKADRKDIEKALQGNWRDEQLFALEENYTCYKFFLERISKCDRAIEAKLQVFAAAENQGELPATEGKKSNDYKVVKKKKNKNAPKFDASTYLNSILGVNVLAIYGLNEVGAMEILAETGTDMSKWATEKHFVSWLNLCPNNKISGGKLISSMVMKKKAGAASQAFRKAANSCQRSNH

SEQ ID NO: 247049 - protein, 367 aa, unidentified
MGHYAGLDVHSKACVFEVQSADGEIVARGSVPTTGEGLATLRTHCPPGTPIALETGTVAFFVARHLAALGFVPAVIDAHEVRLKAHRPRQKSDRRDAHELCDGLRRDIYRTRIHVPPAAVAELRETLSRRRHFVRLQAAEINAAKRLLRTTGVSHLSRDLGSNTGWMRLRDSLPVDGPLRAYVTQHHAAWRCAGEQIAVLEQTLTQQQRAFADDVRRLQTIPGVGPIVALTAIATFSDVRRFPSAKYAASYVGLVPTTYQSGARDAHGHITKSGNTEFRVLLCEAAHHAGRSRHPLHPYFARLCAKRGYKMAVVALAHRLCRIMFAMLNDQSEFDVSKLGVEAGPFTYTAVRHYRLRPVHTVRLGAH

SEQ ID NO: 247050 - protein, 319 aa, unidentified
MAQNDLVVVGIDVAKDKVDACIRGHKLRQTCPSTVQGHRKLVAWLCKCGVNKAVMEASGGYERVWAKLLREAGIEVRIVDPKRVRSFALSAGRLAKNDAIDAEMIAWFAETFSEAPSQTHDAAHEELQALVKARLGLIDFRMRLESQSEHAALGLVQKAHARVLKSLASEIAKLEAAIAAKIKSTPDFAERAEIIESVPGFAETSSANLVAGMPELGQVSDKIAAALIGVAPYDDDSGKRRGERHIKGGRRWVRNAIYMPCIGAATRNNPVLKAYYQRLIAKGKEPKVALVACMRKLIIILNTMIARRQKWDPSRYVLS

SEQ ID NO: 247051 - protein, 307 aa, unidentified
MALTVGVDVAKHTLEWCVGAEGKIQHARNEPRPIAQLVRQLVALDPARIVVESTGGYERTLVTKLAEAGLRVVLVNPRRVRSFGQALGILAKTDAIDARLLALFGEKVEPEVRPILQGRARLLADLVARRRQLVSMIVAEKNRRETSSVVARRSIATLLRVLTQQVRQIDQRIDQTLLEDAESAELSTLLQSVPSVGPGVTRTLLIDLPELGHLGRREIASLVGIAPFARDSGKLRGVRYVRGGRASVRTALYLAAMNASRFNPVLRALYQRLRQAGKPPKLAFIAVARKLLTILNAIAREKTAWQS

SEQ ID NO: 247052 - protein, 326 aa, unidentified
MKNCKDFKFVGIDISKKFFDACFVDAKGQLVQQRINQNLKGYRLLASMIGEDAICVMEATSTYHLPLALWLYNNGIQVVVENPLKIKRFSQMHLQRHKTDKADAKIIYEYGTTVVSKKIVLWLPQSATVQELQQCDSLSQRLNKELTAITNTHEALAQLDVVNTEVRRVVSDTIKQLKKALNQLDKQMQKLIKKHYNETYNLLLSIPGVGSKTAVMLICQTNNFTKFDNVKKFLSYIGMSPRTYESGTSVKGKGHITKVGNGRLRSLLYMCSWTAKRSNPQCVSVYENMRKQGKPEKVIKIAIAHKLLRQAFGVIKHQKPFSMEIA

SEQ ID NO: 247053 - protein, 345 aa, unidentified
MQIKSIGIDLGKTTFHLIALGNRSQVVIRKKFSRSQLLEYTANLASSLIGMEAGVGSHFLGRALHEQGHRVRLIPAQFVRPFVKSNKNDYRDAEAIAEAVERENMRFVPIKSEDQLDLQALHRVRDRLVARRTSVINQIRAFLLERGISFRKGPASLRRQMPEILENADEKLSTAMRRLLDFLWQEWKGLQLQIESLNTELEQIANSDPSCVRLQQIRGVGPLVSTAVVSAIGNGAAFKKGREFAAWLGLVPRQWSTGGKAKLLGISKRGNPYLRKMFIHGARAAVLRVKREGSGLGKWMSGLETRAARNVVIVATANKLARISWAVLASGDDYQPLHKAAAFSN

SEQ ID NO: 247054 - protein, 357 aa, unidentified
MSEITRVGVDLAKNVIQVHAVDAQGKLVTNRALMRDKFLAWCAQLPARCLIAMEASSGAHHWARKLVCLGLQARIIAAHLVEPYRSQGKSGKNDANDAAAICEAASRPSMRFVAIKTVDQQSMLSVHRLREGFKEERTAGTNRIRGLLAEFGVVIPQSTTVLRESLSEVIEDANNELSGLVRLVIERAQTQWKELDEHIDWCDQRIAAHLKNDAQARAAGQLIGVGPVSASAVVATVGDFKQFKNGAQFGAWLGLTPRQNSSGGKNNLGAITKRGDMYVRSLLIQGAKSAVLTAHRREDPISQWVLRLREESGWQTAAVALANKNARILWAVMTKGAPFDARHVSLKPGASTALAAA

SEQ ID NO: 247055 - protein, 369 aa, unidentified
MRKDSRVQTTRQSADRRQGRRAKKQLWIGIDLGNRWSHVCLLDGGGEVVDRTRVRTTPDAMRDYFKDFPECAVVVEASGQSPWVSRVLSECGLDVTVANAREVRKIHQSDRKNDRSDAETLARLLRADRKLLAPIEHRNEAMQADISVLRARDTLVGARTKCINAIRGLVKAAGTQLPKCSAETFARRVELLLPRELQAALEPMLDTIAHLTVQIRSYERLIQALAREKYPETALLSQVTGVGPLTSLAFVLTIGDKDRFKCSRDVGAYLGLVPRQYDSGDKQSQLGITKRGNGFLRRLLVNSAQYVLGPFGPDCRLRRHGERLMQRGGKNAKKRAVVAVARKLATMLHYLWKTGIVYQPLYGVEVLPA

SEQ ID NO: 247056 - protein, 397 aa, unidentified
MYIVGIDIAKRKHEAAVIDGEGTVIIKPFSFTNNCSGYNRLLAMLAKAKLPLDEVSFAMEATGHYWLALFTRLQKEGFRVQVINPVQTNSIRSFYIRQAKTDPRDALLIAEVIRFGHFSESTLHPENIYELRELCRGRHAIVSMQADVKRKVVALLDQVFPEYETAFTNMFGDTSMAILQTCPTPKELSEMPLEELCHLIEVSSHKRFRMAKAQELQALARNSFGFAMAGDVFSTMIRLYAKHLDFLKQQVREMDRKIAEIMDTLDTPITTITGIGPTLGAYILSEIGDISRFSSAAKLAAYAGIDPTMRQSGEYNGVRNRMSKRGSPYLRHAIWLAASSAVLHDPALKLYFQKKRDEGKPYMASVGHACRKMVSIIYAVMRDNKEYVPCIPGEISA

SEQ ID NO: 247057 - protein, 342 aa, unidentified
MDHYAGIDVSLECSSVCVVDASGKIAREGKVASEPEAVIAYFGSLRLSVVRIGLEAGPLSQWLYAAMKEAGLAVELLETRHVRTALQTMPVKSDRNDARGIAQLIRLGWFRPVHCKSIGAQETRAVLTARKLVQSKLLDVENSVRGILRGFGLKVGHTTNRSFAGRVEDLVVNHASLHMIAAALLSVHAVLLRELKAFDKQVRSMARVDVKAKLLMSAPAVGPIVALTYASAIDDPGRFTSSRRVGAHFGLTPKKYQSGETDYTGRISKIGDATVRTALYEAAHIMLIKPIKGCAPLKSWAMRIARRSGMKKAKVALARKLAVILHRMLANATPFNAAMAAA

SEQ ID NO: 247058 - protein, 357 aa, unidentified
MKKLFIGIDFSKEKLDATIILACGMNEIGSREYGGFPNNTTGYRKLCNWVKTNAWNTIAEEWLFCGEDTGSCSIGLSKWLYGKGYDIWIENAYAIKHSSGIQRVKNDKADSAIIAEYAWRQQDKVVPFEPLNESLAQLREIFLYRHKLVGQRVAMELRKEDKSQSNKSKAISFINRKSKHLIAEINKTIAECDKAIDSIIEADEELKENYAIITSIKGVARQNATCMLVYTNNFKKFGYDPRKIACYYGVAPFGKQSGTSVNTPAHTSHFANKLIKSLLGQAAHIAKIYNPEIRDYYQRLISKGKKPQVALNNVKNKLIRIIVALVRKKVPYDQNTYKYYEEREVIERKKNEKLIYC

SEQ ID NO: 247059 - protein, 384 aa, unidentified
MKNNTIIFVGLDTHKEFTEVAYCEDQRGSEVKHLGRVSSAKVSLTKMARQFESKYPQATLHFVYEAGPCGYWIYRLLTSLGHCCYVVAPSLIPKKPGQRVKTDKRDAQDLARLVRNGDLDPIYVPEPADEAIRDLSRARERAMHDLNNARFQLKALLLRNHINYSGKSNWSLKHLRWLTEIILPHPSQQFVLQEMIQTISERNARLERLDNELAHHVKQWRYYPVVKAIQALRGVRLLTATGVIVELGDLTRFDSPRKLMSYIGTTPSEHSSGGKRHLGAITNCGNGRARRLLVEAAHSYRYPAKISKELQLRQEGLPKEVIDQAWQAQQRLCRRYQRLIHKGKHRSVVVTAIARELIAYIWSISKEVTLPRIDPKTRISRVPA

SEQ ID NO: 247060 - protein, 419 aa, unidentified
MSFKIFKFNCCGLDVHKTWIYACIGITDSNNRTEYKQARFSSFTKGLNELCDWLAKYNCKDVCMESTGKYWIPVFNILEQHSFWVTLSHPKYTKPMKGNKTDRKDAKWICDLYMCGMVKPSFIPPADIRELRDLVRYRFKLTCMITGEKNRAQNCLTVSNLKLDDVFSDVFGKSSRSITEHILQHPGEKFDIAPFVDSRCKTPITEIQAAVDGAISKEQVVKLRQCLDHIDELNKHISEVEQEILRLSDKYEAALNLIRTVPGFNKNPLTAIQVLSEIGGDMSVFPTAKHLVSWAGCCPRNDQSNQKIKSTRISRAGSYFKPVLVQVANALIKSKKHSEFTSRYKRIKARRGHKKAIIAICRMILTAIWHILSDLKPYTPEGFLESRPVKEGKVLSTSQALNLLKQRGYIIKGEPLTVS

SEQ ID NO: 247061 - protein, 411 aa, unidentified
MKQQKATDVTILPQLDKACGIDIHKDKIVCFISGKDGSGQELKEFGTFTCELQKVKEWLQSNQVEHCLMESTGIYWMSLYTILTDCGISVIVANPTHIKQIPKRKTDRKDARWLCMLLMHGLVRASFMPTSEQRVLRDYCRSRLFYSRQQNKIQNRLWKILESNNIKLRSVISSINTKTAMSIIRLLSQGVTDREQLAECSLGRARKNKDNMLLALEGTLAAHHLTQLQLLLQDFDHIQQQIKTLNALIDESIAKHYSVAFECLDTITGIAQRSAEIILSEAGKDMSRFPTADHFTSWCGLAPGNNESAGRQGNTSIKKGNTYLKTAIVSAAWAAVRVKNSYWHALFERMRKRMKAQKAIVAIARRMLKVVYSTMETLTHYKEKGVAHYYEMQEKAAAYRQAGKLWPSANV

SEQ ID NO: 247062 - protein, 344 aa, unidentified
MNHYAAIDVSLELSSVCIVEATGKVVKETKVETRPEALVKFFKHFSHPLTRIGLEAGPLSQWLHAGLTDAGFDTTLMETRHVKAALSAMTVKTDRRDARGMAQLIRMGWFRPVHAKSPGSQEMRALLVARKQLQQKLRDIDHSVRGILRGFGLKVGHVTDKSFEARIRELVTGHAMLEQIAEAMLAARATLLSQFSKLHKAVLDIARNDEVCHRLMTTPGVGAIVAITYKSALDDPSRIKKSRNAGPLFGLTPKRYQSGETDVTGGITRVGDEMVRTALYEAANILLSRVTRFSALKRWGLEVAKRRGLKRAKVAVARRLAVILHRMWIDGTTFHWSKTKAAQA

SEQ ID NO: 247063 - protein, 323 aa, unidentified
MSRMQEKINQTHTDVYVGIDVGKDWLDVFIHPVNTRHRFANDTSGIGKLVKQCARDHVHLIVIEATGKYHRQAHEILHEASFNVAVVNPYRSRKFADVLGQLAKTDTIDAELLAHFASIIKPQPTLPPSKHRKALRDLNVARRQVVDEIGTLNRQLSSTDHPFAARQLRARIKMCERHRQALENEIHQLITTQDNLKHRFNILTSIPGIGPVTATTLLTDLDELGQVNAREIAALAGVAPMNRDSGIMRGKRTIRGGRPHVRHLLYMCAVSSSQRDTLMGNFYRRLVKQGKHPKVALTATARKLVIIANTLITEDRHWQPTAP

SEQ ID NO: 247064 - protein, 366 aa, unidentified
MSDFTSSTVSVGLDVHAASIRLAAVCADELLEERTLPYDHEVVERQLARWPGARVCYEAGPTGFGLHRHLAERGIACAVVAPGLVPVRPGDRVKTDPRDARKLARLHAGGLLEAICVPSVELEAVRDLVRAREAARIDRMRDRHRLSKFLLRHQRRMPFRSWGAGRRKWLGEQNFDQPAQQLAFDTYRQTLDLVDCRVEALDRQLAEISERGEWAGLVARLRCVRGIDTLTALGLVAEIGDFHRFQSAEAFMSFVGLVPSERSSGESRRQGSITKAGNAHARRLLVEAAWHSRRRPKVSYELARRQRGQDPAVLARAWAAQQRLHRRFHRMAGRGKPSQKIVVACARELAGFVWAIATDQPLRNRA

SEQ ID NO: 247065 - protein, 331 aa, unidentified
MTNATHETVADSRPVDYIGVDMAKARFEWGVHGARSTQGAANDPAGFEVLLADLRQRRVGLIVIEATGGLEHALASRLLQLGLPVAVVNPRAAREFARSMGHLAKTDAIDALALAHYAHTLAHKANQAGVLLTPVPAHLELLQAMVLRRKQLIDMRTAETNRRGGAMRVLRQSIDAVIKTLNRQIDALDQDINTHLDQHFKELDQRFENIKGIGPNTCAAVVAFMPELGRISGARAAKLAGLAPLNNDSGNSRGKRSTWGGRSIVRGALYMATLSAVRCNPVIKTFYLRLLAAGKPKKVALTACSHKLLRILNAMARNGQAWNPELHVLTP

SEQ ID NO: 247066 - protein, 342 aa, unidentified
METVYVGLDMGSSSFQQVAIKPDGSIKVNRSFTTSEANLRSAFADQHGEIHVHLEAGELAPWAASIIAPLVVRVVCSHPKENAWIAKDADKCDRVDAYKLAELLRLNRFKEVHYAPDQPRRNFKQLVQHYDELTGQQARMKTKIKARFRMQGVIVTGERLFSSKGRQEVLARVESPDLRTAIRQLYEVLDQSVAAQAQARLLMLRAAQAFPEIKLFRTAPGVGPIGACRFSAYSHTPSRFSSKRKLWKYCRLSVSHRSSNGKPLRRPRLDRSGCGRLKDVSRKAFDVSIRSRHDNGFKRTYQRVLETTHDKTHARLTVQRKIVSTLRAMWITRTPYCDELSR

SEQ ID NO: 247067 - protein, 345 aa, unidentified
MYYIGIDVSTKESALCILDGKGKIVRETKLPTDPEIIAHFIDATGLAIERIGLESGCTAAWLFAGLRRYGWPVICIDARHAAAALQAGFRNKNDRNDARGIADLMRVNKYRPVWVKSPEAQREGRLLTARATLQSQLVALENTIRGLLRQEGIGLTDRRTAFEAAVREAIGDDRLLEAAVHPLLETRNAVLQHRAAVDRQILRIVRADPVCRLLMTAPGVGALVSLAFKVAVDDPRRFSRSRDVGAHFGLTPREYSSGEVSYHGRISKMGDREVRRLLYVAASRILRRDAALWCPLKVWAVRLAQRVGIRRARVALARKLAVVLHAMWSDGQVFQWRRTEASASA

SEQ ID NO: 247068 - protein, 463 aa, unidentified
MTPRKEKNLQMPVVQEALTITHPHAAGIDVHSRKHWVAVPPDHVPTPSADAAKDLPYVRQFDTYTADLEMLADWLQQCGITTVAMESTGIYWIALFELLERRGFEVFLVDPRQTKHAPGRPKTDRLDCQWIQRLHSFGLLTASFRPEDQVVVLRSYLRQRQMLISHAGQHIQHMQKALELMNVKLTEVVNDVTGMTGMAIIKDILAGQRDPLKLAKHRDCRCRRTEAEIARALHGNWRDEHLFALQQALELYEFYKRQLAVCDERLAAYLKTFDDRSDGKPLPAKRRLNPRQANMPAFDARTGLYRLAGVDLTVVEGISERTALVILSEIGRDMSKFPTAKNFVSWLGLCPQHQSSAGKIRSRHIRRGTNRAALAFRLAAQGCHHAKTAIGAFYRRIQARAGGPKAVVATARKIAERVYRLLKYGKEYVRQGADEYETTYRLRLVKGLARKAEELGYKLCPVT

SEQ ID NO: 247069 - protein, 384 aa, unidentified
MDVHTSNYTLCSLDPGYGVEKDNYFAEVQFTNDFIKNVVNYVTNLKKKLKDCEFVCGYEAGCLGYSTYKDLTKVGIKCVLMAPSTMAVQKGGKKVKNDRRDARVIAQCLAYQTYKEVYVLSEHDEAVRGYLRMRDSHNKALKRIKQQIIAFCTGHGLFSPTKSNWTVAHLKWLKDLKFNDPVEQEILNEYLSSLTFLSDKIKAMDVRIEELASEKQYCENVKKLRCIKGIETNVALTLLAEIGDFNRFSKPTDFASYLGLIPGEQSSGDKVRGTGITNAGNSTLRRKLTESAKGYWRGRIGIKSATFKKLEKELPKEVTEYALKANTRLQRKFFNMTHVKGKNMNVAASACAREMACFVWGLITNHYDKAPAVPKTDEELLDLN

SEQ ID NO: 247070 - protein, 391 aa, unidentified
MFLLGIDIAKLNHVASCIDSSTNEIVFSNFKFKNDFKGFSTLLDKIKTFDTKNLIIGLESTSHYGENLINFLFKQHFKVALINPLQTSHLRKANIRDAKNDNLDSLNIAKSLIFAKLNFISEKNINCFSLKKLTRFRSSLIKQRSKAKIQLTSLLDLLFPELQYLFKSKIHSKAIYSLLKKYPSAEEIAALKDDEISNLLYASSKGHFKKEKSIELKSLAKTTVGIKDTSISLHVIQLIELIELYDKQIKDIVTKIADTVDKLDTKLLSVPGISIIACAIILGETNNFNNFSNSTKLLAFAGLDPKIRQSGNFNASSCRMSKKGSPYLRYALIFTAWNIVRHSEKFNKYYCLKRSQGKSHYNSLGHVAHKLVRVIFTLIKKNIVYQEENLE

SEQ ID NO: 247071 - protein, 314 aa, unidentified
MSLQESACVTYIGVDVAKPELAVQFPDQLWFTANTAKGHAALIERLGAVGAVHVICEATGGYERALVCALHQAGTAVSVINPRQVRDFARACGRLAKTDAIDARVLADYGAKLNPRPDPVPADGEDDFAELIKGRQDLIALITEEIGRREHLHLPALLKLSTARQRQLETQLAKLDSLIDAHVAAHAALAARAKRLQGVSGVGRVSALTVLALMPELGTITDNQASALAGVAPLNHDSGQYRGQRHIAGGRAAVRRVLYMAALTACRRNPILTVFYKRLREGGKPAKVALTAVMRKLIILLNRLLKNPHFTLAT

SEQ ID NO: 247072 - protein, 336 aa, unidentified
MEEVSTIGLDLAKSVFQVHGIDAAGRVVVRRQLRRGEVLGFFARLRPCLVGMEACATAHHWGRELTRLGHTVKLMPPAYVKPYVKRGKTDAADAEAIAEAVTRPTMRFVAVKSMDQQAVLMLHKVRDLLVRQRTMLINAVRGHAAEFGVIAAKGRGKVAELLQRAHAEDVPALALALLKVLAGQIDALEAKLKALEAELMALHKADPVSQCLATQPGIGPIGAVSFSLKVPDPKAFGSGRHFAAWLGITPKENSSGGRHRQGRISRQGDEGLRRLLVLGATAVIRFAKPGRASPWLINLLARRPRKVAAVALANKMARILWAMMVSGEVYRRPLAA

SEQ ID NO: 247073 - protein, 411 aa, unidentified
MMRPDRTIYVGVDLHKQHHTAVMIDCWNKKLGEIRFDNKPSAFPLLLKEVKKHTKKGMSVVYGLEDVGGFGRALAVYLTENGCSVKEVNAKLANNRRKSQVTVQKSDSWDAECVAKVLRDELPNLPDAKPIDLYWAISQLVTQRKWQAKSLSGMVKRLHQQVSYHYPSYKAFFSEIDGKTALAFWHKYPSPGHLNGMTVDELAKFLRKLSNYALSTKKAEQMLTLIAEDGDTTRDFQEKRDFIVKGLVRNIRFYGRELNRIEREIASLMNQLGFQLETMTGIDLVTAAELVAEIGDIHRFATSDKLARFAGVAPIAVGSGNKYRNYKSKQGNRELHDMLKALAIRQIAVTRTKKEPRNPYFHAYYEQRMAEGKTKQQAIVCIMRKLVNVVHYLMRTKAAYVMPTVPEKDAG

SEQ ID NO: 247074 - protein, 321 aa, unidentified
MQSLHLGIDVAKAKLDCALRLVDGKFKHKVVENSQKGFAALTEWLSKHEGTNAHVCMEATGVYWEAVAEYLAGQNMVVSVMNPAQIKAFGTSRLVRTKTDKVDAKLIAQFCFERHPEAWQAPSSSEQELRALVLRLDALQTMRTQESNRLEVARDIIKSDIAAHITWLDSEIKVLMKKIRDHLDNDPDMKNRQELLDSIPGIGERTIALLLAFSMHPGRFANARQAAAFAGLDPRQHESGSSVKGKPRMSKVGHSILRKALYMPAMVTLYKTDWGRKFRDRLAAAGKPPKLIIGAMMRKLVQVAYGVLKSGVSFNPGLQNA

SEQ ID NO: 247075 - protein, 450 aa, unidentified
MNGGMLEIDAEAGEEQLVERVAAIDVAKASAVVCVRVAHASITGRRVRRVWEVCSTTNAIIALAEQLALEQIERVVVESTSDYWRPFVYLLEARGLTVWLVNASQVKQVPGRPKTDKLDAVWLAKLNERGMLRPSFVPPAEIRRLRDYTRLRVDLIADRTRQVQRLEKLLEDALIKLSTVVSDILGVSGRAMLDALIAGELDPQALAELARGRMRGKRAALVEALTGRFDNHHAELAQMLLDEIDALTLKAERLTLRIDQLIAEIPAAQAPAADPGGHPRDPGSRPLSVVARLDEITGIGPNAAHVIVAEVGIDMTQFPTPGHLVSWTKLCPRTIQSGPKSRPGKAGKGNPYLRRVLGEAAIAASKTDTFLGERYRRLVRRRGKLKALVAVARSILVIVWHLLADPSSRYRDLGADFYTNHIDRQRKTRQLIRQLEALGHTVTLDTAIAA

SEQ ID NO: 247076 - protein, 426 aa, unidentified
MNRCRAETSLRRNETVVHPRCAGIEISKRDAKVCVRVQGVGKRRTASTVTTWGAVTNQILALREHLLEQKITCVVMEATSDYWRPFYYLLEEHFEVMLVNARDVKNVPGRKSDVSDAAWLADLGAHGLVRASFVPPEPIRVLRDLTRARTVITQERTREIHRLEKLLEDAGIKLSSVATDITGVSGRLMLAALIDGRDDPAVIADLAKRRLRSKIPALTEALNGHFSAHHAFMARLFLDRIDAHTADIERLSTRIDEAMEPFQAARELLCSIPGISTTIAEVFVAETGAEMSEFPTAGHLASWAGTAPGKNESAGRVKSTKTRPRNRYLKGALGIAALAASRSKGTYFSAKYKRIAARRGPMKALVAVEHAMLVAAWNMLRNGEFYRDPGADYFTRRVPAKTKARAIGQLESLGYRVTLQPLADTA

SEQ ID NO: 247077 - protein, 413 aa, unidentified
MSKRLQVGLDIHQKHNHVCLMTNDGQMVNPHQRFDNNWPGFQQLLDMLVNALNEGQFEGVDIAGEATGLLWFHPFYHLAQAEELAPFEPHLYLFNPRTIKHFKKVLAQRDKVDPKDAQAVVERLRFGGRLPHEVTFDERYLPLQRLTRYRYHLAHALAREKVYARMVPIYLKASDYTRKPMPFSDVFGATSRYILSKYATIDELASMPLDDLAQELNRIGRHHFDDATNNARRLQRAAAHSYPLAPCLVEPVNVILNSLLAHIRFLEGELKKLNPLIEATLANTPGASYVRSIDGLGLVYTSGILAEVQDPHRFMQGLKRDKRGNLRPKTKHDGQASLARFVGLWWPRRDSGNFQAEDRRLPKTGNPYGRYYFVEGANSGCLAHDIGEEIHDGPIAIGSRPQHRIGENHTGGL

SEQ ID NO: 247078 - protein, 365 aa, unidentified
MPSIIWIGLDVHKNSTTAAILEDDAPDAQVIRLGADLNQLRKLLRRLSGRGSVRACYEASGCGFVVHRVLEKDGFSCEVIAPSLIPARAGDRHKTDRRDAINLAKLYRSGLLTPVHIPDEEQEAIRDLVRTHVARTKQIKVTKLRIHGLLLRQGHVYRDSSYWTLKHRAWLARLRRQLTGPAATILAAELELLEYLEAQLKAVDDQIEIISTRPPYREAVAALKCLRGVRTFTAMTIATEVGDIRRFASPQKLMGWTGLVPGENSSGDRQRHGPITKTGNVFLRRVLIEAAHNHRTRARSTLILDRRRSGKPPDVVSIAIKAQHRLSKRYWRLAARKHSNIAVTAVARELAGFVWAIMTAVAPAA

SEQ ID NO: 247079 - protein, 351 aa, unidentified
MKTEPTAQPKLYIGIDIHKRSWKVHCATDLFAGKSFAMPPKPEVLQEYVSKHFPNYEVTTAYEAGCCGYYAHRSFIQYGWTSLVVNPADIHRKGKERFTKTDKIDAQLISRELKDGRLESIHVPEIEREQLRSLFRRRNDLVKDFRRIKSHIKMQLLYFGVAIPEEFDNDHWSHKFRGWIDDQSFVYPSARETLDSRMRSFRFIDQELRDVSSKIRAYCRKHYKKDYYLLKSIPGIGGIVASGIICELGDLRRFNSIKHLAGYVGLAPGVHQSGDNQKSTGITMRAHRLMRSYFIEASWQAIRTDPIMQAYYRKHLGKDVKSVIIKVARKLLSRTLAVIKTETPYAIGVIE

SEQ ID NO: 247080 - protein, 336 aa, unidentified
MSELATVGIDLAKSVFQIHGVDENGRVLVRRQLRRSQLLAFFEKRPRCLIGMEACAGSHDWGRRLQEMGHDVRLMPPSYVKPYVKRGKTDAADAAAICEAVTRPSMRFVAIKSEACSSVLVLHRTRDFLVRQRTQIGNAIRAHMTEFGIIAVKGAHNVDRLKEQLYRLPEVARMPLGLLFDQLAETNKRIERLTDEIEETHKQSETSQRLATIPGVGMLSATIIAATTPDVDNFDCARDYAAWLGLTPKPHSTGGKQRVGRISKMGNRYIRRLLYLGAMAQIMLRRRLKREPGSDWLSSMLIRKKTKLVAIALAHRMARTIFAVLRDGSRYEPQTV

SEQ ID NO: 247081 - protein, 319 aa, unidentified
MTQNDLIVVGIDVAKDKVDACIRRAALRQTFPNTAQGHRELVSWLRKNGVGKAVMEASGGYEREWRDVLHKAGIEVRIVDPKRVRSFAQSAGCLAKNDPIDAEMIAWFAETFSQAPSQVPDAGREELAALVKARKALVDLTIRLKAQDEHAAPKQARKAFARVVKRIAAEIDQLETTISAMIEATPAFAERAEIIESVPGLARTTSAALIAGAAELGQVSDEVACALIGAAPYDDDSGKRHGERHIKGGRRWVRNAIYMPVLGAATQHNPVLKAYYQRLIAKGKPKRVATIACMRKLIVILNTMLARGEQWDPTRYAPR

SEQ ID NO: 247082 - protein, 340 aa, unidentified
MKLYSAIDLHSSSNHLAIMNEEMKRVLVKKLANNTQLILDTLAPHREAITGVVVESTYNWYWLVDALMEAEYQVHLANPSAIKRYEGLKYTDDAHDACWLARLLSLGILPEGYIYPKQDRPVRDLLRKRGHLVRLRTSLLLSLQNIITRSCNVKVAAKDLKKLTKDHVSAHMQGHEAFELCGTVSKETIDVLTRQIQRIESSVLKTLKPTDSYRKLLTIPGVGPILALTIALETGPVSRFPTVGSYASYCRKVASIWLSNDKRKGTGNRKNGNRYLAWAFSEAAEHARRHHRASRNFYDRKRSQSNLWVAHNALAHKLSRAAYYIMRDNVSFAEHKLYCS

SEQ ID NO: 247083 - protein, 378 aa, unidentified
MSNVRFIGLDVHAETIAVAVAEPHGEVRSLGTVPNRPESIRKLIKKLGPAAQLRVCYEAGPTGYVVYWQLTALGVKCEVVAPTLVPVKAGDRVKTDRRDALKLARSYRAGDLTAVWVPDAAHEALRDLVRAREAAKKDQLRARHRLGKFLLRHGRRPPTTMTPWTQAHLAWVKSAVRFDHAAQDATLLDYLHEVEHVAERITRLEGAITAAVATAPARMRAVIDALQALRGVALVSAVTIASEVGELSRFAKPRQLMGYSGAVASEASTGERIRRGGITKAGNAHLRRVVIEAAWAYRHRPAVGPALRKRQAPVGPEVKEIAWKAQHRLHARYRALTARGKCKQQAVTAIGRELLGFIWAIGVHVESKIDRTTKRVAA

SEQ ID NO: 247084 - protein, 388 aa, unidentified
MIYAGIDVAKDKHDCLIVDSDGKGLSKVFTITNNKQGFDELFMNLTTHSEDLSELKVGLEATGHYSDNLLEFLIANDLPTTVINPLHTNLYRKGLSLRKTKTDKVDAHSIVTMLRTENLKPYSQSSYHLRELKSLTRYRFSLVQDCARLKSSFARLCVILFPELEKLVPSLHMVSVYALLAEFPNARAVSECHLTRLANLLSQASKGRYSKDKAIEIRNAAKVSIGSYSEVKSLELQQTLQLIQVMEEQIAQADAKISPIVDSFHSPSMTIPGIGYRMAAIIIAETENFTNVDNAEKVLAFAGLEPSVYQSGQLTSTHAKMVKRGSKYLRYALFNSAKFVCHWDEGFNQYLAKKRAEGKAYNIAVSHAAKKLTRVIFHLVKTNQSFSR

SEQ ID NO: 247085 - protein, 347 aa, unidentified
MNVTTVGIDLAKLVFQVHGVDGHGKAVIRKQLKRSEVAKFFAKLPACLIGMEACSSAHHWARKLVVLGHTVKLMAPQFVKPYVKTNKNDARDAEAICEAVARPNMRFVPVKNVEQQVLLGIHRARQRFVKARTAQANQIRGLLAEFGIVMPKGVRFVGNQMPGILEDAENGLPDKSRELFAQLLTHFRDLDRQMDELGRQIKEWHQQNEQSRRLEKIPGLGPLSASAVVASVGDAKTFRNGRQFAAWLGLVPRQKSSGGKDQLLGISKRGDTYLRTLLIHGARSVLFSLKRRGEPAAGWLMRVADRRNPNIAAVALANKNARTIWALLAHGREYQPGYVSRSIVVAN

SEQ ID NO: 247086 - protein, 384 aa, unidentified
MPSLTASPAIIYLGLDVHKDSVTIAVLPADASAPTRIDKYPNDFAKLRRVFERCAKEGELRACYEASGAGYVLQRAMKEWGYHCDVIAPSLIPIKPGVQRKHDKYDAGQLARLYRAGELTVIRIPSEAEERVRDVVRCRETLQREVVKSRHYILKFLARRGFIYRGGVNWRPAHYTWLRQLTGTTSPLASEDQLVFSEYFALLEYKLSRRDVLDAHIETLALQPAYAPAVAALQCFRGLQVHGAMVLATELVDWRRFASPRQLMAYLGFVPREHSSGARERRGSITKAGNAHCRHVLVQAAWSYRLHPKIGPALAIRQRGQPASVTLHAWKAQQRLYTMYHRLSMRRGPQIAVVAVARELIGYLWAVMREITPEATPSATLAAA

SEQ ID NO: 247087 - protein, 338 aa, unidentified
MKVAVLGIDLGKNSCSVVGLDDTGKVIMRRRMHRDSVIKIASGLAPCVVAMEACCGAHHLGRILRERGHQVRLMSPEYVRPYVKAQKNDDRDAEAIAEAATRPTMRFIELKSAEQLDMQSLHRVRDRLVSERTALLNQLRAILLERGIVIPQGRRKLEDHLRTLLEGQEAILSPRVWSLLNDMQAEWRALDSRIEALTDEFAAQAKTDEAARRLATIPGIGVLNATALVAAVGNAATFARGRDLVTWLGLVPRQMTTGGKPRLMGITKRGNKYLRKLLVHGARAALPSLSASATPLGKWLTSLLERAHKNTVVVALANKLARIVWAVLRRGETYAWQP

SEQ ID NO: 247088 - protein, 482 aa, unidentified
MSHNKKQGKTRLPRTQAQLGRRKKQKGMCLADRPCLEPNAAGIDIGAREIFVAVPPDRDECPVRVFDTFTEDLQAMARWLKACGITTVAMESTGVYWIPLYEILEAHGIRPCLTNARHMKNVPGRRTDWHECQWLQYLHSVGLLRAAFRPEAEVCAVRAVIRHRGELVQMAVQHVQHMQKALTQMNLQIQHVISDLTGTTGLAIVDAILAGERDPAVLAQRRDPRIQATAETIQKSLVGNWQPEHLFVLRQSRLLYKTYQQQIADCDQEIEKLVGAFAPRVDPAQKPLPADRKRNRNASKKRNKRGLPANGFDLRTEAYKLFGVDVTQVPGVETSVLPLFSEVGRDLASRWPTAPHFVSWLNLCPDNDISGGRVLWRGTRKGQNRAGQIFRMAAYSLHRSPTPLGNYLRRMKAKLGPKAATTATAHKIAVIFYTIVTKQVEYDESIWAARDAQRQKRLEHKIRRQARQLGYQLVPMQEKPAA

SEQ ID NO: 247089 - protein, 358 aa, unidentified
MEKLIRVGMDTSKSVFVLHGVDAAEKVVLRKKLRRQQVIEFFGKLKPTKIGLEACGAAHHWARELEALAHEVVLLPPQYVKPYVKRGKNDAADAEAICEAMSRPTMRFVPVKTAEQQAALMLAGTRDRLIRMRTQLTNAIRGYAAEFGLTAAKGLDKIEPLLARLAAAVDLPKLAKELFAAHAKEYAQLKLEIQKIEAKLMAWHKHNELSRRLVEVPAIGPIGASLVVMKVPDPHAFRSGRDFSAWIGLTPKDHSTAGKTRLGVITRAGDETLRRTLILGATAVIQQVRRGRGHPSPWLIDLLKRKPPKLAAVALANKTARIVWKLMISGERYNSTRLRDTRSPSARYGSEATAITQA

SEQ ID NO: 247090 - protein, 352 aa, unidentified
MRKKCSTVSFKSQVIYCGIDVHKKSWKVCTRHCGMQLDNFSMNPDPQKLAEYLKRNYPEAEYRSVYEAGFSGFEAHRTLCNLGVKNIVINPADVPTSGRERNYKNDSIDSRKLARELENGSLIGIYIPERENLILRDLTRRKEQVTGNITRIKNRIHSHLNFNGVEFRGWSGSSLKMMESEAEKRFDFALLSALRELRFHREERLRVIRSEHDCLKRLKREEIQKHLESIPGIGFDTAVVLQAELWDMKRFKGKDQLNSYVGLAPHLVGSGEHETVKSSGNRKKKLLHSRLIEAAWRAVRFNREYSAKYGAMIGKGICPQKAISIIAKKLLLSIRAVWLQNREYQVLLPKTK

SEQ ID NO: 247091 - protein, 350 aa, unidentified
MDIVGGFDVHRKQITFDYIEIESGEVHRGKIHPADRESLREWLDEFTERFLGKQIAIALEATTGWRYVVEELRRAGVEPRLAEPAETKSLQGRKKRAKTDRLDAGHLRDLMVINRLPESWIPPDHIQEIRTLMRLRHSMIEERTTHKQRIHAQLFHNGYPRQSNLDSTEGRANLEDMELPAAARKVVDLSLAMIEHINEELEPVEKELRAYARSQAGCKALMMSHYGVGELTSVALLSELGDTRRFSSSKKAVRYAGMDITVHNSDDKRAAGKLSRQGPPVLRWAAYEVAKRAWRKNSPDHEYYLQNKERIGAGRATLSIARKLIRRAHHTLGELGEEAISEPVLTSNSG

SEQ ID NO: 247092 - protein, 326 aa, unidentified
MAMLSFAGIDVSKDRLDVMVLPEEQCSSVSNDPTGWAKLVEQLRGSTIAAIGLEASGGYERGVMRSLLAAGMSVRQVNPFKLRQFAKASGVLAKNDPLDARMIASFVAIMPTRPAQPRAPTLERLVEMLAVRRQLSAEKVAAENASRLLENAMLQRLSRRRIARLAADIDMLDERLVEIVVADAALAHRYRLLTSMPGVGPVLACTLIALLPELGRMSRKQVAALVGVAPYAFESGKLKGKRCVWGGRAPVRHVLFMAAMSASNWNPLLKRFHDRLAATGKKPKVVIVAVMRKMITTLNAMLRDGTTWVDRYSGRRSASTARWPLR

SEQ ID NO: 247093 - protein, 346 aa, unidentified
MKYYAGIDVSLELSSVCVVDGRGKIVKEAKVASEPEALVYFFKELGFPVKLIGLEAGPLSQWLHAGLMRAGFEAVLLETRHVKAALSAMTVKTDRKDACGLAQLLRMGWFQQVHAKSIGSQEIRALLVACKQLLGKLLDVELSIRGILRGFGLKVGQVTRKTFEARIRELVTGQATLERIAEAMLSARATLQAQYEKLHKAVLAIVREDAVCRRLMTVPGVGPVVAVTFKSAVDDPSRIAKSKAVGALFGLTPKKYQSGEKDVTGGITRAGDEMVRTALYEAANVLLSRITRFSKLKRWGMDVAKRRGSKRAKVALARKIGIILHRMWIDGTTYRWAETKPIAAQG

SEQ ID NO: 247094 - protein, 348 aa, unidentified
MQEQRYSIGVDLHSRVIQVCVLNGQGQVAWEHRERGASLAVGQALVARLARKFPAARVVVESLGMNRWFVKACREHGLDVVVAHASKLGLKKSGRKTDRRDAYELARRLMLGDVERNALSYYPDDEEYGLRQLVRHRDGLVRERSETVSKIRALARNHRIELPTGDLYGPKNLEKLRSVQLENPHEQLVLGCLVRALEHLHQEVCVLDASVKSESKSARCAGALAAPYVGPVTALTLVAGLGDVHRFRNAKAVASYAGLVPRVIESGDSSFHGPLVKHGSRELRFVLGEWAVQLLARHPLAQKWAEPRLKRMPKNKVRVALARKLLIGIWHTLRTGEVFDLERCLTTA

SEQ ID NO: 247095 - protein, 461 aa, unidentified
MEILYRCCCGLDVHKKLIVACLVWIDAQGQRHKEKRFFTTMTKDILALADWLTAAGCTHIAMESTGVYWRPIWNLLEAQFELLLANAQHLKAVPGRKTDVKDAEWIADLLQHGLLRPSFIPPAAQRQLRELTRYRSTLIAERARLVNRLQKVLEDTNLKLTAVVTDVTGLSARAMLDTLLAGETDPEVLANLARGKLRKKRELLAQAMVGHVDEHHRFLLTSQLAHIDFLDEQVADCNAKIEACMHEDGENASSVDSAENNEQTEQYPVSLSAQAVAEPMPTQDQAPEKAKQEPLTYPEAVTLLDTIPGVNQRIAEIVLAEVGMEMSRFPTAGHLASWAGICPGNHQSAGKRLSGKTRKGDRWLRQALMEAAQGAMRTKDTYLSAQGRRLTLRRGKKRAVVAIAHSILIIAYHILQRRQPYQDLGSNYFDERERVLVARQSVRRLEQLGYTVTLATPTEVA

SEQ ID NO: 247096 - protein, 389 aa, unidentified
MKIFVGIDIAKLNHFAAAISSDGEILLEPFKFTNDADGFQLLVSKLESFDKNSIIIGLESTAHYGDNLVRYLVAEFYQVCVLNPIKTCQMRKNNVRKTKTDKVDTFVIAKTLMMQDDLRFITFFDLDMMDLKALGRFRQKTIKQRTRLKIQLTTYVDQVFPEIQYFFKSGLHQHAVYALLKEAPSPKEIASMHMTHLANLLKVNSHGHFTKEQAKELRVLAQKSVGANDSAISIQITQTIQQIELLDSQLEKIEAEMTDIMKFNDSVIMTIPGIGYINGGMILGEIGDIHRFSNPNKLLAFAGLDPSVYQSGNFQAKTTRMSKRGSRVLRYALVNAAWNVVRNNATFKAYYDAKRAEGRSHYNALGHCSGKLVRVIWKMLTDNVEFNLK

SEQ ID NO: 247097 - protein, 463 aa, unidentified
MRIIGMDLAVKAEHRAVVVDARGRFVTPVLKVTTQAEDLERLLARAREGAPRCDVWAVMEPTGMAWFPVAVYLMRQGVTVYLVNSQTVIDLRRVYHRHAKSDRIDARVLAQLPLHDAETLHALQLPGAAGLACQRGCTQLDRWGHQIAAIKNRFKATLRFAWPGIEAIFADLYAMEVRWFAEHWLDPHAVLRAGVCLLQQAWHESGLKPEDSGAWVPALVTLAQGVVRLYGPEPRYLDFDLLQAEVQRELALLAYLEAQEHALRLKTVRPLYRQLQPDRLLETIPGVGQDGAAVYASFVGGADRFDSARLFRGWSGMVPHSKESAEVESKGLSINHAGPRLIKKYAFLDAEVARQWDPQLAALYHDQMVNKGKHHNQAVCTCATHLLDRVFVVLRDHKPYEVRDVEGRPVTRDEARTLITHKYTVSDEVRRRTTKRYRQTRRDQRAEKKQKREGARTGVRSKP

SEQ ID NO: 247098 - protein, 352 aa, unidentified
MKRYRRNEDKSKRLFVGIDLHRLRWHVTIRTEDAELFSGGIPGTWEALRRLLGRYRGYEIVAVYEAGYFGFWLHDHLEEMGARCIVTPPSLLPIEYGNKVKTDRRDSRKLAHLLAKGLLKEVWVPSAEERCHRQVIRRRRQLITDRVRTQCRIKAELQFFGIAIGQPTGKWPRVFLMNLHRLKLQDRWVQESFHRLLEQYDFLTDLIDKQTEVLEELAQIPKYKERLAILQTVPGIGLIAGMELLLELQDVARFQRAEQLAAYVGLTPSQYSSADKVRMGRITGAGKNQLRAALVQVAWRLIEKDRAIRRKYDRIKVRSGSKRAIVAIARITLLRTRRMLLDGTPYVLGRAA

SEQ ID NO: 247099 - protein, 349 aa, unidentified
MSQTAQTAVAVIGIDIGKNSFHIVGHDERGAIVLRQKWSRGQVEARFANLPPCLIGMEACVGAHHLSRRLKALGHDARLMPAKYVRPYSKGQKNDFRDAEAIAEAVQRPTMKFVATKTADQLDLQALHRVRERLVSQRTGIINQIRAFLLERGIAVRQGQRFLRAELPRILATPPDVLSPRMARMIEDLAGDWRRLDERIEGLSTEIEALAQADSGCERLMSVPGIGPIISSAMVAAIGAGDAFTKGRDFAAWLGLVPKQKSTGDRTILGKISKRGNRYLRVLFVQAAWVVLIKPKSWERHGLKPWIEAAKKRLHHNVLAIALANKLARIAWSVLARGRGFEASKLQVA

SEQ ID NO: 247100 - protein, 432 aa, unidentified
MDSTAANPSRPPGVAGELFGSFTHFGGFDWAMEEHQFAVVDRSGTMLLNLRFKNDAQGWSELRAKIAAYPHLAVAIETSCGPAVERLLEMGLIIYPINPKAAERFRDRKSPGGSKSDPLDAWCFADALRTDGHGWRQLRPLDPLTAELRILCRDEIALIEQRTAMILQLRQALHEYYPTALDAFDDWTHAHTWDFVLAFATPDALVKAGKRKWEKFLHTHKLYRPETSQKRLELFAKANEFVSPSQAVTKAKSLLAITLAKQLRTLQAQLDEYRDRINELFNSHPDRDCFGSLPGAGEKIAPRLLSELGNDRARFGSHEELQMYAGTAPVTRQSGKRSFSKMRHACNKTLRTTLHLWADLSRPRCAWAQAYYQQKKDQGMAHAAALRCLGQRWLKILWKMWQTRTTYDEALHTRNQVSHGSWVIGLMASPTT

SEQ ID NO: 247101 - protein, 418 aa, unidentified
MQTELSQYTAVIGIDWADKKHDVCVQDMATGRRRASQVRHRAEDLDEWARSLQRRYGGPIAVAVELSKGPIINVLQKYDFFVIFPIEPAGLASYRKTFTLSGAKDDPTDAEFALKLLLTHAEHFKPLQPQSVAMRTLMTLVEQRRQLMNDRVRITNRLRNTLKQYYPQALEWFDRIDTPLFCDFVRRWPSLSQAKRARRTTLEKFFREHNMNRKALLEQRITAIKSAMPLTTDDAVILPHRLRVVTLVEQLEVTLECIRRYDAEIASLAPKHPDYRLFDALPGAGPSLAPRLLVAFGEQRERFKNAAELQKYAGIAPVTQRSGQSTWIHWRWQCPTFLRQTFVEWAAQTINKSYWAGLYYYQQRAKGCSYQAALRALAFKWIRILYRCWKTRTPYDEARYLKALQERGSSLLKMAEVA

SEQ ID NO: 247102 - protein, 313 aa, unidentified
MSQGTYVGIDVAKSSLEVAIHDQAQQFSFLNDEEGIQQAVGHIKKLSPSLVVLEATGGFESILAAALSVAGLPVVVVNPRQVRDFARATGRLAKTDTIDARVLAHFAAAIKPELRPFQDEAVQALKDLVARRQQLIEMLTAEKNRLGAMHNRIVKENLQAHIKWLQNELNDTDTGLRGLIEASPAWREKDNLIQTVPGVGNTTSATLLANLPELGNLNRRQIAALVGVAPYNRDSGLLRGKRAVWGGRAKVRTALYMAVMAGLRWNPVIRTFYEHLCSAGKAKKVALTACIRKLLTILNAMMKNNTTWRCQPA

SEQ ID NO: 247103 - protein, 402 aa, unidentified
MNAVGIDVSKGKSMVAIMRPFGEIVSAPFEIKHTAGDIHSLVELINSVEGESRIVMEHTGRYYEVLAHQLLEANLFVSAINPKLIKDFDNDSLRKVKSDKADAVKIARYALDKWQNLKQYNVMNELRNQLKTMNRQFGFYMKHKTAMKNNLIGILDQTYPGVNTYFDSPARSDGSQKWVDFASTYWHVDCVRKMSLNAFIDHYQNWCKRKKYNFSQSKAEEIYGKAKELVPVLPKDAITKLIIKQAVDQLNSASTTVESLRTLMNETASKLPEYPVVMAMKGVGTSLGSQLMAEIGDVSRFTHKSAITAFAGVDPGVNESGTYEQKSVPTSKRGSADLRKTLFQVMDVLIKTHPQDDPVYQFLDKKRAQGKPYYVYMTAGANKFLRIYYGRVKEYLASLPES

SEQ ID NO: 247104 - protein, 346 aa, unidentified
MEISTIGLDLAKNVFQVHGISATGEVVIRKALRRSQMLPFFEKLPPCLVGAEACGTSHHWARELTKLGHEVRLMPAAYVKPYVKRGKNDAADAEAICEAVTRQTMRFVPIKSREQQAALSLHRVRQLLIKQRTQLVNMMRSVLAELGVAIPVGIVKALQMAREIVDGESKIDLPTEATNVVAMLAGQLLQLHAQLRKLDLRLAALQRSDERARRLATIPGIGPIGATALAASVTDPSQFSSGRQFAAWLGLTPRQSSSGGKERLGRITKMGDRYLRQLLVVGATALVRYAKQKPSTVDPRFVALLARKPARVASVAIANKMARIAWAVMARGGVFERGHAPMLAAA

SEQ ID NO: 247105 - protein, 388 aa, unidentified
MKRLVFTNSYQGFSELIDWAKNLSEEHGRPNLMIGMEPTGHYWLNLAYYLKAQAVSVVVVNPMKVKRFKEMDDDSPTKNDTKDAKVIAQIMRDGRYHEPTLPEDVYAELREGMKLYDIIQEDVASIKAQMQNALDRYFPEFLTVFKDWTGKAALHLLDKGYLPEDIRKTSEEALLSEVKQAATRAVGIKRVQALKEAAENSIGLKVGLSMARQEIRYLLDQYRMLEERLIALEAQLEELVLHLPGADQMLAIKGVSVITVAGFYAEVGDLSNYQDPRQIIKLAGLNLKMNQSGLFKGQTTITKRGRKRLRNLLYQVARPLSLHNEGFKQLHQYYRYRSNNPLSGKQSFIALSRKLIKIFFTIGTRQCAFSEERMLRDIPMISNKQKVA

SEQ ID NO: 247106 - protein, 444 aa, unidentified
MVCSGMILICEVADAPVIMGISKPAGLKSPCGEVKIVNPLFVGIDVSSRSNVAYLMKPDGSKHSSFSVQNNLGGAKMLSERIVSALSSMRLSDVVIGLEATSIYGNNLVYALREDGSLSRFQRKIHVLNPKQVKKFKEAYPDLPKNDFVDAFVIADHLRFGRIAKEVYMDDYRYQALRTLTRARFDVIQNLTREKQRFANYLFLKCSGIAQEKDIQNTSATTIALMEHFETVDDLANTDLDELTDFIAQAGRGRFVDPDATARAVRAAAKGSYRLPKTVNDTVNQAMSVSITSMRALKEQVKVLDKAIEQQFEIIPNTLTSIPGIGKVYSAGIIAEIGDIHRFDSQASVAKFAGLVWTQHQSGEFEAEHSRMIKSGNRYLRYYLLEAANSVRRCDSEFRRYYDLKFKEVNKYQHKRALALTARKLVRLVFRLLKDNRLYIPSEG

SEQ ID NO: 247107 - protein, 347 aa, unidentified
MRFYTKQHKYYCGIDLHTKKMYVCILDGEGQIRLHQNIKTEPESLLRILTPFREDVVVAVECMFTWYWIADLCIQENISFVLGHALYMKAIHGGKAKNDKIDSHKIATLLRGGMLPQAYVYPVKMRATRDLLRRRNHFMRKRAELFAHIQNTRSQYNLPDPLGCIAKPQNREGIVERFDDPSVQKSMAANLEMIKAYDHILTQLEHDIIASAKEHDLRSYALLQTIPGVGRILALVILYEIESIERFPSVQDFVSYSRLVKCIKESNGKSYGPSGKKIGNAHLKWAFSEAAVLFLKGNEPAKRYLERLSRKHGKAKALSILAHKLGRAAYFMLKNKEAFNQKQFLNL

SEQ ID NO: 247108 - protein, 423 aa, unidentified
MDAIGLDVHRDFCEVAIVEAGVVRPAGRVQTEPAALELFAQSLGGDDEVALEATGNSLEIARIIEPHVGRVVLANPKAVKGITRAGAKTDKIDARTLAQLLAGGFLPAVWRPDEQTRILRRRISARAQLVRQRTRAKNQVHATLIRNLKGKPPVSDLFGARGRRWLAAQELPADEQETVAACLRQIEFLDGEIALLERALAEQVLASAEMRRLLTLPGVNFVTAAALIAAIGEIGRFPSARQLVSYLGLDPRVHQSGSEPARHGRISKQGPGETRHVLVEAAWHATRTPGPLRAFHQRIAVRRGGNIATVAVARKLAVIAWHMLSRGEDYAFARPSLTREKLRRLELMTGAKHQKGKRIGVFVTKEQHRLDRELAAQAEIAYRRLVQDWQPAIRGAGAAPGRASCGPSSGQAARQETAPPPAL

SEQ ID NO: 247109 - protein, 425 aa, unidentified
MKISQTAQKIKLNQVMDISVDVHKDLLNFFFETGGKEYSDECSNRTTVISKRLEAYHQIAAEHGVKTLRIICEPTGQYHNKLFRTARKMGFFTCFVNAESVAKFRVIETNDTGKTDTKDPRVIRTLGQLDKVIRHRRISEEYMILRKFNKIYDEVDGMIVSLRCRLDRLLVELFCDYSFKKDFLYTASGLALIEAYGCNPYRIIKAGYMGFCARMRKGAPRIQKQTLRRLWEDAQSSVLNEQPEAYVEALEMHLRQLINDWLEQIRRKEEMVNKMVEVLNRLRGKDPKIPPSTPGVINDKNMARLLGETGPVGDFANWRMLMRYGGLNIRMRQSGKYQGQNKITKRGRPLLRKVLQHIVLPLVREGCLYGPYYHRKKEIEKMPGNKAMTCVARHFLKKFYGWYKSGEAFDQQRFFSCETQYRKAA

SEQ ID NO: 247110 - protein, 340 aa, unidentified
MGNVTTIGLDIAKSVFQVHGVDAESEVVVRRKLTRGRVLAFFESLPRCLVGIEACSSSHYWARELTARGHDVRLLPAQYVKPYLKRQKNDAADAEAICEAVTRPTMRFVPVKSPEQQSVMMLHRVRLMLNRQRTQISNALRAHLSEFGVVAPIGRNGIEQLLVVVNDENDARIPADARLCLRMLEAQLRVVKEQILENDRRVRASARETELGRRLMEIPGVGPLLASAFVATVADAHAFKSGRCLSAWIGLVPKQNSSGGKEKLGGISKAGNRYLRQLLVVGAMAVIRYAERNGTRRPWLVQLMARRTTKVAAVALANKTARMVWALMTSGERYREPVVA

SEQ ID NO: 247111 - protein, 368 aa, unidentified
METKSTRNLYVGMDVHKESIDIALAEHGGQVRHYARIGGDLNALARTVRKLESLAQPLVFVYEAGPCGFAIYRSLCARGHACWVVAPSNTPRRVRDRIKTDRRDCLKLAGLARAGELTPIYVPDAADEAMRDLVRAREDAVNVQRQVRHRLSALLLRNDIRYAGKCAWTQAHRRWIARLVLPNAAQRIAFEEYVLGVQEASERVARLTQAIEQQLLSWRWRELVRVLQACRGIQLIHAVRIVAELGDLSRFAHARQLMAYLGLIPREDSSSDRRHQGAITKAGNASARRALVEAAWAYQYRAAVTSVIARRQTGVPKAILDIAWKAQLRLCARFQRLAARGLNRNKIVVAIARELAGFVWAIAQYRPH

SEQ ID NO: 247112 - protein, 340 aa, unidentified
MPLYGGIDLHANNSVVVLLNEQDQVVYEKRLPNHLPTVLDLLDPYRAEIMGFVVASTYNWYWLVDGLMEAGYRVHLAHPAAMQQYSGLKDTDDHSDARWLAHLLRLGVFPEGYIYPKAERAVRDLLRKRAHLVRQHTANVLSVQNIIVRNTGTRLSIKRIRELTKQELEGLLPEVAQVLAVTSSLAVLACLSHQIKTLEQTVHKRLKHTPSYEQLLTVDGIGTILAQTIALETGTIGRFPTVGNYASYCRCVDSSKIRNGKRKGQGNVKNGNRSLGWASMEAAQFALRFHPSAQRFYQRKLAKSNNNTTLARKAVAHKLSRACYDSMRDRVPFDALKAFG

SEQ ID NO: 247113 - protein, 306 aa, unidentified
MHACVGIDVSKATLDVAVYGSSEVRAFANSPTGFRRLAAWLLPQYPRQVVLEATGGYEQAALDALFAAGLPMVRANPRQVRDFAKALGQLAKTDRLDARVLAQLAATISLSPYQPACDWQRRLAQWHQRRGHLVQMIGSERQRLERLADPTLLTWARRHIAMLQRELRRLDAQIKHQVATQPALDPLRSLKGVGPVLQAALACQLPELGHLDGKAIAKLVGVAPLARDSGLMRGQRHVWGGRRQIRAVLYMASLTAIRYEPRLRDFYQALRARGKAAKVAIVATMRKLLVILNARMRDARIEQQSA

SEQ ID NO: 247114 - protein, 344 aa, unidentified
MTVTTVGIDLAKNIFQIHGVDQHGKSILKKKLKRDQLFTFFANKEPCLIGMEACSGAHFWARVLANQGHHVKLMAPQFVKPYVKTNKNDAADAEAICEAVTRPNMRFVGIKSPDQQALLSLHRARSGLIKAQTAQINQVRGLLTEFGIIMPIGKAAVKRYLPLILEDADNGLPDMFRQVISRLYEHLKELGEHIEQYDHLLNEHFKHCELSQRIASLPGIGLISATAIVGTIGDASEFKNGRQLSAWLGLVPRQHSSGGKNTLLGISKRGDGYLRTLLIHGARSVLIARKNKVSSESWLGGLIHRRNTNVAAVALANKNARTLWAMLTRGEDYNPKQYPDAFAS

SEQ ID NO: 247115 - protein, 351 aa, unidentified
MIVGIDVHKDSHTAGLLDPTGREIATLRFANSHKGVERLRDWLAGHDAAGALVGIENAAGYGRLLCGELAATGHEVLNVPAWRVHRDRPTHGAGKSDPADAIAIAHVVLRKREKLGSAVEPEIVRAVALLEVARRQAVAARTEQIQRLRAIWTQTDPEAEIAVAACTSQRALKRLKRIAFGEGLAERTAAGLVRELARDIEHLNQRIAELEAQLANLLYDRGNPVEDLCGAGPAVAAALIAHAGDVRRFRDKAAFARFCGVAPVPCGSGRTADRHRLDRGGNRQLNAALHRIALVQARHEPRAQAFLARKHAEGKTKREARRALKRHLANVVYRRLLDWAENLATSEPHLT

SEQ ID NO: 247116 - protein, 384 aa, unidentified
MPRPVKELTEVEHHVATLFASLELSQTSWLVTSLSPGSVTMSKHSISAGDGAGLLGLLGRMRAKAESSAGVPVEIVVIQEAGLDGFWVHRLLEANRIKSHVVDAASIAVPRRRRRAKTDAIDGETLLRTLRAWKRGEPRVCAMVAPPSPDQEDQRRISRERAILLRERVRHVNRIKGLLSSQGITDFEPLHKDRRIRLDALRTGDGRPLPPRLKAELLREIELIELLLFQIAEVEAERDSATEFDTAQNPSPIALLTRLRGIGSQIASVLYFEGLYRHFGNRREVAAYAGLAPTPWRSGTIDREQGISKAGNPRLRHIMVELAWLWVRHQPDSVLARGFRARVGTETGRVRRIAIVALARKLLIALWRYVNLGEVPEGAVLKPA

SEQ ID NO: 247117 - protein, 302 aa, unidentified
MDKFDPCGIEVSARELVVAVRRGQREEPLRSFPNTPEGHAAVVRFLTVGSQRVRVVLESTGLYGLDLACALHRAAQIEVMVANPRAVRHFASALMQRSKNDRLDAVVQREFAARMPFRSWSAPSPQAFSLCAIARRLETLTEQCTGEKNRLHAAHLSVAIPAAVRRDLQRSVRSIQRALVRLTREAQRILEADPLLASSYHLLLTAKGIGPTSALRLLAETALLSEDLDVRQWVAYAGLDPANINRAPRYTGKRASAKRAIDTCAGPCICPLWSPCVMNLTCALSINTCWPKENAKCRPWSR

SEQ ID NO: 247118 - protein, 401 aa, unidentified
MTTPAREVVAGVDTHADTHHAAVIDAVGRRLGDAQLPTTTAGYAALAAFLISFGIVVRVGVEGTGSYGAGLSRHLRSLGMLVAEVIRPNRQLRRLQGKTDPIDAYAAAQTALAEMDLPTPKTADGTVEAIRQLLVARRSAVKARTAAIAQIKALLVTAPEQTRAKFRGLSDDKLIDTLARSRPSSSEAIASAAGHALRSLARRHQHLGEEITDLEALMAPLVKAENPALVAAFGIHTVTAAQLLVTAGDNPDRLHSEASFAALCGTSPIPASSGKTTRHRLNRGGDRQANTALHRIALTRISHDRRTRDYIAGLIARGKGKKEAMRCLKRAIAREVFTHLTNPAEVPTIDDLSPLRQARGLTVAAAAAHFGVWPDKISTIERGARRDDDFANAYRQWLNAA

SEQ ID NO: 247119 - protein, 358 aa, unidentified
MKTYFGCDAHKHYSIFASVDETGASGPFVRVENERSLFRRHLRTMPPESEIAVETVGNWYWMIDEMERAGHVPLLTHAGQAKAMMGQINKTDKLDARGLALLLRNGTLPSIWIPPGELRDQRELPRMRMTLVRMKTMLKNRIHATLAKYAIQIDEVRDVFGAAGRKLLEKRIRELPPQTCHSVEQQLELLDDVEAQIKETEIQIKTIIQDTPAMKLLMTLPGVGMILAVVIALEVGDVDRFSGPEKLASYAGTVPRVKASGGKIFHGPVRSDVNRYLKWAFIEAANTIVIFHKRWTGRHVAILYTRLREKRGHAKAVVAVARHLSEATYWVLKKAESYRERNAKKPVSSTREQARQFA

SEQ ID NO: 247120 - protein, 423 aa, unidentified
MGYRIAGIDVHKKMLAVVVTDIAIEGEYDFERRQFGARPDELRRLADWLIEQKVQEVVMESTAQYWRPVWHTLERYWKAACRSWEGAGPMSGSLLLAQAQSNRGPRGRKKDFVDAERLVKRLVAQELVLSFVPDSEQRLWRTVVRRRYQLTCDRVRLQNQLESLLEEAHLKLSSLVSDLLGASARRMLHALAHGETSPAALAALADRRLHATQQQLCDALGASTELNGVYRRLIKMALEELQLIEQQMDQLDHEIADLLSQHKDAVQRLAEVPGLGVDSAHQIIAEVGATAATFPSEKHLASWIGVCPGEEESAGISTSNRSPKGNRFMRRLLNQAANAAVKAKGSIFEIVFRRLLPRLGFKQAIWAIAHRLSRLIWKILHQGVRYEERGPAVSQKSRAARTTKMIKELRSLGYRVEPPGNPA

SEQ ID NO: 247121 - protein, 423 aa, unidentified
MKLTYKVCCGVDVHKTFLVATIITSSFVLPQYQQKRFSTFYRGLLAFKQWLLDNDCKDVCMESTGKYWVPVWNVLEDSIHVVIANPKWVSAVKGNKDDKKDSKWIGDLFRMGLVPGSYIPPKDIRILRECTRYRSKLVSMRSSEKNRFQNAFTVCNLTLDAVVSDMFGKSSTDILNYLLDTDTVDPDHCVSLLRRSLKKKASDVVEAVNGFNMTAEQKERVRIVQGHFADIDNRISQIDQIIAKLTAEYEGTISLLCTIPGIDRRLAITIISEIGTDLTEFGSSKRLCRWAGLTPGNNESAGKKKSVRISRAGVYLKPALVEAAHAAVKATQKCPYFRIKYERIMKRRGKKRATIAIARMILTAIYAMVSTGETFNPCDLQKYDMPEELKKKQTVSAAKEAVKLLVSLGLVSEGSISLKPLAS

SEQ ID NO: 247122 - protein, 362 aa, unidentified
MRIIGCDLHARQQVLAMLDTTTGEVLSMTLKHEGNNVREFYSTLAGPVRVGIEATGSMQWFVNLMEELGIECLVGDPAEIRAAEPRKQKHDRRDAELILKVLVENRFPTIWQPSKELQDLRSLLRHRHQWVRMRTRIQNALQSIALANGLRRGSSLWSHDGQSTIASLPLAPHTAYRRSELQAMYVKFEAEIEKLNQRVAEQAGGRAGAQLLMTHPGVGPVTALATEVFLGDPGRFTGGKRVASYVGIIPMEYSSGGRQRLGGLSKQGNPLLRFLWGEAAVHAVRRDPELQRFYRRKLIQKGLGKARMAVARKLGIRLWIMLRDQIDYNEFCRRGQRQQRSGEVCAGMPETRYGATCHRPID

SEQ ID NO: 247123 - protein, 386 aa, unidentified
MKTVAGLDVHKDSVYLCILRENGEKIERVYGVLTPQLDSMRDFMAENEVSEVAMESTSVYWIPIWRVLVDSFELKLVNPYFIRQLPGRKSDVKDAQWIAECVMKELIRGSFIPPPLVQQLRLYDRRIFEINAELVRKYSKIDAILQRCNIRLSNYVACTDCKSYKAVVKQISEGVTSPQELLRHVHKRIINKHGEDTILAALTGVVSEAEIDMLAQYVAESALLEDNKNKCIEKMREICNREFEEQMKNLQTIPGVSERSALTVLAEIGPDVNAFPSAKHLVSWCGFNPRNDESNKKIKSNKITHGNRFIRIASVQCAWAASRTKDCYFSKFYAFHTQVRKKFKLKVVVAVARKMLVCIWHILKFNVPYKDFAPRKPAVEDCTQLA

SEQ ID NO: 247124 - protein, 377 aa, unidentified
MKKELYLGLDVHKDCIITAVAEEGRKGEVRESGAISNDLHAVEKWIGRLRKAHGKETLLRACYEAGPCGFGLARRLRQLGVECQVVAPSLTPTRSGERVKTDKRDARKLARLLRAGELTEVYIPEPSDEAIRDLCRARSDAVDDRRRSRHRLKGFLLRHGYRYQGKSSWSAAHERYLRELMLAHPAMKVILEEYLQAIAAAGERIERSEEAMRVLLEQWRLVPAVHALMAMKGFRTVAAMILVSELGEVHRFAHPRQVMAYLGLVPTENTSSDRRRQGHITKCGNAHARWLLVECAQHYAAPPKVSKELSRRQQGQPNAVRAISWRAQNRLHRRYTRLLARRLQRNKAMVAIARELCGFIWELLGTQSCYQAPSPPV

SEQ ID NO: 247125 - protein, 331 aa, unidentified
MKNVTETVGIDVSKLTLDVYVHHLGQHQQFSNTRKGYTEILQWLKKQKVNMQATLLCFEHTGWYCVLLSFYLHEQGIRYCCVNPLEIKRSIGLKRGKSDKADSKSIAHFAWLRREELEESVPPPANIIELQRMMSLREQLVKQSTALKNLKNGMLTVVSNASQDRSLVLLGQSIHHLEKQVGQIEKAMEALIKESKEMRKNYKLSRTVQGVGRVLAIQMLLHTHNYTRFENWRQFSAYCGLVPYPFQSGTSIHGRNKTHPISDKKMKSLLSMSACSAIQHDKELQCYYQRRVEEGKHKMVAFNIIRNKIVARIFATVRRGTPYVELNKFAA

SEQ ID NO: 247126 - protein, 412 aa, unidentified
MNIRVEKACGIDIHQAFLVATMLDLAGTKDTRRFSTCIEDLLNLREWLLDSKCQRVAIESTGVYWIPTYTLLEGKVETIVANPLQIKNIPGRKNDDIDSEWIAEVCLNGQIKPSYIPPKEIREIRELTRSHVKLTQAKTSFKNRVHKVLSRAGIHVSGVLSDIFGKSGIIILNGILNGKTIDQTLAEIKDKRIKIKKMEIKDSLKGELSQNDIFVIKECIDSIKFLDQKIKEFDSKINQNLNGLQKEMEIVMSIPGVGFTTAAAVMAEIGNIEEFSKPKQLVGWSGLAPAINESAGKSSNGHITKRGNKFLRTILVLAANSIAIGRPNKLRFFYERIKAKKGHKKAIVALARKLVSIIHHLLMFKEMYSEEEMKQKNFKLPKFIPVPEFSIDDMIGILCEAGYSINKTAVKT

SEQ ID NO: 247127 - protein, 339 aa, unidentified
MIHVGVDLHKRSSQLAVLMPDGEVTQQRLENDPTRLEQFFAELPRGARIAIEASGTWWWFVDLVERLGHHAVLSNPKQTKAIAAARLKNDRVDAERLALLLRGDLLPTVWIPPARLREARELVRHRVSLVWVRTEIKNRLLALLSRRNLQPTSSKRWLTVRGRRELAELPLDAIPSTVREDCLALLRVLDEQIRRLDHELVQRWGDDPRVQRLRTIPGIGPFTAILLILELGEIQRFPSAKHLASYVGLTPRVRASANRVRLGHISKEGNRLLRWALVVAATQAARRPGPLRAWFRAVQQRKGMKIARVALARRLAEIVYQIWKHDLDFVTLVRGGVRG

SEQ ID NO: 247128 - protein, 343 aa, unidentified
MPHYVGLDVSQKTTAICVVDEQGRRLWRGVCATDPGAISARVSQHAGVDAKVGIETGSMTPWLVHCLRSAGLDVQCLDARKVKAALQMQLNKTDENDAEGLAQIMRTGWYRAVHVKSLDAHRARALLGARAQLVGMTTRLSNMIRGVLKTFGLLPGAGRGLRFDRKVEALLEGAPEIALVVRPLLATWRQLREQIAVFDKAVLQQVRADPICRLLMTVPGIGALSSLMYVSTVENPSRFSRSRAVGAHLGLTPRRYQSGETDRSGHISRCGDGLARTLMYEAAIVILHRVKRSLHLKDWAEAIERRSGSGKARVALARKLSVILHSVWRSGEPFRWAAPAMAA

SEQ ID NO: 247129 - protein, 349 aa, unidentified
MKIIGCDFHPGYQQIAMLDEETGELSEKALSHEKIEEVRAFYSALQGPVRVGIEASGQSQWFERLLAELGHELWIGDAAKIRASCERKQKTDRRDALLLLQLLMEGRFPRIWVPTPAERDVRQLLLHRAKLVRMRTQVKNQLQALALNQGVQRKWKLWSVAGRKQLEGLALMPWASRRRAELLVLHDQLEGSVSELDLAVAEQANTRSAVRRLMTHPGVGPITALAFVLTMGPAQRFRRGKQVASYLGLIPSEHSSGGRRQRLGHISKQGNTFLRGLLVEAAQSAVRHEPEMRREYQRLAQRKCRALAKVAMARKLAVRLYWMLRSDLDYAQLIRGSHAGQPESFRGRS

SEQ ID NO: 247130 - protein, 403 aa, unidentified
MMFYLGIDLHRKQMTVSLRNESGDVLLRRQVSTRWSKVEEFRKQLHETMTADEKYVAVVEVCGFHDWLVKWLRQDERCHRVLVVQPLGRSASKTDRRDAHGLSELLWVNRERLQREDRVHGVRTVQMPSEEEQAERRLTVVRERLVRRRTQTLNQIHKILRRQNLEWEQPTKTFQTVKVRQWLKTLQLEPTDRLAMNQLLAQWQLWDEQLVAADGWIAERFQANQDARLLASMPGVSMFIALAITSRIKPIARFPRGRSLANFLGLTPGCRSSGDTERVGSITKIGSRMVRYLLAQAIQHLLRRDGTIRTWYLRIKRRRGSKIARVAVMRRTATIMWRMLSTGEPWRPGKASSEKPSVAGDRGQTNSPRGKSSGPMASGSEPGGSSTGSSSLLAGEEVAPCPA

SEQ ID NO: 247131 - protein, 360 aa, unidentified
MSIIYGGLDVHKGSISVCLLDARSGEIVSQEVPNDQPPVLRAARCWAKMGELRLCYEASGAGFVIQRWLQGIGVTCEVIAPSLIPKAPGERVKTDKRDARKLAKFYAAGLLQPVRVPGVEEESVRALVRLRGQLTVDITRVKNRIHKYLRTVGHAYPERSYWNGKHRDWLARLPLAAIPRLIVQTHLEELDALVSRRGEIEQRIEAVARSEPYRQGVDRLMSLRGIGTHTAMVLLSEIGDARRFGGAPQLMAYLGLVPREDSSGQSRHTGAITKAGNHHARYVLGEAAWNQATKPGNCKRLREHWQHQPAAVVTIARKAERRLHDKFWKLTLRKDSKTAAVAVAREMVGFVWALLTLEVA

SEQ ID NO: 247132 - protein, 447 aa, unidentified
MPKRIIRYVGLDVHKRVVEACIVDGAGNVLRRERFTLNRQTLERFAAKMLRRTDHVALEATTNCWAVADMLRPHVARVLVSNPMATKAIAQAKVKTDKVDAHVLAQLLRCDFLPEVWQPDEATRRLREMTGRRSTLVGMRTAMRNRIHAVLAVRLIETPIKLFTPAAREWLAGVELDEQGRLLVDLELRQMDHVQKEIDLLDEELARRAYASDAVKLLMTLPGVDAATALAILAAWGDPTRFPDADHAAAYLGLVPSTKQSADRCYHGPITKRGNSQARWMLIEAAQHLDKHPGPLGHFFRRLARKKSRNVAVTACARKLAVIAWQMLIAGEPYRYAIPRSTEDKLRRLRVKATGERRKSGSPKGTKCTAKLPGGSRTIRSLPEVCRSEGLPAPRGLSPGERRTVRQAACEAHVARIAEPHLAPRRSDKSSKPPADYPRKASSRRKA

SEQ ID NO: 247133 - protein, 323 aa, unidentified
MNKKKMPVVGIDVSKDTFNAYFSGGDFKYPNRLNGWRKLFKAAPPGSLFVMEVTGNYHYKLAAWLFSKGCSVKVLNALRFSDWLKSTGDYKAYTDALCARYLARYAVTDDVLSLKCWEPMSPKLARARTILTLLGRLTKISTQASNTNHAVSKIVCAGDDLLSVMGGIDDYCRCLRSDLEKELFRLVSGIYPEQFCLLQTIPGLGAKTAAIMLVCGRGFEGFETSCQLSSFFGFAVKVKDSGTSVKGKGTITKHGNAYFRSLLFMCAMVAKGKNRPCSELYNRLVSKGKSGTLALTAVMHRLVKIAFGVVRSGEPFRGGSLAA

SEQ ID NO: 247134 - protein, 379 aa, unidentified
MKDIRHVGFDVDSEKIAVAVAEPEGEVRSLGTIPNREDSVRRLVKKLGPAQRLRVCYEAGPHGYDLYWQLTKLGVHCDVIAPTLVPVKSGDRVKTNRRDAEKLARCYRSGDLTAVWVPDAAHEALRDLVRAREAAKKDQLRARHRLGKFLLRRGLRAAAGVKSWTTKHLLWVKTLHFEHAAQEATFLDYLHEVEHAAERVTRLEHAIDQAIEAAPAQMRALIAGLQALRGIRKVSAATIVAEVGPLSRFARPKQLMGYSGMVSAENSTGNSVRRGAITKTGNAHLRRVVGEAAWAYQYRPAMSPVLKKRQEGLSEEVKEIAWKAQHRLSSRYRRLMAKGKIRQKVATAIGRELLGFVWAIGMQVEREQQGCTKGRRPAA

SEQ ID NO: 247135 - protein, 323 aa, unidentified
MTPATSSLRVLGCDVAKDTITVFDSHLGAAQTLENKPRVLKSLFARLKKQEPNLFVVCEATGGYEAALLAAACEADLPIHRADPRKAKAFVRSLRTYGKTDELDAEALTAYGLERHNSLVLWQPLPQAVDDLQKLVRLRTDLVQSRADYKRRASAPGNGPDKRYIKAFIKDHDRRIKAVEKEIDVCLSQDDHIAKIVEVIEAIPGCGHISAFTLAGLMPELGQMSNKQAASLAGLAPHPNDTGKSLGYRSTRGGRRQVKITMFMTAMAARRFNPTIKEKYEAFLAQGKKKMVALVACARKLITIINAKIRDEIFNNKNKLQLS

SEQ ID NO: 247136 - protein, 404 aa, unidentified
MWFIGLDWADEHHDICVITDTGKQIGSLRTAHTPEGFQNLKDFLLSITGPVDKEEVACIVETNHGLLITWLLEAGYPVYPVNPKTIDRHRRPSGAKTDKIDAYLLAKYGRSEMADLRRLEPDSAIVAELKALTRDQDSLVRSQTRLVNQLTACLKAYYPVALKLFSKLQQHSTLAFLQAYPTPQEAMAASVEQIAHILQEARHPTACKVAPKIFETLHQPQLTADAITIRTKARLMLVLVKQLQPLIEEIAHYDKVIEELFLTHADSKMFRSLPRAGKRLAPRLLAEIGDDADRYADAASLQALAGTSPVLFESGNYSKPHRRYACSKPLRNALQQFAWQSTQTAGWARDYYRRKRKEGKSHTVAVRALANVWVRILFAMRSSHSCYCAATFEDAQRKHAPRAA

SEQ ID NO: 247137 - protein, 437 aa, unidentified
MLSIFKSIITIMINSTDFAATIGLDWADKKHDLWLRPTDGCKAEHLRLEQTPEALHEWVAKRRQRFANRKIALAIETSRGPVISALMAYDFIVLFPVNPKGLKSYRDAFALSGAKDDRTDAQLLEEFVRLHPEKLRALEPDTELTRKLAGLVQNRRRLVDERTRLVNQIHATLKTYYPMAETLLEGQMNTPMAADFLVRWPDLEAVQKAKPELIRSFFYQHNSRSAKKTEERLAAVQKAKALTTDAAIIMPARQLVLALAGMLRPLHQAIGRLDQEIAQAMDQHPDAPIFRSFPGAGPALAPRLLVAFGTNRDRFESSTDVAEFYGIAPVVVQSGNSKTVHFRYRCPKFGRQTFHENAGCALKKEPWAKCYYDQQKEANKAKHHQACRALAYKLVRIYFACWKQRQRYEPKRYLLALEKHASPLHRKLQNLTAAHCE

SEQ ID NO: 247138 - protein, 319 aa, unidentified
MAQMVVTAGIDVSKGWLNIALWPLKAELQVDNGAAGYDRLAAWLTQHGVVRVGLEASGGYEVAVIDALEARGFAVVRFNAQRVRMFAKAKGRLAKNDRADARTIAQATAVLLDMAPAPRRRDLDPLVEHLTYRRQMRAWITDCTNQLERLRDRTLRDKIKRRQTALQRELAALDKRLVELVAEHDDWHVLAQRLRTVPGVGPVLAHTLIALLPELGRLSRRAIASLVGVAPFDDDSGKSAGERHIKGGRAAVREALYMAALVAKRFNPLIAAFAKRLAGKKPKVILVACMRKLLVILNAMLRDGQPWKLADTDVLQPAA

SEQ ID NO: 247139 - protein, 412 aa, unidentified
MEVVEDRCAFLDVHRDTVMACARTPDPGGGRREEVAQFGTTTSQLLKLAEWLVEREITLVGMEATGIYWKPVHWILEDEIARVWVINARHMRNVPGRKTDVNDAIWGASLLEHGLVRPSFIPERPVREMRDLTRYRKSVIEERGRESQRLHKVLEDAGIKLASFTSKVLTKSGREMIEALIAGQRDPEVLAEMAKGRMRAKIPELQDALAGRFNTHHARLCRTMLDRIDHADDVIDGLTEQIEALLDPHEAAVHLLCGIPGVSVRTAQVILAEIGTDMSRFPTAGHLASWAGMCPGNNESAGKHRTGRTRHGSKWLRIALVEAGQAAGRSKNTYLSAHYHRIRGRRGPRKAAVAVGHSILVIAWHLLSTGETYTDLGGDYFDRRRNNDARQRRLVAQLEAMGLDVTITPIAA

SEQ ID NO: 247140 - protein, 384 aa, unidentified
MQASTIDTPTAGHCGTIFVALELSQKSWLVTLHSPDRDRISRHKLEGGDHAGLLALIDRERDRASRTAGGIPAVASCYEAGYDGFWLHRLLLAAGITNYVFDPSSIAVDQRARRVKTDRIDGERMLRTLMAYLRGEPRVVRIVRVPCPGQEDARRASRERGRLTKEQTAHTNRIKALLRLLGMAVGNPRRHDWLTWLAKQRDWQGQAAPPQIMAEIKREHTRLMLVREQLDALAQAPADLTPAAAQMAQRSELLLRLKSLGPAFATTLTSEVFYKNFRNRREVASYFGLTPSPWQSGGLDRDQGISKAGNPRARCAAIEMAWLWLRHQPDSKLTQEYRRRTRDAGKRIKRVAIVALARKLIVALWRYLTTGLVPEGAMLKKAEV

SEQ ID NO: 247141 - protein, 344 aa, unidentified
MDHFAGLDVSVKETSVCIVDETGKIVREVKVASEPEALLAVLKNSSYHFKRIGLEAGPLSQWLFSALAEAELPVVCVETRHMQAVLKAQINKTDRNDARGIAQMMRVGLYRPVHVKTVHSQRLRMLLTHRKLLLSKAIDIENDLRGTLRNFGLKVGMVRTVKFEARIKELVENLPDLAGLVEPLLVVRRVLREQIEILHRRLLTIVRDDEVCQRLMTVPGVGPVVALTYRATVDVPARFRKSKSVGAVFGLTCSKYQSGEIDRSGRISRCGDEMMRVMLYEAAQVMLTRTNKWSWLKAWAMKIARHRGMKKAIVALARRLAVILHRIWVDGTEFRWIREQAVAA

SEQ ID NO: 247142 - protein, 379 aa, unidentified
MGENITYVGLDVHKDGIVVAVAEGGLRGEVRDYGRIANTPAALQRLARKLGHEGVALRFCYEAGPCGYGIQRHLSAHGQQCVVVAPSLIPQRAGDRVKTDRRDAARLARLHRAGELTAVWVPDAAHEAMRDLVRARLDAVHALRRARQQLSGFLLRQGCHYGRPAWTKLHRPHGSSPWAEGSRLTGLRFAHAVHHIVLEDYIQAVEAAEARRDRLTAQIEAMLPDWTLAPVVAALQTMRGMALVNAATLIAELGDLSRFSNPRQLMAYLGLVPCEHSSGASVKRGGLTKAGNSAARRLLIEASWTYRFPARVSRELLLRQESQSKPIREIAWKAQLRLCARYRKLARSGKPANVVTAAIARELAGFIWAIARRVPPAAG

SEQ ID NO: 247143 - protein, 349 aa, unidentified
MNATIVGVDLAKNIFELAVAGSDWRITQRQRLARPKFLSFFVHLAPCEVVMEACGSAHFWARRISALGHTVRLLPAHYVKAYVRRNKTDQADAAALIEAARCADIRQVPVKTVEAQQIQSLHRLRSQWLSTRQRYVNTLRGILREFGFAIPLGVNVAKTQIGAILAESDNDVPDAVRASLAEMLQEIRSLEEKTLGVERQLNALTRTDVCVQQLRQIPGIGPLTSTALRAIVGDIQRFPSGRHFASWLGLTPNERSSAEKRRLGKISKQGDAYLRTLLVHGARSALLAAHRAERAGQSVDRLRRWALDCERQRGHKKATVALANQLARIVRATWKHQRAFDGNWSARAA

SEQ ID NO: 247144 - protein, 343 aa, unidentified
MKLSRVGIDLAKNVYQLHGVDRSDKTVWKRRLKRHQWFKVLLDKVGPECEIGMEACTGAHHWGRELQSRGYTVKLIPPQFVKPYVKSNKSDAKDAEAICEAMSRPNMRFVTVKRVEQQDVQATHRIRAELMTQRTAKANQIRGLVAEYGLVAPKHLSSLRAAIPCWLEDAENGLTGDFRTLLQGVWADLVLLDDRVCEMDQTIKRLADNNEDCVRLQQLRGVGPMTSTAMIATVGDARQYQKSRQMAAAIGITPKQQSSGDRDRLLGISKRGDVYLRTLMIHGARAVVARAKHKDDRLSRWVTNIANKKHPNVAAVALANKTARMAWAMLRHETDYDPDFAIR

SEQ ID NO: 247145 - protein, 481 aa, unidentified
MSKQEKRPADSGEKKTESGKGKRGRRRKGMCLDDRPLLEPNAAGIDIGAREIFVAVPPDRDENPVRVFSTFTEDLEAMARWLVSCGITTVAMESTGVYWIPPYEVLEQHGVKPCLVDARGMKNVPGRRTDWHECQWIQFLHSVGLLRAAFRPEGDVCAVRSWMRHRSDLVQMTSQHIQHMQKSLTQMNVQIHHVISDITGLTGLAIVDAIVGGQRDPVELAKLRDRHIKASEETICKSLKGNWRGEHLFTLKQSRQMYQHYQKQIAACDEEIEKLLVAFQPWVDPEEKPLPPNRKRKQRGRKKKNVNPKTGFDLRTESYKLFGVDLTQIPGLNSMVLTLFSEVGRDMSRWPTSGNFASWLALCPDNDITGGRVAWRGMRMVHNRAGDLFRLAAYSLHHDPSPMGDYLRRMKSKMEAPAAITATAHKIAIIFYTMVKKQVEYDASLWAQRDAERDKRIEAKLKRQAARRGYKLVPIEEKPAA

SEQ ID NO: 247146 - protein, 326 aa, unidentified
MVDQHETANIIGADVSSQEIVVAWARSNQPIQSIGNNRKCILAWLKTLPANTVIGMEATGRYHHCLADCAVIHGHTAYVINPKHLAHYARGVGQRGKTDPLDARVIARYVDRERDGLHPYVVPSELQRNLRNLLSQRAGVVKHSGAIRQNLQATHTGSRAALRRAAQQVLNSMAAMIDTIDVEIKRAVQNHATLEAKRAQLQTITGIGFLNSVALTHRFDRTPFANSDAVVAAYGMDPRPKDSGQKVGKRHLTKQGNPEDRRLIYLAAQSASKTKLFKPLYLALLAKGFATTEAIVILARKLLRIAFAVWTSGKPFDPTKIGFKGC

SEQ ID NO: 247147 - protein, 450 aa, unidentified
MGKGNGSGVRRGGLRRNARIERLRVMVPVTNAVLGVDLGEKKQALALVDRDGRVLARRSPRLTVHELGGVLDWAAERARAGGFAGVTVSCEPTGPRWMVLQELCRRRDLPFVCVQPLVTHVAREQEDLTGDKTDEGDTVLIARLTRQLQCYVPEVLDPAWAELRAAGRDRAAQITRATAARQLIRDHLGLAVPALLAVHSDPLDSPTWLASVQVVLERCGGDLDAVMAMGREAFTAAVAAKLAAWGGKRTGPTAAKVLAALAGAAVLPRMMRAAARRVAGALEDLQHATSRRARLEGQMTALLAELGIDHERICQIPGLTPAGLAAILAETGDLRRYRSSSSVVKHAGMSPARNESGSFHGQAKMSRRGRPALRLAAWRATWAVLRHCDVLAAKHAALTSRDTSPLADGQARVACAASLLRWIWSLTVHGTRWDPRIAAGQLSHHHAMAA

SEQ ID NO: 247148 - protein, 376 aa, unidentified
MRKVALDLGTRKTAYCEVRDGKVVQRRTEDAVRDFEPLLGPEQPEAVVAIEACREAWHVHDLLTSWGNQVVLVDTTRSRRLGIGQHGRKTDRIDAEVLALALERGGIPAAHVLSPHRRELRRWLGVRRALVESQAQLVTTARGIAREYGAPLPRCTTDRFVSNVRKLKGDPELAAALEPLLKMLETISAELVGVEQALAKLCATEPVVTLLATAPGVGPIVAASFVSVIDEAKRFTSAHHVQSYLGLVPSEDSSGGKRRLGAISKKGNKYMRALLVQSAWTILRKSDPSDPLRLWAQAVAARRGKHVAVVALARRLVGVLWAMWSKGNAYEAPRLAVASSRGLSEAAQSLEFRAEALKKASKKQSMKRFTAAGAPS

SEQ ID NO: 247149 - protein, 348 aa, unidentified
MPLYVGIDLHSKSNHLAMIDEERKRILKKKLANDPELILKVLSPYQSQIAGIVVESTYNWYWLVDLLQDHGYRVHLANPAAMQKYTGQKHVDDTHDAFWLAELLSLGILPEGHIYPKETRALRDLLRKRQQLVRLRTSLILSLQNMVTRNFGIQLPAADLKSVTEDRVKPYLQGNEDLLLAGSANKFCIDSLTSQICRLELAVQKKLKLQPPYRQLLTLPGVGRVLAMTIMLETGPISRFSKVGRYASYCRKVTSRWTSNEKVKGHGNRKNGNRYLAWAFSEAAEHARRTDTASREFYQRKLRRSKKAPVAHNALAHKLARAAYWILRENVPFQEAKMFGRAEAVLSS

SEQ ID NO: 247150 - protein, 477 aa, unidentified
MKDHRIAGTRRKLSNKQRRPPVPALLERIQPDAAGIDCGATSHFVAVPRDRDPMAVREFKTFTADLQRLADWLVQCRIKTVALESTGVYWIPVYEILEARSIEVVLVNARDVHNVRGRKTDVQDCQWLQELHSVGLLRASFRPAAAIVALRSYVRHRQTLIEAAATCIHRMQKALTQMNLQLHHVLSDLTGVTGMAIVRDILAGVRDPHALAAHRHGGCKASEHEIAAALTGNYRPEYLFVLRQNFEAFEFQQRQIADCDKAIEAQLTSLAQTRPPSAHELPAARPRCKPSKNEPRAELRSPLHRITGGADLSQLDGVGPYGALQLIAEIGTDMSRWRTEKHFAAWLTLAPNNKISGGRLLSSKTPPSANRAATVLRRAAMSLTRSATALGAYYRRVAYRLGRPKAITATARKLALLVYRVLRGDIVYRDPGAATYLQHYRARLINSLRRRAQELGLGLISLETGEVLDHAAAATVS

SEQ ID NO: 247151 - protein, 312 aa, unidentified
MTKTICGVDISKKHLDARIVPGEAVARFTNDAAGIAKLAAFCGEHKVELVVMEATGGYERLAFTLLWEAGAACAIANPRSVRQYAEAMGFLEKTDRIDAFIIARFAHSKGLKPTPPSSKIQCRLKGLVVRLRQLTDDLVVNKQRRHQVEDEEIRATFDDIIALIKRQSRRLEGEIASLIDDDPLWAVLDKTFRTVKGVADRTVARIMAELPEIGTYDNKAISKLVGLAPLAHDSGKKNGKRSIRGGRSGVRSILFLVADIARRYDPSIADFHRRLVAAGKPKMVVRVALAHKLLVRLNAKARDARAQYANAT

SEQ ID NO: 247152 - protein, 341 aa, unidentified
MSIITVGIDLAKNVFAVHGVDDNGKAALVKPKVSREHLLPLIAQLPPCVIGMEACSGAHHWARLFRQHGHTVKLMAPKFVTPYRMSGKRGKNDAADAAAICEAVRRPHMRFVPVKEEHQQIILCLHRTRNGFVEERTATYNRLRGLISEFGIVLPQKVANLRRDIAEHLEDLPGYANQCVGDLLAHADVLDARIAEYDRAIAQAAKEDARSKRLMQLPGIGPITASALLASIGGGHDFANGRQVAAWMGLTPGQYSSGGTARLGRITKAGDSYLRSLLVMGARAILSGLGDKQDRFSRWARSLQERRGYWRAVVAIAAKNARLAWAVLRYGEDFRLQPAAA

SEQ ID NO: 247153 - protein, 309 aa, unidentified
MDAHYVGIDVSKDRLDVHVRPSGEAFVVARDDKGLAALLERLQAIAPRLIAVEATGGYENVVAAAIGGAGLPLAVVNPSQVRHYAQALGKRAKTDPVDAEVIARFAEATRPEPRALPDEATQMLAELVTRRRQIITMMVAERQRATRLPKRLRKSCERVVRMLEKELAALDIDIDTTVRGSPAWRAKEDLLASVPGIGSITARTLIAELPELGRLDRRSLASLVGIAPFTRQSGQWRGKAFIGGGRRSVRAALFVATMAAVRHNPIIRAFRQRLLAAGKPKMVAMIACMRKLLTILNAVARDQKAWQEA

SEQ ID NO: 247154 - protein, 412 aa, unidentified
MDIVVERSAALDVHKAQVTACVRVPDATKRGRAEEVETFATTVPGLLALGDWLEAHRVGRVAMEATGVYWKPVWAVLEERFELMLVNAHHVKQVPGRKTDVSDAQWLCRLVEAGLLRASLVPPKPVRALRNLTRYRKTQIQDRQREANRLHKLLEDTGIKLDCVASDILGVSGRAMLDALVAGTTDAEVLADLAKGRLRQKLPALREALQGRFDAHHALLVGQLLAHLDFLDESIQALSEEIEVQIAPFAHAVELLCTIPGVARRTAEVIIAETGGDMTAFPSAKHLASWAGMCPGNDMSAGKRRTGTTRKGSKWLRGALAEAALSAARTKDAYLAAQYRRLAARRGPRKAMTAVGHSILVAAWHMLETGEIYTDPGGDFYARRNPERLTKRLVAQLENLGHTVTLQEANVA

SEQ ID NO: 247155 - protein, 351 aa, unidentified
MDATTVGVDLAKNIFVACVADCAGRIVERREFNRAGFLTWLGTLPAGTVIGMEACGSAHHWGRTAQRLGLAPRLMAAEFVRPYRKRQSVKNDRADAEAILIALRSPGMRFVPVKTEAQQQRLAWHTLRIGWVEERTALLNRVRGLLAEFGLIVDPGPKHLRALLAEREFDTALSPALRGVIQSVRDQLEALDTRIGECDRQITAQQADDPLAKRARDLPGVGLITADAVTASVGDASMFKNGRQFAAWLGLTPSQSGSGGKTKLGRITRRGDDYLRTLLVQGARSVLAATLRKQRRESPDQLTRLQQWIVALNGRIGYHKTLIAIANKHARQLWAVLAKGEAYNAQAWQRA

SEQ ID NO: 247156 - protein, 340 aa, unidentified
MEQANMIGLDLAKTVFEVHGRSAAGEVVLRRSLKRGQVEKFFAKLPRAVIGLEACGSAHHWARLLGKLGHEVRLMPPAYVKPYVKRNKSDAIDAAACCTAMSQPDMRFVPVKTVEQQAALSLHRSRDLLVSQRTQLGNALRALLSEFGIVAGKGKAGLARLVDELRAGTLELPADAVAAAMALADQRAGVEAAADALERRITAQVKADQKAILLKTAPGVGPLSAHATLATLPDPSLFKSGRDFAAWLGLTPRLAGTGGKTRTGRITKQGNQPLRRLLVLGATAWLRQVKAHPEKASSWLRGLLARRPRKVVAVAQAARTARILWAMLTHNQPYRAPAIG

SEQ ID NO: 247157 - protein, 344 aa, unidentified
MSSLPLQTVFVGLDYHSESVQVCVLTRDGKMLANRSCSNDWRAVATAVREKCGPRTEVQAAIESCCGAADLADELIAQARWSVDLAHPGYVARIKQSPDKTDFSDARLLADLERVGYLPRVWLAPEEVRELRRLVRYRQTLAKERKNLKLQIGAALREARQKPPENLNSWTKAWLDWLTNRAQLSPNSRLITGHRLRRLADLAKEIQAVEKLLAQQTTQDSLVQKLLTLPGIGLVTAVTLRAEIGRFDRFRTGKQLARFCGLSPRNASSGQKQADAGLIKAGNPELRTVLVQAAHRLIRYDERWTKPAGQLRLRGKPASLTLAAIANRWVRWLFHQMQPERLAA

SEQ ID NO: 247158 - protein, 355 aa, unidentified
MPDRINVGVDLHKTQFTICVLIDDEVVETGTVYRMDNEGFLEFTARMQAVSAENGNCEVRIAIESTANSRFFKEVMEKAGFMVTVVNTLRFKVINLSTKKTDKNDARTLAEFLSRDILPQSHLCSAGSEGLRRILKSRSLLVEDAVALKNQAHAVLLAYGHITATAQFQSKAGRARLLEAVSPAEAAIVSIIFETLEAVEKQRKILEKRLREITADDRNVNLLMTIPGIGIVNACTISAYTDDINRFETYKNYSAYCGLVPWVQTSNETVYYGKITKRGPQELRTALVQCVVAMVRMEEKTGNLDIMRQYQELKEQKSSGKAIIATARKLSRIIYMMLKTGKPFDARRLTRSSGS

SEQ ID NO: 247159 - protein, 322 aa, unidentified
MSGTNQHCAGIDVSKNTLDIALSGMTTQSTMPNVLEGFIQIVSELKRNGTRLILMEATGGLESGATCYFQSEGFDVVIINPRQARDFARVMGYLAKTDKIDARVLLQMAEVINQHPEREKYIRPLPDVHRQLLAAMVVRRRQLTVMLTSERNRLYPSHPASHRSIKLIIAALKDELARIEGEMADHISKNFSDLSELLRAVKGVGAATVAVLLAEVPELGSLSRREISALIGVAPVNRDSGTMRGRRTVFGGRASVRTALYMSALVGTRHNPVIKEFYERLVAAGKPKKVALTACIRKLLTILNAMLKKNEAWDPLYHRHAS

SEQ ID NO: 247160 - protein, 323 aa, unidentified
MEKPLVFVGIDVSQDRLDVAVRPSGERWATATAAPAISALVERLRALHPALIVLEAPGGLELPVVGALGVAGLPVVVLNPRQVRDFARATGKLAKTDALDAHTLAHFAEVVRPSVRPLPDAATQALSALLTRRQQLVEMLTAEKNRLRTTLPPVRPRLQAHIAWLEQELRAVDEELHTTLRASPLWREKEDLLRSVPGVGPTLTLTLLAELPELGTLTRRQIAALVGVAPLNRDSGTWRGKRMVWGGRATVRAALYMATLVASRWNPVIRAFYQRLCAAGKPKKVALTACMRKLLTILNAMLEHRTPWRPVLLQTRQYAFTCS

SEQ ID NO: 247161 - protein, 338 aa, unidentified
MESFVGIDLHKYVSQLAVLRESKSPSQLRFANDVVTVEQVLKKLPEGSKIAVEAMGSWWWLVELAQKTGHEVFLSHPKQTKAIASARLKSDKVDALMLAKLLKADLLPTVWIPPATQRHIRELLSHRGRLVRQRTAVINELRAVYAKRNIDPEAKLQRVRPMVSGAEDLGGYGPRIVEEDLKLLEFINRQIGGLDKELIKIALEDAQAKRMMTIVGVGPVSAVAISCWIGEIGRFSNAKKLASYFGLAPRVRQSGDTERHGHMSKEGNRMVRMLLIQAALVHTRRGKGPSRKHYLGVVKRRGKQIARVAVANKLIGAIFHMMKEGIDYSDFIRRSGAQ

SEQ ID NO: 247162 - protein, 371 aa, unidentified
MEKSVLHVGLDVHKMSVDIAIAEPGTAGEIRYYGRIGGNLEALDKVTHKLKAKGAELRFAYEAGPCGYQLYRHLRAQGFECLVAAPGLIPRRPGDRLKNDRRDALTLARLFRAGELTPVRVPDAGDEAMRDLTRAREDAKGVERRAKQHTAAFLLRHGHRFPGKTTWGRGYWRWLRQIAMPYPAQQIVLQEYLDAVAEAEARVQRLTAQIRELLPQWRWHPVVQGLMALRGVSLIVAITVLAEVGDLSRFTNPGELMAYLGLVPSEHSSGERLRRGAITKTGNGHARRVLVEAAWAYRLKARVSRHLWRRLTGLPKPICDLAWKAQIRLCGRYRRLRARGKHQNTVITAMARELAGFIWAIGQQVEPVTVV

SEQ ID NO: 247163 - protein, 349 aa, unidentified
MLADQVDYVVGVDTHRDQHVLAVVVARTGVVVARRSVRSSARGYAEALRFAQVDADGARVWAVEGAGHYGAGLARHLSSRGETVLEAGRGPRDERRLQGKDDSLDAVRAARTALASETLALPRSGQRREALRLLLLARRSAVDVRRLALVQLRSVIVTCPDQLREELRVLPAGRLVERCSRLRRSPSRTPDELAATLVLRSLARRVQAATAEAAELEREILAHVRALAPQLLDEPGVGPIVAAQLIVSWSHHGRVRSEAAFARLAGAAPVPASSGKTTRQRLSRGGDRQLNRALHTVILHRRLHDPATKDYIARRVAEGKTRRDATRLLKRYLARHLYRVLQNQTPLMT

SEQ ID NO: 247164 - protein, 318 aa, unidentified
MTIHTESQIEINVGVDVGKSKLDIVLHPLDLHFQIPNEETSIRKIVQVLKSQNVTRIVTEATGRYEHAFVFACDQANLPIVVVNPVSIRRYAQAIGVLAKTDKIDASVIARFAATIQPEIKPIPDKQSRLIKDLLVRRTQLLEMQTMEKNRLQSLPKALHRSIKTLLRSLETQIKTITKQIDEAVMQVKHWRTKTEILTSVPGVGKVLAYTLLSELPELGELNRKEIAALVGVAPMNRESGTWNGKRRIRGGRHRIRTVMFMAMLSSIQCNPVFKRFYEHLKAQGKLPKVAIIACMRKLIVVLNTMLKNEELWRHKTA

SEQ ID NO: 247165 - protein, 343 aa, unidentified
MKHYIGLDVSMKRTFICVMNEQGKVVREGLENTDPHLIADYLSKLDLREMTVGFESGSLTPYLLAGFKERAVEAICMDARKLGPILALKVNKTDKNDARGIAEALRTGMYTQVHSKPEESINRSILLTARRALVEQQTHLKNTVRGLLKGYGIRLGSISAKKFSAAVMKRIESYHEIVILSIQCLLESFDKIVEETEKIDKKMLEIAYYDKEVQRFMTVPGVGSVTALTYKAEIFDATRFKKSRSVGAYLGMTPTQYASGETQRQGKTSKCGSKELRFLLVEAGIVILTRSKKWSKLKAWGLKIMRKKGLKKAAVAVGRKLAVIMHRMMLEEKDFIYGELKAA

SEQ ID NO: 247166 - protein, 367 aa, unidentified
MRSDNYTGKTVFVGIDVHKKTYSCVSMCEGEIVKRDTMPASPKILANYLNNSFGLAKIKTAYEAGFSGFHLHRHLVLQGVNSIVVHPGSIEVASHNRVKTDKRDAQKIAGQLAAGRLRGIFVPTTKREEMRSLTRLRANVMKLRHQIGQQLKGLLFMHGQIEPDDDTVICKKWILEKQAEIETGVFSSDFKYSISQYAEQWIQLTDRVKGIELRIKTQGEEDCTLQALYESVPGIGPVHARQLANELGDMKQFHNEKQLFSFLGLTPSEHSSGEHTRQGHITRQGNPALRKIFIETAWFAIREDESLKEIFDRISVRRGRKRAIVGIARRLAGRIRGCVLRGEFYEIRPAQEARLLQKKARPRTVIQ

SEQ ID NO: 247167 - protein, 311 aa, unidentified
MERLFVGLDVAKHRVDAHLRPTDETLSVAADEGGLATLAQWLQSRTPALVVLEATGGYEISVAAALATVGIPVAVVNPRQIRDFARATGQLAKTDALDARAIALFAEAVHPPARPLATEQAQVLSELVTRRRQLVEMLGAETNRRHQVRDRQLQHRIDAHIQWLRQALEKLEEDLGDSVRSSPVWREQENLLTSVPGIGPVTAFTLIAELPELGQLDRRAIAALAGLAPMNRDSGTLRGRRMITGGRPTVRRALYMATVSALRCNPIIAGFYARLTAHGRPNKVALIAAMRKLLTILNAIIRDRTLWQPAA

SEQ ID NO: 247168 - protein, 338 aa, unidentified
MTETQYFVGVDIASSTFTVSVGGTPWKVILKPKLFENTEDGFQTFLEWLASHQIFARQTVICMEATGVYSEGLAYFLFAKNYQVAVQSPLEVKRTFKPNGPKTDAVDSLQIAEYACRHLDKLSFWQPRNDILEQVKALLATREQFVSQNVAHKNALQAIQRKPVRTPFAEQAHSQMIEQFKKQILAMDHEIRRLIESDPTFKEMLLLLLSVPGVGLLLASHMILLTQISLDHKELASYLGIAPHEYSSGSSVFRHATSRHFGPSAIRKLLYLASCSVRTHQPQFKVYFARKTKAGKPARLVLNNIANRLIKIICAVLRTKTAFIKNYHSVQPLALTGS

SEQ ID NO: 247169 - protein, 412 aa, unidentified
MEVVYPCCCGLDVHKKSITACVLWAEVKGKSRKEKKRFGTFTHDLLQLADWLQECGVTHVAMESTGVYWKPVWNILAEQFEVLLVNAQHIKAVPGRKTDQKDSEWIADLLQHGLLRGSFVPPRPTRELRDLTRYRVSLAQEINRIANRVQKVLEDANIKLASVATDPLGASGRAMLEAMLAGEQNAAQLAELSKGLLRNKIPELKLALEGRVTEHHRFLLQQLYDHLLFTESKRKQIEEEIERRMRPFQAEMVRLCTIPGVDRVTAWGLLAEIGLNMNQFPSAAHLASWACLCPGSFESAGKRLSGKMRKGNVSLRRCLSQAAWAISMMKNNYLSALYRRIAARRGAKRAVMAVAHALLEIAYHMLKRKEDYRELGADHFDRIDVNRIRRSLVRRLERLGHKVTLEPLALTA

SEQ ID NO: 247170 - protein, 343 aa, unidentified
MHYVGLDVHAKRSSLCILDSCGKVVKRLEVRGSWPRLMEQVAEQVPRPFSVCFEASCGYGYLHEKLSALSERVAVAHPGKLRLIFRSKRKNDRVDAEKQAKLLYLDQVPQVHVPAVDVRAWRGLIELRRKLVGRRTAVKAQLRALLRGAGACDAPAGKALWSKKGLAWLAGVQLPGTDALRRDLMLEELGEAEARVGRVTKELDKRADAHPGVALLRTAPGVGPRTAEAFAAYVDDVRRFARNKQVGCYLGLVPCQDSSAGKDRLGKITGDGPATVRMLLCEAAWQAVRRSPSMKAFFERVSGGEHDRKKIALVAAAHKLARAMAAMLRTGQAWREQGQGQRA

SEQ ID NO: 247171 - protein, 324 aa, unidentified
MAKRITICAGIDTGKRKLDVAIDGSSLQLQVENTAEGHEVLLVWLRRHKVKRIGIEASGGYELPVVTKLRRKRFVVVVFQPAQVRAYAKFHLQLAKNDKIDAALIAACTAAVKKIHAAPDPRLQPFAEHLTLIDQIGEDIQLYKNRLETCRDPRIQKLWEEEISRLAKRARAELKALVAAIRQHRDLARRLDLIYSVSGAGMPTAVAILVRMPEIGKLSREQVAALAGLAPYDDDSGERSGARHIDGGRKRLRRALYTAALPASFRWNPHLIALYQRLRAAGKVHKSALIACARKLLIFVNTVVARGTPWQKEQPVRATNPAAA

SEQ ID NO: 247172 - protein, 410 aa, unidentified
MFYVGIDWAKDFHQIHITDDSGAPLSIFKVFNNYEGLNKLLGILQKLPAAKTDIFIGIETNIGILTEFLLNNEYVLYALNPSVVDSCRSRYKVSRAKTDPIDAMVIANILRTDRHNYRPLRPDSPLCRKIRIISRDRKNLTEEKTRIELQLQESLKIYYPVALELFSGTSVRVFIDFVKLNPSLEEARKFPVIELENLLRRHRISPLRASTINDKINAAHIDIPSFIVEAKKKHVLSLLSLLELLLDQLKDYDKEIAALIALHPYHKSLISLPGVSFNLCSRILSEIGDNLSQFKNYNSLQSYAGTAPVSFFSGISRKSVRRRKACNKYLRDALHLMAFSSINCSSWAKQYYLYLKHKGKGHNQALRNLANKWVKIIFAMLSTNSTYNENYHINNMKKHLSGEPILINLT

SEQ ID NO: 247173 - protein, 355 aa, unidentified
MNDAKYIGLDVHQATISVAVLDSAGKLVMEALLETKAETILQFIRGLRGSLHVTFEEGTCAAWLHDLLKPHVAQVLVCDPRKNTLGKVGNKNDRNDARELAELLYRNKLKPVYHGEHGVRTLKELARSYLTVTRDLTRVMSRLKAIYRSWAIPCAGQQVYAPRYRAEWLGKIAEPGVRRRAEFYYQQFDALAALRQQARRELLHESQKHFAVGLLRQIPSIGPIRAALLVALIQTPHRFRTKRQFWSYIGLALKTYGSGEYRFVGGQLQRSKKALAIRGLNLNHNHDLKNIFKGAATWAAASSGPFQNFYEARLAQGMKPSMARLTLARKIAAITLLVWKKGVRFDAEHLKQQAA

SEQ ID NO: 247174 - protein, 355 aa, unidentified
MSQEKYIGMDVHQATISVAVMDSKGKLIMECILETEAATILEFIRGVRGTLAVTFEEGTCAAWLHDLLKPHVSRLVVCDPRKNALLKDGSKSDRIDARKLAELLRGSQLSSVYHGDHGLRTLKELGRSYLTITKDLTRVMSRIKALYRSWAIPCSGTTVYAARHRSEWLAKISESGVRLRAERFYQQLDMLRALHQEAGRDFVVESHRHPAVKLLRQIPSIGPIRAALLVALLQTPHRFRTKRQLWAYSGFAVETHDSGEYRVVRGKVRRNRERISVRGLSDNYNRDLKNLFKSTAISASIRPGPLRDFYLALLAKGMRPTMARLTLARKIAAITLTIWKKGVDFDAKQLDQQAA

SEQ ID NO: 247175 - protein, 417 aa, unidentified
MIRKVMDAIHQCVAGLDVHQKTVVACRRRLIGNGQAELEIKTFQTTSAALGELAQWLLEWQVTQVAMESTGIYWIPVWNVLEGQFKLTLTNAQHLKKVPGRKDDQSDAEWIAQCHQCGLLRGSFVPSEEVRSWRHLTRQRMKLADHHTAVVNRMHSVLEQGNIKLSSVASDIMGVSGRAMIKAISQGESNPEALAALAKGRLKARHEDLVQSLDGRLNEQQRWLLQRLLGQAEELEQEDARYSEQIKQQMLAYESQLERLDTIGGVGRRSAENILAEIGSCMEQFPSDDHLASWAGLCPGKNESGGKQRSSRTPKGNVWLKRALVEAAWAGTREKDSYLAALYRRLAPRKGKKRAIIAVARTILQSAWHILKEGVEYKELGGDHFDQLNKEQTTKYHVKRLEKLGFKVKLELKQVSA

SEQ ID NO: 247176 - protein, 331 aa, unidentified
MDSDSGEFQEKRLAHREEAEKFYRALAGQKVRVGMEASGHARWFERLLAELQVELWIGDAAEIRAKRVRKQKTDRQDAQLILRLMLEDRFPKIWVPSWENRDLRQLLWHRHRMVQARTRIMNQLQAVALNEGLRCKKRLWREHGRQQLEAFRLAPWASRRRRDLLELMDRLNPTIAELSQAIEQEAEKCPQARRLRTHPGVGALTALAFVLIIGDAERFQCGKQIASYLGLVPLEDSSGNRRRLGHITKQGSSMMRFLLVEAAQVTVRILPEWRSKYLHLMMRRGRKTAKVAMARKLAVRLYWMMRQGWDYQQWSKFGSHAGQPGHRHGVQ

SEQ ID NO: 247177 - protein, 412 aa, unidentified
MQTLVEQGCGLDVHQATVVACLLIVSRNGKVCKQMRTFGTTTRELVSLRTWLLAEGCTHVAMESTGVYWKPVFAILEGELEMVVANAQHVKKVPGRKSDVKDAEWLAELLCHGLLRSSFVPPKPIRELRDLTRYRRKLVESQTAECNRLLKLLETANIKLSSVVCDVFGVSGQLMLKALLEGEASPQEMAQLAKGRLRKRIADLEPALEGKLEAHHRFLLKLQMDRLQAVEQDLNTLERHIQEKLQPYAAQLALLQEIPGVDWTLAAVIIAELGVDMSVFQSVSQLASWAGVCPGTNESAGKRKSSRVPKGNVYLKTGLVEAANAASRARGTYLRDKFYRLKARRGYKRATMAVAHKILVAIYHMLAQQVSYNDLGDLYLDKLNKSHLTRNLVHRLERLGYVVTLTPQQQEA

SEQ ID NO: 247178 - protein, 348 aa, unidentified
MLLYGGIDLHSNSNQSAILNEDRKRIVKRKLANEPDLILSFWEPYKPDLAGIVVESTYNWYWVVDLLQDHGYRVHLANTAGIQKYSGLKHADDNHDAFWLAELLLLGILPEGYIYPKELRALRDVLRKRQHLVRVRTALILSLQNIVTRNCGTKLSSNHLKVLREDRAQLYLQDNEDLLLAGSASKASIDVLSRQILRIETAVVKKLKLHPPYTQLLTLPGVGRIVASTLMLETGPIERFSKVGCYASYCRKVNSRWTSNERVKGHGNKKNGNKYLAWAFGEAAERARIFHKASREFYQRKLSQKKHPALAHGALAHKLARAAFYILRDNVPFDQEKMFGYPEEALDN

SEQ ID NO: 247179 - protein, 420 aa, unidentified
MGCLLWKGVGAVEVLFDRVAGLDVGKDSVTVCVRTPGPRSRRTQTRTFKTMTGSLLVMRNWLLEAGVTIAAMESTSTYWKPPFYALEDHMTVWLLNAAHMKAVPGRKSDVRDAEWIAQLLEHGLLAPSFVPPPDIRRLRLLTRYRLQLMGDRTRETVRLELMLEDASIKLSSVASSLTTVSARAMLAALINGESDPLQLAELAKGRMRSKIPDLAQALTGHFDANHALLARSILHRMELVEVALSELDEVIEAACAPWRHQLDLLQTIPGVGVRVAQVIVAETGADMSRFPSAAHLAAWAGLAPAMHESAGKRSPAGKRHGNKWLTAMLVEAAGSVSRMHGKNYLAEQHARLAARRGRGRAQIAVAHSILVSAYHMLKRDEPYHDLGAEWHSRRNDEAHTRRLVHQLERLGHTVVIDPAA

SEQ ID NO: 247180 - protein, 353 aa, unidentified
MDSLTDLREVVDVVIGVDTHVNTHSAAVVDTATGGVLGEVTVEATAHGYAELVEFANNHATLRAWAIEGTSSHGAGLSRHLLEGSEIVIELDRPKRAARRNGAKSDPLDAIRAAREAMARARLGTPRAGGERQALSVLLAARRSAVHASTDAQLQVFSLVVAAPEPIRARFRGQKLAAMLNTAARLRVQSAWDVETTSTVVALRTLARRAHALLKEARELEKALLAIIRRWRPDLLEQFGVGPIVAATVLCAWSHPGRIHSEAAYAMLAGVAPIPANSGQVTTRHRLNRYGDRQLNRALHTVVRSRIQYQPATRDYVDRRTTEGKTSREIKRCLARYVARDLYRLLESGAPAA

SEQ ID NO: 247181 - protein, 353 aa, unidentified
MVLLGVDPHKDTHTVVAVDQVGRQLDQRTVTARTQGHTELLGWATRRWAADRLWAVEDCRHVTGRLERDLLAAGERVVRVPPRLMAGARAAVRALGKSDSIDALAVARAALREPDLPTAGHDPASWEVKLLVDHREHLIAERTRTINRLRLHLHQLDPDLEHAAQRLPGASLHRITAWLAGVPASVQVGVCQELTATIQTLTVRIDQLASDLRTRVMRLAPNLLSLPGCGVLTAAKLIAETAGVARFRSEACFAMHAGVAPIPVSSGRTDRHRLCRGGNRQLNAAVHRIAITQLRLAGPGQTYYRRRRAKVTPRVRPSARSSGASPAPSTSSSNLHSSNTKRRQPQPLDRGAT

SEQ ID NO: 247182 - protein, 338 aa, unidentified
MELYAGIDLHSNNSVIAVIDEQDRVVFQKRLPNELERILVALASFKQWLIGVVVESTYNWYWLVDGLMQAGYVVHLANPAAIVQYQGLKYSGDEHDARWLAHLLRLKILREGYIYPREARAVRDLMRRRMQLVQTRSAQLACMHTQFTRSTASSPSSDALKRMLPEELETLLEEPNVASGVRANLEVVGTLNREIARLEREVIEQVRLAAQFAPLLSIPGIGRILALAIMLETGAIERFVKVSNFSSYARCVQSKRVSNDKKKGEGNSKCGNKYLAWAFVEAAHFAVRYNPRIKRFYERKAAKTNKIVATKAVAHKLARAAYHVMRERVPFDDTRAFA

SEQ ID NO: 247183 - protein, 403 aa, unidentified
MSQELSIDIFLGLDVGKSEHHACALDRDGNKVFDKPLPQLESELASVFHQLQEHGTVLVVVDQPNTIGALPIAVARACGCEVGYLPGLAMRKAADLYPGRAKTDKRDAFIIADTARTMPHTLRAVDRSNEVLSALKMLSGFDDNIARDCTRTVNRLRSILTQIYPSLERVFAGSTLTRTPVLDLLIHYKGPQGLKRAGYHRVLNWMIKHTRKDPTPLVDEIFAALKAQTVTVPGSDAAELVIPQLAANIKALKEQRNTIAEQVEGMLDDFPLCEVLMSIPGVGIKTAAQILLAIGDGSDFDSAGHLAAYAGIAPVTRRSGSSIRGEFPARSGNKRLKNALFYSAFAAIRSHEPSRQYYERKRAEGKRHNAAVICLARRRCNVIYAILKNKEFFREIPPRPAAA

SEQ ID NO: 247184 - protein, 457 aa, unidentified
MGHARGRKIPAALVEDEDYQLRHERVAGIDVAKAKADVCTRLPPGRPGGRRRSRTEEFPATVAGVQDLAGRLLADGVQLVSMESTSDYWRLWFFVLEAAGLNVQLVSSSQARQLAGRPKTDRADAQWIARLTEMGLLRPCFVPPAEVRELRDWARARLHLVQDRTREWQRLEKLLEGALVKVSSVVSALAGNKTARAIVEGLIAGERDPQNLAALALGSLRGKRGELAAALQGAAFGPHHARLARVHLDRIDAMDRHVAMLDDEIAACLDAIPAAQGVTAAGDRSPDPGQDAVALPAAQRLAEIPGVTVKLAMSIIAETGLDMSRFPTAGHLASWAGLAPSARQSGSLSRKPAKKQGNAYLRGHCTQAASGAARTDTFLGERLRRLSRRSGGARARCAVARSILVIVWHLLNDPAARYTDLGPGWHQKKTDRDKKIRGHLRQLQALGLQVTVTDTAA

SEQ ID NO: 247185 - protein, 392 aa, unidentified
MYIVGIDIGKNHHEASIVSPEGKQIGRSLRFATTHKGADSLMSFIFKNIGNSPCVFGMEATGHYWYPIYSFLKAKGYTIYVINPIQSDSLRKMYIRQTKNDSIDSFLIAEVIRFGQFGTTSMADENILAMRQLCRYRDSVISSRTEIKLRIGTIMEQIFPEYEKQFSSLWMSTSMGILEKYLTPENIENAPIDELFEIIKDKSHNRLTRAKAISIKEAAADTFGIKIAQDAFSFQLKQLIDRMNFLDKQIEALDCQILEYYEKFDCYLHTIPGIGMIAAATILAEIGDINRFKSSSALVAFAGIDPTVRQSGEFNSTHNHMSKRGSPYLRHAIFLAATTCSFHNSPLNAYYKKKRDQGKHHLTATGAVARKLTTVIYAVLRDSKPYEPKKFC

SEQ ID NO: 247186 - protein, 359 aa, unidentified
MLTQSNKIDFSGQHFYVGLDVHLKSWKVSIMAEKLTLKTFSQDPNPELLHHYLVKNFPNGIYHSAYEAGFCGYWIHNRLIALGISNIVVNPADIPTTDKEKVNKTDKRDSKKIARSLRNGDLKGIHVSSLKSLEDRCLLRIRGTLVKDLTRYKNRIKSFLYFHGIEMPEAFSKSATHWSKRFMNWLGSIELTEISAKKSLTLLIVESQHLRLTLLNALRGIQELSRSEAYANNVRLLQTIPGIGTLTAMIILTEMDTINRFASFDQLCSFIGLIPSTNSSGEKENIGEITHRGNNYLRSAIVESAWIAARWDLSLNKCFHDYCKRMESNKAIIRIARKLLNRIRFVLKNNQPYVCSVIK

SEQ ID NO: 247187 - protein, 326 aa, unidentified
MDVLGIDLAKLTFDATLLTESGQQHYQSFPNTSEGFSQLQTWFTQHGVTQLHACMEATNIYYEALATFLYAAGHIVSVVNPARIKGYAQATMQRNKTDKLDSAVIAFFCRTHRPNAWQPLSDEHRRLRALVRHREDLLQTQLQQQNRLRDTTDSLVVASLQTVLETLGSQLKAVEQAIKEHLAAHAELRANLELLTTIVGIGVITAAKLLAEFGDIETYESAKAAAADAGLTPSHFESGTSVRRRPRLSKMGKAGIRGALYWPAITAMRRCAGCKAYAERLAARGKAKKVIICAVMRKLVHIIYGVLKHRTPYDPGKVFGPIATST

SEQ ID NO: 247188 - protein, 402 aa, unidentified
MNCVGIDVSKGKSMIAVMRPFGEVVVSPFEVRHTANELSELAGLLKSLDGETRVVMESTGNYHAPVAWLLHDAGLYVSVVNAMLVHDYGNNSLRRAKTDKKDAVKLANYGLDHWLTLPRYIPEEDTRLMLKICYRQYQQYSKVQTMLKNNLISLLDTTFPDANRLFTSPPRADGSEKWVDFVATFWHCECVCGLSEKAFAAKYQKWCRKHGYHFSEDKALDIYASACGHFGVMPKTDTAKLLVEQAIFQLRATSAALAALKQEMQSLAASLPEYPVVMEMFGVGPTLGPQLMAEIGDVRRFHSKKALVAFAGIDAPPYQSGQIDVRSRSISKRGSASLRRTLFLVMSVILQCAPIDEPVYQFMDKKRSEGKPYRVYMMASANKFLRIYYASVKAYLESLEHD

SEQ ID NO: 247189 - protein, 437 aa, unidentified
MSKLPELDPRAAFVDVGSEQMHVSIAGAAPQVFGTVTGQLEELRDWLLAHEVSSVAMEATGVYWLALYGVLEAAGLQVLMVNGRQIRNLPGRKSDMKDCQWGATLHAHGLLRAGFVPPAHIRRLQDYVRLRGEHVKGAASHVQHMQKALERMNIKVHDQISSLAGASGLAIVRAMVAGERDPSRLLALCDQRIRHTKGERVKQALRGTWAAEHLFALRQALQSWEHYQRLIVECDQQIQALLQEHDHGEAPPDPPKRRKSYPGANAPDIPNLRKMLTRLCGCDLTMLPAHTEYSVLQLTGEVGTDLSKWASEKHFTSWLGLAPGTHQSGKRSRSVKRKRNRAGRLFCVMARSLARSKYIALGGFYRRMAARRGGLVANIALARKLAALFWRVHVKGLDYAERGLQAYEAQVLQTKQRALQRLAKTLGHVIVPRTSPA

SEQ ID NO: 247190 - protein, 344 aa, unidentified
MEHFAGLDVSVKESSVCIVDETGTIVREVKVASEPEALLAVLAKPAYRFKRIGLEAGPLSQWLFSALAEADLPVICVETRHMRAVLKAQINKTDRNDARGMAQMMRVGLYRPVHVKTLRSQKLRMLLTHRKLLQSKAIAVENDLRGTLRNFGLKIGMVGKVKFEARVRELVEGLPDLAMLVDPMLIVRRVLREQIVILHRRVLTIVRDDEVCQRLMTTPGVGPVVALTYRATVDVPARFRKSKSVGAAFGLTCAKYQSGEIDRSGRISRCGDEMMRVMLYEAAQSMMRSKKWSWLKAWAMQIARRCGMKKAIVALARRLAVIMHRIWVDGTEFRWTREQAAAAA

SEQ ID NO: 247191 - protein, 341 aa, unidentified
MNKFNHFVGIDISKKTFDAALIIGSDTTNIKHQVFNQNAAGFAAFSQWLDHYSITKDEVLICMEHTGLYTYGLIDFLIAAGLNLWVEMPLRIKRSMGLQRGGDDKAAAIQIALYTYRYKDQVSLWKPEQAIVLQLRQFSAQRDRLKLALNQLMIPLQEIADCYHDAAIVKVQLKLQAPVIKAIEKSIASIETQIDKLIAAEPAIQATIARVSSIKGVGKQTAIHVFIYTKGFTTFSSAKQLASYCGVVPFTKTSGTSVRYKTQVSPFANKHLKKLLHLCAMAAIQHNDEIKQYYNRKVAEGKNKMSVVNAVRNKLVQRIFAVVRDERNYVENYHYQRAYRK

SEQ ID NO: 247192 - protein, 356 aa, unidentified
MQRITQKGRKVDFQGKRCYVGVDVHKQTYYTALLSEDGLSIQFSSPANPTSLISQIQGMGVEIIALAHESGPTGYDLAWYCEEAGIPVLVAATTKIPRKITPDGKTDRLDGMKLAEYLSRGMLHVITIPTREEFALRELERRRQQLVHSRRELRQQIKSFLLKNRIESPKGLDHWSEESLQELREIDLGNPYLRVTFDSFLREHAFICAEVNQTQKTLTKELALVDKALLLENLRTIPGVGITVSQTFVTEIFRPERFDREEEICAYVGLAPIISQSGQGKARARLVHAGQRYLRSILIESAWILVRKDSHYRSFYNRILCRTNLPQKAIVAVARKLLVIMWRLSVENRAYQYRGQ

SEQ ID NO: 247193 - protein, 339 aa, unidentified
MRLYSGIDLHSNNMTAAIMDEAGKRILKKRLVNDREVVLATLEPYRTEIAGVVVESTYNWYWLVDALMDHGYRVHLANPSAIQQYSGLKYLDDNHDAFWLANLLRLGTLKEGYIYPKEDRPLRDLLRKRFHLVKLRTSLIISLKNILSRNFGLQMGSYRIKNESLDTFISGLPEGDNVILVVRTSKASIDFLTVQIDKVESAVLKQAKNKPFYAKLLDLPGVGKILALTIQLETGPVDRFPKVGNYASYCRKVESRWFSNEKAKGRGNAKNGNKYLAWAFSEAAEYARRFDSASRKFYNRKLNQGNAAIAHNALAHKLARAAYYIMRDNVPFEEAKMFA

SEQ ID NO: 247194 - protein, 331 aa, unidentified
MVAWALGPEDTRVRFMKREKSTTDVAGLDIAKLKLDLGFAKSDDHRIFENKPEAFAELISCLREHGVKRVGMEASGDYERDVREALEKAGFEVVVHQPQDVRAYARYRRIKAKSDKMDARIIAKATENWEGIVARRDPYLVELAEMVTYYEHISDLLAKSKTVAEHHRLAIVKKKSSALRDTLRAEKLSILKLILKKIRARPDLLERFDLLKTMPGIGPVIAAILVVRMPELGTLEHGKAAALLGVAPFDHDSGTVKGKRFISGGRARPRTFTYLAALAAKRTKSPFKDFAQRLKKAGKPAKVVVVAVMRKLIEAANLVLKRKTEWVEKLA

SEQ ID NO: 247195 - protein, 343 aa, unidentified
MSYKLYFGVDVSKHWLDIAYYDGVDVDWKRGHIRVDNDEKGFAQLGRWLDRLDVGKGTCIFCMEYTGLYSQEFRQWLERMKIVYGMVSPRKMHRFEPDLGEDERALDRIKTDEMDSFRIAIYCKEHSMKIRRKPSHLPSDAYFKLKRLLAERRQYVKQSTLYKQQLHDIGKYDTEASQHRKEAELASLTEKVLLTSKEMEAIIKEDADIKRNYDLLCSIKGIGLVVAAETIVLTENFTSITNPRRYACYVGIAPGRKESGVSIQGGDHVGRKGFTQAKADLSMVALQGIRCDKGIRAYWLRRKAEGKHSGVVLNAVKFKIVLRMFAVIRRQKPYVEMEEYGKK

SEQ ID NO: 247196 - protein, 381 aa, unidentified
MHKSQEYYNFEKRNLKHKTQGLMQAQRKELNFDGQNIFVGIDVHLKSWNVSIFTENLYHKTINQPPKAESLSTYLKQSFPNAIYHSVYEAGFSGLHAHYELTNMGIHNIVINPADVPTSDKERRRKTDKVDSNKLARSLRNNELKGIYIPSQEILEDRSFVRVRSSIVKDQSRLKSRLKSMLYFYGIEFPEEFQKSSTHWSKRFVVWLKTVQLNHQSGNIALAMLIKEAELLRTLLLEVNKELKALSNTEKYAEKMELIRSVPGIGLVTGMLFLSEIETINRFENNDKFAGMIGIVPDCHSSGENEKNGEITPRRHIHLRGGLIESSWIAARIDPALSKAFSDYCKRMEPNKAIVRIARKLSNRIYYVLKNEKKYETRIVK

SEQ ID NO: 247197 - protein, 338 aa, unidentified
MKLYGGLDLHSTNVVIQLINEKDEVMYRKKLGCDLDRILAGLEPFKGSIEGLAVESTFNWYWLVDGLMDAGYPVHLVNTAAVKQYEGLKYTDDDSDAFWLAHLMRLGILPTGYIYPKATRGVRDLLRKRGQLVQHRTTHILSIENLYARNIGSRLSANATKQLKEEDIRSRFNDANIVLAIESNRLMIVALDQQIKVIELAVLKQAKLDPRYQCLLSIDGIGKILALTIMLETGAIERFQRVGRFTSYCRCVGSEKLSNGKKKGQGNTKNGNKYLSWAFVEAANFAIRYNDKAKRFYQRKCAKSKQVVGIKAVAHKLARASYYVMRDQVPFDEAKLFG

SEQ ID NO: 247198 - protein, 341 aa, unidentified
MEHLAIDLGGRESQVCVRAGDGQILEERRWPTRDLGRYLQGRARSRVVVEACAEAFYVADEARRHGHEVRVVAATLVRSLGVGARRTKTDKRDARTLSEVSCRIDLPSVHVPSADSRQLKTQLGMRHALLRSRTMLINTVRGWLRGQAVGIRKSAEAFTHRVRETAGPELPPYVERQLAMIDALSEQITAADKQLALLAKQTPVCPRLMSVPGVGPVTALQFVAIIDELSRFQSAHRVEAYLGLTPGEHSSSEKVRRTSITKAGSTAMRWCLVQAAWAARRARGQHTMIDWSIEVQKRRGKKVAIVALARKLAGILFAIWRDGTVYDPQNAARPVPTTAAA

SEQ ID NO: 247199 - protein, 422 aa, unidentified
MNPAMHVCLNTHSPGVQLNVAVDVGCIRHRVAVGLSEGKVLDEFDIAHDGPGLTAFFTRIEHHEREHQAMSVAVAMEGFGGYARPLDARVLMHGWRLFNVNNLKLARFKEIFPAPAKTDAIDARRMLQLFQLQDRVPMAKAVLQEVAPIGETEAKLKALTRRRKQLVDDRMRLSRRLQADLQALCPGLLAVTGEADNLWFLNFLTMRDDLTKLKNVRLSTLLATTGIGKGYAAKIRQWQQEATFSNSATYLGAMIVTDARQILALRKQILALEAQLEDLAGQSVMARRIQTMPGFGPICSTELAGEIGSVERFAKTDSLAMYLGVAPLDNSSGKYKGSKVPRQVNRRARDAMMIAAVQHIRSVPASKAYFDKKRAAGKTHQQAVRAVARMLSKVLFSMLKHSEDYVIPDVSNTPESNSVTVP

SEQ ID NO: 247200 - protein, 371 aa, unidentified
MKKNITGTGMAKRKQQARRQKREELTIGIDMGDRSSSYCILDEAGEVRVAGSLKTTRASLRECFGKLQRSRVAIEAGTHSAWVERVLRECGHEVIVANARAIPLLTANSGKRDPIDAEMLARMARVDPKLLRPIRHRGEEAHGHLVTIRGRRVLVEARTKLMNAARGLVKPLGERLPDCSPAAATVSLAAELSPAARMAIEPLLEAVEALNERIQEVDKRIEAIAREHYGEEVRRLTQVKGVGTLVALTFVLTLEDPARFRKSREVGCYIGARPRRDQSGESNPQLGITKEGDQYLRVLLVNSAQYILGRFGPDTDVRRWGLKLCARGGSNARKRAVVAVARKLSVLLHRLWVSGEAYEPLRNSKRTAVAA

SEQ ID NO: 247201 - protein, 347 aa, unidentified
MLHAGLDLSRRRVDVHVLNEAGETLVVDAFPPDADGLAHLVRHVASFGEEVHAVIESMNGARFVHDTLELHGWGVEIADALRVKGLAPLACKTDKIDAKVLAELSRRDLVPAIWLPTPSVRAERERARFRLHLVHHRVALKNRIHATLLAFGHPCPVSDLFGESGRALLDRLAIPEPWAGTVSASLRLIDELDDQIDAAERELRRLGANHPYMSLLQTVPGVGWVLAYTIASEVGDIARFESPKKLVGYTGLCPRVYQSGGTDRRGRIAKNGPTYLRWALIEASIHACKNPLYKPAYDRTKARLGRDRGGKVARVELGRKLAEAMWHMLTKGERFAPARSQVVALVA

SEQ ID NO: 247202 - protein, 344 aa, unidentified
MKFIRFIGIDVSKKTLDASIFVADEVINKFPHIQVRNDRQGFKDLLRWSKEQGVKPKDALFGLEFTGYYSDELELFLAKKQISYTMLPTTVVKHYQRGTHDKNDKIDSAKIADYLFRFNGTECIKLRVLPSKAMQELKALKSERKFLVQHRVACENRLQVAKSKSEEKHLQKLIDLCKEEIEQVEKQIEDVVTSDEEIYTTFRLLTSIPGIGFVNAVNTIANTQNFTAFETARQYAKYLAVAPSEHSSGTSVRWRGRPSPHADLQAKADLSMAALHAIELSAEMRQLYERKLGNRPKDKDIQKKALNAVKFKLIREMFAVVKQARNFELRGLDKAQAETHSTEK

SEQ ID NO: 247203 - protein, 393 aa, unidentified
MFYLGIDIAKNTHVASLMDEKGKTVFKGFSFSNTTEGGKSLLEIIHKHVEFSDVSIGMEATGHYWLSVYSFLYDYNFHSIHVINPIQTDGWRKGTEIRKRKNDTIDSVLIADLIRYGDFVETSLSNEDLFSLRNICRMRNYLIQSAGDLKRKVICVLDQVFPEYQTIFSNTFGTTSKQLLLDFSSPSDFEELSVEALTETLENLSRKKIGQNTAQKLIDSAKNSFGVTFSKESFTFQLKLLIEQIKFIDNQVKECETKIKELMDKINSPITTIPGIGPVLGAIIISEFGDISRFDKPSKLVAFAGIDATVSQSGEFEGTHNVMSKRGSPYLRKALFQAALVASNSDPVLKNFYLKKRAEGKHHKTCVGAVARKMCNIIYAVLKNNKPYEIPKQ

SEQ ID NO: 247204 - protein, 344 aa, unidentified
MEHYAGLDVSLELTSVCIVDVQGGIVCEAKVASEPEALIGFLRARALPIVRVALEAGPLSQWLHAGLVHAGFDAVLLETRHVKAALSAMTVKTDRRDARGIAQLLRLGWYRSVHAKSASAQEVRALLTARKLIQAKLLDVECGIRGVLRGFGLKVGAISRGRFEARILELVDGNATLEMVIGAMLAARTALAAEFKRLHRELLALVRDDPVCRQLMTVPGVGAVVAITFKSGVDDPTRFKRSRDVGSHFGLTPRKYQSGEIDVTGRITKVGDRMVRTALYEAASVMLTRTVRFSSLKAWGMAIAKRRGTKKARVALARKLGVVLHRMWVDGASFRWSNEEPAIA

SEQ ID NO: 247205 - protein, 438 aa, unidentified
MSMTFARLLDPCFEDDDDPFRHYDYRGEPLEDRLYLPCGIDPHKKVCHAAFVHPLPHRQDILSHRQVQNQHLPDALWLVEEGQRLAEPFQATPLYIFEASGPYWRPYRLFFHQLGWPTATVSGRQTRRAGGTGTRKKRNDLQAAFLVAKVFKQGESHASRIPPEPLATLREYTRLHLFFVELSVALQNRMFDLRYQIHPGFDDLFSKSIMPTTLALAQEELVHPVKLLQADPQTLTEVISQASHGKLGAPRAEAILRSAQHAFYMPYAPEAQSFNLKLMAQAHEYIVHHLLPPLRARIEECLGQLPFPQCLSEIPYFGPVVTATFLAELGSPFWYRTVDSVVAWFGLDPSVSESADHTTGISHLTKRGTKYGRRILWLVARNWSRYLSQGQRMYRKERDENKLSYDGAICVIAAKLVRIAFAMARDGSHFDMDKAFPS

SEQ ID NO: 247206 - protein, 330 aa, unidentified
MEPQYIGIDLHKASFHACAVASDGTRCWEAVFARTAEGIARFAARGIAGAQLAVEASGPTWAFVDAVTRYGVSVCVVDSRKTKLKAGFAAKTDRLDARRLADALRRQSVVSVYVPAVAIRELRELSRGRQQVVRLRTRLVQAIRALLLRMDGPEPPVRTLTSRAGLAWVAGVHLGPSSEASLRRLERLLHATVVETRAADAAVKAAASDDPIVARLRTRPGIGPVLAVALRAEIGTIDRFARGAALAAYAGIVSRVHASGGQVWRGAITREGSPWLRWALVEVAQRTMNRPDRRGRWARRLARRKGKKIARVALARRLCDEIVHTWKMVG

SEQ ID NO: 247207 - protein, 411 aa, unidentified
MLFAGDDRAEDYHDVELQDETGRKLAARRLPEGAAGIARLHALIAAHPGADGDPGQVVAGIETGRGLRVQALAAAGCQVYGLSPEQVARFKERCNVSGARSDAAGAHALAGMVRTERHQLRAVAAGTAGSAAVKVVARARQTLIWERTRHTLRLRPALREFFPAALLACADPGLTGTGTLELLARAPAPAAAAKLTAAQISAALKRARRHDIPARTEAIKDALRSPQLAQPAAVTAACAAAVQATAAVLITLNEQIRRLEIQVEAHFLQHPDAEIYLSQPGIGTINGARVLAEPGDAPGRCASARARKNYAGSSPITRASGRSKIVLARFVRSSRLADALHSRALSALTASPGARACHDQQRARGQGRNAALRQVSNRLVGIQHGCLKTSTRYDEATAWPNDVAHTGPLAA

SEQ ID NO: 247208 - protein, 410 aa, unidentified
MAYKVAGIDVHKKVLMVVVRDVSDPESESQQKRFGTTTSELRELSTWLREQGVQEAVMESTAQYWRPVWYELEPHMKLQLAQAFSNRAPRGRKHDFRDAERLIRRLVAGELTLSFVPEPQQRTWRTMTRMKVQLTEDKARLHSQLECLLEEMRIKLSSLISDLLGVSGYRILRALAGGETDPKRLAALADDRVRCTEEQLIDALTGSRQAVHQQLLALYLDRHQMLVGQIAKLDRMIAEALKAHQEVVARLALVPGLGADSAQQIIAEVGTDAGTFPSAAHLSAWVGTCPGQEETAENNHSSRSAKGNRYLRRILNQAAHAAVKKKGSHFQAVFRRLLPRLGYKAAVWAIAHRLSRLVWKMLHEGVAYVERGSEPDPRTKRRRARNLVRTLRKLGYEVKLTLINPTPVPS

SEQ ID NO: 247209 - protein, 361 aa, unidentified
MVDSTKGTSKVAVGLDLGDTYSHLKVLDSKGDIIEEGRIRTNPEDFKRRFAGTEPALVALETGTHSPWASRVIKECGHEVIVANSRQVPLITQNNQKSDNNDPEILARLVRFDPKLLKPIQPRDLKEQIALAELRARDCLVRARTKLVNHVRGVVKSFGGRTTGANVDNFHEAAQERIPTEIRETLGPVLKVIGELTDKIKLYDKRVEQLCKKEYPQTEVLRQIHGVGALTALAFMLVIADPKRFKESRDVGPYLGLAPGKDDSGEYKAELGITKAGDGFMRRLLVCSAHYILGPFGPDTDLRRHGKKIAQTGKKKAKKRGVVAVARKLAVLLHRLWTTGEEYEPLRNTIRKQKRSAKVNP

SEQ ID NO: 247210 - protein, 420 aa, unidentified
MADEVFAAYVGLDWGNQQHAVCLASGGQRVTTDLVQQAEDIEAWAADLRTRFGGRPIAVCLEQSRGALLYALLKYEFLVLFPINPKQLASYRDAFVPCGPKDDPTDAELLCQFVEQHHTRLRAWRPDDTSTRILRLLSEDRRCWVDERTALKNRLRQRLTEYFPLALALAGSQIDTSWFLELLKKYPSHSELRRAHPRVLARLLPKRSRVADDQGEDTRVVLIRSSAPLVTDPAVILTHRLDVLHMVRMLIQLNDTVAEYDREIARHMAEHCDGALFQSFPAAGAAMAPRLAAAFGTDRERFSSAQEMQQLSGIAPVLKRSGKSCSVIRRLACPKFLRQTFHEYADHSRKQSAWAAAYYRLLKARGKGHHCALRSLAFKWQRIMYRCWKTRTLYDEAAHLQQLRRRNSPLLTYLQPTNDA

SEQ ID NO: 247211 - protein, 342 aa, unidentified
METKRYIGIDLHRDCFTACLRLENGREYLKKWKLEDLAKFTAKLRRTDEVAVEVTGNTRLFHDAVAPHVGRIVAVNPNQFKVITHSVKKTDPNDARNLALYLAKDLLPEVRMKDRTQAQIASLTQTRDTLVKLRTALKNKVNNLCSAHGMNLNKESLGSEKGLRAVLEMRFDPLVNLELKIIIEQIRSLNQSIAELEETIGKEGQKLEGHKNLTSIKGIGGLSAGILLSIIGDISDFADEGKLAAYFGIVPRISNSNATEHSGRITKRGTKLGRTTLVQCALIAQRYSPYLKNYYERKKSRGTGKAIIALARKFLGIIYRTLKNRWVFEDFPNFVLAEEATA

SEQ ID NO: 247212 - protein, 358 aa, unidentified
MLDFGSVNGFSGEQHLFLLLTFKNFNFMTFKIYIGIDISKLTLDVFIKEVQAHKRFKNDLNGFNLLLKWVKNHSKESSESMLFCFEHTGIYSLPFAQFLEENSIPFSMISALEIKRSLGITRGKNDCVDSRRIADFAYRFYDKITLTKLPAKEIANLQSLLSLRDRLSVALGGFTVSRNEALKFMGKNNIPELFSSYDKMILTLKSEIKALEKAIIEIIRNNAELRRTYELITSIKGVGLIVACNMIAYTNNFTRFSNWRKFACYSGIAPFEYQSGTSVRGKSQVNSLANKQMKKLLHLAAICAIHTDSELQQYYTRRQSEGKPKMAIINIVRNKIVARVFAVVKRETPFVDLRKYAA

SEQ ID NO: 247213 - protein, 369 aa, unidentified
MHDVTTFVGIDAHKKDLFIAMLVGNQATPVTWTVANEPNAVRRLARKLEREAPGPVRAFYEAGPCGYALQRQLTTPRVHCDVVAPALIPRKPGERVKTNRRDARKLGELGRAGLLTAVRPPTPDEEAVRDLCRARDDAREDLQRCRHRLGKLLLRRGLQYRVGRHWTKAHRRWVDSLTWPHEAERVVVDDYLLAIDQTEARVKELDQQLTAVAATEPYRERVAWLRCFRGIDTLSAMLILAELHDFRRFASPRALMAYVGLVPGEHSSGEKHRRGRITRTGNALVRRLLVEAGWHYQHRPGVGVALARRRKGQPARIIAIADKAQQRLCRRFQYLAVLNKPRPTIVVAIARELVGFLWAALQPALVVAN

SEQ ID NO: 247214 - protein, 409 aa, unidentified
MPEEKEMPTRFVGLDVHKHYLVAAIVDADKNEIAPLRRVPFVQMDDWIRKSLTPRDAVVLEMTTNTWQLYDDLLPHVHSVTVVHPPNVALITRAHVMTDKIAARTLARLHAAGLLPAVWVPPADVRDHRALIAQRSKMMRLATQARNRLHAVLHRHHTRSVPPEGELFTAAMRSWWLELDISVLERVRVQSDLATLQLAFEQVDLLDKALAALAAQDERAVLLVQLPGIGLTIAMTLLAAIGDVTRFPTANHLVGYAGLAGRVHDSGQTHRGGGITKAGRRDIRAAMVEAAHAASRFHPHWKAELARLEPRLGRNKAIVAIARKLLVAAWHVLAKNEADRHAVAEHTARKLLQHAYRLGRENRQGQSAGGYVRVQLDRLGIGADLKGIPMSRQRAVPLPPSSLKEAAEN

SEQ ID NO: 247215 - protein, 369 aa, unidentified
MPHVTSIGLDVHARSVAAAAFNPFTGEVVRRSFGTDASEIAEWALGFEDPRACYESGPTGFHMARELRALGLDCAVAAVSKMQRPAADARRKNDRRDAEFIARMLATHNIVEVPLPDMAVEAARDLDRALDDATRELRRSRQRLNMFLIRLGHVWDERNADGARKKAWTRAHWRWVSEIRLEGPQRDALEYYVTAARCAESDRRQLERRVVALAGTDRWRATVEALSCIKGVDTLTAFRLAAEAGSFSRFRSAPAFASWCGLIPSEHSSGESERRGGITKAGNALARTALIESAWHYSTCSPRPKAPAPGTDVPPVIRSRADDCTARLHRRREALAAAGKSACKANAAVARELACWVWEIGCRSEGTVL

SEQ ID NO: 247216 - protein, 377 aa, unidentified
MSKLRFVGLDVHAETIAVAVAETGGEVRSVGVIPNRLESIRKLVHKLGPVEHLRACYEAGPTGYVLYWQFTQLGVECAVIAPSLVPTKASDRVKTDRRDAEKLARCHRAGELTAVWVPDAVHEALRDLVRAREAAKKDQLRARHRLGKFLLRHGQQRPEGVKVWTKKHREWIKSHVRFEQPALEATLADYLEEVDHVGKRITKLETAIDEAIQQAPPAIRAVVEALQALRGVAQTVAVSIVAEVGSLSRFPSPRALMGYSGLVPSEHSSGNRVQRGGITKTGNGHLRRVIGEAAWAYQHRPNVIGFLAQRQKRLAIGEESKKIAWKAQQRLHKRYKALSARGKNKNQIITAVGRELLGFIWAIGVSVEKQHQVTVAA

SEQ ID NO: 247217 - protein, 430 aa, unidentified
MKSNTQNAKIEAITEKTLVLGIDVGSKTHYARAFDYRGIEYSKKPFKFSNTEAGFVTFKEWILDLKERHEKDKVVPGMEPTGHYWFNLGKFLHDNEMKPVLVNPHHVKKSKELDDNNPTKNDRKDPKVIAGLVREGRYMIPYLPDGVYADLRTASNIRFQLQAELTRIQNRISRWFNIYFPEYKTVYGKPDAKSGMLILKAAPLPEDILTLGIDGVNQIWRDAKLRAVGKARAKTLIKAAEHSIGSKEGTMSARMEIRMLLEDYESQNMRLQEVMVLIEELVKEIPMAEKLLEIKGVGIRTVSGFLAEVGDISRFNNPKELQKLAGLALVENSSGKHKGETTISRRGRKRLRYLLFEVAMSLVAKNPEFRELHNYYTTRRLNPLKKMQSLMAIAAKLIRVFYAMLTKGVDYDPKKMISDIKRPTVYLQAA

SEQ ID NO: 247218 - protein, 436 aa, unidentified
MRGCRCSMIMGFTKPIEHFNLQRKKVITMNTLYVGIDVSSKSNVVYLMLPNGDKHSNFSVANSHEGSTLLVKKIYSALTSHSLDTVLIGLEATSVYGVNLVYFLREDATLAPFNRKIHVLNPKQVKKFHDTYNDLPKNDYVDSFVIADCLRFGRINKEVYMGDYRYKALQNLTRARFFAVQNLVKEKQRFMNVLFKKYSTMTQEKVFSDAFSTTALAVYDEFESAEALANMDLHELTDFIIEKGKNRFPDPDAVAKAIQKAARSSYRLPKTVNDSVNQVLSISITSMKALESQIKEFDKAIIALMELLPNVLISIPGIGPVYSAGIMAEIGDINRFDNQASLAKYAGLAWKQHQSGGFEAEVTRLIPSGNRFLKYYLCEAAFSLVRCDKEYSDFYHLKYKEVNRCQHKRALALTARKFVRLVFRLLKDNRLYCPAK

SEQ ID NO: 247219 - protein, 315 aa, unidentified
MTATIAQTVGIDISKLTLDVYLHPQATARQFPNTTAGINALIAWLGQSAVHRVAFEPTGAYHRSLERQLGQAGLPMVKVNPLQARRFAEAIGQRAKTDAVDAAMLARFGALDALQTRPIVSQTLSDMKELLVARRGLVKDRVAATNRNHVHRAPLLKRQADQRLRQVERQIAAIDAELRAVCGADAELKARLDILVSIPGIGEATALTMLIEMPELGTIENKCAASLAGLAPIARDSGQRSGKRFIRAGRAHLRQALYMPALVAIRFNADMKSKYQALLAAGKPPKVAIVAVMRKLAILANALLREQRNWTPKAA

SEQ ID NO: 247220 - protein, 368 aa, unidentified
MPRIAEQVLPVTGGVDTHADVHVAAVVDQVGRVLGTQAFPADAAGYQAALAWMRAHGELAKVGVEGTGSYGAGLARYLAACGIEVAEVMRPNRQARRQRGKSDAADAVAAALAALSGEASGVPKSRDGLVESIRALRVARAGAVKARTQAGNQLRDLILTAPEQVRHQLTGLPSQRQVDLAARFRLRDLAGPAEGAKAAMASLARRHQQLAAEIARLDAAPEELLTRAAPPELLAKQGVATVVAATLLTTAGDNPGRVRTEASFAALCGASPVDASSGKQLRHRLNRGGDRQANSALWTIAMTRLAHDPRTKAYAARRTTEGKTTKEIIRCLKRYIAREIYKTLCQPKPPATTSAPQAKQDLSAPVLT

SEQ ID NO: 247221 - protein, 325 aa, unidentified
MFVGLDLHKSYSEFAVMDVAGNLLRQGRIENDLDKMREFSESIPARSSLVIESSSTWYWAHRLLSQRHDVTLSNPIKNKAIASAKVKTDKIDSVMLATLLRGGFVAECYVPSSETIDLRELVRFRANLVRERTKMKNQIHAYLLQNNVSIAASPFSKGLVEELRKIDDARVQSYLRLIDGLDVEIRSASKKIEQRAKDNEDAKLLMTIPGISFFSALLVVSEVGEISRFEDSSSLVAYAGLAPSTHSSGGKTYHGPIMKSGSRYLRWAMGQCARAHMRSEPDGTVATFYARIKGKKGDQKAIVAASAKLLKVVFWVLKERRAYHS

SEQ ID NO: 247222 - protein, 365 aa, unidentified
MSVAVGIDIGSESHAVAVCREGAQEAERKGLKITANRGGFDDLDAWLRRQPEPVARVVMESSGHYWFNLASHLRRQGYPVAVVNPLEAKYFGKRRLQRSKSDPADARTLATFAMVDQPPTREPLVGAELREASRFAMRLVREQGQVCQRILRLVDIGFPELAEVWDDPTCMSALAVLRRAPTARTVARMRVETLAQLRRPGSGARAIGPAKAAELKRRATTSVAAPELEVQVGFEMRLLIGQYDLLEQQIEAADRRVAALLDGEVAQRLLSIPGVGPSIAGTLMAEIGDIWRFTDVDQLLAYAGVHPQERSSGKKGANPETSWVMAKTGNAFLREAAYRRRSSVSSTTRSSAPTTPANGPRGRAA

SEQ ID NO: 247223 - protein, 343 aa, unidentified
MQAVTTIGLDIAKSVFQVHGVDTEGNVLIRRQLKRRYVLAFFEKLPPCLVGIEACASSHHWSRQLKALGHTVRLMPPAYVKPYVKRQKNDAADAEAICEAVTRANMRFVETKTPEQQSCLMLHRTRQLFIRQQTSVINAIRAHLAEFGIVAPVGRKGVEQLLAVVADASDRRVPELARACVAALGAQLRGLKAQILEFDRRILAWHRSNETSRRLDAIPGIGPALATALVASVVDPKAFRSGRNFSAWIGLVPKQHSSGGKDRLGSISKQGDRYLRSLFTAGALAVIRYAKLHGTEHRPWLTALLARRPTKVAAIALANKIARMAWAMMAKGERYKEPVALAA

SEQ ID NO: 247224 - protein, 409 aa, unidentified
MRIIGLDIHRTFAEAVAWDDGKLKRLGRVDMRRHLLEAFAKKLTKEDVVVVEATGNAASVASVIAPYVKKVVIANPKQVRVIAHAKIKTDTIDASVLAQLYASGFLPEVWIPDEPTQALRRQVTRRNQIVRQRSRLKNIIQSILHSHLIPSCPHADLCGASGRTWLFHQVLPEDERLAVERHLREFDRLGEDLKVIERGLARSALGDEGVKRLMTIPGVDMIVALAIVAAIGEAGRFDRPEKLVSYLGLNPSVRQSGPGPAYHGRITKQGRGHARGMLVEAAWAAARAPGPLRAFFLRVRARRGQHVAAVATARKLAVIIWYLLRKGESYAWARPALHAKKLRDLELKAGHKAERGQRGSACAYNIKSHRDQERRWVEQAETAYARFVAGWNPRGPQQVRTGAANEGRQ

SEQ ID NO: 247225 - protein, 346 aa, unidentified
MTILEDTRVITGGVDTHAGMHVAAALDPLGGLLGVREFLATAAGYADLLSWLTGFGNLALVGVEGTGSYGAGLARHMSAAGVRVVEVDRSDRQDRRRQGKSDPLDAVSAARAAQSGRARGAPKGRDGAVEAVRALMVAKRSARSERVQTINQARALVLTGPDDLRTRFARHTAASLVSGLASLRPRPGDVVGYATRIALRELGRRAEFLDAQLERLDELITPLVAARAPGLLALHGIGPDTAALLLVAAGDHPERLRSEAAWAHLCAVAPLQASSGKVTRYRLNPGGDRQANHALWRIVLTRMSAHPPTLLYVGRRTKEGQSKKEIIRCLKRYVAREVYRHLRAVG

SEQ ID NO: 247226 - protein, 377 aa, unidentified
MKWLATPNVVATITPLVVVNALCRRIRGGPAVDHIGIDLHKRSSQICVLTEGGELLEQRIPTARERFAAVLADRPRARILVEASTESEWVARCLEQLGHEVIVADPNYAPMYAQRTRKVKTDRRDARALAEACRLGAYRPAHRTSDAQHHVRAVVAVREVLVQTRCKYVHLAGALLRRQGLRWASGGPETFPMRVSRLCLPVMLQEEIAPLLALVTILTTRIREADHQLARLVASDPRVQRLCTVPGVGPVTAATFVATVDQVERFAGAHQVEAYLGLVPRELSSGERQYRGRITKAGNGRARWLLVEAAWSILRYKKPETLALRRWAERIADRRGKRRAAVAMARRLAGILFAMLRDDTSYQPEKVAAGVERRPAA

SEQ ID NO: 247227 - protein, 459 aa, unidentified
MYTIGLDLAVQAAHKAVVLDEQGHFITPVLTLHTRPSELDQLLTRARNGEQEAVVQVVMEPTGMAWFPVAVYLVRHDVIVYLVNSQEVADLRRYYQRHAKSDRIDARVLARLPLVNPEKLHRLHLPEARALACQRSCKQLDRLSTQITAIHNRLQAIDRFAWPGLDEQVFADPFGPAARWVREHWYDPSRVLAAGAAPIREQWEHSGEAAGSAGEWVEALVDLAAEVLALYGPENQYLDFAQLQAEICREQAWLTSLEQQHQALRKQTIRPLYKQLHPSRNLETLKGVGQDSAAVYASFIGDAERFSSSRLFRGWSGMVPDSAQSANSEAKGLHITQAGPDLIKKFAYLDAEIARRWDPQIAAIYYDQMTNKGKHHKQAICACATHLLDRVLVVLREDKAYELRDVNGTPITSQQARAIIAEHYTVQEAVRQRTTKRQRKERAERQAEHNRKGKVASGS

SEQ ID NO: 247228 - protein, 341 aa, unidentified
MDKLSRIGVDLGKGYFQVHCLPLEGGPAMNRKLSRPKMRAFFAGIAPCRVGMEACGSAHYWARELVAMGHEVVLMPPAYIKPYVKRGKNDAVDAAAICEAMSRPDMRFVPIKSADQQAVLMVHKTRELLVKQRTMSVNALRSHLAEFGLVVAKGIGRVDELSELAENDASLPQEAREAAKLLALHIEALTRSIDAMERKIAKASASSKTCRLLDRVPGVGPLTASAIAASVPDPSVFKSGRDFAAWLGLTPRQNSSGGKAKLGAVTKQGNRYIRKLLVVGSTAVLRFARKRRGPLADSIAALRARKPERLVAVALANKLARICWAIMSTGELFRQEAFAKA

SEQ ID NO: 247229 - protein, 329 aa, unidentified
MRKKTNERYHPLGGRRCAASPRGGIDISKDTLDTYWLSKRKHKQFANNKVGLRALILWVRQAEVSLAVFEATGVYHRLLETSLAAHGFPFARVNPRQARRFAEGTGTLAKTDRVDAAMLARMGSLLELKVDKPKCETLHNLKGMETARQALIKDRTAARARLKTATYPLLRKQATLRLRQIERDIAQIDAAIAATIAADTALSVKADILISIPGIAKVTAYAMLVEMPELGSLSGKQAASLAGLAPISRQSGKWQGKERIQGGRACLRKAIYLPALVATRFNPDMKAKYHELIANGKCKKLAITAIMRKLVVMANALLRDGRKWSETRA

SEQ ID NO: 247230 - protein, 323 aa, unidentified
MERTVAGHVLFRKRITRVKLLGFLAAQARCVVAMEACAGAHYWAREIAKLGHHVRLIAPACVKPFIKRQKNDAADAEAVCEAAQRPSMRFVPVKTEEQQANGIAFRARDLLVRQRTQCVNALRGHLMEYWHVFPKGITHVETLVALVEDLQSSLPDRVRVILKLLVDTFTALETQIAALDAEINRRSKSDPTARRLMTIPGVGPIASTAITALVPAAEGFPAGRDFAAWLGLTPLQKSTGGKQKLGAVSKRGERTIRRLLIIGASAVVQQASRRAAPKGSWLAQMLARKPKMLVTVALANKTARIVWALLVKGGTYRTPAAAA

SEQ ID NO: 247231 - protein, 420 aa, unidentified
MARTVEIVYPVCCGMDVHKNFLVACIAVTNEHSHTEHHIRRFSTFTGDLRRLSEWLASYKCHDVCMESCGKYWIPVFNALEKTCNVCLTHPKYVKAIKGKKTDKKDAKWISELFKCDLVRSSFIPPPDIRQLRDLCRYYVKLTGFASGEKNRAQNCLTMCNFKLDDVFTDVFGKSATRVLDTLLHHGNGGFELDGLVSGKCKSSPEKIRAALDGELNPVQIEKLNLIRQHINDISTLKTALEKLIYSLAAKYQPQIDLIMTVPGIGTQLTAIRILAEIGADMSVFETAKQLVSWAGLTPQNQESAGKKKTTRIGRAGAYLKPLLVQIALAVSKSNKNPELKNKYLALKKRRGGKKAVIAIARKLLTAIWHMLSKSETYNADLYHMADKPPAARVLTTAQAVAFLRNKGFLVVDEETGEVA

SEQ ID NO: 247232 - protein, 318 aa, unidentified
MTQTTHTTALYVGIDVSQKTLTIALYPTDEVWTIDNTSQHHTALVQHLAQLPIQRVLLESSGGYEKAVVSALQQAGLPVVVVPAQRARYFAKSMRGDLKTDRADARMLAYFACCYPVQPVAPCSPVQAELKELWARREQLVQQVEREKKRLHTVQSEAVRASLERMLAVLKDEIAQIEARVAELMASDAALAQKAALLQTAVGVGRVVAYGLVAELPELGQVSHRAIAALAGLAPVRCESGDWVGRARVRGGRPRVRRLLYQAAVVAVSHDGRWRAAYAGLLGRGKVKKVAFCAVARQLLVVLNAMVRDGRAYERVSE

SEQ ID NO: 247233 - protein, 418 aa, unidentified
MNEDGNTRGSRRYIALDIHKQYCVIGGVDREGRVVLQAVRVEHADLEGWLKKNLRSTDHVVLESTTNAWHVYDLLEPLVERVVVANPVKVKQIANARVKTDIRDTLILARLLAANLVPQVWVPPVPVREMRQLLSQRRQLVETHTQIVNRMHSVAHRHHLKHERGKRFNEKTTAWQKDKILSGIEQFQLALEMENRAYIEKQIERISQEVRKLCHQKPWAESMSYVMQLPGFGVITAMTVLAAIGDIQRFESAKHLASYSGLTPGLEQSGTKNRGKGITKEGRRELRWALVEAAQMAVKSDPLWKQRFQAMQKRMHRNQAIVAVARRLLELVWYVLTRRQPYRHFSHERIAYKYLTWAWQMDEAARDGLTRQQFARYYLMRLGIGKDLTRIALNPKYPRRLASEAEVLAIHPELKQVE

SEQ ID NO: 247234 - protein, 352 aa, unidentified
MTQLRTYRIGIDVAKGVFQVHGVKNEPGEPVAIKRRLKRGQMEGFLAKLPPSLIGMEACGSAHYWARLARSYGHDVRLMPPAYVKAYVKRNKTDPHDAAAICEAVGRPTMRFVPIKSEADQALMMLHRTRASFVEKRTAAANQLRAAFAEFGIIAPVGAGGFSQLLRLIETDAESFVRLPEALRLLLAELARQWRSCDAVVRRMEAEIAASVKKSERARRLVRIPTIGPIGASAIDGLLPDPHVFKSGRDFAAWNGLTPREDSTAKTIRRGPISKRGDGYLRRLLVLGATSYLARVRRGQIKGASAWVVKMAAHPKRKLAAVALANKTARIAWAMLAKGEDYRAPAAALQAA

SEQ ID NO: 247235 - protein, 346 aa, unidentified
MIHVGVDLHQRFCYMTALDSRGRQLNAQVVVNEAGALRAYFRQFRKPVRAAVESCGFWPAFRAAVGDQVEVKLVHAQRVKAIAAAKLKNDRIDSATLAHLLRCDLLPEAWMADESTRELRQQVRLRATLVRQRTRLKNQVHAVLHQHGLKHGSSDLFGKTGREWLQQAPVGEKARGALNTYLHLIDEFTGHVKQQDQQVKQFVGQDQRAQWLMTIPGIGQYSAMLLLAEIGDIQRFADKHALTNYAGLVPWMRESAEKRRSGGITRAGSPWLRWIMVEAAQVAIRTSPAVRCYFEQLRRRKHRHVAVVAVARKLLVAVWALLQQGECFDENRFAVGKDGAVRLGKR

SEQ ID NO: 247236 - protein, 343 aa, unidentified
MQVTTIGLDLAKSIFQVHGIDAGGRPVVRKALRRAQVLPFFESLAPCLIGMEACSSAHHWARELSACGHTVKLMPPSYVKPYVKRGKNDAADAEAICEAVTRPTMRFVPVKAPEQQAAVMLHRTRALLMRQRIMVVNALRGHLAEFGLIAPQGAKGLADLLERTFRPDGTGPIPSLARAALAPLVSQVMQLQGAIKAIDAELLAWHRQNAASRRLETIPGIGFITATAIAATVTDPSHFRSGRQFAAWLGLVPRQSSSGGKERLGSISKMGDRYLRTLLVVGATSVIRYARGKNAAGAAWINGLLARRPARLVSVALANKTARIAWAVLSQERDYRKPALTAG

SEQ ID NO: 247237 - protein, 345 aa, unidentified
MSNNIHFSCICGIDIAKKVMQVFKVTSDGVVTNTSVSRKDFLEHFRNIPPALIGMEACATSQHWGRELQGLGHTVKLLSPKAVKPYVKGLKNDRNDAEGIYRALIMGVREVSIKSTAVRDLSLLQTMRAKRQRDKVATINHIRGILAEYGLVMGKSVRAFLSNAGTLLARLTESETTSQLVISELEKLLKEVKEIVSRIEELESSVKKIASENKNYDLFRSAPGVGPITAAMMVVLLCNPTVFKNGRDFAAYLGLAPMSFGSGGRNEVTGIPSKYRCHNEARSLLVQCAHSITRLKYKSDWVASILSRKPKKVAIIAIANKLARQLWVMAKKGDKFEKRLVLAAV

SEQ ID NO: 247238 - protein, 310 aa, unidentified
MEPIFVGIDVSKDRLDVHVRPGGEAFVVTRDGKGLEELVGRLQELGPTLVAVEATGGFETIVAAAVAGAALPLAVVNPAQIRHFAQAVGKRAKTDPIDAGVIAHFVEAVRPVPRALPDEASRLLAELVGRRRQIIEMMVAERQREKRATNVRVRKSLARHIAMLERELGAIDQDINTLVRGSPVWRVKEDLLASVPSIGKTLARTLLAELPELGSLDRRNIASLAGLAPYARQSGRWRGRSMIGGGRAAVRSATFMAALVASRCNPPLKDFYQRLVSVGKPKMVALIAVARKLLTILNAILRDNRPWQSA

SEQ ID NO: 247239 - protein, 408 aa, unidentified
MARKRTLSTLDTSIAYEAVGLDLAKTDVALAAFDSDHKEPYLIDRIPYDKLYELLADMAPTLVAMEPCSGAHQIAEQIQELGHEVMMISGRHVQAWVKDHCNGQKTDLNDAFAILNLAYDRWLTPIRGKTREECRLLALQASYRQLKGQRTKTMVHVEATLHAWGFPIRTGSFNQKALHELIDANREAFGDEVVETLHLMINRVHDLDHDIATVLKLLTEATQRDPRASLLRSIPGFGVLTTSRWCAVVGDIARFDTPKQTMAFIGLVPNNRITGHHTETSSGREARGQGKMSKRGDKMLRSLCILGAGALCLMVRNDRLPDCPFVASIKERLASPRPWFKVLVYVAAKLVRIATALLKYGETFSFEKAGISKAVLKQWELEQAKAAKALTARKRIVRPQARLIHEMP

SEQ ID NO: 247240 - protein, 347 aa, unidentified
MEYIGIDVHQSESQISILTEQGEILERRIRTQRERFAEVLGCRPRARILIEASTGSEWVARCFEELGHEVVVADPNFAPMYATRSRRVKTDRRDAQALMDACRLGAYHPAHRTSEEQQQVRAELAVREAMVRARVRFIALIRALLRRDGIRIGSGSTRAFARRLAAAGLPESRRAGITPLLTAMQELNAQIDAAEAKLTEHAAHDPAVRRLQTVPGVGPITALSFVATLDRVERFHGPHEVEAYLGLVPSERSSGEQLRHGPITKLGSSRTRWLLVEAAWGIVRRPNPHTATLRAWAMRIVARRGRHVATVALARRLAGILFAMWRDGTDYRPQPQAAETSEVAMTA

SEQ ID NO: 247241 - protein, 351 aa, unidentified
MTMVGGFDVHRKQITFDYVDDDGLVRVGEIRPATRTTLRHWLGEHCPAGDAEFALEGCTGWRYVVDELATAGVVAHLGDPAEIATLRGPKKRAKTDRADARLLRTLLLEGRFPESWIPPAHVVEVRTLGRLYCTLMDERRAWQQRIHAQLFHQGCPPIRALLSVAGRDALAQAELSAAGRQYVDTALRRIDELTVEIGPVRGQLVSFARRQVACQALQARQYGVGWLCAAIMWAEIGDARRFSSSDQLVRFAGLDVTVYSSAGKRSPGHLSRQGSPELRWATFEAAKCAARHGSPDHAYYQRLATKHDGHNGKNPTLAVERKILRRSYHTLRELGDAALAMPVPEEQGVAA

SEQ ID NO: 247242 - protein, 400 aa, unidentified
MVSDFIKGYNLMKIFVGIDIAKLNHFAAAISSDGEILIEPFKFTNDADGFQLLVSKLESFDKNSIIIGLESTAHYGDNLVRYLVAEFYQVCVLNPIKTCQMRKNNVRKTKTDKVDTFVIAKTLMMQDDLRFVSFYDLDMMDLKALGRFRQKTIKQRTRLKIQLTTYVDQVFPEIQYFFKSGLHQHAVYALLKEAPSPKEIASMHMTHLANLLKVNSHGHFTKEQAKELRVLAQKSVGANDSSISIQITQTIQQIELLDSQLEKIEAEMTDIMKFNDSVIMTIPGIGYINGGMILGEIGDIHRFSNPNKLLAFAGLDPSVYQSGNFQAKTTRMSKRGSRVLRYALVNAAWNVVRNNATFKAYYDAKRAEGRSHYNALGHCAGKLVRVIWKMLTDEVEFNLE

SEQ ID NO: 247243 - protein, 420 aa, unidentified
MWMPVSRGTDRRYGAGDKEMATSSLESNRWSAAMPQPNDLSRSLVTLDQNSTIIAVVELSQSSWLVGGIVPGIERQPHKKLEPSPERLLGLLHRWQDEAVRAGRTITRIALAFEAGRDGFWLARWLAAGGVEAHVIHASSVAVSREHRRAKTDRLDTELLKRAFLGWLRGERGHCSMARVPTIAEEDAKRPNRERDCLVRERTRIVNQIKSTLARLGIRNFKPAVRKAVERLATVRTPEGMPLPPNTLAELQRDVARLGFVVSQIREIEEARQKQLEQQHEAGYHAMVRRLARIVGVGVETADLLVHEVLSRPMRDRRAVARYAGLTGLPDESGARRREQGLARAGNARVRRGMIQLAWRFLMFQKESALAVWYRARTADSRRGTRKTMIVALARKLIIALWRFVTTGEPLEGVVLRPAS

SEQ ID NO: 247244 - protein, 370 aa, unidentified
MKKISKQSQVVKAAKPERSVGLDLGDRFIHYCLLDQEGEVMEEGRMANSETALRKHFADEAVMRVAMEAGTHSPWVSRLLKRLGHQVLVANPRKIRAITGSESKNDRNDAEQLARFRNDAEQLARFAAFDPKLLSPIEHRSEQRQQDLNLIHARATLVRARTMIVNVVRGLVKSAGDRLPNCSTESFAERTKAAIPASLREVSMPLLKQIGLLTAQIDLMDKQIDKLGKKYPEISILRSTPGVGPLVAACYVLTLDNPNVLGDNRQAGAFLGLRPRQSQSGDSDPQKRIARTGNTYLRSLLVQSAQYVLGRFGPDSALRRWGLKLAGSGGKRGKKRAIVAVARKLAVILHSMWRSRIVFQAFPQSATGVA

SEQ ID NO: 247245 - protein, 372 aa, unidentified
MNYNTVYVGMDVHKESFTFCAYTIDAEKGSHFQRTEADYKNVLKYLEFLRTVYGNDANFICGYEAGCLGYTLYHQLIEHHVNCVILAPTTMLEQCSRRRIKTDRRDAEIIAKCLAQHNYSPVHIPTATDEETKEFLRMRDDHKLALKKVKQQILAFCFRHNYRYDGNSHWTAAHIKWLKSLKPEALYKEILDEYLLTYTTLSDKLERLDKRIEELASKDEYRESVKKLCCFIGIKTHTALSVLIEVGDFQRFASAQKFASYLGLVPGEDSSGDEQTRLGITKAGNRHVRMLLTEASQCYARGQIGFKSKELKSRQAGNSPQVIAYADKANERLRRRYYKMVLGKSKKHNVAKTAIVRELACFMWGMMTDHIT

SEQ ID NO: 247246 - protein, 407 aa, unidentified
MNDSRKRYIGLDVHKHYLIALGVDADLNVVLPARRVELFRLEAWMKKNLTKQDEVVLEMTTNTWQLYDELIQFVGSVTVVHPPHVALITRSQVMNDKIAASILARLLAKGLLVGIWIPPQEIREARGLVAQRQKLVRLATQAKNRLHAVIQRHHLVPPKGNPFGAKNKEWWMSLSLGKLEKLNLQSDLETLQFAEKQVKDMTEIMEGMAAEQEEIGRLLHLAGFGVVTATTVWAAIGDIRRFAEPKYLVGYAGLGTRVHDSGMTSRSGKITKAGRRDLRTVLIEAANAAANSHPHWKAELARLEPRLGRNKAIVAIARKLLIAVWFVLQGKTDKYAEPEAVAQKMLKFAYAVGKANRPKGQTAAQFARIRMDALGVGSELTSIPWGSKKPIPLPPSELKERSAVPNK

SEQ ID NO: 247247 - protein, 370 aa, unidentified
MLDTTTFVGLDVHARSIKAVSLDVMTGEVRCATFGYDAGAVAEWVRSVDPGARCVYESGVTGFDLQKRLSGLGVDCVVGAVSKMIKPSADRGRKNDRNDAEFLARMLSVGNVVEVWVPDDECEAARDLTRALEDARDDLSRSKQRLSKFLLRHGLVFDERTPTGRRKGNWTRAHWSWIESIRFAEGADNDVLAYHVDAVRRAAEEKARLEGLVEAEARKPRWRKRVDSLRCLKGVDTASAADLVFEAGEFSRFRNARSFAAWVGLTPSEHSSGESDRRGAITKAGNKHLRKTLVEAAWHYLTCSGRPKDLAKGQAPDPAARRHAAKGVRRLVERREALLARGVHGSKANVATARELACWVWAVGLMAEGA

SEQ ID NO: 247248 - protein, 387 aa, unidentified
MTERFASHKPATAFDHDSTLVAAMELSGKSWELGAVVPGVARRPRRRVKVGDVGEVLAAIERWKGEAAKAGRAIVRVALAYEAGRDGFWIARYLIERGIEAHVMQPASIAVERRGRRAKTDRIDLDMLLRTLLAWLRGEPRVCSMVRVPSIEEEDSRRPGRERDHLVRERVAIENRITSLLSLHGIAGFKPRLKKAVERLERLRTAAGSPPPPRTMEELRRLMGRQRLLGEQIKQIEAARDAAARAPNPNREERMIQFLIAIAGLGVETATLLVCEVLCRPFRDRGAIACFVGLTGTPFQSGGMEREQGIAKTGNQHVRCILVQLAWRWLRFQPDSALSRWFVARVAGGKGRIRKIMIVALARKLLVALWRYVQTGLAPEGVALAAA

SEQ ID NO: 247249 - protein, 370 aa, unidentified
MKQNSTRRQSPKQSPKQSQKICAGPITIGVDLGDKTSRYCLLDDRGEVAKEGSAATTKKGMAQTFGPLKRCRIALEVGTHSPWVSRLLKSLGHEVFVANPRQLKLISQSSRKDDRVDARTLARLLRADPELLRPIQHRSEAAQLDLMAVRVRAALVEARTALVNSARGLAKSVGERLPKCDADNLGIGQLESLPQPLQALLKPLLKQVESLTAEIKARDEQIEQIARTKYPETKLLRQVSGVGPLIALTFVLTVADKQRFEKSRDVGCYLGLRPKRSQSGRSEPELRITKEGDVYLRKLLVQGAHYILGRKGPDTDLKRWGARLAIGGKRAKQRAVVAVARKLAILLHKLWSCGEVYEPLRNNPARQAVA

SEQ ID NO: 247250 - protein, 422 aa, unidentified
MLEPTQDHEQIIERVAALDIGKAELACCVRVPDPNASGKRLQEVVTYSTMTRSLLGMADRLRQLGVTRVVMEATGDYWKPVFYILEAAGFETWLVNARDVKHLPGRPKTDKLDSVWLCKVTERQMLRPSFVPPPAIRVLRDLTRYRVDLVGVRTAEKQRVEKLLEDAQIKLSVVASDIFGISGRAMMAALIAGERDPKVLAQMARARMRAKISQLEEAFHGRFSAHHAFLLAKMLARIDAITDDITDVEAQIEAQIAPFADAADRVDGIPGVGAIGARVVLAEIGLDMTRFPTAAHLASWARFAPTVSESAGKKKGRNATGHGNPYLARVLGEAAVAAGKTDTFLGERYRRIDRRRGKKRAIVAVGRSILIIIWHLLSDPQAEFVDLGPDHYDTRGGPQRSIRNHVRHLEALGYKVTLQPAA

SEQ ID NO: 247251 - protein, 397 aa, unidentified
MWFGNFSWAPIREEELAMRNCIAVGCDLHDQSMLLMIGHNEGEPQKRSSGTHREARRKTIEYLKRCQREAGADAIVFAYEASQSGYVLYDELTAAGVECHVLAPSKMPHTAKSRRNKTDEKDARRNLDVLRAHVWAGNELPETWVPDPQTRQDRALVRARVSAGEKRASCRREIRSVLKRNDVAKPQGLGKGWSGKYQAWLLGLTSPPSLLGAGERVVLASLLRQLEALEKEVEILEAEVLALSKTDRYRDLVAECRKLKGVGVLTAMVFLTETGDPLRFKNRHSIGNYMGLTPSSDESGEASDRKGHITHQGPWRARRVLNQAAHVRVRTDPEEKAWFDQWLAKHPKKKNIGIVAAMRRLSIRLWHAACRVARERAGLPPLPSPRRGEAPACAPGT

SEQ ID NO: 247252 - protein, 332 aa, unidentified
MYLGIDVHKRYAQVAVMDEAGEIVEEVRVENANLDDLAQRYAGAQAAIEATSNYYHIHDTLSEHLDVTVAHPKELNQIADTDKKTDRVDAKELARMVRLNSVPESYVPTDEIREARALVRGRQSLVEHRTEYANKVHGLLSDHGISEDVKPLTQEGREFLRELSLPTPWESVLESYLEVIETLTGEIQNLEETIEERAGSLRETQLLMTIPGVSYYTALTIYAELGEIGRFDGDKEVVSYVGLNPVIRESGDSRIEGELSKRGSGRARWLLVQAAHTAVHTCNDEYLSRFYERLASRKNSQKAIVATARKMLVSMYHMLDRGEVYDPPGVSA

SEQ ID NO: 247253 - protein, 398 aa, unidentified
MISVGIDVSKGKSMVCFFKPGGEVLITPFEVSHTKHELNELADRINSYGEEARVVLENTGYYHWPVVKALVERGIFVTAVNPLKMKRFCSQNIRKVKNDRIDAIHIASYGLTYWHELVPTQSSEDTYRELLLLSRQYHNVITLLIKAKLNFGNLLDQVMPGITSIIRDERGSKLTEFVKKYVHFQHIDSMSETRFVRDFCKWSQKKGYRVDHERQAKKIFSLVQNGIPVLPHTPTTKIVVLEALRRVNELEKSRDIILAQMNELGNTLPEYSLISEMKCIGKGLTPRIIAEIGDVRRFHNKHALIAYAGIDAPPYQSGSYNAMERHITKRGNKYLRKVIFEVCLSYIQHKPEGDPVYEFIEKKRAEGKCGKEALVAGINKFLHIYYGKVAEFYRELEV

SEQ ID NO: 247254 - protein, 392 aa, unidentified
MLFVGIDVSKSKHSCYIIDFEGTIYEDNLQISNNIKGFNTLSETINSICKTHGLSNVKIGLESTGHYSTNITNYLHSKGFEVILFNPMITNSKRKSNTLRKTKTDKTDAKVIAMMLLTDNSKSYSPISYQIIELKSLTRFRHRMVNQRSKLKQSFVRLVTIVFPELSDFVWSLHQKSIQKLLLELPTANNIANCHLTKLTNLLIKYSQGKYRKDKAIKLKQLAAKSIGSSNRATAFEIQTTINLIHVLDKEIKVIDQKIKTIVDEINTPLITIPGISYTLAAIIIAEIGDINRFANPAKLLAYSGLDPSVYQSGQYNATHTRMVKRGSKYLRWAILQAVKTVAMRDKTFKDYLNKKLKEGKHYFVALSHAGKKLIRVIFYLLKNNTTFVPQN

SEQ ID NO: 247255 - protein, 348 aa, unidentified
MQTQVTKKINFSGKELFIGIDVHKKSWSVTILVEGIEHRTFTQPPDPTALHNYLQRMFPGGDYNSAYEAGFCGYGIHRELNSLGIKNIVINAADIPTSQKDKLQKRDPIDSRKIARGLEKGSLRGIHIFDRDLEELRSLNRTRFYLMRDLRRSKNRIKSFLQYYGEPIPPEFDNNQWTLKFLSWLKQIKMKTLSGQDAFSNLIRSYEYHREQLLTLSRLIRQRIREYDNELYSLLKSISGIGPLTSSALITELGDINRFPHIDHLSSFVGLIPRVRESGETIHTGGITFRCNSFLRTMLIESSWQAIRMDPALMQYYQKHIINNKGHKVIIKVARKLLTRIRYVMKNR

SEQ ID NO: 247256 - protein, 366 aa, unidentified
MKKISTVQVFGNELFKEQKLTIGVDLGDRWSFYCVLDEAGKIILEQKVSTTPEAMKQTFGKIPRSLIAIETGTHSPWVSRLLRKLGHEVLVAHAQKVELISKSNRKDDRHDARTLARLARIDPELLGPVRHRSAKAQIHLTVIRARAELVSARTALVNAARGLVKSYGERLPKCGTAQVSRELAAELSAELREVLEPLLREIESLNERIKEYDARMEKIARESYPHVELLKQVKGVGTQIALTYVLTLDDPHRFPKSREVGCFLGLRPGRRNSGQSEPQMHISKEGDRYLRTMMVQGAHYILGPFGEDSDLRRWGLKLAARGGKNAKKRAVVAVARKLAVLLHRLWVSGEVYEPLRNSHQALRAVA

SEQ ID NO: 247257 - protein, 358 aa, unidentified
MAGKVTETAVVGGVDTHKDLHVAAVVDQNNKVLGTQFFSTTRQDYRQMLAWMTSFGALKRIGVECTGTYGSGLLRYLQNAGLDVLEVTAPDRMERRKRGKSDTIDAECAAHAAFSGIRTVTPKTRNGMIESLRVLKTCRKTAISARRVALQIIHSNIISAPDELREQLRNMTRMQLIRTLGSWRPDASEYRNVTNVYRISLKSLARRYLELHDEIADLDVMIAAIVDELAPELIKRNAIGYESASQLLITAGDNPQRLRSESGFAALCSVSPVPVSSGKTNRYRLNRGGDRAANSALHIIAIGRLRTDDKTKEYVARRVAEGHTKMEAIRCLKRYISREVYTLLRNQNRQINSIPITA

SEQ ID NO: 247258 - protein, 347 aa, unidentified
MRFYNHQHRHCCGIDLHVKTMYVCIVDATGQVLVHRNVKSTPEAFLETVAPYRDDLVVAAECMFTWYWLADLCAAEQIAFVLGHALAMKAIHGGKAKNDKIDSQKIAALLRGGLLPQAYVYPAAMRSTRDLLRRRLHLVRKRGQLLAHIQNTRAQYQLPEFGRRLAYPANRTGVSEHFSDPSVRKSIDVDLALLERYDDLVTDLELTIVREAKRHDGDAFHRLRSVPGIGKVLALTILYEIHDITRFDRVQEFASYARLVKCAHQSAGKTYGTGGAKMGNVHLKWAFSEAAVLFLRHAPGGKKLLGEIEKKHGKGKALSILAHKIGRSVFDMLSRGTVFSMDRFRAA

SEQ ID NO: 247259 - protein, 332 aa, unidentified
MKKIIHFVGIDVSKETLDIALIRNNDKSNIYSFKVTNNKTGFKKMKQWLKVENVSLQEAVFCIEHTGMYSKPVGQFILSLQGNLWMEMSLKIIRSMGVQRGKNDKIDAIRIALYAQRCQDEMKLYEPPRPVVEKLRTLLQLRKRLINSRNSLQVPCNELTTIDEQAGKEATRLIKSSVSALEKNIAVINEQIDELIASDEQLAHEFEIGTSVPGIAKITLAYIICFTNEFKNYSGGKQLACYCGVVPFEYTSGKSVKGKPHVHNMANKQLKRLLHMGAIAAVTYYDEFKRYYKRKVEEGKPKMLVLNNVRNKMVLRLAAVIKNNKPYQKIAA

SEQ ID NO: 247260 - protein, 320 aa, unidentified
MASRESLFIGIDVSKQTLDVAFGADPHAPRETIPSTDEGVQLLVTRLQRLQPTLIVLEATGGLERMVFAQLLQAGLPTARVQPRRVRALAHAEGRQAKTDRLDARLLARFAERVRPPHHQATDEQRASLRDLLVRREQVIQMRTAEINRLTAAAPNLRPGIQQHIDWLDQEIRALEQERDNEAERTDEVRRKRELRESVPGIGAITALNLLLRLPELGTINRKEAAAVVGVAPYANQSGAQHKPRHSSGGRRDVRSVLYMATLAATRRRLVRRAFDQRLCQAGKPRKVAIVAAMRKLLTILGAILRQQKPWDPAVHTSAP

SEQ ID NO: 247261 - protein, 457 aa, unidentified
MTKRRSKTKSKNIKVPKLPQHLQHMNLNAAGIDIGSEFHMVAVPEGRDTVSVREFGTFTADLQALAAWLKKCGITTVAMESTGVYWIPLFEVLEHEGFEVKLVDARHVKNVSGRKSDVLDCQWLQQLHTYGLLAGAFRPPDEVCVLRSYLRQREMLIQTSSMHIQHMQKALQQMNLLLHNVVSDITGVTGMKIIKAILGGQRNPRALARNRDERCHNTAATIAKSLVGNYREEHLFALRQAVDLYETYQAKIADCDHAIIKQVEKQPDSSGDDPPTPEKQVPAHVRIRDGVDVRDLLFKKSGVDLFAIPGLAADTLLVLAGEVGFDMTPWKTEKHFASWLGVCPGTRKSGGKVLHNKTKRNPNRATQAFRMAAASLYRSQSALGAFYRRIKSRSGGQQAVTATAHKIARIYYAMLSHGTTYVELGQKAYEQRYKERRVDHLKVQAKSLGFQLVPCAS

SEQ ID NO: 247262 - protein, 351 aa, unidentified
MEKYIGLDVHAKSCTAAIIDGRGKRLGSQVIETNGKSLVEFFKLQAGRVHLCLEEGTQSAWLTEVLRPYVAELAVTVPRQRRGQKNDELDAYTLAEQLRQGAFTIRVYQQVGPFGELKQLVKTHLSLVIDTRRVQSRLKALYRSRGIATAGQEVYAQSTRSDWLSQLPKSSLRSAEVLYRQYDALCEIRDQARRDMVRESHRFPITRILETCPGMGEIRVARLVSVVVSPQRFRGRRQFWSYCGLGVVMRSSSDWDQDPSGSWHKVRKPVTRGLNLNFNRMLKDVFKGAATTVLQQGGEEPLYSEYQRQTLGGTKPDLAKVTLARKIAAISLTMWKNEEKYDPKKRKQVLA

SEQ ID NO: 247263 - protein, 325 aa, unidentified
MSTAFIGLDLAKLVFQVHGVDVHGKVVMTKRLRRDAVLAFFANLPVCLVGMEACAGSHFWARELTRLGHTVRLMAPQYVKPYVKRQKNDRADAEAICEAVQRPSMRFVAVKSEEQQSTLAIHRVRETLVAQKTQLINALRAHLAEFGIIAPQGAGKVAQLTAVVADLEDTRVPALARSVLQSLIDQLRDTERRVEDLDARLAEQARENKVCQRLMTVPGIGPTTATALTATIGDATVFESGRHLAAWLGLVPRQNSSGGKERLGGISKAGDGRLSKEWGSSAEQAMTGRTFQRLRNEDEVGLALGRNRDRRFEPQCRRAGDREPK

SEQ ID NO: 247264 - protein, 347 aa, unidentified
MRFYTKQHTHYCGIDLHARTMYLCILGQSGEVLLHKNYRANPDSFLKAVANYREDLVVAVECIFTWYWLADLCRCEGIDFVLGHALYMKAIHGGKAKNDRIDAHKVAVILRGGMLPQAYVYPAEMRATRDLLRRRLHFTRKRGELLAHIENTNSQYNLPAFHRKLTYPSNRGEASGRFSDLAVQRNIDVDLGLIAYYDQMLRELEYFILRTAKNHDANTLYRLRTVPGIGKILSLVILYEIHDINRFKRPQELASYSRLVRCIRESAGKVSGSGGKKIGNVHLKWAFSEAAVGFLRKNEEGKKFYDRLVHKHGKGKALTVLAHKLARAVYYIWKHDTVFDQEKFLAN

SEQ ID NO: 247265 - protein, 400 aa, unidentified
MGQPLWAGVDAGKSEHYCVVIDADGKRLLSRRVANDEAALLDLINAITALADGGELTWAIDLNAGGAALLIALLIGAEQRLLYISGRTVHHASGGYRGEGKTDAKDAAVIADQARMRRDLQPLRAGDDIAVELRILTSRRTDLVADRTRAINRLRAQLLEYFPALERAFDYSASKAALILLTGYQTPDGLRRAGAARLAAWLRKRKARNADAVAAAAIEAAKSQHTVVPGQQLAAAMVARLAEEVMTLDTEIGDTDAMIEERFRRHRHAEIILSMPGFGVILGAEFLAATGGDIAAFGNTDRFAAVAGLAPVPRDSGRISGNLKRPRRYNRRLLRACYLASHIAIRTDTASRIYYDRKRAQGKRHTQAVLALARRRLNVMWAMLRDHKPYQPTAPNAATA

SEQ ID NO: 247266 - protein, 346 aa, unidentified
MTIVEPVRTVTGGVDTHLDVHVAAALDPLGGLLGSEPFETTPAGYKALLVWLEGFGEVGKVGVEGTGSYGAGLARFLRRRRVEIVEVDRQNRQAQRRQGKSDPLDAIEAARAALSGRAQGQAKTRDGAVEAIRVLVVAKRSARQARVKALTQVRHLGITAPDPLRCRMKGLSVPALVAEGAKLRPTRSTDPVTAATKASLSSLAHRIQALDREIAELDEMIDPLVAATAPDLLALFGVGPDTAAALLVAAGDNPERLRSEAAWAHLCGVSPLQASSGKVTRHRLDRGGDRQANSALWRIVMVRIAHDPDTTTYFERRVKEGRTKPEVIRILKRYVAREVYRHLPRG

SEQ ID NO: 247267 - protein, 264 aa, unidentified
MNANTNLTVVGIDIAKNVFQLHWIDQSTGEVIRKQLTRAKMLQFFANREKCLIGMEACGGAHYWARELIKLGHEIKLMPGADVKAFNRGNKSNVRDAEAIWLATQVNSPRKVAVKTEEQQAVLTVHRIRELKVKQRTAEINQIRGILMEFGLVTARGHKAIRQWLPHALESLQERVPRIALKALSQLWSDVQQLDQQIKELEDNLKSWAKAQPDCQRLMQIPGVATLTATATVATVGNAKAFKNGRQFAAFLGIAPRHKGSGGK

SEQ ID NO: 247268 - protein, 397 aa, unidentified
MIAVGIDISKAKSTVAVIDSDGTVLASPFTMAHTQPEMEAFVTYLKGLGEPTTILMEYTGHYHYPVLKKLQDEGFPVCIVNPYQMKKYGDVEIHKAKTDKKDALRIAAYALEKSYKLVPYSSMEQKYEDLKFLSRQYSQRITYVAKLKVQLIALLDQTMPGITRILPLNSRNPEKCALLLFIKRFKSFDEIQRIGKARFLASYDVLAKKASERSASSKGLSIYELAVDSITTRGEDPYIWLSQNQCVDLLSATQNAADEIISQMRNIAETIPEYKALRAMHGVGDRLGPIILAEIGDVRRFHSGKALNSYAGNDAPPYQSGQFESRNRHISKRGSSALRKACYEVMQALKLTKPQDDPVYLFMLKKEQEGKPFNVAKMAGVNKFLRIYYARAMELYK

SEQ ID NO: 247269 - protein, 346 aa, unidentified
MKYIGLDVHSTHINCAVIDEQGNLIHHDCFNTSLKNLINLSEKLKHPLSLVYEEGELADWLFQGLRSSFEEITIADPIENRMIYGGDQKSDPIDPLKLATLLRGGFINPVHHTWDHHRSQFKQLVFAYHDMAKQVTRIKNKLKAYYRKQGIIIKTDSVYHPNNRAKFMKRCRHLEIIEKYYQFLDLFQHEKDRFEKSLKKESRCYPVIRRFLKIPGVGIVTATTFFTIIDDPHRFDHKQQLWSYAHLGKATHQSGNFEITKHQRKGNRLLKYVLKIAAGDAVRQKTNEFTRAYIRMVNIQQKESKMAYRIIARKLATIMWTMWKNNQPYIPRENDTPTKDMPHDVS

SEQ ID NO: 247270 - protein, 411 aa, unidentified
MRLFAGDDWAEDHHDIEVMDAAGKVLAKRRLPEGAAGMSQLHELIGRFLPEDADEVEVVIGIGTDRGPWVAALVAAGYTVFPVNPLQASRYRERHGVSGAKSDQGDSHMLADMVRTDSHQLRPAAGDSPEAAGVKVVARTHKTLIWDRTRQVQRLRHQLREYFPAAIEAFEDLDAPDVLELLGKAPDPARAARLTRAQISAALKRARRRNIADKTDAILAALRGEHLTQPAALTVAYAATVRSLVAVITTLNEQAKLLEEQVKEHFGRHPDAEIYQSQPGIGAILGARVLGEFGDDPRRYVSAKSRKNYGGTSPITRASGKKKVVAARFIRNDRLIDALMSWAFASLNASPGARAFYDQQRAKGLEHNDALRRLANRLVGILHGCLTTRTLYDEATAWGHRENLPQSSVAA

SEQ ID NO: 247271 - protein, 343 aa, unidentified
MEHYAGIDVSLESASVCVVDASGRIVCEAKVASEPDVLIGWFDNLGVEVSRIGLEAGPLSQWLYAGMREVGLPVELLETRHVRDAFKAMPVKTDRKDARGIAQLIRLGWFRPVHCKSLPAQELRAVLTARKLVQGKRHDIEMSLRGILRGFGLKVGPTTTRGFEGRIRELVEGHPTLSAVADALLLARATLGEQLGKLQKQLVSLARNDVRARLLMTTPGVGVLVALTYVAAIDDPDRFRSSKATGAHFGLTPKKYQSGETDVTGRISKAGDASVRTALYEAANVILTRPVKGSSLKSWAMRVAKRAGMRKAKVALARKLAVVLHRMLADGTEFVAGRAAAKA

SEQ ID NO: 247272 - protein, 323 aa, unidentified
MQGKVLPKRSATSEVYVGIDVCKDWLDIYLHPLGRQLRVANSKTGLRALKRQLADVTVALIVMEATGPYHRQAHRTLHAAGLAVCVINPLRARLFAEAAGALAKTDAIDARILAILGQSLLPEPTPPASESLQALQELIHARAAATAEATALTNRSKASHTAFLKTELKRRTKAIEGHVARLEAEIVQRIKADPALARRYAILLSIPGIGKVAAATMLVDLAELGRCSGKAAAALAGLAPIARDSGETAGPRHIKGGRARVRTALYMAAVAAARCNPDLAAFYKRLRAAGKKAKVALTAVMRKLVTLANTLVKEDRPWKPHHA

SEQ ID NO: 247273 - protein, 370 aa, unidentified
MNPIYIGVDFHSRQQTICYLKTETGELVIKELKHQDKEQLRAFYQQFLGQVIVGLEASGYSPWFEALLEELGCEVWLGDPVEIRRRARWRQKSDRRDAELIWDLMVHHEFPRLYQPPLASREVLRMLRYRQKLIKMRTMAKNSLQAIAMQAGLAKGSRLFSTAGQEEFGNATMSPVLQWQRDHWFSLLKPLNEQLLETMVWFKAQSKDDNQIKRLRTHPGIGLLTSLCLRHTLQPVSRFRNQRKVVAYAGFDPMIRTSAERAIYLGISKAGSRMLRYLLVEAVHTAVRYDEDLKRFYKRVAERRGRAKAKVATARKLLIRAYIMMRDEIDYAEFRRRAVAVRLARRSQVTPPTSGGLPGVLIGQSTSPGV

SEQ ID NO: 247274 - protein, 409 aa, unidentified
MKRLFERCAGLDVHKSSVTACVRVRAGGGERVEEIRTFSTTTAGLITLLDWLRSYRIQLVGMESTGVYWRPVYYLLEDYFECWLLNARHLRNVPGRKTDVQDAAWICQLVEHGLVRPSFVPPRSIRELRDLTRYRKAQIEERTREVQRLDKVLQDAGIKLSSVASKVLSVSGRAMLEALVSGTHDPELLAELARGKLRRKLPALREALAGRFGAHHALIVGQILAHIDFLDESIAALSERVDEVIAPFADKVELLDTIPGVDKRTAELLLAEIGPDMSRFPSHRHLASWAGLCPGQNESAGKRRSGKTRKGSKWLQSGLTQSAKAAARTRGTYLSAHYQRLRGRRGHGKATVATAHSILVAAYYILLRDEPYRELGADWLARRNDQAHTRRLVAQLERLGHTVVLDPAA

SEQ ID NO: 247275 - protein, 347 aa, unidentified
MGIDLGDRTSHICVLDEGGTVVERGKVQTTREGLRKRFEERTRMRIALEVGTHSPWVSRLLKGLGHEVLVANPRKTRLIYQSRGKQDPVDAEALARIARLDPKLLYPVEHRAESVAQDLAVLRARDALVRTRTQLVNHVRGAVKATGHRVKKCSTRTFTGQAVGEIPEEVREALSSVVKTIEVVSRQILALDGRIRELGKTKYPETALLRQVGGVGPIVALAYVLTLEHPGRFRKSRAVGPYLGLVPARSQSGDSDPQLRITKEGDAFLRRLLVQSAQYILGPFGEDCDLRRFGRALSARGQRNAKKRAVIAVARKLAVLLHRLWKSAEVYEPLRKTGAPRDAAVAA

SEQ ID NO: 247276 - protein, 363 aa, unidentified
MVSPILAQWTTLSEDFVLLGAIMDTVSLIGIDLGKHCFHLHAQDGSGRMVLRKKLTRNQMFTLLSNFPSCTVVMEACAGAHWIARRLQTLGHEAKLISPHFVKPFRQGNKNDFADAQAICEAASRPSMRFVSPRNEAQQVVSALHRVREALVRERTGTINQIHAFLLEFGISLPRGMAVIRRLPAVLETQALPPRLVAVLERLQAHFKYLDEQIGQLEHELLTQLHEDERSERLLEIPGIGPITASVLMSELGDARQYGSARQFAASIGLVPRQYSTGGKPTLLGISKRGDKGLRRLLVQCARVIMLRIERRTDSLGVWVRSLLARRHSNVVACALANKLARIAWAILAKGTHYRSAPAALPA

SEQ ID NO: 247277 - protein, 363 aa, unidentified
MTISIGVDLHKTQFTTHARIGEGVKGQYATDEEGYRTFLSQVREWRTIKRTKVKVGVESTGNTRYFKNRMEQEGIEVTVINTLKFKVVNESVKKTDRHDAATIAEFLEKDMLPESRLCSETSEQIRRYLKVRTTLVRTTVTVKNQIHGLLTGLGMQDSKASLQSKRGRQKILDALAGAANGLVVQPLFETIEKLEENVKLIEQEIDKLAEGDLVVELLQTIPGCGPVTAWTIRAFTDDISRFETFKKYSAYAGLVPWVQCSNMTEHYGKITKRGPEELRTALVQLVLGMRRSKKTPSWRIMERYTAMKREKGSGKTIIATARQLSRIIWCMLTEEVPFDASLMVDKKLNRKANSMQTKQRKTA

SEQ ID NO: 247278 - protein, 341 aa, unidentified
MTFYCGIDLHSKKSQMCIIDRDGKKVKEGNLDNDLLLILEFLEPFGKDVHIAIECTINWYWIVDGLKEEGYDVRLAHTLGLYMITGAKVKTDRRDAFKLAKLLRMGELPESYIYPKEKRPLRDLLRRRAGFVHERAECYSSLRVQFIKYNLNSMSGNGLKQLLPSDIDIMPIPQEVKDYCVMMMERIDLLSSQIDEIDKRLKDITVEDPGFKLLLTLPGVMYVLGLMIYYEIGDIGRFDSVRQFASYCRLVPGISQSSDTVKRGKGKKQGNHYLKFAFTQAANIAVRYYPKLRKFRDKHANRRKGNAATMVANCILAHKIATATFHMLKEGVPFDEAKLFG

SEQ ID NO: 247279 - protein, 385 aa, unidentified
MAPPARPEIVIGLDVGKSSHWACVVTREGELLASKPVLNRENAIDGLYAQYPGALVVVDQVRNIGSLALSRARLAGMPRAYLPGLAAHGASRLFAGDAKTDERDAMVIAKTALGIPDALLPVADRPPEIEAARSLAAQRDFLTCENTRSKNRLRSILLESCPEFEAHADLSDPATLKLMAAVGGPWSISEASPQTVGALTRGCGRAKVAALVESVGSSSRPHPAAVACEDRAVRLLARRISENAAEIESLTSEISALLSADETYRCLLTVPGIGPRTASELVISIDIADFPSHDRLASYCGLAPRNRRSGTSISSVSASRQGNKRLKNLLVFSCNCLARSRNRWGGYYARCRDRGMPHGKALKAVARKRLKVIYAIMRDKVPYSA

SEQ ID NO: 247280 - protein, 361 aa, unidentified
MLYLGCDVHKNYTTISFVDENGDCRGTKSFFNNIDELKHLLSLFPEEEFSAVLEAGLNWGVIYDMLDSLSEVKSVSLAHPPKVKAIASARIKTDKIDSKILGQLLRTDLIPEVWVPSKEVRILKDTVRFRAFVVKIKTMIKNRIHDILRKSHINPPEVKDIFGKYGRMWLEEIELSDKRADKLLRYHLKLKDTFEDMEKEVKKWINKEMRTSEDLKLVKTIPGIREVFGPIIVLEIDDINRFPDPAHLHSYSGLVPSTHVSGNTSYHGRLIKGNRWLRWAFIEGAHTSVRVSPYFREHYARIKRKAGSQAASIASARKLATIVYKVLKEKRPYIEEYKINNKGRLPSVRPSGGITSRSFQE

SEQ ID NO: 247281 - protein, 380 aa, unidentified
MSNTVESSPTVYAAIELSKTTWVLAVNQIKREQPSIYKIKGGDLAGLVKRLESCRIDGGNIVVCYEAGYDGFWLARTLLKLGIDCRVLDPASLQVNRRARRVKTDRIDVLMLLRALIAVERGDRHVCSIVRIPSVEEEDARRSHREQERLVRERTGHINRIKGLLFGQGIRGVEPKLRGTRIDFGTLRTAEGLPLSSRLKAELEREYARLDFIEQQLRALAEERDRPDEQDPSVEQKRKLLIQLRGIGAPSAAILAREVFGRTFSNRKQLGSYLGLTPSAYDSGSVTRCQGISKAGNNAARRIMVELAWLWVRYQPQAGLTQWFLTRSAGQSPRLRRILVVALARKLIVALWRYVETGLVPDGAVLSDSSSSSKGVSSMA

SEQ ID NO: 247282 - protein, 319 aa, unidentified
MDSQPPATIMYVGIDIAKEYLDVAIGVEAVPERIAYTAEALKTLVLRLQTLPAVHVIVEATGGLEVRLLAELWAAQITVARINPQRVREFAKASGRLAKTDQLDARLLAQFGAALQPAATPLPNADTQTLAAWVSRRRQLVDMRTMEHNRRLNAPQTLHVRIDKHLAWLDEEIAALEQEISDFIRNTPAWAAKDAVLQSVPGVGAITARTLLAEMPELGRIDRKKIAARVGVAPFNHDSGRRRGKRCIQGGRYAVRSVLYMAALTATRFNPTIRAFYERLLAAGKEKKVAIVACMRKLLTILNAMLRDDRAWQPAGVTS

SEQ ID NO: 247283 - protein, 363 aa, unidentified
MIVIGTDTHKRTHTCGAVFAGTGQLAGELTAPAREPGFRQMLDWGRNLDEERIWAIEDCRHVSGSLERFLIASGERVVRVPPKLMGESRRGERTAGKSDPIDALAIARAALREGPETLPAAHLDEDALQVKLLLDHREDLVKARSEDQCRLRWHLHDLWPEFEIPAGALDRMVWLDRVARKLSRAEQGTRVRVARELVTEIRRRTRRVNELGREIATLVKARAPELLDLEGCGALTAAKLLAETAGAERLASDAKFARLAGVAPIPASSGNRVRHRLDRGGNRQLNCALHRIAVTQGRFHAPAREFLAKKQAEGKTRIEALRCLKRHLARRVWKLLVNSEREISMTTVDTQRGELTPQIAVAA

SEQ ID NO: 247284 - protein, 361 aa, unidentified
MDTEVLKYSVGIDISKDEMDVCFKSLLMGQETKIKGTRKFPNTKKGFDQIVSWIDKRRKDKTISLVVVVEATGVYHENVSHYLHGSGYRVSIVLPNQSNSYMKSLGIKSKTDPIDSKALAQMGAERKLHIWEPPNAELMELRSLTRHKNNLQKMKTELKNRLHAQQHSAQPGKLVVKQLKSQIRTMDNHLKRVDKSIKELVEAQSPFNDKIKMVTGSIKGVGLDTVVSIVAETNGFELFKSQGQLISYSGYDVVENQSGKRTGKTRISKKGNSHIRKSMHFPALNVVRYGVEPFASLYNRVFERTKIKMKGYVAVQRKLLCMVYTLWKTEQEFDPVKFKDQQKPTQDELLIEQCLSSSFCG

SEQ ID NO: 247285 - protein, 408 aa, unidentified
MKVVFGIDVSKSASTVCELIGESKNEFEITNDRPGFLQLLKELHVFAIHPQIIFEATGVYSRRLQTFLEDYGYDYIILNPLKAKKEMDQGLRHNKTDRNDAYHLALIQKLYHHPVNQLQAEEYHQLNALSRFYDQLTSDLIMAKNRLHQALQSTFPEIETLFSNSKGNNYWQIIKQYPHCESILESDKEQIVRWLLTLKGFGNKHAQKTAKKLLELAHKSYPVVENGSVETKQARYYADRLLVLSSQRERIIDQMTALAKKLPNRDLEILESIPGFAQTTAVRVLAELGDMRRFSNPNKINAFIGIDPGRYQSGEMDSSLSITKHGNAVARKILYRAIGQIDNAAKTNPCHIADYYESKKRSSQTKGFKKIAIASIHKLIRTIYALIQNDQLYDYSVATHNQKDFCRN

SEQ ID NO: 247286 - protein, 365 aa, unidentified
MKKHGKKVNSRKAEWKDKPAITVGLDLGDRHSHYCILNKDGEVTEEGEVPTTEAGLRKLFEGEDRQRIALECGTHSPWVSRLLKKLGHQVIVANARQIPALTGSDSKNDRNDAEYLARFAYSDPWLLKPIQHRSAERQKDLNLMQVRDTLVRARTMIINSMRGLIKSAGGRLPQCSAESFSRRTKDSIPVEMHELVTPLREQSQLLTDQILLLDKRIEKLAEQYPEIVTLRTVPGVGPLIAAAYVLTLDRPDMLANSRQAGAFLGLRPRQRQSGDSDPQCRISKNGNQYLRRLLVQGAHYILRRKSPDSALRRWGLRLAGSGGQRGKKRAVVAVARKLAVLLHRLWTTGKSYQPFPESPATVGAQ

SEQ ID NO: 247287 - protein, 386 aa, unidentified
MYYVGIDVAKAKNDCIIIDSEGKTVHDVFTFENNKVGFSKFYSSVASLLPLEVRIGLEATGHYSLNLIDFIDSKELPLIVLNPLSVNLYRKSTTLRKTKTDKIDCLVIAQMIRTGEHKSYSPVSYPLRELKTLTRHRYRLIQEQSRIKVSITRLVQILFPELPKHFWSLHQKSSYDLLKRYPSASLIADLHLTTLTNILATSSRNKYSRDKAIEIRDAARNSIGSERTAFQLELMQNITIILAFKKELKIVDSEIKKFMDEINSVILTIPGISYTLGAIILAEIGDINAFDDPAKLLAFAGLEPGVSQSGNFISNNQKMVKRGSKYLRWAILQAARLTAMRDPVFKEYMQKKLNEGKHYNVAKSHLARKLIRVIHKLLSSNTEFVR

SEQ ID NO: 247288 - protein, 411 aa, unidentified
MRVHHNVCCGIDVHKKSVTACLMWGPADKEPKFEIRRFGTMTRDLQKLAEWLKQAGCEAATMESTGSYWKPVWNVLEGQTPRLILANAQHVRALPGEKTDRKDGKRLAELTRHGQVRPSYVPPRAILELRDLTRYRSKLLSAGSSERNRIQKVLEDANIKLGSVLSDVFGLSGQKMLQQLVKTDTVDIANVIQLAHWKLKPKMEAIEQSLEGKLTDHHRFLVQASLEHMRFIEEQLKRLDEEIQRRLQPYQEEYALLQTIPGIKETGAARILAEIGADMSVYPDGDHLPSWGGVCPGNNESAGKKFRSKIRKGNVHLLSALTQCAWAATKKKDCHFRNKYYRLKSRRGSQRAIVAVDHAMLKCIYVVLSQRKPYQEPKPVSLSEAQKQRKASSLCRQLRVLGYDVKIQKTA

SEQ ID NO: 247289 - protein, 351 aa, unidentified
MMIIGVDYHPSFQTIAFLVEETGECGEQELNHSDGQAEKFYRELKQRGIRVRVGMEATGYARWFERLLAELGFELWIGDPAEIKAKRVKKQKTDRNDARLLRRLMLENNFPQIWVPSPENRDLRQLLWHRHRLVQMRTRIMNQLQALAMNEGYRWKKKLFSEQGRAQLEKLALAPWASRRRQELLELLDRLNPTIEELTAAVEREARKRPEALRLMTHPGVGPLTALAYVLIIGTPTRFQRGKQIGTYVGMIPSEDSSAGKQRLGHISKQGNSLLRFLLVEAAQAAARIHPDWRRRYIHLAMRRHRSIAKVAMGRRLAIRLYWMWRNGCEYSQSLEFGSYAGQLGTVHGAK

SEQ ID NO: 247290 - protein, 409 aa, unidentified
MTNTLFVGIDVSKKSNVIRFTDSTGDTLSLFSAPNNHDGALKILEKLKDAILHTDFISVTIGMESTSIYADHLAVFLRNDDFLKKWQVKVHILNAKQVSKFKESYPELPKNDNIDTLIIADYLRFGRIAKEVNLDEKYVALRNLTRARFQVAQNLSREKTRFLETLFYKFSALDSSKVFSDTFGATSIAVISEFFSVDDINDMPLENLADFIADKGKNKFIDPEKIAIELKAAARSSYRLSRTVNDSLNQLLAVRLVGISSLQQQIKGLDKAISSYMQLFPDILTSIPGIGPVYSAGILAEIADIHRFNNHAALAKYAGITWSRYQSGGFEASNTKLILSGNKYLKYYFLEAANKVRMHDTEFRRFYQSKYKEVPKHQHKRALALTARKLVRLVYALLDTNRLYIPPTI

SEQ ID NO: 247291 - protein, 333 aa, unidentified
MVDTDTGELSERRLLHREEAEQFYRKLQEQGLKVRVGMESSGHSRRFERLLRDLQFELWIGDAAEIRTKRVRKQKTDRQDAQLLLRLMLEDRFPRIWVPDAANRDLRQLLWHRHRLVQMRTRVVNQLHVVALNEGLRRKKALWRPAGRKELESIALAPWATRRRQDLLDLLEQLTPKIQELTRALEQEVEKRPVTRRLMTHPGVGPLTALAFELVIGTPERFHCGKQIASYVGLVPTEESSGDRRRLGHISKQGNVLLRFLLVEAAQVTVRSQPEWRSKFVHLAMRRGRKIAKVAMPRKLAVHLYWMWCQDWDYGRFEKLGSHAGEPGHRHGV

SEQ ID NO: 247292 - protein, 317 aa, unidentified
MNAKINQNEINVGVDTGKTQLDIYIRPLDIYFVVANDDKGIKEAIVEIKKHRVTRVVIEATGRLEQPFIMACAKANIPFVIANPVNIKRFAGAINQKAKTDKLDAQLIAHYAEVIKPKLSQLKPEQIRLMSDLLSRRRQLMDMQTREKNRLQIMPKEITSSIKPVLTVLKNQLEKTDNKLHKLIESCEEYKIKNDIIQSVPGVGNVVAFNLISEMPELGYINNKEAASLVGVAPFNRESGSYKGKRMIRGGRSQIRTAMYMAMMSAIQCNPTFKAVYHRLIATGKPKKVAIIACIRKLVITLNSMVRDGVYWDPKMN

SEQ ID NO: 247293 - protein, 435 aa, unidentified
MSSLHKINPHCAGIDIGSEFIFIGIEEAEVASFGTFTDDYLTAIAYLKEHAITAVAMEATGVYWITLFDMLEAAGMTVTLVNGKQVKYVPGRKSDVADCQWLQQLHSFGLLRPCFIPDEVTRQLRTYTRLRTDHLSMASSHIQHMHKALTLMNIKVQNVISQIHGASGMRMMHAIVQGERNPERLADLCERSILNTKRNRVIASLKGNFKAEHLFALKQALCAYEFYQKQITECDKQIEALLNDHTNDLPTPPQITPPKDIRHNPPQIDGLHTKLMKMTGGNDPSRITGLTDKTLLELLGETGTNLQEHWATEKHFASWVALAPAIHQSGKSNRRKRIKKHSRAGQIFREAALSIAASKHAALSAFYKRMKARKGFLHALKATARKIAVLYYRIMTKGLAFVEYGIERYQLKFKEQQLRLLQKRAKTLGMMLVST

SEQ ID NO: 247294 - protein, 375 aa, unidentified
MKNITKFVGLDVHRDTIAVGVADREGGRGRYWGTIPHRPEAVRRLMEQLGPKERLLVCYEAGPTGYGLQRLLASMGIECIVVAPALTPTRPGDRVKTDRRDAVRLAELLRAGELAPVWVPGEEDEALRDLVRAREDAKQDLLRARHRLSKFLLRHGIRPPQGVRRWSGRYREWLEGLELGQPVLQRVLREYVHAIDEIEERLKRLEAEIHEQATASVHAPVIQALQALRGVGEVVAVTAVAEVGSFLRFARARQLMAYAGIVPSEYSSGARRRRGAITKTGNAHLRRVLVEAAWSYRHPPALKAKIRQRYEGQPPEVQRMAWKAQERLCRRYRRMIARGKPHAVAVTAVARELLGFMWAIACWVERQQQDDQTVA

SEQ ID NO: 247295 - protein, 399 aa, unidentified
MDAHAPAERRVTVGVDTHADVHVAAALDQLGRLLGTHAYPTTAAGYAALLRWAGRFGVVERIGIEGTGSDGAGLARWLCARGLAVVEVERPKRQTRRRRGKSDPQDAEAAARAVQAGTATARPKGGTGPVEMIRALQAVRRAAVKARTQAANQLHALVLTAPEELRTRLRRLSAAQLVATAAAFRPRRPLTTPTAATQWALKSVATRSRQLSAEIEALDAHLGQLVATAAPALVAVKGVGTDTAATLLVTAGDNPDRLRSEAAFAHLCGVAPIPASSGRTVRHRLNRGGDRQANRALHLLAVRRMGWDPATRAYTARRIAEGKSTPEILRCLKRYIARELYPLLAHNPTLPPPTLGTGGSRSEPATDPPSGERRSPAGPERSAGPRPQAGLTAAGGGAP

SEQ ID NO: 247296 - protein, 315 aa, unidentified
MEQPPAAPSFVGVDVSKDRLDVHVRPSAETFAVARDGEGLEALVAALRRREVALVVLEATGGFELTVAAALAGAGLPLAVVNPRQIRDFARATGRLAKTDALDAEGIALFAERIRPEPRPVAGEDAQALGELVARRRQLVEMIGMEKNRARQARAKRVQRSLAATLKVLEAQLAALDRDIDGAVRGSPVWRATEDLLISVPGIGDVTARTLIAELPELGQLGRRRIAALVGVAPIDRDSGQWRGHRAIAGGRAGVRKTLFMATLSAIRWNPVIHAHYARLVDAGRPKKLAIIACLRHLLTILNAILRTKKPWQNA

SEQ ID NO: 247297 - protein, 415 aa, unidentified
MKTFAELTHFAGLDWAKDHHDVVIVDRAGQIVAQFTFPHSAEGWQRWRQCVQSYPALGVALETSSGPAVEQLLESGVTVFPMNPKSAKSYRERQAPSGTKTDRLDAWSFADGLRTDGHGWRPLAPLDPLVQELRLLCRDEVALTQQRTALVHQIQQALSQYYPAARHAFADWTAPYTWEFVRAFPTPEALVKAGRRRWENFLHSHKLYRPQTVDARLEVFAKANEFAAWPGITRAKSRLVLTLAATLLALEKHLEQYRQAIAQLFAEHPDHQLFGSLPGAGEKLAPRRLSEMGQDRHLFDDPQGLQCVAGTAPVSFQSGQVDRARIRWHCNKHLRYAVHLWADCSRKYCAWAQAYYQAHREKGNSHASALRRLGNRWLKILWTRWQEGQTYDSERHARNQQKHGSWLLQLHPAKA

SEQ ID NO: 247298 - protein, 449 aa, unidentified
MERRQPQVKNWEGLKVIYPNAAGLDIGSEEIWAAVAPASAPAAVRQFGTFTPDLHALADWLATCGVDTVAMESTGVYWIPVYEILEARGLQVYVVNARHLKNVPGRKSDIQDCQWIQGLHSVGLLRGSFRPEGEIVALRAYLRHRAALIEYRGAHIQHMQKALQQMNVQLTQVIADITGVTGLAIIRAIVAGERNPQQLATLRQHGCKRSEETIAKALTGNYRPEHLFALQQALALYDFYTEQLRACDVEIEHQFVNLKPIDDDLPPLPPTTKTDSHSKNGPAYDARTLLYQLTGIDLVAITGLNASTVQTIIAEIGCNVNAFPTEKHFSSWVGVAPHNDISGGKRLRSRTLKTNNRAGQAFRIAAQSVAKSDSAFGAYYRRMKARLGAKQAIVATAHKIARTFYFVLKHRVPFHDLGGEEYERLANQRERKNLQKRAAKLGMVLVSAT

SEQ ID NO: 247299 - protein, 343 aa, unidentified
MNITTVGIDLAKNVFQVHGVDERGRVVLRKAVKRAELAKVFVKMPSCLIGLEACGSAHYWARKLAELGHTVKLMAPQFVKPYVKTNKNDARDAEAICEAVSRPNMRFVPVKSVEQQAVLAVHRARQGFVVERTAQANQIRGLLYELGIVIPKGIRHLEQRLPEILEDAENGLPGASRELFARLFEHFRELGEHVRELESQIKAWHRESEASRRLEAVPGIGALTASALVASIGDAKAFRNGRQLAAWLGLVPRQASSGGKEQLLGISKRGDTYLRTLLIHGARAVMFHRLRRAEESDSWLMKLLARRNRNVAAVALANKNARIVWALLAHEREYHAGPIAAAA

SEQ ID NO: 247300 - protein, 390 aa, unidentified
MGGTWVGVDAGKGCHWAVMLDADGEVLFSRKVQNDEGDLSVLLEEALRLVPDPTWAIDQPGGTAALLLTLLWERDQKVLYVPGIAVDRARDAYRGEAKTDARDARLIAEQARMRKDLGSLRPTDELLVELKLLTAHRRDLVTDRTRAISRLRDILVSSFPALERALDPRGKGALVLLERYQTPDALRRSGRRRVEAYLKKRGVRNASRLAEAALDAARAQRVRVPGQELAARIVACIAGELLALNGRIDALDEELLRSFSAHPLSEILVSLPGMGARLGAEFLVAVGDPSAFATAGHLAAYAGLVPVARDSGKRVGNHRRMSGGNKMLKRVFYQSAFASLRTPHSRGFYERKRGEGKRHHQAVIALARRRVDVLFAMLRDGERFKPSRAA

SEQ ID NO: 247301 - protein, 304 aa, unidentified
MNGIGIDVSKRQLDVGTTDRETLQVTNSPSGFAELDAWLKKHPSNQIVLEATGGYEQPVLDFLHRAGHRVVRANALRARKLAQGLGQAAKTDRLDAYALAQMAALVELPAYQPLGPWQRKLREFVRARRQVMQALTVARQQQEMVGDRGLRRLLQANITRLQTLAERLGKQIAEQVAQQPELTVLKSMKGVGPVLQAVLASYLPELGHISGKAIASLVGVAPMSHDSGTMRGKRSIHGGRAEIRQVLYMASMSAMQHEPRLRDFYRSLRARGKEAKVAIVAVMRKMLVILNARVRDAQRGSTPA

SEQ ID NO: 247302 - protein, 389 aa, unidentified
MKIYVGIDIAKLNHFAAAISSDGEIIIEPFKFTNDADGFQLLVSKLESFDKNSIIIGLESTAHYGDNLVRYLVAEFYQVCVLNPIKTCQMRKNNVRKTKTDKVDTYVIAKTLMIQDNLRFVSFFDLDMMDLKALGRFRQKTIKQRTRLKIQLTTYVDQVFPEIQYFFKSGLHQHAVYALLKEAPSPKEIASMHMTHLANLLKVNSHGHFTKEQAKELRVLAQKSVGANDSAISIQITQTIQQIELLDSQLEKIEAEMTDIMKFNDSVIMTIPGIGYINGGMILGEIGDIHRFSNPNKLLAFAGLDPSVYQSGNFQAKTTRMSKRGSRVLRYALVNAAWNVVRNNATFKAYYDAKRAEGRSHYNALGHCAGKLVRVIWKMLTDEVEFNLE

SEQ ID NO: 247303 - protein, 372 aa, unidentified
MEKFSKYVGLDVHKDTIAVAIAAEDSEVRFYGEIANNPTAIIKLVKLLSKEGELVSFCYEAGGCGYKIYRQLTAMGKDCIVVAPSLIPRKAGERVKTDRRDSINLARLYRAGELTPVWVPEDEQEALRDLTRAREDMKHFERQAKQRLLAFLLRHGWVYSGKARWTHAHYRWMETVKFDRQAQQIVFQEYKDIVNSFGTRVEEIENQMQIHAKESLSWPVIESLMALRGVNFITAFTLIAEIGDLQRFASAPKLMAYLGLVPSERSSGNSVRRGGITKTGNSHVRRVLIEAAWTYRFAARRTPIIQRRMDKVPAAIQEISWSAQKRLCQRYKTLQTNGKLKVQVCTAVARELTGFIWAIGQATPMMKNTPTN

SEQ ID NO: 247304 - protein, 385 aa, unidentified
MVTGITAYKRRSQMNNTTVYVGMDVHKESFTLCAYTLEKEKGSYSRRTPADYKEVLKYLEFLRTVYGNDTIFVCGYEAGCLGYTLYHQLTDHHVDCVILAPTTMLEQRGKKRIKTDKRDAEIIGKCLAQHNYSPVHVPTASDEEVKEFLRMRDDHKLALKKVKQQILAFCLRHNYRFDGNSHWTAAHINWLKSLTPEALYKEILDEYLLTYTILSDKLERLDKRIEELAAKDEYKEAVRKLCCFIGVKTHTALSVIVEVGDFKRFASAEKFASYIGLVPGEASSGDGQTRLGITKAGNRHVRMLLTEASQCYSRGQIGYKSKALKARQDGNTPQVIAYADKANERLRRRYYKMVLSKCKKHNVAKTAIARELACFMWGMMTDNIA

SEQ ID NO: 247305 - protein, 362 aa, unidentified
MTKSTTIIAFDQHAATTVAAVLLPADRTPALHKLTSDIPTILRFLERMRRGHAVQCCYEAGPCGFELQRALSGRGIRCDLIAPALIPRRSGDRIKTDRRDAAQLAVLYRAGALTAIHIPTEQEEAARDLLRCREDIRADLLRARHRLSKFLLRHGRRFTGTKKAWSKRHDVWLRAQAWPIPALDQTHRAYLRAVDDALARLRSAEEDLRALVTLEPLQARVQRLRCFRGMDDLTALTIAAELGDPRRFASAPRTMAFVGLVPSEHSSGTRQARGAITKTGNAHLRRVLVEAAWHYRHRPFVGAALRRRQRGAPDAIVAQAWTAQDRLYRRYHRLAGRGKPHQQVITAVARELTGFVWAALVQ

SEQ ID NO: 247306 - protein, 361 aa, unidentified
MNATTAAIDLAKNVFQVALADETSRVLEQHRLTRSQFERFFDNRSVARVIMEACGSAHHWARMFAARGIEVMLLPAHYVRAYVRRSKTDAADALALLEAARCADIVAVKVKSVEQQSLQALHRTRSLWMGTRTSRINALRGFCRELGLHVPVGARTGLEAMTRAVTDDQSPIPPLLRPLMHQLIDEIRLLEVRVAQLERQLAQVVRESAPCKLLMSIPGVGLLTATGILAATSGSVAHFKSARHFASWFGLTPKESSSGGTRRLGRISKMGDCYLRMLLTHGARSVLRAAKVAKMRGQQLLGVRQWAIELQARSNHNKTACALANKMARICYAVLRDQTPFGQPAARLGKKMQRQSFELAH

SEQ ID NO: 247307 - protein, 354 aa, unidentified
MVTLGASQTNPDHKGGPNVERQYVGIDLHRRRSVIVRMTPEGEKLEMVRIENDPVAFSLELAKAGPNPEVILEATYGWYWAADHLRECGGRVHLAHPLGNNWGHRRVKNDERDAADLADLLRLGRLAESWIPPAEVRELRELVRYRAKLVALRSGLKAQVHAVLAKEGVRVPMSDLFGVKGQVLLDECRLGAAYALRVESLRDLIEVYDGEVEMLEGHIAKTLDGHAGYQAIQAIPGVGPVLGAVFTAEIGDISRFPAADKLCCWAGLTPRHRESDTTVKRGSITKQGSKLVRWAAIEAISRNRGGTFLQAASHRIAERRNNRNIGRVAAARKLLTLVYYGLRDGQIRCLADAG

SEQ ID NO: 247308 - protein, 346 aa, unidentified
MKSMHYVGLDVHKKTIAYCIKDGQGGLVGRGEVGADRVALRSWLATLKRPWEGALEATLFSGWIYDFLQPHAAALRVAHPAMLKAIAASKKKNDKVDAEKICDLLRVGLLPECYMAPAPIRELRRLLRYRNLIVAQAVRMKNKIAGLLMEVGASYNKEKLHRKGYFNELLQSGLGETPESVKEMLRLSRNQLEIFTAIQKRLVEGLEKHPLLKERVGRLMSCDAVGLITALTWALEVGDPQRFGSVRQAISYCGLCSAQDQSAGKDKRGPLSKMRNKHLQTILIEAAKLAPRFSPRLAQVRERELARGNKNRATLAVARRIVAYLLAVDKSGKDFERREPIAAQAA

SEQ ID NO: 247309 - protein, 414 aa, unidentified
MKAEYKTSLREKRYIGLDVHKQYITVGGMNAQQEIVLRPRDVAMERFVKWATENLRKTDEVVLEASTNTWEVYDIVVPLVKRVVVAHPAEVKQIANARVKTDSQDVNRLVRLLIADLVPEVWVPPIEVRELRALISYRWRLVKMATAIQNRMHSLLHRHNIQAPEGKVDTGENRAWWETLKLSDLETLRLKQELKSLRMVREHILEVEKELGGLSTSQRWRAQATRVMQLPGVGVIVTMTLLAAIGDIRRFETPKKLVGYAGLGAGVHDSGQTHRDKGITKSGRKELRWALVEASWQAIRSNPRLRAQYDKLCQRKHPNQAIVAIARKLLVTLWYLLSRNESYIPSTDEDLAYKMLTWAWHMDQTAKRGLTNQQFAKYALLQLGRGEHLTRILKGGLPRRIAPTEEVLALCTPP

SEQ ID NO: 247310 - protein, 356 aa, unidentified
MSKIKQLNFEGQSIFCALDVHKASWRVNIRNDEFELEDYSQNPNPDSLVYHLNKRYPGANFYVAYEAGFCGFGIQRRLQSLGINCIVVNPSDVPSSDKDKKRKNDKIDARKIGRELSKGELEAIYVPGIEMEHVRSLVRQRGRLVRDQTRCKNRIWHLLMFSGLELDADKPKQYWSRHFIEVLKKLPCGSHPLRLALDIAIEEYLAVRKLLSMATKQIRALSQQPSFAAIQNLLQSIPGIGIVNAMIIMSELQDMKRFKTLDKLCSYAGIIPDTSSTGNNEKVKGITNRSNHYLRPAIVESSWVIIRKDPAMLMLYKKYCSMMIPNKAIIKIARHLLSRIRYIWLKQQEYEIGIAG

SEQ ID NO: 247311 - protein, 456 aa, unidentified
MGKKKISLEVADPNAAGIDIGSKSHWTAVGQNAQDVKEFGVYSEDNYGLCLWLQEHGVETVAMESTGTYWQNLFSSLMAFGFEVILVNGQQTKNIKGKKTDIKDCQWIQKLHTLGLLTGSFLPDGTTDIIRTYSRHRQGILEQSARTVLKVQKHLRLMNMRLDVVVKDITGLTGTKIITDFLNGQTSGKELAKNRHYNCRKPESEIAKALQYNGRDDHFFALRQEWATYLHLQGQITQIDEQIKKHLEDVIDNDGDKKQHIPSEKPHKRKNKNTIRGLNMNQVSYQYFEGVDLMAIEGVNDATIMAIISEIGLEGIKKFASAKQFTSWLRLAPNNRISGGKVLGHHLPKGSGRLKIAFRLAANAIGNLKEGHLSDFFKRINYKKGRATAVSATARKLAVIIWNMLVKGTPYDPPTEYLFLDQKRKLRLVGRIKKNIAKFELRPEDVGFGNMMNIST

SEQ ID NO: 247312 - protein, 404 aa, unidentified
MWYVGLDWADTHHDVEVQDETGKRVGARRFAHSHDGLNELKAFLLGIAASPEELACIVETNHGLLITFLLEAGIPVYPVNPKSANQLRKAAGAKTDRIDAHLLAKLGRFDLAELRRLEPDSLSVAELKTLTRDQDALIQTQTRLVNQLTACLKEYYPAALQLFAKVQQRSTLLFLQAYPTPQAALAASVEEITATLRTGKHTNPTKAAPKIVAELHRPQLLASEVIVRAKSRLMLALVKQLLVVIEEIASYDKAIRPLFLSHPDQELWSSLPRAGKRLAPRLLAEWGDDRSRYADGTSVQTLAGTAPVPYESGNYAKAHKRFACSKPLRNALHQFAWQSTRQEAWARDYYQRKRAQGKTHSMALRALANVWVRIIYAMWVNKTSYQTTTFEAAQRAHAPRQRVA

SEQ ID NO: 247313 - protein, 409 aa, unidentified
MNDQTHPVERVIGLDAHPDSFTAAVLRGCTPAQAWTQKVFNQVPLAQLQSWARKHTTPNDLLVLEASGNSFHLVRVLAALGRRALVLESTQLGKLKEAHANNDKISAVRIGKAYLAGTAKEVWVPDPKTQERRDWFHAHQKAVRRSTQMRNRLLSYLNDHGVRLKKGTHLVLEPELAEQQLRQSADWSFRQWQVIQGMLMELRHAEEQRRHWRSLIAQEVAGDPVLLSLIRLCGVRDLVAFALGAIIGDIQRFAEPRKLVKYVGLNPAFDHSGEGKWEGGIGGHGRKDLRSLLIEAAHSILRSRSPLAQWGKKLLGRKGSVNLAVAAIARKLTVAIWYLLNGRWTALEQIDKRLSMKVGKIITHIGAAPLQHLGATRQQLRAQICQSLKTTRDYLLDPNKKFIPKLQRS

SEQ ID NO: 247314 - protein, 386 aa, unidentified
MKRNDLSRSLVAFDQASTMVAVVELSFRSWLVAGLVPGLTRQPLKKLGPDAQALLTLLRRWQGEATKAGSTINRIVVAFEAGRDGFWLARWLRARGIEAYVIHPTSIPVSREHRRAKTDRLDTGLLMRAVLGWLRGEPKHCSMAAIPTIAEEDARRPNREHQTLVQERTRIVNRMKATLIRFGIRTFNVKLRKASDRLAVLRSPEDEPLPPNTGAELRRDMARLQLIRDQIKVIEEARLQQLKHAPRKGTHPMLLMLAEIIGVGVETADMLVHEVLSRKLRDQRAVARYGGLTGAPDESGTKRREKGLARAGNARVRRGMIQLAWRWLTHQKNSELAQWYQTRTTGAKPSVRKTMIVALARKLLIALWRYVTTGVVPAGAVLRAAT

SEQ ID NO: 247315 - protein, 417 aa, unidentified
MRIVRPICCGADIHKDLIVATIATTNQDGITEYIQSSFSSQNFDLVRLKAWLIEHHCFEIAMESTGKYWIPVFNVLEGEIKVFVVHPKYTKAIKGKKTDKKDSKWIADLFKHDLLKFSFIPPKEIRELRELSRYRIKLIAMRSSERNRYQNSMTISNIGLASILSDPFGKSSRAVMKEVIRSSSVTEEKISKLLERNAKKKVKEVLQSLVGSHIESDQRLKMNIASQHMDQIDSHVRRLETEMAIRCIPYATLINLLLDIPGISYLSAMTISAEIGTDMSVFETSKQLSCWAGLAPANNESANKKKSVRISKAGSYLKPLLVQCALAAINSKSNPYYRIKYNRIKKRRGHKKAIIAIARMILVNIYHILSTGEVYSPCDMEQIINPKPVKKVMTIQNAIEFLQSQGFDTSKLISSSS

SEQ ID NO: 247316 - protein, 420 aa, unidentified
MDRAVTDVVHPVACGLDVHLAVVVACLARSGPKDGPGYDERSFPTTQRGLRELREWLLAAGCEAVGMEATGVYWIPVYAALEGHLSLVVGNPNHMQNLRGHKTDRKDAKWIAGLIRHGLIRPSYVPTREFREARELTRSRRQLINARTSIRNEVSRLLAHQGIALRTAEGLSNVFGASGMAILEALAEGRSILDDLPKLLHRSVKHKAGILTAALEAGLGEVSRQLLAMHLGRLEAVEEDILKVEHLIAAHLAPHRDKLDLLMTIPGVSYLSACVILAELGVNMAQWPTEKHLSAWGGVAPGCRESAGKHRRAATRKGNPYLCTTMVECAGAAVLKKGCHYQSKYRSLCARTGSKMKARMAIARKLLVVVYHILTNLEPYREPEARIPTPRSRQRTIQRHLKELQKLGLDVQLTESRDAS

SEQ ID NO: 247317 - protein, 414 aa, unidentified
MLLLDSSEVESTAADGVFIGLDWGNSHHQLCILDAAGRMVHQGKFAHDIAGARGLTERLHRHGPVQGIAIERSEGLLVETLQQQGHRLFCVSPKMSARARERYRLAPSKSDAFDAFVLADSLRHEHRHWRPLAAPSSLLAELRALTRDRERLIWNQRDVENQLRAVVLAFHPGVLHLFSSLDRDITLAFLRDYPTPAHAGRVGVARMAAFCARHGYSGRTRPELLVERLRANLLTASAGTTAGKAFTAALFVEQLELLNTQVRAITKRIRERLAEHPDAAIFLSFPGMGEVTAAIMLAEMGEDRARFPTAGVLLAETGTAPVTRSSGRSRTVKFRYAANKRMRHAIDWWAFVAVRENDWAHEAYWQARARGQLHNRAVRGVGARWTRILWRCWTDHTIYDSALHLKGPPASITA

SEQ ID NO: 247318 - protein, 361 aa, unidentified
MKKPSQHLIAEVPRRQAKVEITIGIDLGDVWSHYCTLNQDGEVVDRGRFRTTPKAIEKWFTDVPSARVAMEAGTHSIWISAQLQELGHEVIVANVRELRSISHSDRKSDQVDAEKLARYARLDPNILRPIAHRSVEQQQALTLIRARALLVRLRTAAVNAGRGLTKSCGHRMPASATTCFAQRSLAVMPPGLAQALGPVLQQIAEMTVKIKLYDRQIQQLGQTEYPETQALLKVHGVGHLTALTFVLTLGSKERFGRSRDVGCYLGLRPRRSQSGDHDPQLGITHAGNAYLRSLLIECSNHILRPHGRDSALRQWGLHLAARGGKQAKSKAVVAVARKLAVLLHHLWSTQATYMPFHEQAA

SEQ ID NO: 247319 - protein, 401 aa, unidentified
MDPQIRVGIDVGCKAHRVGIANPDGKVLEEFDISHTAAGFCDFFRRIDHHKQELDLPVAVAMEGFNGYARPLDRMIQEHGYTLYNVNNLKLARFKEVFPGAAKTDAIDARKILELFHLKDHLPLAKDALQKVVSAPLVNDKLKRLSRRRRQLVNEKVRVASRIQSDMQAVCPGLLAITNNANNLKFLRFLTYRDDLTQLARLQSTTLLKIPGVGQNYARIIQEWQRKASFSAEVEYVGPMIITDARRILELLDQVHILDEAMAALADQSELARRIGSIQGFGKTCIAELAGEIGTTERFAGERSLALYVGMSPLSKDSGQHHGSKCPRSVNHRAKAAMMTAVAHHIRCVPESRAYYDKKRADGKKHNQAIRALGRQLVRVLWSMLKNERDYELREVIPSVT

SEQ ID NO: 247320 - protein, 345 aa, unidentified
MDLGDKTSRYCVLAENGERLSEGSVATTRKAMAQKFAGMRRCRVAMEVGTHSPWLSRWLNGLGFETIVANARQVQLISASSRKNDRMDAHLLARLARVDPLLLRPIRHRSEQAQADLMTIRIRAALVEARTSLVNAARGFAKAQGDRLPACDADAMGVEKMEALPAGMRERLRPLLEQVESLTEKIKTLETKIEQIARTEYPETALLRQVSGVGTLIALTFVLTVEDRNRFQKSRDVGCYVGLRPRQSESGQSQPQLRITKEGDRYLRTLLVQGTHLILNRRGPDTDLKRWGLMLAERGGKNAKKRAIVAVARKLAVLLHRLWVTGEVYEPLRNSQARQSSQQAA

SEQ ID NO: 247321 - protein, 381 aa, unidentified
MKNSNMKRTGQTVTPSVVADRSKAKVVPSLLPKSSNSCLGYPSPHVAQGRASLEQTKIIKEDWSLEAPLIFVGIDVCKAQLDVAIRPTAHNLSVTNDKAGIQTLVKHLNRLQPSLVVLESTGGLERQIMLALISAEIPAVMANPRQVRDFAKATGQLAKTDKIDAAVLAHYAEAIRPKPRPLPDQLTLKLRALTTRRRQIIDMIVAEKNHLATAPQVIKKRISAHIAYLEQDLDGADQDLDRFIQNNPLCKENQEILCSTPSIGPVSSRTLLAELPELGTLGRKQISALVGLAPFPRDSGTLKGRRTIWGGRASVRGVLYMATLVATRCNSIIRDFYKRLKAKGKPFKVALVACMRKLLTILNAMIKHKTRWSENFSHQTT

SEQ ID NO: 247322 - protein, 341 aa, unidentified
MNKSNTISIDLAKSVFQVAVFNRHGKRKLNQAMSKKKMLTVISQHPGATICIEACSASHYWGRTFQSRGHTVKMIPPQKVKPYRCGNKNDANDAIAIYEASLRSDIHSVPVKTPEQQDIAMLLSLRQSYIKQRTAVSLRIRGYAAECGISFPQGANKLRELLPFVIEDAENELTPTTRFVLRELHAQLLNLDGPIERVESQLIDFAKQIPACQLLITLRGVRWVIASAIFSRLGDASAYRNGRGASASLGLVPAHTGSGGKNKNHGISKSGDKTLRSLVVHGARAVVANIRDKEDRLSCWIRNLLERKSFNQVVVALANKTIRMACAMLKSNQSYNETLIA

SEQ ID NO: 247323 - protein, 332 aa, unidentified
MTTHTHDRTDTDLAPLFIGIDVAKGKLDMARSDSDDVVTFNNDDAGIQQLARALKPAAPKLIVVEATGGYERPALNTLLDVGLPVALVNPGRVRHLAKALGILAKTDAIDAKVLVEFARHAQPRIAQKTPEKQAELDALVTCRRQLCKTRTEQSNRRDVTRSKHARKAIDAVLKTINKQIDTLDEQIRKLIDADHHFNRMDKIIRSVPGVGAVLSATLLASLNELGATDRRQVGALVGVAPFNQDSGRLQGTRSIRGGRADIRSTLYMATLAATRCNPVIQNFYQRLKAAGKRSKVALTACMRKLLTLLNAMIREGLYWHQLETVQKLANNP

SEQ ID NO: 247324 - protein, 363 aa, unidentified
MDKITHIGLDVHKETIAVATLRPGATLCEERVIPNTPEALRKLFARMGDPSALRACYEAGPTGYDTQRLLDSLGIACDVIAPALIPRRPGVRVKTDRTDARNLARLHRAGELIPIRIPTVFEEALRELIRTREDLKNDRRIARQRVKSFLLKHGRQYPRTTAARWSGAFAEWARSQKFSEPAAQAAFHYLLAAEETRRAQLVAIEAEIMKAAEEPELAPGVARLRCFRGIDTLSAVTFLAEVGDFRRFASAASFMAFTGLVPSEHSSGHSIHHGPITKTGNAHLRRVLVEAAWAYRHRPAVGETLAKRLQGQPPVVVAYAWQAQCRLSARYRVLAQKKAHNKAVVAVARELAGFIWGMMTDRM

SEQ ID NO: 247325 - protein, 318 aa, unidentified
MPQKTRFVGLDVAKSKVDACIRSEGLRLSAPSTPEGRAGLVAWVRANRVGRAVMEASGGYERGWAEALRAAGVEVRIVDPKRVRHFAKAAGRLAKNDPIDADTIAWFAEAFPDRQAQPHDPARDEIDRLVAARTALKDAEDRIKQQGEHRPPAVVAKALAAIAKTIRAELRKVEGAIAAKIKANPGFARRAEIIASVPGLAAQTAAGVIAWLPELGHVTNQAAAALIGAAPYDDDSGGRKGQRHIKGGRRKLRNLLYMPVMGAATRHNPMLKAHYQRLRARGKEAKVALIACMRKLIVILNTMRARDQTSNPPVRAAR

SEQ ID NO: 247326 - protein, 448 aa, unidentified
MGQGKRPASRGVARRNAKLKALRGLVGKDRAIVAVDLASQRQAAVVCDHDSVVLARRMFTGSAWCISEILAWAGPVAAKAGFAGLVLACEPTGHRWKPLVVTARAGKIPAVCVQPLLVRRAREGEDFTRSRSDFGDAVIIARLTAELRCYLPYLPEGPWARLRHLGARRESLVERCVAARGQVRDLLECAWPAVLEAAADPLESLTWRAALAVSVDPVVIAAMSEQEFLAALREQLVALGGKKVWRRIAVAVQAAAANPSGIAAERDAITERAAFAYQDWMSTLVALADIEARMLGVLDGLGLTSLVTTIPGLSAVGAAVILAQTGDPARYDTPRAWVKHAGLAPQANESGKYRGKTRHSGRGRPGLRTAAWRAIWGALRCNQVYAARHGQLTTRDANRLTGGQAHAALAAALLRQLHVVVTRRVPWDAAIASGAAAPDQVTVVVPAA

SEQ ID NO: 247327 - protein, 354 aa, unidentified
MMIIGCDYHPAFQQIAFVDTDTGELQERRLQHREEAEKFYRNLAAQGMKVRVGMEASGHARWFERLLAELNFELWIGDAAEIRAKRVRKQKTDRQDAQLILRLLLENRFPQVWVPNWENRDLRQLLWHRHRMMQARTRIMNQLQAVALNEGLRCKKKLWREAGREQLESFRLAPWASRRRHDLLELLDRLTPTIAELTQAIEQEAEKCPAAQRLQTHPGVGALTALAFVLIIGRADRFECGKQIASYLGLVPSEESSGQRRRLGHITKQGNSLLRFLLVEAAQVTVRSDQEWRNRYFHLVLRRGRKIAKVAMARRLAVRLYWMWRRGWNYEQLTKFGSHAGEPGNPDGVQSSTE

SEQ ID NO: 247328 - protein, 348 aa, unidentified
MNQFIGLDGHKNSCTFVVVNEKGKVKRKAVLPTDEKALVEFVKSIPGRRHLCIEEGTQSQWFYEIFSDHVHDLAIVQGRKSPGNKDDERDARNLAERFRTRDLGHRVQKVPDSLATLKDLVRSYEMLNTDLVRVKNRIKHLYRSRGIAYSKTGCPFCTGRGGCQKPGFHQRLQLLRTQQESLKPLKAEAQKAMVTEANRHPMTRILQTAPGFGPVRTAELLSIVIDPYRFRTSRQFWCYCGLAIVGRSSANWVQKPNGELSRVKINHTRGLNQNFNHMAKAIFKGAAVTVLTSMPTEPLRADYDRLLANGTKPNLARLTLARKIAALVLAMWKNKEAYNPGKYRLTSI

SEQ ID NO: 247329 - protein, 340 aa, unidentified
MELYGGIDLHSRNHWLAIINEEDRRIFKKKSPNDPQIILRTLKPYKDDLVGIVVESTFNWYWLVDLLMEEGYKVHLANPSAIKKYEGLKHSDDKHDAFWLAHLLRLRILPEGYIYPKQQRPIRDLLRKRGHLVQLSTSLILSLQNIISRNCGFKLNVNEIKKITENRIDPLLAGQEDLQLSGMVSKETIDFLTRKIRQIETAVLNKVKLKKPFIYLQTVPGIGKILSLTIMLETGPIDRFPKVGHYVSYCRKVPVKWTSNSKAKGKGNKKNGNKYLAWAYSEAAEFARRYDPYARAYYNRKSAKTNFMVAHSALAHKLSRAAYYVMRDQVPFDHKKLFAQ

SEQ ID NO: 247330 - protein, 403 aa, unidentified
MNAVGIDVSKKKSTVAIFQPGEKVILQPRDFRHTQSDINSLIQIIKDLDGETRVCMEHTGRYYEPVATWLSDADIFVSAVNPILIREYGDDSLHAPKTDKADARKIARYALDRWAKLKQYGHMDETRNQLKTMNRQFGFYMDQKTAMKNNLIALLDQTYPGANAFFDSPARSDGSQKWVDFVYTYWHVDCVRGKSLKAFTEHYMNWCKRKGYNFSAAKSEEIYNSSADLIAVFPKNVNTKMLIRQAVELLNATSRTVESLREEMDRTAATLPEYPVVMAMNGVGPTLGPQLMAEIGDVTRFKKRGALTAFAGVDPGKNESGQYTQKSVPTSKKGSPHLRKTLFQIMESLIKRSPEDDPVYAFMDKKRAEGKPYYVYMTAGANKFLRIYYGRVNEYLSNVSESE

SEQ ID NO: 247331 - protein, 504 aa, unidentified
MKNQPPKSSKKGSRQRTSQKPWSEMNRKQRREMQRKIRSQDLNLEVLHPDAAGIDIGNEVHYVAVPPNRSSEAVRRFGCTTAELRAMTEVDWLKQCGIQTVAMQSTGVYWIAVFDILEEAGLEVYLVNARETKNLPGRKSDVQESQWLMKLHTYGLLRNSFRPPQEIRTLRTYWRQRNDLVRAAGRHIQRMQKALTQMNIQLANVLSDISGKSGQAIIKAILQGERDAGELAALCNGRVQASQEEVAGSLEGNWQDDLLFVLQQEQDGYEFCQTQMAECDRHLEQCLQQRADRSQGASLPADKRKERRKKKKGNKPQFDLRTALFRMAGTDLTLMDSIDVMTAMTILSEVGWDMSKWKTEDHFVSWLRLCPDNRISGDKIIGKGRLPSNYQRGAFENAISEVDVVVDTVGGEVLEHSLGKVKPGGVVVSIVSTKPLPQRPDLRSVFFYADVTTARLNLLTKLFEERKLSARVGSILPLQDARTAHYMLAGAPHRPGKIVLEMAA

SEQ ID NO: 247332 - protein, 345 aa, unidentified
MKKSLYCGIDLHSNNAMYVVSDEQDKMLFKKRLANRLPIVLEALEPFRKRLKIVAVESTYNWYWLVDGLMEAGYPVSLANPAAIDQYDGIKDANDLTDAAFLAHLSRMGILPTGYIYPKEDRPVRDLLRRRTLLVQKRTSIILSVQNMVLRHTGQSMNWRQIRKTGTKTLSALLDNHDCLLFVAYQQIDLIEQLNEKVELFEDKVLEKVKLRPDYQVLLTMPGVGVILGLTIMLETGTIDRFCKPGDYSSYCRTVRAKRTSNGKKKGNNNSKNGNKYLAWAFVEAVHRALSCCPRAKQFYERKKAIAKAKGGGTLATKALAAKWSKAAYYMMKRQEPFDLARVFG

SEQ ID NO: 247333 - protein, 348 aa, unidentified
MTMIGGLDVHRQQITFDYVDDEGLVHWGQIRPATRKTLRDWLAKHCPDGDGEFAMEGCTGWRYVSEELAAAGVRVHLGDPAEVAALRGPKKRAKTDRWDARLLRTLLLEGRFPESWIPPAHVMEVRTLGRLYCALMDERRSWQQRIHAQLFHQGCPPITALLSQAGREALAAAELSAAGRQYLDTAQRRIDELNADIAPLRAQLVDFARHQPGCQALQARLYGVGWLSAAIIWAEIGDARRFRSSDQVVRFAGLDITGYSSDAKRAPGHLARQGSPERRWAAFEAAKCAARPGSPDYVDYHQVAARKEGKRPTLAVERKILRRCYHILRELGATALAAPTAKPNKTAA

SEQ ID NO: 247334 - protein, 349 aa, unidentified
MRHVGVDLHKTNFVACFIEADDTRRLETYSLTGAGLARFKRQLDSEDELAVEATQNVHYFYDQVKAHVARVVVVDTYRFGVIARSKKKTDKADASALARFLKLGWLPEVPVPSEQVRALRQLLQARTTLVSMRTKLKNMAHAVFSRNGVALPRAAFASAAGRARLAGRDDLPAADLLVLGTALRQMAQLDAEIKAVEEEVVRRGKSLRGVSRLLQVHGLNLLSAISLLAEVGDIALFDTSKQLVAYAGLATSTKQSSETVRHGGITKRGRKRLRTVCIQAVLAMVNRTETPLMSFYQKKKREKGAGKAICATARKLLTVIFVMLKKGLDYWYLEDRLYNRKLRALNAAA

SEQ ID NO: 247335 - protein, 411 aa, unidentified
MKQQFDLFVGIDWGSEQHRVCVVNPDGDIVDQKWIEHSGQSLAELVTWLRSKTSASPGKIAIAIELPRGPVVETLMEQGFAVFSINPKQLDRFRDRYSPAGAKDDSRDAFVLGDSLRTDMHCFHAVRLDEPAVIRLRELSRLDEDLRQEQNRLQNQLREQWHRYFPQLLKLSSAADEPWVWDLFQAAPLPAKAAKLPESRIQRILSKNRIRRIDAPKVHAILAATPLAVAPGAAEAASEHALLLLPRLRLLQQQRGGIAKKLDVVLEQLATPDQTSGEPVEHRDAEVLLSLPGVGRQIAATMLGEASQAIAERDYHGLRCYTGAAPITRQSGKKKIVLMRQGCNERLRNALYHWARVSVVCDPKSKAQYAEMRHKGQSHGRALRGIADRWLDVLISMLTHHTLYDPKRRAA

SEQ ID NO: 247336 - protein, 342 aa, unidentified
MDKFDAAGLEVSAKVLVVALQTDGQLRSSEFPNTAAGHKQLVRYLRHYSRRLRICLESTGLYGLDVALALQGQEGLEVMVANPRSVRHFAQAMMKRSKTDPLDAELLAEYSQRMPFQAWQPPSVPGRRLCAVARAIHQLTEMSTMQKNRLHAAGSTQTTPKIVVTELRRNLAHQQRSIKRLVREAVRLVQSDPLLQKRFQLLLGIGGIAELSAVQLLGELVLVPPDCDVRQWVAYAGLDPRQYKSGESVQKKVRISKAGNKHLRRALYMPALVAVRHQPYFRAFYQHLRAKGKLKKVALVAVMRKLLHGIFGVFKSLQPFDAAKLFSSSIAVPDLTKKKLAS

SEQ ID NO: 247337 - protein, 431 aa, unidentified
MQLTGRPGRKGDRGLETFAWYVGIDWGSEEHRLCLLDASGQVRGERTVAHTVAAVHEALQWVRTCTGATADAIAVGIETPRGALVDTVLEQGFRVFAVNPKQLDRFRDRFTAGGAKDDRRDARVVADALRTDPRAFRAVRPEDPQVVHLRELCRIVEELQVEEARLANKLREQLYRVNAPWLTLSPAADEPWLWTILAETPDPAAWTQLPRRRISPALRAHRIRRLTAEDIVTTLRQPTLTVARGVPEAVATRIASLVPQLLLVHQQRTTAVRQIDRLLETLAAVDPSDGEPHEHRDVEILRSLPGVGRMVTATMLSEAAGPLADRDYLTLRTYTGVAPVTKRSGKRVFFVQMRHACKWRLRQALYHWARISIQHDDATRVYYEALRARGHGYARALRSVADRWLRILVAMLTTRTLYDPARPRTLVSVPA

SEQ ID NO: 247338 - protein, 410 aa, unidentified
MDVFCGIDWAEDHHDIAFVDRDGRLLARARVSDDAAGLARLLELLAEHGDSADDPVPVAIETPRGLLVACLRAAGRRVYPVNPMATARYRDRHSIAGRKSDRGDAVVLANILRTDMHAHRPLPADSELAQAIAVLARAQQDAVWDRTQASNKLRSHLREYYPGFLAAFAAAKGGITRPEARAVLAAAPAPAEAAKLTLAQLRALLRKAGRSRGIDAEAERLREAFRAPQMRQLPLVEQAMGKQALALLRKLDAACAAADDLEQAAIESFNQHPDAGIITSFPGLGPLTGARVLAEIGDDRSRFQDARGLKAYAGAAPITRASGKSRSVTHRKVKNNRLAAAGYTWAFSALTASPGARAHYDRRKDTGDRHAAAQRNLFSRLLGCLHHCLATGQHYNETTAFPAQATPAAA

SEQ ID NO: 247339 - protein, 373 aa, unidentified
MPKYSTAFGMDVHLRSTTVCALDADTGEAVTRRFPGNPWGEIAGWMDGFPGPSLAAYESGYLGFAPQRELAGLGVECVVAAVSKIPRSAADSASKNDRNDAARMAKAILAHDISPAWVPSPEVEGIRDLAGAYDGATARLATAKQRLLAFLAKRGFVYGGTTPAGNPRKYWTYDFLRWLDKVRPEDDGGVRALAALRNEVEAAAEARADLLSEYRAAVDASPIAAEVAALQSIKGCAFALAAAFSAEVGDFTRFRSGRQVTAYFGLAPSQRSSGDSVRLGGISGAGNALVRKLAVEGSWCYAAARHQPKLMPRDTGVPLEIRMHGRKGSERLLRRREEMLARGMPAAKANAATAAELVRWLWALGMMCREGAE

SEQ ID NO: 247340 - protein, 319 aa, unidentified
MKDYTGKKIYLGIDVHKKTYAVAALCEKIVIKKATLPASPEGLVTFCKKFFPGTVIESAYEAGFSGFHLHRVLEKSGIKNLVVHAAGIEVATGDRVKTDKRDSLKIATQLEANRLKGIHVPSEEREEKRALTRLRDTIVEHRTTTANQIKALLHQHGLISPTAKKKICPKWIESLKTLPMRAGIRYALDHLVDVWQQLTVRIKEINVEMAKQAAEDHALEMVYRSTPGIGPVGARILANEVEDMSCFDNERQLFSYTGLTPSEHSSGGHIRKGHISRQGKTVIRRVLVLASWKAIQQDAQLRMWKKVIFNWTLAIRKIS

SEQ ID NO: 247341 - protein, 356 aa, unidentified
MLYSGVDLHRRLVVICTVDESGSLLARKSMKTQPELITNYFHQWPDDHRAVVECTTGWYWFCDLLHSLGIDVVLAHAKYLKAISYAKVKTDAVDALTLAQLLRMGYIPEAHQMPPEYRAIRDLLRQRMVMEHKRTNIIQRIHSILAQFNITSLPVSPYQTAFADFLSSCLIPEEYRMTLSMYHQQCVQATEHRKQLEKYFKARLRPTPAVQLLMSIPGIGDITGSIIAMETGEIHRFADAKHYCSYCRLVPGAKDSGGKHSHRSGSKDGNQYLKYAFTEAAIKAMMFYPEIKHFAARLQRRATKAIARTVVAKELAKITYYVLTRQQEFKTFKGIEINKLRDWPRARKPVRLTGGA

SEQ ID NO: 247342 - protein, 397 aa, unidentified
MYIVGIDIAKRKHEAAVIDGEGAVIIKPFSFTNNCSGYNRLLAMLTKAKLPLDEVSFAMEATGHYWLALFTRLQKEGFRVQVINPVQTSSIRSFYIRQAKTDPRDALLIAEVIRFGHFSESTLHPENIYELRELCRGRHAIVSMQADVKRKVVALLDQVFPEYETAFTNLFSDTSMAILQTCPTPKELSEMPLEELCHLIEVSSHKRFRMAKARELQELAHNSFGFAMAGDVFSTMIRLYAKHLVFLKQQVQEMDRKIAEIMDTLDTPITTITGIGPTLGAYILSEIGDISRFSSAAKLAAYAGIDPTMRQSGEYNGVRNRMSKRGSPYLRHAIWLAASSAVLHDPALKLYFQKKRDEGKPYMASVGHACRKMVSIIYAVMRDNKAYTPCIPNEISA

SEQ ID NO: 247343 - protein, 323 aa, unidentified
MESTERFVGIDLAKDHLDLAVRPTQEQWQAPLTALGIADVVSRLQEIQPILVVMEATGGLERPLVLALVAAQLAVVVSNPRQVRDFAKAAGRLAKTDQIDARILAEFAQKMRPAVRPLPNAEALVLSATLARRTQVLEMLTAEHHRLGRAVPQLRDPIQRHLDWLTQDLATLDAQLAGLVQAHPEWEGKESLLRSVPGVGRVMATTLLADLPELGRLDRRQIASLVGVAPINADSGRRRGKRIVWGGRARVRAVLYMSTLVATRFNPTIRAFYQRLCTAGKPKKLALTACMRKLLTILNAMLRDKTTWETTIDQPVPTSMIVS

SEQ ID NO: 247344 - protein, 367 aa, unidentified
MSILYIGLDVHKETVAVAMAEEGRRGEVRSYGTIENTPAQIEKLIKRLAKAGQDLHFCYEAGGCGYGLQRQIVAAGHLCTVVAPSRIPRKPGEHIKTDRRDAIKLARLNRAGELDAVWVPDAAHEAMRDLIRSRGDAMEHFKSCKQQLLSFLLRHGRSYGGNCTWTKSHYTWLAEQKFEHPAHQIVFQDYINAIHDAELRHEQLVRQIKELLPHWSMKPLVEALCLMKGISLVTAATILSVTGDLRRFATPVQLSAYFGLVPSEHSSGNSIKRYRLSKSGNGEVRRVLIQSAWCYRFPARVTKAKEPQLSAADKSIRDVAWRAQLRLCKRYRRLIAVGKKTPLAVAAVARELTTFIWEMGQIVPIPS

SEQ ID NO: 247345 - protein, 321 aa, unidentified
MNKSTNFIGIDISKDVFDIYDPIQGHFQYANNVKGFRSFLKTLGEDHWCVMEATGCYHQQLALFLYDKSIRVTIMNPLVIKRFIQMKLNQVKTDKSDAKMICHYGQEQKMDLWHPSPEYVEECKQLQTITQLYFKQSTAIKNKLHTLQTRGYKTSKMTRSLKRQLKSLQKEIKLLETEMEQLIKANQQELYTKLNTIPGIGKKTAILLIVTTNGFKDFQSSKQISSYLGLAPNERSSGSSIRGKTRISKTGNPIVRNHLFLCSFTASIYNPQCKALYERIVAKGKSKKLALIAVCNKLIKQAYGISKSGLPYDKNYVSKLA

SEQ ID NO: 247346 - protein, 362 aa, unidentified
MVCFVGGQKLSLLYSSTLSSSSPTINVLSSNSSLSLKLVNNTELEECIMCFNNFIGIDVSKDKIDIFSTKENSHFTVKNNTKEIKKFFKKFNALECFVVIENTGAYEKICLETLSSMNFTVHRTDNRKAKHFIQSLGKQAKTDKLDARGLALYGKERHAELKVYIPESPEYEALRELTLFLIQLKQHRASLKNELQSPGCSYIKNDIENVIKMLDIQIDNIKSKIHEATKQNQEMTEKNKLLTQIKGVAETTATNVQVLLPELGKLSKKEVASLAGLAPCANDSGKHRGYRFTGKGRESVRMALHMATMSAILCNKKISNKYNELIARGKSKMVALTACKRILLITMNAVVRDGEIKDPRIL

SEQ ID NO: 247347 - protein, 409 aa, unidentified
MNKVDIAPFEVFCGIDVGKTSNHIVALDRHGDKPLINRKVPQEEAEIRAALEEAVDFGLALVIVDQFGAFGRLVVGVAKSMDIPVAHMPPRRFRQVAETYGEDKFDEKDAFILADASRTTPRNIEFVGNRAELMAEIKVLSSRRDDIVEERTRCYNRLHDFIHQVSPPLEELFSKRKLHNDLEIRLIARYGGPIGFRQAGRARASTWAAELKYHCVDGPKKVEQVFDVLDRQTVMLPGAAVIEEQIRSIASRIIELLAEEKRLNLMIEQRAKMIPEVDLLQSIPGVGPVYAALIAVEIGDIGRFRDSNHLASYAGVAPRKEESGTSVHKRRKRKGGNRRLKNALMQSSQRSVQCDSLARAYYERKRAEGKKHLQALRALARHRVTVIFAMLNEGTFYEPPVEVDENGRG

SEQ ID NO: 247348 - protein, 349 aa, unidentified
MGEVITIGVDIAKSVFQIHGVDADGTVVIRRRVGRARVLEFFADLPPCRVGMEACATAHQWARELKKLGHDTRLMPPTYVKAYVKRGKNDAADAAAICEAVTRPSMRFVPIKNVEQQSALMLHRTRDLLIRQRTQLINALRAHLAELGLVAAKGREGLHQLVTIVMECGDERLPSNARFACQAIVTQLHAVQIEISGLDKRISQIHRTNADSKRLDTIPGFGVILSTAVVATMTDPKAFRTGREFAAWIGLVPRQNSTGGKERLGSISKQGDRYLRRLLVVGATSVINCARARPYKYPWVIELLGRRPTKLVAVALANKMARIAWAVLAKGEPYRAPTRSSNAVIPAAA

SEQ ID NO: 247349 - protein, 414 aa, unidentified
MLALEDCALGAGPTSYIGGTDMPDGIRWVGLDVHAHESTVAVFDQGTGELITRRVVGRPHALLEWLMDIPVPARMVYEAGPTGYGLARRARAVGIEMYVCAPTRTGREPTDRVKTDKRDAARLARRLAAGELTFVLVPSVEHEQLRDVVRCREQIRSDLMRARHRLGKFLLRREIYYEGPATAWSLRHRGWLAGLNFADRASQLTMADYLHAHDVLLARRDRIEAELEQLAAGSPWAPTIARLRCLRGIDTLSALGLCAEVGEFARFDHPDQLAAYLGIVPSERTSGQQRRLGSITKAGSTHARRLLIEAAYHYRRHPAIGHTLERRQRGQTAEIINIAWRAQRRLNARWRQLKDARKKPNGVTVVAIARELAGFCWEIATYNPHPDPIPLASIPAGDPLTHAHPAPQKLITTA

SEQ ID NO: 247350 - protein, 410 aa, unidentified
MVHVGIDWSDHSHSFCILDDAGAKLDAFDIPHGLEGFETAHKRISKRAESPEDVRLAIETRDSLIVDFFLEMGYSLHFLNPKQTDRFRDRHRMSSARSDSFDAYVLADAVRTDPHLFNTLSPLDEKSLALRVLTRTREGLVQRKVAISHELTAALKRYFPLALELFSGLDRSEAVSFLSQYPTYREARTVSESRIHSILRKAGLSDKMAAKRARIIRTKLDRPQPSPAASVARAYPIAVKSLLRQMQAALGELNAIEAQIRDAYKDHPNKELLESLPGIASTIGPVLAAELGSDITRFSDLKTLKAFAGSSPVTERSGKYCQIKYRRACNWRVRQALHLASRTAIVCCPWARELYDRLRSDGKSYGRALRAVANQLVEMLYIILLRRRPYCEHYHLRMKSIHSGKAPVLT

SEQ ID NO: 247351 - protein, 357 aa, unidentified
MEKASSQGWQEQYTSRRLTMTQFQSFVGVDMASATFVACVGTTPWKLIVKPVQFDNHEEGFLSFLEWMKEHKLTPERTVVCMEATGVYSEGLAYFLYANGYSVAVEPPLNIQRKFPVNASKTDELDCQYIAEYACRYVDKLSFWKPRAEILEQVKLLLTTRQHFSVQLTGHKNALHAIQRKKVASDLAKHVHQNMIEQISKHIKAVDQEIRRLIESDPTFKQTLLLLLSVPGIGLQLAAHLLIAMQDTLDPKVLAAFIGICPLKHQSGSSIYSAPTSRHYGPPVLRKLLYLAACSVRTHKKPFQQYFFRKAAEGKHKKLILNNIQNKLLKIACAVVRSQKPYVSNYVSLNPLILKKA

SEQ ID NO: 247352 - protein, 342 aa, unidentified
MKELKQVVGIDVAQKELVVTIGRLLEDLSVDLFSYKVFKNNDKGFLSLVEWVAKLVENPQEVHYVMEATGVYHQKIAYFLDTNQLKVSIVLPNKISNYFRTLEVKTITDKTCSQVIARFGLERKLDLWKRPKTVYKNLQQLTRERDQIVAERVIVKNQLHAEKAEAEPNSMTLKRISERIKLLNKQENEIKNDISKILKNNPELKEEIDRMMTIPGIGELTAVIILAETNGFELIRNKKQLTSYAGLDVKEKQSGTSIKGKPKISKKGNRSIRKAMHFPSLVAVKWDENFKELYARLVSKHGIKMKALVSIQRKLLEMSYVLYKNQTIYDKEHKNSVQTQMA

SEQ ID NO: 247353 - protein, 376 aa, unidentified
MTMMHQRQIRYIGLDVHKATISAAIAEESGAPTSYGRIPNDPAAVRTLMTRLGGPQVELRVAYEAGPTGYALHRQLTSMAISCMVVAPSLIPKQPGNKVKTDRRDALKLARLLRSGDLTPVWVPDEAHEALRNLVRARADAKADQLRAKHRLSKFLLRQGCWPPVGVRNWSKRYVTWLHQLEFEHLPDRVVFADYLTEVTAAGERIKRLEVALYECAQSSRQVALIRALQAFRGIAFLSAVTLVAEAGDLRRFRTAPQFMAYAGMVPSESSSGGKQQRGSITKTGNSLLRHVLGEAAHHARHAPRVTSKVKQRQTDLPADIVDLAWRAQVRLHTRYRHLSGRIGALKALTAIARELAGFVWAAGQALQEEEVPTAA

SEQ ID NO: 247354 - protein, 420 aa, unidentified
MEVAQDDQEIIARVAALDIGKAEVVCCVRVPGQGPRARRMQEVRTYTTMTRSLLAMADWLTELGVTRVVMEATSDYWKPPFYLLENTFETWLVNARDVKHLPGRPKTDRLDAVWLCKVAERQMLRPSFVPPPAFRELRDLTRYRVDLITTRTSEKQRVEKLLEDSMIKLSVVASDIFGVSGRDMMAALVAGERDPKVLADMARGSMRGKTARLEEAFTGRFTDHHAFLLRTMLARIDGITADIDIVQDRIDEQIAPFAAAVTRLDEIPGVGVTTAQAIIAEIGLDMTRFPTPAHLASWARFAPGISESAGRKKGNSGTGKGNRYLARALGEAAVGVRRTDTFLGERYRRIAHRRGKKKAIVAVGRSILMIVWHLLSDDDARFVDLGSDYYESRVNLNRRTRNHVRELQALGYKVTLEPAA

SEQ ID NO: 247355 - protein, 402 aa, unidentified
MNSVGIDVSKGKSMIAVMRPFGEVVVSPFEVRHTANELNELAGLLKSLDGETRVVMESTGNYHAPVAWLLHDAGLYVSVVNAMLVHDYGNNSLRRGKTDKKDAVKLANYGLDHWLTLPKYVPEEDTRLMLKTCYRQYQQYSKVRTMLKNNLISLLDTAFPDANRLFTSPPRADGSEKWVDFVAAFWHCECVCGLSKKAFTTQYQKWCRKHGYNFSEDKALDIYASACGHFGVMPKTDTAKLLVEQAVSQFRATSAALAALKQEMQSLAVSLPEYPVVMEMFGVGPTLGPQLIAEIGDVRRFHSKKALVAFAGIDAPPYQSGQVDVRSRNISKRGSASLRRTLFLVMGVLLQCAPMDEPVYQFMNKKRSEGKPYRVYMMASANKFLRIYYASVKAYLDSLEHG

SEQ ID NO: 247356 - protein, 435 aa, unidentified
MAKASRATAEQAHTTAPSLAHESLYVGVDIAKSQHIAGFVSHTLLSRHGRFEGCPALKFANSRMGFRLLIDRIRDYVPLEQCFVLMEKTGHYHRALQEYLLEMDVSVYVMHVHARPRGMVKTDKRDALGLANNLYNQLEKGAQMGDRTEIVHRAVPPTEAASLLKGLMGHRYELQHESTKHRNQLTAICDQLFPEMTDVLKDPNSPTALGIRERFPTAQAIATATIDALSQAKGTSATKPGRAGLARLQDVAATSIGTKDVGRVRTLIFEQRQLIAELKLIREHTEQIDAEIEHIVETAREGRILMSLPGIGLTTAAAIVAAVGHVDNFPNAGFLKAYFGWAPKRTQTGTTKDSDKLPRGGERTMRALIYMAAWRCVNTDEDFAAIYKRLVARKCPCDERKRDYVGKNVVMARICGQLCRRTGVTSPYALRPGNP

SEQ ID NO: 247357 - protein, 391 aa, unidentified
MRYNIGVDLAKREHSAAVVEQGGERLLLGFEFKNDEEGFASLLAKLAEVGAECEESGVCLEATGHYGRNLIAFLEAHGYDVFEVNPLLTSNWRKAMSVRKVKNDAVDAEALALWLLAGNPTERRRAKSEMDDLRSLSRSRTSLSHIVGDCKRKAHAVIDVVFPEFHGFFSDDFGKAACYVMRKWGSAANVARARVDSIEKAMREAAGRKFGREDAERLKALAKSSVGQPSGPLEFQLRQLVAQIEFTQGQMKELDAELEGLLGGSPITTIPGVGTVCGAGILGEIGDASRFSSAAQIVAFAGCDPSVFESGEFEGTRAHLSKRGSPHLRWYLWLAADRARMSDPVLRGYYLKKRSEGKCHKVAVSAVVRKLCAIIFAVLRDNKPYVCPAAA

SEQ ID NO: 247358 - protein, 325 aa, unidentified
MNYLGIDVSKDKIDCCLLINDISKKGKAKIFPNNESGFNKLVTWLNQKNIQYSDLLVTLEATGIYHENLCYFLNDLKIKIAISNPMRTRRFAQGMSILNKTDKVDSEVLAKYGALAPIKFWQPDSINFRELRDLMTRRDALSTDLVRENNRLEKSMFTTTSKQVVSMIKDNMQYIQDCIDQIDNLIDQLVESDSELSQKMKLLTSIPAIGQRTALQMLNLFHGKDFENAGSAAAYVGLVPVQKQSGTSVRGATRISKAGSSRIRSALYMAGIVAIRFNPHTKILYDRLLKNGKSKMSALCAVMRKLVYLCYGVLKHKTPYQADYI

SEQ ID NO: 247359 - protein, 360 aa, unidentified
MLYLGIDQHRKQLTVSVRNEAGDAVLRRQVSTEWGRVRAFFEDVRRLAQPDGGFSAIVEICGFNDWLLKMLTEYGCRETVLIQVEKRSKKKTDRRDAHQLSGLLWVNRGRLLTGQRVEGVRRIQPPTEREAEDRQLTAVRQRLGRQRTRTINRIKHLLRKHNLEQQQPAKGLDTIRTRNWLAALPLGPIDRLEMDLLLAQWKLWDDQIAKLELEVEKRQARSATAAVLATIPGCAAYGGLALASRIGAIERFPRPASLANYWGLTPGCRNSGEASDRLGSITKQGSAMARFVLGQMVLHVLRRDGQMKAWYGRIKRRRGSKIARVAVMRRLATIIWHMVKHNQPYVAGGPPRRKLAAKAV

SEQ ID NO: 247360 - protein, 440 aa, unidentified
MAGSQQKKRKLSAQVVEDEDYQLRYERCAGIDVAKASGVVCTRLPAQRDGGRRVAVTETVAATVPAIAALAGRLAAAGVELVSMESTSDYWRVWFYVLEAHGLAVQLVNSAQARQLTGRPKTDDLDAKWLARLTEMGLLRPSFVPPADIRQLRDYTRARVHLVQDRTRQYQRLEKLLEGALVKVTAVTRLTTASAKDMVRAMIAGERDPRTLAALARTRLKARHEDLVAALTGMRFTDHHAHLARTLLNLIAYLDEDIAILEDKIAACLDAIPAAQGVDADGTAGGVGPDPLVLPAVWRLAEIPGLTTELACQVIGETGLDMSRFPTAAHLVSWAGLAPVANQSGPRTRKGKKGQGDSYLRGFCTQAATGAALTDTFLGERHRRIARKRGPGRAKVAVARSILIIIWHLLKDPETRFTDLGPEHYASRTDKDKKTRNLIR

SEQ ID NO: 247361 - protein, 426 aa, unidentified
MKVLYERVAGIDVHKDMIKVAIRSPGDKPWARKTEIVEYRTFYGVLQQMAGELRKRGVTHVVMEASGVYTEPVYYALAEQDFDEVAVINPAHAKALKGHKTDAKDCARLAELFECGLLHGSYIPAPELKEVRDLTRYRMKTVQARTSEIQRLAKALESAGIKLGSVASDITGTSATAMIEALIDGERRGAVLAELARGRMRTAGKLAELSQALAGRFTDHHALLCRLHLDRIAIFDTAVAGLEGQIAAKAAPWRREQRLLKTVPGFGDAVAQAWLGEIGPAPHRHFATHEKLACWVTLCPGNNISAGKRKHGRSGDAGTYIKPMLVQAAWSAIRVRGRLQARYHRLVRRFGGEKNPAAKKKAITAIAHTLLKIAYQVLKSGQPYQDLGADFYTRRESPEQRQAWLLRQLQKLNPSATITITPPEAA

SEQ ID NO: 247362 - protein, 459 aa, unidentified
MRTIGIDLAVTAPHKAIVMNAEGKFVTPLLSFHSRWDEIEQVVARAREGVAPDHPLQAVMEPTGMAWFIVAVPLSRLGVSPIYLVNGQKVHALRRFYKRHSSSDRIAARVLAKMPLVDDESLYPLEIPTATQFACQRGCKELDRLKELMTAIKNRIRDTDRFAWPGLENVFQDIFSPAARLFRQTWYDPAAVLAAGVDQVRQSFLAIADQGDDLTWVDNLVQLAIEVLVLYGTETLDYHLLQQEVCRDQRWLTALEAEADVVWRETVRLLYRQLHPSRNLETLYGVGERGAAVFASFIGRAERFPSNRKFRGWHGLVPDSRQSGDAESKGLHISQAGPDLVKKFGYLDADVARRYDPQIAAIYHDQMVNKGNHHNQAVCACATHLLDRVRVILLEDRPYELRDVDGTPVTPEQARAIIAERYTVPDEVRRRNNRRAHKERAERRAERKRQKQQKGSRPR

SEQ ID NO: 247363 - protein, 424 aa, unidentified
MKVTYQTCCGVDVHKSFLVATIVKTTGGIEPSYQKKRFSTFNNSILEFKQWLLDNDCHDVCMESTGKYWVPVFNLLEDEINVVIANPKWVKAVKGNKDDAKDSKWIGDLFRLGLVKGSYIPCKKVRILREYTRYRYKLVSCRSSEKNRYQNALTVCNVALDSVVSDIFGKSSTSIIDYLLEQSGTSINHEEIASKLLRSLKSKEDAVIESVEGYQMTDAQKYRMRLVRAHMDYITAEINDVDKMIENMISSNPDFENAVQFLCTIPGVKRDSAITIISETGTDMSQFSSSKRLCCWAGLTPGSNESAGKKKSVRITRAGVYLKPALVQCAHAAVKSDKSPYYKKKYDSLVKRRGKKRAIIAIARMILTAIYQMLSTGELWNPSDLYKIDMPVALVEKQKAKAIKQAKKLLQREGLLPPDEPLAS

SEQ ID NO: 247364 - protein, 404 aa, unidentified
MKYCGIDWANDHHDALSIDEQGRQLGSIRVAHTPEGLSQLDAYLERIAAPDGKNQVACIIETTHGLLIAHLLEQGWPVYPVNPRTVDRHRAPSGAKTDTIDAYLLAKTGRADFQDLRRLNPDSELIQELKTLTRDQDSLIQMQTRLVNQLTACLKAYYPLALDLFGKLQQPSTLAFLRAYPTLPTARAASVEDLATLLKRSRFPGARKKAEELVNHLQQPSLMASEVITRAKSRLMLALVAQLEPLLTQIEEYDKEIERLFLSHADSELFLSLPGAGARLAPRLLAEMGDDRDRYASASSLQALAGTSPVLYQSGMYQKAHRRLGCIKPWRNALFQFADRSRRWEAWAGEYYQRKRAEGKSHTVAVRALANSWARILFAVWKTREMYRTATFEAAQRTHALRIA

SEQ ID NO: 247365 - protein, 359 aa, unidentified
MLTQSNKIDFNGQHFYVGFDVHLKSWKVTIMTEKLILKTFSQDPKPELLYQHLVRNYPNGIYHSAYEAGFCGYWIHNKLMALGIDSIVVNPADIPTTDKEKVNKTDKRDSKKIAKCLRNGDLKGIHVSSLKTLEDRGLVRTRGTLVKDLSRNKNRIKSFLYFHGIEMPEAFEKSSTHWSKRFMTWLRSIELTESSSKKSLSLFIDESQHLRLLILNATQEIRELSKSEQYVYKVNLLRTIPGIGALTAMIILTEIETISRFSNFDQLCSFIGLIPSTNSSGEKVAVGEITHRGNNFLRSAIVESAWIAARRDMALNKSYHDYCKRMEPNKAIIRIARKLLNRIRFVLKNGQPYVCSVVR

SEQ ID NO: 247366 - protein, 351 aa, unidentified
MMIIGVDYHPSFQAIAFLMEETGECGEQELNHSDGQAEKFYRDLKQRGISVRIGMEATGYSRWFERLLAELGFELWIGDPAEIKAKRVKKLKYDRYDARLLRRLMLENNFPRIWVPDPENRDLRQLLWHRHRLVQMRTRIMNQLQALAMNEGYRWKKKLFSEQGRAQLEKLALAPWASRRRQELLELLDRMNPTIEELTAAVEREARKRPEVQRLMTHPGVGPLTALAYVLIIGTPTRFQRGKQIGTYVGMIPSEDSSAGKQRLGHISKQGNSLLRFLLVEAAQAAARVHPGWRRRYIHLAMRRHKSIAKVAMGRRLAIRLYWMWRNGCEYSPSLEFGSYAGQLGTVHGGR

SEQ ID NO: 247367 - protein, 340 aa, unidentified
MGKFSEKKHFVGVDISKNTLDLSLVSQEKYGSFKDKQIANALTSYEKIKRWLKKEKVRKEEVMFCMEHTGTYGLLFFAWLSQEGYDYCVEPGLQIKRSLGMTRGKNDRIDARRISDYAYTHKEKLKPFVMPSRLILQIKQLLTYRDQLVKIRRSLKNSIKSHEQYQPLTGLKGVTDELKNEIEKYGKKIKEAEIHIVKLLEEAPEIKKNFDLSRSVKGIGLVLASYMIVTTLNYTAFENGRQYASYAGIAPFEYTSGISIKGKTRTSYLGNKKMKALLSNGANSAIRNDPEHRAYYHRKKEEGKDHKVIINAVSCKLVNRVFAVIKRQTPYVITFGHNFS

SEQ ID NO: 247368 - protein, 317 aa, unidentified
MSSEPVFVGIDVGKDFVEVATCPPSVRCTLSNTPAGWRELVEALRGLPVALVVVEATGGYERAVAADLLEAGQQVVVVNPRQVRDFARGVGELAKTDRIDAAVLARFAQVVRPEARPAPTPEQTDLAELVTRRRQLTALLTQETNRLAMVRHPKVRRSVRTVIRTLEHEIAALDALISRHIQSDDQFRDKDRIVRSTPGVGPQTSAMLLAHLPELGRLNRQQVAALVGVAPWDRQSGQWTGRAHIGGGRKEIRSVLYMATLTAIRCNPVIRSFAQRLQQHGKAFKVVITACMRKLLVTLNTMVRNNTLWHPQLVKND

SEQ ID NO: 247369 - protein, 348 aa, unidentified
MNALHYIGFDVHKKTISFCVKTAAGEIVEEGSVPAQRAGLRQWAAARPQPWRGAMEATLFSGWIYDTLQPYGEQLEMAHPAKMKAISAGKKKSDILDARTIADLVRCNLLPACYVAPPRIRELRRLLRYRSLVVSEAVRMKNKMAGLLMETGALYVKEKLHCKKYFANLLEELEEVPESVIDLPRLSRGALEMFESTQKRLVHELLADPELAQRVERLTTIPAVGEITALTWALEVGDPQRFRSSSDAMSYCGLTAALKSSAGKQQRAPISKQRNRWLQTTLIEAAKLAPRWNPQLAELHARELERGHRNRATLAVARKLVAYLLAVDKSRQPFQERAPSEVPTQKAA

SEQ ID NO: 247370 - protein, 345 aa, unidentified
MKHSVVGMDIAKRVFQLHSVDPKTGEIERIKLRRDQVLPFFAQRRACLVAMEACGSAHWWGRELRALGHEVRLLAPRSVRPFVRSNKTDAADARAIWTAVQQPEARLVAIKSEQQQAILALHRLRAQLMKFRIMQTNALRGLLYEFGEVLPEGHSALAKALPAALAKLAERVPAMLMDSLREHWGRVQSINTEIATIERRLASALRATEPCQRLAAIPGVGLLTATAVVAAVGQANTFTSGREFAAWLGLVPRQTGTGGRVRQLGLSKRGDTYLRTLLIHGARAVIASGKHSPWVEALLKRRPYSVAVAALANKLARTIWAVLARGRPYDAAAFGATPTPQMQTA

SEQ ID NO: 247371 - protein, 444 aa, unidentified
MRIMNEKCAALDVHKKTVVACRRLTESTGSVKAEVKTFGTTTPELLELSDWLREWGVTIVAMESTGEYWKPVYNLLEGEFEVILVNAGHVKQVPGRKTDVKDAEWLAELLSYGLLKASYIPAKPQRDLRDLTRHRVNLVQERARVVNRLQKTLEQANIKLASVATDVMGVSGRQMLEALVGGETDGSVMAELAKGRLRNKMDELEKALTGVVGNHHRFMLAQHLAHIDFLDEQMEQVRGEIGQRIEAMDETDSPSPGSDNSPNPETGELPTPPALNWSTSVGLLDTAPGVDVRAAEMVLAEIGINMRQFPDENHLTAWGGLAPGNNQSGSKRKNAKTREGNGHLRQVMIQIAWAASRTKDSYPQALYRRLVARRGKKRAIVAVARSLLESFYFMLSRGEPYRDLGGNYFDSRRKESKVDALTKQLQKLGYTVQLEPLKIQATPC

SEQ ID NO: 247372 - protein, 359 aa, unidentified
MSIVAHSHSFVVGVDTHARKHVYALIDTITGALLDTNDFPTSATGINRAIAWVSRRTEAATNTLWVIEGAATYGAILAGVIAARNFQVVEAPFMGKRQKGAGKSDVIDAHRMATAVLGLQEEKLRQPRANEGIRQGLRILLSARESMTHERTRAVNALNALVRANPLGVDARQKLNVTQIGEISRWREREEELSLKIARAEAVRLAKHVSTLDEQLKNNESQLDELVRASEASALLNETGFKAITAAKCLVAWSHAGRVRSEAAFAALAGTSPIPASSGNTSRHRLNRGGDRTLNSALHMVAVTCMAHDRTTREYVEKRRAEGKTDREIRRCLKRYLARRVFKILSAVSITKIGASAAA

SEQ ID NO: 247373 - protein, 343 aa, unidentified
MNEVITIGVDLAKNVFQIHGVDVEGGVVFRRQLRRGQMLPFFKKQPPCLVGMEACATTHHWARQLIELGHEVKLMPPRYVKPYVKRNKNDMADAEAICEAVTRPTMRFVEVKTPEQQSVLMLHRTRHLFVRQRTTLINALRAHLAEFGIVAGVGRNGLERLLQVIEDDNDDRVPPTARDSLLALRDQLEMVKHQILGADRRILAWHRGSEVSRRLDDIPGIGPLIATALVASVPDPHIFKSGRDLSAWIGLVPKQNSTGGKDRLGHISKAGNRYLRTMLVVGALSVIRRAKQVGYTRRPWLTKLLERRSTKIAAIALANKNARTAWAMMAHGTFYKEPVSQDL

SEQ ID NO: 247374 - protein, 345 aa, unidentified
MPIVGGLDIHRKQITFDYLDTVTGQVQRGQISPADRAHLRAWLARFADCEDVMFAVEGCTGWRYVAEELAAAGVTAHLAEPADTAATRGRKRHAKTDKTDCRHLRMLLAEGRLPECWIPPGHILEGRALLETYHDLRAEHTAWVQRIHAVLFHHGAPALGEGTLRTEQGLAALRAAAADCLSPAGQLQVATALEVIEALEARMHAVRHQLLDAARQLTGAKVLAARLYGVGPVTALALTCWLAGAGRFSSSRQAVRFAGLDVTVSSSDRKGPPGRLSRQGPPVLRWAVYEAGKTHARASAPDHGYYAQVKDRKNSKRAALSEARKILRQACHILAELGDDALATT

SEQ ID NO: 247375 - protein, 347 aa, unidentified
MHSVGIDLHRSRSHVAVIDDRGDVLLSRRIVNDPQTFLALLAEIDGECRVALEATYGWEWLADVLQDAGYELHLAHPLRTKAIASARVKTDAVDARTLAHLLRTDLLPEAYIAPRELRDLRDLLRHRVALTRMRAALKNRVGAILAKGGIPRPFSDMFGPGGTRFLAELELREAPRRRLDSMLALIGDFDREIAATTKEINQRAKADPYVEVLCQIRGVGRYIAMLVIAEVGDIARFHTARRLCAWAGMTPTVRSSDMRTRLGHISHQGSPALRWALVEAAQHAATGGGPLRQSYERIAKRRGTQVAKVAVARKILTLCFYGLRDGEIRCLAPRAPARTIRPTALSA

SEQ ID NO: 247376 - protein, 338 aa, unidentified
MTTPISMLAIDLAKGSFQVCAIGLDGAVLYNRVLSRTRLAALLAEQQSCIVAMEACATSHYWGRVAQFHGHEVRLVPAAYVKPFVKRQKNDKADAEAIAEAASRPTMRFVAVKSAETQGRAVAFRTHQCLVRQRTQLINALRGHLAEFGLVAPKGPASLKVLENALADETSVLPVQVREMGAIYLDQIARLTEVIEQLAGELEAASKTDAHLRRLCTIPGIGPVTAGAVAAFAPDLDTFDSGRNFAAWLGLVPRQRSTGGKTRLGSVSKMGQTDIRRLLIVGAMSVIRWVVRKGGSADRWLSALVMRKPKMVAAVALANKMARMIWALTTKEQDYRMA

SEQ ID NO: 247377 - protein, 324 aa, unidentified
MLPTLGIDISKDSFHLELSINDKLRHRKFANRKEGFGELRVWLAKHKATQVHACLEATGPYSEALALYLHQQGHTVSIVNPVQIKAFGQSELLRNKDDRPDAGLIRRFCEKQRPAPWTPPPVHLRELQALTRHLENLIETRQQQVNRLETTNTKQVAKSLRKLVTHLDAEIKRTEEQIDDRVGRHPDLKQQSELLESIPGVGKRTATKLLAEIPDITQYKSARQVAAYAGLTPRNNRSGTIRGKTRLSKTGNARVRKALFFPAIVAKRHNPIVRAFCERLSSNGKNKMQVIGAAMRKLIHIAFGVLKSGRMFDPNHELWLNPVS

SEQ ID NO: 247378 - protein, 476 aa, unidentified
MAKVVSARKSKPVKHERTKLLHSASELAARVRQVGVERFAFVCVDPAKHRSRWRMADFLGKLLLPEATVEHTAGPLRAAVASVRHKMQQDDIRVVWVIVERTGQYHLPVQRAFAEAGFETRILHPCATKQYRKAVSPDIKTDDIDLVAQHLAAVAGFGLVELPLDETYRELRLLARHRRDLVEKASALCSQIREHMHLLMPGYAQCFEDLWLSAAALPIARHTGTPQAVLNMGLARLARKLQQDGLRVQERTLERVMAWARQASPPAPDAALHQRVWTALDDDRLSKRREIEGLERDLASALVRTPYVLLMAFPGINVVSAAELAGEMGPIAHYGNSNAITGRAGLYPRRYQSDTVDLADGRLAHRANRRLRAALMRIADNLVANNHYFRSQADVQRKQKADERVIRVRVAKKFTRLAYVVLAGRQVLRHACCQPGDSILLKLSEFHRLHHTGARQLLVDLQAVVDQLPKKAQASR

SEQ ID NO: 247379 - protein, 361 aa, unidentified
MLIERTSVGLDVHARSIVGCAIDERTGELVQRRFGYEPFDAIAWVKALPGPQHVVYEAGPTGFELARQFEASGVSCVVAAPSKLQRPSGERVKTDARDGDHLARLLRLGEVTAVRIPSRAQESACDLVRAREDVRTDLMAARHRLTKLLLRRGLVFDGKTTWSREHDAWIRRHRPDLPGSAAAFDAAYETVAQIAERKHRLDVLIAEAALTDDEFGPVAARLGCLRGISALTAYALAVEIGDWHRFTGNTIGAYLGLVPTEYSSGSSRTQDAITKTGNAHARRLLVESAWHQKKDYRPGAVRHARWATAPMDAVLRGQAGNRRLHSRWQQFTLRKKRSTIAAVAVARELAGWCWSLAVMDG

SEQ ID NO: 247380 - protein, 274 aa, unidentified
MNGSKNVVGIDIAKRVFQLHSIDRETGEIVSLQLKREQFLEHFANRQACLIGMEACGGAQHWARKLTAMGHQVKLLPGKAVKGFVTGNKNDRHDARAIWTAVQQPHVKAVAIKTEEQQAILALHRMRSQLVKFRTAQINGLRGLLTEYGEVMPQGKAGVRKGITEALARLADRLPAMVIDTLREQWARIGKMDEEIATIEQRIKLWLKQDEACKRIAEIPGVGPLTATAAVAIMGDAKAFKSGREFAAFAGLVPRQTGTGGRTKLLGISKRGDT

SEQ ID NO: 247381 - protein, 343 aa, unidentified
MTHYVGLDVSQKLTVICVVDDTGRRLWRGQCTSDPEQVERAVCRHGGDGARLGIETGPMTPWLVHELRGRGLDVTCLDARHARAALKMQINKTDQNDAEGLAQIMRTGWYRSVHVKSFDSHRARALLGARAQLVGMTTRLSNHIRGVLKTFGMLPGQMRGLPFDRRVEILLADRTEVAPIVRPMLAAWRHLREQITAFDKAVRVLVKSSPTCRHLLGVPGIGALSVLAYVSMVEDPTRFRRARSVGAHMGLTPKQYQSGEIDRSGRISKCGDMLARTLMYEAAVVLMTRVKRASGLKEWAQAIARRSGAGKARVALARKLSVILHSMWRSGEPFRWSEQPATA

SEQ ID NO: 247382 - protein, 322 aa, unidentified
MAMLSFGGIDVSKDRLDVMVLPEEQCSSVSNDAAGWDKLIEQLRGSSIAAIGIEASGGYERGVMRALLAADLPVRQVNPFKLRQFARASGVLAKNDPLDARMIASFVAIMPTRPAQRPAPAAERLTEMLAVRRQLSAEKVAAENASRLLEDAMLQRLSRRRIARLAADIAMLDERLVEVVATDDALVHRYRLLTSMPGVGAVLSCTLLALLPELGCMSRKQVAALVGVAPYAFESGTLKGRRCIWGGRAHVRQVLYMAAMSASNWNPAFKTFHDRLKAAGKLPKVAIVAVMRKMITTLNAMVRDDVMWADRLTDRHSVPTAR

SEQ ID NO: 247383 - protein, 409 aa, unidentified
MQVLFNRCAGLDVHKATVVACVMVTAENGTVQKEIKSFGAMTRDLLELGDWLKGHQVTHAAMESTGSYWKPVYNLVEGQAELLVVNAQHIKAVPGRKTDVKDAEWIADLLRHGLLRGSFIPAKPQRELRELVRHRANLVGRRAQAVNELQRTLESTNIKLGNVVSDITGVSATQMLEAILGGQTDEVALAKMARGRMKEKEERLRAALQGKMEEHHRLILSQLLADIAGYEEQVAEVGALIAQRLQKDQELLDRLDDIPGVNQRVAQVIAAEVGTDVKRFPTAEHLISWAGMCPGNNESAGKRRSSRIKPGNRSLRAAIVEAANAAGHKKDCYLSAMYHRLAGKRGKKRALIAVARTILQSCYHMIQRGTRYQDLGANYYEMRNPEGLAKHLVKRIEKLGFAVTIAKAA

SEQ ID NO: 247384 - protein, 331 aa, unidentified
MCVVGIDIAAKSFDLVVRRNGTNAKVRRFEQTPAGHAQAAAHLKKLAPERVVMEATGVYFVDLAVALHAAGLPVSVINPRSFKHFAQIKLKGSKTDAIDAALLAEYAQRMAPALWVPPAPGRLALRDLGRQINRLIHARTQAKNRLHALQARRDVSALLIDDEREGIEQLDARIERLKGAAQQRIEQCAQLSVMAQHLRCAKGLGAASTLAILAELCVLPTQMNSAQVSCFAGLDVRLNQSGSSVHRPGRLSKAGNAYLRAALFMPAMVAVQSDPNAKAFYEALLARGKKRIQALCALMRKMLTGIWACIRNGTPFDSSRLFSCAQTLLKA

SEQ ID NO: 247385 - protein, 401 aa, unidentified
MHAVIGIDVSKATSQVAVAVDGKVVQNFKITHDVFGFNQLNTVIMQFNTFPDIVFGATGVYSRRLKTFLEAHNYPYTCLNPLTAKKQLDQLRPNKNDLNDAKHLAETQFILKRAKSYVQNPIYIELQDMSRFYQQLNHDIVSAKNRLHRLLQLTFPEIETLFSTTDSQQYWEIVSLIPHATMAKHSRQTLSDTIQSSVSRQIGVARLTRLVDKLVALGILSAPAVAVASYNVTEVRYYAQRLIALSQSKANVLATMVDQAKDLPEYDIYQSIPGFSDKTVVSLIAELGDLHRFATSNKLNAFVGIDLRFNDSGDYKSSGFITKRGNTIARKVLFKAISNIASTATYGHQNHINDWYQKKKQSSMSKGTKKIAIGAMSRLLRTMHYLVLNNQLYDYDTASKR

SEQ ID NO: 247386 - protein, 437 aa, unidentified
MSDKKPVEIRVSVDVGYRRHSVAIGLSSGEVLEEFEIAHRPEGFEEFFSRIEEHQKVRNCEVAVAMEGFNGCARPLDAMVRRRGYRLYNINNLKLARFKEIFPGAAKSDRIDARKGLELFQLSDHLPLAKEVLQEVKGTPQANEVLKRLTRRRRRLVDEQIRVISNLQTDLQAVCPGLLEITKNAGNQWFLNFLVSAETLPQLARLRPATLLKIPAVGRKYAGLIEEWQKRAHFSEEVKWVSEMIQEDAQRCLELDEKIKELKAKIKDVAKDSTIANILLTIPGFGTICTSELAAEIGTIERFSKEGSLALYIGMSTLDNSSGKYQGSKQPKHVNTRAKAAMMTALDRHRKYVPQSQRYYEKKRSEGKKHNQAIRALGRHLCRIIYKLLTEEREYEIRPEKGNTKGKVSPRSLIKTQIRKPKVSAKGKNNKIYQQST

SEQ ID NO: 247387 - protein, 414 aa, unidentified
MIVLGADSHKRSHTIAAVSAATGELLGERTVQVGATGFAALVGWARELGTERVWALEDCRHVSGSFERFLIARGERVLRVTTKLMADSRRRARARGKSDSIDALAVARAALREGLDALPAAQLGGPELDLRLLVDHRESLARQRVALNNTLQWHLHDLWPELRLPGSSLFHGTWGPRVARRLARAEQTTRVRIARDQLRRIRELTAALKTLEAEIAQLVAHIAPQLLAEPGLGPLTAAKLVGEIAGADRFATDAKLARAAGIAPIPVSSGKTNRHRLDRGGNRQINATIHRIAITRLRCHPETQAYIARKRAEGKNTKEAIRCLKRHLTRRLWHLLQPPHPETGKINLLTYGDETPGCRGAWCPGRRVASSSRTLGLRWENAERAGRVCFLGCEPVDIAGRPCDHPGCAASTNA

SEQ ID NO: 247388 - protein, 349 aa, unidentified
MNKKLFVGIDFSKETFDAAILKVSEESSIDPKIIGNEQFKNDVPGCKRFVKWLNKTCALSGDYSSVLVGGEDTGNYSITLPKQLYVLGIDCSLQNAYSIKCGSGKIVRDKTDKIDAEKIAYYFYRFRDQIRLYKPLSKDMESLERLYSYRYGQVRERARLKCQIKEYKHILKSEPNDETLKFMIQRLEKQERFLKKEIKAIEAKMVEIIKANEELNEIHKCLLSIPGIGKITSLLLIVVTRGFTRFDNPKQLACFLGVSPHPNQSGTSVQNGNHRSWFADPYFASLLHMAALSASRFNSKFIDYKKKLKSKGKPHLLIMNNIKNKLLTVAFTIATRRTKFYSDYDAKRA

SEQ ID NO: 247389 - protein, 370 aa, unidentified
MTTSTATVTVIGGVDTHKHTHYAAAIDDHGRLLGHREFPATDPGYQDLLAWIRAHGSVQAIGVESTGSFGATLTRALTTAGERVVEVNRPNRLARRMDGKSDRLDAEQIARAVLGRVSTAIPKTKSGTIEVIRTLRVARTSAVRARTNAFNTLWGVMIGAPSPLRDELVVLTKRTLVNRCQGLRPETDDLLSLASDPDRMLMAGVKTALRDLARRWKALDTEIKTLNTQIEALVRAAAPDLLELHGVGVEIAGQVLVTVGDNPERIRSEAAFAKLCGVAPQPASSGRTSGRHRLSRGGDRSANSALYIVTIVRMRHHQPTRDYVERRTAEGLSKREIIRCLKRYIAREIYNNLPQPATAAPPRQAIQTAA

SEQ ID NO: 247390 - protein, 357 aa, unidentified
MHTAQQISFAKVHFFIGLDAHLRNWKVTIRLDGLELKTFSMNPAPLELLAYLQKHYPDGIYHIVYEAGFCGFWALRIFRQHNIDCIIVNPADVPTTNKEKVNKSDPIDSRKLARTHENKDLHGIYIPDTFHEELRMLMRLRYRIIQSQTRSKNRIKGLLYCQGIQIPLQFSGNARWSHNFILWLKQLHLNTDAGNFTLQNLILQLKEIREHNKNILNQLRTEARHPDIAPIMKALQGVPGVAFITAMYLYTEIMDMKRFANDNHLVSFVGLVPSTQSSDTTVQVNGISVRQNPFLPTMMIEAAWTAVREDPAMTLKFKELSKRMNQQNAIIRIAKKLVTRVRHVWLKQEEYVYALVA

SEQ ID NO: 247391 - protein, 335 aa, unidentified
MELLKQAIGIDISKDTLAVCFGTIDYQQNVRFQQQVTLKNTAEGFSALMRLVKECRCKDVDMWFLVEATGVYYENLAYYLYEQDQQLCVMLPNYVKQFARSTSTKTKTDRVDAQLLCRMALERQLDRWGPSSAVMRELKELTRERSSIVGLQSAAKNRLSALGSSHKPSKQQITRVKQQLALYKKQLQQIGAEITRVIARDPALQKRIERVTEMKGVGLQTVTTLLAETNGFALVRSVKQLISYAGLDVASSQSGQYEGQARISKRGNRRLRSAMYMPALAAIRDAGPMRRFYDRICEGYPKTKKPGIVAVIRKLLRIIYAIWKTEQPYNPALIG

SEQ ID NO: 247392 - protein, 371 aa, unidentified
MKSIVYVGMDVHSSNYTLSCYMVENDRCFATVQVEPDYKEILKYLDNVQKNVGEPCEFHCGYEAGCLGYSLYHQLVDHGVDCTILAPSTMPTYKKNEIKTDKRDAMKIARCLAFNTYRAVYIPTKEDSNVKEYIRMRDAHKLALKKVKQQILAFCLRYDFRFTSGKSYWTQKHLAWLRGLAMDTLMREILDEYIQTYQNLVDKLERFDKRIEELAGGASYAEKVKKLSSLIGIRTHTALALIVETGDFARFAKANQYAAFLGLVPGEKSSGDKQNRTGITKAGNTHLRRLLTEAAQCYGRGRVGFKSKALKERQYGNTPETIAYADKANERLKRKFYHMVLNNSKKHNVATAAVARELSCFIWGLMTGHTA

SEQ ID NO: 247393 - protein, 355 aa, unidentified
MTSTKYIGLDVHKESISIAVMNSVGKFVMESVIETKASTILQFIDGLRGDVRVTFEEGTWAAWLYDLLKPHVTEVLVCNPRKAALLKDGSKGDRIDARKLTELLYMNKLATVYHGEHGLRTMKELARSYLTITKDLTRVMNRLKALYRSWGIPCAGNEVYDPRHRTEWLGKISEAGVRRRAEHYYQQLDVLRLLRQEVRRDLLVEAKKHKPWKLLRQIPGIGPIRAALLIALLQTPHRFRTKRQLWTYSGLGLETHDSAQYRAVEGQLQRSKKPVTLRGLNKNHNHDLKAIFKGAALRASSAAGPLRDYYEVLLAKGRKPTMAHLTLARKIAAITLIVWKKEVRFDANYLKQQAA

SEQ ID NO: 247394 - protein, 357 aa, unidentified
MTSSVAAVDSDEVVLGVDTHRDQHTAAVVSVAGVLRGCRQFPATGQGYRDLLCWARGLGVVRRAGVECTGSYGMSLSRLLQGERVSVLEVNQPDKRARRHRGKTDEVDAEAAARAVLAGRAGAVAKASDGPVEALRQLKIVRDSAVQARTKALNQLKAVIVTADPAIRQALTGLSTKGLVQRSAQLGEGDGPDATSRYALATLAGRIIALTSEADRTEQRITALVDAVRPALLERVGIGPDSAATLLIMAGDNPERVQRETSFAALCGVSPVEASSGNMQRRRLNRGGDRQANAALHRIVVSRLRWDTRTQAYMQRRLAEGRTRREVIRCLKRFVAREAFGLINPPDPVTATPSIAA

SEQ ID NO: 247395 - protein, 375 aa, unidentified
MKNKVRFLGLDVHAETIAVAIAEPDGEVRSLGTIANRAESVRKLVKKLGPAEHLKACYEAGPTGYVLYWQLAELGVACEVIAPTLVPMKAGDRVKTDRRDAERLARSYRSGDLTAVWVPDEGSEALRDLVRAREAAKQDQLRARHRLGKFLLRMGQRPAMGMKAWTAPYMAWVRQVHFTQLAREATMLDYLYEVDHMGERVKRLEQAITEAVKLATPAVQEVVKGLQALRGIAEISAVTIVAELGSITRFENARQLMGYSGAVPSEDSSGQRTRRGSITKTGNAHLRRIVVEAAWSYRHRPAIGPRLRKRQEGVPEPIKEIAWKEQVRLTKRYARLAAAGKDQRKIVTAVGRELLGFIWAIGIKAEAAGKLRLAA

SEQ ID NO: 247396 - protein, 362 aa, unidentified
MNLKYSLGLDVSSKKIDCSLSVIDENQRVTFKSKTVINNTLSGFRILQDWITKHHKEPSIPLVVCMEATGVYHENCALYLFEKQYKVSIVLPNKAKKYLECLGLKSKNDTIDARGLSQMGAEQRLELWQPLGRFYYELRHYTRQHQNIQELKTVISNQIHALEHGMYRADVVITQLKSTIELLNSQLKEIDKKIKQHIKSDPLVYQKCKNILFMKGIGILTLATLLAETNGFELFKNYKQLVSYVGYDVVEAQSGTRVGKTKISKKGNSRIRRALHMPSLVVINSKEKPFLNLYDRTLEKHGIKMKSYVAVQKKLLVMVYHLWNKNEKYDPNYQLNILEKEQELSSLLAFEKGTYAYSEQKK

SEQ ID NO: 247397 - protein, 331 aa, unidentified
MKNKEIVGIDVSKNTLDVYLLSTNYHFTVKNAPDGFACLIETINEHVKHKSHPPFFCFENTGRYSRLLSVFLEDAGFHFVLLDALDLKRSMGLTRGKSDKKDARMIALYAWRRRDELTSSQLAGPVIDQLRQLLTLRDKLIKHRTTYKNTTQDLHDGYTDGEFEFIKERHQSMLNHLQQEITLVENEISRIIDLHEELASTYNLLRSVPGIGNVLSIYLIVLTHNFTRFNDPRKFACYAGIAPFEYTSGTSVKGRSKIHPCANRQIKSLLNMAAMASIQLTGEYKTYYQRRLLEGKNKMSTLNIIRNKLVSRAFAVTKRRTPYVNLHKFAA

SEQ ID NO: 247398 - protein, 338 aa, unidentified
MRLYVGIDLHSNNSVVVIQDENDQVVKRKRLENKIETVLAFLESSRDAISGVVVESTYNWYWLVDGLQDAGYRMHLANTAAIQQYEGLKHGDDESDARWLATLLRLGLLPEGHIYPREERAVRDLVRKRSQLVRNHTRQMLSVENLIVRNTGKRITAPEVRALTSESVDALGLEADIVLAIKTNVAVMLCLREQIELVEQRVLSKVRLRKQFQGLLTVDGIGKILAMTIMLETGDIKRFKSVGNYVSYCRCVKSVRLSNHKTKGKGNAKNGNKYLSWAFVEAATYAIRWNERVKRFFQRKCARTKRVVAIKATAHKLARACYYIMSDGGEFDVSRAFG

SEQ ID NO: 247399 - protein, 392 aa, unidentified
MLIVGIDIAKRNHEASVISQDGSLVRKAMRFANSQSGYNKLMDMVRSLNEPVVFGMEATGHYWLTLYTHLRNDGFTVHVINPIQSDALRGMYIRKTKTDSIDSVIIADVIRFGRYCETSVEPGNLQAMRELCRQRFYIIDMASDLKRKVIALLDQVFPEYEKLFSDTFGASSMEILAQYTTPEELLAVDTCKLALLLETASRGRLGMEKAEQIQSVARNSFGIVLSSNSFALIIRQYIEQIRSLESSVDIFDAEISHLLAGFDTQLTTITGIGTTLAAVILSEIGGDISRFSSPAKLAAYAGVDPTVKQSGDFTGTRMKMSKRGSPYLRRAIWLASTTAAFKDPAIHSLYERKRAEGKDHMTVIGHICRKMVSIIFAVLRDNTPYVPAVIPD

SEQ ID NO: 247400 - protein, 367 aa, unidentified
MKKVSTVTAAQTKNFASQQLTIGLDLGDRSSWYCVLDEAGRAVLEQRLSTTPKAMREVFGGMPRSRVALETGMHSPWVSRLLSELGHEVIVAHARNVRLIGESRKKDDRLDAQTLARLARIDPALLSPVKHRSAKAQADLTLIRARAGLVRARTALVNTARGLAKSYGERLRGCNVRNMNREKAEGLSPELQAALAPLLAGIESVSERIQEYNQRIECLARNSYPQVELLKQVKGVGTLIALTFLLTLEDAHRFRKSRDVGCYLGLQPGRRNSGQSEPQMHISKEGDPYLRTLLVQGAQHILGPFGPDCDLRRWGLRLAERGGRSGKKRAIVATARKLAVLLHHLWVSGEVYEPLHNSSPVAMPAAA

SEQ ID NO: 247401 - protein, 332 aa, unidentified
MSEITTLGIDLAKNVMQVHGVDARGVAVLRRQVRRSQLPRLLAQLPPCTVAMEACSGAHAWGRRSVQFGHRVQLIAPQFVKPFVKGNKTDRNDAEAICEAAQRPGMRFVALKSVEQQQVLTLHRLRTGAVKARTALANRLRGVLAEFGLVVAAGLGQLRRALPDVLEDAGNELPALVRAELAVQAGRLRELDAEVVRLSRRIEALAQADERTRALMQRRGIGPLIASAFAAEIADPRVFKNGRQVAAWLGLVPRQHSSGGAPRLLGISKRGDAYLRTLLIHGARAVVRVADRHPDPLSQWISALKLRRGVHKATVAVANKMARQMWAQLAHA

SEQ ID NO: 247402 - protein, 386 aa, unidentified
MRQPNDLSRSLAAFRQDTTLIAVIEMSQSSWLVAGIVPGLDRHPLKKLAVDEDALLRLLHRWRDEAVRAGRNIERITVTFEAGRDGFWLARWLRAHNIEAYVIHPTSVAVSREHRRAKTDRLDTELLKRAFLGWLRGEADHCSMAAIPTMEEEDAKRPHRERENLVAERTRIINRMKSCLVRLGIRAFKPTLQRAPALLPTLRTPEGTPLPANALAEMGRDLARLRFVEDQIKDIEAARLERLKQAPDEKSHAMVRLLARIIGVGIETADMLVREVLSRNLRDRRAVARYAGLTGAPDESGSKRREKGLARAGNARVRRGMIQLAWRFLMFQKGSALAQWYRARTVDARQGARKSLIVAMARKLLIELWRFVTTGQTPVGVEMRPV

SEQ ID NO: 247403 - protein, 337 aa, unidentified
MEKEWFIGIDVSKATLDFALCHLNNPSQFIYHQFENSTVGFKKMMTWLLKNGVNTTNGFFCMEHTGHYTLALCCFLQDQKFAFTLVSPLHLKKSLGITRGKNDKLDAKRIAQFNFLHHRTLKPMQLPSTYLLKLKNLMAFRERLVKTNVGLKNAIKDLKNLGELIDNTFIINQSEQHQKLIEKQINDTDKQIEVTLKEDDQIKKQFDLINSVVGIGLITAVAFIIYTQNFTAFSNGRQFACYAGVAPFEHSSGSSIRGKTKVSPLANRKMKALLSNCASAAIQHDPELKLYYHRKLKEGKAKMSIQNAIKAKLIKRVFATVARKTKYVPIMQYSRAA

SEQ ID NO: 247404 - protein, 370 aa, unidentified
MKEYSEAFIGFDTAKKKHAVAIADVGREGEIRYLGEIDSSPLTIERMIRKLAGRYEKLHFCYEAGPTGYGLYRQVRGLGHHCTIVAPSLIPKKSGERVKTNRRDAVSLARLFRAGELTSVWVPDTVHEAVRDLVRARETASQDLRRKRQQLLSFLLRHGRIFSGRQHWSRAHLRWLAQQKFDHPAQQIVFQDAVDAIDDAAARLRRLDAQVAAIVPSWSMAPVVEAYQAMRGVSFAVAVTFVADIGDLRRFDNPRQLMAFLGLVPSERSTGERVRRAGLTLAGNKRARRVLIEGAWSYRYPARVSQTLQARLEGLPKAVREIAWKAQIRLCARYRRLNAAGKKLPVVIAAIAREMAAFLWAIARHVAPAA

SEQ ID NO: 247405 - protein, 392 aa, unidentified
MIYIGLDIAKNKHDCFAMNSDGEILIEKLTFQNNIYGFNSFFNSVSQFNESFENIKVGLEATGHYSNNILNFLTSKGFNVYVINPLQTNLYRKGQSLRKTKTDKLDARFIATMLITENLKPYSNLSYHISELKSLVRHRFRLIEERSKFKVSLSRLVTIIFPELEKIVWSISQNSMLYLLNELPSTKEISECNLKHLTFILEKYSNGKYNRDKAIEIRELARISIGTSNRSLSFELKQVIQTVLFLQSQIDDIDKELKILVDRLNSPIMSIPGISYVTAAFILAEIGDINNFDSPAKLQAFAGLDPSTYQSGKFVATHSTMVKHGSKYLRWALLNATRLVCMRDKSFNEYKNKKLAEGKHYFVALSHTSKKLIRVIYYLLKTNKSYQLQKVA

SEQ ID NO: 247406 - protein, 312 aa, unidentified
MDALNIGIDVSRDRLDVAANTSSMAPFHVPRDHDGLEDLIARLKPLGAARIAIEATGGFETVVAAALASAGLPVVIVNPAQVRAFAQALGKRAKTDPIDAAVIARFAEATRPALRPLPDAETQALGDLVARRRQIIAMIGAENQRLKRSSQRTAKSINRLLKALQKELTDIDQDIDDSIRRSPHWRAKVELMKSVPGIGDQIARTLIAELPELGTLDRRQIAALVGLAPWTRQSGQWRGRSFIGGGRAGVRTALYMGALVAAHHNPSLRAFRDRLVAHGKPKLVAIIAVARKLITILNAILRDNHPWREQNA

SEQ ID NO: 247407 - protein, 429 aa, unidentified
MQAVASTEAARIVWEAVLEHCCGLDVHKQTVTACLLIGALDQQPRESLRTFPTTTKGLLELRDWLEQNDCTHVAIESTGIYWRPVFHILEDVVTVLLVNAYHMKQIPGRKTDLKDAQWIARLLRWGLLKPSLIPPKPIRELRELCRYRKKLTEQASAEKNRIQKVLEDANIKLASVASDIFGLSGRAMLDALLAGDMSPEEMAELARGKMRSKIPQLADALEGRVGEHHCFLIRMHLEHLGYLQQAIAQLHQRIDEKIKPYQHQIDLICSTPGFSVTSAQHVFVEIGGDISLFPSEGHLASWAGLCPGNNESAGKRKSGRTNKGNRWLRGALVQTAHAASRTKGTYLKSFYHRVAARRGKSRAAVAVAHKQLASIYGELQYDRTYHELGESFFDRLNQKALEQRLVQRLQGLGYWVQLQPQTEADRAIR

SEQ ID NO: 247408 - protein, 343 aa, unidentified
MVHYVGLDVSLKQTSICVVNQVGSVVREGVVDSEPEAIAAFVRSKAPGAVRVGLETGPTATWLWSELKQLGLPVICIDARHARAVLKMQINKSDRNDAAGIARIMQTGWFKEVRVKDLGSHSVRALLASRALLVKIKRDLENQIRGLLKNVGLVIGRAKFNVFAVRAEELIEDRPELIAVVGPLLKARQAIEQQTDDLDRKVLKLARHDVQVRRFMTVPGIGPITALCFKATVDDPTRFKRSRSVGAYVGLTTRRHASGEIDWTGRISKCGDAMLRSYLFEAAGVLLTRVPKWSALKAWGMRLAKRNGLRKATVAVARKLAVILHRMWMDRTEFNWSKKEVAA

SEQ ID NO: 247409 - protein, 390 aa, unidentified
MVFVGIDVAKDKHDCFIISSEGEVLAEVFTITNNRAGFECLLQNIYSCAGKSEKIKVGLEATGHYSYNILGFLLDNGLDSVVINPLHTNLYRKSLSLRKTKTDRVDARTIAAMLMSDVDLKSYTDTAYHNEELKSLTRYRFDKVRARAKLKQSVARLVNILFPELEKLVPSLHVASVYALLSQLPGAYQIATCNLTRLKTILADASKGRYGRDKSIEIRNSARQSVGSRMPAKSLELQHTIRLIQEMDMEINEIEVQIEAMMVEINSPLITIPGIGTRMGAMILAEIGDFSQFDSPDKILAYAGLSPSIYQSGQYICGHAHMEKRGSRYLRFAIYTATKYVCLWDPTFAAYLAKKRAEGKHYNVAISHAAKKLVRLIFAMERSGQAYRAA

SEQ ID NO: 247410 - protein, 449 aa, unidentified
MKILALDLGKFNTMCCFFDTKTRKHSFLNAPTERNYLNTLFKNHKIDLVVMEACGPSGWINDLASSHGLKTLVCSTNEDAWKWSNVKRKTDKDDALKLSRMAAMNELKAVHMPSETHREFRSLVKYRKTLDYRINKMKCTIRAWFVNHGIEIDTGEKAWHSGRERINSFRKPLVECQPNELWKGELDLELTQFDALTVQLESVVKKLEALGKADPRIQRIRTIPGVGPRTAEILVACIDDPHRFTTGRQVSAYFGLVPRQYQSGETDRNGRITKRGNPLARTILVECAWASLRYNDWAKGVYDRICGKQKTRKKKAAVALARKIAVLAWAMLRDEKDWAPTHMIQVTESFGKMKRELKQSLQSMKPKENSDQRKSRLRREAREAKAVADRPKKSVRTATAKRSRSKTTVVPNVAPPPNPTKRTTPKSTARTNLKPKPKPRRAGKLVSAG

SEQ ID NO: 247411 - protein, 418 aa, unidentified
MNEDGNTRASRRYVALDIHKHYCVIAGVDREGRVVLQAVRVEHADLEGWLRKNLLSTDHVVLESTTNAWHVYDLLSPLVEHVVVANPIRVKQIAQARVKTDIRDTLILARLLAANLVPDVWVPPQHVRQLRQLLSQRRQLVATHTQIVNRMHSVAHRHHLKHERGKRFNEKNTAWQKDRRLSRVEQFQLELEMENRAYIEKQIGRIGNEVAKMSHQKPWAESMTYLMQLPGFGVITGMTVLAAIGEIQRFESARHLASYSGLTCGLEQSGTKLVSKGMTKEGRKELRWAMVEVAQRAVKSDPLWTRRFQEMQKRMHRNQAIVAVARRLLELVWYVLTRRQPYRYFSHERIAYKYLTWAWQMDEAARDGLTRQQFARYYLMRLGIGHDLIRIALDPKHPRRLASEAELLILRPELNHIE

SEQ ID NO: 247412 - protein, 484 aa, unidentified
MKLTKQQKQQKRTALRSEPAAGWHSMNRKQRREMMRKIQAEDLNLKMVHPDAAGIDIGNESHYVAVPPGRDSVPVRCFGCTTAELKQMADWLKQCGIRTVALQSTGVYWIAVYDILEEAGLEVYLVNARETKNLPGRKSDVQESQWLMKLHTYGLLRNSFRPSREIRTMRTYWRQHNDLVQAAGQHIQRMQKALTQMNIQLANVLSDISGKSGQAIIHAILAGERDPYELAAMCEANVKASEEEIARALEGNWQEDLLFMLKQEQAGYEFCQQQMAECDERLYTYLQGRPDRSAGASLPREKRKGRREKRKKNRPQFDVREQLFRLTGTDLTRIDGIDVLTAMTVISEAGWDMSKWPDEDHFVGWLRLCPDNRISGDRVIGKGRLPTRNRLSVAFRMAAQSLRESNTYLGAQFRRLRRRLEPAVAVKAMAAKLARLVYRMLRYGMQFVDRGAEVYEAAHRQREIHNLKRRAAHLGFQIIQVPAA

SEQ ID NO: 247413 - protein, 415 aa, unidentified
MKKVYDNCCGIDVHKKLMVACFIHGKGQEVREFGATTRELLELADWLSQGGCQMVAMESTASYWKPLYNILESSGLEAMVVNARHLKAVPGRKTDVKDSEWIADLLQHGLLQASYIPDRAQRELRELVSYRKSLTQDRTRELNRLQKMLEGANIKLSGTVADINGKSARNILDTVLSGTGVDSAKYDEMYSKNVIAHNLKASKEQIIDDLNGVMSPLQRKMMRELLAHVDELDAHIRHLDDDIDGHMKQDEKQAVDAIRPVTGPGAKSAQAVISVIGTDMGRFPTDAHISSWAGLCPGDNESAKKRRSGKTRKGNSLLRSTLIVCAHSASKVKDSYFHAQFQRVSAHRGSKRAYVAVAHSMLIAIYHILKDGVEFKDLGADYYNQFNKERKINAYLKKLKALGWEAPTAMAGQPA

SEQ ID NO: 247414 - protein, 359 aa, unidentified
MTQHHSDRPDIVGGVDTHKDLHMAAVVDTHDRVLGTASFPTTRHGYKTMLAWMRSFGELSRVGIECTGTYGAGLLRYMQRAGITVLEVTTPDKTVRRKRGKNDTIDAENAAHAAYAGVRTVTPKTRDGMIEALRVLKVCRKTAVAARRVALQMIQTQVVSAPEELRDQLRNMSRMQLIRTLAAWRPDMSGYRDVAMAYRIALKSLARRYLELHDEVADLAVMIKAIVDELAPELVSRTAVGYESAAQLLITAGDNPDRLGSEASFAALCGVSPIPASSGKTQRHRLNRGGDRAANSALHIIAIGRLRLDATTQAYVSRRVKEGHSKLEAIRCLKRYIAREVYYVLRHRHQEINQATIAT

SEQ ID NO: 247415 - protein, 350 aa, unidentified
MDRYIGLDAHTSSCTVATIGQSGKQLRSQVVETNAKALIDVIRAVPKDRHLCLEEGPHSNWLYEVLSPHVQEIVVALVNESRGPKNDKLDAFGLAEQLRIGAIRTKVYKKRGNFGRLGYQVKAHTLLVADSVRVQSRIKALLRSRGVAVSGGDVYSTKGREEWLSKLPQSARSLAELLFLEYDGVEELRQRAEREMILEARKHDVYRIIRTCPGIGEIRAAQILPVVVTPYRFANKRMFWSYCGLGIVMRSSSDWVRGQDGGWMRAPVQQTRGLNRNFNRVLKTVFKGAATTVVGRAQDEPLYRHYVSLLDGGTKPNLAKLTIARQIAAIVLSLWRSMEVYDPKKLGHAT

SEQ ID NO: 247416 - protein, 419 aa, unidentified
MPFKIFRKNCCGLDVHKTWIYACIGITDTNGRTEYKQARFSSFSKGLQELADWLAKYSCTEVCMESSGKYWIPVFNVLEESCCVVLAHPKYTKPQKGSKTDRKDAKWICDLFMCDMIKPSFIPSPEIRHLRDLLRFRTKMTNQITGMKNRALNCLTVSNLKLDDVFTDVFGKSSRSIIQQILEHPGETFDVAPYVNYRCKHPIEEIQAAVDGSISPEQAAKLKICLSFIDEQQKRIAELDAEIFRLAEPHAAILDYIRTIPGFSKDPLTAIRLLSEIGPDMSVFRTSKHLVSWAGCCPRNDQSAQKVKSTRISRAGSYLKPLLVQIANALLKSKEHPEFKERYRRIKARRGHKKAIIAVCRMLLTAIWNILSKLEPYSDKGYLADKLTEHSVVISKSEGLALLRKRGYIFRDEIADTCS

SEQ ID NO: 247417 - protein, 415 aa, unidentified
MKIVFPTCCGVDVHKTFLVATIITTPTDSLQPHYQKKRFSTFNSDLNRFADWLLKHDCLDVCMESTGKYWVPVFNILEKRGIRVVIANPKWVKAVKGNKDDTKDSKWIGDLFRIGLVKNSFIPNLDIRILREFTRYRYKLVSMKSSEKNRFQNAFTVCNVALDSVVSDMFGKSATAITDYLTSDECFAPEHCVSLLQRSLKKKAKQVLESIEGYSIADEQKLRIKIIREHHNFLEQMIAKVDTCVNEMVKKYEGEINLLCTIPGIERNSAITIISEVGTHMEQFASSKQLCCWAGLTPGNNKSAGKKKSVQISRAGVYLKPALVQVAHAAVKDNKHPYYKLKYERIAKRRGKKRAIIAIARMILTAIYSMFRTGEVWNPVDLFKIDMPEHLKGQQLAKAIKQATKFLEKQGLTVA

SEQ ID NO: 247418 - protein, 487 aa, unidentified
MSTSLAEIGVGIDVARYHHVVQFVGPDKKPLRPKLIVDESKNGYDKLDNALRRLHQQFPNALFRCVLDDANVYGRNIKAFLEKLPYPLVVSCVNPLTNKRYKQVFLQDNKNDALDAYSVARFAVAEKPQPAPKSDEVSDLLKVLVSRLDSQTQHTTRLINQLHQVLSLAFPEFATYFHNLNTRTARTVLLKWPTAEKLAKAKINELAELKPAPRSKPLGHKRAQKLILAAKNSVATLRGPLAEDLIRDIVKQLDLSMKSEAKLQKAITKIYSEHQPNYLTTIPGVGPFSAAVLTAIIGDIARFPTPEKLVGYFGIYPVDDESGTRKGHKVMSRKGNDLVRRILFMASLVGVRFNPVLRALYARKRSEGKNKMVALGHVMRKLLHLVYAILSKKEPFDPEYATKRSTSTQQQKENEPTEPQPSNKPEGKRSSEGSEIQNTAEPSSEQDAEPTKKYAALDECRGAPVSSKPSLPRQTERTDTQKSPSMA

SEQ ID NO: 247419 - protein, 350 aa, unidentified
MMIIGCDYHPGFQQIALVDSETGELNERRLEHRQEAESFYRDLRAQGVSVRVGMEASGHARWCERLLGELQFELWIGDAAEIRTKRVRKQKTDRQDAQLLLRLLLEDRFPRIWVPSWENRDLRQLLWHRHRLVQMRTRVMNQLHVVALNEGVRRKKALWRPAGRAELESLVLARWASQRRQDLLELLDQLTPKIQELTRALEQEVEKRPVTQQLMKHPGVGPLTALAFELVIGTPERFGCGKQIASYVGLVPSEESSGDRRRLGHISKQGNSLLRFFLVEAAQVTVRSNPEWRSRFFHLAMRRGRKIAKVAMARKLAVRLYWMWRKGWDYEQMKKFGSHAGEPGNRQGVQ

SEQ ID NO: 247420 - protein, 426 aa, unidentified
MKVVYERVAGIDVHKDMIKVAIRSPGEKPWTRKTEIVEYRTFYGVLQQMAAELRRRGVTHVVMEASGVYTEPVYYALAERDFTEIAVINPGHAKALRGHKTDAKDAARLAELFECGLLRGSYIPVPELKEVRDLTRYRIKTVQARTSEIQRLAKALESAGIKVGSVASEITGKSVTAMIEALIDGERRGAVLADMARGRMRTAGKLADLSMALAGRFTEHHALLCRLHLDRIAVFDTAVAGLEDQIAAKAACWQREQNLLKTIPGFGDAVAQAWLAEIGPVPHAHFPSHDKLASWVTLCPGNNISARKRKHGRTGDAGTYIKPMLVQAAWAAIRARGRLQARYHRLVRRFGGEKNPAAKKKAITAIAHTLLKIAYQVLKSGRPYQDLGADFYTRRESPEQRQAWLLRQLQKLNPGATITIAPPEAA

SEQ ID NO: 247421 - protein, 312 aa, unidentified
MPENTKPDYVGVDIAAERLDYCVNETTEGNCANDTVGRAELIAKLKPLPHPRVICESSGGYEKLVVAELLAGGIEVCMVQPGRVRAFAYAEGLLAKTDRIDARLLRRYAQKVQLRLAVPVDAVLTILRELLEHRRALTTQLSEVEGRLPLAGATLAKLLERQVAFLKKQIEQVEKMIRQHLDHDPDLRGKSARLQQIKGVGPVLASTLLAYVPELGEIESPQLSALIGVAPHPRDSGKSHAPRHVRAGRSQVRHVLYMAAVCAMRCNPILAAFYQRLKANGKPPKVCLVAVMRKLVCLMNRLILDPNFILAH

SEQ ID NO: 247422 - protein, 341 aa, unidentified
MKYVGIDLASKSSAVAVMDEQGKVLEQREVATDAGQLNWVLQAYGPVSAIVESSPLAEWACQTLEEAGHTAQIIDARAAKHLMNARKKTDRRDAQTLAQIVRSGWFQPVHRKSAAARMERTQMQARQGLVRTYCKLDSQIRGLLRANGICLGHISKNRFAQRVREVVQQRNPELEQALEPLLAVYEHSLERAEAMRKQMQAQQREDQLQRQLQSVPGVGPLTAKAFAATVDDPQRFANGAQVADYVGLTPGVNQSGERCVRGAITRQGDHLLRWHLVEAAHAMIRQSRDCRLKRWAQQLAEKKGAAKARVALARKLAIVLWRLWIKGERFEAEHGATAAAA

SEQ ID NO: 247423 - protein, 386 aa, unidentified
MRAVCGLDVHKDSVFLCILCETGEIIEKVFGVLTHQLRDMCRMMQSHGVNEVTMESTAVYWIPVWRVLEPHFHLKLVNPYFIKQLPGRKSDVKDAQWIAECTLKDLVRGSFVPPERIQQLRQYDRRIYDLDAEIMRKLSKLDAVMQRCNIRLSNYVSNTDTKSYKNVVRKLCEGVTDPEELIKEIYSRITNRHGRDTILAALTGVVSEAEKDTMRQLRDELDLAERHKQECQDKMMHICKTYYPEELRRLMTIPGIGERAATSLIAEIGVDMTKFQTAAHLASWSGLKPRNDESNKKIKSRRITHGNVYLRKTIIECAWGASRTKDCFFSHFSYHQTQVRKKNKMKVLVAVARKLLIAIWHVLHDETDYKDFSVNNDCETSVAKNG

SEQ ID NO: 247424 - protein, 421 aa, unidentified
MRGLSTKRVRMVKEGTLIATVDIGITNNTGYCTTLDGRDTKSFRFDNTKEGFEKFWWMIMASKNRFGCDEVLVGYESTGPYAEPLVHYLANKQVKIVQVNPMHTKKMKEVNDNSPLKTDDKDPRVIADIIRLGRALTIIVPEGDAAYLRRLNNARERHVGEQTALLNQLQQLVFLIFPEFKTVLKNMKGKTAQHILKRYTTPERIGTLSKEALGEEMRKRSMGKFGIKDAESLIGLARETIGIKEGLAGIFMDIRHILMQLEAEGRFISEIEAEMGAILKRIPCSLRLLSIKGLGTVSVAGLIGEVGDFSKFSTQSEIMKLAGLDLYEISSGKRRGQRKISKRGRSLLRKILFYAAIQMIRKNGIMYDYYARLIGRGMERMRALIAVSRKLLRIIHAIVRDNRDYVGQYQTPERRVIKMAA

SEQ ID NO: 247425 - protein, 347 aa, unidentified
MGYFAGLDVSLEETTICVVDDAGKIVREARVASEPEALVAFFGACGMTMERVGLEACSLTAWLHAGLTEAGIPAICIEARQAKAAMGAMPNKTDRNDARGIAQIMRTGWYRAVHLKSPSCRAWRALLTARRMVLNKRRDVENGIRALLREVGLKVGTPSRKDFPARVRELAADDPVLMSLAESLLSVIEVMTREVERLTKRAIDEVRVEPTCRQLMTVPGVGPLTALAFRATIDQPGRFQKSRDVGAHLGLTPRRYQSGETDVQGRISRCGDELARTALYEAAHSLLIRSTKWSGLRAWGMNIAKRRGMARARVAVARKLAVILHRMWVDGSQFRWGKQAAAPAVAA

SEQ ID NO: 247426 - protein, 302 aa, unidentified
MGWTPPRRPWCARVVVFVTTEQEASVSEVSTIGLDLAKHVFQAHGADASGKVVFRKRLRREKVLEFFAGKPACVVAMEACSSAHHWARELARLGHIVRLIPPAYVKPFVKRQKNDAADAEAICEAAQRPTMRFVAVKSATAQANAVVFRARDLLVRQRTQAINALRGHLGEYGLVVAKGPGHVIKLVEHVEDPASNVPDAARLVLRTLVEALRFLRERIDLLDREIARRARENNEVRRLMSIPGVGPITATALAALAPPAGAFRKGRDFAAWWGSRLRSTLPAAGRSLARPQKWESERCGGS

SEQ ID NO: 247427 - protein, 398 aa, unidentified
MQPTRISNSMPGEDVLAVALELSSGAWKIALHDGKREKPAIQTVAAKVPAHRLDEAMQAIEKIKTKWGLGPGVRTVVLYEAGQDGFWIERALSRLGYEVVICDAASIPVERHARRAKTDRLDAIKLVLCLRAWLRGEHDRMHVIRVPAVETEAQRHLVRDRGELQKEALQHRDRIRKLLRTVGCWQEVEGDIAKRLAKGEISCYDGAAIPAHLHARLTRECQRLALVQQQLAALEKDLVRQLPEPAQKRIADLQRLKAVGQVGATRLVLELFWRSFDNRRQVGACVGLTPQPYDSGQSRVDQGISKQGNRRVRSLLIEMAWLWLRYQPGSAMTQWYLQRTQGNSQNKRGKRIAIVAVARRLVIALWRYLTHGILPEGALLKNRKTTGLKRSAGEVAAI

SEQ ID NO: 247428 - protein, 355 aa, unidentified
MSEIKYIGMDVHQTTTLIVVLNAAGKKLSSTIVADRAQELLAYIQAQRGILHVTFEEGTYATWLYDLLTPHVARVVVCDPRHNALLQAGSKNDPIDAHKLAELLRLNALRPVYHGQQSLRSLKELSRSYLALVQDSTRVMNRIKALYRSRGIACGGKEVYSPRHRVSWVSRLPEAGVHLRAQLLYQELDNLRHLRRQAQRALLAESRKQAASRSLRSVPGLGAVRTALLLALVQTPFRFRNKRLFWAYLGLGWVTRVSAEFCLVNGQVKRSGKAPAVRGLNPNHQRQLKEIFKSAASTALQRPGPWQYFYLQRVALGRKPALVRLTVARKLAALTLSLWKKGGRYDVERLRSAAA

SEQ ID NO: 247429 - protein, 346 aa, unidentified
MTIIGCDFHPSWQQICWVDGETGELMQQKVAHAPGEVEKFYRRFAAPALIGMESTGNSQWFVELLERIGHVVWIGDAAKIRASDVRQQKHDRRDAELLWRLLEEKRFPQIWTPSSEQRDARQLLLHRHKLVRVRAQVKNELQHLAMNRGMQKKRRLWSAEGQQALRELPLAPWAGRRREDLLKLLSMLDGQIASLDMAVKAAAEQNENARLLMTQPGVGPVTSLAFVLTMGDVSRFPRGKQVASYLGLIPREYSSGGHQRLGSISKQGNRFMRMLLVEAAQTAVRLDPQMRSEYLHRCHRKPKGVAKVAAARKLAIRLYWMLRTKRGYPGIVRIESSPRVPLVSAS

SEQ ID NO: 247430 - protein, 385 aa, unidentified
MEAARGVVLGFDVGRYSHHMTAIDARTGEVVASRGVEQTEPDIREAIEPYALGDAAVVVDQPGDLSSLLLAVARDMGLGVGFITPRAMAKGIELYGGELKSDAHDSFVIADLRRADVEELASLMSYDRELTDDVRRAASRIHELLLATCPALGAVYAGQRVKQRLPLAMLARFGGAGGLSAAGRGEVEGWARGQPRCGARGLAFVGSALDAVGSQGVATTSSPFYDELLRIEAASLRSALDAREAVGARVDELLGRIPDAQVLLSMPGVGRVTAATFVSEVPDVGAFASAAKLAAYAGLAPRVRQSGRSLNSVTRPRAGNRRLKRALVLSAARSVDFCEESRAYYDRKRSEGRCHYSAVVALARRRINVMYAMLRDGKRYESRLG

SEQ ID NO: 247431 - protein, 342 aa, unidentified
MAKIIGCDFHPRFQQIAFLEQETGEFGERRLSHPEEAERFYRSLAGQAVRIGVEATGNFGWFQRLMQELGHEVLLGDATEIRASNPRKQKTDKRDARHILSLLVQDRFPAIWQPPVENDEMRQLLLHRCRMVRMRTRIKNQLDGMAKNEGWLSPRVWSPRRREQIEGLPLTGWRAERRRDLVALLEDLNRRIGPLDEAVRAAAEANGEARLLMTHPGVGPVVSLAYVLVIGDWRRFARGKQVGSYLGLIPVEESSGSKRRLGQVSKQGNSLVRWLLVEAAATAQRYDASWHRQYVRLSMTKHHGVAKVAIAHKLAVRLYWMLRSGENYEQVVERGSHAGRSE

SEQ ID NO: 247432 - protein, 347 aa, unidentified
MIEVGMDQHKRFSVAGALNPETGEVVAERRFEHDDPQSIRSFLESFEGPVRVTLETTGNWYWLADLVEEAGATVRLCHTVEAKRRRRGKAKNDRLDALALAELSAEDRVPEAYVPAREDRDRRERHRWRIRLVRLQTIVKNAIHALLDKLNIQVPFEDAFGKGGRACLDALSVREPYASHLRSGLRILDAIGGQIAPEEAAIRGELQSDPQAELLMSAPGIAELTAYLLLYEIGPIERFATEKNFASYCCLAPQTAESANWRGRPGVGRAGNLYLKEAFTNAALGAIRKDPTLRAFYNRQLRRNGPQKARVAAAHKLAVAVYYMLRRRQPYRPAPSMNKQTSGKPVL

SEQ ID NO: 247433 - protein, 360 aa, unidentified
MAQGHTATCIELGSGVVAAHVFAPRHFAGILAEIRPGDVVVLTDLGAPQPGDIAFRLVRAGAILAVSFAMIVVALHEIWLKHERLGRVHACLEATGGYGLAAALALHDAGHRVSLINPAQIRDFVRTRLGRNKSDKIDCAHIRDYGALFDPPAWTPPSPSLRRLCELQTMRAGFVAGKVEWQNRAGSCPGDAAASGLAQATIAHFEAQIEAVNRAIAETIDHDDELRGKRDLLLTIDGVGEVLAAVILAELPAPDVISTSAQAVAYAGLNPRQFQSGTSIHAPTHISKIGNARLRSALYMPAMSAMQCNRAVAALVQRLRAQRRLKGKQIVVAAMRKLLVLCFGVLKTGKPFDPAIAMPA

SEQ ID NO: 247434 - protein, 457 aa, unidentified
MSKRSKKSKFQQFNVQSLPEHLRHINLNAAGIDIGSERHMVAVPEGRDDVSVREFGTFTTDLHALADWLQQCGVTTVAMESTGVYWIPLFELLDRRGFEVKLVDARHVKNVSGRKSDVLDCQWIQQLHTYGLLAGAFRPTDELCVLRSYLRQREMLTQTASMHIQHMQKALQQMNLLLHNVVSDITGVTGMKIIKAILAGERDARILARNRDERCQNSRATIAKSLVGNYRAEHLFALQQAVDLYETYQTKIADCDEAIVKHVDKQPDITDDTLPPGEKHIQARERIRGGVDVRELLFKKSGVDLFAIPGLAADTLLTLSSEVGFDMSPWKTIKHFTSWLGLCPGTKISGGKVLNKKTKRNPNRATQAFRMAAATQARSKTALGAFYRRIKSRTGGKQAITATAHKIARIYYTLLTKGTTYVELGQQAYELKYKERRIHHLMAQAKSLGLQLVPCAT

SEQ ID NO: 247435 - protein, 412 aa, unidentified
MQTLVERGCGLDVHQATVVACLLQVTRDGRVQKQMRTFGSTTRELVCLCEWLRSEGCTHVAMESTGVYWKPVYAILEGAFEIVVANAQQVKKVPGRKTDVKEAEWIADLLCHGLLRSSFVPPKSIRELRDLTRYRRKLVESQAAERNRLLKLLESANIKLSSVATDVFGVSGRLMLKALVEGKASLAEMAELAKGKLRNKIPQLRLALEGKLEEHHRFLLQLQQDRLDAAGRDLATLEQRIQQKLEPYAAQVALLQEIPGVDWTLAAVIIAELGIDMSVFQSVPQLASWAGVCPGNNESAGKRKSSRIPKGNIYLKTALVEAANAAARTKGTYLRDKFYRLKARRGYKRAVVAIAHKILVSIYHMFSQQVSYNDLGDLYLDKLNKNHLTRNLVHRLERLGYSVTLTLQQIAA

SEQ ID NO: 247436 - protein, 329 aa, unidentified
MHRKRSQVAVIAEDGQVQLNKNVVNGSEPMLRLIGELPSGTPVAFEAAFGWGWLVQLLEDYGFEAHLVHPLQCKAIASARLKNDKVDAAILAQLLRADLLPEAWIAPPQVRQLRALLRHRASLVRLGTQQRNRIHAVAADHGYDRSASYWTGPGRGWLAELDLPPASREIVTDCLAVIDGLAPVIDRIDGELHQHAKADPRVKVLRTLPGVGQFTALVMLAEIGDISRFPSARKLASWAGLTPTVRGSDRTVRHGHISKQGSAWLRWVLNQAAQTAKRSPEFAATYSAIAKRRGKKIATIAIARKLLTRAWHLLNEMQATGTVTSPRRP

SEQ ID NO: 247437 - protein, 435 aa, unidentified
MDKENEDLWQQRRYYMGLDWAKEYHEIVVVDREGRIVLDLRIEHTAEGWRRLREKLLGLAAPDLSVVAATVETNRGPAVERLLELGCAVYPINPKAAQRYRDRKAPGGGKTDHLDAFSFADALRTDGHGWRPLTPEDATIQELRLLCRDEIRLIEQRTAFVNQLQESLHEYYPCALEAFDDWTQPASWAFVERFPTPQALKKAGKRRWEHFLHSHRLYRPETYQKRLAVFARATEFCGNQAVTNAKSMLAVSLAKQLRVLAQQLKGYRQRIERLFQEHPDHDLFGSLPGVGAKLGPRLLSECGEDRHRFEDHQALQCYAGTAPISFQSGQIRKVTFRYACNKNLRTAVHLWANLSRKKCSWAQIYYQQKRLEGKSHACALRCLGQRWLKILWKIWQTKRPYDEQLHMRHQIQHGSWVLSLIPAIHTTHELTIESL

SEQ ID NO: 247438 - protein, 353 aa, unidentified
MSKQDVFAGKAVVSVNQSTHPPQASLFCGIDVSAETLAVAVIELGQPFQQREFANSASGHKALLAWLGRSKALVRISLESTGIYSMDLALALDAAAGIEVAVLNPKQVHSFARSLRRSKTDAADAAVLAEFSMRMEFKPWPRPSRSALALRAISRHIEALGVEHTRAFNRLHAAQGSRATPRCVVDDLKRSLAALKRRILKLRCEARAQIEDDERMKEQFRLLTGVPGIAEISALQILGELVLLAPDLNARQWVARSGLDPVHQDSGTSVHKPAHISRAGSRHLRRALYMPALAAVRWDTHLKAFYEVLLARHKRKLQALMAVARKLLHAIYGIFKTRTAYDGNKLFPQLIIA

SEQ ID NO: 247439 - protein, 312 aa, unidentified
MNNIFIGIDVAKDSFDIHVKPSGDHWTCTYDSQGIDTTVDRLAALEPDSIVLEATGGYETELTASLSIAGLPVVIVNPRQVRDFARAMGKLAKTDALDAEVIALFAERVRPERRPLPSQEERALMELVSRRRQLVDMRTMEINRQKHIQSQPVAESVKEIISTFDRQLKDIDREIKQRIKDSPIWRAKEKLLKSVPGIGDGTAAMLMASLPELGSLNRRQIASLVGLAPMNRDSGTFRGRRMIRGGRTAVRTSLFMPTLSAIRHNPFIKTMYNRLIAAGKAPKVAITACMRKLLTILNAVIRDSRPWQTVTP

SEQ ID NO: 247440 - protein, 364 aa, unidentified
MKKVSKRGPQMEAKHNSKPAMTVGLDLGDRFSQYCVLDTEGEVVEEGRIQSSEGAMRRHFEGELRLRVAVECGTHSPWVSRLLSELGHQVVVANARRIPVITASTSKNDRNDAEQLARLAGYDPRLLSPLQHRSPQRQQDLNLIRVRATLVRARTMLINALRGLVKSAGSRLPSCSTESLAVRALAHIPSALAAAARPLLEQIAALNGQIAGLDREIEKLREKYAEIGILRTVPGVGPVVAAAYVLTLDNCDGASNRAAGAWLGLRPRQKQSGDSHPQMRISKEGDRYLRSLLVQSAQYILGRFGPDSALRRWGLKLAQSGGKRGKKRALVAVARKLAVLLHSMWRSGKRFQPFPQPAATSAVA

SEQ ID NO: 247441 - protein, 385 aa, unidentified
MSQLNDLSRSLTSLEQDNAIIAVIEMSQSSWLVAGIVPGIERHPLKKLEPNEGELLHLLMRWRAEATKMGCTITRIAVAYEAGRDGFWLARWLRAHDIETYVIHPTSVAVSREHRRAKTDRLDTGLLKRVFIGWLRGEPDHCHMVTIPTLAEEDAKRPNREREGLVRERTRIVNRMKSCLARFGVRSFKPTLRKAPERLATLVTPEGVPLPANTLLELRRDMARLRFIMDQIKEVEEARGQRLGQAPQEKSHAMVRLLARVIGVGIETADMLVHEILSRSLRDRRAVARYAGLTGAPDESGSRRQEKGLAKAGNARVRRGMIQLAWRFLLFQKDSALAQWYRTRTESAGKKRKTMIVALARKLLIALWRLVTIGEVPAGVVLRAA

SEQ ID NO: 247442 - protein, 434 aa, unidentified
MDNPSNYQQRGVIVNVDCTVVGIDVGKDSSYFCVLTPGGLLHRKPTKITNDAKGLTKLVTCLRKTEETLVTKPAILLESTGHYSERLVCFFIRNNFRVFLINPLQSHSIKNVSIRKVKTDKVDCEEIARLFFVLDLREYEMPDDDVTNLKILTRAHHHLGKTRVQTINQLTSKIDQVWPGFTEIFAVESKTAQSLLLAYPAPAQLLDAPKKDVVELIRTNSRRGQEYAKNKYKALQQCARDALTFGTQLDGYFTCIKLYVGMMQQADEKLNQLEIEINAFAVKVPAVELIKSLPGFGPKISSIIASEVGDIDRFDRSKQLVAYLGMDPSVKQSGKFVGTKNKLSKRGSPYARRALYLAALVSIRKNRNGDYVNRVIHDYYQKKIKNKTRKQALGAVMNKLVRIIFSVLKNRRPFVMITPEEHNKKYAAGLLPAA

SEQ ID NO: 247443 - protein, 319 aa, unidentified
METPQVSFNQAVSRGCGLDVHKKTVVATINGEGLRKQTREFDTVTSSLKELRDWLLDNGITHVAMESTGVFWKPVYNILEPAGLTVWVVNAAHVKYVPGHKTDKKDSAWLCKLLLAGLLKPSYIPPKEQRELRDLTRYRTKLIQSNASNKNRIIRILEDANIKLSSVLSSTSGVVATKLIDKICDAEVITMKDIDEVYHKKLTATKEEIFEACQGFITQHHVYMLQIIRQEIAGTLQTIESLNQRIKEVLLPYENALKMLQKVPGINSKSVEDLVAEIGLDMNTFPTERHLASWAGMSPGNNESAGKKKVVVHRMVTNK

SEQ ID NO: 247444 - protein, 391 aa, unidentified
MIFVGIDVAKDKHDCFILNSEGTVLADVFTIANNRIGFETLLSRIQSCSQGESKIKVGLEATGHYSYNLLGFLLDSGLTTYVINPLHTNLYRKSLSLRRTKTDRIDARTIAMMLMSDVDLKSYSNTAYHNEELKSLTRYRFDKVKERAKLKSSVARLVNILFPELEKLVSSLHIAVVYALLSNYPGASYIANANTEELAETLCTASKGRYTKSKTAEIQVAAGVSIGSKMPAKSMELKHTIALIRELDKEISEVESAIDKITSQMDSPIFTIPGIGRHMGAMILAEVGDFSNFASADKLLAYAGLSPSTYQSGQPQNCYAHMEKRGSRYLRYALFNAAKYVCLWCPTFSAYLEKKRSEGKHYNVAISHAAKKLVRLIFAMQRSGKAFLADY

SEQ ID NO: 247445 - protein, 343 aa, unidentified
MDHSAGLDVSVKETSICIVDDAGKIVREVKVASEPEALLSVLTNPGYHFKRIGLEAGPLSQWLYSALAEAGLPVICVETRHMRAVLKAQINKTDRNDARGMAQMMRVGLYRPVHVKTLRSQKLRMLLTHRKLLQSKAIAIDNDLRGTLRNFGLKVGVVGTVKFEARIKELVENLPDLAELVEPLLVVRRVLREQFVIQHRRLLAIVRDDEVCRRLMTVPGVGPVVSLTYRATVDVPARFRKSKAVGAVFGLTCAKHQSGESERSGKISRCGDEMMRVMLYEAAQSMLLHSKKWSWLKAWAMQIARRRGKKKAIVALARRLAVIMHRIWVDGTEFRWTREAAVA

SEQ ID NO: 247446 - protein, 339 aa, unidentified
MKKISTVGVDLAKGVFQVHAVDEQGTVVVRRALRRSKFLSWFVQLPPCLVGMEACATAHHWARELQKLGHDVRLIPPAYAKAYVRRNKNDPADAAAICEAVGRPSMRFVAIKTEQQQAMVGIHRVRDLLMKQHTMLINQLRGLMAEFGIVAAKGVPHVDELLAVLADPHDQRIPSPLRDGLTATTDILRVIDRRLEAIDRQIVTAGREDATYRHLITVPGYGPIVSSAMAAMIVDPAAFRRAGDFAASLGLVPRQDGTGGKVKLGPISKRGNGYLRRLLVSGAMAVLRSKRAKDDPWRAKLLATKPRKVAAVALANKMARIGWALMMRQEDFRRLPAAA

SEQ ID NO: 247447 - protein, 319 aa, unidentified
MSGMYVGVDVAKAELVVAARPSDERWSVANDERGARTLAERLKRDAPALVVLEATGGYELAAVAALAAAGLPVVVANPRQVRDFARATGQLAKTDRIDAGVLALFAERVRPEVRPLPNEEAQELDAVLTRRRQLLEMLTAERNRLGQVAGRGRRPVKKSLKAHIAFLERELRVADTDLGAMVRASPAWREKDDLLRSVPGVGPVLSLTLLAELPELGRLSRREVAKLAGVAPLARDSGTLRGHRYVRGGRASVRAVLYMAALVATRRNPVIRAFYERLLAAGNPKKLALVACMRKLLTILNAMARSGVRWEAPNALATT

SEQ ID NO: 247448 - protein, 342 aa, unidentified
MSERYEGRQYVGMDLHRRRSVLVRMSETGERLGMVRIVNDRDRLAAVMAQAGEAPEVVLEATYGWYWAADTLAELGAIVHLAHPLGVKAFSYRRVKNDERDAADLADLLRMGRLPEAWIASPAVRELRELVRHRAKLVHLRSGVRCQVHAVLANYGVSVPFSDLFGVEGAKLLERATLPPAARARLDSLLRVIDVFDVEVDAAAKASAAQLVGHSGYRAVQSLPGVGPILGGVFVAEIGDITRFPGPMQLSSWAGLTPKHHESDTTVHRGRITKQGSRLVRWAAVEAVQRVGKHTRIGAYRDRVADRRGRNIGVVAAARELVECVYYALRDGTVRRTLTAAA

SEQ ID NO: 247449 - protein, 320 aa, unidentified
MGTEKVYVGIDVSKETLDMAVHASDQRWRFANSDEGITETLSCLEELCPTLVVLEATGGFQDPLAAALAVAGVPMVVVNPRQVRDFARATGRLAKTDTIDARVLAHFAAAVHPPFRLLPDTQGQELKAILTRRRQLIEMLTAERNRLHSARSRFAKAHIQAHISWLEEEMAHIDHDLRHSIRQSPVWQEKDDLLKSVPGVGPVLSTTLLADLPELGLLNRREIAALVGVAPFNRDSGHFRGQRTIWGGRAVVRSALYMATLVATRYNPIIRDFYRHLLSAGKPKKLALTACMRKLLTILNAMLKHKTPWQYPITEMLKTS

SEQ ID NO: 247450 - protein, 405 aa, unidentified
MVDIMVSDFMKGRYNLMKIFVGIDIAKLNHFAAAISSDGEILIEPFKFTNDADGFQLLVSKLESFDKNSIIIGLESTAHYGDNLVRYLVAEFYQVCVLNPIKTCQMRKNNIRKTKTDKVDTYMIAKTLMMQDDIRFVSFYDLDMMDFKALGRFRQKTIKQRTRLKIQLTTYVDQVFPEIQYFFKSGLHQNAVYALLKEAPSPKEIASMHMTHLANLLKVNSHGHFTKEQAKELRVLAQKSVGANDSAISIQITQTIQQIELLDSQLEKIEAEMTDIMKFNDSVIMTIPGIGYINGGMILGEIGDIHRFSNPNKLLAFAGLDPSVYQSGNFQAKTTRMSKRGSRVLRYALVNAAWNVVRNNATFKAYYDAKRAEGRSHYNALGHCAGKLVRVIWKMLTDEVEFNLE

SEQ ID NO: 247451 - protein, 387 aa, unidentified
MPQPNDLSRSLVALDQDSTIIAVVEMSQSSWLVGGVVPGIERQPRKKQEPSPERLLALLHRWRDESVRAGRTITRIAVAFEAGRDGFWLARWLEARGVEAHVIHPSSVAVSREHRRAKTDRLDTELLRRGFLGWLRGERGHCSMARVPTIAEEDAKRPNRERECLVKERTRLVNRIKGTLARLGIRNFKPTLRQAAERLATMHTPEGTPVPPNALAEVQRDLARLRFVVGQIKQIEEARRQRLEEQPERGPHAMVRLLARVVGIGIETADMLVNEVLSRPMRDRRAVARYAGLTGAPDESGAKRREQGLAKAGNARVRRGMIQLAWRFLRFQKNSALAQWYQARTADRRGATRKTMIVALARKLLIALWRFGTIGEPMDGVTLRPAR

SEQ ID NO: 247452 - protein, 321 aa, unidentified
MSDTTGPGGATHVGIDVSKERLDVCFIPEGEHFVVANNEAGIQSLLDRLLEARPTLVVLEASGRYERPAAAAIASVEIAVAVVNPRQARDFAKATGRLAKTDKIDAEVLARLAAAVGPRPSVLPDEEAQALQAILTRRRQLLEMLVSENNRLKMAPKAVARRIRAHIKWLEKELRRTDKDLDEAVEENAAWKENEALLRSVPGVGPVLARTLLAELPELGTLDHRRLSALVGVAPSNRDSGTFKGKREVWGGRAPVRAALYMGALVAVRHNPILKEFYEKLLSAGKPKKVALVACMRKLLSILNAVMRDRAPWRPTHVFSP

SEQ ID NO: 247453 - protein, 379 aa, unidentified
MTTSSTTQTQSLFMALELSNKKWKLAFSNRQRIRQVTLAAAGSQALREALALAKQRLGLPADAPVRSCYEAGRDGFWVHRLLQSLGVDNVVVDPASIEVPRRARRAKTDRLDAEKLVRMLMRYAGGESTLWRVVRVPTAQQEDQRRPHRELDRLTGERTAHRARVRSLLALHGVAVAWKPQGKLAVESLRDWEGQPLPEQLRAELERELARLELLQQQMAVLEKQQQQRLREPQTAAERQAAALVKLRAIGPVSGRLLSEEFFGWRQFKNRREVGSLSGLTGTPYASGEMAREQGISKAGNKRVRWLMIELAWSWLFYQSQSELSRWYRRRFGTGNARQRRIGIVALARKLLVALWKYLERGELPAGAQLKKGAVLAAA

SEQ ID NO: 247454 - protein, 342 aa, unidentified
MNYVGVDLHKKTISICVMRKDSTGRKVIRRRRLHCCEPHLIRKFFEALGPFEVVVEATSSYEWFLLLIEDLADRCVLAHPKKLRVIAESKNKSDKIDAQVLAEFLLLDMLPEAWRPTPRVRAHRTLVRHRRWLDGRITAIKCKLRHKLANYNADIEGLFTEKGLDYLDQFTMHDADQFEVDHLLAQLQFHASQFRVTEEQLREFAKEAPQREREARAVLKTAPQIGVVTIDAVLSELGDWRRFRGAKQVVAYAGLDPGQRESDGKVKLLKISKEGSPILRWAMIQAAWRLVNNTARWKHIYQTLWRNTGSKKKAIVGVARRLLCTLYAMLRDGKSYQWASAR

SEQ ID NO: 247455 - protein, 424 aa, unidentified
MKVTYPTCCGVDVHKSFLVATIIKTTGGIEPSYQKKRFSTFNNSILDFKSWLLENECHDVCMESTGKYWVPVFNLLEDQINVTIANPKWVKAVKGNKDDTKDSKWIGDLFRLGLVKGSYIPCKSIRILREYTRYRYKLVSCRSSEKNRYQNALTVCNIALDSVVSDIFGKSSSSIIDYLLEQSGTTINHEEIASKLLRTLKSKEDAVIESIEGYQMTDAQKYRMRLVRAHMDYITAEINDVDKQIESLISSVPDYVKAIQFLTTIPGVKHDSAITIISEIGIDMSQFCNSKRLCCWAGLTPGNNESAGKKKSVRITRAGVYLKPALVQCAHAAVKSDKSPYYKKKYESLVKRRGKKRAIIAIARMILTAIYRMLSTGEVWNPSDLYKIDMPAPLVEKQKAKAIKQAKKLLQKEGLLPPDEPLAS

SEQ ID NO: 247456 - protein, 337 aa, unidentified
MGMDQHRAQISAEWIETITGEISRARVAPADRAGVRKFLAQLEGVGLEVALEATTGWRFVVEELERIGADVHLAEVVQTSGLKGRGKRAKSDWADARHLRELLLIGRLPESWIAPAHLLDLRARVRCRHTLLHQRTEWQQRMQAVLYHHGAPHARGLLKLANRERVAALKLPDSAREQLTIALQMIDAIDLQLAPFDLALRAYARKQPGCRTLTDEIYGIGELTSVTILPELGDTRRFQNSRDAVRYAGLDVTVHQSDQRRAVGHLSRQGPPALRWALYEAAQAARRPGSPDRDYYEQLAARIGGNRACIAISRKLLKRSYHLLRALGDQALEPVTT

SEQ ID NO: 247457 - protein, 403 aa, unidentified
MTKQLMAGIDLHSNNMFCGIVDQDGKRVYEQKLPCELPRVLQALKPFKGRIEKIAVESTYNWYWLVDGLQDQHYPVVLANPAKMEQYNGLKVTDDKSDAFFLAEMLRLNILPTGHICDRQWRPVRDLLRRRLSLVRQRTSLILSLKSLHVRTTGQDLPLGQLKALPPESAGGLFENPFDQLTAQVQTQLLDQFNQRIGEIEKALLGKVSGLPRYQVLQSLPGVGTILGLTITLETGDPTRFASAGCYASYCRCVDSRRLSNGKKKGRNNEKCGNKYLAWAYVEAANFAKRYDAQCRRFFDRKAAQSNTMVATKSLACKLAKAAWHMMSQQTSSDAGRMFPGQAGAIRPDETKAGGTAVGDAPIRTGQAGPLRGRDRRRRELKSSEARRRRRPARANKRRDDDL

SEQ ID NO: 247458 - protein, 391 aa, unidentified
MVCVGIDVAKDKHDCCILDSDGTVRADCFTIPNNMDGFKQLLQTIRDCTKKSDKIKVGLEATGHYSYNILGFLLDNGLPTYVINPLHTNLYRKSLSLRKTKTDRVDARTIATMLLSDVDLKSYTDTAYHNEELKSLTRYRFDKVRERAKLKQSVSRLVTILFPELEKLVPSLHIASVYALLSEYPGAKQISEIHLTKLTNLLATASKGRYGKDKAIQIRDAARTSIGSVMPAKFLELKHTIKLIRELTSEIDEIEVSIQKIMDELNPPILSIPGVGIQSAAMILAEIGDFSNFESPDKILAYAGCSPSTYQSGKLTNCYAHMEKRGSRYLRYALYNATKYVCHWNPVFAEYLAKKRAEGKHYNVALSHATKKLVRLIYALQKSGKAYLVAA

SEQ ID NO: 247459 - protein, 352 aa, unidentified
MSMLADLVEVVIGVDTHKDTHTAAVLDTRTGGVLARATVNTDPDGYAELVALAEHHSGLRAWALEGSGGYGAGLARHLADAGELVVELDRPSRPARRSGAKSDPIDAERAARDALARARLAQPKTGPERAALQARLTARRAAVEASATTQRQLHALVITSPEVVRARFRGQSTRAMLTTATRLRPTTSTDVEVSTSLAVLCDLARRVRFLEAEAAEHEKAIRAIVRSWRPDLLQLTGVGPIVAATVLAAWSHPGRCRNDAAFAMLAGVAPIPASSGKTVRYRLNRSGDRQLNRALHTVVLTRLQHDEPTRAYAERRRTDGKTDREIKRCLKRYVARELYRHLETPPQALDAA

SEQ ID NO: 247460 - protein, 309 aa, unidentified
MKQSVVYIGIDVAKAHLDVAWAGTFRRWPNERSGHAALVRWIKQSATPVQLICEASGGYEQALLESLEKSEVKVTLVQAVRVRQYARAAGILAKTDRIDAKVLAAFGSAMQPQPTPPLSAEQKRLRQYEAQRRHLSRILVAEENRLAQLSCAELRSLSRCLISKIKTQIKTLDRGISDLIAQDQTLCVKAQKLTAISGVGIRTAALLLAQMPELGQLNRRQAAALAGLAPFNRDSGSLRGKRAIFGGRPALRSGLYMAALSAARFNPILSNFYQRLRAKGKPHQLALTAVMRKLLLALNHTLKPIPCTT

SEQ ID NO: 247461 - protein, 326 aa, unidentified
MKNISDVVGIDVSKLKIDVCIYHTGKHQSFSNDNNGFTKMYRWVNSVGLLGDILVCFENTGYYSLSLAVFLEQNSLPFCMIAPIEIRRSLGLVRGKNDIIDAYQIARYAWLHRDELECIPLAGRKVLSLAQLLKVRDQLVKQKNAFENMLHAFEQTKELSDKTAITLIKQQIDHIEKQIKKVEVAIEQLLNEQEFITNYTLLRTIKGVGLILAAQLIAHTNNFQSFKQWRQFACYCGLAPFDYQSGSSIRGKTKVHPIADKKVKSLLTMAAISAIQYEPQLKAYYKRKVLAGKAKMSALNAVKCKLVARAFSVIKRQTPYVLLQAA

SEQ ID NO: 247462 - protein, 363 aa, unidentified
MEVAGRFVGIDLGKRTYEMCIVDRKGKISRTGGKTDFAGIDRLCEKLNGDDAVAIEACNLAFRIERAIRKSVGCKVCIMNAGKLAVIYMSTRKTDKEDSLKLAKLLKTHDEDELPIVTPPSDEEWERRKLLSEYRSLKCQRTKEINKLHAIFEHNGYTQFVRKDMRSEKNRANILLLLKGYEKEEAERLVERLNLLEKQIERLLQKINAEVENDGKIQKVMTVPGIGPITALAYVAYVGDVNRFDNAHQVSNFIGFVPKVDNSCTICRSGHTTKKGNPLLRSLLVQAAWSTVKSKNGGALRDKYKYMAESRCIGKGKSIVTIARKLGELLYLILKTDQEYKPQKFITPELKISKLAEDALECS

SEQ ID NO: 247463 - protein, 413 aa, unidentified
MIVGIDIGSEKHYFRAFNWRGIELTRKPVAFSNSMEGFNSFYNTIVELIQKSELEEALVGIEPTGHYWFDLGQFMGEKNIKFVMVNPHHVHKSKELDDNSPSKNDRKDPRVIAGLVRDGRYFYSYMPTGVYAELRNASNRRFVLVEEQTRAKNRLQKWIAVYFPEYKGIYTRIDAKGGLLVLKQAPTPEEIVRLGVEGIIKIWKDAKLRGNGHKKAMLILNAAMKSIGLKAGLTEARMEIQDLIEDYELQTKRLERVNDLIKELCQQIRYADKLLEIKGIGITTIAGFIAEVGDITRFDSAKELQKLAGLELVADSSGKHNGKTKISKRGRKRLRYLLFEAAISVVGKNKEFKEIHRYYTTREKNPLKKMQSLIAVACKLIRVFHVILTKGISYDASKMLKDIQHPGEPLKAA

SEQ ID NO: 247464 - protein, 425 aa, unidentified
MKSNPINSQNQRVERISTTTLVIGIDIAKEKHAAQAINFRGIVLTKRPILFSNDLAGYEHLEHSIRKLQKMHGMNDFVVGLESTGHYWFNIANWLVDQGIDVALVNPMTTKRNKENRDNSPSKNDPKDALVIADAVSRGFYTPFAPKDEAFRRIRVMVTNREHWVVKSGRIKNRIHRWLDIRFPEYRQAFDDIFSDRSLATLRRFPAPSDLLQLTPEQMVQIWGEYMVRPGGVRGKNKAMELQSLARHSVGDTTALEEDKWELRHLIEEYVRICRIIDEADEMIEKVLPEIPCSDLIRSVGASVPATAAILAFGGDLRKLSHGNQLLRKAGLNLAERSSGKYKGQIKLTKRGNSLLRKHLYFTVFHLLSFNEAFQAMHAHNTEVKRMTKMQSMMKLIGKLARMLVAMAREGQTFSMDKAQISLAA

SEQ ID NO: 247465 - protein, 361 aa, unidentified
MHATTVAVDLAKSVFQLAVADATWKVVESHRLTRAQFERWFQNRDVTLVIMEACGSAHHWARWITGLGIEVKLLPAAYVRAYVKRNKTDAADACALLEAARASDIVPVRVKSVEQQALQGLHRTRSLWMSTRTSRINALRGFCREFGLAIPQGARTGVEAISRVLADPNSPVPGLIRGSMKLLVEEIRLLEARIAQLERELSVVAKHSPACTTLLTIPGVGLLTATAMVATTGGQVSHFKDARHFASWFGLTPREFSSGSRQVLGRISKRGDRYLRMLLTHGARSVLRAATVARRAGKKIDGLRTWATTVEGRTNHNKAACALANKLARICYATLRDATPYGQPAPRQQRKIARKAFAVAV

SEQ ID NO: 247466 - protein, 400 aa, unidentified
MISVGIDVSKGKSTVCILKPYGEIVASPFEVMHTESELKNLTQMIQRLDGEIRIVMEATGIYHLPMLSVLQNQNFFVAVINPFEMKEYASRGLRRVKTDKQDSITIANYGIDNWYRLENHQGRDDVYSELKLLGRQYCHYMELHVKALLELTHMLDYTMPGVKKEFHSWNESNGKDKLSDFVERYWHFDNITAMTKEDFIEDYISWAAEKKYHQNRSKAAELYDLASDGISTLSANTPSTKMLVLEAVRVLREIDSTLLKIITRMKELAKTLPEYETVRAMGGVGDVLAPKLIAEIGDVRRFHSGKALIAFAGIDAPPYESGQFVGTNRKISKRGSKVLRKIGYETMRVLKTHKAPEDDAVYRFILKKEAEGKSKRQAKIAGLNKFLRIYYARVSEVYKA

SEQ ID NO: 247467 - protein, 410 aa, unidentified
METLRRRCAGLDVHKDTVVACARVVSEDGTVRQEVETFSTMTSGLLALSDWLAEREITAVVMEATGVYWKPVWHVLDEDFELTLANAANVRNVPGRKTDVNDATWLADLHAHGLIRASFVPPTRVQELRTLLRTRKQLVREKGQHVQRIQKTLEDANLKIASVLSNIIGVSGRAILKALIAGETDPEKLADVTQSRRLKSGRNRIIESLRGNVTKSHRFLLKTHLGMIDALDAAIAEIDTEVGVALEPFRHKAELLTTIPGVGTLAAQSIVAEIGIDMSRFPTVGHLISWAGLCPRNDESAGKRRSTRVRKGAPWLKTVLVQCAWGAARAKDCYPRAQFQRLKARRGPKKAILAVAASILTAAYYILRDDVPYKDLGPDHFERMDKHKAASRLVRKLHNLGYQVEIKQAA

SEQ ID NO: 247468 - protein, 339 aa, unidentified
MKLYVGIDLHSNNSVLTILDEKDKVVYERRHPNDLKVILAQLAPHRKNIQAIAVESTYNWYWLVDGLMDAGYEVKLVNTVAVKIYDGLKYSSDEHDARHLAHLLRLGILPTGYIYPKQERAVRDLLRKRAQLVRDHTVHVLSIKNLVIRNSGKGIASDAILKLDDASIGRICGGDAARAMAIQSSLVVLRCLNKQIRELERVILAQARLKPEFAKLVTVNGIGEMLGMTIMYEAGSMERFAGVGQFASYARCVASSRWSNGKKKGEGNRRNGNKYLCWAFIEAAHYAVRYNERIRRFYQRKQAKTNKIVAAKAVAHKLARACYHVIKERAPFDEARAFA

SEQ ID NO: 247469 - protein, 412 aa, unidentified
MEVVYPCCCGLDVHKKSITACVLWAEAKGKSRKQKKRFGTFTHDLLQLADWLAQCGVTHVAMESTGVYWKPVWNVLAEQFEALLVNAQHIKAVPGRKTDQKDSEWIADLLQHGLLRGSFVPPRPTSELRDLTRYRVSLVQEINRIANRIQKVLEDANIKLASVATDALGASGRAILEAMLAGEQDAARLAEMAQGKLRNKIPELQLALEGRMTEHHRFLLRQLFDHLRFTESKRSDIEQEIDKRMLPFEDKVTRLCTIPGVDRVTAWGMLAEIGLNMDQFPSAAHLASWACLCPGSFESAGKRLSGKMRKGNVSLRRCLSQAAWAISMMKNNYLSALYRRIAARRGAKRAVMAVAHALLVIAYHMLKRKEDYRELGADHFDRIDVNRIRRSLVNRLERLGHKVTLEPLAQTA

SEQ ID NO: 247470 - protein, 408 aa, unidentified
METLIERGCGLDVHKKSVAACVMRFPEPKGTRQSHVRTFGTMAAELAALREWLESQGVTQVAMESTGVYWKPVWAVLEEAFTCLLVNAAHVKQVPGRKSDMLDCAWIAQLLEHGLLRGSFVPPAPIRELRDLTRYRKSLIEERTREANRLHKLLEDTGIKLASVAPDMLGVSGRAMLEALGQGTTDPARLADWARGKLRAKLPALRQALAGRFRPHHAFLVSQRLAHLDYLDEAIDTLSARLTEVMAPFTAELGRLDTIPGVAQRTAEVLIAELGVDMTQFPSAGHAASWVGLCPGNHESAGKHKSGRTRKGNRWLRAALTEAAHAATRTDSALAAQYRRLMHRGHKKAVVAVAHSILVIAYHLLSRQTTYREFGADYFDRRHAERATRRAVRQLERLGYRVTLQPAA

SEQ ID NO: 247471 - protein, 354 aa, unidentified
MSTTTRYVGVDVGKDRCRAALMNQQGIIEKEFFFENNNNKGITHLTSQLTSEDQVIMESTANLWLPLYETLDNKHIKVVLANPMKTKAIASAKVKTDKVDARILAHLLRTDLVAESYVPPKQIREIRALIRHRLSLMRMRTMVKNKVHALTDKYGYRCEFSDMFGVSGLKWLRSVEITSLDLLILENHLSHIESINLQMDKADEAIKLRAVEDEDVRLLLSLPGVDVRTALLLKSEIGPIERFLDYKHLVSWAGLAPCVHQSGDVLWHGGISRCGSGILRWAMVEAARTAVRYDEKLGEFYGRVKARRGGSKAVVAVANKMLKIVWVMLVRREPYSGVNERLYEGKLNRVGFDM

SEQ ID NO: 247472 - protein, 334 aa, unidentified
MEYFAAIDVSLEASSLCILDEKGTIVRETKVASEPESLAKALAAAPGPLVRVGLEAGPLSQWLHAGLTGLGLSVVCLETRHLKATLKAMPNKTDRNDARGMAQVVRTGWYRAVHVKSLPAQEARALLSARQLLIRQAKDIGLSLRGLLRNFGLKLGTASKAGFEGRVRELAGGSPALSAIAEPMLAARAALLRQAKELHRHVLRAVRDDAVCRRLMTAPGVGPIIALAFKSAVDEPGRFAHSRAVGAHFGLTPKRYQSGEIDRSGHITRTGDAMMRTLLYEAATVILARASRRSGLKAWGARLAERQSLKRARVAVARKLATACWTMWRTPKWL

SEQ ID NO: 247473 - protein, 469 aa, unidentified
MAARKQEQKQRRMSAQVVEDEDYQLRYEIVAGIDVAKESAVVCVRMPPAAGRKHRTSHLQTVPATVPVIGELAAELKAAGVQMVSMEATSDYWRIWFVVLEEAGLAVQLVNSSQARNLPGRPKTDKEDARWIARLTEMGMLRSSFVPPPEIRALRVYTRHIWDLTADRTRYWQRLEKLLEDALCKLSSVVSRLAGHQTARAVIEAMIEGERDPRVLAALGRGRMRNDRLPALAEALSGMRFGPQHAHAAASLLRAIDLLEAELRDLQERVTAHLAAIPASWGVDADGVTGPEAGQAGEAAVLPAAGRLDEIPGLGREAAAALIAEIGLDMTRFPTPEALVSWAGLTPTARQSGPRKGRGKKGHGNTYAKRIAVLAAYAAANTDTFLGERFRRLAFRPGGGGRKKAGCAVGRSILVIVWHLLNDPAARYRDLGPDWHARHTDRSRKARNARRQLEALGYDVIITLREDAA

SEQ ID NO: 247474 - protein, 312 aa, unidentified
MMQEVFVGVDVAKDWLDIYHPRHGACRIENAPGALRTWTAACARDGLWVIFEASGGYDRLLRSALEAAGVRFSRVNPRQARDFARAMGVIGKTDRVDARMLCEFGARLRPAPTEPLAASRRALQAQATRRRQLVEMRKQEATRLQQTADPETRADIRSLMAVLERRIARAEARMAALIAADPELAEADRRLRTAPGVGPVVAATLIAELPELGRIDRRAIAALAGLAPISRDSGRRQGRRTIGGGRPVVRAMLYIAALHASRCCPIFNAFRSRLAAAGKPVKATIIATARKLLCVLNAMLAAGSEYRKANQS

SEQ ID NO: 247475 - protein, 377 aa, unidentified
MHKDGSAFVGLDTSKLKISVALAEEGRQGEIRFFGDIENTPGAVRNLVTKLTGKYNKLQFCYEAGPTGYGLHRQLTDLGQDCVVIAPSLIPKRPGERVKTNRRDAVSLARLHRAGELTAIWVPDAEHEAVRDLVRAREAAMLELREKRQHLQSFLLRHGRIYAGRRPWTKVHARWLSNLTFSHPAQYLVLREYRQSIEDAEARLERLTDQVAEVVSSWSMSPVVDAYQAMRGVAFLTAVIFVAEIGDVRRFETPRQLMAFLGLVPSERSTGETVRRGGITKSGNPRARRVLVEGAWTYRYAARLSRPLEVRQERLPKTVRAIAWKAQLRLCARYRRLAAAGKRQTVVTTAIAREMAAFLWAIGREVEPLQPKQVAAC

SEQ ID NO: 247476 - protein, 411 aa, unidentified
MEVVHARCAGLDISKRDAKVCVRVAGVGRRKTVETVTTWGSMTNQVLALRDHLVEQRVTCAVMEATGDYWKPFYYLLEDAGFEVMLVNARHVKNLPGRKTDVSDATWLAQLGAHGLVRGSFVPPEPIRQLRDLTRARTAITRERGREVQRLEKLLEDAGIKLSAVASDILGVSGRQMLEALIAGNHDPVVLADLAKRRLRSKIPELTEALTGRFNEHHAFLARVHLDLIDRHTTAIEALTDRIEVMIEPFQGFRQLICTIPGISTLTADVVIAETGADMTRFPTAKHLASWAGTTPGNNESAGKVKSSKTRPGNPYLQGALGAAAMSCAQNPRTYYGARYRRIASRRGPQKANVALQHSMLTAIWHMGTTGTVYDDPGADYFTTLHPERAKNRAIHQLEAMGYRVTLDHAS

SEQ ID NO: 247477 - protein, 378 aa, unidentified
MKRVRFVGLDVHAETIVVAVAETDGEVRSLGVIPNRAESIRKLVKKLGPAEQLRVCYEAGPTGYVLYWQLTALGVKCEVVAPTLVPVKSGERVKTDRRDAVKLARSYRSGDLTPVWVPDAAHEALRDLVRAREAAKKDQLRARHRLSKFLLRHGKRPPAGVKPSWTGNYLLWVKQEVHFELFAQEFTLIDYLHEVEHAAARVERLDRALEEAVKSAPPQMRAVIEGLQALRGIAQVSAVTIVAELGQISRFARPRQLMGYSGAVSSEDSSGERVWRGAITKTGNAHLRRIVIEAAWSYRHRPTVSGALRQRQEVVSEEVKEIAWKAQHRLHARYRKLTARGKNKGKVITAMGRELLGFIWAIGVKVEGAQKEPLQRAA

SEQ ID NO: 247478 - protein, 326 aa, unidentified
MTASQSSDNTFVGIDVGGAVLDVAWHRGGSAQYANRPDAIVTLIQKLQSDPTITRIVIEPTGGYERPLRKALRQAGLPVEVIHPSRVKAYRTLVGAKAKSDTSDARLLAAYAAAPDEVRGRKAHHVELPEDAIREALNELANRREQLKHMIHAETCRLNTARLAEVRQSIAAHRKLLIAEDKQAHKMMLTLVRQRVDLRRDQRLLRTICGIGEKSALACIAMVPELGRIDNKAAAALIGAAPYVNQSGTKTSPARIYGGRSAVRNILYMAAVAASRHNPVLRPFYERLIAAGKPAKVALIAVLRRLVVFANAVLKSGQPWKGAVPA

SEQ ID NO: 247479 - protein, 355 aa, unidentified
MSQEKYIGMDVHQASISVAVMDAGGKLIMECLLETKAATIVEFIQGLQGTLSLTFEEGTSAAWLHDLLKPHVSRLVVCDPRKAALLKEGNKSDRIDARKLAELLRTNQLKPIYHEEHGIRGLKELGRSYLTITKDVTRVMNRIKALYRSWGIACSGAGVYAPRHRAEWLAKLVEPRVRVRAEHLYQQLDSLQPLRLEARGALLRESYQHPAVKLLRQIPSIGPIRAALLVALLQTPQRFRTKRQLWAYSGFAVETHDSGEYRWVRGKLQRNRERITVRGLNDNHNKDLKNLFKSAALSASTRPGPLHDFYVARVEKGMRPTMARLTLARKMATITLTMWKKGVGFDPQNLHRQAA

SEQ ID NO: 247480 - protein, 342 aa, unidentified
MNRSKKVVRFGMDIGKNTFHLVGVDEVGLLAVKKKLRRKQVLVYFANLPACLVAMEACGGSHYWAREIAKLGHDVKLISPQFVKPYVKGNKNDYNDAEGICEAAGRANMRFVTVKTIEQQDIQGLHRIRQSVVKQRTALANQIRGLLGEYGIVVGFGISQVRRRIPEILEDGENGLTDRFRVWLGELLESFRVLDERIKQYDEEVQQAYAANEACRRLGAIEGIGPQIATAVIASYGDGKQFRNGRQFAASIGLVPRQHTTGDRPVLLGISKRGDKYLRTLLIHGARSAIRWMEGKDDQRSRWLQALVARRGKNKAAVALANKNARIIWALLSRCECYQPTV

SEQ ID NO: 247481 - protein, 381 aa, unidentified
MSVVRLLGLSVFRDARLVLGAPGGLSVEGPRSPEPFGLVGSRAATDVSMTRMVAGTLRSGATRMGSMERVKSNTKVAGVDVGKHRLDVAVHGQADQLQVDNNEAGRARLVAWLDEHGVTRVGLEATGGYEQAVRSGLEAAGLEVVVHQPLEVRLFARLKRLRAKTDRLDAALIAAATAQVEAVRAAQDPRLVELAERLTAYEQVSDQAAELKIFMEHVTLTDLAMTLREQIQSLVRLKARLAAEILARIKAQPDLLTRYRLLLSLPGVGPVVAASLLVRMPELGAMRPGQPASLLGVAPFARDSGQWKGLRFIGGGRARPRRMLYIAALSAKRCDPDLKAFAQRLVAAGKPAKVAIVAVMRKLIEAANLVLARQRPWIRHA

SEQ ID NO: 247482 - protein, 341 aa, unidentified
MAEVSTIGLDLAKHVFQAHGAGASGAVLFRKRLRREQVLSFFARQPRCRVAMEACASGHYWARAISALGHEVRLIPPAYVKPFVKRQKNDMADAEAICEAAQRPTMRFVAVKSEAKQAATVIFRARDLLVGQRTQIINALRGHLAEYGLIAPQGPSHIARLIAQIEDPASGIPEVARSCLGRLVEMLRRLQDEITALDREITVRAKSDDVARRLMTIPGIGPLIATAIEALAPPSETFRSGRDFAAWIGLTPVQRSTGGKERLGRTSRMGERTLRRMLIFAASAVVRWAKRKGVPPGSWLARMLARKPPMLVIVALANKNARVAWALITKGGIYRAPAAAA

SEQ ID NO: 247483 - protein, 342 aa, unidentified
MKDTLIGVDLAKNVFVLHAATMAGEVRYRKKLSRGQFLRFLSEQPPAIVIMEACGSAHYWARELVKVGHEVRLIAPQYVRPFVKRQKNDAADAEAIVIAACQPEMRFVPPKNADQQARAVLFRARERIVRQRTELVNALRAVLYEYGQAIPQGIAHIQRIKAIVERAEIDLPELVREECRDLLAQIDEKTTRIKEKAKKLVDLSRQSGIAHRLQTMPGVDPLVALAVEAFAPSMENFRCGRDFAAWLGLVPRQFSSSGKERLGRVSKAGQADIRRLLIIGAMTCVSWAGRKPPVHGSWLSRMLAKKPKMLVAIALANKMARNIWAMLTKQEDYRDPALAIMA

SEQ ID NO: 247484 - protein, 412 aa, unidentified
MPRVIGMDVHRDFAQVVALENEGLRQLGRVKLDKDSLTSFANHLASDDEVVLEATGNTFAIVRVLRPKVRKVAVANPLQVRLIAHAKIKTDKVDAAALAQLHASGFLPEIWVPDEETEALRRQFTRRSQLVRHRTRLKNEVHAILNANLIGRCPVTDLFTSTGRKWLAEQVLASSDREAVDRGFREIERIGEDLAALDRALAAEAIDDPRLKRLMTITGIDMVSGLGLIATIGDHTRFASSEKLVSYLGLNPSVRQSGSGPARHGRITKRGANQARALLVEAAWAASRVPGPLRSFFMRVMSRRGSQVAAVATARKLATIVWHVLNREEDYVFARPSLVARKRRSAELRAGKLRQRGRRGIAADYYCAATRAEERERLENAERAYERIVSGWRPTGSRSKPASTDLKGNVST

SEQ ID NO: 247485 - protein, 281 aa, unidentified
MDKISVVGLDLAKNVFQVHAVNAQGRVVERKQLRRSEVLSWFAKIEPCRIGLEACGGMHYWARKLSELGHTVRPMAARFIKPYLKSNKSDMLDAEAICEAVQRPGMRFVSVKSAQQQAVLHLHHSRRLLVEQRTALINHIRGMLLEFGIVIAVGPSALRKRLPELLEDTGDELPPMCRDLAAVLRDQLSALDERIALLEHKIQQWHVSNEASQRLAGIPGVGVISATAIAAAIGDARAFTNGRQFAAWQCLDCATAGAVSSQCRNSGAGQSQCPGSLGIAG

SEQ ID NO: 247486 - protein, 349 aa, unidentified
MLIIGVDFHSRFQQIAMVDTESGELVERRIDHSNGEAQKFYVELQKPVRVGMEATGYAQWFERMLAQLGHELWIGDAAEIRAAMVRKQKTDARDALHILDLLLANRFPRIWIPAPAERDLRQLLRHRHKMVGLRTSVRNQLHALAMGQGVYRKRKLWTAGGRTELEALGLDPWASRRRQELLEILDRLDPILAELDRAVAQAAAQRSVARCLMEQPGVGPVTALMFVLTIGPVERFRRSKQVVSYLGLNPRESSSGGRQRLGAISKQGNSMARFLLVEAAQTAARYDEELRRDYQRLKFRRGTAVAKVAIARKLAVRLYWKLRKLNSAVPLARMQGSPENPLVGASLSS

SEQ ID NO: 247487 - protein, 347 aa, unidentified
MKYSGVDLHSNNSVVTVTDDEDRVIAEKRLPNDLTKIVGFLLPWRDELKAVVVESTYNWYWLVDGLQEAGFVVKLANTCAIKKYDGLKHSGDEADARQLAHLLRLGILPTGTILPPEQRAQRDLARKRMQLVRSRTSYILAIENIVARQRAMKINSNQVKQLTADEVDQIGLSEDVALAVKSNLAVTLSLSAQIDIIEKRLQERVGKRKEFVLLNSVPGIGNILATIILLEMGTIERFAFVGNFASYARCVDSQHMSNGKKKGEGNTKNGNKYLAWAFVEATNFALRFNAEAKRFYERKKAKTNTAVATKALAHKLARACYYMLKENQPFDAMRCFACVLTAATSPA

SEQ ID NO: 247488 - protein, 481 aa, unidentified
MSAGKKNANDGAPDGAVAAHGGDGAEVAEDRVQVVEYAAAIDVAKGSGMVCTRVPGSRPDRRRQKVWRAEATCGEVTALMDHLRCEGIQRLVLESTSDYWRIWYYLAEAAGLEVWLVNARDVRHLPGRGKSDRLDCVWHCKLNERGMLRRSFVPPQETRDLRALTRTRARLAQDQARHQARVEKILEDALLKISVVISDLFGASGRRFLDALVAGERSPKALAALGDTRLKATRRELEAALTGRFRDIHAFEIKTHLRLIDAINEEIALLDEKIAQQLALVPRTAPACVACGLAGGGHVPGCPDEGAAVPGLAGRLDEITGVGECNARVIIAELGTDPSQFPTPGHAAAWARLTPRSRQSGETARPGRTGKGNRYLRGALGQAAMAAASTDTRLGALYRRIARKRGKQKAIVAVSRVICEIAWILICDPGARYEELGPDYYSPRSPARQTRDKIREIERLNPGKKVILAPADPGAGAGQAA

SEQ ID NO: 247489 - protein, 353 aa, unidentified
MNEITTVGVDLAKEVIVVCGGDAQGRAVYFKQFSFSGFAQWAANLPPCVVGMEACSSAHHWARFLGAHGHTAKLMAAEFVAPFRKSRSAKNDRNDAQAILCAVRQPDMRFVSVKSVDQQAMLAWHRARAGYQHERKALLNRTRDLLSEFGLWLGRSSAVLVRKLPQLIVEEQLPALSRPILAYTLEHLQQIDQRIADCDAQIQAHARHSEAAQRIQAISGVGPLTASALIATIGNPGDFKNGRQLAAWSGLVPKQHSSGGKQRLGVITQRGDTYLRGLLTQGARSTLQAALKREPLSRSRLQHWIVALHGRAGYHKTLVAIANKHLRTVWAILAHGEHYDPNAWQRHQHACRT

SEQ ID NO: 247490 - protein, 482 aa, unidentified
MKSKPQEKNKRATNHPTQHHWHEMNRKQRRETMRKIQSEDLTLEVLHPDAAGIDIGNESHYVAVPPSRDTQPVRRCGCTTAELKAMADWLKQCGIRTVAMQSTGVYWVAAYDIFEQAGLEVYLVNARDTKNLPGRKSDVQESQWLMKLHTYGLLRNSFRPSQEIRTMRTYWRQRNDLVQSAGRHILRMQKALTQMNVQLANVLSDISGVTGQAIIKAILAGERDPHKLAQLRDRRVKASQEQIARYLEGNWQEDLLFVLKQEQEAYEFCQQQIAECDRQLAQYLQQREDRSQGAPLPEEKRKGRLKKKRANKPQFDLREGLFRMTGTDLTRIDSIDVMTAMTVLSEAGWDMSKWKTEDHFVSWLRLCPDNRISGNKVIGKGRLPTNNPITIAFKMAASTLRLSKTYLGAQFRRFRTRLGAPIAIKAMAAKLARLVYRMLRYGMKYVDQGAAFYELQHRQLQVKQLKWKAAKLGFQIVQATAA

SEQ ID NO: 247491 - protein, 407 aa, unidentified
MEVIIEHACGMDVHKDSITACTMTPKGKEIRTFSTKTVFLLQLIDWIKEQGCTHVAMESTGVFWKPIVNLLEAENIEFLVVNAQHMKAVPGRKTDVKDAEWIAKLLRHGLLKASFIPDRNQRELRELVRYRRSIIEERARQHNRIQKVLEGANIKLGSVVSDIMGVSSRDMLRAIADGEDDPEKLASFARRTMKKKKDELELALRGYINPHQRLMIKTILNHIDFLSEQIELLNLEVATRLSSHQEDIERLDSIPGIATRMAEQILAEIGTDMKKQFPSAAHLCSWAGLVPGHNESAGKRKSTNMKKGNKYLKSALIEAAHSIRGSKTYLGALYRRTASRKGKKRAGISVAHAILRITYYLLTRKEMYVDLGEDYFDKQKQQSIVRYSIRRLENLGYNVTITEPNAS

SEQ ID NO: 247492 - protein, 313 aa, unidentified
MSERGKEVFIGIDVSKEKLDVAVRPTGEFMSFSNNEDGISCVVDFVKQFFPNLVVLEATGGLETAAVAVLADKGLPVVVINPRQIRDFAKATGKLAKTDVIDAHLIARFGEAVRPELRPLKDQEAQKLAALITRRRQIINMITVEKNRLTTAPQWTRKDIQTNIAWLEKCLKKIDNDLQNLLKKSPVWREKDSILRSAPGVGPVLSMTLLSNLPELGALNRKEIAALVGVAPLNRDSGLFRGKRMIWGGRAAIRSVLYMSATCAIRFNPAIKIFYARLRHAGKQHKVAITADQILLDFSVCFARLDQGAHLTA

SEQ ID NO: 247493 - protein, 387 aa, unidentified
MKRFFVGLDWATQTHALCVIDEQGSVRDRFEIAHDAAGLRELVGKLRGVARDAAQLAVAIERPSGLLVDTLVEAGYSVVPIHPNVVKATRPRYRSHGAKSDASDAYLLADLLRTDGARFAPLKPQSDAIRALRALVRGRDDLVATRVQLANQLRSLLESFWPGAAAVFADIDSPIALAFVQRYPSPQAAAHLGEKRLAAFLAQHHYCGRRSPAELLERLRAAPAGHSAELELDAKGELVRALARTLEPLVTQITELSARIEHTIAELPDGRIVMSLPRAGRICAAQILAELCDVRERFPSDNQLAAQAGVCPVTYQSGKSRSVTFRWACNHRLRRAITCLADNSRHACPWAASRYAAARARGCDHPHAVRILARAWVRRDGSCRRGK

SEQ ID NO: 247494 - protein, 414 aa, unidentified
MGDHGRIAGIDVHKKMLAVVVAEGSSEGQLRFERARFGTMDSELRRMGEWLRERNVGEVVMESTAQYWKPVWQQLEGQCQLYLAQAQSNRGPRGRKRDFVDAERLVRRQMAGELILSFVPDGEQRMWRIMSRTKYQLRRDRVRLQNQLETFLEEARIKLSSFVSDLLGISSLRILEALSKGESDLPKLAAMGDANLRATPEQLQDALQGAKHLSEPQRQILGLFLARLKLIDEQIESLNSNLGQSLRQYNDAVVRLAEVPGLGADSAQQVIAEVGPGAATFPSPQELCSWVGTCPGKEESAEVSKSNRSPKGNRMMRRLLNQAANAAVKTKGSVFQNLYRRWVPRLGHNKAIWAIANRLCRLVWKILHQGDRYIEYGDRSNPKTIKERAKRMVRELKALGYQVQIALPAEPSVE

SEQ ID NO: 247495 - protein, 320 aa, unidentified
MAKKKSKSFIGIDVSKQQLEVAVHESDCQFRCANNVNAFGELIVELIGWRPALVVLEATGGLEIPVVTALHAAGLPVVVVNPRQVRGFAKALGQLAKTDRLDARVLAHFAAAIKPPLRPLKSKEEQELAALTGRRDQLIEMLVDEKNRRTSAASDTVREQIKEHIDWLEECIAELDEQLKALLQSSASWQAKDDILQSVPGIGPVVSFSMIADLPELGTLNRQQISKLVGVAPLNRDSGQQRGTRHIYGGRAELRRVLYMAALSASRYNLVIKEFYERLCAKQKPFKVAITACMRKLLSIINVMVRDNTCWKSPQQSVSA

SEQ ID NO: 247496 - protein, 347 aa, unidentified
MATSYIGADVDSKMTELAVERNGKIVFRQRVETSIPALKEFLSGVSGHKALTFEEGPMADWLYRNLKDSVDELVVCDPRRNKLIADDGDKDDPIDAGKLAELHRGGFLRAVYHGQSMERVLFKQWVGLYHDRVRDAVRHVNKIRARCRMHGLRPPRGFLSNSKVQKQWLGELKGHGLRGQLEVLLPGLAAVREQVRRARLEMSRRVKVEDIVERWKDLPGVGLVRAATLLAYLDTPWRFASAKKLWKYCGVGLVRTASGTDKKGRPRKGKLQLAWAVNRPLKGTVIGAAVSAIEQGRNVFSDYHRRLERQGVSPSNARHAVARKMLTAMWGLWKNSSRFEEALVRGG

SEQ ID NO: 247497 - protein, 388 aa, unidentified
MKVLYERCCGVDVHKKSITACTITPEGKEIRTFGTMTDELLEFVNWLKEKGVTHVAMESTSVYWKPLYNLLELEQIETLVVNARHIKAVPGRKTDMKDAEWIANLLRHGLLKGSYIPDRAQRELRELVRYRRSLIEERARELNRIQKVLEGANIKLSSVVSDINGASARKMIRALIEGKNDPMVIAQLAKGKLKQKVEELQRALHGVIGPHQRMMLAEQWRHVEYLDEAIARLDQEIEERTRPFEEALELLDTIPGVGRQSAEQILAEIGTDMSRFASASHLASWAGMAPGNYESAGKRLSSRTRKGNKKLRACLVECARAAARKKDTYLSAKYHRIAARRGANRASMAVGRTILEIIYYLLTRKEPYKELGADYWDVNGKQRSCVKR

SEQ ID NO: 247498 - protein, 375 aa, unidentified
MGDHSEAFVAFDTSKLRNAVAIADGGRAGEVRFLGEIENTGPATAKLVRKLSAKYERLTFCYEAGPTGYGLHRQIKGLGHECMVVAPSLIPKRPGDKVKTNRRDAINLAKLLRADELTAVWVPDQGHEAMRDLTRARETAVMDLRSKRQQVSAFLLRQGKHYPETKKTWTKAHMSWLASQKLEDPQQRLVFEEMMLAIRQAQERRERLEQAIRVAAPDWSLAEVVTALMAMRGIDLIAAATLLAEIGDLARFRTPRELMAYLGLVPSEDSTGETIIRGPITKAGNRRARRMLVECSWSYQHPPRVGQAKQLKVDAAPRAVREIAWKAQCRLHRRYRALIRRGKLKTVAITAVARELAGFIWAVAREITPAHAPAK

SEQ ID NO: 247499 - protein, 411 aa, unidentified
MDVVNARCAGLDVHKATVVGCVRGPGPQPGARRGETKTFATTTRGLQELTTWLLTHGVTDVAMESTGVYWRPVHAALEGRVQLVVVNARHVKMVPGRKTDVKDCEWLAQLLECGLLRGSFVPPRAVRDLRDLTRLRKALIRERGHHVNRIEKTLELAQIKIGCVVTDLMGKTGRAILEALSAGIDDPDQLAEYAQGLLRKKRAALREALVGRLTPHYAFLLQQHLSLIDALDAHLATLQARIETAMVPFADTAALVQTMPGVAARAAQAILAETGVDMSCFPTPAHFASWARLCPGNHESAGKRHNTTTGKGATWLRATLQETAWAAVRSKKSYYRALYHRLKARRGAKKAIVAVQHAMIVALWHMLKHRVAHHDLGADYFERRNTARIRRHHIRRLERLGYDVVITERAA

SEQ ID NO: 247500 - protein, 316 aa, unidentified
MNQPHYWIGIDVAKAHLDVHIRPTAELFQVPNTDAGIAQLVQRLEPLQPRLVVLEATGGLEFPAAVGLSRVKLPVAIVNPRQVRDFAKATGKRAKTDALDAAVLAHFAEAIQPSVSTIADEDSQRMAELVARRRQIVEMLTAEKNRLGTVRGSVRQDIEAHLEWLEKRLEELEAQLQQAIRQSPLWLERVNLLRSVPGVGEVTSSTLLVNLPELGSLSHKQISSLVGVAPLNHDSGKHRGKQVIWGGRAQVRAVLYMATLVATQRNPVIKAFYERLCQKGKPKKVALTACMHKLLIILNAMVKSATPWQPNLVEQA

SEQ ID NO: 247501 - protein, 468 aa, unidentified
MTVKQEGEVGVGKDRKSRKGKKKRKIAKLDSLKQLNLNAGGLDIGATEIYAAVPEGRDEVSVRQFETFTVDLNSLADWLEACGVDTVAMESTSVYWIPIYEILEKRGFDLYLVNARQVKNVTGRKTDVLDCQWLQQLHTYGLLRESFRPSQEICELRTLLRHRGNLIRWRAAHIQHMQKALNLMNLHLTNVISDITGVTGMKIVRAIVAGERKPEVLAQYRDPNCKNSEEVIAKSLEGNYSSEHLFVLQQALELYDIYTAKIRVCDDEIEQLYGAFEPQVDIVSKPLKAPKKNRRKNKNAPEYDLRTYLYQMTGVDLTAIDGLEVLTVQTIISEVGIDMSKWKSVKHFTSWLGLAPENDVSGGKVLRTGTKKVKSRANLAFRQAAMGASRGQSAMGVFYRRIRARHGPAVAIVATAHKIARIFYVMLKEHREYISPDPSQYEARQKERSIKHLKRKAAMFGFQMVPAG

SEQ ID NO: 247502 - protein, 343 aa, unidentified
MQTITTIGLDIAKSVFQVHGVDAAGQVVIRRQLKRRYVLSFFEKLPPCLIGIEACASSHHWSRELQALGHTVRLMPPAYVKPYVKRQKNDAADAEAICEAVTRANMRFVPTKTPEQQSGLMLHRTRHLLIRQQTSVINAIRAHLAEFGIVAPVGRKGVEDLLGVIADASDKRVSEVVRGCLAALGSQLLGLKKQILDFDRMILAWHRSNQTSKRLNCIPGVGPLLATALVASVGDPKTFRSGRNFSAWIGLVPKQHSSGGRDRLGSISKQGDRYLRGLFVAGALAVIRYAKIHGTKHRPWVAALLARRPTKVAAIALANKLARMAWAMMATGEPYNYPAGLRV

SEQ ID NO: 247503 - protein, 343 aa, unidentified
MQTITTIGLDIAKSVFQVHGVDAAGQVVIRRQLKRRYVLAFFEKLSPCLVGIEACASSHHWSRELQALGHTVRLMPPAYVKPYVKRQKNDATDAEAISEAVTRANMRFVPTKRPEQQSCLMLHRTRHLFIRQQTAVINAIRAHLAEFGIVAPVGRKGVEELLHVVADPNDKRVPEVVRACLAALGNQLLSLKKQILESDRMIMVWHRSNEASKRLHYIPGVGPLLATALVASVADPRTFRSGRNFSAWIGLVPKQHSSGGKDRLGSISKQGDRYLRSLFVAGALSVIRYAKIHGTKHRPWLTALLARRPTKVAAIALANKLARMAWAMMARGERYRNPVALAA

SEQ ID NO: 247504 - protein, 430 aa, unidentified
MSSAINTDRKPIAAFVGIDWADKNHDIVLCAAAGNAQFDHRRIDSQPEALIEWASEMQGRFGSQGRILVCLEQSRGTLIYFLMGYECFELYPINPKQLSSYRGAFRPSGAKDDPVDGKLLCQLISLHHQSLRPWRPDDEATRKLALLCEKRRKAVDSRTTLSNQLKSELKLFFPLALTVLDNDLTTPLAANFLLAWPNFESLKKASANKVRKFFYAHQSRSERKIQERLKRIEAAQPSTRDSAIIETSTIAVRMLAQQLKDLVPFIALYDHQITELFDSHPDSALFRNLPGAGKQLAPRLLTAFGSHRERFTSSLEALTFFGLAPVTEQSGKSKWVHFRWACPKFLRQSFHEFAAQSVRSSPWAAAFYQYQRAHGKGHHAAVRALAYKWIRILFRCWKTRQPYNPELYLSALLQRGSPYASAVNNSPQKN

SEQ ID NO: 247505 - protein, 417 aa, unidentified
MLVAGIDVGAEVHHVAVVDQSETVVVKPTSFEEDHQGYQELFELLARAGARGGEDLPLATASAPPPSVMVVMEATGHYWQNLFAALVAKGFAVALVNPLRTHRFAGEELARTKTDRIDCLQIARFGVQKRPAAGQLPEVAVEELRELVRLRERLMQEMVARINQLHRLVDLGFPEFTRYLKDLNTALATAILHQYPTAQAFRGVSRKRLAKLSYDGRRQVGAELAQQLIEAAAISVGSQHSPSHQLGVRYACEDLETLRKRLKRLDGDVAGTLQQHQVGQLLTTIGGIGETTAAMLIAELGDPARFASAAALTAYVGLCPGHKHSGKHQPKSSSLSPFGNRRLRRALWMPTLSAATQSNPWLMVFYRRLIQRGKPHKVALCAAMRKLLAAIYSVAKYRRPFVPFLTPSAMRVDYEKA

SEQ ID NO: 247506 - protein, 400 aa, unidentified
MKYVLVLDVAKDKSMFMLSNNDGEVLLEPTEYNHNKHDFDFIDSYINELNIKDNLTIVMEATSIYHKSPERFFKENNYHVIVFNPIIGKEITNTIRKTKTDKQDCIKLTNLFWKGSIPDRCYTEDEIYTKLNELSRQYYHLDEGLTRHKNRYKELLHLCFPEFELCFKEGKIYDLTALNFIKEFPHAYIIKEKRVDALAYNMANTNGRHINYYKKKANIIKEYAQNSYPGVNEESKDVDNLKQLTEIIIYLTKQKDEVKNQMIELAKQTKNYNNIVSIFGIADLSASLIIAELKDITRFNNIKQINAFCGLDPTIVQSGKSINYHGPISKRGNRYARKILFNCSRNIVTLSAKCNKENPIYLYYQKKKQEGKHFYACLTACSTKLIRIIYALCMNNSTQD

SEQ ID NO: 247507 - protein, 312 aa, unidentified
MERTFVGIDIAKDQVDVHVHPTDERFQLSRDDAGLAGLVARLQPLGPRLVVLEATGGYEIPVAAVLASAGVPVAVVNPRQIRDYARATGQLAKTDALDARLMALFAEAVQPEVRPLPTPEAQALGDLVTRRRQLVDMLGAERNRHQQARDLRLQRRIATHIRWLTKALAEIEADLATRIRSSPIWRERDNLLHSVPGVGDITAYTLIADLPELGHLDRRKIAALVGVAPFNRESGHWRGRRMIAGGRPAVRSVLYMATLTAVRFNPAIAHFYQRLTAAGRPKKVALTAAMRKLLTILNAMLRDQRPWQPESA

SEQ ID NO: 247508 - protein, 344 aa, unidentified
MQITTVGLDLAKNIFQVHGINEQGEVLIRRRLRRAQLVSFFASLKPCLVGMEACGTAHFWARELMELGHQVRIIPPAYVKAYVRRNKNDAADAQAICEAVTRPTMRFVPVKTEQQQAALMLHKARDLLVRQQTMLVNALRSHLAELGLIASQGRGRAEDVIAVIEDAEDQSIPVLARSALKPLVDQLRAAEDAIRALADELTTWHRSNEASQRLATIPGIGILTATAIAVTVPDATAFRSGREFAAWIGLSPRQSSSGGKERLGRISKQGNRYLRRLLVIGATAVLRYARGKSAPAAAWVNGLLARRPARLVSVAMANKTARIAWALLARNETYRRPQACAEMA

SEQ ID NO: 247509 - protein, 356 aa, unidentified
MCQKLNARIAVIGIDIGKNAFHVVGHDERGAIVLRQKWSRGQVETRFASLSPCLIGMEACVGAHHLSRKLQMLGHDARLMPAKYVRPYSKGQKNDFRDAEAIAEAVQRPTMKFVATKSADQLDLQALHRVRERLVSQRTGIINQIRAFLLERGVAVRQGLRFLRAELPDILARRTDALSPRMLRIIEDLAGDWHRLDERIEDLSAEIEALARQDKACERLMTVPGIGPIISSAMVAAIGTGDAFSKGRDFGAWLGLVPKQISTGDRTILGKISKRGNRYLRVLFVQAAWVVLVKLRPKHWERYGLKSWIEAAKKRLHHNVLAIALANKLARIAWAVLYRERNFECVRRNAMASQSA

SEQ ID NO: 247510 - protein, 376 aa, unidentified
MNQDSTLYVGLDVHKDSITVAYATGLDDVELFGKIGTTQTALDRMCKRLQSKARHVHVVYEAGPCGYGLHRRLIEKGFDSMVCAPSLIPRKPGDRVKTDRRDAFKLVRSLRAGDLSAVHVPTGEDEAFRDLARAWSSARDDLKQARQRLKSFLLSHGVQYSGRANWGPAHRRWLSTLSFDSAWQQLAFNEHRRTIEDRLAQRDRLEAALHEAVPAWRFYPVVLALQAMRGIQFTSAVGLISELGDLSRFEHPRQLMAWLGVTPSEHSSGGKRRQGSITKAGNSYARKLLVESAWSYQHPARVSRDIQSRQEGIPKPIVDRAWDAQLRLCGRYRRLVARGKSRQVAIIAVARELAAFIWDIGRMAMSLAVPQSEQPA

SEQ ID NO: 247511 - protein, 398 aa, unidentified
MLSIGIDVSKGKSTVCGMKPGGEIVYTPFEVQHTREGMSELLSLLRGSGEEVRVVLESTGSYHCPVVAALLENGIFVSVVNSLRMKRFCSQSIRRVKTDQIDAMQIALYGLAYWQELQPTRLPENTYRELQLLARQYYQMTSMLIKAKVDFNALCDQVLPGMQELMSDHAGRHKLSDFVLRYHHTAHILKMGETRFRKDYCKWAEKKGYRNHERMAVLIFATAQNGIPVLPDAPSTQIVITEAIRVLHTVEASRDAILTQMQALAKTLPEYSLVREMPCIGDTLAPRLIAEIGDVRRFHSKRALIAYAGIDAPPYQSGKFSANNRHISKRGNRYLRKTGYEVMQSYVMHKPANDPIFTFIEKKRSEGKSGKLAMVAGLNKFLRVYYGKVTELYRSLPQ

SEQ ID NO: 247512 - protein, 377 aa, unidentified
MSKIRFVGLDVHAETIAVAVAETGGEVRSHGVIPNRLESVRKLIGKLGPVGALKACYEAGPTGYVLYWQLTQLGVACEVIAPSLIPTKAGDRVKTDRRDAEKLARCYRAGELTAVWVPDAAHEALRDLVRAREAAKKDQLKARHRLGKFLLRHGRRPEGLKAWTKKYLEWIKTHVHFDPAALEVTLADYLEEVDHVAARIVKLEKAIDEAVRQAPPEIRAVIEALQALRGVAQTTAATIVSELGSVSRFQSPRQLMGYSGLVAREHSSGNRVRHGGITKTGNSHLRRVLVEASWAYQHRPNVTGFLLRRQKNLALSDEVKKIAWKAQQRLHKRYQAFAARDKNKNQIVTALGRELLGFIWAIAVHIEGQQKQLRKIA

SEQ ID NO: 247513 - protein, 341 aa, unidentified
MKNKSFIGIDISKNVIDASIFCEGAPIKDFPHAVFNNSHKGFGEMCTWLKKNHVVLSNCLFGMEFTGSYSMKLEKFLNAKKYQFCMLSTHVVKHYPMGPKDKSDKIDSAKIADFLYRYNGTECVKPYKMPDKTMQRLRTLMNERKFLVEQRTCFMNRRQLCTTKEDAQLYDGYIKKFSRDIENIELEEQKLLATDDSLFTTYKNLLTIPGIGFVNAMNVIVITRNFTAFDTARQYASYIGVAPHFHTSGTSVKWRPRPSARCDGQAKADLSMAALIAVQYDAELQSFYNRKLGGKQDSDTKRKALNAVKFKLVLRMFAIGKQNREWEPLDSKSSNEKLAIS

SEQ ID NO: 247514 - protein, 412 aa, unidentified
MKVVHEICAGIDVHAKMLVACLLLANGEKEIRTFSTMTDELLRLRDWLVAARCTHVAIESTGVYWKPVFNILEDALTVILINPEHAHALRGRKTDVKDAEWLANLLRHGLLKASFIPPAEIRELRELTRYRESLVREQSAVANRIQKLIESGNIKLAQVASDALGVSGRTILWALARGETDPVKLATLAQRQLKEKRVQLERALHGRLTMNQRFVLCELLKRWEELEAADGRVTKEIDHYLQDRPKLARARDNLDTIPGLGPRTAEIIVAEIGVEMKANFASDAHLASWAGICPGNKATGGKRLSGRTRKGNTYLRSALVQAAWGASLKKNCYLSSQFFRLVKRLGRKKALVAVAHSLLVIIFHVLQNDQTYTELGGDYFDRQHVEQQREYYLRRLQMLGLKVTVEELSVAA

SEQ ID NO: 247515 - protein, 419 aa, unidentified
MCTRLPPQREGGRRASRLEEVPARAGEILALAGRLASDGVELVVMESTSDYWRIWFYLLESAGLTVQLVNSSHARQLAGRPKTDRLDAQWIARLAEMGLLRPSFVPPPEIRALRDLTRTRLQMVRDRTREWQRLEKLLEGALVKLSSVVHSLARTKTARDILQALAGGERDPKILAALAATHVKGGRAAIEQSLDGMMIGDHHPLLIRAHLDHVTLLDRTVAAIEDEIEATLGAIPAARGISADGVPSADPGPDAAILAAADRLAEIPGISRKLAMAIIAETGLDMTRFPTAAHLVSWAGLAPVTRQSGPRNRKPGKGHGDAYLKGYCTQAAAGAANTATFLGERLRRLTRRTGPMRARCAVARSILVIIWHLLASPEARFTDLGPDWHERNHDRDRKIRAHVQQLQALGLDVTLTTAA

SEQ ID NO: 247516 - protein, 320 aa, unidentified
MTAFTPVGIDIASKKFDAAIWIEGKKYKNKVFANTPTGFHAFLLWLAPYGPCHICMEATGAYSLPLATYLYDAGYPVSVENAARIHAFGQSELIRNKTDKGDAKMIARYCHLHKPPEWKPVPVNERKLQVLINRLNALKEMKRMEENRALTSETIVQGSIQKVIAALDEEIKEIEQAIKKHIDNDPDLKKNQALLESIPGVGEILSTTLLGYVGDMSRFSSNKALVAYAGLNPMLKESRCWKGSTKLSKKGNALLRKALYMPAITALKYNPVVAALCKRLKEKGKRGKCLVCAAMKKLLQLAYGVLKSGKPFATEIPLAR

SEQ ID NO: 247517 - protein, 443 aa, unidentified
MSELAVLDPRAAFVDVGSEKMHVSIAGGPPALFGTVTSQLHALRDYLAEHQVRSVAMEATGVYWLPLYGVLEAAGMEVVMVDGRQTRNLPGRKTDMKDCQWGATLHAHGLLRAGFVPPANIRRLQDYLRLRGDHIAAAAGHVQHMQKALERMNIKLHEVISSLTGASGLTVIRAILAGERDPQVLLGLCDIRIRNVKAERVVESLRGDWAEEHLFALAQAVQSWDHYQGLIAACDRQIAVVLRQMPDAKVPPPAASTKAGKPRTRPGVNAPDIADLREILAQICGAKDLTTLPAHSEYSVLQLIGEVGTDLTKWRTEKHFTSWLGLAPGSAQSGKRKASVKRRRNRAGQIFCVMARALARSKYVALGGFYRRMAARRGGLVANKALARKPATLFWRVMVKGLDFIETGVAQYETRVLETKHRILHRLARQLGQQIVPNPAAVV

SEQ ID NO: 247518 - protein, 388 aa, unidentified
MRASGAGGREEVTTYQTMTRSLLVLADRLAELGVTRVVMEATSTYWKPPFYLLEESCECWLVNAREVKHVPGRPKTDKQDAVWLAKLAERGMLRPSLVPPPWQRELRDLTRYRRTLIHERTREKQRVEKLLEDTQIKLSAVVSDMFGVSGRQMLEALIAGQRDPKVLAQLAQGRMRSKLGVLEEALTGHFRAHHGYLLRMMLDRIDALGAQADQLTGRIQELLAPFADQVEQLDEIPGVGRIGAQELIAEIGVEMGRFPSAGHLVSWAKFAPTTKASAGKTKSSSTGKGNPWIGATIGEAAMGASKTKTFLGSRYRRIVKRRGKQRALVAVGNSILTVAYHLLLDPQARFVDLGVDFHDRLHPQRRTRQLIRELEHLSGKKVALHTVA

SEQ ID NO: 247519 - protein, 415 aa, unidentified
MALKIVYKICCGIDVHKTFVVACIASTDKHGVTSYERHRFSTYTKGLKNLLQWLLEHNCKDVCMESTGKYWIPVYNILEKDCSIVLAHPKYVKAIRGKKTDKKDAKWIADLFKHDLVSGSFMPPADIRQLRDLMRYRFKLTCFKSSEKNRLQNCLTVSNIQLGNVVSDTFGKSAQAILDKILENPEDTSFDLEPLVFKSLKKKLPELRDAIDGYITPEQAGKLKIIKAHYESLESRKAELEELILALAAPYQQELAILQTAPGISSDFTAIGIISEIGTNMEAFPSAKHLCSWAGLTPTNNESAGKKKSVRVSKAGCYIKPLLVQCANAVVKSSKHPEMRNRYLRLKKRRGHKKAIIAIARMLLTALYHMLKNGENYNAERYRKSDLPPVDREITVEQAILIARNQGYKIKSATA

SEQ ID NO: 247520 - protein, 419 aa, unidentified
MEIIRNQNTRNINGQTLIVAVDIGKSVHYGYFRTPMGEEVKPFPFSNTHQGFQEFWQKLFRFQRQQGLKECVIGFESTGPYAEPLLHYLRTCPVKLVQINPMHTKRLKELTGNSPNKTDRKDPRVIADVISLGHALTLVVPEGAAAQLRRLTHARERALKRRTALLNQLHYLMAVVFPEFLEVMKKISTKTATYLIKHHPIPQHIVVLGSESLSKVLKKISRGQMTEQQAQRLFEVAQKSIGIHEGQQSMLLEIQYLVSAVERENGFIADLEKQMIGSLRQIPYSYSILSIKGVGKITTAGLIGEVGDFGKFKTIAEITKLAGLDLYEISSGNRKGQHRISKRGRSLMRKLLYFAVVNMIRSSGLLHEPWHQMVQRGMPTMKVMVALCRKLLRLIFALARDHAVYKENYTQTNTYKLAA

SEQ ID NO: 247521 - protein, 350 aa, unidentified
MDAGYAGRQFVGVDVHRRRSVLVRMTESGEHLETVRISNDPEYLRAVMARAGDAPEVVLEACYGWYWAADTLAELGAVVHLAHPLGVAGFANRRVKNDERDAADLADLLRMGRLPEAWIAPRQVRELRELVRHRAKLVGLRTSLKCQVHAVLGSAGLAVPVSDLFGAGGQRLLESAELAEAMRAKVNSARKLIEILDFEVDRFAALAAVRLHADPGYAAVQTIPGVGPVLGAVFCAEIGDVARFAGPKQLTSWAGLTPKHRESDKTVHRGRITKQGSKLVRWAAVEAVQHAGKDNPIGAHRERILARRGDKARNQAKVAAARVLLECVYWALRDGQVRRLGPATTTAQAA

SEQ ID NO: 247522 - protein, 388 aa, unidentified
MQDVADQSLAPTAIGADLCAIFVSLELSRSTWLTTSLSPGRGEKMSKHSVSAGDIAALLARFSELRRKARARTGKSFPIVVIQEAGLDGFWIHRVLLSEGIESHVVDAASIATSRRRRRAKTDRIDGETLLRALLAHKRGEPRVCSMVRAPTPEDEDRRRICRERKVLIMERVQHVNRIKGLLFSQGASAYEPLRRDRRARLEALQTGDGRRLPPHLKAQVCRELDRLELLLEQIKAVEAERDALLDAEQTKASAPPPMLLSVRGVGPEFASVLWSEGLSRHFDNRRQVAAYAGLAPTPWQSGSVNREQGISQSGNRRLRTTMIQLAWLWLRHQPRSALTLWFNDRMERNGGRRRKTTIVALARKLLVALWKYVSAGVVIEGTMIRPA

SEQ ID NO: 247523 - protein, 367 aa, unidentified
MKKVSTVEAKQSRKISQSKLTVGLDLGDRTSWYCVLDEAGRVLLEQRVSTTPKALREGFGGMLRSRVALETGIHSPWVSRLLSEVGHEVIVAHARKVRLIGESRKKDDRLDAQTLARLARIDPQLLCPVKHRSAKAQADLTVIRARAGLVRARTALVNTARGLAKSYGERLRGCNVRNMNPEKAEGLSPELQAALQPLLGALESLSERIAEYNQEIETLAKESYPQVALLKQVKGVGTLIGLTFLLTLEDPRRFRKSRDVGCYLGLQPGRRISGQSEPQMHISKEGDPYLRTLLVQGAQHILGPFGVDCDLRRWGLKLAERGGKSGKKRAIIATARKLAVLLHRLWVSGEVYEPLHNCKQRSMPAAA

SEQ ID NO: 247524 - protein, 435 aa, unidentified
MANYYHIPVVGIDVAANFSVVSALKPNGDIYIKNVKIMHSHDGFTKLVTLIQKIEKEFNVKSKVFCESTGIYHLTLFHYLIDQKIDINVINPLITNSNKNSNIRKVKTDKFDSLSIARLSKYYDIKVSSYVSEEFLHLKFLVRDYYKMIDLRANLKKAFSNNLYIYYPGFHKAFSDTTGKTALLFIETYPTPESILEADKLEVINLLQNSSRKGSQWAKTKYNTIIEIATSAKQIGINTPCFANKVKRFIETYKFYSNQLDNLSAEIMDYIDSASFSSVFKSNLELLKSFKGIGDITAITLLTEMNAIENFAKSSQLVAFFGIDPGVNQSGNFKGDQNKMSKRGTAIGRRALYALALASIRKTKNKVPMNTVLYDYYHNTLKSKKKKVRLVAVMNKLLRYIFSVLKNQKPYEVRNPKIHKKMFLEANSRLITKTA

SEQ ID NO: 247525 - protein, 349 aa, unidentified
MSEPYAGRQIVGFDLHRRRSVLVRMTEAGERLETVRISNDPEYLREVMTRAGEAPEVVLEACYGWYWAADTLAELGATVHLAHPLGVKMFSYRRLKNDERDAADLADLLRMGRLPEAWIAPPATRELRGWVRHRAKLVGLRSNLKCQVHGILANAGITVPMSDLFGASGQRLLATADLATESRSRIDSLQRMITALDFEVELFAKLVAGRLRTHPGYQAIQLIPGVGPILAAVFVAEIGDITRFRRPEQLASWAGLTPKHHESDTTVHRGRITKQGSRLVRWAAIEAVQRLPGHTRIGQVRDRVAARRGRNIGVVAAARELTELVFYGLRDHHVHALAVHSPARTPLLA

SEQ ID NO: 247526 - protein, 356 aa, unidentified
MSQKLDTLPAVIGIDIGKNSFHIIGQNRRGAIVLRQKWSRGQVQARLANLPPCRIGMEACVGAHHLSRTLKALGHDPRLMPAKYVRPYSKGQKNDYRDAEAIAEAVQRPTMKFVATKTADQLDLQALHRVRERFVGQRTGIINQIRAFMLERGIAVRQGLRFLRTELPGILATRTDALSPRMLRILEDLSADWRRLDRRIADLSSEIEAVARQDQGCERLMSVPGIGPIISSAMVAAIGTGDAFSKGRDFGAWLGLVPKQLSTGDRTILGSISKRGNRYLRSLFVQAAWVVLVKIGPKHWDRYGLQSWIEAAKKRLHHNVLAIALANKLARIAWAVLHKERAFECVKTNEAASRPA

SEQ ID NO: 247527 - protein, 350 aa, unidentified
MEFFVGLDVSLDETHICVVDEGGRIIKETRALSEPEAIARAIRHRGRRIEHVGLEAGNLSQWLYEGLVTEGFSVSVMEARHVRAAFAAMRVKTDRHDARGIAQLVRLGWFKRVHVKSLDAQETRALLTVRTFLVEKVTATENSLRAALRNFGLKMGSVTRRTWEARARELAEGNEVLEGIVEALLRVRVLLLDELAKVDGQLTSLAKSDPVTRLLMTMLGVGVVVALSFRSAVDDPDRFPRSRDVGAWLGLTPRRWQSGKTDIVGRITKAGDSRVRTMLFEAAASILGRVRILSPLKSWGLRIAKRTCMKKAIVAVSRKLATILLAMWKSGTAYWAKGHPPASAKDFAAS

SEQ ID NO: 247528 - protein, 415 aa, unidentified
MKTFAELTHFAGLDWAKDHHDVVIVDRQGLIVAQFTFPHSAAGWQQWRQCVSSYPALGVALETSSGPAVEQLLDSGVTVFPMNPRSAQSYRQRKAPSGTKTDQLDGWSFADGLRTDGQGWRPLAPLDPLVQELRLLCRDEVELTQQRTALVNQIQQALGEYYPAALEAFDDWTAPYTWEFVKAFPTPADLVKAGRRRWQNFLHAHKLYRPQTVDARLEAFAKATALTASPAITRAKSRLVLTLAATLLALEKHLEQYRAAIAQLFAEHPDHDLFGSLPGAGEKLAPRLLSEVGQDRHLFEDAQGLQCLAGTAPVRFQSGQVDRARIRWHCNKHLRYAVHLWADCSRKYCTWAQTYYQAHRAKGASHASALRRLGQRWLKILWTMWQEHKPYDPERHSRNQQKHGSWLLKLEPAKS

SEQ ID NO: 247529 - protein, 379 aa, unidentified
MQTAADSSPTVLLAAIELSKSKWRVATTEPGSSKVSHHCLPGGDAAGLLTLLRRLQERAVARLGCPVRPVTTMEAGFDGFWLHRFLVGHGVDSHVVDPASVLVNRRARRVKTDRSDAQSLLRALAAHLRGEGHACTMVRVPSVEVEDLRRQVRERDRLVGERNQHANRIKALLFGQGIQNFNPRRPGAAEQLACLHTGDGRLLPPCLLAELRREIDRLALVERHLGEVEAERDALVEQGASQGSAEARILTLSKLKGVGRTAAAVLVREVFHRDFANRRQVASFLGLAPSPWSSGTTNVEQGISKSGSRRARSVMVELAWLWLRWQPATRLAKWFQERSGAARGRARKVLITAVARRLAVDLWRYLAAGVVPEGATAAA

SEQ ID NO: 247530 - protein, 317 aa, unidentified
MPVVLGIDIAKAKFDAVLLSGGKARHRTFDNDDSGFEGLIGWLGKVEAGSLHACMEATGGYGDDLALFLHEQGHRVSIVNPARIKAFGQSEGVRTKTDKVDAGVIARFCRAHEPEPWTPPTPRMRELRALVRRCAALKEMRIKELQRRSHGSASALVRRSIEQSIRRLDDEIAAISTAVAELIDGDEHLCRSRKLLLSIPGIGPQSAAILLAEIPDFKAFGHNKQISAFAGLSPQEHTSGSSVRGKTRVSKAGNPRLRAALYMCALSARRANPTLKAFGDRLKDAGKPPKVVLVAVARKLLVIACGVIKSQRPFQLA

SEQ ID NO: 247531 - protein, 341 aa, unidentified
MNDTKTVVGVDIAKRVFQVHEVDVRTGELQSVQLKRAKFLEYFVNRTPCLIGMEACGGAQHWARRLTTVGHTVKLLPARQVRPFVGGNKSDQADARAIWTAVQQPGIKAVAVKTEAQQAVLALHRMRQQLVKFRTAQINALRGLLTEYGEVMPRGRAALRKGIVDAFVRISERLPAVLMDTLREQFARIGHLDEEIAEIERRLTDWFKQDAACHRVAAVPGIGMLTATAVVATMGDAHTFRSGREFAAWLGLVPRRRGTGGRIKLLGISKRGDTYLRTLLIQGARAVLLQSKAPSTWLANLAQRRPTNVAVVAQANKTARTLWALLVHERTWDADYVSQPA

SEQ ID NO: 247532 - protein, 369 aa, unidentified
MEDCRTAFVGIDVAKARNAIAIAEGGRGGEVRYFGEVEATLDNMRRIVRRIASKYDRVEFCYEAGPTGYGLHRMIMSLGYGCVVVAPSLIPRKPGDRVKTNRRDAMALAKLLRADELTAVWVPDESHEAMRDLIRARAAAVETLGIHKQQVSAFMLKHGRVYPRKKAWSMRYLRWLQEQKFDHPTHQIALQEGVEAVRIAKERVERLEKNIEEFLPAWSLAPVVRALQTLRGVDLIVAATFAAEVGDVRRFESPRQLMSYLGLAPGERSSGDTVRRGGITKAGNGRVRQMLVESAWTYRFPPRVGKVKLYRLEEAPPKVREIAWKAQTRLTARYRALTARGKKATVVCTAIARELAGFMWSAAREAQTA

SEQ ID NO: 247533 - protein, 341 aa, unidentified
MKNKSFIGIDISKNVIDASIFCEGAPIKDFPHDVFNNSRKGFGEMCTWLKKNHVVLSNCLFGMEFTGSYSMKLEKFLNAKKYQFCMLSTHVVKHYPMGPKDKSDKIDSAKIADFLYRYNGTECVKPYKMPDKTMQRLKALMNERKFLVEQRTCFMNRRQLCTTKEDALLYDGYIKKFDHDIENIELEIQKLLETDDSLSTTYKNLLAIPGIGFVNAMNVIVITRNFTAFETARQYASYVGVAPHSHTSGTSVKWRPRPSARCDGQAKADLSMAATVAVQYDAELQSFYNRKLGGKQDSDTKRKALNAVKFKLILRMFAIGKQNRKWDPLDSKSSNEKLAIS

SEQ ID NO: 247534 - protein, 338 aa, unidentified
MSIALLSIDLAKNIFQLHGADERGRQTLSRRVSRGKLLETVISLPRCRIVMEACGGAHYWARKFTAMGHHVQIIAPRFVKPFVKSQKNDRNDAEAIAEAASRPTMRYVTVNSVEQQDIQSMHRIRSLLMRDRIAQINQIRGLLAEYGVVIAQTPLKVRQQLPAILDDQDNELTKLTRSMMRDMYERLTLLDTQIERYDELIRQAHKASVLSQRLEKIRGVGPMIATAVIAAAGSATEFTNGRQFAAWLGLTPRQHSSGGKQRLFGITKRGNGYLRMLLVHGARSVVQQAVRHSDGLSRWILEVQARRGTNVAVVALANKIARTIWVLLARGREYEPPV

SEQ ID NO: 247535 - protein, 337 aa, unidentified
MKRFIGVDLHKNSFTVCFFTDKKKDFKTYALSKLDSFKTDLRKHDVLAVESTTNTRYFVSEILDFVKEIKVINPRQFKVISESVKKTDRNDAEIIALYLSKGLLPEVRMKDKKYTELESLAQTRDKLVKLRTSLKNKIHNILCSYGIVTKRESLSSEKGLNNILSYNVSDTAYVELEVLVNQIRSLNENIKKLDNEMSDRGKKLDKHKNITSIKGVGDRSGTILLSIMGDVNDFDIEKKLFSYFGIVPRVSNSNDTVYHGRITKRGTKLGRTTLVQCTLVAIRYSPYLRSFYEKLKSKKGSGKAIIATAKKLLSIIYNTLKNNWVFKDFTQFQLETS

SEQ ID NO: 247536 - protein, 375 aa, unidentified
MKEKVRFLGLDVHAETIAVAMVEPSGEVCSLGTIANRFESLRKLVKKLGPVEQLRACYEAGPTGYVLYWQLTQLGVDCAVIAPTLVPMKAGDRVKTDRRDAERLARSHRSGDLTAVWVPDEGSEALRDLVRAREAAKQDQLRARHRLSKFLLRSGRRPETKIKIWTGLYMTWVRQLRFAQPAQESTRLDYLHEVEHMAERVQRLEESIREAIKLASPQMQQVISGLQALRGIAEISAVTIASELGNVSRFQSARQLMGYSGAVPTENSSGTRTQRGSITKTGNAHLRRIMVEAAWSYRLRPGIGPELRKRQQGVPDEIKEIAWKAQIRLTKRFARLAAAGKDQRKIATAVGRELLGFIWAIGIKAEAASKQKMAA

SEQ ID NO: 247537 - protein, 412 aa, unidentified
MQVVHPVCCGIDVHAKMLVACLILANGEKKKRTFSTMTAELLQLRDWLVAVQCTHVALESTGVYWKPVFNILEDALTVILINPEHAHALRGRKTDVKDAEWLADLLRHGLLQPSFIPPPVIRELRELTRYRESVVREQSSVANRIQKLLESGNLKLGQVASDALGVSGRMILKALAKGESDPRKLAALARGKLKEKSLSLEQALQGRLTVNQRFVLGELLSRWEQLEAADARVTSEIDKYVQANPKLARARELLDSIPGIGPRVAEVIMAEIGIEMASVFADAAHLASWAGICPGNKATGGKRLSGRTRKGNTYLRSALVQAAWGASLKKHCYLSSQFQRLVKRLGRKKALVAVGHSLLVIIFHVLQNDQLYTELGGDYFDRRHVEQQRDYYVRRLQMLGLKVTLEELPQAA

SEQ ID NO: 247538 - protein, 387 aa, unidentified
MIYVGIDIAKLNHFASAISSDGEVLIEPFKFTNDNDGFLKLISRLDQFEKDELIIGLESTAHYGNNLLLFLVPKGYKVVLINPIQTSTMRKNNIRKTKTDKVDTYIICKVLMMQPHRFVTLFDLGILQLKNLGRFRQKTVKQRTRLKIQLTSYVDQVFPELQYFFKSGIHHKGCYALLKEAPSPEKIASMHLTHLTHLLASNSHGRFKKETAVELRVLAQKSVGSSDNSLSIQISQSIEQIELLNKQLDLIESEMKDIVSSLDSVIMTIPGIGYINGGMILGEIGDIHRFSSPGKLLAFAGLDPSVYQSGNFEAKHTRMSKRGSKVLRYALINAAHNAVKCNKTFKAYYDQKMSEGRSHYNALGHCAGKLVRVIYKMLTDNVPFNLE

SEQ ID NO: 247539 - protein, 350 aa, unidentified
MLTDELDYVVGVDTHRDEHVLAVVAAATGAVLARRAVRANAGGYQEALRFVGQAASGARAWAIEGTGSYGAGLARYLARRGETVLEANRLPRAERRLRGKDDALDAVRTARAALASETLALPRSGEGREALRLLLVARRGAVDVRREGLGQLRAVIVTAPDRLRQELRGLPTARLLERCGRLRRVRSASADELATRLVLGSLARRVEAATREAAELERELLAHVRALAPALLDEPGVGAIVAAQLLVAWSHHGRLRSEAAFARLAGVAPIPASSGQTSRHRLSRGGDRQLNRALHTVVLHRRLHDPTTQAYIEQRVAEGKSRRDATRLLKRYLARRLYRLLQNQEPLLLA

SEQ ID NO: 247540 - protein, 381 aa, unidentified
MFTVSTATAGVVYLALELSRSTWLAAARLPGVERTALRKIEAGDTASLLALVTTLRKRAQAQLGCPVDVVCCFEAGRDGFWLHRLLLANGVASHVVEPTSILVSRRARRAKTDRLDAEGLLRVLAAFHRGDRQVCSVLRVPSPAEEDAKRPHREREHLVQERVRIENRIEALLFTQGIRKLHPGHPEAALRTWERDLTSLRTADGRDLPPNLRAELDRLRRRLVLTLELIREIEAERADAAAAPEEVCQKTAALARIRGVGENFAAVLTREVFYRRFDNRRQLGSYVGVAPMPHQSGAMDRDCRIGRAGNPRARKTLIQLAWRWLRSQPGSALASWFRERVGVLAGRTRRIAIVAMARKLLVALWRYVETGVVPESVELKV

SEQ ID NO: 247541 - protein, 342 aa, unidentified
MEHYAGIDVSLECSSVCVVDGNGKIVREAKVASEPQALIAWFGSLGIGLERIGLEAGPLSQWLFAAMKAAGLAVELLETRHVRKAFEAMPVKSDRNDARGIAQLMRLGWFRPVHCKSMSAQEIRSLLTARKLVQSKLLDVENSLRGILRGFGLKVGKTTKQTFAGRIEELVAGHPHLQMIAKALLAVRAVLRTEFAAFEKQTRRMVRSDMQARLLTSVPAVGPIVALTYASAIDDPARFKSSKQAGAHFGLTPKKHQSGETDYTGRISKIGDASVRTALYEAANVMLTKPVKGCSQLKSWAMRIKRRAGTNKAKVALARRLAVIMHRMLADGTPFNAAAAAA

SEQ ID NO: 247542 - protein, 402 aa, unidentified
MNAVGIDVSKGKSMVCIMRPFGEVVASPFEVTHTGSELSKLANSLKSLNGETKVIMECTGSYYYGIAYALHEAGLFVSAIHAKLIHDFGNNTIRKVKTDKADSIKIANYGLNHWLELPEYIPDEDIRRMLKAFSRQYTKYGKLKTMLKNNFISLTDETFPGVNELFTSQPRKSDGHEKWMDFAFKFWHCECVCGLTPKAFAERYQRWCKKAGYHFSQDKADDIYASACGHLVGMPKNETTMLLVTQAVTQINAISESIAVIASEMKRHAGMLPEYPVVSEFYGVGDILGPQLMAEIGDVYRYRNKGSLVCYAGLEAPPYQSGKFESADRSISKKGSPHLRKALFQVMDCYLRRSPINEPVYQFLDRKRAEGKHYYSYMTAGSAKFLRIYYARVKEYLDKIED

SEQ ID NO: 247543 - protein, 339 aa, unidentified
MTEITRVGLDLAKSVFEVHAVNAQEQVVVRRSLRRNQLLKWFARQAPCLIGLEACGTANHWARELTALGHTVRLIPAAYAKQYVRRNKNDAADAAAICEAVSRPSMRFVPIKTVEQQADAVTHKARQMLIKQRTMIMNSLRGLMAEFGIVVPQGPQHIGKLLAILADLEDSSVPAVARTALNAMSEMLSNLEKQISVLDKDIKARARADMIARRLDTIPGFGPILSSAVAAIVTDPRHFDSGRDFAASLGLVPRQDGTGGKVKLGPISKRGNGYLRRLLVNGATAVLNGKNARNDPWQAKMLDSKPKKLAAVALANKMARIAWAVMTRQEDFRPRAVTA

SEQ ID NO: 247544 - protein, 345 aa, unidentified
MEHYAGIDVSLESSSVCVVDGSGEIIREGKVASEPAALIGWFLSLGFDLARIGLEAGPLSQWLFAAMQHEGLAVELLETRHVRNAFKAMPVKTDRNDARGIAQLMRLGWCRPVHCKSLAAKEVRAVLTARKLVQLKLRDVENSVRGILRGFGLKVGSTTSGRFAKRIHELAAGHQNLQLVAEGLLAVHAVLLREFQAFDRQVRGLARQDEKASQLMTAPGVGPIVALTYASAIDDPGRFSSSKQVGAHFGLTPRRYQSGETDYSGRISKSGDAAVRAALFEAAHIILTKPLRGCTALKSWAMRIARRAGPKKAKVALARKLAVILHRMLADGTAFSAETGPTATA

SEQ ID NO: 247545 - protein, 348 aa, unidentified
MVRYVGVDVGKAKCRAAIMNQTGAIESEFFFENNTKGIESLTSMLTVEDQVVMESTGNLWLSIYDSLDIRSIKVVLANPLKTKVIASAKIKTDKVDARILAHLLRADLVAESYVPKGSIREMRGLVRHRLSLVRMRTAIKNKAHAIVDKYSYHCEFSDMFGKGGVAWMRSLMLNELDRLILENHLSLIESINLQVGMVDKTIRKIACEDEDVRLLLSLTGVDVYGALLIHSEIGPITRFSSYKKLISWAGLAPSVHQSGNVEYTGRITKRGSSLLRWVMVEAARTAVQYDEKLAGFYERVRARRGDQKAAVAVACKMLKIVWFMLSRREVYSCANTRRYGEKLKKIGA

SEQ ID NO: 247546 - protein, 415 aa, unidentified
MKVVFPTCCGVDVHKTFLVATIITTPADSLQPNYQKKRFSTFNSDLNRCADWLLEHNCLDVCMESTGKYWVPVFNILEKRGIRVVIANPKWVKAVKGNKDDTKDSKWIGDLFRIGLVKSSFIPDLNIRILREFTRYRYKLVSMKSSEKNRFQNAFTVCNVALDSVVSDMFGKSATAITDYLTSDESFDAEHCVSLLQRSLKKKAEQVLESIEGFSIADEQKARIKIIREHHDVIEEMIATVDTRVNEMVAKYEGNINLLCTIPGIDRRSAITIISEIGTDMGQFGSSKRLCCWAGLTPGNNESAGKKKSVRISRAGVYLKPALVQVAHAAVKDNDHPYYKLKYERIAKRRGKKRAIIAIARMILTAVYSMFCTGEVWNPVDLYKVDMPGCLKEQQLAKAIKQATRFLEKQGLSVA

SEQ ID NO: 247547 - protein, 330 aa, unidentified
MKKAELFVGIDVSNKTLDVCKLSSTREFLKITNSQKSIAKFIKDLERRHTPSTIFLCLENTGKYSWRLVRALATSEINTYVVNPLHLKRSLGLIRGKNDKVDAVRIAQFIKKNHEELVPYVPEREEITSIKILLAERRYKVKTRRQLKAKNKDLKQVPNRTMVKTLINENNQLIKQYDKQIKRIETEIRAVINADQSLKQMAKLLKSVPGLGDIIAWNIIVKTNEFKTIKDPRKLACYCGVAPFQNRSGTSIFGKTRVSLLADKKLKKILHLGAMRAVRMNNDFKVYYERKVKEGKNKMLVLNAVRNKMIHVAYALINKQEFYQNRLVLS

SEQ ID NO: 247548 - protein, 408 aa, unidentified
MNTTLYVGIDVSSKSNVVYVMLPNGDKHSSFSVANSHDGSIQLVKRILSALTSHSLDTVLIGLEATSVYGDNLVYFLREDATLAPFNRKIHVLNPRQVKQFHDAYNDLPKNDYVDSFVIADCLRFGRINKEVYIGDYHYKALQNLTRARYFAVQNLTKEKQRFINVLFKKYSTMTQEKVFSNTFSATALAVYDEFESAEALANMDLQELTDFIIEKGKNRFPDPDAVAKAIQKAARSSYRLPKTVNDSVNQVLSISLASIKALDAQIKEFDKAIKAQMELLPNVLISVPGIGPVYSAGIMAEIGDINRFENQAKLAKYAGLAWKQYQSGGFESETTRLIPSGNRFLKYYLCEAALSLVRCDKEYSDFYHLKYKEVNRYQHKRALALTARKLVRLVFRLLKDNRLYRPA

SEQ ID NO: 247549 - protein, 343 aa, unidentified
MKITRVGVDLAKKVFQVHGVDAAGHQVWKRQLKRSSWLSVLTETVEPGCKIGMEACGGAHHWARELKSRGFKVKLISPQFVKPYLKSLKNDVNDAEAICEAMTRHHMRFVAVKTVAQQDIQAIHRVREGLMNHRKAKANQIRGLVAEYGLVAPRQMAPLRRAIPCWLEDAENGLRQPFRVLLHGLWEDLQRMDERLKVLDKEILMLSESHPDAKRLKQLRGIGPLTATAMVAQFGDGRHFKRGRQASASVGITPRHAGTGGKNWLFGITKKGNPYLRSILIHGARSVVSKAKHKDDRLSRWVTELAKRKHPNVAAVALANKTVRIAWAMLRNGTDYDPELAMA

SEQ ID NO: 247550 - protein, 436 aa, unidentified
MAVDIVHPRVAGIDVHKRVVWVAVRLPGPGLGERTVTVRGFKTFWRQLRQMAGWLAELGVSDVAMESTGVYWWPVYHALVAAGGIEVCVCNAAHMRNVPGRKTDIRDCQWIAELHEHGLLRPSFIPAAEVAALRQRTRYRKKLIEHRAAEGQRLSKVLEDAGIKIDSVASELLGVSGRQMIEALIAGERDPARLAGLAKGRLRAKLDALELACDGRFTASHAQMCRLHLDAYDRLTMQIVTLDVLVAEAAAPFEAVIAKLITIPGIGRRIAEVIVAETGAQMARFPASAKLAAWAGLAPGSNESAGKRKKAAARNGNQHLRAAMVEAAWACSRTATRPGARFRRLAYRFGKLNIKKAAVAVAHTLLSIAWAVMKDDADYAEAGADYYDLRDRRNHEHLARHYQQALTRLGYQVTLTPPGDGPPPGAPPGQPQQPAA

SEQ ID NO: 247551 - protein, 435 aa, unidentified
MSTLGVDLAVRAAHVATLSNDRGEVIWSRRRFTSHPHDLAALSTAVGPASELTVVMEPTRSAWVVVAAHFRATGAKVVMIAPEQSADLRSYYKKHTKNDRLDSLVLSRVPLLHPEGLREVSGLGPAEPLRRAVRRRVDIVDQRGACHQRIDAMLDLLGPAYHEALGSRGTKTSAVVLERYGNPKTLRRLGLSRLTDLVRKTSGGHLDAEYAARLLQAATQAITLWKGGGLDFDELAWDLAQEVRLINQLDVEIERLDARIAELYQLADPKGIVRSAPGVGPVLSAGIAGRLGDATRFANLAAVRSFSGIVPGVNQSGFTETRPGITKQGDPGLRRDLFLAAELARHQDPQLAAKYHRLIMERRLHHYSAICHLATTLVTRIAACMRSGQLYVVRDVDGTPVNSEEARAIIAKRYSIPPAARRRSRIPDAVSEPTR

SEQ ID NO: 247552 - protein, 416 aa, unidentified
MDVVFPRCAGLDVHKKRITACRIVPDPTGQKAEGITELQPFGTMTRDLLALADWLTEASITHVAMESTGEYWKPVYNLLEDTFTVFLVNAAHVKNVPGRKTDKADARWLAKLMRFGLLQASFIPPKGQRDLRDLTRYRTKLVQERVREVNRVQGVLERANIKLASVIADIMGVSGRAMLEALIAGRADPATMAALAKRRMRSKIPVLEQALTGIVHDHHRQLLAMQLAHIDFLDEQIEALNAAIETSLKALSTAEPSREAQPLPLTFSRAVELLDTIPGIDQRGAEVIVAEIGIDMSRFETAPRLAAWAGVAPGNDESAGKQRSGKTRKGNRPLRAILTQLAHAAVRTKDTYLSALYQRLVAYLRLADKYLGLLASRLRGVNQPVIRTRRGFQPLVTHRWPAFERKVSAPNLSPPT

SEQ ID NO: 247553 - protein, 367 aa, unidentified
MSNSRIQSKALNAKLSWEIIGLDLAKNDLSFVGITLEGEIIRIDRLSYEQLVEFSRDTDPTTFAMEPCCESHYLTNQLELYGHQCRIIPGKAVQNYIDTYFSGQKNDLNDAEALAFLGQQKRLKFVRAKNRDEMQLQTLLTVREHYIDEYRKTLTSLKGVAQYWGLRLAKSLSSEMRLIALIEDADLPEDVKGIFKEMVKTYKDLQKKARELTKKIEAFTQGDEFCQKIRKIPGLGPISSAGLKVAIGDIARFPSPRTLPAYFGLVPRNITTGHSLKMGKITKRGDKLVRTYLVQAASSLLMLDGKGKFRDCQLRRWIQRKRQTLNHGKLVVALAAKLLRIVWAILSKNEAFDYRKAGVAKCALPKT

SEQ ID NO: 247554 - protein, 432 aa, unidentified
MKNDNRKYLSVGIDVGADFSLMAIALPSQELVGKSYRIFHNSKRSLDSAIDRIYSVMEQYDLPARIFMESTGIYHFPVYHKMREAGLDAYVLNPLVTHASKDINVRNIHNDKFDAQKIALLGLRPDLKTSIVPSDDVAAMKAILREYYAMKKETSMYICRLKDQLRQVFPQFIPVFSKVNGVAAMAVLYEYLTPDSILAAGADELERFMKTVISKGPLHIRKKAEALVEAARGAQNFGHGNTGVFYLIRHYIEMIRLLDAETKQLLTQVRVLLKEQKNSQMAKQVRLLQSIPGIGFLSAVTLVCEIGDFSAFKRPKQLFAYFGLDPAVRQSGNFSGADLKMSKRGSPYARRCIYVLAIQSVSLRVDGTAKNPVLRSFYEEKCKSKSKMTALGAVMHKVCNIIFAVLRDERPFVLITPEEHRTAYFAAAVKAA

SEQ ID NO: 247555 - protein, 352 aa, unidentified
MITLGVDAHKAVHVAIAVDESGRELGEWRGPNAVDAWASLARWAAAFGPECWWGIEGAWGNGRGLAQYLVAQSFTVFEISPHWTTRLRRNNRRQGKSDRLDARAVARCVREEAPKLPLVHAEDDSVVLDLLSTEREAAIAEATRLRNQIHALLSQVDPEYERHLPSLTSASGLRALVSYSARDGTLIQQQRAACIRRLAERLQLATAQADDVAEQIRLLAAARYEPLTRLCGVNLLTAGTLAGMLGPGCRFESEAQLAAYAGTSPLEASSSGLTRHRLNRGGNRRLNSVIYRIALTQAHFHPGARAYIERRVSEGKTRREAHRCLRRYIARAIWRLWQECLQQPTAKNTEAA

SEQ ID NO: 247556 - protein, 318 aa, unidentified
MDGTNQVSIGIDVAKATLDIHVLPSGQTQTLPNTKTGFEQLQQALPDPVTCLIVLEATGGFEREVVADLTDAGYRVAVINPKRARDFAKALGLLAKTDRIDAHVLARYAEKVQPAPVEKTPEKQGEIQQLVARRRQLIDLRTQESNRWGTTQAKAARKSIQAVINTLEAEIRGIEKVIEALLESDDDWQNKMQLIQSVPGLGDVTATTLIADVPEIGKLNRQQISALIGLAPFNRDSGASKGKRCISGGRKSVRCVLYMAAMAARRCNPVIRAFADRLAQHGKPFKVIITACMRKLLVILNSIVKSGRPWMTQLATNP

SEQ ID NO: 247557 - protein, 385 aa, unidentified
MRSEATREGETIVGGQVLYMALELSDRTWKVLFASPAGRRRERSVAARDLGRLMEEIAAAKRRLGLSAQARVVSCYEAGRDGFWLDLELRANGIDNLVVDSSSIEVARRARRAKTDRVDLFKLMGLLLRWVGGEKKVWSVVRVPDAAAEDIRQLSRSIERLKGEHGRHVTRIKALLATQGLKLARIGGRDWGKRVGELRRWNGSALGAWLQRDLVLEGERLAVVAEQLGALKAERDRLVAEGREAAAVKARELARLGAIASESSFVFATELFGWRTFSNRRELAGSVGLTGTPYSSGDSAREQGISKAGNRRMRTMLVEIAWCWLRYQPASALSRWWQERFANSGGRARKIAIVALARKLLVALWRFLEHGVVPAGAVLKTRVAA

SEQ ID NO: 247558 - protein, 286 aa, unidentified
MRKNLRFVGLDVHKDSISVAVAENGREPARLLETVPADEWLLLKVLDRLGPKSRLRVCYEAGPTGYGLARRLNEAGICCVVVAPSLVPTQKNRRIKTDRRDAVRLAHFLRSGDLVEISVPEAQTEAMRDLERAREDAIQVERVARQQLDKFLLRHGRRWSAGLKWTVKHWKWIKVQEFPEEASRRVFNDYIHTAEQARARVQRLTTDISELVDRWTLGPLVRALQALRGVDLVTAVVLAAEIGDFKRFRSPKQLMAYLGLVPSEHSSGGDRQQGGITRTGRITSSA

SEQ ID NO: 247559 - protein, 423 aa, unidentified
MPVSTLYVGIDVSLKTNQVCPINFNQDVFFNEKFDNSPSGTERMTVKILDILNKNKDLNKVLFCMEATSVYHIHVSSILASDSRLLAYGCKVYAENAKSIQKYKETFLDREKTDPEDAYLCADYARIGKCKDCHPVIGYQKIALQRLTRQRKHIAEQLGKEKQYLSSNLFLKFSALKVNPEDNPFSNTFGKTSSVMLTDFLSNEEIVKADLGDLVVKISEVSNNRISDKDEVARKLKRMAQHSYHLDSYASDSVSMAMASSFRLIETYQNELKKLDKEILRLIEGYDNKYCAILTSVKGVGNVYAAGIIAEIDDIHYFRNDEHLASYCGLRWKKNDSGNKRSDHTRQPNTCNTYLRYYIVEATGSILRFNDEYASYYCRKKSEVKVNSHKRALVLTSRKFVRLVYGMLRDHKLFDDHYLAHRS

SEQ ID NO: 247560 - protein, 309 aa, unidentified
MEHFVGIDVAKDRLDVHLRPSGESFAVARDGEGLVQLVNRLQTLAPRLVVMEATVGYETIVASAVAAAHLPLAVVNPRQIRDFARATGKLAKTDRIDAAAIAHFAEAVRPPARPIADAEAQALGELVARRRQVIQMIVAERNRRRRATQGRVLRAIDRHLELLQSELSELDRDIDGAIRKSPAWQADAELLVSVPGVGPATLRTLIADLPELGRLDRRKIAALVGVAPINRDSGTMRGRRTIAGGRPAVRTALFMAAMVASRKNPIIAPYYAKLRAAGKTAKQALTACIRKLVVILNAILRDRKPWQPA

SEQ ID NO: 247561 - protein, 462 aa, unidentified
MTIDKKLWRNRKERKELARRLRSEDPGLEVVHPCAAGIDVGNGAHYAAVRPDRDSQSVRRFECFTADLHRLADWLQNCGVKTVALQSTGVYWIPLYDILEERGLEVYLVNARHTKNLPGRKSDVQESQWLLKLHTYGLLNNSFQPTSEIRVLRTYWRQRAAHVRGVATCIQRMQKALTQMNVQLANVISDLSGATGQMIVRAIVAGERDPRKLAELSDPRIHASKEEIAKSLEGHWRQELLFVLQQEVAMYDTYQRRIVECDHELQKHLSGFADTVPSAKDKAKKKKGQSKHHPQFDLADELLRITGVDLTRIDGIDVMVAQTLLSEIGLDMSRWKTEAHFASWLGLCPDNRISGDKVLGRGTRHVINRAATALRMAATSLLRSQTYLGAQYRRLRSKLGAPKAITAMAHRLARLVYRMLKYGQQYVDKGAAYYEQRNRQQQIAFLRKKAAQLGLQVTLANP

SEQ ID NO: 247562 - protein, 312 aa, unidentified
MTAIICGVDVSAETLDARIGRDGAWQRFANTAEGIAALAAFCRTNDVGLAVMEATGGYERQAFAQLWADDLPSAIVNPRSVRRFAEAMGTMEKTDRIDCGMISWYAETRCIQPTRPASTTQQRLKALVVRLRQLTELRVEQLNQRRLVTDPDALATFETILATIARETRSLEAKIAAAIGADPVWVALDRAFRTIKGVADRTVARLMAEMPEIGTLSYKAVAKLAGLAPIARDSGKFIGKRPVRGGRESVRSILFIVAEVVRRHDPDFARFHQKLCAAGKPKKVVRVALARKLLVRLNAKARDARNELANAA

SEQ ID NO: 247563 - protein, 428 aa, unidentified
MNQPSNNDDTQNDYAAFIAIDWADRQHVFSLQVAGQTTKETGTLEQKPEVIGPWVAKLRERFGGRPVAIAVEQSRGALIHALMTYDFIVIYPLHPTTVAKFREAFKSSGAKSDPLDTDQILQILTKHRELLKALNPDTAQTRLLARLVEDRRKAVDLRTSHVQALTAALKEYFPQALELVNGNLTSRLACDFLIKWPSFEAFQQAKPSTIKRFYYGHNIRSPEVMEKVLGLVKTAQPLTTDSAIVQSGSRLSQMYAQLIRTLNSVIVDYEERIEKVFHDHPEANLFNKLPGAGPALAPRLLSFFGTDRSRYEAAGNVQSFSGIAPVTKSSGKTRVVYFRHACPKFDRQTFHEFARLSVSKCQWARNYVDYYTAKGKKFHTIIRALAFKWIRILFRCWKNRAPYDETKYMDNLKKRGSIFATLHLEQKS

SEQ ID NO: 247564 - protein, 391 aa, unidentified
MISVGIDVAKDKHDCFIINSEGEVLADVFTIPNSLDGFQHLLQRIRDCPSHQGKIKVGLEATGHYSYNILGFLLDNGLATYVLNPLHTNLYRKSLSLRKTKTDRVDARTIAAMLLSDVGLKPYTDTAYYNEELKSLTRYRFDKVKERGRLKQSITRLVCILFPELEKLVPTLHIVSVYALLEEFPGAKQIAEANLTRLKTLLYNASKGRYGQDMAVKIREAARKSIGSVMPAKSLELRHTIHLIRELDAEIDEIETAIQRIMNELHSPITTIPGIGSRMGAMILAEVGDFSRFGSPDKLLAYAGLSPSTYQSGQLKNCYAHMEKRGSRYLRFAIFNAAKYVCHWDRGFAAYLAKKRAEGKHYNVAISHAAKKLVRLIYALEKSGEPYRLAA

SEQ ID NO: 247565 - protein, 420 aa, unidentified
MGRLKIVYPVCCGMDVHRDFLIACIAATNAQGVTEYQSRRFSTYTGSLRELRDWLLANDCKDICMESTGKYWFPVHNILEESCHVVVSHPKFVKAIKGKKTDKKDAQWIADLFKHDLVRGSFIPPKDIRQLRDLCRYWVKLSSYMTGEKNRAQNCLTVSNFKLDDVFSNVFGKSASAITTQLLEHPGEQFDVAPFVDGRCKTPIAQIQEAVDGIFTYEQAEKLKIIRGHMDSLERHKAELESLILEIAQNYLPQIELLLTVPGIHDAFTAIRILAEIGADMTVFDTSKHLCSWAGLTPQNAESAGKKKTTRIGKSGAYLKPLLIQVALAASRGEKHPEIYGKKQALQKRRGKKKAIVAIARRLLTAIYHILSKNEPYNPAAYIQEDKNPMARQISQEKAFEMLARMGFIVSNPSPLSSSG

SEQ ID NO: 247566 - protein, 355 aa, unidentified
MNHIAIDLGSRESQICIRDSSGTILVEGKRATCSLGKYLAGIEKSRVLLESCAEAFVVADAARAAGHEVVVVPAKLVRQLGVGDRGIKNDVRDAQQLSNVSCRLADLPSVHIPSTLSRERKAMCNMREAQIEARTKLVNTARSWLRTQGIGVLRGGGQETFPERFRRHVASRGRTVPEEVNRVLQALEALNLGIMEADKQLAKAAESDPICKLLMTAPGIGPVSSLRYAAALDDISRFHSAHGVEAYLGVVPGENSTGESRKRRMTGITKAGPPRVRWALTQAAWAVLRCKKRDPMAQWAWEVAKRRGKKCAAVALVRKLSGVLYAMWRDGKPYDPHHAGKATREAGMVANPIVP

SEQ ID NO: 247567 - protein, 314 aa, unidentified
MRKCIGIDIAKQYFDMYVLCSRQHHRLDNTAEGVRQCVQVCKAATPELIVMEATGGYELALACALQAEGLPVAIVNPRRIRDFAKAAGQIAKTDKLDARIIAQFAATLEPMTTEQINEDTQKLKALVARRNQLVGLHTAESNRLEHADNRDIQHSIAAVLKVIEDQMKAVERKIEDHILNTPELKQRSETLQSTPGIGPTTAHMLVTELPELGRLNRRQIAALLGVAPIARDSGTLRGKRMTGGGRKNIRSRLFLPTLVAVRYNPVLKAYYDRLVSRGKCKMVALVAAMRKLICILNTMIKKNQNWQPNFTKIA

SEQ ID NO: 247568 - protein, 384 aa, unidentified
MTAGADGSVVSNGMDAPTFDGIYVPEWKCQQPLEPEGASTMQITTIGIDLAKNVFQIHGADQHGKAVLRKQFRRDQVAPFFANLQPCLIGIEACSSAHHWARKLQALGHTVRLMAPQFVKPYVKSNKNDVADAEAICEAVGRPTMRFVPIKNAEQQSVLSLHRVRQAFVKARTAQANQIRGLLAEYGMVVPKGIGFIASRVPDLIEDANNELPGRFRQLVDRLLEHLKLLDKQVNEIEAQIKAWHRDDETSQKLQKVPGIGPITASALAATVGDAKNFDNGRQLAAWLGLVPRQNSSGGKQTLLGMSKRGDAYLRTLLIHGARSVLYRASQKNDPESWLVKLTTRRNANIAAVALANKTARIVWALLAHDREFRPDYAAAAAAA

SEQ ID NO: 247569 - protein, 476 aa, unidentified
MSKRVQKRQERKRVQPKVDWKALAVVHPDAAGIDIGGSEHWVAVGPDRDEQPVRCFDCFTADLEQMADWLAARGVRSVAMQSTGVYWIPVFEVLQQRGMEVYLVNARHTKNLPGRKSDIAECQWLLKLHTFGLLQNSFQPSDEIRAVRTLWRYRGGLVGQASSTIQRMQKALIEMNIQLSNVLSDLSGVSGMAIVQAILEGKRDPQELAALADPQVKASQEVIAKSLHGNWRSELLFVLGQEMDSYRALRKRIAECDGKVQQHLQRMGSRVDLSVQPIGPRPKGKRARGNAPQTFDLRSELYRLTGVDWSQVDGIDVQVAQTVIAEVGTDLKAFPSEKHFANWLGLCPTNDSSGGRVLKRRTPKVVNRAKTAFRQAASTLIRSHSYLGAQYRRLRTRLGAPKAITAMARKLACLFYRLLTKGQPYVDRGAHYYESHHREQQIRSLIKRARQLGLQLLSGNGQPLGLQVPSPEGQSA

SEQ ID NO: 247570 - protein, 364 aa, unidentified
MSDITTTIERSKLTVGLDIGDRFTQVCVLDEDGEVLEEGRVTTTPRAFQQRFAAMPPARLVLEAGTHSLWASRLLGELGHEVIVANPRMLRFIYGNNSKNDRADADYLARVGKLDPGLLHPIVHRREESQAHLALLRSRDILVHTRARLVTHARGVVKPFGFKLPRCSTTAFVSKAQEHIPEILAPALVPVFGIISALNDQIRELDKKIEALARETYRETALLTQVQGVGTLTTLAFMLTIEDPNRFPRARAVGSYVGLRPRQDESGTLKPQLHITKAGDKFLRHLLVECAHYMLSSRGEDSDLKRWGLKLAERGGKAAKKRAVVAVARKLSVLLLRLWTTGETYEPLRNAKKRGDPVPSAAVS

SEQ ID NO: 247571 - protein, 347 aa, unidentified
MNFYGTEHKHYCGVDLHARTMYVCIVSQQGVVLLHRNLPCDELKFLAAIRPYRDDLVVGVECIYTWYWLADLCAREGIAFVLGHALYMRAIHGAKAKNDRIDSHKTAALLRGGLMPQAYVYPAEMRATRDLMRRRLHFVRERSSLLAHIQMTHHQYNLDAPGKRISYRTNREGIGEGFEDQSVRDSIAADLVLVDQYEKVIGELELAVLRQGRVHDPNAFRLLTTLPGIGRVLGLTILYEIHDIRRFPSVGDFASYSRLVKCEKSSAGKKLGTSGAKIGNVHLKWAFSEAAVLFVAKCEFGKKLLARYERKYGKPKALSILAHKLGRAVYFMLARNQAFDLERFSKS

SEQ ID NO: 247572 - protein, 342 aa, unidentified
MKDTMIGVDLAKNVFQLHGATMTGHLSFRKKLTRSRFRQFMAGQPPAVVVMEACGSASYWAREMVKFGHEVKLIAPQYVRPFVKRQKNDAADAEAIVVAAQRPEMRFVQPKSEEQQACAVLFRARERLLHQRTELVNALRSVLYEYGHIIPKGIAHIKRIESILDEPNSDLPALVREECFDLLEQIAEKTARIDVKTAKAKALSLATDTARRLQTMPGVGPQTALAISGFAPPMESFKRGRDFAAWLGLVPRQYTSGGKERLGRVSKAGQTDIRSLLIIGAMSRLTVLARKSIVEGSWLARMLRRKPLMLVAIALANKMARAIWAMMTKKEDYRNPARVVAA

SEQ ID NO: 247573 - protein, 319 aa, unidentified
MNCTNNQKEITIGVDTGKFQLDIYIRPLDIYFTVTNDEKGIKEAIKKIKPHKPTRVVIEATGRLEHAFIMACSQADIPFTVANPAHVKKFAGAIGRKAKTDKLDAQLIAHFGEAVKPTLSTLKPENMQLMSDLLSRRRQLMTMQTMEKNRLQIMPKEITGIIKPILTAIKNQIEKVDDKLSKLIEKCSEYKAKNTIIQSMPGIGPVVAFNLLSDMPELGYLTNKEASSLIGVAPFNKESGSYEGQINIRGGRHKIRTVMYMAMMSAMQCNPVFKATYQRLVAAGKPKKTAIIACVRKMIIILNSMVRDGVMWDPEMNQN

SEQ ID NO: 247574 - protein, 347 aa, unidentified
MRFYNGQHRHYCGIDLHARTLYVCILDAAGNTLVHRNAKATPEAFLEIIAPYREDLVVAAECMFTWYWLADLCAKEAIPFVLGHALAMKAIHGGKAKNDKIDSHKIAVLLRGGMLPQAYVYPQAMRSTRDLLRRRLHLVRKRGQLLAHIQNTLHQYNLEPWGKRIAYPANRQGLLDHFPDPAVRQSIAVDLSLLDHYDRLIPPLELDIVRAAKRHDADAFHRLRSVPGIGKILALTILYEVHDIHRFDRVQEFASYARLVQCAHESAGKKLGTGGRKQGNVHLKWAFSEAAVTFLRHSVDGKKLLARLERKHGKGKALSILAHKIGRAVYYILARSTVFSQERFMHA

SEQ ID NO: 247575 - protein, 362 aa, unidentified
MVGFGKNLKEGTMNYIAFDCHKRYTFARVEDASGRVLWEGRIPHRRGIFLEFLEGFEPSTPVALETIGSWYWVVDEIEARGLRPRLVHARKAKVMMGMVDKSDRLDARGLGILQRTGTLPEVWIPSGEIRDRRELPRSRMLLVWQRRRLKQRVLSNLVKYGFVVSEVSDPFGRKGKEVLKRMIAELPPETKSITLMLLEEIEHLERRIKEIEERMREVFSSSEEIKLLQSIPGVGFILAVVIALEVGDISRFGGPERFVSYCGLVPRVEQSGSRVRYGRMRKEANRYLKWAFIEAANTVALNAKRWPERHASRLYQRIRQRKGHGKAVGAVGRHLAEAAYWILRKKEPYRDPGLRALGERGA

SEQ ID NO: 247576 - protein, 309 aa, unidentified
MQANLIGIDLAKNVFQVCAVDHNGNELWSKRLTRQRLSGFIAEQKNCVIAMEACGGAHHWGREAGLKGIEVRLIPPQFVKPYVKSQKNDYHDAQAICEAATRPHMRFAALKTLEEQDIQSLHRYRDLLVSNRTMVINHARGVLLEYGVAIPKGAAGFGKKLLAVLEQNESNLTISIKRQIGLLREQLVELEEKIRQCENDLEVLAKQNPVYSQLLKLPGVGKLTASALLSMTSQAGKLKNGRQFSAFLGLVPRQNSSGGKTKLLGITKRGDVHLRNLLIHGGRAVVRHIDNKTDETSPYTDHSRLVFVV

SEQ ID NO: 247577 - protein, 359 aa, unidentified
MDLQQIMYHPKLLKIMRYDYFIGADISKPFIDFVVLDQNGEKLFYLQVENTRTDLTRFVKDLSKKYTLSNCLFCMENTGIYNEHLLHTLYKRHANIWLEKAIQIKQSLGLQRGKNDQVDAFRVALYAYKHQKDVCLWEPERTVISELRRYTSLRSRLIGIVVTLSNPLQELEQFTKKQEYNALKRHCQSSLNALKSDIKKVEARIDKLIVEDPYLDKLFNLVTSVDGVGKVVAQEFIIATGEFKRITDPKKFACYSGVVPFEHSSGISIRGKTRVSPLANKRMKKLLHLSALINVQLEGDLQTYYHKKVAEGKNKMSVLNAVRNKIIARVFACVRKNEKYQRSFLSKNREAPIEKECTG

SEQ ID NO: 247578 - protein, 343 aa, unidentified
MYYIGLDVHKKSISYCVKDAAGQVHREGKTGSTRRELDTWIKTLPEPRMIAMEATIFTGWIYDHLLPHAEKVKVAHPLMLRAIAAAKKKNDRIDARKISDLLRCDLLPECHMASTEIRDRRRTLRYRGLLLRQTVQMKNRVSGLLMESGVTYDKQRLHKMGYFTELFSTNDEISDSIRPLLRLGREHILRGQRLDRALISSLERDPLLSERLRRLRTIPGVGPITALTWALEIGDYTRFRSVKEAISYCGLCSAEKKSADKVMRMPISKQRNKHIQHVLVEAAKMAPRYSHELALVRDKEMQRGNKNRATLAVARKLVAYLLAVDRRKQDFVPAEALAGEAVA

SEQ ID NO: 247579 - protein, 420 aa, unidentified
MILFKIFRKNCCGLDVHKTWIYACIGITDTNGRTEYKEARFSSFSEGLRKLDDWLTSYSCNEVCMESSGKYWIPVFNILEKNHSVTLAHPKYTKPQRGNKTDRKDAKWICDLFMCDMIKPSFIPPLTIRNLRDLVRYLRKLTNIVTGEKNRAQNCLTVSNLKLDDVFSDVFGKSALSITRHIIDHPGEYFDVAPFVDRRCKTPIKEIQAAVDGSISKEQSVKLRQCISHIEELETHKENIVTEISRIVEPFSNALSLLRTVPGFDSNPMTAITILSEIGDDMTVFPSAKNLCSWAGCCPRNDQSGRKVKSTRISRAGTFLKPLLVQVANALVKSKSHTEFVERYRRIKARRGHKKAIIAICRMILTAIWNILKNNVPYTANGFKQKLPTHRSKILTTSQALQMLRTRGYVIKDSPAVLST

SEQ ID NO: 247580 - protein, 457 aa, unidentified
MSQTKRSRKSRDLTKVHPAAAAIDIGATIHVAAVGPDRDNEPVRTFQTFTGDLHRLADWFAGCGVKTVVMESTGVYWIPIFEILEQRGFEVMVVNARDAKHVPGRKTDVSDAQWLQRLHEYGLLRASFRPQAEIAGLRAYLRQRERLLDYAAAHIQHMQKALTQMNLQLHHVVSDITGVTGMAIIRAIVEGERDPAVLASHRERGCHASVETMCQALVGNYREEHVFALTQALELYDVYQTKVTACDKQIQAILTRLKQTAPPPANKLLPVRRRSRQPNAPGFDARAALHAILGVDLTQIDGLGPYLALKLVGECGTTLTAWPSAKHFTSWLALAPHNKISGGKVLSSKTRRTSNRAASLLRLAAGTVGRTDTALGAFYRRLSARVGKAKAITATARKIAVLFYNTLRHGMSYADPGATYYEDRYKQRVLTNLQRRAKSLGFVLREADQETAQVGVS

SEQ ID NO: 247581 - protein, 413 aa, unidentified
MEVVYERCAGLDVHKNSVTVCLIVSGPGVKPKKEIRTFGTMTDDLLKLSDWLTVNGVTHVAMESTGVYWKPIWGILEGNFTLLLVNAQHIKAVPGRKTDVKDSEWIADLLRHGLLRGSFVPDQAQRELRELTRYRTTLVRERAAEANRLQKTLEGANIKLGSVASDVLGLSGRSILAQLIAGTTDPAAMAELAKGKMRAKIPELVRSLTGKVRPHQRFLLAQQLEHIDFLDGAINEVSREIGERLRPFEEDIERLDTIPGVGRRVAETILAEMGSSMPRFPTQGHLASWSGLAPGNNESAGKRRSGKTCKGSPSLKAALVEAAEAAARTKNTFLAAQYHRIKARRGHKKAIVAVAHSILVIAYHILRDKEPYRELGAAYYDERDREKIKHRLVARLERLGVKVALVDPVAPAA

SEQ ID NO: 247582 - protein, 346 aa, unidentified
MGLGPAGNEPVYERRLANDTGLLIKEVMRFSKQGKTEVAYEAGCLGYVIQRAMEEAGISCYVLPANKVAKKRDDRIKTDKRDARLIGREMRNKNIRPISVPDEADEAARDLLRCREDVSEDLRRSKQRLLKFLVRHGHIYDGGGSHWTLRHWQWMDRLGFRQEHERTVYEEYRSQIRALEERLTRLEQQVTETAESPRYKAAVSKLRAFKGVDYIIALSVVCEIGDFRRFANAKAFMSYLGFVPSEYSSGGKRNQGGITKAGNGHLRKLLIEGAWHYARNARAGKRLEQRRQNCPVWVIDVADRALHRLHKKYFRLLMNGKHQNVAVTAVARELAGFIWAVQVSAA

SEQ ID NO: 247583 - protein, 378 aa, unidentified
MPSESTVHIAIELSVSSWLIAARLPGAEKSRLHRIEGGDTAALLALFAELRSRASAKLTGEANVACCFEAGRDGFWLHRLLTAHGVAAYVLEPTSILVNRRARRAKTDRLDAEGMLRVLAAWLGGDRQVCSMVRVPTPDEEDAKRTHREREHLVQEKLRIENRIQALLFTQGIRARPSLRSWARDMAELRTGDGRALLPLLRTELNRLRRRLVLILELIRELEAERAEALAAAANDAMVRKITALQRIRGIGSNFAAVLVREVLYRSFANRRQLASYVGITPMPYQSGGMDRDRSISRAGNPRARTTLIQLAWLWLRYQPGSALAAWFRERVGTLQGRTRRIAIVAMARRLLIALWRYVETGVLPEGVEIRAEAAPMA

SEQ ID NO: 247584 - protein, 409 aa, unidentified
MQVMHERCAGLDVHKKSVYACAIWPGEKGEKEQEVRSFGTFTADLLKLADWLRGHGVSYVAMEATGVFWRPVWAVLEGEFELLLVNPQHIKAVPGRKTDTRDCEWIADLLQHGLLRGSFVPPCEIQDLRDLTRYRAELTQAQNKVDNRIQKLLEQCNIKLSSVASNTLGVSGQLMLEAIIEGEDDPAQLADLAQRKLREKIPQLRLALAGKVRDHHRFLLKEYLQEWKALRGRIARVEQEIEHRMGPFDQVVALWESMPGVDHITACNLVAEVGVDMTQFPSGQHLASWAGLCPGNNESAGKRMSGTMRDGNKWLRRALCQAAWAVTRKKDCYLSAQFRRLAARRGMKRAVMAVAHSMLIIGYTMLKTGRSYHELGGTYFDQINKDQLQKYFVKRLEKLGLTVSVVTAA

SEQ ID NO: 247585 - protein, 295 aa, unidentified
MDQVIIGVDPHKLSVTIEARDSREILRAKGRFGTDTRSYRQLLAYARQWPERVWAVEGANGIGRPLAQRLLASGERVLDVPAKLAARARVFDTGQGRKTDPADAHAIVMVALRDKRLRELPADPGLTVLRLLCDRRDELSRARAQALNRMHRLFLELIPGGAPVKKSTAQYRALLATVRPRDLAGKTRRRMAAEEIADLEHLDAKLKAMKAELNAAVAATGSHLMDIHGIGPAGAARILADVADAARFPNRAHFASWTGTAPIDASSGQHTHHRLSRAGKRRINHVLYMAGLVQC

SEQ ID NO: 247586 - protein, 359 aa, unidentified
MKNLKYSVGVDVSMKDFACCISVINDQQEVKVKATHKFANTIAGFEQLLEWVKRHRKEELPIVFVMEATGVYHEQLAWFLHHKGNTVSILLANKAKKYLQADGIRSKNDKIDARGLAKIGAEKKLEQWTPPSMELYTLRHYTRFHQSLNEMYTAAANQLHSIEHSQFKNKTIIKQLKSSLKLYEKQMKELESLITQLIQSDPVLSQHHQNVCAIKGMGTLSFAVIAAETNGFALFDNAASLVKYAGYDVIENESGKHTGRTKISKRGNSRIRRILHMPAFCAVRDDQPQFKKLFERVYDRTRIKMKGYVAIQKKLLVMMYYLWKKGERYDPAFKKEVAPALPGATRDGLLKEALIKQQN

SEQ ID NO: 247587 - protein, 334 aa, unidentified
MEKVTTLGIDLAKSVFSLHGVGGAGQAVLRRTVRRDQLVKVVAGIAPCLIGMEACSGAHEWGRRFQEHGHTVRLMAPKFVAPYRKSGKNDGNDAEAICEAVARPNMRFVPIKSAEQQAVLALHRVRQGWIEERTATINRLRALLTEFGVVLPNRAQHVRRGAHAAAEALPELARRAVEDLRAHLGMLDERVASYDRELQAQARQSEAAQRLMQIRGIGPLTAVAMVATVGCARDFRSGRQFAAWLGLTPRQHSSGGKPRLGHISRRGDAYLRCLLVQGARSVLLTAMRHSDRLSRWALSVQARRGYHKALVAIAAKNARIAWALLSKNQTLRAA

SEQ ID NO: 247588 - protein, 367 aa, unidentified
MNYSAIDYHKKNSFVSTVNEQGQRVAEAKIKGNAPAAFAQFFAGLGGEPTKVVVEACWNWGWLYDVLEQIEEVEEVVLAHPYKTRVIAEAQVKSDKLDARILSQLLRGNLIARAHAPSWSTRQRRFLLRQRMFWVRVRTMVRNRVHALLARQHGLELPHRHDLFGSGGMKFLRNLSLSGIDGALLRQDLEVLEQLDSQVKASEREIARELGADPEVERLQTIPGIGKLLAAVIAAEFDGAERFRTNKKLWGYCGLAPSTRTSDRHTWHGPLLGQCNKWLRWAFVEAAWVAIVHSGYFGAIYSRQIERGKIANQAIIVVARRLCEIAWKLLREKRSFQSSAPSKISHRPHVILADAQLKNCASRPRSD

SEQ ID NO: 247589 - protein, 350 aa, unidentified
MEIHTIGIDLAKTVFHFVGLNARGEVVVQRKCSRSQLLRFTSNLRVCLIGMEACGGAHFLGRALRDQGHDVRLMPAQYVKPYVKTNKNDYIDAEAIAEAVGRPRMRFVPIKTDDQLDLQSLHRIRERWVVRRTAVINQIRGLLLERGITIRKGRLHIEASLPPILEDADNKLSGILRVLLAQLQLEMQYLGRQIAESDKLILEIAKGMDSCRRLIAIPGIGPLTATATIAAIGNGAAFKKGRGFAAWLGVVPGEQSTGGKQKLTGTSKRGNKYLRKLFVQGAHTVLLQKNKQSPGLSTWLADLTARKRKQVATVAMANKMARMVWAVLTKGEAYRPPLLLEPARNGLQLT

SEQ ID NO: 247590 - protein, 371 aa, unidentified
MKSIIDIGMDVHKKTYSLCAVLKESGEVLSETRIPADPDLIIKFIENAKSIINQPDAEIKAGYEAGCLGYSLYWQLAQRGIDCDILAPSTMQRSAKNKVLKNDRRDARNIAVNLAGGTYKSVHIPTEEDVEIKEYIRMMHDFKIESKKVKQHINAFILRFGHQYPGKSRWIPAHIKWLKELKLNDMHREILDEYLSQLDILTEKIERFQNRLEELSQKETYREKIGQLRCIKGIDTTVAMTLHAETSDFDRFPNAKAFASYCGLTPSEDSSGDKIRRLGITKQGNSMIRTASVEAAQVLVRGTIGKKGKKLKSKQKDQDVKVIDYADKAMVRLQKKYHRMILRGVSRNIAITAIARELSCFVWGIETGHLD

SEQ ID NO: 247591 - protein, 357 aa, unidentified
MNITQIISFANTHFFIGIDAHLKNWKVTIRMGGIELKTFSMNPSPLELIAYLHNHYPDGIYHIVYEAGFCGFWALRIFRQHNIDCIIINPADVPTTNKEKVNKSDPIDSRKLARTHENKELHGIYIPDTFHEELRALMRLRYRIIQSQTRIKNRIKGLLYCQGIQIPLQFSGRDRWSHAFILWLQQLHLNTSAGNFTLQSLILQLKEIREHNKNVLKQLRKEAQHPDIAPLMKALQGVPGVAFITAMYLYTEIMDMKRFPNDDALANFVGLVPSTRSSDEKVYSNGISFRQNSFLRTIMIEAAWTAVREDPAMTLKFKELSKRMKSQDAIIRIAKKLVKRIRHVWLKQEEYVYALVA

SEQ ID NO: 247592 - protein, 413 aa, unidentified
MRLFVGDDWAEAHHDVELMDVTGRRLAKARLPEGVAGVARLHAMIGEQLGEDADEDDAGQVAVGIETDRGPWVQALIAAGYTVYAINPLQASRYRERHGVSGAKSDAGDAHVLADMVRTDSHQLRPIAGDTAQAAAIKVVTRTHKTLIWERTRCTQRLRHALRDYFPAALEAFGDLDAPDTLELLARAPDPASAARLTTAQISAALKRARRRNVTEKAAQIQAVMRAAHLGQPDIVAAAYAASARALIAVLATLNEQVAALQGQVEAYFGQHPDAEIIASQPGLGPVLGARVLAESGDDPRRYASAKARKNYAGTSPITRASGTKKAVLARYVHNDRLIDALMTQAFSALQASPGARAYYDRQRARGAGHNPALRQLANRLTGILHGCLKTRTLYDEATAWPQHAAKAEKTAA

SEQ ID NO: 247593 - protein, 347 aa, unidentified
MRFYKHTHAFYCGVDLHARSMFTHILDHAGNTVFEADLPASPDAFRNAIAPYRAGLVVGCECMFSWYWLADLCEDDAIPFTLGHALYMKAIHGGKAKNDRIDAAKIAGLLRGGMFPMAYVYPRAKRDTRDLLRRRCFFVNQRAQLTAHIVNTNSQYNHPPLTKKLCYAGNRSDDLAERFTQASTQASIRADLALIDAYDAQIDEVERTVLKNAKIIDPVTLKLLRTIPGIGKILSLVLLYEIDQIARFPEVGNFLSYSRLVRCEHESAGKKKGTGGKKIGNAHLKWAFAEAACLMLRAEADAKKWLDRQARKRGKKKALSVLEAKLGRAVYHVWSKQQAFDLRRFFA

SEQ ID NO: 247594 - protein, 368 aa, unidentified
MKEVTTRYLGLDVHKATISIAVADNGVPPILFGTIANDPTAVRRVVRQLKRGGKLVAAYEAGPTGYGLHRQLKELGVDCIVVAPALIPRRAADRVKTDKRDAIALARLLRSGDLTPVWVPGQEDEALRDLVRSRFDAKDDLRRAMHRLAKFLLRQSIQIPAGMRPWSTRHLQWLDALQLDNPTSHLVLEDYRLAVHAARERVRRLESDLERCAEHSSRLGLILALQVLRGIAFLSAVTIVAEVGDFRRFPDAPHFMSFTGLTVSEHSSGQSRRQGRITRAGNRYLRHILVQAAHNARFTPSLGGELKQRLNGVPADLVDFSVRAQTRLHRRYRHLDRRIGRPKAVTAVGRELAGFVWAIGQRMEASAA

SEQ ID NO: 247595 - protein, 321 aa, unidentified
MQSSDFIGIDVAKATLEIATADATSPTQTLANDRTALSSWLATLPATAQLALESTGRYHELAVELATGRGLPVYLVNPRALHHYAKAVHRGAKTDRLDARLIARYLAHEHAQLRPYTPPSAAVQELLRLQRQRTQLVVTLTGLRQSLAELDVCRPEQRTALQGVRQLIAALDARSAELLAAEPARADLAKRLATIPGFGPLNSRHYATLLPRLDPPRLSALISYVGLDPRPRDSGTCRGQRKLSKHGPAETRRLSYLAAMAAARYDDDWKTLKNQLIARGRSTTEAFCILARRLLRIAYALYRDGGVYDPAKLAPEGGQTT

SEQ ID NO: 247596 - protein, 408 aa, unidentified
MTIVGIDVSKGKSMVAAMKPGGELVAAPYEVRHSDIELSRLALNVLCMEPDTRVVMEATGRYHEPVAALLHSEGIFVSILNPLLIKQSGAGSLRKVKSDPKDALKIAKYGLDNWSTLREYTPMEAIRQQLKLCARQCDLYNKSIVMLTNNLISLSDKTFPGVNELFSSPEKADGHLKWVDFYRTFWHCDCINRMSPDTFGERYQKWCKRKGYHFSADAADALYAASCGLYTTLPRDNNARLLVTVAADQLIALRENQSKLEAEMLNFCKQLPEYETVMAMYGVGKSTGPHLMAELGDVRRFLHRSSIVAFAGVDPGVVGSGKMQLSSVATSKRGSPQLRKALFQVVSTYVKCKPENEAVYQFYTKKRDEGKPFFVCTTAAANKFLRIYYARVKECLNAAESATQVEEG

SEQ ID NO: 247597 - protein, 469 aa, unidentified
MAAVMIGVDPHKASHTAVAISAAEEPLGELRVRACVAQTGRLLAWAAAWPQRTWAVEGAGGTGHLLARQLVSAGERVLDVQPELGARVRLLAAGDVNKNDPNDARSVAVAALRSAGVRQVRPDDHAAVLKIWSKRYRDLGRTRTQVACRLHAVLGELIPGGVPRAITTARAARILRAIEAAGAVEAARCELAAAFLDDLRRIDTRIRETRKKLAVTIAASGTSLTGLFGVGPVAAAAVIGDVRDVSRFPGRDHFAACDGTAPIEVSSGPRKICRLSRRGNRRLNHAIHMAAITRIRHRHSQGRACYDKKLAEGKTPKEALRSLKRQVSNAIFACLQADARRAAARVKGPGGQQGNDSVASAAGSHPRHRLFGQATPGPGHHPAATSSDPPPGPASAWGRAGHSPVAAPLPSAQPQVQAERPQRSEDERPGGAARRPHPATRKATAQGPLLKPRRPKATSHQPKKTDGTP

SEQ ID NO: 247598 - protein, 391 aa, unidentified
MTYVGIDVAKDKHDCYIVNSDGEILANVFTISNDQIGFNLLFQTLQSVAPDLSKVKVGLEATGHYSYNILGFLLDKGLATFVINPLHTNLFRKSTSLRRTKTDKVDARTIAAMLASNVVLTSYTAASYHNEELKSLTRYRFDKVQERAKLKTSVARLVNILFPELEKLVPSLHMNSVYALLSEFPGAKQIASCHLTRLVHLLSKSSKGRYRRDKAIQIREAARSSVGSVMPAKSLELKHTIRLIEVLSEEIDEIETSIREIMDSNPSPILTIPGINYRMGAMILAEIGDFSRFDSPNKILAYAGLSPSTYQSGKLDNAYPHMEKRGSRYLRYALFNATRLVCNWDPTFAAYLAKKRAEGKHYIVAVSHAAKKLIRVICAIQKSGKPYCPAT

SEQ ID NO: 247599 - protein, 344 aa, unidentified
MNIIGCDYHPSFQQIAWVDTETGETQERKLMHGDGEAERFYRQLRGPVRVGMESTGNCHWFVDLLAEMGHEVWIGDAARISAKQVRQQRTDRRDALHILELLVKDDFPRIWMPSRQERDQRQLLIHRYKLVTLRARVKNELQHLALNQGMQKGRSLWSKAGQKVLLDLPLQLWAGTRRKNLLELLKQMDQQIVVLDQAVKKAAEENEKARLLMTQPGVGPITSLAFVLTLGDVTRFRRGKQVASYLGLIPREYSSGGKQRLGGISKQGNRFMRMLLVEAAQTVVRYDPGFRKEYLHRCHHKPKAVAKVAAARKLAIRLYWMLRTNTPYPEVVRIESSSRVPLAG

SEQ ID NO: 247600 - protein, 320 aa, unidentified
MEAVLGIDIAKAKFDVALQFSDGRVRRKSVPNTPAGFTALGAWLTQQRVTRVHACLEATGSYGEALATWLHDAGHRVSVVNPMTIHAFAASRLSRTKTDRTDAALIAQYCATQHPAPWQPAPREIRELQALIRRLEALQDMRIQETNRLSSGAVTPAVVRSLETVIATLSDEITAVQQQIRDHFTQHPGLRAQRDLLTSIPGIGDSTAAVLLAELFDKQYRSARQAAAFAGVVPRIAESGTLKRRGRLSKIGPSRLRKALYFPALAGLRFNPSLQALRTRLRAKGKVPMVIVGAAMRKLIHLAYGVLKSQRPYDLTIVRA

SEQ ID NO: 247601 - protein, 320 aa, unidentified
MNEISSETVVELKFVGIDVSKDALDVCIEPPGVAERFGNDDAGIAALSQRLKAFTPTLIVMEATGGFETHAATTLVGAGMPVAVINPRQARDFAKASGELAKTDAVDARMLAFFGRAIRPAARALKDETVHELDGLVTRRRQLIDMRTQETNRLTTASKLQKKQIDKHIAWLNKRIDELDKGLTKRLRNSEVWRTKDDLMQGIPGVATVTSLSMLAKCPELGTLNRRQIAKLVGIAPLANDSGKRRGARAIWGGRADVRSVLYMASLSAMRYNAVIRVFADRLRAAGKPPKVVIVACMRKLLTIMNAIIKNNTPWNPTIA

SEQ ID NO: 247602 - protein, 365 aa, unidentified
MASVSHPAPIHLGLDVHKDTISVGILDPDQQVPDVERITHDEASVRRLVARFPDRGWLRACYEAGPTGFELARLLHGMGVRCEVIAPSLIPRAPGDKVKTDRRDCRRLARLHRAGELVAIRIPSSEEEAVRDLCRTRSDMVEDLTRARNRLGKFLLRHGRPWRGGSTRTKVYQAWLRAQRFDQPAMTQTFGHYLAVVEVRNQALDAVEADLVGWCGRPPFAWQVTRLAAYRGVTRLGALTLAAEVADWHRFAHASQFMGFCGLVPSEYSSGSRVHRGRLTKAGNAHPRAQLVESAWSYQHRPSVGAEIARRQQGLPPEVVARAWAAQQRLSGRFRTLAARKHTKSIVAAAIARELAGFLWAEMTA

SEQ ID NO: 247603 - protein, 354 aa, unidentified
MSQSLNSAVAVIGIDIGKNSFHVVGHDERGAIVLRQKWSRGQIEARFANMPPCLVGMEACVGAHHLSRKLNSLGHNARLMPAKYVRPYSKGQKNDFRDAEAIAEAVQRPTMKFVATKTADQLDLQALHRVRERLVSQRTGIINQIRAFLLERGIAVRQGQRFLRAELPRILATPPDVLSPRMVRIIEDLAGDWRRLDERVEGMSNEIEAIARQDAGCERLMSVPGIGPIISSAMVAAIGAGDVFTKGRDFAAWLGLVPKQISTGDRTILGKISRRGNRYLRVLFVQAAWVVLIKPKIWERHGLKSWIEAAKKRLHRNVLAIALANKLARIAWSVLAHGRDFEARKMDQAANQSA

SEQ ID NO: 247604 - protein, 414 aa, unidentified
MAGIINKACGLDVHKKFLIATILSIFGEKKQLRFERTEKGILDLKNWVISEKCDVVACESTSDFWVPIYESLINHLTVIVGNARDMKAFTHKKTDKIDSEFIAQLALNNMIKPSRVFSKNQREFRSYIRLRHKLVQKRTDIKNVAHAILASEMFHLNDVLTDIFGKNGIIILSGISSGKNVDQIIESLSPNVRKKSDQIREVLDREMSLSAAIRIQTCLSLINNIDEQINILEAEIFRCAYTNHNREMKLLMSSPGVGEISTATIIAEVGDFNDFSSGAKLASWLGLVPNVYQSADKYHNGRITKRGSKVARWILIQVAQAAARKNGSMLKEFFERKKKTIGHSKAIVALARKIVTILWHLITNNEMYEDEMGYKKGEVQKRKIVESEEFSVDERISIISEIFAIVKKEETDST

SEQ ID NO: 247605 - protein, 329 aa, unidentified
MNYIGMDVHKRFTYAVVKDEQGNKIAEDKFDNNENNFANFLQIYKPEETKIVMESTGVWEYIYEILEAMKYEVKLANPVKTKAIAYAKVKTDSVDASTLADLLRANLVAESYIPPKNIRRLREITRLRKIAAKQRIQTENRLHALLTKRGIFLPKKTLCKSSFEFLKEKKEYPIDEYLEIIEYQRQREKEIEKRIEKIAENNKEATILVSFSGIGPIRAVEVIAEVGEIDRFPTADKLCSYAGLVPSIKQSGSSLRFGRLMQQASKSLKHAFVQIAWSLVRTKESNRLQEFYKKLSKKKGKQKAICATARKICCVVHAMLRKNEEFRYL

SEQ ID NO: 247606 - protein, 262 aa, unidentified
MFPVGIDVSKNTLDLCMLYDGIKGRLKTRNIQNNRHSVENILRWLRLQHCGPEDVHVVMEATGVYHERLATELHDAGFRVSLANPHRSREFARGMGIMTKTDKVDAYMLACYAFLKKPHRWEPPAPEIRYLGALLRRRDVLLGDALREENWLEKYLSTDTPADIISSCRRMAQLLREEVSNIERQIKAHIKACPALRRDYTLLTSIKSVGPQLGMHMLVVLRSHNFASAEQADAFLGVVPIEKRSGTSVRSRPRMSKIGPLS

SEQ ID NO: 247607 - protein, 535 aa, unidentified
MGSSDRLVTGALQPVQELGSGLRVCFLVKPSWVIPLRRMLIFHRRPGHGRRHSTPRLHLTYTSSNPMAKRSKAKKVRLILTQETHPHAAGIDVSATEMMVAVPPGQCADPVRSFGTTTDELIALRDHLLEQNILTVAMESTGLYWVPLYDVLEAAGIEVRLVNARHVKNVPGRKTDVVDAQWLQQLHTAGLLRGGFRPPQAIRGLRDLMRERADLLSQSSHQILMMQRCFDQMNIQLHRVLSDLDGTSGLRIIEAILAGERSPAALERLRDRRCKTPKAEVIQALTGNWDEDCVARLGRAHALWGAIRQHLEAIHERLATLIAGLETPVHPALLAQPDDSGAAQPTRVMELKSPKPKDVEGKNGFGIDLRSESLRLFGTDLMAIAGIGHSVVAVLLSEVGTAAQFKLSFPTGKQFASWLGLCPDNRISGGRILGSKTRPVQHRLAEALRLSAFGLWRNKSGLGDYCRKMKGRLGKAEGITATAHKLARAIYAMITRGEPYDEKKLLQTSPAAKARKLQNLQKRAQDLGFKLIPAA

SEQ ID NO: 247608 - protein, 410 aa, unidentified
MEPILKSCAGMDVHEKKVDVCIAHGPFDKPPKFEIRTFSTMTSDLEELATWLKKYEVTTIGMESTGIYWKPIFNVMEGEFQIVLANAQRLKAIPRKKTDIIDCKRIANLLRYGLVPNSFIPPKEIRELRDLNRTRRKLVGMMTSEKNRLVKVLEAANIKLSSVVTKIYGVSSLAMIRSLLEKNKLSREEISQMAKGKLKKKVDLLEKALNGKLTNHHRFLLGMHLENIDHLAKQIKKIDEEIQRKMVPFQKESKLIQTIPGISEVNASAILAEIGVDMSQFPDEAHLSSWAGVCPGNNESAGKKKSGKTQKGNSFLKGTLTEAAWAASKTKNSSYSAIYHNIVRRRGKKRALVALAHRMLIDIYYILKTGEPYQDIGAKAVHERTIKRREQSMIRSLERAGYSVAKAATA

SEQ ID NO: 247609 - protein, 324 aa, unidentified
MSKIQLRSYIGIDVGKEWIDVFVSGLNEENRYKNTPEEISCFIQWLLSQEIIIERICLESSGGYENRILTALCNAHLPVCQVNAKWVRNFAKAKGYLAKTDKVDARVLSEYADKMSPSLYQQLTEERKALKNLYLRRQQLVQMLAAEKNRLEKCDDNPFSSSSIKRIIKHFEKEVARIDALLDDWLNQHSNIKASLSTITSVQGIGKTTAIALLALLPELGRLNRRKISALAGLAPMNRDSGKQRGKRFIQGGRPTVRHALYMSALVASRFNPIIKDFYQRLLSAGKPKKVALTACMRKLIVYLNSLLNQLFQDNRVPEIRACA

SEQ ID NO: 247610 - protein, 411 aa, unidentified
MELLHPRCAGLDVAKDEVVACVRVPDGRGGRQQEVRTFQTFTSGLEALADWLAAEGVTQVVMEATGQYWKPIWYVLEERGFQLMLVNARHVKILPGRKTDVADAAWLAELLEHGLLRGSFVPPAPIRELRDLTRYRKRLIQAHSSEGQRIQKTLEDAGIKLDSVAADVLGVSGWAMLEALVAGERDPQVLAELAKGRLRAKLPQLRQALRGRFGAHHALLIRLAMAHLEQLEASIAELDTHIDQVLAPFAWARDRLDTITGVGKRAAETIIAEIGVDMSVFPTAGHLASWAGRCPGNNRTGGKRRSGKPTKGNRWLGEVLIECAWAAARSRDTYLSAQYWRLARRIGKKKAAVAVGHSILVIAWYLLTDDCDYQDLGGDYFVRRDTDRQRQRAIAQLQALGYQVTLEPVAA

SEQ ID NO: 247611 - protein, 315 aa, unidentified
MKSNTAVYVGVDVAKATLQVHVQGRQAELKNAPAARAKLCQKLQALPGAHVVCEATGGYERDLAGALHKAKIPVSVVNPAQVRAAAQAQGQRAKTDRIDAAMLTDYGQRYEPQPTPQASQVQRQLVDLTQWLKQLIEAQATAKTQAEHHHNPFVRKQHQTLMDCYQTQIQAVEAKLEALLKKDQVLQQRVEALDAIEGVGSRTALVILAHMPELGQLNRQQAAALAGLAPWTRESGTMKGVRCIGGGRPEVRLALYMSALSATRFNPVLRAFYQRLIAKGKLPKVALTAVMRKLLVYMNHKLKSLTAQPESAAQV

SEQ ID NO: 247612 - protein, 386 aa, unidentified
MHDGTNLPVPERTGIPGDCATLFVSLELSRSTWVATSLAPGSKKMSKHTLVGGDGRKLLDLLARLKTRAEQRIAAPVKVVAIHEVGLDGFWIHRLLEANGVESHVVDPASIAVPRRHRRAKTDAIDGETLLRTLMAWQRGEPRVCAMTVPPSPSEEDCRRVSRERATLLRERIQHTNRIRGLLFGQGITNYNPLHKNRRECLEELRTGDGRSLPTHVKAEILREIDRLELVLRQIGEVEAERDEILRPAEASSPAALLMRLKGIGAEFATVLYFEGLFRHFENRRQLAAYAGLAPSPWKSGSIDHEQGISKAGNPRLRTTMVELAWMWVRYQPDSALSGWFRQRVGSERGRTRRISIVALARKLLIALWRYVTHGEIPAGAVMKPV

SEQ ID NO: 247613 - protein, 347 aa, unidentified
MNVIHYIGFDVHKKSISYCVKTVAGEIVKEGKLAADRATLTEWAEKQMQPWRGAMEATLFSAWIYDTLKPYAVQLEMGHPARMKAITCGKKKSDKIDARTIADLLRCNLLPVCYVMPPGLRDLRRLLRYRSLVVRESVRMQNKIAGLLMETGSPFNKEKLHGKKYFAQLIQTLEQVPESVKDLLQMSRSAMEMFETTQKRLVKQLLVNPALAQRIERLAGIRGVGEITALTWALEIGDPHRFRSNGDAMSYCGLTAAWRSSADKQQRGPISKQRNAWLQTTLIEAAKLAPRWNPQLAAVHAHELERGHRNRATLMVARKLVAYLLAVDKSQKPFEVRDTASTAACAA

SEQ ID NO: 247614 - protein, 343 aa, unidentified
MGTQITGGVDTHLEVHVAAALDERGGLLGTASCATTPAGYRELVEWFASLGTVVLVGVEGTGSYGAGLTRHLQGVGIVVVEVDRPNRQRRRRVGKSDTHDAISAARAAFAGDALGAPKQRDGNVEAIRVLRLARSSAKRDRTRALNQMRALVTTAPDELRSQLRALTIPRLVSAAAGFRPAGRTDVTNANRVALKSLARRVLELDDEIVMLDEILTPLVAQTAPEMLERVGVGIDTASALLVAAGENSGRIRNERSFARLCGAAPLDASSGKQQRHRLNRGGDRQANSALWRIVITRLSYDPDTRRYLQRRCAEGKTKTEAIRCLKRYIARELYACLPQNELA

SEQ ID NO: 247615 - protein, 340 aa, unidentified
MTQHKIIGIDLAKNIFFLFEINHKGKNLSRKKLQRSKLLSYIANKEPCTIAMEACSGAHYWAREFSQFGHKVILYAPQHVKTQRRKQKNDYNDAEAIAEVALYKRPHPVPHKSVEQQDIQSLIRMRRLLVTERTRIVNQVRGLISEYGIIMPKGAAAFRKAIPEILENDENQLSCILRELISHQYERYLYIDEQVKWFDDKLNQTIKQFENAKRLMSIPGFGPLTSQAVAVWLGSGQQFKTGRDASAAMGLVPKQDTSGDKVVLLGITKRGNTYIRSLLVHGARAALRRAKFKSDNLSKWMLELQERRGPNRAAVALANKLMRIAWAVITKNEEYRPTQS

SEQ ID NO: 247616 - protein, 375 aa, unidentified
MKKNNTVKKSLKKGAKKSTKGAQESITIGMDLGDKASRYCILNGSGEVKEEGSVPTSKKGMMQMFGALRRFRIAMEVGGHSPWISRLLIALGHEVIVANARQVKLISTSSRKNDRLDARVLARLARMDPELLRPIRHRSEQAQLHLLEIRARSVLMEARTSLVNAARGLVKALGERIPKCDPDQLGVEQLKSLPAPLQETLRPLLEEVESLTEKIDVYNERIEQIARKEYPETELLKQIKGVGTLIALTFVLTIGDAGRFESSRDVGCYIGLRPKQSDSGDSQPQLRITKEGDSYLRTMLVQGAHYILSARGPDTDLKRWGLKLSQRGGKNAKKRAIVAVSRKLAILLHRLWVTAEVYEPLRNSNARTADKKTAA

SEQ ID NO: 247617 - protein, 413 aa, unidentified
MERLIERCCGLDVHKATVSACVRVTQQPGSKVEQEVRTFATTTADLLALRDWLIEQRVTHAAMEATGVYWKPVYYVLESDFELLLVNPAHFKQVPGRKTDVADCAWLAQLLQYGLLRASFVPPAPIRELRDLTRYRKSLTEERSRAANRLHKVLQDAGIKLSSVATDTLGVSGRSMLTALAAGTTDPALLAELARGKLRKKLPELRQALAGRFGSHHRFMVSRLLADIDYLEEAGTELSKRIEELLAPFAATVERLITIPGVQRRTAEVVVAEIGADMSRFPSAAHLSSWAGMCPGNHESAGKRRSGKTRRGNRWLRTALVEAGSAAGRTKHTALGARYRRLRAHVGHQRAVLAVGRNVLEIAYHLMAEATTYRELGTDYFDRYRAERLKRRSLDQLRRLGYQVTLTQIPTAA

SEQ ID NO: 247618 - protein, 340 aa, unidentified
MSTEYACGQYVGIDLHRRRSVIVRMDKDGVRLETVRIVNDAERLRWVLARAGESPEVVLEATYGWYWAVDVLAEVGASVHLAHPLGVKAFEYRRVKNDERDAADLADLLRMGRLPEAWIAPPATRELREVVRHRAKLVGLRAHCKAEVHAVLAKCGIQVVMSDLFGLEGNALLDSVALPGPYRARVDSLRRLIEHLEFEIEVFTKLSRGRLARDPGYLAIQAIPGIGGVLAAVFVAEIGDVTRFPGPSQLASWAGLTPKHHESDTHVHRGRITKQGSRLVRWAAVESVQILPKTTRIGAFRDRVGARRGRNLAVVAAAREQLGLVFYGLRDHEVRALRAA

SEQ ID NO: 247619 - protein, 367 aa, unidentified
MSTVKFIGLDVHKETIAVAVADDGRSGEIRFHGTILNTPEAIRRLVSRLATPDATLHFCYEAGGCGYGIHRQLLGMGMDCSVIAPSVIPRKPADRVKTDRRDAEMLARLLRSGELTAIWIPDPAHEAMRDLVRSRRQVRQDLVACRQMLLGFLLRHGRKFTGRTNWTKAHWRWLGSQAFEIPHQQFILGESIRRIEEAQQRCDRLDTMLMEALPRWSLAPVVKALQALRGVGPIVAITLAAEIGDLSRFETPKQLMGWLGLVPSEASSGTRTRRGAITKTGNRETRAMLVEAAWSYRLPAREERRYRARVEDLPEEIRAIAWKAQVRLCQRYRTLAASGKALPKVITAIARELVGFIWDIGRRVQPT

SEQ ID NO: 247620 - protein, 402 aa, unidentified
MNAVGIDVSKGKSMVAIMRPFGEIVSTPFEIKHTASDINSLVELINSVEGESRIVMEHTGRYYEVLAHQLSEANLFVSAINPKLIKDFDNDSLRKVKSDKADAVKIARYALDKWQNLKQYNVMDELRNQLKTMNRQFGFYMKCKTAMKNNLIGILDQTYPGVNTYFDSPARSDGSQKWVDFASTYWHVDCVRKMSLNAFIDHYQNWCKRKKYNFSQSKAEEIYGKAKELVPVLPKDAITKLIIKQAVDQLNSASTTVESLRTLMNETASKLPEYPVVMAMKGVGTSLGPQLMAEIGNVSRFTHKSAITAFAGVDPGVNESGSYEQKSVPTSKRGSSVLRKTLFQVMDVLIKTHPQDDPVYQFLDKKRAQGKPYYVYMTAGANKFLRIYYGRVKEYLSSLPES

SEQ ID NO: 247621 - protein, 338 aa, unidentified
MIVVGLDVHKQALTAVAVDELGRAVAERTGAVDAEALVEWARSLEPERLWALEDCRHVTRGLEQALVAAGERLVRVPPRLTAPQRRRGRIRGKSDAIDAPAIARAALQEPDLDRPRAGEQRLRELKLLLDHRDDLVAERRRCQQRLRWHLHELDPSYAVPLGALDRGVWLERLGRWLARREQTTQVRIARQLLVRCRTTTREIVALERELETRAQTLAPRLLELPGCGPLSAAKLLCEIGPIERFASDARLARHAGVAPLEASSGRKRRHRLDRGGNRQLNCALHRIAVTQGRVHPPARAYLERKQGEGKSRREAIRCLKRQLARTVYTTLKSESALT

SEQ ID NO: 247622 - protein, 482 aa, unidentified
MKPKSPLETNKTNDHAMQGRWQEMNRKQRRETMRKIQSEDLSLEVIHRNAAGIDIGNESHYVAVPQSRDSQPVRRYGCTTGELKAMADWLKQCGIQTVAMQSTGVYWVAVYDILEQVGLEVYLVNARDTKNLPGRKSDVQESQWLMKLHTYGLLRNSFRPVQEIRTMRTYWRQRNDLVQSAGRHIQRIQKTLTQMNIQLANVLSDVSGVTGQAIIKAILEGERDPHKLAAFRDSRVKASEGQIARSLEGNWQPDLLFVLKQEQDGYEFCQKQMAECDQQLKQYLQNREDRSQGAALPEEQRKARRQKKKGNKPQFDLRAELFRLTGTDLTRIDSIDVMTATTIISEAGYDMSKWETENHFVSWLRLCPDNRISGGKIIGKGRLPTNNRATVALRMAASTLRLSDTYLGAQFRRLRTKLGTPCAIKAMAAKLARLVYRMLRYGMKYLDRGAAFYDAEHRRLQIKHLKWKAANLGLQIVEAPAT

SEQ ID NO: 247623 - protein, 464 aa, unidentified
MDVIVERPAALDVHKAQVTACVRAADEGGRRVARVEQFKTTVRGLLVLHDWLKAHGVTQVTMEATGVYWKPIFHVLEDDFELVLVNARHVKQVPGRKTDVCDAAWLCQLAEAGLLRASLVPPKPIRALRLLTRYRKTQVSERQREANRLHKVLEDTGIKLDCVATDILGVSGRAMLDALVAGTTDPEVLADLARGRLRAKLPALREALEGRFDARHALLVGAILAHLDFLDEQIDRLSQAVGEALAPHAAAVELLRSIPGVERRTAENVLAEIGLDMTRFPSAGHLASWAGQCPGNHESAGKRRSGRTRKGSKWLNEALKEAALAATHKNGSYLQALYQRLRPRVGHGRALGAVKHSMLCACWHMLSTGELYHDLGGDYFLSRDPERQTRRLVRRLEALGHTVTLQDAVIVEDGDTVTLEDGDTVTLTHGDTGMLTHGDTGMLTHGDTGMLTHGDTGMLQEPAA

SEQ ID NO: 247624 - protein, 323 aa, unidentified
MTMTYVGIDVSKTTFVVAYSSDKASKTKTFRNTVKGVHEFIQTISSAGHHCVLEATGNYSSLLVYLLSQAGITVSLENPLKIRNFARVMLSVTKTDETDALLIALYGEKMQPAPYRLRSDAILTLKQKRTVIRQLKKQLIATRNLKGSMEALPFFDPKCRKTIEKTIAFLEKQIKGLEEELSSLAQSEYKKQMDLLTSIKGIGITLAAALIMATGGFTYFDNAKQLTRYLGLSPTYQQSGTSVNVKGHINRNGDSSLRSQLYIAAMASLRCNTECKECFTRLRSNGKPGKVAVIAVANKLVRQAFAVVTQERTYVDGFKSAKP

SEQ ID NO: 247625 - protein, 400 aa, unidentified
MKSVLSVDVAKEKSMVMLSTEYGEVLIEPKEVKHNLKDFDNIKNQINNFKLEDLTIFMESTGIYHLPVERYFKENGFNTLVINSLTTKNNYDTLRKTKTDTKDCIRLAKLFFVNEVKYHDLSKKDLYANLKAMTRQYFYLTQLNVSCKNRYKRLINICFPEFEEIFKGSRIYEETALNFIKTFPHAYIVKEKRIDALYNNLYKTNSRHDYYYKRLANKIKEVSIDSYPGVDKDHSDVKNLSDMASILQENIKTINDLKEKMIETAKKSPYFDIINSFYGIGETLTTELLGELGDITRFDNHKQLIAFCGLDPTIIQSGKSINVRGTISKRGNKYARWILFNISQMVVKLGHQCPNHPVYNYYLIKKAEGKHYYESLTACSTKILRMLYTMCKNNTTFKIN

SEQ ID NO: 247626 - protein, 410 aa, unidentified
MLFVGDDWAEDHHDIEILDETGRRLVRRRLPEGAAGIAGLHALIADHLDPDGEPGEVVVGIETDRGPWVQALLAAGYLVYAINPLQAARYRERHGSSGAKSDPGDAHVLAELVRLDRDHHRPVAGDSAIGEHVKVVARAHQSMIWSRQRQTSTLRSMLREYYPGALAAFDDLAGRDALAVLALAPTPAEGRRLRVARVAKALRAAGRQRGADTVAARVVEALRAEQLEAHPGVVGAYAASVKALVAVIGELARQCEVLQGEVAAGFGRHPDAEIYLSQPGLGTVLGARVLAEFGDDPERYADAKARKNYSGMAPVTRASGKTRVVLARHARNRRLADALYLQAFAALTASPGARAYYDAHRARGNTHHQALRALANRLVGILHGCLRTKTPYNEATAWPPTNDQSTPTAA

SEQ ID NO: 247627 - protein, 316 aa, unidentified
MAMRVSKSIVGVDVAKVELVIYEPDQDLLTSITNDKPAIKRWLKTLPRPTAIAVEATNVYHIDLVELAYEAGLDVYIIDGYQLSNYRKSVGVRSKTDASDARLLARYLKNEGEDLRPWTPPPAVYGKLQSLLRRRASLVQAKTSLTQSWANDVSLKAVFVTFLKSVERLDLLVQKKLKDVLREAGLLEEVARCQAIEGIGFLTATALVMAYNRGDFNSSDSFIAFLGMDLRVSDSGQKNGRRSLTKRGCSEVRRLLHNAAMSASRSVAWKEFYNKHLGGGKATTQVLVMLGRKLARIAFSLMKNQSEYQPKAGILA

SEQ ID NO: 247628 - protein, 454 aa, unidentified
MAKHRKNKKAHGLVAAPVMEPNAAGVDIGATEIYIAVPPDRDTQPVRRFAAFTEDLKAAADWLERCRIETVAMESTGVYWIPLFQILETRGMKVCLVNARHVKNVPGRKTDVSDCQWLQYLHAVGLLRASFRPSGQVCAVRSLMRYRESLVGMAAVHLQHMQKALDQMNLQLHHVISDLSGTTGMAILDAILCGERNRLKLAQLRDPRIKASPETIAKSLVGDYRREHLFTLRQSVTAYRSYQQLLACCDVEIEQMLGEFPDGAGPDTPVLADPKDRHRPRRNEMKFDLRGHLYRIFGVDLTEVPGLNALTAHTLLTEVGPDLSAFPNVGAFASWMGLCPDNRISGGKVLSSHTRKVNNRAARALRMAAQSLFRSQSWMGQYYRRMRAKLGAPKAITASAHKLARIVFHMLTNRHAYDETVFAQQEIQNQQRLQQRLMQQAKKHGFQLIPIAQN

SEQ ID NO: 247629 - protein, 338 aa, unidentified
MKYTVFGMDIAKQVIQLHTVNPETGEVQRHKLRRNQVLEFFAQRQAALIAIEACGGAHWWARKLVEQGHEVRLLHPKSVRPFVLRNKTDAADARAIWTAVQQPEVHEVAIKTEVQQSVLALHRLRAQLMKFRIMQTNALRGLLYEFGVVLPQGHTALLKALPDTLAALDTQLPAMLLDSLREQWARVQQMQVEIDVIERRLAAVLRETPQCQQIAEIPGVGLLTATAAVATMGEASSFKSGREFAAWAGLVPRQRGTGGHVRQLGLSKRGDVYLRTLLMHGARSIVIRHRNVPWIAALLARRPYNVAVAAVANKLARTIWAVLAKGKPYDPTAFSAAA

SEQ ID NO: 247630 - protein, 411 aa, unidentified
MKIAGIDVHKRVLMVVVIDATRLEEKPERRRFTTLPSDLRRLCSWLRAQEVQEAVMESTAQYWRTVWLELEPHMLLHLAHAFYNRAPWGRKHDFRDAERLVRRLIAEELILSFVPNGEQRIWRSMTRMKLQLTRDRVRLQNQIECLLEEMRIKLSSVVSDLLGASGLRILRALAAGETDAKRLVALGDDRLKCTEEQLVDALTGSSQHMHREMLALQLERLQLIDAQIAKLNNLIAQGMKPHREVVMRLAEVPGLGVDSAQQIIAEIGTQAGTFSSAAELTSWVGTCPGKDESAEQNHSSRSAKGNKYLRRVLNQAAHAAVKKRGSYFQAVFRRLLPRLGYQSAIWAIAHRLCRVVWKILHEGARFIEQGNQPDAQAKKKRARILVQALRRLGYDIAITETHLAMQNAVQV

SEQ ID NO: 247631 - protein, 389 aa, unidentified
MQTVADRPEAPTAIRTDLGAIFVSLELSRSTWLITSLSPAGGEKMSKHVVRGGDVAGLLERFTQVREKARTRTGKVFPFVVIQEAGLDGFWIDRVLRNEGIESHVVDPASIATSRRHRRAKTDRIDGEALVRALLAYKRGEPRVCAMVKAPTPEEEDRRRVCRERKVLIAERVRHVNRVKGLLFSQGISGYEPLRRDRRERLDTLQTGDGRPLADHLKAQVRRELDRLELLLEQIKAVETERDVLLATQQVAVPAPAAMLLGIKGIGPEIAAILWSEGLFRHFDNRRQVASYAGLAPTPWQSGSIDRDQGVSKAGNPRLRTTLIQLAWLWLRHQPKSALALWFEERVKRTGGRLKKTTIVALARKLLVALWKYVTAGVAIEGAVMKAAG

SEQ ID NO: 247632 - protein, 397 aa, unidentified
MKCPQGLHDRGSVTHNAFRRVRERHIQHEGGTDMNKVHYVGMDVDKEKIILARLGPGDAKEVQEHVIANRPSAVKKYFGALLAGAEVHASYEAGCFGFGLYRQLSAMGVAVLVAAPGLIPRKPSARIKTDRRDAYSIALALRAGQLTAIYVPTPQDESVRDYLRMYEDLRGDLRTYKQRVLHFLLRRGIRYEQGGPWTVKHRNWLSNLEFADARDRKTLDMYLSTLEELEGKCCEAAAEVEEMATQERYCEQIKKLTAFKGIKTLIALSFVADIGDFRRFASARQFMAFLGLVPSEHSSGNKRRQGGITKAGNSHLRRLLVEAAWHYRSYHPSSRTLVERRRGVDPQVLSYANKAGRRLSRKYMHLMLRGKRSQVAVTAVSRELAGFLWGAMTDQVA

SEQ ID NO: 247633 - protein, 382 aa, unidentified
MQTIDTVNPTILLAIELSASTWLVAARVPGWEKPHLHRIDGGDTAALLALISSLQARAARGLDATIGVVCCFEAGRDGFWLHRLLTAHGVVCHVLEPTSILVNRRARRAKTDRLDAEGMLRVLAAYLRGDHQACSMVRVPTPEEEDAKRTHREREKLVQERLRIENRIEALLFTQGIRKRPSLRSWERDLAVLRTGDGREIPRHLRAELDRLRRRLVMTLELIREVEAERDQAAKTKPQDRACHKIAALSRIRGIGENFAAVLTREVFYRSFDNRRQIASYVGITPMPYQSGGMDRDRRISRAGNPRARTTMIQLAWLWLRYQPGSELAEWFRERVGTLAGRTRRIAIVAMARKLLIALWRYAETGVIPAGAEIRAETTVAA

SEQ ID NO: 247634 - protein, 341 aa, unidentified
MDTVSLIGIDLGKHCFHLHAQDGSGRMVLRKKLTRNQMFTLLSNFPSCTVVMEACAGAHWIARRLQTLGHEAKLISPQFVKPFRQGNKNDFADAQAICEAASRPSMRFVSPRNEAQQVVSALHRVREALVRNRTGTINQIHAFLLEFGISLPRGMAVMRRLPAVLEAEALPPRLVAVLERLQAHFKYLDEQIGQVEHELLTQLHEDERSERLLEIPGIGPITASVLMSELGDARQYGSARQFAASIGLVPRQYSTGGKPTLLGISKRGDKGLRRLLVQCARVIMLRIERRTDSLGVWVRSLLARRHSNVVACALANKLARIAWAILAKGTHYRSAPTALPA

SEQ ID NO: 247635 - protein, 396 aa, unidentified
MISVGIDVSKGKSTVCIMKPCGEILESPFDIGHTADELDSLISLIKSFDEETRVVMEDTGHYHLPVATYLSSHNIFVCCVNALRMKKFCSQSIRRAKTDKIDSIKIAAFGITYWNELVKAYPSDVIYDELKFLARQYYQVTGMLVKSKVNFSNLLDQVMPKINDVLSNQGGNHKLTEFVSRYIHFQNILDMGERKFTSDYCKWAKKKGYRLNERKAAEIYAIAQNGIPTLPNSQSVKIAVSEAVKLIHSIEESRNTILAQMQDLCNTLPEYSVVKEMDCIGDTLAPRIIAEIGDVRRFKNKHSLIAYAGIDAPPYQSGAFHASERHISKRGNSYLRKTGYEIMQSLIKHKPADNAVYDFIQKKRSEGKCGKEAMIAGLNKFLRVYYGKVMEFYSEH

SEQ ID NO: 247636 - protein, 364 aa, unidentified
MNGYDYTGKEVYVGIDVHKKTYSCASICNGQVVKKDSMPGNPEVILSYLKNTFKGAKIYSVYEAGFTGFHLHRYLVSQGINNNVVHPGSIEVCSRDRVKTDKRDALKMATQLSTGRLKGINVPDQEREEKRSVTRLRMNIVKLRHQVGQQFKALLFTQGLIDHDDDTRVSQKWLLKKVAEVKQKGYSEDFCYSVNEYAEQWIQLNNKLKEIELRLAAQAQSEKELQTIYESVPGIGRIHARQLANELGDMKQFANEKRLFSFTGLTPSEYSSGEYVRQGSISRQGKSLLRKILIEAAWIAITKDPSLKDVFDRLSSSRGKKRAIVAVARRLAGRIRSCVLTGTLYEIKSTQEGCSLQENGCMTS

SEQ ID NO: 247637 - protein, 355 aa, unidentified
MNNLRYVGLDVHRDTISAAVLDTEGKLIMQSVVLTRANAICDFLNEIRGTLHVTFEEGIHSAWLYDLLQSKVARVVVCDPRKNKLLKSGNKGDLIDARKLAELLRNNSLSPVYHGELSALEVQRRVRSYSMLTEDTTRIMSRVKAVFRGQAIPCPGKSVFRPDRRKSYLLQLPTEGLRQRAELLYRELDAVHRLRLQAKREMLAECRKHPAMKWLQSVPYLGKVRAAVLIGRVQTPHRFRTKRQFWSYCGLALETHDSAQYQVVHGQVERKPRFIQVRGLNWNHNHDLKGLFKSAATMAAYRDGIFHEVYCGMLAKGMRPEMARLTLARKIAAITLKIWKEGGTFNAEQVKPQAA

SEQ ID NO: 247638 - protein, 340 aa, unidentified
MGEITTIGLDLAKHVFQVHGVDAEGTTVLRKRLRRGQMLAFFSKLPPCIVGLEACATAHYWARELGALGHEVRLMPAQYVKAYIKRNKNDAADAEAICEAVVRPTMRFVPTKTAEQQAALLLHRGRERLVRQRTALVNALRAHLAEFGVIAPQGLRNVGKLIGIVRNEEDARLPNAARQVLQVLAAQIEQLETAIAELEKQLMAWHKSNPISQRLATIPGVGPIIATAIAATVVEPSGFRSGREFAAWLGLVPRQNSTGGKNRLGGISKRGNQYLRRLLINGASANLLRSKATNADPWVIGLRRRRPSLVVAVALANKTARIAWAVMHRQENYQRMAAAA

SEQ ID NO: 247639 - protein, 338 aa, unidentified
MGSYVGIDLHRQRSVIVVLDEDGNRVSWSRIDNSPANLAREVTAAGADAEVAMEACWGWYWAADVIVECGVRLHLAHPLGIAGYANRRVKNDIRDATLLADLLRMGRLPESWVAPPEVRELREEVRYRHKLIRLQTGLKCQVHQVLGKEGVIPETKGIWWSGGQRWLDELQLADVYTNRIESLRDLIELNNREIVQSDTRIHRRLKGHPGYVAIQQIAGVGRVLGAVFVAEIGDVHRFGDARRLCSWAGLTPRLRESDAHTHRGHITKQGSRLLRWAAIEAVSGAARDRRVASVKARLGARRGHNIGRVAAARHLLTLVYYGLRDGEIRCLAATDDAA

SEQ ID NO: 247640 - protein, 392 aa, unidentified
MDSPPPRHHSATVAFKEANGSEGETMKKHSSKHDPLSSTDVELCTTLCVDLAKQVFQLAGEDATGRVIYENRIKSRQNFHDFLIKLPVTVTVLMECGPGAQAWARLLQAKGNPVRILPAQRVAEHRSGAKNDRNDTHAILRAGRDTSIASIPIKSTTALAIQALHRVRRGNIKRHTALGNQIRGLLLEHGVSMPQGDAAINSHVPRALEDASLPLPDLLRELLDELLTDWLSLGERIATLSRRLEATAQEDKVAQRLITIRGVGPIIATAIVAKQTEPSRFASGRMYAAFFGIVPDQHSSGNKIRLGRMSKRGDGYIRSLMIQGAHAVLSQLRPDSDQPDDHRLLRWLSRLGRKEAAIRLANRNLRIIWALLQSDQVYQRKPNSNSEAAMSL

SEQ ID NO: 247641 - protein, 431 aa, unidentified
MTVARRTPGPASANLQGRCYAADGGGEEGEDMAFIGADVNRWSTPMQKLNDLSRSLTPLKPDGTLIAVIEMSLSSWLVAGVVPSVERQPSKKLEVDENALLKLLNRWREEAQKAGQGIERIAVAFEAGRDGFWLARWLRAHDIEAHVIHASSVAVSREHRRAKTDRLDTELLKRSFLGWLRGERDHCKMVAIPTIKDEDAKRPNRERESLVGEQSRIVNRMKAALIRLGIRGFNPKLKKASERLDGLRTPEGEPIPPNTLAELRRDMARRRLVSDQIRQIEDTRLERLKQAPGEGPHAMVRLLARVIGVGIETADMLVQEVLSRNMRDRRAIARYAGLTGSPDESGRKRREKGLTRSGNARVRRGMIELAWRFLRFQKDSVLAQWFQTRTENARGTRKTMIVALARKLLIALWRLLREGVVPDGVVLRPAS

SEQ ID NO: 247642 - protein, 414 aa, unidentified
MESGYRLMVGIDWATEAHQVCVLDRQGRLLEQRRVEHRAEAIAAMTDRLMGLAGGDPASIAVAIEVPRGAVVEALVERGLSVFAINPKQLDRFRDRHTVAGAKDDRRDAFVLADSLRTDLAAFRRVHLDDAWTIRIRELTRIEENLNTEINRLANQLRDLLLRFYPQLLRLCPAADQPWLWALLKLAPTPAKAQRLRRSSIQRLLHQFRIRKWTADQVRTELKTAPLCVAPGVTEATSTHIALLLPRMELLMAQLKLCSKAVQTALDEKIAEEEQRREHRDVEILLSLPGVGRVVAATMLAEASQLLAQRNYHALRTLGGVAPVTRQSGKRLAVRRRYGCNHRLSNAFYHWARTSSQCDPRAKHHYQTLRRLGHSHGRALRGITDRLLARLVAMLRDQTLYDSTRTLTPNPIAA

SEQ ID NO: 247643 - protein, 495 aa, unidentified
MARSPSSSHVPWADTPRPVTTIDSATFDVFPETVGRDETAAQLNESADAFKSEDLPISPSPLGRRRVRKPMKTTTTYAAFVGLDWADRSHQVCLRPAEGDRDEQSKLAHEPLALRTWASTLRARFPVGKIAVALEQTKGPLVYALSMHAHLELFPINPAMLAKYREAAKAASGTKNDPLDASLLCELLRVHRDWLRSLPAVPTATRELQILLETRRGLVDQRTGLCCQLGAALKGYYPQALALVGHDVGTLLACAFLRRWPTLSAVQRARPETLRNFYHAHQVRSEERIEERLAVVRSAVALTDDAAVLATLPVLVASIVAQLEVLAPAIADYDRRIAASFAPQADAALFESLPGAGQQLAPRLYVAYGPDRSRYTSALQLQQYSGIAPVKEQSGKTEVTHWRWHCPKFLRQSFHEFAGCSIPQSRWAKAYYDEQIARGKPHHRVVRALAYKWQRIMFRCWQNHEPYDEERYLAALRRHHSPLISRIDSTRVEAA

SEQ ID NO: 247644 - protein, 353 aa, unidentified
MNNRKYIGMDVHQASISIAVSDAAGKVLMECIIETKAATVLEFIQGLRGSLWVTFEEGTSAAWLYDLLKPHVTKVVVCDPRKNALLKAGNKNDRVDARKLGELLRAELLTPVYHGESGVRTLRELSRGYLAVSKDLTRVMNRLKAIYRSWAIPCAGQQVYSPRHRAAWLEKLREAGVRRRAEQTYQQLDFLMEIRKETRKELLAESRKHPARKLLEQIPRLGPIRVALLIALIQTPHRFRTKRQLWNYCGLGLRTRSSGEYRYTGGQLQHARKPPALRGLNVNHNHDLKHLFKSAATQAGNDPLGAFYQNLLAGGMEPPMARLTLARKIAAIALKVWKKGERFDPAKLKQQAA

SEQ ID NO: 247645 - protein, 363 aa, unidentified
MSVQYVGMDVDKQKIVLARLGAGQDARAVEQVIANTPRAVKKYFASLLSAAEVHATYEAGCFGFGLYRQLSAMGVTVVLAAPGLIPRKPADRVKTDRRDAHNLALALRAGQLTAIYVPTQQDESVRDYLRMYEAFRGDLRICKQRILQFLLRRSLSYGGGGPWTVKHRHWLSTLEFQQPRDRQTLDMYLAQMQELEAKCAEAAAEVESIAAQDCYRQQTKKLTAFKGIKTLIALSFITDIGDFRRFTNARQFMAYLGLVPSERSSGNKRRQGSITKAGNSHLRRLLVEAAWHYRSYHPTSRDLTERRRGVEPAVVSYANRAGRRLNRKYMHMLLRGKRSQVAVTAVSRELAGFLWGAMTNQVA

SEQ ID NO: 247646 - protein, 323 aa, unidentified
MTRIICGVDVASQSLEARIGQHGPAAAFANNPEGIHALAAFCHAHQVVLVAMEATGGYEQQAFALLSQQKLPVAIVNPRAVRQFAQSMGSLEKTDAIDAAMIAWYAETKKSQPLCLAPKTQLELRARVTRLRQLTDIRTAQLNQQRLVTNRAVADGFRQMLAFLAAQMEELEEAIAQLIAADPLWRELDQAFRAIKGVADRTVARIMAEMPEIGSLSNKTISKLAGVAPLANDSGKHQGKRSVRGGRASVREILFIVASVVGRYEPDFIAFQQRLRAAGKPPKVVRIALAHKLLVRLNAKAREVRQRLQALESAPVALAASSL

SEQ ID NO: 247647 - protein, 325 aa, unidentified
MTPMNSSTVIPVGVDIAKRKFDVARLQDGKYRHKVFDNTQHGFEAFLNWLSSYGPEPVHIAMEATGAYSLPLAEFLAARGYWVSVVNPAQIKAFAESELRRAKTDPADAKLIARFTRERRPPRWNPPPPTIHELQALLRRVEQVLEMRQMERNRLDTAHPAARASLETLIKTLDQELASLRATIRQTIDDDRELRRRRDLLDSIPGVGEATIAHLLVLFSPHYGFHSAKQVVAFVGLAPNPHQSGEVMHTRLSKIGDALLRKVLYLPAWVAWRHNPVIKAFCERLKAHGKSGKAVACAAMRKLLHIAFGVLKSGRAFDPKLALAK

SEQ ID NO: 247648 - protein, 374 aa, unidentified
MRSPNNMLFVGLDVHKESIAVAYAPQEPGSEAVALGNIGTRQCDIDKLLRQLQSKASRLRIVYEAGPCGFWLHRYLHKKGLECSVVAPSLIPKRPGDRVKTDRRDALQLARLERAGELTSIHVPNIQDEAVRDLSRAREDAMRDLKAAKFRLKAFLLRQDIRYEGQARWTPAHLRWLARVVCPTPAQQIVFQEYLRAINEQNERLARLEQALRDQMEHWWLAPLIEALQVLRGVQFTTAVTLIAELGDLNRFTHPKQLMSYLGLTPSEYSTGPRRQQGGITKSGNTHARRVLVESAWAYRHPAKVSAYLQKRIGHLPKELQDLSWKAQVRLCKRYRSLCARGKHVNEVVVAIARELAAFIWAVAKIVPVTHFAR

SEQ ID NO: 247649 - protein, 442 aa, unidentified
MAMRKRDDDLVFPNAAGIDVGGSSHWVAVPRHACEESVREFGAMTDDLNAMADWLIACGVDTVALESTGVYWIPVYEVLEQRGLKVWLVDARQMKYVPGRKSDVQDCQWLQRLMSQGYLRAAFRPGEQVCVVRAVARQRDVLLVEQASWVQRMQKALVQMNIQLTEVLSDVMGTTGQAIIRAIVAGERDPKVLARMRHSRVKASEQDIAKALTGNWRDEHLFVLRQALSMYDDIAWHLGECDAKLQGLLSELGAAKVDLGRAPRAGSKTRAAFDSRQILANWAGVDVTRINGLGLAAVMKILSEIGPDMSHFASVKHFCSWLGLCPGTKISGGKVLSSKTKGSGNRVRQALKMAAMSLSHSDSALGGFYRRLCSRMDKPRANTATAHKLARMVYFMLTRGEAYVDQGQQHYEEQQRQRSIAALKRRAAALGFAIMPTNPTPA

SEQ ID NO: 247650 - protein, 348 aa, unidentified
MIIIGVDFHPEFQQIASVDTDTGEFQEKRLAHREETEAFYRALAGQKVRVGMEASGHARWFERLVAELQFELWIGDAAEIRTKRVRKQKTDRQDAQLILRLVLENRFPQIWVPSWENRDLRQLLWHRHRMVQARTRIMNQLQAVALNEGLRSKKRLWREHGRQQLESFRLAPWASRRRGDLLELLDRLNPTIAELSQAVEQEVEKCPEAQRLRTHPGVGGLTALAFVLIIGRTERFHCGKQVASYLGLVPLEESSGNRRRLGHITKQGSSMLRFLLVEAAQVTVRSVPEWRSKYLHLMMRRGRKTAKVAMARRLAVRLYWMWRKGWDYEQVKKFGSHAGQPGHRDGVQ

SEQ ID NO: 247651 - protein, 394 aa, unidentified
MEVMVETCCGIDVHQKTIVCCILDGPLDTNRPKKVQKTFGTRTNELRQALEWLNAHNVTDVFMESTGQYWLPVFNIFTEGDFQIILANPQRIKNVPGRKTDIKDAEWIAQLGRCGLIQTSYIPEPEVLALRLMTRRRLSYIQKRTQAKNELHNILQRANIKLTGYLSDIFSKTGQSLLQLFINGEALTLETVSACLHGRVKASPEDILAAMDGKLSPVDRQLLDDSLDEYRFYTTKIEQIEKAIAQYILKYFPDTYALLMEIPGIKEQSAAVILGEIGPDVEAFQTVGHLSSWAGVSPGSNESAGKSTHARTTKGNKYLKIVLVASGGMAGRSKDPAFSALYHRMAARGSKMKAIVACAHKLLRIIYKVLSDRVHYETKKALGLRQQPKSIDSL

SEQ ID NO: 247652 - protein, 360 aa, unidentified
MYDYTGKTIFLGLDVHKSTYSLTAICENCIIKREKISADPLLLVKYCKKYFYNARIKSAYEAGFSGYHLHRILISHGIENIVVHPANIEVSKNDSVKTDRRDSLKIATQLADNRLKGNFIPSVQREDKRHLTRLRECLVKQRTRTSCQIKSLLYSQGMISYDKVLRINKKTLLSVLRMKMPTNLQYKLKVLAQTWNYFSLQIAQTNEKMLISFTDDNWLKKVYCSIPGIGITMSNVLMNEIGDTLQFSNEQKLFSHAGLTPREHSSGDHQRQGHITKQGNPILRKMLIQAAWKAIKLDRSLLTVFERIRGLNKGKAKIAIVAVARVMLGRIRTCFKENRLYVNKSIEQTSVRDWKFKEKI

SEQ ID NO: 247653 - protein, 403 aa, unidentified
MTGVIIGVDPHKLSATIEVVDRHGYLVGSGRFTTDKAGYAAMRAYVKAWPDRTWAVEGANGTGRPLAQRLIEAGEHVVDVPAKLAARVRLFDTGHNRKTDALDAHSIAMVALRTVGLRVLTPDGDLEALRMLTDRRDELARLRVQTVNRLQRLLSELIPGQRKKDLSALQAKAMLATVRPRDIAGKARRRMAAEELADLVAVDKKLKKMKTELKAAVQARGSTLMEVHGIGPAGAARILADVGDIARFADRNRFASWTGTAPLDASSGEQIRHRLSRAGNRRMNHVIHIAAIVQLRHDTEGRAYYRRKLAAGKTPMEALRCLKLRISDVVYRHLVADARAAEAGAAETGPGGHCGATQESSAVDLPPHIDTSDQPLPGPAAPTLRPTPTTRKSPGRQALEPAS

SEQ ID NO: 247654 - protein, 342 aa, unidentified
MLQQTGSYRLFVGIDVSARTFTFASMPSGTTPSRAHTLEQTSVGFDQLNRDLLRLEPDPTAILVVMEATGTYWMRLALALCDAHIAVAVVNPAQAHDFAKALRKRSKTDAIDAQSLAEFAARLQPQPWTPPPPVQNELQQRLVHRDALVDARTQFRNQLHALERQPVIIESVQTRLQELIASLSEQIAEVEQEISTALEQDAAWAEAAAYLASIKGLGTLTIAWLLSATSNFKQTATPEAAANYAGLVPQLRESGSSVRGRPRIGHSGHARLREALYMATLSAMQHNPLIRAFYQRLIAKGKAKKVAICAAARKLLRIAWAVATKKQSFDVDYREHQAARAV

SEQ ID NO: 247655 - protein, 389 aa, unidentified
MYYIGIDIAKFKHAVFIQDDNGEIINKGEYFENTIVGFQKLLTILNNLEQTQQKKIGLEATGHYHMNLIAFLQNHDYDVHELNPYFVNKYRSSITLRKNKNDFIDAEIISSYLIKNEVKSYPQKFYHIYSLKSLCRKREELIKNRSKILIALTNSLDITFPEFKPFFKNKFTSTALYILKNYETPTRISKMNIDSYNKMKRELRRTISYSEFITLKELANNTVGFHDSIQISILKTNLESYFYLDKQVTEIEKLITNEIQILKPKMLGIKWFSVFFIATIYSEYNGFDGFDSASKCLAFAGLEGGRYQSGQVDYNLPMIKHGSGHLRNSLIYGSFSLLGRYPVLYEYYHKKRNEGKSHYVALSHVAKKLLRVIFYLEKNNIDFNPNLLK

SEQ ID NO: 247656 - protein, 404 aa, unidentified
MHPRFKMPLYVGIDIGKESHMVCGVSDQEQTVIRPFSVENSLSGVELFMTKVKALAPIDQILVGMEATGHYWQCFFIQLHTLGFSVCLINPYQTNHFAKTNLKRAKTDKVDALTIAKYLANSKPAPTKLPEELILIQKELSRLRESLVKNRSALYNQLRVALDKAFPEFVQLIPDPASEKAFTILKRYPSATAIRKAKLSKLQDLTYGKKKHRIGPALASLLKDQAKGSIATDYAHTAYEIEIGSIIAQIRTINEQMGAVEQKLEKQIYQLKLNNLLSINGFGVASVASLIGEIEDVDKFSSPKKLVAHIGVCPKEDQSGKYRNPHPKMSKMGNSRLRGVLYRACISAIRCNPAIKDYYHRLLDKGKAKKVAICACMRKLIHLLWALWKYQRTFDPEFMGSIKK

SEQ ID NO: 247657 - protein, 388 aa, unidentified
MHPTGPCPEQDPPRDRHHQATLYASLELSRSTWLVTSLAPGDRKMSKHSVAAGDGAALLALLARLRGRVERSAGGPVGVVVVQEAGRDGFWLHRLLEAEGVESQVVDPGSVAAPRRQRRAKTDAIDGETLLRTLLAWRRGEPRVCAMVVPPTPGEEDRRRLTRERGTLLEERTRHTNRIKGLLAGQGIYDFEPLRPDRLERLGALVTGDGRPLPDRLRAELRRELERLELLRRQIAEVEAERDAAAAAESEAGPSPVALLAGLKAIGPQTAAVLYHEGLYRSFANRREVAAYAGLAPTPWRSGKVAREQGISKAGNPRLRHAMVELAWLWVRHQPESAPSRWFRARVGQERGRVRRVAIVALARRLLVALWRYLAHGEVPEGAVLKAA

SEQ ID NO: 247658 - protein, 366 aa, unidentified
MYYIGLDVHKKTISYCVKDAAGRVHQEGRIGSTRRELDAWIRTLPQPRTIAMEATIFTGWIYDHLLPHAAAVKVAHPLMLRAIAAAKKKNDRIDAGKIADCLRCDFLPECHMAPTAIRERRRVLRYRTLVMRQAVQMKNRIAGLLMETGVSYNKLRLHRMGYFEQLLATSDEVSDSIRPLLKLSREHIDRSIRMDAALLRSLEHDPLLTDRLRRLRTVPGVGPITALTWALEVGDTSRFRSIKQAISYCGLCSAEKSSADKVMRTPISKQRNKHIQQVLVEAARLAPRYSEELALLYERERQRGNSNRATLAVARKLVTFMLAVERRGTDFVAAEEFRRTAAARTTPSQEGKNIRISEAQTARSRR

SEQ ID NO: 247659 - protein, 317 aa, unidentified
MKVVYLGVDVSKKKLDLCLRSNGKDILYDVIPNDLSSIKSWLTRTFEKFFLSEDSLVVCAEHTGQYTYPLVCATKSIGVYLCLEDAAKIKYCHGIPRGKNDKIDACRIAMYAERYNDCLQPYTASELIIQKLKNLSTERSMLVADRAKYQSQLKDQVDYMEHSIYIAKCNRVEGIINTFTDYIAQIDLEIKELINQAPVIAHQMDLLMSVDGVGERVALKMIMETDAFTSFTDPRKFCCHAGVVPFVYVSGSSQRSKNRVSNRADKSIKHLLHMAALSVSQVKNSPLKKYYDRKVEEGKNKMSVLNREIIKIRLRNP

SEQ ID NO: 247660 - protein, 362 aa, unidentified
MFRPHTLYIRIRIVRKVSEPAFAMKDQDVTDVIRRKQQTAMKYIGIDVSKATFVVAYSSDKGGEIRIFNNTTTGIKQFIGALPKDGSIHCVMEATGNYSALLLYMLNVAGITVSMENPLKIKNFARAMLSTVKTDKIDARLIALYGEKMNPQPFKIQGEAILRLRQKRTVIRQLTKQITAMSNLRGSLACLPVPDKGATHTVDETIEFLEKRRDRLQSELTDLVEVEFSRQLALLTTIKGIGITLATALIITTGGFTYFQNAKQVSRYLGICPTYEQSGTSVNIRGHINRNGDAYTRGLLYVAAWTASRFNTKCGETYTRLRQNGKPGKLAMIAVANKLVRQAFAVVTHDKEYVDGFVSNRP

SEQ ID NO: 247661 - protein, 307 aa, unidentified
MEAQDMRFTQVVTVGCGIDVHKDLITATIRKSNEKLETHEYNAYTSSLKSLRDWCKDEKVTHVAMESTGVYWKPVFNVLEEDFEVILVNARHVKNVPGHKTDKKDSRWLSKLLLSGLLKGSFIPPVDIRELRDLTRYKKKVIAQAASEKNRIIKILEDANIKLSSVLSNIDGAVGTKIINSMIEGKTDIDELMKFYHGKIKIGKKEFRLALEGKVTKHHQFMLQLHKDSIADKERLIERIDAEIDEAIKAYQVEIDLLQTIPGVGKNSAIGIISEIGVDMGRFPDENHLSSWAGMSPGNNETGGKKK

SEQ ID NO: 247662 - protein, 372 aa, unidentified
MNYNTVYVGMDVHKESFTFCAYTIDAEKGSHFQRTEADYKNVLKYLEFLRTVYGNDANFICGYEAGCLGYTLYHQLIEHHVNCVILAPTTMLEQCSRRRIKTDRRDAEIIAKCLAQHNYSPVHIPTATDEETKGFLRMRDDHKLALKKVKQQILAFCLRHNYRYDGNSHWTAAHIKWLKSLKPEALYKEILDEYLLTYTTLSDKLERLDKRIEELASKDEYRESVKKLCCFIGIKTHTALSVLIEVGDFQRFASAQKFASYLGLVPGEDSSGDEQTRLGITKAGNRHVRMLLTEASQCYARGQIGFKSKELKSRQAGNSPQVIAYADKANERLRRRYYKMVLGKSKKHNVAKTAIARELACFMWGMMTDHIT

SEQ ID NO: 247663 - protein, 354 aa, unidentified
MVTIISDDLPRIVVGVDSHKETHQAAVLDCTGALLGNERFAASTAGYLELEAWLATLGRIQRVGIECTGSYAAGLTRFFRERQVDVFEVNTTHRATRARRGKDDAIDAEMAARKVLSGEASAQAKDTTGDIESIRLLKLSRESAIKARTIALLQIRDVLITAPAELREWIESAGGARHRVNRAWALRPDLERLGEPLQAAKFTLRQLSRRVKFLDEEIAGVDRQLAALVERCAPNLLQCRGIGTQHAAQLLITAGQNLERLHSDGAFARLCGVAPVPVSSGKTNRMRLHRGGDRQANRALHLIVIARLRLDPKTQVYMARRQAEGLSKMDAVRCLKRFVAREVYKELKRDLLQN

SEQ ID NO: 247664 - protein, 400 aa, unidentified
MRVVFGIDVSKASSEVAILVNGEKVHGYTMPNEALGFARLLGDLRTVHKPEIIFEATGVYSRRLQTFLEDNGYAYTRLNPLEAKKQLDSLRVRKTDQIDAEKLAQSQCVLNRKPTYVQEKVYQNLRDLSRFYQNLTEDIVRAKNRLHKVLQVTFPELENILSTPTGEQYWNLVITFPCKDFVLELSNDELSKSIRLSTSKRISDKRVAYLAEKLIALANQSYCAVKKTSPILEEVRYYAKELLRLYEQRQAVLDEMVELAQPLPEYDILLSIPGIAETTATSIIGELGDIRRFQSANQINAFIGIDLRHYESGNFLTKEHITKRGNPYARKILFKCIHNIASASHTNPCHIADFYEKRKRQSQTTSTKPHTIASIHRLIRTMYYLIMHNKLYDYASTQNR

SEQ ID NO: 247665 - protein, 410 aa, unidentified
MELLHPRCCGLDVHKETVVACLRLASDGKVTTEVRTFQTTTAALLRLSEWLAANDCTHVVMEATGVYWKPIWHILDDGEFELVLANAAHVKNVPGRKTDVNDAMWLAELLAHGLIRASFVPDTQTQEMRNLLRTRKQLVREQSSHVLRVQKTLEDANIKLDSALSDLMSKSGRAMIEALIAGETNPAKLASLADRRVKASQAELREALRGRVTNHHRFLLRLHLNQIDALDAATATVDAQVEANLGPFRTAVEQVISIPGVKNLSAQVIVSEIGIDMSRFPSDQHLISWAGICPRNDESAGKRRSNRLRKGAPWLKTTLVQCAWAAVKKKDSYLQAQYYRIKARRGPKKAIMAVAASILTAVYHMLKDGTMYQDLGRDHFDHRSKDQQKNRLVKRLADLGYVVEIKPLAA

SEQ ID NO: 247666 - protein, 354 aa, unidentified
MSQTLNAAIAVVGIDIGKNSFHIVGHDECGAIVLRQRWSRGQVEARFANLPPCLIGMEACVGAHHLSRKLNRLGHDARLMPAKYVRPYSKGQKNDFRDAEAIAEAVQRPTMKFVATKTADQLDLQALHRVRERLVSQRTGIINQIRAFLLERGIAVRQGQRFLRAELPRILATPPDVLSPRMVRVIEDLAGDWRRLDERIEGLSDEIEAIARHESGCERLMSVPGIGPIISSAMVAAIGTGDAFSKGRDFAAWLGLVPRQMSTGDRTILGRISKRGNRYLRVLFVQAAWVVLIRPQSWERYGLKSWIEAAKKRLHHNVLAIALANKLARIAWSVLARGRAFEIRKTNETATQSA

SEQ ID NO: 247667 - protein, 409 aa, unidentified
MDVVNARCAGLDVHKATVVAGLRVPGPQRGERCGETKTFATTTRGLRELIDWLMAHGVTAVAMESTSVYWRPVHAVLEGHVQLVLVNARHVKMVPGRKTDVRDCEWLAQLLECGLLRASFVPPRAVRDLRDLTRLRKTLIRERGHHVNRIEKTLELAQIKLSGADLMGKTGRAILQALSAGLKDPVQLAEYAQGLLRKKRAALREALVGRLTPHYAFLLQQHLSLIDAVNAHIATLDARIETAMAPFAESAAIVQTMPGVGARATQAILAETGVDMSCFPTPAHFASWARLCPGNHESAGKRQSTTTGKGAAWLRATLQEAAWAAVRSKKSYYRALYHRLKARRGAKKAIVAVQHAMIVALWHMLKHGVAHHDLGADYFERRNTARVRRHHVRRLEQLGYDVTLTEKAA

SEQ ID NO: 247668 - protein, 476 aa, unidentified
MGASRCSVNLGCAGKRSVLRVAPRSPHRSLTRKPGGTTNCRRCLGWRAREGDSQQKGLPSAQPGKRGAMEIVHPRCAGLDVHKKSVYGCVICCEPGGEKREKRNFGTMTRDLLSLADWLKQHQVTHVVMEATGVYWRPIWAILEGQFELMLVNPHHVKAIPGRKTDTKDCEWIAELLQHGLLRGSFVPPTQIQDLRDLTRYRVELTQAQARVANRIQKLLEQANIKLASVVCDTLGVSGQQMLDAMIAGQQDPEQLADLARKRLRGKIPELRLALEGRVRDHHRFLLKEYLEEWRALGQRIARVEEEIERRIVPFEEAVSLWESIPGMNRRTACNLVAEIGVNMGQFPSAQHAASWAGLCPGNNESAGKRMSGKTRAGNRWLRRTLCQGAWAVTRVKDCYLAAQFRRIAARRGMKRAVMAVAHSMLIIAYTMLKTGRNYHELGGSYLGQINRDQLQRYLTKRLERLGLTVTVAPVA

SEQ ID NO: 247669 - protein, 420 aa, unidentified
MIYVGIDIAKQKHFAAATTADGEVLIPPFGFSNDAEGFKLLLSKIKSFKKENTLIGLESTAHYAENLICHLFELGYNISVINPIQTSTLRKTNIRKTKTDKVDCLLIIKSMIVNKPRIYSKIDIDSLRLKSLCRFREKIKKAKAKLKIQLVTYVDILFPELQYFFKSGIHTNTCYQLLKEHSSPDDIAALHLTYLANLLQKASHGRFGKEEAFALKGLAKSSVGTGNTAVSIQITQSIAQIELQEQQLADLDRAIESIMLEMDSVILTIPGIGFLNGAMILGEIGNISRFSNPSKLLAYADLDPTVNQSGKFNAKSTKMSKRGSKLLRYALINAAWNVSLNNKTFNDYFNLKRSQGNNHYAALGHVAHKLVRIIFKMPIFRLSKFLSVGIIFLLTIHSWSPCMPYRSFYIFTNRWIIDKP

SEQ ID NO: 247670 - protein, 345 aa, unidentified
MEHYVGLDVSLKLTAICIVDRTGKIEREGVVSSDPEAIAIFIKSHAPHVVRVGLETGATATWLWTELNKLGLPVICIDARHAKAALKMQINKSDRNDAVGIARIMQCGWYKEVHVKDLDSHAVKALLVSRALLVKIKRDLENQIRGLLKNLGLVIGRAKMNVFAVRAAELTEHRPELAAAVVPLLSARAAIEQQIADLDRKVMRLARKNAQARRFMTAPGVGPITALCFLATIDDPTRFKRSRSVGAYFGLTTRRYASGEIDWTGRISKCGDKMLRSYLYEAANVMLTRVARWSALKAWGIRVAKRTGLRKAKVAVARKLAVVLHRMWIDGTEFKWSKEAANQPA

SEQ ID NO: 247671 - protein, 481 aa, unidentified
MSKPTQHSKKPGGKKTAAGQGKRSRKRKGMCLEDRPILEPNAAGIDIGAREIFVAVPPDHDADPVRVFSTFTEDLEEMAKWLVSCGVTTAAMESTGVYWIPAYDVLEQHGVKPCLVDAHGMKNVPGRRTDWHECQWIQFLHSVGLLRAAFRPDGEVCAVRSLMRHRSDLVQMTNQHIQHIHKALTQMNVQIHHVIDDITGVTGLAIVDAIVDGQRNPLELAKLRDPRIKASEETIVKSLQGTWRPEHLFTLQQSRQMYRHYQDQIAACDEEIEKLLVAFQPRVDPAEKPLPPDRKKRKRGRPKKNAKTKQGFDLRTESYKIFGVDLTQIPGLMAMVLTLFSEVGRDMSRWKTAGQFVSWLALCPDNDITGGRVAWRGMRRVHNRAGELFRMAAYSLHHDKSPLGDYLRRMKSKLGPAGATTATAHKIAIIFYTMVKRQVEYDATLWAERDTQREKRFEAKLKRQAHQLGYKLIPIEEKPAA

SEQ ID NO: 247672 - protein, 410 aa, unidentified
MENCKVIVGIDVSSKDSTVCVLMDKVRQGKTFKISNDMVGFQQLYKRLRLYSVIPLIVFESTGVYSLSLQAFLEKKHIQYLKLNPLKAKKLMDNNLRHNKTDQVDAYRLALIQFNAPQKLLKPQSRAYHEMQNASRYYEELNKAMVVAKNQLHRNLQTTFPQIENLMCHPTGKIYWSVVALFPHAQAVLDSNKEHILGELETISGLSQKKAEYLTQRLISLARLTCAYDNKDSIVIRAIQRNIASLFSLDQEKKEVLAYLYKLASKNQADTRILTIYQSIPGIAKTTALRLLAELGDLRRFDSPNQIDAFIGIDPGIYQSGELDSHLSITKHGNSIARKIMYLSIGQMESVKTTQPCHITDYYDRKKSSQSRGFKKIAIASVHKLIRTMYALVTKNQLYDYNVATRNQRL

SEQ ID NO: 247673 - protein, 343 aa, unidentified
MDHFAGLDVSVKETSVCIVDDTGKIVREVKVASEPEALLAVLKDCAYRFKRIGLEAGPLSQWLYSGLAEAELPVVCVETRHMQAVLKAQINKTDRNDARGIAQMMRAGLYRPVHVKTLRSQKLRMLLTHRQLLLSKAIAIENELRGTLRNFGLKVGMVGTVKFETRIRELVENLPDLAVLVEPLLVVRRVLRQQIGLLHRHLLTIARDDDVCRRLMTVPGVGPVVALTYRATVDVPARFKNSKAVAASFGLTPCKYQSGEIDRDGRISRCGDEMMRVMLYEAAQVMLTRTNKWSWLKAWAMQIARHRGMKKAIVALARRLAVILHRIWVDGTVFRWTREVVTA

SEQ ID NO: 247674 - protein, 388 aa, unidentified
MLLDHPSDGQTAIRTHFGAIFVSLELSRSTWLVTSLSPGNSEKMSKYSVKAGALPELLKLFSELKQKALARSGESYRIVTIQEAGLDGFWLHRALQQEGVESHVVDPASIATPRRRRRAKTDRLDGETLLRSLLAYKRGEPRVCAMVVAPSPEEEDHRRLCRERRTLIAERIVHVNRIKGLLFAQGIFDYVPMRRNRRAALDLLRTGDGRVLPAHLKLQIRRELDRLELLLEQIATVEREQDALLAASRPAGGTERSNPVAMLLDLKSLGPNFAAALWTEAFWRQFANRRQIASYAGLAATPWRSGGIEREQGVSKAGNPRLRTTMIQLAWLWIRHQPQSALTQWFNANSPRGRKRTIVALARKLLVALWKYVTAGVVIEGAVMKSAA

SEQ ID NO: 247675 - protein, 392 aa, unidentified
MSQQHCHFDASRSLTALEQDSTIIAVIEMSQSKWLVAALVPGVARHPLKKLDAQEEGLLKLLHRWRNEAGQAGRAIRRIVVAYEAGRDGFWLARWLRARDVEAYVIHPTSIAVSREHRRAKTDRLDTELLMRAFLGWLRGEKRHCSMVAIPTIEEEDARRPNRERQNLVTEQTRITNQMKTIFVRFGIRAFRPTLRNAEEKLKGLRAAEGTALPDNTRAELCRLLARLRVVREQIRAVEQERLRKLAVVPTEQKSSQAMVRLIARVLGIGIETADMLVNEVLLRHWRDRKAIARYAGLTGSPDESGKRRRERGLARAGNARVRCGMIQFAWRFLRFQKDSALAQWFAARTVDGRGSTRKTMIVALARKLLIALWSLVTRGEIPQGLILRPAL

SEQ ID NO: 247676 - protein, 310 aa, unidentified
MTVVTVGIDLAKNVFAVHGVNAAGKAVLVKPLVRRAKLLELIATLPTCLIGIEACTGAHYWAREFQKMGHTVRIMAPQLVSPYRMGGRHGKNAAADAAAICEAVTRPNMRFVPIKSVEQQGQLFVHRAHQGYVSERTALINRIRGLLSELGIVLPQAFKAFLSGVAQVLEDLPGYCNQVIGDLLNELYHIEEKIKNSEKLIQQLARDNSAVQLLMPFRGIGPMTATAIVASIGNGHDFKNGRQFSAWLGLTPRQQSSGGKARLGRITKAGDSYLRTLLVLGAGSVLLGAAKNARMCWAMLHLRDEFRFPA

SEQ ID NO: 247677 - protein, 317 aa, unidentified
MTSEILFGIDVAKDELVIDSELGSLTVSNTAEAIDTWLKSLPTVSYLGLEATGTYHQLLADRAVSMGKIVYVLNPRDMRHYALGLGRRGKTDRVDAQMIRRFITAERQHLRPYQPATMVQHQLALLQRRRATVVKHRQALQKALRSVSELAEPLQETLVALDALLTRIDHQLNDLLELEPVLKAEARRLESIPGIGRQTSTQLAVLFDRVALTRSDAAVAFVGLDPRASDSGQKRGRRRVSKRGPGELRRLLYNCAQAAAKTAVWKPYYQSLRAREFSATQALVILARKLLRIAFSLWQQADAKFDAQKIGCLKNAA

SEQ ID NO: 247678 - protein, 402 aa, unidentified
MNAVGIDVSKGKSMVAIMRPFGEIVSAPFEIKHTASDIHSLVELINSVEGESRIVMEHTGRYYEVLAHQLSEANLFVSAINPKLIKDFDNDSLRKVKSDKADAVKIARYALDKWQNLKQYNVMDELRNQLKTMNRQFGFYIKHKTAMKNNLIGILDQTYPGVNTYFDSPARSDGSQKWVDFASTYWHVDCVRKMSLNSFIDHYQNWCKRKKYNFSQSKAEEIYGKAKELVPVLSKDAITKLIIKQAVDQLNSASTTVESLRTLMNETASKLPEYPVVMAMKGVGTSLGPQLMAEIGNVSRFTHKSAITAFAGVDPGVNESGSYEQKSVPTSKRGSSDLRKTLFQVMDVLIKTHPQDDPVYQFLDKKRAQGKPYYVYMTAGANKFLRIYYGRVKEYLASLPES

SEQ ID NO: 247679 - protein, 359 aa, unidentified
MSFVADSLMVIIGCDFHPGFQQIAVLDTESGEVRDLRLAHQQQAREFYAGLQGKEVLVGVEACGYTQWFEQMLEGLGHRFQIGDAAAIRASYVRKQKTDRRDAGHILRLLVEGRFPALWAPSPSQRDARQLIVHRHKRVQMRTRVKNQLHALAINQGLRLRRQLWTREGRRQLEALQLLPYAAARRADLLRQLDEMDGQIAELDKMVRQEAEARAEVVRLMSHPGVGPVTALAFVLTIGDAGRFRHACQVASYLGLIPAERSSGGKQRLGHITKQGSPLLRLLLVEAAHGAVRGDAELSRCYTRLQRRHSTGVAKVAVARKLALRLYWMLRNQADYAQLRGPYAGKPVSFCGRQTRPVA

SEQ ID NO: 247680 - protein, 346 aa, unidentified
MDYFAGLDVSVKETSVCIVDETGKIVREVKVASEPEPLLAVLTNPTLQFRRIGLEAGPLSQWLFSALAEVELPVICVETRHMRAVLKAQINKTDRNDARGMAQMMRVGLYRPVHVKTLRSQKLRMLLTHRKLLQSKAIAIDNDLRGTLRNFGLKVGMVSVAKFEARIKELIENFSDLALLVEPLLVVRRALREQLGILHRRLLAVVRDDDVCRRLMTVPGVGPVVALTYRATVDVPARFRKSKSVGAVFGLTSAKYQSGEIDRSGAISRCGDEMMRTMLYEAAQIMLFRSAKWSWLKAWAMKIARRRGTKKAVVALARRLAVIMHRIWVDGSEFRWTREQIAPVAA

SEQ ID NO: 247681 - protein, 412 aa, unidentified
MEVLHPHCAGLDVHKASVVACVRHMMGGAVKREVRSFQTTTKGLIALSQWLSAEDCTHIVMEATGVYWKPVWHILSDGEFALVLANAAHVKNVPGRKTDVNDATWLAELLAHGLVRGSFVPDEPTQEMRNLLRTRKQLVRERSRHIQRLQKTLEDANIKLDSVISDILGLSGRRMIEALIAGETDPNALAALAHRRIKASPAELEAALRGRVTRHHRFLLGLHLQQIDAIDAAIDQIDPEVDALVEPFHAAVQLLTTIPGIDALSACVILAEIGRDMSRFPTAGHLISWAGLCPKNDESAGKRRSTRMRKGAPWLKTTLVQCASAAARKKASYLQAQFHRLRARRGAKKAIGAVAASILTAAYHMLKNGTLYEDLGPAHFDKRAQANQVHRLIDRLRNLGFAVQITPMEAAA

SEQ ID NO: 247682 - protein, 402 aa, unidentified
MNAVGIDVSKGKSMVAIMRPFGEIVSAPFEIKHTASDIHSLVELINSVEGESRIVMEHTGRYYEVLAHQLSKANLFVSAINPKLIKDFDNDSLRKVKSDKADAVKIARYALDKWQNLKQYNVMDELRNQLKTMNRQFGFYMKHKTAMKNNLIGILDQTYPGVNTYFDSPARSDGSQKWVDFASTYWHVDCVRKMSLNAFIDHYQNWCKRKKYNFSQSKAEEIYGKAKELVPVLPKDAITKLIIKQAVDQLNSASTTVESLRTLMNETASKLPEYPVVMAMKGVGTSLGSQLMAEIGDVSRFTHKRAITAFAGVDPGVNESGSYEQKSVPTSKRGSSDLRKTLFQVMDVLIKTHPQDDPVYQFLDKKRAQGKPYYVYMTAGANKFLRIYYGRVKEYLSSLPES

SEQ ID NO: 247683 - protein, 336 aa, unidentified
MYSGIDLHSNNSVVAIIDEADRIVAQKRLPNDITKIVGFLARWQDDLAGVVVESTYNWYWLVDGLQDAGLHVHLANTAAIKQYEGLKHSGDETDAQHLAHLLRLGILPTGTILPREHRVVRDLARKRMQLVQSCTTHVLAVENITARQLGGRMTSNQIKRLTDDTIDSLPLAADVGLAIKANVAVIATLQSQIEVLEKRLQERVKPRPQYGLLTSVPGIGQTLATVIFLETGPIDRFADVGNFASYARCVDSVHTSNRKKKGEGNVKNGNKYLAWAFVEAANFARRFCPEAKRFHERKKAKTNNIVATKALAHKLARACYHILKEGKPFDVTRCFA

SEQ ID NO: 247684 - protein, 422 aa, unidentified
MQNTAARKLKQVPEGCLVVGIDPHKKKHAAVAITQDLTIHDRFKFDNTRDGLEFSVRRIRAEMVKSDCRGVMFAIETGGHYWRNIAYFLEEQGIPFRFINQYTLKRRREGKDLNHRKNDYRDSEVAAQLLCTGEFVESSIPQGVYAELRTAHNAYRRLVKERTRITNLMKGLLDGLFPEFVQVFKDPCAVTALCVLSYCAIPSIIAGMTPDEFVATVEAHYNGRRLMRRKLMALHQVATTSIGIGAGAQSLAFEISFLVEKLTLIKRQIGTIERTLVRLVDETEEGKYLLSITGLNYIAAAGLLAELGSFKLYRTAKQMIKMAGSNPTERESGGKRGAHTPMSKQGRPVLRYCAWTSVIPMLRFNADFRDWAKQRRERPAHANSLGGREVVGAALNKLLRLAFAMVKNQTFYRSPQLVPVLG

SEQ ID NO: 247685 - protein, 360 aa, unidentified
MTGTMTWAAMDVHARSTYAASMDVMTGELCRQRFDTGAVEAVVGWLAGLPGPVRCCYEAGPTGFGLYRAAVAAGVDCQVIAPSKTPRPSGDRNKSDRRDTDLLLRQLMAGALTPITVPSATFEAARDLSRAREQIRLDLMRCRHRLSKLLLRHGRVWDRSTWTHAHRQWLSGQTFAHQNTELAFIDNLAACDGLTARKAALEERLSWVATDPEFWPIVSRLRAFRGVDTLSALILLLEVTDFARFPRAVQLGSWLGLVPSRQQSGESDVHGSITKTGSKYARRILVEAAWHYARAPGVGRSLYERQEGLPDHVLQIASRAQHRLYRIHKRMRERKKPGNVITVACARELACFLWAAATAP

SEQ ID NO: 247686 - protein, 355 aa, unidentified
MSQEKYIGMDVHQATVSAAVRDRNGNLLMECILETKADTLLEFVQGLHGTLSLAFEEGTLAAWLHDLLKPHVNRVVVCDARKAALLRDGNKSDRIDARHLSELLRTNQLKPVYHGEHGLRTLKELGRSYLTVSKEMTRTMNRIKSLYRSWAIPCAGTTVYAPRHRRQWLAKIAEPGARVRAEHLYEQLDHLQPIRVRARRELLQESNKHDALRRLRQIPSIGQIRAALLVALLQTPHRFRSKRQIWAYSGFAIETHDSGEYRYVRGKLQRNRERITVRGLNRNHNPDLKNIFKGATISASSRPGPLQDFYETRVALGMRPTMARLTLARKIAAITLTLWKKGVNFDPQQLSRQAA

SEQ ID NO: 247687 - protein, 377 aa, unidentified
MNQHGTTFVGMDAHKKAIHVAMLLPGQREPVEWQVANEPAAIRRLAKRLEREAPGEVRCCYEAGPCGYVLQRELEAAGGVICEVIAPALVPIKPGERIKTDRRDARKLAVSLRANDLTTVHPPTPADEAVRDLCRCREDAREDLLRARQRLGKFLLRRGRVYTIGKRAWGLLHRQWLKGLKFEHAADQVTTEDYLAAIEQLEERLRGLDQRLAALAEQDPYREPVSWLRCFRGIDTVTAIALVAELHDFRRFQTARALMAYLGLVPSENSSGERHRRGAITKAGNAHVRRLLIEAAWHYRHRPGVGVGLRRRRQGQPSAIIAIADRAQHRLCRRFRHLTERSKPFNKAVVAVARELIGFVWAALYPATAGQAARSRS

SEQ ID NO: 247688 - protein, 342 aa, unidentified
MQVTTIGLDIAKNVFQVHGIDAAEKVVVRKQLRRSQVLAFFKALPPCLIGMEACATAHYWARELTKLGHRVRLMPAKDVKAYVKRNKNDAADAEAICEAVRRPTMRFVQTKSAEQQGRLMLHRVRDLLMRQRTQVINALRAHLAELGITAAQGTAGLKELLKIIASDADERLPVDAHASFVVLAAELQAMQTLVGSLEKRIMAQHRGNEASKRLETIPGIGFIGATAIAATVTDPTAFRSGRDFAAWIGLVPRQDSTGGKQKLGPISKQGDRYLRRILVVGAHAVLRYAKQNPEKYPWLTQLLARRPFKVVAVALANKMARMAWALLAHGGSYRAPALAAAA

SEQ ID NO: 247689 - protein, 353 aa, unidentified
MEFTMIARSDAACFVGIDLHKDTLTACTIVAKDREVAYRKISCVAREKVREFLAGLPRPSVVAIETVGFYRWLWMEAEPIVDQVVLADARGCRALAGRRIKTDREDALNVAELLMTGRLPMAWAPPGNIQRVRNLTRHRVGLSRDHAKTLHRVKSIMNRLNRPGPARMDAAGLQRYLLASVDRIEADDLTVLWQHQRRLVEVEQDRSAIDRRIIDLMRADEFRRLHTILESIPGVGLVVSATAIAEIGDFSRFPDSKAIGRYAGLTPTGYASADKNRLGRICKTGSPDLRWALQQAAWTAIRCDPDIKKTWLKISKTAGKKAAAVAIARKILVLMWTLVRKDELYKAREPVAA

SEQ ID NO: 247690 - protein, 425 aa, unidentified
MKRTQNEKISQIKIETLVVGIDIGKETHYARAFDYRGIELAKLLIFSNTAEGFELLDRWMLNTCRQQSKTEVIAGFEPTGHYWFTLGDHLKRQGHKLAIVNPFHVKRTKELDDNSPTKNDRKDPKTIAMLVKDGRYRDVYIPDDIYQELREAVAERERLQKQLNATHNMVIRWLDIRFPEFAGVFKKWTGKTALLTLRTFPTPALVLEAGAEKILAKWRTVVKRSIGIKRAQALVKAASNSIGKTNGHIASEAVLQNLLTEYEFYHAQHEQIEQLMRELLIQVPNATKLLGIKGVGLVTATTFVGEIGDINRFEHPRQIQKLAGCNLVENSSGKHKGKITISHRGRKRLRHGLFMAMIAILGKNPEFQELHHRNQTRKNNPLNKMQSIIALCGKLIRIFYTILSKGVDYNPEKMMGDIQQSVKAA

SEQ ID NO: 247691 - protein, 375 aa, unidentified
MEEKLRFLGLDVHAETIAVAIAEPDGEVRSLGMIPNRAESIRKMIKKLGPADKLRACYEAGPTGYVVYWQLAELGIQCEVVAPTLVPVKAGDRVKTDRRDAEKLARCYRSGDLTAVWVPDEGSEALRDLVRAREAAKQDQMRARHRLSKFLLRSGQRPPSGVRPWTRPYLIWVAQLRFTQIAQEATRQDYLHEVEHMRERVARLEQAIMEAVKLASPSLQQVINDLQALRGIADISAVTIAAELGQVSRFDSARQLMGYCGAVPSEDSSGKRVRRGGITKTGNAHLRRIVVEAAWSYRRPPGIWYGLRRRQESISEEVKEIAWKAQHRLHKRYMKLGAAGKDQRKIITAVARELLGFIWAIGTRAETIASQQAAA

SEQ ID NO: 247692 - protein, 366 aa, unidentified
MKKISTTQAFSNELLKEQKLTIGVDLGDRWSFYCVLDEAGKIILEQKVSTTPEAMKQTFSRMPQSRIALETGTHSPWASRLLTELEHEVIVAHAQKVQLITKSNRKDDRHDARTLARLARIDPELLGPVRHRSVQAQIHLTVIRARAELVSARTALVNAARGLVKSYGERLPKCGTQQVGRELAAALSTELRDVLEPLLKEIESLNERVKDYDERMEKIAKEVYPEVSLLKQVKGVGTQIALTYVLTIEDPHRFAKSREVGCFLGLKPGRRNSGESEPQKKISKAGDRYLRTMMVQGAHYILGPFGEDSDLRRWGRKLSERGGKNAKKRAVVAVARKLAILLHRLWVSGEVYEPLRNSQKAMRAVA

SEQ ID NO: 247693 - protein, 311 aa, unidentified
MKPAVYVGIDVAQQYVDVVVSGNRNAMRVAADGGALEMLGQQLMELEPKLILMEASGGFERLPLTVLQTAGLPVAVVNPRQVRDFARSLGYLAKTDAIDARVLAQFAEVLNPQPARLSDEAEEQLRALELRRRQLIQMIVAERNRLRTAPRTAGRIEEHLRWLEDEVKAIAQELQGLVESDPEMQARAVILRSVPGIGPILSFILLSGLPELGRLNRKQIAALVGVAPFNWDSGKLRGKRAIWGGRAHIRSALYMAALVASRRNPVIRALYERLCAAGKPKKVALVAAMRKLLITLNSMLRTQTKWLENTP

SEQ ID NO: 247694 - protein, 339 aa, unidentified
MNVVIGIDPHKASHTAVAIDEAEDELSSIKVRATRRQVDQILGWAEPFEKRTWAIESAGGLGYLLAQQLVARGEVVLDVPATLASRIRVLATGRSNKNDPNDALSVAIAAFRAPNLRSVETADHAEVLRLLAKRNGDLGSHRTRVVCRLHALLAELAPGGIAKELYVSDAERLLAKIRPETPAEQVRYDLALELLDDVRRLDAQTKESHRRIRVAVKASGTSLTELFGVGPIIAAQLIGYAGDVRRFANRDAFASYNGTAPIELSSGGRVVHRLSRRGNRQLNHAVHMAAISQIRQSGSEGRAYFERKVAEGKTKKEAVRSLKRQVSNAVYRQLLLDAR

SEQ ID NO: 247695 - protein, 342 aa, unidentified
MNHYAGIDVSLECSSVCVVDASGKILREVRVASEPEALIAWFRSSGFEFERIGLEAGPLSQWLFAGMKAAGLAVELLETRHVRKAFEAMPVKSDRNDARGIAQLMRLGWFRPVHCKSISAQETRSLLTARKLVQSKLLDVENSLRGILRGFGLKVGKTTGQKFAGRIEELVAGHPYLQMIAKALLAVRAVLRTEFAAFEKQTRRMARSDMQARLLTSVPAVGPIVALTYASAIDDPARFKSSKQAGAHFGLTPKKHQSGETDYTGRISKIGDASVRTALYEAANVMLTKPVKGCSQLKSWAMRIAKRAGMSKAKVALARRLAVIMHRMLADGTPFNAAAAAA

SEQ ID NO: 247696 - protein, 343 aa, unidentified
MQTVTTIGLDIAKSVFQVHGIDAAGQVVVRRQLKRRYVLAFFQKLPPCLIGIEACASSHHWSRELRALGHTVRLMPPAYVKPYVKRQKNDATDAEAICEAVTRANMRFVETKTPEQQCGLVLHRTRHLFIRQQTAVINAIRAHLAEFGIIAPVGRHGVEELLNVVADPNDKRVPEIARACLLAFGTQLRRLKEQILEFDRMIRAWHRSSETSRRLDNCPGVGPVLATALVATVADPKSFRSGRNFSAWIGLVPKQHSSGGKNRLGSISKQGDRYLRGLFVAGALAVIRYAKIHGTKHRPWLTALLARRPTKVAAIALANKIARMAWAMMAKGERYKEPVALAA

SEQ ID NO: 247697 - protein, 344 aa, unidentified
MAIVGGLDIHRRQITYDWIDTTTGETRRGQLSPATRLELRSWLAQFDGPQVDFALEATTGWRFVAEELARAGIAAHLAEPADTRALRGPKRRAKTDRTDAHHLRELLRAGTLPESWMPPAHVADARTRVRLRRALVGERTGWYQRIHAILFHHGLPERSQLLTADGRAWLARAELPAVARQAVDLALRMIDHLEVELDRLDGELARIARAQPGCQALMGRYGIGWLTAVTIWAEFGDVRRFANSRQAVRFTGLDITIAESDGKRARGHLARQGSPVLRWALHEAAMCAARPSSPDHPYYLQVKQRLGGKRAALSVARKLAREAYHTLRALGDQALVPAELPTAA

SEQ ID NO: 247698 - protein, 368 aa, unidentified
MNHKSSKLYVGMDVHKESIDLAVAEEGGEVRHHGRIGGDMNALWRAVRKLESSGRALVFVYEAGPCGFGIYRGLTARGHACWVVAPSNTPRRVRDRIKTDRRDSLKLAGLARAGELTSIYVPDVRDEAMRDLVRAREDAVVMQRQARQRLAALLLRNDVRYAGKTAWTAAHRRWIADLKLPQSAQRLAFEEYVQAVEEASARVQRLSQCIEQELATWRWRSVVAALQACRGIQLIHAVRIVAELGDLSRFRHPRRLMGYLGLIPGEDSSGEHRHQGAITKAGNSSARRALVEAAWAYQYTAKVSALIARRQVDVPKAALNIAWKAQVRLCARFRRLAARGVHRNKIVVAIARELAGFVWAIAQYVKPV

SEQ ID NO: 247699 - protein, 339 aa, unidentified
MNEVTLIGIDLGKHSFHLHAQDAAGRMVFRKKLSRQQLLRTLAKVSSCRVVMEACAGSHWLARQLAGMGHEPRLISPQFVRPFVAGNKNDFGDAQAICEAACRPSMRFVSPRNEAQQTVSAMHRLRERLVRERTATVNQIHGFLLEFGISLPRGAALMSRLPTVLDHETLPPRLVALVVRLRAQVHYLEEQIRQVVQDLKASLREDDKSRRLLEIPGIGPITASALAVELGDARQFANARQFAASIGLVPRQYSTGGKPTLLGISKRGDRNLRRLLVQCARAVMQHTASRTDALSLWVKTLSTRRHSNVVACALANKLARIAWAILARGTHYQARALTT

SEQ ID NO: 247700 - protein, 401 aa, unidentified
MPFHGGLDWGAAAHAVCVVNERGTVVARIDVGHDAAGLGAMFARLRKIAPAAELPVAIERPSGLIVDALVQAGHPVVPIHPNAVKACRPRYRAASGKSDPGDAYMLADILRTDGHRFRPLVPMSDDIRALRALVRGRDDLVAHRTALANQLRSLLESFWPGAAAIFADIASPIALAFVSRYPTPDSASRLGEKRLACFLAQHSYCGRRSPAELLGRLRAAAAGLAGDAKADAKGEVARALAGLLKRLVADIAKLSSRIEHAVAELPDGRIIMSFPRAGRICAAQILSELGDVRQRFLTEDQLAAEAGAAPVTHASGKSRSVVCRWACNKNLRAAITCFADNSRHACAWAADIYQRAKQRGRRHPHAVRVLARAWVRVLWRAWQNQTTYDPAKHRRAANFAT

SEQ ID NO: 247701 - protein, 355 aa, unidentified
MNSLKYIGLDVHLATISIAVLNAAGKLIMEVTIETQAAALLDFIRGLRGTLQVALEEGTCAEWLYALLAPQVAKVVVCDPRQNPRRLGEKKSDRLDARKLAEWLRLGTLKAVYHGNPRGPALRESARSYCTLVSDTVRVMNRLKALYRGRGIRCAGTRVYSPRGRGEWLAQLLEPGVRRRAERLYQQFDWLLPLRQEARAAMLAESRQHAAQKILRSIPALGPVRVALLIALLQTPHRFRGKRQLWAYAGLALVTRSSADYRVVAGQLARSRQPALILGLNANHNHALKALFKDAAASALAHPGPLKDFYTTRVAQGMKPELARLTLARKIAAITLTLWKKGERFNVQHLKPQAA

SEQ ID NO: 247702 - protein, 354 aa, unidentified
MPVYIGVDFHARTQTVCWCDTADGVIHQRTLDHERDDVRAFYAQFPAPALVGLESSGYALWFHQLLAERNHQVLVGDAFQIRQFARRRQKNDRRDAELLLDLLLRGDFPAVHVPPPASREVLGLLRYRHRLVRMRTMLRNGLQAVALNHQLRLGPRLFRTRGLVQLAALPLQGAAAVQRQHSLELLDALQKKILEVEEILEARAAADPRVIRLRTHPGVGRLTALGVVHTLEPVTRFDRARRVAAYCGLDPKEHSSGERQRFGHISKQGNRLLRFLLVEAAHRAVQTGQDEPLRRFYLRLVMKKSTAIAAVAVARKLVLRLYRMLRDQIDYDEFRRRGRDARRARETRRPAMPA

SEQ ID NO: 247703 - protein, 370 aa, unidentified
MAKRSMFVGMDVHKESIDLSLAEEGRDGEVRHYGVIPGDLEALAKVVRALRAPNRRLRFVYEAGPCGFGIHRYLTGQGEDCVVVNPSSMPKRSGDRIKTDRRDGDALARVHRAGELTAMYIPTADDEALRDLVRGREDAVGLSTQAKHRLKAFLLRQGRRYPGRAGWTRPYRRWLADLSFPLAPQHIALQEYRDTIDETERRVERLTDQLRQLTPAWRWAPVVDALQALRGVSFVTAVGLVTEVGDIRRFTHPRELMAYLGLVPSEYSSGPSVRRGGITKAGNPHARRLLAEAAWAYQGVPRVGRQMLYRQETLPKPICDIAWKAQLRLTSRFRKLVARGKAKPKVATAIARELTGFIWAIAREVPTPPA

SEQ ID NO: 247704 - protein, 404 aa, unidentified
MWYVGLDWADTHHDVDVLDEAGKRVGARRFAHSHEGLNELKQFVLSIAASPEQLACIVETNHGLLITFLLEAGFPVYPVNPKTANQLRKAAGAKTDQIDAHLLAKIGRLDLAELRRLEPDSATVAELKTLTRDQDALIQTQTRLVNQLTACLKEYYPAALHLFAKLQQRSTLLFLQAYPTPQAAQAASVEEITATLRTGKHTRSTQVAPKIFEELHRPQLVGSPVIVRAKSRQMLSLVKQLLVVIEEIASYDEAISTLFLTHKDQQMWRSLPRAGKRLAPRLLAEWGDDRSRYADASSVQTLAGTAPVPFQSGNYAKAHKRFACAKPLRNALHQFAWQSMRKEEWARDYYQRKRAEGKTHTMAVRALANVWVRIIYRMWVNKTSYQTATFAAAKLAHAPRQQAA

SEQ ID NO: 247705 - protein, 435 aa, unidentified
MRGIVGLDVGSDAVSVCVLAGEDGRELVRRHEVVNSEIGATQLTERLVALAAAEAITEYRIGIEASSLYWWPLALHLSTNSVLPTTQVYALNPKLVKDFRSTFGALPKTDRHDAFLIAERIRFERGLPAPFAVDWRYEPLRRLTRLRVHLASSLAREKNYFLTMLFLPFSGFVAAKPFDDPFSPTSWALLEEFTTDHLARVPVEELVTYLQRHGRGQFNDPMATATKVQQAAKDSYHLHRTMDAPMRLVLGSTRATITTLQQQLKMVDATIARELAGIPQTVSSVPGLGAVWTAGLVAEIGMISRFADDAALAQYAGLTWTVRESGHFQAEDTRMTKRGNTYLRYYLIEAANSVREHCSEYGVYYQTKYAQTPKHAHKRALVLTARKLVRLVDALLRTDTIYQPPEHRMTRKEATQPSARRPARHHRTRPLSALS

SEQ ID NO: 247706 - protein, 323 aa, unidentified
MNKDMIYFGIDISKDVFDVMDSNGNYFQFTNDFKGFKKFVRLLNKNSHCVMEATGYYHYKLAYYLIENNIRVSVENPLSVKRFIQMRLSKIKTDKSDAKMICQYAQSVDLKLWKGRTKNQIECLQITRLLSLYFKQTTALKNKIHGEDVLGNPSSLVVRSLKRSLKFKQKEIKHLEEKLTEIVKQDHQELLTRLQSIPGLGRKTSIMLIVLTDGFERFTSAQELCSYSGLTPIIRQSGSSVRGRARISKMGNKKLRNLLFMCSFTACKNNKACKALYDRIVAKGKSKKLALIAVCNKLLKQAFAIAKSGLIYDETYRSTLVKN

SEQ ID NO: 247707 - protein, 409 aa, unidentified
MATLYVGIDIGAEHNTAHFMAQDGSSVGRLTFPNDLEGAQSLIGRVLELKAAHGTDAVRLGMEATGVYWWHLYHAIVEAPELSGLDVKTAVINPKVVDGFKGIYTDVPKTDLVDAWVIADCVRFGRIRVYPPLDPRYAPLQRLTRLRYQMTHDLTREKNRALSLLFLRFSTYAKDRPFSDVFGAASTAVFTELAVDDIVTMPLEDLAARIMEHGRGHFDDPQAVAKELKQAARRAYRLSPKMDDAVAVTLSLTVANIAFLEKQIACVDRAIAKEMKAFPAILSTVPGIGDVYAAGILAEIGDIHRFPNDNALAKYAGLTWRQHQSGSFEADDLPLTRSGNAYLRYYLTQAANSVRVREPEYAAFYERKYREARHHHHKRALVLTARKLTGLVFALLNEGQIYQPRRNAS

SEQ ID NO: 247708 - protein, 343 aa, unidentified
MSEVSIIGLDIAKNVFQAHGVDVGGRKLFSRRIARSKVLEFFVGVPRCLVALEACGGAYHWARELVRMGHEVRIMPPAYVKPFVKRQKNDAADAEAICEAVQRPNMRFVAIKSEEQQASALVFRTRDLLVKQRTQIINAIRGHMTEYGWVAPKGPSWVAMLRDLIDEEIGASLPQAAREMFRVMLGMLDELDQRIAELDKEIARRAREDEVARRLMTIPGIGPIVATAIAALAPAAETFRRGRDFAAWLGLTPLQKSTGGKTKLGRTSKMGERTLRRLLIIGSSSVVRQASRRGAPEGSWLAGMLARKPRMLVTVAQANKTARIIWALLTKKEDYKAPVAASA

SEQ ID NO: 247709 - protein, 315 aa, unidentified
MRNCIGIDISKSSFDVFVLEENKASEMVNDAEGIKQCIKLCHEIQPELIVMEATGGYEMLLASHLQAEGFAVAIVNPRRIRDFARAMGKMAKTDKIDAQVIATFAATLEPMPHEFIDANSRKLKALVARRKQLLQMHTAEVNRKEHAIEDEIKQSIEAIVTAIENQLEKVDKELDDSIGQAPELKQKTEFLKSIPGIGKITAQMLVTELPELGVLNRRQIAALVGVAPMNRDSGIFRGKRMTGGGRRHIRARLFLPTLVATQYNPVIKKYYQNLVVNQGKCKMVALTAATRKLLCIMNAMLKNNQYWQPDLVKNT

SEQ ID NO: 247710 - protein, 397 aa, unidentified
MQALLYCCCGVDVHDEMIETCIVKGFEDEPEIIRKQFQTMPKNLYEFAAYLNEHECYNIAMESTGIYWRPVYEVIEDYCGSNVQIVVTNASHMRNIPGRKNDVDDAEWIATLLQHGLLKSSFVPERIFRDLREASRLYRKLVGERSRYTNRIGKLLQAHGFKLSNVLSDILGASGRNILKVLAERGSLSISVVESCLRGRPKHTPHDIHVAISGSLNSFERKILSVLLNKVETAEHNLNELFFDMKEKAAPYHRQLSIIDSVPGFDILASLLLLSEISSTPYKSFRSADALCSWAGLSPRNDESAGKIKSRKTLPRGQYVKSILVQAAWSAVRSRENPFRDWFWSHKGKMGEKKALIAVSRQLLKTIYTLLSNNTLYDNDIAIANRKRVYRPNSKTE

SEQ ID NO: 247711 - protein, 331 aa, unidentified
MNTILVIGIDLAKSVIHAHAVDSDHRVACKKKLTPEKMLAWLSTLSPCLIGIEACGGSNYWFRKMSQYGHTVKLISPQFVKPYVKSNKNDANDAEAICEAVIRPNMRFVSAKSLEQQDIQSLHRIRTRLVGQRTALANQIRGLLNEYGFVFPQGINAMRSRLPDVIEDAQNELTPRFRHLMQALYDELVSLDAKVKEFDDELQLIFRQSEACQRIGHIPGIGKVTATALVAAIGDPAVFENGRQMAAWLGLVPRQFSTGGKTRLGGISKRGDKYLRTLLVHGGRAVLRTAAKRTDRTARWAQRLQAKKGPNKAAVAIANKNARIGRYCRKT

SEQ ID NO: 247712 - protein, 344 aa, unidentified
MKISTIGLDLAKNVFAVHGIDLEGRVVVKRNLRRAQVLSFFGKLEPCLVGMEASAGSHYWARELTQHGHDVRLMPASYVKAYVKRGKTDAGDAEAICEAVQRPTMRFVPAKTVEQQGLQTLHRSRSLLLRQRTQTINVLRALCAEFGVIAAKGRLPLDELIELVATEDDARIPTEARVALTPMLSLLDLLSRSIAALDRQIALRNKGSADSQRLLTIPGIGPLLASALPNSIGDVKRFASGRDLAAWIGLTPRPHSSGGKSKLGHISKQGNDYLRRLLVQGAMSLIRVARVSKGPVAAWLRELLARKPARVAAIALANKIARIAWAVLTRGEVYRVHINAAKAA

SEQ ID NO: 247713 - protein, 358 aa, unidentified
MPKQINKMDFTGQNIYCGIDVHNKDWKTTILVEETFHKTFTQPPEPIVLSTYLENNFPGGTYFAAYEAGFCGFWVQKELSRLGVETIITNPADIPTTDKEKRQKEDFRDSRKIARSLKNGDLQAIYVPSDIALEDRLLIRSRYTIAKDLRRNKHRIKSFMHFYGIRLPEEFLNSKSHWSKKFMVWLEGIKLRDDSGNAALAILIKQVNTLSCELTSVKKQLTTLSNQPRFKQNCDLLMSIQGVGLITSMRFLSEIVDIKRFRSLDKLASYVGLIPSTNSSGDNQKVGDITPRGHRALRTALVESAWKAVGKDTVLMAKYYQLCKRMDSNKAIIRIAKKLLARMAFVLREKKAYEISMA

SEQ ID NO: 247714 - protein, 428 aa, unidentified
METPTLNPELVAWIGLDWADQAHEIRLQADGSRRVESLRVEQKPEALHAWVAQLRARFPQGKVAVALEQSRGAVIYALMNYDFLLLYPVPPKGLARYREAFFTSGAKSDPGDADLLLEMVHSHRDRLRLWQPDDALTRQLRLLVEHRRRTVDDRTALTNRLTDLLKTYFPQALEWAGDLRKLAACEFLSQWPSLKALQAAGRPTWRRFYRCHRRLSAEELDQLLQAIAQARPLTEDRALVEASVLMTQTLIEQLRAVIAALARLDQALEKLFEQHPDQGLFQGLPGAGEALAPRLAAAFGSNRHRYQSAEELQQFSGIAPVTESSGKTCWVHWRMACPKFLRQTFHEFADASRKKSRWAEAYYQRRRQDGVSHHAAIRALAYKWIRILYRCWKTSTPYDESVYLQALRRRHSPLWLAATALSIQEGHA

SEQ ID NO: 247715 - protein, 381 aa, unidentified
MKTVHTKRTGQAARPSVGADRSVARVVPSLLPKSSNSCRGYPSPHFSQGRARLEQIKSIKEDSLLEVPLIFVGIDVSKAQLDVAIRPSAQSLSVSNDRAGIKSLIKQLKKLGPQLVVLEATGGLERQVLSALMAGEIPVVMANPRHIRDFAKSTGQLAKTDRLDAAVIAHYAEAVRPKPRPLPDEVSLELRALSARRRQVVGMIVAEKNRLATASKAVKKRITAHIAYLEQELNDADQNLDRFIEKNAAWKENQQILCSTPSIGPVSSRTLLVELPELGALDRKKISALVGVAPFPRDSGTLKGRRTIWGGRASVRSALFMATVAGTRFNPVIRDFYKRLKAKGKPSKVCLIACMHKLLTILNAMIKNKIRWSGNFAHQTT

SEQ ID NO: 247716 - protein, 356 aa, unidentified
MRHYAGLDVSLEETAICVIDEAGRIVKEARVLSEPEALVGFFQALGHTVERIGLEACSLAAWLHEGLAAASLPAVCLETRQAKAAMGAMPNKTDRNDARAIAQIVRTGWFRAVHVKSPASRSWRALLTARRMVLNKLRDLENGVRALLREAGLKLGTPGRKQFADRVRELTAAEPVLAALAEPLLTIMATMAHELAQLTRRVLEVVRGEPVCRRLTSVPGVGPLTALAFRATIDQPGRFQHSRDEGAHLGLTPKRHQSGETDVQGGISRCGDELARTALYEAAHVLLVRSQKWSALRAWGMKVAKHRGMARARVAVARKRVAVARKLAVILHRIWTDGSAFRRGKEGQQAAAPALG

SEQ ID NO: 247717 - protein, 345 aa, unidentified
MTVYIGVDFHARAQTISYLTTEDGEIRRAQLDHGQPQEVRKFYEQFAGQQVIVGFESSGYAAWFEELLEELGYEIWIGHATAIRLFARRRQKNDRRDADLILDLLWRGDFPRIHRYSPQSRAVLQQLRYRQRLVKMRTMVVNSLVFLASSRGVGLRTQLKSRRGIERLRQIALPQPLIDQRDEMCQLLQELKTKTERVERWLEAKADSDVRVQRLRTHYGIGPLTGLGLVHTLECVERFANARKVTAYVGFDPVEDSSGERRRIGSISKQGSRLLRFYLVEAGQIAMRKDPDLARVYHRVRLRRGHAKAKVAVGRRLLVRAFIMLRDEIDYAEFQRRGVAARSSR

SEQ ID NO: 247718 - protein, 411 aa, unidentified
MLTEALFYVGIDRAAETHAVCVLDDRGRVAGAFTIDHTADGFADLARRLARLGEDPAQVPVAIERPDGRLVDALLEAGHPVVPVKPNAIKAWRDAEVLSGAKSDEADAEVIAEYLRLRAHKLRPAIPYSPETKALRTVVRTREDLVEMRVAASNQLVALLDAHWPGAQAVFADVESPIALEFLTRYPTPAAAARLGEKRMAAFCTKHGYSGRRPAAELLDRLRSAPAGTTDEALTEALQDAVLAMVTVLKAVVGALRDLDRSVIAHLGEHPDAEIFTSLPRSGRINAAQVLAEWGDARAAYDSPDAVAALAGQTPVTDKSGKHHAVHFRWACNKRFRKAITTFADNSRHASPWAAKIYTDARARGHDHPHAVRILARAWIRVIYRCWQNRVPYDPAHHGNAQRLNQQLAAA

SEQ ID NO: 247719 - protein, 405 aa, unidentified
MFVGIDWASERHAVCVLDDAGRKATAFVIAHTADGFDQLAARLRRYGDPGGLPVAIERPDGRLVDRLLEAGHPVVPVQPNAIKAWRDAEVLSGAKSDPSDAALIAEYLRLRQHRLRVLAPFSPETRALRAVVRTRDDLVDQRVAASNQLGACLEAFWPGAKAIFADLASPITLDFLTRYPTPESAASLGERRLVAFLTKHGYCGRRSPGELLARLRAAPAGLTGTVEAEARRDTVLAMVKVLRALVAAIKDLDRSVVAHLGEHPDGEIFTSLPRSGRINAAQVLAEWGDCRQAYADAEAVACLAGATPVTNQSGKHTTVSFRWACNKRFRRAICTFADNSRHASPWAAKLYADALARGCDHPHAVRVLARAWIRVIWRCWVDQVPYDPAKHGTARKLTEMTTSAV

SEQ ID NO: 247720 - protein, 331 aa, unidentified
MKKNVFIGIDVSKEKLDIYIYGFNYHFIVSNDTKGLVKLLETSCEITECKSSNFFICFENTGKYSKMLSVFLHTQEITFIMEPALRIKKSLGMARGKNDKVDSKRIALYVYEKRESLEPTILPGEKVEKIKSLLSLREKLIKHRTAYKNGISDLNDCYQEGETKLIKDVQQRLIVNINQEIKKIENEINCIIESDLKMQNNFNLITTITGIGKINAYFLIAYTANFTLFKNARAFACYCGIAPFDNSSGKYSGNTKVHHFANKQLKTLLNMAATSAIKTNGELKEYYNKRVLVLGKNKRSTINIIRNKIVYRVFAVVSRGTPYVNLYKFAA

SEQ ID NO: 247721 - protein, 350 aa, unidentified
MIIIGADYHPGFQQIAWVDSESGELNELRLEHREGAEKFYRDLGAQGMKVRVGMEASGHARWFERLLAELHFELWIGDAAEIRTKRVRKQKTDRQDALLLLRLLLEDRFPRIWVASGENRDLRQLLWHRHRMVQTRTRLMNQLQAVALNEGLRCKKRLWREVGREQLEGFRLAPWASRRRRDLLELLDRLNPTIAELTEAIEQEVEKCPEAQRLRTHPGVGSLTALAFVLIIGKAERFQCGKQIASYLGLVPSEESSGDRRRLGHITKQGNSLLRFLLVEAAQVTVRSDQEWRSKFFHLALRRGRKIAKVAMARRLAVRLYWMWRKGWDYEQLKKFGSHAGQPGHRHGVH

SEQ ID NO: 247722 - protein, 424 aa, unidentified
MVKIMKQLDEEFAAYIGLDWADQTHFLSLCEADSQKVERYKLDHKPEALVQWISDLQQRFPGRRIAVALEQSRGALVYALMNYEFLVLYPVNPKALAKFREAFYVSGAKDDPIDSDLLLELVTLHRNRLRAWQPDDELTRTISLLVEYRRELVDTQTGLTNRLSDLLKLYFPQALEWAGELATVQACDFLQRWPTLAQVRQATATELLQFYSAHGCRKAALIEQRLRQIETAQPLTTDGAVITASVTMVQATIAQLRPLLVSLKQMDKQIAELFAAHEDHQLFSSFPGAGAALAPRLLSAMGTNRDRFVTAQEVQQLSGIAPVIQRSGKTCFVHRRFACPKFLRQSFHEYAAQSIRWSPWARAYYDRQRQRGNGHHAAVRSLAFRWIRIIFRCWQNRIPYSEETYQQALRRRGSLLSQLIIAQT

SEQ ID NO: 247723 - protein, 421 aa, unidentified
MEHDAGIDVSLECSSVCVVDGNGKIVRETKVASEPAALIGWLSSLGFGLGRIGLEAGPLSQWLYMAMKQAGLAVELLETRHVRDAFKAMPVKSDRNDARGIAQLMRLGWFRPVHCKSMAAQEVRAVLTARKLVQSRLLDVENSLRGILRGFGLKVGKTTRTNFSGRIRELVKDHLNLKTIGEALLSVRAVLLGEFNAFEKQVRAMSRLNANARLLMSTPGVGQIVALTYDSAIDAPARFRSSKRAAPLVGLTPKKYQSGETDRSGRISKIGDAAVRAALYEAAHIMLTKPIKGCPRLKSWAMRIARRAGMNKAKLALARKLAVILHRMLVTATPFNDAAAAACSGGATQFSGEVTTPVLPEAKSLAGTRDQVRPPRESSTPSQDAITPTADWPTYPLRTPSGDGLVPIPDRSTSPASGSRK

SEQ ID NO: 247724 - protein, 323 aa, unidentified
MNDNMIQQDANLPCVGMDIAKDKFDVCFELKKKTVCFSNNANGFEKLIKKLPDCGTCLIVLESTGHYHRKLTVALLAAGHLVSVVNPKLVRHYAKALGIEAKTDDIDARVISQFGFQIQPRPLAKTPVKQEQMQELVIRRKQLLDHLTAETNRMDSVRLKSVKRSIEKVAKLFKEQIADIEKQILDLIESDDDFKRKADVLVSIPGVAKTTAANIIAELPELGQLNREEISSLVGVAPFNCDSGKYKGQRHIRGGRKRLRSSLYMAAHNARLHNPKFKEYYNDLITRGKPFKVAMVAVMRKLLVIMNTMIKTNTTWNAHLIES

SEQ ID NO: 247725 - protein, 374 aa, unidentified
MKEFSKYVGLDVHKDTIVVSIADAGRSKARHYGTIKHTTAAVSALLKKINAEGEVLELCYEAGPCGYGLYHQLTGSGHECQVVAPTLIPKRASDKVKTDRRDSLRLAELLRAGELTPVWVPDSDQEAIRDLVRTRDDFKVSQRQVRQQLLAFLLRHSLRWTGGKQNWTQGFWRWIEALEMPSAHQQFALKEYIDAVRRHGMQIQAIEKQMLVAKQGWSLEPIVDGLMAMRGINLVSSMGLMAELGDLSRFSRPTQLMAYLGLVPSEHTSGDSRQQGGITKSGNGHVRRLLIESAWCYRFTARKSRDIEARAQRTSPEVQAIAWKAQKRLNARYKALSERGLSSCKVVTAVARELCGFIWAVVQQVRDEQQRAVA

SEQ ID NO: 247726 - protein, 324 aa, unidentified
MTDAILGIDVSKETLDASCARGQRRQSRTFSNSPEGWKLMLAWLKAMGSKQAHACMEATGRHSLGLALALHDAGHIVSVVNPAQIRDFGRTKLGRNKTDKVDAALIREYAELLKPGPWTPPSPAMRTLNELQTVRAGIVGSRTEWKNRIGSGLGDSTATKLAAATIEHFTVQLQAIDKAISETIDGDAELRGRCDLLLSVVGVGETLAALLLAEMPEPGILRRSGELVAYAGLNPSHHRSGTSIDRPTRISKIGNAALRSSLYMPALSAMRYNPAIAALVARLKSAGRLKPKQIVVAAMRKLLVICFGVLKTGKRFDPAIAMPA

SEQ ID NO: 247727 - protein, 431 aa, unidentified
MLTLNNLYMTTNTTFKATIGLDWADQKHDLWIQPADSPKHEHRVLEQTPEALHSWVAQMRQRLQNGPIAIAVETSRGPIISALMAYDFIVLFPINPKALKDYRAAFAVSGAKDDRTDAQLLEEFVRLHQNKLRALHPDDELTRKIGGLSEKRRSLVDHRTVLVNQLHSTLKTYYPLADMLLGREMNSPMAAAFLARWPELSALQTAKAQTIREFFYKHNSRSEDKIQERLKAIKNAQPLTTDRALIEPARALVLALVGMLKALHKAIVGFDQAIEQSMDRHPDAPIFRSFPCAGPATAPRLLAAFGTQRDRFDSAEAVSQLYGIAPVVIQSGTTRTVHMRHRCPKFGRQTFHENAGLVAKSESWARSYYLRQRERHEDKHHQACRALAYKLIRIYFACWQNRTPYNGEIYHKALRKNGSPLAALLDRNSSE

SEQ ID NO: 247728 - protein, 379 aa, unidentified
MDHAITDTSAETVLRGALELSKNSWLLALQLPDRAQPSLYPIRGGDTEGLMGKLTAASDRWAKVSGKAPSIVLCYEAGYDAFWLARFLKARGIECLVVDAASMQVNRRARRAKTDRIDVGMLLRALIAWGQGDRHVWSVVRIPSVDEEDLRRSHRERDRLVRERTAHINRIKGLLFGQGIRDINVKSKYKTLQIDKLVTGEGHPLPPRLASEITREIARLALIQEQIAALERERDQAPTPCKATERKRVQLMGLTGIGPAIAAVMTREVYYRQFDNRQQVAGFLGLATSPHDSGDVERSQGISRAGRGQVRGIMIQAAWLWLKHQPKSAITRWFVQRTAGQSGRIRRIMLIAVARKLAIALWRFLEQGLVPQGAMLATR

SEQ ID NO: 247729 - protein, 391 aa, unidentified
MIFVGIDVAKDKHDCFILNSEGTVLADVFTIANNRIGFETLLSRIQSCSQGESKIKVGLEATGHYSYNLLGFLLDSGLATYVINPLHTNLYRKSLSLRRTKTDRIDARTIAMMLMSDVDLKSYSNTAYHNEELKSLTRYRFDKVKERAKLKSSVARLVNILFPELEKLVSSLHIAVVYALLSNYPGASYIANANTEELAEILCTASKGRYTKSKTAEIQVAAGVSIGSKMPAKSMELKHTIALIRELDKEISEVESAIDKITSQMDSPIFTIPGIGRHMSAMILAEVGDFSNFASADKLLAYAGLSPSTYQSGQLQNCYAHMEKRGSRYLRYALFNAAKYVCLWCPTFSAYLEKKRSEGKHYNVAISHSAKKLVRLIFAMQRSGKAFLADY

SEQ ID NO: 247730 - protein, 438 aa, unidentified
MSNKVIFNLDELFISVGIDVGADFSWMSIALPNQQFVGKPYKILHNSIDSLTTAVSKIKEAEELYSLESRIFLESTGIYHYPLFCYLRDKGFNCSVINPIITKNSTNINIRKVHNDRFDSKKAALVGLKPDLKVSLMPSDLALNCRNLCREYYDLMDNRSAYVNKLQGELRMAFPQYLGIFSKVTVNTSLTLLETYTSPSAFLEADKQEIIDIIKSTARFGLTYTQNKYNAIIQAATDANQFGYIIDSNIKRIRLYISFIRKYDEEINSILESLHELVDANEDADFVKQIHLIETFKGAGFLSAVSIMGEIGDFSAFSKPKQLFAYFGLDPAVKQSGKFEGTKVQMSKRGSAIARRVIHTLTLQSISISRNGEAKNPVLREYYLKKCDSKPKLVAMGAVSHKVCNMIFAILRDNKPFKIIAPQEHIKQYNAAKCDIAA

SEQ ID NO: 247731 - protein, 344 aa, unidentified
MRSINKKFMQVYGIDLSMEKFDVNYIDQNGQERKKEVKNKLNGISKFLATVPTDAILCAENTGTYSDMLVFLSNQRGLSISLVPGYTIKHSLGMVKGKSDSVDARRIREYGERFQDKLTFKQYDREEMVELRSLYSLRSQLVKSRKILRTGEHSRSNVPMQSISVKKHTNQALAHLDAEIKEVEKEIEDIIKSDCELSENYELSVSIKGIGPVIATDLIIKTGNFKVIDTARKASSYAGVCPFPNESGKMVGKRKTSPFADRKLKALLYMGAKSAVKHNTEYRLYYQKKKLEGKPHYLIMNNISNKMLRTIYSVVKNKTPYSQDYVCPDPRELKNSNSSSKKVA

SEQ ID NO: 247732 - protein, 398 aa, unidentified
MTESSDYESVQVFIGVDVGKDTHHAVAINRSGKRLFDKALPNDENKLRSLISDLKQHGQILLVVDQPATIGALPVAVARSEGVLVGYLPGLAMRRIADLHAGEAKTDARDAAIIAEAARTLPHALRTLKLADEQIAELSMLCGFDDDLAAQTTQASNHIRGLLTLIHPALERVLGPRLEHPAVLDLLQRYPSPEKLASLGEKKLAAQLCKLAPRLGKRLAADIAQALAEQTVVVPGTNAAAVVLPRLALQLITLRKQRDEVALEVEQRVLAHPLYPVLTSMPGVGVRTAARLLTEVACRAFASAAHLAAYAGLAPVTRRSGSSIRGEHPSRRGNKALKRALFLSAFAALRDPLSRAYYTRKMSQGKRHNQALIALARRRCDVLFAMMRDGTFYTPQGS

SEQ ID NO: 247733 - protein, 368 aa, unidentified
MNTVKFIGMDVHKKTITIAIIDEGRKNQPRIYGAIANELQALDKFCRKMVSTSTRLHFVYEAGPCGYGIYRHLTQKGFDCMVAAPSMIPKKNGDRIKNDHRDAAMLARLHRAGELTAVYVPDARDEAMRDLTRAREDAVAAARKSKQRLNAFLLRNGLTFAGRTKWSKAYFRWLSDITMPYPAQQVALQEYIDTVHENLQRINRLTDQIRQLVPHWRFAPVVSALQAARGVSLIVAVTVLAELGDLSRFDNPSELMAYLGLVPSEHSSGESIKKGAITKTGNGHARKALIEAAWAYRMQARVSRALLKRQQGVPERVCQIAWKAQLRLCARFRRLTARGKTKQKVVTAIARELSAFLWAMAKQLQPVA

SEQ ID NO: 247734 - protein, 520 aa, unidentified
MAATRSRRRPSRPRIPTSVGKPRGVLHPRVQQVGPEHFGIVCFDCHKVSSKFLLADFYGRCLIPPTVVQHNRPDLDSAIAQIRLAFEQHQVRDGVVAIERTGRYHRVVQRAFAASGFETRILHPFVTKQYRQPVDPGNKTDDADLAAIHRATVTGCALLEATRDEAWTTLQLLIRHRRDLVRKGAALNCQIRDHLEAALPGYAACFDKLWESAIPWHLLRLYPTAGRLHEAGVVSLCQSLRQAGIRFQQRTIQTVVDWALQAAAGDIAAGQHLRIALALYDDRQRKTQEIQALERDIAARLVQTPYVLLLSFPGINVVSAADFAGEAGPITHYLNAKSITGRAGLRPSRYQSNQVDLANGPLVRNCNHALRAAILGIADNLIVCNHHFQALATQWAAQGKDPRDTRIKVGMRFCRIAFQMVAGRQVFRHPCIQGRHYILDKLTAFHREHDTGMADVLRDLQAAIGQLPPRAYAAEAKPLAEELQRIQDGHRRGPQVLGDILPIVLARLGVGVVQSTESGE

SEQ ID NO: 247735 - protein, 462 aa, unidentified
MTASPCRVHGLGGGVTSSGGTDRPLIRGMTTGLSPGREALRNVDVAISAVAGPDEYDRRTLHVIDTRDIDVYLGLDVGKGEHHATAVTPAGKKAFDKRLPNSEPKLREVFAKLQAKHGTVLVVVDQPATIGALPLAVARDMGCQVAYLPGLTMRRIADLYPGEAKTDARDAFIIADAARAMPHTLRSLDLDDATVAELEMIVGFDDDLAAEATRLSNRLRGLFTQVHPHLERVLGPRMQHPAVLKLLSQFGSPAQIRKAGRRRLITLIRPKAPRMTERLIDEVFTALDEQTVIVPGTDAAALIVPSLADSLQAVLDQRKLLAHRIEELLEAHPLSQVLMSMPGIGIRTGARILIDVGDGTNFPSAAHLAAYAGLAPATRSSGSSIRGEQPSRRGNKQLKRAFFLSAFAALADPTSRTYYDKKIAQGKHHTQALLCLARRRADVLFAMLRDGTFYQPPTPITP

SEQ ID NO: 247736 - protein, 344 aa, unidentified
MPVSVIGIDLAKTVFQVHGVDDSGRPILLKQLRREQMMSFFVQIPPCLIGMEACASAHHWARKVQGLGHNVRLMAPHFVKPYVKSNKNDAADAEAICEAVRRPTMRFVPVKNIEQQAALALHRVRQSLVKSRTAQANQIRGLLAEYGLVMPARISSVRSGVPKLLDEAAGWLPGVFSELISGLLDHLGSLDQRVMVLERQIQLWHRDNAFSRRLEDVPGIGPLTASALVASIGDAKQFSTGRQLAAWFGLVPRQYSTGGKPRLLGISKCGDSYLRTLLIHGARSALRTAHRKSIGERWLDGLLERRHRNIVAVALANKNARIVLALLARDRIYDDNFERPLQTA

SEQ ID NO: 247737 - protein, 360 aa, unidentified
MASATLTRPEGADKPDVVIGLDTHKEFHVAVALAPNGGRLGECSIPANRQGYSVLQDWALELGSRPVFAVEGTGSFGAGLCRELLAVGYSVVEINRPDRSTRRRLGKDDAIDAEAAARSFLAGTATIAPKGGTHLVEMIRLLKGNKDSASKSRTRAINQIKAILVTAPAVLREQLEPLANDDLMVTCTAFRVPLVDSPIAAAKKALRFLARRVLRLEREIAELLDNLDQLTQQACPGLRQTYGIGTDGAATLLVTVGDHPERLRSDAAFASLCGVSPLPASSGKTNRHRLNRGGNRQANATLHRIVVVRLRWHEQTKAYAARRLKEGRSKAEIMRCLKRFIAREVFHTLLGRPPVRTAAA

SEQ ID NO: 247738 - protein, 415 aa, unidentified
MSNPLVVGVDVHRQTNTVCLMDLAGHVLGRRRTIDNNRPGAALLVDHLAQQMAAGDFDTIQIAAEATGWYWWHFFQTLSRDPTLQLWPLQLYPLNPRLTANFAKTYVDRDHTDQGDAFVIADRLRMGRDLPPPYQLDARYLAVRLLTRYRLHLVHTLAREQAYALSILYLKASEYGRLKPFGNLFGAASRAVLQEFASLEEIAAVPFDELVEWVDVRGKRRFADPQHNASTLQQVARDSYLLPEALRLPVHQVLSWSLQHVTFLEGQLKRLDGAIAEQLECIPHTLETIPAIGPVFAGGIVAEIGDIARFEYDQAKVAKFAGFKWKKHQSGDFTAEETHLTRTGNRYLRYYFCEAANAVRMHDREYGAYYERKYHEVRQHQHKRAIVLTARKLVRLVVRLLTSHQAYQPRRSASS

SEQ ID NO: 247739 - protein, 387 aa, unidentified
MGQVIIGMDPHKRSATIEVISDREKVLAQGRFSTDRDGYQTMLKLGRQYKDRIWAVEGCNGIGKHIAQRLVADGETVVDVPAKLSARARVFDTGQGRKTDPVDAHHVAVAALRSKGLRRVAVDDVTVALRLLVDRRDGLGRAHTDLLNRIHKLLLELLPGGAKKYLSAAQARALLTTVRPRDLVGRTRRRLASELITELVQVDKKTKAADKELRELVEATGSSLQDLHGIGPSGAARLIGDVADISRFASRGHFASWNGTAPLDASSGDQSRHRLSRAGNRRINRTLHIMAVVQLRNDTEGRAYYRRKLAAGKTPMEAMRALKRRLSDVVYRQMVNDAKTAETGPGGHVGAALKSSAADLIPMIDTSDKSLPGPAKPQPRTQLLAAS

SEQ ID NO: 247740 - protein, 429 aa, unidentified
MQNESTPGARGPVFCGVDTHADSHWLCVLDWRGRKVLSRQFPADAAGYEALAGAIAAAGEPACVAMEGTSSYGAGLTRHLASLGMPVREALSPARMQRRRPGQGKCDESDAERAARAAMSGSKLGTPKSQDGWVDGVRCMLAARSGAVKARTSAINTARSLLTTAPEGLRSRFRGMAGPRLMEELPSVRAEGALGAALGALADLWAAARDAALDMERAIEASLEENCPALLAMYGCGPVSAAKLAVAAGDNPGRLRSEASFAAICGACPIPASSGKTVRHRLNRGGDRQANSALHEIARQRVMRDPETAEYAERARGRGKSDREVMRCLKRYVAREAYRALMRPHEVRRPEDASGLVAARRAARVSQVRAASILGTSEKYISMLERGQRELKPIRRAYEAWVEAGLPLDWDRQAFEAERKMDSKKHLAK

SEQ ID NO: 247741 - protein, 377 aa, unidentified
MDLLHPRCAGLDVSKRDAKVCVRVASGTRAAARSTVTTWGSVTNQVLALREHLIAEQVTLVVMEATGDYWKPFYYLLEDAPFEVMLVNARHVKNLPGRKTDVSDAAWLAQLGAHGLVRASFVPPAQIRQLRDLTRTRTTMVRERAKEIQRLEKLLEDTGIKLSSVASDISDVSGRLMLDALISGQRDPAALADLAKRRLRSKIPALTEALTGRFTDHHGFLARVHLDLIDQRSHAIAELTARIEVVIEPFRGARDLIVTIPGISVLVADVIIAETGADMHRFPTAGHLASWAGTCPGCNESAGRIKSTKTRPGNPYLKGALGIAALSAARSHDTYLAAKDRRIASRHGPVKAIVAVEHAMLTAIWNMITKHRGSGRH

SEQ ID NO: 247742 - protein, 419 aa, unidentified
MKRTKHKNSTLVNEKTLIVSVDIGKEIHYGYMRAPGGVEVKPFPFRNTGGGFSEFMKKIRTFQRSRKLDEVVVGFESSGCYAEPLCHYMRKRGVRLVQTNPMHTKRLKELTGNSPNKTDRKDPRVIADIIFLGHALSVIVPEGAAAELRRLTQARESAVKRNTAVLNQLHTCMFLLFPEFIEVMNSISSASSLYLIERYPTPKEIIALGIDSLAAVLRKVSHGKLRRERASELFAAARESVGITEGTAGIIMEIAHLVEMIRNTQRFIRNAEDQMAICLTAIPYNHCILSIKGIGVVTAAGLIGEVGDFRQYGTVREITKLAGFDLYEVSSGRHKGQRRISKRGRSAMRRLLYYAALNTVKSDGIMYEVYHRMLSRGMPSTKALVAVARKLLALIYALARDNTVFIEQYTHISTSITAA

SEQ ID NO: 247743 - protein, 446 aa, unidentified
MDVVFLRCAGLDVHKKSITACRIVPDPTGQEAEGIAELRTFGTMTLELLALADWLTEASITHVAMESTGEYWTPVYNLLEGAFTVFLVNAAHVKNVPGRKTDKADARWLAKLRRFGLLQASFIPPKGQRDVRDLTRYRTKLVQERVREVNRVQGVLERANIKLASVVSDIMGVSGRAMLEALIAGKADPATMADLAKRRMRSKLPLLEQALTGVVRDHHRQLLAMQLAHIDFLDEQIDALNNTIETALRALSADEPLSPQPPPRAAASSALPLTVSTPLTFTRAVELLDTIPGVDQRGAEVIVTEIGIDMSRFETAPRLAAWAGVAPGNDESAGKQRSGKTRKGNRPLRAILTQLAHAAVRTKGTYFSALYQRLAARRGKQRAIIAVAHSMMRSVFHMLSRNEAYRELGANYFDERRRHYTVDRLARRIEHLGYRVSLEPVAAPAV

SEQ ID NO: 247744 - protein, 358 aa, unidentified
MSGIVTIGLDLAKSIFQIHGVDNTGRTILRRRLSRHELVPYFAKISPCLIGMEACSAAHHWARELSRFGHSVRLIPPQYAKPYVKRNKTDAADAEAICEAVARPNMRYVPIKTLDQQSVLSLHRVRALFVRQRTAAINTVRGLLTEFGIIAGKGIGRIAELRHRANEADNEALPDEARAAITEVFEHIDALTKRIDATEAKIVAWHKSSEASQRLASAPGVGPITASAIVASVGDARQFRSSRHFAAWLGLTPRLHASGGKEHIGRISKGGDRYLRALLIHGARDRRHQLPQGRSTTPLAQTIAHTEVRQRCGGGGRAQNSTGALGNDHPGRRVSKDCRSGGMRGHGADKHTGAGLRG

SEQ ID NO: 247745 - protein, 350 aa, unidentified
MLIIGCDFHSRFQQIAMLDPQTGEVMERRLEHENGEARRFYAGLPTPARVGMEATGYAQWFERMLAEQGHQLWVGDAAGIRAAMVRKQKSDSRDACHILDLLLRNKFPRIWIPSTEERDVRQLLRHRYKLVCLRTSLKNQLHAMAMGHGICRKKKLWTAVGRKELQGLSLGPWASRRRQQLLDLLDQLEPVLEELDRAVIQEAEKRPAAVRLMTQPGVGPVTALAFVLTIGPVERFQKSRKLVSYLGLNPSENSSAGKQRLSGISKQGNSMVRYLLVEAAQTASIYDPELRRDYQRLKFRRGRGVAKVAIARKLAVRLYWKLRKQFSPVPPAPMQGSPAVSVVGESLSSF

SEQ ID NO: 247746 - protein, 374 aa, unidentified
MTVKDCTSVKEFRQLRKEIRGSKDHLIVGIDVAKDDHRAFFGTANGKTLLKRLTFKNDIEGFEKLLARVKEMKVKHRLDELVLGLEPTANYHKPLGDFLIKCGHMVVFVSGVSVKRNRELLDGRWDKNDTKDSANVADLISQGKCLYYEYAPLLLKDLRGLLSLKRRLKKQEHGLRIRIRNSLLAQYFPELDKYYSKWEPEVLSVVRWCLDPSVIAGLEYDQFVSLVSPGSKNIRQQGRLEWIWKKAVESIGCDAGEAAEFEAKVMVEELRHIREVIKETDAKIKDVCVRFPEYNYLLTIPGFGPDVSSKVLAGIGNPFRFNSLSQVLKMAGMDLNANRSGKSSNTAVPVISKKGSPHLRYALYQAAVYRVSQK

SEQ ID NO: 247747 - protein, 456 aa, unidentified
MPRRRRPSTRPVTMPILHPDAGGIDVGATEIYVCVPLDRDPQPIRRFGTFTEDLHALADWLTRCGVTSVAMESTGVYWIPLYQILETRGLDVCLVNARHVKNVPGRKTDVQDCQWLQYLHSVGLLRASFRPPETVCAVRSLLRHRDTLIQLAATHTQHMQKALSQMNLQLHHVLSDVTGVTGLAILDAILAGERDPQVLARHRDGRIKASRETIAKALVGDYRPEHLFTLRQSLASYRHYQCLIAECDGEVETLLGTFASQIDPAAHPLPPAPPGRRKPHRKTPPFDLRAELYRVLGTDLTQVPGLQTPTVHTLFAELGADLSAFPSGDHFASWLGLCPDNRISGGKVLSVKTRHVKHRVAQALRLAAQSLSRSQSVLGRFFRRMRAKLGAPKAITATAHKLARIVYHLITTRQPYQESRLAAADAAHRRHSESRLRAQARALGFQLVPAPEQAVS

SEQ ID NO: 247748 - protein, 325 aa, unidentified
MSSPEVIGIDVSAATLAVAGKEIGLRPAYENTTMGRNALIKALRPGRQRVRAVLEATGIYFLDLACELAAAGVEVMVVNPKAAHHFAEAILQRRKEDPVDAAMLREYGRRMDFVPWTPPAADLFALRAIAREAQAQSKAVTAAKNRRHALAATQLTPAELTALLDRQIAQAEAIIDQLIAAALKQIKANPELRRLFERTDSVPGFAAKATVIAMAELIVLPPMTARQWVAQAGIDVCEERSGTSVQRRPRISKRGNKRLRDALFYPALTAARCCPEARAFVDRLVARGKTRLQAIVALMRKLLHAIHAMWRNDEDFDAKKLFAQA

SEQ ID NO: 247749 - protein, 424 aa, unidentified
MKVTYQTCCGVDVHKSFLVATIVKTTGGIEPSYQKKRFSTFNNSILEFKQWLLDNDCRDVCMESTGKYWIPVFNLLENEINVVIANPKWVKAVKGNKDDAKDSKWIGDLFRLGLVKGSYIPCRKIRILREYSRYRYKLVSCRSSEKNRYQNALTVCNVALDSVVSDIFGKSSTSIIDYLLEQSGTSINHEEIASKLLRSLKSKEDAVIESVEGYQMTDAQKYRMRLIRAHMDYITAEINDVDKMIENMISSNPDFENAVRFLCTIPGVKHDSAVTIISEIGTDMSQFSSSKRLCCWAGLTPGSNESAGKKKSVRITRAGVYLKPALVQCAHAAVKSDKSPYYKKKYDSLVKRRGKKRAIIAIARMILTAIYQMLSTGEQWNPSDLYKIDMPAPLLEKQKAKAIKQAKKLLQREGLLPPDEPLAS

SEQ ID NO: 247750 - protein, 338 aa, unidentified
MKLYCGIDLHSNNSVIVILDEADKVIYQKKLANDLDLILQQLLVYINDIVAIAIESTFNWYWLVDGLKEAGYEVKLVNTAAVQTYSGLKHTDDKDDARWLAHLLRLGILPTGYIYPKEERAVRDLLRKRSQLVRQSTTNILSGQNILTRNTAHSLSASKLKKINDEEIDKLLDDPNIALALKSNINIIKSLQTNIAEIEQAVVSQVKLRPEYKQLLSVSGIGQALGLTIMLETGEISRFNKVGNYSSYCRCVKSERLSNGKKKGENNRKNGNKYLAWAFIEAANFAIRYNDKIKAFYQKKKAKTNGIIATKAVANKLARACYHIMKDQVPFDVNKAFI

SEQ ID NO: 247751 - protein, 328 aa, unidentified
MSEQINAIVGIDMSKKKFDVALLRDNKLKHKVFSNTKSGHESLLTWLHKNKVPAAHLCMESTNIYGEALAEHLFDQGYTVSIVNPARIKGFAQSELSRTKTDKADASLIARFCLAMAPVAWTPDPQEIRELKALVRRLESLMEMRQQEVNRLHVAQDIVVSPLEEHIDYLDQEIKTTQQHIQEHIDHHPDLKAKKALLQSIPGIGEATIAVVLSEFANIEKFRNAKCLAAFIGVAPRERQSGSSVRGRTRMSKTGRSQLRKAFFMPALVALRYNPILIQLKQRLTNAGKSKMTIVGAAMRKLVHLIYGVLKSGVPFDADYVKKQTGSA

SEQ ID NO: 247752 - protein, 346 aa, unidentified
MEYVALDVHKNYTWARVENSQGARLYESRLAHGHGTIKNFVNRWSGRSPVAVETVGNWYWVVDEIEAGGGTPQLVNARLAKLMMGNVNKSDKLDCQGMNRLQRTGTLPTVWIPSSVVRDQRELPRTRMVLSSQRTQLKNRVHATLGKYGHTVQGASDAFGKKGRKIIEELLVKLPPHTQQTLRVVLDELDHVTDNLKAIEQQMIEIFSPCPQTDWLKSLPGVGDILAVVIFTEIGTIERFSRAEQLASYCGLVARENSSGGKIRFGAVRRDVNVYLKWAFVEAANSAVLNAGRCDYAHVSRLYGRLKPRRGHGKAKVAVARHLAEACFWMLKKGEPYREPMPSTQR

SEQ ID NO: 247753 - protein, 441 aa, unidentified
MDDAEVLELEQRVEQVARVAAIDVAKASGMVCTRLPSEANAARRVQRTWAVSATAGEIMALADHLVCQGVELVVMEATGVFWKPWFYLLEDRGLAVWLVNARDVKNVPGRPKTDRLDAIWLAKLGERGMLRASFVPPEPVRRLRDLTRLRRTLTEERTRYRQRVADVLQDACLKIADPRQGLTDLFGVSGRAVLAGLVAGQRAPAVLLAPVDPRLRRKQAYLEAALVGRFTGHHAYLIGKLLDLHDRLEADIGELNARIEALIGEIDPGPPPDDGHPGRRPLLERLDEIPGVSPEIAADIIGEIGVDMGCFPTPGHLSSWAKLTPRTIQSGARNTHGKTGKGNRWIKGPLGQAAVAAGRTDTFLGARFKRIVKHAPYKKAQVAVARNILEIVWVLIADPDARYSDLGSDWHARHINQARKTRQAVRDLEQLGYTVTLAKAA

SEQ ID NO: 247754 - protein, 350 aa, unidentified
MEAYDGPQIVGMDLHRRRSVLVRMAEDGHKLSTARIASSPARLAAEIKRAGLHPKVVLEACYGWYWAADTLTAAGAEVHLAHPLGVREFSHRRVKNDELDARDLADLLRMGRLAEAQLAPAEIRELREITRYRGKLVQLRTSCKDQVHGVLAKLGIEVTCSDIFGAWGTQWLDELPLPQPYSWKVASLRQLTGWLSAEITVLEQVTADLLAGHDAYRAVQALPGIGPVLGAVIVAEIGDITRFRHPARLCSWAGLTPRHYESDTKVVRGRITKQGSRPLRWALIEAVQRTPAGTPIHQARDAIIARRGPQARNIAKVAAARKLLTYVFYAMRDGHVRALDTPGAAAPETA

SEQ ID NO: 247755 - protein, 349 aa, unidentified
MNKHKTIGIDLAKRVFQVCVVDTRRPRAQVNKEFKRHQVLDFMRRQPACRVFMEACGGSHYWARQLQALGHSVALISPQFVTPFRKGHKTDANDALAIVEAGLRPDMRFVPLKSVEQQDIQSLHRIRERYIHQRTQLINQVHGLLQEYGVISGRGQKALKQRVWLALEDADNELSMLMRDLIAEQMAELDRLNERIQSLDKRVEQMSRAVMPCRQLLAIEGVGPVVATQLYSALGNGNAFKKGRQASAYLGLTPTQHSSGGIAKIKGIGRTGQISLKAALIRGAHSAINTVGDKQDAKSRWLRALVARVGKNKAAVALANKTVRTAWAVLHSGQSYCREFNDGSALMAS

SEQ ID NO: 247756 - protein, 316 aa, unidentified
MKQPGSATYIGIDVSKATLDIGVIPTGETWSISNQSDDIAALVKKLRRLKPEKIVIEPTARLELPVVGALAAAGLPIVVVNPRQVRDFARASGILAKTDRLDALVLARFGEAVTPEIRPLKDEDAQALDALMTRRRQLGNMLTTEKNRLGNAPGPVQEDIKDHIVWLEKRLKDLDDDLDGTLRNSPVWREKDALLQSVPGVGRVLSLSMLSQLPELGQLDRRQIAALVGVAPFNCDSGSFRGRRRVWGGRSHLRSVLFMATLASTRYNPVIKTFYERLRASGKPSKVALTACMRKLLVILNAMIKSQTPWRYQVID

SEQ ID NO: 247757 - protein, 415 aa, unidentified
MEDLGLRALYRRVAGIDVHRMLHVVTALIEQADGSLQRHTREFGGFRRDCRALAAWLAELGVELVVMESTGIYCKSVHAHLENAGVAAWVVNAHMIKHVPGRKTDMADSEWLAVLARFGLVRASFIPPKDLRELRLVSRYRRKLGAMCASEVNRLHKILDDAGIKLGGVVSDINGVSARAMVSALIEQQPIEHMLGLARGKLKQKREDLGASLEGDLSARHLFVLGHIHAHIETLQREIADLDRYLLTAMLPYAWAHQLLQTIPGIDEIAAAMILIEIGDDMARFGRAERLACWAALSPGNDQSAGKRRSGRTRHGNSIIRFILCECANAARMTKSTLAAKYRSLMVRKSHKKAIVAVAHKMIRLIFLMLTRRQPYIDQAIDYAAISAKKNAPRWIRQLKTIGRWPSPKPAAASA

SEQ ID NO: 247758 - protein, 343 aa, unidentified
MSKLYAGLDVSLELTSVCVVDVEGRIAAEAKVLSDPAAISAALLALDGSFERVGLEAGPLAQWLYYGLKDAGLPVCCIETRHAKAAIAAMSHNKTDRNDARSIAQLVRSGWFKSVHVKSVESQELRTLLTSREFLVNKLRDHENEVRGALRPFGLKVGRVGARAFAPRVRELVAERPHLALCMEALLTTREALVKQLAALHAVLLRTVKNDELCTRFMGIPGVGPVTALAFKTTIDRPDRFRRSADVGAHLGLAPRQFQSGETDRRGRIAKTGDAFTRTALFAAANVMLSRSTQWTALKHWGITLAKRSSLKKAKVAVARKLAVIMHRMWRDGTPFRWTAQEA

SEQ ID NO: 247759 - protein, 341 aa, unidentified
MAQASTIGLDIAKRVFQAHGADATGRVVFRKRLVRAKVLEFFAGQAPCLVALEACGGAHHWARELGKLGHTVRLIPPAYVKPFVKRQKNDVADAEAICEAAQRPGMRFVPVKDEAQQANAVVFRARDLLVRQRTQCINALRGHLAEYGHVAPQGPAHVDSLVALVEDPKSSVPGSARGILQVLIRTLNALEEQLKELDAEITRRAKADPVARRLMTIPGIGPIAATAVTALVPAPEGFRAGRDFAAWLGLTPLQKSTGGKRKLGAISKMGERTIRRLLILGASAVVRWASQRGTAAGSWLARLLARKPRMLVTVALANKMARIVWALLVKGGTYRAPAVAA

SEQ ID NO: 247760 - protein, 345 aa, unidentified
MEQISRIGMDTSKHVFQLHGVNAAEAPVLRKKLRRKDMIAFFEKLAPTVIAIEACGASHQLARLLQSFGHSVKLIAPQLVKPYVKRGKNDAADAEALCEAMSRPTMRFVTVKTDEQQAALMLVSVRDRLIRNRTQLTNAIRGYAAEFGLIAAKGMAHVIPLLERIQTDESLPVLAREMFAIQAKEYTQIQAQIDEADAKLKAWLKADERGKRLAKIPGVGPIGAALLTMKTPAPEMFQSGRQFAAWIGLTPKDHSTGGKVRLGVITRAGDEKLRSVLVAGATSVIQQGQRNGRMLPWLAELLKRKSRKLAAVALANKIARIAWKLMSSGETYIAKSALTTLAGAV

SEQ ID NO: 247761 - protein, 351 aa, unidentified
MPRKTDTAVVRTIGIDTGKNTLHMIGLDERGAIVLREKVSRQRIAARLVNVPPCLVGIEAGMATHYVARQLSSLGHDVRQVPPTYAKPYRQGHKNDFRDAHAVAEAVQRPSTRCVPIKTDDQLDLQALHRVRSRLIGDRTAVINQLRGFLLEHGIAVRQGHRFLRQQLPQILATRTDVLSPRMVRIAGDLVGDWDYLDERIERVTDEIESLAKTDVSCGQLMTAPGLGPIIASATVAAIGNGAAFAKGRDFAAWLGLVPKQMSTGDRTILGRITKRGNRYLRMLFIQGARAILLHPASWAKHSFGPWLTAAAKRLHHNVLTVALANKLARIALTVLAQGRNYEPRVTPAAA

SEQ ID NO: 247762 - protein, 354 aa, unidentified
MIIIGVDFHPEFQPIALLNTTTGEVEEKRLAHPEEAEKFYRALAGAGETVRIGMEASGHARWFERLVAELQFDLWIGDAAEIRTKRVRKQKTDRQDAQLILSLLLEDRFPKIWVPSWENRDLRQLLWHRHRMVQARTRVMNQLQAVALNEGLRCKKKLWRERGRQQLESFGLAPWASRRRRDLLELLDRFNPAIAELTQAMEREVENCPAAQRLRTHPGVGVLTALAFVLILGDAERFHCGKQVASYLGLVPLEDSSGNRRRLGHITKQGSSILRFLRVEAAQVAVRSLPEWRSKYFHLVLRRGRKIAKVAMARRLAVQLFWMMRKEWNYEQLKKFGSHAGQPGNRHGVQSNTE

SEQ ID NO: 247763 - protein, 404 aa, unidentified
MWYVGLDWADTHHDVEVLDEAGKRVGVRRFAHSHQGLNELKQFLLNIAPEVEHLACIVETNHGLLITFLLEAGIPVYPVNPKTANQLRKAAGAKTDQIDAHLLAKIGRLELAELRRLEPDSPIVQELKTLTRDQDALIQTQTRLVNQLTACLKEYYPAALHLFAKVQQRSTLVFLQAYPTPQAAQAASVAELTATLRAGKHTNPTKAAPKIFEELHRPQLVASEVIVRAKSRLLLSLVKQLLVVIQEMASYDKAIRSLFLRHDDQELWRSLPGAGKRLAPRLLAEWGDERSRYADATSVQTLAGTAPVPFQSGKYAKAHKRFACVKPLRNALYQFAWQSTRQEPWALAYYQRKRAEGKSHSMAVRALANVWVRIMYRMWVTKTSYQTATFEAAKRAHAPRPHAA

SEQ ID NO: 247764 - protein, 344 aa, unidentified
MTEVITIGVDIAKSVFQIHAVDAAGEPVIRRQLRRRQVLPFFKKQPPCLIGIEACATSHHWAREISKLGHEVRLMPPRYVKPYVKRNKNDAADAEAICEAVRRPNMRFVPVKTPEQQSVLMLHRTRELFVRQRTSLTNAIRAHMAEFGIVAGIGRNGVEVLLKLITEGEDDRMPAEARACLMALADQLELIKRQIVEADRRVLAWHRSSETSKRLEAIPGVGPLIASALVASIPDPAVFRSGRDLSAWIGLVPKQHSTGGKERLGSISKAGNRYLRQLLVIGALSVIRRAKQLGYTRHPWLVRLLERRSTKIAAVALANKIARIAWAMMARNESYQPSRLSPAT

SEQ ID NO: 247765 - protein, 435 aa, unidentified
MVETRLQVGIDFSTRWVDVCLLNPDDDIPVAQQRFSNSLPGYAGVKQLLLETLATHSYGGCAISGEATGMYWLPFFLPLAADADLQAYEAELYLLNPRWVSWYKKCFAQDHKTDPRDAYYIAHRTRTQSPSVSWQPDTAGLALRSYTRYRFHLVETLTREKCFASAYLFLKANLYRQLKPFSNVFGVTSRALLSDSATFADLTALPVADLAAQLDALSLGKLPDPLHNAQRLQQVVAESFPLDAPLAAAVQHILSATLAHISFLETQIAQAEAWIASALTQYPAIQQLQTIHGFGRTCAAGIGAEIGAVERFLGGTKWDARRRRYRPKNLRDAEDAIAKIAGLWWPRAQSGEFEAEERRMAKSGNAYLRYYLIQGADLLRKHIPEYRDFYARKYAEATKHKHKRALVLTARKSVGLIVGLLHRNEPYRSKEAHQT

SEQ ID NO: 247766 - protein, 322 aa, unidentified
METVNFQQVVKRGCGIDVHKETVVATIDGQGLKRTTREFLTFTSSLTDLKDWLLENGITHVVMESTGVYWKPVYQILEPTELTVWIVNARHVKYVPGHKTDKKDSAWLCKLLLAGLLKPSYIPPKQQRELRDLTRYRKKLIQDIASNKNRIIRILEDCNVKLSSVLSDTSGITATKLIDKLCDGKAITMDDINEVYHKKIQATREELWEACNGFMNEHHIYLLQTIRQNTMDTEKIILELNDRIRALLSPYENILEHLREIPGLGHKTAEDLVAEIGLDMEVFPSENHLSSWVGVSPGNNESAGKKKADAQRTGISKRNLHW

SEQ ID NO: 247767 - protein, 256 aa, unidentified
MSQPNPLCVGIDVSKTTLDIATANNEFAQFTAGNDTDGFELIIAELRKHSVALVLMEATGGLEAAVACSLQAEGFDIAVINPRQAWNFSRAMGYLAKTGRIDAKVLSQMAEVINRHPERERFIKAIPDAERQILAAMVVRRRQLITMLVAERNRLHPAHPQNRKSINTIIKALEDELSRIDEAMNNHIKTHFKELAARLSSIKGVGAMTVATLLSEVPELGSLSRREISALIGVAPVNRDSGTMRGRRIFLAGELA

SEQ ID NO: 247768 - protein, 328 aa, unidentified
MQAITTIGLDIAKSVFQVHGVDANGQVVLRRQLKRRYVLAFFEKLAPCLVGIEACASSHHWARQLQALGHNVRLMPPAYVKPYVKRQKNDATDAEAICEAVSRANMRFVPAKTSEQQSGLVLHRTRHLFIRQQTSVINAIRAHCAEFGIVAPVGRRGVEELLNVIANAKDEQVPAIARACVAALGAQLHRIKQQILEFDRMITAWHRCCETSRRLDEIPGVGPALATALVASVANPRAFRSGRDFSAWIGLVPKQNSSGGKPKLGSISKQGDRYLRGLFTAGALAVIRYAPRHQAPAMAHRIISTAADHGRSPRTRQQNCQNGMGDDG

SEQ ID NO: 247769 - protein, 324 aa, unidentified
MQGVPTQWVGIDVGKQTLAVTILPRQLTFTVPNTAAGHRRLVARLGDQPSCLVLEATGRHHWAIQAALVAAGHPPAVINPMRIHYFRKSEGLQAKTDGLDATLLARYAAQKHPAPAVLRTEAQTRLAEQVRYRDFLVRTRDAFANRAQEAMPRDLQRRHRTMIRTLDRQIAQTAEAQAAGIAADPALATTATVLASAPGVGPVTTAVLLAELPELGTISAKAIASLAGVAPRDDQSGKADKRKHLRGGRARVRQALYMMALSATHRDPVMIAHYQQLLARGKPKKVALLACARRMLGILNAMVRESLTWEQTEVGQGRFLPGPP

SEQ ID NO: 247770 - protein, 355 aa, unidentified
MTYDYVIGMDACKYFHHACVLDIDGTQVLSKRINQNEQSLRALFSAFSAYDHKVLVVVDQPNNIGRLTVAVAQDIGIDVRYLPGLAMRQLSRIHAGNAKTDIRDAYIIAHAAKNLPESLRSVDRVEEAFLQLKVLNGIDEDLARSYTRLINQIRSALVGCYPQFEQALRGQIIHRKWVLHLLARYGGPTKIKRLGKAKAAAFARRYKARNPEPVLDAIFAAISEQTVTIAGAHYAEMGVAMSAKDALLKLEHRQQIEKEVIKLINDIPHTQFLLSMPGIGPKTAAQILMTAGDMSDFPSAGHLASYAGLSPRTNQSGTSIMSNSLNRAGNKKIKERPMAIIFCIHQIPRAFPAIL

SEQ ID NO: 247771 - protein, 373 aa, unidentified
MIVIGADTHKHSHTVAAVDAATGRVLADRTVKAKRRSFDDLLLWARGLDAERVWAIEDCRHVSGALERFLLRRGERVVRVAPKLMAGARRSARERGKSDAIDAVAIARAALREGLDKLPVAQLAGPELDVRLLVDHRERLVAQRTALINDLRWHLHDRWPGLEIPARVLITARWQDRVAGRLQRAEQTARVRIARDELRRIRALTRSIDALERELAVLVADLAPRLLAEQGCGVLTAAKLIGEIAGIARFATDAKLARIAGSAPIPASSGNTDRHRLDRGGNRQLNCALHRLAVTKGRLDPDTAAYLTRKQADGNSRREALRCLKRHLARRVWRLLQPPPTEQPPRPSTRPPNISPAATMIHCNTPYSRFSLT

SEQ ID NO: 247772 - protein, 452 aa, unidentified
MAKVAKRKQTSKGLRLEVVNPNAAGIDISPKEMQVCVPSDRDGECNRTFGVYTKDLHYIAEWLKACCIDTVAMESTGIYWLPVFRILKESGFDVILVNASDVKNFSGRKTDASDAEWLMMLHSYGLLKPCFQPENIARTMRNLVRHRDNLIRSASREVLHLQKAMEQMNLKLDNVFSDILGKSGQSVIKAILNGERDPKVLSDLADPRCRTSKEEIEKSLQATWDEEHLFEMRQSDSLYQFYQQLIAECDAKINEIAMQYSATVDAPKTKLLRSEKYNAKKNRIGFDVEKVAFELWGVNVMRIPGMSRGSLLRLVGELGADFTTKFVDVKHFVSWANLVPNNKISGGALLSSKVPKKKNPVGIIFRQAANTLKAAKNPLGDYFRHMRAKGGHLQAMVATGKKLASIFYCMVQRKVEYNEKVYCDHRKQELQNKVAYLHKRLQRMESELANCG

SEQ ID NO: 247773 - protein, 332 aa, unidentified
MENVLKIVGADLSKKCIDLAIHATQEHLRIENNIEGFKRMTHWLKQHKIDPSQLTIVMEHTGLYSYCFEAFLHQKGYRFNKVNPIDIKFSIGLTRGKSDKMDAARIARFGFEKQGRLKAETPLSQALQDLKLLNTSRENLVRTRASLKTAIEEFRNIGLKDSNPALHCQLQIVSQLDKQIERLEKKINTVIQQEEKIAKTYALLNSIKGVGPVVATNTIIKTHNFERFTNARKFACYCGIAPFENTSGTSVRGRTRVNHMADKGMKTILDLAAKSAIGCDKELKEFYQKRVDQGKSKMSTINIIRNKIVGRMFAVIKRQTPFEQNYFRPSLN

SEQ ID NO: 247774 - protein, 351 aa, unidentified
MIVLGADTHKRSHTIAAVDALTGQVVGEKTVPVGVRGGGALVMWARSLGIERVWALEDCRHVSGALERLLIGRGERVVRVSTRLMAGARRGGRERGKSDRIDAIAVARAALAAGVDSLPTAALAGSELDLRLLVDHRERLVRMRVALNNALQWSLHDLWPELELPGGALFSATWSTKLTRRLARAEQTMRVRIAREELRRLRELTAAIKSLEGEIAVLVGELAPQLVAEPGCGPLTAAKLVGEIAGAERFASDAKLARAAGIAPIPASSGKTDRHRLDRGGNRQINAAIHRIAVTRARCHPQTRDYIAQRRAEGKTNRDAIRCLKRHLTRRIWHLLQPPNPPQGDPSPSSS

SEQ ID NO: 247775 - protein, 419 aa, unidentified
MNEVKSETQSIQYWVGIDWGESEHAVAVVDERRNVLQQFKLAASLEALQDLAVRLHALKFVAGIAIESTRNPILPFLLGEGFTIFPVNPKLSAHWREGNSVGGVKNDARDGLVLALELSRRHESLRTCTPNEAAAELSGLCETLRDLIDQRTALLQRLKATIRQYYPGAMEFFSDWSSPVAWRFLKKFPNPAKLSRTQKSTLIQFLKANRIGLKPLWLERIERRKTASQWPLPDDAAALEIMALATIAQLQALQPHIEKLDDLIDERNKKSPQAQLMKSLPGAGPRMAPALTAIAETVLHEKDRLQALRGLSGVAPVEKQSGKSRRVKIRRRCNKHWRNIMHLFARCSIASCRWAKTYYNLCRERGDRYASALRKLADKWLKIIDRMLDTGEAYDDDRYVNALKKNGSPVYKKLCEKNC

SEQ ID NO: 247776 - protein, 348 aa, unidentified
MYIGIDLHKETCYATTLDKEGEIIDRREFKNNREEWEKYIEEMPRDSKVAVEACSYWYPVCDLLEERGIEMVLSHPSKTRIIAEAKIKTDKVDSKNLAKLLRADFLPQSYIPSKEIRENRELLRLRVQLGKDRTVVKNRIHALMAKNGVKHEFSDLFGVEGMNFLREIDLPELQRIAVDVLLRQLESIDKEIEHVQKQIAVIAREDEDIKILMTIPGIDYYSAMIIKNEIGEIERFLDYKKLCSFAGLVPRVHQSGNTRWEGHITKEGDALLRWILIQVVHQVVRYPGELRKFYYELKKKKSTKIAVVATARKLLRVIYCMLARKENYRYERKALTESKLKRLEKTAC

SEQ ID NO: 247777 - protein, 412 aa, unidentified
MLFVGNDWAEDHHDVEIVDEQGRRLARKRLPDGLAGITGLHTLIAQFFPEEWAELEPGAAASRVKVGIETDRGQWVQALIAAGYEVFAINPMSVARYRERHSTSGAKSDAADAHVLAEIVRLDRAHHRPVAGDSELAEAIKLVARAHQSLVWDRTRQVLRLRGVLREFFPAALEAFADLDAADTLELLTLAPDPDRAARLSKSRIVAALRRANRRGVDDRADAIHSMLRAPALRQPAQVQVAFAAIVTSQVRLISALNGEIAQLGEVVADHFGRHPDAEIYASQPGLGVILGARVLAEFGDDRTRFADAKARKNYAGTSPITRASGKKKVVLARYARNTRLGDAVQQWAFSSLKGSRGARAYYDALRARNIGHQAALRQLANRLVGILHGCLKTDTLYEETTAWAHHLTAAA

SEQ ID NO: 247778 - protein, 364 aa, unidentified
MTIVAHAHPFVIGVDTHAKTHALSILATPSGEIIEEATFPTTRSGLARAVAWAGRRTGGDLTVLWVIECAATYGAQLARAVADTGYTAVEAARMNAKANRGIGKSDQLDARRIAAAVLPLEVDRMRQLRSDDAVRAGLRVLVTARELMTGERTANVNALLALLRMVDLGIDARKPLTRTQIGEVSHWRVRHEEVGIATARNEAVRLARRITALDSELAENIAATTALLAQSPAKVLLEKIGIGPVTAAVAMAAWSHDGRVRDEAAFASLAGVSPIPASSGNTVRHRLNRGGDRRLNRALHMAVVTRMAYDPTTRAYAERRTAEGLSKKEIRRVLKRYLARQIYRTLTAESRAAIAVPESAPSPA

SEQ ID NO: 247779 - protein, 425 aa, unidentified
MFKIVFPVCCGIDVHKDFVVATIASTDSRRVTSYQTRKFKTMRYDLENLLKWLIEQECEHICMESTGKFWIPIFNVLEPYCRVMLANPRYVRNIPGKKTDQNDSVWLADLHKHGLVRSSFIPPKPVRELRDLVRYRCKLTNVRSSEKNRFQNSLTVSNIMLASVVSDIFGKSSQAIIAELLKTRNGSEVDFEPLLKRKLKEKSDLIAQSLQGTVSPEQAQKLKVCLGHHDAVNACLAQLDVAIAEAARPFAEAIALIATVPGVQSASATAIIAEIGPDMSVFPSSKHLCSWAGLTPQNNESAGKKKSVRVSRAGAYLKPLLIQCALASLREGECPAFRSRYERIKRRRGHKRALIAVARMMLTAIYHILLKNEPFDRSRDLAEARPVKADPVQAVVFSIEQAIALLTANGFQVSGLEAPVSCATT

SEQ ID NO: 247780 - protein, 340 aa, unidentified
MGKITTVGLDLAKNVFQVHGIDVTGAAVLRKRLRRGQVLAFFAKLPRCLIGMEACATAHYWGRELQTLGHEVRPMPPQYVKAYVKRNKNDAADAEAICEAVRRPSMRFVAIKTSEQQAALLMHRGRELLVRQRTMLANALRGHLAEFGLITAQGLHKVAGLITVVRDEKDDRMPGMARQVLRLIAEQIDELEARIAAIEAQIMVWHQANPISQRLATIPGIGPIIATAVAATVAEPSMFRSGREFAAWLGLVPRQNSTGGKARLGGISKRGDSYLRRLLVNGAHAVLLRSKAGKVDPWLIALRGRKPRLVVAVALANKTARIAWAIMTKQDTYRRATAAA

SEQ ID NO: 247781 - protein, 406 aa, unidentified
MRCVIAFDVSRKSSTMAAYNEQGNCEFEGRLIHSKTGFSNLSKIIKDLSEKNNYTLEFVFEATGVYSAALERFLRENNLVYYSLNPLLAHLNTQSLRRNKTDISDAHQLANNHFKNDYFQTYREDSYYEQMRTMSRRYDEIMKERIQYKNRLHASLQLSFPDFDTAFINKSKLYYNLVQVFPHPNLILKRSKTVIKNRIKKCTKKNYSLKKLEERAILLIEIAKDSFPAVDETDYSCELVRDYAKKILEMEEEQDEIIQRMTEMSKDRKEYRILRSFPGIKDKLACRIIAELGDLTRFKNNKQLNAYAGIDIVRYQSGNMEYKDRINKRGNSRLRGILYFMIVSMLSAKGKQINHLVDYYYKLKKQPYNKHHKVAVVACMNKFLKVAFHLIQNDLLYDYEKASSQQ

SEQ ID NO: 247782 - protein, 430 aa, unidentified
MSLERSVEQEPLFAAFVGVDWADQKHVWSLQGAGSQKRESGELEHAPEAVEVWVAQLCQRFAQGPIAVALEQSRGSLVFMLSKYERLHLFPVASTMAGNMRDALYPSGAKDDPRDADLLLDLLLKHRDKLRRLSPDTEATRRVQNLVEERRKLVDEKTEQINRLTSHLKIYFPQMLDWFDRLDREAACTLLERWPTLEELQKVPPAKLRTFFCKHHCRDQEVIGRRIVGIRQAVPAIRDRAVMEAKSAVVKVITQMIRILVQGIAELDRKIEEGAAAHPDFFIFNSLPGAGPALAPRLLSAFGSQRARYGSAQEVQAYSGIAPVIERSGKKKWVHFRWAAPKFLRQSFHEWAGRSITQSQWARSYYEQQRQRGKGHHAAVRALAFKWIRIAFRCWKDSVAYDESRYQATLVRRASPLRASMGASTLAKTL

SEQ ID NO: 247783 - protein, 400 aa, unidentified
MNPVIGLDVSKGESHAQAFSDRGTPYGKTFRFKHDLDGLASFLRYLQDLESFTRQRPAVVLEATGHYHSPVIQFLDEHPYLYIIINPFLSHQAKKSQLRKVKTDVADAYQLGEMFYKEELEPYKKRGQYLMNLRYLTRQYESLTGMYVQAKLQFQAVLDQVFPEYHGVFGDLYSKVSLRFLALYPTSQSVLAMSENDVTVRIQHLVGHVNSNRWSLERAQKLIAAAERNPFRETAFPSHLIALELLINLLLQYQEHLAKLDQSIEALAEELQEYDLVQSIPGIGTKIAATILAEIGEIDRFDHAKKLVAFAGIDPSVFASGKFTATRNKITKRGSRRLRTALYQAVRCGLKGSRNKRIRAYYDKKRAEGKLFKVAIIACANKLLHWIFAILTKKEAFILD

SEQ ID NO: 247784 - protein, 376 aa, unidentified
MGHDSTVYVGLDVHKESITAAYAVGIGEVELLGKIGTSKTDIDRLCQRMQSKATHVRIVYEAGPCGYGLYRQLVQKGFDCVVCAPSLIPKKPGERVKTDRRDALKLVRSLRAGDLSSVYVPGVEDEAFRDLARAWAAAKADLKHARQRLKSFLLSHGIRYTGSANWGPAHRRWISTFVFPNHWQQLAFDECRRTIEDRLAQCDRLEAALREAVVNWRFYPAVLGLQTMRGIQFTTAVGMLAELGDLSRFEHPRQLMAWLGVTPSEHSSGERRRQGSITKNGNSYARKLLVEAAWSYRYPARVSPDIQRRHEGIPKPIIDRAWDAQLRLCRRYRKLAARGKNVNTGVVAVARELSGFIWDIGRLAMSLAIPKDARPV

SEQ ID NO: 247785 - protein, 360 aa, unidentified
MQSTTIIAFDQHAATTVAAVLLPGHRTAALHTLSSQSPTILRFVERLRRHGPVTCCYEAGPCGFELQRAVQAHAIPCDVIAPALIPRRPGDRIKTDRRDAGQLAILYRAGALTAIHIPTEQEEAARDLLRCREDIRADLLRARHRLSKFLLRHGRRFTETKAWSKRYDTWVRAQTWLIPALDQTHRAYVRAVDEGVARLRAVELALRDLLALEPLRSRVQRLRCFRGLDDLSALTIAAELADARRFPTAPSMMAFVGLVPSEHSSGVKRARGAITKTGNAHLRRILVEAAWHYRHPPFVGEPLRARQRGAPQTVIAHAWTAQQRLYRRYRRLAARGKPKQHVVTAVARELTGFVWAALTQ

SEQ ID NO: 247786 - protein, 344 aa, unidentified
MKYMGIDYHKQYFVATTMDEKGRIISKEKVSTDRNSIKRYFKKAGSEGEMKAVMEACYGWEYFYDEVDELVDELIMAHPLKTRLIAEARIKTDSIDSETLAHLLRADLIPQAYAPSAETRDQKNLLRYRSSLTAMKVRIKNMVHSVLTRNHIEDKGFQELSDKFGKKGIAYMRAITLKGNDTAILHEYLDLLEETEKRIKSAESRIRAVCRQDEICRLLDSIPGIGDILAVTIRYEIDDIERFISSGKLCSYAGLVPSTYSSGNRTYQGKITKQGNKWLRWAMIEAAQRAPLSDMWLSAFFNRVSTKKGRKIARVAVARKLLEIIYRIWTERRAYYKKPVTVAL

SEQ ID NO: 247787 - protein, 421 aa, unidentified
MRGARAKRVKTVKEGTLVATVDIGLASNTGYCTTLDGRDAKPFKFDNTKEGFEKFWYLTMASKNRFGCDEVVVGYESTGPYAEPLVHYLAHKQVKIVQVNPMHTKKMKEVNDNSPLKTDDKDPRVIADIIRLGRALTLVVPEGDAAYLRRLNNARERHVGEQTALLNQLQQLVFLIFPEFQTVLKNMKGKTAQYLLKRYTTPERIGALSKEALGEEMRKRSMGQFGVQEAELLIGLARETVGIKEGLDGIFMDIRHILLQLEAEGRFISEIEAEMGATLERIPFSGRLLSIKGLGIVSVAGLIGEVGDFSKFSTQSEILKLAGLDLYEISSGKRKGQRRISKRGRGLLRKILFYAAIQMIRKNGIMHDYYARLTGRGMERMRALIAVARKLLRIIHALVRDNSDYVEQNKVGDRRMIEMAA

SEQ ID NO: 247788 - protein, 411 aa, unidentified
MDKVYDKCCGIDVHKKLIVACFRKGSKQELRNFGATTRELLELANWLQNGGCEMVAMESTASYWKPLYNILESSELKAMVVNASHMKAVPGRKTDTKDAEWIAELLQHGLLKASYIPDKQQRELRELVRYRKSLVSERTRELNRLQKMLEGANIKLSGTVSDINCMSARNILEYLLTGEFFDEAKYDEMYKKKIIAHNLKASKEQIIDDLNGVMTPLQRRMMKELLSHLDELNVHINNLEDEIDNFMKPEEKQATQAIQDVTGIGKNSSQAIISVIGTDMSRFPTAGHLAAWAGLCPGNNESAQKRKTGKMRKGNALLRSTLVVCAHSATRNKNSYFYAQFMRISSHRGKKRAYVAVAHSMLIAIYHILKDGVVFKDLGADYYNQFNMERKINAYLKKLKALGWEVPVVAA

SEQ ID NO: 247789 - protein, 355 aa, unidentified
MQKYNISFKGQNIFVGIDVHLKTWHVTTLTESGYKYSFAQHADARELFERLNKKYPEAHFKSAYEAGFCGFSVHYALTEHGIENIVVNAADIPTTGKEKAMKTDAVDSEKIAWALKRGELTGIYIKDKRFMDDTNLMRLRQRFIKDLSRQKNRTKHLLYTQGVTYPKRFLNSKTHWSRNFMQWLREEVELLSEEKLTLTLLCEQVENTRKAILKVTREIRRLSMTEKYKDNFDLLISVPGFGLIMAMTMLTEFDNNIMRFPNERKFVAMLGLIPTCHDSGEKKTTGEKTFRGNKQLGPLVVESSWVAIQRDCELASYYSKCCQCMRPPRAIIKVARKLACKAYAVLKNQKAYVQP

SEQ ID NO: 247790 - protein, 491 aa, unidentified
MRFFSKTTRATDGPRWFGIDLAKRESQISVLDAGGVQIETKRFATTRESFLLIAAELREGDTAALEVTTNSTSIARLLRGNSQARVIVSNPIKTKTIAQAKIKTDKIDARVLAELARVGYLPEVWLPDEDTEALRQFITDRVSLVRRRTECKNTIHSVLHRNMVHQERSDLFGTSGRRWLENIIRGEGIKTPVPELDRMRIGSLLNEIDRIDALVADLESVIASYVALRPHLKEQMDRLLSITGVNLVVASSLIGTIGDIGRFPDKKKLAAYFGVVPSTYQSGDTSRNGRITKQGRAEARWLIIEAAEILRRSPGPMRALYSRIQRKRNHNVAVVAVARKLVELVHHLLSNREDYVYKLPRLTMEKRSRWRFLAKKKLGIEIKSAAAKRGGRSALYGTGIDVQGRKLKSQITKQAAADAERLYAAIVDQRKRHLDDPSSPLIPSTDLLFDPTSPSETDWERILSQHTERLLLRYQKREATRSKSTPRPDIA

SEQ ID NO: 247791 - protein, 398 aa, unidentified
MFVGWDWASASHDVTVSDDRGIVIDHWAFQHSEADFETALARPASDGTPELPVIIERSSGLVVDRLLEAGYPVVPVHPTAFHAARPRWGAFGAKSDPGDSYKLADYRRTDGHRLRRLVPVDSGLRELQALVRLRDDHVRARTAAGNQLGALLEQHWPGPRNLFCSLVSDIALNFLTDYPTPQAAARLGEARMAAFCKRHAYRGGKPASALLARLRSAPVAPVSLPASVLSALITAQVQLLRSLQATITQLETTIKRCLARHPRAVFLAQLPGVGTINLAQLLAEVGPILDRVESAEQAAAECGAAPVTKASGKAHGVYFRWAANTRARKVVTAFAHNSRMQSPWAAGLYANARARGKRNPHATRIVARAWLRVIWACWHNATPYDPDNHPAAQRLKAS

SEQ ID NO: 247792 - protein, 316 aa, unidentified
MKKLSYIGLDISKSFIDLHLLPQERDARFEHSTEGIAKLVTFLKRRKPTLIVIEATGGYESKVAAELAAAKFSVAVVNPRQVRNYARALGKLAKTDAIDANVIARFAQDVRPEARKLPDTKELALKAYVARRRQLVDMLVAEKNRRARAASKSITENIDSTINFIQSKIDALDKDIDSTIQNSPVWRAKDDLLKSVPGIGDKTSSALLAQLPELGRLNRRQIAALVGVAPMNRDSGALRGKRMIAGGRKSVRNALFMATTAARRFNPTIKKFYLRLRNAGKSYKVALTACMRKLIVILNAMIKTQIPFKQALVLDS

SEQ ID NO: 247793 - protein, 341 aa, unidentified
MGEVSTIGLDLAKTVFQAHGADGSGGVVFRKRLRRDHLLAFFAGQPRCVVAMEACASAHYWAREIGALGHETRLIPPAYVKPFVKRQKNDMADAEAICEAAQRPTMRFVKPKSAEAQAAAVIFRTRDLLVRQRTQLINALRGHLAEFGFIVRQGPGHVSKLIELVADPSSELPAEARPVLAVIADSLQAIQARILVLDREIAARAKADPVARRLMTIPGVGPVVATALVALAPPASTFRRGRDFAAWLGLTPRQHSSGGKERLGRTTKMGERSLRRLLILGASSAAKNAGRNGSRASPWLVGMLARKPRMLVTVALANKMARIVWALMAHGGTYRAPATAV

SEQ ID NO: 247794 - protein, 325 aa, unidentified
MQNQTIVGIDVSNATLDICVNSQREQYSFVINNDVKAISKFFKAYKEDLIIGMENTGRYNWALYEALKEAGHRIFVISPLHLKKSMGLVRGKNDKIDAVRIAAFIAKNYHELPQWKPSSPAVQKLKILLTERSFRVKAKRQLLKQQYDYAKMKHLGMDKYLMGLNKQELALVGKQLAMIETEIEALIKADEQMHSQAKLIRSVPGAGKVLCWMMLAKTENFTAITEPRKMACYSGVVPFSYQSGTSIRGKSRVSPYADKAIKATLHLAAMSAIRLNNELRQYYLRKVSEGKNKMSALNAIRNKIVHRIFAVIKKQTPYQNHLLLS

SEQ ID NO: 247795 - protein, 423 aa, unidentified
MDVLYERVAGLDVHKDTVVACVRMLVDGKTKRECRTFAATTEQLVELRAWLEECRCTHVAMEATGVYWMPVFRILDDGEFELIVANAAHIKNVPGRKTDMNDAMWLADLLACGLIRASFVPNEGVQELRGLTRTRKQLIREQTRHMQRIEKTLAEANIKLGSVISDVMGASGRRIIKAMIAGVRQPKQLAELAGKQIKASPKELYDALHGRLTDHHRFLLELHLKQWDSINETIRKLDLEVDQRIARMEAKAGSRNTPFRTLIELLTTIPGVSAVAAPAILSEVGDDMSRFPTAGHLVAWSGLCPGQNESAGKRKSSRLRKGAPWLKTMLVQCAWAAKRTKDSYYRAQFFRLQAKRGPQKAICAVAASILTAVYHILKNGTEHHDLGAAYFDRRPVELKASRLVARLKKLGFTVQLQPSAESA

SEQ ID NO: 247796 - protein, 408 aa, unidentified
MNAVGIDVSKGKSMVAALRPMGEVALLPQEFLHTGVGLEQMAYAILALGEDTRVVMEATGRYHEPVAAALHEYGIYVCVLNPLYIKQSGGGSIRKVKTDKADAMKIAKYGLDNWVDLREYTPMDTVRQQLKLCSRQYNLYMKTVVSLQNNLISLTDKTFPGVSELFSSPERTDGHQKWVDFVMTFWHCDCICRVSEKAFTERYQKWCKRKGYHCSVEKALDIYASSCGHFTTLPKNDNTKLLIVTAAQQLLAGKTTLAALRAEMTRLASQLPEYETVRAMYGVGETTAAQLMAEIGDVRRFPRRSSIVGFAGVDPAVDQSGKHETQSTHTTKRGSPHLRKTLYQIVCTYLRKAPADEPVYQFLDKKRAEGKPYFVYMTAAQNKFLRIYYARVKECLEAFDAQQSTSQG

SEQ ID NO: 247797 - protein, 414 aa, unidentified
MRLVYPICCGLDVHKNVIVAAIVTTNNVGISEYKQRSFSTINSDIQKFHDWLIENDCYHVCMESTGKYWIPIFNYLENDIDVCLTHPKYVKAIKGKKSDKKDSKWIADLYKFDLVRCSFIPPKDFRQLRELARYRFKIVCMKSSEKNRIQNCMTVSNIGIASVLSDPFGKTATEIMSYLLKNTSDSIDDKAVRKLIKKGAIAKSDEIIEAIKGYNIETDQAKKLVLARDHLDYLDDMITQTEVELYVRIKPYYEFVEYLSSLPGVTELSATIILAEIGVDMNIFDDAKHLCSWCGLSPSNNESAGKKKSVRIAKAGAYLKPMMVQCALAAIKSKKQPYFAIKYGRIKKRRGHKKAIIAIARMMMVCIHHMVSEKQYFNPTDYTELMDPHVNQPKVTLNDANVFAYLEAQGYDTS

SEQ ID NO: 247798 - protein, 346 aa, unidentified
MHYIGMDCHITTLDFAVVNEAGRLVKAHSVATSVNGFMEFVKTVPPPRTIYMEEGTLAAWALETCVRFREKLVITDAKKNHWIGSSGQKDDSIDALKLAQLARGGYIKEIHHPVGQRRRFRELMIAYHDTVRSTTRIKNKIKARFRQNGIQCTGATVYSETHREEWKGKLPQEATLLLILDGLWRQLKQSEQTEKELLAAAKAQAKHYPEIKHFEALPGIGFIHAATISAILETPYRFADKRKVWMYAGLGIMTRSSGDKIYSEKLSTDYNRLLKYTLKQAAEAAIQAKANPFRRKYLDMTLLHGIAPHRAKLTIARDMLATMWAMWRKGEKYSPEIREKSSYKQG

SEQ ID NO: 247799 - protein, 443 aa, unidentified
MARKRSQQRFELVHPHCAGIDIGSREHWVAVDRKHEQPVRSFRTFTDDLVHLADWLASLKIEVVAMEATGVYWIPLFELLDSRGFTVYLVNSRSTRQISGRKSDVLDCQWIWQLMSHGLLRGAFRPADAICSVRALVRQRATKVRDQAQALNRLQKALSQMNIQLANVISDISGVTGMRILRAIIDGERDPQTLAQLMDRRIKADKETIARSLHGNWRQEHLHALEQEIDCHDFLEQQIQACDKAISVALAQLPEREQAPQPSRKVLRSPHRSATDQAALHQAVWRVMGVDLTAIPTIGVDTALVIASEIGPDLSRFPTGQHFCSWLGLAPPTRISGGRQLAGGSPKVLNRAAQTLKQAASNARNDKSFIGASHRARLTRMDTSCAIKATAHQIARLIYAMLTKGQPYVEQGIEAFEERSKDRQLRALLRKARKLGMDLVKAA

SEQ ID NO: 247800 - protein, 335 aa, unidentified
MSIIGCDLHSRYQVIAVVDTDTGEMVTRRLEHENGEARTFYAGLPKPSLIGIEATGYTQWFERLVAELGHELWVGDAAEIRARAVRRQKTDTRDAEHLLDLLLTKRFPRLWVPTPEERDARQLLKHRNKLVRMQTSVRNQLHFLAMSQGVCRKQKLWSARGRAELEGLSLGPWASQRRKELLQLLDGLGPRIEELDGAVKTEAERRPEAVELMKHKGVGPVTALAFVLTIGPVERFAHSRALVSYLGLNPSEDSSGGHQRLGHISKQGNEMLRWLLVEAGHSAAQFDPELRRKYQRLKFRRGAKVAKVAIARHLAVRLYWTLRQARGGAAGSHAR

SEQ ID NO: 247801 - protein, 440 aa, unidentified
MRPRTRMGICTLEDYHLPISGQAIVMETQRNKVCGADIHKKFLVATTLSRDGPKVTKRFGMTLDDFLNFKSWVIENQCEQVAVESTGSYWIPIHAVLEDSVDLIVANAYKIKHTPGRKSDLIDSEWIAELCLNGMIEPSRIFPKEDRELRRLTRSREGYVNDMTREKNRIHHALESCGIKISSVLSDIFGKSGRYLLNCLLDGVELEKMIKGIPVKSIRNKADQIREAVRGSLETTQIILIRGGLEQIATIQRRIDELDREIKNRIASREEDLKIAMSIPGIGFTSAATILAEMGDFKDFAKAEQLASWAGLVPAVYQSADKLVTGSITKHGSKHIRRILVEVAKAISQTNKSKLKRFFRRVQAKKGYNVATVALARKVLCILFHLLMSREMYREDDVIKTKSVVIDTSSLSSKLDFEEMIRVLAKAGYEIRKTNLGTGG

SEQ ID NO: 247802 - protein, 319 aa, unidentified
MQTNNSKHIRTKPLNIGVDVGKSLLDISFLEHEEHLQIENTQDAIQSFVRRCRRLKPQRIVMEATGGYERQLASACAAAKLPIVIIQPMKVRQFAKAEGQLAKTDRIDSALIARCAKALQIEPRPLPDANVQKVRDLLARKRQLTEQRTQELNRAHKASTPLQRSHQRSIRFLEQEIAWVDKQLAKAVGAVDQWQSTYAILKSVPGIGDGVAYTLLGELPELGHLNHRQIAALTGLAPFNRDSGAFRGKRRIRGGRAPIRTMLYMAMLSAIQHNPIMKAFYEKLVAQGKHKKVAITACMRKMMVILNAMIRDQKEWQMA

SEQ ID NO: 247803 - protein, 430 aa, unidentified
MKSNTQNAKIEAITEKTLVLGIDVGSETHYARAFDYRGIEYSKKPFKFSNTEAGFATFKEWILDLKERHEKDKVVPGMEPTGHYWFNLGKFLQDNEMKPVLVNPHHVKKSKELDDNNPTKNDRKDPKVIAGLVREGRYMIPYLPDGVYADLRTASNIRFQLQAELTRIQNRISRWFNIYFPEYKTVYGKPDAKSGILILKAAPLPEDILTLGIDGVNQIWRDAKLRAVGKARAKTLIEAAEHSVGSKEGAVAARMEIRMLLEDYESRNIRLQEVMTLIEGLVKQIPMAEKLLEIKGVGIRTVSGFLAEVGDISRFNNPKELQKLAGLALVENSSGKHKGETTISRRGRKRLRYLLFEVAMSLVAKNPEFRELHNYYTTRRLNPLKKMQSLMAIAAKLIRVFYVMLTKGVNYDPKKMVNDIKRPAVYLQTA

SEQ ID NO: 247804 - protein, 344 aa, unidentified
MKATTVGIDLAKNVFQVHGVNEHGKTVFRKQLKRHQVAEFFANMPACLIGMEACGSAHHWARKLQALGHTVKLMAPQFVKPYVKTNKNDAADAEAICEAVARPNMRFVPVKNVEQQAVLALHRARQGFVKARTAQGNQIRGLLAEYGLIIPKGIAYIAQRVPELIEDASNELPGVFRQLIQRLTDQLKELDRQAGELEAQIAAWHRESELSCKLAAVPGIGPITASALVATVGDAKNFANGRQLAAWLGLVPRQHSSGGKNVLLGMSKRGDTYLRTLRIHGARAVNFHAGKKVGGWLPTLIGRRNTNVAAVALANKNARIVWALLAHDREYRHDYAVVASASAA

SEQ ID NO: 247805 - protein, 406 aa, unidentified
MEKTEKRYIGLDVHKHYLIALGVDAELNVVLPARRVELCRLETWMKKTLTKQDEVVLEMTTNTWQLYDELVAYAGSVMVVHPPHVALITRSQVMNDKIAASILARLLAKGLLVGIWIPSQEIREARGLVAQRQKMVRLATQAKNRLHAVIQRHHLVPPAGNPFGASHTAWWQSLPIGKLEKLNLQSDLETLQFGEKQVQDMTEIMEGMAAEQEEIGRLLHLAGFGVVTAMTVWAAIGDIGRFAEPKYLVGYAGLGTRVHDSGMTSRSGKITKAGRRDLRTVLIEAANVAANNHPHWKAELARLEPRLGRNKAIVAIARKLLIAVWYVLQGKTDKYAEPEAVAQKMLRFAYTVGKSNRPKGQTAAQFARVRMDALGLGGELTSIPWGSKKPIPLPPSVLQRKERRPK

SEQ ID NO: 247806 - protein, 366 aa, unidentified
MKKTSTVRVNGNMIFKGHKLTIGLDLGDRWSFYCVLDEAGEVLLEQKVATTREAMKQTFEKIPRSLIALETGTHSPWVSRLLRELGHQVLVAHAQKVQLITKSNRKDDRHDARTLARLARIDPELLGPVRHRSARAQIHLTVIRARAELVRARTALVNAVRGLVKSYGQRLPKCGTQQVSRELAAGLNAELREVLEPLLKEIESLNERIKEYDERMEKIAKESYPQVELLKQVKGVGTQIALTYVLTLEDPHRFPKSREVGCFLGLRPGRRDSGESEPQMRISKEGDRYLRTMMVQGAHYILGPFGEDSDLRRWGLKLAARGGKNGKKRAVVAVARKLAVLLHRLWVGGEVYEPLRNSHKAMRAVA

SEQ ID NO: 247807 - protein, 370 aa, unidentified
MQDAIKFVGLDVSKEKIAVAIAEEGRGEPRYFGMIPHTPEAIRKLIKKLGEPNTLRVCYEAGPTGYPLFRLLLTLGVHCDVIAPSLIPKRPGERIKTDRRDSIRLAQLYRAGELTPIYVPDTEDEALRDLVRAREDAKEDELRAKHRLSKFLLRNNLHPPAGVNKWTKKYREWLNVLKFENSSLRVVFQEYYHQLKELEQRILRLEEEIKLQAAEGVHAPMIQALQALRGVALITATSLVAEIGSFKRFPTPKQFMAYVGLVPSESSSGEKRRQGEITKTGNRHVRRLLIESAWSYRYQPSVKGELKRRQDGLSPIVQGISWKAQNRLHKRYFQLLSRGKTGGKAITAVARELAGFIWAITQEINDTSKI

SEQ ID NO: 247808 - protein, 346 aa, unidentified
MTTTAATTTIIGMDISKHSFELWGADERGKQTMHKRLHRDKVSLFFANFPRCAVAMEACASSQHWARQLKELGHEVMLIPAQHVIAYRRGGKNDRNDAHAISKAAARPSMRSVPVKTTDQQDLQAIHRVRERLIHHRTALINELRGLLMEYGIICAKGRTRLRIWLREAFDACVETLSPMAQETFRSLRDELRALEERIAATDKRIKMVFDSHPVCHRLATVPGVGALVATALVASVAEPQRFKNGRQFAAYLGLVPRQHTTGGKPKLLGISKAGNRYLRMLLVHGARSIMFHHRGKEDPRSKWVAKLVERRGFHKANVALANKNARVLWKLLTTPGETFGQQLAA

SEQ ID NO: 247809 - protein, 394 aa, unidentified
MAPPTRPGIVIGLDVGKSSHWACVVTRGGELLASEPVLNRENAIDGLYAQYPGALVVVDQVRNIGSLALSRARLAGIPRAYLPGLAAHGASKLFAGDAKTDERDAMVIAKTALGIPDALLPVADRPPEIEAARSLAAQRDFLTRENTRSKNRLRSILLESCPEFEAHADLSDPATLKLMAAVGGPWSISEASPQAVGALTRGCRRVKVAALVESVESSSRPHPAAVACEDRAVRLLARRISENAAEIESLTSEISALLSADETYRRLLTVPGIGPRTASELVISIDIADFPSHDRLASRCGLAPRNRRSGTSISSVSASRQGNKRLKNLLIFSCNCLARSRNRCEEAAQGDLRDHEGQGSVRSLTAGGNRRPGGACVSIAKNAHQKDESLLTEL

SEQ ID NO: 247810 - protein, 337 aa, unidentified
MELYSGLDLHSTNTYIGILDTDFKRVFKKRVSNNLDLILEVLEPFRDQLKGLVVESTYNWYWLVDGLMDAGYGCVHLANPSAIKQYEGLKHSDDQHDAFFLAQLLILDILPQGYIYPKKDRPVRDLARKRMFLVKHKTAHILSLQSLIARCCGQRISSNQIRTLTVVDLRQLLKEEYLLLSAQANLNIIAFLIQQIKALEKAIKKKVKLDKAFEQLMTVPGIGFILAMTIMLEVGDIGRFAKVGNFASYCRCVSSQRLSDGKSKGSGNRKNGNRYLSWAFVEAAQLGRRYSQRFCRYYDRKAAQTNTIVATKALSNKLARICYYIMRDQVSFKEELF

SEQ ID NO: 247811 - protein, 327 aa, unidentified
MSNFTYIGIDVGKDDLCCSLPGIKPFFVNNDPAGIRSLLKKASALGSPDKLCFVMESTSVYSSRTAEMLLELADTWVAIVPPVCVNGFKQAGLVTTKNDVVDAIAIREFAEAKKPAPWLPPNEAQRRLRNLEVVMDNLARARARLKNVREKLRNEYHRDTIALASVDRMLSQLDAEFDTLQAEFDLVIAADDTLAADSAHLLSIPSIGPRVRNVVMAVIYEQLRTLSERKLLKHCGMTPREHRSGKHKGRTLMSKAGDGRVRGVLHMAALTAIRKGGLMFEYYQKQKAAGKPSKVAIVNVMRRLLYIIQGVVRSNAPFDMDIFLARS

SEQ ID NO: 247812 - protein, 375 aa, unidentified
MMHVAVGQPTQEVKETPMNNVGLDAHKTRCVACVKTPEGRILEQFAFQNNPHGHEELITHLKAYPEVQVAIESTGNLWIPIYNRLEDEHIHTILTNPKKTRMIAEAKIKTDRLDARILADLLRANLLSPSYVPPREIRMQRSIIRERARLTQLRTIIKNRIHTILDKHSIKTPYTDISGKHSLEWLFKLELPAGDRILLDVNLEQLNSLNHSIDRLTETIAISAIENPEVKLLMGFTGIDYYSAMLLINEIGPVARFASPKKLVSYAGLAPSTHQSGNHTTHGHITKEGNIHIRWILVEAAQHASRHDPRLSQFYLRVMKRRGHNRAVVAVARKMLVTIYHVLNHHSQYRGLRPELYTNKIRRLERITSSSLQTA

SEQ ID NO: 247813 - protein, 370 aa, unidentified
MAQSSTLFVGMDVHKETIAVAYVAQEPGADVTYLGTIGTRQCDIDQLIRKMQSKAQHLIFIYEAGPCGYWLYRYLQKKDYDCWVVAPSLIPKKAGERVKTDRRDALQLARLARSGDLTPVYVPKVDDEAIRDLTRAREDTISDLKDAKFRLKAFLLRQDIRYAGRANWGPAHLRWLAEVVCPTPAQQIVFQEYVRAVTDHTERLGRLDQELREQVKTWRLHPVVDALQALRGVQFTVAVTMVAEIGDLTRFEHPSELMQFLGLVPSEYSSGARRQQGGITKTGNTHARRVLVEGAWAYRYPAKVSRQLQLRLEHQPPSIQDISWKAQVRLCKRYQRLVAKGKHANVVTVAIARELVGFVWAIAKEVPITQ

SEQ ID NO: 247814 - protein, 410 aa, unidentified
MQVLHQCCCGLDVHKRFVVACLIRQTEEGTPHKELRRFDTLTPELLRLVDWLQSAGCTHVALESTGVYWKPIFNLMEGLFEIVLVNAQHMKAVPGRKTDAKDAEWIADLLQHGLLKASFIPPQPQRDLRDLTRYRSSLKQERTRHINRVHKLLEETNIKLSSVFADMMCKTGRAILDALARGEANPEVLADLALLWAPQKRDALVPALQGCMRAHHRFLLQELLGMIETLERAIGRLDHEIEERLRPQQATIERLDAITGVSQRVLETLFAEIGWELETFPDAAHLASWVGICPGQHESGGKRMSGRTRKGNRHAKTMLVQAAHAAGKTKTYLGAQYRRMSKGRGIKRAAVAVGHSILVIYYHMLTTSQPYQEKGEDYFVQYDQHEKQRRLVKQLERLGYTVKLTQEHDG

SEQ ID NO: 247815 - protein, 394 aa, unidentified
MSTVGIDIGAYQHAVAVCRDGAVEAERRVIRIGAGRAGFDELDRLLETVGPVERVVMESSGHYWFALASHLRRRALPVAVINPVASKYFARRRLQRAKSDPADARTLAALAMVDRPRTREPLQGAELREAARFAMGLVQEQARVCQRILRLVDIGFPELREAYEDPGCASALALLRVAPTARAAARRRPGTLAKARTAGGAVVGPKKTAVLQAAARTTVAPPELEAQVTFEMELLIAQHDFLEQQIAQADKRVATLLDGDLVRRLRTIPGVGPAIVATLIAEIGDIFRFDDFDQLVAFAGVHAAERSSGTKGADPETSWHMAKTGNAYLRAALYRMALVGTQHNPVIRHHYQRKRTEGKSKMNALGHCMKKALAIVWGVWRSDHDFVVPEGIPS

SEQ ID NO: 247816 - protein, 373 aa, unidentified
MNYNTVYVGMDVHKESFSLCSFTIEEDKASHVQKVESDYKQVLKYLEFLRTIYGKDAYFICGYEAGCLGFTLYHQLTEHHVNCVILAPTTMLQQRGKKKIKTDKRDAALIGRCLAQHNYSPVHVPTEQDEEIKEYLRMRTDHKLALKKIKQQILAFCLRHNYRYERGGSHWTQTHIKWLRALTPDGLYKEILDEYLLTFDQLSNKLERLEQRIEELGSREEYREDVKKLTCLLGVKTQTALSVIVEVGDFKRFATADRFASYLGLVPGEDSSGDGRQRLGITKAGNTHVRRLLVEAAQSYSRGQIGYKSRELKARQSGNTPQVIAYADKANERLRRRYYKMVLGQNKRSNVAKTAIARELACFMWGMMTDHIA

SEQ ID NO: 247817 - protein, 312 aa, unidentified
MIKTFCGVDVSKAWLDAHALPGGVAERFANTASGVESLAAFCRAHGVELVVMEASGGCERTAFAMLWSMGHPCALVNPRQVRRFAEAMGYLEKTDSIDAAVIAHFGQVKRLRPTPLQSPAAQRLKALVARLSQLTGDITVNKQRKSAACDPDALASLSEVLALLKRQSRRLEGEIASLIDDDPLWARLNETFREIKGVASRTVARLMAELPEIGTLSGKAIAKLAGLAPIANDSGKRTGRRPVRGGREGPRSILFLVAQIAARYDPHLAAFYQRLSDAGKPKMVTRIALARKLLVILNAKARDARNEFANAA

SEQ ID NO: 247818 - protein, 455 aa, unidentified
MESSQTSFKIIHPRAAGIDVGSRSHFLAIDQNKDNVREFGVYTKDHQEMISHLHQHGVTTIAMESTGSYWQTLFNALQQAGFDVLLVGGNQTKNVKGRKTDVIDCIWIQKLHSLGLLSGSLLLSDTFQQLRTYYYHHLHLVQQSARYSNKMQKALRLMNIRLDVVLNDITGQSGMAVIEAILAGQREPEHLVSLVSHRVKKSRQEIADALQGWWREELLFELQASLDFYRLYESKIKACDQVIETFLVKYAPQVEVSVDEKKQLKTNRKRAGKHAPGFNLSHLAYQYFRTDLFAISGISYNTVLCLLTSMGHDIHKFPTAKSFACWLGLVPNNKISGGKVIGNRTPSGKNYIAKALRHAANSIGNQKDHEMTPFFKRIAFKKGRLAAIIATARKLAVIIWNMIVKAEPYQKNQAELSNEKQKAMKLKYLDKKLHALQLTKEELEKLFLKHSLSVI

SEQ ID NO: 247819 - protein, 324 aa, unidentified
MIDGILGIDVCKNTLDVSISSYAKVRTKSFTNSPDGWRHLLDWLIAQKIQRVHACLESTGRYSLGIACALYEADHVVSIINPAQIRDFVRTKLGRNKTDGVDASHIREYCELFKPSPWAPPSEAHRRLGELQTIRSGIIAGLTEWKNRKNSGIVDAEAQALADATISHFTSQLGAVDKAIALTIDNDCDLQSKRDLLLSISGVGETLAGVVLAELPGPDVLRSSAEVVAYAGLNPRQHQSGTSIDRATRISKIGNAVLRAALYMPALSAMRYNSAIVALVSRLKSRGRLKPKQIVVAAMRKLLVLCFGVLKTGRPFDAAIAMGG

SEQ ID NO: 247820 - protein, 331 aa, unidentified
MYKQFIGIDVSKLTFDVCIYGSTAHRKFANDQSGFQLFFQWIRKLSAPESMDNVLICFEHTGMYSLTLALYLEESQCVFAMISPLEIKRSLGIVRGKNDKVDARRIAEYAYEKREKITPTKLPSKAILQLHPLLTLRDRLARTRAGYVATRTEQKRFLVKQDLPDLFDVYNDLIACLTKQIKQLEKAIKDIIRKDDDIRNTFQLITAIKGVGFLVGTYLIVYTHNFTKFENWRKFACYAGVAPFDHTSGTSIRGKTQVSNLANKQMKKMLHLAALSASHTDIEMIAYYTRRVNDGKSKMCALNIIRNKLLARVFAVAKRGTAYVQFVEQAA

SEQ ID NO: 247821 - protein, 404 aa, unidentified
MKIESIYSCVAGMDVHLNKIVVCIIRVLENLEPDIFIQEFGGFKRDRRAMAEWIASFHPESVVMESTGIYWKSPYSALERVGIRAKVVNAHHVAKVEGRKTDICDAQWLAMLARAGLLRGSFIPDESVRHLRLITRHHDRLTSARAAEKNRLLKVLGDGGMRLSALVSDPHGKACKAMIGSILNGDSPEQAVKLAGSLKASRDEICASLDHELTDNHIYIANIIRDHLTYLDNTLADLEQRVLTELKPWAAMVDLLMTLPGMDKLSIAKLLVEIGPDMVAFANPGRIAAWCGLCPGNNESADKRKNCKTRKGNPYVRKILIEIANAAVKTQCYFKEKYQSLIVRKGHKKAVVAIAHKIIRVVYLMLSRNECYNDKSLQFEEIRTKRNAPRWLKALRKQGFLPAL

SEQ ID NO: 247822 - protein, 314 aa, unidentified
MNHTNEIIYVGADVSKDKLDCWKPSSKSKGGSFRSFPNTKSALAALLRWLPKGAHIIVEATGGYERTLRHGAHEKGIPISVVNPKPVRDFARAMGLRAKTDRIDAALLAGFGSALKPAATPEPDPRQVELDELCTLRQSLVAERSAHRCRIKQSESPAARWSIEALIKALEEQIARLEGQIDALCSSCPKMSLARGLLRTLPGVDKVVSAALLAWLPELGTLSRKQVAALAGLAPYANDSGKKNGKRFITGGRAKLRALLHMSATSIIRTRSPLAFQYKSMVARGKVKSVSLVAIARKLVIRANTISKIIPSLL

SEQ ID NO: 247823 - protein, 348 aa, unidentified
MWIIGCDFHPSWQQVAWCNTETGETAEQRLEHGNGEAERWYRQLPVGSRIGLEATGNSQWFVEMLQRLGHEVWIGDAAQIRASYVRKQKTDKRDATHILKLLLEGRFPRLWRPSPEQRDIRQLLIHRHKLVEIRTRVKNGLQHLAMNRGMQKKRQLWSEAGQRALRELAMPGWAGCRRQDLLETLAYLDRKIAPSDRAAEETAQRDKMALLLKMQPGVGPITALAFVVTIGEASRFPRGKQVASYLGLIPCEHSSGGKQRLGGISKQGNRFLRQLLVEAAQSAVRYDESLRRPYLHRCHRKPKGVAKVAAARQLAVRLYWMLRTQTPYPEIVRIESSPRVAVVVRHGG

SEQ ID NO: 247824 - protein, 332 aa, unidentified
MALTAWLGIDVAKQKFDVALNWNTRRRAKVFRNDAEGWQALLRWLKDLGIDQVHACLEATGRYGDDLALHLHDAGHRVSVVNPAQIKHFGRAKLGRNKTDRADAALICDYCRLFEPAAWTPPSAALRQLRDLVRTREALTASRVEWTNRRNSGQGSAAADAAMAGVIARLEAEIVALDQAIEDAIGQNEDLRARHDLLISVPGIATHTAAVILSEMPGPEVLRTAREAAAYAGLNPSHRQSGSSLDGPSRISRIGNATLRAALYFPALAAIRWNPLVAALRQRLKDQGRLKPKQIVGAAMRKLLHLCFGVLKTGKPFDPNHASATDKTAATT

SEQ ID NO: 247825 - protein, 395 aa, unidentified
MNKIVHYIGLDVHKETIAVSIASQNSTEVRRYGIIGGTLDAVDKLVKKLAQENVELRFAYEAGPCGFVLCRHLCHKGIHCEVIAPSLIPKKASDRVKTDRRDADQLARLYRAGELTAVHVPDQEDEAIRDLVRARTSAMTDQRQGRNRLKGFLLRLGFRYTGKSSWNDAHKRYLSGLVMPQGPQQIAFQEYIHAVNDATDRLERLAKAVEDASLGWKWEPVVRALMSLRGVQVLTAMTLVAEVGDFSRFEDPRSLMHFFGLTPSEHSSSDKRVQGGITRCGNAHCRRVLTEAAWHYRLQPKVSEAIQKRQEGQSKEVQLIAWKAQERLHKRFKQLAAKKKSVVAATAVARELVGFVWAIACRVKPAEQPAAPEIIRTCRGKVYRLDPEKKFQKHK

SEQ ID NO: 247826 - protein, 379 aa, unidentified
MHAITLHLGLDVHKDSITIAIAQAGLKGEIRVFGTITNDLHALEKALTRIRKAHRGAPLEVAYEAGPCGFGIARRLQQLAVPCLVAAPSLIPKQPGSPFKTDQRDARTIARLLRAGELTAVYIPEPTDEAIRDLCRARTDAVDDLRRCRLRLKSFLLRHGYRYHGKANWSQPHMRYLRELVLPHPAMKAILEEYLQGIDAAHQRVQRIEASMLSLLETWRLKPAVHALMAFRGFQLVAAMITVSELGDIHRFAHPRQLMTYLGLVSVEHSSGPRQHLGAISRCGNGHARWLLVECAEHYLAPPKVSKELSRRQQDQPPQVRALSWKAQNRLHLRFTRLLARRLQRNKAKVAVARELCGFIWALLRTQDCYRQATGGAAS

SEQ ID NO: 247827 - protein, 341 aa, unidentified
MDKELYFGVDVSKKTLDLAYYDGEAIDWKNAHIQVSNDDAGFKKIGSWVAKVGKDFATFLFCMEYTGLYNQNFRLWLESKEYIYGIVEPRKMHRFEPDLDDDQRSLDRIKTDELDAFRIAIYCEQNHKKILRNPSKLPSSVYFKLKRLLAERKQNTKQSVLYKQQLHDICAYDTDLSVERKKLLLKNMQENQKAIDKEIDSYMNEDTSIRKNYNLLTSIPGIGRIIALETIVLTENFTAISNPRKYACYIGIAPFKKESGTSVRKKTGVSKKGFSEAKADLSIAVLSAIRNNPSIRDYWIRKRKEKCGGIVLNAIKFKLVLRMFAVIKRGTPYVETDAYKN

SEQ ID NO: 247828 - protein, 411 aa, unidentified
MDVVNARCAGLDVHKATVVAGVRVPGPQPGARRGETKTFATTTRGLRDLTNWLRTHGVTVVAMASTGVYWRPVYEALEGIVQLVVVNARHVQMVPGRKTDVKDCEWLAQLLECGLLRGSFVPPRAVRDLRDLTRLRKALIRERGHHVNRIAKTLELAHLKLSCVVTDLMGKTGRAILQALSAGIDDPERLAACAQGLLRKKQAALREALGGRLTPHYAFLLQQHLSLIDGLDAHIATLDTRIEAAMAPLAEAAALVQTMPGVAARAAQAILAETGVDMDLFPTPAHFASWARLCPGNHESAGKRQSTTTGKGATWLRATLQETAWAAVRSKKSYYRALYHRLKGRRGAKKAIVAVQHAMIVALWHMLKHGVTHQDLGADYFERRNIARIRRHHVRRLEQLGYDVTLRGKAA

SEQ ID NO: 247829 - protein, 340 aa, unidentified
MEWTVAVGVDTHKDAHVCVALDRLGRQLERASFPASEAGYGACLAWALALGEPAFAVEGCGSFGAGLARVLTGAGLPVWEAERPRRRERRRGKSDTLDALRAARRLLSDGEGLSELRSLPGREAVRVLLVECRSAVSARTQALNQLHGLALTAPTRLRERLETLAGERLAEAALRLRPAETADVDERVLVEVARRLGRRAQALTRELAALDARIAELVRSLAGKLLAEPGVGPVCAAQLVVSSGDPARLRSEAAFAALAGTSPVEASSGRQKRHRLNRGGDRRLNEALHVIALNRIRHHPETAAYHARLLERGKTRREARRCVKRVLARYFYRQLCALLA

SEQ ID NO: 247830 - protein, 291 aa, unidentified
MEKITTVGLDLAKSVFQVHGIAEEGAVIVRRALRRSQVLDFFRKLQPCLVGMEACGSAHYWAWEIQALRHTVRLMPPAYVKAYLKRNKTDAADAEAICEAVTRPTMRHVPAKTQDEQAAGMVLKARDLLIRQRTQSINALRAHLAELGIVRATGLVGIISLAAIVRDESDLRLPGEARMALEELVEQIETVTARIERLDRKILETVRKDDSARRLTAIPGVGPIIAATIRAVVQDPAGFRTGRDFAAWIGFSTRAFQRRKRTDSGLRVSRNASFRLWPQRLSFGNTLRTKI

SEQ ID NO: 247831 - protein, 423 aa, unidentified
MKFKAQDKQNQLIEKITPQHLVVGIDIAQLTHVARAVNFRGIAIGNPLSFSNDEEGFQILLRWIQSLQAAHNLNCAIIGMEPTGHYWLNVSRWLYEKQFEVVLVNPHLVKKNKENRDNTPSKSDKKDALVIADMVKNGYYSFIRNTPEAFAELRVLLSNRDSIVTRLVSAKNQIHRWVDVVFPELRQVFKNLMCRGSLATLRLFPTPEELSKLTPQEVVKGWKSIMQRQPGDKKAQTLIALAHHSVGSKQATKAYKLHLTQLLAEYDLACEQLQVVEAEIAAVLARIPFAKSMLAVKGISAISLAGVLGEAGDLSGFSHGNALLRHAGLNLAEASSGKWTGQMKISKRGRSRLRRFIFMMTISLVGNNPEFKAMHAYNVQVRKMKKMRSLMKLCGKLARVLVGMARSKEAYNPYKTKPIQQAA

SEQ ID NO: 247832 - protein, 344 aa, unidentified
MKDTTIAVDLAKSVFEIAVSRHPGRVAERHRLSRDAFLRFFATRQPATVLMEACGSAHHWGRQIQGLGHQVLLLPPHQTRPYVTGNKTDRADAKGLLEAQRNEEIRPVPIKSLDQQALCALHRLRSAWLAARTARINTVRGLLREFGITIPLGAGRVGTIVQRLLEDADSGIPDAIRPALSEARDEILELERRMRSVELQLRALARQIPEVRKLQTIPGIGLITGTALVAFIGDVRRFPSPRHFASYLGLTPKERSSGLRRRIGAISKKGDVYLRMLLTHGARSVLWRARSLETLDRLRAWALRLERLRGHNKATIALANKLARIVWAVWRHDTEFEEQLPVVA

SEQ ID NO: 247833 - protein, 409 aa, unidentified
MEAIFARAAGLDIHKKTVEATVRILEGNHVQQQTRRWGAMTREVLAMADWLEAQGVTHVAMESTGVFWKPIYNIVESRFTVILVNARHLKQVPGRKSDVRDSQWIAQLLQYGLLRGSFIPPRPQRDLRDLTRHRTQLVAEQTRVVNRIHKILEDANIKLGSVASDIMGVSGRAMIHALMEGEQNAAKLANMAQGQLRGKIPELERALEGWVTEHHRFVLSMLWEELAGLEELVAKLERRIEEVTRPLAPRVKQMDPVPGVDRRVAEVVLAEVGADVSSFPTHAHISSWAGMSPGNEESAGKRRTGRTTKGNRWLRQALVQAAWAASHTKDTYLAAQYRRLVGRRGKKRALVAVGHSILVIIYHLLKDGTCYSDLGGDFFDQLRPERLTHYYVKRLERLGHRVTLEPCTV

SEQ ID NO: 247834 - protein, 482 aa, unidentified
MKKKSIFPYQSQELNTLFEGAGNNAKVMCIPIDYAKKEHVVMFCNGHGNILRKPFPIKNSPEGLEYLTQQVLRSCHHRGIDPKYAFFGGEDVGSYAQNFINTLRSGGWIVAGVNAHDAKKQRANAQASTDALDLMGIASMLLNRRANCSPAQTGIYRNLRSLTRHRKKVVDMSTEEKNRIHTIVDQVFPGFLDEKNTGISPFSNSSLYLMTDRFSPAQIRRRKRQKLIETLRRYGTVKPEVAANKLQIYAAHVLNTPTEYLSALQVSLAQHIKHFNCLQESIEHLEKEMALWLAQTQGAFLTTLRGIGIVLAAGATAEIGDPTKQKPVANLVSYSGIIPRVKQTGGPEGKTRIGKVSKRCNRILKNYVVQSAHHIGLHGPEDLMADYKRRDTNGQHADFGIGRRYLRTVMCLMRTSQIYIPKRLRSKGINPEERAGYFLMIWPSLRDKWAKLGALEAAFANDNPLGRWRNMVQELYEIKLKL

SEQ ID NO: 247835 - protein, 313 aa, unidentified
MNMEKDAILIEQFIEKGFGIDVHKEMMVVTIMGKGIKKQTREFKTFTEDIQQCKAWLESFEVKQGAMESTGVYWKPVFNILSEGLEIKLVNARHIKTVPGRKTDVKDSEWICKLLLSGLLNGSFIPPELTRETRDVFRYKVKMTQNLAAEKNRIQKILEDANIKLSSVVSDMSGVTAIKLIDGIIEGQTEINQLIEENYHGKLNASKSDFKKAMNGRLTDHHKYMLLEIKDHITYLEDKIDKLEKKLEEKLDAYKSEIALLDTIPGVHTESAIGIISEIGTDMSAFANEQKFASWAGMCPGNNESAGKKKVQE

SEQ ID NO: 247836 - protein, 329 aa, unidentified
MDHIAIDLGSRQSQVCVRKSSGEVLQEQKLPNALLPQLFDCPPATVVMETCSEAFAVADLARSKGHQVRVVPATLVRALGVGQRGIKTDRRDAQVLSEASCRMDLPSVHLPSAWSREAKTLCGMRDGLVTARTKLINTVRGWLRTQLANKRPSRYALTKALRAESGDRLPVYVERQLVVIDQLSEQIKEADEAVAKLADQSEICRLLMTAPGVGPKTAVRYAATLDDAARFPNAAQARSYLGVTPGENSSSTRRHITGITKAGSPQTRWLLVQASWAALRYCPSDPMCRWAKQVALRRGKHVAVMALARKLAGVLYAIWRDRKPYSPQA

SEQ ID NO: 247837 - protein, 400 aa, unidentified
MISVGIDVSKGKSTVCILKPYGEIMCSPFEMLHGEKELNALDDLLNKLDGEIRIVMEATGIYHLPILTFFHEKGYFVSVINPFAMKKYAKDNSIRGAKTDKLDSIMIANYGIEKWFKLQRYKGDEEIYAELKLLGRRYRHYMELHVKALQELTHILDYVMPGIKKMFNSWNEANGKDKLSDFVEQFWHFDLITAMSLEKFTEEYLDWAKEKKYHRSRSKAEAVYELASNGISTLSSGTPSTKMLVQEAISVLRTVDSSLFLILTRMQELAKTLPEYSTVREMGGVGDVLAVKLIAEIGDIRRLHSAKALIAWAGIDPPPYESGQFIGSKRKITKRGSSTLRKVGYEVMRVLKSHPAPKDDAVYNYILKKESEGKSKKHAKIAGLNKFLRIYYARVMAVYQ

SEQ ID NO: 247838 - protein, 351 aa, unidentified
MPRTTTVHAVTNIGIDMGKNTLHMIGLDSRGAIVLREKVSRGRITSRLANLPCCLIGIEAGMATHYVARELAALGHDVKQVPPTYAKPFRQGHKNDFRDAHAVAEAVQRPTTRFVPAKTDEQLDLQALHRVRSRLVSERTAVINQIRGFLLERGIIVRQGLRFLRQLLPDILAKRTDVLSPRMVRIVADLASDWRELDERIETVTDEIETLAKSDDSCGRVMTVPGIGPIISSAMVAAIGSGGAFARGRDFSAWIGLVPKQMSTGDRTILGRITKRGNGYLRMLFMQAARVILLRPANWSKHGFGVWLARAAQRLHPNVLAAALANKLARIAWTVLAQERSYEARITKAVA

SEQ ID NO: 247839 - protein, 354 aa, unidentified
MKRSTKYVGLDVHQATTVASVREESGRVIARSVLETHGPSILEYLRGMRGAIHVAFEEGTQSQWLHDLVAPLADRVIVCDPRQVARQGNKGDHVDADRLAELLRLGGLRPVYHGSADHADLQDLTRSYRNLVEDGTRVMLRLKALFRARAIRTSGTAVYHPAGRAEWLAQLPDRGVRFRAEVLYAELDVLRALRPKAKAAMLAEARRDPAWPVLRAIPFLGPVRVALLLATMGTPWRFRTKRNLWAYAGLAVVTRSSADYALVAGQPVRRRRAPLTRGLNRNHNRVLKDVFKGAATAATARPGPLQDFYHGMIARGMREELARVTLTRKLAALTLRLWKNGECYDPAKVTMQSR

SEQ ID NO: 247840 - protein, 338 aa, unidentified
MEFYVGIDLHSNNHYIGIIDGEGREVFKKKGQNDLGGILETLDPFKDLIQGVVIESTFNWYWLVDGLMDSHYKVHLANTTAIQQYSGLKYSDDTSDALWLAEMLRLGILPEGYIFPKKLRAVRDLLRKRLQLVQHRTALLLSMKGMISNCLGRNITRSTLTKLNNESIEELFSDAYQTMSATSLQAVIESLSNQIKKIEKVVVKEVSLKKEFKKLLTVNGIGTILGITIMLETGDISRFSAVGNYSSYCRCVPSKKMSNGKNKGSGNKKNGNRYLAWAYVEAAHYMQRYCSKARSWAQKKASKKGNVVATKALSNKVARACYFIIKDQVPFNPAKLFN

SEQ ID NO: 247841 - protein, 346 aa, unidentified
MTYYLGIDLHKRTSTWVLLDEDRSLVKKSVHPCATYEHIARAIHDVPVPLADIKVALEPVCGWRWTADMLTHAGMDVSCANTLKTRLIASSKLKHDTVDAIALAELLRADFLPKSYQAPPDIVALRDLVRERAYLVHMRTGLKNRLQGIVTARGSILPLSSVMKKEGAYWIREHGDDDMRRMVSLIEMITKEIRTLDERVEYVARTHPVPQLLMTMPAVGPVTAVTVFAEVGDFTRFSSPNKLTAYAGLVPSERSSAGRIAHGHITKLGSPYLRGACVEAAMRIRETTDPVLYGHYLQLKPRAGAMKTRVALARKMLTIMWYMVNRHEPYRMSTHTAKLGDLERPF

SEQ ID NO: 247842 - protein, 290 aa, unidentified
MHVTTIGLDLAKNVFQVHGIDDHGEIAFNRALRRAQVLAFFERLEPCLVGIEACGTSHHWARELIKLGHNVKLIPPAYVKPYVKRGKSDAVDAEAICEAVTRPTMRFVEVKTPEQQAILAVHRTRDLIVRQRTQTINMLRAQLAEFGLVLPQGVYHPLRFAKDCVDAEQPDLPKDAQEVVLDLCDELLFLHTKILRHMTQIAKSEKRVALLRTIPGVGPITASAIVATVGSGKQFNNGREVAAWLGLTPLNRSSGGKERLGHISKMGDQYIRRLLVLGMTSRIRSIRCRD

SEQ ID NO: 247843 - protein, 416 aa, unidentified
MKIVRPICCGMDVHKNIIVATIGITNKKTRITEYIQETFSTLNHDLLNLKQWLINHKCFDACMESTGKYWIPIFNILEDEINIYLTHPKYVKAIKGKKTDKKDSKWICDLFKHDLIKFSFIPPKEIRALREISRYRYKLVGMRSSERNRYQNCMTVSNIGIGSVFSDPFGKSAQAIMKEVLESDIIEDEKILKCIHGSCKNKDKILDSIKHCNIETDQRFKMNESMTHMEELQVHINNCEIEIMKRAAPMFDRFMHITQLPGISTLSAILIISEIGVDMKQFESDKQLACWAGLAPANNESANKKKSVRISKAGQYLKPLLVQCALGAIKDKEGYFGIKYSRIKKRRGHKKAIIAIARMMLVSIYHMILTGETFNPSDYESFRNPKPPIKQQDLTEESAIEFLKKSGFDVSKLTKL

SEQ ID NO: 247844 - protein, 351 aa, unidentified
MLLIGVDYHPSFQTIAFFVEETGECGEQELNHSDGQAEKFYRDLKQRGISVRVGMEATGYSRWFERLLAELGFEVWMGDPAEIKAKRVKKQKFDREDARLILRLMRENNFPQIWVPGPENRDLRQLLWHRHRLVQMRTRIMNQLQALAMNEGYRWKKKLFSEQGRTQLEKLTLAPWASRRRQELLELLDRMNPTIEELTAAVERETRKRPEALRLMTHPGVGPLTALAYVLIIGTPTRFQRGKQIGTYVGMIPSEDSSAHKQRLGHISKQGNSLLRFLLVEAAQAAARIHPDWRRRYIHLAMRRHKSIAKVAMGRRLAVRLYWMWRNGCEYSPSLEFGSYAGQLGTVHGVK

SEQ ID NO: 247845 - protein, 368 aa, unidentified
MKKHSTTPKSPKQASACKGGPITIGLDLGDKTSRYCVLGANGEVMSEGSVATTRKAMAKKFAQMRRCRVALEVGTHSPWLSRWLSSLGFEVIVANARQVQLISASSRKNDRLDARLLARLARVDPQLLRPIRHRSESAQADLMRIRVRAALVEARTGLVNATRGFAKAMGERLPACDTDSMGVERMESLPEALRDTLKPLLEQVESLTEKIKESDAKIEQIARTQYPETELLRQVSGVGTLIALTFVLTVEDRERFRKSRDVGCYVGLRPKQSESGQSQPQLRISKEGDVYLRTLLVQAAHCILSRRGPDTDLKRWGLKLASRGGKNAKKRAVVAVARKLAVLLHRLWVCGEVYEPLRNSQKTMRAVA

SEQ ID NO: 247846 - protein, 353 aa, unidentified
MKFYSKQHKYYCGVDLHARSLYVCIIDQKGKIVKHKNIDATPADFLEIIKKYRKDIVVAVECMFTWYWVADLCREEKISFVLGHALYMKAIHGGKAKNDRIDSHKIAVLLRGGMIPMAYVYPSEMRATRDLLRRRNHLMRKRADLLAHIQNTNHQYNLPRFMKNICYKGNREGIAEQFSDECVRKSVEVNISLIDQYDQLLRHLEYYIDKKAKVHNPEALFRLRSVPGIGHTLALIILYEIHEITRFPRVQDFVSYSRLVKTSKESAGKHYGHSGGKIGNAHLKWAFSEAAVLMLRESSDIKKYKAKLQRKHGKAKALTILAHKIGRAVYYMLKRKEVFNTERCLNKQLIQTG

SEQ ID NO: 247847 - protein, 387 aa, unidentified
MDVRTVNNLPPAAAHDEAVRCLLAIELSKKSWIVAVNTPLSEKISRYRLKGCDWKGLLELIEKIRARVARELNRPVEIISCYEAGYDGFWLHRLLEAHGVRNYVIDPASIQVDRRARRAKTDNIDVAQLLRSLMAYLRGDPKVWSVVCVPSVGEEDARRLHRERDRLINERVQHVNRVKGLCAVHGIYDYEPLRSNRMLRLEQLRTGDGRKLPPYLKAEIVRELQRLELVLTMIKTIEAERKAIISAKSPHLNVKKIQDLIKIKSIGPGISTVLVGEVFYRKFNNRQRLGSYVGLTPSHFQSGPMSRDQGISKAGNPKARTVMIELAWIWLRYQPNSPLSVWFHQRVGTAKGRIRRIAIVAVARKLLIALWRYLETGLVPTNAVVRG

SEQ ID NO: 247848 - protein, 348 aa, unidentified
MTMTIVEAARAVTGGVDTHLDVHVAAALDPLGALLGTERFETDPGGYKALLTWLESFGQVTKVGVEGTGSYGAGLARFLRRADVEVIEVDRPNRAERRRSGKSDPLDAVEAARAALGGRATSISKSKDGAVEAIRVLVVAKRSARGARVKAVVQMRHLVITAPDQLRCRLKGLSVAGLVAESARLRPSRSGDPVMAAHKASLCSLARRIQGLKDEIAELDERIERLLVRTAPELLSRFGVGPDTAAALLVSAGDNPERLHSEAAWAHLCGVAPIPASSGKSNRHRLDRGGDRHANSALWRIVMVRIAHDPETTAYFERKVKEGRSKRDVIRLLKRYVARELYRYLPRG

SEQ ID NO: 247849 - protein, 368 aa, unidentified
MKNVTTYVGIDAHQKDLVIAMLVGSQATPVTWTVPNEPNAVRRLIRKLEREAPGPVQACYEAGPGGYALQRQMTTPRVACQVIAPALIPQKPGERVKTNARDARKLAELHRAGLLTEVRPPTPEEEAVRDLCRARDDVREDLQRSRHRLGKLLLRRGRHYPGRNWTRAHRRWIESIPWTQAAERVVVDDYLLAIDHLEARRLELDARLAEIAETDPYRERVGWLRCFRGIDTLTAILILAELHDFRRFQSPRALMAYLGLVPGEDSTGEKHRRGRITRAGNALVRRLLVETAWHYQHRPRVGVAVTRRRQGQPGRIIAMADKAQQRLCRRFRRLREHHKPAPKVAVAIARELAGFLWAALQPAPVSAS

SEQ ID NO: 247850 - protein, 428 aa, unidentified
MKYNKQNEKIEMITEDFLIVAIDVGSTTHYARAFDYRGIEYSKKAFSFKNTDQGFKTFKSWACAIAVQNKKKIFLVGMEPTGHYWFNLGKFVQNSGMILAHVNPAAVKKSKELDDNDPSKNDRKDPKVIAGLLKDGRYSFPYMPEGVYAKIRDISYLRDDAQKSLIRIKNRLARWLSIYFPEYKEVYGQIDAKTGMLILEEYPLPKDIVTLGVEGVIKIWKSHKARGAGQRRAEKLVNAAKRSVGRTESDEIARIELKVLLKDLKEYQQRVQVYENLAFEALLEVPNAEKLLNICGVGVVSVMRFVAEVGDISRFNNAKEIQKLAGLSIKTNSSGKHEGVGKITYRGRKRLRYGMYELAISLVSRNKAFKSIHQYFTTRQNNPLKGMQSMVAISCKVIRIFFGILVNGYEFDENKMLQDIVRPEATIS

SEQ ID NO: 247851 - protein, 427 aa, unidentified
MGAMSESEVQELQFAALVGIDWADQKHAWCLQAADTTHRENREVEHTPEAIEAWVGQLCRRFDNRPIAVAVEQVKGALVFMLSKYGALHLFPVPPTMSAKMREALYPSGSQDDPRDADLLLELLLQHRDKLRRLSPDSEATRRVQNLVDERRKLVDEKTAQINRLTHQLKIYFPQMLEWFEQLDTELVCVLLERWPTLEELQKVPPQRLRTFFHKQRCRYPELIERRLVGIRQAIPAIRDRAVIEAKSTVVKVSAQVIRSLVRGITDLDRKIEEAAAAHPDFFIFESLPGAGAVLAPRLLAAFGSQRERYTSAEEVQTYSGIAPVMKRSGKKKWVHFRWACPKFVRQSFHEWAGHSIAHSQWARSYYQQQRKRGKGHHAAVRGLAFKWIRIVFRCWKDRAVYDESRYLITLAKRNSPLAAVPGGTML

SEQ ID NO: 247852 - protein, 445 aa, unidentified
MAKKELQIINPNAAGIDIGTENYHVSVDGKTVKVFETYTESGVELLKYLKANGVKTVAMESTGVLWSPLYDILEKGGIEVCLVNGSHVSNIPAQKSDFQDCRWIQKVHSYGFLRASFIPEEIIRELRIYVRQREDIIEAASESILHMQRAFEYMNIKLHNVLSDIKGKSGIMIIEAILGGERDASKLMSLLSKGVSKSKYPAIKASLVGNYKREYIFLLKQGYERYQFLQHQLNLCDKEIETLLKEITKDMPQPPETPSSPSRHNHPSVDNLHTMLTQMTDGRDATVLPGFCDKTILKLVAELGTDLSCWPTDCHFTSWMGLSPRKKQSGKMNRTKYNPVKSKVGQIFRESAMSIANSKHLALRGFYNRIKSRHGYKKAIKATARKLAVLYYRFMTKGLEYVERGMKEYEERYRILMFKNLKKKASKLGFELVEVANNYEVLEYV

SEQ ID NO: 247853 - protein, 469 aa, unidentified
MKHKNRRAKDQKVSVINNDLELVEPDAAAVDVGSRSHWVAVNGQRDPNPVREFGTFTSDLASLANWLAQCEAKSVVMEATGVYWVSLYEVLEERGFKVFVVDAHTVRHLPGRSKSDVKDCQWLRRLHSFGLLRACFRPPAQIRKLRSYLRSRGHIIEAAAQQQLRMQKALTLMNVQLHHVISDISGLTGLSIVRAIVSGERDPHKLARLRDPRILASRETIRKSLEGNWQEELLFDLQITLQTFDHFQGQIRAYDQQIRQELKKVPSHKDLVQEVLPPVRLNACRKRPGMSQEDQLDLRAELYRISGVDLTRIDGISLQTAQKVFFEIGTDVKAWPDEKKFSCWLGLSPNHRISGGKVLKRSSRKVVNPLSIALRLAARALRNSRSALGANFRRLTAKIGMPKAITAMARKLAVLIYRMLRFGTQYVDKGMQHYETKYQQSKIQYLRAQAARVGMILLPKQPAVASAAT

SEQ ID NO: 247854 - protein, 346 aa, unidentified
MILIGCDFHPSWQQVCWLNMASGETNNQKLVHASGDAEKFYRRLTVPVRVGIEATGNCQWFLELLGKLGHEVWVGDAAKIRACDPRQQKHDPRDARLLLQLLVENRFPRIWTPSSEEKDLRQLLLHRYKLVRMRVQVKNELQHLAMNKGITKGRRLWSAAGEKVLCELPLAPWASRRREDLLRLRSMLNEQIAGLDQAVEKVAEQNDRARLLMTQPGVGPITSMAFVLTMGDVSRFPRGKQVASYLGLIPREYSSGGHQRLGSISKQGNRFMRMLLVEAAQCVVRYDAGFRNEYLHRCHTKPRGVAKVAAARKLAVRLYWMLRTNTAYPEIARVGSSSRVPLGGAS

SEQ ID NO: 247855 - protein, 388 aa, unidentified
MIGIDSHKRSNTALVLDGREKVLARRRFPNDSAGYRDLKAFARQWQERTWAVEGARGVGLSLAQRLAMERELVLDVPAVLSARVRALGGGSGRKTDEADAYAVAVAGLRGHGLQVVKPEDDIAVLKMLSDRRQQLVEQRITAVNRLHDVLQDLLPGGASTRLTATKAHEILNSLTLSDPVALARQQLAVEHADDVAALDVKIKTMAKRITEALRQQPSAVTDIKGIGDIGTALILGEVGDVRRFASKHHFASYTGTAPIDVSSGDQNRHRLNRGGNRRLNYALHIAVLVQIRFPGPGQDYYARKRAEGKKPLEAMRCLKRRLSNVVFHALQDDLRLRPGAAGPEGHSGATLQSSASDPTPTVSPSDQSLTGPATRNATPPRTKVKVAS

SEQ ID NO: 247856 - protein, 316 aa, unidentified
MIEKTYVGIDVSKAKLDIAIRREGLRKIATFINSQEGIEECRKWLSDNNAKEAIIVVESTGSLHWLVCLLLTDYGYDVRLINPLITKKYQKSSIRDAKNDKIDAIRLAEIGRIEENLPQFFDSRETLKIKRYESLLAKLVHAKQQIKRAYEDAIEATTIIDVSLNLDCILECIELLDTAIDVLKKMITDTADDLAKEISQIKGVSIFQATVLSTAIKGRSFENRDQMIAFFGLDIRVRQSGTWEGKGCLSKRGNPFYRKILFQIGWSLWRHNEEYKAYYDSIHGRGKHYYTCILATARKFLRYFFRVYKFSLVNSL

SEQ ID NO: 247857 - protein, 429 aa, unidentified
MDEVDRTRLEQFRQLRRSIRGSEAYLIVGIDVGKEKHTAFLGTANGKTVLKRLSFANNQEGFKKLLDQADGAKGKGGFQEIIYGLEPTANYHKPLADFLVQLGRQVFLVAAVAVKGNRKSLDGRWDKHDGKDAANIADLISQGKFLYYEYPDFRLRELRELLALKRRLKRQEHSLRVRIRNHLVAKYFPELDGHFGHSEREGLAIVRWCLDPSLLADYTFEEFRNLVTTGRRSLSQSRRLLTIWETAKDSIGCDVGAAAQFEAKVMVEGLGQVREAIAETDRQIQERASKFPEYEYLLSLPGFGPDVSSKVLGAIGDPFRFQNGRQVLKLAGWDLNAERSGKNSDRAQPVISKKGKADLRYALYQAALVASSRNYGIRLYFAKKLQGRQGEPGILTKMRVKLAAKLLIIAWTLMKKKEPFNPDYLTQEE

SEQ ID NO: 247858 - protein, 288 aa, unidentified
MEGPIVSIDVSNGNSHYMCFIKNNKRFGKVKKIDHDIEGFKRLLEDIQKLEAETNEKVCAVFEATGVYTKPLERFLSKNSIKTYIINPLESARKRKEEIHNKKTDKLDPISISKVYYDKEEMMELKKKDETYNWLRKKNRLYEDQLNHLRKYKVTFQNQLSICFPGYLDLFKDGYSDIPMTILKKYPHPDLLKNKKAETVASTLEEYRYISSIDGIGPNLAARIIAEIGDIEEFKSREALVAYAGLDPHIYQSGDQDGKHLKISKKGNKYLRCLLFLAVGCSIRGAKD

SEQ ID NO: 247859 - protein, 359 aa, unidentified
MLAMGDSALRNEADAMTFVGCDLHTRMQQVAVLHTDTGEVSEHQLGHEGSAVEDFYAALPRPVTIGIESTGYAVWFHILMQRLGHTLLVGDAAKIRAMVVRKTKTDRRDALPMLDLLSHDRFPAIRVPDPITRDLRALLMHRMRLGRIRTMVKNGLHAIALNYRLGRGSTLLRQAGLTELQALALPRYSAQRRDQSLELLTGLNAQIRELDTAIATAALAPPDAPRPITHPGVGALTALAAVVVLGPVDRFPDSKHVVSYVGLAPALNASADKYHLGHITKQGRTLLRFALGQAASHAARMDLDLKRTYFTIMHRRGRPQAKVAVARKLLLRLFLMLRDQIDYDECRRRGHRMGAIASA

SEQ ID NO: 247860 - protein, 343 aa, unidentified
MDHSAGLDVSVKETSICIVDDTGRIVREVKVASEPEALLQVLKNPAYHFKRIGLEAGPMSQWLFSALAEAGLPVICVETRHMRAVLKAQINKTDRNDARGIAQMMRVGLYRPVHVKTLRSQKLRMLLTHRKLLQSKAIAIENDLRGTLRNFGLKVGMVGKVKFEARIKELVENIPDLAMLVEPLLIVRRVLREQFVIQHRRLLAIVRDDDVCRRLMTVPGVGPVVSLTYRATVDVPARFRKSKSVGAVFGLTCAKYQSGEVEWSGRISRCGDEMMRVMLYEAAQSMLRSKKWSWLKAWAMQIARRRGMKKAIVALARRLAVIMHRIWVDGTEFRWAREQAAAA

SEQ ID NO: 247861 - protein, 370 aa, unidentified
MRFYQGQHPFYCGIDLHARTMHVCILDQAGQTVFDKGIPCRPEALLRAIQPYRDHLVIGAECMFAWYWVADLCVEQDIAFVLGHALYRKAIHGGKAKNDRSDAGKIARLLRGGTFPLAYAYPKGMRETRDLMRRRTYLVRKRAELLTHLQILNAQYNLAPFPKKLACAANRTEMNVAERFADPSVQKSAAINLALIDRLDELIGDLELYLVRTAKVDDIQTFYRLRSIPGVGKVLALILLYETHDIGRFDTAGQFLSYARLVRCAHESGGKKLGTGGKKIGNAHLRWAFAEAACLFLRSSERAKKWKQKQAAQRGEGKALAILAARLGRAVYHMLRKGEAFDEDRFWSGARRTRTGSSSLSRKEARDAGH

SEQ ID NO: 247862 - protein, 352 aa, unidentified
MSQKLESAIAVIGIDIGKNSFHVVGHDERGAIVLRQKWSRGQVETRFANMPRCLIGMEACVGAHHLSRKLNSLGHDARLMPAKYVRPYSKGQKNDFRDAEAIAEAVQRPTMKFVATKTADQLDLQALHRIRERLVSQRTGIINQIRAFLLERGVAVRQRLRFLRAELPNILATPPDVLSPRMVRIIKDLACDWRRLDERVEGLSNEIEAIARQDAGCERLMSVPGIGPIISSAMVAAIGAGDVFTKGRDFAAWLGLVPKQISTGDRTILGKISRRGNRYLRVLFVQAAWVVLIKPKSWERHGLKSWIEAARKRLHRNVLAIAMANKLARIAWSVLDRGRDFEARSIANAQPI

SEQ ID NO: 247863 - protein, 350 aa, unidentified
MVVVGADVHKRSHTFVAVDEVGRKLGEKTVKATTAGHAEAVMWVRERFGSQVVWAIEDCRHLSARLERDVLTAGQQVVRVPSKLMAQTRASARTRGKSDPIDALAVARAALREPDLPVASHDEISRELKLLVDRREDLVAQRTSTINRLLWRVHELDPEHAPKPRSLDLAKHRRLLGEWLAIQPGLVAELARDELADITRLTEAINALAKRIGDRVRTVAPTLLSMPGCGELTAAKLVGETAAVTRFKSEAAFARHSGVAPIPVWSGNTAGRVRMTRSGNRQLNAALHRIAVTQIRLEGLGQTYYRHRIAAGDSNPEALRCLKRRLSRIVFGHLYTDHQNRNQPCQPAAA

SEQ ID NO: 247864 - protein, 402 aa, unidentified
MISKTKNTVRQFDTYIGIDLGDRKHHVCATDKHGDILKEFTISNDRHALRQLCHDFPGGSVGLEVGTHSPWISRFLTAEGMETTVANARKLRAIYQNDRKCDKLDALMLAKLLRVDRELLSPIQHGSEQAQKDFVAIKVRASLVRQRTGMVNTLRGVVKSMGMRIPSSSAEAFHLRVREFLTEQPELESAIAPALKALETLTEQIRVYEKAILDAAMVHHPQALKFQQIPSIGPITSLAFVLSIEDPARFKDPRDVGAYLGLVPRRDQSGGTDKQLPISKAGNKYLRQLLVQCAQYLLGHFGPDCALRDQGLKLVARGGKAAKKKAMISIARKLAVIMIAMWQKGSDYEPYPPVRKTCDTPQQPKTSKSRAPSKRVASKADREPDRASRKVAHKNPELRRVS

SEQ ID NO: 247865 - protein, 378 aa, unidentified
MRKHTTAKKNQKTLTKTKGKQVRQMAVRQRLTIGLDLGDITSRYCILDEAGEVVSEGQVPTTKAGMNSLFEKMPSSRVALEVGTHSPWISRHLGSLGHEVIVANPHKVKLITQSVRKNDRIDAQQLARLARVDRKLLSPIRHRGEQAQADLAVIRARGELVESRTGLINCARGLVKPMGERLKKCDADQVAEALAKPLSEVAQVVIGPLLKSVETISEQIVGYDQKIEEIAKRYPEVELLTQVYGVGTLIALTYILTIEDAERFQHSRDVGAFLGLQPKQRESGNSQPQLGISKTGDRLMRSLLVQAAHCVLRKGAPDSDLRAWGLGKMGQGGKNAKRRTIVAVARKLSVLLHRLWVTGEVYDPLYQRKSAPAAKAAA

SEQ ID NO: 247866 - protein, 402 aa, unidentified
MIGVGIDVSKSKSMICILNEYGEVLRTPYEISHTETDLKELSKSIKGYGGKNDVRVVMEATGAYSRPILYYLLDEGIFVSEINPLAMRKYRADINFRGVKNDRIDAIAIAQYAVEKWNRLKEYQRADKEYAAMKALSRQYLSYMRPHVILTQNLDHLIDQVMPGIKEEFDGYDPVTGRDRLADFLEEFRHYDYITSLGPKKFEERFNKWAKKKGYRPRQNKSGKIYSLAKEGIPTLAYDPTSRLLVEQAVAALKGLNQVLYQILAQIRELAEKRPEYAAVRAMSGVGDILAPLLVAEVGDPRRYHSADALIACIGIDVPPYESGQFKASERKITRKGSKQLRKLGYLMVKNLKRIKPVQDTAVYDYYVKKKSEGKKDKQAIVAAMNKFFRIYYARSMEAYRS

SEQ ID NO: 247867 - protein, 365 aa, unidentified
MTIVDAVRPVTGGVDARLDLNVAPGPVTGGVDTHLDLNVAAALDPVGGLLGVAEFPTTLAGHRELLGWLSGFGPVARVGVEGTGSYGAGVARFLRASGVEIVEVDRPNRQARRRSGKSDPLDAVEAARAALSGRASGAAKSRDGNVEAIRALVVAKRSARSAKIQALNQIRHLSFTAPEQLRQRLAGVSRHHLAAHAAGLRPATGAGADPVITATKTALRILGRRVLALDEEKAGIDALLAGLVTQTAPQLLAVFGVGVDTAAALLVTAGDNPGRLRSEAAWAHLCGTAPIPASSGKVTRYRLNRGGDRQANCALWGIVITRLGNDPRTKAYMTRRLAEGRSKPEVIRVLKRYVAREVYHRLPRP

SEQ ID NO: 247868 - protein, 370 aa, unidentified
MKQQTKSSNITVGLDLGDRRHRFCALDERGEVVEQDSICNDRVSLRKLAGRYHGALGVMEAGAHSPWISRFLEALGWRVVVSNPRKVRAIYQHERKSDQRDALMLARIGRMDLALLYPVRHGTAEAQQDLLRIKLRDSLVRARVAVINSVRFTLKSLGYTVRNPSSARFYKVVMEEVPESVREMITPSVQALAELTARIKMLEVEINTLAQMKYPQSAQLQQIPGVGPITALYFVLKIEDPNRFAHVRDVGAYAGLCPRRDQSGESDPQLRISKRGDAYLRRLLVSAVHYILGPFGPQSALRAYGLMLAADGTARAKKRATVAVARKLAVLLLSLWKSQQPYQPFPGACLKWRARGPTIWNDCAASHGSD

SEQ ID NO: 247869 - protein, 418 aa, unidentified
MTQDSDHRFVAIDVHKSYLVVGAVAPDQTLALRPRQVPLVEFATWAERHLRPTDQVVLEATTNTWDLYDLLVPLVARVVVADPAKTKAKIASPVKTDNRDTIEMAKLLASNSIPAVWVPPPHVRELRAIVAHRQRLVRQRTAAKNRLHAVLIRHNLVPPPGDLWAAKQQAWWDAVALPPVERLRAQHDRATIQHLSSQIGEVEAELARLSVQAPWADQVPFLIQLPGVALVTAMTVLSAIGDITRFSSAKRLVGYSGLGVKVHASGQTHRSGGITKAGRRELRAVLVEAAHAATQASPLWRTRFEQLAARIGKPKATVALARKLLVLIWHVLTRHQADRLAEPERVARRLFRWGANYGLATQQGLSRAAFVRQQLDRIGVGGDLVELVYSGYVFDLQGLGPPRAIRGTTGSKEQTATH

SEQ ID NO: 247870 - protein, 367 aa, unidentified
MKKISTVAARQSKNFREQKLTIGLDLGDRSSWYCVLDEAGGVVLEQKLGTTPKAMKEVFGKMPRSRIALETGMHSPWVSRALSELGHEVIVAHARNVRLIGESRRKDDRFDARTLARLARIDPQLLAPVKHRSAQAQSHLMVIRARAGLVRARTSLINTARGLTKSYGERLRGCSPRNMNAKKARQLSPELRAALEPLLGAIASLSERIYEYNQQIEKIATNSYPRVTRLKQVKGVGTLIALTYMLTLEDAQRFRKSRDVGCYVGLQPGRRNSGQSEPQLHISKEGDRYLRTLLVQGAHHILGPFGADSDLRRWGLKLAERGGKNGKKRAVIATARKLAVLLHRLWVSGEAYEPLRNRRAMRLPAAA

SEQ ID NO: 247871 - protein, 360 aa, unidentified
MTKQVMAGIDLHSNNLMIGIVDQSGKRLKHQKVDCDLKQVTAVLEPYKARLKSVAVESTYNWYWLVDGLRALSYPIVLANPAGIEQYSGIKCADDKNDAFFLAELQRLDILPTGYIYNAKLRPVRDLLRRRLSLVHQRSALMVSFKSLYTRTTGQAMKLGTLKSMEPSQAAALYEHPANQLIAKLQKEHIEGLDKSIARIEKAVLQSARELPYYDKLNTLPGVGKILGMTITMEVGEIERFQTPGDFASYCRAVDSKRTSNEKTKGRNNRKCGNKYLAWSFVEAANFAKRYDESCRRWFDRKAAKTNTVIATKALACKLAKTAWHLMAKDVTYDQKRIFPQECGRATVSQVKGLAKSPEN

SEQ ID NO: 247872 - protein, 428 aa, unidentified
MSYRIAGIDVHKKMLAVVVTDVEVQGENQFERIRYGSNPEQLRLLAAWLIEHEVEEVVMESTAQYWKPVWGALERYWKPSCQKREGAGPMSGTLHLAQARSNRGRRGRKKDFPDAERLVKRLVADELILSFVPDAEQRLWRTVTRRKYQLTRNKVRLQNQLEALLEEAHIKLSSLVSDLLGVSARRMLKAIADGGTDPAALAALADKKLRATQAQLCDALGACTELQPVNRRLLKMFLEELHLIEQQIGQLDQEMAALLSQHPESVQRLAEIPGLGVDSAQQIIAEVGPTAATFPSAGNLSSWVGACPGDDESAGVSHSHRSPKGNRQMRRLLNQAANAAVKYKGGIFEILYRRYVPRLGHKQTIGVIAHRLCRLIWKILYQGVHYEERGPDVRKKSQRYRAARMIRELQSLGYRVEQTNSQSADVPA

SEQ ID NO: 247873 - protein, 356 aa, unidentified
MSKDIVLVADYHSENIEYRWFNEATGEERTGKFPTTEAGILGLVRQAAGELEAGGRVVWIMESTTGWARVKKLLGERAKFHLVNVLQMPLPPKARRRKTDKIDTGRVLREYLQGLLPLSSQPSRRWREIRRVVDCRQELVGRQTAIKNWIGSLLHHETWYDRRNLWSGQGMRRLRAMELPVSDRVLVGMKLAQLALLDEQVRQIEGEMQAIYDGWPEAQWVDAIRGIGMVTAVSLLAHIGPIERFRTAEDLVSYAGLAPGVRQSDQTCHHGRIGGGGTDSLLRYLAIEATTWLRQIPRYRPAFERKAKARGKKVARLHIARMLLRSIHKMLSSNVPFNPGPQRSQTGAMAVASSVP

SEQ ID NO: 247874 - protein, 345 aa, unidentified
MSKHSVRAGDVAALLARFSELKRKASERTGKSFPIVVIQEAGLDGFWLHRVLQSEGVESHVVDPSSIATSRRRRRAKTDRIDGEALLRALLAYKRGEPRVCAMVKAPTPEEEDRRRLCRERKVLIAERVKHVNRVKGLLFSQGISGYEPLRRDRRQRLDELTTGDGRPLPVHLKTQIRRELDRLELLLDQIKEAEAERDALLAAPQPAAPAPAGRMLLEFKGIGAELAAVLWLEALFRHFDNRRQLASYAGLAPTPWQSGSVDHEQGVSKAGNPRLRTSLIQLAWLWLRHQPQSALTLWFKERVSGNGGHFKKSTIVALARKLLVALWKYVTAGVVIDGAVMKDA

SEQ ID NO: 247875 - protein, 412 aa, unidentified
MGTTIAGIDVHKKVLMVIVLEVQAEQAGQVAARRRFGSTASELQRLRLWLLEQGAGEAVMESTAQYWRPVWMELEPHMKLQLAQAFSNRAPRGRKHDFKDAERLVRRHLAQELMLSLVPEPEQRAWRTLTRMKTQLTHDRVRLHNQLEALLEEMGIKLSSVLSDLLGTSGQRILQALAHGETDPERLAALGSSRLQCGKEHLIDALHAKPPAMHRQLLRLYLERLAVLDAQIAELNQMIAAAMKPYEDAVMRLAEVPGFGADSAQQVIAEVGPEARAFDSAAQFTSWAGTCPGKEESAEQNHSSRSAKGNKYLRRVLTEAAQAAVKTKGSHYQIVFRRLLPRLGYKQALWAVVHRLCRLVWKILHDGVHYIEQGIFRDPKAAKQRARTLARALRRLGYDIRLQPLESNALAG

SEQ ID NO: 247876 - protein, 350 aa, unidentified
MSKSAYERSHPIHVTTIGLDLAKNVFQVHGITLDDEVAFNRPLRQAQLLPFFSKLNPCLIGMEACSSAHHWARELTNFGHDVRLIPPIYVKPYVKRGKSDAIDAEAICEAVTRPTMRFVAIKTVEQQSLLSVHRARSLLVRQRTQLINGLRGMVAEFGVYIARGLARVIGFAENILTGEVLELPDIANEVIHNMCEHLMALHARVHWYEDRLKQVAKEDARVRLLRTIPGVGAVTASAIIASIGDGHQFSNGREFAAWLGLTPANKSSGGKEKLGRITKMGDQYLRSLLVVGMTSLVRQTKSHPERASKWLTSLLERKPARVATVAMANKTARIVWAVLTRNEPYTPHTA

SEQ ID NO: 247877 - protein, 393 aa, unidentified
MCFMAPGDKIIRRPFDVKHTKEELQPLVDEIRVQAKYDEIKVVMESTGVYHLSIAYFLQQNGIFVSVVNALKVANFNKAENFRHTKTDSIDSTNIARYGIAYWAKLPQFDLNGDKYFLLKRLCDAYLNFSEERSRILLQLQSQLEQTMPGIFDLFGGFDINSGKDKLLDFLERYCHIEDIIAKSEAEFVASYREWAKEKGYRSNESKAATIYAQAKNGIPSIPNNPIVRETIMWYVGLLRRADEALMASLTRMEDIAKDLPEYELVGEMGGVGRVTRVALIAQIGDVRRFKNKHSLICFAGLTPSIHESGKFRASQNHIVKKGPARLRKVLYQVMMSLVMHKIPKDDAVYRFIKKKESEGKYKKVAKVAGMAKFLRIYYGRVMHLYRDLGLAA

SEQ ID NO: 247878 - protein, 340 aa, unidentified
MGIELYCGVDLHSNNGVYHVTGADGTAVWHRRLPNCAEVVQAALAPFRPERLTVAIESTYNWYWLADRLEDAGYRVVLANPSRMDQYRGMKNTNDDSDATFIAELCRLGILPRGWICPREDRALRDLLRRRVLAVESRTRLVNSLQSMLVRQTGSFAQYRTLEAYTTKELREMLTHESLLVVAEAQLKLIGAHDAAIATLESFALQKCRPRPEYPLLTSTPGVGKILAMTMMMEIGDIRRFASPGELSSYARAVKADRLSNGKVKGKNNGRNGNRYLAWAFIEAVNHAVRYCQPARKWYQRKAAATLPVVARKGLASKFAKAVWYMLTENQPFQIQKVFG

SEQ ID NO: 247879 - protein, 314 aa, unidentified
MKKADSNVACAGMDVHYKFSNVTFRDAGGKVVSHQRLNHPDRRQLVERLSHWPPGIPVVMEASFGWGWLSDLLEEAGMDVHLSNCFKVEQMRKARGWVKTNKKDADLVSLLPFELSDWWKVWRAPPDVRNRREQMRFRSDLVKAQTGEKSRIHAVFHRHGVFHEFSDLFGAKGRMFLVELCLHNPVSLPPEALVALRGHVKLLDHLRCQLADVARILHKQMLRTPLTIRLKTIPGIALILAHILAAEIGRIERFKNHKSLASYCLLAPCADDTGEETSGQSPLGRHLGIRGNHVLKWAFIEAVTSHDALPIYLV

SEQ ID NO: 247880 - protein, 401 aa, unidentified
MEGPIVSIDVSIGNSHYMCFIKNNKRFGKVKKIDHDIEGFKRLLEDIQKLEAETNEKVCAVFEATGVYTKPLERFLSKNSIKTYMINPLESARKRKEEIHNKKTDKLDPISISKVYYDKETMMELTKKDETYNWLRKKNRLYEDQLNHLRKYKVTFQNQLSICFPGYLDLFKDGYSDIPMTILKKYPHPDLLKNKKAETVARYLEKNTCHNHKVSLEYALKIIEFAKKTYPGCEKDDVEVEIFKILLDKVIETQRECEKTLNEMITVASTLEEYRYILSIDGIGTNLAARIIAEIGDIEEFKSREALVAYAGLDPHIYQSGDQDGKHLKISKKGNKYLRCLLFLAVGCSIRGAKDNPVNRFYQKKKQQSNPLNSKAAKTACTAKLLKIIYGICKNKTTYER

SEQ ID NO: 247881 - protein, 277 aa, unidentified
MNATTYGLDVAKRVFQMYWVDAQSGEIVNRRFGRDELIGFLAQRPAGRVALEACGSGHWWARKIKTLGHEVVLLHAKFIRPFVQTNKTDAADARAIWTAMQQPQMRTVAAKTEDQQAMLSVHRMRALLVKFRTMQVNQLRGLLYEFGVTFRAGRLAGLAEIRVRMAELEDTLPGVMICSLQDQLKRIDGLEQDIDRLEKQMGAWHKQEAACRAIAQVPGIGKLTATALVAMMGDAKTFKSGREFAAFLGLVPRQSGTGGKIRLGSISKRGDPACARC

SEQ ID NO: 247882 - protein, 317 aa, unidentified
MAVIAGVDVGKASLDVSISEGPVIRFDNTVKGIGKLLKHLKAQDVAVAVCEATGGYERLLVSQLRKTEIAIHVAHPSRVRAFAKACGYEAKTDPRDAQVLSRYGQVFPDNRTPQRELEPDREALRDLLSRRRQFVRQRVQEKSRLDKGITSIAQRSTKRHIAWLEKEIARLDVEYQETLEKCIPFADRAALYRTVPGVGPLTSATLVAYLPELGCRDSKSLTSLVGLAPWSRDSGKKRGSRAIRGGRGSVRSALYLCAWSAIRHNSELRRFYQRLRQRGKPGNVAVVAVMRKLLLQLNAVARRGTPWIPKSVPIMSS

SEQ ID NO: 247883 - protein, 339 aa, unidentified
MNSQVAGLDLHKDQTYITVMEKDGQVLGEKVLKSKAEPILNYLRNFDKPEVVFEATRNWYWLYDALQREDVEVTMAHPKKTKAIGAARIKTDRIDSRTLAHLKRADLIPEAYLAPLETRELRELLRHRIFLVRERAKLKSKLRTLLSKLNLNCPYSDVLGKEAIIWLRETQKKMPEVFSDKMDDFLAVGDKLTEVIERATAVIEREAEADEIARLLETIPGIGWFSAMVLKAEIGTITRFPDANRLASYCGLVPSTHSSGNHTHRGVITKEGNPWLRWILTEAAGKVKGKSKHFRAFYYRIRDKKTKHVARVATARKLAVAIYYMWKRREPFKEPNFTG

SEQ ID NO: 247884 - protein, 344 aa, unidentified
MQSMYYVGLDVHKKTISYCVKDGSGKIHADGTIPATRFDLDRWMRTLPQPWTAAMEATVFTGWIYDYLLPHAAAVKVAHPLMLRAIAAAKKKNDRVDANKICDCLRCDFLPECYMASTAIRERRRTLRYRNLLVRQMVQMKNKISGLLMEAGVSYNKQRLHKAGYFRELLATNPDIDEGLVSLLRLCRETVVRLQRTESALVRSLERDSLLMDRVERLMTIPAVGPITALTWALEVGDAKRFSSIKKAISYCGLCGAEKSSANTVQRTPLSKQRNQHLQTTLIEAAKMAPRNSPELAMLYDKEKQKGNANRATLTVARKLVAYLMAVDRGQRNFQVVETNCIAA

SEQ ID NO: 247885 - protein, 340 aa, unidentified
MGDITTIGLDLAKNVFQVHAVDVAGSVVLRKRLRRGQVLAFFAGLPPCLIGLEACATAHHWARELIALGHETRLMPPSYVKAYVKRNKHDVADAEAICEAVRRPSMRFVPLKTAEQQSALMMHRARDLLIRQRTMLVNALRGHLAEFGLVEAQGLHKVARLIAIVMDEMDGRVPHIARQVLKVIVSQIEDIQTRIAGLETQVLAWHKSNPVSQRLATIPGIGPIIATAVAATVADPNTFRSGREFAAWLGLVPRQNSTGGKARLGGISKRGDSYLRRLLVNSAHTVLLCSKAAKADPWLTSLLSRKPRLVVAVALANKTARMAWAIMSRPDLYRHAAVAA

SEQ ID NO: 247886 - protein, 429 aa, unidentified
MARVIIGMDPHKRSATIEIIDGREQVLAQGRYGTDSDGYRAMLAVGRRYPQRVWAVEGCNGIGRHVAQRLVADGEVVVDVPAKLSARARVFATGQGRKTDPVDAHSVAVVALRTNGLRQVMVDDATVALRLMVDRRDWLGRARTDTVNRLHALLLDLVAGGAKKHLSAPQARTILATVRPRDVVGRTRRQLASDLITELAVIDKKIKQANAALTALIATTGSRLRRLNGIGPSVAARLLGDIGDITRFASRNHFASWNGTAPLDASSGDQQRHRLSRAGNRRINRALHIMAVVQLRHDTEGRAYFRRKLAAGKTPMEAMRCLKRRLSDVVYRQMRADMKASPGGHSGATLTSSAADPTPTVDSSDKPQPGLSHEPTPPTTPVEADPPPAPTQAAKRPRTRTAKPARPTALTSTPRTTSAHPRKRSSSKA

SEQ ID NO: 247887 - protein, 402 aa, unidentified
MNCVGIDVSKGKSMIVVMRPFGEVVVSPFEVRHTASELSELAGLLKSLDGETRVVMESTGNYHTPVAWLLHDAGLYVSVVNAMLVHDYGNNSLRRAKTDKKDAIKLANYGLDHWLTLPRYVPEEDTRLMLKTCYRQYQQYSKVQTMLKNNLISLLDTTFPDANRLFTSPPRTDGSEKWVDFVAAFWHCECVCGLSEKAFTTRYQKWCRKHGYNFSEDKARDIYASACGHFGVIPKTDTAKLLVEQAISQLQTTSAALAALKQEMQSLAASLPEYPVVMEMFGVGPALGPQLMAEIGDVRRFHSKKALVAFAGIDAPPYQSGQIDVRSRSISKRGSASLRRTLFLVMSVILQCAPIDEPVYQFMDKKRSEGKPYRVYMMASANKFLRIYYASVKAYLESLEHD

SEQ ID NO: 247888 - protein, 314 aa, unidentified
MSAEIFVGMDVSQGCVDVAVRPGTAFQITQDERGIAEAVERLQAVQPTLIVLEATGGLEVPLTGALAAAGLPVVVINPRQVRDFARATGQLAKTDRLDAQILARFAEAIRPPVRPVPDEQTQALAALVARRRQLIEMLTAEKNRLRLAARPIQKRVQAHITWLEKELAATNTDLTATMRESPVWREKEEGLRSVPGVGPVLTTTLFANLPELGTLTRKEVAALAGVAPFPRDSGTLKGRRAIWGGRAHVRAALYMAALVATRRNPVIRVFYQRLCQAGKAKKLALTACMRKLLTILNAIVKSGTPWRVAVSQSA

SEQ ID NO: 247889 - protein, 353 aa, unidentified
MREVISLTTKRVCGLDLGDKTSAVCVCGRGGEIEWEGRVRTTVAGLAKRFQGVEPMRIALETGMHSLWVSRQLRQWGHEVIVAHAAKVRLIGNSRRKNDRLDARTLADLASVRPRLLSPVEHLSAEAQAHRGVLRSREALVRSRSSLILHARGSVKAWGGRLPSCSAESFVKKAQGAVPAELLPALAPIFEMVGELTVRIRSYDRQIEELLRTHYPQAQRLRQVRGVGPITTLAFVLAVGDPQRFARSRTVGAYFGLVPAQRDSGSLRPQLRISKQGDPYVRKLLVQCAHYILGPWGVDSDLRRLGERLSEVGGKNGKKRAVVAVARKLAVLLHRLLVSGQTYEPLRQAGLAA

SEQ ID NO: 247890 - protein, 349 aa, unidentified
MEQNEVILGVDTHLDTHAGAVISGAGRLLGTLSVTTDTAGYLDLLTWANSFGQLRRAGVEGTGTYGAGLARVLRDHEIEVLEVNRPDRAMRRSRGKSDPTDAENAARAVLAGRATAIPKEQSGAAEAMRAVSVARRSAVKAKTQAINQLRALLVSAPQEIRERLLKVKTAECVEGCARLRSLGKTPVLQTLTTTLRLLAKRWLMLAEELNALDTMLDSLTSQHARRVRERFGVGPQTAAVLVSVAGDNPERLKSESALAALCGTSPLQASSGKTVRHRLNRGGDRSANNALWTIAMVRMRSDPRTRAYVDRRTKEGMSNKEIHRCLKRYIVRELYPLILADLADSTAAA

SEQ ID NO: 247891 - protein, 407 aa, unidentified
MSFFVGLDWAATTHAVCVITETGTVRWRGTVPHSAAGLAELIQRLRRLGPPPTLPVALERPSGLVVDTLLEAGFPVIPIHPNVVKATRPRYSAAGGKSDPGDAYLLADLLRTDGHRFRPLQPLTDETRALRALVRGRDDLVIQRVALANQLRALLERFWPGAAAIFADVDSPIALAFLTRYPTPPSAERLGERRLAQFLRRHAYCGRRAPAELLARLRTAPCGRTGDAETEASGELVHAFVAVLTPLIAQIQQLSAAIAAALDQHPDGPLLQSLPRSGQVNAAQLLAELGDDRARFPTPEQLAAEGGVAPVTRASGKHYGGAFRWACNKRLRQALTTFANNSRHASAWAADVYARAQARGCDHAHAIRILARAWVRILWRCWQDRRPYDIARHRGAQPLLAILPVVG

SEQ ID NO: 247892 - protein, 440 aa, unidentified
MKPLPVLDPKAAAVDVGSEKLHASVAGDTPKVFGTFTRELESLREWFKGQGVRTVAMEATGVYWLYLYEVLEAGGLEVVMVNGRYVQNVPGRKTDMSDCQWLATLHAHGLLRGGFVPSADIRRLQDYQRLRADHIIGAGSQIQKMQQALERMNVKFHDVISDLTGVSGLKVMRAILEGERDPARLLTLCDQQIVKKKSLAVQESLRGCWREEHLFALRQGLELWETFQQKIAACDRELQKLLQQLAGPPGAEGSSPLKLAAAKDLGKNAPAIERFQELLARICGGRDATQIPGLGVYLVLQLISEVGTDMTRWATEKHFTSWLGLAGGRKQSGKRKGTVKAHRNRAGRMFCAAARALAQSVDKALGGFYRRLRGKVGGLAANVALARKLAQLFYRLLRYGMEYVEKGLKEYEAKVLATETYLLRKLAKKQGFVLIPTLAK

SEQ ID NO: 247893 - protein, 329 aa, unidentified
MVTIRHHGLSLKTFSTDPSPEALKRHLEKYYPGGIYHLAYEVGFSGFWIFRIFNELGLDCIVVNAADIPTTNKEKDQKQDPVDSHKLARELEKGDLQCIFIPDEQDQHLRSLCRLYSCQVHNATRVKNRIKGHLYFNGVELPPHSSHWSGNFIAYLKALPLDNGPAKDYLSLCLEELQQHRQRIVTVLHKLRYYVRHHRTGNIILDLMTVSGIGFKSAIILYTEIIDIHRFRTFDQLKSYAGLVPSTHSSGETDSTRGLTHRRNGYLRWVLVEAAWVAVRKDPALLQSYNKLITRMAKQDAIIRIAGKLLSRIRYVWKNDCPYVVGVIE

SEQ ID NO: 247894 - protein, 379 aa, unidentified
MEVFIERCAGLDVHSETVVACVITGKQEDQLVKATETFPTLTKDLFRLLKWLEEHEVTHIAMESTGIYWKPVFNILEDFFDITLANAQRIKNVPGRKTDVSDAEWIAKLLRHGLIEKSFVPPVDIRELRDLTRLRKKWIGHLTSEKNRIQKVLESSNVKLGTVISDVFGVSGRRLLEKLVEQGYVDAEDVESRIHGRLASKKDLITDSLFGTINDHQRFLIRQSWLHIMQLEELIKDVEKRIDNLLGNYKEELELLLTIPGIKKDSAAIIIAEIGVDMAQFPTSQHLASWAGVSPGNHESAGKRKSTRTSKGNPHIKSAMCEVAWAISRCRNRWLAAKFWSIASRRGKKKALVAISHRMLRIIYSMLINKEHYREPQIS

SEQ ID NO: 247895 - protein, 379 aa, unidentified
MGKHRLAFVAFDSAKDKHAVAIADDGRDGEVRYLGEIDNSPDAVRKLVAKLSRQYQRVHFCYEAGPTGYGLHRQLTELGHVCDVIAPTMIPKRSGDRVKTNRRDSVTLVKLLRAGELRAIWVPDGVHEAVRDLTRARETAMVDLKTKRQQLLSFLLRHGRSFPGGKHWTKMHERWLAKQTFTHPAQQIVFQDQLEAITTAQARLAALEQQLREIVPSWTMAPVVAAYQALRGVSFLVAITFAAEVGDVRRFATPQQLMAFLGLVPSERTTGDTVRRGSITKSGNHRARRVLIEGAWTYRFSARVGETLRTRLKNLPLSVRAIAWKAQLRLCARYRRLIARGKKTPVATTAIARELAAFLWAIAQQVAPLAQQVAPQTGV

SEQ ID NO: 247896 - protein, 410 aa, unidentified
MEVMHVRCCGLDVHKETVVACVRRVIDGKTVKEVRTFSTTTADLIALSEWLTESKCTHVAMEATGVYWKPVWHMLSDGGFELVLANAAHIKNVPGRKSDIKDSDWISDLLAHGLIRASFVPDGPTQEMRTLLRTRKQLVHEKARHILRIQKTLEDANIKLDSVITDIIGLSGRKMIEALIAGESDPAKLARLADPRVKASRETLHQALRGRVTGHHRFLLRLHLDQIDVLDAAIAKIDREVDVGIGPFRTAVEQVSSTPGIKTLAAMQILSEIGTDMSRFASDANLVSWACICPRSDESAGKRRSTRTRKGSPWLKTTLVQCAWAAVRKKDSYLHAQFHRIKARRGPKKAIVAVAASILTAIYHMLKDGTMYQDLGPNHFDARTKERQKNRLVKRLADLGYAVELAPLPN

SEQ ID NO: 247897 - protein, 427 aa, unidentified
MEEVTGEPLYRDRVCGIDVGKAEMYATIRVPSDKDPARRAQETRSFATTKRGVLALADWLRSWQVPCAVMEATGDYWKGPFYRLEAEGLECVLADARQVKNLPGRPKRDPSDSRWLATCFERGAVTGCFVATPEFRVIREHTRYRRDLTGERTREKQRAEKLLESAAIKLSSVVSDLHGVTGRDIMDHLIAGERDPRVLAQLARARARRKISELEAALEGAEFFTPGLAALLAKMLARIDRLDADIDELTAVIEALLGPYEEQLQQAGSMPGWGRRSAEDAIAETGVDMGRFPTGGHLASWAGRTPLDNQSGSRKGKAKSKKGNRYLGAVTGETAVSAGRTQTREGARYRRLSRRRGKAKACVAVGNTQMKVYHKLLSSPGMRYEDLGPDYYDNRASARRQVRALEKRARELGYTLVPDLTGCPEVA

SEQ ID NO: 247898 - protein, 340 aa, unidentified
MNATTYGLDVAKLVFQMYWVDAQSGEITNRRFRRDELLVFLAQRSAGRVALEACGSAHWWARKIKALGHEVVLLHPKFIRPFVQTNKTDAADARAIWTAVQQPEMRTVAPKTEDQQAMLGLHRMRSLLIKFRTMQVNQLRGLLYEFGVSFRAGRVAGLNEIRTRMAELEDTLPGTMISSLQDQLKRIDSIEQDIDQLENKISVWHKQEAACQAIAAIPGIGKLSATALVATIGDASTFRSGREFASFTGLVPRQSGTGGKVWLGGISKRGDPYLRTLLIHGARSVMCHTKVPGDWQKAIQERRPGNVVAVALANKMARTVWAILAHGSTYDKHHVSIKPA

SEQ ID NO: 247899 - protein, 317 aa, unidentified
MNNTEIQTPVNVGVDVGKANLDIALHPSGQFYTIPNTEAHIRRFVRILKNYEIERIVVEASGRHEHALVQACDKAGLPIIIVNPISVRRYAQAIGVLAKTDRIDAQVIAQYAATLKPEFKPIPDKTSQKIKDLLVRRSQLLEMSTMEKNRLQILPKSLHRSIKSLLRMLQNQIETVTRQIEQEVAKVDQWRSKMEIMTSVPGVGKVLAYTFLSELPELGSLNRKEIAALVGVAPINRDSGKLNGKRRIRGGRHRVRTVMFMAMLSSIQCNPVFKRFYERLKAQGKIPKVALIACMRKMIVVLNTMIKNQEPWRAEMA

SEQ ID NO: 247900 - protein, 337 aa, unidentified
MGLYCGIDLHSNNHVLTVIDEADRRVYERRLPNDLAITKAALEPFRAQLVAVAVESTFNWYWLVDGLMDAGYEVRLVHTGAVVQYDGLKHTDDEHDAFWLAHLMRLGILPTGYIYPRSERGLRDLARQRMRLVQHRASHITSVQSQVWRSTAVRLSSHTIKGEGKQPWPELRDADLALSIETGRAAIDALTVQIERLEEVLLKRVGLSPPFQVLKTVTGIGPILALTIALEVGDIKRFPGVGEFASYCRCVDSQRLSNAKKKGEANRKNGNPYLAWAFMEAAHFAIRYLPAARRFYERKCRQRNALLAVKALAHKLARACFYILRDQVPFAPERLFV

SEQ ID NO: 247901 - protein, 437 aa, unidentified
MNREKMLSNRELLKGKNVIIGVDPSKERMDCQLIDMYGLQIGQPFSFSVSAKGFSVVFHQKLRHQLGRDYVSGEVMIAIESSLSYWKTFAYYCYRQGFLVVLVNPVSTYHSRPLEDADYSKTDPRDAFLVGENALRGRFCLFAMSDDVYARAHRLSIHYFKVTKDLCRYRQRLTSKLNEMFPEMETVLMPASQTGFYLLGRYTYPSDFAAMDRESELVMVRKISKGKIGKDELEALVGCARKSIGVDFPAYKEDDRLILDNLLFMIRTLGAECEKIMDRILKLLSSTPCFRILSSIKGIGEITAALFIAEAGDLRRFKSACELEKFAGLNLKLCDSGQYKGHRRISNHGNKRLRHLIYLICDMLRRYEPSIRQKFLKRRMSGGGNFTKDIIALSSVCLRLIMSLIRRGTLYEVRPEQHVALHAVETTYEEYRRKKAA

SEQ ID NO: 247902 - protein, 315 aa, unidentified
MDEVTYVGIDVSKARLDVAMLPGREGFAVTNTGAGIEQLVSRLHSLTLGVVVLEATGGYEIEAWTALSDAGLPVAVMNPRQVREFARATGRLAKTDRIDAEVLARFAQAVQPEPRLLPDAATLALRELVRHRRQLTASLTQAKNRLRLASATRCELEDEIAYFKRAIARAEARIAELIEQVPETRARAELLRSVPSVGATVAATLLAELPELGSLNRKKLASLAGVAPINRDSGTMRGRRTVWGGRAGLRSTLYMAAVVAVRHNAALKTFYLRLVGRGKPAKLALTACLRKLLCILNAIARSQQPWRELPAGLAT

SEQ ID NO: 247903 - protein, 329 aa, unidentified
MHTTVHHTPKTICLGLDIAKAKLDACLLHSGKRHRAQFDNTPAGLRALLAWLRPLHDGPLPVIMESTGSYSLLAATVLYEAGHAVSVLNPRWIKDHARSDGRRNKTDTLDAEIIAHYGLTHDPDLWQPASPAQAALRALLRRLAALGELAQMEARRAETSDAVVGKSIARLQKHIARETAAIEAAIAEHLAANATLHADCERLCAIPGIGIKTARWLVAELPRHLPNSRTAAAWCGLTPRLSQSGSSVRGASSIGREGNRFLRKILYMPALVARRANPRLKAFADSLEARGKSKMSALLAVEHKLLRHAFALLKHQSAYDPNHHPLNHS

SEQ ID NO: 247904 - protein, 397 aa, unidentified
MWTLGIDIAKRKHVAALLDDNGKRVFKNFSFTNTMEGVNRLLDRINQIGFSIENLLIGMEATGHYWMILYHFLSNAGFQVRLINPLMTAARRNAGIRGTKTDSVDAELIANILREAAPKFSAVPDDEVRQLRNLTRLRYECSQTFVAEKQRLIGLLDLVFPEYSNYFSDIFGAASRQLLAQYPTAEDIKKIDIRKLTRILKEASKGHMGREHAHRLKNAAKNSFSLSASNLSFALEIKFLVQRMNILLQQIEELDKQAKKYMKKNQKLLQTIPGIGPVWAPTILAEVLPVFHPEEKNGARKLVAAAGLDVRLNESGQSKGKGKMSKRGSRYLRTAAIQAAEVAALVAKDPMFRAVYEKQKAKGKKHLVAISHVANKLLHVVFSVLKNKKPYEVHLIH

SEQ ID NO: 247905 - protein, 423 aa, unidentified
MGKTIPICCGVDVHKKFLVATILTGDYLIPQCKQKHFGTSFRNLLAFKQWLLDNNCKDVCMESTGKYWVPVWNVLEGIGNVVIATPKWVSAVKGNKDDKKDSKWIGNLFRMGLVPSSYIPGKDIRILREFTRYRSKLVSMRASEKNRYQNAFTVCNLTLDAVVSDMFGKSATAIENYLLDTNVVDPEICVSFLQRSLKKKSAEIIEAVEGFNMTQEQKERVRIIQGHFTDIDRRISQIDEIIDRLTAEYEGTISLLCTIPGIDRRLAITIISEIGTDMSEFGSSRRLCSWAGLVPGNNQSAGKKKSVKITRAGVYLKPALVEAAHAAVKATEKSPYFRIKYEKIMKRRGKKRAIIAIARMILTSIYAMVSTGEVFNPSDLLKYDMPEELQKKRTLAAAKDAVKLLVSLGLVAEGSISLETLAS

SEQ ID NO: 247906 - protein, 419 aa, unidentified
MKPQASKAFAAFIGLDWADAKHEVCLQAAGTEQREFRSLEHSPEEINAWVQTLRTRFNGQPVAVCLELTKGPIVSALRHYDFLVLFPVNPLTVAKYREAFTPSRAKDDPTDAELQVEILLKHRDRLMPLSPQSPTMRALVQLVEHRRRLVGDKVRLTNRLTSALKNYFPHVLRWFQDKDTAIFCDFLSRWPTLKAAQLARRTTLESFFRAHHVHSADVITTRIEAIKSAVALTTDEGVITPNALLVQALVAQLRVTLQVIADFDNAIAQRAQEHPDFSLFDALPGAGAVFAPRLLAAFGEQRERYASAEERQKYAGIAPVTERSGKKTWVHWRLQCPKFLRQTFVEWAAESTRHSFWAQVYYQQQRAKGKAHQAAVRALAFKWIRILSRCWQDRTPYDESVYLQALNRRSAPLLHNLAH

SEQ ID NO: 247907 - protein, 348 aa, unidentified
MLADEADHVIGVDTHRDTHTAAVVETATGVVGESKTTSADSLGHKRMLVFGEEHAPGSRVWAIESTGSYGSGFTTYLLERGERVVEVDRPKRPARRSGAKSDELDAIRAAKEALERNHPTQPRRRGEREAVRVLQRTREGAVRGRSRAICHLKALVVTAPEGLRSQLRRLADAELITRCARLRTAPAQSTEHRMTVKALRSTARRVLALEAEAADLESELELLVERVCPELLAEPGVGVFSAAELINAWSHAGRLRSEAAFAMLGGAAPIPASSGQTVRHRLNRGGDRQLNRALHTIVMSRLQHDLETQAYAARRAAEGRTPKEIKRCLKRFVARRMFRLLEAEAGVA

SEQ ID NO: 247908 - protein, 343 aa, unidentified
MEHFAGLDVSVNETSVCIVDDTGRIVREVKVASEPETLLAVLKTGAYRFKRIGLEAGPLSQWLFNALAEAGLPAICVETRHMRAALQAQINKTDRNDARGIAQMMRAGLFRPVHVKTIRSQKLRMLLTHRKLLQSKAIAIENDLRGTLRNFGLKVGMVGTVKFEGRIKELVADIPDLAGMVEPLLIVRRVLREQIAVLHRRLLAIVKDDAVCRRLMTIPGVGPVVALTYRATVDVPARFRNSKAVGAVFGLTPARYQSGESDRTGAISKCGDGMMRVMLYEAAQILLVRTAKWSWLKAWAMQIARRRGMKKAIVALARRLAVIMHRIWVDGTEFNWSKNTVTA

SEQ ID NO: 247909 - protein, 347 aa, unidentified
MKFYTTLHKYYCGIDLHARLLYVCIIDERGNKVVHQKIKAEPRQLFQLLKPYIGQVVVGVECMHCWYWVSDFCRDIKVDFILGHALYMKAIHGGKAKNDKIDSYKIASLMRGGNFPLAYNYPSEYRTTRDLLRRRTHFMRHSASLKAHVVNTDSQYNLPAQSLNLKNVSAREGLRHHYDDPVIQRMITFEMNILDCYIRELKHVETFIEKEARDDFPVLRHIIRTFPGIGQILALTILYEIGDIGRFDSVQKFASYSRLVKCKAESAGKTYGTSGNKIGNGYLKWAFSEAAVLYLRGNDKAQRYLAKLQKRMSKGKALSALAHKIGRCIYYMLKNKQVFNEEKFLKG

SEQ ID NO: 247910 - protein, 452 aa, unidentified
MEQPQEVEDEEFERVWERVAAVDVAKASGVVCTRVPDEGRPGRRKVHVWSVTATLGAVTELGDHLRCQGIEVVTLESTSDYWRIWHAVLEAAGLKVQLVNARSVKNVPGRAKTDKKDAVWLAKLTERGMLRPSFVPPYDIRRLREYTRLRADLVQDRARCWQRLEKLLERALVKLSSVSAKLTTQTSRAILEALIAGERNPEVLADLAIGKARARRRELAEALEGRFEDHHAELARMLLDQIDALTAQIDAISDRVSGLIAQIPAAWGVDADGTTGPDAGREPDAAVLPAVARLDEITGCGVIAAQAVIAGTGPDMTVFGTPGRLVSRARRCPQARQSGQKTTAGKPGKGDRRLNGIPGEIAASASRTGTFPGERYRRLARRRGKRKALAAIARSVLVIIFHLPVGPAARFNDLGPDCYGNRVSRDRKIRNHVRQLEALGLTVTVEETAEAA

SEQ ID NO: 247911 - protein, 423 aa, unidentified
MMKLKYSICCGLDVHKNVIVATIVTTNKDGISEYLQKSFSTINSDIQRFHNWLIENNCYHVCMESTGKYWIPIFNYLENDIDVCLTHPKYVKAIKGKKTDKKDSKWIADLYKFDLVRCSFIPPKDFRQLRELSRYRFKLVCMKSSEKNRIQNCMTISNVGIASVLSDPFGKTATEIMSYLLEHTADSMDEKAVRKLIKKGAKSKSDEIIEAIKGYTIETDQAKKLELARGHLEYLDDMITQTEVELYVRIKPYYEFVEFVSTMPGMTELSSTIVLAETGVDMNIFDDAKHLCSWCGLSPANNESAGKKKSVRIAKAGAYLKPMMVQCALAAIKNKKQPYFAIKYGRIKKRRGHKKAIIAIARMMMVCIYHMVSEKKPFTPADYEELMKPQNHVERVVLNENNVFAYLESLGYDSSKLVKRNDN

SEQ ID NO: 247912 - protein, 310 aa, unidentified
MMASLDVFVGIDVSKDRLDVHVRPLGVGFSVSNETTGHAALIARLRPLRAKRIVLEATGGYERALWLALSEAGLVAAVVNPRQVREFARAAGRLAKTDRLDAAVIAHFAETFVPRPGKPDAVADRLGEHVRYRRSLQEEIVALEHQRRRLETPALRERAERRHAALRAEVKEIEREMRAIVDGDPGKKALFACLTALKGVGLVLACTLIANMRELGTLTRHQAAALIGVAPLNHDSGVRRGYRANAGGRRRVRNVLYVATLSAVRSNPVIREFYRRLSADGKPAKVALVACMRKMLVMLNGRVRDHLATA

SEQ ID NO: 247913 - protein, 338 aa, unidentified
MKKSSPASSEVLWAGVDLAKLTFQVAIWGHLSFPEMQCRSFDRTRKAMKGFLSWLRDQTPAGAKLGLVMEATGTFAEEMASWLMDLDSTLWLAIVNPGQTSAFIKSLGFRNKTDDLDAKGLAKYGQERRPVPWERPSPELAALKDLVRIRMDLINARTAMHLRLTDHKRAAKRASDAMRKVILSLKTQIQQLDIAVKDQVAAFPELAHQMERYTSICGVAQVTATTVMVELGDLRRFQRSRQLTAFAGLSPKRHQSGTSVNGKTRLCKQGSARVRAALYMAASCAVRFNPDMKATYDRLLAQGKERRSALGAVMRKLLVLMRAVLIADRAWQPMKVAA

SEQ ID NO: 247914 - protein, 423 aa, unidentified
MKTVYPICCGVDVHKRFFVATLITTEGLLPKYQKRRFSTFNSQILLFKQWLLENNCHDVCMESTGKYWVPVYNLLEDSISVTVANPKWVKTIKGNKDDVKDSKWIGDLFRIGLVPGSFIPSKEIRVLREFTRYRSKLVGCKSGEKNRYQNVFTVCNVALDAVVSNMFGVSALSVTDYIVNSNTFDPEHCASLLKHTLKKKASEVVESIDGFQMTDAQKQRARMVKEHYDFLETHIGRLDAAIDALAEPFESAITLLCTMPGIDRRSAVAIISEIGVDMTQFGSSKRLCRWAGLTPGNNESAGKKHSVHIMRAGVYIKPMLVQAAWAAVKSTKSPYYNLKYTAISKRRGKKRAVIAIARMMLTAAFHMLSTGEVWNPSDLQQVDMPPELREKQLRHDLDRAAKLLVANGVVAPDAIQISQQITG

SEQ ID NO: 247915 - protein, 382 aa, unidentified
MTQRPSTDQPDQPDRPDRPDRPDRPDPSGASSGVVEVTGGVDTHRDTHTAAAVDGQGRLLGHRQFPTTAAGYVALLGWLRSFGQLLLVGVEGTGSYGAELAFTLQQAGVAVVEVDRPDRAARRRDGKSDPLDAEAAARAALSGRADGSPKRRGGPVQALAALRIARRSAVDQRADLTRQIKSLVVTAPESVRAQLRTLTDTELIRHCATRRPDPTRAADPQTATVLALRALARRHQHLSTEITQLDKLITPLVARINPTLFALFGVGPDTAGQLLITAGNNPERLRSEAAFAMLCAAAPLPASSGRTDRHRLNRGGDRQANAALYRIVITRLRHDPRTRAYAERRATQSLSKKEIIRCLKRYVAREVYTALTHTRNDLEPAS

SEQ ID NO: 247916 - protein, 332 aa, unidentified
MKKNYVFIGIDVSQETLDVHLHSLDQHFVVENSTTGFATLLERTCELSKCKCSELFICFEHTGKYSKMLSVFLYSQKIMFAMEPALKIKKSLGMTRGKNDKVDAKRIAKYAYEKRENLLPTILPGQEIDRIKSLLSLRDKLVKHNTAYKNGLTGLNDCYKEGENEMIIQVQTRLIENLNEEIIVIENEINRIIEQSPSMFRNFKLVLSVKGIGKINAYYIIAYTANFTLFTNARAFACYCGIAPFESSSGKTKGKTKVHYYANKKLKSLLDRAATSAIRSKGEMKMYYEKRVKELGKNKRSTINIIRNKIVYRVFATVNRGTPYVDIFKFAA

SEQ ID NO: 247917 - protein, 351 aa, unidentified
MSNYKIGCDAHKKFSQFAVRDANGRLCQQSRIEHEPGAIRDFLVQFPSGTPVALESVGNWYWIVDEIEAAGCIPHMAHAAKAKVMMGNIHKTDKLDAAGLAVLEHLGTLPKVWIPSGEQRDRRELPRTRMALKKHVVSLKNRIHATLAKYAICIEAKDIFAGTGRRALEGALSNLPVETSYCARQELAVLYAVDAQIQSLEKRIKQQNAQTPSIQLLKTLPGFGDILSIVIDCEVGSISRFDYCDHFASYAGVVPKEHSSGGKIRYGHMLAESNHYLKWAFIEAANVISSRRNAPTWRNKHVVQLYERISSKKGHTKAIGAVARHLAEAAFWVLKKGEPYREPKPHLPKQA

SEQ ID NO: 247918 - protein, 346 aa, unidentified
MMIIGCDFHPSWQQVSWLDSETGETGEQKLVHAAGEAKRFYEQLSAPVLVGMEATGNSQWFIELVQDLGHEIWIGDAAQIRASYVRKQKTDKRDAAHILKLVVEGRFPRLWTPDREQRDLRQLVLHRHKLVTIRSRVKNELQHLSLNKGMQKKRTLWSQAGQKLLRELPLKPWAACRREDLLGLLAMLDEQIGKLDRAVQQAAEENRAAKLLMTQPGVGPNTALAFVLTIGDASRFPRGKQVASYLGLIPREESSGGRQKLGAITKQGNRLLRSLLVEAAQIAVRYDPGFRKQYLHRCHQKPKGVAKVAAAHKLAVRLYWMLRTQVAYPEIVRIESSPRVALVGAS

SEQ ID NO: 247919 - protein, 354 aa, unidentified
MLAELVDHVIGIDPDKDWITAAIVEADTTRFIESARFSADRDGYARAVAWADAHTTPGERVWAIEGAASFGRGLTVALSSVDEWVIEFDWARQKATKDAAKSDELDAIQAAREVLGRDRLNIPRAHDGQREALRVHTVARAGAVRARTAAINELKALVVTADDDLRAELRHLTTRALVATCGKFRSSTARSATQQCTRLTMRALAQRITHLNTEIADHDRAMTTLLQQIAPQLLSEAGIGHVTAATFVLAWSHHGRCRTEAAFARLAGAAPIPATSGQTQNRHRLNRRGDRRLNHALYIVALTRLQRDPATRAYMARRLAEGKTKREVVRCLKRYIARRVWRLLEHQSPPAFTS

SEQ ID NO: 247920 - protein, 348 aa, unidentified
MVYFVGLDVSVKTTSVCVVDDAGKVILEQKVPTEPADIIAVLTPLGVSFGRIGIEAGPLSQWLVNALTAAELPVICVETRHMKALLTAQQISKTDRNDARGIAQMMRVGLFKPVHVKTMVAQEQRMLLTSRKLLQRKLLDVESDLRGTLRNFGLKVGVVSSFRYEARVRELVAGFPRLAAIVEPLLSVRRVMRQQLAVLQKMVLDTVRGDPVCRRLMTAPGVGAVVALTYRATVDQPQRFVHSRAVGAHVGLTPKRYQSGETDYEGGVSKCGDALLRTMLYEAAHALLTRGAKWSWLKAWGVRVAQRRGMRRAIVAVARRLAVVLHRMWVDGSEFRWSKDSTAVPAVA

SEQ ID NO: 247921 - protein, 329 aa, unidentified
MKRSWFIGIDISKKTLDISIYDIETRRSRKHFKVENNLKGFKRILRELSQERVALKTAFVCMEYCGVYGIEIGFFLEGKIEYCFCNALHIKRSLGLTRGKSDKLDALKIARFCYLFRDELEATLMPSGILLKLKALMSERVRLTKSIVIEKQVLKELSSILSEQSINRSEDRLLNLQADLKCIDKEIKTLVHEDKQISKSYDLLTSITGISLVNGVMIILCTNNFQGINNARSFACYCGVAPFEYSSGTSVRGATKVSQYANKKMNSDLTNAARSAVIHDAEIRIYYKRKRKEGKSHGTVMNAVKFKLITRAFAVVKRGTPFVKLRQAG

SEQ ID NO: 247922 - protein, 409 aa, unidentified
MRYYIGVDWADAEHAVWGVDEGGQKVTARVVSHTAAGLSEWGRELHEWRAQGIEVWAAIERPEGRVVDFLLDHGVVVYPINPKALDRARDRFRQSGAKSDPFDARVAAEFLRTDHAHLTALHPSSAAAQELKYLTEDCQRLIRQQTRLVNQLTATLKAYYPRALEVAELTTVLARAFLQAFPTPEAVAGLTARQWQRWARAQHLSEARTAELWAGLQQPQLPVPAHVVRVKARLMRAQVAALTPVLEAVAAYRQGVEDFFASMPAAAWARTLPGGNGGITIATLWARLGDAPERWTSFQHLQAQAGTVPVTKRSGKLQVVTFRFACDKQLRYVVDQVAFLSLQRSAWARAYYDQQRARGHRHRHALRALGAKWLKIIFVMWQRQVAYDESHHLATMARQALRHPEKKIA

SEQ ID NO: 247923 - protein, 316 aa, unidentified
MTETPTYAGIDVAKDRLDVVLRPSGGYVEATNDERSIRSVVRRLRKEGVALAVLEATGGLEQPAAAALALGGVPVAIVNPRQLRDFAKATGKLAKTDRIDAAVLAHFAEAVRPEPRPLADEHARELSAVVLRRRQILAMTTAEANRARTAPKAVSKRIEAHLRWLRKELARVDGELERVVKESLVWKEKAVLLMSVPGVGPTLSATLLAELPELEHLDRRRLAALVGVAPLNRDSGTLRGIRTVWGGRSGVRTTLYMATLCATRHNPAIREFYGRLVASGKPKKVALTACMRKLLTILAAILRKRTPWQPRLLAAY

SEQ ID NO: 247924 - protein, 429 aa, unidentified
MTRISVGVDVSKNRSTVCIMDQDGKVIMRPFLVWHSTEELDFLADTLKRLNGEVRVIMESTSIYQYPIALHLKEKGIFISIVNAYKVKKFANTDFRGGKTDKKDSRTIASYGISYWDKLVEWQIPKDTYFNLDLLNRTYMNAKKHRQIILQELQHYIDCAMPGMDKELHSLNLSTKKDFMLDFVEKFWHRDEIVNMTEAEFTEVFTAWAKKKGYRPVEGKAAKIYAIAKSCIPYYPANPTVKTILQCIVDKLSGVNRTLVTIVTQMIEEAKKLPEYQIVREMPGVGDPLAARFFGSAGDIRRFKNSKALVAYAGIDSPPDESGDFSSTHRHITKKGSKVFRDTGYEIMMALRAQKRTWEKVRKNPEVYDYMLRKEAEEKPRKVAKIAALNKFLRIIYARIKELYDNMALAERAKAKTKSKTKAKTKATA

SEQ ID NO: 247925 - protein, 428 aa, unidentified
MSYRIAGIDVHKKMLAVVVSDVEIESEYQFERRMFSSNPEQLRSLAAWLVEQKAEEIVMESTAQYWKPVWETLERYWKSLCEKREGARRRSGTLHLAQALSNRGRRGRKRDFVDAERLVKRLVARELTLSFVPDAEQRLWRTVTRKKYQLRRDLVRIHNQLEALLEEAHIKLSSLVSDLLGVSARRMLKALADGETNPAALAALAHERLRATPEQLCDALGACTELKPVYRRLLKMTLEHLQILERQIGQLDQELATLLHPHQDAVQRLAEVPGFAVDSAQQIIAEVGPGAATFPSEKCLSSWVGACPGEEESAGVNYSHRSPKGNRHMRRLLNQTANAAVKAKGSIFEIIYRRCVPRLGHNQAIGVIAHRQCRLIWLILHQGARYEERGPAVSKQSRYQRTWRMIRQLRNLGYRIELPNPQASQAQA

SEQ ID NO: 247926 - protein, 412 aa, unidentified
MLFMGDDWAEDHHDVEIVDDQGKVLARRRLPEGLAGVTRLHALIAEHAPPQWADLDPADAAAQVVVGIETDRGPWVGALVAAGYTVYALNPLSVARYRERHSTSGAKSDAADAHLLAEIVRLDRAAHRPVAGDSAAGEAIKVTARTHQSLIWDRTRHVLRLRSTLRDFFPAALAAFEQLDAPETLQLLAQAPDPDTASRLSKAKIVGALTRANRRDVPARAEAIRMVLTAPELRQPGPVQEAYAAIVATEVAVITVLNTQIERLGQVVGEHFGRHRDADIYTSLPGLGVILGARILGEFGDDPHRYTDAKARKAYAGTAPITKASGKRRVVLARYARNRRLGDALQQWAFCSMRGSPGARTYYQSLRARNIGHQAALRQLANRWVGILHGCLRYRTLYDEKTAWAHHFHTAA

SEQ ID NO: 247927 - protein, 324 aa, unidentified
MISIGIDVSKATIDCVFINNDKKHYRKFNNDAEGFKGLIKWIKPFHTFDETLFCMEATGIYHLALAKFLFDLEANIIVANPIKTHHFAKLNMSRNKTDKSDALLIAMYSDYLMHNDTWQQSLWQPKTQEFEDLQYLITRLDQLAQQKYAEQNRLAIATNKRIVKSIKQMIKYLDKQIDALTASITDLVKSSDSLNKSVELLKTINGVGAKTAWSILAYTGDMSDFENANQITSFAGLNPQQKQSGTSVNSTSLSKMGHRKLRKTLFMPALVAIRHNPVLKAFYQRLLARGKAKMVAVAAIMRKLLVLCFGVLKSGVAFDANYGK

SEQ ID NO: 247928 - protein, 322 aa, unidentified
MQDAQTRSNVFVGIDVAKDSFDVAVLPGEQSASFSYDDAGLEQLLQWLRPHGICLIVLEATGGLERRIAGELIDAGHQVAIVNPRQVRDFARGTGKLAKTDRIDAFVLARFAQQVQPRITEKASEKQVELAALVTRRRQLQSLAVAESNRRETARSSSARKSVEKHLEWLRKEVARIDAEIARLIAADETWRGRAERLKSVPGVGPATSAMLVAELPELGRLNRREISALVGLAPYNHDSGKLRGKRSIWGGRISVRSALYMAALTARRCNPIIRAFADRLQQAGKPFKVILTACMRKLLIILNALAKKHQAWSPASLHSPS

SEQ ID NO: 247929 - protein, 412 aa, unidentified
MKEALRRVGIDWGSEAHQVCRMEGEGKPTQRAFPHTSEGLRALVAFVVEGDIEPEQIAIAIEVNHGAVVEALLARGLRVYSTNPKVLDRLRDRFSPAGAKDDRRDAFVLASCVESDAHAFRRIEPGNEANTRLQAATRLREELTSDLRANANRLWNELREYRPALLTLCPGADEPWLWVLIEKAPSPSAGAKLTRARIGAVLKRHRIRRVTAEEVRTVLRGDVLSLRSIYIESHMARVLILIERLKLAQAQIATIEKQIETALAERVKSEEQTERRDLTILLSLPGVGPITVATALGESGDAFERRDYNALRSLSGAAPITKQSGGTRYVVMRRACQPRLRVALHISALQAIRIDPKFRDLYLRARARGHTVGRAIRTIVDRLLFLAVQLLRKNQLYDIDLRQLAPEVAAAS

SEQ ID NO: 247930 - protein, 341 aa, unidentified
MKKLFVGIDFSKEKVDVTIIFAEALTELYPRVTSEFKNTVSGFKQLIKWVEQNANCIDSSLWLFCGENTGDYSKPLCNYLYGKGYDMWLENAKCIKDSSGIRRLKSDRADASMIAEYAMRNYDRAVMYEPLSEALTQLRELFLYRQMVVRHRCSFQVRRGEKKLTMEKSSVKTMISQSGRHIVSELNKEIEKIDKRIASLIDSNAELAQVFNIVTSIPGIGTQNAVCLMVYTDNFRKFNYDSRKIACYYGIAPFGKDSGTSVHTDPHVHYMANRQIKAMLTQAALAAVNFNQDIASYYSRLIARGKKKQVALNNVKNKLVHIATAMVKNKQVFDKNYMISA

SEQ ID NO: 247931 - protein, 343 aa, unidentified
MKLKKVTTWNAIITCPAIGIDVCKKHLDIAGLREGVGYSRRITNDSRAIAGFVKGLVGHNFQGTILCEATSHYHILLTVMLCEAGLDIRVINPLLSSKHAKSSIRKTKTDRVDARVLAVMVLTEPDLPPPLKLTRSQCAVRHTLGLIHSQEKHLQGMNRALASYRERMGQLGLATGKAHRQTVKAMEKLEHCHEKLLAELESYLLESRPEQQEVIGRVSAVPGITRRNAALFTYVLNPQVNSAKSWMAYAGLDVAIRESGTWRGRGRITKRGPAWLRKRLVQAAWGAAMTYPQGRCYYDFLKAKGRKHKEALVIIARKLLNIIYSLIVHGKTFDHAKAFQIVA

SEQ ID NO: 247932 - protein, 349 aa, unidentified
MLAERVDYVIGIDTHRDQHTLAVVVAPTAAVVAQHAVRTTTRGYAAALAFAERHAAGVRVWAVEGAGHYGAGLTRYLSGRGEVVIEVARIARSERRLRGKDDPLDALRAARSALASETLTLPRAGQRQEALRVLLLARRSAVDVRRLALVQLRSVIVTAPESIRDELRHLPVGQLLRRCSHFRRSHSRTADELAIVLVLRSLARRIETATEEAAELEREMLGHVRALVPELLNESGIGPIVAAQLIVTWSHRDRVRSEAAFARLAGVAPLPASSGQTIRHRLSRGGDRQLNRALHTVILHRRQHDPATRDYIARRITEGKSARDATRILKRYLARHLYRVMQSATPLTT

SEQ ID NO: 247933 - protein, 408 aa, unidentified
MNAVGIDVSKGKSMVAALRPMGEVALLPQEFLHTEVGLEQMAYAIIALGEDTRVIMEATGRYHEPIAAALHEYGIYVCVLNPLFIKQSGGGSIRKVKTDKADAMKIAKYGLDNWVDLREYTPMDTVRQQLKLCSRQYNLYMKTVVSLQNNLISLTDKTFPGVNELFSSPERADGHQKWVDFVMTFYHCDCICRVSENAFAERYQKWCKRKGYHFSAEKAQDVYLGSCGHFTTLPKNDNTKLLITTAAQQLLAGKMTLAALRTEMTRLAKQLPEYDIVRAMYGVGETTAVQLMAEIGDVRRFPRRSSIVGFAGVDPAVDQSGKHSAKSVPTTKRGSPHLRKTLYQIVCTYLKKSPVDEPVYQFLDKKRSEGKPYFVYMTAAQNKFLRIYYARVKECLEAFDAQQDTSQR

SEQ ID NO: 247934 - protein, 460 aa, unidentified
MPKSKAKKAPKKATLPASLRQVNLNAAAIDVGAESHYVAVPEDRDDQPVREFAAFTADLYRMADWLKACGIETVAMESTGVYWIPVFQVLEERGFEVKLVDARQLKRVPGRKSDVLDCQWLQQLHTFGLLAGAFRPDDQICVLRSYMRQRAMLVRYAGQHVQHMQKALVQMNVQLQHVIEDITGATGMRIIRAILSGERNPQHLAALRDPNCKNSAATIAKALEGDWREEHLFALEQAVELVDAYQAKIAACDERILTHLGTFNDRSGDGPSPHGPAPRKDRHDLSFDATAELYRLTGIDLTLVSGLEANTVLKIISETGLDMSKWPSSKHFSSWLGLAPNNRVSGGKVISRRTLPSSNRAATALRIAARSLCRSRSALGAFLRRKAAQIGMPKAITATAHKLARIIYNMLRYGTEFVEQGQDYYERAYQDRVLKSITRRAQEMGYCLVRQEQTLVIPTG

SEQ ID NO: 247935 - protein, 431 aa, unidentified
MLKINPLSTLYVGIDVSSKSNYVCALDFFKNKYINSSFANNQPGAEELALKILECLKEHPDITTIVAALESTSVYSIHIANYLSSCEELMRFKPYVFVLNPKCTANYKKSYIGLGKSDPIDAFVIADYARAGNIESKPWRGSQFLALKRLTRHRLHLVECMTREKTYLISNLYLKFSELQMLEGDDQPFCDIYGATSSSVLMEYLSPEEILASSEEDLIAFLAEKSRNRIKDISKTADLLKKAARDSYRLDKALYEPLNVSIASSFNCIETFKREIKVIDNAIEKEIKGLNPNAFIILQSIDGIGPVFAGGIIAEIGDITAFHSSDALAKYAGLTWKSNQSGDFDGEDTPMIKAGNRYLRYYLGEAANSMRKHNVEYGAYYRKKYNEVPKHQHKRALALTSRKFVRLVYGLLARNQLYSGVSLDTSIKDSN

SEQ ID NO: 247936 - protein, 385 aa, unidentified
MKKTQETLRKDDTTKQAVLYTAFELSNKTWKLAFSNGSKVRYVSTDARDLNKLQAQIAMAKKRFGLNEDVRVVSCYEAGRDGFWLHRYLLSLGIENLVVDSASIEVNRRKRRTKTDRIDAGKLLVMLMRHYGGEKKMWSVVRVPREEEEDARNLGRELEVLKRERTMHSNRIKGLLIQQGLEIKGLNVKRFLSELEGMRTWDDKELPVDFKTRMEREHQRLKMVDEQIRGLKEERKKRVESGDKACYRQVAQLMKLRGIGQENSWDFVMEFFGWRNFRNRKQVGALAGLTPTPYDSGGSLREQGISKAGSRHIRTRSVESAWCWLRFQPQSKLSRWFNKRFAQGGKRMRRIGIVAVARKLLIELWRYLKDGVVPEGAGLMKGISS

SEQ ID NO: 247937 - protein, 342 aa, unidentified
MQTITTIGLDIAKSVFQVHGVDADGQVVVRRQLKRRYVLAFFQKLQPCLVGIEACASAHHWARELQALGHTAKLMPPAYVKPYVKRHKNDAADAEAICEAVTRANMRFVATKTPEQQSCLTLHRTRHLLMRQQTSLINAIRSHLAEFGIVAPVGRNGVEHLLGIVADANDKRLPEVARACVAALGAQLRALKVQILEFDRMIMAWHRSSEASKRLDEVPGVGPVLATALVASVADPRAFRSGRDFSAWIGLVPKQNSSGGKERLGNISKRGDRYLRSLFTTGALAVIRYAKIHGTRHRPWLRSLLTRRPTKVAAIALANKIARMVWAMMAKGERYKEPAALA

SEQ ID NO: 247938 - protein, 338 aa, unidentified
MKTYAGIDLHSSNNYIGIINEKDQRLYGKRIPNELNRVLMALEPFRDTLQGVVVESTYNWYWLVDGLQEHGYKLHLANPAAIKQYEGLKHTDDKWDAFWLAHMRRLNILPEGYIYPKQHRAVRDLLRRRLLFVRHSTSHILSLQSMITRNLGFKMSGNAIKKLKGKEVEGMFGSSNLVFMAKNNIATIQFLKKIIQDIAKKIKSQVKLRKEFNRLLTITGIGDILGLTIMLEVGDIKRFAKVGNYSSYCRCVKSERLSNGKKKGENNKKNGNKYLSWAYVEAANFAIRYSAKAHRFYQRKKAKKNGIVAIKALSNKICRASYYIMRDRVPFNEEMLFR

SEQ ID NO: 247939 - protein, 364 aa, unidentified
MSNVAQEGVTGKHIFCPIDLHQASMMVGIALDQGPVRFITLDTDDEGGVAELIGILHEEARRHRGSKVWVSYEASGCGFRLADILDAEGFEVSVLAPSHLPVSQKKRSFKTDKRDVIRILEVLRGHVLAGNDLPAVWIPSPQLRDDREMVRLRLDLRERGAEVKNKIHGLLRRYGIKRPSALKSLWTHKYVEWLRGIAAELEYGAATVLVSLLRELDFYLSESEVLEAELLKLAESARYAKPARALTRIKGVGVLTAMVFLTELGDMDRFGNRRQVSSYFGLVPRSYESGEQDDHKGHISRMGPARVRKVLNQAAWSLVRWDEAWGDWFRSRTVGSNKDRRKKMITAVMRKLGVYMWHTAQDAA

SEQ ID NO: 247940 - protein, 359 aa, unidentified
MAAFGLSLEAPKEALMLHVGLDLSRKRVDVCVFDTEGEVRCRLTVPPDADGLRQLAARFPGERVRAVVESMTGARFVHDTLEGCGWVVEVADAQRVKALAPLTAKTDRIDARVLAGLSYRDLIPAVWLPPPEVRGMRELARFRLHLVRHRTGLKNRIHSSLITWGIAVPVSDLFGLGGRNLLGRLELPPAWRETTQATLEAIDHLDGQITECDRQLRHAGQGDPTVRLLQTIPGIGPILGFTIAAEIGDISRFPTAKHLVGYTGLCPRVHQSGDSDWRGPLAKHGPRWLRWALIEATTWASQHPAYHQRYQTISRRLGRQRGPAVARVDCARQLTTAIWWMLTRQQPFQPASPTPPLVA

SEQ ID NO: 247941 - protein, 375 aa, unidentified
MEHHSEAFVALDTAKLRNAVAIADAGRNGEIRYLGEFDNTEAATRKLVAKLASKHARLTFCYEAGPTGYGLYRLIKSLGHDCMVVAPSLIPSKPGDRVKTNRRDAVNLVKLLRAGELTAVWVPDERHEAMRDLVRARDAAAKDYRIKRQNVSSLLLRLGHHYPGKKTWGRAHINWLASLKLEHREQRIAFEEMLLAVRQVRERIERFEQAMREAVADWTLAPVVEAVQAMRGIDLIGAVAFLAELGDLSRFENPRQLMAYLGLTPSERSTGESVKRGGITKAGNTRARRLLIEAAWSYRFPPRVSKDMQTRIGAAPQTAREIAWKAQMRLCGRFRTLTRKGKRPTIVVTAIARELSAFIWAINREVVGSHATANQ

SEQ ID NO: 247942 - protein, 349 aa, unidentified
MIRNKPRGTTVYGIDLGKNIFHVVGTDSAGNVVQRVKFRRDTLRAFFERAERAVVGMEACPGSQWLARKLQAMGHTVRIIPAQFVKPYVKSHKNDTIDAAAIAEAVTRPTMRFVQVKQPEQVDLQSLHRIRDQMVGSRTRLICQMRAFCLEYGVAIRQGAGLFKSDLPRVIADECNDLTPTMRRLLNELFEDLMRLEKRIAEITREIEALAASDEKARRLMTIPGIGPLGATALLAAAGNGQQFKKARDLAAWLGLVPQQYSTGGKPQMFGISKRGNRYLRRLLIHGARSCVMHLDRSRDRLGAWLRQLHSRMHVNKVTVALAAKIARIAWVVLNRPGAIYERRDPALA

SEQ ID NO: 247943 - protein, 392 aa, unidentified
MYIVGIDIGKNHHEASIVSPEGKQIGRSLRFATTHKGADSLMSFIFKNIGNSPCVFGMEATGHYWYPIYSFLKAKGYTIYVINPIQSDSLRKMYIRQTKNDSIDSFLIAEVIRFGQFGTTSMADENILAMRQLCRYRDSVISSRTEIKLRIGTIMEQIFPEYEKQFSSLWMSTSMGILEKYLTPENIENAPIDELFEIIKDKSHNRLTKAKAISIKEAAADTFGIKIAQDAFSFQLKQLIDRMNFLDKQIEALDIEIMKYYEQFDCYLHTIPGIGIIAAATILAEIGDINRFKSSSALVAFADIDPTVRQSGEFSSTHNHMSKRGSPYLRHAIFLAATTCSFHNSPLNAYYKKKRDQGKHHLTATGAVARKLTTVIYAVLRDSKPYEPKKFC

SEQ ID NO: 247944 - protein, 289 aa, unidentified
MTNTITTVGLDLAKTVFQVHAADSEGNPVLKKRLRRSQMLTFFAGLKPCLIGMEACGSAHYWARELQSLGHEVRLIAPQFVKPFVKTNKNDASDAEAIVEAMQRPTMRFAPIKSADQQAVLMLHRARELLVRQKTQLLNALRGHCAEFGIIVAQGASRVGELVAIIADQQDDRLPAPAREALGFLVRQLAAVKEQILDLEKKLKDWHKNNEASRRLATIPGIGVITATALVATIGEADQFKSGRELAAWLGLVPRQNSSGNKQRLGRISKRGDGYLRKLLVHGARTVLR

SEQ ID NO: 247945 - protein, 370 aa, unidentified
MGKRNMFVGMDVHKESIDISVAEDGRRGEMRHYGVIGGDLEALGKVVRALRAPDRRLHFVYEAGPCGFGIHRYLTAQGEACVVVSPSNIPKRSGDRVKTDRRDGEALARLHRAGELTAIYIPTADDEALRDLVRAREDAVGVSTQAKHRLKAFLLRQGRRYPGRAGWTIAYRRWLADLSFPSAPQHIALQEYRDTIDEAERRLDRLTDQLRQLVPAWRWAPVVDALQALRGVSFITAAGLVAEVGDIRRFQHPRELMAYLGLVPSEHSSGPSVRRGGITKAGNPHARRLLAEAAWAYQGIPRTGRQALYRQEALPPSVRAIAWKAQLRLTARFRRLVARGKAKPKVATAVARELTGFIWAIAQEVPPPPA

SEQ ID NO: 247946 - protein, 419 aa, unidentified
MTRSKDSKIIGVVHQICCGMDVHKESISACVIFPDKDGVDQHDIKVFGTFTDDLMRLRSWLLDHSCPVVAMESTGIYWRPVHNVLEDSVQVVLVNARDIKNVPGRKTDIGDSKWLAGLLRHGLLRSSFIPFKEVREWRDLTRLRKKYVQTVGDYKKRTHKLFESANIKIDSVVSDLFGVTGRNLMNLLVSDRKSLTLSEIQICVRGKLKGKEEELYRSIQGFFSDHHRFILKRLLETIDMLESEIAEFESHIRHLMRGQNALLDRIKKAAGIADVSSCEILAEIGPDMTAFRTGEAIVSWAGLCPGNNESAGKRKSGKSPVRKHHLKTIMTEVAWAAVKKKGSYFKDKYYRLKARRGAKKAIIAIAHRILLGIYHVIKDGVEFRDLGEDYLTRRNKSQKMSYLRKQAQLMGYNLVPQAT

SEQ ID NO: 247947 - protein, 473 aa, unidentified
MEATKRLTRKQKNELGRRIWSADPGLEVVHRDVAGIDIGSRQHYVAVGPDRDTEPVRVFGCFTADLQGMVRFLKGCGIKGVVMQSTGVYWIPVYDVLEEAGFEVWLVNARDTKNLPGRKSDVQESPWLMKLHTYGLLRRSFRPTPEIRAVRTCWRERAEYVQQAGMCMQRMHKALTEMNIQIGTVLSDLSGTTGMGMVRAIVGGERDANNLADFRDPRVKASRETIVLSLQGTWQSEQVAILKRQLADWDHVQKQIRACDQDRKALMRKLPDAQVAPGDRPPAPEQPGKRGHKKNGKSSRNEPGFDLAAELKRVTGVDLTRIDGVQVNTIQTVIAEAGLDMSRWLTENHFVSWLGLSPRNDTSGGKVLNRGTRKVVSRLATALRMAASSLRNSDSYLGAQFRRLRTRLGAPKALTAMAAKLARLIYRMLRYGQEFVEKGAAAYEKKYCQQQIELLAKKAAQHGFALVEIGQPA

SEQ ID NO: 247948 - protein, 378 aa, unidentified
MIATTRPELSVSEPTLYVAFELGKKDWKLAMTSGFGVDPWLRTVASGDRRGVESAVRQGRTRFGLPAQAPVVSCYEAGRDGFWIHRALTQRGIRNRVVDSASIEVNRRARRAKTDRMDALKLVQMLVRVCYGEKKVWSEVRVPTVAAEAARQVSRERTALAKDQTRLINQMRGWLVTWGCALPRSRQTGWWSTLRDWAGAPLPIEVQTRLARAAARWAVLERQIAELEGQQQAAVRHAASGSALHQLVQLKGVATTSASVLLDEGLVWRAFRNRRQIGGLLGFAPTPYDSGESVREQGISRAGNERLQAISIQLAWNWVRWQPLSALTRWYQAHFGTGKRARRIGIVAVARKLVIALWRYVTRGVVPAGAILKVASLG

SEQ ID NO: 247949 - protein, 332 aa, unidentified
MTHVLGIDIACESFVARLLACQPTVTPVGEGMTFENSTDGFGKCLSWLLTFGLHPEETLIVVEATGVYWEALALFFSDRQFHLSVTNPAQIKYFSRSVLQRGKSDQLDANLIALFGARMHPRLWEAPSPISEELQVLMRQRDAYVAMLTEELCRLHAFEHAGHTPHQALAICKRTIAFLRQQIKEIDTSFKNTLNTDARWKKLYDLVQTIPGIGTVTAGVFLTETRALNEFSSARQLTAYTGIAPVPYSSGSSVLKKPRISKIGNARLRKAFYMAAISSVRFNPHMRIFFQRLVARGKPKKLILIAIARKLLVLCFAVCKSQIPYQPDYARV

SEQ ID NO: 247950 - protein, 353 aa, unidentified
MGIVVALDVHRNQITFKVLEQETGELRRGRIAPATRAEMRAWLRQFADCRARFAVEGTTGWRFVVEEIERAGHRAHLADPAETAARRGRKRRAKTDDADCDLQLRLLLAGELPESWIPPAQILELRTLVRLRKTLIDQRSAWQQRIHAQLFHQGVPGGLKLRTEAGREALRRAELSPAGRQLVEVGLRMLDVFDLELAPLDRELRAFARRQPGCRALIEQLYGVGPVSATAILAELGDCRRFASSDDAVRHAGLDVTVYQSDEKRAPGHLSHQGPAVLRWALYEAAVSAARASSPDRSYYLQVAARLDHNRACLSVARKLCRRAYHILRELGDQALAPLEQQGTQREAIAAAA

SEQ ID NO: 247951 - protein, 371 aa, unidentified
MKEFSKYVGMDVHKETIAVAVAEAGGGEVRYLGEVANSTDAIQKLVKQLCKGDAELSFCYEAGPCGYGIHRHLTELGWDCQVVAPSLIPKKSGDRVKTDRRDSLSLARLHRAGELTAVWVPDDAQEAMRDLTRAREDMKHLQRQAKQRSLAFLLRHGKSYDGKGNWTQAHYRWLEGVKFSQPVQQIVFQEYVDTVKLLSQRVAALDQQMADAATKSVWWPVIEALMALRGVSLLTATTIVAEIGDLKRFASAPQLMAYLGLVPSEHSSGGSKSRGGITKTGNGHVRRVLVEAAWTYRHPARKTACLQRRAERTPEAVQDIAWKAQKRLCGRYRLMEARGKLKVQACTAVARELAGFIWAIGQALPQPAALA

SEQ ID NO: 247952 - protein, 346 aa, unidentified
MEQISRVGMDTSKRFFQLHGVNAAEEVVLRKKLRRKEMVEFFQALAPTVIGIEACGSSHHWARLLRSFGHEVKLIAPQLVKPYVKRGKNDGADAEALCEAMSRPTMRFVPVKTAEQQAALMLIGLRERLIGNCTQLSNAIRGYAAEFGFTAAKGMTHLDPLLERIQADESLPLAARELFAVQSKEYAQLRGQINEVEAKLKAWYKSDECSQRLIKIPGVGPIGAVLLKMKTPAPEQFRTGRQFAAWIGLTPQDHSTAGKVRHGGITRAGDEALRAVLVAGATAVIQQAVRYGGRASPWLDALLKRKPPKLAAVALANKMARVAWKLMVTGDSYSTKSAPAALASRV

SEQ ID NO: 247953 - protein, 319 aa, unidentified
MKYYTSTTEYNCGIDLHSYQMYVCVMDRQGKKLVHTNILHNDFDYFLKLVAPYKHDLTVCCECMFGWYWLADACQAAGLTFVLAHALYVKAIHGGKNKNDRVDSEKLTHLLRSNLIPPAYVYPAIMRPLRALLRQRMFFVWRRSELLARIQSHQLAHNRPLVKQTRRNRDPWEETLLKSEDNPLRQIVLKNDFAMIRHFDHEIFHLEEELQRQTKKVASRDFALLQTVPGIGQNLGLTILYEIGDIQRFPSVKDFLSYCRLVKGTVASAGKIKGLRGAKLGNPYLRWAFGEAAVIAKRDHYVIGPLSKRLEAQMRGNKF

SEQ ID NO: 247954 - protein, 371 aa, unidentified
MKNNNTPSVVSNSPTPATIVPSGFTLGLDLGDRSHHVCVLDATGQIIREGALSNTRPALAKLLAEFPRATVALEAGTHSPWISRYLTGLGATVLVANPRKLHAISRSERKCDRRDAQRLARLARVDPALLHPIQHGTAQAQHDLLGLKLRDALVRTRVNLINAIRFTLKSLGHPVRNPSSESFHKTALADIPADCLPVIQPLLTVLAHVTEQIKGMEHDLVQRSKKEYPATQRLQQIAGVGPLTALCFVLKIGDPQRFGRGRDVGAYLGLCPRRDQSGGTDKQLRISKCGDGLMRRLLVSAAHYVLGPFGPPCALREHGRRLTGTGSTREKKRAVIAVARKLAVLLLSLWKHGTDYEPRATAAPALVMTPA

SEQ ID NO: 247955 - protein, 343 aa, unidentified
MQTVTTIGLDIAKSVFQVHGIDAEGKVLIRRQLKRRYVLAFFEKLSPCLVGIEACATSHHWSRELKALGHNVRLMPPAYVKPYVKRQKNDASDAEAICEAVTRANMRFVETKTPEQQSCLILHRTRQLFIRQQTSVINAIRAHMAEFGTVAPVGRKGVEQLLAIVTDASDRRVPEVARACLAALGAQLRMLKAQILEFDRRILAWHRSNETSRRLDAIPGIGPALATALVASVADPKAFRSGRNFSAWIGLVPKQHSSGGKDKLGSISKQGDRYLRSLFTVGALAVIRYAKIHGTQHRPWLTALLARKPTKVAAIALANKIARMAWAMMAKGERYKEPVALAA

SEQ ID NO: 247956 - protein, 416 aa, unidentified
MEVVHRRCCGLDVHKKSVVACVLLSDPSGPPQREVRTFGTFTHEVLALADWLAEQEVTHIALESTGVYWKPIWNLLEDRFALLLVNPRHIKAVPGRKTDVHDAEWLAELLRHGLLTPSFVPDRAQRELRELTRYRTSLINERSAAVNRLQKTLEGANIKLASVASDVLGVSSRQMLAAVVEGTTLETSALAQLTHGQLRDKVPQLEHALSGRVGAHQRFMLAEQLAHIDALDASLERLSTEIAERMRPFDELIERLDAIPGVGRTIAEVLLAEIGADMTRFPTANHLVSWAGMCPGHNESAGKKRSGKTRKGSPWLRAALVQAAHAAARAKQTYLAAQYRRLTARRGTKKAAVAVGHSILVIVYHLLTDPDCPYVDLGATYFDQRDPGAVQRRLIHRLEALGYHVQVTPLAESSAA

SEQ ID NO: 247957 - protein, 340 aa, unidentified
MTDVTRIGLDLAKSIFQIHGVNADEVVTIRRSLRRGQMLAWFAKLPPCLIGMEACAGAHYWARELSQLGHTVRLMPPLYVKGYQRRNKTDAADAAAICEAVSRPSMRFVTPKTAPQQAAAGIHRVRASLTKQETMTMNSLRGLMAEFGIIAPQGRKGIAELLAILNDPQDTRIPQPLHGALQALAATLRSLAAQLKAVDKALAAWGRADTTSRHLSTIPGFGVVTATAIAAHVPDPSVFASGRDFSASIGVVPRQNGTGGKVRLGAISKKGSHYLRRLSVNGAMSYLRSKRGRQDPWVVKMLARKPMKLVAVALANKNLRIAWALMVRGEDYRAATVAAA

SEQ ID NO: 247958 - protein, 396 aa, unidentified
MSQIIRLGVDTSKSVFQLHGVDAAEGVVLRKKLRRGQVLEFFAKLPPTRVGLEACGAAHHWARALGALGHAVALLPPQLVKPYVPRNKNDAADADGICEAMSRPRMRFVPVKTAEQQAALMLVGVREQLIARRTQLSNMIRGYAAEFGLVAAKGLDKIGPLLVRIAADAQLPELAKEMFGTLAADYAALELRLCRIEARLGAWQRQDATSRRLLEVPGVGPIGAALLVMKVPDPRAFRSGRDFAAWLGLTPKDHSTAGKQRLGGITRAGDEALRRTLVVGATAVIQQIKRGRGRASPWLTALIARKPAKLAAVALANKTARIVWKLMLSGERYERERAATTRAARHAARAHQGDGRHPPSATAARLGRRASDGGSEGMASRPRPAIRIGGAAPRET

SEQ ID NO: 247959 - protein, 315 aa, unidentified
MTQPVYLGIDISKRTLDIATVDRYIGQVDNDDAGYEQLLKQLASLGQLHIGIEASGGDERPLLKYLLTAGFHVYRLEPARVRHFAKSINWHAKTDKIDAQLIARFVQTTGPRPTSKPDKNAEKLRVLRDRRKQIVEDRVREQNRLESCDDASIRRMINQSIARLQKFESQLDAQLTRCLNKSPKLKAKAAVLTQVIGVADQTAATLLAHLPELGTVNRQQIASLAGLAPYAHDSGRYQGKRRIRGGRAAVRTALYMACLCAVQHDAVMRTFYQRLIAAGKLRKVALTACARKLLVHLNTLCAQAQALPGKKAAGA

SEQ ID NO: 247960 - protein, 355 aa, unidentified
MDSKKYIGMDVHKESISIAVMNGAGKIVMECVIETKASMILQFFDGLRGDLQVTFEEGTSAAWLYDLLKPHVSKVVVCDPRKNASMKEGNRSDKIDARRLAELLRLNHLNPVYHGEHGLRSLKELVRSYLTITKDLGRVMSRVKAIYRSWAIPCTGKQVYAPRHRAEWLGKITEPGVRRRAEFYYQQLDALRTVRQEVRRELLAEGKKHQSWKHLCQIPSIGPIRAAVLLGILQTPHRFRTKRQLWTYSGFGIETHSSADHRNVDGQLQRAKKQVSIRGLNRNCNHDLKNLFKGAAIVASCKPGPFQEFYTALLAKGIRPEMARLTLARKIATIVLMVWKRGVCFDAQHLKPQTA

SEQ ID NO: 247961 - protein, 372 aa, unidentified
MIVLGADTHKVSHTVAAVEEATGREIAEHTVKAKRRSFEDLLRWGRGLGEERVWAIEDCRHVSGALERFLLARGERVVRVPPKLMAGARKSSRERGKSDAIDAVAIARAAIREGLDTLPVAQLAGPERDVRLLVDHRERLVGQRTALINDLRWGLHDLWPEFDIPPRALIHTCWQDRVGGRLARAEQVAQVRIARDELRRIRELTRSIDALEHELAGLVSALAPQLLAERGCGVLTAAKLIGEIAGVSRFASDAKLARSCGSAPIPASSGQTRRHRLDRGGNRQLNCALHRLAVSKGRLDPDTAAYLARKQAEGKSRREALRCLKRHLARRVWRLLQPATATDTVLGKRPTITAAAGVTVNCSTPFNPYSLT

SEQ ID NO: 247962 - protein, 345 aa, unidentified
MHIASIGIDLGKTIFHLVALGERNKILLRKKFSRRQLLVYTANLPASLIGLEACAGAHFVGGALREQGHQVRLIPAQFVKPYRKSNKNDFIDAEAIAEAVTKQNMRFAQLKTQEQLDWQAMHRVRDRLVRRRTALINEIRGFLLERGITFAAQPIHLRKHLPTVIEDAEQNLSPRLRWLLDRMWQEWKQTETEIQAISDEIEGISNDDARCRQLRQIPGFGPLVSTATVAAIGNGSAFRRGRDFAAWVGVVPRQYSTGGKQKLYGISKRGNIYLRRMLIHGARSVLFRVKYDTGGFGQWVHRLAQRAPSNKVVVAIANKLARIAWAVLSSGKDYRHQPLLQLAAA

SEQ ID NO: 247963 - protein, 374 aa, unidentified
MRGIEPTPDNMNKCVNTELSSHEGTRGQFNGRPGAIKLGLDVHQDFYVVVLQEGGGNPKPAQRFQKAVFLLWAERLKEKHPERPIHAVYEACGFGFGLQRQLSALGIHCYVVCPQKLDERNQRVKTDGRDAKALCLKLDRYVEGNREALALVRVPTEEEEQGRALHRQREQLVRTRKQLEAHGRSLLVNHGVEPVQKWWKERTYGQLAVPAWMKELLDHIQPFLLTLEAQIRALTRELEAAARPGQPRGLGAMSSVVIDREVGNWNRFHNRRQVGSYTGLCPGEYSSGKTRLQGCVTKHGNPRLRTALVETAWRLVRFQPEYKPVVKWRAILAKGALATGAARKQAIVAVARQLAVDLWRVRTGQVEATALGLY

SEQ ID NO: 247964 - protein, 438 aa, unidentified
MIQRILAGYGAIDIGQEKIFIACSGEEAVRSFGTFSAELELAADHLVQRGIRRVAMEATGVYWIPLHDLLEKKGIEVTVFNGAHARNMPGRKSDVQDCQWHAMLHSHGLLVSCFIPSEEIRQLRCYYRLREDHLSIATEHIQHMQRALDLMNVRLHVVLSQLHGVSGLRVIKAILAGERDPVALSALCDCQILKRKRAEVIQSLQGHWQEHHLFALGQALESYEFCLRQMVACDRQIEALLQRITKDQPPQTPAPGQKVKVVRHNAPQIEGLHRFLITMTGGCDATQLPGISPLGFMKLIAEIGTDLRKWQTAKHFTSWLGLSPGSSQSGKRRKRLARKKTVAGQIFREAVLSLAKSKHLALGAAYRRIKARKGSPVAMVAIARKLAVLYYNLFTKGLNYVEEGVRRYEEKYRQQTLRYLEKTAKAFGFHLAPAPASL

SEQ ID NO: 247965 - protein, 348 aa, unidentified
MLHAGLDLSRKRLDYCLLDQQGDRVEVGAAPPDGDGLRGFARRVEDRHGPVLVRAAIESMNGARFVHDTLERCGWEVEVADAQKVKGLAPLACKTDRIDAWVLAELSRRDLVPAIWLPDFEQRQERERARWRLFLVRKRSSLKHRVHAQLLAFGHTCPVSDLFGRQGRELLERLDFPEPWRGGVLASVAMIDDLERDVAQIDRELRELGADHRYIPLLQTVPGIAWVLGYTIAAEIGDIHRFASPKKLTGYTGLCPRVYQSGGTDRRGPLTHAGPKYLRWALMEAALHACRHEVYRDRYQRNKQRLGKQRGAKVAQVDIARRLAEAIWHMLTRNQPFAPAGATPALAA

SEQ ID NO: 247966 - protein, 402 aa, unidentified
MFDTEDVGVFLGLDVGKTAHHGHGLTLAGKKVFDKQLPNSEPKLRAVLDKLTAKFGTVLVIVDQPASIGALPLTVARDSGCKVAYLPGLAMRRIADLYPGEAKTDAKDAAVIADAARTMPHTLRSLELTDEITAELTVLVGFDQDLAAEATRTSNRIRGLLTQFHPSLERVLGPRLDHPAVTWLLERYGSPAALRKAGRRRLVEVIRPKAPRMAARLIDDVFAALDEQTVVVPGTGTLDTVVPSLARSLSAVHEQRRALEAQIKALLEDHPLSKVLTSMPGVAVRTAAVLLVTVGDGTSFPTAAHLASYAGLAPTTRSSGTSIHGEHAPRGGNRQLKRAMFLSAFAALHDPASRTYYGKCRARGKTHTQALLRLARHRISVLFAMLRDGTFYEPRLPQATAA

SEQ ID NO: 247967 - protein, 391 aa, unidentified
MIYIGIDVAKDKHDCFITNSDSEVLFKAFTIANNLDGFNDLYQKIESVMDDVTKVKVGLEATGHYSYNLLGYLIDKGLPTYVINPLHTNLYRKSLSLRQTKTDKVDARTIASMLMSDVNLKSYSDTFYHNEELKSLTRYRFDKVKERAKLKTSVSRLVCILFPELEKLVPTLHMASVYALLSEFPSAKHVATAHLTRLTNLLSESSKGRYGKDTAITFRDAARASIGSNMPAKSLEVKHTIKLIQELDSEIDEIENEIKIIMDEINSPILSIPGINYRMGAMIIAEIGDFNRFDSPDKILAYAGFSPSTYQSGQLDGAYAHMEKRGSRYLRYALYNATKYVCHWDPTFAAYLAKKRAEGKHYNVAISHAVKKLVRVIYHLEKTKQQYIKVA

SEQ ID NO: 247968 - protein, 346 aa, unidentified
MLTIGINPHKQTHTGVAVDPLGAEVAARTVSARREGFGQLLESGRALDRERVWVLEDVRIVSGSLERFLIDRGETVVRLPPMLMADARRGGRERGKSDPIDALAIARAALREGVDTLPTARLAGPELEIRQLALHRERLVDSRTRLINELRWQLHDLWPEWEIPKRSMIHPSWQTKITRRLAHAEATVQVGIARDMIRRIRELTRAITDLYQQLEILVKRVAPQLLAERGLGVLIAAKLIGEIAGIDRFTSDAQLARISGCAPIPVSSGRTDRYRLDPGSNRQLNHAFHLLAFAKIVHDPKRRSTLPSNARTGRPNAKRSALSNATSSDAFTASSATPRPSPSPSA

SEQ ID NO: 247969 - protein, 341 aa, unidentified
MDADIIIGVDLAKNVFQLHGARRDGQVVFRKKLSRPQFAKFCAEHPRSVFAMEACATAHYWARELMSLGHEVKLIPPIYVKPFVKRHKNDAADAEAITEAALRPNMSFVVPKTAEKQALTMMMRTRDQLLEQRTATVNALRGHLAEFGLIAPVGLKNVERLEALVDGHADLPKLVRDMAKLHFERIDRLSEEIDALTVRIKAHCSDSTTARRLQTMPGIGPIAAMVIEAFAPDMKVFEKGRDFAAWLGLVPKQHSTGGKTRLGQTSKMGQKDIRRALIIGAMSCIAAAARRGKPCHPWLQDKLDRKPKMVAAVALANRMARQIWAMITKEQGYQPKQEVAA

SEQ ID NO: 247970 - protein, 332 aa, unidentified
MFVGMDVHRNRTQVCVLDRKGNEVRNRNVTNDRQALRKELAGLRRGTPVAFEAAYGTGWIAELLGDLGFEPHLAHPAGCRAIADAKLKNDRVDARTLANLLRTGYLAEAWLAPKDVREQRLLLRERARLVRIRTSAKNRIRAQIADEGVPAPNHGLWTKDGAAFLDTLDLSPMHRWVVSDCRVLIEVLQSRITLLEAEIRRQAKPDKRVDALMTIPGIGLLSAMTLVAEIGDVTRFATSRKLCAWAGIIPSMRNSDRTLHHGHITRAGPGAVRHVLAEAAQTAIRKEPYHSDYLATKRRRGTGIALVRVSRKLLTEAFYALWALEDEQRQCS

SEQ ID NO: 247971 - protein, 266 aa, unidentified
MLYTGLDLHKSFSYITTMNDKGEIVGQKKLPSNSEVVEFLKEFGESMEVAIEATPSWYWLYDCLEDEGFEVKLSHPLRTKAIASDKVKTDKIDSGTLAHLLRSDLLPLSYVPEKPVRLNRELLRYRASLVKMQTRIKNKVHTILAKNNISHDYTDLFGKAGMAFLHSLSLLGNYKIALEGYLTVLDTVRGEIKRASKRVQQLAEEDQDSMLLMTIPGVGYYSALLIKSEIGDVKRFPSAKQLCSYAGLVPSTHASGNTCYHGHITK

SEQ ID NO: 247972 - protein, 344 aa, unidentified
MKILKQVAGIDVAQKELVVSFGCLQEDLSVDLRASKVFPNTPKGHNALIDWVKKISTPDIAVQFVMEATGVYHESLAYFLVDHSCNVVVVLPNKISNYFRTLQVKTINDYTASQAIASFGLERKLDCWQKPDPVLKKLRQLCRERNQIIDTRTVTKNQLHAEKTEAEPNTGTVQRLKQLIIVLNKQIAQVKGEIEGLIKSKKELGEAVELLTTLPGVAVLTAATVLAETNGFELIRNKKQLTSYAGLDVREKQSGTSVKGKSTISKRGNRYLRKAMHLPALAAIRCDSRFKSVFTRLVGKHGIKMKAAVAIQRKLLEMIYTIYKTKTPYQIDFETLTKKEKQPA

SEQ ID NO: 247973 - protein, 378 aa, unidentified
MPTMPKRAALSNPGMFDLGVSHLDAAGVPPLVFGGVDTHADTHTVAAVSHLGVMLGNASFPATAGGYRQLYCWLAAHGSLIRVGVEGTGSYGAGLAAALTERGVELVEVNRPNRVIRRARGKSDPIDAEAAARAALNGVATAVPKARTSVVEAIRVILVARRGAVQARTAAINTLHHMIITAPRQLRDQLQPLTRRHQIAVCSGLRSTDITSPTRATKLALRRLACRINHLTAEISDATKDITALVRGHAPQLLAEVGVGALSAAQLLITAGDNPDRMTSPAGFAALCGTTPIPVSSGKTSRHRLNRGGDRQANCALHTIINSRLRYHPETQAYAAKRTAARKTERDIRRSLKRYLARRLFTLILNPNQAAENLPAAA

SEQ ID NO: 247974 - protein, 409 aa, unidentified
MLKIVYPNCCGIDVHKTFVVAVIAIANNQGITEYHRKRFSTFTNGLTQLRDWLEYYSCFDVCMESTGKYWIPVFNILEEQTNVCLAHPKYVKAIRGKKTDKKDAQWIADLFKHDLVASSFIPPLKIRQLRDLFRYRMKLTQLQVGEKNRYQNCLTWSNLQIASVVSDVFGKSAQAIIKSILDNPQDKPNIEQLVHKRMKNKVQDLEIAMEGALTPEQAEKIRVIKAHYDALAICKEDLEQMIRELGQDYQHQVKLIQTVPGFKEDLSALRIISEIGCDMTVFDSAAKLCSWAGLVPANNESAGKKFSTRISKGGKYLKPFLVQVANAVVKSDKHPELRNKYLKLKKRRGHRKAISAICRRLLVSVYQVLRKQEDYNPVLQGLTEIRNPDKTMSVQDAVRFAQQHGFNVA

SEQ ID NO: 247975 - protein, 347 aa, unidentified
MIHVGLDMHKKYSKVIWTDDAGTILGRQTLYHEDKDALQDFFQSLPQPATVAMEATRSWYWLHDLMQGEGLQVKLAHPLKTKLIGEAKIKTDTIDAQVLAQLERTGFLPESYIPPPSVRDHRELLRYRLLLVATRIRLKNRVHDLVDKQGITHPFSDLFGTRGRAFLQSLVLPPLSQKELQRLMELITYLDQQIKSAEKDIKALLKQDPRGELLLTIPGVSHLTTYLLLAEIGDPHRFPSAKKLCSYAGIIPSTHQSGGKTHHGSITKQGNKFIRWAMVEAANIAIRKDPALQAFYEKLKRSKGSGIAKVAVARKLLVAVFHILKKEEAYRFNSLSKIHWGKPVTPV

SEQ ID NO: 247976 - protein, 371 aa, unidentified
MNHVTSIGLDVHARSVTAVALDSITGEVRSQKFGYSPAEIAGWILQLDSPKAVYESGVTGFHLVRELREMGVDCIVGAVSKMHKPASDRRKKNDRNDAEFLARQLMAHNIVEVFVPDVETEGARNLSRALEDVRDDLTRAKHRLTHLLIRWGYIWNEFNEDGKRRGSWTHAHWEWIRGIELPDAAARESLDYYISEVRHIESQKKAIEKRVAQCASRPRWRDRVEALRCMKGIETVTAFALTVEAGVFSRFDSARAFASWLGLVPSEHSSGERASRGGITKAGNSHLRKLLVEASWHYTRATKERKRSLCDESVPASISNHAAVGVKRLVERRRHLSCELRKRPVVANVATARELACWIWALGRMSEGALA

SEQ ID NO: 247977 - protein, 418 aa, unidentified
MIDDMQWFVGIDWATQSHRVCLLDVEGRQVSERDFAHGGAGLTELRDWLLEKTKATPDQIAVAIETPHGPVVEMLLDHGFGVFAINPKQLDRFRDRFTVAGAKDDSRDARVLGSALRTDRQAFRRLVVDDPLVIELREWSRLADELQQERTRLANRARCQLWRYYPQAMELTDDVADDWFLALWQQVPTPATAAKASEKAIARILKDHRIRRLDAATVLQTLRKTALFVAPGTTEAACVHIRSIAARLHLVNQQIKESHKSLDRLCTELEAATESPSGQNREQHDVTILRSWPGIGRIVLATLLTEATEPLRRRDYHALRSLAGTAPVTRRSGKQCFVIRRLACNKRLQNAVYHWSRAAIQRDAASRRRYDALRRRGHGHARALRTVGDRLLCALCTSLDRQTPYDPNYQTAQVTVAP

SEQ ID NO: 247978 - protein, 340 aa, unidentified
MRELYGGCDLHSNSNLLGVIDGQGKRIFKKRLSNDMGEIRETLVAFQEELVGIVVESTYKWYWLVDGLREAGYRVYLANPSAIQHYAGLKHGDDKQDAFGLAEMLRLGILPEGYIYPKEERPIRDLLRKRGHLMRLRTSLVVSLQNILSRNLGRKVNVNEVKVLREDRITPLLQENGDLAMAGRISKETIDFLTHQIDQIERRVDQEVRLKEAYRFLQTLPGVGKVLALTVMLETGPISRFKTVGDYVSYCRKVPSQWMSNGKWKRSGNTKNGNRYLSWAYAEASDYGRRLHPEPRAYYQRKRQKTNAVVAHSALAHKLARAAYYVMRDQVPFDSEKLFR

SEQ ID NO: 247979 - protein, 457 aa, unidentified
MGRHKSKNKGRDTMSVVHPNAAAIDVGATMHMAAVNADRTPEPVRSFGTFTTDLHRLVDWFAECGVDTVVMESTSVYWIPIFELLDARGFAVFLVNARDAKHVPGRKTDVSDAQWLQRLHSFGLLRASFRPKGQIAELRAYLRQRERLLEYGASHIQHMQKALTEMNVQLHHVVTDITGVTGLRIIRAILAGERNPAVLARMRDRRCHASVEMIEKALAGNYRAEHLFALEQALALYDTYQQKAFACDARIEAVLKELSVPRGREGGQLPAPRQNRSHQQNAMLFDVRAALFALLGKDVTQIDGLGPYLALKLIAECGDDLSAWPSAKHFTSWLCLAPSNKISGGKVLSARTRRSGNRAAALLRLAAATVGRTDTALGAFYRRLSARIGKAKAVTATARKIAVLFYNALQHGMDYVDPGASSYETRYRARVIANLHRRAKAFGFVLQPIDPPPSAVS

SEQ ID NO: 247980 - protein, 350 aa, unidentified
MVVVGADVHKRTHTFVAVDQVGRKIGEKVVEATTVGHHQAIRWARTQFGVELVWAIEDCRHLSARLERDLLSADQKVVRVPSKLMAQTRASARTRGKSEPIDALAVARAYLREPDLPVASHDELSRELKLLVDRREDLVGQRTSTINRLLWRVHELDPGQAPKPASLDLAKHRRMLGDWLAAQPGLVAELAREELADITRLTEAINALAKRIGERVRAIAPALLAMPGCGELTAAKIIGETAGVARFKSEAAFARHTGVAPIPVWSGNTVGRVRMTRTGNRQLNAALHRIAVTQIRLDGLGQAYYRSRLAAGDSSTEALRCLKRRLARVVFHHLHTDHNIRTKPCQPAAA

SEQ ID NO: 247981 - protein, 528 aa, unidentified
MISKHRPKSFKARSAEFLQKPRGVIHPRVQKVGPEHFGIVSIDCAKARSKWMLTDFYGKVLVPPTEVAHNRVELEAAVARVRAVLSQFDLFDCLVAVERTGRYHHPVKNVFAKAAFETRVVHPYATKQFRQPDHPDNKTDDTDLAAIQRAAVNGFALVENTPSESWRQLHLSIRHRRDLVRKCSALACQIREHLDAALPGYAACFDKLWNSNVAFRLVRQFGSAHAMLEQGLPGMAQFLRQLKVRFQERTLQTVRVWAQTAAAPDLAADLHRQIALAYEDDRQRKNQEIMALERDIAHRLAQTPYILLLSFPGINVVSAADFAGEMGPISNYAHARAITGRAGLFPSRHQSDRVDRPNGPLVRRANRALRAAILGIADNLMLCNSHFRTLAAHWKATGKDPRHTHVKVAARFCRIAFHMVAGRQVYHHPSQRERNYVLDKLLAFHNEHETPWEPTLRDLHLALDQLPVKQHAAEAQPLLDRQRAAQKHTRRTIGKTGPQPLNELLAIVLARLGVGALPYRPSEVKDPT

SEQ ID NO: 247982 - protein, 357 aa, unidentified
MNYTQNEKIEQVTDSTMVVGVDIGSQIHYARAFDNRGRELTKRIFSFHNDLEGFNSFNLWAETLKTENKKTAVLIGCEPTGHYWFAFAKYVNNHQKRLVMVNPFSVKKIKELDDNSPKKTDSKDPKTIAKLVVDGRYSIPYMPEGIYAEIRDLVYSRDRIMKQHNISANRIQRWLAIHFPEYLGLYTRFDAISGLAVLEKAPLPKDVIALGVNGIRKIWHDKKMRGRGVTEDRAKTLVEAAHNSVGLDGGIGTKSELYMLLEEHRLWTSQLEAVNKVLEEMILKVPHVEKLLAIKGVGSITIAGFIAEVGDIRRFDSPKQIQKYAGLELVENSSGKHKGGRGSANAGEGNSERSCIR

SEQ ID NO: 247983 - protein, 344 aa, unidentified
MDHFAGLDVSVKETSVCIVDETGKIGREVKVASEPEALLAVLKNPAYHFKRIGLEAGPLSQWLFSALAGAELPVVCVETRHMQAVLKAQINKTDRNDARGIAQMMRVGLYRPVHVKTLRSQKLRMLLTHRKLLQSKAIAIDNDLRSTLRNFGLKVGMVGTVKFEARIKELVENLPDLAGLVEPLLVVRRVLREQFVILHRRLLAIVRDDEVCRRLMTTPGVGPVVALTYRATVDVPARFRKSKSVGAVFGLTCSKYQSGEIDRSGRISRCGDEMMRVMLYEAAQSMLYSKKWSWLKAWAMQIARRRGMKRAIVALARRLAVIMHRIWVDGTEFRWTREQAAAAA

SEQ ID NO: 247984 - protein, 404 aa, unidentified
MYNAVGIDVSKGKSTVAVLQPGGTVIRKPFDVSHTSQSLNELAAYLVSLDGDTRIVMECTGRYHEPILKALSEAGLFVSAVNPHLVKNFGNNSLRKVKSDPSDARKIARYTLDNWAELRQYSSMDNTRTQLKTLNSQFSFFMKQKVAAKANLIALLDNTYPGVNRLFDSPAREDGSEKWVDYAYSFWHVDCVRGIGLKAFTERYQAFCRRHHYNFQADKPEKLFNASKELVAVFPKEKTYKLLVQQSIQQLNLASGHVERLRREMNELASTLPEYNTVMGIYGVGKTYGPQLIAEIGDVSRFTHREALTAFAGVDPGVDESGQHKSKSNRASKVGSARLRKTLFQIMRTLLQNAPEDDPVYRFLDKKRSQGKPYYVYMTAGANKFLRIYYGKVKECLRNLEQES

SEQ ID NO: 247985 - protein, 433 aa, unidentified
MQKLRYNAAGIDIGAKKIFIGIENESVVNFSTFTADFRLAIEYLLSHKITTVAMEATGVYWVILYDMLEASGIDVWLVDGRQTQQVPGRKTDVKDCQWIQQLHSYGLLNRCFIPDAHIQELRTYQRLREDHIRSASMHVNHMQKALTLMNIRLKEVLNQIHGASGLAMIQAILAGERDAKKLLSLCHNSIKKKKADQVLKALGGHYKESGLFELKQAYESYQFYQARIGECDQRMEQLLEKMNITDQQEGKKKIGKRKAIRHNKPKIADLGWHLLEIFGGKDATQLSGITDYTWLQLYTEVGSDLTKWSFEKRFTSWLGLAPGQNHSGKKKKNKRKKGHPKAGQIFRQIAQSLIESKKIALGAFGRRIKGRRGPGVAIKAVARKLAVLYWRMMVKGLDYVEKGVKAYEEKMKLQHQRWLEKKAQEMGYQLTPA

SEQ ID NO: 247986 - protein, 400 aa, unidentified
MNSVGIDISKGRSTIAVMRPFGEVVISPFEVRHTGSELSKLAKQLKSLDGETRVVMEATGNYHASVAKLLHNAGLYVSVINAKLVHDYGNNELRRVKTDRKDAVKLADYGLDRWLTLPRYIPEEDTRLLLKNCYRQYRQYSKVQTVLKNNLISLLDTVCPNANRLFSSPIRGDGSEKWVNFVAEFWHCRCVSEKSERAFTSKYLRWCRKHGYNFREAKAHTIYAEASGHIGVMPKSETTKLLVEQAVAQLRATSTALAALKHEMQSLASQLPEYPVVMDMFGVGPTLGPQLIAEIGDVRRFYSKKALVAYAGLDAPPNDSGNVTGRHKSMSKIGASSLRRTLFLVMSVYAPLDEPVYQFMDRKRAEGKPYRVYMMASANKFLRIYYATVKAYLEPLEHTA

SEQ ID NO: 247987 - protein, 345 aa, unidentified
MKAVIRQRRSSHFMNAVYCGLDVHKESTYATILDRDGQVVTQKRLRNEEVPGFLEPYTVEKVAMEASTYIIPMYRRLVEHGYSVTVSHPKKTRYIAEARIKSDRVDSYALAMLLRLDSLPTSYIPPRELADLRERIRRRAFLVRQNAKLKVKIRDVLAYEGIKPPEGYGLFTRKGVEWLSGLNLEPVNCYLRLMDPLRREVLLLSRELRALARDDPDVRLLMTIPGVGYYIGLLIKAEVGDVSRFSSGGHLACYAGLVPSTRSSGGVERHGGITREGSRWLRWALVEAAMVHIRYDTPVTRLYHRVAGRRGRKPGLVAAARKLVTVCYSVLVYGRPYFNPLHSQA

SEQ ID NO: 247988 - protein, 325 aa, unidentified
METKMLCCGIDVSHLTLDVTYQNNLGDLFHLQVGNNIAGFKKILEHTGTDYHFVMEATGVYYIRLAFYLHSHGCRLSVVNAMSIKRYIQMHLERNKSDKKDSGWICKYAIEQRPGFWEMPDSAYFESKQMFNTIREYAEQVKRFNNQLHSLKLLPVPSKETIRSIEKMKACLEKEMALLEKKLEACLKQWQPDQYKSINSIKGLGKRATALLIIFTQGFKHTKNHRQLISFAGLSPTEYSSGSSIKGNNRIYKKGGKTIRDVLYMCAMNAKQTNVACKQLFDRLKANGKTGKQALIAVMNKLLKQVFAVVKNNSLYQPNYCSAKP

SEQ ID NO: 247989 - protein, 422 aa, unidentified
MKQEQKRRCCGMDIHKDTIVVCVLPAGRGEGSALRKTYRSFRNDLIRMRTWLKQLNVTDIAMESTGVYWRPVWNVLEDQGFRLLLVNPAQVKALAGRKSDGRDCKRIAQYLEDERLDGSFVPPKEIRELRQLVRHRISLLEQRNEVHNQIRDLFETASLKLSSVATNLMGVSGRRIIEAMIAGEDSAELLSWKVKGRLRAKEKEVRESLKGFFNDFHRDLLAAFYEHYQFLTSQIEKFEARIAEQMKPHQERIELLSGIPGVDRIVAWHLIAELGTDMSVFPGAGHCASWAGLVPGENESAGKKKSTRCRKGNKVLRRILSQAAWGASRKKRSYLRTFFYRIRARQGASKAVMALAHKILVIAYQILKTNTPYQELGGDYFDRINAEKVARQCIRKLESLGLKVQVLAQAGVEYISTGISTH

SEQ ID NO: 247990 - protein, 412 aa, unidentified
MDATYYVAGIDVHKKLLAVVVANVRETELQFECRRFGTTVSELRNLSAWLREHTVQEVVMESTAQYWKPVWLALEGQFQLWLAQARSNRGPRGRKTDFRDAKRCVSRLLSDDLRLSYVPDAEQRCWRTLTRTKYQLTRDRTRLQNQLESLLEECQIKLSSVVSDLLGASGQRILRAIAAGETDPARLQALGDKRLHATDAQLKDALSGQPQPAHRSLLTLYLQRLDLVEVQIAELDRMIADAMKAHEAAIVRLAELPGLGVDSAQQIIAEIGPRAEAFPSAAQLASWVGVCPGSEESAGESNSNRSAKGNRALRRLLNQLAHAAVRKRDCYLQIVFERLCVRLGYAKAVWAVAHRLCRLIWKVLHQGVRYIEHGPTVNALTLKRRKQRLVTQLKKLGYSVQLTPILVPETGS

SEQ ID NO: 247991 - protein, 369 aa, unidentified
MDDIIFVGLDVHKATVCIAVAEGGRGGDVRQLGVFENRPEILNKVVSRLSKGGRRVSFCYEAGPCGYGLHRLLTGYGHECVVIAPSLIPMKAGDRVKTDRRDALMLAKLHRAGELTAIWIPDAAHEAMRDLVRARATAVRVLVKARQHLQGFLLRHDRIYRGARAWTLAYRRWLSTVRFEHPAQQIVLQDYIHAVQEAETRRDRLTQQIEELLPNWSMAPVVAALQSMRGVALVVAVTVVAEVGDFRRFANPRQLMAYLGLVPSEHSSGSSVRRGGITKAGNALARRVLIEGAWTYRMSARVSRKLHDRLEGLPAAVRDIAWKAQLRLCARYRRLAAMGKSKVVVTTAIAREMVGFIWAIARLAQPALV

SEQ ID NO: 247992 - protein, 342 aa, unidentified
MYYIGLDVHKKTISYCVKDASGRICQEGKVGATRWELDVWIKTLPQPWTVAMEATIFTGWIYDHLKPHAADVKVAHPLMLRAIAAAKKKNDSIDASKIADCLRCDFLPECYMAATEIRERRRTLRYRHLLVRQMVQMKNRVSGLLMETGVSHNKQRLHKVGYFPELLANADAVSTSIRPLLQLSRESITRLQRTEGAIIRSLQRDPLLAERVRRLQTIPAVGKVTALSWALEMGDISRFRSIRQAISYCGLCGDEKRSADKVARTPISKQRNKHIQRVLVEAAKLAPRRNPDLALVYENARQKGNANCATLAVARKLVAYLMAVDREQRDFEPVREFAGIAA

SEQ ID NO: 247993 - protein, 343 aa, unidentified
MQTVTTIGLDIAKSVFQVHGVDANGQVIIRRQLKRRYILAFFQKVPPCLVGIEACASSHHWSRELQALGHTVRLMPPAYVKPYVKRHKNDATDAEAICEAVGRPNMRFVATKTPGQQSCLTLHRTRHLFIRQQTSVINAIRAHLAEFGIVAPVGRHGVEQLLQVVADKSDKRLPEVARTCVAALGAQLQTLKAKILEFDRLIMAWHRSSETSRRLDDIPGVGPALATALVASIADPNAFRSGRDFSAWIGVVPKQNSSGGKDRLGSISKRGDRYLRGLFVAGALAVIRYAKIYGTKHRPWLTALLARRPTKVAAIALANKIARMAWAMMAKGQRYKEPAALAV

SEQ ID NO: 247994 - protein, 369 aa, unidentified
MLSERTSVGLDVHARSVAAAAIDGVTGELIKAKLTPSHDHIRSWIGGLPGPVAVAYEAGPTGFGLYRSLTAAGVRCVVVAPSKLQRPSGDRVKTDAKDAVHLARLLRLGEVTAVAVPSVEQEAARDLVRAREDCRGDLMRARHRLSKLLLRQGIVYDGGAAWTGVHDTWLRRQHFDTVATGLAFESDYDTVLSVKGRRERLDTAITTMAADSEFTPVVRQLSCLRGVSTLTAFALAVEIGDWTRFSGNSIGSFVGLVPSERSSGASRVQGSITKTGNTHARRLLVEAAWHHRPAYRPGKTMRDRWELAPPAARARGDAGNRRLHERWISFDLRKKRPVIANVAIARELTGWCWSLAVLDTDAAAGSDTS

SEQ ID NO: 247995 - protein, 402 aa, unidentified
MNCVGIDVSKGKSMIAVMRPFGEVVVSPFEVRHTANELSELAGLLKSLDGETRVVMESTGNYHAPVAWLLHDAGLYVSVVNAMLVHDYGNNSLRRAKTDKKDAVKLANYGLDHWLTLPRYIPEEDTRLMLKICYRQYQQYSKVQTMLKNNLISLLDTTFPDANRLFTSPPRADGSEKWVDFVATFWHCECVCGRSEKAFTTQYQKWCRKHGYNFSEDKALDIYASACRHFGVIPKTDTAKLLVEQAISQLQTTSSALAALKQEMQSLAASLPEYPVVMGMFGVGPTLGPQLIAEIGDVRRFHSKKALVAFAGIDAPPYQSGQIDVRSRSISKRGSASLRRTLFLVMSVILQCAPIDEPVYQFMDKKRSEGKPYRVYMMASANKFLRIYYASVKAYLESLEHD

SEQ ID NO: 247996 - protein, 430 aa, unidentified
MNDSNDIRREQFCRLRNEIRGSSEYLIVGVDIAKERHNAFFGTATGKTLHKGLFFDNTYEGFQKLLIQTDALKVRHGLRKVVFGMEPTANYHKPLGEYLIRGGHLVVLVSAAATAKNRTLLDGRWDKHDTKDSANVADLIAQGKCLYYDCPGERMQALRGLLSLKRRLKKEERGLRVRIRNQLLAQYFPEMDRHFGSAASLNVVRCCLDPSLISLMEYDEFCRTVSPGKANLAQQRRLMQIWQAAKQSIGCVVGEAVSVEAQIMVSALHRVRETIKTLEDKIEDICLTFSEYQFLLTIPGFGPDVSSKVLAAIGDPERFGNGKQVLKMAGLDLCAARSGKTSQRATPVISKQGKSDLRYALYQAAIVSSSKNKDFIRYHMDKIRGREREKGIGTKMRVKLAAKLLIIAWTLMKKRAPFDVRYLENPAKAA

SEQ ID NO: 247997 - protein, 392 aa, unidentified
MQPVVGIDVAKGVSVIQAFIGREEPYGRIEKLQHGKEGFEQLGELLGMLKHKCDDEPVVVLEATGHYHRSLVGYLKRCGWTYYIVNPLQAKRSKGTQLRKVKTDAADAWHLAEMYYRGDVKAHREWEESYTELQHLTRQHEFVTAMYVQAKLNSRALLEQVFPEFIGLFHNLYATTSLKVLERCLENKIGDVGDLIRECVGKSHSNGWIEEKTKRLKELMQDWKTQERSQSQSIALTSMVSLLLEFDKQLNHLEKQMEERAGELPEVELIKSIPGVGNKLSAAIVAELGDVSQFKDAKQLVAYAGLDPGIYSSGKFTATSNRITKRGSKRLRRALYLAVQCGIRRCANRRISEYYDKKRKEGKPYKVVVIACANKLLHHIYAILSKSEPYKA

SEQ ID NO: 247998 - protein, 433 aa, unidentified
MNPSTPEPPPLVAAAFVGIDWADQKHDVVLRSAAEPAKVEHQVLAHEVNAVLDWINQLQQRFGSKGKVLVCLEQSRGALIYQLMGYELFELYPINPSQLANYRKAFATSGAKADRPDADLLCELVYCHRDRLKAWKPDDALTRKLATLNEDRRKAVDRRTELANEIKSQLKLYFPLALQVLDNDTSSALAADLLLQWPTLETLQKASPHKLRKFFYGHNCRQEQKLLERLRLIQEAKPLLSDLAVIEPAVLRLQMLAQQLKVLLPYIARYEKQIAELFDSHPDSFLFRDLPGAGAALAPRLLTAFGTDRDRFGSAAEVASLSGIAPVRQASGKSMTVQMRWACPKFLRQSFHEFGAASIRFCPWAQACYEAQRARGKGHHAAVRAVAFKWIRILFACWKQRIAYTQELYLQALQTRGSAYAKALAEKGSPACE

SEQ ID NO: 247999 - protein, 341 aa, unidentified
MKKFIRIGVDLAKNYFQVHALESEIGPAVTRKLKRSKMHEFFSQIEPCLIGVEACGSAHYWARELKAMGHEVLLMPPAYTKPYVKRGKNDAVDADAICEAMSRPGMRFVPIKSAEQQATLILHKTRELLVKQRTMSVNALRGHLSEFGIVVAKGIGRVDELLDLAEGDATLPAAAKAGVKILAQALEGLDKAIDDLEKEISSAHAQNEMSRLLDKVPGIGKLIASVIAASVPDPSVFKSGRDFAAWLGLTPRQNSSGGKQTLGGITKQGNRYIRKMLVLGATSLLNVVGKRKGALRDWIVGLLAKKPARLVTVAVANKLARILWAMMKTGECFRTEMFAKA

SEQ ID NO: 248000 - protein, 299 aa, unidentified
MEKITRVGVDLAKRVYQVHAVDNADLTVLARPMSPDRFLSWALGLPAGTVVAMESCSGAHHLARRLRLMGLDARLIAAHFIAPFRVQGASGKNDANDAAAICEAASRVRTRCVPVKTPDQQGWQGVHRLREGYKEERTACINRIRGLLAEFGLVFPQSPDALRRVLNDVLEDASNELPGVMRLALQRTQAHWRALDDEIAWCDQQVKQHVRADQAAARAAQLHGVGDLTASALVAAVGDMHQFKSARQFSAWVGLVPSQNSSGGKNRLGRITKRGDDYLRTLLIQGAKSALLAAPKRCD

SEQ ID NO: 248001 - protein, 398 aa, unidentified
MISVGIDVSKEKSTVCVLKPYGEIVMKPKDVQHTESELSKLVGELQELQEEIRVVMEATGAYHLPILSYLKEKGFFVALVNPLEMKRYRCQGIRNAKTDKIDSKIIANYGIDFWYHLSDFKGSEEHYLELRLLGRQYRQYMKFRVENVLALANMLDQTMPGIKTLLCDWNKYTGKDKLADFAYDYWHFDNITKKSEKQFLESYSKWAKKKGYRQNESKAKQIYALAKEGIPTLPSSTPSTKMLVQESVKIVREVDDTLMQILTRMSEIAKTLPEYQVVHDMGGVGDVLAARLIGEIGDVRRFHNAKSLIAYAGIDAPPYQSGKFTGTDRHISKRGSSTLRKVGFETMTCLVMQKKCGDPVYDFIKKKQAEGKASKVAKIAGFNKFLRIYYARVMEVYQ

SEQ ID NO: 248002 - protein, 367 aa, unidentified
MGKSSTVFVGMDVHKESIDVTLAEAGGEVRRFGTIGGDRAAVQRLLRRLSRAHGSLHVVYEAGPCGWWLQRLCAGLGHACSVVAPSLTPRRAGERIKTDRRDSEKLARLARAGELQALYVPDAGDEAMRDLVRAREDAVVAQRRARQQLKALLLRHEIRYVGRTSWSGAHRRWLSDLKLPAPAQQIAFEEYVMAVEAAGERVARLTRAIEEHILSWRFAPVVAGLQALRGVQFIHAVTLICELGDLTRFDTPRQLMGYLGLVPREDSSGPARRQGPITKAGNGFARRALIEAAWAYQHPARVTPIIARRQTGLAKPIRDIAWRAQLRLCARFRRLAARRLNKNKIVVAIARELSGFVWAIAREFRVA

SEQ ID NO: 248003 - protein, 339 aa, unidentified
MKLTTVGVDIAKNVIQLHWVDPDTGEIVNKPIKRAAFLEHFVNRTPCLIGMEACGGAQHWARRLIEMGHEVKLMPAKFVKAFNTGNKNDAADARAILMATQMPSKAVAVKTEAQQAVLALHRMRQQLVKFRTMQINSLRGLLTEYGEVMGQGRAALDKAIPSVLERLIDRLPAILIDTLREQWNGLTPLDKQIAEIERRLQTWMKEDKACKAISVIPGVGLLTATAAVATMGDAKAFKSGREFAAWLGLVPGQSGSGGKVQLLGISKRGDTYVRTLLIHGARSVLFHAKEPGRWIEEMKKRRPLNVVTVALANKMARTIWAILAHDTPYQKDHLSVKPA

SEQ ID NO: 248004 - protein, 307 aa, unidentified
MFIGIDVSKTRLDVHVRPNGEAFAVDRDGDGIEQLIARLQALSPELIVLEATGGFETVVAAGLSAAGLPLAVVNPRQIRDFARATGRLVKTDPLDAAVIAHFAEAVQPEVRPIASEEARTLGEFVARRRQLLEMMTAERNRRRQLTSQRLIKGVDRVLATLQAQLTELEGDIDIAIRGTPAWREKEDLLTSVPGIGPKIARTMIAELPELGALTRQQIAALAGVAPFNRDSGTWRGRRSIAGGRATVRTALYMSILVTIRRDLPLAVTYRRLRNAGKPAKVAIVACMRKLITILNAILRDKQPWQMA

SEQ ID NO: 248005 - protein, 343 aa, unidentified
MSIVRVTGGVDTHADFHVAAAVDCNGGVLGIESFPTNQAGYESLAGWLAGFGPVIRVGVEGTGSYGVGLSRFLTEADVEMVEVDRPNRQVRRKKGKSDPTDAVAAARAALSGDASVIPKARNGPVEQMRVLLVARRSARQQRIQSLNQLRHLALTAPEPIRTRFKDRYKAGLVSEAANMRPRQGSDPVAHTTNIVIRDLARRIQALTTEMRNIDRILTALIGGTAPSLLELHGLGPDTAASLLVTAGDNPERLHSERAWAHLCGVTPIPASSGKTTRYRLNRGGDRNANAALYRIVLTRMSSHQQTRQYVARRRAQGLNTAEIMRCLKRYVARQVFKHLPAAT

SEQ ID NO: 248006 - protein, 323 aa, unidentified
MEKRIKQCVGIDCGLKELVVAYGVMNEEFDTKVLSSTAFNNNPAGFKKMLSWSKKLNPQNIEVRYVIEATGVYHEQVSLFLHEHACKVSVLLPNHANAFMKSTKVKTVNDKVSAELLSQMGLERKLDLWQPPLKIYNELRQLTRERDQLTGEQTQVKNQLHAEKSGAWPNAQSIKRMQKRIRFVSNQIEEIEHEITILVEQDSRLKDKMKRICTIKGVGLITAATVVAETNGFNLIRNKKQLVSYAGIDVITKDSGTSIKSKPKISKKGNKYLRKCLHYPALSAIRSTENMKALFNRLVGKHGIKMKAVVAVQRKLLILIYVL

SEQ ID NO: 248007 - protein, 361 aa, unidentified
MKKVSRELPKMEAGIAKPEMTVGLDLGDRYSHYCLLNSDGEVVEEGRVQSTEAALRRHFEGEDCLRIALECGTHSPWVSRLLNALGHQVIVANARKIPAITGSESKNDRNDAEKLARFAAFDPKLLSPLEHRSEERQVDLNLIHARSTLVRARTMIVNALRGLVKSAGGRLPACSTEFLPARALAAIPPALSAVATPLVEQIGMLNAQVDGMDKQIEKLSAKYPEIVLLRTAPGVGPIVAAAYVLTLGQPDAASNRSAGASLGLRPAQSQSGAADPQRRISKAGDSFLRSLLVQSAQYVLGRFGPDSELRRWGLKLAATGGKRGKKRAIVAVARKLAVVLHALWRSGQRFQPFPQQAAVAA

SEQ ID NO: 248008 - protein, 339 aa, unidentified
MELYAGLDLHSRNTYIGIMDNAFNRVFKKRVPNHLELILQTLDPFRDQIKGFVVESTYNWYWLVDGLMDAGYSSAHLANPSAIKQYEGLKHSDDQHDAFFLAQLLILGILPQGYIYPKKGRPVRDLARKRMFLVQHKTAHILSLQSLIARCCAMKVRANDMRHLTVKELEEWLKEEYLVLSAQANLDSINFLKQKIKQLEKAIIQKVKLNKEFKYLLTVPGIGNILAMTIMLEVGDIKRFPKVGNFTSYCRCVPSRRLSDGKSKGHGNRKNGNRYLSWAFTEAVHLGRRYNERFRRYYNRKVAQANTSLATKALGNKLARICYYIMRDQVPFREELFCH

SEQ ID NO: 248009 - protein, 345 aa, unidentified
MQIKSIGIDLGKTTFHLVALGAHSQVVIRKKFSRQQLLTYAANLPSCLMGMEAGVGSHFLGRALREQGHEVRLIPAQFVRPFVKSNKNDYCDAEAIAEAVERENMRFVPIKTEDQLDLQALHRVRERLVSRRTSVINQIRAFLLERGISFRKGPASLRRQMPEILENADERLTARMRRLLDFLWQEWKHLQLQIESLSEDLEKIANSDAACARLQQIPGVGPLVATAVVSAIGNGAAFHKGREFAAWLGLVPGQWSTGGKAKLLGISKRGNPYLRKMFIHGARAAVLRVKREGSCLGQWMSGLETRAARNVVIVATANKLARISWAVLSSGNDYRPMHRALRCSS

SEQ ID NO: 248010 - protein, 340 aa, unidentified
MTITTVGIDLAKNVFAVHGVDQNGKTVLIKSRVTRTALPGLIAGLPPCVIGMEACSGAHYWARLFRQYGHEPRLMAAKFVSPYRMAGKSGKNDAADAQAICEAVRRPHMRFVPVKDESQQAMQCLHRTRQGFIEEKTATYNRLRGLISEFGVIAPQSTDALRHMVSAQKNSLPLQVQQCVDDLLEHVARIEANIAEYDRILSHMAKTDHRSQRLMELKGVGPTTACALVASIGNAHDFKNGRQLSAWLGLTPSQYSSGGKSKLGRITKAGDSYLRTLLVQGARSVLIGAEKRTDSFSRWGCSLVERRGYWRAVVAIAAKNARLCWASLHYGDDFRLYSAS

SEQ ID NO: 248011 - protein, 307 aa, unidentified
MMIHPGFIGIDVSKHYLDVCEGDRTERFANTAESARSLACRWQGSFVLFEATGRYDLELRKALEAAGVTYARVNPARARDFARATGRLAKTDAIDARVLATMAQSSLFARERASDPEREALARAHKRRDQLVHMRQQERTRLSECGDASLRADIEAHIRWLDTQIAQWEGEIERLVAQSASLAQSEQRLRSIPGIGPVAATTLLALVPELGSLSSKKIAALAGLAPFNVDSGQFRGARKIKAGRKRVRDALYMAAVAAARCNPRLRAFYARLRAAGKPAKVALIALARKLMLMANAILRDKTQFRPA

SEQ ID NO: 248012 - protein, 424 aa, unidentified
MKVTYQTCCGVDVHKSFLVATIVKTTGGIEPSYQKKRFSTFNNSILEFKQWLLDNDCHDVCMESTGKYWVPVFNLLEDEINVVIANPKWVKAVKGNKDDAKDSKWIGDLFRLGLVKGSYVPCKKVRILREYTRYRYKLVSCRSSEKNRYQNALTVCNVALDSVVSDIFGKSSTSIIDYLLEQSGSSINHEEIASKLLRSLKSKEDAVIESIEGYQMTDAQKYRMRLIRAHMDYITAEINDVDKMIENMISSNPDFKNAVRFLCTIPGVKRDSAITIISEIGTDMTQFSSSKRLCCWAGLTPGSNESAGKKKSVRITRAGVYLKPALVQCAHAAVKSDKSPYYKKKYDSLVKRRGKKRAIIAIARMILTAIYQMLSTGELWNPSDLYKIDMPVALVEKQKAKAIKQAKKLLQQEGLLPPDEPLAS

SEQ ID NO: 248013 - protein, 326 aa, unidentified
MSRIQEKKTITTATSPFIVMGIDVSKDQLDVYVSPAGNHHSFKNDAGGVAELVNVCRDHDADLVVLEATGRYHRMAHKTLHEAGVRTAVANPARSRNFARSVGRLAKTDRIDAQVLAEYGERVRPPASTPPSKQQAKIAEITVARRQIVDEMKILKQQQTQTLDDLVIAQIAARISLCQCHCKDLEQLLAELIEEDDGIMRKHEILTSIPGIGLTTAATLISELNELGGANAKQIASLSGVAPMNRDSGSFRGKRKIGGGRKPVRDVMYMAAVVAIRWNKDMAAFYQRLKKAGKPFKVAITAVMRKLLILANTLLSENRLWSETQP

SEQ ID NO: 248014 - protein, 415 aa, unidentified
MEKVYDICCGVDVHKKLIVACLRSGRKNEIRQFGATTRELLEMAAWLDEAKCEMTAMESTASYWKPIYNVLETWGLPVMVVNAHHMKAVPGRKTDVQDAEWIADLLQHGLLKASYIPSKDQRELRELVQYRKSLIEDRGRELNRLQKMLEGGNIKLSGTVTKINGKSARNILDFIVGGGFFDEAKYDEMLANKEIANNLKASREQIIDDLNGVLSPIQRRVMKELLSHLDELDEHIRNLDDDIDRFMKQKDKEAVKAIEEIPGLGKNSAQAVISVIGSDMSRFPSDRHISKWAGLCPGNNESASKRKSGKTTKGNKLLRTTLINCAHSAVKVKKSYFAAQFARISTHRGKKRAYVAVAHSMLIAIYYVLNDGIAFKDLGADYYNQFNKERKANGLLKKLKALGYDVTIAAVPDIA

SEQ ID NO: 248015 - protein, 363 aa, unidentified
MMIIGVDYHPSFQTIAFLDQETGEYDERRLNHSDGEAERFYRELKQRRVSVRVGMEATGYSRWFERLLAELGFEVWIGDAAEISRQRVRKQKTDREDARLLLRLLRENRFPRIWVPSPENRDLRQLLWHRHRLVQMRTRIMNQLQAVAMNEGYRWKKKLFSEQGRTQLEKLSLAPWASRRRKELLELLDQLDPKIAELTTAVEQEAQQRPEVLRLMTHPGVGSITGLVYVLVIGTPDRFPCGKQIGSYTGLIPSEDSSAGRQRLGHLSKQGNALLRYLLGEAAQAAARCNPHWRRRYVYLAMRRHQNIAKAAMARKLAVRLYWMWRNGWNYSQFVEFGSHAGKLATGHGLKKSVVHLIGHPAP

SEQ ID NO: 248016 - protein, 338 aa, unidentified
MEYYTGLDVSLKTTFISIINKKGEVVKEMEVESSVESISEYLLKQDLTYKKIGIESGQLSIHLSKELRKKGLAVECVDSRHMASALSARINKNDRNDARGIAQMLRAGLYKSVQVKSDESCQIKILLGSRRQLVNVRQKLYGTVRGLLKIYGKKVKERIGVSFVVSVRDYLTTIDDNASTAIGATLNSIEEIENSIKEVNMKLKESVKRDEDCQRLMSIPGVGEITAMIYKATLDDPTRFTDSGTVGAYIGLTPKQYASGEVDRHGRISKMGPKDCRSVLYEAAQSLLVINKKNCKIKSWGLKLAKKRGKKKAIVAVARKLAVIMHRMLIDKTEFRYQ

SEQ ID NO: 248017 - protein, 451 aa, unidentified
MLGLGMQHIHCPNKRRTLTMKFNQSNKQNQRISRISETTLVIGTDIAKHNHVARAFNYRGIELGKRCLFQNDDNGLLNLLAWAESIKQEHGLTDVLLGVEPTGHYWFPLFHFLRQRSIEVVLVNPHHVKKSKELDDNSPTKNDIKDAKVVAKLVIDGRYTQPQLPEGVYADLRVLMNQRDRLCGDLNRVKGRIHNWLDRFFPEYRQVFKNWEGKASLITLTNFPLPQDVVAAGETTVVAIWKKNDVKRAVGPKRAELLYRKARKSIGLTEGATAAKHELAMYLEQYAMLCRQIEQLMELVAGLVEQIPGATHMMSIPCIGLITVAGFLAEVGDLSGYDHSQQIVRHAGLSLRENSSGLHKGKTTISKRGRCRLRALLFRAALTMVAKNPEFRALHLYFTTRRDNPLKKKQSMIAICNKLIRVLFELGRKQKEYDANKVLGPHREAQLQAAA

SEQ ID NO: 248018 - protein, 450 aa, unidentified
MDKETKIKSKSRSVLSLPIVNPDAAGIDVSATMHAVAVPIGRDIEHVKEFGAFTEDLHSIAKWLLECGITTVAMESTGVYWKQLFTILIQYGFKVSLVNARHVKNVTGRKTDMDDAQWIQKLHSCGLLNSCFLPDDATESLRSLVRHRKSLLEDSSKYVHRMQKSLELMNIKIHSVISDVMGKTGKSIIESILSGEREPESFIQYVDPRIKAEKATILKSLDGNWRDEQVFLLGENYELHKMIENRITICETKIESVLQMQAAVTNDGIIEPAPVVVQKKKRKNDPVFSVQNYLLKIHKVDVTAIYGISNGTALEILAETGTDLTKWESEKHFVSWLNLCPNNKITGGKLISSTVMKKKAGAAAQAFRAAANTVQRSDHWLGDYFRRMKAKGGNKYAVIATARKLATIYYKMVRYKQSFIPINNDEYREKYKSAKIAYLEKQLLKLKAVG

SEQ ID NO: 248019 - protein, 389 aa, unidentified
MKNQYDNVACGGCDVHYKFTNVTFRDDNAKVVRREKVTHTNREVLRSWLSRWPKELPLVLEASFGWGWLSDEMLAAELKPRLSNCFKVEKMRKARGWPKTNKKDADLLSLLPFEATDWWEVWWAPPEVRDRRERMRFRSDLVGLQTMTKNRVHAIFHRHGIFHEFSDLFGANGRAFLGYLCRDGDGRLSGGALMALRGHVMLLDHVRHQLADVTRQLHKELERTPLAKLLDSIPGIGLVLAHTLMAEIGLIDRFRSHRQLASYSLLAPRSQDTGEGKEGRQPLGRHLGTHGNRTLKWAFIEAAHGAVRKGGKWRAMFDRRTDGGKKDRNRGYIKVARELVKVVYAVWSKEMLYMPTPPSRPGSRKRRRKPRRSSRSGTGQPYQPMVAAK

SEQ ID NO: 248020 - protein, 421 aa, unidentified
MTPTSHDTFAAFVGIDWADAKHDICLQAAGTAKRECFQLDHTPEAIEAWVTTLRTRFSGQPVAVCLELTKGPLVSALRKYDFLVLFPINPLTLARYREAFTPSRAKDDPTDAELQLELLLTHRDKLQPLQPQSPAMRALEQLVEHRRRVVGDKVRITNRLTSTLKNYFPQVLQWFQDKDTHLFCDFLSRWPTLKAAQLARRSTLETFFRDHHVRVGDVLAKRIHAIKTATPLTTDEGVIAPNALLVQALVSQLRVTLDAIEAFDHAIAQRAQRHPDFPLFQALPGAGPVFASRLLVAFGEQRERYTSATALQKYAGVAPVTERSGKKAWVHWRLQCPKFLRQTFVEWAAESIRHSFWAQVYSQQQRDKGNTHQAAVRALAFKWIRILYRCWQDRTPYDESVYLQALHRRGSSLIHNLAEAS

SEQ ID NO: 248021 - protein, 329 aa, unidentified
MIVLGIDVSKLKLDAALWLPETRKWYALQAGNDMIGAAKLLHWACAKSGAAATQCRVVLEATGVYHELAAEALHEAGAEVVLANPKRVRDFAKGHGILNKTDGVDARTLARYGAEAEVIAWQPPPLEVRTLRALLSRLAAVEEDLQRENNRREKARATATPTLVLESLERTLQGLIAERKRLEQAINDHYDQHPDLKQQRDLLRTIPAVGDKSANQLLCLLRSKTFDSARQAAACSGLVPLAHQSGTSVRQPPRLSKQGNPKLRAVLYMAAVSALKHNRELRAVYDRFVGSGKAKMAALGILMRKLVHIAYGVLKYQQPYNPALVSKIA

SEQ ID NO: 248022 - protein, 359 aa, unidentified
MLQHHAVIVGIDLGDRYSHLCLLDAENGEVIEESRIATNREAFERRFSGTEPMRVAIEASTHSPWVSRVLEGHGHEVLVANARKVRLIYGEGRKTDKTDAEKLARLARLDPKLLSPIKHRGEASQSHLALLHSRDALVGTRTKLVNHVRGTVKAFGARLPKCTAQSFHHKVAEHLPKELAPALEPVLKTIASLTELIREYDRTLEGVADELYPETKLLRQVHGVGALTALAFVLTLEDAFRFAKSRQVGPYLGLVPVTDQSGSSDPQKRISKHGNELTRKLLVNCAHYILGPFGEDSDLRRHGEKIAGRGGKNAKKRAVVAVARKLSVLLHRLLLHRLWVMAEVYEPLYNASRRGCQAA

SEQ ID NO: 248023 - protein, 402 aa, unidentified
MNAVGIDVSKGKSMVAIMRPFGEIVSAPFEIKHTASDINSLVELINSVEGESRIVMEHTGRYYEVLAHQLSEANLFVSAINPKLIKDFDNDSLRKVKSDKADAVKIARYALDKWQNLKQYNVMDELRNQLKTMNRQFGFYMKHKTAMKNNLIGILDQTYPGVNTYFDSPARSDGSQKWVDFASTYWHVDCVRKMSLNAFIDHYQNWCKRKKYNFSQSKAEEIYGKAKELVPVLPKDAITKLIIRQAVDQLNSVSTTVESLRTLMNETASKLPEYPVVMAMKGVGTSLGPQLMAEIGDVSRFTHKSAITAFAGVDPGVNESGTYEQKSVPTSKRGSADLRKTLFQVMDVLIKTHPQDDPVYQFLDKKRTQGKPYYVYMTAGANKFLRIYYGRVKEYLSSLPES

SEQ ID NO: 248024 - protein, 346 aa, unidentified
MEIFVGIDWAEAHHDICVLNEMGMVLAKRRIAEGLDGVGQLHALLADHAAEPNQVVIGIETDRGLLVGALLAAGYQVFAINPLAASRYRDRHSTSGAKSDPGDAKMLADLVRTDRHNHRPVAGDSELAASLQVLARAHQNLIWSRQRLVNQLRSNLREYFPAALAAFGTDLAHPLALGVLDAAPTPALGRTLSQSKLAAILRRAGRERGVEEKAAAIQAQLRAPQLAAPALIGEAYGKSVAATVRILRELNAQLASLAAELTQSFEGHPDAELYRSLPGLGVVLGARVLSEFGDDRTRFAHPKARKNYAGNSPITKASGTRRVVLEPGWRATGGSPMPATSGLFAR

SEQ ID NO: 248025 - protein, 356 aa, unidentified
MSEGSWVGLDVHARSVVAGVIDQGSGQVRSLRLPPGGEVTVAWLQTLPAPVRVVYEAGPTGYRLARACAEAGISCVVAAPSRIRAATDRVKTDRRDAERLARLLRLGEITPVRVPAPEEEAARDLVRAREDARGDLMRARHRLSKLLLRHGLVYDATAWTRTHDAWLRRQRFHGGPLAIVFDECYGRMLDAKSRRDALDKAITELAATPPYVNVVGRLVCLRGVSTLTAFALTVELGDWTRFRPESLGPFLGLTPSEHSSGERRRQGGITKTGNSNARRLLIEAAWHQRRPPRRSVTLERRRTGKPQVVQAQAERSARRLHGRWHALEARGKPRSIVVVAVARELAGHCWALATME

SEQ ID NO: 248026 - protein, 313 aa, unidentified
MHEDIFVGIDIAQQTLDVHVLPQGNAFRCENDPNGIEKLIERLQKVAPTVIVMEASGGFEISLAAELGAANLPLAIVNPRQVRDFARGMGKLAKTDAIDAYVLARFAQANKIEPRPLPSEEEQLIKDLVKRRQQLVSLRSTEKLRLHRVRSKPVRQSILVVIQTLDEQIRNIDHDLDDMLKSSPLWREKEDLLKSFKGVGPVTARTLLALLPELGTANRQQIAALAGLAPMNRDSGKMRGKRMITGGRTQVRNTLYMAAVSASKHNSTIKTFYERLTQAGKPAKVALTACMRRILVILNAMIKTKQPFEVLFA

SEQ ID NO: 248027 - protein, 423 aa, unidentified
MKNTAARKRKQVPEGYLIIGVDPHKKKHAAVAITQDFTIRDRFKFDNTREGLEFLLRRIRIGMVKSDCRGVMFAIETGGHYWRNVAYYLDEKGIPFRFINQYTLKRRREGKDLNRRKNDYRDSEVAAQLLCTGEFVESVIPQGVYAELRTAHNAYRRLVKERTRITNLVKGLLDGLFPEFTHVFKDPCGLTALSVLSTCSTPGVIAGMTEDEFVATIETRHRGRLMRRKLMALHYAARSSIGIAAGAKSVSSEISFLVEKLELIRGHICAIERTLVRLVDETEEGKYLLSIRGLNYIAVAGLLAELGCFKSYRSAKQMIKMAGSNPTESESAGKKKSRTPMSKQGRPVLRYCAWTSVIPMLRFNSDFRAWAKQRRERPAHANPLNGREVVGAALNRLLRLSFAMVKNQTYYQVPEPELALATV

SEQ ID NO: 248028 - protein, 362 aa, unidentified
MKKDNRFRFANASKMTIGIDLGDRYSYFYTLDAAGENTESGRVQTTKSALEKRFRGGEGARVVIEAGTHSPWVSRLLTECGHEVLVANPRKLALITKNERKDDPVDAELLARLGRVEPQLLSPIAHRGAEAQADLAVIRARDAVVAARTQLVNHVRGAVKSWGSRMPKCSPRSFAQKGESEVPEPLRGALQPLLEVIEGMTEQIKGYDRQMEEACRENYLETELLRQVGGVGAVTSLAFVLTLEDANRFGRSRSVGGFLGLHPGRDKSGAQDPELRITKAGDQLLRRLLVGSAQYILGPFGPDCDLRRWGLKLASRGRKNAKKRAVVAVARKLAVLLHRLWAGGEVYEPLRLAAPTALSTPA

SEQ ID NO: 248029 - protein, 341 aa, unidentified
MEEYIGLDVSMKETAVSIRRAGERIWRGKCASDPSIVAELIRKRAPSVKRVVFETGPLSVWFYHSLRIEGLPAICIDARHAKAALDMATNKTDANDADGLAQLAEVGFFREVRVKGFDSMLTRTLVAARTRLVRITTELSNQIRGVMKTFGLLVPAGKGSTFEKNVRSLLADQDRLASIVLPMLEAWRGIRVRAAELGRQLVRDARQSRACRILMSIPGIGAITATSFTTAVEEPDNFRKSRSVGAWIGLTTRRYQSGEVDYDGHISRRGDRPLRGLLYEAAAVILTRSSTHSTLRTWGLQLRERIGFKRAAVAVARKLAVIMHAMLKTGELFNPNAGAAA

SEQ ID NO: 248030 - protein, 428 aa, unidentified
MDQVNRNRLEEFRQLRKEVRHSEEYLIVGIDIAKDRHYAFFGTATGKTLLKRIIFSNDHEGFRKLLDHAEALRVQHGLKKVVYGMEPTANYHKPLGEYLINLGRTVVLVSGVTVARNRESLDGRWDKHDGKDSANVADLISQGKCLYYEHPSAELRGLRGLLSLKRRLKKQEHGYRVRIRNHLIAQYFPEMDRGYERLGAEGLSIVRWCLPASQITELDVDPFIERVTSRRITMEKRRRLEEVWEKAGESIGCDAVPGVDHEAKVMVEGLRQIREMIKETEQKIKELCEQFPEYHYILTIPGFGPDVSAKVLGAIGDADRFQNGKQVLKMGGLDLSADRSGKDSDRAIPEISKRGKGDLRYALYQAALVASLQNRDVMIYYTNKIRGREREKGIHIKMRVKLAAKMLLIAWTLMKKKEAFDPTYLNAE

SEQ ID NO: 248031 - protein, 489 aa, unidentified
MSTARKQQGEKKDPMLNARAPQRKVRGSHCQQGKGHQRGSELTITNPDAAGIDVGSQVHYVAVPEGRAQESVRSFGAYTGQLDELVQWLKDCRIKTVAMESTGVYWIPLYQKLEEAGFEVLLVDARQAKHVPGRKSDVQDCQWLEQLHRYGLLRAAFRPEDSVCRLRTLQRHRKDLVESAAMWIQHMQKALNEMNLHLHHVLSDISGHSGLAILDAILAGERDPRKLASLAHYRVQKNQAQIAAALTGDYRPELLFVLRQSLQNYRQIQQQITQCDLSIEKQLAKMTDCQNPNQASEPTPPSPDLGGGKPRKRKSPVILEISLAGHLKRILGVDLTTIPGLNVLAILTLVSEIGTNMTKWRNEKAFVSWLGLSPNNKISGQRVLSSRTRKVVNRAATILRLAAMIEGKTNTPLGSFYRRKRAQLGGPKAVTATARKLGSLIYRLIKNGQGYHEPDLHTYELKYKDQILNSLRKRANTFGFDLVELPKAA

SEQ ID NO: 248032 - protein, 332 aa, unidentified
MVAGTHGSLNKAGSTKMTQISTTAGIDTSRAKLDIAVHGGVEHWQVENTSVGWRRLAVGLSQAGVTRVGIEASGGYERGVVGYLRDKGLTVLVLQPIQVKAYARVHLRRAKNDKLDAVLIAACAATIDQPRIEPAERLAKLAQHLTFVEQIEEDIARFKVRLEHIDNPRLRRMVLADIARLKTRRSAELSRIVMALRAHEDLGRRLDLVLSIPGLGERTAIALIVRMPELGRVSGEEAAALAGLAPYDDDSGKHKGQRHIAGGRGRLRRSLFAAALPAAFRWNKAPIELYTRLTARGKAHNAALIACARMLLIYANTVVHRGKPWVERPATI

SEQ ID NO: 248033 - protein, 366 aa, unidentified
MWMEAPVIGHRTSVGLDVHARSVVGCALDGDTGEVWERRLTPNYQDIWDWLRSLPGPVAVTYEAGPTGFGLARFLIAAGVLCLVGAPSKLQRPSGDRVKTDARDAAHLARLLHLGQIVEVSVPSAEQEAARDLVRAREDCRGDLMSSRHRVSKLLLRQGIVYCGGRTWTGKHEGWLRGQRFDAAPLQLAYDTALDTMLATVDRRNRLDEAIAKLAADSAYTPVVTRLGCLRGVSTLTAFGLAVEIGDWDRLTGRSIGAYLGLVPTEYSSGASRSQGPITKTGNGHARRLLIEAAWHHRQPYRPGVDLRRRWDAASPPARARGQQANRRLHTRWSRFDARKKRPVVANTAIARELAGWCWSLAVLDT

SEQ ID NO: 248034 - protein, 351 aa, unidentified
MSNATRWIGIDLHRRRSHIAIVDEHGELTMSRRIVNGREAFLELLGDPQGAETHVALEATYGWEWLAELLEEAGYDLHLAHPLRTRAIAAARVKTDAIDARTLAQLLRGGLLPEAYVAPREIRELRELLRHRATLTRMRSAVKNRVHAILAKHGVTREHSDLFGKGGRGFLAELELRDAPRRRLDSLIALIDDFDREINHTTREIDERAKTDDRVDVLTQIRGVGRYTAMLIIAEIGDINRFPTARHLCSWAGLTPTVRSSDGKARLGHISRQGSPALRWALVEAAQKITTGSGPLRDQFERIAKRRGRKIAKVAVARQILTLSYYGLRDGEIRCLARRSRAGAKEKLAIT

SEQ ID NO: 248035 - protein, 376 aa, unidentified
MSNVRFIGLDVHAETIAVAVAEPDGEVRSMGVIPNRPESIRRLIKKLGPADQLRVCYEAGPTGYVVYWQLTALGVKCEVVAPTLVPVKPGDRVKTDRRDALKLARSYRAGDLTAVWVPDAAHEALRDLVRAREAAKKDQLRARHRLGKFLLRHGRRPPTAMTPWTQTHLTWVKTMHFAHVAQEATLLDYLHEVEHQDDRIERLERSIDDAVKIAPARMRAVVEALQALRGIAQLSAVTIAAEVGELSRFAKPRQLMGYSGVVASEDSTGERIRRGGITKTGNAHLRRVVIEAAWAYRHRPNIGASLRKRQAAVSPEVNAIAWKAQHRLHARYRHLTTKGKCKQEVVTAVGRELLGFIWAIGVKVEAQRGREPSAAA

SEQ ID NO: 248036 - protein, 409 aa, unidentified
MTSNLETLHKRVAGIDVHRMKHVITVLIEDDAGNISKETREFGGFKRDLKALAAWLQGSRVELVILESTGIYWKSVYSHLENAGLMTWVVNAHHVKNVPGHKTDVGDSEWLAQLGRYGLVHGSFIPPKDLRELRQVSRYRSKESNMLAAEKNRLHKVLDDAGIKLGGLVADINGQAAQAMIDGLIDGQAPEELIKLTGRLKAPKESLLASLEGDLSARHILLLKEIRAHIHELENHLERLNAYLIEAMAPYDWAYKLLQTLPGLDEIGAAMVLIEIGDDLSHFGSADRLASWGALCPGNNESAGKRKSGKTRKGNTMLRYLLCEAANSARRTMTVFRSKYLGLVVRRGHKKAIVALAHKMIRTIYFMLTRHQPYRDSGFDYAAANVKKNAPRWLRALKQFGYWPETATA

SEQ ID NO: 248037 - protein, 435 aa, unidentified
MSSDSEMAAFIGLDWADQHHVICLRAAGSEQVENSVLDQKPESLQAWIQHLRLRFGGRPVALILEQSRGALLYALMDVDFLRLYPINPQTLAKFRKALYPSGAKDDPTDAALLLELLEKHREHLHVWVPDDPDTRCLRLLNEARRKLVDQKTALTNEVTSLLKGYFPQALSWAGDLDTRRAGAFLDKWPSLEGLRRSSRATLEKFYRQHGCPSQRSIDSLLEEIQQAQPLTRDPAVIRASVLMVQALMRQVRDLLESIAQFDRQIKDLFEKHPDYPVFHSFPGAGPALGPRLLALFGSDRKRFRVADEVQLLSGIAPVTERSGKAHRVHWRWACSKFLRQSVQEFSEKSIQRSPWARACYDRLRAAGKSHYAALRVLGYKWIRIMFRCWKDHTPYDEQRYLAVLRRRSSPLGNALSLPQESSVVKKMSFSCAKNA

SEQ ID NO: 248038 - protein, 407 aa, unidentified
MNDSRKRYIGLDVHKHYLIALGVDADLNVMLPARRVDLFRLESWMKKTLTKQDEVVLEMTTNTWQLYDELIQYAGKVTVVHPPHVALITRSQVMNDKIAASILARLLAKGLLVGIWIPPQEIRDARGLVAQRQKMVRLATQAKNRMHAVIQRHHLIPPAGNPFGASNQAWWQMLPLGKLEKLNLQSDLETLQFAEKQEKRLTEIMEGMVAEQEEIGRLLHLAGFGVVIAFTVWTAIGDIRRFAEPRYLVGYAGLGTRVHDSGMTSRSGKITKAGRRDLRTALIEAANVAANSHPHWKAELARLEPRLGRNKAVVAIARKLLIAVWFVLQGKTDKYAEPEAVAQKMLKFAYTVGKANRPKGQTAAQFARIRLDALGLGSELTSIAWGSKKPIPLPPSKLKERSDVPNK

SEQ ID NO: 248039 - protein, 362 aa, unidentified
MKNQIPQITIGVDLGDTKHRFHVLDQAGNEVRRGSMPNTPSALSRLAGSYPGARIAIEVGTHSPWVSWHLSEAGCEVIVANARKLRAVYENERKCDQRDAQMLAKIARLDPDLLHPVTHISKQAMTDRLALSSREQLVESRKRLIQSVRSMVKSLGCRINSCSAGRFPALAREALGAEEGVMPGIGPMLTAIEGISASIRELDEQIDRLGAESHPVTWQLRQITGVGPITALAFALAVEDPRRIEKTRDIGAYLGIVPRRDQSGDTDKSLGISKTGNAYVRKLLVQCAQHILGAHGPDCELRRFGLRLASRGGKAHKKKAMVAVARKLAVLMLSLWKSGEDYQPERGRETQPDGTTPDLAAA

SEQ ID NO: 248040 - protein, 360 aa, unidentified
MENLDVLKFHVGIDISKTKFDAALGFVNYEQKTKLIASHIFTNSKEGFLDLVNWVSKKTFAETPISYSMEATGVYYENLAFYLNENGFQVHVLVPSIAKKYIQSIGVKTKTDKIDSKSLMQLGLERNLKKWTAPDKYFYQLRILTRESLIKERTQLLNQKHASESGYSQNEKTSQRLKKRIELLNEYVTEVELDIKKVITQNKELNAKVNQLLTIPGVGIITVATILAETYGFNLIQNVRQLTSYAGYDVVLKDSGQFKSKGKISKKGNSHIRKIMHLPAISARKNNPNYQAFYDKIYNKRNIKMVGCVALQRKLLCLIFTLWEKNEEFKHTINSGNQELETSFGERVTKKSSATKVALH

SEQ ID NO: 248041 - protein, 339 aa, unidentified
MKLYAAIDLHSNNNMLVIIDENDKVIFEKRLRNDLPLVLSHLAPYRAEVTAVAVESTYNWYWLVDGLMDAGYDVKLVNTVAVRQYDGLKYTGDEHDARHLAHIMRLGILPTGHIYPKEERSVRDLLRKRAQLVRCRTAQVLSIQNLVSRNTGHGIKMEDIRLLEDAEISRLCGGDEARAIALRSNLSVMLCLDEQVRDLERALLPRARLKPAFANLMSVVGVGKILGMTIMYEAGTMERFAKVGCFSSYARCVESSKWSNGKKKGEGNRKNGNQYLAWAFVEAAHHAVRHSEAVRKFYQRKKAKRNGVVAIKAVAHKLARACYHVLKDQVPFEEARAFA

SEQ ID NO: 248042 - protein, 387 aa, unidentified
MTKNKGRVVGLDVHPDSFAGAVVEGTNPASARVLSSSSRVELKQLECWALRHTSAQDTLVLEASGNAFAVAARLRAIRRKVEILDSHRAGKVGKVYCANDRVDAVKIARIYLSALSPIVWQPDAKTLERREIFSAYQAVVKESTRAKQQLRSMLNEHCVRLEKGFRLCHPHAIKRLLAMRAWTPARTMLLQQLHGTLVAARRRRTLLRRHMAQEIVAEEALLRLTRLCGINLVTLYGVVAAVGDVRRFAHSKKLVAYIGLNPSVSQSGNFEGGGALKRHGRGALRALLIQSGKKLLEVNNPLQKWGLAVAARRGRNKAAVAVARKLCVALWHVLMGHAIGALERLDTLETKLSKFATEMGPAALAAFGYNNKADFVKKKLYVLQSYP

SEQ ID NO: 248043 - protein, 341 aa, unidentified
MNKVAIAAIDLGKHSFHLHAQDDRGHELYRKKFTRAALMQHLMNLEPCTVVMEACGGAHFMAQEVAKLGHTPKLIAPHLVRPYVKSNKNDFADAEAICEAATRPTMRFVHPKTQAQQLLAMLNSTRDSFIKERTATVNRIHAALLEVGVSLATGFKPIKELPARLEASSIPVPIKKLLTRLQEHFTYLDGQIKTLDKEVECQAAEDDLAARLMTMPCVGPITSSVLAAELGDGKQFKCGRGYSASIGLIPKQHSTGGKTVLLGISKRGDRNQRRLLVQCARVYLMQLDRQKGWLADWVRQLLAHHHSNHVVCALANKLARIAWAIAAHHTEFDAGPTAMNA

SEQ ID NO: 248044 - protein, 343 aa, unidentified
MQAVTTIGLDIAKSVFQIHGVNARGNVVVRRQLKRRHVLAFFEKLPPCLVGLEACASSHHWSRELQALGHTVRLMPPAYVKPYVKRQKNDATDAEAICEAVTRPNMRFVPTKTPEQQSCLMLHRTRHLFIRQQTAVINAIRAHLAELGIVAPVGRRGVEELLEVVADANDGRVPEVARACVAALGAQLRMLKAQILEFDRRIMAWHRSNATSKRLDAIPGVGPALATALVACVADPRAFRSGRDFSAWIGLVPTQHSSGGKDKLGAISKKGDRYLRGLFTAGALAVIRYAKIHGARHRPWLTALLARRPTKVAAIALANKLARMAWAMMARGENYKEPAALAA

SEQ ID NO: 248045 - protein, 349 aa, unidentified
MTIIAVGIDLAKHVFAVHGVDEAGRAALVRPSVARDKLHETIATLPPCLIGMEACTGAHHWARLFMQHGHSVRLIAPKFVAPYRLSGKRGKNDAADAQAICEAVQRPQMRFVPVKSEAQQAQLMVHCARQGFVKERTATINRIRGLLAEFGHILAAKADTVRREAAKLLEALPGQSNRVIGDLLSQIHHLDQRIAEYDGLIRTMAREDSRCAELQRLSGLGQITATALRATIGNGAEFKCGRQVAAWLGLVPGQYSSGGKTRLGRITKAGDTYLRTLLVLGARAMLAAAQRAVAEEQENPAKPASQLAHWAVALAARRGHGKAVVAIAAKNARLAWAMLRTGEDFRMPA

SEQ ID NO: 248046 - protein, 343 aa, unidentified
MKRNTIGLDLAKNIFHVVGIDHRGKQIFRKQLRRQQVTSWFARQPVSLVGIEACGGSHYWARVLIELGHEVRLIAPQHVKAFVRGQKNDYNDAAAIAEAVTRPQMRFVPIKSTAQLDLQALQRLRTRLIRERTGLSNQLRGLLAENGIVIPRSLATLRRRLPELLEEVDNGLSAFFRRLLDTGWQHLLQIEDQVKTLDRELSCAVAQDEDCQRLLTIPGFGPVVASGFSVAVGDGRCYRRGRDVSAVLGVVPRQHTTGGKPKLLGISKRGDNLLRAHLIQGARSVLMHAKGKEDPLSRWALKVSAERGFNKATVAVANKMARIGWAVLRHQTTYQPEYHLNTK

SEQ ID NO: 248047 - protein, 310 aa, unidentified
MDAPVVGIDVSMDRLDVHVLPSGEAFFVANDALGVETLADRLAGLGATVVALEATGGFEMLAASALSAVGLPVAVVNPAQVRSFADALGKRAKTDTIDAAVIARFAVASGVKAKPLADEQTRLFAELITRRRQILAMIVAEEARLKRAANRQLKKSISRLLVALRRELETLDEDLDSQVRASPLWRIKENLLSSVPGIGKGIARTLIAELPELGSLTARQIASLAGLAPFTRQSGKWRGKSFISGGRASVRAALFMGALVASRHNPVLKAFRDKLVAKGKPKIVAIIATARKLLTILNAIIRDQKPWQNA

SEQ ID NO: 248048 - protein, 345 aa, unidentified
MLIIGCDFHAGFQVLSIFDNRRGEVREKRLAHPAEAKEFYRDLSEPARVGIEAGAPCQWFRRLLAECGHELWVGDAGKIRAAETRKQKTDRRDAELLMRLMVEGRFPRIWVPSEEERDVRQLLMDRHHRLRARTAAKNQLQSLAMNQGVQKGQRLWSEAGRQWLADLEMMPHAARRRDQLLSWVGMLDQQIAALDVVIAAEAKRRAEARLLMTHPGIGPQTALAMVLTLGEVSRFAHARKVPSYLGLVPSEYSSGGKQRLGHISKQGSALMRFLLVEAGQSAVRLDEQLKRAYKRMWVRKGNRAIAKVMVARRLAVRLYWMLRNQWTYAELVRHVGQPESFRGKQ

SEQ ID NO: 248049 - protein, 385 aa, unidentified
MSKDTRFVGLDVHAKLIAVAVAEGGRDGEVRSHGTIPNTSESVRRLMKRLGKEGQELRVCYEAGPTGYVLYWQLTGMGIECEVIAPTLIPKKPGERVKTDRLDAIKLARNLRAGELTGVWVPNKEQEELRDLVRARDGVRKQLMACRHQLSKFLLKHGVYKPEKASAWSSRHAAWLRTVHFGRDGLDFIFQDHVREVDNQSSRLKQMDAAIDAAIEAGPPELREVVSALQMLRGVAKTTAAGLVAEIGCFSRFDGPDKLMSYVGVVPSEYSTGGPGKRSQGGITKMGNGHARRLIIEAGWHYRYRPVTNPRMKACEKGVDPKLLPDIKRISSDAQRRLCGRYRDLLSRGKEKNVTVTAVGRELLGFVWSVAVTVEQHYKTVASVN

SEQ ID NO: 248050 - protein, 335 aa, unidentified
MEFQFFIGIDVSKNELDFSVQQDRQLLFHREVLNDPQSIGVFLKELSRLPGFALNKAIFCMEHTGIYSNHLLSCLYKKKALVCLEAASQIRNSLGNIRGKNDKIDSIRIAEYAYKNREELRLWEPKRDVVQQLARLSATRSRLIKAKKMLRTPLEEHSAFMWKKTAKQDAVLCDKTLKGIETDLSKVEKTISEIIAADAELSRLFSLVTSVSGVGKVTAVQILITTNEFKDIHNPKQYACYAGVAPFTKESGIFKGKGRVSHMANKKAKTLLHLAAIVAIQYNPDLKLFYERKVKVEKKNKMSVINAVRNKLILRIFACVNQNRPYENNYHKLVA

SEQ ID NO: 248051 - protein, 341 aa, unidentified
MQTIKYFIGFDISADDFTASCITSPDNPVFSTQKFSNNIDGANELIELFYKNNIKPSEAILCMEATGVYTERLCYFLASKGFTVSIEAPHKIKNKIKDSPRKNDFIDALAIAEYAFRYTDKLPKWKPRNEILEQIQVLLSTREHLSVQMIANVNALKTLKHKYYQTPLANQIYQQTISKLKEHIKQIDQEIKSLIDKDDSFKNNVSLAKSVPGVGLLLAANLLILSKGFTENLNYKQIASYTGICPYEQISGTSLHKVPRSRMCGPSKLRKLLYLAALSVRTHNKNFKKYFLRKVEEGKNKRLILNNIENKLLKIICAVINSGCAYTENYKSINPNRLNTA

SEQ ID NO: 248052 - protein, 411 aa, unidentified
MPRVIGLDIHRDFAQAVALDGGNYTQMGRVQLDRDSLTAFGRRLLPSDEIVLEATANTFAVVRVLRPMVGKIVVANPLQVRLIADAKIKTDKIDAGVLAQLQATGFLPQVWIPDQETEILRRKFSRRSQLVRHRTRLKNEVHAILHSNLIVQCPFSDLFTATGKKWLGTQNLPEGDREAVERGFRELDRLAADLAALDRDLATQAVNDVRLQRMITITGIDMVSGLGLLAVIGDHKRFESSEKLVSYFGLNPSVRQSGNGPARHGRITKRGANLARSLLVEAAWAASRAPGPLRSFFMRVMARRGSQIAAVATARKLAVIIWHVLHREEEYVFARPSLVGRKRRAVELRAGRPQQRGRRGIAGRYHNPITRAEERARLEQSERAYERVVSGWQPTGPRKPGRSPRQGDDPK

SEQ ID NO: 248053 - protein, 312 aa, unidentified
MEKLSYGGIDVSKDRLDVVVLPEGWFFSVSNDTAGWAELVARLHPLAVSAIGLEPSGGYERGIIRALLAAGLSVRRINPNKLRQFARARGILAKNDRLDARLIAEYVAIMPTRVVQRDDAVERLAEIVTMRRQLCDEHVAVENQAAHLEDAMLRRLSKRRLIRLEADIRLLDKRLAEMVATNAAFAQLYELLTSMPGVGPVLAFTLIALLPELGKMSRKQIAALVGLAPYDFDSGKLRGHRSIYGGRMPIRNVLYMAALSASRYNPALKTFSNRLAHANKKSKVIIVAVMRKMITTLNAMLRDNAAWQPQSN

SEQ ID NO: 248054 - protein, 344 aa, unidentified
MKITTIGLDLAKSIFQVHGVDATGQVVVRKSLRRSQMLPFFAKLPPCLVGIEACGTSHHWARELLKLGHEVRLMPPAYVKPYVKRGKTDAADAEAVCEAVTRPTMRFVPVKSPEQQAALSMHRTRDLLVKQRTQLINMIRGLLAEFGIDIPKGLERALLMARQIVDGKPPEVPFEAAKIVSTLSQQVLDTHVRLREIDRDLAIWLRSNDVARRLMTIPGIGPIGASALAASVTDPHQFRSGRQFAAWLGLTPLQKSSGGKERLGRISKMGDKYLRKLLIVGMTSLVRRAKYNPKTVDPRLADLLARKPVRVATVAMANKTARVIWSIMARGETYHADHRPALAA

SEQ ID NO: 248055 - protein, 343 aa, unidentified
MQTITTIGLDIAKSVFQVHGIDAEDRVIIRRQLKRRYVLAFFQKLPSCLVGIEACASSHHWSRELKALGHTVRLMPPAYVKPYVKRQKNDAADAEAICEAVTRANMRFVATKTPEQQSCLMLHRTRHLFIRQQTAVINVIRAHLAEFGIVAPVGRKGVEELLDVVADSNDDRLPEVARVCLAALGAQLRRLKEQILEFDRKIMAWHRSNETSQRLDAIPGVGPMLATALVACVADPKVFRAGRNFLAWIGLVPKQHSSGGKDRLGSISKQGDRYLRSLFMAGALAVIRYAKINGTKRRPWLTALLARRPAKVAAIALANKIARMAWAMMARGERYKEPVALAA

SEQ ID NO: 248056 - protein, 465 aa, unidentified
MAKKAQKMKKGKRSELLIVNSNAAGIDIASTEYQVCVPEDRDAAPNKRFEAYTCDLHSIAQWLKQCGIDTVAMEATGIYWVQLFMILQEYGFDVVLCNAKHIKNIAEKKTDYVDASWIQMLHSYGLLRESFQPDNQIRQLKDLMRQRERIIQRTSQDLLRIQKTLEMMNIKVHKVLSDIKGKSGLCILEAIIAGERRPDVLADLVHHRVKATREEIIKSLEGNWNDAQLFILKQNFDAYCFALKQIEELDISIEHSLKAYAQITGKSTTNKPIERTLKRQQLIGNAFHFDAEQYSYNILGVNLTRIPGISSLTAIKLISELGKDFTEKFPTVKHFCSWCNIVPNNKISGGKVLSSNIPKRKNFTGQTFRVAANTLSKSRGYLGDYFRRMQFRLGYNQAIIAVAHKLARIIYHMVKMSVEYDESIDREKNTKMLEFKRKSLIKRLSKIEVELNISANNTMNYALVR

SEQ ID NO: 248057 - protein, 341 aa, unidentified
MYSIGLDISKASISVHIPINSLNLEIDNTSIALKALYSKLKKLYKKDLDKLTFVYEPTGSYSFTTKKFCSNKNIKSFIINPKQSSNFAKAWGHRSKSDKIDAIMLSQAIVIAKENEIRVPVINVTLETIKELMSYYKFTVKQRVALSNHQEALNSKDCNTYMKRDITKRLKLFRDKEVEILDKIKNIIESDDKLFQTYNNIQTIPGIGKIAGIVLMHLFISYPNANKNQIVSLTGLDPVIKDSGTSIKSKPRISKAGVKLYRGSLFMATMVAINYNEQMKDFYNRLKDNGKHSTVAQIAVMRKLIVIAHSLYKNNCIYSADIYNKACGKIVEINDNNGNLA

SEQ ID NO: 248058 - protein, 366 aa, unidentified
MKIIHWIGIDDHADKWTIAHLRGNEDKPAREFELVPGGEGYRKLIKYAKELDGEVRIVYEAGPCGYELYRRLTKADLKIDVAAPSLTPRKPGDRVKTNRRDAAKLARYLRAGDMLTLIVVPDQGRESLRDLVRARHAVQKDLLSVRHRITKLVLRYGHRYREGSAWTNRFWTWLSKIKLEGEHSQFVLDELILAHGQRLEQRGRYDDEIEAAAKTPQYAPYVAALTVLRGIDRLSAMTILSELGDLRRFATAPQVMAAIGLVPGEASTGDDTNRLPITKTGNAHVRHIAVEAAWQYERRISNGPVIRRRRKDQPKALLDIAEKCDLRLNRKFHRMTSRGKRSTIAAVAVARELMGFIWAIGQIVHP

SEQ ID NO: 248059 - protein, 336 aa, unidentified
METKFVHFAGVDVSKQKIDVCVIVNNQRSEIVHNQFEQSKKGFASLKKWLVQVTARQTGKLLICVENTGLYDDALMYYLSDHDLAVSLENAANIKRSVRDHRGKTDKLDARNIALYALNHHDELRLWERPRKQVALLQQMLSERSRLVNALKMLKQAHTEQQVFSWSGRVQSKSYQSGIKGLQKDIEQVEKDVWELVKSDKELLQMFMLIVSIPAVGKITAYHFICYTNEFKQVKSGKQLASYCGVVPFERSSGSSVKGKPRLPHQANKILKKLLHLCAVTAIKMKGAFAAYYRRKIEEGKNGLIAINGIRNKLVLTIAAVIRNNEPYNENYIYKP

SEQ ID NO: 248060 - protein, 321 aa, unidentified
MTYVGIDVSKATFIVAYSSAKSSKTKTFKNTTKGVHEFIQTLSANEHHCVLEATGNYSSLLVYLLSRANITVSLENPLKIKNFARVMLSVTKTDETDARLIALYGQRMQPAPYKLRSDAILTLKQKRTVIRQLKKQLIATQNLKGSMEALPFFDPKCKKAIEKTIVFLEKQTKGLEEELAALAQSQNKKQIDLLTSINGIGVTLAAALIMATGGFTYFDNAKQLTRYLGLSPTYQQSGTSVNVKGHINRNGDSSLRGQLYIAAMASLRCNAECKACFDRLRSNGKPGKVAVVAVANKLVRQAFAVVTQEKPYVDGFKSEKP

SEQ ID NO: 248061 - protein, 427 aa, unidentified
MRVLYDRVAAIDVHKDMVKVAVRVPGEKRGGRKTDVLEYRTFYGVLQAMARELRGRGVTHVVMEASGVYTEPVYYALAELDFTEVLVVNPAHVKALRGHKTDARDAVRLLDLYECGAVMRGSYIPAPDLKEVRDLVRYRVKTVQARTSEIQRLQKTLESAGIKLDSVVSDITGMSSTAMIEALIDGERRGEVLADLALGRMRAAGKLADLSMALAGRFTDHHALMCRLHRDRISMFDDAVGDLDAKIAPLVARYPDAAALLRTLPGFGEVVTAGWLGAIGPAPHRHFGTAERLASWVTLCPGNYISARKSRSGRTGDGGNYIKPLLVQAAWAAIRVPGRLQARFHRLVRKFGGPKNKGARKRAIIAIAHTLLKIAYAVLKTGKPYQEPGADFYTRRESAQARQDYLLRQLQKLNPGSVITITPAEAA

SEQ ID NO: 248062 - protein, 410 aa, unidentified
MEVLYPRCCGLDVHKETVTACLRLVMDGKVAKEVRTFATTTTSLMQLAEWLTQNKCTHVAMEATGVYWKPVWHILSDGDLQLVLANAAHIKNVPGRKTDVKDADWVSDLLAHGLIRPSFVPDSETQEMRTLMRTRKQLVREKAGHTLRIQKTLEDANIKLDSVITDVIGVSGRKMIEALIAGENDPKKLARLADQRSRASQDTLREALRGRVTKRHRFLLRLHLGQIDALDAAIADLDREVDASIAPFRTAIEQVTSIPGVKHLSARAILSEIGIDMYRFATDAHLISWACICPRNDESAGKRRSSRIRKGSPWLKATLVQCAWSATRTKDTYLQAQFHRIRSRRGAKKAIVAVAASILTAIYHMLKDGTMYLDLGPNHFDNRTKDRQKNRLVKRLAQLGYQVQLAPLTS

SEQ ID NO: 248063 - protein, 344 aa, unidentified
MRIASIGIDLGKTTFHLVALGERNKVLVRKKFSRGQLLAYTANLPSSLIGMEACAGSHFLGTTLREQGHQVRLIPAQFVKPYRKSNKNDFLDAEAIAEAVTKENMRFVQIKSQDQLDLQAMHRVRDRLVQRRTALINEIRGFLLERGIIFAAHPIHLRNNLPGVIEDAEQNLSPRLRWLLDRLWQEWKQIESDVQAISQEIERISDEDVRCRQLRQIPGFGPLVSTATVAAIGNGAAFRRGRDFAAWVGVVPRQYSTGGKARLYGISRRGNIYLRRMLIHGARAVLFRIKHDTGGFGQWVHRLAQRAPRNKVIVAIANKLARIAWAVLSSGKDYRHQPLRPAAA

SEQ ID NO: 248064 - protein, 334 aa, unidentified
MSKKVIGIDVGKKDLYLAHKYFTTTGKVKVKRKKFSNNLKGYKALIEWSKNIAKKEGDKPLHFIMEATGVYYEGIAYFLFEKGFAVSVINPSYIKSFANSSGVRTKTDQKDALVLVEYGEAMKPELWSPPAEEYRVLLNLCRAISSLKNRRDAVANRIESLKSSRVIAQAVLEEEERLFNEINKSIKRLEKQIREHVNKYPSLKKETKLLMSINGVGWNTAVLMVAIMEGGRRFKSAKEAAAYLGLSVQEYTSGTSVKKRSRLSKKGAKDIRKALYFPAITAVRCNADVKALYERLLKRGKLKMVAIGAAMRKLVHICFGVLKNKTAFQPQTIG

SEQ ID NO: 248065 - protein, 425 aa, unidentified
MNYKQNEKINQVKESTLVVGIDIGSTKQYARAFDWRGIELGKVFTFSNSREGFEAFKAWMQHLQDKYRKSDVIAGIEPTGHYWIDLGAYLEDEGILLVMVNPYAVKQTKELDDNSQSKNDRKDPKVIAKLVTEGRYSAPYTPDGVYADLRIMVANRKRLIREMTQIKNRFARWFAIYFPEYTDVFGDYEAQSSMLLLKKVCTPEAIVELGAEKINKIWRDAKLRAVGMKRATTLCETAKRSIGLKKGSSAARYEMKLLLEDYEYKKAQLDAVMEEIEKLCRKIPESEQMLAIKGIGVITVAGFLAEVGDVRRFESPRQIQKLAGLSLRENSSGKHKGQTTISKRGRSNLRAVLFNAAIPLIATNPEFKSLHEYYTTRANNPLKKKQSVIAISCKLIRVFYAILANGVTYDAQKMLSDIHRQPQAA

SEQ ID NO: 248066 - protein, 367 aa, unidentified
MKKNTTVKQSLSSTDLSTCTTVAVDLAKQVFQVAGEDALGQVLYEERIKSREAFHAFLRKLPSTVVVLVETGPGAQAWARQLQAQGNLARILPAQLVAKHRSGAKNDRNDARAILRAGRDSKIAAVPIKSATALAMQALHRARQGYVRRRTAMSNQMRGLLMEHGITLAQGDVAISQTLPRVLEDATQPLPDILRELIDELLGEWRQLGERINVLTGRLESAANEDKTARRLMTVRGIGPIIATALLAKETEPERFANARQFAAYFGMVPEQNSSGQKIRLGRMSKRGDSYVRSLMVQGAHAVLRHLRHDSEQPDDRRLQRWLGRLGRKEAAIRLANRNLRIVWVLLQNDQTYRSQPADGRPAAPSY

SEQ ID NO: 248067 - protein, 346 aa, unidentified
MIAVGIDISKSKSTVAILDSYGAALVTPFNMAHTQPEMNALVSRLKAFDEPVTILLEYTGHYHYPVLKKLQDEGFSVCVVNPYQMKKYGDMEIHRAKTDKKDAIRIATFALEKSYRLVPYSFMEQKYEDLKFLSRQYQQRISFVAKLKVQLINLLDQTMPGITKILELRSRNPEKCALLLFIKRFKSFDEIQRIGKTRFLSAYTTLMKKTPDRYAPQKGLAIYELARESITTRGEDPYIWAAQDQCVDLLSTAQNAADEIIAQMQNIAETIPEYKVLRAMNGVGDRLGPVILAEIGDVRRFHSAKALNSFAGNDAPPYQSGQFESRNRHISLLSGRLVLRSCRPLN

SEQ ID NO: 248068 - protein, 389 aa, unidentified
MRSSHRFDTPVADSEHATMYVAFELGKAKWLAGIVSPGSAKLSRHVLPGGDTAAVWHHIARAHGRAVKRLGKPVRIVSCYEAGYDGFWLHRWLEAQGVESRVLDPASIEVNRRARRAKTDRLDLEQLMRVLIRHEGGERRVCSVVRPPSVEQEDTRRPWRERERLVKERTMHVNRIKGLLHGQGVRDLQPRARGFVEQLEGARSGDGHALAPHLVSEITREHVRLTLVEQQIGAIEAQAEATRQAAVPNGVANKINQLIELKSLGPATSQTLVGEAFFRDFQNRRQVGAYFGLTGTPFDSGNSHHEQGISKAGNPRARTAAIELAWLWRRHQPRSALSRWFEARVGTQKGAIKRIAIVALARKLIVALWRFLEHGVVPEGAVLRSASRA

SEQ ID NO: 248069 - protein, 413 aa, unidentified
MLRVINERCAGLDVHKKTVVACVLVTKQDGQVCQQVRTFGTTTGEILALAEWLKSQEVSSVAMESTGVYWIPVYNLLEGSFELLVVNAQHMKAVPGRKTDVSDAEWIAQLHRHGLLKGSFVPPKPQRQLRELVRHRTNVVERRSQSVNELQKVLETGNIKLASVVSEITGVSAMEMVQGLIDGERAPEALAKLGRGRLRDKKVQLAAALTGRLEKHHRFILSQLLADISFCEEQILELDLQIRVAMKEYEEVIQRLDEIPGVNRRIAEVLIAEMGTDTSRFGDAAHAVSWAGMCPGNNQSGCKRRTARVRQGNKSLKRVLVEAAHAAGRKKDSYFSAQYRRLAARRGKKRAKVAVGRSILETAFHMIERKTTYKDLGSDYFDRRNPEKLAKRLAERIAKLGYKVNYQPLAQAA

SEQ ID NO: 248070 - protein, 315 aa, unidentified
MSESSREVFIGIDVSKEKLDVAVRPTSEFMSFSNNENGISCVVDFVKSFAPSRVVLEATGGLETAVVGMLADKRLPVVVVNPRQVRDFAKATGKLAKTDEIDAHLIARFGEAVRPEIRLLKDQEAQKLTALITRRRQIVEMITAEKNRLHAAPKWTSKDIQANIAWLEKCLKKVDKDLKNLLKKSPVWREKDEILQSTPGVGPVLSMTLLSGLPELGTLNRKEIAALVGVAPLNRDSGLFRGKRMVWGGRANIRSVLYMSATCAMRFNPAIRTFYERLRSAGKLHKVAITACMRKLLVILNTMIKNRTYWSTVQT

SEQ ID NO: 248071 - protein, 357 aa, unidentified
MTTMTTTTPGVTGGVDTHGQTHHAAVIDHLGRQLGDRQFPTTPAGYRALQAWMASHGPLERVGVEGTGTYGAELSRQLRAAEVQVVEVDRPDRRARRAQGKSDPLDAYSAARAALAGTATGTPKARDGRIEAIRALRVARASAVKARSQTTNQLKALLVTAPGELREQLRALSTTALVSTCARLRPAGDIADPATATKTALRRLARRHEYLSEEITQADAEIRALVTAAAPDLIALPGVGPEVAGQLLTTLGDNPDRLRSEAAFAHLCGVAPIPASSGRSHRHRLNRGGDRAANYALYVIVLGRLRYDRRTRAYAARRTSEGLSKPEIIRCLKRYVAREIYNALQPATRPAELALTA

SEQ ID NO: 248072 - protein, 418 aa, unidentified
MSTNWTNHSYFAALDWASDHHDVIVLDRPGAVQIEFRFAHTAEGWAEFTTKMQPFSGAPITLETSSGPAVDQLLQHGWAIYPVAPTAAARYRERKVPSGTKTDRHDTWALADALRTDGHAWRPLRPQDEATATLRALCRDEIALIEQRTALVNQLQAALREYYPAALAAFDDWTAPYAWALVLQFPTPAQLQAAGKRKWEKFLHTQHLWRPQTVTTRLEIFAHAEGLPASAAVTAAKSLLAVSLVKVLVTLQAQLAEYRRRITEAFRQHPDHDVFGSLPGAKATLGPRLLAEVGGVREEYPDADALMCQAGVSPVSYQSGRVSKCRLRRACNKVLRATVHLWANASRLTCEWAQAYYEQKRSEGQSHASALRCLGKRWLKILWRLWQRKEAYDEAKYLAQLQRRGSLTWTKLQTAKTV

SEQ ID NO: 248073 - protein, 415 aa, unidentified
MGQQRNKVCGVDIHKKFLVATILTRDGTKMQKRFGTDIDDLLNFRDWVLKENCDCVAIESTGVYWYPVNAVLENKVELILANAHQIKHTPGRKTDALDSEWIAEVALNNLIDPSRILPKEDRELRRLTRTRESLVKIRSQMKNQVHQGLESCSIKLSSVLSDSFGKSGRYILDGLIKGKNIDEIIAGIPSKRVKNNGDQIRSAIKIGLDQIQVFLIQSHLDTIDCLTKKLDEMDLEIKQRISGRKDDLKIVMSVPGIGFIAATTILAEIGNYQDFSTPDKLAAWCGIVPSVYQSADKLRTGSITKQGSKHIRWIMVQVAQAAAKKKGSKLRKFFLRVKAKKGHNVAVVALARKILCILHHLLMNREMYQEEGVEKSRPSRLDGSSATIDKMSLQTMIEIIAKAGYEVRKTERDGG

SEQ ID NO: 248074 - protein, 338 aa, unidentified
MMYGAIDLHARYSQIRILDEDGRVVREERVLTSAERLVRVFAGYGPMRVLLETGTESEWVAQALEGAGHAVIVADPNFAPMYGELRRTVKTDRRDVAALAEANRRGWYRATHRVSAPQRALRQILCSRRQLVSMRSGTISVLRALLRQAGYRLAAGSAERVPTRLARLSLPEALADTLVPLRRILEALSEAIAMVDARLRAHVATDPVVPRLQSVPGVGPIVALSFRAFVDDVTRFASAGQVSAAIGLVPREDSSAERRHRGHITKVGPRELRSLLVQGAWACWRSHGSASLRAWVDRLAARRGRRIAVVALARRLSRILFALWRDGSVFDAATLAAA

SEQ ID NO: 248075 - protein, 423 aa, unidentified
MKSLSIHSFTAFVGIDWADAKHDFCIQAAGSGQHEFGTMDHSPEAIAKWAYSLRDRFGGPIAICLEIAKGPLVYALQRYEFLVLFPVHPSTLAQYRKTFVPSGAKDDPTDAEAALDILLRHPEKVRPIKLQSVAMRKLATLVEERRCLAGDITSITNRLGYSLKQYYPQVLDWFEHRDTLIFCDFLSHWPTLKHVKRARRSTLESFFHQHNVRRAYLVEERIQGIRAATALTEDEAVIRPYQMLVQALVEQLRALLQAIDRFDAEIDDITKSLPDYDLFAALPGAGNVQAPRLLVAFGEDRDRYANAAEMQRYSGIAPVVERSGNKCWTHWRFFCPTFLRQTFVEWAGSTIPRSFWAGAYYQQQRKKGRSHQVAVRALAFKWIRIIYRCWKTRTPYDESVYLKALKNRGSPLLANMMESAKMT

SEQ ID NO: 248076 - protein, 486 aa, unidentified
MSKQSTPRKGRQSCSQHTPKRSPKRALTVVNPNAAGIDVGATNHYVAVPPDAVADESAVRKFGAFTEDLEQMVEWLKACGVTTVALESTGVDWKPVFQKLEVAGLKPVLVNPKMVKHVPGRKTDVQDCQWLQQLHTYGLLQGSFVPDDLVCQLRVLMRHRANLVSQAAAEIQHIQKASAQMNLHLHHAVSDVTGETGLRILRAILEGQRDPEVLVQLRDPQITKSSKEEMKKALRGEWRDELLFVLRQSLEAWEFYHKQMDQCDEQVQQVIKNFPTAEMPEPQLPSTTSSMTAAPTSADSMAKKKTQQSRKRNDPIMNLVPELTRICGIDLCETSGFRVLTALTVVSEIGLDMSRWRSEKAFSSWLGVCPNHKISGGRILSRSTRKVINRAATALRLAAQGISQTDNWLGLFFRRMKSRLGPAGAITATAHKLACIIYHLLKNKEPYVEIDPVLYAARVDRARLGRLKKQAAAMGYELVQTRTFTE

SEQ ID NO: 248077 - protein, 346 aa, unidentified
MMIIGCDFHPSWQQVSWLDTETGDCGERKLVHANGDAKMFYQQLTAPVLIGMEATGNSQWFVELVEDMGHEIWIGDAAQIRASYVRKQKTDKRDAAHILKLVAEGRFPRLWTPDRGQRDLRQLVLHRHKLVEIRSRVKNELQHLSLNKGMQRKGKLWSQAGQKMLRELSLKPWAACRREDLLGLLAMLNQQVGQLDTAVQHAAEENPQAKLLMTQPGVGPNTALAYVLTIGDVSRFARGKQVASYLGLIPREHSSGGRQKLGVITKQGNRMLRSLLVEAAQIAVRFDPEMKKQYLHRCHQKPKGVAKVATARKLAVRLYWMLRTNVAYPEIVRIESSPRVPLVGAS

SEQ ID NO: 248078 - protein, 355 aa, unidentified
MKKRDKYMGMDVHQATTVVSVIDAEGKLVLETTVATEAGPLIRLMESISGPLHVTFEEGTQAEWLYEVVRGYVTEVIVCDPRRNKLLEEGSKGDKLDARKLAELLRAGLLRTVYHGQQEATRKLKQLVRAYENLSQDTQRTMARIKAVYRSRGIASRGRAVYQRTQREQWLEKLSEPGARQRMEWLYEELDQLGPIRRRAKQAVLSESRNHRAVALLRTIPQLGPLRSALIVATVDTPHRFRTKRQLWSYSGLAVVTHMSSEYEIKEGRVVRSRKPIATRGLNRNGNRRMKQVFRSAATGGAQMEPYRWYLEKLQQNGMKAEMARVTLARKIAAIALSIWKKGETFDPKKLNGTT

SEQ ID NO: 248079 - protein, 359 aa, unidentified
MNSTLSNNPAVVIGIDLAKTHCDVVGFDKDRKIALKLPRISKEKLLERLANMPRASVLMEACGGSHCFVRKVKALGHDGRLLNPGDVKRIRCGHQKNNMLDAAYIAWAWYIPGISYVAPKTQAQQDLQSLQRIYQGYMKSRIEFGNRIHALLLEYGLSSPQTSRFIAEQLPEFIETHTKDLTPLAGEALLMLRDSWLEASEWEEKAGQKYDKLVRANEDSKRLMTIPGIGPKCAGALLTHCGEASRFRDSRQFAASLGLVPRQNSTGDRDTLGHITKRGPKHPRSMLVQGASALMIMADRLEGTLGEWVRKIKASGKKYGVKVCAIAAKLARIAWRILCEKGMEYRPQPIKAGRSRAAA

SEQ ID NO: 248080 - protein, 438 aa, unidentified
MEQRDGSRLAEFCQFRKEIRGSTEYLVVGLDIAKERHNAFFGTAAGKTLHKGMFFDNTYDGFQKLLIQTDALKVQHGLRKVVFGLEPTANYHKPLGEYLIKGGHLVVLVAAAATSKNRELLDGRWDKHDTKDAANIADLISQGKCLYSDWPGEDLLSLRGLLSLKKRLKKEEHGLRVRIRNQLLAQYFPEMDQHFGSLASLGVVQRCLDPSLISIMEYDEFCRTAAPGKVNMAQQRRLMQIWQVAKQSIGCSVGSAVAVEAQIMVTGLNRVRETIKTVEDKIEDICLKFPEYSFLLTIPGFGPDISSKVLGAIGNPDRFTNGKQVLKMAGFDLCASRSGKTSNSATPVISKHGKADLRYALYQAAIISSLHSKEFIVYFTNKIRGREREKGIGTKMRVKLAAKLLIIAWTLMKKKKPFDPKCLITEDSKAQTEKKELK

SEQ ID NO: 248081 - protein, 322 aa, unidentified
MDKPVTPDRYVGIDVGKDRIEVHIRPDAIAFGCATDANGLEHLLTRLKPLTPKVIALEATGGYEAIIVATLSNAGLPVAIVNPRQTRQFAGALGRLAKTDKIDAGVIAHFAEMAKLEGKPPADAERSELRALLARRSQLVEMAKSERQRGARADSTLTRRSCRTIIRQLEAEIARIERAIGKLVDESPLFQAREALLKTIPGVGKVVARTFIAELPELGTVDRHEIAALVGVAPINQDSGKWRGRRMIKGGRPQVRSPLFVACLSAIRHNKPLRAFYQRLVDGGKVKKLAIVAVMRKLVVIANAMMKSGKPWSDAATPAAAA

SEQ ID NO: 248082 - protein, 309 aa, unidentified
MTVALYDGKKHTEYHFDSNDEKAGKEIIKLLGNDTGESLVTMEASGVYHLRLAVLLYSKGIKISVVNPLVIKRYAQMKMVRAKTDRVDARIIAEYGYTQEPFMFMPKSDTLKRVTLYLKGIDDLLKTKNQITNRLEALSRQSCKCEDLNKSFKKLVEQINHEIKQLEEKIKSLVKQEYEETYNRLKEIEGVGERVSICIIGHFGNFENFESPKQVASYIGINPAPYESGTSVKRRGHISKKGSPYIRTMLFLASLSASIYNLQCKELYERLINNGKPKKVALIAVANKLIRQIFVIVKYGRQYDPQYKL

SEQ ID NO: 248083 - protein, 320 aa, unidentified
MIPPAIFVGIDVSKARLDVAQAPAAPAWAAANSGEGISELVQRLQRLAPALIVLEATGGYESAAVAALMAASLPVVVVNPRQVRDFARAKNRLAKTDKIDAQVLADFGEAVRPELRPLPDVAAKELGALVRRRQQIVEMLTAETNRSLLATAAVGKDIEDHIQWLRNRLKDLNRDLKEAIRSTPGWRERDDLLRSEKGVGPVLSLVLTADLPELGQLNRKKISTLVGLAPLNRDSGQFRGKRKIWGGRPTVRAALYMGTLVATRHNSVIRAFYQRLITSGKPKKLALTACMHKFLIILNGIVRDAEALSLTPGLASQDSC

SEQ ID NO: 248084 - protein, 276 aa, unidentified
METKVLIGVDPHKATNALAVLDEHGELLGRTEFPADRKGLEALERWAANFPRRKWAVEGANGLGRTLAHRLASAGENVVDVPPKLSARVRVLSIGHGRKNDELDATFAALAAWRNGRLARVRPDDGIDAIRLLSERREDLVCERTRVLNRLHGLLRDLLPGGVPGMLSANRAARILRRIRPRRNSRSAAEAVRRQLASDLLRDVRNLNKRISELDVRIREEVDGSSTSLTEVFGVGPILAAKIIGLVGDVSRFPSKGHFASYAGVAPVEVSSGEVT

SEQ ID NO: 248085 - protein, 533 aa, unidentified
MRTSHCQRPRFHWCSEPEEETGLGCLQAPLAVAAGERLLEGQHVEKNLESLASCVKVQIARKSQWHIKGRQDMEEIFEDCHDVEVVYQRCCGLDIHKKMIVACLIIVAADGKRRKQIRTFGTTTQALLELLDWLKAAGCTHVGMEATGVYWKPAYNLLEGHFELIVANARHIKAVPGHKTDVKDAQWIASLLQHGLLKASFVPSSEQRELRELTRYRTTLVEERARIVNRLQKTLEDTNLKLGDVVSDITGKSAQAILRGLLAGETDPAVLADLARGRLKAKRAELEEALVGTIKPHHRFLLTEHLDHIHQLDQSIERVGAEIEARMGPDEPPEPEKDSDKQPQDEQPEAEPTASDEPCEPATKAPLSLAQAVVLLCSIPGISQRAAEGILAEIGTNMDRFASAKHLASWAGMCPGNHESAGKRSSGKTTKGSPWLRKLLVQAALAAGRTKNTYLSAQYGRLAARRGKKRASIAVGHTILVIIFHVLREQKPYQELGGNFFDERERQAVEKRLVQRLEKLGYDVTLEPVAPAA

SEQ ID NO: 248086 - protein, 427 aa, unidentified
MKKLDFLSTLFVGIDVSSKSNVVCALDFSSNKLLTFSVSNNQPGALDMAQKFYDFLTSNPKFKTVIIALESTSIYSVHIANFLSSHEQLLAFQPYVYCLNPKIIANYRKSFIAMDKTDPLDAFIIADFARVGRINSKPWRGSQFLALQRLTRHRLHLVNCLTREKTYMASNMFLKFSELTILDDSERPFSTNYGATASSVLTDFLSTDDIITMPIESLVAFLCEKSKNGFVDPNHTASLLKQAARNSYRLDKCLYEPLTIALASSFNCISAYETEIKTIDKAIKRNINGLTQSEYQCLLSIPGIGPVYAGGILAEIGTITAFTSQDAIAKYAGLVWRQSQSGNYKADDTNLSKAGNKYLRYYLVEAANSVKNHVPEYTAFYHKKFGEVKTHQHKRALALTSRKLIRLIFGLLANNQLYSATRVNQIS

SEQ ID NO: 248087 - protein, 412 aa, unidentified
MKDLLEISCGLDIHKEKIVACILTGPLGKPTHSEIREFTTLIPDMLALRDWIISENCHHVAMESTGIYWIPIYEILEDAFSGDITLLVVNARHMKNVPGKKTDMRDSEWISTLLRAGLLNASFIPEKRIREFRDLNRYRKSIIRDITSQKNRVEKFLQSSGFRLSSFISDIFGTSGRNIILHLMEHGRIDKISLDSYLKTKTRKRIDEILMSVNGTLSEHQKSFLKILMCHYDSMKEHLIEIETHLQEDMLPFALQIEQLNTIYGISTTASCAIIAEIGTDMKPFKTAEHICSWAGLCPGNNESAGKRKSTSITKGNPYIKSMLCEIAWVIAGKRNTYLSAWYWRIKQKKGARKAIVALARKLLVIIYTMLKQGTNFDENCFEVRRKNCEQKQLSRYIRELEKHGYTVEAQV

SEQ ID NO: 248088 - protein, 347 aa, unidentified
MNTTTIGLDIAKRVFQAHGTDSRGKSTMTRRLKRAEVLRFFANLQPCLIGIEACASAHHWARKLCALGHTVKLIAPQFVKPYVKTNKNDARDAEAICEAVSRPNMRFVPMKTVEQQATLALHRARQGFVSARTAQSNQLRGLLSEFGIVMPKGISNLKRRMPEILEDAENGLLHRSRELFARLYAHFRELDRQVAELERQIKICHRESPASRRLEAIPGIGPLSASALAASIGDAKAFRNGRQLAAWLGLVPRQHSSGGKEQLLGISKRGDTYLRTLLIHGARSVLLTLKRPGGQTDGWLARLAARRNANIAAVALANKNARVIWALLAHERDYQAAYVAPFGRAVM

SEQ ID NO: 248089 - protein, 345 aa, unidentified
MKQPRVIAIDLAKSVFQVCLFDSAMRVLSNRAMSRAKLQALLARQQPAHVVMEACGTAHFWARLAGTHGHRVTLLPPKLVTPYRQGQKTDGNDALAIGIASQQPQIKTAAVKTLEQQALQSLKRIQEHLSDQLTASGNALRALASEFGLVIAKGTASLKRRMPEILEDAENALPMAARHGLALLWANWQQLAQQRDDAERQLQHYAETLEPCRRLQAMEGIGYKNAVALYLRLGDGQHFKNGREASACVGVTPRQYSSGGKIRLGGIGRYRGDQRLRSSLIVGCRAMVNALKRRPPRNATEQWLQQVIERRGPGRAAVALANRNVRTAWAMLRHATAYQPQPLAA

SEQ ID NO: 248090 - protein, 331 aa, unidentified
MRIIGCDLHARQQTLAMLETTTGEVVNLTLMHEGDEVRKFYSQLPRPVLVGIEATGSMQWFLNLMEELGIECRVGHPATIRAAEPRKQKQDRRDADLILKLLVENRFPAIWLPNKELLDLRALLLHRHQWVRIRTRIPNALQAIALANGLRRGPGLWSYDGQAKIAFWPLPPHASYRRSALQAMYRKMKDDIENLTKQVAEQAEQRCGARLLMTHPGVGPVTALATEVFLGDPGRFVDGKALASYVGIIPREYSSGGTQRFGGVTKQGSPLLRFLWCEAGAHAVRRDPELQRFYRRKLVQKGLGKARVAVARKLGIRLWIMLRDEIDYDRP

SEQ ID NO: 248091 - protein, 279 aa, unidentified
MNSEKYIGLDVHQATISVAVLDSTGKLVMESILETKAATILEFFAGFAELYRSTFEEGTWAAWLHDLLKPHVAKLVVCNPRKNALLKDGNKSDRIDAHKLAELLYLNKLSSVYHGETGVRMLRELARSYLTIAKDLTRVMCRLKAVYRSWAIPCAGRDVYYTRHRTEWLGKIKEAGVRRRAERLYQQLDMLQYLRQQVRRELLAESRKHAITVKLRQIPSLGPIRSALAVALIQTPHRFRTKRQLWAYSGLALETRTSAEYCYVKGGLRRSKKQISIRV

SEQ ID NO: 248092 - protein, 344 aa, unidentified
MTYYAGLDVSLRSTHICVIDDDGELLAEGKTDSEVVDIIAFLDDLHVEITEAGLEAGTLTQCLTYGLQSAGFEVVCMEARQVKAALSAMRNKTDKNDARGIAQLLRSGWYSRVHVKSIESHQVRALLSSRRAVLAKCIDLEQEIRGLFKVFGIKLPKRLGHGAFEPKVRPLIEADEALAHALLPMLDARLVLYHSFRELNNRTRHMANDDPVCQRLMTAPGVGFVTALTFKSGVDDPAHFKRSRTVAAHFGLTPRRFQSGEIDFDGHISRAGDAGVRSTLYVAANAMMTRSSKWSPLKAWGMKLAKTRGHKRAVIAVARKLAVILHRMWIDDTRYRWSAEAARS

SEQ ID NO: 248093 - protein, 387 aa, unidentified
MQASTVDTPTAGHCGTIFVAIELSQKSWLVTLHSPDKGKMSRHKLEGGDHAALLALIGQVRERAARALGAVPAVVSCYEAGYDGFWLHRLLLAAGITNYVFDPASIAVDQRARRVKTDRIDGEKMLRTLMAYLRGEPQVVRIVRAPAPEQEDARRTSRERGRLIKEQTAHTTRIKALLRLLGMAVGNPRRRDWLSWLAAQRDWQGQAVPRRMLAEIKHEHARLMLVREQLEALAQASAQADPAPAAAQMTERSELLLRLKCLGPAFATTLTSEVFYKDFRNRREVASYFGLTPSPWQSGGTDRDQGISKAGNPRARCAAIELAWLWLRHQPESALTRWFRSRTHNNASKRNKRIAIVALARKLMVALWRYLTTGMVPEGAVLKAAKA

SEQ ID NO: 248094 - protein, 322 aa, unidentified
MAMLSFGGIDVSKDRLDVVVLPEEECSSVPNDAAGWAELVERLRGFSITAIGIEPSGGYERGAMRALLAAGMPVRQVNPFKLRQFARASGVLAKNDPLDARMIASFVTIMPTRPAQRQTPAAERLAEMLAIRRQLSAEKVAAENASRLLEDAMLQRLSRRRIVRLAADIDLLDKRMVEIVATDDALVHRYRLLASMPGVGAVLACTLIALLPELGRMSRKQVAALVGVAPYAFESGTLKGRRCIWGGRAHIRQVLYMAAMSASNWNPVLKAFHDRLTAAGKLPKVVIVAVMRKMITMLNAMVRDDVVWADRLSGRHVLPTAR

SEQ ID NO: 248095 - protein, 360 aa, unidentified
MHATTVAVDLAKSVFQIAVADEHWHIVETQRLTRTQFERWFANRAVGLVVMEACGSAHHWARWLNSLGIEVRLLPAQYVRAYVRRNKTDATDAAALLEAARASDLRPVRVKSVEQQALQGLHRIRSLWMGTRTSRINARRGFCREFGIAIPQGARTGIEALGRVLADPQSAVPELIRHTAGQLLEEIRLLEARIAQVERQLSLAARQSPACTLLLSVPGVGLLTATAMVAATSGDVTHFTDARHFASWFGLTPREYSSGSSRYLGRISKKGDRYLRMLLTHGARSVLRAAQVAQSAGKQVQGVRCWALQVQGRSNHNKATCALANKLARICYATLRDHKPFDEAAHLSRKESRQSFVMPA

SEQ ID NO: 248096 - protein, 340 aa, unidentified
MNEITTVGLDLAKNVFQVHGVDAEGSTVLRKQLRRAQVLAFFSGLPRCLVGMEACATAHYWARELRALGHEVRLMPAQYVKAYIKRNKNDAADAEAICEAVARPTMRFVPAKTAEQQAAVLLHRGRERLVRQRTMLVNALRGHLAEFGVIAPQGLRNVGRLIAIIRDEEDARLPGLARQVLQVLAVQIEQLEAAIAALEKQLMGWHKSNPISQRLATIPGIGPIIATAIAAMVAEPSGFRSGREFAAWLGLVPRQNSTGGKNRLGGISKRGNQYLRRLLINGASANLLRSKATNADPWVIGLRRRRPSLVVAVALANKTARIAWAVMHRQENYQRMATAA

SEQ ID NO: 248097 - protein, 505 aa, unidentified
MSEETKKSLRFSGNSPLLNLPTTISADRTDVIQYGVGFDVHRDKISVCVAAQLVTGAVLEVKSHTFSAMPQGVDEIVRFLGKYSPISCYLMECTGVYHLPLYHALRHTFPDRLERIVAMNPLLLNRRITDLGKKTDRVDARSLAFLTFYQSLIKPSYIGSMQFFRTRDMIRSYHKTNTHCTACKNRIHRLLHSINAKISLDLNAEWCVLLLDRFACCTGTISEIYEELISERKLKGLSVGVLEKQRPNIMLIADITLIKEDRFMLRMELGRLLQEQVVAATFLTHAEQYMIDDPAYLLAYRNLKLIPGLGSLAVLTVLLEIGDYSRFVNWKAFAKYCGTIPIIDQSGNHKKKGHINRFSNGLLRYVLTQSAGVLINRCDKSTDLGEYAFKQHKIKHLPFKKASMKVANKLAKTIYNVLILGVDYNPSYEGYERRKKKQDNYLKKKKTLLESYRTRSLRRDINQFITSNYEFMNSSSRFQVTSGFTKMIKRARYLNSDKDSMLKKK

SEQ ID NO: 248098 - protein, 418 aa, unidentified
MIDDVQWFVGIDWATRSHRACLLDVEGRHVSEHDFAHDGAGLTELRDWLLEKTKAAPGRIAVAIETPHGPVVETLLDHAFQVFAINPKQLDRFRDRFTVAGAKDDSRDARVLGSGLRTDRQAFRRLVVDDPLVIELREWSRMAEELQQERTRLANRVRQQLWRYYPQAAELTDDVADDWFLTLWQQVPTPATAATASEEAITRILKDHRIRRLDAATVLQTLRKTPLFVAPGTTEAACAHIRTVAARLHLVNQQIKEAHRALDGLCAKLEAATESPSGQNREQHDVTILRSWPGIGRTVLATLLTEATEPLRARDYHALRALAGTAPVTRRSGKQCFVIRRLACNKRLQNAVYHWSRVAIQHDTAARRRYDALRRRGHGHARALRSVGDRLLYALCTTLKRQTPYNPNCQTAQVTTSL

SEQ ID NO: 248099 - protein, 383 aa, unidentified
MRRNATVTHMGLDIHRNFTQASACDQQGRLLWRARLQHADRQALRQELAQWPKVPVVLESSFGWGWLSDELLLAGQEPHLASSRKMAGWRKAQGIAKCNRTDADLLADLWTEKKKWWEVWRAPAEVRDRREWLRYRMGLVRIQTETKNRIHATLHRHGIVNPHSDLFGVAGRRWLSLLISEPASESLLRETGRQTLKGHLVLLDQLRKHIAQATRQLRRQIKDSPVARRLMSLPGISWILAYTIIAEVGRIDRFCGGRKLCAYSLLVPLADESGDEIDAPPLGRRIGHAGRLTLKWAWIEAAHGAVRRPGRFKAIFDRRSDNGKRDRGRSYIAVAHDLCRIAWSLWKNDVDYSDCPPPRPGSRSDTSRPGTDQPQNPMVPALA

SEQ ID NO: 248100 - protein, 344 aa, unidentified
MDATTVGVDLAKNVFEIALANERGHIVERQRLNRARFDRFFINRPACRIVMEACGSAHHHARRLSSQGHDVVLLPAQYARAYVRRNKTDAADAAALIEASRCPDIRPVPIKSVDQQALQQLHRLRSQWMTARTARLNFLRGSLREFGVCVPVGARRAIQAVRDTLTHPLCPVPALLHSSLLELLAEIDSLEQRCKHIDHELARIMADDPVVERLLKIPGIGPLTATALRASVVDVQRFPSARHFASWVGLTSREHSSGERRRLGRISKQGDPYLRTLLIHGARAVLLAARGAHRRGVPLDRLRSWALDVQERRGHNKAAVALANKLARIVWATWRYEREFSSRL

SEQ ID NO: 248101 - protein, 317 aa, unidentified
MGEAKVDKYVGIDVSKNTLDLMVRPTGTRQQQPNDADGIAQLVKELRRLRPTLVVCEATGGWERLLVGALATAHLPIVVVNPRQVRDFAKATGRLAKTDRLDAEVIARFAEAVQPEPRALPSTDAQALDELVSRRQQLIDMRTAERNRRRLATGRLREQLDEHLAWLDRQLQDLDTELDHTLRNSPIWREQADVLRSAKGVGPILTATLLSALPELGHLTHKEIAALVGVAPFNRDSGMWRGRRQIWGGRGPVRAVLYMATLSAVRTNPVVRGFYQRLINAGKLQKVALVASMHKLLTILNAMARDGRLWQPAKLTS

SEQ ID NO: 248102 - protein, 357 aa, unidentified
MEMVSVYVGLDYHSDTIRVCVMTTDGEELLNRSVLSNVGSVSEAVRTCLERKHRRVEEAPAVIVEGVAIEACTGSAEFATRLIEATEWTVRLAHAGAVHRLKQGPDKTDHGDAWHLANLIRVNYLPEVWLADETTRELRHLVRHRQALMADAKDVKLRVRALLKENGVAETCREKAWTKAWRAWLTEVKLPEHSQWILQEQLAWLQQLQQRIKEVEQRMRETTSDDALVQKLLEQHGVGLVTALLLRAVVGRFDRFRSGKQLSHYCGVTPRNASSGKRQADAGLVTTGHPDLRAVLIQLAKRLPRHVPHWREFKQRLGRRKPANVVSAAIANRWLRRLYHEVVQHPSKTLTQGGLNA

SEQ ID NO: 248103 - protein, 336 aa, unidentified
MNEAACVVGIDVSKRKLDIALLIDGKRKSKVFDNNAKGHSALSGWLIARGADQERTHICLESTGPYSETLAISLVQAHWRVSVVNPARIKGFAQGELARNKTDRADAALLARFCVAMRPGLWEPPSVQLRELRAWVDRVHALKDMRQQELNRIEALDASEQQDVLEHVKAHVSWLDSEIAKLEREIDDHIDRHPELKRDAQLLHSIPGIGNTTVAKVLAYAGDIRRFANAKALAAFIGVTPRQRLSGTSIRGRTMMSRTGHAQLRRALYMPGLVARRHNPVLKAFGDRLGAAGLAPKAVIGAVMRKLAHLIYGVINSGKPYDMNIALSKLDYQDGI

SEQ ID NO: 248104 - protein, 404 aa, unidentified
MFKFGIDWSEQHHNLCIRNSQGAIVSQVEFKHTLKGFQRFDDERRKLGVPPSECLVAIETAYNLLVDFLLDRGYLVYLIPPQATKGYRNRQRSSGAHTDDTDAALLSSILHTDLDSHRRLQPNSALTQQILAQVRLIDLLRRSIQRQANQLRAVLFRVYPQALGLFGKMTAQINLQFLMAYPTAQEAQALTQPAFEAFCREHRYGRANLISRRYAHLMEPAPEANPIAVTAYRDQVRILAGLLLPQVLRRTEARSSLAQLFSQHPDSFIFESLPGAGELLAPGLLVKFGDHRDRFPTPGSVQALAGTCPVTKQSGKRKVVIFRRGCDREFRRITQQFAKASVRQSGWALAYWRDVRPRCRSDSDAYRRLANRWLAIIWRMWQDGKAYDESYHIQQRAQRRRSRS

SEQ ID NO: 248105 - protein, 353 aa, unidentified
MKPKMESNTASLAVIGVDIGKEVFHLVGLGADGKIAFRWKIKRLALKDAFEKLPRCIVGMEACLSAHFVSRTLRALGHEPRIIPAIYVKPFVKGQKNDYNDAEAIAEAALRPNLRVVQEKSQDQLDLQACHRVRSRLVSRRTATINQIRAFLIEQGIAVRAGPRALRNSLFAILENRKDEISPRMASLILGLYEDWCHLDERIETVTGVIEELSQVEAKCQRLMSVPGIGPVISTGLVAAIGTGEAFERGRDFGAWLGLVPRQYSTGGRSVLGRISKRGSKYLRTLLIQAAKVLLMRPHNWPRYSFGAWLKTASERLHRNKLAVALANKLARIAWSVLRNDKAFDTHLETAAI

SEQ ID NO: 248106 - protein, 318 aa, unidentified
MTASPVVGVDVAKDRLDVAVRPSGEAWSEANDDAGVRALVARLRPLGPALIVCEATGGFERAAIAALAAAGFPVVVANPRQVRDFARATGQLAKTDQLDAAILALFAERVRPTPRPLPDAAAQLLDAVLTRRRQLLEMLVAEKNRLGFAPKPLHRGIQAHVRWLERQLDDVTKELAGLIEASPVWRAKDDLLQSVPGVGPIVSSTLLGELPELGTLSHKQIAALVGVAPLARDSGTLRGKRLVWGGRASVRPALFMAALCGRRWNPALKRFYDRLKAAGKPTKVALIACARKLLTILNAMVRDHKRWAMPAPSVQYSC

SEQ ID NO: 248107 - protein, 343 aa, unidentified
MDHFVGLDVSVKETSVCIVDEVGKIVREVKVASEPEALLAVLKKPAYRFKRIGLEAGPLSQWLFGALAEAELPVVCVETRHMQVVLKAQINKTDRNDARGIAQMIRAGLYRPVHVKTLRSQKLRMLLTHRKLLQSKAIAIENDLRGTLRNFGLKVGIAGTVKFEARIRELVENLPDLAALVEPLLIVRRVLHEQISVLHRRLLAIVRDDAVRRRLMTIPGVGPVVALTYRATIDVPARFKNSKAVGAVIGLTPSKYQSGEINRTGAISKCGDEMMRVMLYEAAQVMLTRTNKWSWLKAWAMKIARQRGMKKAIVALARRLAVIMHRVWVDGTEFRWTRKVVAA

SEQ ID NO: 248108 - protein, 387 aa, unidentified
MQLIANRPEAPSAIRSDLGAIFVSMEISRASWLITSLSPGSGEKMSKHSVPAGDTCALLTRFSALKQKALARTGKTFPIIVIQEAGLDGFWIHRVLQKEGIESHVVDPASIATSRRRRRAKTDSIDGEALLRALLAYKRGEPRVCAMVKAPTPEEEDRRRLCRERKVLIAERISHVNRIKGLLYVQGVSGYQPLDRDRRRQLDELKTGDGRALPKHLKVQISRALDRLELLLEQIKAVEAERDALLGASVATSPAAMLLNLKGIGPEFSAVLWSEGLFRHFDNRRQVASYAGLAPTPWQSGSIEREQGVSKSGNPRLRTTLIQLAWLWVRHQPQSALALWFEERVKRNGGRHKKSTIVSLARKLLVALWKYVTAGVVIEGAVMKTAG

SEQ ID NO: 248109 - protein, 412 aa, unidentified
MKRIRERVAGLDVHRDTVVACCQVKQPDRFIEVTKQSFATTANGLGQLAAWLTDAGVDTVAMEATGVYWKPVYYCLEGLFGELWLCNAQHVKNVPGRKTDLSDAEWLADVAAHGMVRPSFVPPPEIRELRDVTRYRKTQVESRAREIQRLEKTLQDAGIKLSSVASKVWSQSSRAMIEAMIDGERDPSVLAQMAKSRLRAKIPQLEEAFSGRFGSHHALVCRQVIEHIDFLDRSIATLTADVTERLCPFESAVTILCSIPGVSRTTAEVMIAEIGVDMTRFPTSGHLCAWAGVAPASHESAGKRHPVGTRNGSTWLQRALVEAARGASRTKGTYLSAQYSRLARRRGSNKATIAVAHSILDVSWHLLTNGALYDDPGARFFELRHDPAVEAKRLQRRIEDLGFDVTIAPAAA

SEQ ID NO: 248110 - protein, 324 aa, unidentified
MSDAIVGIDVSKETLDAYCARGHRKQGRTFANSPDGWKLVRAWLKAMGSKQAHVCMEATGRHSLGVALALHDAGHIVSVVNPAQIRDFGRTKLGRNKTDKVDAALICEYAGLFNPKPWAPPSPAMRRLCELQTVRAGIIRSRTEWRNRSGSGLGDSTATKLAAATITHFTRQLEAIDRAIGETIDQDAELRGRRELLLSVIGVGETLAASLMAEMPEPGVLRRSGEMVAYAGLNPSHHRSGSSIDRPTRISKIGNATLRSSLYMPALSAMRFNPAVAALVARLKSAGRLQPKQIVVAAMRKLLVLCFGVLKTGKRFDPAIAMPA

SEQ ID NO: 248111 - protein, 354 aa, unidentified
MNTIKYIGIDVHQATSVFAIRDSRGNILGESILKTEPTTIVDFLKGQRGTVRVTFEEGTYASWLYDVIKPYVSKVIVCDPRKNKLDENKTDRIDARKLAELLRLNALSAVYHGEQSNQTLKEYARSYLSLQQDSTRIMNRLKAIYRGRGIGCRGMAIYRPKNRKEWLDKIKDKGARCRAERLLKQLEIFGKLRLEAQKDLVRESRKHKDYKILKGIPGLGLIRIALIMAFVITPHRFRNKRQFWTYIGLSVVRRGSSEYEINEGELKRKKRKPLPRGLNHNYNHVLKDVFKGAALTAAYRGQFRKLFEQRVADGAAENLALLTMARKIASITLAIWKKGERFDIKRHQLSEQKT

SEQ ID NO: 248112 - protein, 386 aa, unidentified
MQKLNDLSRSLIALEPAGTLIAVIEMSLSSWLVAGIVPGVERQPLKKLAVDESALLKLLHRWREEAEKAGRRIERIVVAFEAGRDGFWLARWLKAHSIEAHVIHAASVAVSREHRRAKTDRLDTELLKRAFLGWLRGERDHCKVVAIPTLKDEDAKRPNRERESLVGEQSRIVNRMKAALIRLGIRGFNPKLKRAAGRLDSLRTPEGEPIPPNTLAELRRDMERRRLVSNQIRQIEEARLERFEHAPNDGPHAMVRLLARVVGVGIETADMLVHEVLSRNMRDRRAIARYAGLTGSPDESGRKRREKGLARSGNGRVRRGMVQLAWRFLTYQKESALAQWFRTRTENALGARKPMIVALARKLLIALWRLVWQGVVPDGVVLRPAQ

SEQ ID NO: 248113 - protein, 371 aa, unidentified
MHDTIFVGMDVHKATISIAVAGGARGGEVRQLGNFLNRADHVGKLVERLSKTGGQRLRFCYEAGPCGYVLHRQITALGHECVVVAPSLIPMKAGDRIKTDRRDAVMLAKLHRAGELTAVWVPDAAHEAMRDLIRARATAVRVLGKARQHLQGFLLRHGRVYAGKKGWTLPYRRWLTTIRFDHPAQQVVLQDYIHSVHDAEERIARLTKQIEDLVPTWSMAPVVEAFQAMRGVAFVAAVTVVAEVGDFTRFDNPRQVMAYLGLTPSEHSSGTAIRRGGITKAGNALARRVLIEGAWAYRMQARVSRKLHDRLEGLPQIVRDIAWKAQVRLCSRYRRLVATGKPKVVVTTAIAREMAGFLWAIARQTPIGSPA

SEQ ID NO: 248114 - protein, 376 aa, unidentified
MNNSQATKRQVNTEGAKLYMSFELADKDWKLFFTDGRKERSRGISAGNLGRLEEEIKKAKDRFGLKGETRVISCYEAGRDGFWLHRYLREKGIKNWVVDPSSIEVDRRKRRAKTDRIDGKKLLRLLLRYSWGEKKAWSVVRVPRVEEEDGRHLHRELETLKKERAMHSNRVRSFLKLHGVSDVQPLRGDFEEYVEGVRLWDGSGLPLEVKERLKREHRRLVVVQGQIRELERKRKEILKGGKERHIEQMMRLRGIGIESSWKWEKEFFGWRKFHNRREVGALAGLTPTPYDSGQSRREQGINKAGNRRVRSMAIEIAWFWIRYQPGSKLTRWFKERYAQGGKRMRRIGIVAVARRLLIDLWRFLEHGVIPEGAIVE

SEQ ID NO: 248115 - protein, 319 aa, unidentified
MAQNDLVVVGIDVAKDKVDLCIRALALRQTCPNTAQGRRKLVAWLRKHQVGKAVMEASGGYEREWRKVLYDADIEVRIVDPKRVRSFAQSAGRLAKNDTIDAEMIAWFAETFSQTPSQRHDVAQEELAALVKARLALVELKIRLQSQSAHAAPGPAQKAQARVLKTLAAEIEKLEFAIAAKVKATPHLAERAEIVESVPGFAETTSAILVAGMPELGQVSDKIAAALVGIAPYDDDSGKRRGERHIKGGRRWVRNAIYMPCLGAATQNNPVAKAFYRRLIAKGKQPKVALVACMRKLICILNVMIARRQKWQAPHHAPT

SEQ ID NO: 248116 - protein, 430 aa, unidentified
MKSNTQNAKIEAITEKTLVLGIDVGSETHYARAFDYRGIEYSKKPFKFSNTEVGFATFKKWILDLKERHEKDKVVPGMEPTGHYWFNLGKFLQDNEMKPVLVNPHHVKKSKELDDNNPTKNDRKDPKVIAGLVREGRYMIPYLPDGVYADLRTASNIRFQLQAELTRIQNRISRWFNIYFPEYKTVYGKPDAKSGMLILKAAPLPEDILTLGIDGVNQIWRDAKLRAVGKARAKTLIEAAEHSIGSKEGTMSARMEIRMLLEDYESKNMRLQEVMVLIEELVKEIPMAEKLLEIKGVGIRTVSGFLAEVGDISRFNNPKELQKLAGLALVENSSGKHKGKTTISRRGRKRLRYLLFEVAMSLVAKNPEFRELHNYYTTRRLNPLKKMQSLMAIAAKLIRVFYAMLTKGVDYDPKKMISDIKRPTVYLQAA

SEQ ID NO: 248117 - protein, 319 aa, unidentified
MGNQEGFYVGVDVSKESLDLAIHDERQQWHFTNDPAGIRKVIALLRKHKPAMVCFEASGGYEVPLWIALTEAGMNPAPSNPRLVRHFAQSAGRLAKTDTLDARVIADYAYAMKPRVAPFPETGVLKEIVARRCQLVEMISAEKNRLKSARNASVKDDIQATIKYLEERLGNIDKELRIGIKSSPEWREKDKLLQSVPGVGKGLSTCLIAQLPELGLLDRCKIAALVGVAPLNRDSGNSHGKRTIWGGRSRVRTALYMATLSATRHNPTIRPFYIRLLEKGKTKKTAIVACMRKLLTILNAMTRHRMYWCAARLPAVLSR

SEQ ID NO: 248118 - protein, 355 aa, unidentified
MNSRKYIGMDVHKESISIAVRNDAGKIVMECVIETKASMILQFIDGLRGDLQVTFEEGTSAAWLYDLLKPHVTKVVVCDPRKNASMKEGNKNDKIDARRLAELLRLNHLNPVYHGEHGLRSLKELVRSYLTITKDLGRVMSRVKAIYRSWAIPCTGKQVYAPRHRAEWLGKITEPGVRRRAEFYYQQLDALRTVRQQVRRELLAEGKKHTPWKRLCQIPSIGPIRSAVLLGILQTPHRFRTKRQLWTYSGFGIETHSSADHRSVGGQLERVKKQISIRGLNRNCNHDLKNLFKGAAIVASSKAGPFQEFYTALLTKGIRPEMARLTLARKIATIVLIVWKTGACFDAQHLKPQTA

SEQ ID NO: 248119 - protein, 346 aa, unidentified
MRIIGCDLHARQQTISMLDVETGEVSEKTLVHEGEAVREFYAGLPKPVLVGLEATGSMFWFLRLLEELGIEYRVGHPAAIRKAETRKQKHDRRDAELIRRLLVEKRFPQIWLPTAEQRDLRTLLQHRHQLVRMRVMTQNGLQGLALSQGLQRGAKLWSQAGQQALDSLPLADYSRRRRQQLQELRQELDQRLQQLDQAVRQQAEQRVGARLLLSHPGVGPITALATEVFLGDARRFTDAKAVASYVGMIPSEHSSGGQQRNGRLSKQGNPLLRLLWVEAARAAARKDARLKQFYRRKLVQKGLGKAVVATARKLGIRLWIMLRDQIDYTEFCRRAEQRCPHAGMPE

SEQ ID NO: 248120 - protein, 479 aa, unidentified
MNNKAKKAKKQAVINNSTANILSKEELARRTAMLQEGMKAATWRELETNGKFTKNDKLTFISDDMLIIGCDIGSEMHYVRAIDSRGRELSQDAFPFSNSSEGFQSAKAWALELAAANDKHQIVLGLEPTGHYWFCLAAWMVSNDISVVQVNPYAVKQTKELEDNSQRKDDRKDPKLIANLVKDGNYGMPYLPEGLYADLRRLSMLRDQLTEDRIRNINRLHREMKIYFPEYRDAFGKLDGAFTLEALKAAPFPEDIVRLGVDGLKDIWHRAKLRGRGYSKADQIVQYAKESIGLEHGRAGGRKAVKIFAEQIESLSEALEEIEAELHQKCREIPYAENILEIRGIGENILAGILAEMGDITRFDDASEIQKLSGLGLVACSSGKHKGETKISHRGRKRLRYWLFQAAKSAVSHGEEFKELHAHYTTRKDNPLKKMQSLIVIACKLLRIIFTLLRTGCRYDPMKMLRDIKRPERAAAQAA

SEQ ID NO: 248121 - protein, 352 aa, unidentified
MVHIQQTFYQIRRTAMENMYFVGLDVHKKIIAFCVKQRDGQIISQGTINANRTALKLWVHTLPTPWIVALEATLFTGWIYDFLLNYTEEVKVAHPQMLEAITVAKNKNDISDAEKIADLLRCNLLPECYIQPKGIRELRRVLRYRSLIVREIVRMKNKISGLLMESGIEYDIKKLHGKKYFYNLLEEIEVSEELSQILKMSRECLEFLKTIDKKIVSGLKIHPEIRERLDMLTTIPGVGSITALTWILEIGDPHRFPNIKKAISYCGLCSGQRESGGKQYWGPISKKRNKHLQTILIEAAKLAPLWNAQLGELYEREKKKGDKNRATLSVARKLVAYLLAVDKNGRAFEERK

SEQ ID NO: 248122 - protein, 402 aa, unidentified
MTYDYVIGMDVGKYFHHACVLDIDGTQVLSKRINQNEQSLRALFSAFSVYDHKVLVVVDQPNNIGRLTVAVAQDIGIDVRYLPGLAMRQLSRIHAGNAKTDIRDAYIIAHAAKNLPESLRSVDRVEEAFLQLKVLNGIDEDLARSYTRLINQIRSALVGCYPQFEQALRGQIIHRKWVLHLLARYGGPTKIKRLGKAKAAAFARRYKARNPEPVLDAIFAAISEQTVTIAGAHYAEMSVAMSAKDALLKLEHRQQIEKEVIELINDIPHTQFLLSMPGIGPKTAAQILMTAGDMSDFPSAGHLASYAGLSPRTNQSGISIMSNSLNRAGNKKLKNALWQSSFASIRFHERSRQFYERKRREGKRHNAAVVALARRRLNVLYAMMRNHEHYHDPAPSQEDLAA

SEQ ID NO: 248123 - protein, 402 aa, unidentified
MGKLSVPSPDPRRLEKTPSRATHYERAPLVEYGWFGDTNFHSQEERPMNDIKYIGMDVHQTSTSIVVLNASGRILVSAVVETQGQALVAFIQGLRGTLHLTFEEGIYAAWLYGLLVSHASRLVVCDPRRNALLQAGSKSDPIDAHKLADLLRLNALRPVYHGENGLGTLKELSRSYLVLVQDSTRVMNRIKALYRSRAIPCAGTKVYLPRQRASWVDQLKEAGVHKRAEFLYRHLDLLSLLRREAKLALLAESRKHTVTRLLRAVPGLGPVRIAVLLAMVQTPFRFRNKRLFWAYVGLGLVTRISAEFALVNGQLKRSGKAPALRGLNPNHQRELKEIFKSAATAAVQRPGPWQQFYQQRVQAGRKPELVRLTVARKLAALTLHLWRKGERYDVKQLKPTAV

SEQ ID NO: 248124 - protein, 343 aa, unidentified
MQEITTIGLDIAKSVFQVHGIDASGAVIVRRQLRRRQVLPFFRKLPVCVIGIEACATSHHWARELEKLGHEVKLMAPRYVKPYVKRNKNDAADAEAICEAVTRPTMRFVPIKSPEQQSVLMLHRTRQLFVRQRTALINAIRAHLAEFGIVAGIGRNGVEKLLDLISKGEDDRIPPAARECLMALAAQLELIKRQILEADRRVLAWHRTSKTSKRLEAIPGVGPLIATALVASIPDPSVFRSGRDLSAWIGLVPKQNSTGGKERLGSISKAGNRYLRSLLVVGALSVIRRAKQLGYTRHPWLVRLMERRSVKIAAIALANKIARIAWAMMARNESYRTPLLATA

SEQ ID NO: 248125 - protein, 310 aa, unidentified
MDSITVGIDVSKDRLDIAVRPSGEVFAIERNPAGLEQLTLRLGTLSPNLVALEASGGFETVVAAALAAARLPVVVVNPAQIRAFAKAIGQRAKTDPIDAAVIAHFAEATRPEPRPMPDEATRLLADLVARRRQILEMMVAERQREKRVTVPHLRKSIMRLLKVLERELTSVDTDINDAVRGSPAWREKEDLLASVPGVGPTIARTLIAELPELGQLSRRQVAALAGLAPFTRQSGQWRGKSFIGGGRTSVRTALFMGAMVAKKYNPVLRTFFNRLVAAGKPKMIALIAVARKLLTMLNAILRDRRPWQTA

SEQ ID NO: 248126 - protein, 424 aa, unidentified
MKVTYQTCCGVDVHKSFLVATIVKTTGGIEPSYQKKRFSTFNNSILEFKQWLLDNNCHDVCMESTGKYWVPVFNLLEDEINVVIANPKWVKAVKGNKDDTKDSKWIGDLFRLGLVKGSYIPCKIVRILREYTRYRYKLVSCRSSEKNRYQNALTVCNVALDSVVSDIFGKSSTSIIDYLLEQSGASINHEEIASKLLRSLKSKEDAVIESVEGYQMTDAQKYRMRLVRAHIDYITAEINDVDKMIENMISSNSDSENAVQLLCTIPGVKHDSAITIISEIGTDMSQFSSSKRLCCWAVLTPGSNESAGKKKSVRITRAGVYLKPALVQCAHAAVKSDKFPYYKKKYESLVKRRGKKRAIIAIARMILTAIYQMLSTGEQWNPSDLYKVDMPVALVEKQKAKAIRQAKKLLQREGMLPPDESLAS

SEQ ID NO: 248127 - protein, 375 aa, unidentified
MTMMDAKRPDTKAEVILGVDTHLDVHVAVAVDHLGRRLGESSVPTTANGYERLLRWAERFGRVGCAGVEGTSSYGAGLARHLRAKGIEVLEVERPKRQRRSSRRKVKSDLSDAESAARAVLASETSGVPKSGDGCVEMIRALRAARRSATKARTQAANQLQSLRVTAPEEMRHRLRGLSTKELVSVASRFRLGDDPRDVPTATKFALRSVARRYEALSEEIAELDAQLERLVAQAAPGLLSLPGIGTDNAATLLVVAGDNPQRLRSEASFASLCGVAPIEASSGKVVRHRLNRGGNREANRALYMSCLARMRRDLRTQEYVARRTAEGKSKREIIRCLKRYVAREVYRVLISCGARSSPPRPKEEAQIAAGSNAA

SEQ ID NO: 248128 - protein, 352 aa, unidentified
MARILAIDLGKFKSVACWYKADSGEARFQTVPTSRQEMRQLLLARAVDVVVFEACTLAGWVYDLCGELGLKGRVANPNGEAWKWKNVKRKTDRDDALKLARLTALGELPEVYMPSPATRQKRGLLQYRQSLIGQRVAVQNRIRALLSAQGLPAPRGHRAWTQLGLEGIAQRSRPLAECASEELWRGELALCVSQLQQLRAWLEEVDGKLDQLGRADARVQLLQSVPGMGARTAEVVVAYLDDPKRFTKGSQVSSFAGLVPRQYQSGETDRRGRISKRGPGLLRKMLVECSWVMLRYNTWAQRLVQRISRGQRTRKKQAVIALARKLLVRCWAMLRDGQPWRAEKAAPMTASA

SEQ ID NO: 248129 - protein, 341 aa, unidentified
MYYIGLDVHKKTISYCVKDASGLVHQEGKIGATRRELDSWIKALPQPRIVAMEATIFTGWIYDHLLPHAAQVKVAHPLMLRAIAAAKKKNDRIDAGKIADCLRCDFLPECHMAPLEIRDRRRTLRYRQLLVRQMVQMKNRISGLLMETGVEYNKRRLHKVGYFGELLSTNEEIKESIRPLLKLSRETIVRLQKTEYALVSSLQRDPLLAERIRRLRTVPGVGPITALTWALEMGDVSRFRSVKQAISYCGLCGDEKSSADKVMRTPLSKQRNKHIQRVLVEAAKLAPREDHKLALVYEAEKQKGNANRATLAVARKMVSYLLAVDRGARSFVPAEEHSTAA

SEQ ID NO: 248130 - protein, 467 aa, unidentified
MQELTLGIDVACRAAHQASLADQAGRFAWSGRRFRTTTADLDRLWAAIPSPAAVTVVLEPTRNAWVPLAAWFRRHGARVILVPPEQSADLREYYSKHTKSDHLDSRMLARLPLLHPDGLRPAEGLGPADAMRRATRLRASLVKRRNVILARLDSYLELLGPGWHAAFGGDLATNTALRFMAAGYADPHTARRLGRARLTRFIWRYSHGHWGEELAARLLAAAAETLALWDGELDYTELAADIAAEARLALALSAEIRDLEQKIAALLHQADPAAIMTSVPGVGVINAAQILARLGDPARFRSLAGARSFTGLVPSLTSSGVSGHHGPPTKSGDAPLREALFMAADHARRTDPTLAARYHRLMVHQGKHHNSALCHISTVLLTRIIACWRAETHYQIRDLDGTPLTAAQGRAIIARHYRVSDELRAQRRTSHTKTGASRRHQESPGAPTPARPPAHTTTRHTKLLDTA

SEQ ID NO: 248131 - protein, 341 aa, unidentified
MENCGIDLHQKSSQVTVVDDEGLLLERASIPTTRVALERWFGSRSPMRILVEASGCSPWVVRVLRELGHDVGVVDPRRIRLVAESTLKTDRIDADTLAELARLKLRLRTLVWQRGEATQRQRGHLRVRRALVEARAGFILTVRGLVRSFGGRIASCRSDRFADRCEATELPSGMGEVVAPLVAAIRELDARIAVMDELIKAVGSGHDAVASLQAIPGVGPVVALAYVLSLEDPTRFRRSRDVPGYLGLRPRLRASSDSVRQGRITKQGDPDLRRLLVQAAHAHLRSTQDTALKRWAESLIPRVGKRKTIVALARKLAVLMHRLWVTGEAYEAFPETTAKAA

SEQ ID NO: 248132 - protein, 348 aa, unidentified
MNNMHYVGLDIHKKTISYCVRQSDGTILQESTMAAIRPALDTWMRQLPQPWTAGMEATMFTGWIYDHLVESGATVKVAHSAMLKAIAAGKKKNDQVDARKIADLLRCDYFPECHMATREIRDRRRVLRYRNLLVRQAVRMKNKVSGLLMEVGIPYNQQKVHGKKYFAQLLHEQRKEMPPSLPELFQLSRSTIESLTGMERQLMRALEQDDLLAARVERLATIPGVGRVLSLTWALEMGEISRFSSVKNAVSYCGLCGAEKSSGGKAERTSLSKQRNKHLQSMLIEAAKLAPRWNAELALVYEREKQKGNRNQATLAVARKLVAYLMAVDRREKGFSKTPVKVNEKQAA

SEQ ID NO: 248133 - protein, 351 aa, unidentified
MDYRVYCGVDFHARQQTISCLTTEDGVVSTHELKHQNKAELKAFYAQFRGPVLVALEASGYSPWFEQMLEELGHEVWLGDASEIRRRARRRQKNDRRDAELILDLLLHDEFPRIHRPAVNSRELLRMLRYRHKLVQMRTIIKNSLQALSIQSGLSLRARLFSGVGLDQLRSLTMSPVMQYQRDQWLVALESLNQQIIAATNWLGEQAAGDTRVQRLRTHPGIGLLTGLAIVHTLEPVTRFRNQRKVAAYVGFDPQERSSGEKKRYLGISKAGSRVLRYLLVEATHTAIKSDPDLKRFYLRLLHRHGKAKAKVAAARKLLIRSYILLRDQIDYAEFGRRAVAARLARLASKA

SEQ ID NO: 248134 - protein, 394 aa, unidentified
MKLIGIDIGKIKHFFCIMDKDSGEIVSQPASFSNDKEGFDFLLQKIKSYPKDSVIIGMEDTGHYHFALLKYLLDLQYTVALINPKTTDFNRKMQGGITKNDKLDTINICDVLDTPERKKQYRITKVNKFDLYEQKQLTRQHHNLKEELNVYKNRLQKSIDIVFPEFNSLFKSKYGTVYINILKTFGSAENIANTDIRTIRKCFEIDGRGNRISLTPERLKERARSSIGISSLAEVIQIKHLSAQIDLIEEQLSEIDKKIEEFSIQNNSPILSIPGISHFSGTSILAELGDISNYSKPSQIIKFAGVAPLHYESSQFNAQHTAITKKGSKYLRKTLYQIILPVIRHNPVFNKYYQLKISQGKGHRCAQGHCVRKLLRIIYHLLKTNQQFDPQLLR

SEQ ID NO: 248135 - protein, 368 aa, unidentified
MQIINRSQVLYVGIDVHKDTHTAVALSPFGEKIFEMTISNESEDFISLVEKTKSEANRIGLIPSFGLEDIHSWGERLSSFLVEEGLPVTAVAPVLVDHLRQKTTHPEKNDSLDALGVAKVMIQKIDTLPKHTLTEETKKAKQIRELSIEREWLVKERTRLKNQLHILLHRIHNSSYRTKFKDPFSKKALRYWVRSIPRNIDSILEQRTKRSLRRLLDLIEETQEIEDELTALMELNGFKIHTVSGCGPVIAAELIGEIGDINRFKSPGSLAKYAGCCPRECSSGKRIKWRKTRSGNRRLNKSFHRMALSQISRSGNNAAKEYFKRKISEGKTKSQALVCLRRQLVNIIWMMMKHKTEYVYPPRNESCN

SEQ ID NO: 248136 - protein, 339 aa, unidentified
MQVTTIGLDLAKNVFQVHGITENEEVVFNRPLRRAQVLPFFARLGPCLIGMEACSSAHHWARELTALGHEVRLIPPMYVKPYVKRGKSDAIDAEAICEAVTRPTMRFVAMKTVEQQALLSLHRARDLLVRQRTQLINGLRGMVAEFGVYIARGLARVIGFAEDILAGEILDLPEIANEVVHNLCEHLMALHARVRWYDDRLKLVGKEDVRVRLLRTIPGIGAVTASAIIASIGDGHQFRNGREFAAWLGLTPANKSSGGKERLGRITKMGDQYLRQLLVVGMTSLVRQTQSHPERASKWLTSLLERKPARVATVAMANKTARIVWAVLTRNEPYSPHTT

SEQ ID NO: 248137 - protein, 459 aa, unidentified
MKKQKASKEQETRISSYLEQVNLYAAGIDIGSRSHYVAVPAEFDDQPVREFPCFTRDLNRMADWLVKLGIQTIAMESTGVYWIPAYEILEERGLEVLLVNAHHVKNVPGRKSDVQDCQWLQQLHTHGLLHGCFRTSEEMVPIRAYMRQRDNLVKGAADHIRHMQKALRQMNLLLENVVTDITGKTGMDIIRAILRGVRDPFELAKLRDVRCHQDEATIAASLEGHYREEHLFTLRQAVELYDFHQKKILACDTAIEKQLQSLGGSGRSNPLPPVKKRKKKNGLNFDVRREIHRITGTDLTQIDGMDENSVLRVLSETGVDMSAWPTEKHFASWLGLSPSNKITGGKVFSSKTKPCANRAAAAFRLCAYGLFNSKSALGAYLRRQRSRLGSPKAITATAHKLARIFYSLLKNGTDYVDQGQDYYEQQYRERATKNLKKRASFLGFELVPVEKNGAELSIA

SEQ ID NO: 248138 - protein, 347 aa, unidentified
MTIVEDARVITGGVDTHADMHVAAALDPIGGLLGVEEFPVTPAGYAHLLGWLGGFGTAGLVGIEGTGSYGAGLARHVAAAGIRVVEVDRSDRQDRRRQGKSDPLDAVSAARAAQSGRARGAPKGRDGAVEAIRALMVAKRSARSERTQTINQARSLIVTGPDDLRARFAGHTVAALVSELAALRPRPGEAVGYATRIAVRELGRRAEFLDGQLARLDELIVPLVTSRAPGLLALHGIGPDTAALLLIAAGDHPERLRSEAAWAHLCAVAPIPASSGKVTRHRLNPGGNREANHALWRVVITRMSSHAPTRAYVERRSEQGLSKKEIIRCLKRYAAREVYPHLRAGAG

SEQ ID NO: 248139 - protein, 338 aa, unidentified
MPLYGGIDLHANNSVVVLLNEQDQRIYHKRLPNDLATIVEQLAPYHADIEGLVVESTYNWYWLVDGFMDAGYRLHLANPAAIQQYSGLTYTDDHSDARWLAHLLRLGVLPEGYIYPKAQRPVRDLLRKRAHLVEQQTANVLSVQNIILRNTGARLSTNRIKSVSQAEVEALLPDADQALAVSSALAVLHCLAEQIKTVETRVRTRLQSTSLYELLQTVDGIGPILAQTILLETGDIGRFPSVGDYASYWRCVDSTKVSNGKRKGQGNVKNGNPYLAWAYAEAAHFAMRFNLRVQRYYQRKQAQTNVPVAHKTVAHKLARACYHMMRHQVPFDAAKAFG

SEQ ID NO: 248140 - protein, 350 aa, unidentified
MPCSTIRAVATIGIDMGKNTLHMIGLDSRGAIVLREKVSRGRISSRLANLPPCLIGIEAGMATHYVARELAALGHDVKQVPPTYAKPFRQGHKNDFRDAHAVAEAVQRPTTRFVPAKTDEQLDLQALHRVRSRLVSERTAVINQIRAFLLERGIIVRQGLRFLRQALPDILAKRTDVLSPRMVRIVADLASDWRQLDERIEVVTDEIETLAKSDSSCRRVMTVPGIGPIISSAMIAAIGSGAAFARGRDFSAWIGLVPKQMSTGDRTILGRISKRGNGYLRMLFMQAARVILLRPASWPKHGFGVWLARAAQRLHPNVLASALANKLARIAWTVLAQERSYETRVTKAAA

SEQ ID NO: 248141 - protein, 345 aa, unidentified
MLADEVDFVIGVDTHKDSHSAAVVNATGGVVAGLEAVACESGYRRLLNYARVHATGRRAWAVEGTGSYGSGLSVFLQGQGERVIEIERPRRAARQKGKSDKLDAIRAAREALADDKLVTPRQRGQREALRVLLTTREGAMRARTAALCQLHALVIGAPEELRGRLRHLSTDQLVRRCSHLRRHARQCLELQVLTQALSSVARRAEALHVEAVAYERDLVQLVNALAPTLAAEPGIGPICAAQILCAWSHRGRLRSNAAFAALAGVAPIQASSGQVVRHRLNRGGDRQLNRALHTIVMWRTNFHAESKAYLARRRQEGKSDREIRRCLKRHLARRIFHLLQGVDSL

SEQ ID NO: 248142 - protein, 411 aa, unidentified
MRLFVGDDWAEDHHDVELMDAAGRVLARKRLPEGAAGMARLHELTGQHLGEDAEDAEVVIGIETDRGPWVAALVAAGYVVYAVNPLQASRYRERHGVSGAKSDRGDSHMLADMVRTDSHQLRAVAGDSAEAAAVKVLARTHKTLIWERTRQVQRLRYQLREYFPAALAAFEDLDAPDALELLARAPDPARARRLTRAQVHAALKRARRRDIPAKATAILAALRSAQLGQPEAVTAAYAVTARSLIAVITVLNEQVKTLQGQVEADFGRHPDAEIYLSQPGLGPILGARVLGEFGDDPHRYAGGKARKNYAATSPITRASGKKKTVAARFIRNDRLTDALMAQAFTALSTSPGARALYAAERARGTEHNPALRKVANRLVGILHGCLKTRTLYDEATAWSHRENLPQSSVAA

SEQ ID NO: 248143 - protein, 277 aa, unidentified
MKKVMAGIDLHSNNVVIGIMDMDGKRVTSGKLPCELKAIAKFLAPFKKRLEQVAVESTYNWYWLVDGLQALRYPVVLANPAGMQQYSGIKHADDTNDAFFLAELLRLKILPTGHIYDAQLRPVRDLLRRRMRLVRHRTALMLSFKSLYTRTTGQEMTLSQLKDIEIKQAQELYTHPANQMIAGMQVKHIEQLTESIDKIEKVVMASARELPSYSKLTTLPGVGMILGMTITMEVGDIKRFAGPGDFASYCRTVEAQRTSNSKKKGENNSKCGNKYLA

SEQ ID NO: 248144 - protein, 364 aa, unidentified
METVFYVGMDVHKDSIQVAVLKDGCARCEIEQRLAYDFKKVRKVFSSLQRKGTVLAAYEAGSMGFDLARLLSEMTIQCIVAAPGKIARKPGDRVKTDRRDALMIARLLRSTELEAVHVPTREDEAVRDYLRARADLKLDYTRSKQRLSKFLLRHGYLYEGSFWTLRHMEWMKSIEFSLPMLSDTFARYMETLLTQKERLRGMDTQIEALATGARYSEGVARLRCLKGIDYLTALSLICEVGDFRRFERAEQFMGFLGIVPGERSSGPKRRQGGITKAGNVHLRKLLVEASWHYRYHSCASKSLIERRAGQKPEVIAYAERARERLQNKFARLVHGKFKKSQVAVTAVARELAGFVWGLMVGKVA

SEQ ID NO: 248145 - protein, 362 aa, unidentified
MGLDVHKETIAVAYVGEERGAEVVSVGTSGTRQGDIDKLIRKLQAKGKSLHLVYEAGPCGYGLYRYLTKKNFKCWVVAPSCLPKKAGDRVKTDRRDAVQVARLLRSGDLSPGYIPSVEAEAIRDVVRAREDVLKDLKAAKVRLKAFLLRQDIRYEGRANWPAAHLRWLANVVCPTPAQQIVFQEYVRAVSEHTERLQRLEAELPPLVQTWRWVPVVEAIQALRGVQFLAALTLLAELGELTRFETPRQLMRYLGLVPSEHSSGERRRQGSITKTGNSHARRVLVEGAWAYRYPAKVSRHLQLRLEKVPKVIQDISWKAQVRLCKRYRRLLARGKQVNQVVVAIAREMAAFVWASAREVKGAH

SEQ ID NO: 248146 - protein, 339 aa, unidentified
MNNSVIGLDIAKNIFHLFTLLADGKILKKKLNRSKLLEFFANYPASIIGMEACGGAHHWARELTKLGHEVVLLNARYVKSFVVGNKNDFNDAAAIYDAVTRPNKRVGAIKTVAQQDIQLVHSIRKELVDQRTALVNQTRGLLSERGIVINQGITQIREQLPLIVEDAENGLTDLSRELFAEQYEKLKTLDAEIKAQDQRINRLCNANDLSKRFLDVPGVGPLTATMVAADIGDGGKGYKSSRDYAASLGVVPKQHSSADKLHYLGISKRGNRYIRTLLIHGARAVLKNCTKKTDKLSLWLQGLVARRGFNKAAVALANKNARILWAMASNGKDYEALDA

SEQ ID NO: 248147 - protein, 389 aa, unidentified
MPRIADGCGVVTADPPGWVTGGVDTHGDVHVAAVIDHVGRVLGTGSFPAAAGGYGELLAWLGGFGVLARVGVEGTGSYGAGLARFLAGQGITVLEVPRPDRQRRRRHGKSDPVDAVSAAVAALSGEECGTPKSGDGAAESVRALKVARRGAVKARTQAGNQLRDLVITAPAGLREQLQGLGVTARVAAAAAFTCGDAAEAVEGTKAAMASVARRWQDAGAEVTRLDAALEELVARTAPAGFLDRQGAGTQSAAALIAAAGDNPGRIGRESGFAALAGTSPVDCSSGRQERHRLNRGGDRQANSAIWRIVTTRMQHDPRTRAYVAKRTKDGKTRKEIIRALMRYVAREVWKALVRPAVQAARERGAGRAGVRPLLPAARAVPAALPVTTP

SEQ ID NO: 248148 - protein, 408 aa, unidentified
MDVFNERCAGLDVHKEVIYICVLIGQGRSSQKFKFKFGTFHHQLIEMRQKLVELGVTHVLMESTGVYWMPIYDALEGFVEVVVGNAQHIMNVPGRKTDESDAEWLAKLLRYGMVKPSFVPERQFRELRQLTRYRRAIVQTQASEQNRVEKHLQIAGVKLSSVASHVFGVSGTNMLNSIAQGKTDPTHLAELALGRLRKKIPQLRDAFTGAISNHTQQLIATQMDQMNRLECTIAEVELKIDDKVKPHAELVARLDQIPGIDLRCATDILAEIGTDMSPWATHRQIAAMAGLCPGNYISAGKRLKNRSRQGNPYLKSILVQAAASAINTNGSYYQSKFRRLKQRRGHKRALVAIAHAMLIAIYYMIKKGETYRELGANFVTDYETGRKKNDLVKQLQKLGYSVSLTQIQ

SEQ ID NO: 248149 - protein, 372 aa, unidentified
MSQSSTLYVGMDVHKETIAVAYVAKDHDAEVVSLGTFGTRQCDIDNLIRKLQSKAKHLVFVYEAGPCGYWLYRYLTKKDYVCWVVAPSLIPTRAGDRVKTDRRDAMQLARLMRSGDLTPVYVPAVDDEAIRDLSRAREETLRDLKAAKLRLKAFVLRHDIRYTGRANWSPAHLRWLSEVICPTPAQQIVFQEYVQTVTEQTERLGRLELELHEQVQTWRLHPVVEALQALRGVQFTVAVTTVAELGDLTRFDNPRQLMNYLGLTPSEYSSGARRQQGSITKTGNTHARRALVEGAWAYRYPAKVSRHLQLRLEKLPAAIQAISWKAQVRLCKRYRHLMAKGKNANQVVVAIARELSAFMWAIAKQVAGSPKA

SEQ ID NO: 248150 - protein, 407 aa, unidentified
MLNITNKVYVGIDVHHLKHRVAIISDMCLHQSKVDWKKATIFDIKNNYSDFQLLDSAIKEHVLDASNAAIAVDQTGGHYSEPLVWFLQNKGYDVCHLEPKAVKAARERLLDEECKSDTIDAAGAAYLLYLRDVHGISFRISAVAPVLGSQASVLQCLILQRIQYNKLIVQCTNRLHQLLIATFPEGEVKYFRQLLRVINQYPTPQDIIANPNLDGVMYMARKDKEAIATLAKQTVGVPGTFYRELIKDLCRQRNDCITKRDTITRLMKEKVGSHPYGNILLSFPCLGVVAAATIIALVKDISRWPDKKKLKKAFGIYSTSKQSGVSTSRGKLGKEGSRHTRKALFYVVLGCIQGNTCENDFKDLYLRQLMREKPKLKAIVSTMGKLTEIIYHCLKNGEKYQYQRVYG

SEQ ID NO: 248151 - protein, 339 aa, unidentified
MDKLYGGIDLHANNSVVVVLDEQDQVLYHKRLPNELEKILQQLAPFRTQLQGLVVESTYNWYWLVDGLMEAGYCVHLANPAAMQQYVGLKYTNDDTDARWLAHLLRLGLLPTGYIYPKEDRAIRDLLRKRSHLVRQKTANLLSVQNLLTRNTGQAKKGNLIKQLTPANVSELVSLPEQALALQVTVAVMQHLTEQITCVERAVHTRVKLRPTFQALLTVPGIGQTLALTIMLETGDIRRFPTVGQFASYCRCVGSTKLSNGKRKGQGNTKNGNKYLAWAFVEAAHFAIRYESSINQFYQRKRAKTKVVIALKAVAHKLARACYYIMRDTVSFDVMRAFA

SEQ ID NO: 248152 - protein, 365 aa, unidentified
MTEGTCFVGLDVHARKTAAAAVQLGSGEVFRAQLPGTSPAVTVEWLQSLPGPVRAVYEAGPTGFGLARAGRAAGLEVMVCAPGAIPKQPGDRIKTDTRDALKLARLLAAGQLRSVTVPSLELEALRDLVRARDDVRGDLMGARHRIGKLLLRRGMVFAGPGEPWNSQRHLAWLGRIDLGEPLAQTVLGEYLACHEVLLARRTRLDGLIADQATRGPWAPTIARLRCLRGVETLTAVGLVAEIGDFTAFEHPRQLASFLGLVPSEQSSGTKRRQGAITKAGSSHARRLLVEAAWHYRRQPAVSLALSRRQHGQPPAAVEAAWRAQLRLSGRWAHLDARRGKRRTTVAVAVARELSCFVWEIARQPD

SEQ ID NO: 248153 - protein, 402 aa, unidentified
MAIGAAEEPPGEQQVRACPSQASQLVAWAAGWPDRVWAVEGAAGLGHLLAQQLVAAGEQVLDVPPKLAARVRLLQAGDTNKNDPSDARPVAVAALRSAARRREVTAEDHAAVLKIWARRHRDLAPARNQVACRLHAVLCDLVPGGHPKEISAAQAARILGQVTPSGSVASARAELAAEFLADLRHLDDQRRKCGKKLATAVRASGTSLTSLFGVGPVIAGLILGDVRDVTRFPSRDHFAAYNGTAPVEVSPGGRTVHRLSLRGNRRLNHAIHMAAITQLRYKHSGGRAHYDKKVAEGKTHKEALRCLRRQISDAIYARLLADARQAATATVKDPGGQPGNDSDSSAAGSHPAHRLFGQATPGPATTIRPGATAGRAPSQPNRAHQRPAARPAAASKKPRPTT

SEQ ID NO: 248154 - protein, 340 aa, unidentified
MDTIAIDLHKRESQLRTITSDGVLIECRIVTSRDQFTRTLGDRPRARILVEASTESEWVVRHLETLGHEVVVADPGFAPMYASRSKRVKTDKRDARALCEALRLGAYREIHRASDARRHLRAQLTVRDARVRTRTRYIAVIKAFVRREGLSMASGEAIHTLTKLAALPLPPHVREELAPLVAVWAPLGEQLAAVDATLTAIAATDPVVTRLRTMPSIGPITALAFVAALDDVARISNAHQVQGYLGLVPSEHSSGDRRVRGRITKRGDVRLRWLLVETGWRILRAPNADLQGLRAWGLRIAARRGKRIAAVALARRVAGILYAMWRDDAPFHAVPLAEAA

SEQ ID NO: 248155 - protein, 317 aa, unidentified
MRKTLLADRVFIGADVSKGWIDIADTQGHKARVANEYGAIDAAFVGAWSQCANLVCEATGGYERTLMRVAIDRGLPLRRVHPNRARAFGQATSRLAKTDALDAQMLARFAAFTLNEPPAPLPSQAAQALADMVSRLTQLSDLRQSESCRAQQAAGAAIRKSIDAVLKVLERQIEAMQQAIDAFIAQDPALSQNAAILRSCKGVGPKSAQAILAMLPEIGQLNRRKIAALVGVAPITKASGSSINHASIAGGRKALRDILFMAALTASKHNPVFKSFYERLRANGKPHKLALIAVLRKLVITLNAMISSRQTFRMALT

SEQ ID NO: 248156 - protein, 350 aa, unidentified
MAMTIVGTNPDAVIGGVDTHAEVHVAAAVNHVGGVLGVESFPTTQIGYRQLMSWLASHGELTLVGVEGTGSYGVGLARYLAQAGVAVVEVDRPNRQTRHRKGKSDPVDAVSAARAALSGTATGLPKTRDGNLEAIRVLMVARRSAVDTRIETLNQLRHIVFTATPEIRGKFEGLTAISLANKAATLRPRDGEDPVRYVTLITIRALGQRIQYLREETKRLNRMLRPLIRDTAPSLLEVYGVGYDTAAKLLVAAGDNPERIRSEAPWAHLCGVAPIPASSGKTTRHRLNRGGNRQANSALYRIMLSRMRHDQATRDYVARRLGEGKTMGEVGRILKRYIAREVYKQLPRPS

SEQ ID NO: 248157 - protein, 314 aa, unidentified
MTYFIGVDVSKEVLDVHIKPDELEMQFPRTSKGIRSFVKVLKRYEAILVVFEASGGYEKSLQIALRTEEINHHVINPARVREFAKACGRFAKTDKIDARILSLFAEKMTFYQAHQPSQEEILLKDLVHRRRQLVEEVTREKNRLDKAFHEVIKQDIKKHIEILCNSIEKLEQEIKRLLASIQSLSEKVQLLVSMPGVGITTASVLLAELPELGQLNNKQIASLIGVAPMSKESGKFKGARRIMGGRASVRCTLYMSTITAIRGNPALKEFYQRLRNNGKPAKVAITAAMRKIIVTLNQMIMHRNYWNKKTSFNP

SEQ ID NO: 248158 - protein, 331 aa, unidentified
MEPPVVIGIDVSKAELVIGVHPTGETWTSATTPPALDRLVTQLRDQHPDLIVMEATAGYELPVAAACAAAQLPVAIVNPRQVRAFAHAIGRTAKTDAIDAAVLALFGARVHPAPRPIPDAQTQALAGLVTRRRQLLEMLGAERRRLAQAPPTGPITRDLRNHIRWLERRVGDVDDEIGTAVQASAVWRVHEDLLRTVPGIGPTTARTLLAELPELGQLDRRAIAALVGVAPFNCDSGQLRGQRHIWGGRATVRASLYMAALVASRHNPVLADFYRRLRQLGKPAKVALVAVMRKLLTMLNAIIKHQTRWNPKVASTPASPSRAARAATVVA

SEQ ID NO: 248159 - protein, 344 aa, unidentified
MKKIFIGIDFSKEKFDVTLIHAEGVKECAPSAHEVFDNKLSGFRRLLKWVKSQAGEEADTWLFCGENTGGYSIALSNFIYACGHEMWLECAYKIKHSSGIQRVKSDRADSRVIAEYAMRNYDKMVLYKPLSPSLSDLRELFLYRHSLVKHKVTLTVRREEKRLTQEKSKPRALMSKTSKHLIAEVNKSIAVIEKEIKETIDADEELREIFGIITSMPGVGTQNAVCLMVYTDNFRRFGLDSRKIACYYGIAPFGRQSGSSIHSRPQVSPFANRMIKSLLSQAALAAIKSDASFRSYYQRLIARGKQPLLAQNNIKNKMLHIIVAMIRNKVKYNPDYVYPTKEIA

SEQ ID NO: 248160 - protein, 419 aa, unidentified
MSFKIFKFNCCGLDVHKTWIYACIGITDSNNRTEYKQARFSSFTKGLNELCDWLAKYNCKDVCMESTGKYWIPVFNILEQHSFWVTLSHPKYTKPMKGNKTDRKDAKWICDLYMCGMVKPSFIPPADIRELRDLVRYRFKLTCMITGEKNRAQNCLTVSNLKLDDVFSDVFGKSSRSITEHILQHPGEKFDIAPFVDSRCKTPITEIQAAVDGAISKEQVVKLRQCLDHIDELNKHISEVEQEILRLSDKYEAALNLIRTVPGFNKNPLTAIQVLSEIGGDMSVFPTAKHLVSWAGCCPRNDQSNQKIKSTRISRAGSYFKPVLVQVANALIKSKKHLEFTTRYKRIKARRGHKKAIIAICRMILTAIWHILSDLKPYTPEGFLESRPVKEGKVLSTSQALNLLKQRGYIIKGEPLAVC

SEQ ID NO: 248161 - protein, 351 aa, unidentified
MNATTVAVDVAKNVFEVAIADGAWRVVERAWLTRAQFERFFDQRSVQRVVMEACGSAHHWGRVFSARGIEVKLLPAQYVRAYVKRNKTDAADAMALLEAVRAADIKPVAVKSVEQQALQALHRTREAWKSTRTRRINTLRGFCREFGLVVPEGAVLGLVHMARYVADEHSGIPALLRGTMRLLLEEVRLMEARMGQLEQQLGEVAKHSPACQVLQSVPGIGLITSTAMVAAVGDPRSFDSARRYASFLGLTPREYSSGNSRYLGRISKRGDRYIRTLLTHGARSVLRAGVVAQRLGRPIDRLKRWALAVQSRTNHNKAACALANKLARIAWAVWVKQENYRAQELVPLTST

SEQ ID NO: 248162 - protein, 373 aa, unidentified
MLYLGIDQHGKQLTVNLRGEDGEVLLRRQVSTEWERVEAFLREVDDQGQAQGGWLAIVEVCGFNDWLLELLSRHGCREVILMHPDKRNKKKTDRRDANSLSELLWVNRQRLLSGQRVNGLRRVYVPSPVERQDRRLTALRRNVARRRTKILNQIKHLLLRHNALRTCPTRGIQTLKARQWLRQLAQGQAELERSPLDELDRLELGQLSDQWDLCELEERQLDQQIQQRHHAHPQSAVVASLPGCAAYTALAIASRIGPIQRFKTPRSLANYFGLTPGCRNSGEATQRLGSITKEGSAMVRFLLGQWVLHVLRKDPRMRSWYQRIKQRRGSKIARVAVMRRLCTILWHMLSKNEAYQLTGPPRPRKKGRALADV

SEQ ID NO: 248163 - protein, 391 aa, unidentified
MPHGKFARPMSLNGMVRPCSSPASEGSWLGTEDKEHAMSGLNSAIASIGIDIGKNSFHLVGQDERGAIVLRQKWSRGQIEARLANLPRCLIGMEACTGAHHLSRKLQALGHDARLMPAKYVRPYSKGQKNDFRDAEAIAEAVQRPTMKFVATKTAEQLDLQALHRVRERLVGQRTGIINQIRAFLLERGIAVRQGLRFLRAELPTILATPSDVLSPRMLRLIEDLAGDWRRLDERIEGISVEIEALARQDPACERLMTVPGVGPIIASAMVAAIGSGDAFSKGRDFGAWLGLVPKQISTGDRTVLGGISKRGNRYLRTLFVQAAWVVLVKLGKKWERYGLRSWIESAKKRLHHNVLAIALANKLARIAWAVLYKGRAFECVKADEIAPRPA

SEQ ID NO: 248164 - protein, 408 aa, unidentified
MDVVYPVCCGIDVHQARLTACLRRVQEDGQVTKDVQEFDTTYPALLVLLDWLIAQHCPVVAMESTGVYWKPVYHVLAGTLAVLVGNAQDMQQRPGRKTDKADARWIAALLAHGLIRPSFVPPPAIRALRDLTRTRVALVQTRSQTKNRVHKVLEDTNLKLPSVVTDLFGVSGRRMLAALIAGERDPRVLAGLALGRLRRKLPQLEVALTGQCTVHHATIIQASLELIDLLHRQIADLDRQIGELVVPLGPQIEQLTSIPGVEETAARDIFAEIGTDMSRFGSSARLASWAGVCPGNNESAGKRRRGQARKGNRYLRRILVQCAWAARKTPTYLGRTFRRLEARLGGKKAAVAVAHKILVIVYHLLTEGTLYDEERYDRLQPRQEAQQRQRAIKVLEQLGYHVSLEHVA

SEQ ID NO: 248165 - protein, 311 aa, unidentified
MEADRIAIGVDVSKHRLDFATLGSEQRGSEPNTASGIEALAKTLAAMGPHRIVLEAAGGYERAVARTLYDAGLPVCVINARQIRHFAKAIGVTAKTDSIDAEVLARYAAMVCPPLRPLKAENEQEVADLMARRRQLLTMIVMEKNRLQAPNRVQSTRIAAHVRWLEREVERVDHDFDRWIAADPDRVEADAILQSTPGVGAVVARTLIADLPELGKLGKRQISALVGLAPFNRDSGAMRGKRKIRGGRASVRGILYMAALTGARFNPVLAAFYKRLCDAGKPKKLALAAVAHKLLIILNAMMRNRSHWAHE

SEQ ID NO: 248166 - protein, 411 aa, unidentified
MYYVGIDIAKSFHVVSVIDDNETKIINKPFKINNDSKGFDKLLTILDSVTLNKDDFLIGLEATGIYGENLLEFIKSKGYNVKLLNPFQTSRYREQITMKKVKNDNIDSLVIALFLKDGKYSSGYVTDDEYQSLRTLYRNRASIQSDMKEIKKRILTQITVTFPEFENFTNPFTISGLALLDKYPTAHHYKHSSVDRIMKIFSHIQGNNFNKDKALKLLELSRESIYSGKAKDARAIAIRSSIRLLKMYQDELLIIENEISSLLDKKGINQQTLDELPTKDSLIENLKTIPGVSEKTIAAVISECGDLTRFPSIPKFIGYLGLFPTENSSGNSKSIGHLSKRGSSLVKHALYMSATSCLIHNKQMKQLYDTKRSQGKSKKEGLVAVSRKLATIIYSIFKYNTPYNPNRVFTN

SEQ ID NO: 248167 - protein, 412 aa, unidentified
MKDLLEISCGLDVHKEKIVACILTGPLGKPTRSEIREFSTLIPDMIALRDWIVSQNCHHVAMESTGIYWMPIYEILEDAFYGDITLLVVNARHMKNVPGKKTDMRDSEWISTLLRAGLLNGSFIPEKRIREFRDLNRYRKSVIRDITSQKNRIEKFLQSSGFRLSSFISDIFGASGRNIILHLIEHGQIDKTALDSCLKTKTRNRIDEILMSVNGTLSEHQKAFLRILMTHYDSLKKHLAEIETSLEKDMAPFALQVEQLNSIYGISTTASCAIIAEIGIDMKPFKTAEHICSWAGLCPGNNESAGKRKSTSVTKGNPYIKSMLCEIAWVIAGKRNTYLSAWYWRIKQKKGAKKAIVALARKLLVIIYTMLKQGTLFDESCFETRRKHCEQKQLSRYIRELEKHGYHVEAQS

SEQ ID NO: 248168 - protein, 417 aa, unidentified
MKKHNNSAMKSEPISKRAKSRGPVQRDTKEVLAELVETLRKKLDPKVEAGSTGEEDRRGKFRPNLDRLTVGVDLGDQWSHYCILGLEGETLAEGQLRTTQQHIAEFFQALNAARVVFEVGTHSPWVQEVICGCGHEVLVANPRLMEGSKRRKRKNDRIDANKLARLGRVDPQSLHPMRHRSKEVRQDLVVLRARDALVAARTELINATRGLVKSMGARLPKCSSPSFAQKVEETVPVELRDALLPLVRMAATLSDCIQGYDEKIEKLGREKYGHTALLRQVKGVGPITALAYVLTLENPDRFVKSRDVGPYLGLVPKQEDSGESQPQLGISKAGDTMMRRLLVGSAHYILGPFGPDTDLRRYGLRLCERGGKNAKKRAAVAVARKLAVLLHCLWVSGEVYEPLRQDMSATIAPAVAA

SEQ ID NO: 248169 - protein, 344 aa, unidentified
MDHFAGLDVSVKETSLCILDEAGKIVKEVRVASEPQALLRVLGDPSYRFRRIGLEAGPLSQWLFSALAEAELPVICVETRHMQAVLKAQINKTDRNDARGIAQMMRAGVYRPVHVKTLRSQKLRMLLTHRKLLQSKAVAIDNDLRGTLRNFGLKVGMVGTARFEARIRELVEDLPDLVALIEPLLIVRRTLREQIVILHRRLLAIVRDDEVCRRLMTIPGVGPVVSLTYRATVDVPARFRKSKSVGAVFGLTSSRYQSGEVDWNGEISRCGDEMMRTMLYEAAQSMMHSKKWSWLKAWAMQIARRRGMKKAIVALARRLAVIMHRIWVDGTEFRWTREQAASAA

SEQ ID NO: 248170 - protein, 352 aa, unidentified
MRTSHQNTSETISTIGIDVGKNTFHLVGLDKRGVIVLQQKVTRHQLGRRLSNIPRCLIGMEACSGTHYLARQLTALGHDVRLIPAQYVKPFLKGHKNDYRDAEAIAEAVQRPTMHFVSIKTPEQMDLLALHRVRSRLVGRRTGVINQIRGFLLERGITVRQGPMPLRKALPEILSASSDALSPRMINLIGELIQDWRRLDERIAAVSSEIEALAKQDASCQRLMSVPGIGPIISSAVVAAIGNGAGFKQGRDFAAWLGLIPRQESTGDRTILGKISKRGNKYVRTLFVQAAHVVLARRPSTAMQGLWPWIERASKRLHRNMLAIALANKLARIAWAVLARGQAYQPRITANA

SEQ ID NO: 248171 - protein, 344 aa, unidentified
MQITTIGLDLAKSIFQVHGIDATGQVVVRKALRRAQMLPFFAKLPSCLVGIEACGTSHHWARELTKLGHEVRLMPPAYVKPYVKRGKTDAADAEAVCEAVTRPTMRFVPVKSPEQQAALSMHRTRDLLVKQRTQMVNMIRGLLAEFGIDIAKGLGRALLMARRIVDGEIPDVPIEAAKMVGMLSQQALDIDARLRQIDRDLLVWQRGNDVARRLMTIPGIGPVGATALAASVTDPHQFRSGRQFAAWLGLTPLQKSSGGKERLGRITKMGDKYLRKLLIVGMTSLVSRAKSRPEKIDPRLANLLARKPVRVATVAMANKTARTIWAIMTRGEIYRAGHRPVLAA

SEQ ID NO: 248172 - protein, 362 aa, unidentified
MVYIGVDLHRKVSHVVALDEAGTTILSRRFEHSPDAFRRVFGELEPEPISVAFEATYGWGWFADLLADAGIEAHMAHPLATKAIGAGRVKNDAVDAATLAQLLRTHLLPEAWIAPPEVRELRRLVRMRASLVRVRSRLKCQVHAICADAGIPVPASDLFGKKGRATLETLVLPPITASRLAAHLRLVDDLAREIIAADREIVVAFRGDDRIRRLLPIPGIGILNAATIVAEIGDVTRFPSADHLASWAGLTPTERSSADHVRRGHISKQGSRWLRWAMVEAATKIGTSRSAKLRRFADPIADRRGTKIARVALARRILTLVFYALRDERGCRDYPPLPRPSRRPVTARSRSVMASPDGRAID

SEQ ID NO: 248173 - protein, 447 aa, unidentified
MVNPNAAAIDIGATIHVAAVGADRASDPVRSFGTFTADLHRLADWFAECGVKTVVMESTSVYWIPIFELLDERGFEVILVNARDAKHVPGRKTDVSDAQWLQRLHSYGLLRASFRPKGEIVELRAYLRQRERLLDTAASHIQHMQKAMTEMNLQLHHVVSDITGATGMRIIRAIIAGERDPAVLASMRDTRCHSSAEVIEKALTGHYRGEHLFVLEQALALYDVYQQKVAACDIRIESVLKELSSIRGRKEDARADGSGSPRRRSRQSNGPDFDVGKALHSLLGKDLTRIHGMGPYLALKLVSECGDDLSAWPSAKHFTSWLCLAPSNKISGGKVLSSRTRRSGSRAASLLRLAAVTIGRTDTALGAFYRRLSARAGKSKAVTATARKIATLFYNALRHGMDYVDPGASYYETRYRERVVKNLHRRAKAFGFILQAAEMPAAEQAVS

SEQ ID NO: 248174 - protein, 343 aa, unidentified
MSIVILGVDLGKNACSVVGVDAAGAVVVRRSMRRQTLVDYVAKLPVCVVAMEACCGAHYLGRLFAAHGHEIRLMSPEYVRPYVKAQKNDDRDAEGIAEAASRPTMRFVELKTQEQLDIQTLHRVRSRLVAERRSLTNQLRAILLERGTIFPVGRRKLELGIDALLADEDTTLSPRLRQLVAELRAEWRELDARVEALNGEFVELARNDAAARRLTSIPGVGVLNATALIAAVGDASSFAKARDLGAWLGLVPRQHTTGGKPRLLGISKRGNTYLRTLLIHGARAALPSLARSETPLGRWLTGMIERGVHRNAIVVALANKLARIAWAALRKDATFERGYQVAA

SEQ ID NO: 248175 - protein, 450 aa, unidentified
MECVPETLHFECVREGTTTTYMINVNELVTLRVCIYKVTLILVCEFITFDTTNQEVFILKFIGIDIAKDHHDIVIIDDYGEIIKEHFQINNHKQGFKKLHTEIKSCMKSLNDIHIGMEETGIYHENLRDFLISKGFTVYTINPLLTSYSRKASSPRLTKTDKIDATAICRYIMNNFRLLHSYTPSLYYIDELKQLSRTYHHKKQLLSKTKTELKRLLQISFPEFTKHFDPYAKWALDVLGEYPLPTSFKGLHTGALAARIKTKSDRLSKAILLKQLANASIGKCDDLRAFLIHSIISDFKHYESQTKELKKIITTKMSIFPKIMSVPGIGPINGATILGETGDINRFNNKHEYYAFYGCDPIIHESGNYKLKKSRLSKRGSKYLRTAIFSASRVACVGKFTRDNKFKRKYISMASKKNKHHYTILFAVAKNMVHSIFKMLIKNKFYDDSK

SEQ ID NO: 248176 - protein, 455 aa, unidentified
MPGKKTRGTSSGRLSTINPDAAGIDIGSTFHVVAVPSDRDDRSVRTFRTFSSDLHQLADWLTEVGITTVAMESTGVYWIPVFEILDARGFEVLLVNARDVKHVPGRKSDVNDAQWLQQLHQHGLLRGSFRPRDSVVRLRAYLRHRERLVDYAAAHIQHMQKALMQMNVQLHHVVTDITGLTGMRIIRAIVAGNHAPEQLAEFRDRRCHASENTIREALIGNYRPEHVFALRQALELYDFHQVKVAECDVEIEAVLIELNEQRVTPEAPLPSVRHAKGRNEPAFDVRPALYALLGADLSQIHGFGPYTVLRLVAECGDDMTKWPTAKHFTSWLSLAPGNKISGGRLLSSKTRRSSNRATALLRIAAVNVGKTQTAIGAFYRRLAARTGKAKAVTATARKLAILFYNALRFGMTYVDPGVSSYEERYRQRVIHNLQRRAKSLGFTLVAAPQATEGVS

SEQ ID NO: 248177 - protein, 351 aa, unidentified
MKKIFIGIDFAKEKFDAAIIEACGLKEFGDRQFGTFGNDRKGYRQFMKWVKGLAGTSTESEWLFCGEDTGSCSQGLSKWLYGKGLDIWIENPYSIKHSSGIQRVKTDRADASMIAEYAWRHQDKAKLFEPLSESLTQLREVFLYRHKLVQQRVAMEVRKKGKESEDSSKAMSFIRRKSKHLIKEIDSAIKECDMMIDKIISEDAELAENYAIVTSIKGVARQNGACLLIYTNNFKRFDMDARKIACYYGVAPFGKESGSSVHTPARTSHFANKLIKALLGQAAQIARVFCPEIKEYYQSLIKRGKKHSVAINNVKNKLLRIIVALVKKKTKYDPESYKFYRDRLNRQYAPK

SEQ ID NO: 248178 - protein, 367 aa, unidentified
MSTRVKRSGPKKAKPVFVGVDLHGHNHMLVVREAGGPVVLAQRQPNELELILAALQPFGDRVAGVAVESTFNTYWLLDGLQDAGYEVHLAHPPDLTDHRKRLKFADDKVDARLLAELLEEGRLPEGYIYPRAMRGVRDLFRRRMLLVQEQTTLLVSLHSLILRHEGTAPPPSRLKTLDTEEAVALVKEAPVQAQVRALKAVLASLSKSIRYLEREAMGSLTPDAVYHRIESIPGVGKILAAVIRLETGSLGRFASGGDFVSYCRLAPSVHLSNGIRKGEGQPKRGNRYLAWAFIEAAHFACRYCDQAKAYYTRKRKKRGAVVATKALAAKLARSVYAMWASGRDFDARRAFGPSAGAGEKVSAGVAA

SEQ ID NO: 248179 - protein, 314 aa, unidentified
MSTELFVGIDVSKDKFDLATTASCKQKQFANDKRGIAALVKWLEGRQPTLVVLEASGGYETALVGALDAAGSPVALTNARKVREFAKADGRLAKTDAIDAALLADFAQRMRPQPRPVPDEQALELKALATRRRQLVDMIVAERNHLENVPRSIAKQIRKHLRWLKKELAAVEKEMEDAIRSNPVWRKRVELLQSAPGVGAVISFALIAELPELGETDHKPIAALVGVAPFNCDSGRHKGKRVCRGGRSDLRRSLYMGVLSATQHNPPIREFYQRLLDRGKPKQLAVIACMRKLLTHLNAMIRDNRPWQNTPCQA

SEQ ID NO: 248180 - protein, 463 aa, unidentified
MEKKPPVEFNELNRNVAGIDLASRGNNYVCGPRREDGECEIASFGTTTPELHRMLHWLQERQVESVAMESTSVYWIPVADLLEANGIKAVLVDTREVRMVPGRKSDVKDCQWLQKLHSCGLLHGAFRPPEDVAAVRSVLREKDNLTAMRTQAIQQMQKSLDQMNIRVHHAVSDIDGVTGTAIIKAIVEGERDPVKLAALRDKRCKKSELEIAAHLTGVWRDEHLFNLAQAFELLQFLDKKIKEYDEKAERMFEALAAAAAPAENPPPPPAPGKKKSAKELLEAAVRNAMQKFMGIDLTVIPGIGCGTAKVIASELGKNFECFPTERHFVSYIGLAPSLGKSAGKNVRQKKRCKNTSRIGRALRMAAATLYNSKTELGAYSRNVARQTDKKTAVKATARRMAHMVYRGVKYGIEYIDLGAQKYEERLRERKVYAANMLIKTFDIKISELTATPEGIAALAALAV

SEQ ID NO: 248181 - protein, 465 aa, unidentified
MKSKTAKTKKQSKKISIDAAWEPVNLQAAGVDIGSREHWACAPRAGGGCLVRKFGTFTADLEAMAAWFKECGVTSVAMEATGVYWIPLFQILERSGLHALLVNARQTKNVAGRKSDVQDCQWIQRLHTYGLLQGSFRPEDAYCVLRTYLRYRDELVGARSTQCQHMQKALLQMNVQLPHVLSNVTGVSGLAIIDAILKGERDPVVLAALVDRRVRASQPTIQQALKGDYREEHLFVLRLAHELYHIYEAKILACDEQIVREFARLPARVDPARQPLPARKAGRSPYLDKMAGTDLRPELYEKLGVDLTGIEGIGVHTALILLTEVGPKVDRFRSEKHFCSWLGLCPDNRISGGKVLSSQTRRVINRASDALRLAAQSLERSQSALGGFARRMKARLGAAEGITATAHKLARIIYRLIKHGEAYVRQGLEDYEKKFAERKLHALQKTAKAMGFDLVQKQPLTQSVS

SEQ ID NO: 248182 - protein, 364 aa, unidentified
MTESITCVAFDMHQDSITVAWLRPGATEPETRTVPNEPTLFRRLVQELLARGRARACYAAGPLGDAPQRQRAAWGLPCEVIAPSLIPRRPGDRVKTDKRDAKKLVKLYRSGELTPIRIPTPAEEAARDLVRCREAAGVEARRALHRLRKFLLRRDLRCPAGRPGTQAWWRWVHALRLPDPAAQRTLEEYTLAATTARARWKALDPEVTALATRAPWVAPVARLRCFRGIDTLGAVSLHLEVFDWRRFGSPRPCMSFVGRVPSEHSSGGRRRQGSITKAGNAHLRRILVEAAWQYARRADRRAAVRQRQQGQPPAVVAVAQQAEQRLYRRFHRLVDRGKLRTVAATAVARELCGFLWAAMVEAPV

SEQ ID NO: 248183 - protein, 425 aa, unidentified
MNPSTKEEPDYAAFIAIDWADQKHTYSLQVAGQTKKEAGTLEQKPEVIGPWVAKLRERFGNRPVAVAVEQSRGALIHALLSYDFLVLYPIHPTTVAKFREAFKFSGTKSDPLDTDQILQILTKHRDQLKLLQPDTEATRLLARLVEDRRKAVDLRTGHIQAALAALKEYFPQAIELCRHNLTSRLAADLIQKWPTLPAFQQAKDSTITRFLYGHNIRSSEVIDAALQIAHTALPLTTDPAITESGQRLCCLHLQIIQTLNPLIDDYAARIAKLFDAHPEAPIFTGLPGAGPALAPRLLSFFGTDRSRFTAAANIQSFSGIAPVTKSSGKSKVVFFRVACPDFDRQTFHEFARLSVASSQWAANYLVYYTAKGKNYHAIIRALAFKWIRILFRCWQNRTPYDEAKYLDALKKRGSIFATLHLQKKS

SEQ ID NO: 248184 - protein, 403 aa, unidentified
MNSVGIDISKGRSTVAVMRPFGEVVISPFEVRHTDSELSELARQLKSLNGETRVVMEATGNYHAPVAKLLHDAGLYVSVVNAKLVHVYGNNDLRRVKTDRKDAVKLANYGLDRWLTLPRYVPEEDTRLLLKNCYRQYRQYSKVQTLLKNNLISLLDTVFPNVNRLFSSPIRGDGSEKWVDFVAEFWHCRCVSEKSQKAFTSKYQRWCRKHGYNFSEEKAHTIHAEASGYIGVMPKSETTKLLVEQAVAQLRATSAALTALKHEMLALAAQLPEYPVVMGMFGVGPTLGPQLIAEIGDVRRFYSKKALVAYAGLDAPPNDSGDVTGKHKSMSKIGASSLRRTLFLVMSVYLQNAPLDEPIFRFMDKKRAEGKPYRVYMMASANKFLRIYYATVKAYLESLEHTA

SEQ ID NO: 248185 - protein, 293 aa, unidentified
MGRAGRSVRPMTGAEMMTTGLAVGIDVSKAALDVCALPSGVHRRFDNNEGGFKRLIAWLARLTKDPLKIVLEATGTMTWGAVAALIAAGHAPRVVNPARVKAFRAAEGKHAKTDRLDASLIARFALVMSEEARPAPSAKQLEIKGLSARRRQLGELIADEKRRQQQAFEPAALASIKETIALLKAQQKRIESRLLGAIAAEPAAAERAAILTSIPGVGPIIAAELIAELPELGALNRHQIAALAGVAPQANQSGRTLGRAIMPAIHKEGAAGAARSRRRSPTPCRRGRRRSEG

SEQ ID NO: 248186 - protein, 356 aa, unidentified
MKNNKLDFRGQTISVGIDTHKKNMVITPRCQGMQLRTISMDPEPEQLVRYLHKNYPNASYESVYEAGFSGYWMDRKLRAAGIKNIIVNPADVPIKQKEKRKKTDKIDSRKLARELSAGNLEGIYIPSEEHEAIRALSRLRKQITKDQTRQKCRIKSLLNFVGITLPENSELKHWSGKFIKYLSEIEFKHKAMKITLERLLESLINGRQILLGIVKNLREIVKEDTEMKKITEYLQSVPGIGFITAITLYTEIMEIKRFGKFDELSSYVGFSPATDSSGEKDKVIGLSKQQNRYLRNMLIESSWLAIRKDPALLQAYGNLVKRMSKQKAIIRIAKKLLSRIMYVWRNEKHYVCAVVS

SEQ ID NO: 248187 - protein, 500 aa, unidentified
MKTRRSKAKIRVGQKRGSAICSKPEQKLEVLRPDAAGIDCGAEEHYIAVPPDRVGAGEPTVRCFSAFTEGLDAAVDWLKDCRITTVAMESTGVYWIALHQKLEAAGIEVYLVNARHVRHVPGRKTDVQDSQWLRQLHRFGLLNASFRPQDIVCRLRSLHRHRDNLVSSSASEIQHMQKALQQMNLHLHHVVSDITGLTGLRIIDAILSGQRDPEQLVKLRDKRVYKSTPQQMQAALVGDYRAEHLFVLSQSLQAYRFYQARIEECDREIEPLLEKLALQVEAASANLELGALKPASAKDEAMTPELSNESNPGCGLKAKRKRKPIANEPKIELAGLLERICGIDLTKVVGLNVLNVLLIVSEIGVDMSKWRSAKAFCSWLGLCPGNKISGGKVLDSRTRQVVNRVADALRLAAQSVGRTETCLGIFYRRKLAHLGAPKATTATARKLACLIYHLLKYKQPYQEPDPAIYQLRLQKSALVKLQRQATALGYTLQPTTPLPA

SEQ ID NO: 248188 - protein, 456 aa, unidentified
MARRLVGIDLGIASSHTVRVLDETGQQVCRRRCEPTVASLRRIEDAASVGAPPGTVLEVVLEPTGPAWLPVAVFFASRGHSVFRVSSAKSADLRRFLSKHAKSNGIDAETLARLPLFSPGGLLPLELADAEHAALDRRVRACDRLTRAASEHKTRIKDLVRQLLPMTPLIEDIGVADLAVLERWADPRTLLKIGPSKLKSLIVKASHNHHGAERAEQWRSAAAAAVELYGEHPAVAWQDLAAEVATEVRLLKAIQAELAVHSARREQAYRWADHGQLARSLPGIAKVGGPVIAAAIGRAERFPTGAQFKSYAGLAPRASETGNTDRKGQPMSKAGSSLLRTTFFRAADTARKQDPQLAKIYYTQMVERGANHVKALCVVAAHLAERAWAVMARGMPYVICDINGEAVTAQQAKTIIAEHWTVPPQVRARRRSTKTAKAGKAPQQVHAGPAKPNRRP

SEQ ID NO: 248189 - protein, 371 aa, unidentified
MQDNIFIGLDVHKATISVAVAKNERGGEVRHWGTIPHRPDHVRKLVEKLGANRSQLYFCYEAGPCGYNLHRQLVEMGCDCIVVAPSLIPVKAGDRVKTDRRDAVMLAKLHRAGELTSVWVPDAEHEAMRDLVRARATAVRMLGKARQHLQGFLLRHGRIYPGKKGWTVAYRRWLTTLGFQHPAQQIVFQNYVDAVSDAQARVDLLTRQIAELVPTWSLAPVVEAVQAMRGVALIVAVTVVAEGGDFHRFDNPRQLMAYIGLTPSEHSSGSSIRRGGITKAGSSLARRALIEGAWSYRMQARVGRKMFDRLEALPQSVRDIAWKGQLRMCQRHRHLVAAGKLKVVITTAIAREMLGFIWAIAREVSVAPARS

SEQ ID NO: 248190 - protein, 411 aa, unidentified
MEIVHTRCCGLDVHKRTVVACVLTSQADGLIERQVRTFKTMTVDLLALADWLSSLSVTHVALESTGVYWRPVYNVLEDDQRTLLLVNPQHMRAVPGKKTDVKDAEWLADLLRHGLLRASFIPPAPIRVVRELTRYRKTIVQSRADEVNRLQKTLEGANLKLASVATDVLGMSGRAIFAALLEGERDPEVLAELARGKLRAKLPQLRQALVGRVQPHHLVLISQILAHIDFLEEAIAQVQAEIEQCLPPFDEALELLQTIPGIKEVAAAAILAEIGTDMSRFPTAGHLSSWAGLCPTNKESAGKRMKGPTNHGNVWLRAIMGEVAWASIRTKASYFSAQFRRLARRRGNQKAAMAVAHSILVVIYHILRTGQPYRELGVDHFTRSDAARIERHHVRRLEQLGFTVMLTPTAA

SEQ ID NO: 248191 - protein, 467 aa, unidentified
MEDTRKKAQKPEDCAGRKTLTAALQVVNANAAGIDLGSREHYVAVPPDRDERPVRHFGCLTPDLHEMARWLNGCGVQTVAMEATGVYWVPVAQVLESEGLEVVLVDASDLKNVKGRKTDVQDCQWAQQLHTFGLLKGAFRPTKEIQVLRGYWRHRETLVAECAQQIHRMQKALEQMNLQLHKVLSDISGVTGMQILRAILAGERDGAVLARMRNGRLKCSEETLAKALTGDYRQEHLFALRQAVELYDVYQQKIAECDAEIQKVMAQFQRPPARGTRNPKASKKKATSRRKNQCHFNLAEELFQIAGVDVTRIDGIDALTAQTVFAEVGFDLSAFPTEHHFASWTRLCPNNRITGGKIISSRRRRGKNRVALAFRRGAQSLHHSQSALGGFYRRMVAKMGPGKATTAVAHKLARLFYRMVRYGQDYVDQGEKQYQQRYQEHQMRLLKKRARHMGYALVCAQTGVVVS

SEQ ID NO: 248192 - protein, 384 aa, unidentified
MYYVGIDISKYKHTFVIASHLGEVIQKPMDFDNSHLGFAQFLDKLKPFDSNQLKIGFESTGHYSANLKQFLHDQGYSFYQLNAHLVKKFSLSLSSRKAKTDKIDCLAIAKFLMTVDSKSHTSLSYHISFLKSLSRHYYRLNKYIGKTKVELVNYLDKAFPEFTRYFSSIYTKTPLAIIFKANSLNSIANMSMSRFDSLNKLSRGNFNYSKYIELKQAAKFSVGVKDKFYWSLLHLTIKRIQTLENEKEKVEDHINLIMKDINSPITSIPGMGTTSAAIILSKIGDIFKFSNSRALIAYAGLDNSVHQSGIESSYGKVSKRGSKYLRTALYNVSFPIVNNSKLFYDYYFDKKSRGKSHTLSLIWVSRKLLRIIYFLLKNNQEFSD

SEQ ID NO: 248193 - protein, 392 aa, unidentified
MLYLGIDLHKSQITINLRNENGDVIQAGQVSTQHDAISEFFNALVKQAGRCRGFMAIFEVCGFHDWLYEKLKTCRCKEIVVVQPDNSSRLKTDRRDANALCELLWNNRKRLQNGARPNGIRRVFLPEYADAKTRQLANLREFLVAQRTKVINKVRGIMRKHNIDQDAPSQKRYGTQKNRRWLEQLELPPNDRTEVDIHLKLWKEYDERVLSVESELAKCYEGNPAIMRLTSVPGISVMGAITLLSRVGDIARFKTPDSLANYFGLTPGCRNSGESKKRIGSITKTGSRMARYVLNHAVNHAVRKCPNMKNWHKKIKMRRGSKTARVAVMRRLATIVWHVLRWEITYQFRYDQPVTTKKNGNRHTSAKGFVRHNNKNPGNEKTPSTCRNKSKA

SEQ ID NO: 248194 - protein, 325 aa, unidentified
MDEPVGIDVSSKKLRIASDHEEFEVENTSQNHQQVIRRLKRAGRTIHVCLESTGVYGLDMALMLSRTTGFDVMVVPPRAAHHFAEALMRRSKDDPIDARVLREYARRMEFKPWQPPPEEMLHLRTLARRMTALTEMRTEEKNRLHAAKATQTLECIRDDIEASIDFLTERIASLKKLAAAHIDRHPRLQCAIARLISVKGIALVSAIRIYAELCVLPPGMTPRQWVAHAGLDPRHFESGTFQGLTRISKAGNKYLRAALYWPALTAIRSQPNVKAFYNKLLGKGKMKMVGTVAVMRKLLHSIWGMFKHETNFDGEKFYALTAERS

SEQ ID NO: 248195 - protein, 371 aa, unidentified
MRDHSEAFVAFDTSKLRNAVAVAEVGRSGEVRFLGEIDNTAAATSKLAKKLATKYGRLSFCYEAGPTGYGLYRQITGLGHDCIVVAPSLIPKKAGDRVKTNRRDALGLVTQFRAGELTAVWVPDPRHEAMRDLTRARGAGVEDLRRKRQHISSFLLRLGLHYPGKKTWSRTHMKWLASQKLAHAEQRLAFEEMLLAVRQAEERIARLEEAIRAAVPDWSLAAVVDALMAMRGIDLVSATAFLAEIGDLSRFRTPRELMAFLGLVPSEHSTGDKVKRGGITKTGNRRARCILAECSWAYRHPPRVGKDKQARVEAAPRVVREIAWKAQHRLYNRYRALTRRGKLKTVVITAIARELAGFIWAINREITPAPV

SEQ ID NO: 248196 - protein, 318 aa, unidentified
MAVVNHVRQGVETSRFDNTSAGMKLFEKWLKSHKTAFNENTLVVIENTGIYHRLIWAFCSGKHLPIHIGNAARIKWSFGIARGKNDKIDSLRLCNYAFKEAEDLKATPVLNPDLLHLKDFVSARTKLLKQKSGLGVSIKELGNVNDKSHQKLIEKAMKHALDGIAKSIKNIEDQIKKIISENQDFKRNYKLLISIPGIGHVTAVYLIGCTANFAGQPSGKELACYAGVAPFEHSSGISIKGKTRVHRMANKELKRLLHMCALSLIQHNQEFRTYYNRKKDEGKHSMSIINAVRNKIALRVAAVIKNQASYKNNYNIAA

SEQ ID NO: 248197 - protein, 347 aa, unidentified
MDHVIIGVDTHKNTHAAVAIDAQGARLGSTTIPATRKGYRDLDAWAAQFGHVKAFGIEGTGSFGAGLSRDLLAKGHDVRDVMRPNRQLRHLHGKSDSLDAESAARSVLNGQATAQAKAQTGSSEMIRHLKVARDSAVKAKSQAMITLKTLIVNAPADLRDTLDGVRGRITLVRHVAAMRPGEITSPTASAKAAMRAIARRWLALHEEIQAHDRELDRLVRERASELMQAHGISTMTVAEMLILLGDNPERIQSEAALAKLCGLCPIPASSGKTNRMRLNRGGNRQANAAIYRVAIVRMRDDQRTKAYAARRTSEGKTRREIVRCIKRYIVREIYRALCVPPTKAGHA

SEQ ID NO: 248198 - protein, 344 aa, unidentified
MPIITVGIDLAKAVFAVHGVDEAGKATLVKPKVARDQLVPLIAQLPPCLIGMEACSGAHHWARVFAEHGHTVKLMAPKLVSPYRMSGKRGKNDAADAAAICEAVTRPSMRFVPVKDEHQQATLCLHRTRQGFIEERTSTYNRLRGLLSEFGVVMPQSPERLRKEIGPFLDSLPGWARRCMSELLEHTSHIEDRLVELDRGINQIAREDDRSRRLLQLRGVGSTTASALVATIGDGHDFRNGRQVAAWLGLTPSQYSSGGKQRLGSITKAGDAYLRSLLVLGARSVMANLGNKQDPLSRWIRNLMERRGYWRAAVAIAAKNARMAWAVLHYGDTFKPEQAEPTGA

SEQ ID NO: 248199 - protein, 416 aa, unidentified
MNAAGIDVSSRKSTVAVLRPFGEVVKLPFDVTHSAEGLAALVQQLKSIEGETRVVMEHTGRYYEPVAQALHTAGFYVSAVNPLLIKEYGGNSLRRVKTDKADAMKIARYALDNWSELRDYTPMDTIRYDLKTLNRQFQLASKQKTAVSNNLIALLEQSFPGVRKCFDSPVRKDGTQKWVDFVYTFWHADCVRKNSLNVFTERYRKWCKRHGYFFKQSNAAEVYELARSVITLVPKGPVAKVLVQQAASQLTSISRSVETYRAEMNRLASMLPEYPVVMGLYGVGESFGPQLMAEIGDVRRFDRKQALVAFAGIDPMPNQSGEKNVRSNKSSKRGSPYLRKTLFSIMMCLLQSAPADEPVFQFLDRKRSEGKPYYVYMTAGANKFLRRYYAKVRNYLATLDNLPPVDMDSTGLNHLN

SEQ ID NO: 248200 - protein, 331 aa, unidentified
MRIITTIGIDLAKKVFQVHGVDTEGKVVVARKLRRKEVLAFFAKLPPCLVGMEACGSAHYWAREIAKLAHSVKLMPPKYVKAYVKRGKTDAGDAAAICEAVTRPSMSFVPVKGPAQQGLSMLHSARSQLIGQRTQLINAVRGHLSELGIIAERGLLGLTELATIVRDESDQRLPATARAALMILVRQIEAVSTEIAALDTALHKENKASELGPRLETIPSVGPVIASALRARVTNAKLFENGRHLSAWIGLVPENDSTGGKVRQNGLSKKGDRYLRSLFVNGAMAVVQKAQKRPDKHPWVTKLLARMSAKQVVIEPRRARGLAMGVHDCNA

SEQ ID NO: 248201 - protein, 371 aa, unidentified
MDESSKTLYVGLDVHKDSIAVAYAPEDRGAEVVSLGSIGTRQCDIDALIRKLQSKGATLVFVYEAGPCGYWLYRYLTRKGLSCHVVAPSLIPRKPGDRVKTDRRDAVMLARLMRSGDQTSIYVPGIEDEAIRDLSRGREDAMRDLKATKYRLKAFLLRQDIRYEGRANWTAAHLRWLAEVVCPTRAQQIVFQEYVRGVTEQHERLQRLEGELHAEVKGWRLYPVVEAIQALRGVELTSAVILMAELGDITRFDTPRQLMSYLGLTPSEYSSGERRRQGGITKAGNTHARRALVEGAWAYRYPAKVSRHLQLRLETLPAEVRAIGWKAQVRLCKRYRQLSARGKHANQVVVAIAREMAAFAWAIARTVPLAL

SEQ ID NO: 248202 - protein, 405 aa, unidentified
MTIAAHRSEAPSTVRVDLSAIFVSIELSQSKWLITSLSPGGGEKLSKFTLPASDVAGMLTRFAELQRKAEARTGQAFPLVVIQEAGLDGFWVHRVLKAEGIESHIVDPASIAVSRRKRRVKTDRIDGEMLVRALLAYKRGEPRVCAMVRAPTPEEEDRRRVSRERKSLTTERIRHVNRIKGLLFGQGVNGYQPLRQDRRKRLDELTTGDGRPLPAQLKAQISRELDRLELVMQQINACEDQRDALLAAAHPAVTADANNLVCAAEPSSAAPSVPAMLLQLKGIGPEIASVLWLEGLSRQFDNRRQVAAYAGLAPSHWQSGKIDHDQGVSKAGNPRLRTTLIQLAWLWVRHQPDSALTIWFKTRVAQNCGRLKKTTIVALARKLLVALWKYVNAGVVIDGAVMQPA

SEQ ID NO: 248203 - protein, 321 aa, unidentified
MSGYLGIDVSKNELVLVREAVAGTVSYSNDASGHRSLVKDLLRNDATRPILIVLEATGGYERGVVVALAEAGLPVVVVNPRQVRDFAKATGKLAKTDQIDARVLADFGAMVKPELKAMPGELEEELRALIARRQQLLQMLVAEKSRLQQMLGRSSQKLRREVRSHVADLERRLKMTDSDMDDTLRKSPIWREQDDILQSFPGIGQKTSLMLLAELREIGTLSSSEIANLAGLAPVNRDSGKWRGKRRTGGGRSRVRAALYMAALSAVRFNPIIKAYYCRLVSSGKPKMVALVASMRKILITLNAMIKTKTRWQAHVTPAIA

SEQ ID NO: 248204 - protein, 342 aa, unidentified
MKQYVGLDVSQRETAVCVVNETGQVIFEGKAKSNPGVLTDLLSKHAPHAERIGFETGAMASWLWHELRRVELPVVCIDARHAHAALSVRMNKSDQNDARGLAELVRVGWYREVKVKSEESQKIRAILVARSRLVSMRRDIENQVRSLIKECGLLFPRAIGQQFRNQVSELLGVDHLLLSVISPLLSIHENVCQQQGKFDNEVRRLAKLDETTRRLMTVPGVGVVTALTFRHTIDDPSRFRSASTVGAYLGLTPRRSQSGETDTNGKISRWGDRLLRTYLFEAATVLLYRTKKWSSLKAWGMKLAKRIGMKKAKVAIARKIAVILHCIWVDGTSFDWGQPKPI

SEQ ID NO: 248205 - protein, 460 aa, unidentified
MTRKRSKSTKARAAHVDTLSQMNLHAAGVDIGSSEIYVAVPPESDAETVCCFRTFTPDLEEIAKWLTKCEVTTVAMESTGVYWIPLYELLESKGFKVCLVNARHLKNTPGRKTDVLDCQWIQQLHTYGLLQASFRPSADICALRAIVRQRDMLVRDRGRHVQHMLKALQTMNIQLNLVLSDITGVTGMNIIRAIIDGEHDPKTLAAFRDGRCAHAQEEIEKALQGNYRQEHLFALRQAVQLYDFYGQQIEQCDDELETMYKGLQLPNGPDTTKNQPPAPKAKRRKSQANFDLSTSLYNMAGVDLTRIPGVDALTAQVVLSEIGTDMSKWETVKHFASWLGICPQNEITGGKVQSRSTARTDNPATNALRLAAQSVWHSDSAIGNFYRRIRAKDGPAVANTATAHKLARVIYHMLRYRVDYVDPEADVYETQYRDRAIRNLTQRAKRLGFRLEPKQQTVVT

SEQ ID NO: 248206 - protein, 465 aa, unidentified
MDEQSKRSKRKRTAATPTALPVVRPQAAGIDIGSAEHWVCGPARADGTPNVRMFGTTTDARHALVDWLVAQHVESVAMERASVYWIPVYELLESRGVEVVLVNARQLHHVPGRKADVSDGQWLQLLHSCGLLRGSFRPAAAIVRLRALPRQVANLVAERTRGVQWMPKALDQMNVQVHRAVADLTGTTGMAIVRAIVAGERDPATLAAHRDPRCRKSADEIARYLTGTWRDEHLFTLASALRLYDAFETEIAAVETQLLAELAALEPPMRRAAPVPVHPNRAKEDGLRRRGEQAIRTALWRVEGVDLTRIDGIGTRAAQVVVTEVGPNLAAFPSEDAFVAWLRLCPRTPISGGKPLKKRRNGLGANRIAAVLRMAATTVPRSQTALGASFRRLARRKGAAVAVFATARHLAKLIYRMLRFGQDYVDVGAQAYERRFQLRRLAGITLAAKSLGFTLVPQTAEAAPE

SEQ ID NO: 248207 - protein, 356 aa, unidentified
MQTQVTKKIDFSGKPLFIGLDVHKKSWSVTVVVDGTEHRTFTQPPDPESLFNYLQRMFPGGEYNSAYEAGFCGYGIHRRLNQLGINNIVINAADIPTSQKDKLQKRDPVDSRKIARSLEKGSLHGIHIFDRELEELRSLNRTRFYLMRDLRKSKTRIKSFLQYYGEPIPVEFDNNQWTLKFVTWLKQVKMQTMSGQDAFSNLISSYEHHRSQLLTLSRQIRERIREYDRELYTLLKSVSGIGPLTASALITELGDINRFKNIDQLGSYVGLVPRIRESGETTYTGGITFRCNSFLRTLLIESAWQAIRMDPAIMQYYHAHLINNKGHKVVIKVARKLLNRIRYVMKNRKPYETGVV

SEQ ID NO: 248208 - protein, 353 aa, unidentified
MIYRGCLHVPGIIVGVDTHKDEHVAVVVDKLGVRIGQRNLPTTNTGYVGLEHWASSLGEIDAFGVEGTGSYGAGLARFLRGQGHKVIEVNRPDRSARRRLGKSDPTDAEMAARAVLAGVARDRPKSGVDKVEMIRMFKSTKDSAMKGRTQAINQMKALIVTAPVELRAVLRGFTTNQLVARCARWRYGQLGTPTAAAKYALRSLARRHIQLTQEIVALDAQLARLTAAFAPALTESFGIGSDTAAALLVTAGSNPERLKSEAAFAALCGVSPVPASSGKTNRHRLNRGGDRQANAALYRVVIVRLRYHDQTRTYFQRRMEEGKTKTEVIRCLKRYVAREVFSILHDIGKRRTA

SEQ ID NO: 248209 - protein, 316 aa, unidentified
MATSVTAQRIGVDVGKAELWLSMNGEAAQRCDNTPAAIRRWMSELTGPADFAMEATNDYHLPLALEAVRQGHRVYLINGYRLNRYRESIGGRAKTDAGDARLLVRYLEREQNDLQPWTPPPKGYRTLQKLLHRRATLVRARVMLEQSLQGVPELKTARKTLIQQIGRVDTLLQRLLRKAIREAGWSEHARRCQQMDGIGPLTATALTMAFHRGTFRSSDAFVAFLGMDVRVRDSGQKRGRRRLTKQGDPELRRLLYMAAMQAKSKPAWSDYYQRCLDRGLATTQALNALARKLARVAFALMKNQTDYRPPAPCTQT

SEQ ID NO: 248210 - protein, 343 aa, unidentified
MSSIQYVGLDVHKRAVSFCVKTAAGRVVEQGSVVATREALTEWGLGQRRPWIGVLESTLFSHWIYDHLEPYAVELKMAQSRRLEAIASAKKKSDHVDAAMLADLLRCDLIPECYVLPRELRELRLQLRVRNFLVQQAVRLKNRLAGLLLQSGEPFSKGKLHQARYFGELLERLEYVPQSVLDLLQTVRGFIELFERAQGALVRGLVAHPELQERVRRLRTIPGVGEVTALTWALEVGDPERFSGIRKAVSYCGLCSAQNESGGHSRRGPLSKQRNAHLQTVLIEAAKLAPRWNPWLAEIHQQALARGDRNQATIAVARKLVALLLAIDKRGTDYEARSPEAAA

SEQ ID NO: 248211 - protein, 460 aa, unidentified
MNPKRSKSRNGGKMPMVHPNAAAIDVGATMHMAAVRADRAPEPVRSFGTFTTDLHRLVDWFTECGVETVVMESTSVYWIPIFELLDARGFTVFLVNARDAKHVPGRKTDVSDAQWLQRLHSFGLLRASFRPKGQIAELRAYVRQRERLLEYAASHIQHMQKALMEMNLQLHHVVADITGATGLRIIRAILAGERDPEALACLRHFGCHSSAETIAKALTGSYRAEHLFALEQALALYDAYHEKASACDARIEAVLKELSIHRGHGHGPAPRASRRRNRTDQANALAFDVREALFALLGKDITTIDGLGPYLSLKLIAECGDDLSSWPSAKHFTSWLGLAPSNKVSGGKMLSSRTRRSGGRAAALLRLAAVTVGRTDTALGAFYRRLSARIGKAKAVTATARKIAVLFYNAVRYGMDYVDPGASSYETRYRTRVVNNLHRRAKAFGFVLQPLEPKVGAAVS

SEQ ID NO: 248212 - protein, 378 aa, unidentified
MKEISQTCNRKRHRKAARTLDGRVVIAAERVYSRTNREETDMKRYLGVDLHRTQITVCIRLENGRTYLRQWPMRELKLFAGQLHRDDEIAVEATGNTRLFYDAVVKHVARVRVVNPTQFKVISQSVKKTDNNDAELLALYLSKGLLPEVRMKDHEHRNLSHLAQTRDLLVKQRSALKGKINNLLSAEGINLKRETLSSKKALNRVLALPLPLILATEVRVLVDQILSLSGSIAQLEELIEEEGSKLAGHKNLISIKGIGPVSATVLLSTIGKIEDFAEPGKLAAYFGLVPRVQNSNETERSGHITKQGNKLARTALVQCSLIAKRYSPYLQKFYQRIQRRRGGRKANIALARKFLGVIYYTLKNNWVFEDFPNFVLAS

SEQ ID NO: 248213 - protein, 376 aa, unidentified
MSHFNDIYVGLDVHKATIAVAIVRGPRSPAHFYGEIENTPQAVANLVNKLSVDGEVINFCYEAGPCGYELYHQLQGFGHECDVVAPSLIPRKTGVRIKTDRRDAMALAKLHATGSLTAVWVPDKDQEGLRDLSRSREDFKQIETKTRQRLGAFLLRNGKVYGGKTKWTQAYWRWLETVTFDTATQHIVLQEYVEAVRDAQRRVLNIEGQIRQAIKGWSLEPVVQAFMALRGVSLITSFTILAELGDLSRFESPKQLMAYLGLVPSEYSSGNKRRQGALTKTGNGHVRRVLVESAWNYRFVARKTRDIQKRAEQTSEAIQAIAWEGQKRLCGRYQRLLTAGKLKQQVTAAVARELCGFVWAIACEAMGAAHGSRATA

SEQ ID NO: 248214 - protein, 460 aa, unidentified
MNKFYLGGDVSKGYCDFIILDENKKTALKSFQLDDTAKGHHFLNSVLIDFAAGHPGCAILAGVESTGGYENNWFESLWELQDRLEISVARINPIGTHHSSKATLNRVITDKKSARNIAEYIINYKDKIVFKKNDKFSSLRRQWKYVRILTKQRTQLYNQLESNLYNANPELLRYTKYGYPNWLLRVIMNYPTAKHLSKARAATLSSIPYLKETRAISLIEKAKNSVASATDNITGDLITSLIKQIISLTRLINKQSKIIADNCKLPEIEILKSFKGIGDYSAIGLILQIVSIENFSSTKKIASFFGLHPVWKESGDGTSGWRLSKQGSKEARNILYNVALTALRDNPLIKEIYARHCKKGMKKKKAIVACMHKILRIVYGMLKNNEKFNPEKDRTNSKKMLKNNLPEKKAINKLRRYQPVDSGAPISKRQYRKRKEQEKSQNEITSLNTGSVSHSSGAKT

SEQ ID NO: 248215 - protein, 421 aa, unidentified
MSNCTLSKKLVGVKPGTLFVGVDLALDRNVAVVLSERAEQLARFGFPNERDGYDYFYRRLEAIQEQQQAPAVLVGMEPTNYFWKLLAADMEQQQPDYGYRLVNPYTVKKNREGDHLDRSKDDNRDAFTIGDLLRTGKYTETQLLHGGYAELRQYVTLYARLRRDVRRQKTLIRNVAGQLFPELPCAFKDLASMTALAMLRHHAPAAVVRKMSQDAFIAGVRSDLPGQRVQVTKLRRVHVLAKRSVGLTDGVGALQLALRLHIEALEGLEQHLEEVYKVLVDAFLALPESAYLLSVHELGIITAATILSEIGDPSYYTNARQLVKLAGTQPVPNTSGRKSRSKTPMSHKGRPRLRTALFFAVMRLVQVDQAFARDYRHLQTRENNPLTKMQALGVLMNKLLRILWALMRNSTFYIPGFPGTA

SEQ ID NO: 248216 - protein, 343 aa, unidentified
MPHYVGLDVSQKATAICVVGEQGQRLWRGVCATDPAAISARLLRYAGVGAKVGVETGSMTPWLVHGLRSAGLDVQCLDARRVKAALQMRLNKTDENDAEGLAQVMRTGWYRAVHVKSLDAHRARALLGARAQLVGMTTRLSNMIRGVLKTFGLLPGAGRGLRFDRKVEALLEGVPELALIVRPLLATWRQLREQIAVFDKAVQQQVRTDPICRLLMTVPGIGALSSLMYVSTVEDPGRFSRSRAVGAHLGLTPRRYQSGETDRSGHISRCGDGLARTLMYEAAIVILHRVKRSLYLKDWAAAIERRSGSGKARVALARKLSVILHSVWRSGEPFRWVPQTAAA

SEQ ID NO: 248217 - protein, 352 aa, unidentified
MQFYIGVDFHAHQQTVAWCDKRTGEVRTLDLVHNLEKVREFYTSLPEPATIGIEASSRAAWFENMLFEIGHKLVVGNPVLIRKRAASRHKNDRRDAELILELLMRGEFPALWRRPPQSNQILEILRLRSNLVRQRTQVYNRLQALAHNAGLPKGRIRTAFFQSLLKAADIDETGALARAHYFRLLDSLSNQIDELQEWLEKKADNVPVKLLMTQKGVGCLTSLTVVHTLGDITRFTKVSKQVVGLAGFDSLEDSSAGRVRFGRISKAGSALLRFQLGQAAQIAARYDARLKGFYKRLSKKKPKAVAKTAAARKLLVKLSIMLRDNITADEFDRRGRTVGNARLNAGSEMTVL

SEQ ID NO: 248218 - protein, 412 aa, unidentified
MKEALRRVGIDWGSESHQACRIDGEGEPTQRVFPHTSEGMRALVAFVVEGEIDPEQIAIAIEVNHGAVVEALLAKGLRVYSINPKVLDRLRDRFSPAGAKDDRRDAFVLASCVDSDAHAFRKIEPGNEGNTRLQAATRLREDLKSDLRANANRLWNELREYRPALLTLCPGADEPWLWVLIEKAPSPSEGAKLTRARIGAVLKKHRIRRLTAEEVRTVLLGDVLSLRSVYIESHVACALVLIARLKLAQTQIANVEKQIKTALAERVKSEEQTERRDLTILLSLPGFGSSTVATALGESGDAFERRDYSALRSICGAAPVTKQSGGTRYVVMRQVCQPRLRVALHLSALQAIRVDPKFGDLYLRARARGQTVGRAIRNIVDRLLFLAIQLLKKNQLYDIRLRQIAPEAVAAP

SEQ ID NO: 248219 - protein, 402 aa, unidentified
MIGIDPHKGSHTASAIDQAETALGELRVRSGADQLGRLLGWAARWPERIWAVEGASGLGYLLAQQLVAAGEQVADVQPKLAARVRLLATGATNKNDPNDARSVAIAALRSPAVRKVSAENHAAVMRVWARRHRDLGSARTQVACRLHAVLCALVPGGFAGEISAARAAGLLDELQPDGAVAAARCDLARQFAADLRRIDEQMRDIRKRLAAAVTASRTTTTQIFGVGPVVAAIVIGEAGHITRFASRDHFAACNGTAPVEVSSGPRKIYRLSRRGNRRINHAIHMAAVTQIRHRHTDGRAYFERKLAEGKTRKEALRSLKRRISDALFARLQADARQAAGTVSAGPGGQPGNDSVASAAGSHPEHRLFGQATPGPDSTLRPRPDPQTGKTRSRATRKTDRTS

SEQ ID NO: 248220 - protein, 392 aa, unidentified
MYPDQHPHGAGTQEVKTFGTMTRDLEALSAWLTAAAVEQVALESTGVYWWPVFNLLEEAGLAVTLVNPQQVKGLPGRKTDVGDAVWLADLLRHGLVRASFIPPADIRALRELTRYRASQVRARAKEVHQLLKTLESANLKLASVATDPVGVSGRQMLAAVAAGEEDPETLAQMAKAGLRQKLDDLEQAFIGRVKPHHRTLIHAGLDHLRFLERTSEHLEQEVARAMAPFAAQVAARAAVPGIGDVAAAAIVAEIGVDMDRFSTDAHLASWAGLCPGNKQSGGKRLSSATTQGNVWLRRILGEVAWAAIRQRDSVFRARYYRLKPRLGAQQALVAIMHQLLKVIYHSLKTGEPYRELGADYYQPADPQRTARHLTNRLERLGFTVTLSPAPAA

SEQ ID NO: 248221 - protein, 341 aa, unidentified
MSDFSYFCGIDLAKNHFSLHAVDQNGKVILHKSVTRSKLLTTIANMPLMRIGVEACGGAHYWARTLNKLGHDARIMAVKYVVPYRTKGKNDLNDAVAICEAVQRPSTRFVPIKSPEQQAILSVHRIREHWVRERTALMNRIRALLSEFGLIIPVGRSSLMKLVPLMLEDAENELPHLARTVIADAYHHLGELNQRIADTEQVFDSFAKVSANVQRVMKVRGIGPQTATAILASIGNGSQFDKSRDFSAWLGLVPKQYSTGGKPRLGRITKHGDKYLRTLLVHGARTVIANLGDKQDKLSQWCRGVLERRGMNRAIVALAAKNARIIWSLLHNQTEYENYAA

SEQ ID NO: 248222 - protein, 425 aa, unidentified
MKTTTTYAAFVGLDWADRSHQICLRAAEGPRDEQSKLVHEPLALHTWAHELRARFPEGKIAVALEQTKGPLVYALSMHAHLELFPINPAMLAKYREAAKAASGTKNDPLDAALLCELLRVHRDWLRPLPAVPAAVRGLQMLLEARRGLVDQRTGLCNQLTAALKGYYPQALVLVGHDVGAPLTCAFLRRWPTLSAVQRARPETLRRFYHAHQVRSEERIAERLALVRAAVALTDDAAVLATLPVQVAVLVAQLEVLAPAIADYDRRIADAFAMQADAALFESLPGAGEQLAPRLLVAFGPDRTRYPSALQLQQYSGIAPVQQQSGNTKITHWRWHCPKFLRQSFHEFAGCSVPQSRWAKAYYDEQIERGKPRHRVLRALAYKWQRILFRCWQNHEPYDEERYLAALRRHHSPLIARIDSTCADAA

SEQ ID NO: 248223 - protein, 316 aa, unidentified
MSMNPTPVYLGIDIAKDTLEGAGPGLRLPVPNTAEGHAQLLAAARALRTPVHFVCEATGGYERRLVASLLAQDCAVSLLNPARVRQFAKATGRLAKTDRIDAELLAEYGRTLHPPVEPKPVPLLAELTDVVRRRAQLAELLGLQRTQRQQLYDVKLIADLDRLIGFIEQQIAALERRLDELIDKDGGLGSRLQQLCQVAGVGKTTAMHLLAELPELGRLNRTRIAALAGLAPFNRDSGGTSGQRHIRGGRAQVRRALYMAALTATRCNPVLGPFYRQLRARGKGHRVAITAVMRKLLVHLNQIVRTPEVMLASQHS

SEQ ID NO: 248224 - protein, 315 aa, unidentified
MTQARVLVGIDVSKARLDVHLHPRGEAFVLANDRAGWRALVVRLRKLGSIAVGIEASGGYEKGPAHHLVRAAIVVYVFDPAQVRSFARGLRRHAKTDPIDAAMIARCLEATIEDAIPYQPDPLAQRLAALVGYRAKLVAEGTALKGYQDTLEEPLVRRMVEARRVGLKLVIARLDKAIADLIASTAVLARRYRLLVSVPGAGPVLASTLLALLPELGRIGAKAIAALVGVAPFSRQSGNTDRGGRCRGGRGAVRAVLYMAALSAIRCGNPALARFYDRLRRAGKPAKPAIVATMRKLITILNAIARDQRPWAPQP

SEQ ID NO: 248225 - protein, 402 aa, unidentified
MNSVGIDISKGRSTIAVMRPFGEVVISPFEVRHTDSELSKLARQLKSLDGETRVVMEATGNYHAPVAKLLHDAGLYVSVINAKLVHGYGNNELRRVKTDRKDAVKLANYGLDRWLTLPRYIPEEDTRLLLKNCYRQYRQYSKVQTVLKNNLISLLDTVFPNVNRLFSSPIRGDGSEKWVDFVAEFWHCRCISGKSERAFTNKYQQWCRKHGYNFSEAKAHTIHAEASGHIGVMSKSETTKLLVEQAVAQLRATSAALTALKREMLTLAVQLPEYPVVMGMFGVGPTLGPQLIAEIGDVRRFYSKKAPVAYAGLDAPPNNSGDATGKHKSMSKIGASSLRRTLFLVMSVYLQNAPLDEPVYQFMDRKRAEGKPYRVYMMASANKFLRIYYATVKAYLESLEQV

SEQ ID NO: 248226 - protein, 347 aa, unidentified
MTIMVDTQRALTGGVDTHADVHVAAVIDPDGGLLGVESFATDLVGYKQLSDWMGTFGEIGLVGVEGTGSYGAGLARHLHREGLVVVEVDRPNRQERARQGKSDSLDAIEAARAALSGRAFGVAKTRDGNVEAIRALMVARRSARESRTKAINQIRQLVYTAPDELRERFVGVPSWRIAEGVAILRVHADADPVRMATKSALGTLGRRAVSLGEEGKRLDALIARLVDKVAPELVELVGLGPDTAALLLIAAGDNPSRLRSEATWAKLCGVAPLEASSGKVTRHRLNRGGDRQANHALWRIVITRMACHAPTKVYVARRTAEGKSKREIMRVLKRYVAREVYHYLPRD

SEQ ID NO: 248227 - protein, 316 aa, unidentified
MSDLVYVGIDVAKDSFDVASDPAGLTLSLPNDPTGRQQLLDALATHTPALIVLEATGGYERGLVADLLHAGQKVVIANPRQVRNFARGIGQLAKTDRIDAQVLARFARMVQPKPRPQPSKQTAHLAELVTRRRQLTNLLTQESNRLPMARHAKVRKSLQKIIRALEQQIIDLDKIIRDDIASDDGLRHKDEILQSFKGVGPGTSAMLLSHLPELGRLNRQEIAALVGVAPWDIQSGQWAGKSRIWGGRKEVRGMLYMAALTAIRSNRAIQTFYQRLESHGKAFKVAITACMRKILVILNTLVRNDCLWSPQPAKNA

SEQ ID NO: 248228 - protein, 319 aa, unidentified
MAKKKSKCFIGIDVSKQQLEVAVHESDCQFRCANKVNAFGKLIVELIDWRPALVVLEATGGLEIPVVSALQAAGLPVVVVNPRQVRDFAKALGQLAKTDRLDARVLAHFAAAIKPPLRPIKSKEEQELAALTGRRDQLIEMLVDEKNRRTSAASDTVREQIKEHIDWLEECIAELDEQLKGLLQSSASWQAKDDILQSVPGIGPVVSFSMIADLPELGTLNRQQISKLVGVAPLNRDSGQQRGTRHIYGGRAGLRRVLYMAALSATRHNLVIKEFYERLCAKQKPFKVAITACMRKLLSIINVMVRDNTCWRSPQTVSA

SEQ ID NO: 248229 - protein, 395 aa, unidentified
MFIVGIDIAKRSHEAIIIAEGGQVVRKAFSFRNNCTGYNLLLEQVRRLTLVKSQIVFAMESTAHYWLALYARLLKDGYTVMVLNPIQSHSLRELYIRKAKTDARDSLVIADLVRFGRCKASNVPQDKILALRELCRSRAYLVDMAADLKRKLIALLDRIFPEYESLFDSVFSKASIAVLSKYSTPQKVKNANLRKLTDLLMENSNGHFGEWKAHQLKEAACSSFGIDDSGGVYSTLLGMFLEQILSLTAQADSLEKQISVFFQEFNNPLTSIPGVGTVLAATILSEIGDITRFSSADKLLAYAGLDPSVKQSGEFKSNQNRMSKRGSPYLRRAIWLASTVAVHRDPMFQTYYEKKISEGLHYMNVIGHVSRKMTAVIFAVLRDGQPYQPILQSAG

SEQ ID NO: 248230 - protein, 474 aa, unidentified
MVHSVGIDLHQGRHRARCLDDRAQPCDSFSFQTTPEGLATLEERIFRDGANPIIVLEPAGLPWLMVAVYLRSRHPDCWLVKAKTQKVAALRRYLRGPVKSDRLDALTLAKMPFIDPEQLDEIYLPPADVHALQRLNRQRKRLEDDVTGHKVRIGAIIDGYLPGIHRAFNNIWSSQARAFLRSRLNPFAVVRDGEESLHAFLSKATLWGKWGRAETRLVFLACQSVASVCEFSRPAGTVNEEFFQDLQDEIARELRLMEAEEAESESLAHRIAELYRKLHPSDNLRTIPGVGEHTAPVFLAAVGDPARFPNQSAFANWGGVVPGARQSSNVEAKGLRMTKAGPSIMRMALYQAGDIGRRWDPQLAAVYYRQMVYHGKNHRQAMGAVMSHLGARVLRVLKEDRPYELRDTEGKPISRDDARRLILSEYRVPEDIRRERRRRNPVKSRKKEREMATYRMNEAAKAPQPVPVQAVSRK

SEQ ID NO: 248231 - protein, 345 aa, unidentified
MTVYIGVDFHPYEQTVAYCDERDGEVRYRQFLHSDKQSLKAFYRKFGDEVVVGVEATGCLWWFEKLLFENGIKVKIGDPRLIRRAALSRHKNDFRDAETILDLLVNGSFPEITPRSERSREMLTMLNHRHFLVKKRTSIANTLQAFARSKGLDKFRLQTLKRQKELLDAVSTDMERLIVISRFSLYNELSKEIAAFDAKLAEEADKDAKTRLLMTHPGIGVVTALALIHTLGDVRRFRRKEEVVAFVGLDPLEKSSGEKRRIGSISKHGSRLTRHLLGQAAQTCRDHGIKAHYLQVSRRRGRPKAKVAAARKLLINCYVMLRDNISYEQFATGGAKLACARGQER

SEQ ID NO: 248232 - protein, 383 aa, unidentified
MTRQQACRIDQVPRPWTLPFKTERYLRPCSNSESAFTRKVLGGYHPFTEDSPLANIIGIDVSKLSLDCAYLRDVDQHKAKRKRVTNNPEGFAALLSWAQTVSGVCVSEIRFIIEPSSIYHELLVQFLDQRHATICLVNPGRVRKFAQGMGILSKNDLIDADMLTRYGLLNRKLMAYQAEAQEIGDLRSLLNRLDSLERDLRRELNRQEKIGRSSVLHRFEKQSMQRCVKRLKAEIVLFKKHIRKMIRFSTLLKKDYDLLLSIPGVGAKTAWVMIVVLGSRQFDSAVQVASFLGLNPIEKQSGKTRYRRPRLSKAGNGRFRQALFFPAMVATRKNPDIKAQYERLLEAGKTKMCALGAAMRKLVHICYGVVKNQRPYEHRTQQA

SEQ ID NO: 248233 - protein, 362 aa, unidentified
MTEITRAPVARVGVDLSKRVYQVHAVDAGGRVVMARALPTDRFFAWCTELPHGCIVAMETCGGAHHVARRLRLLGLDARLIAGHFVTPYRMAGKSGKNDVNDAAAICEAAGRPHMRFVPVKTTEQQGQLAVHRLREGFKEERTALINRIRGLLTEFGLVFAQGPDALHLVLASVIEDASNELPGVARLVLQRAHLHWIDIELQIAWCDERIAAHVRADARATKAASLLGIGPTTASALVASVGEFGQFVNARQFGAWLGLVPSQNSTGGKARLGGITKRGDDYLRTLLIQGAKSAVMSAAKRSDRISQWLVQLKERVGWQKAVVALANKNARILWAVLTRDGVFDPDHVPQIPAARQKPQPA

SEQ ID NO: 248234 - protein, 384 aa, unidentified
MNKHSILFIGLDTHKEFNEVAYIEEHRGAQPVHLGRVSSSKVAVQKLVRQFESKYSGATLHFVYEAGPCGYWIYRLITSLGHCCYVVAPSLIPKKPGEKIKTDKRDALKLAKLLKSEDLTPIYVPEPEDEAVRDLSRAREVAMKDLKDAKYQLKALLLRNNINYKGTANWSQKHLRWLTEIVLPHTAQHIVLQEFLHTITERISRLERLDNELTHHVHQWRYYPVVKAIQAMRGVRLLVATGVVAELGDLSRFDHPRKLMSYLGLVPSEHSSGGKRHIGAITKCGNGRARRLLVEGAHTYRYAANISTDMQKRQEGLPKDIIDIAWKAQIRLCKRYKKMIAKGKHYNLVVTAIAREMIAYIWAIAKEVVLTPVNTKLRLARVPA

SEQ ID NO: 248235 - protein, 338 aa, unidentified
MNYLGIDVSNAKLDCALLREAGTAKRLDKTFTNDAAGIKALLAWLDSRLNNNNAGADAACDKARVHVLMEPTGVYHERAALWLFEAGLSVSLVNPARLRSYASAIGVVSKNDRLDSAVLARYGAAEKPDPWQPPSMAAQTLNALLARREALCQDIQREENRREKTNYALNTPAPVVDSIAQTLVFLERQLAALEKEIDQHIDRDPTLKHNDQLLRSINGVGPRVAQRMNALMSSHRFQSAEALAAYIGLTPCERVSGSSVRGKTRMSKKGPAQLRHLLFMPAIVAKKHNPHVKAIYARLIAKGKPKMSAIGAAMRKLVHLCFGVLHSGKPYSPGWKHA

SEQ ID NO: 248236 - protein, 318 aa, unidentified
MASGIGVGIDVSKDTLDVATSDESITLRVSNDEAGFATIIEAMRQVVVHRLLLEASGGYERNALIALFEAGLPVVLVQPLRARHFARALGRYAKTDQIDAATLARMALLAVDDVPLWAPTEDALADLKALVDRRHSLLTFRDAEEKRVRLARPIVRDHIKAAVADLTVKVRDLERRIDALIAEVTSLAAQVEVLEAVTGVGRISAASLLVTIPELGTLTREQVAALVGVAPMNRDSGAWSGARFIRGGRARARQSLYMAALAGTLWNPIIRERYKLLVGKGKKPKVALVACMRKLLIHLNSLMRSYKNGPTKSALQLS

SEQ ID NO: 248237 - protein, 402 aa, unidentified
MPMLSIGIDVFKGKSTVCGMKPGGEIVYTPFEVQHTREGMSELVSLLHNSGEEVRAVLESTGSYHCPVVAALLENGIFVSVVNSLRMKRFCSQSIRKVKTDRIDAMQIALYGLAYWQELQPAKLPEDTYRELQLLARQYYQMTSILIKAKVDFNAICDQVLPGMQELMNDHAGRRKLSDFVLRYHHTTHILEMGETRFRKDYCKWAEKKGYRNCERMAALIFATAQNGIPVLPNAPSTQIVITEAIRVLHTVEASRDAILTQMQALAKTLPEYSLVREMPCIGDTLAPRLIAEIGDVRRFHSKRALIAYAGIDAPPYQSGKFCANNRHISKRGNRYLRKTGYEVMQSYVMHKPANDPIFTFIEKKRGEGKSGKLAMVAGLNKFLRVYYGKVTELYRSLPAIE

SEQ ID NO: 248238 - protein, 277 aa, unidentified
MVETKFVSLDVHKDTVAIVVVNEQGDSLIQSVVATDAGIIRDFLLGLSGKTHITFEAGTQSNWLYRETNSIVEKVVVCNPRHNKLLMVGNKSDLTDAEKLAQLLRLDSLKAVWQHSSEQLQLKELVRTHENLVSDCIRVMNRIKAIYRSRGIRCSGSSVYSPAKRGQWIAKLSEPGSVFRAETLFAELETLTGLRKQAKKKMLRQAGRHQDYKRLCTVPGLAFISVSRLLAIVGDPFRFQTKRQFWKYCGFAVTTRSSADHLFVGGNLQKRIKLHNK

SEQ ID NO: 248239 - protein, 358 aa, unidentified
MNTIAVGWDLHRKFSQVSLQRREDGGEIRVVERARLEHDDLPKLRGWLQKLPAGTPVAMEGAFGWPWVADLLTGLGLDPHLGHPPAIKVLAKNEAKADRCDSDRLGRFWLKGIFPESYLATPEVRQIRERLRYRAALVGIRTGVKNRIQAILHRRGVLHSFSDVFGKRGRAWLDELELPVAAREVLSGQLRLIDLLDELIAEVEQWMMQNLEEDSVVQNLKTIPGIGLILAHVIRAEIGQLVERFPNVKHLVSYAGLAPLSDDSADRRGRRHISPVCNHTLRWALIEAAGPVTRSRKPPERLIKLYLRLSLGGRANKNQAKVAVARELCQLVYVIWKKGEPYREHPPARPGTQQRVAK

SEQ ID NO: 248240 - protein, 411 aa, unidentified
MSAGVITAVGIDVSKYKSTVAARRPGGEVALLPFDVGHDVTGIKNLLEKLQGLDDEGSEIRIVMEHTGMYWRPVALALQQAGFFVSVVNAILIHNFSDNSLRKVKTDKADALKIANYGLTFWMDLREYSAEDETRQMLKIQNRLYERTTTTGTMLRNGLISLLDQTFPGANKLFLNEGRNSKGHVKWVDFVIRFWHKECVAALSLHTFAGTFQKWCKRTGYRFSTSDAERIHTAARNAVATLPKNDSTKLLITQAAISLNTVYDSLHAFRTEMNRLASLLPEYELVMGMEGVGKITGPQLMAEVGDVRRFSHKGALVAYAGVDAPPYQSGTFDAKNRHVSKRGSPHLRKVLFEIASMILVHGNPDNSVFCFMDKKRAEGKHFYVYTVAGAAKFLRIYYARVKEYLNTQEIA

SEQ ID NO: 248241 - protein, 337 aa, unidentified
MKFYAGIDLHSSNNYIGVIDETDKRVFGRRIDNHLPCVLSALEPFKKNLDGVVVESTYNWYWLVDGLQENGYKVHLANPAAIKQYEGLKYTDDKWDAFCLAHMKRLNILPEGYIYPKDLRPVRDLLRRRSLFVHQRTSQILSLQSMITRNLGIRISAQNIRKFGLDRMDQINDVNQAFLIENQLGTIEHLDKTIKGMEKQVLSQVKLKEEFRLLQSIPGIGTILALTIMLEVGDIKRFKKVGHYSSYCRCVKSEKTSNSKKKGENNKKNGNKYLSWAYVEAANFANRFSQEAQRFFQKKQAKRNRIVATKALSNKLCRASYYIMRDQVPFDEAKLFC

SEQ ID NO: 248242 - protein, 340 aa, unidentified
MNTTHVAVDLAKSVFQVAVSNTPGRIDEQHRLSRARFQRFFAEHQPVEVLMEACGTAHHWGRELTALGHTVSLLPPADVRRYRDGDKTDRADTKAILEAARNSAIDSVPVKTIDQQAITALHRLRSGYLATRTARINCVRGLLREFGVAIPVGARHLAPRAREAIEDGSVPAYLEPILLDAVTEVEELRRKAADIETQLKRLARHMPDATLLMSVPGIGVLTATALAAYVGDVRRFRSGRHFAAYLGLTPREHSSGLSRRLGRISKRGNSYLRMLLIHGARSVLRAAKLSEHPDGLRAWALAVECRSGHNVAAVALANKLARITWRVWRDHRSFEQRLNS

SEQ ID NO: 248243 - protein, 360 aa, unidentified
MASPTLTQPEGADHPDVVIGVDTHKEFHVAVALAPNGGRLGECSIPANRQGYGVLQDWALELGSRPVFAVEGTGSFGAGLCRELLAVGYSDVEINRPDRSTRRRLGKDDAIDAEAAARSFVASTATIAPKGGTHLVEMIRLLKGNKDSASKSRTRAINQIKAILVTAPAVLREQLEPLAHDVLMATSSAFRVPLVDSPMAAAKKALRFLARRVLRLEREIDELLNDLDQLTQQACPGLRQTYGIGTDGAATLLVTVGDHPERLRSDAAFASLCGVSPLPASSGKTNRHRLNRGGNRQANATLHRIVVVRLRWHEQTKAYAARRLKEGRSKAEIMRCLKRFIAREVFHTLLGRPPVRTTAA

SEQ ID NO: 248244 - protein, 318 aa, unidentified
MANQVAVGIDISKKTMDVAIGHEQSTAIFSNDGAGHQALIEVLKSHQVSLIVMEATGQYQLACACALQAAGFAVVVINPRQARDFAKAMGRLVKTDSVDARMLAELAQVLNLRPDRDRFIKPMPDQAQQYLHALVLRRRQLVRLLVSERQRKHMAHAEVVQDIAELMDMLSTQLETLDRKIAEHLAQHQSNLAALLKSVKGVGPATAATLISELPELGQLKAKQICALVGVAPMNRDSGQARGKRIICGGRATVRSALYMAAIVAMRYNAVIRQYYERLLAAGKPKKVAIVACMRKLLVIMNAMVKTGQPWNEPLAPA

SEQ ID NO: 248245 - protein, 360 aa, unidentified
MDVHKNSIAIAIAEEGRQREVNFYGVINNDMDQLHKFLRKQISQGAEPRCVYEAGPCGYNIYRSLSEKGIDCVVVAPSLIPRKSGDRIKTDRRDSETLAKLHRAGELISVYVPSLEDEALRDLVRAREDSVNALKRVKQQLGAFLLRHHIDSPVKSKWCKSYFNWLAGIAMPHPAQQITLQEYIETVYDCKQRVERISEQMRQLSKQTRLYGLNKSLQSLRGVSEIVSAVVVSELGDLTRFDSPAKLMAYLGLVPSQHNSGDKKRTGSNTKTGNGHVRRALVEAAQAYRLPARKSRCIVKRNEGLPQEIRNIAWQAQVRLCSRYKRLVYRGKNSNLVKTAIARELAGFMWAIAHKVPNTV

SEQ ID NO: 248246 - protein, 359 aa, unidentified
MPKSLLVRARRSPPCATIRSLRSIWQKSIFEIAVSSEPGKFDERHRLSRQRFLDFFVNRPAATVLMEACSSAHYWARKIEGLGHRVMLLPPHQVRPYVLRNKTDRTDTKGMLEAYRNEDIRPVPIKTLEQQTVGSLHRLRSAWMDERTAKINTLRGLLRELGLVIPVGSQNVVPRAWSFIEDADSGIPDALRPLLAELGEEIRELERRTKMVEHQLEALADSSPAIEGLRTIPGIGLLIATALFAFVGDPHRFPSGRHLASYLGLTPREYSSGSRRQLGRISKRGNAYLRTLLIHGARAILWHAKSMKQPDRLRVWALRLEATAGHNKAAVALANKLARIAWVVWKNERTYESVVVPAA

SEQ ID NO: 248247 - protein, 413 aa, unidentified
MNDQKRWYAGVDWASESHHVRLIDEQGRDVGEKIFKHAGEGLAEMVAWLLATSGAAEPGQIDVAIEVPHGPVVETLIERGFAVHALNPKQMDRFRDRYSMAGAKDDSRDALVMASALRTDPHCFRKLAATDPTIVELREWSRIAEDLGGERTALTNRLRQQLWRYFPAFLDLDADLGAPWLIELWQAAPTPDKARRIRKASIDGILKRHRIRRLDAPQILEILRQRPLAVAAGTTEAARAHIVTLIARIRLINRQLAEAHHQLDTLTARLGAAEEAEPGQIKQRDADILASLPGIGRIVLATLLAEATDALQRRDYPALRTLTGVAPVTKRSGRSHFVVRRHACHRRLANAVYHWARIATQHDRTSRAKYAALRARGHSHGRALRSVADRLLNVACSMLKTGTTFRPAFANPK

SEQ ID NO: 248248 - protein, 322 aa, unidentified
MNTMVMPLGIDVAKAKLDCALWLGTKYRTKRFANTPEGSAQLNDWLHRHGADRVHACMEATGIYWEAAALYLADAGQRVSVINPALAKAHGQSLGLRSKTDALDAKLLADFCREKQPPAWTPPSDAERRLRALVLRHQSLVEMQTQEKNRCESLREDVRTSVETHLAWLASELERIEQAIAKLLDDDDHLRGQRELLASIPGLGERTIAVLLAYGVNGERFQSARQFVAFAGLSPRLHESGSSARGKPRLSKLGHAFLRRAPYMPAMATLYKTAWGKRFQQRLATHGKPPKLIIGAMMRKLAQVAFGVIKSGRPFNPVLHGA

SEQ ID NO: 248249 - protein, 368 aa, unidentified
MGKSSKLYVGMDVHKDSIDVATGDDAAGEVRHYGAIGGERVAVSRLARKLESTGKVLVFVYEAGPCGFGIYRMLRARGHECWVISPGMTPRSNADRVKTDRRDCLKLARLARAGELTPIHVPDEIDEAMRDLVRAREDAVVMQRQARQRLGALLLRNDIRYNGKTLWSPAHRRFIAELKLPHPAQHIAFEEYAQGVDEAGQRIERLEAAIGDELTRWRWRPVVEALQAFRGIRTIHAVRLVAELGDLTRFANPRHLMGFLGLVPSENSTGNRRRQGAITKTGNSSARRALVEAAWAYRYGARVSVGIARRQSGLPKPVTDLAWKAQLRLCSRYRRLSARGLNRNKIIVAVARELSGFVWALGQQVKPL

SEQ ID NO: 248250 - protein, 406 aa, unidentified
MHKSFLVATIIKTPQDSLQPSYQKKRFSTFNSDLNRFADWLHENDCLDVCMESTGKYWVPVFNILEKRGIRVTIANPKWVKAVKGNKDDTKDSKWIGDLFRIGLVKSSFIPNKDIRILRELTRYRYKLTSMKSSEKNRFQNAFTVCNVALDSVVSDMFGKSATAITDYLTSDEDFDPQHCVSLLHRSLKKKAEDVLSSIEGYEITLEQKCRIGIVRDHLHYIEKLIERVDICINTMVEKYDGAISLLRTIPGIDRSSAITVISEIGVDMAQFGSSKRLCCWAGLTPGNNESAGKKKSVRISRAGVYLKPVLVQVAHAAVKDKLNPYYALKYERIAKRRGKKRAIVAIARMILTAIYSMLSTGEIWNPVDLFKVDMPEHLKEQQLQKAMKQAVRFLEAQGLTVLDSA

SEQ ID NO: 248251 - protein, 371 aa, unidentified
MNTIVYVGMDVHKESYTLCCYCYDTDLVEYRQTIPADYRLVLKYMERVRDRYEGDITFVCGYEAGCVGYSLYHQLTDHAVDCKILAPTTMAITNTNRVKTDRKDAANIARCLAFHTYSEVYVPDEQDNQVKEYIRMRDDQKLALKKVKQQILAFVLRQGKRFEGGKTYWTIRHMKWLYGLELAPLDKETLSEYLITYEYLVEKIERLDRRIEELASEERYREKVKKLGCFMGLQTHTALSMIVEIGDFERFAKAQKFAGFLGLVPSEDSSADDINRYGITKAGNRHLRRLMVEAAQCYTRGVVGHKSVALKKRQEGCSPEVIAYADKANERLRRRFYRLTLHNGVNRNKAATAIARELSCFIWGMMTDNVA

SEQ ID NO: 248252 - protein, 353 aa, unidentified
MRTYYVGMDVHRATIAIVVLNGAGKVVEQLVVETSATRVRCYLKQLQGRVYVTFEEGTQAQWLYDVVQPLVTEVIVCNPRHNKLLKAGNKSDRIDAQKLAELLRNGALKAVDHRDHGVRALKELVRNYDCLVSDTTRVMNRLKAMFRQQAIACGGHEVYRQDRREVWLAKLTERGAKARASSLYRQLAALKALRHEAKLAMVREARRGAAYLWLMSVPRLGAVSVAQLLAVVGTPHRFRTKRQFWSYVGLAVVTSSTADMEVVDGVLRRSRRPVATRGLNRNHNHLLKRVFKNAATSACQSAPFKQHYERRLQQGMDPALARLTVARQLSAITLSLWKRGEKFQAERMKRPAV

SEQ ID NO: 248253 - protein, 459 aa, unidentified
MSQRKKTKGKSKGGARMLPVLHPDAAGIDVGAEEVFVAVPPDCATEPVRSFETFTRDLYELADWLQSCGIRSVAMESTGVYWIPLFQILETRGIEVFLVNAQHVKNVPGRKSDVSDCQWLQYLHSVGLLKASFRPPDQICVVRSLWRHRESLVQMAAEHTMHMQKALSQMNLQLHHVLSDITGLSGMRILDAILAGERDPVKLAALCHGRVRSPRETVAKSLEGDYLAEHLFALRQSLAGFRFYRKLMGEVDQELEIVMRQLPRAEGAPDQMPPRTKKCFYQKAGNEPAFDLKAELFRISGVDLTDVPGISTITAHTILIEVGPDLSRFRNASAFASWLGLCPDQKVSGGKVLYTGSRKVKSRVAIALRLGAQCLYHAKNYLGEYYRKMKWRLGAPQALTATAHKLARIVFHMLLTKEPYNESVLVKWDQQANMRAESRLRTQAAKLGFQLAPAAEPQA

SEQ ID NO: 248254 - protein, 347 aa, unidentified
MGKSITDLSSVTIVGLNPVKHVFQVHGVDASGRVIVAKALQRKDVLAFFTQLPECLVGMEACGSAHHWARELIKLGHDARMVPPAYVKPYVRRQKNDAADAAGICEAVTRPSMRFVGVRTLENQAALMHHKAREMLVAQRTQLINALRGHLAEIGVIAAQGPKNARELAGVVMAEGDDTIPACVHAALAPLVRQLHALDQEIARSDRTIAAMARGDEMARRLMTIPGFGPVTASAMAASVQDVSAFSGPREFAAFLSLTPRQNSPSGKERLGRVSKMRNRYLRKLLVVGAHAILYHRKPHEDALRSFAKKLIQTKPFKLVAVALANKMARIAFAIMRGKTTYSAAPA

SEQ ID NO: 248255 - protein, 356 aa, unidentified
MNNLSKLDFTGQPIFIGLDVHKQSWSVSIHSQQCEHKTFTQPPKVDVLMHYLQRNFPGASYSSVYEAGYSGFWIHDQLREKGIPCLVVNPADVPTKDKERAKKRDRIDCRKLARSLRSGELEGIYVPCRSKLEDRSLMRTRQSMVQKQTRCKNQIKAMLLFYGIHLSEEQVKSHWSRRFLEWIESLRMERSSGDLALQVHLEELRHLRQILATLNRGVRELAQTEEYREWVRLLKTIPGISTLTAMILLTELIEVCRRFSSLDKLSSFVGLIPDTQSSGETEHTGEITKRRHGRLRALLVEAAWVAARKDPALLRAFEGYCQRMRKTMAIVKIARKLLNRIRFVLKNHKPYVPAVV

SEQ ID NO: 248256 - protein, 341 aa, unidentified
MEEYIGLDVSMKETAVSIRRAGERIWRGKCASDPGILAELIRKRAPAVKRVVFETGPLSVWFYHSLRAEGLPAICIDARHAKAALDMAANKTDANDADGLSQLAEVGFFREVRVKGFDSMLTRTLVAARTRLVRITTELSNQIRGVMKTFGLLVPAGKGSTFEKHVRSLLANQDALASIVLPMLEAWRGIRVRAAELGRQLVRDARQSRACRILMSIPGIGAITATSFTTAIEEPGNFRKSRSVGAWIGLTTRRYQSGEVDYDGHISRRGDHHLRGLLYEAAAVILTRSSTHSTLRTWGLQLRKRIGFKRAAVAVARKLAVIMHTMLKTGELFNPNAGAAA

SEQ ID NO: 248257 - protein, 428 aa, unidentified
MNIEETIRRQQFCQIKDEIRGSDHYLIVGIDVAKDKHHAFMGSATGKSLLRKLIFENNLDGFRMLLERSDAAKTQNALSQVVFGMEPTGNYHKPLGAYLIRCGHHVVLVTGKAVKNNRELLDGRWDKNDDKDAANVADLVSRAKCLYYDYPSSSINDLRQLLSLRRRLKKEEHSLRMRIRNNLLAQYFPELDRFYSACESESLAIVRWCLDPGRIAGMELDEFFTMVTTTRRGIAQKLRLQKIHRLSVQSIGCPMGPAAELEAQLLVEKLKEVRRQLKQIADQMEDICLQFAEYNWLLTIPGFGPYISARVLASIANPWRFDNSSQLLKLAGYDLGANRSGKRSDDAVPVISKRGNGELRYALYQAAHVASSHNPDFIRYYTRILRGRERERGIKTKMKVKLAAKMLKIAWTLMKKQEVFNPDHLIID

SEQ ID NO: 248258 - protein, 436 aa, unidentified
MTLINFVAANQKYYAFNLLSVFIMVFWSVQYLLQHLLVQTQVSHQLLQPLILILQLPQTPQFRHARPGKFFLPVNGMDYFLPLRLTVRNVLTRRITMNIVFLGIDLAKNVFQLCGLNQAGKPVYTKRTGRKELLQTLANIPACLIGIEASTGAFYWQREFEKLGHKVKVISPQYVRPFVRGQKNDGNDAQAIVVALMQPTMQFVPPKSPEQQDIQALHRARQRIVNHRTATVCQIRGLLLDRGIPIGSAVSRARRAIPLILEDAENGLSSRMRRTIAELYDLFNDLGRRIHFFDKEIETVFRQSEACPRIAKVKGIGPKTATAVVAAIGKGTEFKNGRHFAAWLGLVPRQHSSGDRQVLMNMTKKGDKHLRTLFIHGARAVVRVATNNNDGHMNQWVNQLKERRGFNKTTVAVANKNARIIWSMLRNDTGYQVVCN

SEQ ID NO: 248259 - protein, 438 aa, unidentified
MIQRILVGYGAIDIGQEKIFLACSGEETVRSFGTFSAEFELAANYLVQRGIRRVAMEATGVYWIPLHDLLEKKGIAVTVFNGAHARNMPGRKSDVQDCQWHAMLHSHGLLVSCFIPPEEIRQLRCYYRLREDHLSIATEHIQHMQRALDLMNVRLHVVLSQLHGVSGLRVIKAILAGERDPVALSELCDAQILKHKRAEVIESLRGHWQEHHLFALGQALESYEFCLRQMVACDRQIEALLQRMTQDQPPQTPAAGQKVKVVRHNAPQIEGLHRLLITLTGGRDATVLPGIAPLGFMKLIGEIGTDLSKWQTAKHFTSWLGLSPGSSQSGKRRKRLPRKKTVAGQIFRQAVMSIAKSKHLALGAAYRRIKGRKGSPVAVVAIARKLAVLYYNLFTKGLSYVEEGVRQYEEKYRQQTLRYLQKTAKAFGFGLAPISELQ

SEQ ID NO: 248260 - protein, 351 aa, unidentified
MMIIGVDYHPGFQQIAFLVEETGACGERRLNHSDGEAENFYRDLKARGISVRVGMETTGFSRWFERLLAELGFEVWIGDAAEIKTRRAKKQKTDRLDAELLLKLLLEDRFPRIWVPSPENRDLRQLLWHRHRLVQMRTRIMNQLQALAMNENRYWKGKLWSERGRAELEKLPLAPWTSRRRQELLELLDRMNPTIEELTAAATLEANKRPEALRLMTHPGVGPLTALAFVLIIGTPERFGCAKQICNYVGLIPSEDSSGGRQRLGHISKQGSSLLRYLLVEAAQAASRFNPHWRRRYTHLAMRRHRSIAKVAMGRRLGIRLYWMWRNGCDYSPSFEFGSYAGQLAVRHGGR

SEQ ID NO: 248261 - protein, 407 aa, unidentified
MPLFVGIDVSSKNLEACLMDDAGETLATRTVTNNLPGATELKAVILQHVKKDDSIQIAMEATSVYSWHPAMFFHEDPELKQRQTKVFTLNPKLVKNFKRAYAEMDKTDPKDAWVIADRLRFGRLPKSVIQSEQYLALQRLTRMRYHLVHSLTREQQVFLNHLFFKFSAFNLEVDTSAFGHAITELLLEAYSLDEIAQMPLEDLAKYLQTKGRGRFSDPEDVAASIQKAARDSYRLSKCVEDSIDLILGSSIEIIRHLKRQIKDLDKAIARVLDGLPNTLETIPGLGPVSCAGILAEIGDIERFENQAAIAKFAGLFWPRHQSGDYEADDKMLARTGNRYLRYYLVEAANLVRRHEPEYRAFYQKKYREVPKHSHKRALVLTARKLVRLIDALLRNGQIYAPKKKVTR

SEQ ID NO: 248262 - protein, 338 aa, unidentified
MSNITTVGLDLAKNVFHLIATDSRGREVSRKVLKRAQLLAYFANLPICLVGMEACSGAHDWARRLQKLGFEVRLIPAQYVKAYVRGNKNDFNDARAIAEAVCRPDMRFVTVKTVEQQDVQALHRLRAARVGERTALCNQLRGLLTEYGLVLAQGVPTVRRRIPELLEDAENGLSESFRRLLAQGYEQLCQLDEHIAFYTDELQRQSQAIEAVQRLQTVPGFGPIVASVFFSMVGDGRAYGKGRDVSAALGLVPRQHSSGGKSVLLGISKRGDGYLRSLLVHGARSVASRAAGKDDPLSRWIERLKRERGVNKAVVALANKLARIGWVVLRHQTVYQAA

SEQ ID NO: 248263 - protein, 339 aa, unidentified
MKVSTLGIDLAKNVFQLHSVGCNGQTVLKKKLTRDKFLPFLMQLEPCLIGMEACASSHHFARVLRQYGHEVKLIPPQYVKPYVKTNKTDAADAEAICEAVARPNMRFVQIKTAEQQAILVLHTERNILIRERTACANSMRAILAEFGIIMPRTLSQLYKKIPEILEEYDNELSPFVRCSVARQLEHLQGVEDQITLIEQELSRWAKTQPACQRVMKVPGVGLMTATYLVASVGNGQQFHSAKQFAAWLGLVPREFSSGGKQRLGRISKRGDRYFRYLLVHGARAVAAVIERHKDNMPWLYRLLNKKAYNVAVVAQANKTARILWSMLVHHTEYRTLSAV

SEQ ID NO: 248264 - protein, 399 aa, unidentified
MIGNHESIDVFIGLDVGKGEHHAVAVDRAGKKLFDKALPNDELRLREILASLDKHGRILLVVDQPATIGALPVAVAQAAGVTVGYLPGLAMRRIADLHPGEAKTDARDAFIIAAAARTMPHTLRSIQIADEQLAELTMLCGFDDDLAKQATATSNRIRGLLTQIHPALERVLGPRLDHPAVLDLLRTWPTPEALRHAGRRRIGNRLKKLAPRMGERLAGEIIEALDQQTVTVVGTNAATIVLPQLARMLADIRESRDTVFAQVEALVEAHPLHPVLTSLPAVGVRTAARILTEIVGKDFASAGHLASYAGLAPVTWRSGSSIRGDHPSRKGNKILKRALFLSAFAALKDPLSRAYYDRKRAEGKRHNQALIALARRRCDTLYAMLRDSTFYEPRLPSAA

SEQ ID NO: 248265 - protein, 334 aa, unidentified
MLEAGLSVKNNYFNNSEDFNMNQTNFVGVDTHKDSLACYVDGKFKQFPTTLKGFKEAIKWTKSKKWAVEGSYCFGRPFVAYLIKNGHEVYEVNPLLTKTWRQSISLNGKKNDFGDAKVISMFAHTRSLVPVSLEAVHLKEKLTTRKLLVKQRVQIINSIKNLFSSRGKELPFKNLTTQKAGKWLINQDDTIIKGFAQILIQQNQTIKDLEKEIENGLPEKAKALTSLKGIKELSAAVIYTETKGRLISKPALANYCGIAPVEYGSGKKTRHKNNKAGNRQLNSIFFRLSSSQSRFSEKGKEYFEKKVKEGKTPRHARKCVARNLVNIVFDILTK

SEQ ID NO: 248266 - protein, 315 aa, unidentified
MHRVTHFVGIDIAKHSLEVAFRPTGQHLKLAYDTAGLQQLLRTLPEPETCLVVVEATGGYQRRVVTELLTAGHLVAVANPRQVHDFARAHNILAKTDSIDARIIARFGEEVELRLVSKRSGKHEELAQLVARRRQLVDHRASEKNHRETISSKTVKKSVQHVIDVLTKEIARLDKQLLALVESDDDWNQTAEIVSSVPGVGPVVSATLVADLPELGDLNRQEISALVGLAPFNRDSGRSSGKRSIWGGRKNVRKALYMAARTACRCNPVIKAFAHRLRKRGEPYKVMITACMRKLLVILNRMVHTQTPWTPAGVH

SEQ ID NO: 248267 - protein, 422 aa, unidentified
MLTGTQDNEEIIERVAALDIGKAELVCCIRVPDAGHPGRRLQEVASYPTMTRSLLVMSDRLAGLGVTRVVMEATSDYWKPVFYLLEAAGFETWLVNAKDVKHLPGRPKTDRLDAVWLCKVAERQMLRPSFVPPPQIRRLRDLTRYRADLVAARTAEKQRAEKLLEDAQIKLSVVVSDLFSVSGRDMMAALVAGERDPKTLAQLARHTMRRKITILEEAFTGYFTDHHAFLLGTMLARVDAISADIAALDARIGEAISPFAGTVARLDEIPGISLTAAHVIIAETGLDMARFPTAGHLVSWARFAPGVKESAGKKKGKGTTGHGNPYLAAVLGNAAAAAGRTNTFLGERYRRIARRRGAKRAIVAVGHSILVIAWHLLSDPDARFHDLGPDYYAMRIDPERRKRNHVRQLEALGYTVTLEPAA

SEQ ID NO: 248268 - protein, 346 aa, unidentified
MLIIGCDYHPSWQQICWMDTLTGETEEKKLEHASGEAEKFYRGLLAPALIGMESTGNCQWFVEMATTAGHDVWIGDAARIRASEVRQQKHDRRDAALLLKLLLEGRFPRIWTPSGPEKDLRQLLIHRYKLVRIRAQVKNELQHLAMNQGVTKQHKLWSKAGQKVLHELPLKPWASRRREDLCKLRTMLDEQIALLNQAVEEAAAANGKAQLLMTQPGVGPITSMAFVLTMGDVSRFQRGKQVATYLGLIPREYSSGGHQRLGSISKQGNRFMRMLLVEAAQVAVRCDPQMRNEYLHRCHRKPKGVAKVAAARKLAIRLYWMLRTNTKYPEVVRVESSSRVPLVGAS

SEQ ID NO: 248269 - protein, 425 aa, unidentified
MKITQNLHEIKLNQVLDVSVDIHKEILNFFFNLEGKEYSDECPNHTKSIEKRLSKYHGIAQEQGFARLRLICEPTGEYQNKLLRTARRHGHLTCLVNTESVCNFRVIESNDTNKTDIKDPKVIATLGRLNKVIRHRVLAEDYQVLRKLGRIYHELDSDITALRCKIDRLLIELFCDFSFTKDFLYGNSGAVLIDRFGCNPYRIIETGFETFAATMKQEIPRIRKDTITRLWQDSESSVLNELLPGYRDVLEEQFRDLIARFRDRECRKEWIVEQMKIILRRLRDDDPRIPPPTAGVISEKYLALLVAETGPLADFRSWRQLMRYAGLNIRMRQSGKYMGKNKISKKGSPLLRKVLNHIVLPLVRTGWLYGDYYHKKREAEKMAGTKAMTIVSRHFLRKFHGWYKSGSAFDEKRFFACEAEYLKAA

SEQ ID NO: 248270 - protein, 349 aa, unidentified
MDIVGGFDVHRKQITFDYIELESGEVHRGKIQPANRQSLREWLESFVERFPGKQAAIALEASTGWRYVVEELQRAGLEPHLAEPAETKALQGRKKRAKTDRLDAGHLRDLMVIERLPESWIPPEHIQEIRTLMRLRHTMIEERTAHKQRIHAQLFHNGYAQQKNPDSMEGRAHLEEMELPGAARQVIDLSLAMIEHINEELEPIEKQLRVYARSQAGCQALMEHYGVGELTSVALLSELGDTRRFSSSKQAVRYAGLDITVHSSDEKRAAGKLSRQGPPVLRWAAYEVAKRAWRKGSPDHDYYLKNKKRIGANRAALSIARKLIRRAHHTLRELGEEAVSEPVLASNSA

SEQ ID NO: 248271 - protein, 390 aa, unidentified
MRYFIGIDVAKFKHTACVIDTDGTVLVESFDFTNDIIGFQSLLKNIKPFLKKKHLVGMEDTGHYGDNLRNFLLEKQYKVVMLNPIVTSHIRKASNKAKNDRIDCFVIANTMMNPNFYRDQHAQSIDYATVRQLTRMHHTHTEEINRYKCQLQKSIDIVFPEFNSLLNTKYSKTYLEILDTYHSAHTIANTDIRLLRNTLKNVGVGRSVSISAEQLKKAAKESIGQHNLAIEMDIPFLISLIRRLTSILGEIDKKIEEFSHQLNSPILDISGISHFSAMSIISELGDITYFSSEKKLIKFAGVNPCVYESGTYSMTHTRLEKKGSKYLRKTLYQIIDVVIRFNPIFQAFYQKKISQGKSYRCAQGHCIRKLLRVIYKILSTGERFNPEKLK

SEQ ID NO: 248272 - protein, 347 aa, unidentified
MIIIGCDLHSRMQVIAMLDTETGEVVERQLEHEGGAARTFYEGLKEPALVGIETTGYTRWFAELLSELGHELVVGEAGKIRALKTRKQHYDRGDAGHILNLLLRGDFPKVWLPPAEERDVRVFLEHRHQLVEMRTRAQNGLQAIALSYGLRRRRGLWSEAGQKELQKLPLREGMERRRADWLRLIRQLNTWIQELDRRIDQEVAQREEAQRLMTHPGVGPQTALATVLVLGPVERFPDDRHLTSYLGLIPQEESSAGRQHFGHLTKQGNRLLRWLLVEAAQTASRYDPQLRRAYRRLAFRKGRPVAKVAIARKLAIRLYIMLRDKIDYPEFCRRGSHAGMPEEVALA

SEQ ID NO: 248273 - protein, 374 aa, unidentified
MSSNVCHQIIYLAIELSSSSWVIAYRVPRNDKAKLHRLEAGDGAGLLAFIAGLRHRLDPPDDASTLVVSCFEAGRDGFWLHRLLTARGVINHVVEPTSILVTRGARRAKTDRLDAVGLLRVLAAKFAGDPGACRTVVVPSVEEEDAKRPHREREFLVQERVRTENRIAALLATQGVRERPSLRSWDADMRALRTGDGRPLPTHLVAELNRLRRRLSLTLEMIRELDAVREQALEAQHDSASRMVKALCTIRGIGVNFASVLTREVFYRTFDNRRQIASYLGLAPTPFQSGGMDRDRRINRAGNSRARKTLVQLAWLWLRYQPESSHAAWFRDRVGSLQGRIRRITIVALARKLLIAIWRFVTLGLAPEGAIIAA

SEQ ID NO: 248274 - protein, 405 aa, unidentified
MGIRKETRTFDTFTSCLTEMKEWLLANGITHVVMESTDVYWKPVMRVLEADIPNVWIVNARHIKNVPSHKTDKMDSEWICKLLIAGLLKPSYIPPKEQRQLRELTRYRNKLIQAIATEKNRMMRVLEDCNIKLSSVVANTSGVTATALIDMLCEDRKLTLEDIESVYHKKLSASPQELLEACTGFVEEHHIYMLQMIRKSIAQTQGLVDELSKRIKEILIKYENVLELLKEIPGFNTKVVEDLVSEIGLDMSAFPSEKHLVSWAGICPDYNESTSKKSGRITHGNKQVKAVLTEAAWAATRTKNTFFSERYHRISARRRKKRALIAVAHSQLTAAYLILSTGARYHELGAQFMQAKIEKKRKLYLTAELKKLGYKVSLEKKKGSNKILRQYYLRPIFTGTPIVRL

SEQ ID NO: 248275 - protein, 365 aa, unidentified
MNAIHYIGFDVHKKTISFCVKTADGQIVEEGSLQAERTVLRRWAAGRKQVWHGAMEATLFSAWIYDTLKPYAQQLSMGHPAKMKAITAGKNKSDQIDARTIADLLRCNLLPVCYVLAPQLRDLRRLLRYRNLVVQQSVRMQNRMAGLLMESGTAFNKQKLHQKKYFTDLMKSLEEVPESVKDLLRMSRGSMEMFQSTQKQLVKRLLSEPALEQRVERLMSIRAVGPITALTWALEIADPHRFASIADAVSYCGLSAAFRSSAGKQQRGPISKQRNAWLQPVLIEAAKLAPLWNPQLAAVHARALERGHANRATLQVARKLVAYLLAVDKSGQPFQVHTPPPPAGTTAKKKPARKSKKAVALAPAA

SEQ ID NO: 248276 - protein, 413 aa, unidentified
MKLFVGIDVSSEKLDVCFLDSSDTTLKEVTLPNNINGASSIKEDVLQFHQSFNYEKIVIGMESTSIYSFHPATFLSEDLELKSLGLVEVVIQNPKSIHRYKGLFEEDKNDRIDAFRIADFLRIERFNKTVLKEERYVALQRLIRSRYQMVHQLTECKQHFLENLYYKCNTLSKELDTSVFGATMLDLLSDALTLDEMAEMELEDLANLLQEKGRGRFSDPQKLAKTIKKAIRDSYRLGKVVQESVDMVLATYARLIQTLKKQIKDLEKSIVALFEIVTEAQCLKSIPGIGIVYAAGIVAEIGQIERFENEAQLAKYCGLYWKKNQSGNFESERTPLTRTGNQYLRYYMVEAANSIRRHEDTYRLYYQKKYDEVPKFKHKRALVLTARKLVRLVDTLLRNHQLYTPERSVSLKS

SEQ ID NO: 248277 - protein, 393 aa, unidentified
MKKVSGLVVVGVDPHKRINAVVVVDAHGQVVDRGTFANSTAGLGELAVFVRRFPNRTWAIEGCNGVGKHLSQRLVAGGERVVDVATRRSSLVRVFAGGNGRKSDDTDALSIAMVGLQSTDLPVVRPDDRATTLRLLAHRRAELVSTRTQAVCRLQRELLILLPGGTKRGLTAARAKTLLASVRPRDEVGRTRKAIAVDLLGDLIAADKKIKTITAQIKDVLASTDTTLTELFGVGAVSAAWLIGEVLDIARFTDAEHFASYNGTAPIEWGSGQGGPGPFILNRGGNRRINHALHMVAVSQIRHPGPGRGYYLRKIAEGKTKKEALRALKRRISDAVYRRLVADAQGVEERGPGGHLGATTKISAADPTPTVDSSIKPQPGPRPNATPASAKAS

SEQ ID NO: 248278 - protein, 439 aa, unidentified
MILIREVADAPVIMGISKPAGLKSPCGEVKIMNPLFVGIDVSSKNNVAYLMKPDGSKHSSFSVQNNLGGAKLLSEKIVSALHSMQLNDVVIGLEATSIYGDSLVYALREDGSLGRFQRKIHVLNPKQVRKFKEAYPDLPKNDWVDAFVIADHLRFGRIAKEVYMDDYRYQALRTLTRARFDIIQNLTREKQRFANYLFLKCSGIAQDKDIQNTSATTIALMEHFETVDDLANADLDELTAFISEAGRGRFVDPDATAKAVQAAARRSYRLPKTVNDTVNQAMSVSIASMRALKEQVKVLDKAIEQHLEIIPNTLTSIPGIGKVYSAGIIAEIGDIHRFNAQASVAKFAGLVWHRNQSGDFEAEHSQMIKSGNRYLRYYLLEAANSVRRCDSEFRRYYDLKLKEVNKYQHKRALALTARKLVRLVFRLLKDNRLYIPPEG

SEQ ID NO: 248279 - protein, 318 aa, unidentified
MQAQAAAVYVGIDISKASFDVDSYPVAQPACFTNDEPGRAAAANYLRGLQPSLIVVEATGGLEAPLVGQLATAGLSVAVVNPRQARDFAKAIGVLAKTDRVDAQMLARFGQAVKPAVRPLKPEETLALEAMLTRRRQIIEMITAESNRLSSAAPRIAKQIRQHIAWLEKRLDEADQDLDGMLRQSPVWQHKAQLMTSVPGVGRVTAVTLLAELPELGALPRREISALVGVCPYSRDSGKYRGRRSIWGGRAVVRAALYMAAIVASRHNPVIRAFYQKLVTAGKLKKVALVACMRKLLVILNAMLKHGTPWHHQPQLAA

SEQ ID NO: 248280 - protein, 356 aa, unidentified
MEQLTTVGIDLAKDVIAACVLDVHGAVIERRVLRRAAFERWAEQLSPSNVAMEACGSAHHWGRWFAARGHTARIIAAAFVTPFRKGGKNDTADAEAIAIAAQQPTMRFVPIKTVDQQAILAWHRVREGWKEERTALLNRLRGLLAEYGVVVGRSANRFLVALPQLTEDNRFPDPVRALLLEAREQFGALHARLARCDAQIAAHARNSPVAQRAGELLGVGPVTSSALAATVPNAKIFRSGRQFGAWLGLAPRQHSSGGKTRLGRISRRGNVYLRNLLIQGARSTLQAAINAEPARASRLQRWIIELYGRKGYYKTLIAIANKHARILWAMLAKGEHYDASAWQRHPMNQPPLAGSA

SEQ ID NO: 248281 - protein, 429 aa, unidentified
MTRISAGVDVSKNRSTVCIIDQDGKFIMRPFLVWHSTEELDFLADTLKRLNGEVRVIMESTSIYQYPIALQLKERGLFISIVNAYEMKQFANIDFRGGKTDKKDSRTIASYGISYWDKLVEWQIPKDTYFNLDLLNRTYMNAKKHRQIILQELQHYIDCAMPGMDKELHSLNLSTKKGFMLDFVEKFWHRDEIVNMTEAEFTEVFTAWAKKKGYRPVEGKAAKIYAIAKSCIPYYPANPTVKTILQCIVDKLSGVNRTLVTIVTQMIEEAKKLPEYQIVREMPGVGDPLAARFFGSAGDIRRFKNSKALVAYAGIDSPPDESGDFSSTHRHITKKGSKVFRDTGYEIMMALRAQKRTWEKVRKNPEVYDYMLKKEAEGKPRKVAKIAALNKFLRIVYARIKELYDNMALAERAKAKTKSKTKAKTKATA

SEQ ID NO: 248282 - protein, 410 aa, unidentified
MRLFCGIDWAESHHDVAIIDDTGTVVAKARIGDDAAGFARLLDLLAGAGDTAEAPVPVGIETDHGLLVSALRSTGRTIYAINPLSASRYRARHQVSGAKSDAADAVMLANIVRTDTAAHRPLPADTDLAQAIRVLARAQQDAVWSRQQLGNRLRSLLTQFYPAALDAFAGLPEGGLARRDARTILAAAPTPALAAKLTRARLRTLLTKAGRRRNVDHDVDRLYGVFRSQRLRQPPLVENAMGIQFSALLSQFEAACAAADDLAEAARAHCEQHPDAVIITSFPGLGLLAGARVLAEIGDDRTRFADPRGLKAYAGSAPITRASGRKTVISHRHIKNRRLAAVGPIWALASLRASPGARRHFDTRRAAGDWNHQAQRHLFNKFLGQLHHCLQTGCPYDEHHAFPPPLAAAA

SEQ ID NO: 248283 - protein, 402 aa, unidentified
MKVCGLDVHKDSIFCSIYDGKTSSEVKVFDSTTRFIYEMGEYLMTEGVNQVAMESTSIYWIPVWNILMEMGFELTLVNPFLIKQMPGRKSDIKDAQWIATLLHKNLIRGSMIPNSTIQELRFYSRKYMRMQQDKCKLLTKMDRIMVMANIRISSCVSKLTNKSVIIVLEALIKGETNPDNLVKLVYGNTKNKQSGKLREALTGYIMDHHRKSLKWEKESYDILERQILECIKEMERICNEHYKDEMLLLQTLPGVSKISAICLIAETGADMSVFENSGKLTGWAGLRPRNDESAGKFKSKAITKGNKYLRAILIQVAWGASRTKGSYFMEKYHRLAMRKSNKKAIVAIGRKILVIIWNMLKEKKPYNPNLVSIYDPIKIERQLAYHRKEMEKAAKLLHKEII

SEQ ID NO: 248284 - protein, 406 aa, unidentified
MISVGIDVSKGKSMVCIMKPGGEVLKTPFEMLHSMESILHLVKLINSYDEEVRVILEDTGHYHLPVVTLLVEKGIFTCCVNALRMKKFCSQSIRRAKTDKIDAVHIAQFGLTYWDELSPVKPPKSVYQELKVLARQYYQTVSMLVKAKVNLSNLLDQTMPGIKELMNDSPGNHKLTDFVKRYYHFGHILEMGEKRFTSDYCKWAKKQGYRVYERLASEILAVAQNSIPVLPNSPVTKVVVLEAVRVLHEIEISRDTILAQMQELAKSLPEFSVIREMACIGDTLAPRIIAEIGDIRRFKNKHSLIAYAGIDAPPYQSGAFNATERHISKRGNSYLRKTGYEIMQCLIQHKPIGDPVYEFIYKKRLEGKCGKEAMIAGLNKFLRIYYGRVTELYKEINEQLIFGSYL

SEQ ID NO: 248285 - protein, 409 aa, unidentified
MDVILDRVCGLDVHKDTIKACVRVPGQDQKREQVIATFGTKTADLLALRDWLEQWQVTHVGMESTGEYWKPVYWILEDRFQLVLANAAHIKNVPGRKTDAKDGSWIAQLLECGLLEKSFVPPREIREIRDLTRYRKTLIQQRTEEVLRLHGVLQRAGIKLSSVAANIMGVTGRAIMDALVEGKQDAAAMAELARGSLRKKIPLLKQALEGRFTRQHGAMVSHMLGHIDYLEEVIADLSRELDTLLEPFRQPIELLKTIPGVQQRTAEMIVGEIGVDMEQFPSAGNLASWGGLCPGNKRSAGQRKPEKIRKGGRWLKPALLEATWAAVKENDSYLSAQYHRLVPHKGKKKAAIAVSHSMLIAAYWILKEGVPYKDLGPDYFLRRNQEAIQRRCVRQLQQLGFRVTLDKAA

SEQ ID NO: 248286 - protein, 338 aa, unidentified
MHKLEAFLCCGIDVSAAQLVVALAGEDGKGLPRSFPNRASGHQALILWLQKSGTRIRVCLEATGRYSLDLALALQAAAGIEVAVLNPKKVHAFAATLCRSKTDPADAQVLAEYARRMPFQCWHPPQAAALELRSMTRHIAALTQQHTQQSNRLHAASTSTAGSRWVQQDLKRSLRDLQRRIEKMRRAARAVIERDAELRPRFALLLSTPGIAEISALNLLGELALLAPGLSVRQWVAHSGLDPAHHNSGSSVHKPARISRAGNRYLRRALYMPALVAVRHDPHLRAFYQALLARHKAKLQALMAVARKILHAIFGMFRGRTDYDGSRLFPQLELAEAA

SEQ ID NO: 248287 - protein, 345 aa, unidentified
MPIVGGLDIHRKQITFDYLDTVTGEVKRGQIAPADREHVRAWLARFAGRDDVAFAVEGCAGWRYVSEELAAAGVAAHLGEPADTATLRGRKRHAKTDKTDARHLRTLLAEGRLPECWIPPEHILEYRALLETYHDLRRAHTAWVQRIHAVFFHQGAPPLSDDALRTEPGLAKLCAAAAAHLSPAGQLQVATALDMLAATEARLGPLRHQLRDAARHLTGAKVLAARLYGVGPLTSLALTCWLGGADRFSSSRKAVRFTGLDITVHSSDRKGPPGRLSRQGPPVLRWAVYEAGKTHARTSAPDHGYYASVKDRKNSKRACLSEARKIVRQACHILTELGDDALTAA

SEQ ID NO: 248288 - protein, 331 aa, unidentified
MNYSHFVGLDVGKKTFDASLMSADEKELSHKSFDNTPTGIQSLLDWIAGYHLSLSKLLFCAENMGSYVTELSVSSVSMGFSLALVCPLTIKKSIGLQRGKNDRIDAKRIANYAVLHYRKLELYKLPDKDLVRLRGWIIIRDNLIKQKVSSIKLLETFSWMAKLADVTESISFLEEQLKSIKERILEVEEDMEQLIAASTSLYTNYLLLRSIKGIGIINAIVLLCVTDNFQRFDNPRKFACYCGVAPFEHTSGISIRGKTQTSSLANKEVKVYLTRAAITAISWDPQMKAYYKRKIAEGKHKASVINAVRAKIIARSFAVIRRQTPFVTLAV

SEQ ID NO: 248289 - protein, 275 aa, unidentified
MNAVGIDVSKGRSMVAILRPYGEVVLPPFEVNHTASDINSLIDIIKSVDGESRIAMEHTGRYYEPLALQLSQAGLFVSAVNPKLIKDYNRNSLRKVKSDKVDAIKIARYALDSWSELKPYSPIDEIRNQLKIMNRQFSFYMKHKTAMKNNLIGILDQTYPGVNSYFDSSARADGSQNIKQAVEQLNTASRTVEELRALMNEMAAKLPEYPIVMAMKGVGPSLGPQLMAEIGDVTRFTHKTAITAFAGVDPGVNQSGSYEQRKAQNSKKLLFTLHI

SEQ ID NO: 248290 - protein, 356 aa, unidentified
MNANNDNVTMERASVETGVTIKLGLDVHAGQITVCRQDGGQVPKPAQRKSWPEFLAWVEALVKGGAKVVSCYEAGPCGYGLHRQLTALGVTNYVVVPQRWDVEGKRVKTDARDALELCQRLDRYVAGNTKAFSVVRVPSPEQEQRRAVGRQRGTLVQERQRCVLRGHGLMLGQGVHAPTGWWEPKFWASFQQELPEWLRAQVQIWQAQAVGLDEQVTRWSLRVEAQSAGQPIPKGIGALTAALLAGEILDWGRFENRRQVASYTGLCPSESSSGLKRRQGGVSKHGNPRVRHQLVEACWRLLLWQPDYPPLKQLRAATGARARKRAVVAAARRLAIDLWRINTGQCPAEKLGLQLR

SEQ ID NO: 248291 - protein, 342 aa, unidentified
MQITTIGLDIAKNVFQVHGIDAAERVVVRKQLRRRQVLEFFKAFPPCLVGMEACATAHYWARELMKLGHLVRLMPAKDVKAYVKRNKNDAADAEAICEAVRRPTMRFVQIKSAEQQGRLMLHRARDLLMRQRTQVINALRPHLAEFGIVAPQGRQGVKELLLIIASGEDERLPVDAHASLVVLAAEFTAMQTMIGSIEKRIMALHRLNEASRRLETIPGIGVAGATAIAATVPDPAVFRSGRDFAAWIGLVPREDSTGGKHRLGPISKRGDRYLRRILVVGAVAVLRYARQNPEKYPWLTRLLARKPFQVAAVALANKTARVAWALLAKGGTYRAPALVAAA

SEQ ID NO: 248292 - protein, 346 aa, unidentified
MMVIGCDYHPSWQQICWMETTTGETQEKKLEHSRGEAERFYRQVPAPALIGMESTGNCQWFVEMVTTLGHDVWIGDPAKIRASEVRQQKHDRRDAELILKLLLEGRFPRIWTPSGEEKDLRQLLIHRHKLVRIRAQVKNELQHLAMNQGVTKKQKLWSQAGEKVLRKLTLKPWASQRREDLFKVRGMLDEQISLLDAAAVDVAEKNEKARLLMTQPGVGPITSLAFVLTMGDVNRFPRGKQVASYLGLIPREYSSGGHQRLGSISKQGNRFLRMLLVEAAQGAVRCDPGFRNEYLHRCHTKAKGVAKVAAARKLAIRLYWMLRTNTGYPEVVRVESSSRVPLVSAS

SEQ ID NO: 248293 - protein, 382 aa, unidentified
MITTTRPTESTAPTGGLLLAFELSQRSWKLGFTVGMGQRPRIRQIPAGAVGALATEIERAKKRLGLSSDAPVMSCYEAGRDGFWLHRYLVAHGITNYVVDSSSIEVNRRARRAKTDCLDLAGRLSLLARYVLGDRRAWRVVRVPTVAEEDARHLSRTLEALTQDRTRLVSRLKSLLTTQGVSLPIDAKFLHRLETAHLWDGTPLPPGLQERLTRTWTQLQEVDGQMRDLNARRLTRSEHLTPATSQALAQLLTMRAIGPIGASVLATEIFGWRRIRNGRELGALVGLVPAPYQSGETDYDQGITRAGNAHVRRVIVQLAWGWIRHQPDSALTHWYQQRFGAGGKRVRKIGIVALARKLLIALWRYLETGVVPDGAQLKPMEV

SEQ ID NO: 248294 - protein, 318 aa, unidentified
MTPAPACFVGIDVSKDTLDVHLRPDGTARQFPNTDDGCQALADWLAPLAPTRIVLEATGGYEANAVAHLSLASLLLSVADPRRVRDFAKALGRRAKTDAIDAAVLAEFAEKVCPPVRPLPDADARKLQAILARRRQLIGLRTMESNRLQTTADEIVRRSLRAVLRTVEREIGRADRELDTAIRECPAWREKDELLQSIPGIGPVVSRTLLADLPELGTLTREQAAALVGVAPMNHDSGRHRGKRFISGGRAAVRSVLYLAGHAAKQGNALLKAFADRLTAAGKAPKVVRIAVARKLLVIANAVLRTGQSFRKIEAEIA

SEQ ID NO: 248295 - protein, 363 aa, unidentified
MGNTIICGIDAHEKTLVTRIGVNQEAAETKRFSNTRSGRQALFSYVKKLSGEYAGGKMVMAYEASTLGYGIYDESVTSGIECHILAPTKMPTARKDRKKKTDERDAQRVFEIVRAYALAGNELPRIWIPDHQTRDDREVVRGRLDAAQKLTGLKCQVQTLLKRTGVVKPAEAGDSWTQRYRLWLKGLCIKPGAQIALQSLLRQIEGIEAEIKILDQAVEQLAEGERYKAVAGALVRKVKGVGLLTAMVYVTELGDLSRFNNRKQVGSYLGLVPSSNESGEVADHKGHITREGSARVRKVLCQATWARVAHDKEEAVVYQRLVKKNPKHKKIAVVASMRRLGVLLWHIGLAAQKEAVAVKEQAA

SEQ ID NO: 248296 - protein, 423 aa, unidentified
MTKRSSNPTDAVLVAIDMSKHRQEVLIERPEGGRRRRMTVMATKADYDRLATDLSDIGRPIIVGFEATGNYHRTLAHRLLSAGFELRLISSVALARTREALHNGWDKNDSKDAQVILHMLRIGATQRYVDPLAAGINDLQEMSKTHEAISKAKTQTWHRILTHYLPLYFPEIERFAGNSRSDWFLALLERFPTPASMTVLGQETFSREAWDLVGRKVSKARLINDIYETACASVALPVDEDSVSIAMFRMVIAQARNLIRQRDEIERTAHAMLAENRDYQLLRMIPGIGPINALTILAEAGDLRRFSHHRQFLKFCGLDLATRQSGTFRGRTMLSKYGNARLRRTFWMAAQVAARQRNNSFRDKLGRYTAGHADDADRRRKAMTALTAKMARVAHAVIKTGTEYRPFLERSDARWKDPSLQVP

SEQ ID NO: 248297 - protein, 421 aa, unidentified
MRGSRTKRGKAVKEKTLIVTVDIGMASNTGYCTSVDGRDIKPFKFDNTREGLERFWSMIVVSKNRFRCSDVMVGYESTGPYAEPLLHYLKQRPVTIVQVNPMHTKRIKELNDNSPLKTDDKDPRVIADVLHLGHALSVVIPEGDAAYLRRLNNARERHVGERTALLNQLQQLVFLIFPEFKTVFKDIKVKTAQHILTRYTTPERIGSLNQGELGEEMRKQSMGKFGVEQAELLIRLARDTIGIQEGIAGLVLDIRHILMQLEGLHGFVAEIEAEMEKALERIPYSTRILSMKGLGVVTVAGLIGEVGDFTKFSTQSEVMKLAGLDLYEISSGKRKGQRRISKRGRSLLRKILYNAAISTIRKNGIMALQYANLIGRGRVRTSALIVIAKKLLRIIYAMVRDSRDYICNYESPKRLEIKEAA

SEQ ID NO: 248298 - protein, 406 aa, unidentified
MAAVMIGVDPHKASHTAAAIGPAEEPLGQVRIRASESQVEQLVAWAAAWPERTWAVEGATGLGSLLARQLVAAGERVLDVQPKLAARVRLLEAGNTNKNDPNDARSVAVAALRSAARREVAADGHAAVLKVWSKRYRDLGRARTQAACRLHALLADLVPGGFAGEITAGQAADLLARITPADPAARARCELAAEFLADLRYLDTQIRGTRDRITAAVRASRTTLTEIFGVGPVIAAAIVGAVGDVSRFADRNRFAAYNGTAPVEVSSGGRKIHRLSLRGNRRLNHAIHMAAITQIRYQHSPGRAYFDRKIAEGKTSKEALRALKRQLSDAIYARLVADAARRGTTAQAEGPGGQSGNGSVSSAAGSHPGCRLFGQATPGPQTSLRPTAPGRPPTPVAASANSLRTT

SEQ ID NO: 248299 - protein, 381 aa, unidentified
MSARTDQQLFAGIDWASTTHMICVVDHDGAITVRFEIPNTGKTFTGLVKRLTKLGVQGVAIERCDGPLVEAMLDAELRVVVITPRQVKGLRSRYSGSGAKSDTGDAYLLADVLRTDGHRFTALSQDSDATQVLRSLSRTRKQLVEARVGLVNQLRAELERCFPGAIGLFFRLDSDITLAFLRRYPTQHAATKLTPARFTAFLRRIAYCGRTPAHELFTRVHDAPAAGLSEAEAEGHAVCVLALLRAIETVRNQERELQAEIIERLDAHADAHIFTSLPKAGHGVRAAALLAEIGDVRSRFPDEESLAALAGVAPVTRASGKHHSVGFRWAADKKLRNALTNFADDSRHASPWAAHIYVPRQEVGRVSASGNVGVEGSARPA

SEQ ID NO: 248300 - protein, 459 aa, unidentified
MSTLRARALKGEAWNLGIDLGVTNVHQAVLATNEGKFVWPKPWSFSTREEDFDQLDRRVRRAAPPGTTFRAVMEPTGMSWFSVAVALQKRGWQTHRVKSQKVHALRQYYKKHAKSDRLDGETLAKMPVVDEEGLYPLYLPDATTLACQRLCRQREHFLELAVASQNRIQAIDHLALPGLGKDLGDPFSPAARAFRDELYDPREVLTLGEAGLSAFFARFAAEGDDPAAARKRAQRVYDVCQNAVALYRRSGLEPAMYLDYLALCQEVRRELRFLTLYEQQVHEIEQAIWLLYRQLHPSGYLESIYGVGAHGAPVFVSFIGDPHRFASLREWRAFVGLIPESAQSTTTDQKGLHITQAGQDILKKYAYLGADVARHYDPQIAAIYYDQMVNKGNHHIQAVCACATHLLDRILVVLQDERPYELRDVDGRVVTPEEARAIIAQKYTVPKEVRARLRKQRAR

SEQ ID NO: 248301 - protein, 391 aa, unidentified
MVCVGIDVAKDKHDCCILDSDGTVRADCFTIPNNMDGFKKLLQTIQDCTQKTDKIKVGLEATGHYSYNILGFLLDNGLPTYVINPLHTNLYRKSLSLRKTKTDRVDARTIATMLLSDVDLKSYTDTAYHNEELKSLTRYRFEKVQERAKLKQSVSRLVTILFPELEKLVPTLHIASIYSLLSEYPGAKQVSEVHLTKLTNLLTTTSKGRYGKEKAIQIRDAARVSIGSVMPAKSLELKHTIKLIRELTSEIDEIEVSIQKIMDELNPSILSIPGMGIHSAAMILAEIGDFSNFESSDKIFAYAACSPSTYQSGKLSNCYAHMEKRGSRYLRYALYNATKYVCHWNPVFAEYLAKKCAEGKHYNVALSHATKKLVRLIYALQKSGKAYLTAA

SEQ ID NO: 248302 - protein, 338 aa, unidentified
MTIVFVGIDLAKNVFAVHGVNPAGKPELVRPSVPRAKLHEMIAALPPCTIGMEACSGAHHWARLFQALGHTVKLMAPKFVAPYRLSGKRGKNDAADAAAICEAVQRPNMRFVPVKSPEQQGQLMVHRARQGYVEARTATINRVRGLLSEVGIVLPLKAETVRREAMAQLEDLPGWVNTVIGDLLCEVHRLDERITEYDRHVALMARQSSQAQQLLRLRGVGETTATALIAMIGNGRDFHNGRQLSAWIGLVPGQYSSGGKTRLGRITKSGDAYLRSLLVMGARAVLNAAKDKTDSISRWATALAERVGYWKAVVAIAAKNARMAWAVLVKGEAFAMPA

SEQ ID NO: 248303 - protein, 340 aa, unidentified
MARYFVGLDVHWNHTTVCILDGDGKRVERLTIRGAWRKINDQLQQLPGRVAVCFEASTAYGHLYEMLSEVADRVVVAHPGQLRLIFRSKKKNDRADAEKLAKLLFLGEVPTVYVPSQDVRAWRQLVEYRRCLIAKRTRAKNALRAILRTTGMRPPKEFGLWTQQGMAWLGQVELPELTALQRDLLLEELAMFDRQVGRAEKELKHFSHDNPAVALLQTIPGVGIRTAEAVVAYLDDPSRFAKSKQVGSYFGLVPSQDQSGSTNRLGHITRSGPSVVRHLLSEAAWHSIRCSPTVQRYHARIQQDTPERKKIALVATAHYLARVMHAMLRDNQPWAEQVAA

SEQ ID NO: 248304 - protein, 339 aa, unidentified
MKYTPVGVDIAKHLIQVHFIDEHTGEVIDKQLRRQDFLTFFSNREPYLIGMEACGGSQHWARELKKLGHEVRLLQARFVKAFVMGNKNDVMDARAIWMAVQQPGKEIAVKTEEQQSVLVLHRTRQQLVKFRTAQINSLHGTLLEFGETIHKGRAAMEREFPAALERMKEKLPPYLITVLEEQFYRLNELDLRIDGLEKQLNSVARQNETCKRLMEIPGVGPLVATAAVATMGEASAFKSGREFAAYIGLVPKQTGSGGKVRLLGISKRGDTYLRTLFIHGARAAALLTKEPGPWITELKKRRPTGVAIVAMANKLARTVWAIAAHGSKYDKNHVSIRPY

SEQ ID NO: 248305 - protein, 450 aa, unidentified
MAQSQTLNVPSEFAAFIGLDWADRKHSWKLVAAGSVEGESGELNHTPEALQQWATDLQDRFAGAPVAIALEQRRGAVVFQLSKFPHLVVYPVHPTTAAKYRQAFFPSGTKNDPLDSALLLELLLQHRDRLRRLDPDTPATRLLQLLVEHRRKLVDEKTRLSNRLTAALKSYYPQPLQWFDDIDAPLGCAFLQRWPTLAQAQHSHPGTLRKFFVQHNCRSAERIRERIEGIHQATPAVTDTALLEAGGIIVSGIVRASQALSESIAAVDARLQSAVTEHPQAGIFAGLPGAGAVLLPRLIAAFGTQLDRFPSASKLQCHTGIAPVHSQTGNTEIVHMRRACPKFLRQTFVEFAAHSVAKSVWARAFLQNQLAQQKDYNVAIRALAFKWQRILHACWRNNTPYDEQRYLQTLQKRNSPLAKLSAIPKSAPTDPTAVGWKSVAGFHTLAMKNT

SEQ ID NO: 248306 - protein, 351 aa, unidentified
MKKYIGLDVHAASTTLAVVGESGKRLKSHVVETTGGALVEQIKSIAGEKFLCLEEGTQSAWLYEILSPHAKEVVVSMVLERRGQKNDEEDAYKLAEQLRTGAVKKQVFKEAGGFRTLREVARVYSMIVQDSARAQNRIKSIYRSRGVPLAGEAAYSMTGRQPLLLQLPDASRTAVMFLYEQFDAVEAIRTKAEKSLVAESHKHPISRTLETCPGLGPIRVAQLLPIVVTPMRFRTKRQFWGYCGLGVVTQSSSDWVPKEGGGWIRANVNKTRGLSRARSGTLKSIFKGAAMTVSTCHETDPLHRQYQRTMEAGTKPNLARLTLARKIAAITLSMWKTKEKYDSTRHRKESS

SEQ ID NO: 248307 - protein, 316 aa, unidentified
MKSPQNFVGIDVSAMRLDVAVLPAGTHFTVAHSEEGIASLVRRLRELAPHIVVLEATGGYENAVAYALSEASLPVVIMNPKVIRHFAKSTGKLAKTDKLDARVLAHYAQAIQPPVRPLKAPEQAELATLMSRRRQIRDMIVMEGNRRRTSTPKVRGNIDQHLEYMRQLLKDLDREINDFIRRTPWWHENSEILQSFNGVGPKVSASLIADLAELGTTQRTQISALAGLAPMNRDSGQWRGKRTIQGGRPAVRQALYMAALVASRRNPVIREFYQRLRLAGKPAKVALTACMRKILVILNAMLKNRTYWNSQLHLAA

SEQ ID NO: 248308 - protein, 418 aa, unidentified
MENLYAVCCGIDVHKKLIVACLRQGDKTQIREFGASTRELLELADWLIDHHCEAAAMESTGSYWKPLYNILESQDLNPIVVNAQHMHNVPGRKTDIKDAEWISDLLCHGLLTPSFIPARAQRELRELVSYRKSLVKTQGAELNRLQKMLEGGNIKLSGTVSNINGKSARHLLDLVLEGNKLDEAVYDQMLKDKKISRKLKASRSKLIDDMNGVLSPMQIKMIREIRKHIDELETHIKELDDEIDDAMSPHEKEIVQQLTDIPGIGKDSAKIIISVIGTDMSRFPTSRQLCSWAGMCPGNNESAKKKYSSRTLKGNKLLKSTLVVCAHSAVLRKESYYSSLYSRIAAHRGKKRAIVAVGHAILQAIYYMIKNNEPYKELGSEYYSSKTRESKIKSHLSKLQNLGVNIPEEVRFAALQMA

SEQ ID NO: 248309 - protein, 436 aa, unidentified
MPDVPWAHRKKGGASMSKKKSSLAGLAALYARVCGLDVHKKLVVACVRILDSKDGTVQSTLRKFGTMTADLLELRGWLAEQKVTHVAMESTGVYWQPVFNLLEGHFQVWVVNAQHIKKVPGRKTDMKDAEWIAQLLQCGLLRPSFVPDRQQRQLRDLTRQQTKLVQQRNAVDNRIQKVLETANIKLGSVASDVLGVSGRKMIEALIAGEKDVTVLADLAKRQLRGKIPELKRALEGELTEHHRFLLRQLLGQYDFLEKEIASVSERLGAVAPPSFRAAVVQLDAMAGVGERGAKALLAETGTDMSRFPTHKHFASWAGRCPGNHESAGKRRSGKTPAANRHLDAVLTEMAHAAVRTKNSYFKSQYHRLAGRRGKKRAIGAVKHSLLVTVYFMLRDNKPYKDLGADYFDKLNPQQRIRYHVRRLQELGQEVELKPAA

SEQ ID NO: 248310 - protein, 370 aa, unidentified
MLDTTTFVGLDVHARSIKAVSLDVMTGEVRCATFGYDAGAVAEWVRSVDPKARCVYESGVTGFDLQKRLSGLGVDCVVGAVSKMIKPSADRRRKNDRNDAEFLARMLSVGNVVEVWVPDDECEAARDLTRALEDARDDLSRSKQRLSKFLLRHGLAFDERTPTGRRKGNWTRAHWSWIESIRFAERADNDVLAYYVDAVRRAAEEKARLEGLVGAEARKPRWRKRVDSLRCLKGVDTASAADLVFEAGEFSRFRNARSFAAWVGLTPSEHSSGESDRRGAITKAGNKHLRKALVEAAWHYLTCSGRPKDLAKGQAPDRGARRHAAKGVRRLVERREALLARGVHGNKANVATARELACWVWAVGLMAEEA

SEQ ID NO: 248311 - protein, 365 aa, unidentified
MPSLTHPDAVFLGMDVHKDSISVGILNPGQERPEVEKIFHDEVSVRRLIDRFEDRTLLWSCYEAGPTGYDLARLLKSLGVHCEVIAPSMIPKASGDKVKTDARDCRRLARLHRAGELVAVRIPTPFEEAVRDLCRTRGDMVEDLTRARNRLTKFLLRHSRVWRDGSNWTLKHEAWLRSLSFDEPALKTTFEHYRATVLSREAALGAVEADLSNWFDKEPFADPVRRLAAYRGVNTMGALCLQAEVCDWRRFARAASFMGFVGLVPSEYSTGKSTHRGHLTKAGNVHLRAQLVESAWSYQFRPNVGRAIAVRQDGLAPEVVARAWKAQLRLCGRFRHLAERKNTKSVVAAAIARELAGFLWAEMVA

SEQ ID NO: 248312 - protein, 326 aa, unidentified
MFRVHGVDENGKFLVARQLRRRQLLPFIAQLKPCLVGMEACGGAHYFAREIAKHGHEVRLMSPRFVLPYVKSNKNDARDAEAICEAVTRPSMRFVVVKSQAQQDVLALHRVRALLIRERTALMNQMRGLLAESGIVIQQGLAPLRRAVAELQDDENGPTPILREILVEMSERLRLFEERLKGYDSRITGLARNDQQVARLMAVEEIGPITATALVATVGDARQFRTGRELSAWLGLTPRQHSSGERTVLLGISKRGDRYLRTLLIHGARSALYYAARRHTRRSEWLEGVRKRRGANIAAVALANKNARILWTLLRRGEDYRVLLAA

SEQ ID NO: 248313 - protein, 357 aa, unidentified
MAIVAQKHPFVIGVDTHARNHALSILACPHGEIIDEAMFPATSAGLARAVSWAGQRTGGDLDVLWVIEGTGTYGARLARAAVDAGYPVVEAPRMNARANRGIGKSDPLDARRIAQAALPLATTQLRQPRADTGVRAAVRILIASRDHMSTERTATINALIALLRVTDLGIDARRPLTAGQVTAVAAWRTRTEDLATATARWEANRLAKRVTALDKDLTTITTRITDLLHHSPAGTLLEEPGIGPITAAVALTAWSHLGRIRSEAAFASLAGVNPIPASSGNTIRHRINQGGDRRLNRALHMAVLTRMRMDPRTRTYVERRTTEGRTTKEIRRCLKRYLARQIYRHLNAAAQLTPDTP

SEQ ID NO: 248314 - protein, 408 aa, unidentified
MEVVHSRCCGIDVHQASLAVCVAIKEKGNSEKHKLRCGTTTAELLRLADWLHGHQVTHVAMEATGVYWKPVWHILEGQFELLLANPTQVQALRGRKTDLKDGERIADFFQHGLLQGSFVPPKPIQQLRDLTRSRTTLKQEQVRIGNRIRKVLEDANIKLSSVMSDVMGVSGRAMLRAMVRGESDPETLAQLARKRLRGKIPVLQQAAAGSLNEHHRFLLEQWLAHWDELTERIAKFDQRIEEQIRPFAAAVETWNSLPGIDRITAWTMVAEMGADMNQFPTAAHAASWAGLCPGQEESAGKRKSGRTRPGNVWLRRALTQAAWGASMTKGSYFKAFYHRLAARKGKKRAIVAVAHALLSTGYMLLWTDRRFSDLGEDYFDRLDRERLTKRLVKRLEKLGHQVSIQPAA

SEQ ID NO: 248315 - protein, 332 aa, unidentified
MPMLAELVDAVVGVDTHRDFHEVEIALPTGAPIAVCSISNDTTGYAEMLAWIVEHTPGPRLVVSIEGSRSYGLGVARAVSAAGLTVIECEQPARKVRRGKGKSDSIDAHLAVLTALQLDSSRLPVPRADGDREALQILLGARDELTVAATAQTNRLRALLLTGDDTDRQLARGPLTEDTLAGLARRRQARDATREQAVRHGEIRRLALAVRDGGRALKVNRAQLQTIVDEVAPGLTDHPGIGPVTAAQVIVSFSHPGRCRSDAAFAALAGTSPLEASSGRIVRHRLNRGGDRALNRAIHTIAVVRMRCCPRTRAYVARRTAEGKTMREIGAA

SEQ ID NO: 248316 - protein, 344 aa, unidentified
MANLNQFCDFTKLIGIDIAKSVFQIYSCDTQTGEITNVQIKRDKVLESLANCGKCLIGMEACGSSQYWARKLQTLGHTVRLMDPKLVKPFVRHNKSDKADAEGVYHALVSGVRSVAVKTETERDIQTLLTMRALLVKQRTARINHVRGLLAEYGHVMPKSVDQFDKKVDECINSLEGDAVQLVIDMLRDTIKSIRDEHDRIKTLQREISRLASQTKNAKHFLTVPGIGETIMAYMCVLLADPTQFSSGRQFAAYLGLVPMHTGSGGKTVTTKIPGRCDKALRALLVQGAHAVARSKYRTDWVKNILAKKPKKVAMVAIANRMARQCWAVASKGQDWRRMPVTVA

SEQ ID NO: 248317 - protein, 368 aa, unidentified
MTKSLRFVGLDVHKDSITIAVAEEGREPAYVYAEIPNDWGALRRKLSRLAVKSELRCCYEAGPCGYGLYRKMRDAKIACVVVAPSLVPVKSGNRVKTDRRDAKKLAHFLRSGDLTEIFVPDEEAEAVRDLERAREDAKNSERAARHQLGKFLLRHGRRFEGANWTQKHLGWVRRQKFDQQAQQRVLTDYLKTVEDAGQREKQLTEDLAELIQHTKLYPLIRALQAFRGIRLITAVTIAAELVDLKRFSSARQLMAFLGLVPSEHSSGETQHRGRITRAGNKHLRRVLVESAWSYHYQPNMSKAIRKRNEGVAPGVQRLAWKAQQRLHKRLYHLIRKGKTPQKAITAVARELTGFVWAVGQEPAWLAEE

SEQ ID NO: 248318 - protein, 356 aa, unidentified
MQTQVTKKIDFTGKDLFVGLDVHKKSWSVTIVVDGMEHRTFTQPPDPEALHKYLQRSFPGGNYTSAYEAGYCGYGIHRRLNDLGIKNIVINAADIPTTQKDKLHKRDPVDSRKLARGLEKNSLRGIHVFERDHEELRSLNRTRFYLMRDLRRSKNRIKSFLLYYDIPLPGEFDNNQWTLKFIAWLKQVKLQTIAGQEAFSHLITSYEHHREQLLILSRIVRLRISQHDKELFNLLKSISGIGPLTSSALMTEIGDINRFHDIDDLASYVGLVPRVRESGETTHTGGITFRCNNFLRVLLIEASWQAVRQDPALMQYYHKHVINSKGHKVIIKVARKLLNRIRYVMKNRQPYVTGVA

SEQ ID NO: 248319 - protein, 388 aa, unidentified
MQVVTGQAAAPTAIQTNLRAIFVSLELSRSTWLITSLSPGAAEKMSKHSVQAGDIAGLLRRLAQIKEKARARTGRDFPIITIQEAGLDGFWIHRVLQSEGIESHVVDPASIATSRRRRRVKTDKIDGETLVRTLLAYKRGEPRVCAMIKVPTPEEEDSRRLCRERKVLTAERVLHVNRIKGLLFCQGISGYEPLRRDRHERLEELQTGDGRPLPPHLKAQVNRELDRLELLLKHIKAVEAERDALLVAAHTPAAVPASMLLNIRGIGPEFAAVLWSEGLFRHFDNRRQVAAYAGLAPTPWQSGAVDREQGVSKAGNPRLRTTLIQLAWLWLRNQPHSALTLWFHERVSRNGGRLRKTTIVALARKLLVALWKYVTAGVVIEGAAMTAA

SEQ ID NO: 248320 - protein, 409 aa, unidentified
MLDNHFQYFVGIDWGSERHRVCLMNREGRTLAERWIEHSGDSLAELADWLRQQTSDSASALAAAIESPRGAVVETLLEHGFAVFSINPKQLDRFRDRYWPAGAKDDRRDAFVLADALRTDMHCFRLVKLDEPVMIRLRELSRLDDELAQEQNRAVNRLREQFHRFFPQLLQLCQSAEEPWLWDLFESAPWPAKAARLTEARITRILREHRIRRITAAEVRAVLKTKPLTLAPGAAEAAIEHALLLLPRLRLLLQQRTDLARRIGALLDELATPAEGEQEHRDAAILLSLPGLGRKVAATMLSEASQAIAERDYHALRCYSGTAPITKQSGKKKIVIMRRSANERLRNALYHWARTSVVWDQVSKKAYAMLRARGHSHGRALRSMADRWLKVLTSMLSTRTLFDPQRRPA

SEQ ID NO: 248321 - protein, 421 aa, unidentified
MRDIGLDVHRDFCEVAIWEDGELRSAGRIETTPERLELFAQSLGRSDRVALEVTGNAWEIARILEPHVAQVLVVSPSDTGIRQARAKTDRLDARALARLLAAGSLDGLWLPDEQTGALRRRLGRRAQLVRARTRAKNEVHGALVRRLIAKPRVADLFGQAGRQWLEGLELPEEERETVASALRQVDFLEAEIAEVEALIAHQALESEEARRLMTVPGVNVITAASFLAAIGDIRRFQSPRKLVGYLGLDPKVRQSGPGPATHGRISKQGSAPARYALVEASWSVVRQPGPMHAFYERIRSRRRHQVAIVATARKLAVLFWHLLTKAEDYAYAQPSLTRKKLRRLELLAGARRGEVRPGIWSANKAIRQAERELAEQAERAYQRTVADWQAKKGASATPGRASSRPLGGKQRGKASVPHPAL

SEQ ID NO: 248322 - protein, 333 aa, unidentified
MLPPNCGTATPYILRNTVGLDISKLTFDATAIVGNAEYSAKFDNDSKGLDQFSDRLKSLGCQNLHICMEATGNYYEEVADYFAQYYSVYVVNPLKISKYAESRFKRTKTDKQDAKLIAQYCRSAKESELVKRQKPTDEQYRLLRMTAAYAQIKSECAAMKNRHHAAKDEEAAKAYAEIIKAMNEQLEVLKEKIKEQTEKPKCKEGVKCLETIPGIGRMTAAVLFHHLTSSKFETSNKFAAFAGLSPQQKESGTSVRGKGKLTKFGNRKLRAVLFMLTMVAYRIRAFPDFIKRLEEKKKPKKVIIAALMRKLAVIAYHVHKKGGDYDPSRYKSA

SEQ ID NO: 248323 - protein, 376 aa, unidentified
MKQFNDIYVGLDVHKDTIAVAIVRGLRSKPTYFGEIPNTPAAITKLLHQLSPDGEVLNFCYEAGPCGYEVYHQLTKLGQSCSVVAPSLIPRMPGVRIKTDRRDAMSLAKLHADGSLTAVWVPGKEQEGIRDLSRAREDFKQTETKARQRLGAFLLRNGKIFTGKSKWTVAHWRWMETLTFETPMQHIVMQEYVEALKEASRRLLGIEKQILLAVRGWSLEPVLNSLLAMRGVNTITAVTLLAELGDITRFDNPKQLMSYLGLVPSEYSSGSKRQQGSITKTGNGHVRRVLVEAAWNYRFPARKSRTIEMRAEKTSDRVQAIAWEGQKRLCGRYQKLLSLGKLKQKVCTAVAREMVGFVWAIACEASGRVHASRATA

SEQ ID NO: 248324 - protein, 335 aa, unidentified
MSQEKYIGMDVHQATVSAAVRDRNGNLLMECILETKADTLLEFVQGLHGTLSLAFEEGTLAAWLHDLLKPHVNRVVVCDSRKAALLRDGNKSDRIDARNLSELLRTNQLKPVYHGEHGLRTLKELGRSYLTVSKEMTRTMNRIKSLYRSWAIPCPGTTVYAPRYRRQWLAKITEPGARMRAEHLYEQLDHLQPIRVRARREFLQESNKHDAVKRLRQIPSIGQIRAALLVALLQTPHRFRSKRQIWAYSGFAIETHDSGEYRYVRGKLQRNRERITVRGLNRNHNPDLKNIFKEQPSRLAADLALCRIFMKHELPWGCGQPWLALPWHEKSLPSP

SEQ ID NO: 248325 - protein, 410 aa, unidentified
MEPIVERCCGLDVHQATVVACVLVGGAHERPRKEVRTFSTFTADLVKLGEWLQAAGVTHVGMESTGVYWKPVHTVLEGEFELIVGNAQHIKNVPGRKTDVKDSEWIAELVRHGLIAKSFVPPPPIRQLRDLVRYRRKLVESQTAEKNRLLKLLESANIKLASVVSDVFGVSGMEMLDEILAGESTPEQMAQLARGRMRPKRGALTRALEGRVDAHHRLLLGMQLRRLRQVGTDLAELDRCIDAQLTPYRQPHTLLMQIPGVDAVVAAVMIAELGVDMSVFHSVRHLAAWAGVCPGNHESAGKRKSGRVRWGNVLLKTTLVEAAMAAAFAKGTYLKDKFFRLKARRGYKRATMAIAHKILVAAYHMLSTGQDYQDLGEAYLDRVKEQFVAKHLVRRLERLGYHVQLERKAA

SEQ ID NO: 248326 - protein, 351 aa, unidentified
MNKVTTLGIDLAKTVFQLHGVDVAGKVVWRREVRRAQLMKFVAQLEPCLIGIEACGGANYWARRFAEFGHQVKMMSPQFVKPYRKSDKNDRNDAEAICEAVTRPSMRFVAVKSVEQQDMLTMHRVREGLMKERVALINRIRGSLSEYGIVIAKDVSNLRRELPGILEDAENELTAVARQLFSELYEDLGAREQRIRQLEHSIRALGSQHDVVRRLQTVPGIGYLSATALYGTVGDAKHYRNGRQLAAWMGLVPRQSSSGGKQRLLGITKRGDKYLRKLLVHGARSITTRAERTPRPPDRWLNELRERRGKPRSYVAQANKTARIAWAIMAKGEVYRAPTTAALEASAAVEA

SEQ ID NO: 248327 - protein, 371 aa, unidentified
MTVLAESVDAVIGVDTHRDTLSAAVVTPIGAVVADHQVAASAAGYRTLLEFGRVHVPGMRCWALEGAGSYGAGLSAFLTEQGEQVVEVARPKRPARAAGRKSDGIDAVRAAREALSCNHPVVPRSRGEREALRVLISTRASAVTARTRAINHLKALIVSAPEELRAELRGKTSDTQISYCAALRPRPSRDIEHRMTARALQSTAQRILTLRREVDELEAEIQPLVTAIRPDLLGLPGVGPISAAQILISWSHPGRFRSEAAFATFSGAAPIPASSGLTNRHRLNRSGDRQLNRALHTIVLTRARIDPDTRAYIARRTSEGKTSREAKRCLKRIMARQIYKLLEPPVSTRSHAQLTALGQSPGTVETPLSGI

SEQ ID NO: 248328 - protein, 363 aa, unidentified
MDKKSSKKYSWFIGIDVSRNELDFAVMKSKTIIFHREIPNEVQTIKDFITELKARQGFTVSKTIFCMENTGFYSNHLLQVLQHFKANIVVENAMKIKNSLGNIRGKNDKIDAMRIAEYTYLHQENLRFWSPRRPVIDQLAELTALRLRLQGLSVGLTTSVHEQRSFVNKRIFKENLKLCTRSIEAVKLDLMDIEEAILKVINEDDQLRRLRDIIVSVDYVGAVTATEMLVCTNEFRDIKDPKKFACYAGVAPFPKESGKMKVRSRVSPLANKKMKSLLHMCALLAMRHCPELRPYFLRKVEQEGKPKMAVLNALRYKLILRIFACVNQNREFEKEYTRQSLPMPDPIFDTTITEAEISHLTCR

SEQ ID NO: 248329 - protein, 312 aa, unidentified
MERIIERCAGLDVHQDTVVATVRVPAEDGGRRQETRTFGTTTSQLLELSEWLVGFGVTLVGMEATGVYSKPVFWVLEDHVECWLLNAKHLRHAPGRKTDVSDSAWICQLVEHGLVRPSFVPPKPIRELRDLTRYRRAQIEERTRVVQRLEKVLQDAGIKLTSVASRILSVSGRDMLEAMLAGERDPQVLAGLARGRMCEKIPQLADALAGRFRSEHHRLMIAQMLAHVDFLDAAIGALTVRIDELMVPFAPIRARVMTMPGVKARTADQLIAECGVDMDRFPTAADLASWAGVLPGQQRLGRQAAPDPHPAR

SEQ ID NO: 248330 - protein, 338 aa, unidentified
MSMYCGIDLHSTKSWVAVLDDQLKVVQEAGLGNNLEEIVRLLEPYREEIEGIAVESTWNWYWLVDGLMEAGYRVHLTNTWAAQQWDGLKYTDDRHDARWLARLLKLGILPEGYIYPKEERSVRDLLRRRAFLVRKRTSFLLSMRGSFECRTGKRTSSDALKRWTAEDVEKYVDDSVAALGITSLLEPMNALSAEIRTIEREALSRARLRDEFAPLLTVWGVGKILALTIMYEVGDIERFRKVGNFTSYCRLVKTSRLSVGKPKGSGNRKNGNPYLSWAFSEAAHHANRHHEQARRYFQRKRSKTNNIVAIRALAHKLARASYHVMRDQVDFDAARLFR

SEQ ID NO: 248331 - protein, 458 aa, unidentified
MKNVYLGADVSKGYCDFMLLDAKKRRIEKDFQLDDTFDGHQKLYHILSALCDQHPNAQIYAAVESTGGYENNWFNAMIKFQSSLPLKTARLNPCGVHNNSKAGLQRNITDPISAENVAKYLIEHPENVTYQQQDPLASLRKQWSFVKMLSKQKTQLLNQLESNLYAANPEVLGYCKNGVPNWVLSVLARCPTAAKLAKAKKSSLALIPYVTEQKAKELIQRAKKSVASATDPITAQIIKATVAQIRQLTKAIEAQEKILTQSCSIPEVQLLKTFPGIGDISAIGLILEIGSVERFATAKKLASFFGLHPLYKQSGDGKWGFHMSKKGRIVPRQILYMVAMVALQCNPLIAEIYLKHTEKGMKKKAALGLCMHKICRIIYGMLKHNSAFDANIDRNNRKKSLKANATKIRKDKTRRYQSYDAKAPISGRHNKKRKERKQSQSDNIANNGIIKASVPASV

SEQ ID NO: 248332 - protein, 338 aa, unidentified
MKVYVGMDLHATNTYVGMVDEENEVLHKQRFRNELPLILAGLDPFRKDIQGVVVESTFNWYWLVDGLMAEGYRVHLANVSAIKQYEGLKQIDDKRSAFWLANLLRLGILPTGYIYPKEERPTRDLLRKRLHLVRHRTSHILSVKNILARNLGLRMKSEEVKKLEDPEVRRFFPDKEMQTAVLASVGLIRHLEVQISGIERMITKKLKIRKEFAKLMTIPGIGKILTLTIMLEVGDIRRFPTVGDYSSSCRCVKSIRTSAGKLIGYGNRKNGNKYLSWAYIEAAQAARRFHETVRSSYEKKMAKTNRIVAIKALSHKLTRASYYVMRDQVDYDPARLFR

SEQ ID NO: 248333 - protein, 402 aa, unidentified
MNCVGIDVSKGKSMIAVMRPFGEVVVSPFEVRHTASELSELARLLKNLDGETRVVMESTGNYHAPVAWLLHDAGLYVSVVNAMLVHDYGNNSLRRGKTDKKDAVKLANYGLDHWLTLPRYVPEEDTRLMLKTCYRQYQQYSKVQTMLKNNLISLLDTAFPDANRLFTSPPRADGSEKWVDFVATFWHCECVCGLSKKAFTAKYQKWCRKHGYNFSEDKALDIYVSACGRFGVMPKTKTAKLLVEQAISQLQTTSAALAALKQEMQSLAASLPEYPVVMGMFGVGPTLGPQLIAEIGDVRRFHSKKALVAFAGIDAPPYQSGQIDVRSRSISKRGSASLRRTLFLVMGVLLQCAPMDEPVYQFMNKKRSEGKPYRVYMMASANKFLRIYYASVKAYLDSLEHD

SEQ ID NO: 248334 - protein, 405 aa, unidentified
MPYILALDVSMGHSYSVLYKDDTCLFEDEIEHTQRGFHALLEEIQHLPERPLIVFEATGIYSRPVEKFFQDHHFSYCLLNPLEAKKQMEESTLRSWKTDKSDAHRLAQTHLKNQRQPKEVQSNFYLEMRDLARFYQEIEKKITRLRMDLHNCLQLTFPELEQFFSNRLTPYALTLIRLFPHPDFVLASTRTKIKNKLINETRKKISTNRAEQKADQIIHYAQCAYPAVEKDSIHCQKTIYYAELLQDLLEQKKALATQMIKKAEGSPCFLLYQTFPGIGALTAALLLGELGDITRFKTHKQLNAFVGIDIRRYHSGKYTGQDRINKRGNPKARKIIFFTIRNMIRQQRAAPNHIVDYYYKLKKQPIPKKEKVATVACMNKLLKCMHAMVRAHTEYDYAYAVSVDH

SEQ ID NO: 248335 - protein, 464 aa, unidentified
MIKRKRSSEKKVVPTSLPVIRPKVAGIDIGSRDHWVCGPPRADGQPNVKVFRSTTAVLHELVDWLIEQGVDSVAMESTSVYWIPLYEILESRGIEAVLVNARQLHNVPGRKTDYHDCQWIQLLHSCGLLRGSFRPSDAVVSLRATQRQVANLVEERTRYVQWMQKALDQMNVQVHRAVADLTGNTGLAIVRAIVAGERNPLRLAAYRDPRCHKSKEEIAQYLTGNWREEHLFNLASSLRLFDAVEELMASYQARFLKSIEALQLAGQQNASVPRHHNPAKEKDIRSHGDQQNRTALWRFSGVDLTRIDGIAIGVASTILTEVGRDLSAFPSEAHFVSWLRLCPRTAISGGKPLAKKRNGLGANRVANALRMAACTLRRSKTALGAAYRRIARHKGAAVAVFALARKLAQLVFRMLRYGTDYVDTGEKAYELQFEKRRLAGLTEAAKSLGYALVPNQPPPSTSPG

SEQ ID NO: 248336 - protein, 386 aa, unidentified
MTTLTRTQESIALLPAAPIHLLLAFELGERSWKLGFTTGLGQRPRIRQVPAGAVDQVLEEIARAKVRLKLPADTPVVSCYEAGRDGVWLHRYLVAHAITNHVVDSSSIEVNRRARRAKTDRLDLAGLLNLLARYLLGDRRVWRVVRVPSVADEDARQPHRTWETVQQDRTRLICRLQGLLTTQGVRLRIAADFLSRLDAARLWDGTPVPAGLKARLTRVWAQLELLDVQLEELETARTKLTVDPETAMGRYVTRLPTLRGVGPIGAWVLATEIFGWRQIQNARQLGGLVGLVPAPYQSGETSHDQGITRAGNKHVRRLMVQLAWSWLRYQPTSALSRWYRERFGGGGKRMRRIGIVALARKLLIALWRFVESGTVPEGAQLKETAM

SEQ ID NO: 248337 - protein, 354 aa, unidentified
MPQISNTAVAVIGIDIGKNSFHVVGHDARGAIVLRQKWSRGQVEARLANIPPCLIGMEACVGAHHLSRKLASLGHDARLMPAKYVRPYSKGQKNDFNDAEAIAEAVQRPTMKFVATKTAEQLDLQALHRVRERLVSQRTGIINQIRAFMLERGIAVRQGIGFLRKELPTILATRTDILSPRMLRVIEELAGDWRRLDQRIDGLSGEIEALARQDQACSRLMTVPGIGPIISSAMVAAIGTGDVFSKGRDFGAWLGLVPKQISTGDRTILGKISRRGNRYLRVLFVQAAWVVLVKIKDWERYGLKSWIEAAKKRLHHNVLAIALANKLARIAWAVLAKGRAFELTRTDDAGVRPA

SEQ ID NO: 248338 - protein, 402 aa, unidentified
MKEDSKGQTRGKARKAGNESRPGAQDIQTVLKAHEQRFAGSGNGDTGRKAPEVRFVGIDLGDKKSVCCFLDREGTIVAEEKFSTTREECAELFSKIPTLRIALEVGTHSPWVSEQLKSYGHEVIVANPRKMESIHKNKRKNDKVDARTLARLVRADPELLYPIRHRGAEARNDLVMIRARDALVSVRTDLICCVRGLVKSSGSRLPKCSAESFHKKAKDMLPEVLRPSLAPLLVQIGSLTTRIHKYDLAVSRLAQKKYPETSLLQQVNGVGDLTSVAYVLTLEKPERFAKSRDVGPYLGLIPRQDESGESSKQLGITKTGDRMVRRLMVGSAHYILGPFGKDCDLRQFGLKLAARGGKNAKKRAVVAVARKLGVLLHRLWLTGETYEPLRQKTSETIGLSSN

SEQ ID NO: 248339 - protein, 412 aa, unidentified
MQDILTCVMGLDVHRDIIVACLVRGAVDAEPEAETRTFSTLIPEMQKLRDWVIEAECRNIAMESTGIYWQPIYEMLESCFDGEISILVVNARHMKNVPGRKTDMKDAQWIATLLRAGLLKGSFIPDKTFRELRHLTRYRKSVVHDITAQKNRIDKFLQSSGFRFTAFLSDTFGASGRNIIRHLIEHGSIDREALDKCLKTKTRNRIDEILVALNGSLSVHQRRFLNMVFLHLEDLEAHKHTIEDEITEEVLKHTDALNLLCSIPGIDVTAAAAIVAEIGTDMSAFPDSQHICSWAGLSPGNNESAGKRKSVHINKGNPYLKSMLCETAWIMASHRKLYLSGWYWKVKQRKGAKRATIALARKVLSIIYTMLKTGTPYSEECFEQRRQRCERKRANRMVNELQKLGYTVVAPN

SEQ ID NO: 248340 - protein, 385 aa, unidentified
MGSHGNVSQMGLDCHRNFSRATARDGAGKVVWRQRLEHADRTRLREQLRQWPKVPVVLEGTFGWSWMSDELGDAGLDPHLSSSRKVAAWREARGMAKTNKRDADLLSELWSEKQNWWEVWLAPREVRDQRELLRYRTTLVRMQTSVKNRVHATLHRHGVLHPFGDLFGVAGMKFLQQLASDDTLRDSSRVTLAGYLKLLGQVRRQIAAATRQLKGQVRRSDEGNRWRSLPGVSWVLAYTILAEVGRIERFKDGRRLSSYSLLAPIADDSGDEDPGARPVGRHVGHVGRRTLKWAFIAAARGAVSKSAFFRAIFDRRTDGGKRDRGRGYIAVARELCRVGYSCVKNGRIYQEQRPERMNKKASDLLVRECVGPDRPLAGADVVAVR

SEQ ID NO: 248341 - protein, 377 aa, unidentified
MIIAVGIDVHKDKCAACARFAGKGEPKPKHEEFLENFNKEFRRFDSDYRGMTAFADALRDHEVHVLIENSTKSHDVYWMLRNLGIDVIVAHASDLKRITESQTKNDDNDAFELAGYMRRRLWGEDEFAESHIPEPETLLRREVCRFDLNLRTELSALKRQIRSHMLIRGWKLTRDYKDIVCASALRELKHSGIDIFLYDVAKAEYLKKLIFETERNIRFRMEGDPLFDGVWSIPGFGVLSAAYFSCMIDDISRFPDGKSFSAHLGLTPKLDESADKGKNCGMSRRGDPNMRRLIAQATFVHIFHADSFISRKYQRLKSRGKKHSEALVACANSMARLVFAILRDGSRYQADPSVLAKARALADSDEVEDEMEAVGSR

SEQ ID NO: 248342 - protein, 417 aa, unidentified
MEYARMSLPAVPQGGVTAGIDWASADHAACVVDAAGKAVARFTVEHTAAGLAELVRRLRKAGAAEAAIERGDGPVVDALLGAGITVVVITPNQVKNLRSRYGSAGNKDDRFDAFVLADTLRTDRGRLRPLEPDAPATVALRCAVRARRDLVTHRVALCNQLRAHLQGCFPGAVGLFKDLDSPVSLAFLARFDCQDRAGWLSPGRMAAWLKSQGYSGRKDPAVLHARLAAAPRGAAGDDGAAQARVTRALLAVLAALVAQIKNLDAQIAEQLALHADAHVFTSLPRSGTVRAARLLAETGDCRGRFPTPESLICAAGVAPSTRQSGKTKAVTFRWAADKQLRDAVCDFAGDSRRASPWAARLYHDAIARGHDHPHAVRIVARAWLYVIWHCWQDGTAYDPARHKALQRILAEEKPAAA

SEQ ID NO: 248343 - protein, 312 aa, unidentified
MTEHYYCGIDVAKDRLDVMVLPDRKSFSVDNNAAGYSELVKRLRGLAIAAIGIEPSGGYERAVIRALLAADLSVRRINPNKLRQFARARGVLAKNDRLDARLIAEYVAIMPTRVVQHDPATEQLAEVVTMRRQLCDEHVAVENQTAHLEDAILRRLNKRRLARLEADILLLDRRMAQIVASNANLTRRYELLTSMQGVGPTLAFTLIALLPELGQMSRKQIAALVGLAPYDFDSGRLKGHRCIYGGRLPVRNVLYMAALSACRYNPALKVFYRRLAATNKKPKVIIVAVMRKMITTLNAMLRDNVAWQPKSA

SEQ ID NO: 248344 - protein, 355 aa, unidentified
MNQEKYIGMDVHQATISVAVMDSSGKLIMECILETKAATILEFIAGLRGTLSVTFEEGTSAAWLHDLLKPHVSHLVVCDPRRNALLKDGSKSDRIDARKLAELLHANKLHAVYHGEHGVRTLKELGRSYLTITKDLTRVMSRIKALYRSWAIPCSGATVYAPRHRDEWLAKIPHPGVRLRAERLYPQLDVLQPVRQEARRDLLVESHKHHAVKLLRQIPSIGPIRAALLVALLQTPHRFRTKRQLWAYSGFAVEIHDSGEYRYVRGKLQRNRERITVRGLNHNHNHDLKNLFKGAAQSASTRPGPLCDFYVALVEKGMRPTMARLTLARKMAAMALIIWKKGVDFDAKQLNRQAA

SEQ ID NO: 248345 - protein, 393 aa, unidentified
MICVGIDVAKDKHDCFILSSEGEVLADVFTIQNNAEGFDTLLQTIRRCVCPGDKIKVGLEATGHYSYNILGFLLDKGLDTYVINPLHTNLYRKSLSLRKTKTDRVDARTIAAMLMSDVDLKSYTDTAYHNEELKSLTRYRFDKVRERAKLKQSVSRLVTILFPELEKLVPSLHMASVYALLSEFPGAKQVAGAHLTHLKAVLYDASKGRYGRDMATTLREAARCSVGSVMPTKSLELQHTIRLIRELDAEIEDVEAAIQSMMDEMQSPIMTIPGIGVRMGAMILAEIGDFSRFDSPDKILAYAGMSPSTYQSGQLSLSGAYSHMEKRGSRYLRYALYNATKYVCLWDPVFAAYLAKKRTEGKHYNVALSHAAKKLVRLIYAMEKSRQSYRNAA

SEQ ID NO: 248346 - protein, 366 aa, unidentified
MTSVPSAAGLIHLGMDTSVNEIVVAVLRPGEEVPVVDRICGDEESVRRLIGRFPDRRLLSACYEAGPGGYELHRLLTSMGVACDVVAPSLIPKGSSDRVKTGKRDSVRLALPHRAGLLTPVRVPSPAEEAVRDLVRARGDLLDDRKRMQQRLNAMLLRHGRVWRGGKKWSYAHRAWVDRQVFDEPALAEAFALYRGGLEAREAELAAAGARLAAWAGREPLAGPVTRLGGYRGIARLTGLTLAAEVVDWRRFASARAFMGFAGLIPTEYSSGSRTRRGHITKAGPEGVRTALIEAAWAYRYRPAIGATLRRRQAGLPPETLARSWKAQQRLHAKYAKMTARGKPPGVAVVAVARELAGFVWAEMTT

SEQ ID NO: 248347 - protein, 415 aa, unidentified
MDILYSNVAGLDVHLRSIFVAVRRVSASKRARVREEVRTFGTMTNDILQLRDWLKTMGVTHVAMEATGVLWKPIWNLLEGHFTLLLVNPRELKQVPGRKSDVRDCQWIAHLLQCGLLHSSFVPERAQRELRDLTRHRAQLRNEQTRIANRIHKVLEDTNIKLGAVATDLLGKSGRKILRALLQGEHDPVKLADLAERKLRKKIPQLRLALVGHFTEHHHFLIAHLLDHLDFLERQIDALSARIENCLQPFVSSEQFDRLDKIGGVNRCTIENVVAEIGVNMNQFPSADHLSSWAGVSPGNDKSAGKIKRKRCTLGNRWLKRALTEAAWASSHCKNCYLAAQFHRLAGRRGKKRALQAVAHSILVIFYHMLKSPVEYQDLGKDYFDRLHPERLSRYLVKRLEALGYEVALSPRQAA

SEQ ID NO: 248348 - protein, 422 aa, unidentified
MSYCPVAGIDVSKRFSDMCILSPDNKIFAQEKIYHDGTSINRANALLQKAERLFFSKPVIVMESTSHYHLILFQFFSEHGYDVIVVNPLQSNSMKDFSIRKRKTDRVDAFKLAMMYRTKTLRPSQIPQTATRALRQLCRHRAELLNDVSSYKNRLTALLDQTFPGYDKVFSDVGGVTSCAVLVRFPTPTILLVEEESELVEVIAAASKSGYSFAKKKAGLLISAAQKAQTLGIHSCADETLIVCTIQMLRTLSESVLQIETAIDNLLAQIKEMRNNVSLLQSIPGIGSHSAALLLGEIGDISLFKKPKQLAAYFGLDPTERQSGSFRGTKNKLSKRGSPYARAALHMGVVNSICKRGKDSAANPVLLSYYEKKCKNKPAKVAQAASMHKLVFIVFAILRDQKPFELKTPEQHAVEQGFVKAA

SEQ ID NO: 248349 - protein, 400 aa, unidentified
MDVHEKKVDVCIAHGPFDKPPKFEIRTFSTMTSDLEELMTWLNKYEVTTIGMESTGVYWKPIFNVMEGQFEIVLANAQRLKAIPRKKTDIMDCKRIANLLRYGLLPNSFIPPKEIRELRDLNRTRRKLVGMMTSEKNRLVKVLESANIKLSSVVTKIYGVSSLALIRSLLEKDKLSREEISKMAKGKLKKKVDLLEKAVNGKLTDHHRFLLEMHLQNIDHLAKQIKKLDEEIEKKMVPFQKESNLIQTIPGISEVNASAILAEIGVDMSQFPDEAHLSSWAGVCPGNNESAGKKKSGKTQKGNSFLKAALTEAAWAASKTKNTSYNAFYHNLVRRKGKKKTLVALAHRMLIDIYFVLKTGEPYQDMGAEAVHERTSKRKERSMIRSLEKAGYSVTRTATA

SEQ ID NO: 248350 - protein, 365 aa, unidentified
MQKISTMRTSGKNIFQGQLTIGLDLGDRSSAYCVLNEAGEIVLEHKLATTPEAMKQVFGSMPRCRIAMETGTHSPWVSRLLTALGHEVIVAHAQKVRLITKSRRKDDRLDARTLARLARIDPELLSPVKHRSAQAQLHLTEIRARAVLVSARTALVNAARGLVKSYGERLRKCGTEQFRRETTSGLSAGLREALEPLLREVESLNERIQEYDRRIEKMSKVTYPETALLKQIKGVGNLIATTYVLTLEDPHRFRKSRDAGCFVGLQPGRRNSGESEPQMRISKEGDEYLRTLLVQGAHYILGPFGEDSDLRRWGRKLSARGGKTAKKRAVVAVARKLAVLLHRLWVSGEVYEPLRNSQKTMNPAA

SEQ ID NO: 248351 - protein, 424 aa, unidentified
MNFTQNEKLNQVTADTLIVGVDIGSQTHFARAFDWRGVEQGKRVFKFSNTGVGFLTFMKWLYEMQQRTAKKKIIVGCEPTGCYWLTFQSFLEKQGIKLVTVNPYSVKKSKELDDNSPEKSDLKDPKTIAGLVKDGRYSTSYIPTGVYAEIREASVCRDQIMKQHVRLSNQIQGWLQKYFPEYLECYSDFDSTSGLMLLQYAPLPHDIVKLGAGGINEIWRNAKVRAAGLKRAQTLVEAAGNSVGLDGGEAAKLEIWILVNDYIAKKQQLERLDEYLAQKVMEVPNVEKLLAIKGVGLSTVTGFIAEVGDIGRFTDPKQIQKLAGLEITKTSSGKKKGQPGISKRGRSKLRRTMYESARALMNWNPAFADVFLYYRNRTRNPLGGMQAKIAVACKAIRVFYTILKTGCDFDEMKFREDIIRPEAA

SEQ ID NO: 248352 - protein, 355 aa, unidentified
MIIIGVDYHPSFQQIAFMDEKTGECGERQLNHSDGEAEKFYRELQQRGVSVRVGMEATGYSRWFERLLAELGFEVWIGDAAEIKRLRVRKQKTDREDARLMRKLLLENRFPRIWVPSPENRDLRQLLWHRHRLVQMRTRIMNQLQAVAMNEGYRWKKKLFSEKGRALLEKLSLAPWASRRRKELLELLDQLDPKIAELTAAVEQEANQRPEVLLLMTHPGVGPITGLVYVLVIGTPDRFPSGKKVGSYIGLIPSEDSSAGRQRLGHISKQGNALLRYLLGEAAQAAVRTNADWRRRYVHLAMRRQKSIAKVAMARKLGVRLYWMWRNGWDYSQLVEFGSNAGKLATRHGVKYCVV

SEQ ID NO: 248353 - protein, 367 aa, unidentified
MLYLGIDQHKRQLTVSLRGEDGSVILKRQVSTQWEKVRAFFADLAEKARPEGGFLAILEVCGMNPWLVEMLQQYGCRETIVIQPTERSKQKTDRRDAGGLSHLLWIHRQQFLAGKHPLGLRRVQPPTAQEADDRQLTALRARLTKKRTAVLNGIHKILRKHNLEQECPTKVFQTQKVRRWLAEMKLSTIDRLELDLLLPQWEMLDGHLEVVEAKIAERAIGDEQARLLESMPGIGHYSAVAIASRIGGIERFQRPDSLANYFGLTPGCRNSGEATQRLGSITKQGSKIVRYLLGQAVVKVLRFDGVMRAWFKRIKRRRGAKIARVAVMRRLATIMWHMLKKKQKYRYELPIKKHREFEEFEGAVEAA

SEQ ID NO: 248354 - protein, 407 aa, unidentified
MKKNSNSEMKSNRTVKPRARGPVQREAKEVMAELLTKLSEKLNPQLAGSSAENGLNRDRLTVGVDLGDQWSNYCILGLEGEKLAEGKVRTEQEEITELFRAMTPARVVMEVGTHSAWVREVVVGFGHEVLVANPRQMDGPKRRRKNDRIDAHKLARVGRVDPQSLFPIEHRSIAVRQDLVALRARDALVTVRTELINTTRGLVKTLGERLPKCSSESFPRRAEGALPQSVREVLLPLVRLVETLSSCIEVYDKRIEKLATEKYEHTELLRQVKGVGPLTSLAYVLTLENPERFAKSRDVGPYLGLVPKQEDSGESQPQLRITKTGDEMVRRLLVGSAQYILGPFGPDTDLRRYGLRLCERGGKNAKKRAAVAVARKLAVLLHRLWVSGEVYEPLRHARPPATDQAAA

SEQ ID NO: 248355 - protein, 362 aa, unidentified
MRDTMRFVGLDVHSRGTRAAVLDVASGELRRRRLSSEPEVLVEFLSGLGSSSLAVYEAGPAGFHLARAAAAAALEVRVCAPGLIPKKPTDRVKTDARDAERLARLLAAGELSFVRVPTVEEEQVRDLVRAREDLRCDLMRARQRLTRFLLRRGARFEGPGASWGPEHMRWLTRRVAFEDPASVAAFADYLAAVCALVQRRSALESALEEIAPRSPWSTEVARLSCFRGVSTLTAIGISAEVGDFARFSTPSKLSGYLGIVPSEHTSDSRRRQGAITKAGPRHARRLLIEAAWHAYRPPRVGEVLKRRQHGQDPRVCEIAWRCQQRLYTQWQKLTARRTPAGVAVVACARELSTFLWEAAVLN

SEQ ID NO: 248356 - protein, 346 aa, unidentified
MEEYARKQYAGVDVSLRSVSICVSDGSGKVLWRGEVMNEPGVVSAALSRHAPGLVLAVLETDSCGIHLYRGLEAMGVPIVCVCARHAKGVLKCKVNKTDNNDAEGLAQLARTGWYREVYVKSADAHVIRAHLLACRQVGKARRDIENQIRAMLRVFGIKVGTVARGRFEERVWRLVEQVPALRLPIDQLLLARCSLLESQNALECEAKRLAKADKHYQILQTMPGVGPLTALAFVSAMDGPARFARSSSVGAYLGLTPRSYQSGEVAWSGRISKTGDAVARALFYEAANSLMVRVKAWSPLKVWTHKLAERIGGKKVRVALARKMAFVLHRMLSDGTGYKWSVKAV

SEQ ID NO: 248357 - protein, 500 aa, unidentified
MACSLVTPRVPSVGAIPSGRLLVPVPLSTVPTPILDPLAVPRQDTMIMGRRKDPSPPTPTPTAATLTIVHPHAAAIDVHSDTHVVCVGPGQVHSFGAYTADLHALADHLTGHGITAVVLESTGVYWVPLFEVLEAKGFEVALIEPSQARHCGARPKTDVLDCQWLQRLHAFGLLRPSFRPPDSVLALRGYWRQRQTLVRYAASHVQHMQKALEQMNVKLTEVAADITGVTGTAIITAILQGERDPQTLARLRDKRCAKSQEEYALALEGTWRPEHLFALKQAFELYQFHQRQITECDQQIAAELAKLPDRAGGKTFDVKPRKRGRKSHDVRFEATGPLFRALGVDLTLIDGIDVSTALVILGEIGVDVNRFPTEKHFASWLRLCPQLEQSNHTTKTRSPLRGKNRVAQALRMAAQSVSRTKTPLAAFYHRIKARLGGRGAITATAHKLALLVYRVLRYGLEYVRQSLEEYAANVRAQAERSLRRKATQLGYELVPKAAPT

SEQ ID NO: 248358 - protein, 343 aa, unidentified
MQTVTTIGLDIAKSVFQVHAVDAAGKVIIRRQLKRRYVLAFFEKLPPCLIGIEACASSHHWSRELQALGHSVRLMPPAYVKPYVKRQKNDATDAEAICEAVTRANMRFVETKTADQQGGLVLHRTRHLCMRQQTSVINAIRAHLAEFGVVAPVGRNGVEELLRVVADPDDKRVPEVARVCLVALGAQLRRLKDQVLEFDRMITAWHRSNKMSIRLDECPGVGPVLATALVATVADPKSFRSGRNFSAWIGLVPKQHSSGGKDRLGSISKQGDRYLRSLFVIGALAVIRYAKVHGTRHRPWLTALLARRPAKVAAIALANKIARMVWAMMAKCERYKEPVALAA

SEQ ID NO: 248359 - protein, 403 aa, unidentified
MTVRPLVWIGIDVGKTSHHACAVDETGKVLWNQKVSNEQRAIEQLIARAHKGADEARWAIDLTSPMALMLITVLLGAEQSVVYVPGHVVNTMTGAFRGEGKTDAKDARVIAETARMRSDLSAVAMPDELVVELAQLTGYRTDVMADWVRGVNRLRSLLGSIFPGLEAAFDYSNRTPLILVAHLCTPADIRAAGIKGVTAYLGDNGGWPTAIAKTAATAVAAAKQQPLALPGEAGTAALVKRLARKLLDLDHEIKDIDKTITERFRDHPYAHIIESLPGFGPGLGAEFVVVTGGDLASFATAGRLASYAGLVPVPRDSGRISGNLHRPKRYNRRLRRVFYMAALSSIRGDGPSRQFYDRKRGERLIHSQALLALARRLVDVLWALLRDGREFTPDKPTPATATA

SEQ ID NO: 248360 - protein, 344 aa, unidentified
MEQVYYVGLDIHKKIIAFCIKQVDGTIVAEGKIDANRKALKQWAESTPGPWIGAMEATIFTGWVYDFLKPYARQLQVGNPLMMKAITAAKKKNDKLDARTIADLVRCNLLPCCYMAGEEMRDLRRVLRYRNLLVRQAVRMKNRMATLLMETGQEYNKKKLHGAKYFRELLEKLSDVPESFKEILQMSRGALELFESCQKRLLKGLVNNEVLRERVQRLMSIQGVGEVTALSWALEIGDVQRFSSIRKASSYCGLCSAQVESGGKITRMPLSKQRNKHLQSVLIEAAKLAPLYNQELADVYNKEQQRGNNHNQATITVARKLVAFLLAVDKSGKAFVKKAEKQAA

SEQ ID NO: 248361 - protein, 414 aa, unidentified
MQVLYSHCAGLDVHKRTVVACCLTPDPQGGWQQERRTFPTMTVDLLALADWLREHGVTHVAMESTGEYWRPVFNILEAEFETLLVNAAHVKNGPGRKTDVRDAQWLAELLQHGLLRASFIPPVPVRELRDLVRHRSNFVRERATLVNRVQKVLEAANIKLASVATDVMGVCGRRMLAAIVAGEADPELLAELARGRLARKRDELAKALAGRVLPHHRFVLTELLCQIDSFDETIARFDEQIVTAARPFAEAVERLDTIPGVGRETAQVIVAEIGVDMSRFPSANHLAAWAGVAPGNCESGGERLSGRTRKGNQALRHGSVQAAHGAARMKNTFLAAQYQRLARRRGSKRAVLAVAHSILVIAYHLLERQEEYRELGGDYFDRQRPEATAKRLTHRLERLGYRVIIQKPEEAVTA

SEQ ID NO: 248362 - protein, 369 aa, unidentified
MEWENRQLSVGIDLHKTQFTVCALAPSGEIVHECVYPTTNEGYDEFAQWAHEVEKQRNLYTVLAVEATGNARYFKNFMEAEGFGVKVINTAKFKVIVKSAVKNDRRDAYTIAFFLLKDFIPESHLCSQYEEDLRRLLKTRSLLVQQTVAIKNNIHGMMLSYGYTTTAAQFQSKKSQKQLLKELEAHTQFNKEATGILNTMIEVLEKTSQMIKEVEEQLEKYVQEDEEVQLLQTIPGVGKIMSATIAAWIGDINNFESYKQFASYCGLVPYLKESNESTYLGHITKRGPRELRTALVQVVMGLLRLQSKYPTWRIYSKYSSLKSDKGSGRAIVACARKMSRVIYCMLKDQKPFDYSLMDRNSARMKSICA

SEQ ID NO: 248363 - protein, 364 aa, unidentified
MQYVSNNTELSSHEETRCQFNGSTGVIKLGIDVHQQFYTAVVQEGGSNPKPPQRFRKEAFLHWAARLKQLGAAVHAVYEACGFGFGLQRQLAALGIACHVVCPQKLDEHNRRVKTDSLDAKALCLKLDRFVQGNQDALALVRVPTEQEEQLRAIHRQREQLVKARKQLEAQGRSLMVNHGIEPVQSWWKLRTFAALPVPAWLKELLANSQPILIALQEKIRVLSLQLQSAAGPDQPRGLGAMSSVVIDREIGNWHRFRNRRQVGSYTGLCPGEHSSGNTRLQSCVTKHGNPRLRAALVELAWRLVRFQPNYRPIVKWNEVLRKGALATGAARKKAIVAVARQLAVDLWRIRTGRVRAETLGLIN

SEQ ID NO: 248364 - protein, 343 aa, unidentified
MDHFAGLDVSVKETSVCIVDDTGRIVREMKVASEPQALLAVLKNPTYHFKRIGLEAGPLSQWLYSALAEAGLPVICVETRHMRAVLKAQINKTDRNDARGIAQMMRVGLYRPVHVKTLRSQKLRMLLTHRKLLQSKAIALENDLRGTLRNFGLKVGIAGKIKFEARIKELLENLPDLADLVEPLLVVRRVLREQLGILQRRLLAIVRDDEVCRRLMTTPGVGPVVALTYRATVDVPARFRKSKSVGAVFGLTCAKYQSGEIDQSGRISRCGDEMMRVMLYEAAQSMLLRSTRWSWLKAWAMQIARRRGMKKAIVALARRLAVIMHRIWVDRTEFRWTREVAAV

SEQ ID NO: 248365 - protein, 304 aa, unidentified
MNGIGIDVSKRQLDIGTTDGETLQVGNNRSGFSELDVWLKKRPTRQIVLEATGGYEQPVLDFLHKAGHPVARANALRARKLAQGLGQIAKTDRLDAYALAQMASLVKLPPYQPLQSWQQKMREFVRARRQAMDALTIARQQQEMVLDRELRRLLQGNITRLQTLVERLGKQIVEQVGQQPQLKMLKSMKGVGPVLQAVLASYLPELGRITGKRIASLVGVAPMSHDSGTMRGKRSIHGGRAEIRQVLYMAAMSAMRHEPRLRDFYQSLRARGKEGKVAIVAVMRKMLVILNARVRDAESGLVPA

SEQ ID NO: 248366 - protein, 394 aa, unidentified
MKLIGIDIGKNKHFFCIMDQQTGEIISQPISFSNDKEGFDFLIQKIKSYSKDSVLIGMEDTGHYHFALLKYLLNLQYTVALINPKTTDFNRKIQGGITKNDKLDTINICDVLDTPERKKQYRITKVNSFDLYEQKQLTRHHHSLKEEENVYKNRLQKCIDIVFPEFNKLFNSKYGTVYMNILKTFGSAENVANTDIRTIRKCFEIEGRGNRISLTPERLKECARSSIGISSSAEVIQIKHLTAQIELIEEQLTEIDKKIEEFSIQNNSPILSIPGISHFSGTSILAELGDISNYSKPSQIIKFAGVAPLHYESSQFNAQHTSITKKGSKYLRKTLYQIILPVIRHNQVFYKYYQLKISQGKGHRCAQGHCVRKLLRIIYHLLKTNQQFDPQLLR

SEQ ID NO: 248367 - protein, 588 aa, unidentified
MTRTASLSCTEVGVGIDTHRYFHQAEFLYGDVQPAAPGLNFEESVEGYAQLRQALEKIVARHPDVHFRIHLDAAGQYAANLERFLRGLPFKMTFSVGEPARNKHYRQAIAPKRGKRDVTDSYACGRFAVVERPSATPDNPEAFRFLREIAGRLESRVRQTTRAVNGLHNVLSRVFPELATIVGDLGAQYVLKLLARYPTPEKIARAQRQSLLSIPYLTAKKADQIQAAAKRSVGSVCGEIAEQLVGSQVGEVKHAKRAEKQMEELLLMTYRALPRTPHVQVQTIIGIGELTAAVLVAKVVAIDRFQTKGSLVCYFGAFPEPNQSGRDKYGNSVAVGTMEMSQQGSDLVRRYLWMAAKSAAQHNPAVRALYARLRARGKRGDVAYGHCMRKLLHLAFAVWKTDRPFDPNHYPWEKAAPGTKAQEETAGRKQDLPEKEAITAADSNVDAPTTPVKQSNASQPAGNGRWIDFASLRQQVTIEQVLQHVGCLEEMSKRGPQRRGRCPIHAKPDERDRSFSADVSKNVFQCFNPKCATHGNVLDFWAAWRRLPLREAALDLAETFHLPTSPNREEEPVGKNRSSAPPLSGAGT

SEQ ID NO: 248368 - protein, 339 aa, unidentified
MNRIVVGVDIAKRVFQLHWVEPQTGEIVALQLKRERFLEHFANRSSCLIGMEACGGSQHWARSLQKLGHEVKLMSARMVKPFVCGNKNDVADARGIWTAVQQPGIKAVAVKSEEQQAVLALHRMREQLVKFRTAQINGLRGLLTEYGEVMPQGRAGIKRDIRGALGRLSDRLPAMVIETLREQYARLSELDERIGQIERRLRQWQREDSATQRIAAIPGVGLLSATAAVATMGDAKAFKSGREFAAWLGLVPRQTGTGGRVRLLGISKRGDKYLRTLLIHGARSVLTRSKSPPEWLSELVKRRPKNVAVVAMANKMARTIWALTAHERAYQSGYVSRPA

SEQ ID NO: 248369 - protein, 358 aa, unidentified
MGLIAANTVIGMDIGLHHSWCEARTTASGPPLKEARLPNRPEEFRAFVEELPHPIRVVMEATGNWAYLYECWEPLVEEVQLAHPLKTKAIASARIKTDRIDKRILAQLGLADLVPQAYIPPREIRDLRDVLRHRAFLVRLQTKVKNRIHSALWKLGLEHGQTDLFGRAGLAWLQTVELREPFRALVDQDLRVLATLQQEIKTATRTIDRLATADPRVSWLLPIRGIGKYSALLVLAEIGDVTRFPAPKQLVAFAGLCPSTHQSGAATYHGRLTKQGSTWLRWVLVEAAQRYAKAPGRLGTFSRRLARKKGPNTAKVAVARELLVAIYHCLSRGVPFQEHPPTRVMSGKPPTPQMIPGR

SEQ ID NO: 248370 - protein, 425 aa, unidentified
MNYKQNEKINQVKESTFVVGIDIGSTTQYARVFDWRGIELGKVFTFSNSREGFEAFKAWMQHLQDKYRKSDVIVGIEPTGHYLFDLGAYLEDEGILLVMVNPYAVKQTKELDDNSQSKNDRKDPKVIAKLVTEGRYSAPYTPDGLYADLRIMVANRKRLIREMTQIKNRFARWFAIYFPEYTDVFGDYEAQSSMLLLKKVCTPEAIVELGAEKINQIWRDAKLRAVGMKRATTLCETAKRSIGLKKGSSAARYEMKLLLEDYEYKKAQLDAVMEEIEKLCRKIPESEQMLAIKGIGVITVAGFLAEVGDVRRFESPRQIQKLAGLSLRENSSGKHKGQTTISKRGRSKLRAVLFNAAIPLIAKNPEFKSLHEYYTTRANNPLKKKQSVIAISCKLIRVFYAILANGVTYDAQKMLSDIHRQPQAA

SEQ ID NO: 248371 - protein, 325 aa, unidentified
MQSETNYAGVDISKSFFDVAIPGQGKYDYYKFSNDEPGFKALSKVLPVGSHIIMEASGPYYLPLASYLSGFNIALSVVNPLIIRRFCQMRMSRTKTDKKDAMMIAEYGKTEKPGLWKIPDHHVINLQQMEALLSNLTKERTALNNQLESFIHSGMLDKQLKKMLVSELKHKEGLIKKINKTMEISAKQHYAEMLQDLESIPGMGKKTAMALIVISGGFDRFANYRKLSSYIGICPRLFESGTSVKGKARICKMGMSRIRAMLYVCSWSAMKYNKACKELYERLVAKGKAKKLALIAVANKLLKQAFAIATQKTKYNENYSNYICF

SEQ ID NO: 248372 - protein, 319 aa, unidentified
MFVGIDVAKGELVIAASPTAERWTVSNDERGVRTLVDRLQGVAPILIVLEATGGYELLCVAALAAAELPVVVVNPRQVRDFARATGQLAKTDRLDADVLAQFAEKVRPAVRPLPMPDAQELDALLTRRRQLLEMLGAERNRLGQVFGTGKRSVRKSLKTHIAFLERELRIADSDLDVAVRRSPLWREQEDLLRSVPGIGPVVSRTLLAGLPELGRLSRREIAKLVGVAPLSRDSGTLRGRRFVQGGRAPVRAVLYMAALVAARRNPVIRAFYLRLVAAGKPKKLALVACMRKLLTILNVMMRTKTRWTSEYAAPALVTA

SEQ ID NO: 248373 - protein, 424 aa, unidentified
MTQHQDTSILRVMHEVCCGLDVHKKLINACLITTDENGQEDSELRVFQTFTDDLYRLRDWLLDHNCPIVAMESTGIYWRPVHNILEGLFEIILVNARHFKNLPGKKTDMSDSHWICGLLRVGLLKGSFIPEKHVRQWRDLTRYRRSKIEDLGDAKRQVHKLFESANIKIDSVASQIFTRTGRNLMELLLKKGQELTLEEVKQCLRGKLRSKGEELYRAIQGFFEDHHRWLLEKMLANVEHLEQLINDIQLRLRSLLKPYEDSIDRLNEIPGIDFISAYSIISETGPTLSSFPNTASFCSWAGVCPGNNESAGKRHSGRSPVYKGNLKTILIEVAWAAVRAKRSYYRAKFFSLRSRLGPKKAIVAIAHRILKAIYHVLKHGAKFKDLGEDYLSNLHKNSKLNYLIRQAGKFGYTLTPSGVAEKSF

SEQ ID NO: 248374 - protein, 337 aa, unidentified
MKYCGIDLHSNNSLVVIIDEADHVVYSRRHANDLSQILSALAIHGAELSGVVVESTFNWYWLVDGLQEAGYRVHLANTTAIKQYDGLKHRGDESDARQLAHLLRLGLLPQGYIMPKAERAVRDLARKRMQLVQQRTTQILSIENSLSRHTGGRMSSNNIKCLQETDVNDMQLGEMQRLGLKANVAVMQALQVQIDSLEKVLAKHCRAEPDYRLLKTVDGIGEVLATVILLETGSIERFADVGNYASYCRCVGSAHVSNGKKKGEGNTKNGNRYLAWAFVEAANFAVRYCEAARRFYQKKKAKRNSTVAIKAVAHKLARACYHMLKGKEAFSVERCFA

SEQ ID NO: 248375 - protein, 403 aa, unidentified
MNSVGIDISKGRSTVAVMRPFGEVVISPFEVRHTDSELSELARQLKSLNGETRVVMEATGNYHAPVAKLLHDAGLYVSVVNAKLVHVYGNNDLRRVKTDRKDAVKLANYGLDRWLTLPRYVPEDDTRLLLKNCYRQYRQYSKVQTVLKNNLISLLDTVFPNVNRLFSSPAREDGSEKWVDFVAEFWHCRCVSEKSEKAFANKYQRWCRKYGYNFNEAKAHTIHAEASGHIGVMPMSETTKLLVEQAVAQLRATSTALAALKHEMQALTSMLPEYPVVMDMFGVGPTLGPQLIAEIGDVRRFYSKKALVAYAGLDAPPNDSGDVTGRHKSMSKIGASSLRRTLFLVMSVYLQTAPLDEPVYQFMDRKRAEGKPYRVYMMASANKFLRIYYATVKAYLESLEHTA

SEQ ID NO: 248376 - protein, 372 aa, unidentified
MTQSNILFIGMDVHKESIVISLADDDRSEVRRYGSIGGTMTDFKKTLRKLVSTNKSLFFCYEAGPCGYELYRFIVSQGHQCIVVAPSLIPKKAGDKIKTDKRDADNLTRLLRSGDLTPVFVPNAEDEAMRDLSRAREDVVLALKSAKQRLKSFLLRHNKRFDGSANWSEKHLRWLAEDVNMPHPEQKVVFQEYINSVTESNERVKRLDKEILFYAQQWRLFPVVKSLMALRGVRMVVAVTIMAELGDLTRFENPKQLMCFLGLTPSEYSSGDKQKKGAITKTGNQHARRVLVEAGWSYRFTAKVSKEMQKRHEDVPHNIRDIAWKAQLRLTKRFRVMANKGKPNNLIVVAMAREIAAFMWPIANEVPIRARN

SEQ ID NO: 248377 - protein, 409 aa, unidentified
MEVLVEICAGLDVHQATVVACVRRPGKRGRRTGDVRTFGTTTREILRLADWLTGEGVTHVAMESTGVFWKPVFNILEGHVEVILVNAQHYKAVPGRKTDVRDCEWLAQLLEHGLLRASFIPPQPIRDLRDLTRYRKSLVQHRATEGNRVHKLLESANIKLGIVATDILGVSGRAMLRALMAGEADGTVLAELAKGALRQKRGHLAEALTGRFTPHHAALLGELLAHIEYLESAIARLNERVEAAVRPYAGHVARLQTIPGVGREAAETMVAEIGVDMSRFPSAAHLASWAGVCPGNNESAGKRKTGKTRKGNRWLKPLLVECGWGAGRARRTYLGAQYARLGRRRGKKKAAIAVGHSILVAAYHILRERVPYRDLGPDHFDRLATERLTDHYVHRLEQLGHRVTLAPVA

SEQ ID NO: 248378 - protein, 426 aa, unidentified
MRVLYDRVAAIDVHKDMVKVAIRVPGVKRGTRKTDVLEFRTFYGVLQAMARELRGRGVTHVVMEASGVYTDPVYYALRELDFTEVMVINPAHAKALKGHKTDAKDAIRLLDLYECGLLSGSYIPDPDLREVRDLARYRMKTVQARTSEIQRLQKALETAGIKLSSVVSDVTGGSATAMIEALISGERRGSVMAGLAQTRLRTAGKMADLSMALTGRFTDHHALMCRLHRDRIKVFDDAVQDLDAKIAPLVARYAREAELLKTLPGFGDVIVAGWLGAIGPAPHQHFATASRLAAWATLCPGNYMSARKSKGGRTGDGGAYIKPLLIQAAWAAVRVPGRLQARFRRLVRKFGGPRNKGAQKRAITAIAHTLLKIAYSVLKTGTPYADLGADFYTRRESPDARQDYLIRQLHKLNPGCVITITPAETA

SEQ ID NO: 248379 - protein, 384 aa, unidentified
MQTVADRPEAPTAIRTDLGAIFVSLELSRSTWLITSLSPDGGEKMSKHVVRGGEVAGLLERFAQLREKTRARTGKVFPFVVIQEAGLDGFWIDRALQNEGIESHVVDPASIATSRRRRRAKTDRIDGEALVRALLAYKRGEPRVCAMVKAPTPEEEDRRRLCRERKVLIAERVRHVNRVKGLLFSQGISGYEPLRRDRRGWLDTLQTGDGRLLPDHLKAQVRRELDRLELLLEQIKTVEAERDVLLAAQQAPAAMLLDIKGIGPEFAAILWSEGLFRHFDNRRQVASYAGLAPTPWQSGSVDREQGVSKAGNPRLRTTLIQLAWLWLRHQPQSALALWFEERVRRNGGRLKKTTIVALARKLLVALWKYVTAGVVIEGAVMKVA

SEQ ID NO: 248380 - protein, 343 aa, unidentified
MNEYVGFDVSKEETSFCVIDEEGRILSQCKTPTDPDALFNAVKQSCHCPLRMVMETGTWSHWLVRELRHRGLPVDCIDARQAHAVMKLQHNKTDANDAYLLAQIARTGFCRPVAIKSEAAQDKRLLLKARSHLVRLRCKTESTIRGLLGALGIRFAKGSAKLPARVQAVLQQRPELNTAIAPLLDLIARLNKQTDCMDAEIEAAAKEHAACRLLMSVPGVGEVTAMAFVATIDDPERFAKSRSVGAYAGLTTRRYQSGEMDYSGKISKHGDGMLRSLLYEAAHSILCVVRKAHPLKDWARRIKKRTSHKKACVALARKLAVIMHKMLITGEPFRWPQQGDAVA

SEQ ID NO: 248381 - protein, 361 aa, unidentified
MAWTPPGLLLHDGGSHVKEIAMLTTFGLDIAKRVFQLHTVDPDTGEIQRLKLRRAEMVPFFANRGPCVVAMEACGSSHHWGRQLRSLGHDVRLIATKFVRPFVKSNKTDAADAQAIWEAAQRPGMRFVPVKTEQQQAILVLHAMRDGLVKGRTAQLHQIRAAFYELGIELPEGRHWCVKNLPSAFERLEAKIPAMVIEALRSQLELILNLTSRIDELERKLDAYRRMDERCDRLLRVPGVGLLTSTAIVAAVGDAREFRSGREFAAWLGLVPRQSGTGGKVRLLGISKRGSSYLRALVIHCARAVVARQKQHTTWLERLLRERPWNVAVVAQANKIARTIWALLAHERVYEADHRAVAIGG

SEQ ID NO: 248382 - protein, 328 aa, unidentified
MKKEKEPKQYCGIDVSGNTIDVCYTKTDGTMEWGQFENNRLGFKQLLKYCGTDYHYIMESTGVYHLPLAFFLQAQECMYSIINALQIKRFIQMNLERNKSDKKDAFHICNYGIMNTPEVYEMPERQYFECKSLNNAIEGITQELTSFKNKLHALSKLEIDKKAIEKSYKQIIKTLSAELLKLESELSNKLTTWQPELVKLVSSVVGIGKRATSLLIVSTQGFKHTSNYQQLISYVGLSPKEYTSGTSIKGKVRICKQGGGRLRHVLYMCALNAKETNKECKALFDRLVAKGKNKKLAVIAVCNKLLKQVFGVVKNQTMFDRNYLQKTA

SEQ ID NO: 248383 - protein, 343 aa, unidentified
MQIVRVGLDLAKYVFEVHGVDGRGKVVLRKTLRRDAVSSFFANLPSCLIGMEASNGAHYWARVLSGLGHEVRLISPQFVTPYVKSNKNDRNDAEAICEAVGRPTMRFVPAKSVDQLAVQAVHRIRSRLVSGRTRLANQIRGVLAEHGVIVARNIAKLRQNLADIVGNRGNGLSDLVRALVGELQQELADLDRRITTYDRRIRELYRGSEVCQRLGQIEGIGPLSATALVAAVGDRQGFKNGRQFAAWLGLVPKQRSSGGRDRLFGISKRGDRYLRTLLIHGARAALGRAVGKQDPRSRWLGKLRERRHPNIAAVALANKNARIAWALLSNGEAYDPGLTVGSA

SEQ ID NO: 248384 - protein, 426 aa, unidentified
MVFVESDDDEQIIERVAALDIGKAEVVCCVRLPSANGKRRVQEVSTHSTMVTSLCELANRLVGLGVERVVMEATSDYWRPPFYLFEAHGLDPWLVNAKDVKHLPGRPKTDKLDAVWLCKVAERQMLRPSFVPPEEFRRLRDLTRYRVDLVVARTAEKSRVEKLLEEACLKLSVVATDIFGVSGRAMMAALIAGERDPQVLAKLARGRMRSKIRLLQEAFAGLRLGTFGDHHRFMLTQMLSRVDAADADIAAIDTQIEAQLAPFGDAVAQLDEIPGIGPAAAATIIAETGVDMSRFPTAAHLASWAKFAPGINASAGKNKGNGSTGHGNRYLARILGEAAVGAGRTDTFLGARYRRLTRRRGKKKAIVAVGRSILVIIWHLLADPQSRYQDLGAHHYDQHVNTLTKKRNHIRQLEALGYRVTLEPAA

SEQ ID NO: 248385 - protein, 355 aa, unidentified
MKQGTQLDFSGQNIFVGMDVHKNSWKISIRSEQMELRTFSQTPSVRTLSNHLKVNYPLANYHVVYEAGFCGFGYQREFTEEGINCIIVNPCDVPTSDKDKQRKSDTVDCRKLGQTLSKGQLTGIFIPSVEQQDDRGVIRVYQQLVKDQTRFKNRIKGWLAFQGIAIPGDDEQKYWSNNFVQWLKNLALTPSARINLDILIQGYEQARAMVLTATRQVRALSKQGRYREIIKLVRSVPGIGEITALLIITEIGDINRFKTLDNLCDYVGFVPRVHGSGDKETVLGLTHRAHHALREKFIEASWVAIRLDPAMTMAFNTYCKRMKKNRAIIKIAKKLLNRVRYVLKNQKEYVRAVVQ

SEQ ID NO: 248386 - protein, 410 aa, unidentified
MEAIIERVAGVDVGQATVVATVLVGAAHERARKETRTFRTVTRELLEMREWCLAKGVTHVAMEGTGVYWRPVYELLEDAFEMILGNAQHIKNVPGRKTDVKDSEWLADLARHGLIAKSFVPPKPLRQLRELLRYRRKLMESRTAERNRLLKLLETANIKLASVVTDVFGVSGRLMLDALIEGTATPATMAALAKGVLRKKTRDLEHALEGRVEAHHRFLLGLQLRRLDQADADLAVLDARIDEALTPYQPQCQLLQQIPGVNRVVAAVVVAELGTDMGVFRSAQHAAAWAGVCPGNNESAGKHKGAGARKGNVHLRTALVEAAVAASHKKGSYLRDKFYRLRARRGTKRAAMAIGHKILIAAYHMLATGLPYRDLGSTYLDGVEKRRTTRNLVRRLERLGYEVTLGTKAA

SEQ ID NO: 248387 - protein, 453 aa, unidentified
MSRKKTRLQSVNEGPKIRPDAAGIDISPEVIYVAVDPQRDAKPVRAFGSVTEQLYRIANWLKACGVRTVAMESTGVYWIPLFQVLEERGFEVYLVNARHYKNVPGRKTDVCDSAWLQYLHAVGLLQGSFRPAQQVCAFRTLLRHRSALVQAASEHIQHMQKSLDQMNVQIHRVLSDITGVSGLAIVDAILAGERDGRRLAALRHGTVRASEERMVAALEGDYRAEHLFTLRQSLESYRHYQKLIGECDRQLRQQLEQFEGKSDDGELPPARKQMRTAEDHQLRREFHRILRVDLTAIPGVNVRTVEMLLAEVGPDFSRFRSAGAFAAWLGLCPGNEISGGKVLSSRTRKVANRLAGALRMAAESLCRDKSYLGQFYRRMKSKLGGGPKAITAAAHKLARIIYTLVTKRQEYSESHFAAIEQKNADKHKQRLDRQARLMGYSLVPLATPTPNVS

SEQ ID NO: 248388 - protein, 347 aa, unidentified
MNFYTQQHKHYCGIDLHARAMYVCILDQHGTKLVHKNLPTTPEAFLRIVTPYRDDLVVAVECMFTWYWLADLCAKEGIAFVLGHALYMKAIHGGKAKNDKIDAHKIAVLLRGGMLPQAYVYPAEMRATRDLLRRRCHLVQKRAELLAHIQNTNSQYNLPEIGKKLAYKANRAGVEEHFPDPSVRKTIEVDISLIDHYDQLLGEVELYITRTAKAHEVQTFSRLQSVPGIGKILALVMLYEIQDIARFPRVQDFVSYCRLVKCAKESGGKRLGTSGKKIGNVHLRWAFAEAAVLFLRQNQPGKEYFAKLEHKHGKAKALTVLAPKLARAVYYMLTREHAFDLNRFVTA

SEQ ID NO: 248389 - protein, 324 aa, unidentified
MFFLGIDVSKAKLDCALLGSDANKRKTKVVPNSIAGVQTLLQWCAKQGAEPAQLHAVLEPTGQYHEQAATALHDASVSVSLVNPAQVRDFAGALAVRSKTDGIDSYVLARYGQALKPGLWRPAPLHARQLRALLARRDALAKDLQRELNRQEKTQFSDPPVLVEGSIAKTIAFLREEIKRLDHAINDHIDRHPDLKEDRELLTSIPGIGDRAGNAILSIMHNRPIESAEGLASYLGVVPVQRQSGTSLNSRPRLSKTGPSTVRATLYMAAIVSKRFNPHVGALYARLLAAGKSKMAALGAAMRKLVHLCFGVLKTRTPYRPDYA

SEQ ID NO: 248390 - protein, 352 aa, unidentified
MMLIGCDYHPSWQQICWFETATGETGELKLEHASGEADKFYRGLPEHALIGMESSGNCQWFVEMATTAGHDVWIGDAAQIRASEVRQQKHDRRDAALILKLLMEGRFPRIWTPSGQEKDLRQLLIHRYKLVRIRAQVKTELQHLAMNQGVTKKRKLWSKAGEKVLRELPLKPWASRRRADLLKVKEMLNGQITELDQAVVEAAEKNEKAKLLMTQPGVGPITSMAFVLTMGDVNRFQRGKQVASYLGLIPREYSSGGHQRFGSISKQGNRFLRMLLVEAAQGAVRCDPGFRNEYLHRCHKKAKGVAKVAAARKLAIRLYWMLRTNTGYPEVVRVESSSRVPVVSASLPGQAS

SEQ ID NO: 248391 - protein, 339 aa, unidentified
MTILFVGIDLAKNVFAVHGVDGHGKAVLIRPSVQRSKLHELVASLPVCTIGMEACSGAHHWARLFKQHGHTVRLMAPKFVSPYRMSGVRGKNDAADAAAICEAVQRPNMHFVPVKSEDEQARLCVHRVRQGFVEQRTATINRLRGLLSEFGIVLPQKAAIVRREAAAHLEDLPGWANTAVGDLLSEVHRLDERIAEYDQHVSHMAANDERSRRLMQLQGVGCTTASALVSTIGDAHDFKNGRQLAAWLGLVPAQYSSGGKARLGSITKAGDRYLRTLLVLGAKSVLAAAKSKDDRLSRWAVALQTRRGYWRALVAIAAKNARMAWAVLAKGESFKPINT

SEQ ID NO: 248392 - protein, 371 aa, unidentified
MAKSELLGVVDDLQDSYEAGEGNITIGIDLGDRYSYCCVLSEEGNVLAQGRIRTNAETLERYFKEIPPCRIAIEAGTHSRWIYELLSSWKHEVIVANTGAIKIITSNNRKSDEVDAQMLARLARADPKLLSPIQHRREVGYEDIVCMNARDLLVRTRVKLINAVRGMVKSSGGRLPTSSTEYFVAKAAPCIPVTLRPALAPLVENIARLTEQIREFDKRIEQIGRTRYPETARLRQVNGVGPVTALKFVLTIGDPSRFHQSRDVGPYLGLVPRRHQSGAVDKQLRISKAGNRQLRVLLVQCAHRMLSRSGPDSDLKRWGIHIATRGGKSSRKRAVTAVARKLAVLLHRLWVSRETYRPLFNATAVQSKPAA

SEQ ID NO: 248393 - protein, 323 aa, unidentified
MNTYLGVDISKKTFDITLLISDKSISKKFSNDVKGFKDLLSWLKKQNVSEPHACLEATGFYSEALAEFLFDREYAVSVINPVCIKHYAQSRLKRHKTDKIDSTLIAEYCKIHNPTLWRKPTADLKKLRELSRCLEDLKIQLNQVVNHLEKKSRSSKLVINTWTSLKSKLEKQMEKIYTEIDNLFKANDDLDKKRKNLETIPGIGKKTAITLLAEIPDINSFKNSRQLVAFAGLVPSQKFSGSSVKGRSKLSKMGSGHLRKALFFPAITAKKFNPMIKDFCKRLEQKRKHSFVIIGAAMHKLLSIVFAVLKNNTVFEQEFTKTN

SEQ ID NO: 248394 - protein, 342 aa, unidentified
MQISTIGIDIGKNSFHFVGFDARGGIVVRRQCSRTQLIRTLANLPPCLVGMEACCGAHHLGRILVAQGHDVRLIPPQYVKPFVKSHKNDLLDAEAIGEAVQRPTMRFVPLKTMEQLDLQAIHRLRTRLVGRRTAVINQMRGFLPERGVTCPVGREALVKRFPEVLDNPALGLSVRFCRLLKQLRDEWRLLDDDIHDVDQDILSLARDDEACERLMEVPGIGPLTATALVAAVGNGAAFAKGRDLAAWLGLVPRQHSTGGKTVLRGISKRGNAYLRCLFIHGARSVCRHHHQKPHRLGRWLTSLEARAHPNVVVVALANKLVRTAWAVLQRNTRYDGRLLANA

SEQ ID NO: 248395 - protein, 346 aa, unidentified
MLYVGLDLSRQRLDVHVLDEQGRTVEVTAVHPDADALRTLVNRILCHGQEVSAVIESMTGSRFVHDTLERFGWDVMIADAVKAKGVAPLAAKTDKIDARVLAELARRDLVPEIWLPDPTIRAERERARFRLHLVRHRSALKCRIHATLMTFGHSVPVADLFGTSGRRLLAGFELPEPWARTLATSLAMVDELDQRIDECGRELACLGADHPYIPLLLTVPGVGPLLAYTIASEIGDIGRFSSPKKLTGYTGLCPLVRQSGNHDFRGPLAKNGPKYLRWALVEAATHAARDPHYRDRYERNKHRLGRQRGAKVARVDIARQLAEAIWHVLTKNEPFAPASPAILLVA

SEQ ID NO: 248396 - protein, 370 aa, unidentified
MHQSSTLYVGLDVHKESIAVAYVAAAHHAEVVSLGNIGTRQCDIDKLIRQLQSKSSQLIFVYEAGPCGYWLYRYLTKKGHVCWVIAPSLIPKKPGDRVKTNRRDAIKLARLMRSGDLTPVYVPKVEDEAIRDLCRARAEAIRDLKAAKFRLKAFLLRHDIRYAGRATWGPAHLRWLSEVVCPTPAQQIVFQEYIRAVNEHTERLARLEQELTDQVQTWRLAPVVAALQALRGVQFTVAVTTVAELGDLTRFDNPRQLMNYLGLTPSEYSTGERRRQGGITKTGNTHARRALIEGAWAYRYPAKISRHLQLRLEKVPKAIQDMSWKAQVRLCKRYRQLSARGKNPNQVVVAIARELSAFMWAIAQEVPLTP

SEQ ID NO: 248397 - protein, 364 aa, unidentified
MYYVGLDVHAKRSSLSILDANGKLVKHLEVKGSWQKLLEVVDAQVPRPFAICYEASCGYGYLYDQLGRRAERVSVAHPGQLRLIFRSKKKNDRVDGEKLAKLLYLNEVPQVYVPGLDVQSWRGLINYRRKLVGRRAAVKTQIRAHLRGLGQLAPATGGLWTKKGIKWLREQAMSATDGLRRDIMADDLDGLEEKIRKVEKELNKIAKSHPGVMLLMTIPGVGVRTAEAFVAHVDDVKRFARTKAVGSYFGLVPCQDASADRNRLGHITKDGPAPVRWLVAEAAWQGRRRSARIRGFFDRVMRNDPSRKKIALVATAHYLTRVMAAMLRTGEAWREEESPAPAAEPGPRPQERNKTKKKKGANKE

SEQ ID NO: 248398 - protein, 355 aa, unidentified
MDSKKYIGMDVHKESISIAVMNAAGKIVMECVIETKASMILQFIDGLRGDVHVTFEEGTWAAWLYDLLKPHVRKVVVCDPRRNALLQEGNQNDRVDARKLAELMHNDQLRSVYHGDHGLRTLKELVRSYLTITQDLSRVMTRVKAIYRSWAIPCTGKQVYAPRHRAEWLAKINEPGVRRRAEFYYQQLDALRCLRQEVRRDLLTESKKHQAWKQLCGIPSIGPIRAAELLGILQTPHRFRTKRQLWTYGGVGIETSSSADHHVVKGQLERKKKHVEIRGLNRNYNHDLKNLFKGAAIVAATKPGPFAEFYAELLAKGMRPEMARLTLARKIATIVLIVWKRGVCFDAQHLKPQTA

SEQ ID NO: 248399 - protein, 345 aa, unidentified
MQPMYYIGLDLHKRTISYCVKDVSGTIHAEGTIPAIRFHLDQWMNTLPQPWTAAMEATVFTGWIYDHLQPHAAGLKVAHPLMLRAIAAAKKKNDRIDARKLSDCLRCDFLPECYMAPTAIRERRRTLRYRNLLVRQMVQMKNKIAVLLMEAGVSYNKQRLHKAGYFRELLATNPDINEGLCSLLRVCRETVVRLQRTESALVRSLERDSLLKERVERLMTIPAVGPITALTWALEVGDVWRFSSIKKAISYCGLCGAEKSSANTVQRTPLSKQRNKHLQTMLIEAAKMAPRYSPHLALLYDKEKQKGSANRATLAVARKLVAYLMAVDRGQRPFELVEASYSTAA

SEQ ID NO: 248400 - protein, 430 aa, unidentified
MELDSTVRSWEEDMKNRQRKLYVGIDVHSREHKAAVLPIALLEQPGAPWRKVKPLSIKNNIADFERLDTTIKSHVSNAEEVAIAVDHTGGHYSEPIAYFLQARGYTVYHLEAKAMKAARERFLDEENKSDVIDSTSVAYMLYLRDAHGLSFRISAMTPELGSGAAALNSLVLQRWQFTKLATQATNRLHQLLLAVFPEGEARHFNQLLKVTPYYPTPKDILDSNRLEGIEKLSQKHKENILELAANSIGIPGDIYQWLIKDLSIQRVESLTKRDALTAILRQRVAAHPYGDILLSFPSLGEVAAATIIGIIKDIENWPDKKKFKRALGVYSYLTQSGGSSGRTKQGREGSRHGRRVLFQVCFRCIRTNAHDNDFKDYYLRQVAQGKLRIKALVSTMGKLAEIIYHCLKVGEPYQYQGKYKTIVISSDKKS

SEQ ID NO: 248401 - protein, 342 aa, unidentified
MEQVSVVGLDLAKSVFQVHGVNAQGEAVLRRRLTRGQLMKLFEKLPPCLVGMEACASAHHWARELAALGHEVKLMPPQYVKPYVKRGKNDAADAEAICEAVTRPTMRFVGAKSPDQQATMMLHRVRKILTRQRTQISNALRAHMAEFGIVAAIGRGGLDRLIAVIADREDARLPDEARACLGVLSTQLEMVKEQILDNDRRILADARRTEAGRRLMKIPGIGPLLASAIVACVPDPSTFGGGRSLSAWIGLTPRQNSSGGKERLGSITKAGNSYLRELLVVGAMAVVRRAKQGSTKRPWVTQLLARKKPKVAAVALANKNARIIWAMMTTGEPYREAEMAAA

SEQ ID NO: 248402 - protein, 327 aa, unidentified
MVTVPKLGIDISKRTFDVALIRDPESMKAKQRQFSNTPAGFQDLQNWLAKHGVEQVHAVMEATGAYGDALAEYLYATGHLVSIVNPAQIKAFGQSQLQRNKTDRADGVLIARFALAHNPPPWTPPEPEHQELQSLVRHLDDLIEQRTQVSNRLSEGRLTKTVRESWEKVLDSLNERIADVKMQINQHFDDHPGLKRQRELLDSIPGIGPETAARLLAEMPKLGEFDSARSAAAHTGLTPKRRQSGTSINAPTRISKIGNPRVRYALYLPAMTALRSSKEFKELAARLTERGKKKMQIIAAAMHKLVRIAYGVLKNQRPYDPSYVAVA

SEQ ID NO: 248403 - protein, 466 aa, unidentified
MQPNRRRSLGKPRVSPTVFDRLNPHVAGIDCGSGEHFVAVPPDRDPHPVQSFPTFTSDLLRLADWLAACRVTSVAMEATGVYWIPIYEILDARGFEVLLVNARHFKNVPGRKSDVSDCEWIRELHSVGLLRGSFRPTDAIVALRAYMRHRQTLVESAGTDTQRMQKALVQMHLQLPLVVSDITGVTGLRILRDIVAGQRDPQHLAAHRDARVRASTADIVAALTGHDRPEHLFVLQQNLELFDACQAQLAACDRAIDAHVQTLTAQRPPPVTPLPDPRVTKKPHDHQPRFEIRTPLFQLTGGVDLTQIDGVAPYTALKLISEIGLDMTRWPTEKHFTSWLSLAPKNKISGGRLLSSRTPPSANRAAVVLRMAAMSLGRTQTALGAFYRRLAARIGKPQAITATARKLAALVSRALKGELVYRDPGADAYDIQQRARVLRRLRQRAATLGFSLVNRDTGEILAPAIP

SEQ ID NO: 248404 - protein, 355 aa, unidentified
MNSIKYIGMDLHSATISAAVVNDAGKLNMEATMATEASAVVDFIAGVQGTLHVAFEEGIHAPWLYDLLLPHVAQVLVCNPRQLPRHRGENKNDKIDAQQLAQWLRLGVLKPVYHNPTGLRTLKELVRSYLSLVRDTARVMNRLKALYRARAIPAPGTRVYSPRFREAWLQPLREAGVHYRAQLLYRQLDLLLPLRQEAKRAMIAESRQHGAQKILLSIPTLGPVRVAVLMAVMQTPHRFRRNRKLWTYAGLGLVSRSSANYRIVEGQLTRAGKPALILGLNLNHNHVLKALFKDAAATAVSRPGPLREFYARQLAAGREAEIARVTVARKLATIVLTLWKKGERFNAEHLKPQAA

SEQ ID NO: 248405 - protein, 364 aa, unidentified
MKIVGCDLHAGQQSIAMMDSETGELTEKVLKHEGNAVREFYGSLEGPVVVGIEATGAMQWFLELLEELGIECRVGHPAKIRAAETRQQKHDRRDAEVILELLLMKNRFPDIWMPSTEQRDLRSLLRDRHQWVKMRARLQHTLQAIALNHALRKGKALWTATGRQALQDLALPDYTAQRRDELLRLYLQLERRIQQLDKQVEKEAQGRPQARRLLTHPGVGPVTALATEVFLGDPHRFRTAKEVASYIGMIPCEHSSGKRRRLGKLTKEGNSRLRYLWTEATLHAAVKDPELKRFYRRKLVQKGMGKARVATARKLGIRLWIMLRDEIDYEEFCRRGKLPQKGKTHAGMPDFNSGPAQAVTGSTE

SEQ ID NO: 248406 - protein, 340 aa, unidentified
MKKEMKFYLGMDVSKLWVDITVMCVLNHIKQPAITERFDNDQAGMKSLGKWLKKHKVSFDENSLLVIENTGVYHRLIWEYCSITGLPLHIGNATHIKWSFGIARGKNDKIDSQRLCAYAFKNADELKAAPVLNPVFVKLKDMMTARSRLLAQKNSIKVYLGELKLSNSKEAQQIIEAAHKAALEGIKQSIKTVEAQIQQMVQQDAAIKNNYDLLVSVPGIGHLTAVYIICCTNNFICKITGKQLASYAGVAPFGNKSGTSIKGRDKVHKMANKDLKKLLHMGAISAITHYPEFKDYYERKVKEGKHEQSVINAVRSKIAQRAVAVVNDQKPYVNNYKKAA

SEQ ID NO: 248407 - protein, 467 aa, unidentified
MTPHKDYCLDPCPPAPTPTLTASSVLAEALQVCNPHAAGIDIGEAEHWVAVPPGCDPQPVRRFGTFTVDLDALADWLIDCGVTTVAMESTGVYWIPLFELLEARGLQVLLIDPRQAKRAPGRPKTDRLDCKWLQRLHTYGLLAGAFRPADQVCVLRSYLRHRQMLLTSAAHHIQHMHKALQQMNLKLPQVVSDITGVTGMAIIKAIIAGERHPQRLAQLRNPHCHHDTDDIAKALQGNWRAEHLFALRQAVELYDVYHQQIAQCDQQIKRHLETFADKSAGQPLPPKARRHKKTNEPRFDARTPLYRLAGVDLTTIEGIEENTALILLSEIGTDMHRWPSVKHFCSWLGLCPQHQISGGKILSRRVRPGAHRVTVALRLAARSLHHSQSALGAFFRRMKARLGTPKAITATAHKLARLVYSLLQHGSAYVQQGVDAYEAQYRERKVTTMAKQAKALGYTLVPLTAQG

SEQ ID NO: 248408 - protein, 406 aa, unidentified
MTENLPMPQRFIGLDVHKHYLVAVGVTPDRQPVFGPQRVELSRLETWINKTLTPQDAVVLEMTGNTYQLYDELLPHVHSVTVVHPPHVKLITSMPVMNDKIAAARLAELHTAGLLNGIWVPPQEVRELRALIAQRAKMVKLATQAKNRLHAVLHRYHLAPPDGDPFSAAQRDWWLHLDLTPTEQVRIHCDLTTLDCAQTQCAHIETLLKALAAQDERVPFLVQLPGVGLLTAMTLLAAIGDISRFPSAKHLVGYAGLGARVHDSGQTTRRGRLTKDGRRDLRCALVEAAHSAASTHPHWRAELARLEPRLGYNKAIVAIARKLLVSVWHVLSEQCVDRFAEPERLARKLFGFVVALRSANRPDGLTAAARTHQLLTQLGCGADLPTVHWGSKTIRLLPADIGVPKT

SEQ ID NO: 248409 - protein, 327 aa, unidentified
MSKQVVWIGVDVGKDDVWVSVAGKKGRSFTTTPKGVRNMCDWSQSSAGDGEVRLCMESTGVYGYRVAVMCRQLDVEVSVINPAQIKAFSQAQLRRTKTDQVDAEVIRCFAESQHPAPWQPPRKAVSQLYWLISELDALGEIRRQLENRKHSRQLVPDLPKEALLASRKVLQSVSRQIDSLQKRIEGLVANDAEMNQRVQLLCTIPGIQQATATRLIAYGKDHWDTHTARQLTAHAGLAPRHRQSGSSIRGKSRLAKQGDKRLRRVLYMPTVCAIVHNPYVRAVYQRLVANGKPKMLALLAGMRKLIVLIRAILRTKKPFTYPIPALT

SEQ ID NO: 248410 - protein, 350 aa, unidentified
MNHKCKIIIGIDTHKATHVAVALDTQGTRLAALSIPTNPKGYLELERWSQSFGEVHAFGIEGTGSYGAGLSRSLLAQGHNVVEVTRPNRQLRYTQGKTDTLDAEGAARSVLSGQATARPKTQTGISEMIRHLKVARDTAVKSRSQAMVTLKTLIINAPADLRDVLDKTRGKVALIRHIAAFRPGEINNTMASVKAAMRALARRWLWLHEEIITHDKELERLVTERAPDLMTSHGIATLTVAEMLIVVGDDPTRIRSEAAFAKLCGVCPIPASSGKTHRFRLNRGGNRQANAALYRVAIVRMRSHEPTLAYVRKRTKDGKSKSEIIRCLKRYIVREIYSQLCVPKSAQIAT

SEQ ID NO: 248411 - protein, 336 aa, unidentified
MRIVANSVGLDYHDASVQVCVLSPTGELLGNARCRNDRSSIVSYAEGFGAVGAAAMESCTGAADLAEELVSQAGWSVSLGHPGYVRRMKQNPDKTDYGDARMLADLVRVGYLPRVWLAPQEVRELRRLVRYRQQLADERRNVKLRIRALLRDHRVPPGPRSPWSRAWRAWLKDLSLGSQSDWVMARHLRRLESLTLEVREAEARLAEVTAEDVVVSRLLTLPGIGLVTACALRAEIGRFDRFRSGKQLARFCGLTPRNASSGQRQADAGLIRAGNPQLRAVLIEAAQRLMRWDPRWSALGRRLRGRGKPYNVAAAAVGNRWVRWMYQEMRTIEQAA

SEQ ID NO: 248412 - protein, 339 aa, unidentified
MNAVGIDVSKGKSMVMIMRSFGEVVASPFEANHSDSELGDLAKSLKSLSGETKVILECTGAYFYPIAHALHEAGLFVSIIHAKLIHDYGNNTIRKVKTDKADSIKIANYGLSNWMSLQRFCPEDDVRRSLRAYSRQYAKYTKLKVSLKNNFISLTDQTFPGVNELFSSPPRKSDGREKWLDFAAYFWHCECVASMSENAFTKRYQAWCTRNGYRFSKEKACDVYTAACDHTLVIPQNDTTELLVKQSVKQINAVSESIAIIAAEMKRLAAFLPEYSVVSAFYGVGEILCPQIMAEVGNIYRFKHKGALVCFSGLEAPPYQSGKLESANRAISKKGSPHL

SEQ ID NO: 248413 - protein, 340 aa, unidentified
MEIDVLGIDLAKRVFQLHGATRTGVVVHRSKVSRPALFEAITRLSPKLVVMEACSSAHHWARRLQGHGIDVRLISPQYVAPFVKTNKNDRNDAEAIVEAASRPAMRFVTIKTIQQQDIQALHRLRQLLVHQRTAIINQVRGVLAERGIVVAQSPAAFHRAMPEIQANPNDELSQFCRGLIVELLEHLKSLEERIGSCDARVKTVMASSEACKRISAIDGVGPLTATAIVAAVGDASAFRNGRHLAAWLGLVPRHYSSGGKSKLYGISKRGDTYLRTLLIHGARSVLRYVAGKTDMQSRWLRELIERRGYNRAAVAVANKNARVIQALLSSERTYQRPAAA

SEQ ID NO: 248414 - protein, 337 aa, unidentified
MEYFAGLDVSMKETHICVVDRDGGVAVEATAPTSPAAIAAELAKAPAVKRIVFETGRMAPTLYHGLDALGLPVVCVESRQAYQALKSLATHKTDRNDARGLAQIARTGFFKPVHVKSLPAHAVRALIIARKKLVGQRVTLENQIRGLAVVFGVRLPRGLSPAFAQQVVNGSDGVAGLSGAMRGLLAARNALLAAIAAINRDMKRLARSSEACQRLMTIPGVGQLTALAFVAAIDEPERFRRSRDVGAYLGLVPRRYQSGEVDYTGSISKSGDRRVRTMLYEAANVMLTRYRGDLALKGWALGIAKRSTMRKARIALARKLAIIMHAMLRDGTEFQAA

SEQ ID NO: 248415 - protein, 461 aa, unidentified
MAKKAKKVKTAKGAELRIVNPDAAGIDIADGIMQVCVPADRSKDNNRAFGAYTSDLHAISAWLRECGIKTVAMESTGVYWIPLFCRLQEDGMDVVLTNARDVKNITERKTDESDAKWLMLLHQYGLLKASFQPHNDAKRMRTLTRHRDTLSREASSIVLRMQKAMQQMNIKFTLVLSDITGKSGIRIIEAILAGERDPKKLADLADIQCKTPKEEIAKALEGNWEEDLLFVLRQNYDTFKHFCAQLDRCDTELEKLMENYRTEVAGTGRPSYSPTKKRRDYHKRKRNVGFDVERKAYDMWGVNVFEIPGISHLTALGLMSELGHDFTRKFPSSKQFCCWCNIAPNTKISGGKRISSHVPHRRNNVGLIFRSIASSLANAKNQLGNFYRRIRSRAGGKAAVIATAHKVAEIFFAMVANQTTYNPEKVGIDEKVLLEKRIARYKRELERITGMHIEIGNACVP

SEQ ID NO: 248416 - protein, 283 aa, unidentified
MIIWIGIDVSKSYLDAAWIENGKRVHKRVRNSKKGFAELMALVPQTPHFVMEATGTYYFNLALFLHQAGCFVAVVNPAQIKHHIKSDLSRSKSDKSDAFSIAKFGQEKSPSPWKPHEREVYELRQLLTLDAKLQQMKVQFTNMVEAFVQTDYHSKQAVSRANMMAKVLKAEREKCKREMEKLASKLFPEQVEILASIPGVGIASAVSVMADVGDFSRFESSRHLVSFCGLSPTIKQSGTSIRSKGHISRMGGHRIRGTLYMCDECLTVQRPVQGDEKAIGGNG

SEQ ID NO: 248417 - protein, 389 aa, unidentified
MKIYVGIDIAKLNHFAAAISSDGEIILEPFKFTNDADGFQLLVSKLESFDKNSIIFGLESTAHYGDNLVRYLVAELYQVCVLNPIKTCQMRKNNVRKTKTDKVDTYVIAKTLMMQDNLRFVSFFDLDMMDLKALGRFRQKTIKQRTRLKIQLTTYVDQVFPEIQYFFKSGLHQHAVYALLKEAPSPKEIASMHMTHLANLLKVNSHGHFTKEQAKELRVLAQKSVGANDSAISIQITQTIQQIELLDSQLEKIEAEMTDIMKFNDSVIMTIPGIGYINGGMILGEIGDIHRFSNPNKLLAFAGLDPSVYQSGNFQAKTTRMSKRGSRVLRYALVNAAWNVVRNNATFKAYYDAKRAEGRSHYNALGHCAGKLVRVIWKMLTDELEFNLE

SEQ ID NO: 248418 - protein, 451 aa, unidentified
MLIQGSSDPPRLVRVGIDAAIVAQHEVCIRATDAEGRVRTDRFHVQPTLAGLRSLTDRLAQMPGVVAVAEPTSMTWLGLSVALAEAGCDLSLLGARHAARLRGAISGKHKSDVIDADVLARAGEVFDLHPLRPVDPAQLALRRGSVRRGTAVIDGNRHLRRLISLARWAFPDVWNGFGGSLPTAIAVLQRWPHLAQLAAARRSTLTGVVALHTRGVSDVPERVEVIRSSAAAWASFWEGHVDLDALAFDVTEHLSDMATAKARIERATTQARRYWEQLYGDDELLMSIPGVGPVTACVIRGFLADGSAFPSAKAAASYVGLNPSTWSSGTVSQPSRAITKEGPAVLRLAFFQAANAARRQDPQLAGFYHRLMTAHGHCHTQACVAVARKLVERTWTVLHRGTPYQLRDSRGQPISHLEAKQVVKDRCTVPDHVRASARAHSAATNRGKLTR

SEQ ID NO: 248419 - protein, 457 aa, unidentified
MDRKGKRTEGLEEAHPFTGMSQVNENAAGADIGAVEIVVCVPGKENTQVVRAFGNYSVDLQAIGRWLQGYNVKTVAMESTGVYWIPLFEELERQGFECLLISSRSLRRVAGRKSDLTDAQWIQTLHSYGLLESSFRPQAELIALRTLLRHRNQQVEHRSPHILHMQKALLQMNVQLSQAVTDITGVTGQTIVRAILAGERDPQELAAMREPGCKKSAEEIGKALTGTWREEHLFILKQSLEMFDFYTRQIQACDEEIERVYGLTRPDWEIGEVKPLEQRKRNSHSKNRPHNPEGIRRHLKRISGVDLSVVDGFGVSLAQTVVMEVGTDMSKFPSEKHFCSWLGLAPKHEISGGKVLKNKTLKTKNRAGQAFRMAAQSVKQADCVFGVTYRRLKARLGPAQATVATAHAIARVVYRMLKYKVEYQTISVEEYEQKYKDQQLKYMRKKAAKLGYQLAPA

SEQ ID NO: 248420 - protein, 339 aa, unidentified
MKITTIGIDIAKSIFHLYAVNKIGRYVKKKQLKRHQLLQYLAQLEPCVIAMEACGGANYWAREIKALGHEVKLIAPQYVKPYVKGNKNDYNDAEAIAEAAQRPTMRFVPIKSVEQQDVQNLHRQRERIKKARTALVNQIRGLLAEYGIVINKGIAAVRSGLPDILEDAQNGLTMRSRELFADLYEELRLLDERFKESEKQIEVGNRGNEVCQRLDEILGIGPITASATYAAAGDGKDFVNGRHFSAWIGLVPGQHSTGGKPTLLGISKRGNAYLRTLFIHGARAVLRHSASKTDRFSVWAQALLERRGHNKACVAVANKMARMAWVIMARGETYRPAMS

SEQ ID NO: 248421 - protein, 396 aa, unidentified
MISVGIDVSKGKSTVCIMKPGGEVLSAPFEITHTKSELLDLINIIKSQNEEVRVVMEDTGHYHLPVATLLVDNDIFVCSVNALRMKKYCSQSIRRAKTDKIDSVHIASYGIAYWNELQSIPCSDDIYKELQLLARQYYQSVALLVKAKVNFSNLLDRVMPNIQSIITDNSSNSKLTDFVARYWHFSRILEMGEKRFISDYCKWAKKKGYRMCECNAKEIFALAQNGIPVLPSSQSTKIVITEAVRVIHELESSRDTILAQMQSFAKTLPEYSVVREMPCIGDVLAPRIIAEIGDVRRFKNKHSLIAYAGIDAPPYQSGTFNASERKISKRGNSYLRKTGYEIMQSLIKHKPADDSVYDFIQKKRSEGKCGKEAMIAGLNKFLRVYYGRVMERYSEL

SEQ ID NO: 248422 - protein, 381 aa, unidentified
MKKNNIGKLQVTKSQLRRKAAKQRLTVGLDLGDRTSRYCLLDEAGEKAGENQLPTTRAGMDAAFAKMAPSRIALEVGTHSPWVSRQLVGMGHEVIVANPRKVRLISQSVKKNDRMDAEQLARLARVDPKLLSPIRHRGAEVQADLAVIRARAGLVESRTGLINTARGLVKPMGERLKKCDADQVREALGEGLSEEAQNVIGPLLKSVEEISKQIQVYEQKIEEIEKRYPETKVLKQVSGVGRLVALTFVLTVEDPERFEHSRDIGPYLGLTRKQRDSGESQPELGISKAGDELLRWLLVQAAHCILRRGAPESDLREWGLRKVQAVGGRKGGKTRKKKAAVGVARKLAVLLHRLWVTGEVYDPQYNRKARETAKGKRKAAA

SEQ ID NO: 248423 - protein, 408 aa, unidentified
MTVVGIDVSKGKSMVAAMKPGGELVTTPYEVKHSGIELSRFALDVLCMEPDTRVVMEATGRYHEPVAALLHSEGIFVSVLNPLLIKQSGAGSLRKVKSDPKDALKIAKYGLDNWSTLREYTPMEAIRQQLKLCARQCDLYSKNIVMLTNNLISLSDKTFPRVNELFSSPEKADGHLKWVDFYRSFWHCDCINRMSPDAFEERYKKWCKRKGYHFSADAADALYAASCGLYTTLPRDDNAKLLVTVATDQLIALRENQSKLETEMLNLCKQLPEYETVMAMYGVGKSTGPHLMAELGDIRRFPHRSSIVAFAGVDPGVVGSGKMQLSSVATSKRGSPQLRKALFQVVSAYVKRKPENEAVYQFYAKKRDEGKPYYVCTTAAANKFLRIYYARVKECLNAAESATQAEEG

SEQ ID NO: 248424 - protein, 394 aa, unidentified
MKLIGIDIGKNKHFFCIMDQQTGEIISQPISFSNDKEGFDFLIQKIKSYSKDSVLIGMEDTGHYHFALLKYLLDLQYTVALINPKTTDFNRKMQGGITKNDKLDTINICDVLDTPERKKQYRISKVNSFDLYEQKQLTRHHHNLKEEENVYKNRLQKCIDIVFPEFNKLFNSKYGTVYMNILKTFGSAENVANTDIRTIRKCFEIEGRGNRISLTPERLKECARSSIGISSSAEVIQIKHLTAQIELIEEQLTEIDKKIEEFSIQNNSPILSIPGISHFSGTSILAELGDISNYSKPSQIIKFAGVAPLHYESSQFNAQHTAITKKGSKYLRKTLYQIILPVIRHNQVFYKYYQLKISQGKGHRCAQGHCVRKLLRIIYHLLKTNQQFDPQLLR

SEQ ID NO: 248425 - protein, 346 aa, unidentified
MKVKTLGIDLAKETFGLHGVDALGRVAVHRRVTRKQLLGFLVKLEPCLVGMEACGSAHYWAHEIEKLGHTVKLMSPQFVIPYRKGNKNDPNDAEAICEAVSRPSMRFVPIKNEEQQDLQALHRVREQLVKNRTALANQIRGLLRERGVVVAQAIARLRVALPVILEDQSNRLSGLMRELLGEMAERLRMLDDRLRQYDQRIARICQQDERCRRLVKVEGVGPLVATAVVAAIGNARQFTNGRELSAWLGLVPREHSSGQRTMLLGISKRGNRYLRTLLIHGARAAARVAERKRDARSIWLSRLKLTGGPNVAAVALANKNARVMWALLARGDSYRVRPAMDRAAAA

SEQ ID NO: 248426 - protein, 444 aa, unidentified
MRTAERNAEPQVVGLAPQTTLMTERTDTMKTYILRDANHVEPQKTSNPARAARPQPTTPSAPIAAPGPGLFVGLDVHNDSIAVSLAPSDSSEVRRYGILGGQHDDVLKLLKKLSAAHPGVALKFCYEAGPRGYPLCRFIRQHGAECIIVAPSKVPRQPGDRVKTDRRDADQLARLLRAGELTGIYVPDPPDEAVRDLIRARYQVSKQQHRARQQLKMFLLRQNIRYAGTKPWTLQHLRFLATVKLPFAEQQFVFQEQVNTITELGQRLERYEKEIASVVEGWRWQPVVRALMSLRGVALLTGATLVAELGDLHRFASAPQLMSYLGLCPSEHTTGETRQQGGITKMGNGIARKAMIEAAWNNRTPARISRGVLARQEGLPKGVTDVAWNAQTRLHQRYKHLTGVGRKKSQVAAAALGRELAGFVWAIGRMVKPHPVKPEPVKAA

SEQ ID NO: 248427 - protein, 414 aa, unidentified
MEVIHRRCAGMDVSKKDAKVCVRVAGAGRRRTVETVRTWASTTNAILTLRDHLLSEQVSLVVMEATSDYWKPFYYLLEDAGFELMLVNARHARNMPGRKTDVTDAVWLAQLGAHGLVRASFVPPAPIRELRDLTRTRVMLTRERGREIQRLEKLLEDAGIKLSSVASDITGVSGRLMLQALIDGHRDPAALADLAKRRLRHKIPELTEALTGRFSEHHAFLAGIFLDTIDQRTRQVEELNHRIDQAMAPFRAFCDLICSIPGIGRQTAEVVVAETGADMTVFPSPKHLASWAGVCPGSNESAGRVKSTRTRPGNPYLKAALGTAALSIAATRGTFLAAKYKRLAARRGGKKALVAIEHTILNAIWSMANTGAYYDDPGSEYYLRHHPERARRNATRQLERLGWTVTLTPAAHTA

SEQ ID NO: 248428 - protein, 330 aa, unidentified
MKSSIIIAAALGIDIAKAKFDVCLLKENGRAKHKVFLNTRHGFEQLIRWLDSHQVGDHSRACLEATGSYGEPLALFLFEAGFTVSIANPAAVRAFANAGLSRTKTDKVDAELIARFCLAQQPQAWQPPAPELRELQALVRRLDALIEMRVAEENRLSSGGLTETVRHSLEEHIAYLLAEIKQTEALIRQHINNHSDLKEQSDLLDSIPGIGETTAALLLAEIVNIKQYTSARQVAAYAGLVPRERRSGSSVRGRTCLSKIGNARLRKALYFPAITALRSSDFFKQWAEPLRTRGKSKMSVIGAAMRKLIHLAYGVLKTGQPFDPNWAKTV

SEQ ID NO: 248429 - protein, 397 aa, unidentified
MAASERVVIGMDPHKRSVTIEVMTADEVVVGGGRFGTDVDGFAAMTEYVRQWPDRVWAIEGCSGIGRHVAMRLIADHQDVVDVPPKLSARARVFSTGQGRKTDATDAHSVALVGTRMAGLRPVVADDQLTVLRMLADRRRALGEEHTRKVSQLHALLLELLPGGAKKDLSAAQAKALLAKVRPRDLVGKTRRRLAAELVGDLEQIYARKKAADKELRALVAATDTGLLDLHGIGPSGAARLLVEVGDITRFPDRNHFASWTGTAPIDASSGDHVRHRLSRRGNRQINRVLHIMATVQLRNRTEGRAYFDRKKAGGKSSNEAMRCLRRRLSDAVYRVMVDDLAETMRTDPGGQPGNDSYSSATSSQPHASSSEKPLPDPSRPSLNSDTCSVLTQKGAM

SEQ ID NO: 248430 - protein, 423 aa, unidentified
MEMMHERVAGLDVHKATIVACVRVGTGRKVTRECRTFDTTTDGLLALLAWLVECRCSHVAMEATGVYWMPVWKILSEGDFVLIVANAAHIKNVPGRKSDLNDAMWIADLLACGLIKSSFVPEEDVQELRSLLRTRKQLGREQTRHVQRIQKTLAEANIKLDSVLSDIMGASGRRIIEAMIAGVRNPRQLAALASAQIKATPKQLYDALHGRLTDHHRFLLKLHLRQWDGLDATIREIDLEVEARIARMDKEVSAGAAPFRDLIRLLCTIPGVSTLSARTILSEIGRDMSRFPTAGHMVAWAGLCPGQNESAGKRKPARLRKGAPWLKTMLVQCAWAAKRKKDSYYKAQFFRLQSRRGPQKAICAVAASILTAIYHILKDGTEHQDLGANHFDRRSTEGKARRLVAQLTSLGFEVQLQRTAEAA

SEQ ID NO: 248431 - protein, 344 aa, unidentified
MGEITTVGLDLAKRVISLHAEDAAGRVVLRRTLRREALLGWFVQRSPCSVAMEACASAHHFARELAALGHTTRIIAAEFVRPFRMSGKNDANDAAAICAAVRQPQMRFVTIKSAEQQARLSVHRLRQGLQEERTAGLNRLRGLLAEFGRVYANSASAALAGARAALADETLPAKLRQCVARQLTHLRELEAHLADCDREVARDAQADARAQRLARLSGVGALTASALAATVVDAQQFRCGRQFAAWLGLTPRQYSTGGKSRLGRITRRGDAYLRTLLVQGARSALQAAMRAAPTRRTRLAAWIVAVHARIGYHKTLVAIANKHARLIWALLMKDEPLRAHGAAN

SEQ ID NO: 248432 - protein, 354 aa, unidentified
MKHTTKYVALDVHQEATATTVRDHKGRVIARSVIPTEEGTLLEFFRGMRGSIHVTFEEGTQAQWLHDLLTPVVDRVVVCDRRGEGQKGNKGDRVDADDLSDLLRRGGLRAVYHGSPHRADLKELTRTYENVVEDSMRVMQRLKALFRARAIRTPGKGVYDPAKRTEWLAELPGSGVRFRAQVLYAELDILRDLRPKAKAAMVAEARRDPAYAVLETIPFFGPVRLALLLATLGTPWRFRSKRNLWGYAGLAVVTHNSSEFVIVGGRPVRRKRQPLTRGLNRNHNPAVKAVFKGAAIAASAKPGPLQDFYHGMVERGMDEALARVTLARKIAAVTLRLWKRGEHFDPEMLTVQAR

SEQ ID NO: 248433 - protein, 417 aa, unidentified
MSLTIDEAAFFVGIDWATEIHAVCVQDTNGKKVAAFPVHHTAAGLAALMNRLARIGDPASMPVGIERPDGRLVDALLEAGHPVVPVKPNAIKAWRDGEVLSGAKSDDGDAEVIAEYLRLRHHRLQLATPYTAETKALRTVTRTRGDLVDMRVATTNQLSALLDMHWPGAKAIFADVESPIALEFLTRYPTARHAAQLGVKRLTGFCVKHSYCGRRTAEQLLARLRAAPPGTTDEVLCEAVRDAVIALVTVLTAVGTALKALSRSVVATLGEHPDAEIFTSLPRSGQINAAQILAEWGDCRQAYDSPDAIAALAGATPVTKESGKHRAVHFRWACNKRFRVAVTTFADNSRHESDWAAQVYARARARGHDHPHAVRVLARAWIRIIWRCWNDRVAYDPARHGNAVRLHQPVQNELLAA

SEQ ID NO: 248434 - protein, 386 aa, unidentified
MQKLNDLSRSFNLFEPDGTLIAVIEMSQASWLVAGIVPGVERQPLKKLKVDEGTLLKLLHRWREEAEKAGRRIKRICVALEAGRDGFWLARWLRARDIEAHVIHASSVAVSREHRRAKTDRLDTELLKRAFLGWLRGERDHCKMVAIPTIKDEDAKRPNRERESLVGEQNRIINRMKATLIRLGIRGFNPKLKKAAERLEGLRTAEGEPIPPNTLAELHRDMVRRRLVSDQIRQIEDARLERLKQAPGDGPHAMVRLLARVIGVGIETADMLVQEVLSRNMRDRRAVARYAGLTGSPDESGTKRREKGLARSGNARVRRGMIQLAWRFLMFQKDSALAQWFRSRTENAPGTRKPMIVALARKLLIALWRLVQEGVVPEGIVLRPAS

SEQ ID NO: 248435 - protein, 415 aa, unidentified
MDAIYERCCGLDIHKRTVVACMIVPGSGRQARKEVRTFGTMTDDLLTLADWLAAESVTHVAMESTGVFWKPLFNLLEDRFQLLLVNARDIKQVPGRKTDVKDCEWIADLLRHGLLKASFVPDRQQRELRELVRYRTTLVRERSAEVNRLQKTLEGANIKLASVASDPLGLSGREMLNALIDGSTDVASMAELARGKMRAKRGLLERALAGRMAAHQRFLLTEQLCHIDALDEGIARASGEIAERMRPFAEALERLDTIPGIGQRMAEILVAEIGTDMRRFPSAAHLASWAGMCPGNQESAGKRKSGRTRKGNVWLRAALIESAHSLGRGRGTYLAAQYRRLTARRGKKKAAVALGHSILVIVYHLLSRGDVYHDLGVQYFDEGRRERLEHGLVRRLQDLGYKVTLEPTQPTTSAA

SEQ ID NO: 248436 - protein, 405 aa, unidentified
MLGERFAGVDWASEEHAVCVNDAGGRIVEGRRYLHDERGLKALCARLIELGVVLVAIERPDGLLIERLLDAGLRVIAIHPNQVAAMRPRFSAAGGKSDGFDSFVLAELARTDSHRFRVLVPDTDATKALRALSRAREDLVGHRVALANELRAQLECFWPGAAHVFADVDSPIALAFLKRYPSPGDAHGLGEQRMARFLARHHYCGRKPSAELLARLRGAAEGRAATLESEARRQVVLALVAALEPIVARIAELTSEIRGALHDHVDGRTFRSLFIDPKSAVCAAAMLAEIGDCRDRYPTKTALAADGGQAPVAVESGKSKRARFRWACDHRLRAAICTLADTSRHHNPWAADIYDRARARGCTHQHAIRILGRAWCAVIWRIWHDHDVYDPARHTARQHLTAATT

SEQ ID NO: 248437 - protein, 266 aa, unidentified
MTAYVGIDLHRRRSLAVCLDDGGDRLWWRRFDNSPQMLVEVVSEAGGDVVVVMEATWGWYWAADVLADEGVEVHLAHPLGIKGFENRRVKNDLQDAEMLANLLRLGSLPESWIAPDSIRQLRELVRYRFKVSRLRSGLKSQIHSVLGKEGVIPQLRDLWGPLGAAYLDDIDLAEAYEIRLESLRNLIAIYEHEITELDSWIHRKLRDDAGYQAIQQLNGVGRVHAAVFVAEIGDVTRFPNPRRLCSWAGLTPRLRESDTKTFGSVR

SEQ ID NO: 248438 - protein, 396 aa, unidentified
MKNHITAKKNQKELRKTNRKQIRAMAAHGRLTIGLDLGDRSSRYCILDEAGGVASEGTLLTTKSGLDSLFAKMPTSRVALEVGTHSPWVSRHLAGYGHEVIVANPHKVKLITQSVRKNDRIDAEKLARLGRADPKLLSPIRHRGEEAQADLAVIRARAELMEARTGLINCARGMAKAMGERLKACDADQVKESMGEGLGGTVQRAIGPLLKSVEAITQQLGEYDRQIEKIAQRYPEVELLTPVYGVGTLIGLTFVLTIEDAERFEHSRDVGCFLGLQPRQRESGESQPELGISKAGDRLLRSYLVQAAHCMLRKGAPDSDIRAWGVGKLQGEDKQGKKGKRGKRRVLVAMARKLAVLLHRLWAAGEVYEPLYNRKAAEAAVAQGKAKGKVSSRIAA

SEQ ID NO: 248439 - protein, 365 aa, unidentified
MNSVHYVGMDVDKEKIILARLGLGGDAKEVQEHVIANTPSAVKKYFSALLAGAQVHASYEAGCFGFGLYRQLSAMGVAVLVAAPGLIPRKPSDRVKTDRRDARSIALALRAGQLTGIHIPTVQDESVRDYLRMYEDLRGDLRICKQRVLHFLLRRGIRYEKGGPWTVRHKNWLASLEFADARDRKTLDMYLSTMQELEGKCSEAAEEVEQIAAQERYREQIKKLCAFKGIKTLIALSFVAEIGDFRRFPNARQFMAFLGLVPSEHSSGNKRRQGGITKAGNSHLRRLLVEAAWHYRSYHPSSRILIERRRGVDPQVLSYANRAGRRLSGKYMHMVLRGKRSQVAVTAVSRELAGFLWGAMTGQVA

SEQ ID NO: 248440 - protein, 412 aa, unidentified
MTAINQFAAHIGLDWADKKHDVCVQFNNGERVFHVIEHTPEALDTWLEALHKKVKGRIAVAIELKKGPVVFALQKYPFITVFPVHALSLARYRQTFWPSGAKDDPQDAELALELMLRYPKKIRAIEPDNADIRLLQQLVEQRRQLIEDKRRFVNRLINTLKQYYPQLLEWFSHRGSLLLCELIIRWPSLQQLKRARRDTVRNFLNAKGGRATALTGQRVASIDDAIPLTTDPSVIEANALMATALATQIKVVSEIIKTYDERIETLFNTLPDAGLFKSLPGMGPCMGPRMLAALGDNRDRFNSAEEIQNYAGIAPVTERSGQKSWVHWRWQCAKFVRQTFVEWAAKTVNSSYWAKLYYQSLREKGKSHQSAIRALSFKWIRIIYSCWKHRTCYDEAKYLLALKARNSPLLKP

SEQ ID NO: 248441 - protein, 417 aa, unidentified
MDNEVYYERCAGIDVHKKLLVVCLRVGRKSEVREFGTLTHEIREMVAWLKANGCQMAAMESTGSYWKPLYNIFEQEGLPAMVCNAYHIKNVPGRKTDVGDAQWIARCLSQGLLNPSFVPDREQRELRDMTRFRKSQIEERARNINRLQKFLEGANIKLGSWVSDVEGKSATALLELVIGKPDFTSQDVADRMHGRLKSSAEELFHSLEGSITSSQREFLAHVMAVIREQTVQIEKTDALIQNSLSENYKAAVRALDAIPGIGKVSAEQILAETGIDMSRFRNQHSLSKWAGVCPGNNESAGKRKSGRTPPGNKTLKSTLTQCAKSAKNNKKSFFSAQYSRLVSHRGKNRATMAVAHSLLIAIFFVLNGCVFEDLGADYYIQFNREKKINSHVKQLSKLGVSIPDDILKAAVQRPPDG

SEQ ID NO: 248442 - protein, 366 aa, unidentified
MKDRGMVQYLGMDVHKEWIIIATIRGEEQEPRSIVKKKNDWVIIRKYLTKVLEKGPILCCYEAGPCGYTLARNIEEMGITCIIAAPGLIPRKAGSHIKTDQRDAINLARNLRNGELVSVKVPDCKDEMVRDYIRMRDDMKGAEKKIKQQILGFVVRHGYRYDGTYWTEKHRKWLLSLFEEKDLRKETLDHYYCSLLEKEERLERISEKIEEIAKWKRYERLVGRFGCLKGVSTYTALSLCVEIGDFKRFPTAPQFMAYLGVIPSEHTSGGKRRLGGITKSGNKHIRQLLIESSWHYCLSYIPSKRLAERRKGQEERIIAYADRAGRRLTKKYHRVAITHMNKKIAVTAVARELAGFIWGMAVDEVA

SEQ ID NO: 248443 - protein, 430 aa, unidentified
MHNKNYISVGIDVGSAFSFMTILAPDETVILKPFKITHNNKDSLERAVSEIKKAEELYSLESRTFLESTGIYHFPLFCYLVDCGFNASIINPIITHSTKNGNIRKVKNDKIDSKGIAKLGLSKDIPVSQFPAKLVLELRSLTRKYYDLTDERSAHINKLKGDLHTVFPQYLDVFCDVTGKTSTMILRQYGTPDKILRGHKKTMIEKISKASRKGLAKASERYEKLCAAANAAKTFGCQIDSIYFNISLTLDLVEKLDSALDSILNRIRQLITFNKNEKFIQQIKLLNTIPGVGFLTAVTIMCEIGDFSAFRNPKQLFAYFGLDPEVNESGKFVGTQLHMSKRGSRIARRAIFAVALASIRTKRNGEGINPYLRKYYELKSGQKPKMVAIGAVMHKVCNIVFAVLRDEKAFELRSPEEHCKQYQRPALAAA

SEQ ID NO: 248444 - protein, 304 aa, unidentified
MNGIGIDVSKRQLDVGTTDGQTLQVSNSRSGFAELDLWLQGHPAVQIVLEATGGYEQPVLDFLHNAGHPVVRANALRARKLAQGLGHMAKTDRLDAYALAKMAALVKLRSYQPLEPWQREMRDFVRARRQAMHALTVARQQQEMVGNRELRRLLQANITCLQRTVERLGKRISEQVSKQPQLAVLKSMKGVGPGLQAVLASYLPELGKISGKAVASLVGVAPMSHDSGTMRGKRSIHGGRAEIRQVLYMASMSAMRHEPRLRDFYQSLRARGKEGKVAIVAVMRKMLVILNARMRDAQGGSIPA

SEQ ID NO: 248445 - protein, 351 aa, unidentified
MPTVTLGVDAHKRSHTVVAVDAVGKKLAAKTVPSTSIGHAAALSWARVQFGVDLVWGIEDCRSMTARLERDLMAANQIVVRVPPHLMSRSRASSREPGKSDPIDALAVARAVLREPDLPRAAHDETSFSLKLLVDRRDDLVTIRRGMISRLLDRVHALDPTHVNPTNWDRAKVRADLHTWLAQHTGLIAELARAELDDIDRLTAQIVALTERLTHLINQVAPRLLAKPGVGPLSAAKIVAETAGVERFKSEAAFARYVGAAPTPNWSGGQTPTGRRLQPSRRGNRQLNSALHRIAVVQIRLKDCPGRDYVERRVAEGDTKSQAIRSLKRRLARVVYQALIEDRALTNQVAA

SEQ ID NO: 248446 - protein, 327 aa, unidentified
MTQKMDVVGIDVSKATLDAYALTSQQARQFANDPGGHQGLVAWLQELGVGVAVFEASGGYERAAAQSLRRAGLVAHVVDPKRVRYYARAAGQLAKTDRIDARMIAGFGAAFLLGKPGGIVGTDDPVRQDLAELVGTRQVLVDHRTGLQQQADAVTSAIAKKLLLAPLKQLDRQIETSDRQIAAAIARHEPFAALARRLDTVPGLGPVSIAALIAWLPELGQLDRRQLAALVGVAPFADDSGKRTGQRHIQGGRMKLRNILYMATVGAATRHNPVLQARYRRLLENGKKPKVALIACLRTLLTILNAMVARQQDWNPTRLPAAEPAAA

SEQ ID NO: 248447 - protein, 355 aa, unidentified
MNDAKYIGLDVHQATISVAVLDSAGNLVMEAILETKAETILQFLHGLRGSLHVTFEEGTCAAWLHDLLKPHVTQVLVCDPRKNALIKAGNKSDRIDARKLADLLYLNKLNPVYHGETGIRPLKELARSYLALTRDTTRVMNRLKALYRSWAIPCAGQRVYAPRYRSEWLAKISEAGVRRRAEIYYQQLDALRSLREQVRRDLLAEGRKHSAMKLLRQIPSIGPIRAVLLIALMQTPHRFRTKRQLWAYCGLALKTSTSGEYRIVEGQLKRSKKFLAIRGLNANHNHDLKNIFKGAATRAAAVPGPFQEFHAGLVARGMKPTMARLTLARKIAAITLIVWKKGVGFDAEHLKQQAA

SEQ ID NO: 248448 - protein, 310 aa, unidentified
MEITVGIDVSKARLDVHVHPSGESFAVGNDEAGVAELVIRLGRLDGLKTIGMEASGRYERLAVAALAEAALPVVVLNPAQVRHYGMAIGLRAKTDPIDASLIALFVEAVRPEPGMLGDAQTTELSALMARRRQLVGMLAAERMRRQQAPKGPVRLSLARVVTSLEDALRDLDAHIDTTVRGTPVWREREDLLASVPGIGKTIARTLLAELPELGTLTPKQAAALAGLAPYTRQSGKWRGRSFIGGGRTAVRTALFMGALVAARHNPTLKAFRDRLVAAGKPKLVAIIATARKLLIILNAILRDAKPWRPA

SEQ ID NO: 248449 - protein, 474 aa, unidentified
MSSSKKQAVATGRPGLGMVGKKRASQGKETNQSVFQANAAGIDIGAREIYVAVPPDRDGNPVRSCGTFTGDLNEMAEWLVSCGVTTVAMESTGVYWIPVYDAVERHGMQACLVNPRNMKNVPGKRTDFHECQWIQQLHSMGLLHAAFRPESEVCAVRSLMRHRNDLVEMASQHIQHMQKALTQMNVQFQHVISDLTGLTGLAILDAIVAGERDPALLARLRDPRIKADEETIRKSLEGNWRGEHILVLKQRLSLYRSYRDQINDCDKEIEKLVAAFTPRVDPEARPLPEDRKKRQRQRRKKTGSPDFDMRTEAYKLFGVDLTQIPGLMMLVFMLFSEVGRDMSRWPDAGHFVSWLGLCPDNDISGGKVLWRGVRRTKNRAGTLFRIAAHSVYRDESPIGDYLRRMKAKLGPTAATTATAHKIAVIFYTMVKNQVEYDASLWVKRDALRENRIEARLHKQAAQRGYKLVPLTQAA

SEQ ID NO: 248450 - protein, 351 aa, unidentified
MPHKSSVRTVTTIGIDMGKTTLHMVGLDSCGAIVLREKVSRGRIASRLANLAPCLIGIEAGMATHYVARELAALGHDVKQVPPTYAKPFRQGHKNDFRDALAVAEAVQRPTTRFVPPKSNEQLDLQALHRVRSRLVSQRTAVINQIRGFLLERGIIVRQGLRFLRQLLPDILAKRTDVLSPRMVRIVSDLAGDWRQLDDRIETVTDEIETLAKADDNCRRVMTVPGIGPIISSAMVAAIGNGSAFSRGRDYSAWLGLVPKQMSTGDRTILGRISKRGNSYLRMLFIQAARVILLRPANWPKHGFGAWLVRAIQRLHPNVLAAALANKLARIAWTVLAQERSYEARVTKAEA

SEQ ID NO: 248451 - protein, 346 aa, unidentified
MENIALDVHKHYTWARVENPQGQALYTSRLVHSRGSIKNFIQRWTPGSPVAVETVGNWYWVVDEIEAGGGKPQLVNARLAKLMIGNVNKSDKLDAKGLNMLQRTGTLPTVWIPPSGVRDARELPRTRMVFSRQRTQLKNRVHATLSKYGYSVDEVSDAFGKRGRQIIEVLSSKLPPHTKQALDHVLDQLDEVMENLKAIETDMIKVFAPCPQTTWLKNLPGVGKILAVVIWTEIGSIERFGRAEQLASYSGLVAREHSSGGKFHYGAVRRDVNVYLKWAFVEAAGSAIQNRQRCGYQHIGQLYERIKPRRGHNRAKVAVARHLAEASFWMLKKGESYREPRLSTQR

SEQ ID NO: 248452 - protein, 338 aa, unidentified
MAIIATGIDLAKNVFAVHGVNETGTVLLRQPKVARGKLNALVASLPPCVIGIEACSGAHHWARQFQAHGHTVRLMAPKLVTPYRMSGKRGKNDAADAAAICEAVQRPNMRFVPVKTEEQQSRLMVHRARQGFVAARTACINRIRGLLSEFGIALPLKAEVVRRQAREHLEDLPGYANLVIGDLLGEVAHLDERIKQYDAHVRAMAHDCTAAQQLMQLMGVGETTATAIVAMVGNAREFDSGRQFAAWIGLVPGQYSSGGKARLGRITKAGDAYLRSLLVLGARAALNAAATKTDSLSRWALQLRERRGYWKAVVAIAAKNARMAWAVLTKGESFKLPV

SEQ ID NO: 248453 - protein, 340 aa, unidentified
MTIVLGLDQHRAQITAEWIDTVTGEISRSRVAPAHRESVRRFLARFDGLELEVALEATTGWRFVVEELQRVGASVHLAEPAETAARRGRKKRAKTDRADARLLRELVMVGRLPESWIAPDHILDLRARVRLRHTLIDERGEWQQRIHAVLYHHGCPHHLGVGLLTAEGRQWLQSLELPATAREQVTVALQMINAVDAQLAPMDKELRAYARRQPGCKALMGLYGVGHLTAVTILAELGDARRFSSSREAVRYSGLDITVHQSDQRRAPGHLSRQGPPALRWALYEAAQSVHRKSSPDREYYLQAAERLGGNRACLAVARKLLKRSYHTLRELGEQALQPA

SEQ ID NO: 248454 - protein, 431 aa, unidentified
MLKINPLSTLYVGIDVSSKSNYVCALDFFKNKYINSSFANNQPGAEELALKILECLKEHPDITTVVAALESTSVYSIHIANYLSSCEELMRFKPFVFVLNPKCTANYKKSYIGLGKSDPIDAFVIADYARAGNIESEPWRGSQFLALKRLTRHRLHLVECMTREKTYLVSNLYLKFSELQMLEGDDKPFCDIYGATSSSVLMEYLSPEEILDSSEEDLITFLAEKSRNRIKDISKTANLLKKAARDSYRLDKALYEPLNVSIASSFNCIETFKREIKVIDNAIEKEIKGLNPNAFIILQSIDGIGPVFAGGIIAEIGDITAFHSSDALAKYAGLTWKSNQSGDFDGEDTPMMKAGNRYLRYYLGEAANSMRKHNVEYGTYYRKKYNEVPKHQHKRALALTSRKFVRLVYGLLARNQLYSGVSLDTSIKESN

SEQ ID NO: 248455 - protein, 475 aa, unidentified
MNIKGKKKKNQVITANIFEQQEVLAKVEAIKNNLKASTWHELETKGKFTKNEKLTFISDDMLILGCDIGSETHYVRAIDTRGRELSKSAFPFSNTLEGFQSAKDWAVKIAAANDKKQIVLGLEPTGHYWFCLTTWMVSNGISVVQVNPYAVKQTKELEDNSQLKDDTKDPKLIANLVKDGNFGMPYLPEKLYADLRRLSMFREQLNEDRIRFLNRLHREMKIYFPEYKDALGKFDGAFSLELLKKAPFPEDLLLLGKDGIRQIWHDAKLRGRGYSRAEEILTYARESVGMKDGANASKTAVKWFVERIIELDEQLVEIEEQLKQKCKEIPHTENILEISGIGENTLSGILAEMGDISRFDDVKEIQKLSGLGLVSCSSGKHKGETKISHRGRKRLRYWLFQAAKSVVAHSEEFKELHAYYTTRIENPLKKMQSLIVIACKLLRVIYTILTKGTVYDPQKLRSDIKRSSKQETVAA

SEQ ID NO: 248456 - protein, 346 aa, unidentified
MAIVETTRSITGGVDTHLDTHVVAALDPNGGVLGVAAFAATRSGYSSLWSWLGEFGTIARIGVEGTGAYGAGLARHLRSLGVEVIEVDRPNRQLRRARGKSDTIDAIEAARAVLSGRATGVAKTADGNVEAMRALLVAKRSGREARITCLNQIRHLGVTAPDELRERFGRVSRGMLAAQAASLRPRPDSDAVLYATKLAMRSLGRRVLVIDEEIARLEVVLGELVTATAPGLVGLYGVGVDTAAILCVAAGDNPQRVRSEAAWAQLCGVAPLEATSGKLTRRHRLNRGGNRQANHALWRIVFTRLGSDPRTRSYLARRLDEGLSRPEIIRSLKRYVTRETYRQLPR

SEQ ID NO: 248457 - protein, 347 aa, unidentified
MLIIGCDFHPGFQQVAIFDNLTGEIQEKRLQHRAEAEQFYRSLAGQEVRVGMEACGHYPWFERQLAELGFELWFGDAAQVRASVVRKQKTDRRDAEHLLDLLIENRFPRIWVPSLEVRDVRQLLVHRHKQVQARTRTKNQLQAMALSHGVQKKRKLWTQTGRAELEQLPLLPYAAERRKKLLQELDELEVEISALDRRVAEEARQRPEVVLLMTHPGVGPVTGLAMVLTLGPAERFESAKQVGSYFGLIPSEASSGGKQRLGKISKQGNSFLRFLLVEAGQTAARYDPQLKRFYKRLATRKNRGVAKVAVARKLATRLYLMLREGWTYAQLNQAVMSVSPSHPVVGE

SEQ ID NO: 248458 - protein, 338 aa, unidentified
MKTHIGVDLHQRFCYLTAVDASGKKRKQGQVVNEGAALRSWLRGLERPRQVVVEASGFWPAFARSVAPEMERLVMVHPQRVKAIAAAKLKNDRVDSETLAHLSRCDLLPEAWMADEGTQQLRLLVRLRITLGRQRARAKNQLQAVLHQEGFKKPVSDVFGKRGRAWLKGLELSAAARLVVDTWLREVDHLDVELAGQTRELERMARADARARFLQSVPGIGAYAAMVILAELGAVERFQNKRALASYAGLTPVVRESAGKRKRGGITHQGSNTLRWIMLQVAQVAARCSPGARSYYAGLRARKPAQVAKIALARKLLTAVWALLHHGVCFDEELFIRG

SEQ ID NO: 248459 - protein, 398 aa, unidentified
MTESSDYESVQVFIGVDVGKDTHHAVAINRSGKRLFNKALPNDENKLRSLISGLKQHGQILLVVDQPATIGALPVAVARSEGVLVGYLPGLAMRRIADLYAGEAKTDARDAAIIAEAARILPHALRTLKLADEQIAELSMLYGFDDDLAAQTTQASNRICGLLTQIHPALERVLGPRLDHPAVLDLLQRYPSPEKLASLGEKKLAAQLCKLAPRLGKRLAADIAQALAEQTVVVPGTNAAAVVLPRLALQLITLRKQRDEVALEVEQRVLAHPLYPVLTSMPGVGVRTAARLLTEVACRAFASAAHLAAYAGLAPVTRRSGSSIRGEYPSRRGNKALKRALFLSAFAALRDPISRAYYTRKMSQGKRHNQALIALARRRCDVLFAMMRDGTFYTPQAS

SEQ ID NO: 248460 - protein, 411 aa, unidentified
MERFVERCAGLDVHKDSVAATVHVPGPEVSRLQETRTFATTTRGLLALADWLASYGVTLVGMESTGCYWKPVYYLLEERFECWLLNPRHLRNVPGRKTDVADSAWICRLLEHGLVRASFVPPRPIRELRDLTRYRKTQIEERSREVQRLDKVLQDAGIKLSSVASKTLGVSARRMLDALVAGTHDPELLAELARGRLRRKLPALKEALSGRFRSDHHGLLVAQILAHIDYLDETIATLSERIEQAIAPFSRERELLQTIPGVGRTGAEVLIAELGVDMSVFPTDAHLASWAGQCPGNHESAGKRRSGRPRHGSKWLQTTLTESAKAASRSKGTYLGAQYTRLRGRRGPRKATGALRHSILIAAYHILAQNTAYRELGADYFDRRSTDQRTKRLVRQLEKLGHTVTLEPLAA

SEQ ID NO: 248461 - protein, 336 aa, unidentified
MFQLGIDVSKKTLDLCLLREGVKGRVKTRKLQNDINAVSSVIAWLSKQHCKPEDVHIIMEATGVYHESLAYGLHKAGGRISLANPHRTREFARGMGILTKNDRVDAYMLACYGALKAPEPWLPPPEEVRHLSALLRRRDVLVTDCTREKNRLEKYLATDTPPVIAESVEAMISQLNAEIKRLDRLIRSHLNLHPELKKDFDLLTSIKSVGYQLGLNMLVILRSHDFTTAEQAAAFLGVVPVEKYSGTSVRGCPKLSKIGPPEIRAKLYLASLCGLRFNPLMKSMYERLCLRGKAKMCAIGALMRKLVHWCYGVLKTQKPFDVDYLSSDARSACKAA

SEQ ID NO: 248462 - protein, 404 aa, unidentified
MKGPIVSIDVSKGKSDYQAFKNLNVKYTGSRSIKHTKEGFDEIVNLVREMEKKLETEVCVVYEATGVYHRVLKKVLEDNNIKQFIINPLLSAKTRKNDSLRCPKTDKLDPKSIAKTYYSHSLHNSHKQETIYHELRELSRYYEDILVHIRKDKVAFRAQLDIVFPGYDALYDDLYGPVALAVIEKYPHPEMLQKKKINTVSKVIQSKTCHRQAVSDTMADKAIEYSKTIYSGCDKDDIEVLILQRFIKKLKEDMAEAERTIGEMIKLAQELPDFSIIKSIPGIGDNLAARIIAELGDMTRFKKKNELVAFAGLDPRISESGQNDGDHMHITKKGNKRLRCLLYLAVTCSIRLKRDDNSIKDFYIKKKQQSNPMCSKAAKTACASKLVRIIYSMCKTGELYQYNK

SEQ ID NO: 248463 - protein, 334 aa, unidentified
MKNYLFHVGIDISKLKLDVNLLNSKTLESEHFVIDNNPKSIKDFVKLLVKQKIELKDVLFCCENTGVYTNHLSFTLLGLELDLWIVPAIEIKRSKGISRGKNDKTDAKDISFYSVRNIDKLRLFQLAEIDIQKLKMLYTEREKVIKSLLLLETTKENSEFVNKEVFKEVSSINQSLISTIKKSINKIEKRIKEIIKSNQELNKQYTLIKSVPGIGEQTSLYFIIATKGFSAFKNWRQFACYSGVAPFEYRSGSSVRGRTKVNHLADKKMKTLLQMCAMTTLKYDPQLKEYYIKKKDEGKNSMLVLNNIRCKLISRVFAVVNRETPYINTYKFAS

SEQ ID NO: 248464 - protein, 403 aa, unidentified
MVFVGIDWAEAHHDICVVDDEGHVLAKRRVPDGLEGVGKLHALVAEHAEDPAQVVIGIETDRGLLVGSLVAAGYQVYAINPFASSRYRDRHATSGAKSDSGDARVLADLVRTDRHKHRPLAGDSHLAEVVQILARAHQGLVWTRQRQANQLRNALREFYPGALAAFDDLDAADAVAILERAPTPSQGRALSQAKIISALRQGGRERNLESKAAEIQAQLRLPQLEVPALLAQAYGHSVAATVAVIKQLNLQIAALEQELAASFEMHPDAEIYLSLPGLGVVLGARAMAEFGDDRTRFLNPKARKSYAGTAPITKASGTRKVVLARVARNRRLADACYQWAFSALTRSEGARHRYDVLRARGQTHHQALRALGNRLVGILHGCLTNRQIYSEHLAWSPHLEVAA

SEQ ID NO: 248465 - protein, 429 aa, unidentified
MNSTQNKKIEQVKETTMIVGIDVGSEQHYFRAFNWRGIELTRKPVAFSNSMEGFNSFYNTIMELMQKSELEEALVGIEPTGHYWFDLGQFMGEKNIKFVMVNPHHVHKTKELDDNSPSKNDRKDPRIIAGLVRDGRYFYSYMPTGVYAELRNASNRRFVLVEEQTRAKNRLQKWIAVYFPEYKGIYTRIDAKGGLLVLKQAPTPEEITKLGEEGIIKIWKDAKLRGSGHKKAMKILNAAMRSIGLKAGLTEARMEIQDLIEDYELQTRRLERVNDLIKELCQQVRYADKLLEIKGIGITTVAGFIAEVGDITRFDSTKELQKLAGLELVADSSGKHNGRAKISKRGRKRLRYLLFEAAISVVGKNEEFKEIHRYYTTREKNPLKKMQSLIAVACKLIRVFHVILTKGVSYDASKMLKDIQHPGEQLKAA

SEQ ID NO: 248466 - protein, 305 aa, unidentified
MISWVGIDISKSNLVVWVQPQKEGFEIPNTSEGFVELIKRLSCYEVGRVLLEATGGYERQVMAALQQTNFQVLRINPRRARAFAVAMGKNAKTDPIDAAVLADFAEVLHGSHEKVISPEREALRELIQLREHFVQQRDDNKRRLQQAQLPTVVSATKDHIRYLQAQIKALEKHLVQGMFDLDVEKARRLMSVKGIGKVAAASLLVYLPELGELDRREVAALAGIAPYNDDSGNHNGKRQIYGGRTRVRHALYISSWVVIRFQADFKTRYEALRERGKSAKVALIACMRILLIRLNAMLRDGTEWR

SEQ ID NO: 248467 - protein, 436 aa, unidentified
MTAPGLEVRRWEWQLCVEILWGESRRLIRFGFGTVTGERPMLQENEGTISTQDQPTGSDIFVSVEMSRSKWVVGIHTPLADKIGLHTMACGDVEALMALIDRARVKLVASGSNSPAAMICYEAGYEGFWLYRRLIALGIRVVVIDPASLLVDRRAKRAKTDRIDARAMVRALMAWARGERQVLREVRVPTVEQDDARRGLRERQRLVKERTGHGNRIKGLLKTQGIMDFDPRAADAPARLDAIVTGDGRPLAPCLKREIVRELERLALVMRQIDQVETERDAVVQACDAGAGTDALAAEPEREAAMIGELNRLKGIGMNDATILVREAFWRDFRNQREVGGWSGLAPSPWASGSVLRDQGITKAGPPMLRAHMIQMSWRWLLWQPDSGLAQWFRKRTEGATGRMRRIMVVALARKLLIALWRYATTGMVPHGAIVT

SEQ ID NO: 248468 - protein, 309 aa, unidentified
MIAVGIDVGKSFLDVAVYGEQKVQRFKNTSGGVERLVKGLKKHKQVRIVVEATGGYEESVLEACAKAGLWIARINPRQGRDFSRATGQLAKTDHLDARMLAEMAAVFHGRLRQHTPAMPWQTELKGWLRRRRQVTDAIIGTRQQMTMALPVIRALMRKTLAALQRELAVVDAAMKQLLQVHATPAVRSAKGLGPVFQATTLALLPELGQLSRQQIAKLVGVAPLNRDSGQSQGKRKIYGGRAQMRVALYMATLSAVRWDPDLRSHYVQLRARGKVAKVALVACMRKLLGIVNARRREELRGCGEMSCVV

SEQ ID NO: 248469 - protein, 347 aa, unidentified
MAMTIVKTRAITGGVDTHADVHVAAALDPIGGLLGVQEFPATAAGYAGLLGWLGGFGTVALVGIEGTGSYGAGLARHVTTAGVRVVEVDRSDRQDRRRQGKSDPLDAVSAARAAQSGRAAGAPKGRDGAVEAIRALMVAKRSARSERVQTINQARALVLTGPDDLRTRFARHTAASLVSGLASLRPRPGDVVGYATRIALRELGRRAEFLDGQLERLDELIAPLVAARAPGLLALHGVGPDTAALLLVAAGDHPERLRSEAAWAHLCAVAPIPASSGKVTRYRLNPGGDRQANHALWRIVLTRMSAHPPTLIYVERRTKEGLSKKEIIRCLKRYVAREVYRHLRAVV

SEQ ID NO: 248470 - protein, 479 aa, unidentified
MTPRKGKGFAKNVAAARTHAGMELLQPHAAGIDVHAYQHYVAVPVDAVPAAWINPEPNLPPGVRVFGTNTGDLEAIAAWLQDCGVKSVALESTGVYGDVLLVILEQHGFEVVLVHPQQTATAPGRPKTDVLDCQWIQRLHSYGLLRASFRPSAEIRELRSYQRHREMLIRSAASHIHHMQKALEQMNVKLTEVVSDITGKTGMSIIKAILRGQRDACKLAKYRHGGCKATEAQIASALLGTWSEAALFELRQALKLYEEYQRRLQECAARIEQCLRQFADRSAGQPLPKPVRQFGRKTRGVSVNTRQLLYQLAGVDVTLIEGIDETTALVLLCEMGYDLSKFPTERHFTSWLGLSPNHRGSGGKIKKRRVRPGANRAARALRMAAQGCHHAKHALGAFYRRIAARCGGPKAVVATARKIAERFWRLLTKGMAYVRQGMDEYEKTYQFKLTRRLAQRAAALGYKLVPVALTPEPEPEPQP

SEQ ID NO: 248471 - protein, 348 aa, unidentified
MNILAMDLGKNNTVFCEYDSRTAKYKFGKIRTRPQQIHDLLVEKEPEKVVFEICSAAGWIYDIAQALNVKTEVANPSHQGWRWKKVKRKTDRDDALKLAQLSAMKQLPLVHVPDKAVREKRSLIGYRHKLVKRRTQIKNSIRAILDREGISLSAGRAGWSGESVEMLKAMAVSVSEMNCDCLWRGQLWMELLQFEQIEKALNEITSALDRLGKKDVAVQRLQSIPGVGPRLSEAIVAYLDKPQRFANGKQVGSYAGLTPKQYQSGAMDIQGKISGQGNALLRSLLVEVSWSGIRYNKWMEETYKKLLRGSPSRKKIAITAVARKLLVRCWAMLRDEQNWDSNMAGKAA

SEQ ID NO: 248472 - protein, 343 aa, unidentified
MHVNTIGVDLAKNVFQVHGVDSAGKVVITRQLRRKQVLDFFSKLPSCLVGMEACGTGHHWAREISKLGHTVRLMPPSYVKGYVKRSKNDAADAAAICEAVTRPSMRFVPIKSTDQQALLMLHRTRDLLIRQRTQLINALRAHLAEFGLVAETGREGVAQLGAIITDEGNHEVLPSAMKQALQAIVDQLAALELQVGALDRAIHAHHRANDMSCRLETVPGIGVIGATAIASTVTDPSGFKSGRDFAAWIGLVPRQHSTGGKERLGGISKQGDRYLRRLLVIGATAVVRQARLHPQKHPWIMRLLAKKPAKLVAVAVANKMARIAWAIMAKGGYYRAPVLAAAA

SEQ ID NO: 248473 - protein, 363 aa, unidentified
MQVRHIFVGIDLGDKNSVARIAVDRDKGTRFGFLNSRQGRARLLREVKRRSEQADSAKIVMAYEASSCGFVLSDEAEALGIKCWVLAPTKMEKSVEQRQHKNDDRDADDVLEKLRGHVLAGNRLPTVWVPDLQTRDDRELIRTRLDLTEKQTQIKAQIRMLIKRHGLEKPSGLGAGWTIGYRRWLQALTESEQLLGWSTRQALDSMVRQLQFLEAEIDQVQKPLEELANEPRHKPIIEELRQEAGVGLLTAMVYRTEIGQAGRFGRGRQVGKFVGLTPTSHESGQQSDRKGHISRQGPPRLRKVLCQASWVHIVHDARAGRTYQRLVSRNPKKKKIALVAVMRRLAVRMWHRMRKIELQQIQA

SEQ ID NO: 248474 - protein, 313 aa, unidentified
MMASQDVFVGIDVSKDRLDVHVRPLGVGFSVSNEAAGYTALIARLRPLRVKRIVLEATGGYERALWLALSEAGLVAAVVNPRQVREFARAAGRLAKTDRLDAAVIAHFAETFAPRLCKPDPVADRLGEHVLYRRSVQDELVALEHQRRRLETPALQERADRRRAALRAEVKEIEREMRAIVDSDPAKKALFACLTAFKGVGLVLACTLIANMRELGSLSRHQAAALIGVAPLNHDSGARRGYRAIAGGRRRVRNVLYVATLSAVRSNPAIKEFYRRLSDGGKPPKVALVACMRKMLVMLNGRVRDELTVAAIP

SEQ ID NO: 248475 - protein, 325 aa, unidentified
MFYLGIDVSKNKFEMALIPSSDEPQTLKRKVLANGPEGFDKLHAWLSRRAEGEVHTCMEATGTYYEDLATFLVNSGIKVSVVNPALIANFAKSSNTRNKTDSVDALVIADYCRSKRPKLWTPPSPEAKELTELVRRLAALERAKQGEENRLSSGVSSAAVASSIKQSIEFLSQQIKELESLIKDHIDSHPTLREDRDLLVTIPGIGEKTAAVILGELPDTANFNNAKQAAAYAGLSPREYRSGSSVRGRTRLCKVGNSRLRCALYFPAVVACIHNPVVKALYQRLLHAGKSKMCALGAAMRKLLHIAFGVLRRRQPFLAVGDTPA

SEQ ID NO: 248476 - protein, 453 aa, unidentified
MSLVMLGVDPHKQSHTATALVAGSHQQLATLRVPASPSGYRQLLGWARQFPQRRWAVENARGLGCHLTQWLLARGESVQDVRTTATARVRELSRGRGRKTDALDAAAAAGIAALQGDAAQLQPEDETVVLAVLEERRSNLVGQRTRSVNQLHALLRELIPGGAPRKLRADRAAALLRTVHPLTAADRARKQVAWDLVAEVRGLDRRLAMIGIRIQDSVAALGSRLPETVGVGPVIAGRLLGRTGRASRFPTAAHFASYTGAAPVEVASGERARHRLSRAGDRQLNHALHLIALVQVGTPGCAGTTTSGAHWPRARPPGKPCAASSAESPITSGESCAATNRPATTANPRRLDRQRRPRSVGVKQRVVGVKARRCARRSRLGGAGSRAGCRPIGWPGCGGLADGWPRAYGDGHSRRERLVSRSTSRTPTRQAGRPGAGCAQSGPARSGVCRTPW

SEQ ID NO: 248477 - protein, 416 aa, unidentified
MSFALPDALFFTGIDWAAETHAVCVTDAGGKIAAGFTIEHSADGIALLARRLARYGEAGVMPVAIERPDGRLVDLLLEAGHPVVPVSPNAIKTWRDGEVLSGAKSDAGDAAVIAEYLRLRAHRLKTAAPYSDETLALRTAVRTRGDLVEMRVAATNQLSALLDAHWPGAKAIFADVESPISLEFLTRYPTPAAAAHLGEKRMAAFLAKHGYSGRRPAAELLARLRAAPAGTGREALSEALRDVVLAAVGVITALNAAVKSLDRSVAAHLGEHPDGKIFTSLPRSGQVNAAQVLAEWGDCRPAYAGPDSVAALAGVTPVTSQSGKHRDVHFRWACNKRFRAAITTFADNSRHASPWAAKVYTDARARGKDHPHAIRILARAWIRVIWPCWLNGVPYDPAQHGAAAALAEQPVKQIAA

SEQ ID NO: 248478 - protein, 464 aa, unidentified
MTTGKKLWRNRKERKEWARRLQSEDPGLEIVHPLAAGIDVGNSAHYVAVRPDRDPEPVRRFECFTADLHGMADWLQSCGVKSIAMQSTGVYWIPLYEILEERGFEVYLVNARHTKNLPGRKSDVQESQWLLKLHTYGLLNNSFQPVSEIRVLRTYWRQRAEHVRGAATCIQRMQKALTQMNVQLANVISDISGLTGQAIIRAIVTGERDPGKLARLSDRRVHASQAEIAKSLEGNWRSELLFVLQQEVDMYDIYQKRISECDQQLQKQLARLTGFPTGKEPTQKAKTKQAAAKNAPRFDLSSELQRVTGVDLTRIDGIDVMTAQTLLSEVGLDMSRWKTEAHFASWLGLCPDNRISGDKVLARGTRRVVNRAATALRQAANTLIRSRSYLGAQYRRLRTKLGAPKAITAMAHRLARLVFRMLKYGQAYIDKGTEYYEERFRQQQLQLLRKRAAKLGLQLAEIQA

SEQ ID NO: 248479 - protein, 369 aa, unidentified
MEKGTTYVALDDSKRKIVAGILRPGDAQPELREIANDPRQIRRLFERLKREGPVTACYEAGVSGYDLYRQLRALGVAGDVIAPALTPRRPGQRIKTDRRDAAKLVRLFRAGELTAIHVPDEAEEAVRDLVRCRDDIRRDVLRWRHRVLKLLARHGRAYLTGKNWSQAHWRWIREQRFDLPPLQRAFEATVFALEQALARQAELDKELEAVAATAPYREPVGWLRCFRGINTLSAIILLAEVVDFQRFRRPRELMAYLGLVPSEYSSGETQRRGALTKAGNSHARRVLVEAAWHYRHRPTIGRALASRSQGQPDEILGQAWRAQQRLHRRYRHLVGHGKRTPVAVAAVARELVGFIWAAMTRHESRRQAA

SEQ ID NO: 248480 - protein, 402 aa, unidentified
METSAGIDWASETHAVCVVDEHGRRLLQRTIRHDDAGLSELTRLLRQHAVQRVAIERPDGVLVERMLDAGLPVLAIHPNQVQAARDRYRAAGGKSDAFDAFVLAELARTDHHRFRLVRPDSDQTRALQAMTRARDDLVAVRVELANRLRAELERSWPGAAVIFADLDSPIALAFLQRYPSPSDAARLGPQRLAGFLSRHHYCGRKTPAVLLQRLAQAPSVQLLDAESEARRSIVLSLVAALQPLVAQIRELSSAIAQALAAHPDGHIFRAFFRDPKSSLTAATLLAEIGDSRQRYPTADALAADAGQSPVAVESGKRKQATFRRACDKRLRNAISVLADTSRHHNPWAADIYTRARARGASHQHAIRILGRAWCGVIWRLWHDHDIYDPARHTALQRLLTAA

SEQ ID NO: 248481 - protein, 338 aa, unidentified
MTGGVDTHADMHVAAALDPIGGLLGVAEFPATRAGYAALLGWLGGFGTVRLVGVEGTGSYGAGLARHLAVAGVRVVEVDRADRQDRRRQGKSDPLDAVSAARAAQSGRAAGAPKGRDGAVEAIRALMVAKRSARSERTQTINQSRALILTGPDELRTRFTTHTPADLIAELASLRPRTGELGGHATKMAVRELARRAQFLDAQLERLDALIVPLVTAHAPALLAVYGVGPDTAAMLLVTAGDQPERLRSEAAWAHLCGVAPIPASSGKVTRRRLNPGGDRQANHALWRIVITRMSSHPATRVYVERRTKEGLSKKEIIRCLKRYVARQVYPLLRPADG

SEQ ID NO: 248482 - protein, 356 aa, unidentified
MESLAQLDSARVIIGVDTHKDEHVAVAIDERGALLGQFGLAATAVGYADLEAWALSLGPVIAFGVEGTGSYGAGLARSLAGRDHTVIEVNRPDRSTRRRVGKSDPIDAEMAARSVLAGVATGQPKSGDDYVEMIRMLKVAKDSAVRARTQAINQIKALIVTAPQELRVSLTGDSTHKLVARCLALRPGSLTTPTAAAKHALRSLARRHQQLGAERDDLAAQLDVLTATTAPMLRATFGIGVDTAAALLVAAGDNPQRLRSEPAFAALCGTNPIPASSGKSQRHRLNRGGNRQANAALHRIAVVRLRWHQPTKDYADRRTTEGKTKPEIIRCLKRYIAREVYAILQHPADQHIPHTA

SEQ ID NO: 248483 - protein, 430 aa, unidentified
MHNKNYISVGIDVGSAFSFMTILAPDETVILKPFKSTHNNKDSLERAVSEIKKAEELYSLESRTFLESTGIYHFPLFCYLVDCGFNASIINPIITHSTKNGNIRKVKNDKIDSKGIAKLGLSKDIPVSQFPAKLVLELRSLTRKYYDLTDERSAHINKLKGDLHTVFPQYLDVFCDVTGKTSTMILRQYGTPDKILRGHKKTMIEKISKASRKGLAKASERYEKLCAAANAAKTFGCQIDSIYFNIFLTLDLVEKLDSALDSILNRIRQLITFNKNEKFIQQIKLLNTIPGVGFLTAVTIMCEIGDFSAFRNPKQLFAYFGLDPEVNESGKFVGTQLHMSKRGSRIARRAIFAVALASIRTKRNGEGINPYLRKYYELKSGQKPKMVAIGAVMHKICNIVFAVLRDEKAFELRSPEEHCKQYQRPALAAA

SEQ ID NO: 248484 - protein, 422 aa, unidentified
MNTHSNKSFTAFIGIDWADTKHDICLQAADSEQREFDCIAHQVECIEEWALSIQQRFGGAIAIALELSKGPIVYALQKYDFFVLFPINPSTLAKYREAFTPSRAKDDPTDAELALDLLLRHPDRLKPLAPQSVEMRTLAALVEQRRQLVNDKIRITNRLRNALKQYYPQTLEWFDHIDTPLFCDFITRWPTLVQAKRARKNTLEKFFHAHNMRRADVLETRLRAIKAATSLTLDEAVIAPHKLLALVLTEQLRVTLHAIHRYDDAIAELAPQHPDYALFSLLPGAGPSLAPRLLVAFGEQRERFSNAAEVQQYSGIAPVTERSGNKHWVHWRWQCPTFLRQTFTEWAAQTINKSYWAGAYYRQQRDKGGSHQAAVRALAFKWIRILYRCWQTRTPYSEATYLKALERRGSPLLNPPKMAEIA

SEQ ID NO: 248485 - protein, 408 aa, unidentified
MKRYYIGVDWGDRLHQVYVGDQDGKKVREVKVQESPEGLAEIGRWLDENRAEGIELWAAIEKPAGRIVDFLLDHGVEVYPVNPKAVDRVRDRYRMSGSKSDAFDAYVLAEFLRTDQAHLRVLRPNSEKAQELKMLSRDQRRVGRHKTRLLNQLTTTLKEYYARPLEVFGDLETEIALDFLQQYPTPAHLSALKRKEFNRFATQQHHLSKQRCEQLWEKLNQPQLAVPEHVVRAKAQWVEVLIEQLRASIKAVKIYNHKVESFFASSPAAQFAKTLPGGKSGTLVAAIWAELGDAPGRWQSSRHLQAEAGAVPVTKASGKSRVVHFRFACNKHLRHTMYWFSFVSVNHSEWAKLYYRGQRDKGHSHHQALRALGAKWLKIIFVMWRDHKPYDENYHLANIARQKMRQAA

SEQ ID NO: 248486 - protein, 351 aa, unidentified
MLILGCDYHPSFQQIAWVDTESGECGERSLMHSTGEAERFYRNLKEQGVKVRVGIEATGHSRWFERLLMELEYELWVGDAAEIKAKRVRKQKNDREDARLLRTLLVENRFPRVWLADQLNRDLRQLLWHRHRLVQMRTRVMNQLQAVALNEGVQRKKGLWSQAGRAQLESFQLLPWATMRREDLLRLLDGLTPRIQALTAEVNKQAEQYPEARRLMTHPGVGPLTALAYVLIIGSPDRFRCGKQIGCYLGLIPSEESSANRQRLGHITKEGNSLLRFLLLEAAQAAVRSDADWRREFLHLTMRRGRPIAVVALARKLAVRLYWMWRNGRDYEKSLKFSSHVGQPGTAYGVK

SEQ ID NO: 248487 - protein, 344 aa, unidentified
MSEVTTIGLDIAKNVFHAHGADERGRVVFSKRISRGKLLEFFAAQPSCMVALEACGGAHHWARQLIHLGHQVRLIPPAYVKPFVKRHKNDAVDAEAICEAAQRPSMRFVAVKDEEQQAAGLVFRTRDLLVKQRTQLINAIRGHLSEYGWVAPKGPSHVAMLADLLEEEEMASTLPEAARAMLRVMLDLLGNLDDRIKELDKEIARRAREDEVSRRLMTIPGIGPIGATAITALAPPAETFAKGRDFAAWLGLTPLQKSTGGKQKLGATSKMGERTLRRLLIIGSSAVVLQASKRGAPKGSWLERMLARKPRMLVTVALANKTARIVWALLVKQEDYKAPVAALA

SEQ ID NO: 248488 - protein, 339 aa, unidentified
MPFLGGENISLIGVDIHKKYCLGIIEGNNTETKLRFPNTRNGWKAFLKNEEHIDKVIIEAGSVSEKTLRYLEDLNVPVKMANPRKARLIAEATIKTDELDAKRLIDLEKVGLLPESWIPSREIRDIRHLCRYRYFLVQIRTKIKNRIHYELEREDINVKTLTYKYLETVKEKTIMIDQLYRLLREINEKIREVEKEIEREYSNNEYSKIIDTIPGISKYGSLLLSMEIGDINRFSNSKKLASYAGLVPREYQSGTREWKGHITKEGNKWIRWILDECLAIHINVCPESPISIYYRSLMPIKGNGKAKIAAERKLLSVIYVMLKEKITFDQYIKMMRRAI

SEQ ID NO: 248489 - protein, 320 aa, unidentified
MLSYCGIDVSKDRLDVAVLPDGECFSVRNDAAGWAELVERLCSFSIAAIGIEASGGYERGVMRHLLAAGMPVRQVNPFRLRQFAKASGVLAKNDPIDARMIASFAAIMPTRPAQRHAPELERLTEILAIRRQLSAEKVAAENASRLLENAMLRRLSRRRIARLTADIDMLDKHLVEIVASDAALGHRYQLLTSMPGVGSLLACTLIALLPELGSMSRKQVAALVGVAPYAFESGTLKGRRCIRGGRAPVRHVLYMAAMSASNWNPVLKVFHARLKGAGKLPKVAIVAVMRKMITALNAMVRDDVIWADRHRGRHPVPTAR

SEQ ID NO: 248490 - protein, 331 aa, unidentified
MEKREYIGIDISKSTFEAYLYKAGETKGFKNNQQGFDELTKWIEIITKTQLDNVALCFEHTGLYSLPLSIYLHEKHACYFVVSGLLVKRSLGLKRGKSDKIDAQQLSRFAWLYRDELKPYQIPSQVLIKLKQLYSLRARLVKQCSGHKGYLREIRTVLHIDAEDTIVKTCVELVKVLEKQIETIEKEITELIKTDEELLSTYRNITSIKGVGLVVAVAMIVSTNNFQCFDTWRQFSCYAGIAPFEHSSGLSYRGKSRISHLGNRQLKTLLSNSAASSIQYDPEMRLYYQRRLAEGKNKMSTLNIIRNKIVSRIFAVATRRTPYVNLHNYSS

SEQ ID NO: 248491 - protein, 347 aa, unidentified
MVTIGIDTHKATLAVSAIDGTGRETGARTFPNDRQGHVGLLRWAQAHGSERRFGIEGSGSFGAALARLLVAAGEAVVEVPAILTERERRHLRRAGKSDPGDALAIARVALREAGLGPIPMPGITEDLKLLVDARDQRVGERTRIANRLHAHLVVLAPGYKREIRNLTAARHLAAVADLLDRLGGVRAELARAELARLRELEAESVMLEGRIRSLVRLTGSSLPTITGVAAITAAKLLGETGDPRRIHSTPAFALMSGTAPIPASSGQTSRHRLNRGGNRQLNRALHTIALVQARTDPRAQAYMARRMAEGKSWLEALRCLKRHLADVVLRTMLADLERSAKPAAMGA

SEQ ID NO: 248492 - protein, 472 aa, unidentified
MVRPPKKCKPLAEEERKPLVVASETVLKEQQAQARLERLNWDAAGIDIGATSHFVAVPAGRDEQPVREFPAFTADLQRLADWLTQCGIRTVAMESTGVYWIPLFELLESRGFEVLLVNAHHVKNVPGRKSDVLDCQWLQELHTFGLLRGAFRPEESMCVLRAYLRQRANLVRYAGMHIQHMQKALNQMNLHLHHVVSDITGVTGMKVIRAILAGERDPQVLAQHRDRRCRHSCEMIAKALHGSWREEHLFALRQAVELFDTYQQQIARCDEEIARVLVRLDPATEEDTPPPVRKHKGDRNTPRIDDLRGQLFRLVGVDLTRIDGLNPHSVLKILAEIGTDMSRWPSVKQFCSWLGLSPGNKISGGKRIGKSKTTPSANRAAAALRIAAQALSNSQSALGGYLRRQKARLGAPKAITATAHKLATILYSMIANKTEYDPPEVNYYDVQYRKRVLANLRRRADQLGFDLIERPA

SEQ ID NO: 248493 - protein, 412 aa, unidentified
MSQMLVGIDVSLRSHHVHFMHGEGHTLADFSVSNDVEGADTLIQKVLRTAEKNQLHELKIGMESTDQYSWHLAHYLKKQLHRVLPHVQTAIYMLNARKVARFKKGYDTLPKNDRVDAWVIADHLRFGRLPHEMQETLIYDALRRLTRTRFHLTHEIARNKTYMLNQLYLKFSGLRQDNPFSDTFGATSIAVIEELDPEIIAEMPLEELVEFLQEKGKNRFAEPEEIAKYLKKLARNSYRLDKVMADPVNLSLSVILSTIQHMESQVKRLDKEIERMMKGIPQTLTSVKGIGPVYAAGLIAEIGDIHRFNDHHALAKYAGLVWTQYQSGEYESENTQRERTGNKYLRYYLVQASEAIRKHDTEYKAFYQKKYQEVTKHQHKRALVLTARKLVRLVHSLLRTKQLYIPKEERRE

SEQ ID NO: 248494 - protein, 364 aa, unidentified
MDVHTTNYTLCCYSMEDDRFFAEVQVEPDAKNILKYLARIEKQQSRDCRIVCGYEAGCLGYSLYHQLHAHGIDCVILAPTTMMTKPGKRIKTDRRDARLISKCLAFHTYSPVYIPTEVDDAVKEYIRMRDDANSALARVKQQIIAFCIRHGKIHDGKSYWTNKHLEWLSNLDLGNKILSEVLQEYLIRYYQLREQVDMYDMRINELAQAEPYRQKVEKLGCFRGIAAHTALSFCVEVGDFRRFATAQQFASYLGLVPGECSSGDKQQYTGITKAGNSHLRKLLVETAQVFGRSATKSGKSVALKERQAKCDSLTVAYADKANARLKKKYFKIAMRSKVNIAKTAVAREMACFIWGMMTDNISCA

SEQ ID NO: 248495 - protein, 341 aa, unidentified
MHRVSAGDTAMLMRLLDELQASGRGQGTPSPIAVCFEAGRDGFWLHRLLTAQGITAYVVEPTSILVNRRAKRAKTDRLDAEGMLRVLAAYIAGDTQICSMVQVPTPDEEDGKRVHREREYLVQERTRIENRISALLVTQGIRSRPSLRSWERDMALLETGDGRKLPQHLASELNRLRRRLVLVRELISELDTERDEHLIATSGDAITTKVTALSEIYGVGDNFAAVLTREVFYRRFGNRKQLASYVGLAPMPHQSGNVDKDRRIGRAGNARARKTLVQAAWLWLRYQPKSELAAWFHKRVGDLKGRARRIAIVAMARKLLIALWRYTESGEIPAGAVFRSA

SEQ ID NO: 248496 - protein, 403 aa, unidentified
MSTCFAGLDWASQTHVVCVIDEHGAVLERLDVVHSAAGLAGLQRRLRHHGCPAIAIERPSGLLVDTLVEGGLTVVPIHPNIVKATRSRYRCHGGKSDDSDAYLLADLLRTDGHRFKPLAPQSDEIRALRALVRGRDDLVATRVQLANQLRSLLESFWPGAAVVFADIDSPIALAFVERYPTPDSTARLGPKRMAAFCAQHAYSGRRSADELLTRLHQAPAPACAELEIDAKGALARSLALTLVCLVEQIRLMTSRIEHHVSALDDGRIVMSFPRAGRICAAQILAEIGSVRERFHSDEHLAAEAGVAPVTYQSGKSKAVTFRWACNHRLRAALTCLADNSRHASHWAAHVYAKARARGCDHPHAIRILARAWLRVIWRAWVDRIPYDPAKHGGMQSILKTAGG

SEQ ID NO: 248497 - protein, 292 aa, unidentified
MNKYKEIYGIDISKDVFDVYGSQSGQNQFKNDSKGFVSFKKHLPKDVLVVMEATGYYHYRLAQFLYKSGVSVSVVNPLSVKRFIQMKLAKVKTDKSDAKAISEYGEMNDVPLYTALTDVQSECLQLFRLLDSYIKHRTATKNKLKGEEVLGIPSKFVYRRSLNRNLKHLNKEVLELETRLLELVKQDQQHQLTLLKSIPGLGVKTALFLIVVTDGFKKFENASQLCSYVGITPTIRRSGSSVRGRSRISKVGNKKLRNLLFLCSFSACKHNKACREIYERFWLPKERVKNWH

SEQ ID NO: 248498 - protein, 345 aa, unidentified
MVIWLTHIQGRQNDRIQRLRIRPVFIGVDVGKDTHHAVAINRSGKRLFDKALPNDENKLRSLISDLKQHGQILLVVDQPATIGALPVAVARSEGVLVGYLPGLAMRRIADLHAGEAKTDARDAAIIAEAARTLPHALRTLKLADEQIAELSMLCGFDDDLAAQTTQASNRIRGLLTQIHPALERVLGPRLEHPAVLDLLQRYPSPEKLASLGEKKLAAQLCKLAPRLGKRLAADIAQALAEQTVVVPGTNAAAVVLPRLALQLITLRKQRDEVALEVEQRVLAHPLYPVLTSMPGVGVRTAARLLTEVACRAFASAAHLAAYAGLAPVTRRSGSSIRGEHPSRQG

SEQ ID NO: 248499 - protein, 348 aa, unidentified
MVVIGCDFHPSWQQVSWLNLETGEAGDEKLVHTPGAAEKFYGRFPAGSRIGMEATGNCQWFVELLHRLGHELWVGDAAKIRASDSRQQKHDKRDARLLLQLLVEDRFPRIWVPSREQKDLRQLLIHRYKLVRIRAQVKNGLQHLAMNQGLLRKRKLWSKAGQQVLCELPLAPWASRRRADLLKMMSELDSKIALLDRAVVQAAEQNEKVKLLMTQPGVGPITALAFVLTMGDVSRFPRGKQVASYLGLIPREYSSGGHQRLGSISKQGSSFLRMLLVEAAQAAVRHDPEFRKEYLHRCHSKAKGVAKVAAARKLAIRLYWMLRTMTKYPEIVRIESSSRVPLVVRHGG

SEQ ID NO: 248500 - protein, 392 aa, unidentified
MYIVGIDIGKNHHEASIVSPKGKQIGRSLRFATTHKGADSLMSFIFKNIGNSPCVFGMEATGHYWYPIYSFLKAKGYTIYVINPIQSDSLRKMYIRQTKNDSIDSFLIAEVIRFGQFGTTSMADENILAMRQLCRYRDSVISSRTEIKLRIGTIMEQIFPEYEKQFSSLWVSTSMGILEKYLTPENIENTPIDELFEIIKDKSHNRLTRAKAISIKEAAADTFGIKIAQDAFSFQLKQLIDRMNFLDKQIEALDIEIMKYYEQFDCYLHTIPGIGIIGAATILAEIGDISRFKNSSALVAFAGIDPTVRQSGEFNSTHNHMSKRGSPYLRHAIFLAATTCSFHNSPLNAYYKKKRDQGKHHLTATGAVARKLTTIIYAVLWDSKPYEPKKFC

SEQ ID NO: 248501 - protein, 380 aa, unidentified
MMEQAARIAGYEGGDVLYMALELSNQRWKLGFSNGVKQRQKTVSAGELGTVVEEIARAKEKLKLKANARVVACFEAGRDGHWIHRWLTQIGVEALEIDSSSIERPQGRKHVKTDRRDVVKLLELLICHWLGLKKGFRVVRVPTEEAEASLRLHREHEQLVKQRTAVRNRMLSLLNLQGVKELVLTRRFEGWLEEVRDWQGKRLSGELKAELRRLQEQYALFQSQLKTLDEAYRAELETDTRLSQQRVRLEQLRGIGPQGSRILAAEAFSWRRFRNTKEVGAMSGLTPTPDESGELSREQGIGKHGNWRVRWIMIQLAWQWLRYQPDSALTQWFWRRFGHGGKRMRRIGIVALARKLLIALWKYVEHGVVPEGAVFKPATG

SEQ ID NO: 248502 - protein, 367 aa, unidentified
MKKVSTRAAAQSRNISQQKLTIGLDLGDRNCWYCVVDEAGQIQLEQRVRTNANALREVFGAMPRCRIALEIGTHSPWISRLLCELGHAVIVANARKVRLIGESRKKDDRLDAQTLARLARIDPQLLYPVKHRSAQAQVDLTLIRARAGLVRARTALVNTARGLAKSYGERLRSCNVRNLNPEKAESLSPELQAALEPLLNAIESLSERIVEYNEGVENLAQQSYPQVALLQQIKGVGTLIALTFLLTLEDPHRFRKSRDVGCYLGLQPGRRNSGQSEPQMHISKEGDPYLRTLLVQGAQHILGPFGIDCDLRRWGLKLAERGGRNGKKRAIVATARKLAVLLHHLWVSGEVYEPLHNNSRTTVATAA

SEQ ID NO: 248503 - protein, 453 aa, unidentified
MGSKKHIAMEIVNSSAAGIDIGSRSHFVAVGQNDDDVREFGVYNEDLKAISNWLKENQIKTVAMESTGTYWQSLYSILLSDGFQVILCNGKFTKNIKGKKTDVQDCQWIQKLHSIGLLSGSFLPDLQTEQLRTYCRHRSNLISTAADTSRKMQKYLRLLNLRLDVVVSDICGLTGLQIIQSICEGETNPEKLAAFRNGNCKKTEQEIAKALQTNGRKDYLFALKQEFETYNQLQEKIEQCDQEIKAMLDDTINNNEDKKQHYIDKKAHKKVNKNAPKNIDLNLLGYQYFEGVDLLKIEGLSHATLLAIISEVGLEGIKKFPTAKHFASWLRLTPNNKISGGKVLSSKVPKGSNRLKTALRNAANAIGNLKESTPLRDFFHRINFRKGRVSAISATARKLGIIIWNMVVKNMPYHNPENYLYADEKRKLGIVKRIRKQIVKLNIKPEDLNLSIT

SEQ ID NO: 248504 - protein, 313 aa, unidentified
MTIMMAAGVDVGRDWLDVAIAPSGKHFRTPNTPAGIASIPGRLSRAGVTRVVLESIGALAARLVRALTAAGLEVGVVDPRRIAALRLAEGGRAKTDRLDARLIARFALLMNDAIRPIPDADALELRALSTRRRQLVEMIAMEKTRLKQVVDSLLMASCREMIRVLGEERARIEAMIETRTHASPEGRRRSELLRTIPGVGPAIAATFLVDLPELGAIDNKAIASLAGLAPHIQQSGSSPGRASIQGGRPCVRAAAYMAALSSVRSDAGFKADYKAMRTNGKPAKVALIAIARKIVVAANSILRHDKPWTHPAH

SEQ ID NO: 248505 - protein, 371 aa, unidentified
MDHSSKTLYVGLDVHKDSITVAYAPEDRGADVVSLGPIGTRQCDIDKLTRMLQAKGATLVFVYEAGPCGYWLHRNLTRKGFACHVVAPSLIPRKPGDRVKTDRRDAITLARLMRSGDLSAIYVPGIEDEALRDLSRGREDAMRDLKASKHRLKAFLLRQDIRYAGRATWNAAHLRWLAEVVCPTPPQQIVFQEYVRAVTEQQERLQRLERELHEAVKGWRLYPVVAAIQALRGIELTGAIILIAELGDLTRFDTPRQLMSYLGLTPSEYSSGARRRQGGITKAGNSHARRALVEGAWAYRYPAKVSRHLQLRLETLPAEVQAIGWKAQVRLCKRYRQLSARGKHVNQVVVAIAREMAAFAWAIARTIPLAS

SEQ ID NO: 248506 - protein, 387 aa, unidentified
MTVLTVNNLPAATHGETVRCLFAIEMSGLNWVIAFNTPLSEKISRRTLTGCKWKRLLELIEEVRARVGRETGRAVEVISCYEAGYDGFWLHRQLSAHGISNYVIDPASLQVDRRARRVKTDRIDAERLLRSLMAYLRGEPKVWSVVRVPSVAEEDARRLHRERDRLVSERVQHVNRIKGLCALQGIYDYNPLRPQAIARLEQLRTTQGGALPPRLKSEIKRELQRLELVVEMIATLETERDAIVKDEASTHVNAKKIQNLHKLKAIGPEFAAVLVGEVFHRDFTNRRQVASYVGFAPSPFQSGSVAHDQGISKAGNRKGRTTGIELAWLWLRYQPDSDLSVWFRARVGTTKGRIRRIAIVALARKLLVALWRYLETGVVPRGAVLKG

SEQ ID NO: 248507 - protein, 492 aa, unidentified
MPQVGAEDLFEVAAADDQQVVETLSADGPNPALGDRVRLRRLQRRFDYPHAFGADGRVERPAELRVPVVDQEAHVLKPLGDREVPRLLAHPGAIGAGGYAGKVDAPRAVLDPEQHIQRSQPDSLDGEEDGMWRRAVRWLVDDRRVAVIFVGRLLMAIVGGLDLHRRQITFDYLDTESGEVRGGRVVPADREHLRLWLHRFDGREAAFAVEACTGWRFVVDELERAGAVVHLAEPADTAALRGRKRRAKTDRVDARHLRELVLAARVPESWIPPAHVSEARTRIRLYKALVDERSGWLQRTHAVLFHHGAPAAPRLARKQARARLDLSQLPLAAQAVVEVALRSVDRINDELAPMRLELTRLARAQPGCHALQAHYGIGPLTSLAIWAELGDCRRFSSSADAVRHTGLDITVHSSDSKRGRGHLARQGPGLLRWALFEAAVCAARPASPDHDYYLTVRARLGHQRAVLSVARKLTRWCHHTLRALGEEALAAA

SEQ ID NO: 248508 - protein, 418 aa, unidentified
MEDKQEKDRLAAYIGIDWGKKQHAICHRDAVSGQLENSLLEHKPESLSSWVRELRARYGGRRIGIALEQSKGPLIYALMSHDFIELYPVNPKQLARYREAFRVGNPKGDPSDAALLQEMLELHRSRLRVWKVDDEQTRLLRILVHERRDVIDEGTRLINRLDSLLCDYFPQAIDLIGNLRTKKACDFLEKWPTLESLQNEDQQEVTSFFRTRRSNKNAIQAKLDKIRTAAPLTSDSVIIASSVIKVKGTIKLLRVIIEQTEDLEQQIEQLYDQHKDKEIFDSLPGAGKALGPRLLVAMGSDRDRYNSALEIQEYSGIAPVTRQSGNTRTVQRRYGCPVFLKQTFHEHAHWSIRKCEWAKAYYSKLRKAGKGHNAAIRSLAYKWIRIIFKCWKDGKPYDESVYLKALQSKGSDLLELVA

SEQ ID NO: 248509 - protein, 420 aa, unidentified
MARLKIIYPICCGMDVHRDFVVACIASTNNQGVTDYQTKRFSTYSGGLRDLRDWLGTNNCRDVCMESTGKYWFPVHNILEASCHVVVSHPKFTKAIKGKKTDKKDAMWIADLFKHDLVRGSFIPPGDIRQLRDLCRYWVKLTQYTTGEKNRAQNCLTVSNLKLDSVFSNVFGKSASAIVSHMLEHPGEQFDVAPFVDRRCKTPIAQIQAAVDGSFNPFQAEKLKIIRAHMDDLAKCKAFLETQIYSLALPYTPQVELLLTVPGISEPMTAIRIIAEIGADMSVFESSKHCCSWAGLTPQNNESAGKKKTTRIGKAGQYIKPLLIQCALAASNPRSTKHPEILSKYQQLKKRRGKKKARVAIARRLLTAIYQILRKHEPYSPFIAPVAPSTPKQRVLSPNQAFALLRSKGYLIAEDLTSSA

SEQ ID NO: 248510 - protein, 388 aa, unidentified
MQVVADRAAAPSAIQTDLRAIFVSLELSRSTWLITSLSPGGGEKMSKHSVQAGDIAGLLKRFAQLKEKARARTGRDFPIITIQEAGLDGFWIHRVLQSEGIESHVVDPASIATSRRRRRAKTDKIDGETLVRTLLAYKRGEPRVCAMVKAPTPEEEDSRRLCRERKVLTAERVLHVNRIKGLLFCQGISGYEPLRRDRHERLEELQTGDGRLLPQHLKAQVNREIDRLELLLKQIKAVEAERDALLVAGHTPAAVPASMLLNIKGIGPEFAAVLWSEGLFRHFDNRRQVAAYAGLAPTPWQSGAVDREQGVSKAGNPRLRTTLIQLAWLWLRNQPHSALTLWFHERVSRNGGRLRKTTIVALARKLLVALWKYVTAGVVIEGAAMTAA

SEQ ID NO: 248511 - protein, 320 aa, unidentified
MTYIGIDVSKDSFVAAYPAKSGYTTTTFPNTTSGVRRFIQSLTEDCHCVMEATGNYSMLLLYLLQESDIAVSMENPQKIKHFARAMLSTTKTDDIDAKLIAKYGEKMEPQPYKIPSESIILLKQKRTVLRQLKKQLTMMINLQHSLSVLPKQDPTAKVATEQTIKFLRKQISKMEEEITKLSNKEFKRQMELLTSIKGIGEHIAAAIITATGGFTYFSSAKQISRYLGLCPTYEQSGTSIHFKGHINRNGDTHLRSQLYVVAFASIRFNTACRETYERLRSRGKSGKAAIIAVANKLIRQMFAVVMNDRPYIDGYVSSLA

SEQ ID NO: 248512 - protein, 371 aa, unidentified
MGGNGITFVGMDAHKKAINVAMLLPGARQPVEWQVANEPAAIRRLAKKLVREGPGEVRCCYEAGPCGYALQRQLEAAGGIICEVVAPSLIPVKPGERIKTDRKDARKLAQMQRADLLTVVHPPTVDEESVRDLSRCREDAQEDLTRSRQRMGKFLRRGLIFTVSKKAWGQLHRQWLRGLSFEHAADQAVFGDYLLAIEQLEERVLTLAAKLTEAAQQDPYREPVAWLRCFHGIDTVTAITVVAELHDFRRFRSARELMAYLGLVPSEYSSGESRHQGSITKAGNGHARRVLVEAAWHYRHRSKPGKTLRRRREGQPARVIALADRAQQRLCRRYQHLVERGKPTPKVVVAIARELVGFLWGALQAPADVRS

SEQ ID NO: 248513 - protein, 425 aa, unidentified
MEVIHRRCSGLDVHKQTVVACVRLVLDDKITREVRTFETTTSGLLLLLAWLTELGCTHVAMEATGVYWKPVWNILSDGDFELVLANAAHIKNVPGRKTDVSDAAWIADLLAHGLIRSSFVPEQEFQELRELLRTRKQLGRQQSSHIRRLQKTLECANVKLDSVITDIVGKSGRAMLQALIAGETDPVKLAALADRRIKASAHELREALRGRVTDHHRFLLHLHLQHIDFADSAIQDIDRNVTALIARMDQEVEAGQTRATFQSLILLLMTIPGIDVLSARIILSEIGRDMSRFPTAGHLLSWAGLCPRNDESAGKRRSTRLRKGDPWLKTLLVQCAWAARRKKGSYFNAQFLRLRGRRGPKKAACAVAASLLTTIYHMLKDGTQFQDLGADHFDRRSKDVRAKRLVAQLANLGFNAKLTPLAQAA

SEQ ID NO: 248514 - protein, 355 aa, unidentified
MPSKADTAIARNIGIDTGKNTLHVIGLDEKGALVLREKVSRTRIAARFVNVPPCLIGIEAGMASHHIARELVALGHEVKQVPPAYSKPFRQGHKNDFRDAHAVAEAVERPSTRCVPIKTDGQLDLQALHRVRSRLIGNRTAVINQIRGFLLEHGIPVRQGYRFLRQQLPRILATRTDVLSPRMIRIVGDLMADWKYLDERIEGVTDEIEALAHADEGCQQLITVPGIGPIISSAMVAAIGNGAAFCKGRDFAAWLGLVPKQMSTGDRTILGRITKRGNRYLRMLFIQGARAVLLRPASWAKHSFGSWLTAATRRLHRNVLTVALANKLARIAWTVLAQGRRYEARVEPRVEPAAA

SEQ ID NO: 248515 - protein, 414 aa, unidentified
MDTIYARVAGLDVHQKFTTVGVRCRLETGKLFAEVRTFGTMTRDLLALADYLEALGVTHVAMESTGILWKPVWNILEGRFTLLLVNPRRVKQVPGRKLDVSDAEWIAHLLQCGLLQGSFVPKRELRELRDLTRCRAQLVSEQTRVANRVHKVLEDANIKLGAVASDILGKSGRAMLWALNRGERDPDKLADLALGRLRAKIPELKLALEGHFREHHQFLVEHLLGHLDDLERRIEEISQRIAEHLPSILDDERLRRLDAIAGVNRTTIENVVAEIGVDMSQFPDEHHLSSWAGICPGNEESAGKRLRNRTTRKNRWLRRAITEAAWAAGRTKNSYLGALYRRLAPQRGKNRALIAIGHSLLVIFYHMLKYDVEYQDLGVDYFDKREPERLRNYLVKRLQLLGYQVCLTPQTDAA

SEQ ID NO: 248516 - protein, 345 aa, unidentified
MKKIVKQVAGIDVAQDELVVRLGRMYDDWSPELYASKTFANTAKGFESLIAWVKKLTSAEVVVRYVMEATGVYHESLAYYLDENNCEASIVLPNKISNYVRTLETKTITDKTSAQAIALFGLEKKIDKWSRPKGIFKKLRQLTREREQLVAERTMLKNQMHAESSEAEPSKKSIARMKKRIALLDTQEKEIMAEVKQLIQSDNEMKQLVALICTLPGVGVLTAAIVVAETNGFDLIRNKRQLTSYAGLDVIEKQSGTSVKGKSRISKKGNRYLRKAMHLPALSAIRHDERFKAVFSRLVSKHGIKMKAAVAVQRKLLEMIFTIYKTGKPYDKNYLKKLESSIATP

SEQ ID NO: 248517 - protein, 328 aa, unidentified
MFFVGIDVSKATLDVFIYQSNYSFIVENNPQGFSELLDIICNVAKCTVNEIFICFENTGKYSRMLSVFLHSNSITFVMEQALKIKKSQGVTRGKNDKIDAKRISLYAYEKRDNLTPTVLSGLKIDQIKSLLSLREKLIKHRTAYKNGLSDLHDCYIEGENDVIIETQKRLIQSLNKEIDEIEKHIHNIIKSDERMLNNFKLLLTIKGVGQILAFYLIAFTANFTLFGNARSFACFAGIAPFEYSSGTIIGKPRVHPFANKQLKSLLNLAAQSVIQIPGEYSQYYNRRVEIDGKSKMSTLNIIQNKIVFRVFSVIQRQTPYVDLYKFAA

SEQ ID NO: 248518 - protein, 321 aa, unidentified
MENVVGIDVSKDTLAICFSLNGKVQHLEVSNDKAGFQKLIKSCGLDTWYVMEATGAYYMQLAYHLHEQGAKVAVVNPVVIKRYIQMHLGKGKSDKKDAQWIMRYGQQSGLKLWQPEEAQMVECRQLEQVIEQLIKQKTMVMNALEALQIQPVKSNVALKSLKQTLQLLQKQIQQMEKELEDNMNDLFKNEMKLLSSIPGIGKKTAGMLLLFYGGFKQITNYRQLVAKAGLCPREYSSGSSIRGKVRITKMGGSLIRSKLYMCSLTAMRANAACKDLYDRLVAKGKNGKVALIAVCNKLLKQAFAIVKSGIPYQSVFTKTSA

SEQ ID NO: 248519 - protein, 382 aa, unidentified
MQTIDPVNPTILLAIELSTSTWLVAARVPGLDKPRLSRIDGGDTAALLALISSLQARAACGLGATMGIVCCFEAGRDGFWLHRLLTAHGVVSYVLEPTSILVNRRARRAKTDRLDAEGMLRVLAAYLRGDHQACSMVRVPTPEEEDAKRTHREREKLVQERLRIENRIEALLFTQGIRKRPSLRSWERDLAVLRTGDGREIPRHLRAELDRLRRRLVMTLELIREVEAERDQAAKTKPQDRACHKIAALSRIRGIGENFAAVLTREVFYRSFDNRRQIASYVGITPMPYQSGGMDRDRRISRAGNPRARTTMIQLAWLWLRYQPGSELAEWFRERVGTLAGRTRRIAIVAMARKLLIALWRYAETGVIPAGAEIRAEITVAA

SEQ ID NO: 248520 - protein, 349 aa, unidentified
MEAYDGPQIVGMDLHRRRSVLVRMTEDGRKLATARIANSPARLAAEIRRAGLHPQVVLEACYGWYWAADALAAAGAEVHLAHPMGVKAFSNRRVKNDEVDARDLADLLRMGRLPEAWIAPPEIRELREITRYRQKLVHIRTSCKDQVHGVLAKLGIEVTCSDIFGAWGTRWLDELPLPQPYCWKVASLRQLISWLTSETTVLEQVTAELLAGHDAYRAVQQLPGIGPVLAAVIVAEIGDITRFRHPSRLCSWAGLTPRHYESDTKVVRGRITKQGSRPLRWALIEAVQRTPAGTPVRQARDAIITRRGPQARNIAKVAAARKLLTYVFYAMRDGHVRALDTPAAEQEAG

SEQ ID NO: 248521 - protein, 386 aa, unidentified
MIYVGIDIAKLNHFASIISSDGEVLVEPFKFSNDSDGFRLLLSKLNQFESDSLVIGLESTAHYGNNLVEFLVSRHFHVCVINPIQTSAMRKNNIRKTKTDRVDTLLIAKTLMVQPHRFYDKQDIDLMHLKNLGRFRQVLMKQRTSAKIKLTSFLDQAFPELQYFFNGIHHKSVYSLLKEAPSPEKIASMHMTHLAHLLETTSHGRFKKDKAQALRILAQKSVGSSDSSISIQITQTIEQVELLDSQIHDVEAHITTIVKSLGSVILTIPGISCIEAGMILGEIGDIHRFSSPSKLLAFAGLDPSVYQSGNFNASHTRMSKRGSSVLRYALVYAAHNIVRNNDVFRSFYDAKRSQGKNHYNALGHCAGKLVRVIFKMLTDNVAFCLS

SEQ ID NO: 248522 - protein, 356 aa, unidentified
MTPTMIDTQVVVLGVDTHQRTHHAAIVAADGRPLADREFPATSSGYRQLWQWAATFGRITHAGVESSASYGAGLTRLLTGEGVTVIDVNTPDRPRRYAHGKTDQLDAYAAAMAVLTGRADAVAKDTTGIVESIRMLYLARTSAVDEATRIGNQIRDLCTTAPAACADNVRAATTTAQRLTVIEALPAPGPDVSAPAAAFIRAGRSLVARYRAARREVTSLTGELHNLLDKVVPTVLSRPHIGPVTAARLVITVGENADRMRTEATFAKLVGVAPLPASSGKTTRHRLNRGGDRQANSALHMIVVGRMKKHPPTRAYVERRSAEHKTKKDIIRCLKRYVAREVFNDLTTDLGRLDTL

SEQ ID NO: 248523 - protein, 419 aa, unidentified
MDRGTAVKLACVGLDCHRNFSTATGRDDSMQVVWRQRLDHRDRSQLREALSAWPAGTPVILEGTFGWGWMSDELLRAKLDPHLSSSTKVAGWRKARGMAKSNKRDADLLSELWGERSRWWEVWCAPPAVRDLRELLRLRCSLVQMQTQLKNRIHATLHRHGLICEVSDLFGKRGRAWLSVAIVDPNVPLREGARGILKDQLELLDEVRQRIAAATKQFRAVVRRDPAARRLMTLPGVSTILGYTILAEVGEIGRFASGRSLSRYSLLAPMSDDSGEETPGQTPLGRHVGKVGRLTLKWAWIEAARSAVRKSARMRLVFDRYTHDGKYNRGRGYIAVAHQLCLIGYAMWKKERDYQETAPPRPGSKESGSKESGSKQSLEQEKPDVAKENNMLEKKKDDSRPGTGQPQRRLAMQDAKAPA

SEQ ID NO: 248524 - protein, 361 aa, unidentified
MTGTMTSAGLDVHARSIDAAAICVATGEVTRRRFGGASGAVIDWLRGLPGPVHACYEAGPTGFGLFRTAEAAGIRMDVIAPSKTPRAAGDRVKTDRKDAELLARLLLAGQLSAVRVPEARMEARRELFRCHEQARGDLMRARHRTSKMLLRHGRVWSGGSTWTQRHRVWLAGQQFEQVESELAFGDYLASVDAAAARKAALAERLSRLALEEDLWPTVSRLRAFRGIDTLTALGLHLELGGDWARFERPAQLSAWLGLIPSLHQSGESATRGAITKTGSLYARRLLVESAWHYRRKPYLGPTLAARQQGVPDQVLQGSWRAQRRLHRVFGRLKARGKPANVATVAVARELSGFLWAAAVTD

SEQ ID NO: 248525 - protein, 373 aa, unidentified
MVITHVALDDSKRVIVAGILRAEATQPELREIPNDPRQVRRLFERLLHEGPVRACYEAGVSGYDLYRQLTGLGVECAVIAPALTPRKPGERVKTDRRDAAKLVRLFRAGELTAIHVPTEAEESVRDLTRCRDDIRADIVRWRHRVLKFLARHGRVYQTGKNWSQAHWTWIRAQRFEDIALERTLEASLDALEQAMRRRTDLDRVIEALASDAPYRDAVNALRCFRGINTLSAMILVAEIVDFQRFRRPRALMAYLGLVPSEYSSGERHRRGALTKAGNSHARRVLVEAAWHYRHRPGLGNRLARHTANQPPTVVAEAWRAQQRLHRRYRHLVGHGKRPTVAVAAVARELAGFVWAAMTQARWHARRPEAPITV

SEQ ID NO: 248526 - protein, 340 aa, unidentified
MRLVGCDLHGSQQSIAMLDRDTGEVVEKTLAHEDGAVRAFYASIPPPVVVGIEATGSMGWFLRLMEELVIECRVGHPTAIRKAETRRQKHDRRDASLLLQLLAEDRFPAIWMPSTEYRDLRSLLLHRHQWVRMRTRVQNALHAIALAHGVRRGHTLWNREGQALLASLPLAPHTADRRSELQALYQHLNEHIDRLDDRVQHVANERARATLLMTHPGVGPVTALATEVFVGDPTRFLDGKALASYVGMIPREYSSGKRQRLGALSKQGNPFLRFLWCEAAAHAVRRDPDLERFYRRKVVQKGFAKARVAAARKLGIRLWIMLRDQIDYTEFCRRGLGRQS

SEQ ID NO: 248527 - protein, 427 aa, unidentified
MRYNKTGNRKQVNILEASIGVDIGKYQHVAVAQSWDGRRLKPLIFDNNLQGFNKLWEYWSKAKECLGVSDVRFALEPTGQYWKALAEWLERKPAEVRMVQPAHTHKAKELEDNSPGKHDIKDAGVISDLDIQRKSLRLVRPQGVFAELRYLTICRQGLVKDLNREVNRLHRLMDVLFPELIGLFKNHIGKGLLELVKTAACPDQMVRLGEQAIKDLLKKKSKGTLGLERARAIMDAACNSIGIKEGREALKLELRQLLVRMELIRNQLSEIEQTIKEVIEKVPYIEILSSIPQVGRITLAAILGEAGDFRQYQNARQIIKLAGLNLYEISSGQHHGRKRITKRGRPLLRQMLYLAGLRLIKEKGAFYQFYKRLVEKGKAKPQAIVAMGCKLLRVLFAMVRNNSKFEEKNESSLLIVNQIRALPLIGA

SEQ ID NO: 248528 - protein, 338 aa, unidentified
MEKYIGMDAHSSICVFSVVDEKGTEVNQTKIATNEKLLVEYIRSIKGSKKLVFEECELSAWLCETLRGEVDELVICNPTRNLQYKRAKTDKLDAQNLARLLRGGFLTPVYHDGSKTEQLRALMSGYQDVVDTGVSVKNRYKSLFRKAGLPARGTKLYDDSSLLEDLPRPDQRFVGHSFYRLLEALENEREQYVAAIKKLGRTFPEIKLLKGIPGIGDIQAAKIVSQVISAQRFKDKHKFWSYCGLVRHRMESGGHIYGSRRGRGNRVLKCVFKMAAKSVLTGENELRVYYDELRTKGTSDKSARNAVSRKLAAISLSVLKTKRPYDETRIIPQTGQAR

SEQ ID NO: 248529 - protein, 320 aa, unidentified
MNAEIFVGVDVCKAWLDAAQVSSPLKDAPGELTSRVSNDEAGRAVLVKQLQRLAPTLVVLEATGGFEAAMASELCAAGVAVAVVNPKKVRDFARSIGVLAKTDQLDAQVLAKFAQATRPQVYALPDETQQEIIELVDRRAQLVSMRAQEKNRLATVKHVARTSVRHHIEWLDKRIKEIDKDLDGRLKDSTIYQPKYELLDSVPGIGRVTISMLLGRLPELGSLDRKRLAALVGVAPFADDSGRRRGQRYIQGGRADVRSTLYMAVFTARRCNGPIKALYDRLKAAGKAYKVAMTACMRKLLIILNAILKSGQPWRQIESA

SEQ ID NO: 248530 - protein, 521 aa, unidentified
MSAKPKPARKSRSHSVHKPQGVIHPRVRAIGPENFAFICVDCAKRRSKIMVADFYGRVLMEPTVVEHDRIALETALQRVRDTLTQHGIKDQIAVIERTGRYHGPVQRAFVTGGIEVRMLHPYTTKQFRQPADPGNKTDDTDLSAIHRAAVNGFGLLEHERDPVHVRLQLLARHRRRLVHKNVMLRQQMLEHLHSYMPGYASCFKDIFDSDLLLWVPKHMGSAAEILQAGVDGLDQQLRKANVRSHRPTLLKIVAWARSAPSAEEPVSLHRRFFTEFDSDRLAKLEMIRAIESDLLAPLSQTPYVLLVSVPGINVVSAAEFAGEMGPIKHYAKPRAISGRAGLYPSRHQSDEVDYPNGPLVRHANHDLRRAILIIADNLIRCNEHFGVLVAGWRVKNADARDVRVRVGSRFCRIAFHMVSGRMTFRHPCTQHRDYVLKKLLRFAVEHAIAPDQLLRNLDAAAVQLSPSDEREEAESLAEELAQLRKKRGSGPKAIGEILPAVLVKLGVHLISSLESGEADLT

SEQ ID NO: 248531 - protein, 448 aa, unidentified
MASSRKKGTKKTTPLAPLNRRAAGVDIGSTFHVVAVAPELDPEPVRSFRSFTADLTALADWLVSLGVETVAMESTGIYWIPLFEILEARGLEVVLVNARDAKNVPGRKTDINDAQWIQQLHSYGLLRASFRPGAQIVALRAYLRHRERLLEYGASHVQHMQKALMQMNLQLHHVVADITGVTGMKILREIVAGETDPDALAAFRDARCKASVETIRDALTGHYRAEHVFALRQALELHDFYQQKLSDCDVEIERALRALPRGSDVAAPPRPRQRGKNEPRFEIRAVLNSLLGVDLTEIHGLGPYSVLRIFAECGSDMTRWPTAKHFTSWLTLAPGNKISGGKVLSAKTRRSANRATVLLRLAAVSVSRTATALGAFFRRLAARVGKAKAVTATARKIATVLYNTLRHGRAYVDPGASYYEERYRERTLHNLRRRAGAMGFDLVATAVE

SEQ ID NO: 248532 - protein, 313 aa, unidentified
MVDEVVCVGVDVAKSTLDVSVSNSEETRQFTNNDKGINLAVHYIANLNPIGITLEATGRLEIPLAAALQAAQLPVAIINPRQVRDFARATGVLAKTDAIDARILALFGVRVRPEIRPLPDKKACEMGGLLARRRQLVEMLTAEHNRLLQADKDVRPNIQAHIKWLENALLKINTDIEDRIKRSPSWREKDILLKSVPGVGKVVSSTLLIELPELGKLNRRKIAALVGVAPLNRDSGTIRGKRTVWGGRAKLRATLYMAVLVASQCNPIIAAFYKRLLDAGKAKKVALVACMRKLLTILNSMMRTMTIWQPQTA

SEQ ID NO: 248533 - protein, 343 aa, unidentified
MQSITTIGLDIAKSVFQVHGVDAAGQVVVRRQLRRRHVLAFFEKLPPCLVGIEACASSHHWSRELHALGHTVRLMPPAYVKPYVKRQKNDVTDAEAICEAVTRPSMRFVPTKTSEQQACLMLHRARHLFIRQQTAVINSIRAYLAEFGIIAPVGRRGVERLLEVVADTTDHRLPEIARACVAALGDQLQALKAQILKFDRCIIAWHRSNATSRQLDEIPGVGPALATALVASVADLKAFRSGRDFSAWIGLVPRQNSSGGKDKLGSISKQGDRYLRSLFTTGALAVIRYAKIHGTRHRPWLTALLARRPTKVAAIALANKLARMAWAMMARNEHYKEPAALTA

SEQ ID NO: 248534 - protein, 316 aa, unidentified
MNKENPTEINIGIDTSQSQLDIYVRPIGVYFSVDNTPKGANEAVKRIQTYQPTRILIESTGRLEVCFVCAAHKAKLPVVVCNAGQVRQFAKAAGRLAKTDRLDAQDIAHFGEAMRPALSALKPEKLRQISDLIAVRSQCLDMSTMQKNRLQRMQTSVHKPIQRILKAIQKEVERIDQQIDKLVEAIPQWRSQRDLMMSAKGVGKVVAYTLMSELPELGKLNRKEIAALVGVAPINRDSGSFRGKRRIYGGRRKVRTVLYVSMLSATQYDPKIKAMYQRLLATGKPKKVALIACVRKQLTILNAMMKNGTPWNENLA

SEQ ID NO: 248535 - protein, 407 aa, unidentified
MVTVGIDIGKEKHAAAAIGAAGEVLMPPRFFDQNAQGFAALLAQLRKLGRPSGIRIGMEATGRYWIPLRHALAEQGYRVESVNPLITSAEIAKDVRGRKTDKADALAIATALLRNRHNPAPAEDAATDALKSLTRHRTFLVRQRSNAKRCLHAALDVTFPEAGKTFGQIFSATALAVLEAFPSARLLSGANLKTLTAIVSKASRGRLGAERARSFRDAARASVSAGIVNEGDEAALVSLIAQIRFADSQIESAEEKIRAMPAPKAAALLASVKGLGTLLPRVIACEIGDMERFRHPPSGKPPRDMDKRILAFAGCEPRLRESGKWKGRTKISKRGSPALRTALWQASAMCRLHNPLFAAVYERQTARGKPHSVALFYVARKLVEVLCGMHKTGRPFSLQTAGGAICL

SEQ ID NO: 248536 - protein, 449 aa, unidentified
MEGNGLPVLRRNVAGIDLGSTTHWVCAPTVDGTAREVECFGATTPELERLAQWLKQRNVESVAMESTGVYWIPPHEVLERHGFEVVLVCTREFAQVPGRKKTDRIDCKWIQRLHSCGLLRGSFRPPEQVCMLRTLVREKATLVAERADWVRRMQKSLDQMNVRVHRAVSDIEGTTGMAIIRAIVKGERDPGQLAELRNPGCRKSAKEIAEQLSGHWREDHLFSLEQSLKMHDAIDERIQAYQTETQRRLAQMERADCEEQQAPQLKNKNKAKMIRQRGEEPMRQALYRMSGVDLTAIDAVGVGVVQVVLTEYGPDLSCFPTEKHFVSHVTLAPKKAVSGGKPLKKKKRGSASSRVSAVLRSAALSLRHSQTALGAYFRHTAQRLGADVAAFATARKLATLIYRLLRWGKAYVDEGAAAYEKRYQTARINRLHSTAAGLGYQLVAKPMNP

SEQ ID NO: 248537 - protein, 347 aa, unidentified
MELSKTSWLLAARASPSGKTSSHRLNGGDVAGLLALLRRLQAREQREGGHDVEVILGYEAGYDGFWLQRRLAAEGITCWVMDPGSLQVDRRARRAKTDRLDAAMLLRALMAWCRGDRAVCSMVQVPSVEREDARRTHRERQRLIAERVQHVNRIKGLLATQGIYDVQPLRRDRWERLDELRTGDGRELPPRLRREIEREFKRLELVLEQIEATEAERDAAVAVPAADDADAAKVVQLAKLGGIGTELATVLVREALHRSFTNRREVAAYAGLTPSPYASGERHRDQGISKAGNPLLRKAMVELAWLWLRYQPDSALARWFTERVGTVRGRMRKITAVALARKLLVAL

SEQ ID NO: 248538 - protein, 421 aa, unidentified
MIQVSHEAFAAFVGIDWADAKHDGCRQVAGSAKRDYCQREHTPEAIDAWGTTLRMRCHGQPVALCLALNKGPLGSALRTYDFLVLCPIHPLTLARYREAFTPSRAKDDPTDAALQLALLLPQRDKLQPLNPQSPTMRALAQLIAPRRRVVGDTVRITNRLPSTLKNYCPHVLHWLQEKDTAIFCDFLSRWPTLKAVQLARRAPLATFFRAHHVRYAEVIAPRLQASKAAPPLPTDAGVMAPHALLVQALVAQLRGTLQALADCDTAIAQRAQSHPDFPLFQALPGAGPVFAPRLLVACGEQRERYACAADLQKYAGSAPVTERSGTKSWVHGRLQGPKFLRHTFVEWAAESLRPSFWAQVSYQQPRDKGKAHQAAVRARAFQWIRILSRCWQERTPYDAAIYLQALHRRGASLSQTLAKAS

SEQ ID NO: 248539 - protein, 365 aa, unidentified
MRHSTKRVSVRASRPQRNTIGVDTSDKKSRICVLSSDGEILEETEIPTSVPGYTRYFKRQDAALVTCEVGSHSAWIEIVLRDCGHDVIVANPREVEGMRKRNHKTDKRDAFLLARSALQSPESLHGITQRSPEIRRDLTLINARDSLVEARTKLVNAVRGFVKPTGHRIPKISTHAFHKKALEHIPADLGPALEPLLVTIAGLTQQIDHYDREIEHCAKKYPVTERLRQVDGVGPITSLLLVLVIMDPKRFKKSRDVGAYLGLVPKTYQSGESSPQLGITKSGNVLLRRLLVGSAHYILGPFGEDSDLRRYGLALAQRGGKASKKKAVVAVARKLAVLLHRLWVTGEDYEPLRNSTRRASKRATA

SEQ ID NO: 248540 - protein, 424 aa, unidentified
MKPHLDVEFAAFVGIDWSDTKHDICLQAANSEEREWAVVPHRPAAIDAWASALRQRFGGRPVAVCLELAKGPLVYALQKYDFLVLFPVHPATLAKYREAFTPSHAKADPTDAQLALELLLRYRAKLKALTPQSVPMRMLLRLVEQRRRLVGEQNRISNRLTDALKQYFPDVLAWFPDKDTLLFCAFLTRWPTLKQLKRARRATLQSFFHDHHVRSQSRIDERLRAIKSATPLTDDPAVIRPTQLLALALVEQLRVTLQAIESFDAEIASVSQTLPDYSLFRALPGAGATLAPRLLAAFGEQRERYQSAAEVQRYTGIAPVTESSGKTHWVHWRLQCPTFLRQTFVEWAGATIPRSFWAAAYYRQQRAKGCSHHAAVRALAFKWIRILYRCWQTRTPYDEATYLNALSRRGSPLLASIGKVAKNT

SEQ ID NO: 248541 - protein, 319 aa, unidentified
MNAELDKVYVGIDVSKSQLDVAIGKAGEYWQAGNDRVGIEKCVERLRALEPALIVIESSGGLEVPLMTELYAVGLPFALVHPGRVRDFARSMGLLAKTDKLDARLLAHFGEAIRPLPTQLPGEAEQALNACMLRRRQLLDMLVDERNHLASTRLSLRLKVEEHIEWLELQVADLDQEIEEQIEQIPVFKEKRTILRSAKGVGPVLCAKLLSGLPELGKLNRKKIAALVGVAPYNDDSGRRRGKRKTKGGRADVREVLYMATVAAARFNPVIKPFYQRLVKQGKLKKVALVACMRKFITILNAMIRDMQPWKTISRPVAS

SEQ ID NO: 248542 - protein, 406 aa, unidentified
MRSIALDVHRDFCEVAIKEGGEVRSAGRVRTSVEEFELFARSLAKDDRVALEATGPANAIVRVLEPHVARVVVANTRRVRAIAEAKVKTDKVDAATLCELLDAGFLPAVWSPDESTRALRGLLGRRDRLVRSRTRAKNAVHAALQRNLKGRPPMSDVFGRVGRRWLGRLELPAHERQIVESCLREVDFLSHEIAALESELAKLALSSEAVKRLMSVPGVSLVSAATFVAVVGDIRRFESPKRLVGYVGLDPKVRQSGEQAARHGRISKQGSAAARHMLCEAAWIAVRTPGPLRAFYERLRARRGAQIALVATGRKLCVLFWHLLTREQDYAFGRPSLTRHKRRRLELMAGDPPRRGQRSGSGASKREQLHERELSEQFEQAYRRLVEDWQQKPRKSGAGATPGRAS

SEQ ID NO: 248543 - protein, 342 aa, unidentified
MTKIIGCDFHPRFQQIAFVNQETGEFGERRLSHPDEAEQYYRSFAGEGVRIGVEATGNFRWFLRLMQELGHEVLLGDATAIRASNPRKQKTDKRDARHILTLLVEDRFPAVWQPPLENEEQRQLLLHRCRLVQMRTRVKNQLDAMAKNEGWLARRVWSAGRREPIEQLPLTGWRAQRRRDLLALLEDLNRRLAPLDEAVRRAAEASGEARLLMTHPGVGPVVSLAYVLVIGDWRRFPRGKQVGSYLGLIPAEESSGGKRRLGKVSKQGNTLLRWLLVEAATTAQRYDASWHRQYVRLSMTKHHGVAKVAIAHKLAVRLYWMLRSGENYQQVVERGSHAGQSE

SEQ ID NO: 248544 - protein, 328 aa, unidentified
MWAPSPNSKAEVAYLMDTSEINVGIDTSSTQLDIYVRPSDTFFRVSNDQAGIKDAVKRLQSVSPTRVLIESTGRLELDFVIRAHKAGLPIVVCNPAQVRNFAKSIGRMAKTDKLDAMDIAHYGEATKPRLSSIKPEKLRAISDLLVVRSQCLEMSTMQKNRLKRMPKSVHKPIQAILKTIKSEIEKVDRQLDKLIESLAEWRQRRDLLLSAKGVGNILAYTLMSELPELGTLNRKEIAALVGVAPMNRDSGSHQGKRYIRGGRHRVRTVLFVSMMSAIQCHPKLKPAYERMVANGKPKKVALVACMRKQLTILNAMVKNNTYWDENMA

SEQ ID NO: 248545 - protein, 411 aa, unidentified
MATMFCGIDWGESRHDVAIIDQAGNVLGRAKITDDAAGFTELLTLLAEAGDCEGEQIPVAIEKDHGLLVSALRSTGRAIFPLNPLAASRYRARHQVSGAKSDATDAVLLANILRTDMAAHRPLPADTELAQAIRVLARAQQDMAWTRQRIGNQIRSLLKEFYPAALDAFAPLARGGLAHPEARTILAVAPTPAKAAKLTRARLRTLLAKAGRQRRINTQADRLFEALRGNYLRHPSVVEDAMGVQLTALLTHFDAVCRASDDLEVAAREHFERHPAAAVINSFPGMGTLLGARVLAEIGDDRARFAAARGLKAFAGSAPVTRSSGKKTVVTYRRIKNNRLAAVGTIWALSALSVSPGAKRHYDARRERGDWNRQAQRHLFNKFLGQLHHCLQTGVTYDETHAFPPPLELAA

SEQ ID NO: 248546 - protein, 458 aa, unidentified
MSKKINNLESLPMVQPHAAGLDIGAREIWACVPPAQTTDSVRRFGTFTPDLQSLVDWLVSHQVDTIAMESTGVYWIPVFEMLEARGLKVHLVNAHSLKKVPGRKTDVLDCQWIQKLHAFGLLSGSFRPDGEMCALRTYLRHRAQLLEHRAPHILHMQKALQQMNLQLHHVLSDITGVTGLAILRAIVAGNRDSVKLAQFRNPACKSPIDTIAKALTGDWKAEQLFVLKQSLALYDYYTQQVAACDAEIERQYGAMKSRGEGSPELPEMPRVKRGSKSKNQPPFNVRRELLRLTGVDLVAVEGISASLAQTILSEIGTDMSKWPNEKHFGSWLGLAPHNDISGGKVLNSRTLKTDNRAGQAFRQAATSVTRSQSAFGAFYRRKRAQLGRMQALVATAHKIARTVYVMLKKRVQYFDIGAEMYEKKQRERELIYLQRKAAKLGYILTEPQPDPTLLLTPT

SEQ ID NO: 248547 - protein, 349 aa, unidentified
MHNDTLIAVDVAKSVFEIAVSELPGKVTERCRLPRSKFVAFFANRPAATVIMEACGSSHHWGRQIARLGHRIQLLPPQHVRPYVRGNKTDRSDVKGMLEAYRNADIHPVPVKSIEQQILATLHRLRSSWVAERTAKSNTLRGLLRELGVVIPVGARHVVPHAWALIEDAESVLPEALRAPFAEVCEELRTLGQRIEQIETQLKALAEQMPEVTRLRSIPGVGLLIATAVVAFVGDVHRFRSARHFASYLGLTPREYSSGSKRRLGRISKRGDVYLRMLIIHGARSILGHAKRQEAHGVDRLRRWAVQLEKRVGHNKAAVALANKLARLLWALCTSERTYTPAHEAGVAA

SEQ ID NO: 248548 - protein, 298 aa, unidentified
MSHKTAATIAHTIGIDTGKNTLHLVGLDDKRAIVLREKVARDRITVRLANVPQCLVGIEAGMATHYVARELSALGHDVKQVPPAYAKPFRQGHKNDFRDAYAIAEAVQRPSTRCVPVKTDDQLDLQALHRVRSRLVGQRTAVINQIRSFLLEHGIAIRQGLRFLRQQLPDILAKRSDVLSPRMIRIIEDLSGDWRRLDERIEHITAEIEVLAQGSESCRQLMTVPGVGPIIASAMVAAIGNGTAFAKGRDFAAWLGLIPKQMSTGDRTILGRITKRGNRYLRTLFMQGARVILLRPAN

SEQ ID NO: 248549 - protein, 419 aa, unidentified
MNTHWIQYTHFAALDWAADHHDVVVVDRTGAIAAEFRFAHTASGWAEFTDKMNPFAGCPLALETSSGPAVDQLLQRGWILYPVNPKAAQRYRERKAPSGTKSDRHDTWSLADALRTDGHGWRPLVPQDEATATLRALCRDEMALIEQRTALVNQLIAALREYYPAALEAFNDWTAPYAWALLIQFPTPAELQAAGKRKWEKFLHTHRLWHPSTAPERLKVFAAANALPASPPIVTAKSLLAISLVRVLQALEKQLDEYRQRINQAFTQHPDHHVFGSLPGAGEKLAPRLLGELGSARQVYPDPDALCCQAGVSPVSFQSGQVDKARIRWACDRVLRHTVHLWVDYSRKKSPWARTYYARKRERGLSHAAALRCLGKRWLKVLWRLWQDGTSYDPRVHEQSLKDHGSWVAPLLSAAPAKL

SEQ ID NO: 248550 - protein, 348 aa, unidentified
MLIIGCDLHSRYQVIAMLDTETGEVVTRRLQHENGEAKTFYASLPKLSLVGIEATGYTQWFERLLAELGHELWVGDAAEIRARAVRRQKTDTRDAEHLLDLLSTQRFPRLWVPSPQERDGRQLLKHRNKLVRMQTSVRNQLHFLAMSQGVCRKQKLWSARGRAELEGLSLGPWASQRRKELLELLDQLGPRIAELDQAVKTEAERRPEAVELMKHKGVGPVTALAFVLTWGPVERFRHSRQVVSYLGLNPRENSSGGRQRLGAISKQGNSMLRWLLVEAAQSAARFDPELRRQYQRLKFRRGGQIAKVAIARQLAVRLYWRLRSPEAPPVRMPGSPSSGVVPSTGSRE

SEQ ID NO: 248551 - protein, 376 aa, unidentified
MKNKATPTLHDNGQPNAALAGGNSGARQIFKLGLDVDLNNAVTAIQCGAGEIKRGQSFSRARLLGWVRTQVNAGHTVHTVYEACGFGYTLHHELVGAGAHSLVTTPMRHTAQRRRKNDRMDARELCVRLARWLDGHRDELKPIRIPSSEEQQRRELGRQREFFKRELRRLENHGRALRIEFEHETLPSGWAGPRKWTRLSLQCSSFVREQLEPIVTQIRTCRAQLVKLSAALEARVAEQMIPTGLGSLTLALLDGEVCNWHRFKHRKAIGSYTGCCPSEYSTGGVQRFGPIDRQGNKHVRVLLVEAVWRLLKWQPGWHARQKYLARLKHGSSLKKKIAVALARQLAIDLWRWRTGRATAAELGWTLKNAIEETTPL

SEQ ID NO: 248552 - protein, 339 aa, unidentified
MIYYGAADVHSDNTCLGILDESGKKVFSKRVLNYKALILEELSSFQDKLAGIVVESTFNWYWIVDALMEAGYKTHLAHPAAIKQYEGLKHTNDYDDTFHLANLLRLGILSEGYIYPKEQRAVRDLLRKRLMLVKHRTAHILSFQSLYCRQTGFKLSGNDVKRMSERELEDMSSLELVRQAGHANLQVMRFLSNQIEAIEKMILADMQIKPQFQKLLTISGVGRILALTIALETGDVCRFATVRNFSSYCRLVSSQRSSNQKKKGENNRKNGNKYLCWAFIEAANITKRYCPLAQRFYQRKLAKSHKVLAIKALAHKLARAAYFIMRDQVDYDPQKAFGQ

SEQ ID NO: 248553 - protein, 341 aa, unidentified
MERSRTVVGVDIAKRVFQLHWVETETGELMRLRLTRAKFLEHFANRPPCLVGMEACGGAQHWARRLLALGHEVRLLPAKMVRPFGRGNKNDSRDAQAIWTAVQQPGTKTVAVKTEEQQGVLALHRMRQQLVKFRTAQINALRGLLTEYGEVMPRGRAGLSRDIAAVLERVSERLPTMVVETLREQWARVGDLDAEVDRIERRLTLWHRQNVASRRVAAIPGVGVLSATATVATMGDPAAFRSGREFAAWLGLVPRHTGTGGRVRMLGISKRGDRYLRTLLIHGARSVLARGKLPSAWQLRLSQRRPSNVVAVALANKTARTIWALLAHDQPYEPNFARRSA

SEQ ID NO: 248554 - protein, 412 aa, unidentified
MSVALPPAQFFAGLDWATEIHAVCVTDHAGKIVDRFSITHTADGIAMLIRRLGKLAEPGDVQVGIERPNGRLVDLLLEAGHPVVPVSPNAIKAWRDGEVLSGAKSDAGDAAVIAEYLRLRQHRLRVATPYSEDTRALRTVVRTRTDLVDMRVAATNQLAALLDDHWPGAKVVFADVESPISLEFLTRYPTPASAAHVGEKRMQAFMTKHKYCGRRSAAALLERLRSAPAGATGEALTEALRDAVGALVTVLKALNTAVRDLDRSTAAHLGEHPDGEIFTSLPRSGQINAAQMLAEWGDARQAYESPDSVAALAGCTPVTKESGKHRAVHFRWACNKRFRVALTTFADNSRHASPWAAKIYHQARASGKDHPHAVRVLARAWIRVIWRCWLDGVPYDPAKHGAAASLNEPAPA

SEQ ID NO: 248555 - protein, 350 aa, unidentified
MLIIGCDFHSRFQQIAMLDPQTGEMIERRLEHENGEARKFYAGLATPARVGMEATGYAQWFERMLAEQGHQLWVGDAAEIRAAMVRKQKTDARDACHILDLLLRDKFPRIWIPSTEERDVRQLLRHRFKLVCLRTSLKNQLHAMAMGQGICRKKKLWTVVGRKELEGLSLGPWASRRRQQLLEMLDQLEPVIDELDRAVIQEAEKRPAAARLMTQPGVGPVTALAFVLTIGPVSRFRRSKQVVSYLGLNPTEESSGGRQRLGSISKQGNSMVRFLLVEAAQTASIYDPELRRDYQRLKFRRGREVAKVAIARKLAVRLYGKLREAARPVPPAPMQGSPAVSVVGENLSCF

SEQ ID NO: 248556 - protein, 355 aa, unidentified
MDRIYIGVDFHARQQTICYLTTEDGEVHTHELKHQDKTEVRAFYAQFSGQVVIGLEASGYSPWFEQLLEELGHEVWLGDATEIRRRARWRQKNDRRDAELILDLMVHHEFPRLHRPCSQSREILRMLRYRQKLIKIRTMGKNSLQALALQSGLAKRSQLFTKAGQQELRTAAMSPVMQWQRDQWFKLLEPLNERLLETMLWLKQQTKDDERISRLRTHPGIGLLTSLCVVHTLWPVTRFRNQRKVAAYAGFDPMERSSAERKHFLGISKAGSRVLRYLLVEAAHTAVKKDDDLKRFYQRLVERRGRPKAKVAAARKLLIRSYIMLRDEIDYAEFRHRAVAARLARQSTRPLVPEA

SEQ ID NO: 248557 - protein, 345 aa, unidentified
MDNFFVVGVVVSKTKLDYCLMSQDKVLKQGTMVNETSAIRLTFASFLNEFGLSNDQIVICTEHSGQYNYPLIYSCECSKYKLWLENPNQIKFFCSGLQQGKQYKLNSKQIAVYALRNLDKMHLCHQQVSEVEHLKQLHSELEMLEIDSAKLHSKLVDQKNYMSEEVFNINAGRLINLMQGLEDAITTIKSEIRCIFADNLFLSEQMELLTSIESVDTDLALKMIVETDAFTRFDNCRQFCSHVGIAPLNKIIKVNEHLVNASYPKNDKGIKTFLNQAALSILKNNDSELKNYYIRKVKEGKDEKIVLNAIRVKLVARMFAVIKNNQKYQHVLMKEGIVTPVYESL

SEQ ID NO: 248558 - protein, 312 aa, unidentified
MTHVICGVDVSATTLDARIGRDGEHCRFDVSTEGLDDLVAFCHAHQVSLVVMEATGGYERRPAGHLWAAELPTDIVNPRAVRDFAKAMGWLEKTDRIDCGLIAWYAETKRIQPTPPASATQARLTALVRRLRQLTDLRTQQTNQRRLITKPAVLDSFGPILAAIVTQQRQLETLIAQAIGDDPLWTRLDAAFRTIKGVADRTVARLMAEMPEIGTLSNKAVAKLAGLAPIARDSGQHSGKRRVRGGREPVRSILFVIAEVVRRYDPDFVAFHQRLSRAGKPNKLIRIAIARKILVRLNAKAREVRNNTALPA

SEQ ID NO: 248559 - protein, 348 aa, unidentified
MKHYIGLDAHSATCTFVVQDEVGNVTHRTVVKTSEGTLLGFLGTLPGEKILAVEESHVSQWVYVLLHDKVDKLIVCNPCRLAKHQGPKTDYRDALRLANELRGNFLKAVYHDESHWIQLRVLVSGYSDLVSEITRTKNRLKAVFRSEILDTSDSKFYKSKDRAKELSHEHGRFVAESLFSQIEHLEEKKLEFKAIFTKNMKIYRPLKNLATVPGIDVVRANIIMAIVCMPHRFKSKYKFWAYCMLVRYFEISDGKVYGSRKIRARFELKSLFMGAAENAIQGENCLKDHYDAKRRAGVDHRGAKISVARLIAAAALSILKNNGKFDENYHETHTERTQIRKTLNEVRI

SEQ ID NO: 248560 - protein, 348 aa, unidentified
MRFYTGQHQHYCGIDLHARTLYLCILNAEGNVLLHKNLPCDRARFLEAIEPFREDLVVASECIFNWYWLADLCAEHSIPFVLGHALYMRAIHGGKAKNDKIDALKTASLLRGGLLPMAYVYPAQMRSTRDLLRRRTHFVRKRAQLMAHVQNTFHQYNLPRPPGRLVYKYQRAPIPDAFNDPMLKKSVETDLALCDTYDELIRDLERTVVRQARVHDPQTLLRLNTIPGIGEILSLTLLYEIHDIGRFESVQRFASYARLVKCEKSSAGKRIGTSGHKIGSVHLKWAFSEAAVSVIRHLPQSKRLHDRLKRKYGKGKALSIFAHKIGRTVYFMLKRNQAFDAGRFLANT

SEQ ID NO: 248561 - protein, 318 aa, unidentified
MMQLVLNVGVDVAKDAVVVACAEPRFPVQSIPNQRAPLRAWLKSLPAGSRIGLESTGDYHELLADLAQAHGHTVFLLNPLDTRHYARAMGNRAKTDRVDAELIARLIAQEHTHLGAYTPPTANQRKLDRLIRRRATIVRLQGTLKRTMRHLGGFAAELKAVMGKLDALIAKIDAAMSAIAASSPQHQEAQQRLQTIVGVGPLVGLSLTNTLERVPFRKADAFVAFTGLDPRANDSGRKAGRRRLSKRGPAELRRLLFNAAMSAIKTNVWKPIYDSYRTQGWSTTASLVIIARKIARTAWSIHHYRTTFNPERITQCLT

SEQ ID NO: 248562 - protein, 439 aa, unidentified
MSQELPTLDPLAAFVDVGSEHMHVSVAGNKPEVFGTVTSQLHALRDWLIGQGVHSVAMEATGVYWLPLYGVLESAGLDVRMVNGRQTRNLPGRKTDMADSQWGATLHMHGLLHAGFVPPADIRRLQDYLRLRADHVAAAAACVQLMQKAFDRMNIKLHDVISSLAGVSGMAIVRAIVAGERSPEALAALCARQIRRRKERAVIEALQGTWADEHIFALDQALQSWDHYQKLIADCDTRIASVLPPHDETQPPLPVSTKQTGVNAPEISRLREILAQMCGGRDLTRLPALSHYGLLQLIGEVGTDLSVWPTEKHFTSWAGLAPGSNASGKRKKRVSRGRNRTGQLFCMMAQSLVRSKDIALGGFYRRLAARRGGLVATKALARKLAGWFWRVMVKGDDYVEKGIARYEEQVRKTKEHALKRLANELGRQLVPLPNSFPIP

SEQ ID NO: 248563 - protein, 348 aa, unidentified
MLADEVDFVIGVDSHRDEHALALVACPTGACLAEAVISANGRGYAAALALALERAPGRRAWAIEGTGSYGKGLARHLAQQGERVLEVERPRRAGGRGRAKTDRLDALRAARALIAEERPALPRAAGRRESLRVLLRVRTSAVSARKVALNQLRALLVTCPEPLRAELRSLTRARLLRCCRELAPEREHDPKLAGTLRALRVLAARIESLSAETRELERELRVQAEQIASALLDERGIGPIGAAQALVSWSHKGRFRSEAAFARLAGAPPIPASAGQRVRHRLDRGGDRKLNGVLHQIVITRRKHDPRTIAYIERRRSEGKSEREAIRSLKRYVARHLFRLLEATAVTA

SEQ ID NO: 248564 - protein, 290 aa, unidentified
MKIYALGIDLGKTVFHLVGLDSSGQVVVRKRCSRTQLLACTANLQVQLIGMEACSGAHFLGKALRAQGHDVRLMPAQYVKPYVKTNKSDYIDAEAIAEAVQRPRMRFVPIKTEEQLDLQALHRVRERWVMRRTAVVNQIRSLLLERGLTLPKGRSHLGQMLPRILEDAELKLSGAFRVLLAQLKLELEQLAARIEQMDMVIQQEARENESCQRLTTIPGVGPVTATALIAAVGNGSAFGKGRDLSAWMGIVPGEYSTGGKQKLLGISKRGNKYLRRLFVQVSGPGIFDPL

SEQ ID NO: 248565 - protein, 412 aa, unidentified
MSNPLLVGIDVHRKTNTIALMELTGREIAPRFTVDNNRPGAATLAQTLQATAEEHGYDAIHIAAEATGWYWWHLFCALDQDPFLKQRPLLLYPFNPRLIATFRKTYSERDKSDLIDAAIIADRLRFGRDLPQPYVCDEPYQALRFLTRHRFHLVHQIVREKAYFLAHLYLKASEYTHLKPFGDVFGATSRALLQGYANIEAIAAIPFDDLVEIIDQLGKRRFAAPEDNARQMLTVARDSYSLPEGLQAPVNLILQQSAQQIAALQRLVKRTETAITEALQPIPNTLQTVPGIGAVVAAGMISEIGDPVRFDCDQAKVAKLAGLIWSQTQSADFEAEETRLGHSGNRYLRYYFCEGANSVRMRDAEYRAYYERKYHEVRSHQHKRAIVLTARKLVRLVVRLLTTNQPYRPRRA

SEQ ID NO: 248566 - protein, 437 aa, unidentified
MLPCLNPNAAGVDIGATEIYIAVPGDRDPQPVRCFSTFTEDLQAAADWLTACHIETVAMESTGVYWIPLFQILEARGFTVFLVNAHHVKNVPGRKSDVSDCQWLQYLHAVGLLRGSFRPEQAVCTVRSLLRHRDSLVQMASSHVQHMQKALDQMNLQLHHVISDITGVTGVAILEAILAGERNPHRLAALRDRRIKASADTIAKSLVGDYRREHLFTLGQSLEAFRHYQELIAACDREIAQYLEGFESKLDPPPAPPSPAQDRPKPSASQPRFDLQTHLHRIFGVDLTKVPGINVLTTQTLLAEIGPDFSRFASAPALTSWLGLCPDNRVSGGKVLSVKTRKVKNRAATALRMAAQSLYRSQSYLGHYFRRMRAKLGAPKAITATAHKLARIVYHMVTTRHAYDDSICAHNEVQNRQRLEARLRKQARELGLQVVAI

SEQ ID NO: 248567 - protein, 412 aa, unidentified
MQVLYSRCCGLDVHQKTVVACVMITQPNGKVDKSIRTFATTTTTLLTLGDWLASLQVSHVAMESTGVFWRPIYNVLEDQFELILANAHEIKALPGRKTDVRDCEWIADLLRHGLIRPSFIPAKPVRVLRDLMRYRKSLVYQHTQQINRLHKVLETASIKLTSVVSDVWGKSGQSMIKAIIQGESDAQTLTELARGTLRGKLPQVQEALEGRIQPHHRMLLQQIFAQLQFLESSMQQVLKEIEAQMEPYQAVVELLMTHPGVQAVAAMGVVSEVGIDLSRFPSAKHFASWIGVCPGNHTSAGKRKHGKTTKGNAYLRALLAEIVWGISHTKDNYLSAKSHRLARRIGKTKAIVAVSHTVAVNFYHMITKRIPYRELGANYFDTVDRERLTKHTVKRLEALGYEVTLTAKEVSA

SEQ ID NO: 248568 - protein, 317 aa, unidentified
MKQSVVYIGIDVAKTHLDVAWAGTFRRWPNERSGHAALVRWIKQSATPVQLICEASGGYEQALLESLEKSEVKVTLVQAVRVRQYARAAGILAKTDRIDAKVLAAFGSAMQPQPTPPLSAEQKRLRQYEAQRRHLSRILVAEENRLAQLSCAELRSLSRCLISKIKTQIKTLDRGISDLIAQDQTLCIKAQKLTAISGVGVRTAALLLAQMPELGQLNRRQAAALAGLAPFNRDSGSLRGKRAIFGGRPALRSGLYMAALSAARFNPILSNFYQRLRAKGKPTNRSHRSDAKTTARAQSHPHHSHSPLENNTVTYDI

SEQ ID NO: 248569 - protein, 401 aa, unidentified
MDPHLCVGVDVGYRAHRVGIAHPDGSILEQFDITHNDAGFQEFFQRIERRRTELGLPVAVAMEGYNGYARPLDRLVQERGYRLYNVNNLKLARFKEVFPGAAKTDPIDTRKILELFRLKEQLPLAKDAIQEVVMAPAVNEKLKRLSRRRRHLVGEKMRVLSRMQADLQAVCPELLAATHDADNLWFLRLPSFRDDLRQLARLRPSTILQIPSVGQKYAHRIRDWQAEARFSDEVEYVGPMIIQDAGRILELHEQIHVLDEAMTDLSAQSEIARRLSTIPGFGKTSIAELAGKIGTMERFASEASLALYLGMCPLTHQSGQLSVARVPRQVNIRCRAALMTTTARHIGCVPQSRAYYERKRAEGKAHNQAIRSLGRHLVRVIWAMLRDGRDYEIREDSHPLT

SEQ ID NO: 248570 - protein, 400 aa, unidentified
MMTPDDIDVWVGLDVGKSAHHAHALNHDGNTLYDKPLKQDEKAIRTMLGKLSKHGRVLLVVDQPNTIGSLPLTVARNMGIAVAYLPGTAMRRTAQLLPGDAKTDRRDAHVIAWAALKLPETLRDAGPDDETLAALKLLAGHDEDLAHESTRHVNRLRSLLLQTHPAFERALKGERITRDATLALLERYGGPMGVKRAGIEDVKDWAKSNGLRAGRIIDDMFKAIGEQTVTVPGTLMAETIIPSIAHDIKTIRDRRREVGRQVEKLLEDHPLLTVLTSMPGIGVRTASNILLGIGGDIANFKSSAHLAAYAGISPVTGQSGTSIKGERPSRRGNKRLKNALWQTAFVASTKHPPSVAYYKRKREQGKHHNAAIICLARRRCDVIYSMLKNGTLYQEPALVA

SEQ ID NO: 248571 - protein, 381 aa, unidentified
MPHRVDAPLQEVFLLLYIGIDVHKKWCYATLKDRDGRELDQFRFLNRTEGFHRLLKVVADRPAKAVVESTGNLWLRLYLVLERGGIEVLLSNPSMTKAIAHARLKSDKVDSSTLADLLRADLIARCYVPPAEVRAARAMIRMHMNLVKDRTRVKNRIHSVLHKYEVPGFKGSDQFGKSGIAWLKRLKLSEGDQLILDTLIRQLECLNQLIDETHRRVARAAVNRKDIRLLMTIPGIGFYSAMLIVSEIGDVTRFATSSKLVSWLGLAPSVHQSGNTCHHGKITKKGSPRVRWILVEAAQTSVRHDDHFRSKYIRIARRRGKRKAIVAVAREMVVACYHMLTRGEEYRYKSEELVKRKYKKLESKARGVPCVEGRAETLCRE

SEQ ID NO: 248572 - protein, 331 aa, unidentified
MGVSVGLDVAAKTVDMVWRRNGVKSKVTTYEQSPAGHARLVKALSALQPNSVVMEATGIYYLDLALALHQGGLPVSVINPKSARRFAELKLVDTKTDAVDTGLLAEYGERMTPQRWSAPDPTRLALRDLGRQINRLIGARTQAKNRLHALQAKRQTFKLLIQDERSGIAQLDRRIERLEQAALGLIADSPELSAQMRCMTAGKGVGQGTVIALLAEFCLLPSHLKAPQVSRHAGLDVRLHQSGSSVNRPARLSKTGNRYLRAALYMPAMNAIQHEPRAKAFYQALVARGKKKLQALCAVMRKYLTGLWVCFKQVTAFDPARLFAEIHLAKT

SEQ ID NO: 248573 - protein, 359 aa, unidentified
MRTRIPEVPKKTFTIGLDLGDKSSAYCVLDAEGTVISEQKVRTTPKALSDCFGGMAIGRIALETGTHSPWVSRLLSAIGHEVIVANARHVRLIAQSRQKDDRLDARTLARLARVDPKLLSPVTHRSAQAQADLSLIRARAGLVRSRATLINMARGLVKTNGERLQGSSSRIIKSDVSMDLSPALRVSMEPVLASIKALTLQIRGYNRKIIELGKTSYPEVSLLTQVHGVGPLVALTYILTLEDPHRFAKSRDAGCYIGLQPARRNSGTCQPQLHITKQGDPYLRSLLIESAHHILGPFGADSDLRRWGLTLASRGAALGKKRALVGVARKLAVVLHHLWTTGEVYQPLHQTTLAATSAA

SEQ ID NO: 248574 - protein, 341 aa, unidentified
MSEKRYIGVDLHRRVFTCCVRLENGRQFLSEWRLEQMPQFLKKLRGTDEVAVEVTGNTRLFYDAVAPHVARVVVVNANQFRVISQSVKKTDPNDARNLALYLAKGLLPEVRMKDKEHGQLASLTQTRDTLVKLRTALKNKVNNILSARGLNLAKEALSSEKKLAEVLDLPFDEIVRIELRVIVEQIRSLNRSIAELEKTIGEEGSKLEGHKGLSSIKGIGKITSAILLSVIGDVNDFPDEGHLASYFGIVPRVSNSNQTERSGRIHKRGTKLGRTALVQSALIAANYSPYLKRFYEQVKARRGAGKAIIALARKFLGIIYRTLKNKWVFEDFPNFVLAEES

SEQ ID NO: 248575 - protein, 355 aa, unidentified
MDSKKYIGMDVHKESISIAVMNGAGKIVMECVIETKASMILQFIDGLRGDLQVTFEEGTSAAWLYDLLKPHVTKLLVCDPRKNASMREGNQSDKIDARRLAELLRLNHLNPVYHGEHGLRSLKELARSYLTITKDLGRVMSRVKAIYRSWAIPCTGKQVYAPRHRAEWLGKITEPGVRRRAEFYYQQLDALRTVRQQVRRELLAEGKKHQAWKRLCQIPSIGPIRSAVLLGILQTPHRFRTKRQLWTYSGFGIETQSSADHRSVDGQLERVKKQSSIRGLNRNCNHDLKNLFKGAAIVASSKPGPFQEFYTALVTKGIRPEMARLTLARKIATIVLMVWKRGACFDAQHLKPQAA

SEQ ID NO: 248576 - protein, 372 aa, unidentified
MPDVSSNQPADVRLWVSLDVHKLSIVAATLPPTGGGKPEVQRIETTEKAIRRFIDKLGGPDGLAVCYEAGPGGFELYRLLTRLGVACDVVAPSLIPVRAGDRVKTDRRDAKKLVTLYRGGLLRFVQPPTPETEGLRDLLRCRDDLRCARTAARHRVSKQLLRHGRIYREGKHQWTVKHRDWLTRQQLDDPLAHAALEQMLVHLDSIERQLATLDAHLERIARSERWAGQVEVLTRFRGIATLTALGLIAEIGDFARFSHPRELASWLGITPSEYSSGDQQHRGHITKTGNRHARRLLTEAAWHYRYPPRLPKTGPEPDQRAWQAQLRLYHRYRHLTQQGKRSTVVNMAVARELAAFLWAAMTDQPHRQEAAA

SEQ ID NO: 248577 - protein, 354 aa, unidentified
MSQNLDSAIAVIGIDIGKNSFHIVGLDSRGAIVLRQKWSRGQVEARFANMPPCLIGMEACVGAHHLSRKLKALGHDARLMPAKYVRPYSKGQKNDFRDAEAIAEAVQRPTMKFVATKTADQLDLQALHRVRERLVSQRTGIINQIRAFLLERGIAVRQGQRFLRAELPRILATPPGVLSPRMVRVIEDLASDWRRLDERVDSLSGEIEAVARQDADCERLMSVPGIGPIISSAMVAAIGRGEVFSKGRDFGAWLGLVPKQTSTGDRTILGKISKRGNRYLRVLFVQAAWVVLIRPKSWERHGLKPWIEAAKKRLHPNVLAIALANKLARIAWSVLARGRNFEARTNTNATAQAA

SEQ ID NO: 248578 - protein, 352 aa, unidentified
MDTTTILAIDLGKFKSVACVYRRGGGGTPAFHTVASTREALLGLLDRVAPAVVVIEACALAGWVHDLCVARGLPCKVANTASEAWRFKHLKRKTDRDDALRLAQLEDLGQLPTVCLPPAEVRQRRSLILARQRLVGLRVRAQNRLRSLLMMQGLEAPRGAAAWAAAGLAAFEAQARPLAECPPAEAWRGLVHLALAEYRQALAWVEEVEAQLDALGRADEQVRRLRTVPGVGPRTAEVVSAYLHQPKRFRTGKEVGAYAGLVPRQSQSGESDRRGRITRRGPGVLRKLLVECAWAMLRYNRWAAALYARLSRGRARKKQAIVALARRLLVRCWAMLRDGSDWREEAPAAAGA

SEQ ID NO: 248579 - protein, 471 aa, unidentified
MPRRKPASSRPDPAAAALLQTLHPHAAGIDIGATELWVCVPPSAIGAPSASSAPTVLPPHVRRFGAFTADLHAIAAWSRQSQVTTVAMESTGVYWIPLYDLLEAERFEVLLVDPRQAQRAPNRPKTDVHDCQWIQRLHSLGLLTAAFRPEEPIRVWRSYQRHRASLIEDAGRHLQRIDKALEQMNVKLPAVVSDITGVTGMGIIRAIVRGERDPQALAKLRDRRCKESAATIARALQGTWQPEHLFALQQSLALYDYYHEQIRACDLVIEEHLQEMALPEVPPLEPTRRVRRRRDNEVIFDARQRLHHMAGVDLTAIEGIEESTALVVLSEIGTDMSRWPSEKHFGSWLGLAPNPQKSGGKMRSSATRPGVNRAAQALRLAAKNLQRSQSALGAFFRRIAARRGLAKAITATAYKLARIIYALLKHGTGYVTQGLAAYETAYRERMVRQMKRKAAELGLVIVEQEAVAQPA

SEQ ID NO: 248580 - protein, 403 aa, unidentified
MRHVIAFDISMGKSYMVIYNAQKQCIFEKEIQHLKPDFKELQKKIYEITKKTGKLPEIVFEATGIYSRQLERFMQDNQYTYCLLNPLEAKLQCDSLRIHKTDRSDAHRLALTHFTATRRVSHGTNHIFHQLKSLSRFYSELDGELSVIRSRMHKVIQLTFPELEKMFTSKSDLFLNFVQLFPHPDSVLSLSKTIIKNHIRANTNKKISNIMAEKKAIQILEIAKNSYPAVSQNDVLCDQLKVYAKRYQELLQQKECCINKMVLIAEQRAEYSIILSLPGIGANTAVRLMAEIGDITRFANNKQLNAYAGIDIRRFQSGKIFYKDKINKRGNKHLRKLLFLIIQNMIKLRRYGRNHIIEYYDKLKTQPYNKCHKVASIACVNKLLKLLLHLITHNIHYDYRLTA

SEQ ID NO: 248581 - protein, 431 aa, unidentified
MIETVESTQHTGLSQEASIAHQWFVGIDWGDQNHQVMVLDQQRRRVGERVVPHDGTSLAQLASWLREVSGGAPSRVAVAIEVPRGAIVETLLEQGFEVFAINPKQLDRFRDRHTVAGAKDDRRDALVLADALRTDPQSFRAVRLGAPDLLVLRELSRAEEGLLQEFRRIANRLRDQLHRFYPQMLQLCSAADESWLWDLLELAPTPRHATLLSEDQVRRILNAHRLRRFKAQDVLACLQVPALHVAPGTAEAAQAHCGFLLPCLRVLAEQLRACEQHVSTLLSTLAEDNAASDPSDVAIVQSLPGVGRKITAWLFAEAAQPLAERDYPVLRTHGGIAPVTRQSGQRRQVVMRRSCNQRLRHALYHMARVAMQRDTHFASVYEALRAKGQRHGQALRNIADRLLRILMAMLRDRTRYDSSRIHGGQKVLMER

SEQ ID NO: 248582 - protein, 430 aa, unidentified
MKQYELLHSLFVGIDVSMKENVVHAMPFSPEDHPGHAHLRFSAPNTPAGSVGIVEKVSDFLKFYPDVIQVVIALEATSVYSFHLATFLSVAHFNGHIPAIVYSVNSKEIHAYKKTFTDVGKDDYVDAMVIADYARSNKIRSRPWKGPELLGLRVLTRLRFRIAKLMGIVKNSTGNSIYLECSGLMTGENPFCNVWTTTCQELLTTFQGPDEILSLSDEELLNFITEKGHGRFSHPLDVVEKVKKAARNSYRLDKRVYEPLSSGLFVSFFIIHSLEAAIKKLDKSIETMAKSFSSDSYQILLSIDGVGPVIAGGLLAEIGDIKRFKTDDALAKYIGLTWRGKQSGQSESPVKHLSKAGDVYLRYYVLLATGQIINYSAKYREAYERIRSRKTLFPHRAALNLVARKIVRLIFTLLDKHQLYSDNKVMVTLE

SEQ ID NO: 248583 - protein, 322 aa, unidentified
MNKYNETFGVDISKDVFDVHGSKSGHSQFKNNEKGFKAFLKSLPSQALVVMEATGYYHYRLAQFLYKNEVAVSVVNPLSVKRFIQMGLAKVKTDKSDAKAICKYALINDVPLYTALTDIQSECLQLFRLLDSFIKHRTATKNKIHGEETLGVPSKAVYRSLKRNKKHLDKELTAIEERILSLVKKDQQHQLTLLTSIPGIGVKTALFLIVVTDGFSKFENASQLCSYVGITPVIRESGSSVRGRSKISKVGNKKLRNLLFLCSFNACKHNKACKGIYERLVNKGKSKKLALIAVSNKLLRQAFAIAKSGRPYDEGFVSVLRK

SEQ ID NO: 248584 - protein, 340 aa, unidentified
MKTLYAGIDLHSNNNVVVVTDAEDKVVYRKRLRNELEVVLDALAPFADSLHGVVVESTYNWYWLVDGLMDHGYRLHLANTTAIEPYSGLKYADDVSDARWLAKLLRLDILPEGYIYPKAERPVRDLARKRCYLVQQCTSNVLSIQNLLARNTGRSMSATGVKRLRDEGVDALLPDPDLALAVKSSLAVVHCILEQIRLLEKTVLKRVRLRDEFKILLTMTGIGPILGVTIMLETGDIARFPTVGDFASYARCVDSAHISNGKKKGKGNQKSGNAYLAWAFSEAATFATRYDKTIARYYQRKCARAKHMMVARGAVAHKLARACYHMLREQTAFDVQRAFA

SEQ ID NO: 248585 - protein, 342 aa, unidentified
MKQYVGLDVSQKETSVCVVNEAGRILFEGKAKSDPGALTALLRERAPHAERIGFETGAMASWLWHELRRVDLPVVCIDARHARAALSVRMNKSDQNDARGLAELVRVGWYREVKVKSEESQKVRAILVARSRLVAIRRDIENQVRSLIKEYGLLFPRAIGKQFRNQVSELLGEDHQLIGVIAPLLSIHEHICEQQSKFDDEVRRLAKSDETTRRLMTVPGVGVVTALTFRHTIDDPSRFRSASTVGTYLGLTPRRNQSGETDTNGKISRWGDRLLRSYLFEAATVLLYRTKKWSSLKAWGMKLAKRIGVKKAKVAIARKIAVILHCIWVDGTSFDWGQAKPA

SEQ ID NO: 248586 - protein, 423 aa, unidentified
MSQNQPEIQYAAFLAIDWADQKHVWSLQDANSSTCERGEVDHMPEAVEAWAAQMSQRFAGRPIAVAVEQSRGALVFLLSKYEQLHIFPVPPAMTANLRKAFYSSGAKSDPSDADLLLDLVQRHREKLRRLSPDTEATRLIQNLVEERRKLVDEKTAQSNRLEAHLKIYFPQIPRWFGDVDSPLVCALLERWPTLEALQTARPDTLRSFFRKHHSRKEELIESRIKAIGEAMPALKDRAVVQTKVAVVKVSVQLIQVLHEGIEGLNRQIQEAAEAHPDFFIFDSLPGAGAVMAPRLLAAFGSQRERYQNAAEMQTFSGIAPVTESSGKSSWVHFRFACSKFLRQSFHEWASYSITHSQWARAYYGLQCRRGKKHHAAVRALAFKWIRIIYRCWKERVAYDENVYLAALAKHNSPLVAATKAEAL

SEQ ID NO: 248587 - protein, 300 aa, unidentified
MNHYVGLDVSLEETAICVVDGTGRIVKEARAASEPEALIAALREIDWPLERVGLEASSLTAWLHDELHSAGLPAVCIETRQANAAMKTMPNKTDRNDARALAQIMRTGWYRQVHVKSRQCRLWRSLLVARRTVLNEMRSMENVVRAVLREAGLKLGVPGRAAFAGRVRELTEGDARVTTLVEPLLAILATMLDQLAHLTKQVQDIVRQEAVCRRLMSVPGVGPITALAFRATIDRPDRFRRSRDVGAHLGLTPARYQSGETDIQGKSAAAATSSPGPRSMRPPTLCWFAAGSGRPCGPGA

SEQ ID NO: 248588 - protein, 380 aa, unidentified
MKNVRFVGLDVHAETIAVAVAEGERSGEVRSLGSIPNRIESIRKLIKKLGSSEQLRVCYEAGPTGYVLYWQLTELGIKCEVVAPTLVPVKAGDRVKTDRRDAEKLARSYRAGELTPVWVPDAAHEALRDLVRARLAAKRDQLRARHRLSKFLLRHGRRSPAGMKAWTAAYLVWVKRNVKFDQRAQEATLADYLHEVEHAQERITRLERAIDDAIETMPEQMRSVMQALQALRGIAKISAATVVAELGEISRFKKPRQLMGYSGVVSSEYSSGAQTWRGGITKTGNAHLRRIIVEAAWAYRHRPSVGPELAMRQKEASPEVKEIAWKAQHRLHSRYRKLLDKGKTKQKVMTALARELLGFVWAIGVMVEQQFIEKCKDQAA

SEQ ID NO: 248589 - protein, 408 aa, unidentified
MNTLYVGIDVSSRSNVVYLMLPNGNKHSNFSVANSHEGSVQLVKRIHSALTSHSLDTVLIGLEATSVYGDNLVYFLREDTTLAPFNRKIHVLNPKQVKKFHDAYNDLPKNDYVDSFVIADCLRFGRINKEVYLGDYRYKALQNLTRARYFAVQNLTKEKQRFINVLFKKYSTLTQEKVFSNTFSTTALAVYNEFESAEALANMDLHELTDFIMEKGKNRFPDPDAVAKAIQKAARSSYRLPKTVNDSVNQVLSISITSMKALESQIKEFDKAIKSQMELLPNVLISIPGIGPVYSAGIMAEISDINRFNNQAALAKYAGLAWKQHQSGGFEAETTRLIPSGNRFLKYYLCGAAFSLVRCDKEYSDFYHLKYKEVNRYQHKRALALTARKFVRLVFRLLKDNRLYCPAK

SEQ ID NO: 248590 - protein, 397 aa, unidentified
MIAVGIDISKAKSTVAVIDSDGTVLASPFTMAHTQPEMEAFVTYLKGLGEPTTILMEYTGHYHYPVLKKLQGEGFPVCIVNPYQMKKYGDVEIHKAKTDKKDALRIAAYALEKSYKLVPYSSMEQKYEDLKFLSRQYSQRITYVAKLKVQLIALLDQTMPGITRILPLNSRNPEKCALLLFIKRFKSFDEIQRIGKARFLASYDVLAKKTSERSASSKGLSIYELAVDSITTRGEDPYIWLSQNQCVDLLSATQNAADEIISQMRNIAETIPEYKVLRAMRGVGDRLGPIILAEIGDIRRFHSGKALNSYAGNDAPPYQSGQFESRNRHISKRGSSALRKACYEVMQALKLTKPQDDPVYLFMLKKEQEGKPFNVAKMAGVNKFLRIYYARAMELYK

SEQ ID NO: 248591 - protein, 366 aa, unidentified
MKQPITYVGLDVHKDTIAVAVAEAGKRGEAREHGKIANTAAALRVLAVKLARGGGDLRFCYEAGPCGYGIQRQLSAAGHECVVVAPSLIPRKPGDRIKTDRRDAINLAKLHRAGELTSVWVPDQAHEAIRDLVRARLAAVRTLRQARQQLSGFLLRHGHHYNRPAWTLMHRRWLAGLRFEQPVHHIVLEDCIAAVEAATARRDRLEGHIEVALPEWSLAPVVHALQALRGMALVAAATVVAELGDIARFANPRQLMAYLGLVPSEHSSGDTRRQGRAGNGAARRILIEAAWSYRFPARISREQLLRQEGLAEPIRDAAWKAQERLCRRYRKLARAGKPPTVVTAAIARELSGFVWAIAQLARPMNG

SEQ ID NO: 248592 - protein, 342 aa, unidentified
MEAAVTIGLDLGKSVFQVHGVDVGGAVVVQRRLTRSRLLAFFAKQPACLVGMEACAAAHHWGRELQKLGHRVRLMPPRYVKPYVKRQKNDAADAEAICEAVTRPNMRFVEIKTCEQQGTLVLHRVRLMLTRQRVQLSNAIRGHMAEYGLVAPVGRNGLQRLIAIIEDAEDSRVPAMARASLAPLVHQLGMVNDQVLENDRLVRANARSTELGHRLMEVPGVGPVLASAMVATVPDPAAFKSGRDLAAWIGLVPRQNSSGGKEKLGGITKQGDRYLRQLLVAGALAVIRYAQRHGTRRPWLVRLLSRRAPKIAAVALANKMARMIWAMMVTGERYREPVVAAV

SEQ ID NO: 248593 - protein, 300 aa, unidentified
MNQYVGLDVSLEQTAICVVDDDGKPLWQGKCASTPEMLVAIIRTRAPQVARIGLESGPLSLWHWHALKQAGLPVVCLDARHAKAALSLQLNKSDRNDARGLAQIVRTGWYREVAVKSFDSQLIRSLLTTRAHLVGMRVDLANQIRGVLKPFGLIAGKGGGQAFADRVRALVADGPLQMVAEALLTAWQAISHQLAILTRRLIGLARQDQAVKRLMTTPGVGTIVALTYVSVIDRPERFAKSSSVGAYLGLTPRRFQSGEEDYNGHISRCGDRLLRTYLFEAVGIILHRVSRWSAAQGQPA

SEQ ID NO: 248594 - protein, 351 aa, unidentified
MPHKSTVHAVTAIGIDMGKNTLHMVGLDSRGAIVLREKVSRGRIASRLANLQPCLIGIEAGMATHYVARELAALGHDVKQVPPTYAKPFRQGHKNDFRDAHAVAEAVQRPTTRFVPAKTNEQLDLQALHRVRSRLVSERTAVINQIRGFLLERGIIVRQGLRFLRQQLPDILAKRTDVLSPRMVRIVTDLAGDWRQLDERIETVTDEIETLAKSDDNCRRVMTVPGIGPIISSAMVAAIGSGAAFARGRDYSAWLGLVPKQMSTGDRTILGRISKRGNGYLRTLFMQAARVILLRPANWPKHGFGAWLIRAAQRLHPNVLAAALANKLARIAWTVLAQERSYEARVTKAAA

SEQ ID NO: 248595 - protein, 354 aa, unidentified
MPCLPVEVILGVDTHRDTHAVVLVDLLGRLIATATFPTTRPGLRALIKWAQQRGNVRRAGVEGTGSFGAGLTRALHHEGIEVVEVTRATRVGGRHRGKNDTRDAEAAARSVLSGQATAAPKARDGIVESIRVLRNTRASAIKARTQAILHIKNLIVTAPDELRETLSPLTNRQLVKHCARMHRSSRRDSLAATRHAMRSLARRHQDLDCEIAELDELLGDLIAQAAPRLLKQPGIGPEIAARMLLVAGDNPTRLRSDAALAALCGASPIEASSGKTIRHRLNRGGDRQGNSALWLIATNRMIHHPETREYVKRRTTEGKSTKEIRRCLMRHIARGIYPLILADLHDAYQQSALT

SEQ ID NO: 248596 - protein, 523 aa, unidentified
MSTARTRKRSRSGPRQVLQKPAGVIHPRVQQVGPEHFGIVSVDCAKARSKWMLCDFYGNIRVAPTVVEHNRTALEAAVTQIRQARAQHAFHDLLVAVERTGRYHRPVQRACAAAGLEVRIVHPFATKQFRLPSDPGYKTDDTDLAAIHRAAVNGFALVEPARDETWKTLQLLIRHRRDLVFKNTAVCCPIREHRDAACPGLAACFDNLWDSATAWHLVQHFAAPQDLVAAGLDGLCRSLDDAGVRYQRRTLRRLLEWATIAAAPDLAATQHRRIALALNDDRMRKTQEIHGLERASAACLARTPYVLLLSFPGINVVSAADFAGAMGPIEHYAHARTITGRAGLRPCRYQSDQVDKANGPLVRHCNRKLRAAILGIADNLVCCNHHCHVLAHHWKVAGMDPRDIHSRVGQRFCRIAYHMVAGRQVFRHPCLQGRHYILDKLAAFHRTHDTPAPELLRDLQAAIEQLPRPEYQAEALPLHQELEKIQAGRRRGPQLLGDILPIVLARLGVGAVPSTASGEEHPH

SEQ ID NO: 248597 - protein, 355 aa, unidentified
MSSEKYIGLDVHQATICVAVMDAKGKVVMESILETKAATILEFLAGLRGTLSVTFEEGTWAAWLYDLLKPHVANLVVCNPRKNALLKHGNKSDKIDARKLANLLRLNDLEPVYHGETGVRMLRELARSYLTIVKDVSRVMSRLKAIYRSWAIPCAGRDVYYTRHRGEWLGKIPEAGSRRRAEQLYQQLDMLQPLRQQARRELLAESRKHTITAKLRQIPSLGPIRSALAVALIQTPHRFRTKRQLWTYSGLGLETRDSGEYHYVEGQVRRRKKQVFIRGLNKDHNHDLKGLFKAAATRASVRPGPFQDFYQRSLAKGIQPTMARLTLARKIAAITLTLWKKGENFDAEKLKAQAA

SEQ ID NO: 248598 - protein, 359 aa, unidentified
MRTITIGVDLAKQVFSVCSVDAAGRVQDRRELRREAFRQWLPSVPAGTIVAMEACSGAHYWARRCQDSGLLPRLMAAQFVAPFRKSRTAKNDRNDAEAIATAARQGNMRFVPVKTVDQQVRLSWHRVREGYKAEALATSNRLRGLFAEFGVVIAQSDAALRRALADLDALALPCALVELLRDVDAHWQKLQARIADADRRINAHAKADDACTRLRAIIGVGPITADAVVATIGSAQDFKNGRQFAAWLGLVPMQHSSGGRSRLGRISCRGDGYLRTLLIQGARSSLQRAKAVPWEKASPEQRWIQDLGRRLPFGKVLVAIANKHARQLWAMLARGEHYDADAWLKHPMVQRPAKKRAAE

SEQ ID NO: 248599 - protein, 389 aa, unidentified
MSQVQVNDLSRSLAAFDQNTTLTVVVELSEASWLVAGLVPGLDRQPLKKQAPDPVALQRLLDRWRAAAVKAGRTIERITLAFEAGRDGFWLARWLQTRGIEVNVIHSTSVAVSREHRRAKTDRLDTALLMRVFLGWLRGERGHCRMVAIPTLAEEDAKRPSRERESLVGERTRIVNRMKAALARLGIRGFKPELRKAPQGLEGLRTPEDMPIPPNTLDEIRRDMARLAMVREQIDAIEQARLVRLEKAPATGPHAMVRLLARVIGVGVETADMLVQEVFCRNLRDRRAVARYVGLTGSPDESGKRRREKGLAKAGNARVRRGLIQLAWRFLRFQKDSVLAQWYQARTEGPNGARKTTMIVALARKLLIALWRMVTTGELPADVALRPAA

SEQ ID NO: 248600 - protein, 347 aa, unidentified
MEHLAIDLGSRKSQICVRSRSGEIVVERRLDTDALPAFLRSRPASRVILETCTEAFYVADHALEAGHEVRVVPSMLVRSLGVGARGVKTDQRDARATSEASTRIDLPSVYVPSKTSRQRSALCSSRQVLVSTRTKFINHCRGWLRSQIGRVAPGSSATFPERLRKSPVTLPGHIEAVLSMLEELNAKITELDKETAQLAKADEVCTRLMTVPGVGPITALRFSASIGDVQRFGNSHALQSYLGLVPGERSSGERKHRTSLTKAGNSHVRWLLIQAAWAAWRTRPSDPMVRWAKQVALRRGNHVAVVALARKMAGILYAVWRDQRHYDPSRGAVVRDDRVHELQTALE

SEQ ID NO: 248601 - protein, 381 aa, unidentified
MIDALEAQLKGDRAVNKSNTVTRSENEILKQKKLTIGMDLGDRSTRYCILDEAGEVILERSVPTTKKGMGQVFSAIPGSRVALETGAHSPWVSRQLTQLGHEVIVAHARNVRLIGESSRKDDRLDARTLARLARIDPQLLSPVRHRSAEAQVHLTVIRARAALVGARTALVNAARGLAKSYGERLRKCGTQQVRRDLAAGLSVELRAALEPLLEEIESLSQRIATYDRQIEQIAQKNYPEVSLLQQVKGVGTLIALTYVLTLEDPHRFRRSRDVGCYLGLRPGRRNSGSSQPQLHISKEGDRYLRTLMVQGAHYILGPFGEDSDLRRWGLRLAERGGKNAKKRAIVAVARKLAVLLHKLWVNGEVYEPLRNHPTTAVDAVA

SEQ ID NO: 248602 - protein, 379 aa, unidentified
METLYKRCAGLDVHSETIVACVLLGDSEADMEKETETFPTLTKDLFRLLKWLEEKGVTHIAMESTGVYWKPVYNILEDFFDITLANAQRIKNVPGRKTDVSDAEWIAKLLRHGLIEKSFVPPEDFRNLRDLTRLRKKWIGHMTSEKNRIQKVLETSNIKLSTVISDVFGVSGRKLLEQLMTEGYIDQEEVEKKIHGRMAHKKQLIADSLFGTLNDHQLFLIKQSWMHIIYLEELISDIEKRIDKTLLNYQEEVQLLITMPGIKKDTAAIIIAEIGVDMEQFPTSKHLAAWAGLSPGNYESAGKRKSTRTLRGNPHIKSALCEAAWAVSRSRNKRLGIKYWSLAARRGKKKALVAIGHRMLTIVYHMLQNKEPYHELTSN

SEQ ID NO: 248603 - protein, 338 aa, unidentified
MRAYAGIDLHSSNNYIGIMDQDYKRLFGRRQPNDLSNVLKVLEPFKADLEGVIVESTYNWYWLVDGLQEHGYKVHLANPSAIKQYEGIKHTDDKWDSFWLAHMKHLNILPEGYIYPKKQRPVRDLLRRRLFFVRHRTANILSLQSTITRNLGIKISGNDIKKLNMDDAGNLFDSSNLVFMAQNNISTIKHLGKIIKGIEKEVKSQVKFRKEFVMLTTIPGIGIILGLTIMLEVGDINRFAKVGNYSSYCRCVGSKRLSNGKKKGENNKKNGNKYLAWAYVEAAHFAKRYIPKAQRFYQQKMAKANGAVANKAFANKLARASYFIMRDQVSFDEDLLFR

SEQ ID NO: 248604 - protein, 284 aa, unidentified
MSEPVHTPQTPIAGEVTVGIDVAKAALDVAVRPSGEERHLANEAAGIAEIVGWLQTLGPQVIVVEATGGYEAPLVAELGIAGLPVAVVNPRQVRDFARATGRLAKTDRLDAQTLAHFGQAVRPVPRPLLDEDAQALAALVERRRQLVGMRTAEENRLGATRVAVVRTRIEDHLEWLATELKELDDDLRQRLRASPLWREQDDLLQSVPGIGPVLSLTLLAELPELGRLTHGQIAALVGVAPLNRDSGTLRGRRAVWGGRRGGRPARAKGAVHATRAPTVLVTVY

SEQ ID NO: 248605 - protein, 449 aa, unidentified
MKRTGKSGFPLLNPDAAGIDVGAREHYVAVPADRDAQPVRCFGAFTEDLQRLAQWLLQCGIKTVAMEATGVYWIPLYQILESYGLAVKLVNARHVKHVPGRKSDVQDCQWLQQLESFGLLSGSFRPEAKICVLRSYMRQREMLIRQASRHVQQMQKALTQMNIKLHQVISDLSGDTGLRIVRAIVAGERDRLKLAALKDRRIKSEVALIAKALEGDYRAEHLFALKQALELYDYYQRKIAECDAEIYKEMKTLETRGSAAPLAKHKPRSSHNPLGFASQAELYRIMGVDLTRIDGVNENTAQLILSELGLDICQKWPTEAQFTSWLGLCPNHEISGGKLLKRGTRKVVNRVANALRMCAQSLLNSKSALGAYARRMRARKDTPVAITATAHKLARLIYRTLKYGQDYVDVGSDSYEAKYQAAVVKSLQKRAQSLGYQLVSCQTPGAVVP

SEQ ID NO: 248606 - protein, 449 aa, unidentified
MSTTPTPTLPVLDPLAAFVDVGSEEMYVSIAGGPPEVFGTFTTELHRLRDWLKERGVKSVAMEATGVYWLPLYGVLETAGFEVVMVNGKYPRNLPGRKTDMKDCQWGATLHAHGLLGAGFVPPAAIRRLQDYLRLRADHVTSAGASVQHQQKALARMNVKLHDVISSLAGASGQNVIQAILAGERDPERLLALCDVQIQKKKAERVKESLRGTWAEEHLFALRQAVEDWQHFQRQIAACDRQLEAVLREISGPEEPPTGPKAKATGAKRPGVNAPEIEGLHGLLCRLCGGKDLTVLPAHTDYSLLQLLGEVGTDLTKWPTEKHFTAWLGLAPGSHQSGKRKKSVGRKRNRAGRLFCVMGRSLARSKHIALGGFYRRMAGRRGGLVANIALARKLAEWFWRVMVKGVSYVEQGLAQYEKQVLETKRRALQRLAKQLGQVVMPNPTARKNA

SEQ ID NO: 248607 - protein, 350 aa, unidentified
MIVIGSDPHKRNHCFAAADAATGELRSSEAVAASGAGFERALGWGRSLGQQRVWAIEDCRHVSGRLERFLVARGERVVRVAPKLMAGQRRSSRQAGKSDPIDALAVARAALREGVASLPAAYLDERALEIKLLLDHREDLVRERTQVQGRLRWHLHDLWGEDGVPAGGLDRAKWLDRLSRRLARGEQTVRARICREQLTRLRALARRATELEREIGRLVSAHAPELLQLPGCGALTAAKLVAETAGAQRFATDARFARHAGIAPIPASSGRNQRVRLHRGGNRQLNCAIHRIAVTQGRVHPPAIDYLARKQAEGKSRIEALRCLKRHLARTIWRTMTTNTNAPANKLALT

SEQ ID NO: 248608 - protein, 391 aa, unidentified
MEHPMKRNDDLSRSLVAFDQASTLVSVVELGFRSWLVAGLVPGLSRQPLKKLSADAQALLTLLRRWQGEATKMGSTVNRIVVAFEAGRDGFWLARWLRTRGIEAYVIHPTSIPVSREHRRAKTDRLDAGLLMRALLGWLRGEPKHCSMAAIPTIAEEDARRPNREHQMLVQERTAVVNRMKATLIRFGIRNFNVKLRKAGDRLAALRGPENEPPPPNTVAELRRDMARLHLIREQIKAIEEARLEQLKQAPRTGTHPMLLMLAQIMGIGVETADMLVHEVLSRKLRDQRAVARYAGLTGAPDESGTKRREKGLARAGNARVRRGMIQLAWRWLMHQKNSELAQWYETRTMAAKPGQRKTMIVALARKLLIALWRYATTGVVPTGVVLHPAT

SEQ ID NO: 248609 - protein, 352 aa, unidentified
MSKTSKTQQIAFVGIDLAKRSFHVYAADEAGHQVLSKKLTRARLSGFIAQLPACTIAMEACGSAHHWARTFRAYGHEVRLIAPQFVKPFVKSNKNDAADAEAICAALQRPNMRFVAIKSLEQQDIQAIHRLRSLVVGQRTALINQTRGLLLEFGIEVAQGRAALQRRLPEILEQAENGLSERFRAELHRLYEELQHLNQRVAHYAQQIDQIAQDNAQAQALMQLPGIGAKGATALLAAVGEDPGLLKNGRVMAAWLGLVPRQHSTGGKERLLGISKRGDVYLRQLLIHGARAVLRVAERKEDPLSRWASALKARRHPNIAAVALANKLARIAYAILTTGHPYRPQLAMAAAG

SEQ ID NO: 248610 - protein, 432 aa, unidentified
MPHIATRMGLPRFDASASAPEKEFDMITVGIDIGKESHAVAAVTATGEILMQPRIYAQTTEGFDSLLAQLERLGKAADIRIGMEATGRYWLPLRHALAENGYRVESVNPLITSAEISKDVRGRKTDKADALAIAAALLRNRHNPAPAEDAATDALKSLTRHRTFLVRQKSNVKRCVHAALDVTFPEARATIGPLFSATALAILEAFPSARLLSGANLKTLAAIASKASRGRLTADYARAVRDAARKSVSAGIVNEGDEAALVSLIEQLRFSEGQIEKTEEKIRGMPAPRTADLLASVKGLGTLLPRVIASEIGDMERFRNPPSGKPPRDMDKRILAFAGCEPRLRESGKWKGRTKISKRGSPALRTALWQASAMCRLHNPLFASVYERQTARGKPHNVALFYVARKLVEVLCGMYKTGMPFSLQTAGGATCQ

SEQ ID NO: 248611 - protein, 375 aa, unidentified
MKIFCGIDWASDHHDIALVDTEGTLVARARISDDATGLQQLLDLLAEHGDTPETRIPAAIETTRGLLVACLRATGRPVYAINPMAASRYRERHTIARKKSDHLDAMVLANILRTDAAVHRTMPADTELAQAIAVLARAQQDAVWDRTQAANKLRSHLREYFPGYLAAVQPILGGLCSPVARAQLAAAPTPARAARLTRTQLQAVLKKAGRQRGIEAEVTRLHSALRAPQMRQLPLVEDAMGHQALTLMRKLDAACTSADELAEASVKAFEAHPDAEIITSFPGLGSLTGARVLAEIGDDRSRFADARALKSYAGAAPVTRASGKSISVKARRIKNQRLAAAGYVWAFASLTGLNGRQSPLRPQTHPRRTPHLSPA

SEQ ID NO: 248612 - protein, 348 aa, unidentified
MRFYNRQHRHYCGIDLHVKTMYVCILDAAGQVLVHRNVKSTPEAFLEIVAPYREDLVVAAECMFTWYWLADVCASEGIHFVLGHALAMKAIHGGKAKNDKLDSHKIASLLRGGLVPQAYVYPAAMRSTRDLLRRRLHLVRKRGQLLAHIQNTRAQYNLPPFERRIAYPANREGVAEYFEDPSVRKSIEVDLALIAHYDTLINDLELTIVREAKRHDGDAFHRLRSVPGIGKILALTILYEIQDITRFNRVQEFASYARLVKCAHQSAGKTLGTGGAKMGNVHLKWAFSEAAVLFLCHNAAGKKLLAQIQKKHGKGKALSILAHKIGRAVYHMLARGTVFSMEKFLHAS

SEQ ID NO: 248613 - protein, 341 aa, unidentified
MAEVCTIGLDLAKHVFQAHGADASGAVLFRKKLRRAQVLSFFATQPPGTVAMEACGSAHHWAREIGKLGHAVRLIPPAYVKPFVKRQKNDAADAQAICEAAQRPTMRFVAPKSEQAQAAALVFRARDLLVRQRTQIINALRGHLAEFGIVVAQGPAHVSSLVRAVEDPAEPVPEIARAILSVLIEMLHTLDGRISLLDREIAQRAKEDVTARRLMTIPGVGPITATALTALAPPAETFKRGRDFAAWIGLTPLQHSTGGKQKLGATSKMGERTLRRLLIIGASAVLRWAAHHGAPAGSWLSRMLARKPPMLVRVALANKMARMVWALMAKGGVYRAPAVSV

SEQ ID NO: 248614 - protein, 402 aa, unidentified
MNAVGIDVSKGKSMVAIMRPFGEVVATPFEIKHTTSDINSLVKFINSVEGESRIVMEHTGRYYEVLAHQLSQANIFVSAINPKLIKDFDNDSLRKVKSDRVDAIKIARYALDKWQNLKQYSVMNELRNQLKTMNRQFGFYMKHKTAMKNNLIGILDQTYPGVNTYFDSPARSNGSQKWVDFASTYWHVDCVRKMSRDAFINHYQNWCKRKKYNFSQSKAEEIYGKAKELVPVLPKDEITKRIIKRAVDQLNSASTTVGSLRTLMNETACRRPEYPIVMAMKGVGPSLVPQLMAKIGDVSRFTHKGALTAFAGVDPGVNESGTYEQKSVPTSKRGSSDLRKTLFQVMDALIKTKPQDDPVYQFLDKKRAQGKPYYVYMTAGANKFLRIYYGRVKEYLSSLSES

SEQ ID NO: 248615 - protein, 340 aa, unidentified
MDATTYGLDIAKRVFQMYWVDVQSGEFINRRFGREDLIAFLAQRPPGRVALEACGSAHWWARKIEGLGHQVVLLHAKFIRPFVQTNKTDAADARAIWTAAHQPGMRTVAAKSEDQQAMLSVHRMRSQLVKFRTMQTNQLRGLLYEYGVTFRAGRLAGLAEIRARMAELETSLPGLLQSGLQDQLKRIDALQKDIDALEDRIGSWNKQEEACRAVAEVPGIGRITATALVATMGQARAFKSGREFAAFLGLVPRQSGTGGRIRLGSISKRGDPYLRTLLVHGARSVMVNAKEPSAWQTQIKSRRPGNVATVALANKMARTAWAILAHGRAYQRDYVSVRPA

SEQ ID NO: 248616 - protein, 368 aa, unidentified
MNEVTTYVGMDAHKKDLFIAMLVGATPTPVTWQLANEPQAVRRLVRKLEREAPGPVRVFYEAGPCGYALQRQLTTPRVQCDVIAPALVPRKPGDRVKTNRRDARKLAELGRAGLLTAVQPPTPDDEAVRDLARARDDAREDLQRCRHRMGKLLLRRGLHDSGRNWTRVHRRWIDQLTWTHVAERAVVNDYLLAIDQTEARLAELDAKLAEIAARDPYREPVGWLRCFRGIETLTAMLILAELYDVRRFPSAPALMAYLGLVPGEHSSGEKHRRGRITRTGNALVRRLLVEAAWHYQHRPSVGVALTKRRKGQPGRVIAIADKAQQRLCRRFRTLAAEHKPTPKVAVAIARELAGFLWAALQPAPVSVT

SEQ ID NO: 248617 - protein, 383 aa, unidentified
MAKSQELQPSFHATTELITIGIDLGDRFSHCCVLGPDGKILTEGRLRSTPETMARHFQDLPPARIAIEVGTHSRWLSQLLMEWGHNVIVANPRNLRMIADNIRKSDQVDAHMLARLARVDPQLLSPIVHRKQESYPDIIQLKARDLLVKNRTRLMNAVRGVLKSAGVRLSPCGTSYFPSKAAMCVPAELKMSLMPLLETISHLNKQIYSLDKAIESTAQNRYPETNRLRQISGVGPITALQYVLTIGDPSRFTHSRDVPAYLGLTPRRHQSGSVEQQLRISKAGNKQLRSLLVQCAQYLLGRFGPDSDLKRWGTRMFERGGKNSKKRAIVAVARKLAVLLHRLWVTGDTYHPLYNVAADPPRRDASNAVRGAEVPQKGPMYLG

SEQ ID NO: 248618 - protein, 351 aa, unidentified
MERYIALDVHAESTTCAVVSSTGKRLKQVVVETSGSALISFLSAMPGRKHLVLEEGTQSAWLHEILSRQVDELVVAIPAKTAGNKNDSEDAWRLAEQLRTGTLLKKVFKSPELASLRAAVRAYRLLTIDVVRIKNRLKAIFRARGVSLSSEAYDSESRSACLAALPQPSRYQAAMLGQQLDATLPVLEEAEAHLRAEAQKVPSVARVATVPGFGLIRAATLVAATITPARFRTTRQFWSYAGLAIVTRSSSDWIQSKSGWVRGNVNQTRGLNRNRHPWLKDVLKGAALNVTTVMKDHPLRSDYERMLQSGTKPTLARLTIARRLAAAALACWRKQEEYDPSKHKSHIVAVP

SEQ ID NO: 248619 - protein, 354 aa, unidentified
MGLKHQKEKRSMDHFAGLDVSVKETSLCIVDDAGRIVREVRVASEPEALLAVLKNPTWHITRIGLEAGPLSQWLFNALAEAGLPVICVETRHMRAVLKAQINKTDRNDARGIAQMMRAGLYRPVHVKTLRSQKLRMLLTHRKLLQSKAIAIENDLRATLRNFGLKVGIVGTAKFEARIKELVDSLPDLALLVEPLLVVRRALREQIGVLHRRLLAIVREDDVCRRLMTVPGVGPVVALTYRATVDAPSRFRNAKAVGAAFGLTPSQHQSGDSNRTGGISRCGDEMMRAMLYEAAQILLVRSTRWSWLKAWAMQIARRRGMKKAIVALARRLAVIMHRIWVDGTEFRWTREAVAA

SEQ ID NO: 248620 - protein, 314 aa, unidentified
MSTPISVGLDVAKAHIDVAVRPTGDGYRVPHDEAGLTTLVTALRALAPTLVVLEATGGYETDVATALALAGIAVAIVNPRQVRDFAKALGRLAKTDAIDARVLALFAERVRPDARPLPDAAQQALVAVVARRRQLVDMLTAERNRLPLAHGVVRRDLREHIHWLERRLRDSDRDLAAMIRDSPLWRAQENLLRSVPGIGPVTAAVLIADLPELGRLSRRQLAALVGVAPLNRDSGTRRGPRTTWGGRATVRAPLYMATLVATRCNPVLRTFYRRLRLAGKPPRVALVAAMRKLLTILNAIARTQRPWQPVTLDL

SEQ ID NO: 248621 - protein, 352 aa, unidentified
MTDLAELVDHVIGVDPDRDRVTAAVVSVTTQGELAAATFPATRRGYGQALRWAKTLTVDERRAWAIESTGSYGAGLAATLAEKGEFVIEFDHPSTRASKDGAKSDSLDAVRAARETLGRKTWATPRSRGLREGLRTLIVARDSAKLARVAAINVLKALIVTAPVDLREDLRGLTFGQLVDRCIRLRPDTATEPEHAATKLSLRSTATRIKQLTTECRELELAMLPIVREICPALLNEPGIGTLVAAQILISWSHAGRCRNEAAFARLGGVAPLEATSGQNQTRHRLSRGGDRQLNRALHTAILARVKVHPETRDYLARRIAQGKTKREAMRCLKRYYARHIFRLLESTPTPT

SEQ ID NO: 248622 - protein, 319 aa, unidentified
MFVGIDVAKAELVVGVRPTGTGWTAVNDDQGVRDLVARMQALGPTLIVLEATGGYELLCVAALAAAGLPVVVVNPRQVRDFARATGQLAKTDRIDAAILARFADTVRPEIRTLPTVEAQALDALLTRRRQLLEMLGAERNRLGQVFGSGKKPVKKSLTAHITFLERAVARADAELDAAIAQSAIWKAQDDLLRSVPGVGPILSRTLLADLPELGRLSRREIAKLAGVAPLSRDSGTMRGRRFVQGGRAPVRAVLYMAAMVAARRNPVIKAFYERLVAAGKPKKLALVACMRKLLTVLNVMVRTTTPWNPEFATMSVATA

SEQ ID NO: 248623 - protein, 343 aa, unidentified
MNVTTIGFDIAKGVIQVHGVDAVGAVTLRKRMSRAGALKFFGELTPCLVGMEACGGSHFWARELAAFGHTVRLISPIYVKPYVKRSKTDAADAAAICEAVSRPHMRFVPIKSREDQALAQAYKTRGLLVAQRTALVNALRAHLTEFGIVAPLGPVGAARLIGLVRTDAEPLPELARQTLLELADMIEATQARIAAFDARLRELAATDEASRRLMKVPGIGPVAAGTLRALAGDVTRFRTGRDFAAWLGLTPRQNSSGDKVRIGAISKAGNRELRTLLVMGQLAVLRYALANPAKASPWLAGMIKRRPPLVVAVAMAAKTARVIWAMLARGESYRPLRASSAAA

SEQ ID NO: 248624 - protein, 411 aa, unidentified
MDAVRRCCGGLDVHQETVVACVLNGPLENKPQCVIRTFGTTTRELMELQDWLQEQGCKEVVMESTGVYWKPVWNILEGTCELVLVNARSVKSRSGKKTDKKDAERLAEMHRCGLIEPSMVPEQNIRDLRDLTRYRTKLVQAATSEKNRIHKILQDANIKLTTYMSDLFGVSGRALLQKIMAGEVLEEAELRSLVKTQLKKKVPQLLDALNGKLRRHHREMISEHWEHLMYLEEKIGRLEEKIEWRIGAYEEMIEQIDSIPGIERTSAITILAEMGPHVAEMFPTDAQFASWAGVSPGNNESAGKRKKTKALQGNKHLKRALCQAGWANYRSNNRIGRFFRRIRKRRGEQKASVATGHLMARILHAMMREKTLYKEIDVPLGEGTSEQRKLESYLTYIRQMGYKVSLQPVSE

SEQ ID NO: 248625 - protein, 424 aa, unidentified
MDGELFVGVDWGSEKHQVCVIDAQRKKLLEWAVEHSGKGLSSLAEKLLELAAGESGRLSVAIEVPRGPVVDALLERRIAVFAVNPKQLDRFRDRHTVAGAKDDRRDALVLADSLRTDRSAFRQVQLGDATLVQLRELCRLQDELKAERITLGNRLREQLLRYFPQILELDNIYKRPWIWALLTKASTPQEAAQLSLAKLRSLLSAHGIRRLTPEQVRETLKAEPLHVAPGVVQACQRSVASLLPRLRLAHEQKQQVEREIGDLLKQCSTPDAEGKVEHRDASLLQSLPGLGKLVCATMLAEAGEALTRRDYMNLRGLCGVAPVTRRSGKQLAVSMRHSCNKRLRTAVHQWASRAASCDGYWKARYAALRAKGHAHARAVRGLADRLLAVLLAVLKNGQPYDPARKRAIPGASASQPGPLHLALA

SEQ ID NO: 248626 - protein, 475 aa, unidentified
MNSTVLPASVQPNIDCNYIGLDVHSDNVVVCVRRNILKVGGELQGKTIKLKKVSICDSQDSLTQLLSEYADGQQHVMTAESTFNWYWLADIAEEHGWNFRLADPCTVSQANIKAANDETDAQYLAERLRMGSLKSTTVLPRALRGARDLTRHRMRVMQEVSEKKIRLSNLYHNHCAHPLHGKQLQDLQFAYEENGIDAVLASCISGNGSELIIADLLAGLHDAQMRLERIEAQVYERLDQIDTYREGRLLLKNSMKGCGDVLSAVIITEIGDISRFRTMGEFVSYCRLAPASKLSNGKSKGQGNAKNGNAYLSWALTELATLMARYNKSIQHYLERKVKKTGLRVIGIRALAAKLARCVYQVLRKKEAFDLLLAFGGSHPQEPSASRAKTEESSQRKTATKSSETKVTGMTRTVVTDKKKIPGKKPALAVTQTQRLKSAVGQKTASVASRLKAPCALTTTKPAYADRGCVKSRRE

SEQ ID NO: 248627 - protein, 349 aa, unidentified
MPKSNTAVVTIGIDPGKNTLHLIGLDARGGIVLREKVARARIVSRLANVPPCLIGIEAGMGTHYVTRELLALGHDVRQVPPVYAKPFRQTHKNDFRDAHAIAEAVQRPTTRCVPPKTDEQLDLQALHRVRYRLVGQRTAIINQIRCFLLEHGLTVRQRLHWLRHALPDILAQRTDVLSPRMVRILEDLAQDWRRLDDRIETVSGEIEALSKTTEPCRHLMTIPGIGPIISSAVVAAIGNGTAFTRGRDFAAWLGLVPKQISTGDRTILGRITKRGNRYLRMLFMQAARVVLLRPRNWMKNGYGPWLAAAAQRLHHNVLATALANKLARIAWSVLAQHRVYEARLSPAAV

SEQ ID NO: 248628 - protein, 445 aa, unidentified
MSNAVAAAPSEPEWAAFAAIDWADQKNFWRLLPAGSRQSEAGQLDSTPEAVEVWAANLQQRFGGRPIAVILEQTRGPLVYMLTKYPHLVLFPVHPTTAARYRETFAPSGAKSDPSDTDSLLDLLLRHRERLRPLRPDTVETRLLHFLVEERRQTVDEKTRANLRLTDCLKLYFPQVLRWFDDVTSSLVGDLLERWPTLEQLQRVHPGTLRRFFQEHNCRGEEKNAERMAAIQQATSATQDQAVREACVLIAHSLVAMLATLRAQIDVFDKRIAELVANHPDGALFRSLPGAGDALVPRMIVAFGTQRDRYQSAYEMQCYSGIAPVTEASGNSQWVHFRFICPKFLRQTFHEFAGCSIQRSEWARAYYDHLHNDKNKSHQVAVRSLAFKWLRIIYRCWKDGKPYDEAIYMQSLRRRGSLLAGVLGTPTGVGWKSVAGFQKLSENNA

SEQ ID NO: 248629 - protein, 339 aa, unidentified
MSKLFKIFVGIDISKSWFDATLISKKTADKAVHHQFAQTPSGYDQLLQWLQDYNTAINDEILFCLEYTGIYNTGLVNFLVHHSAAIWVEMPLRIKRAGGLERGSDDRSASFKIACYALRYHDQAKLWKPADTSIEKIKHLITQRERIITSLKHLKVPAQELIDCGCIKEGKMVMKLQQPVIKALQKTKEEIEALINKTIKQDEQLSHTIDLIQSVNGIGQVTATALLVYTKGFTAFANAKELACYCGVVPFNKTSGSSVRYKPSVSPFANMKLKKLLHLCAMSAMQNDKEMKAYFERKVLEGKNKMSVINAVRNKLVHRVFAVVRDNRMYEDNYIRTCA

SEQ ID NO: 248630 - protein, 365 aa, unidentified
MESMYYVGLDVHKKSISYCVKSGDGCIHAEGSVPATRMDLDEWIKTLPKPWTAAMEATIFTGWIYDHLLPHARALKVAHPLMLRAIAAAKKKNDRIDANKIADCLRCDFLPECYMASTEIRERRRTLRYRNLLVRQVVQMKNKIAVLLMEAGVSYNKQKLHKAGYFRELLATNQDIDEGLRSLLGLCREMLVRLGKTESALVRSLERDPVLRQRIERLMTIPSVGPITALTWALEVGDVGRFSSIKKAISYCGLCGAEKRSADTIQRTPLSKQRNRHLQTILIEAAKLAPRNSPALAMIYDREKQKENANRATLAVARKIVAYLVAVDRRQKDFLVIENEARTAAGKKEDFFSAQPARSRGNATG

SEQ ID NO: 248631 - protein, 312 aa, unidentified
MPDKLFLGIDVAKDWIDVAIHHGPTQRIANTGPAIEDWIDTLDCSQIGLIAFEPTGGYERTLRRCLCQAGLAFARVHPNEVTAFRTRRGVKAKTDRLDATLLAAFAALELATRGLAPLVETDDQLREMVARRRQLVDTLHAERCRAAMAQVPVVKKTLARVIKVLETALDGLEAEIEAHIDAHAELRLTARRMRTVCGVGPITVQTMFGELPELGRLSGKEIAALVGLAPRNHESGRQRSRATTGHGRPGVRQVLFNAARCAIRWNPVMRAFYQRLTTVHRRPGKVALTAVMRKILVTLNAIVRDQQDWKHA

SEQ ID NO: 248632 - protein, 342 aa, unidentified
MSSQVFVGIDVAKAQWDMALRPAGERWAVTNDDAGIAALGTRLPEIAPPLMVLAATGSYQRAVAVVHPRQARDVAQATGPLAKTDALDARALAHVAEAVRPPPRPLPDAQTAALRALLARRRPLVAMRTAEPHRLGNAPPRRQTDIQAHLTGLHTRLAALDDDLATTRRTSPVWRAREELLRRVPGMGPVWTRTRRLDLPEWGTLSRQQLAALVGVAPVNRDRGPLRGSRTIWGGRACGRATLYMSTRVAVRSHPVLKAFYERLRAAGQAAKVALTACRRTLLTMLNAIVKPHTPWQPQEGPRVSQVPLTNKTVAPLLPRSGFRQQLSASVRGHMADTPPKE

SEQ ID NO: 248633 - protein, 367 aa, unidentified
MTEERYYIGMDVHKDSVQMAVFEHAGEEPIYERKLNNDPALLVKEAKRFSQKGETEAAYEAGCLGYVIQRAFEKAGIACYVLPANKLAKKRDDRIKTDKRDARLIGRELRSKSIRPISVPNDADEATRDLLRCREDASEDVRRAKQRLSKFLLRHGHSYAAQQGSHWTAKYWEWMDKIQFSQEYERAVFEEYRSQILAMEARLKRLDRQVEEAAESPQYKAAVSKLRAFKGIDYIIALALVCEIGDFQRFGSAKAFMSYLGFVPSESSSGPKRRQGGITKAGNGHLRRLLIEGAWHYTRNARSGKRLEKRRQNSPPGVIAIADKALQRLHKKFVRLLMKGKHKNMAVTAVARELAGFVWAVQVSPAA

SEQ ID NO: 248634 - protein, 371 aa, unidentified
MHDTIFVGMDVHKATISIAVADGARGGEVRQLGNFLNRADHVGKLVERLSKTDGRRLRFCYEAGPCGYGLHRQITDLGHECVVVAPSLIPMKAGDRIKTDRRDAVMLAKLHRAGELTAVWVPDAAHEAMRDLIRARATAVRVLGKARQHLQGFLLRQGRVYAGKKGWTLPYRRWLTTLRFDHPAQQVVLQDYIHSVHDAEERIARLMKQIEDLVPTWSMAPVVEAFQAMRGVAFVAAVTVVAEVGDFTRFDNPRQVMAYLGLTPSEHSSGTAIRRGGITKAGNALARRVLIEGAWTYRMQARVSRKLHDRLEGLPQIVRDIAWKAQVRLCGRYRRLAATGKPKVVVTTAIAREMVGFLWAIARQAQVGSVA

SEQ ID NO: 248635 - protein, 339 aa, unidentified
MKVSTLGIDLAKNVFQLHGVGCNGQTVLKKKLTRDKFLPFLMQLEPCLIGMEACASSHHFARVLRQYGHEVKLIPPQYVKPYVKTNKTDAADAEAICEAVARPNMRFVQIKTAEQQAILVLHTERNILIRERTACANSMRAILAEFGIIMPRTLSQLYKKIPEILEEYDNELSPFVRCSVARQLEHLQSVEDQITLIEQELSRWAKTQPACQRVMKVPGVGLMTATYLVASVGNGQQFHSAKQFAAWLGLVPREFSSGGKQRLGRISKRGDRYFRYLLVHGARAVAAVIERHKDNMPWLYRLLNKKAYNVAVVAQANKTARILWSMLVQHTEYRTLSAA

SEQ ID NO: 248636 - protein, 392 aa, unidentified
MIYVGIDVASQKHDCFLLKDTGEVFSKTSFTIKNDFEGYKKLHNSILQFVESTKDSNVRIGLESTGHYSKNILLYLIKQGYQTTLINPILTNMDRKASTVRKTKTDKIDAEAICKFLDKNRFDFKPYTLLSYHIDALKSLTRQRFSLVKQMTQQKLIFQRLVNVIFPELLSHFSNDYGESVLNILYSYPTPKKLAKAHKESITKLLHSRCKITSSEILELAKNSIGQSEEYLGFKLKHTIDMILFYQSQIEIYNKQIEIELNETEYGKIITSIPGVGIITGAMIISEIGDINNFTTSDQLLAYAGLDPSVYESGKFESSHNKPSKRGSKYLRWAIHQASSVIWQHDNTFKDYYLKKIKESKHHYVAIGHIDKKLIRVIFSLLKNKSMFIPQK

SEQ ID NO: 248637 - protein, 367 aa, unidentified
MKKHTAMAVGLTLNRKCERLTIGLDLGDRSSCYCMLDEAGDVLLEQKLSTTPKAMRDVFGALPKCRIAVETGTHSPWISRLLTELGHETIVAHARNVRLIGKSKRKDDRLDAFTLARLVRIDPQLLCPVKHRSAEAQADLIVIRARAALVRNRTTLVNAARGLTKSYGERLGRGNARSMKPKAAQDLSPELKNALGPLMREIESVSERIRDYDELLESMSQNKYPEAERLKQIKGVGTLIALTYMLTLEDPNRFRKSRDAACYVGLQPGRRNSGQSEPQMHISKEGDPYLRALLVQAAHHILGPWGVDSDLRRWGMKLAEHGGKRGKKRATIAVARKLAVLLHRLWVSGDVYVPLRRIGHAAVPAVA

SEQ ID NO: 248638 - protein, 388 aa, unidentified
MDMIDAVSNAPIQTTISAIFFSMELSRSQWLITSLSPGGGERMSKHVMPAGDVGGLLEQLDAIRSKAEAKTGRVFPFVSIQEAGLDGFWIHRVLDREGIESHVVDPASIATSRRRRRAKTDRLDSETLLRTLLAFKRGDPRVCSMVVVPTPEEEDRRRNSRERKALVHERVSLVNRLKGLLFSQGVTGYESLKSDRWERFAELVTGDGRPIGEHLRAAVERILDRIELILAQLKTIERVRDSLVAQQPADDQSPACPAQLMTLRGVGPDFAEVLWSEGLYRHFDNRRQLASYAGLSPSPWQSGSINSEQGISKAGNPRLRSIMVQLSWFWLLHQPDSALSRWFHDRVKLDGGRRKKLTIVALARKLLIALWKFARHGVVIEGAVFKSA

SEQ ID NO: 248639 - protein, 453 aa, unidentified
MELDIINPNAAGIDVGSRSHFVAVGQSLEDVKEFGVYAEDLTSLCLWLVSYGIKSVAMESTGDYWQNLYTELMKHGIDVILCNGKFTKHAKGKKTDVKDCQYIQKLHALGLLTSSFLPDETTEKLRTYCRQRNNLISSASGASRRMQKFLKFLNFRLDVVVKDVCGLTGLAIIEDICKGNLDPESLSNHRHYNCHKSKEEIAKALHGNNREDFLFGLKQELQAYQFFQKQIEACDKEIAKFVNDELKKSPEKSKLKTTDKPYKRQNKNAVSINNFNQVSFKYFGGVDLMAIEGLSHATVLAIMSEIGPDGFKKFETSKHFVSWSRLAPNNKISGGKVLSSRIPKGSNRLKIALRQAANAIGNLKDTHLSDFFKRVAYRKGRQAAVSATARKLGVIIWTMATKKVPYSPPTEYLFLDQKRKMGIAKRIQKQMAKFDIKPEEIGIGNSLIPNYNF

SEQ ID NO: 248640 - protein, 464 aa, unidentified
MTAGKQLWRNRKEKKEWARRLQSEDPGLEVVHPHAAGIDVGNSTHYVAVRPDRDPEPVRRFECFTADLHRLADWLQSCGVKTVAMQSTGVYWIPLYEILEEHGLEVYLVNARHTKNLPGRKSDVQESQWLLKLHTYGLLNNSFQPVSEIRVLRTYWRQRGEHVRGAATCIQRMQKALTQMNVQLANVISDISGLTGQAIIRAMVAGERNPPKLAMLSDPRVHASHEEIAKSLEGNWRPELLFVLHQEVDMYDTYQKRIAECDQRLQKHLASFTRPLPIQPPTQKLKTKKPAAKNAPRFDLSSELQRVTGVDLTRIDGIDVMVAQTLLSEVGLDMSRWITESHFASWLGLCPDNRISGDKVLSRGTRRVVNRAATALRQAANTLMRSRSYLGAQYRRLRTKLGAPKAITAMAHRLARLVYRMLKYGQTYVDKGTEYYEERFRQQQIQLLRKRAAKLGLQVAEIHA

SEQ ID NO: 248641 - protein, 307 aa, unidentified
MCCVLMVVIAPKKFANTTKGHDELVSWLKGHKIDHAHICIEATGTYMEPVAECLYDAGYIVSVINPALGKAFAQSEGLRNKTDTVDARMLAEFCRQKRPAAREAPHPLERALRATVVRHRALTDMHTQELNRTETAREVQRPSIDAHLLWLEAELKRLEKQIKDLTDDDPDMKHRRKLLESIPGIGEKTSAVLLAYIGLKDRFAHARQFAAFAGLTPRRYESGSSVRGASRMSKAGHVSLRRALYMPAMVATSKTEWGRAFRDRLAANGKKGKVILGAMMRKLAQVAYGVLKSGVPFDASRHNPVAA

SEQ ID NO: 248642 - protein, 411 aa, unidentified
MRVHHNVCCGIDVHKKSVTACLMWGPADKEPQFEIRRFGTMTRDLQKLAEWLKQAGCEAATMESTGSYWKPVWNVLEGQIPKLILANAQHVRALPGEKTDRKDGKRLAELTRHGQVRPSYVPPRAILELRDLTRYRSKLLSAGSSERNRIQKVLEDANIKLGSVLSDLFGVSGQKMLQALIKQDTVDTAKVAQLAHWSLKPKMEAIQQALDGKLRDHHRFLIDASLQHMRFIEEQLMRLDEEIQRRLQPYQEQYALLQTIPGIKETGAARILSEIGPDMSPFPDGDHLSSWGGACPGNNESAGKKFQSKIRKGNPHLLAALTECAWAATKKKDCHFRNKYYRLKSRRGSQRAIIAIDHAMLKCIYVVLSQRQPYQEPKPTSLTEAQKERKASSLCRQLRALGYDVKIQKAA

SEQ ID NO: 248643 - protein, 343 aa, unidentified
MPAITTIGLDIAKSVFQVHGVDAEGNVVFRRQLKRRYVLPFFQKLPPCLVGIEACATSHYWSRELQALGHKVRLMPPAYVKPYVKRHKNDATDAEAICEAVGRPNMRFVETKTPEQQGCLTLHRTRHLFIRQQTSVINAIRAHLAEFGIVAPVGRRGVDQLLAVVADTRDKRMPEVTRSCVAALSAQLQMLKAQILEFDRMIRAWHRSSETSKRLDAIPGVGPALATALVASVADPKAFRSGRDFSAWIGLVPKQSSSGGKDKLGSISKQGDRYLRSLFTAGALAVIRYAKIHGTRHRPWLTALLARRPTKVAAIALANKLARMAWAMMARGEQYREPAALAA

SEQ ID NO: 248644 - protein, 348 aa, unidentified
MSEKPISAVAVIGIDIGKNSFHVVGHDDRGAIVLRQKWSRGQVEARLANMPSCLIGMEACVGAHHLSRKLHGFGHDARLMPAKYVRLYSKGQKNDFRDAEAIAEAVQRPTMKFVATKTADQLDLQALHRVRERLVSQRTGIINQIRAFLLERGIAVRQGQRFLRAGLPSILAAPSDVLSPRMVRVIEDLTGDWRRLDERIEGLSGEIGAVARQDAGCERLMSVPGVGPIISSAMVAAIGAGDAFSKGRDFAAWLGLVPRQMSTGDRTILGKISKRGNRYLRVLFVQAAWVVLIKPKSWERHGLKPWIEAAKKRLHHNVLAIALANKLARIAWSVLANGRIFEARLQAA

SEQ ID NO: 248645 - protein, 342 aa, unidentified
MEYYAGIDVSLECSSVCVMDGSGKFVREAKVASEPEVLIGWFGSLGLGLERIGLEAGPLSQWLYAAMREAGLAVELLETRHVRDAFRAMPVKSDRNDARGIAQLMRLGWFRPVHCKSMDAQEVRAVLTARKLVQTKLLDVENSLRGILRGFGLKVGKTTPRSFAGRIQELVDGQPNLEAIGEALLSVRAVLQREFNAFERRVRAMARLNARTRLLMSTPAVGPIVALTYAAAIDDPARFKSSKQAGSHFGLTPKKYQSGETDRSGRISKIGDASVREALYQAAHVMLTKPVKDCSELKGWAMRIARRAGMNKAKVALARKLAVILHRMLANGTPFNPAAAAA

SEQ ID NO: 248646 - protein, 390 aa, unidentified
MRLMGRSKEEDQPMSKIKIYVGMDVHKDSVMVAVLPEGAREPTVVKRLSNEDRRLRRFLERIGRDGEIQACYEASGAGYVLQRRMEAWGYGCEVVAPSLIPTRPGEQRKHDTRDAVNLARLYRAGELVTIRIPTEAEERVRDLVRCRETFQREILSSRHYILKFLRRRGLVFRQGQNWTHKHFGWLRGLLVDEVLEEEDRIVFSEYMALLEYKLSRRDELDRRIEAFALAEPYREAVGRLMCFKGISTHSAMVLATELVDWRRFESPRQLMAYLGLVPTEHSSGESRRQGSITKAGNGHCRHVLVQAAWSYRTPPRRGEALRRRQEGQPPAVVAHSWKAQHRLHKVYGRLAYRKNSQTAVVAVARELVGFLWAVMQDLESADTAVPKRAA

SEQ ID NO: 248647 - protein, 400 aa, unidentified
MLYIGIDIGKRNHEATILDESGKELCESIKFPNSIIGAEKLLSKLLTLKDSMFILEATGHYWLNLYCYLASEGLNVQVINPIQSDSLRNLYIRRTKTDKKDSFIIADIARISRMPNTRLADENILKLQTITRLRLGLIEQVASLKARILGVLDRIFPEYESIFSNVFIKTSRELLKNATSPEEILEFDLSELSESLNKVSRGRFGTIKARELQSKAANSFGITLGLDAFRLEIKLLLSQIEFLEDQIKVLDSSIKELMQEFKTCFITTIPGIGEIFAASILAEIGDINRFKSAKKLVAYAGLDATVNQSGQFTGTRTKISKRGSPYLRRALWSAANIARRFNPILQKFYQKKLNEGKHPQVALGAVARKLTHLVYYILKEQKPFDPNYEWSSAKIYVDSL

SEQ ID NO: 248648 - protein, 387 aa, unidentified
MQDVACRQEQAAIRVDLGAIFVSMELSRSSWLITSLSPGGGQKMSKHAVRGGDMAGLLQQFGALKEKTWARTGKRFPIIVIQEAGLDGFWIHRVLQSEGIESHVVDAASILVSRRRRRAKTDKIDGETLVRTLLAYKRGEPRVCSMLKPPTPEDEDRRRLSRERKTLVAERVEHVNRIKGLLFAQGVTHYEPVRRDRRRRLDELQTGDSRPLPPNLKAQILRELDRLELTLKQLEELEVTRDELLDQATANMFTPVARLLQLKGVGPEFAGILWSEGLYRQFDNRRQLAAYAGLAPTPWQSGAVDHEQGVSKAGNHRLRTMMVQMSWLWLRHQPDSALSLWFKYRVERNGGRLRKPLIVALARKLLVALWQYATAGVIIEGAVMKAL

SEQ ID NO: 248649 - protein, 409 aa, unidentified
MDQLIERGAALDVHRKTIAVCVRVPDERGDRGQHVRTFGTTAAELVTLRDWLEAHRVTHVALESTGVYWKPVYYVLEEAMTCVLVNAAHVKQVPGRKTDVQDCVWLAQLLEHGLLRGSFVPPPPLRELRDLTRYRKVLIQERTREANRLHKVLEDAGIKLATVATDILGVSGRAMLQALVSGTTDPDLLADLARGTLRKKLPALRHALAGRFRAHPAFLVSQHVAHLDYLDEAVGALSARIEEALAPFAAELARLDTIPGVAQRTAEVLVAEIGVDMRQFPTAQHLASWAGLCPGQNESAGKHKSGRTRAGNKWLRVALIEAASMACRTRNTAFAARYHRIARHRGHKKAVVAVAHAMLVTAYHLLARQVDYHEPGADYFDRRHAERTTRRAIRTLERQGYRVTLESAA

SEQ ID NO: 248650 - protein, 343 aa, unidentified
MENTIVGVDLAKNVIQVCVFTNKKVLSNTEMTPSEFIGFLANSQALTIVFEACGTSNYWKRTANDLGHDARLISAKLVSAVRQNQKTDKNDALAIVQATLLPEVTFISGKSIEQQQLQSIMRLRELAVKQKTAAGNQIKSLLLELNIKVSNRGGGMKSAIERTLEDAENGLTAEFRSALDIAWQQYILILKSINEYDNCLEKSIESHSECKKLLKLEGVGTLNAINLYIALGCAELGVFEKGKDASACIGLTPIQYSSGGKTKLGSIGKYVKNSLLRSQLITGAMSAVNHASNREPITTKDRWIQSMVERRGKKCTAVALANKTVRTAYAMLTQNTEYKAELI

SEQ ID NO: 248651 - protein, 394 aa, unidentified
MKLVGIDVGKNSHHFCVMDKETGEFNVTPSSFPNNKEGFDFLINSLKPYSKKSILLGMEDTGHYHVALLKFLLSNGYTVALINPKTTDLTRKMEGGITKNDKLDTITICDVLDTPERKKQYRITKVDRFDLYEQRQLTRHHHNLKEELNVYCNRLQKSIDLVFPEFNTLFSSKYGIVYMNLLKTFGSAEAIASTDIRTIRKFFEIKGKGNRISLTLEKLKECAKNSIGISSGVETIQIKHLVSQITLIKEQIAEIDKKIEEFSITNNSPILSIPGISHFSGTSILAELGDIGNYSKPSQIIKFAGVAPYHYESSQYNAQHTAITKKGSKYLRKTLYQIILPVINNNPVFKKYYLLKISQGKGHRCAQGHCIRKLLRIIYHLLETGQSFDPALLR

SEQ ID NO: 248652 - protein, 358 aa, unidentified
MNNITRVGVDLAKNVIQVCAVDAAGKVVLNKPLPRDRFLTWCAELPKGCLIAMEACSGSHHWARELNKLGLNAKIIAASHVSPYRMEGKGGKNDANDAAAVCEAASRPNMRFVPVKTSNQQGILCVHRLREGFKEERTGCINRIRGLMAEFGIVVSKSPNKLREKLQDLLEDAENGLDWLARLAIQELYTHWSAIDEKIDWCDKRINAHIADDVQAQSAKQLIGVGALTASAAVATVVDFKQFKNGAQFGAWLGLTPKQSSSGGKTKLGRITKRGDTYLRTLLIQGAKAAVMSAHMRQDPISKWLFQLKEKSGWQKAAVAMANKNARILWAVMTKGINFDPAYVSVKPGGSIGAALAV

SEQ ID NO: 248653 - protein, 362 aa, unidentified
MPKSTTIIAFDHHAATTVAAVLLPGQRTPALHPLTSDSPTILRFIERVRRAGPVQCCYEAGPCGFELQRALVAADIACDVIAPALIPRRPGDRVKTDRRDASQLAVLYRAGALTPIHIPTDQEEAARDLLRCREDIRADLLRARHRLSKFLLRHGRRFTATKKAWTKRHAAWLQAQRWPLAALEQTHRAYVRTVDEAVARLHAVDTELRDLLTIEPLRARVERLRCFRGIDDLTALTIAAELGDARRFPSASRVMAFTGLVPSEYSSGSKHARGAITKTGNAHLRRVLVESAWHYRHHPFLGRALRLRQRGAPPAVIHHAWHAQHRLHRRYRRLAARGKPKQHIVTAIARELSGFLWAVLTQ

SEQ ID NO: 248654 - protein, 438 aa, unidentified
MSNKVIFNLDDLFISVGIDVGADFSWMSIAFPNQQFVGKPYKILHNSIDSLTTAVSKIKEAEELYSLESRIFLESTGIYHYPLFCYLRDKGFNCSVINPIITKNSTNINIRKVHNDRFDSKKAALVGLKPDLKVSLMPSDLALNCRNLCREYYDLMDNRSAYVNKLQGELRMAFPQYLGIFSKVTINTSLTLLETYTSPSAFLEADKQEIIDIIKSTARFGLTYAQNKYNAIIQAATDANQFGYIIDSNIKRIRLYISFIRKYDEEINNILESLHELVDANEDADFVKQIHLIETFKGAGFLSAVSIMGEIGDFSAFSKPKQLFAYFGLDPAVKQSGKFEGTKVQMSKRGSAIARRVIHTLTLQSISISRNGEAKNPVLREYYLKKCDSKPKLVAMGAVSHKVCNMIFAILRDNKPFEIITPQEHIKQYNASKCDMAA

SEQ ID NO: 248655 - protein, 343 aa, unidentified
MNSHTTDTHCFAGIDYHKKSLVVALGDTHGKLLGQPERIPTEPETVRRFFRRYPGLHCAIENCRGFDWLVDLLKELGLVVHISNPYATRLIADSRCKTDKIDSRILMELLSKQFLPTCYQPTKAEIRIKEQIRWRRQLVKASTSVKNRAVALVDKENKGHSISFSASGLTQIKAIELQKHRKQLISKHIDLVTEFQEKIDLEDLWVAKECRNNPSVQLLKSVPGIGDLTALTLVVELGDIARFKRSNNVTAYLGLNPRLYSSASTRRTGSITKKGQRELRCLLVQAAWRAIKRSSPIQERFKKIAKRRGKNVAIVAIARLLAEICFHILRSGEPFNESKLALG

SEQ ID NO: 248656 - protein, 428 aa, unidentified
MEEVDDAELVVERIAALDLGKATLEACVRVPHTQQPGRRMQELRGYGTTTMQLLEMVGWLRHWRVQRVVMESTSTYWKGVYYLLEAEGFDCWLVNAREVKNVPGRAKTDRADAVWLAKVAERGMCRPSLVHPPEIRRLRDLTRYRRALVQDRTREQQRVEKLLEDAQIKISAVLSDLHGVSGRAMMAALIAGERDPRTLARLAKSGARKKTEALEEALRGFFTDHHAMILQMMLDNSDRISAQITELDARIEEAIGPFSRQAARLADIPGVNTVTAAELIAEIGVDMTRFPSAAHLVSWAKFCPQTHQSAGKSMSKGRGKGNPWIAGTLGRIAFAHSRADTFLGVRYRRLARRRGKQKAIVATGNSVLTVVYHLLSDHDARFCELGPGYYESRINKHRRARDLATQLQALTGQHIAIRDGKAIITDAA

SEQ ID NO: 248657 - protein, 408 aa, unidentified
MQVTFGIDVSKSTSTVCELIGESKNELTITNNRPGFIQLLHELTVFSKHPQIIFEATGVYSRRLQAFLEDYGYEYVVLNPIKAKKEMNMGLRYNKTDKTDAYHLALIQRLYRHPINQLQSQTYKQLNSLSRFYDQLTADLVMAKNRLHQALQSTFPEIENLFSSAKGKNYWQIVVRYPHCDLVRREDKKQLINWLMSLKGIAFKHALRTADKLIELAYQAYPVVSCSSIEVEQVQYYAHRLLNLSDQRENLIARMVKLAKSLPNHDLENLESIPGFAQTTAVRVLAELGDLRRFSNPNKINAFIGIDPGRYQSGEMDSNLSITKHGNAVARKLLYRAIGQIDNAAKTNPCHIADYYESKKLSSQTKGFKKIAIASIHKLIRTIYALIINDQPYDYNVATHNQKDFSRN

SEQ ID NO: 248658 - protein, 416 aa, unidentified
MTEQLNIVCGADIHQRFLIATILCRDGRTWTNRFSMNINGLLDFKTWLLSYGCQKVAVESTGRFWIPVHMVLEGTIDVIVASAYKIKHTTKKKTDLKDSEWLAELCLNDMIEPSRIFPKEDRELRNLTRAREAYVRDLSKEKNRVNNILESCSIKLASVISDIFGKSGMHILNGLLSGICIEEVLRDIPDKRVRVKKSEELREALTGKLEVSDIFLIRQSLQIINQLKACILELDEEIRSRIASRPMDLKIAMSIPGIGMVSAYTILAEVGNYMDFRKPEQLAMWAGIVPSVYQSADKLITGSITKQGSKHLRWILVQVAHAITHKKGGKLKKFFLKIKGKKGYLVAIVALARKVICILHHLLVNQEMYEEEGRTAHKDAIILEKKDQKIPPIEDMIHYIIQAGYKVKKIKSGVGG

SEQ ID NO: 248659 - protein, 340 aa, unidentified
MKLYGAIDLHSTNSVLVVIDEEDKIVYQKRLPNDLALILKELCVYQSRLEGIVVESTYNWYWLVDGLMAEGYKVHLANTAAIQQYEGLKYSNDDSDARWLAHVLRLGILPQGYIYPREERPVRDLLRKRSQLVRQRTMNLLSIQNLMTRNTGLSMTANQIKGLDKTQVDGLLPDADLSLAVKANWSVMCSADEQVELLEQRVTERVKLRAQFSFLKTVPGIGQILALTIMLETGDIGRFATVGHYASYCRCVGSQKLSNGKRKGSGNTKNGNKYLAWAFVEAANFAIRFNSKIKSFYQRKKAKTKAVVAIKAVAHKLCRACYHIMKDRVAFDVTKAFGQK

SEQ ID NO: 248660 - protein, 365 aa, unidentified
MSSVADSDVVVGMDVSKNTIVAGVLTGGDGLPVVESLSADEASVRRFFQRFDQLGRVSACYEAGPTGYDLHRLLSSMGVHCVVVAPSLIPKGPGDRVKTDKRDARRLAVLHEAGLLTPIRVPNPREEAVRDLCRTRADLVGDVTQAKNRLFAFLLRHGRVWRDGRQWTMKHRHWVAAQSFDDPALTATLGYYRANLETREVMLHAIEADLAVWFDREPFGAQVTRLAAYRGFTHQGALMVAAEVCDWRRFASARHFMGFVGLTPSEYSSGDTTRRGRITKAGNAHLRAQLNEAAWAYSHVPHVGPGIAARQQGLPPEVIARSWKAQQRLCRRYRHLAERKSNKNIVITAVARELAGFVWAEMTAD

SEQ ID NO: 248661 - protein, 345 aa, unidentified
MQNMYYIGLDVHKRTISYCVKDGSGTIHAEGTIVATRFDLDRWMKTLPQPWTAAMEATVFTGWIYDHLQPHATALKVAHPLMLRAIAAAKKKNDRIDANKICDCLRCDFLPECYMASTAIRERRRTLRYRNLLVRQMVQMKNKISGLLMEAGVNYNKQRLHKAGYFRELLATNPDIDEGLCSLLRVCRETVVRLGKTESALVRSLERDSLLMERVERLMTIPAVGPITALTWALEVGDVKRFSSIKKAISYCGLCGAEKSSANTMQRTPLSKQRNKHLQTTLIEAAKMAPRNSPELAMLYDQEKQKGNANRATLAVARKLVAYLMAVDRGQRNFQVVETNNCVAA

SEQ ID NO: 248662 - protein, 319 aa, unidentified
MATQVQSWVGVDVSKAELVSCRDAEQPVELTPNEATAIEAWLKTLPKGTCLAVEATNIYHLELVQRAYRRGFTVYLIDGLRLERYRQSLGHRAKTDSHDAQLLRRYLEREHADLRVWNPPPKAYVELQQLLRRRATLVRATVALKQSLVGLDGLKRETAALLRQLQRLDQRLQRRLREAVQHHGWADDVARCEAIEGVGPLTATAVTMAFHRGHFRHSDAFIAFLGLDVRVRDSGTYRGRRKLTKQGDPELRRLLFLAAMQACRSATWKPFYQRYLDRGLSKIQSLVILARKLARVAFALLRQQAAYTPRLDGGACPET

SEQ ID NO: 248663 - protein, 418 aa, unidentified
MEIVYDRVAAIDVGKKIIAVAVRTPGERPGKRRQQVRKYNTFYQTLIKMVAWLVAEGVTHVTMEATGIYWKPIFHVLCAAERPLEVLLVNARHVRNVPGRKSDALDAVWLAELTECGLLRGSFIPPRQIAAIRELTRYRKKLIEARTSELQRLAKVLEDSGIKIDSVASALTTLSARDMIEALIAGQRDPTVLADLARGVMRKKIPELTMACAGRFGDQHALMCTLHLEHIDHLADMIARLDTRIDEATLPFAQQTELLTTIPGIGERAAQVIISEIGVDMSRFPTAAHLASWAGLCPGNNESAGRHRSGKTRKGNKDLCVVLTECAWAAGRTSTYVGAQFRRFHRRFGKKGGQKAATATAHTLIVIIWHVLTETTAYRDLGSDYFTRRFDNSEAHKHRLIRELEALGNKVTIEPAAA

SEQ ID NO: 248664 - protein, 345 aa, unidentified
MDQISRIGMDTSKHVFQLHGVNAAEAPVLRRKLRRKEMVTFFEKLAPAVIAIEACGASHHWARLLQSFGHTVKLIPPQLVKPYVKRGKNDAADAEALCEAMSRPTMRFVPVKSPEQQAALMLVSVRDRLVRNRTQLANAIRGHAAEFGLTAAQGMAHLGPLLDRIQADESLPASARELFAMQAKEYEQLQTQIAEVDAQLLARHRADECSRRLAKIPGVGPVGAMLLRMKTPEPELFRSGRQFAAWIGLTPRDHSTAGKVRLGVITRAGDEGLRSVLVVGATAVIQQAQRRGTASPWLAALLKRKSPKLAAVALANKTARIAWKLMLTGEDYSARPAPAAMAGAA

SEQ ID NO: 248665 - protein, 482 aa, unidentified
MKKRNIYQNQSQELLHLFEGAGSSEKVMCVPMDYAKKDHLVMFCNGHGDILRKPFSVKNTPEGIAYIADQVTRSCRQRGIQKKHVFFGGEDANSFAKNFVSTLRSKGFLVANVNAHDAKKQRGNVQASTDRIDLMGIATMLLNCRANCGPAQSGIYRNLRTLVRHRRKLVQMLTEVKNRVHGIVDELFPGFLNEKNSGIIPFTQSSLYLMEDRFSPKQIRRRRRQKLIEILKRFGTSKAERTAVKLQQYAAKVLHAPVEYVDTMQLSLAQHVKHIRCLKESVAQMDKEIALNLAQTQGAFLTSVRGIGLVLAAGVTAEIGDLNEQKPLNNLASYSGIIPRVKQTGGSDGKTYTGPVAKRCNRILKDYVVKSAYHLGLHGPKDLMADYKRRDASGQHADFGMGRRYLRMAISLMRTSQVYLPPNLRKDDYTLEERAGYYLTSWPYLKEKWKKVGALEAAFAKDRPLGLWRQIVQELYDIKLKL

SEQ ID NO: 248666 - protein, 369 aa, unidentified
MIPVAAPLRMVERGPVLIGHKHRGGAAVGYFAGLDVSLEETAICIVDDAGGIVREARTSSEPEALVAFFGACGMKMERVGLEACSLTAWLHGGLTEAGLPAICIEARQAKAAMGAMPNKTDRNDARGIAQIMRTGWYRAVHVKSSACRSWRALLTARRMVLNKRRDVENGIRALLREVGLKVGTPSRKDFPARVRELAADDPVLTGLAESLLNVIEVMTQEVERLTKRVLDEVKVEPTCRRLMSVPGVGPLTALAFRATIDQPERFRKSRDVGAHLGLTPRRYQSGETDVQGRISRCGDELARTALYEAAHSLLILSTKWSALRAWGMNVAKRRGMARARVAVARKLAVILHRMWADGSEFRWGKQPAA

SEQ ID NO: 248667 - protein, 431 aa, unidentified
MEMTIGVRRRIAKQTQRHAELTPETLIVALDLGKRQHAVWVTDSTRIPMDTWVMPATPQGFATLFDRTVRLQERFERPRVLFAMEPTSHFWKLAAQQITDRGAPYRLVQPLSVRRAREEQRYTWAKGDRIDAELIATLIANGTWLEKQLETGPWGTWEQLARARLHLVQQRADTLRELLALIELCFPNYPYLPGGVTQPGSLAVLRSCPTPAQIRHLAPEAFLTRVRVYYTGARFQARRVLRVYHAAGNTWGLRANRFATSLRIRMAVDRYALLTEQIALMDRHLGRFYRASGAAPLLDTIPGLGVSMAGTLVGLMGPVGRYDRSRCVVRLAGAEPTQNASGLFQGATPTSHRGRGHLRLAAYQAVMGLIRHNPEFRARYDWLTTRPKRPLHKVAARIALADKLLRTIYTMLMTRCPYDASVARGEGRHSQ

SEQ ID NO: 248668 - protein, 309 aa, unidentified
MSAYAGIDVSKATLQIALYPQTDDLSVANTPEGLASAMDYFRAHDVHHVLMEATGGYEKLAVRLLAGAGFKVQRVNPVRARSYALSMNKRAKTDKIDARILARFAANLDEEPCCQPDADREELTQLVNQRESLVQQRDDNRRRIKQADSAFVQQTYKTLEVQLQMLIKSCGKQIAQQTRKINAQLMGQLTAIKGIGPVTIASLFCYLPELGDLSRQQVAALVGVAPYNNDSGTKSGKRSIYGGRAKLRRAAYMSVLVMVRHNPDFKARYEQLCNRGKAKKVALVACMRVLLVRLNAMVREGTPWRDQPV

SEQ ID NO: 248669 - protein, 353 aa, unidentified
MLIIGCDFHPSFQQVAMFDNLTGEWSEKRLGHREEAEKFYRGLTGPVRVGMEACGHYPWFEKLLAELGFELWLGNAAAIRAKRVRRQKTDRRDAEHILQLLLENGFPQIWVPSLEERDVRQLLVHRHKRVQARTRSKNQLQALALSQGMRKQRKLWTAAGRADMEQLEMLPYAAERRKQLWQDVERLNAEIEGLNRRIEEEVGKRPAAVKLQTHPGVGPVTALAMVLTMGPAERFPSGKQVGSYFGLIPSEYSSGEGRQQLGRISKQGSSFLRFLLVEAGQSAARYDAELGRFYRRLSARKNRGLAKVAVARKLAVRLYWMLREDWNYAQLCKAVVRVSPSHSVVRKQQKPSV

SEQ ID NO: 248670 - protein, 463 aa, unidentified
MARKARRASQPRERAVPFQQVHPHAAGIDVGATSHFVAVPRDRDPQPVREFPVYTADLHRLADWLKACRIDTVAMESTGVYWIPLYEVLDRRRFKVYLVSPKHLKGVPGRKSDVADCQWLQELHTFGLLSGAFRPEDQEVVLRSYMRQRAMLVSYAAKHIQHMQKALTQMNVLLHQAVSDITGATGMRILRAILDGERDPHRLAALRDVGCKKDVAAIAKALEGNWREEHLFALRQAVELYESYREKIAACDAQVLVHVRTFEDRDKGGTSTPPKPTNQAPRKNQMAFDAATEVYRLTGVDLTRITAIGAHTALEVVSEMGRDVSHWPTEKHFTAWLDLAPRNRISGGKRLPSLRGSLKANRIAQLLRTAAGTLHHSHSYLGAYYRRLAARIGKAKAIKATARKLAVQLYRALKYGTDYVERGEAYYEKTYQDRVLKNLTRRAKEFGFCLVKEEVTAFHAQPV

SEQ ID NO: 248671 - protein, 370 aa, unidentified
MRRVIGMDIHRTFAEVVFWEEGKLRPAGRIGMTRAGLEGFGHSLGKEDEVVIEATGNAMAVVRVLSPFVARVIVANPLQVKAIAHAHVKTDKIDAGVLASLRAADFLPEIWLPDAETERLRRLVARRNQVVRHRTQIKNEVHSILHAHLIPPCPHADLFGRLGRTWLARQVMPDDERGAIERHLRELDRLGEDLDILDRDIAQGAIDDPAVKRLLTITGVNLIVAAGLIAAIGDVRRFPDPQKLVSYVGLNPRVRQSGLGFAQHGRISKRGRSHARAMLVEAAWAASKAPGPLRAFFLRIRARRGHQIAAVAVARKLAVLCWHLLIKGADYQWARPALVANKLRAMELKAGQPARKGSKPGAAYAYNRAA

SEQ ID NO: 248672 - protein, 459 aa, unidentified
MKKPKASGNKIRKKITVMTHVVEPNAAGIDVGTTEMYVAVPADRDAQAVRRFSTFTNDLILIADWLKSCGVTSVAMESTGVFWIPLFQILEDRGFRVCLVNARHVKNVPGRKTDVADCQWLQYLHSVGLLRASHRPKQAICAIRSVWRHREGLIQIAAVHTQHMQKALDQMNIQLHHVISDITGVTGLAIIDAILDGERDPHKLARLRDPRIKASEQTVADSLVGDYRTEHLFVLRQSLKAYRQYQQWIIDCDKEIERQLKHIESKIDPVQQSLVSTKEDRRKPRGNEAHFDLRNNLYRVFGVDLTDVPGVSSLTAHVLLTEVGPDLSRFPSAAAFASWLGLCPDNRISGGKILSVRTRHVVSRLAIALRLAAQSLYSSRSYLGDYFRRIRTRLGAPAAITAAAHKLARILYHLISSRQPYDESVFSLLEERAKQRQISVLKKRASAFGFELKPVEMVP

SEQ ID NO: 248673 - protein, 401 aa, unidentified
MQVIAKRCAGLDIHKMSIVVTVLLEQADRSVHYETRTFGTFKRDRKALASWLIDQRIELCVMESTGIFWKSPMSTLRRAGLQVWLVNARHVKNMPGRKTDVSDSQWLAELARFGLVKPSFVPTDKIQALRLLSRRRQCLIKTLRTEKQRLHQCLDDAGIRLGGVVSDIDGVSASEMIEGLLEGIPINELAQKARGRLRKKMKEIADSLDESLSEVHLFALRQIKELIDYLKQQIQSIDDELAERMNSDFSEYWRLLQTLPGVDKVAAAGIIAEIGADMHHFKTGKHLASWAGFCPGNNESAGKRYSGKTRKGNQWLRTLLCEVAHAASRTRCQFKTYYQSLVIRRGKKRSIVAVAHKILRVIYCMLKQKIEYQDSSVDYEALMVHRNAPRWIKTLKQYNYI

SEQ ID NO: 248674 - protein, 409 aa, unidentified
MNPLFVGIDVSSKNNVAYLMKPDGSKHSSFSVQNNLGGAKLLSERIVSALGSMQLERVVIGLEATSIYGDSLVYALREDGRLGRFQRKIHVLNPKQVRKFKEAYSDLPKNDWVDAFVIADHLRFGRINREVYMDDYRYKALQTLTRARFDVIQNLTREKQRFANYLFLKCSGMAQDKDIQNTSATTIALMEHFETVDDLANADLEELTAFITETGRGKFADPDATAKAVRAAAKGSYRLPKTVNDTVNQAMAVSIASMRALKGQVKVLDKAIEQQFEIIPNTLTSIPGIGKVYSAGIIAEIGDIHRFDSQASVAKYAGLVWNRSQSGDFEAEHSRMIKSGNRYLRYYLLEAANSVRRCDSEFRRYYDLKFKEVNKCKARNEIQELIQAQKNVERFFAEEKDTTEKILTC

SEQ ID NO: 248675 - protein, 342 aa, unidentified
MKATTIGIDLAKHLFQLHGVDQHGKTVLKRQLKRDQMLSFFTNLPPSLIGMEACGSAHYWANKLQGMGHTVKLMAPQFVKPYVKTNKNDAADAEAICEAVTRPNMRFVPIKNGEQLAVLALHRARQGFVKARTAQANQIRGLLAEHGIIVPKGIAHISLRLPELLEDAENDLPGTFRQLIERLGEHLKELAKQVNELEEQIWCWHKENSASRKLAKMPGIGPLTASALVASIGNAKQFENGRQLAAWLGLVPKQHSSGGKQTLLGISKRGDIYLRTLLIHGARSVLRVAERKTEYAGSWLAGVMERRNHNVTVVALANKNARIIWALLAHEREYDADHAVAA

SEQ ID NO: 248676 - protein, 343 aa, unidentified
MGEVSTIGLDIAKSVFQIHGVDAGGAVVIRKRISRAKLLEFFATLPTCLVGIEACPSAHYWSRRLQGLGHTVRLMPPSYVKAYVKRSKNDANDAAAICEAVTRPSMRFVATKSEQQQSGLMLHRSRQLLVCQRTMLSNAIRGHMAELGIISAKGRNGTAELLKIIADEQDDRIPAAARFSLNVLARQYAAIRAETVAIERRIHAWHRSSEESRRLEEIPGVGPIVATALMAEVGDWKTFSSGRSLAAWIGLVPRQHSSGGKERLGRISKQGNRHLRWLLVAGAMAVIRYARQHGTKRPWLARLMDRRPLKVAAVALANKIARMAWAMMVRGERFKEPKLLPAA

SEQ ID NO: 248677 - protein, 475 aa, unidentified
MNIKGSKKKNQVLSVNIFEQQGIIAKADAIKAGLKASTWHELETRGKFDKNDKLSFVSDDMLILGCDIGSETHYVRAIDTRGRELSKSAFGFSNTAEGFESMLDWSAKLAAANDKKQIVLGLEPTGHYWFCLTTWLVAKGISVVQVNPYAVKQTKEVEDNSQLKDDIKDPKLIANLVKDGNFGMPYLPEKLYADIRRLSMFRDQLNEDRIRNLNRLHREMKIYFPEYKDAFGKIDGTFSLELLKAAPFPDELAALGTEGMKQIWHEAKLRGRGYANASSILEYARKSVGIKDGADASRQAVKWFVSRIIELDGQLSDIENKLNERCMEIPHAKNILAISGIGENILSGILAEMGDISRFDNVKEIQKLSGLGLVACSSGKHTGETKISHRGRKRLRYWLFQAAKSAVAHSEEFKELHVYYTTRKQNPLKKMQSLIVIACKILRVIFTILTKGTTYDPKKLLGDIVRPNQAVPQAA

SEQ ID NO: 248678 - protein, 359 aa, unidentified
MKKVSKVARQRETAKEKPAITVGLDLGDRYSRYCLLNEDGEVGEEGRIQTTESAFRRRFEGESRMRVALECGTHSPWVSRLFKELGHQVIVANARKIPAITASESKNDRNDAEQLARLAAYDPRLLSPLAHRSPERQQDLNLIQARSILVRTRTMLVNALRGLVKSAGGRLPGCSTEALAGRAAAHIPSSLADAAGPLLEQIRGLNRQIAAMDGRIEQLQQKYPEIGILRTVPGVGPVVASAYVLTLDRPHTASNRSAGAYLGLRPKQSQSGDSDPQMRITKAGDIYLRSLLVQSAQYILGRFGPDSALRRWGLKLAASGGKRGKKRALVAVARKLAVLLHSMWRSGRCFQPFPNLAAV

SEQ ID NO: 248679 - protein, 356 aa, unidentified
MTSNIKYIGMDVHKESISACVRNSVGKVVMECLIETKASMILQFIDGLRGDLQVTFEEGTSAAWLYDLLKPHVTKLVVCDPRKNKSMREGNQNDKIDARRLAELLRVDHLTPVYHGEHGLRTLKELVRSYLTITKDLGRVMTRVKAIYRSWAIPCTGKQVYARCHRAEWLGKITEPGVRRRAEFYYQQLDALRVLRQEARRDLLAESKKHKAWKRLCEIPSIGPIRAAVLLGILQTPHRFRSKRPLWNYGGLAIEMHSSADHRRVDGQLQRSRKNVLVRGLNRNCNHDLKNLFKGAAAVASSKPGPFQEFYTALVAKGMRPEMARLTLARKIATIVLIVWKKGVCFDANHLKPQTA

SEQ ID NO: 248680 - protein, 314 aa, unidentified
MTQERVFVGIDVAKARLDVHLYPACQALTVSNDRAGMRALTKHLGKQNAVVALEASGGYEKPVARRLTKSGFPVYVLDPAQVRAFARGLRRHAKTDAIDAGTIARCLAATIDEAVVYHPDPLAERLSALVSFRAKLVAESAALKGYRDTINEPTVRRMVQARLLSLKLSVIRLDKEIATLIAGSERLLDRFRLLVSAPGVGPVLASTLLALLPELGRISSKAVAALVGVAPFNRQSGRLDRGGHCHGGRRQIRSVLYMATLSAIRCANPAIATFYERLRRNGKPAKPAIVAAMRKLITTLNAMARDHTPWLQHA

SEQ ID NO: 248681 - protein, 465 aa, unidentified
MSANRSSRRPKHAKSPSLLKRINPLAAGIDCGSEHHYVAVSQDLDPEPVRSFRSFTPDLHKLADWLDSCGITSVAMESTGVYWIPLFDILEERGFEVILTCAHDLKSVPGRKSDVLDCQWIQELHSVGLLRGSFRPDADIAALRAYMRHRGSLVATAATHVQRMQKALVQMNVQLHVVLSDITGVTGMRILRDIVAGVADPKALAEHRDYRCKAPLEDIVAALTGSYRPEHLFTLRQNLETYDACQAQITACDAEVEALLNELAAKAATPTDPMPAPRTKRKPRDNAPVFDVRSVLYQLIGVDLTQIDAIGPHTALKLVSEIGADMSRWPSEKHFVSWLGLSPNNRISGGRLISSRTTPSPNRAATLFRLSAMALGRTDTALGANYRRLAFRVGKAKAITAIARKLAIIVYRVLRGDITYEDPGADGYDQMNRSSSLRGLRKRASKLGYALVDLESGQVISGAVS

SEQ ID NO: 248682 - protein, 318 aa, unidentified
MSKIAEHSHFVGVDVSKDWLDACLLPGRCTFRVPNTTRGVWSLVGRLAECEDALVVMEATGGFEARALELIAAAGLDVAMVNPRQVRAFARALGILAKTDQIDALAIARYAEAVEPTPRAVAHKDLSEIRALMTRRQQLSDMLTQERGRRCRVTSTLVRRRILVSLRGLKKEIEFIDGAIDKLVAETAKWREKEEQLRSVPGVGKIVSRTLIAFVPELGALTRRQIASLIGVAPFSRDSGTLRGRRTIWGGRANVRAVLYMAALVASKRNRVIAAFYGQLLARGKQRKLALVAAMRKLLTILNAMSRAQTTWEEPNRA

SEQ ID NO: 248683 - protein, 337 aa, unidentified
MDYFAGLDISMDETHVCVLDREGVVVRESKTESTAQAIAGELAKAPSCRRIVFETGRMAPILFHGLSQLGLPVVCVESRQAYQALRSLATHKTDRNDARGLAHLARTGFFKPVHVKSLSAHAVRSLIGARKKLVGQRVTLENQIRGLAVVFGVRLPRALTVAFVNQALKASEGIAGLSAAMRGLIAARTAVMTAVAAIDADIRRMTRASAACRRLMTIPGVGQLTALAFVAAIDDPSRVRRSRDIGAYLGLVPRRHQSGEVDYTGGISKCGDRGVRTLLYEAANVMLTRYKGQLKLKDWAFAIAKRSTMRKAKVALARRLAIIMHAMLRDGTEFELA

SEQ ID NO: 248684 - protein, 399 aa, unidentified
MTTVEQTPEAPAAIRTDLGAIFVSLELSRSTWLITSLSPGAGEKLSKHSVASGDVAALLGRFGELRRKAGLRMGRTFGIVCIQEAGLDGFWLHRVLESEGVESHVVDAASIMVSRRRRRAKTDKIDGEALLRTLLAYKRGEPRVCSMARPPTPEEEDRRRVCRERKTLIAERGEHINRIKGLLFAQGVFDYEPVRRDRRRRLEELTTGDGRALPERLKRQITRELDRLELTLAQIKAIEAERDALLAAEPPAAAEAGEAASPPARWAPASLMLLKGVGEESAAVLWTEGLFKSFDNRRQLAAYAGLAPSPWKSGSIDHEQGVSKAGNPRLRTTMIQLSWLWLRHQPKSQLSLWFMETVKLQKGRIRKVMIVALARKLLVALWKYLTTGLIPDGAELKAA

SEQ ID NO: 248685 - protein, 355 aa, unidentified
MNSEKYIGLDVHQATISVAVMDSTGKVVMESILETKAATILEFFAGLRGTLSVTFEEGTWAAWLYDLLQPHVAKLVVCNPRKTALLKDGNKNDRIDARKLAELLRLDSLKPVYHGETGVRMLRELARSYLTLVKDLTRVMNRLKAMYRSWAIPCAGRDVYYPRHRAEWLGKIREAGVRRRAERLYQQLDMLQHLRQQARRELLAESRKHAITAKLRQIPSLGPIRSALAVALIQTPHRFRTKRQLWAYSGLALETRTSGEHCYVRGQLRRSKKQVSIRGLNKDHNHDLKGLFKAAATRASVQPGPFQDFYQRSLAKGIKPTMVRLTLARKIAAITLTLWKKGENFDAERLKSQAA

SEQ ID NO: 248686 - protein, 474 aa, unidentified
MSKRAISKRAISKRAKSAQRKPRKVKTQGVAALPIFRPNTAGIDIGAMEILVAVSPDLDAEPVRSFGTFTRDLEAIAGWLEACGVTSVAMESTGVYWIPLYQVLVDRKIEVCLVNARHFHNVPGRKTDVLDCQWLQYLHSVGLLRGSFRPEQVICAVRTLLRHRQSLVQMAAEHTLHMQKAMEQMNVKLSHVISDITGVTGMRIIDAILAGERDPRELAKLRHGCIQADEETIIRSLEGDYRAEHLITLEQSVAGYRFYQKQMAELDQKIEGFMEAIPAKIDLQEHPLPADAKKHRRRQHNAPAYDLRSHCYRALGVDLTQVPGFDGPTVQVLLTEVGPDLSKFPGASSFANWLTLCPNNVITGGKILSAKTRKGKSRAATALRQAAQTVERSDNYLGQFFRRMRARLGRAEAITAVAHKLARIFFAMVRKGQAYDESLLAKADTRQRERQEAKLRRQAREIGFQLVAMETAKA

SEQ ID NO: 248687 - protein, 438 aa, unidentified
MSNKVIFNLDELFISVGIDVGANFSWMSIALPNQQFVGKPYKILHNSIDSLTTAVSKIKEAEELYSLESRIFLESTGIYHYPLFCYLRDKGFNCSVINPIITKNSTNINIRKVHNDRFDSKKAALVGLKPDLKVSLMPSDLALNCRNLCREYYDLMDNRSAYVNKLQGELRIAFPQYLGIFSKVTINTSLTLLETYTSPSAFLKADKQEIIDIIKSTARFGLTYAQNKYNAIIQAATDANQFGYIIDSNIKRIRLYISFIRKYDEEINSILESLHELVDANEDSDFVKQIHLIETFKGAGFLSAVSIMGEIGDFSAFSKPKQLFAYFGLDPAVKQSGKFEGTKVQMSKRGSAIARRVIHTLTLQSISISRNREAKNPVLREYYLKKCDSKPKLVAMGAVSHKVCNMIFAILRDNKPFKIIAPQEHIKQYNAAKCDIAA

SEQ ID NO: 248688 - protein, 362 aa, unidentified
MFRPHTLYIRIRIVRKVSEPAFAMKDQDVTDVIRRKQQTAMRYIGIDVSKATFVVAYSSDKGGGIRTFNNTTAGIRQFIGTLPKDGSIHCVMEATGNYSALLLYMLNVAGITVSMENPLKVKNFAKAMLSTVKTDKSDARLITLYGEKMNPRPFKVQGEAILRLRQKRTVIRQLTKQITAMSNLRGSLVCLPVPDKGATHTVDETIKFLEKRRDRLQVELTDLVEVEFSRQLALLTTIKGIGITLATALIITTGGFTYFQNAKQVSRYLGICPTYEQSGTSVNIRGHINRNGDAYTRGLIYVAAWNASRFNAKCGETYTRLRQNGKPGKLAMIAVANKLVRQAFAVVAHDKEYVDGFVSNRH

SEQ ID NO: 248689 - protein, 479 aa, unidentified
MAVGRMNRKQRKELTRQLRSEDPGLDVVHPRAAGIDVGNGAHYVAVPPDQDREPVRRFECFTADLHRLADWLQACGVATVAMQSTGVYWIPLYEILEERGLEVYLVNARHTKNLPGRKSDVQESQWLLKLHTYGLLNNSFQPTAEIRTVRTYWRQRAEHVRAASTCIQRMQKVLTQMNVQLANVISDLSGLTGQTIVRTILAGERDPKKLAELSHPRIQASREEIAKSLEGNWRPELLFVLKQEVEMYDIYQQRIGECDRELKAHLKRFADNVQRKPAEAGPVSEEQKDKKVPAKLPRSGKRAQGNAPCFDLRSELYRISGVDLTRIDSINVVVAQTVISEVGLDMSRWNTEAHFASWLGLCPDNRISGDKVLSKGTRHVINRAATALRMAATTLLRSRSYLGAQYRRLRARLGAPKAITAMAHKLARIVYRMLKYGQDYVDKGMQYYEDRHRRQQIELLQKTAAKLGLHIVEIQAVGG

SEQ ID NO: 248690 - protein, 348 aa, unidentified
MARYIGLDAHATTCTLAVVGPSGRRLGSQVVETNGAALIEAVKTVPRPRHLCLEEGTQSAWLYEVLRPVVDELVVTQQTRSPAGNKNDKLDAYGLATGLLKNTLPRRIYKSPHSFAKLRTLAHGYTKLSRDVTRCKNRLKSLYLSRGIHAVGKSVYGPSREQWLQQLPASCRTAALLLYAQLDAMVALKEQAKEALVRESHRQPISRVLETCPGLGEVRVAVLIPTVVTPSRFRTARQYWAYCGFGIVMRTSSDWVRTPKGLQRRQGMGVRGLTQQYNRTLKEVYKAAVISVLKEPEHPLTQHYERLLEAGTKPPNAKLTIARKIAALSLAMWRNQEAYDPARYTPHS

SEQ ID NO: 248691 - protein, 342 aa, unidentified
MGVYCGIDLHAKVSQVAVVDEKGDVLVNRQVKNVLSDVLAVLAPYGEGIPVAVESTFNWYWLVDGLQDAGHDVHLGHPLKLAMISKAKIKTDRRDAPMLADRLRKDDFPEAYIYPRETRPLRDLVRQRGRLVVARAREYAGVRLRLYRHGIIDHSKNSAKGMTLEELDTVLRHPHVKPLVHQERARIELLTGQILQLEGVILAAVAGQADYQHLRTLPGVGQALSAVILLESGAITRFASARHYASYCRLIPGCAESAGKVRRGRGKKQGNAYLKAAWTQAATHAARTDPKIRSLYDRLKARHVGRGATPIATNVIAHKLALAAYHMLKEGTVYDEHVLFGN

SEQ ID NO: 248692 - protein, 418 aa, unidentified
MEPNRFRHYIGIDWATEAHRICLLDHNGQLCAKVSIPHSGAGLDQLLEWLASHGVEPAFAAVAIETPRGALVETLVERHYAVFAINPKQLAHFRDRYTSAGAKDDDRDAWVAASALRTDEKAFQRVTIDAPEVIQLRELYRTADELREEIQRLTSRLREQLNRYYPQMLALYPSADQPVLWDLLELAPLPATAHQLTLPQVETVLRKRRIRRFTAGQVLEQLRATPLTLANGAAAAASEHALILVAQLRVIYELRKQTLKRLAGIVKKMRQTTTGSGAPSDAAIIASLPGAGILTTAALLSESSRAVAQRDAPALRAYAGVAPVTQQSGKSLKVSMRYACNNRLRNALYHFAMGSLRDPVARRHYDRLRAEGHSHARALRGVADRWVTVLMAMLRSGSRYDATRRKAWQAADAAGATA

SEQ ID NO: 248693 - protein, 386 aa, unidentified
MEKANDLSRSSTVLEQNSTLIAVIEMSLSSWLVAGIVPGLARHPLKKLGADPEALLLLLHRWREEAAKYGHAIARIAVAFEAGRDGFWLARWLRARDVEAFVIHSTSVAVPREHRRAKTDRLDTQHLKRAFLGWLRGEPNHCQMAGIPSLDEEDARRPNRERENLVSQQTSIVNRMKACLIRLGVRNFKPTLRHASERLEMVRTPEGAPLPLNTLAEMRRDMARLRLVREQIREIEAARSQRLQVSESRAQAMVKLLTGIIGVGIETADMLVHEILSRQLRDRRAVARYAGLTGAPDESGKRRREKGLARAGNARVRRGMIQLAWRFLLFQKDSALAQWFRARTAEARGGTRKTLIVALARKLLIAFWRLTMTGEVPAGIKLRPGV

SEQ ID NO: 248694 - protein, 300 aa, unidentified
MSWTVAIGVDTHKDMHVAVACDALGRQLDSCSLPATSAGYLALWRWAETLGEPAFAVEGAGSYGAGLARFLRAAGGNVYECERPRRRERRGGKSDLIDAALAARRLLAGEELSRPRGDGAREDLRLLLLERRGVVRAQTAALNQLHSALLAAPASMRERLSELHGARLVAACVRVSVRAQEERVLVGVLRRLVSSGDPARMRSESSFAALAGTSPVDASSGRHQRHRLNRGGDRQLNRALHVIALNRVRHHGETSRYYGRLLDSGKSAREARRCVKRALARSFYRRLCELPRLQEVPLRA

SEQ ID NO: 248695 - protein, 365 aa, unidentified
MQKISTMRTSGRNILEGRLTIGLDLGDRSSAYCVLNEAGEIVLEHKLATTPEAMEQVFGSMPRCRIAMETGTHSPWVSRLLTALGYEVIVGHAQKVRLITKSRRKDDRLDARTLARLARIDPELLSPVKHRSAQAQLHLTEIRARAGLVSARTALVNAARGLVKSYGERLRKCGTQQFDRETTSALNAGLRQALDPLVQEIESLNERIQEYDRRIAKMAKEEYPETALLKQVKGVGDLIATAYVLTVEDPQRFRKSRDAGCFVGLQPGRRNSGESEPQMRISKEGDEYLRTLLVQGAHYILGPFGEDCDLRRWGQKLSARGGKNAKKRAVVAVARKLAVLLHRLWISGEVYEPLRNSQKAMSAAA

SEQ ID NO: 248696 - protein, 422 aa, unidentified
MSKKKQTVAGLGAIYARVCGMDVHKEVVVGCVRILDMKDGTVQSTLRRFGTMTADLLELRQWLAQEQVTHVAMESTGVYWQPVFNILEGHFEVWVVNAQHIKKVPGRKTDMKDAEWIAQLLQCGLLKPSFVPDRQQRELRLTRQQTKLVQQRNAVANRIQKVLETANIKLGSVATDVLGVSGRKMIEALIAGEKDVSKLADLAEKRLRHKIPQLQRALEGEVGEHHRFLLRRLLDQYDFFEKEIARISERLAAIAPPSFHAAVKRLDEVAGVAERGAQALLAETGTDMSRFPSHKHFASWAGRCPGNRESAGKRKSGKTPAANRHLDAVLTEIAHAAVRKKDSYFKSQYHRLAGRRGKKRAIGAVKHSILVTIYFMLRDNKSYTDLGADYFDKLNPQQQIRYHVRKLNELGQNVELSLRPAA

SEQ ID NO: 248697 - protein, 338 aa, unidentified
MALYCGIDLHSRDCWLAILDEGLKVVQEAKVVNDLEALLQVLEPFREDMKGVAVESTFNWYWLVDGLMDNGYRLHLANTSAVKQYEGRKHTDDRHDAKWLAEMLALQILPEGYIYPKNERPERDLLRRRSFLVKKRTSFLLAMRGAYECRSGLRTSSNEVKQWTREEIEENWDDPTVALGMTCLLEPMKALDDQIRTVEKEILRHAKLRSEFAPLLTVWGIGKILALTVMYEVGEISRFKKVGNFASYCRLVKTARLSAGKRKGSGNRKNGNPYLSWAYSEAAHYASRYHPEARKYVQRKTSKTNGIVAIRALAHKLARASYYVMKDQVDFDPERVFG

SEQ ID NO: 248698 - protein, 354 aa, unidentified
MKAITFSNLHFFVGIDTHLKQWKVTIRNCGIELKTFSMNPSPDELYKYLNKHYPNGTYFVVYEAGFCGFWPQRKLTELGINCIIVNPADVPSSGKEKSAKSDPVDSRKLARELENSSLKPIYVPDLYTEQLRSLMRHRFRLSQGQTRIKNRIKMLLYNYGISFPKEHLTNSRWSGYFIHWLKSVKLSSSAGQFTLNNLIDQLEQTREHLKNVLRQLRQEAKQEDISAVINALTSVPGVAFITAMSICTEIIDIRRFKRFDELCSFVGLVPSVYSTGETEYTRGISFRHNKFLRPLLIEAAWTAVRKDPALTLRFNELIKQMSKQKAIIRIAKKLLRRIRHVWMNQDSYVKALVA

SEQ ID NO: 248699 - protein, 414 aa, unidentified
MSEASVPMPAPAPLVYVVGIDIGMESCMMCSLTMQKRQMIKPSPFANTAEGFKNLFERLGQLETPPDQILVGLEATSRYGENVYHALLKRGYRVRLLHPAQMHAFAQQRGLRAKTDQVDAATIARALLSGEARFGYVPSEQVAIYRELVRLQQQLSDDVVRYKNELHALVVVLFPEFTQVFADPTGPTALAFLKRYPSAQAVAQTEVVTLSQVLHQLAPRRYGRRTAEKLLALAKESISSGVALSARSTSLRLLCDQLEHSQANLKRLQQEIEALLDHDPKVAGVLGIPEFGVMTVAVLRAELGDLDRFTRMDQVVAYVGLDLQVKQSGKYKGQTKLSKRGSGRVRRILYLAALRSIQLDDSPFGAYYRRLVHRGMKKGMAVVAVMRKLLIVAAHLILTEQVYEPGKVAGLAVR

SEQ ID NO: 248700 - protein, 387 aa, unidentified
MEVRVVSTPSAGADNEPVHCYVAIELSKSSWIVGFQTPLTNKTSQYQVKACDANALLELIERIRTRVARELRRPIEVMSCYEAGYDGFWLHRVLKAHGIHNHVLDPASLQVNRRARRAKTDRIDADRMVRALIRYLRGEPEACRGARTECRTGRRQASAHRERRRLIAERVQHVNRIKGLCATQGIYHYAPLRKDRLARLDDLRTGDGRALPTRLKAEIARELKRLEVLLEMIATVETERDVILTSAASTHLNAGKIKMLAKLKAIGPEFATTLVGEVFYREFANRRKLGSYVGLGSSPFCSGPVDRDQGISKAGNPTARSMMIELAWTWLRYQPGSALSIWFRERVGNLKGRPRRIAIVAMARKLLVALWRYLQTGLVPTGALLKA

SEQ ID NO: 248701 - protein, 354 aa, unidentified
MSQTLNAAIAVVGIDIGKNSFHIVGHDERGAIVLRQRWSRGQVEARFANLPPCLIGMEACVGAHHLSRKLNRLGHDARLMPAKYVRPYSKGQKNDFRDAEAIAEAVQRPTMKFVATKTADQLDLQALHRVRERLVSQRTGIINQIRAFLLERGIAVRQGQRFLRAELPRILATPPDVLSPRMVRVIEDLAGDWRRLDERIEGLSDEIEAIARHESGCERLMSVPGIGPIISSAMVAAIGTGDAFSKGRDFAAWLGLVPRQMSTGDRTILGRISKRGNRYLRVLFVQAAWVVLIRPQSWERYGLKSWIEAAKKRLHHNVLAIALANKLARIAWSVLARGRAFEIRKTNETATQSA

SEQ ID NO: 248702 - protein, 329 aa, unidentified
MSNLLKKVIGVDVGSKFLTLSFLDDEKGEQVLNLPNNERSILSFLSKISPSDYCFVIEATGNYSSRLLHLSIGKGFESSLINCMSVKHFARMKNIITKTDAEDAKLIRNYGEMFRPEFYVPKTQDIEYLDQELKLLNDLEEEKRRYAVKLKALRFHPVVNPSTEKHYEKRLKQLEKEIKEVEARLPQLQDEEFTETKNLLQSVSGIGEKTSLQLMTATSGFKNFHSSKSLVKYFGLAPRIYQSGKKSYSPGKCRTSKAYIRSILYVCSWTAIKHNQKCKELYLRLLEKGKAKKLALIAVCNKLLRICFSVVKNKTPFQQDFQNKLKIST

SEQ ID NO: 248703 - protein, 430 aa, unidentified
MERVIQNGPAGAVSVGLDVGKEEIYAVMRWSDGTFERPWRALNPSEVPVLVEMLGKIGASRALTAAMESTGTYGDALRARLGQAGMALHRVSGKAAADYAEVLDGVPSQHDGKDAAVIAELAAYGKSRPWPYHEPNEEDAELAYWVDWLDLQQRIQMMWICRLEALLARHWPEATRVVELTSMTLLRGLAHYGGPATLAADPEAVRRLKGWGHWASTEKAERVLAAAVGTEGARQGMRDRLRMQQYATLALAARHETRKAHRRLQELARGTEILQRMAGVVGLATACVLWVALGDPRNYPSGGAYRKALGLNLKERSSGKYKGRVKISKRGPGNARRWLFFAALRLAKNPSVRRWYEAKKAKDNNHGKKAVIAVARKLVLALYAVAVRGQAFEAWRLFPGRSTARQALTCSRETARSVTTPEDKQWKKRS

SEQ ID NO: 248704 - protein, 425 aa, unidentified
MRKSRVGAVKNIFFRETICNDPQVCRIVDLPVYYELETNNGNRDYRIQIGGHYMNYNTVYVGMDVHKESFTLCSCKYEDEKASHYQRTPASYKNVLRYLAFLRTIYGEDTRFVCGYEAGCLGYSLYHQLENFNVECVILAPTTMLEQRSKRRIKTDKRDAEIIARSLAQHNYSPVHIPTETDNQTKEFIRMRDDHKAELKKIKQQILSFCLRQGYQYDGSGNWTAKHVKWLRSLKPAGLYKEILDEYLLTYTILTDKLNRLDQRIEELASKEEYKESVSKLTCFLGIKTHTALSVIVEVGDFQRFVSARKFAGYLGLVPGQHSSGDDRNGLGITKAGNTHVRRLLVESAQSYTRGKIGYKSRVLRSRQAGNSPQVINYADRANERLRRRYYKMVLKDGKKYNIAKTAIARELACFIWGMMTDNIY

SEQ ID NO: 248705 - protein, 429 aa, unidentified
MENSPSCSLPIVAWVGLDWADQAHAVCLQADGSAHRERCELKHTAEALQFWVAELRSRFPQGRVAIALEQSRGALFSALMTYDFLVLYPIPPKALADYRKALYPSGSKNDPGDAQLLLEFLHKHRERFRPWVADDAPTREIAFLVQHRRKLVDDRTALSNRLQALLKGYFPQALEWAGDLTAPLAWDFVGQFTSLEEAQKASRLKVLKVYRAHTRRTPEQLEQLLDQIHTARPLTTDRAVIESSALMALAQVDQLRALAAGLERLEEKLQELFAAHPDQAIFRSFPGAGPALAPRLLAAWGTDRQRYEAAADMACWSGAAPVTNQSGKKCWVHWRLACPKFLRQTFHEFAGQSILWSPWARAYYQQMRQRGLDHHPAVRSLAFKWIRILYRCWKDHSLYDEARYQQALQRRGSPLAAALRQISTQEARA

SEQ ID NO: 248706 - protein, 338 aa, unidentified
MIVIGVDVHKHSLTAVAVDEAGRMLDEKTVVTADGELRAWAAGLAVERLWALEDCRQLTRALERDLLAAGEELVRVPPKLMAPERRAGRVRGKSDPIDALAVARAALREPNLSRPRPDEAPFRDLKLLVDHRDDLVDERRRAQQRLRWHLHQLDPSFAVPAKALDRPVHLDRVGRWLTRRPAEVQVRVARELVVRCRSLTRTIVELDRELEQRTAQTAPALLELPGCGAITAAKLLAEIGPIGRFQTDAQLARHGGVAPLEASSGRVQRHRLDRGGNRQLNCALYRIAITQARYHPEARAYLERKQAEGKSRREAIRCLKRILIRVIFNTLKASPALT

SEQ ID NO: 248707 - protein, 340 aa, unidentified
MEEVSIVGVDLAKQVFQVHGAASDGRVLFRKKLSRLQFPKFMATLPPCVVAMEACGTAHYWGRELAGLGHDVRLIPPVYVKAFVKRQKNDAADAEAVAEAAMRPTMRTVAVKTSNQQARAMLFRTRDLLVGQRTQMVNALRGHLAEHGVIVGKGLGNVERLSTLVTSDNLPELVQSMSRLYLSQIAQLNEEIDQIDRRIAAEARQSDVVRRLQKVPGIGPICAMAITAFAPSMEEFRRGRDFAAWLGLVPRQHSSGGKQKLGRTSKMGQRDIRRLLIIGAMSVVHWKGRGGGRPGSWLSNMLARKPRMLVAIAMANKMARVVWAMLIRNEDYRDPTGAVC

SEQ ID NO: 248708 - protein, 318 aa, unidentified
MGNDTRIAVDVAEAVFEVAISNRPGHVARRERLQRAEFLSFLAQQPAATVIMEACGSSQHWGRKLEMLGHRVVLLPPHHVRPCVRGNKTDRTDAKGILEASRNEDIHPVPVKTVAQQVLTSLHRLRSGWVTERTARINALRGLLRELGVFIPVGARQVVPAVWILIEDADSDLPDPLRSILAEACLEIRQIEARITLVERQLEATAEQLPVVALLYTIPGVGLLTATALVAFLGDIHRFPSGRHLASYLGLTPREFSSGLKRRLGRISKRGDGYLRTLLIHGARSVLLHARKQQPDRLREWAHKLVVRPPLATPRVPS

SEQ ID NO: 248709 - protein, 342 aa, unidentified
MRIVMLGIDLGKNLCSLAGLDETGAVVLRRRMKRASVLPFTAQLEICTVAMEACCGAHHLGRQLVAQGHVVRLMSPAYVQPYVKAQKKDERDAEAIAEAATRPTMRYVEIKSEAQLEVQSLHRVRGRLVAERTALINQLRALMLERGIAVPQGRCKLARYLPEILADERNGLGPRLRQLIEDIREEWRSIDQRIKGYDDELAEQVRNEDTAKRLISIPGIGVLTATALVAAVGNAQTFSCGRDLAAWLGLVPRQATTGGKPRLLHISKRGNGYLRMLLIHGARTALPGLAKKDTPLGRWVKALLARAHRNVVTVALANKLARIAWAVLARDRQYVTVQAIGK

SEQ ID NO: 248710 - protein, 375 aa, unidentified
MSKIRFLGLDVHAGTIAVAVAEPKGEVRSLGVILNRLESIRKLVAKLGPVKHLKACYEAGPTGYVVYWQLTQLGVKCEVIAPSLVPAKAGDRVKTDRRDAEKLARCYRNGDLTAVWVPDAAHEALRDLVRAREDARQDQHRARQRLGKFLLRHGALAPDEVKKKWTAKYMTWLNTHVHFEQPALEATRLDYVHEVHHASERIARLEKAIDEAIATAPEQIRSVVAALQALRGVAQTTAVTIVAETGSLSRFQNPRQLMSYSGLVSSEYSSGNRIQRGGITKTGNAHLRRVMVEAAWAYQHKPWVGGFLLKRQQGLDQEIKDIAWKAQWRLCTRYKKLAAAGKNKPQIVTAIARELLGFAWAIAVKTEPHPQQQAA

SEQ ID NO: 248711 - protein, 368 aa, unidentified
MATTTHPAQPDHTDPHNSPTVVLGVDTHRDVHVAAVLDHLGTLLEARSFPATADGYRGLLAWARTFGQVRRAGVEGTGSFGAALTRYLRGEGVQVVEVHQPNKALRRRRGKTDAVDAEAAARAVLSAQATAVPKAGDGHVEAMRIYKLARDSAVKSRSQAINQLKAVLVNADPTLRESLAGLGTKTLIRTCAELPDPSPASTPAFAAAVHTLRLLARRIRQLSAEAYELEKQLRAAVLEHTPQLLERPGIGPDSAATLLITMGDNPERVRSQASFAALCGVSPVQASSGKTQRLRLNRGGDRQANAALYRIVLTRLRRHDPTRDYLERRTSQGKTRREIIRCIKYYVAREVYHLVRPQTDAVELMQAA

SEQ ID NO: 248712 - protein, 343 aa, unidentified
MYYIGLDVHKKTISYAIKLADGTVHREGVVDATRAALDDWIKNLPQPWTGAMEATLFTGWIYDHLRPHAGSLKVAHPLMLRAIAASKKKNDRVDAGKIADLLRANLLPECYMAPTALRERRRTLRYRNLLVRQSVQMKNKMAGLLMETGVTYNKQKLHQKRYFAQLLRGSAELPAALKPLLKIGRETVERAATTEKALLRALQRDRALAERVERLTTIPGIGPVTALSWALEIGEVSRFASLKHAVSYCGLCSGENSSAGVQKRSPISKQRNKHLQTVLIEAAKLAPRWNPDLALLHDKEVARGHRNRATLAVARKLVAYLLAVDRREKPFQGGKKLAPDKAA

SEQ ID NO: 248713 - protein, 422 aa, unidentified
MEQEPTVFVGIDWASEEHQVCLIGPNAPVQRAFAHDAAGLGAMVAWIISHAQRPEEVAVAIETPTGPVVEALMDRGVAVFSINPKQLDRFRDRLSPAGAKDDRRDALVLGLSLRTDRHCFRQLHPLDPIIVELREWSRMDGELKDERIRLTNRIRQQLWRYYPQALDLNDDMGADWVLDVLALAPTPATARRLTEKKVAKVLTARRIRRLTAVDILRLLQVPALTVAGGTEQAAAAHIAAVAERLRLVNRQLKEIERNIDRLIASLPGEVTDPGEPLGQSSEQRDAVILRSFPGVGRTVLATLLAEAHQALHNRDYHALRTLCGAAPVTKRSGKSIRVERRQACSHRLREALYHWARVATQHDPVSKARYAALRARGHTHGRALRGVGDRLLAVACAMLKTQTAFEPRHPKMAGTQPQISPC

SEQ ID NO: 248714 - protein, 369 aa, unidentified
MEWTPPPRKGYRSGSITNQETQMKQIAVIGIDLAKNVFQVHGTDAAGNAVLNKKLSRAQMIEFFSKITPCLIGVEACSSAHYWGRRLTDMGHTVKLMPPQYVKPYVKTNKNDARDAEAICEAVTRPNMRFVPIKSEEQQAVLVLHRVRDGIVKQRTALSNQMRGLLAEFGIIVAKGSKQLNGCMTQLLSESDSTLPGNLQKTFSSLFQELTNLTARIKEFDKQIESHLKATDECVRILQIEGVGALTATAVVASVGDIRNFKSASQFAAWLGLVPRQNSSGGKTQLLGISKRGDTYLRWLLVHGARAALSYAKRTEKLTTWQQAMLQRKSLNKVVVAMAHRTARRIWAVLAKDCAYDPLHNQRHAMVGA

SEQ ID NO: 248715 - protein, 318 aa, unidentified
MQSIPLIFGVDVAKAELVVASHGRPGTCQVPNQATSIKAWLRHLPGGSTVAMEASGRYHQLLASLAHAAGMRVYVLNAADVYFYAKALGARGKTDRVDAQVIARYAAEHHEKLRAWVPAPQQYVHIDELLRRRALVVAKREALRQAFAGLADLRTAFNKLDAAFDSMLRAIDVTIQRAIAADAMLAAAQRRIAQVPGFGPLGSALLAVLLARIPFACADALVAYSGLDPRPRDSGQMRGRRRISKRGPAYLRKQWYLAGFSASRSKAAKPLYLALRAKGLSTTEAFLVLGRKLLRVAYSLWKSGSDFDVTRLNGAQPA

SEQ ID NO: 248716 - protein, 397 aa, unidentified
MYIVGIDIAKRKHEAAVIDGEGTVIIKPFSFTNNCSGYNRLLAMLTKAKLPLDEVSFAMEATGHYWLALFTRLQKEGFRVQVINPVQTNSIRNFYIRQAKTDPRDALLIAEVIRFGHFSESTLHPENIYELRELCRGRHAIVSMQADVKRKVVALLDQVFPEYETAFTNMFGDTSMAILQTCPTPKELSEMPFEELCHLIEASSHKRFRMAKAQELQELARNSFGFAMAGDVFSTMIRLYAKHLDFLKQQVREMDRKIAEIMDTLDTPITTITGIGPTLGAYILSEIGDISRFSSAAKLAAYAGIDPTMRQSGEYNGVRNRMSKRGSPYLRHAIWLAASSAVLHDPALKLYFQKKRDEGKPYMASVGHACRKMVSIIYAVMRDNKAYTPYIPNEISA

SEQ ID NO: 248717 - protein, 329 aa, unidentified
MVYCGIDVSAATLAVAVQQQDQRFEERVFDNTAGGHKTLIRWLHKRKARVRVSLEATGIYSLDLALALDKAEGIEVAVLNPKLIHRFAQTLRRSKTDSADAQVLAEYSARMPFTPWSAPGLSGLQLRSISRHIQSLVVEYARQNNRLHAAEKSALTPRCVVQDLKRSMASLQLRLARLRSAAIELVRRDKAMQESFELLIGMPGIAAISALQLLGELAPLSPEMSARQWVAHSGLDPSHRESGTSVHKPSRISRAGNRHLRRALHMPALVAVRHDPHLKAFYESLLGRHKAKMQALIAVERKLLHAIYGIFKSRMPYDGNKLFPQMQIA

SEQ ID NO: 248718 - protein, 349 aa, unidentified
MQAMKTVTLDAHTERSQMAVISPEGEILIELQVETTPEELRRVVSGIPGPKRVVLENGPLSAMIHDALDGLAEQVVSCDPTRNALVSRSDSSNDRLDARRLGILDRAGATHEVYVPPEPYRTLRSLVHYDHMLARTVTRTKNQLKALCRRYGVRYRGAGVYRKAGRKEFLEKMPNAHVRWQMRSLYRQLDGFRLERIQAQRMVSKHARKIEVVKKLKKVPGLGPRTAPALVAWIADPSRFRNESGLSSYAGLGLKNDISNWKVTKRARASKRGNRELKRALFLSARGALNGTNALRARYDARMAAGWEDRKAIRDVARTILFVACAIWRSGKEYDDAKVGVPKTEDGAR

SEQ ID NO: 248719 - protein, 341 aa, unidentified
MQNLKLVGIDIAKSVFQLQGCDQNGKPIFKKKLSRKDFLPFIRQLPTCIIAMEACGGSHFFARYFRSLGHEVRLISPQFVKPFVKGNKNDRNDAAAICEAAVRPSMHFVPIKEEWHQSVQTVHRIRSERVARKTKLQNMLRAILVELGFVTTQGTKALKDLARHFIDEQVGNVSRLSIQNVEDLLEDIAEVEKRIEKADKTLKEVAESSPSCKKIMKIKGLGPATATALVAATPDPHAFKNGRQYAAWLGLVPRHSGTGGKVHLGKISKRGDKTLRSLLVHGGRSALRYAVPDGDKLSKWACGVKERRGSNKAAVALAHKNARIIWALLAKGAEYDPKLAA

SEQ ID NO: 248720 - protein, 395 aa, unidentified
MFIVGIDIAKRSHEAIIITEDGQVVRKAFSFRNNCTGYNLLLEQVRRLTLVKSQIVFAMESTAHYWLALYARLLKDGYTVMVLNPIQSHSLRELYIRKAKTDARDSLIIADLVRFDRCKASNVPQDKILALRELCRSRAYLVDMAADLKRKLIALLDRIFPEYESLFDSVFSKASIAVLCKYSTPQKVKNANLRKLTDILMESSNGHFGEWKAHQLKEAACSSFGIDDSDGVYSTLLGMFLEQILSLTAQADSLEKQISVFFQEFNNPLTSIPGVGTVLAATILSEIGDITRFSSADKLLAYAGLDPSVKQSGEFKSNQNRMSKRGSPYLRRAIWLASTVAVHRDPMFQTYYEKKLSEGLHYMNVIGHVSRKMTAVIFAVLRDGQPYQPILQSAG

SEQ ID NO: 248721 - protein, 315 aa, unidentified
MTACLAQNVGVDISKDFLDVAFFPPTESWRFANDNKGFRALLKKLGKRVIERIVYEPTGAYHRLFERTLAKAHMPLVKVNPRHARRFAQASGKLAKTDRCDAAMLARMGAALQLEPHCVVSDAVDALKELQIARDALVKDRVAALNRQKTARSKLIKTQLGERLQQIDAQIEEIDREQKKLRNVDPTLTQSFDIITSIPSFGAVTANLLLVDMPELGHVDEEQVSALSGLAPIAEESGKHKGKRSIGGGRARVRQALYMPALNAIKPNGIFHKKFTAMIDAGKPAKVAITAIMRKMLILANALIRDQRKWTPTPP

SEQ ID NO: 248722 - protein, 352 aa, unidentified
MIEVGMDQHKRFTVAAALNAETGQVIEQRFEHDDPGSVVAFLESFDEAVRVTLETTGNWYWLADLIEETGASVRLCHTVEAKRRRRSGAKNDRLDAIALAELSAEDRVPESYVPARDERDRRERHRFRIRLVRIQTALKNWIHALLAKLNVEVPFDDAFGKGGRAFLDALELREPYGGHLRAALRILDALAVEIRREESAIQATLKADERAAILLSAPGVGELTAYLMLHEIGPIERFPGPKQFAKYCCVTPGTEESADWRGHPGVGRAGNLYLKEAFTNAVLGAVRKDATIRTYYNRQVRHNGKKKAKVAAAHKLARAVYFMLTRRQTYRPAPRRKKMTTAGKPVPRLGRP

SEQ ID NO: 248723 - protein, 414 aa, unidentified
MLKIVYRVCCGMDVHKSFVVACIAATNEQGVTTYKSKRFSTFTGDLRRCAAWLAENNCKDVCMESTGKYWIPIYNILEHTCNIVLAHPKYVKAIRGKKTDKRDAKWIADIFKHDLVAGSFIPPPDIRQLRDLVRYRWKLTNFTTGEKNRAQNCLTVSNFKLDDVFSDVFGKAASAITARILEDPTEKITDISGFRTKGMKATDEQVLAAVDGEMCAEQAEKLRIIRSHMDSLELCKLNLESLILSTAEKYLPQFNLVMSAPGIQSFAAIGIISEIGVDMSVFPTSKHLCSWAGLTPQNNESAGKKKTTRISRAGAYIKPLLVQCALCAIRAKQFPEVRNRYLALKKRRGHKNAIIAIARMLLTAIYNMLKKNEPYNPELYRQADRPPTHREVSVEEAIFILQRQGYLVTAPSVT

SEQ ID NO: 248724 - protein, 453 aa, unidentified
MEQEEKISMEIVNPKAAGIDVGSRSHWVAVGQQESDIREFGVFNQDLFEMAEWLHQNHIKTIAMESTGTYWQNLYAVLISKGFHVILCNGKFTKNIKGKKTDVKDCQWIQKLHSLGLLSSSFLPDEKTEQLRTYCRHRANLLHNAASTSKKMQKYLRLLNLRLDVVVNDICGLTGLLIIRAICNGETNPQKLAALRHGNCRKSEEEIARALQSNGRKDYLFALQQELDTYDHLQNKITACDKMIHQMLNEIIDNDDNKKQHHIDPKTHKRINKNTPKDIDLNLKSYQMFEGTDLLAIEGMSYSTVLSLMSEVGLEGIKKFPSAKHFCSWLRLAPNNKVSGGKVLSSKIPKGSNRLKIALRNAANAIGNLKDSTPLRDFFQRISFRKGRVSAVSATARKLAVIIWNMVVKGVQYVNPEGYLFLDQKRKLGIVKRIQKQITKFGLTNEDLEIVIN

SEQ ID NO: 248725 - protein, 404 aa, unidentified
MTTRPQIWVGIDVGKQSHHACAVDETGKTVFSQKLGNDQAAIEALIARAGRAADRVRWAIDLTSPLALLLITALLAADQTVTYVPGRVVNTMTHGFRGEAKTDAKDAKVIAETARMRRDLGQVTMPDELVVGLTQLTRYRTDLMADWVAGINRLRDLLGSIFPALEAAFDYSNRTPLILVAGMCTPGEIRVAGIDGVTTHLTENGAWKPGIGKTAAAAVDAAGRQTLALPGEADTAMLVKRIAAKLLDLDREIKDTDKLITTRFRQHPWARIIESLPGMGPGLGAEFLVSTGGDLATFASAGRLASYAGLVPVPRDSGRVSGNLHRPKRYNRRLRRVFYMAALSSLRNPDGLSRRFYDRKRSERQIHTQALLALARRLVDVLWALLRDGREFTLEPPNPVATAA

SEQ ID NO: 248726 - protein, 421 aa, unidentified
MQSATSTTLPETPLNDVTAGIDWAVDDHAACIVDGRGREIARVMVEHTTTGLRDLVIFLAKHGVDEVAIERPDGPIIDVLLEAELTVVVISPNQVKNLRGRYGSAGNKDDRFDAFVLADTLRTDRAQLRRLEPDTQATTALRRACRTRKDLVAHRVAAANQLRAHLSIVFPGAVGLFADLDSEISLAFIARFDTQERADWLSPARLGKWLASVGYSGRTDPAVLHAHLTQAPRGLTGPAATAEAGSTHAMIALLTTLVEQIKILGRQIGDQLDAHADGHIFTSLPRSGRVRAARLLAEIGDCRAKYPTPESLACLAGVAPSTRQSGKMRVVGFRWACDKQLRDAVTDFAGGSRHANLWAADLYDRSRARGHDHAHAVRILARAWLYVIWHCWQDNAAYDPDKHHALQRVLTNRRATQNQAA

SEQ ID NO: 248727 - protein, 415 aa, unidentified
MNSSCQHKEASMTVYLGIDWSTKSHALTFINQEGGSIAQETIRHTAKGFARLDEIRAGLGVSAAECLVGIESSHTLLIDWLWAHGYKQVYVIPPRMTASRQASYSQSGARTDSHDAYLIANLLRTDLHLLHPWRPDSASIQALRTQVSLRMQLVAERVREQNRLSALLERYYPAFLNAFSLDTDVGLAFLQRYPTPQAAENLTWAEFEEFARTQRYASRYRTAAFARIQALQPVALPEIVEISQLRALVLAERLMGTRTLIKETEKTIQALYLAHPDHYIYDSLPGAGAVLAPALLSKLGDDRERFPTPGTLQAFAGTAPVTEQSGQRRMVRFRQACDKELRTITQRWAKASLEKSPWAVAYFTQARERGHSTSRVQRALANRWLAILWKLWQSNQPYDQDLHLQRVKARSRPRC

SEQ ID NO: 248728 - protein, 387 aa, unidentified
MKNVYSNVACSGMDVHYEFSKVTFRSEAGSVVRRERLDHRDRERLRERVSQWPKGLPVILEASFGWGWLSDLLEEAGLEPHLSNCYKVEQMRKARGWVKTNEKDADLVSLLPFEASTWWEVWRAPPEVRDQREQMRFRADLVALQTCVKNRIHAIFHRHGIFHDFSDLFGGQGRAFLSELCLHNPTGLPPQAWLALRGQVRLLDHVRWQLADIERNLHRQWVTTPLVRRLKTIQGIGLVLAHVLAAEIGRIERFGNHKRLASYSLLAPRANDTGEADLTAAPLGRHLGTRGNRTLKWAFIEAAHGAVRSGGRWRAMFDRVTQGGRKDRNRGYIKVARELVKVVYVVWAKGVPYAPIPPARPGHRKHQKKSRSGTGQLCHPMVHALGA

SEQ ID NO: 248729 - protein, 408 aa, unidentified
MNAVGIDVSKGKSMVAALRPMGEVALLPQEFLHTEVGLEQMAYAIIALGEDTRVIMEATGRYHEPVAAALHEYGIYVCVLNPLFIKQSGGGSIRKVKTDKADAMKIAKYGLDNWVDLREYTPMDTVRQQLKLCSRQYNLYMKTVVSLQNNLISLTDKTFPGVNELFSSPERADGHQKWVDFVMTFYHCDCICRVSENAFAERYQKWCKRKGYHFSAEKAQDVYLGSCGHFTTLPKNDNTKLLITTAAQQLLAGKMTLAALRTEMTRLAKQLPEYDIVRAMYGVGETTAVQLMAEIGDVRRFPRRSSIVGFAGVDPAVDQSGKHSAKSVPTTKRGSPHLRKTLYQIVCTYLKKSPVDEPVYQFLDKKRSEGKPYFVYMTAAQNKFLRIYYARVKECLEAIDAQQDTSQR

SEQ ID NO: 248730 - protein, 350 aa, unidentified
MDKELYIGVDVSKQTLDLAYYDGESIDWKKAHIKVSNNNAGFKKIGSWVAKVSKGFDIVLFCMEYTGLYTQNFRLWLEEKHYIYRMVEPRKMHRFEPDLDDGLRLLDRIKTDELDSFRIAIYCEQNHRKILRNPSKLPPPVYFKLKRLLAERKQTVKQSVLYKQQLHDICAYDTDLSVERKNGQLKTLNDALKGIDNEIDMYIKEDADISKNFSLLTSIPGIGRVVALETIVLTENFMAIDNPRKYACYIGVAPFKKESGTSVRKGSSVSKKGFKQAKADLSIACLVCMQHIPNIRDYWERKRKEKCSGIVFNAIKFKVILRMFAVIKRGTPYVETDNYRNGKNKQPGVN

SEQ ID NO: 248731 - protein, 343 aa, unidentified
MTKDTMIGVDLAKSVFQVHGASMTGQVRFCKKLTRVQFLRFMGDHPPAVVVMEACGSAYYWSREMVRLGHETKLIAPQYVKPFVKRHKNDAADAEAIVIAAQRPEMRFVEPKSEEQQAHAILFRGRERLIRQRTALVNALRSNLYEYGHIAPKGIGQIKRIEAIIEEPNSDLPDLMREECRDLLEQITEKTGRIETKSERLKGLAAEADTARRLQTMPGVGPLTALAIEAFAPDMKTFKRGRDFAAWLGLVPRQYSSGGKQRLGRVSKAGQADIRRLLIIGAMSRLAWHGRRSIPEGSWLDRMMARKPRMLVAIALANKMARAIWAMLTKKEDYRNPAWAAVT

SEQ ID NO: 248732 - protein, 304 aa, unidentified
MFGIGIDVSKATLDVAVHGEQFRQFSNDKRGFVRLIRWLKTWPIKQVVLEASGGYERAALDVLHAAGLPMVRINPARARRFAQGTGRAAKTDRLDATVLAQMAHLLPLTRYVPPAPWQQRLAEFAQCRRHLVQMRVSEMQRLRRLVDPDLIAMKQRYIAQLSDDLKQLDKAIAEQLEGQPGWKNIGALKGVGPILISTLACELPELGSLGSKAIASLVGLAPMNRESGTWQGQRRISGGRAVVREALYMAALTAIRYEPRLRAFYAGLKAKGKASKVALVAVMRKMLVILNARKRDAEVALGCP

SEQ ID NO: 248733 - protein, 369 aa, unidentified
MPDIAEKFASFVGVDLHKSTLTLSAVDAAGKDLAMLTCHTKCVDQVEAWIRSQPRPCHLAVEAVGFCEWFIDRFRPCVDRMDIADATELSNRRGKRRKNDRNDARDIACRLARGECPLGWIAGEEVSQLRKLGRHWHCLSRNLSRAKHSMRSMLLAANISGPKLDGASCQKWLLGHGHLLKEVQRSAFGDFLEIISLLERQRAELRRKIIFANRQPVFSGTVQLLKSVPGIDEIWACIIAAEVGDFARFPNADTLQFWAGLTPNNEESAGRTQSGHITKAGNATLRWAVGKAAVTLCRSDARQELIRRRLIQRIGKPKANVAMARRLLGILYAMFRDGAVYQGQESRGYERHANAARLVKKRRKDRAAA

SEQ ID NO: 248734 - protein, 397 aa, unidentified
MYIVGIDIAKRKHEAAVIDGEGAVIIKPFSFTNNCSGYNRLLAMLTKAKLPLDEVSFAMEATGHYWLALFTRLQKEGFRVQVINPVQTNSIRSFYIRQAKTDPRDALLIAEVIRFGHFSESTLHPENIYELRELCRGRHAIVSMQADVKRKVVALLDQVFPEYETAFTNMFSDTSMAILQTCPTPKELSEMPLEELCHLIEVSSHKRFRMAKAQELQALARNSFGFAMAGDVFSTMIRLYAKHLDFLKQQVREMDRKIAEIMETLDTPITTITGIGLTLGAYILSEIGDISRFSSAAKLAAYAGIDPTMRQSGEYNGVRNRMSKRGSPYLRHAIWLAASSAVLHDPALKLYFQKKRDEGKPYMASVGHACRKMVSIIYAVMRDNKAYTPYIPNEISA

SEQ ID NO: 248735 - protein, 353 aa, unidentified
MEYIAFDAHKHYTLASVARPDGRLVREQRLPHERGALQQFLARCEPGSPVAVETIGNWYWIVDEIEAAGCLPKLVHARKAKLMMGEINKTDKLDVRGLNQLQRNGTLPTVWIPPGELRDQRDLPRTRMVLVRQRTQLKNRIHATLAKYALHHLEVSDLFGVRGRALLRQRLTLLPPCTAYATQHLLEQVETLDRHVRAFEQQMQTVFKPTPAVQLLLSLPGVGLMLAVVIALEVGSIARFPTADKLAAYAGTTPRVHASGGKTRFGPSRPDVNRYLKWAFVEAANAICLNRSRAPRRHVSRLYERVARRKGHQKAIGAVARHLAEATYWILTKQEAYREPKALTVSSTGDKRG

SEQ ID NO: 248736 - protein, 379 aa, unidentified
MDFSTVARLPVGEKPATLFVALELSKATWLVALHSPAADKISLHRLAGGDTQGLLTLIERKRDQAQTALARPVHVISCYEAGYDGFWLHRLLCASGIDNRVLEAASTLVDRRSRRAKTERLDAAALLRTLMALERGEPRVCRVVRVPSPEHEDTRRRSRERARLVNERTQHTSRIKGLLMTQGIRDFAPTRRDWRERLEGLRTADGHALLPCLKAEIARECRRLWQVIDMIAEVEAEQHQVAAETTTGASQLSRLRGIGLTIASVLGNEVFFRTFQNRREIAGYLGLASSPWNSGSVSRDQGIQRSGNPRGRQTAIELAWLWLRHQPESGLARWFHERVGASKGRIRRTMIVALARKLMIALWRYVTQGLMPEGAVIKA

SEQ ID NO: 248737 - protein, 436 aa, unidentified
METIFERVSALDVHKAQVTACVRVPDGSGKRAVHLAEFATTVRGLLALADWLKEYGVTHVAMEATGVYWQPVWHVLEEDFELMLVNARDVKNVPGRKTDVSDAQWLCQLMEAGLLRSSFVPPKSQRQLRALTRYRKTQIAERQREANRLHKALEDTGIKLGNVASDIMGKSGRAMLDALVAGTTDPEVLADLAKGRLREKLPALREALEGHFEAHHSLIIGAILAHLDFLNEQIDGLSEAIGELLGPTGLVSVKLASTIPGVAARTAEVMVAEIGTDMSKFPSARHLASWAGRCPGNDQSAGKRRSGRTRKGSKWLGIALEEAALGAIRGRNTYLSRRSIPAPQAAPRTRPRTRRGQTLDRDRLLAHVHQRRGLPRPRRRLLPTPRPRQSHEAPRRQAASPRAHRHAATTGGNLAWAQRAFPISFPQATSSLARGR

SEQ ID NO: 248738 - protein, 410 aa, unidentified
MKVLHRRCAGLDVHKAEVVACARVFAGRKVVHEVRRFGTTTRELMALAAWLESLEVTHVAMVATGVYWKPVWHILEADFTLILANAQHVRNVPGRKSDVNDATWIADLLAHGLITPSFVPPQPIRELRDLTRTRRQAVGEAVRHQHRIEKILQDANIKLSSVLSDPMGVSGRRMLAAMAAGETDAGKIAELGSPRLECGRGALIEALSGRVSEHHRYLIGWHLRLLDEIEAKIAELDQRIEAQIAPFRAAIERLTGIPGIKQVAASAIIAEIGADMSIFPTAGHLLSWARIVPRLDESAGKKRSRRVKKGGAWLKPVLVQCARAAARKRGSYYGAQYRRLKARIGDQKAIIAVAASILTAIYHMLRDGTEHADLGAAYLSRREGDSKAIAHQLARRIRALGYQVDLREAA

SEQ ID NO: 248739 - protein, 423 aa, unidentified
MTVVYPICCGVDVHKTFFVATIITTEGIEPKYKKKRFSTFNNEILAFKSWLSENNCRDVCMESTGKYWVPVFNLLEDSINVTIANPKWVKTIKGNKDDAKDSKWIGDLFRIGLVPGSFIPCKDIRILREYTRYRFKLVSCKSSEKNRYQNVFTVCNVALDSVVSDMFGKSAASITDYIVSSDTFDPDHCVSLLQRSLKKKADEVVASIDGFQMTSPQKTRAKMVKEHYDYLLEHIQKIDTVIDDLVKPYESAINLLCTNPGIKRPSAITVISEIGTDMSHFGSSKRLCRWAGLTPGNNESAGKKKSVKITRAGVYLKPALVEIAHAAVKSTKSPYYKLKYERILKRRGKKRAIIAIARMILTAIYHMLSTGEVWNPSDLNQIDMPLELREKEVRKSLCYAAKLLVEHGLIAPDSIQFTDTSVA

SEQ ID NO: 248740 - protein, 361 aa, unidentified
MKRKVYVGMDVHKETIQIASLTSNTKDLVKEQQIKHEEVQIKKFIQKLKLEKSEIHCCYEAGVTGYPLYRYLKTLGVNCTIVAPGKIPRQSSDKIKTDKRDAIKLARLLRSGELESIHVPSEEDEAVRDYLRSRDSLRLDLGRNRQRLMKFLLRKGIKYSTTKYWTTSHYKWLNNLQFENEILQTTFNDYYSRVRVQEENLKAMDKKIQEIAESEPYREKVGILRCFRGLTAMFLLSEVNDFKRFKTAGSFMSFLGLVPGEYSSGSKRKQTGITKTGSPRLRRILTEAAWQHRFSGTGSKVVVARRVGQSALVVSLAEKASLRLHKKFKNLQLRGKSPQVMITAVSRELSGFLWAAMNLVV

SEQ ID NO: 248741 - protein, 415 aa, unidentified
MSHPLLVGVDVHRQTNTVCLMDAAGHVLGPRRTIDNNRPGAAVLVDQVAQKMAQGDFDAIQIAAEATGWYWWHFFQTLARDPTLQQWSLQLYPLNPRLTANFAKTYVDRDHTDVGDAFVIADRLRMGRDLPPPYQLDARYLALRLLTRYRFHVIHTLTREKAYALAILYLKASEYGRLKPFGNLFGAASRAVLQEFASLEAIAAMPFDELAEWLDVRGKRRFADPQDNARTLQQVARDSYALPDALQLPVHQILGWSLQHITFLEGQIKRLDSAISEQLTNIPHTLETIPGIGPVFAAGIVAELGDIARFAFDQAKVAKFAGFKWKKHQSGDFTAEETHLTRTGNRYLRYYFCEAANAVRMHDAEYAAYYDRKYREVRQHQHKRAIVLTARKLVRLVVRLLTSNQSYQVRRPASS

SEQ ID NO: 248742 - protein, 359 aa, unidentified
MRQLYAGCDLHGNSNLIGIVDGEGKRVFKKKLSNDFSLVRDTLKLFQEELVGIAVESTYNWYWLVDGLMEEGYKVHLANPSAIQQYVGLKHADDKHDAFWLAEMLRLGILPEGYIYPKQERPVRDLLRKRGHLVRLRTSLVISLQNILSRNLGRKVNVNDVKALREDRVTPLLESSEELALAGRVSKEAIDFLTHQIRRIEGVVEKRIELKEAYRYLLTLPGVGKILALTMMLETGPIGRFATVGDYVSYCRKVPSQWTSNGKRKGSGNKKNGNKYLAWAYAEASELARRFYPEPRAYYNRKMQKTNAPVAHSALAHKLARAGYYVMRDQVPFESQRLFGRGRGWNGEPELGLVKSHEA

SEQ ID NO: 248743 - protein, 369 aa, unidentified
MEKTIKNIGLDVHKNSISIGIADDGRDGEVRFYGKIDNDMNQLDKVIRKLISKGAVLRFVYEAGPCGYGIYRYLTNNNMDCVVVAPSKIPQQSGNRLKNDRRDSLSLARLHRAGELTPVYVPTPEDEALRDLVRARMDATRALRVAKQQLGAFLLRHDMIYSGKTKWTKAYFTWLASVPMRHSAQLIVLQEYIDTVTDCISRVHRLTEQIRLQSSKSGRHELIKALQSMRGISLIVAATIASELGDLTRFETPGKLMAFLGLIPSEHSSGDQVKKGSITKTGNRHVRSALVEAAHAYRFAARKSRTIRKRQEELPKGVIDISWKAQCRLCARYQCLIAKGKKVNVTKTAIAREIAGFSWAIAKELQKAV

SEQ ID NO: 248744 - protein, 337 aa, unidentified
MRFIGVDLHSNSMTVCFLTASGKEELQAYSLSALAEFRQRLRRTDWIAVEATGNTRWFVGQIKERVGRVVIVNPNQFEVIRKSVKKTDRHDARALAQFLSKDLLPEARLKDERAAQINSLAETRDKLVKLRTTLVNKLHALHRGRGINSRRSQFLSEKGLRGVPARDWGAATRVEVEVIVTQLRSIQDGIQRLGAQMAESGAQLKGHANLASIKGIGPKAASILLSVIGEVNDFESEEKLASYFGIVPRVSNSNETVQHGRITKRGSKLGRTTLVQCTLVAKKYSPYLQNFYERIKARKGGGKAIIAVARKFLGIIYRTLKNDWVFADFPNFVLAER

SEQ ID NO: 248745 - protein, 399 aa, unidentified
MGERSVRAWAGVDAGKGHHWAAVVDEAGTTLWSKKIVNDETAILTALGEILELAEQVHWAVDISGTASALLLALLAAHGQQVAYVPGRTVNRMAGAYRGEAKTDARDAYVIAETSRQRRDFTTIEVPAQLAADLALLTAHRSDLVADRVRMINRLRDVLTGIFPALERAFDYSSQKGALVLLTGYQTPAALRRRGRARLTAWLASRSVRGADAVAATALEAADAQRTVLPGQDVAATIVAGLAAQLLALDDRLKRIDKQIRDTFHAHPQAEIIESLPGIGPILGAEFVVAAGDLAAYADAGHLASAAGLVPVPRDSGRRTGNMHRPKCYSRRLRRVFYLSAQTSIMRDGPNRDFYLKKRAEGCKHVQAIIALARRRVSVLWALLRDNRIFTPDPDAQAA

SEQ ID NO: 248746 - protein, 370 aa, unidentified
MRKDTLYVGLDTDKKHIDIGLAEPLPKGEVRYWGKIANDTAAFERVRKRLQKDGRELVVCYEAGPCGYGLYRWLNGKPGVSCQVVAPALTPRRPGVRVKTNRRDCLTLAKLLRAEELTAVWVPDAAHEAMRDLVRARGAAKEDLNRCRQRLGGFLLRQDIRYAGKPWTKKHRAWLGRLAFAEPAHRLLLGEMLDALDQAQARRDRLTDHIAELVPNWSLAWLVEALQVLRGYQLINAASVVAEVGDPRRFDNPRQLMGYLGMGVSEYSTGERVRRGGITKTGNKRARVALIEAAWTYARPAKRPKASAARQPAAVRAIADKARHRLSARYRKLIARGKLPAVAVTAIARESLGFIWAIARAAAPEAPRQR

SEQ ID NO: 248747 - protein, 341 aa, unidentified
MKLLRQNSGIDMAKDTFVAGFTTIDNDQTVLQKRPKTFNNNIAGYVEFLNWVNKFRSSDIQMNFTMEATGVYYEGLAYFLHERNKRVSVLLPNTVKKFGESLNIKSKTDKIDAKILGQMGVERVLPEWKVSSKIYRELKTLTRERQRLVENRTTVKNQLHAEKHTAHPMKTAMNRMSNHIKYLDKQIASIEKELEKKVATDDFVSEKIKKTTTIPGIAFLTAVTVAAETQGFDNFTNSRQLSSFAGYDIQLKESGKFKGKTKISKKGNSHIRRAMYMPSLSTMVHSKTYKNIYDRLYQKKENGLVAGTAIQRKLLGIMYTLWKNDTVFIDNYESKKMSYKD

SEQ ID NO: 248748 - protein, 346 aa, unidentified
MFVGLDVHKKYCYASVIDEEGQLVSEGRFLNQLEELDSFLLKLEPGSEVVLEATAIWEQLYDRMEEQGFEVTLAHPLKVRAIASAKVKTDRIDSQTLAQLLRANLIPSSYVPQLPMRTLRKEVRHRATLVRWRTQVKNNIHLLLARQGLQFSKTDLFGKAGMAFLHSLMLEEDMQSVLEDYLAILQILNERITLTTKHLQQKSKTIPQVELLTSIPGIGTYSALLLLAEIGDIGRFSNSKQLCSYAGLVPRVHQSGMTEYYGRITKEGSRWMRWILVQAVHQTVRRPNVIQRFYKKLAHKKGTKVALVASARKLLCYIYQMLKQEVRFEELKVVQAQGPPAFATGH

SEQ ID NO: 248749 - protein, 406 aa, unidentified
METPEVRVGIDVGCRQHRVAIGDGAGRVLEEFDAAHTRAGLAQFFARVEHHTQRQPTARVVVAMEGVNGWARPLDQQIQQRGWQLLNVNNLKLARFKEIFPGPAKSDAIDARKILELLALRATTPVARTVVQEVTPHTETNDRLKRLTRRRRQLVGEKGRVLGRLQADLQAVCPGLVTITGHVGNRWFLHLLTFRPDLRQLARLRPQSVRQIRGVGGHYAAVITQWQPTAIFGRELEWVGPMIHADAQRVLALLDQIDALEAQIATLVQQSSLARRIDSIPGFGLVCSAELAGEIGTPERFASEASLALYIGMAQLDNSSGQRVGSKPARQVNTRAKGAMMTAADRHRKFVPQSQAYYERKRAEGKTHNQAIRALGRHLVRVLWAMLRHDRDYELREVTNHNEQAA

SEQ ID NO: 248750 - protein, 343 aa, unidentified
MTRFVGLDVSQKLTAICVVDETGRRLWRGQCATDPGQIERAVRGHAGEGAKIGVETGPMTPWLVHELRGRGLDVVCLDARHASAALKMQMNKTDQNDAEGLAQIMRTGWYRPVHVKSLDAHRARALLGARAQLVGMTTRLSNHIRGVLKTFGMLPGAMRGLPFDRRVEELLAGRDDLAPIVRPMLEAWRKLREQIAAFDKEVRALAKKDPTCRLLMSVPGIGVLSVLAYVSTVEDPARFARSRSVGAHMGLTPQQYQSGEVDRSGRISRCGDTLARTLLYEAAVVLLTRVKRASPLKDWAQAIAKRSGIGKARVALARKLSVILHSIWRSGEPFRWSEQAAAA

SEQ ID NO: 248751 - protein, 375 aa, unidentified
MKDHSEAFVAFDTSKLRNAVAIAEAGRSGEVRFLGEIDNTAVATAKLVTKLSKQYDRILFCYEAGPTGYGLYRQITGLGHGCMVAAPSLIPKKAGDRVKTNRRDALGLATQLRAGELTAVWVPDQRHEAMRDLIRARGAGVEDLRRKRQHISSFLLRLGIHYTGKKTWSKTHMKWLASQKLEHAEQRIALEEMLLAVRQAEERIARLEEAIRAAVPDWSLAAVVEALMAMRGIDMIAATAFLAEIGDLSRFRTPRELMAFLGLVPSEHSTGDKVKRGGITKTGNRRARCILAECSWAYRHPPRVGKDKQARVAAAPRGVREIAWKAQHRLYKRYRALTRKGKLKTVVITAIARELAGFIWAINRDISTAGMAAKP

SEQ ID NO: 248752 - protein, 414 aa, unidentified
MEDILECCCGLDIHKESIVACLLKGPLGAELKPRSEVREFGTQLKDLVALRKWLEKHECHYVAMESTGIYWQPVYAVLETALSDEMHLLVVNARHMKNVPGKKTDMRDAEWIATLLRAGLLKGSFVPERDIRDLRQFTRYRKALIRDITSQKNRIEKLLQSNGFRLSSFLSDIFGSSGLAIMHQLVQVGSISSQSLDRCLKAQARQKSGEILSSLNGTLSVPQRTLLKMQLAHLADLQANLREVEAEIHDGFSQFQGPIELLDSIPGIDLTAAYAILAEIGKEMSAFPTAQHICSWAGLAPGSHKSANKQKRQRVTQGNNYLKTMLCEVAWVIASHKKLYLSGWYWRLKQHTDAKRAVVALARKLLVIIYTLLKTNQPYNEQKFMERKNASEQKRVKRMMNELTKLGYAVSLAA

SEQ ID NO: 248753 - protein, 368 aa, unidentified
MGWAPPSGGVVMPRLAREEHRKEAAVSNACTIGLDLAKHVLQAHGADEAGRVVFRKRLRRDKVLEFFASQPRCLVAMEACGGAHYWAREISRLGHEVRLIPASYVKPFVKRQKNDMADAEAICEAAQRPAMRFVAVKSEEQQASAVVFRARDILVRQRTQLINALRGHLAEYGMVVAQGPSHVAKLISHVEDPTSGLPDAARSTLGVLIEVLKSLDDRLRRLDTEIVRRAKEDEVARRLATIPGVGPVTATALAALAPAAETFRKGRDFAAWMGLTPLQRSTGGKQKLGRTSKMGERTLRRLLIIGASSVVQQASRCGAPEGSWLAQMLSRKPRMLVVVALANKMARTAWALLAKGETYRSPAVAASG

SEQ ID NO: 248754 - protein, 395 aa, unidentified
MRFAGIDIGAEHHVVAVVGDDGAVVNKAVRFAEDAEGYERVRTVLGDPEQLLVAMEATGHYWQNLFAVLASHGYQIALLNPLRTSRFAAEELARTKTDAIDAVGIARFTQQKRPAATPLTDQATLELRELVLMRERLVQEVGDKVRQLHRVVDLGFPEFTRHVKKLDTELALTLLHELPTAAAYKRVTPAWIAKQVYDGRHRVGPELGKALFEAANVSVGQHHGEAFQLEIRYLCEAIRLLKRQLRELEERIETTLGDNEVGKLLTTIDGIGPQTSARIIAAVGDPSRFRSAAAFAAYLGVVPALKHSGKHTPSRAGCSPLGHARLRKALWMPVLSAVRRNPWLRAFYQRLRAAGKPPKVAMVAALRKLAHAIYSVAKNRKPFVPRLSAEAAEAP

SEQ ID NO: 248755 - protein, 346 aa, unidentified
MLYAGLDLSRKRLDVCLLDEDGATVAMTAAPPDADGLRGLVARLSCHNQPICAAIESMNGARFVHDALERCGWEVEIADAQRVKGLAPLACKTDRIDARVLAELARRDLVPAIWLPDPEVRAERERARFRLHLVRHRTALKNRIHATLIAHGLSAPVSDLFGVRGRALLASFALPEPWAASTAAALMLIEQLDEQIGELEAELRDLGADHPYVPLLMSAPGIGWVLAYTIAAEIGDIARFAAAKKLVGYTGLCPRVYQSGASDRRGPLAKNGPKYLRWALIEAATHAASHPCYAAHHQATRKRLGRQRGKKIARVETARKLAEAIFYMLTRDQPFAPAGPALPLVA

SEQ ID NO: 248756 - protein, 421 aa, unidentified
MKSNTQNAKIEAITEKTLVLGIDVGSETHYARAFDYRGIEYSKKPFKFSNTEAGFVTFKEWILDIKERHEKDKVVLGMEPTGHYWFNLGKFLQDNEMKPVLVNPHHVKKSKELDDNNPTKNDRKDPKVIAGLVREGRYMIPYLPDGVYADLRTASNIRFQLQAELTRIQNRISRWFNIYFPEYKTVYGKPDAKSGMLILKAAPLPEGILTLGIDGVNQIWRDAKLRAVGKARAKTLIEAAEHSVGSKEGAVAARMEIRMLLEDYESRSIRLQEVMTLIEGLVKQIPMAEKLLEIKGVGIRTVSGFLAEVGDISRFNNPKELQKLAGLALVENSSGKHKGETTISRRGRKRLRYLLFEVAMSLVSKNQEFRRLNPLKKMQSLMAIAAKLIRVFYVMLTKGVNYDPKKMVNDIKRPAVYLQTA

SEQ ID NO: 248757 - protein, 350 aa, unidentified
MSITDYITLWRYLHPQLFSNPTIMVTSVGIDVGKSKCQVALRDTSGEYIEKSFCNNGEGLAQCAQFFNTRGVSKETPLVLESTGEYHLLFTMTLKDTYHYGSVKVINGILTKKYAGANIRKIKTDSVDAKILADIGEREKLINFSKTKEELIQRKRITLLKKLEHIRQQLRSSTDDLEETAKSLGLPVEAEQRSKVILSAVGKEIKRLSKEISENAESELADELTSIPGVSRSAISIVLSMICNRQFTSRNQLVAFCGIDLTIRESGTSVHGKRHLSKRGDPFLRKKLFQMAWALKMHNPEYQKYYEKKRGEGHHYFTCLMAIARKFLRRIHGTQRRLENGKLITASNDI

SEQ ID NO: 248758 - protein, 422 aa, unidentified
MIMGFTKPIEHSNFITKEGDFMNPLYVGIDVSSKNNVIYLMLPNGDKHSSFSLANSHDGSTQLVKRIFTAMTSNNIDSVLIGLEATSVYGDNLVYFLKEDTTLASFDRKIHVLNPKQVNKFKESYNDLPKNDYVDAFVIADCLRFGRINKEVYMDDYRYKALQNLTRARYFAVTNLTKEKQRFINVLFKKYSTMTQEKVFSDTFSTTALAVYEKFESAETLAKMDLQELTAFIMEKGKHRFPDPDAVAKALQKVARSSYRLPKTVNDSVNQVLAISITSIRAFDKAITKQMELLPNVLISIPGIGPVLSAGIMAEIGDINRFQNQAALAKYAGLAWQQHQSGDFEAQTTRMIHSGNRFLKYYLCEAAFSLVRCDKEYSRFYHLKYKEVNRFQHKRALALTARKFVRLVFALLKDNRLYRPAE

SEQ ID NO: 248759 - protein, 358 aa, unidentified
MNSNKYVGMDVHTATISVAVRDVAGKLIMESVIETKASTILQFIQGLRGNLYVTFEEGTWAAWLYDLIKPYVTNVVVCNPRRNALLKEGSRCDRIDARKLADLLRTNLLRPVYHGEKGLRTLKELARAYLTVSKDLTRVMNRVKAIYRGWGIPCGGQSVYHPRHRKEWLSKIAQVSVRRRAELYYEQLDALVLLRKKARQELLAEGKKHQAWKLLRSIPALGPIRAAVLMAIVQTPHRFRTKRVLWKYSGFGVRTHTSADHRYVKGQLERSKKPVSVRGLDRDHNHQLKDLFKGAAIQASTREGPFREFYEALVAKGMRPEMARLTLARKIAVIALTVWKKGGAFDAKYLKPQTALCL

SEQ ID NO: 248760 - protein, 449 aa, unidentified
MMEPVEIQDEEHEQILERVAAVDVAKASGMVCTRVPHESRPGRRVTKVWEVPATTNAIMELGEYLAGLEVQKVTLESTSDYWRPFYYLLEAAGLEVQLVNAREAKGVPGRPKSDKLDCVWQAKLTERGMLRPSFVPPAEIRQLRDYTRLRVDLTRERSRHAQRLEKLLEDALIKLSTVATDIMGVSGRAMIEALIGGERDPQVLAGLARGRLKVKHAALVQALTGRFDAHHGELARMLLDQYDALSAQITRLTARIEELIAAIPEARGVDASGATGPGAGEAPDAAVRSAIARLDEVPGIGRHGAQLIIAEVGLDMTRFPTAGHLASWAKLCPRTIQSGARSRGGKTGKGNPYLKGLLGEAAAAAAKTDTFLGERYRRIVKRRGKLKALVAVARSILVIIWHLLADPAATFCDLGAGYYASRTSTDRKLKNHIRQIEALGFTVSLTKAA

SEQ ID NO: 248761 - protein, 434 aa, unidentified
MSRGDRRRNERLTRLRLVVRRDLAVVAVDLASARQAVVVADHDSRVLGRRMFRCTPWGIDSILDWAVGVATHGGFDGVVLGCEPTGHRWEPLLDRSRARGIAMVCVNPMLVAHSREGEDFTRDRSDFKDSTVIARLVSELRCFVPYSPEGEWARLRHLGRRRADVVIEVGSARQTLADLLECAWPTVLEAAGEPFDSTCWRACLDVSTDPTIIAAMTLEDFGAQVRAALPRWGAKRPWRPILCAVWDAAHHPGGVAWERPAALERAALVLEDWRLSLAELACLEDRMVAILDNLDLTGLVCTIPALSAVGAAAILAEIGDPDRFDCARAWVKHAGVCPRDNESGNAKGPTKVSGRGRPLLRTAAWRASWPLIVHNEVYAARYAHLTTREDNRLNDGQARIAVVASLLRQLYVVVTRRVVWNPALAAGKEVDTAA

SEQ ID NO: 248762 - protein, 382 aa, unidentified
MDTAATCNLEYTLERMLYMAIELDNNRWKLGFTVGFGQRPRERNIAARDTMALEWEIRSAKRRFHLPGDCRVLSCYEAGREGFWLHRYLVHSGINNVVVDAASMEARKKRRRAKIDRIDLEKLLRMLIRYHAGDEKVWSVVRVPSVEAEDRRQLHRDRWALTSECNRHTNRIKGLLATQGISLPVNENLPEELNHVRKWDGSPIPPMLQSRLIREYERFRLVEQQINAIEQEQRRAIRQQEHPSTVMVRDLMRLKSIHVHTAWPLTMELFSWRQFRNPQEIGGLVGLEPVPHQSGETDRELGMSKCGNARLRSLAVEFAWQWLFHQPNSELSHWYEKRFGNGSRRVRKIGIVALARKLLVALWRYLETGEIPEGAELKAVIL

SEQ ID NO: 248763 - protein, 338 aa, unidentified
MPQWSCPSGAAALMAVINHQKQVIESAHFENTELGLKAFQKWLKIYKVSFDENTVLVIENTGIYHRLLWAFCNRINLQIHIGNAAHIKWSFGIARGKNDKIDAIRLCKYACKESDELKMSKPLNPKLMQLKDLQTSRVRLLSQKNANQSYLKELKNINDKATQKVLEQAYKTAIEGLEKSIKSVEKLIKKLISDQDSLQKSYDLLLSIPGIGNITAIYLIVCTNNFAGNISGKQLASYAGVAPFGNSSGTSIKKPEKVHKMANKELKKILHMGAMSVIHCNPEMKHYYSRKMLEGKHALSIINAVKNKLVLRAVAVIKSQTPYVDNFVKSEQILKNAA

SEQ ID NO: 248764 - protein, 310 aa, unidentified
MDVIIDKGCGLDVHKETVVACVMGTGIRKEIRTFDTMTGSLLRLKSWLIDLGITHVAMESTGPYWKPVFNILEDSFEVILANARHIKNVPGRKTDVKDSEWICKLLRSGLLTASFVPPQAIRDLRDLTRYRRKLIQAVSAEKNRIQKVLEDANVKLSSVASDTFGVSAGKMVRAIISGNVDPVSLADLAVGRLKSKKDLLRDALQGHFRDHHGFMIQASLDHIEYMEKTIAKLDQQINEKLKDYHRERELLESIPAVKEQGSASILAEIGADMSVFPSADHISAWAGMSPGNNESAGKKKVAKQPTAIKI

SEQ ID NO: 248765 - protein, 425 aa, unidentified
MQTDGANQQQQYAASIGFDWGDQQHAVALQAAGSGRVETQTIKQTPESLHDWVLGLRNRFGGRNVIVAIEQSRGAVTNALLGYGFVHVLRVPPKSLARYREAFYPSGAKDDIPDASLLLEWARDHRDRVKVWTPDKPETRALQKLTEFRRDTVGRRIVITNMLTQSLKEYFPQALSWAGELNTPMACDFLEKWPTLVKLQKTKPAQIRKFYQEHGCRRTEVIQQRLEEIRSARPLTQDSAVISTSITVLETLIPQLRCLIDAIDRIESQIHVLFNKHEDRDIFDSFPGAGPVMAPRLLAAMGSDRSRYNAALEVQQHSGIAPVMERSGNSTWVHRRFACPKFFRQTFHEFAGLSIRYSSWACAYYKMQIDKGKGHHAAVRALAYKWIRIIYRCWQNRVPYNEEIYLEALRRKNAPLLEFLDQAAA

SEQ ID NO: 248766 - protein, 392 aa, unidentified
MVVSVGIDVSKDKHDCFILSSEGEVLVDVFTIPNTMDGFNCLLQRIQDCTTPQGKMKVGLEATGHYSYNLLGFLLDNGLATYVLNPLRTNLYRKSLSLRKTKTDRVDARTIASMLLSDAGLKPYTNTAYHNEELKSLTRYRFDKVKERAKLKSSVSRLVCILFPEMEKLVSTLHTASVYTLLEEFPGAKQVARAHLTRLKSLLETASKGRYKRDMALEIREAARNSIGSRMPAKSLELQHTIRLIRELDTEIVEIEEQIQSLMDELASPITTIPGMGFRMAAMILAEVGDFTRFDSPDKLLAYAGMSPSTYQSGQLKNCYPHMEKRGSRYLRYALYNATKYVCRWDPTFAAYLAKKRAEGKHYNVALSHAAKKLVRLIFAMEKSRRPYCLAT

SEQ ID NO: 248767 - protein, 351 aa, unidentified
MNYIGVDYHKKYSYMVVKNEDGRVERRGTVNNIKEEVQQFLEPYRPGMAVVEATRNWGLIYDWLDEVLDDVTLAHPLKVKAIAEARIKTDKISADILADLLRADLLPKAYAPSKPTRDIKNILRQRMFFVRIQTMVKNRIYDILDRHPEVLAQVPEASDLFGAAGMQWLGQTTLSGEDNMLLSSELRLLKYLKEEITQSNGIVKKLAKKDARARLLQSIPGIGPFFSVLILYEIDDISRFRDEKKLCAYAGIVPSTHASGGKVFHGRITKTGNKWLRWAAIEAAQTAVRSDSEFRAYYQRIKVRKGTNTAKVATARRLLTIVYRLLRQGRFYERRTTPQEKTIIPAALVIS

SEQ ID NO: 248768 - protein, 355 aa, unidentified
MKGNADMLVLGIDAHKRTHTVVAVDDAGRKLGQHTTTSATTTDHLALVRWADQFGGDRRWAVEDCRHLSRRLERDLLTAGEAIVRVPPKMMAHARDAARSYGKSDPIDALAVARAALREPDLPAARLDDETRQVRLLVDHREDLIGERTRQINRLRWHLHELDPTWDPPQRSLNRYKQLDEIAARLAGVDGLVARLALELTTSVRDLTVRINDLEREITVLVKALAPTVLTRPGVGVLTAAKLLGETADITRFRNKDAYARHTGTAPLPVWSGNRTRHRLARTGNRQLNCAIHRIAVTQGRCHPDARAFIARRIASGNTPSEARRALKRRLSNLVYRDLLHDASTIATRPSVLAA

SEQ ID NO: 248769 - protein, 373 aa, unidentified
MPRYSTAFGMDVHLRSTTVCALDAETGEAVTRRFRGNPWGEVAEWMSGFPGPSLAAYESGYLGFAPQRELSGLGVDCVVAAVSKVPRSAADLSSKNDRNDAVRMAKAILSHDVTPVWVPSPEIEGLRDLAGAHDAATARLAAAKQRLLAFLARRGYAYGGTTPAGNPRKYWTYDFLRWLDKVRPADDGGIRALAALRNEVEAAAEARDDLLAEYRAAVAAGPLSAEVEALQSIKGCGFALAAAFASEVGDFSRFRSGRQVTAYFGLAPRQRSSADSVRLGGISGAGNALVRRLAVEGSWSYVQANHQPKLMPKGSGVPLEIRMHGRKGSERLLRRRGEMLARGMPQAKANAATAAELVRWLWALGMMCREATE

SEQ ID NO: 248770 - protein, 377 aa, unidentified
MKNVRFVGLDVHAQTIAVAVAEAKGEVRSLGVIPNRPESVNRLIKKLGKVQDLRVCYEAGPTGYVLYWQLTRMGVSCEVVAPTLVPVKAGDRVKTDRRDAQKLARSYRAGDLTAVWVPDAAHEALRDLVRAREAAKRDQLRARNRLGKFLLRQGRRAPEGTGAWMLKHLRWVQQQHFEHSAQAATFVDYLHEVEHAAARVKRLEQALDRAIEAAPASQRAVIEALQALRGVAKMSAVTLVSEVGEFSRFAHPRQIMGYSGMVSREHSSGPHIRRGPISKAGNAHLRRILIESAWACRHRPRVGAKLAVRQRHTSAAVQEIAWQAQHRLHRRYCTLVAKGKPKPKVATAVGRELLGFIWAIATEVETSLRVSEPRRAA

SEQ ID NO: 248771 - protein, 461 aa, unidentified
MSSPAESVDDGEHEQVVVRVAAIDIGKRIGKVCTRLPHETKEGRRHTRVWDVPATTGPIIELADHLVCQGVERVVLESTSDYWRPFFYLLEARGLAVWLVNARDVKNVPGRPKTDKLDAVWLAKLAERGMLRPSFVPRPEIRRLRDLTRLRDDLTHERTRHKQRVEKILEDALIKLSTVLSDIFGVSGRAILDALVAGERDPKKLAALAHGRVRATRAELAAALTGQFSDHHAYLVRLLLDQVDDLTRRIDDLTARIDEAIAALPMPDNDENAPPPPGAADNGPPTTGRAAPSGTDLLDRLDEIPGISRHTAQVILAELGTRMAQFPTPGHLASWAKLAPRTIQSGATTRRGKTGKGNPYLRGALGEAASAAARTQTFLGARYRRLVKRRGKLKALVAVARSILIIVWQLLNNPATRYHDLGTDHHTTRINIDRRKRTLLRELAGLGTTQADITAALGATA

SEQ ID NO: 248772 - protein, 400 aa, unidentified
MAESLIVGIDPGRYGHGVVVLRPDGEEALRERVANEAAAIEALVDRVVELAGGPGRALWVIEADGGDGAVLIGELLARDELVVTLTPTEVAVRRKGRRQVHKSDLIDAELCAGIGREQQATLRRLVAVPEVVAEVRVLARYQDGLIRDRTRLINRLRFLLSQYWPEFLAARAFAALDGDAVTALLIELPTPSAVRSKTPFELAGFLAAQRYRRRPLERAEQILAAAQVGSRPQEAVYGRLVAEVAGELRALKLRIEALDEEIRHRFLLQPEAPIILSLPGMSHRTGPRFLAEVGALARFGSPDALAAYAGLTPTLWQSGRSSGTHFLTRRCNLHLRQACWSAALGSLRTPASRRFYDRKRSEGKSHHQAIIALARTQLRVLWTMLRAGTLFSTERALEAA

SEQ ID NO: 248773 - protein, 346 aa, unidentified
MDYFAGLDVSVKETSVCIVDETGKIVREVKVASEPEPLLAVLTNPTLQFRRIGLEAGPLSQWLFSALAEVELPVICVETRHMRAVLKAQINKTDRNDARGMAQMMRVGLYRPVHVKTLRSQKLRMLLTHRKLLQSKAIAIDNDLRGTLRNFGLKVGMVSVAKFEARIKELIENFSDLALLVEPLLVVRRALREQLGILHRRLLAVVRDDDVCRRLMTVPGVGPVVALTYRATVDVPARFRKSKSVGAVFGLTSAKYQSGEIDRSGAISRCGDEMMRTMLYEAAQTVLFRSAKWSWLKAWAMKIARRRGTKKAVVALARRLAVIMHRIWVDGSEFRWTREQIAPVAA

SEQ ID NO: 248774 - protein, 343 aa, unidentified
MKLTRVGVDLAKQVFQVHGVDRAERPVWCKRLKRSRWIADLERDVEPGAEIGMEACGGAHHWARVLQAKGYRVKLIAPQFVKPYVKTNKTDANDAEAICEAMSRPSMRFVAVKTVDQQDLQAVHRVRSSLIRERTAKANQLRGLVYEYGLVAPREISSLRRAVPQWLEDAENGLTLRFRSLLAGLYRDLQQLDERVRELDREVAAITREHEPVRRLMQINGVGPLIASALYALVGDARQYRNGRDLAVALGLTPRQHSSGGKEKLLGISKRGDKYMRTLLIHGARSALRTAPGRTDRISRWALALAERSHPNVAVTALANKTARVAWAMLRHGANYEPERLAA

SEQ ID NO: 248775 - protein, 376 aa, unidentified
MKDNTKYVGLDVSKENIAVAIADEGREKPRYYGMIPHTPEAIRKLVKKLGDPDQLLVCYEAGPTGYGLYRLFLSLGIECEVIAPGLIPQKASDKVKTDKRDALRLAQLFRAGELTPVYVPTKEDEALRDLVRAREDAKEDELRAKHRFTKFLLRHDIRPPAEVGKNWSYKYKQWLQTLTFENSCLKIVYQEYLHHIREIQERIKRLEEEIETQGTTGVHAPSIQALQALRGVALITATTLVAEVGSFKRFRSPKQFMSYIGLVPSESSSGELRKKGKITKTGNRHVRKALIESSWSYRYQPAVKGRLKKRIDGQPPTIQSISWKAQNRLHKKYFRLLARGKSSPAVITAVARELAGFVWAVAQELEELSSNKQMVS

SEQ ID NO: 248776 - protein, 344 aa, unidentified
MQKQSYVGLDVSLAETSICVIDETGARLFEGKVVTDSAAIAAAVRRHVVGQVVRVGLETGTTAGWLWRELIALGLPAVCLDTRHAHRALSLRVQKTDKNDARGLAELVRLGWYREAKVRSVDAQFVRSLLMARRQLLAIKRNLANQLRNVLKTFGLTRTSTAGRGWLAKVRAIVAETSWVAPVVEPMLKICAELDVQLAALNKQLLILAREDPDVRRMMTVPGIGALTGLAYKAAIDDPSRFTNSSSAGPYLGLVPKVHQSGETEWTGRISKTGDELARTYLYEAAGVLLFKVSRWSALRAWGIRLVQRIGLKRAKVAGARKLAVLLHALWTDGTEFEWRAAPA

SEQ ID NO: 248777 - protein, 344 aa, unidentified
MHEATIAVDLAKSVFEVAVSAEPGRVSERRRLPRETFLRFFAEREAATVVMEACGSAHHFGREIEKLGHRVVLLPPRAVRPYVVRNKTDRADAKGILEAYRNADLRPVPVKSLGQQTLSALHRLRSAWLAARTARLNTLRGLLREFGVTIPVGPCEVLPRTFELLEDAGSPLPLALRPLIAEACEEIRGFERRMLTAEKTLRALGQRIPDVARLETIPGVGPITATALVAFVGDATRFPSGRHFASYLGLTPREHSSGLRRSLGSISKRGDTYVRMLLTHGARAVLWKAKAREKPDRLRAWALQVERLRGPNKAAIALANKLARIVWAVWRRKEDFRETAAPAA

SEQ ID NO: 248778 - protein, 370 aa, unidentified
MVKRSMFVGMDVHKESIDIALAEEGRDGEVRHYGVIPGDLEALAKVLRAVQAPDRRLRFVYEAGPCGFGIHRYLTTQGEDCVVVNPSSIPKRSGDRIKTDRRDSQALARLHRAGELTAIYIPTADDEALRDLVRAREDAVGLSTQAKHRLKAFLLRQGRRYPGRAGWTQPYRRWLADLSFPLAPQHIALQEYRDTIDETERRVERLTDQLRHLTPPWRWAPVVDALQALRGVSFVTAVGLVVEVGDIRRFDHPRQLMAFLGLVPSEYSSGPSVRRGGITKAGNPHARRLLAEAAWAYQGVPRLGRQMLYRQEALPKPVCDIAWKAQLRLTSRFRRLVARGKAKPKVATAIARELTGFIWAIAREIPAPPA

SEQ ID NO: 248779 - protein, 337 aa, unidentified
MKFSGIDLHSNNSVVLISDEADRIVYQKRLPNDLAQILAALEPHRDELVGVVIESTYNWYWLVDGLMDAGYRVHLANPSGIRKYEGLKYSGDVADAAYLAHLLRLGLLAEGYIYPREERGARDLARKRLQLVRYRTAQILSIEGILMRQTGARMKSESIKGLTAAQVEEFGFAPDVALAMEANRAVSQTLGQQIEALEQRLRERVSLRGEFKLLKTAPGIGETLATTIMLETGTIARFAQVGNFSSYCRCVDSLRESNGKKKGEGNTKNGNKYLAWAFVEAANFAVRYCPQAKSFYEHKKRKTNRIVAIKALAHKLARACYHMLREQKPFDVNRCFA

SEQ ID NO: 248780 - protein, 285 aa, unidentified
MLVMGEWSLRRGGDLLRFYNAQHPFYCGIDLHARSMYVCILNQDGEIMLHRNMTARPETLLKAITPYREAMVVAVECLFTWYWLADLCAPEGIPFVLGHALSMKAIHGGKAKNDKIDAHTIAVLLRGGMLPQAYVYPAEMRATRDLLRRRMYLTRQRAELLAPIQNTNSQYNLPEIGEKLAYKANRNGVAERFPDPAVHKSMDVDLALLGYYEPLRRALELHSVKAAKQHDAHTLYLLQTVPGIGKILSLVLLYELHDIHRVPRVQDFVSYCRLVQCAKESAGKR

SEQ ID NO: 248781 - protein, 345 aa, unidentified
MQIKSIGIDLGKTTFHLIALGSRSQVVIRKRFSRSQLLVYTANLPSSLIGMEAGVGSHFLGRALREQGHEVRLIPAQFVRPFVKSNKNDYRDAEAIAEAVERENMRFVPIKTEDQLDLQALHRVRDRLVARRTSVINQIRAFLLERGISFRKGPASLRRQLPEILENADQKLSSRMRRLLDFLWQEWKGLQAQVESLNADLEQIASSDAAWVRLQQIPGVGPLVSTAVVSAIGNGAAFKKGREFAAWLGLVPRQWSTGGKPKLLGISKRGNPYLRKMFIHGARAAVLRVKREGSSLGKWMSGLETRAARNVVIVATANKLARISWAVLASGNDYHPTHKTLVFSN

SEQ ID NO: 248782 - protein, 351 aa, unidentified
MMIIGVDFHPSFQQIAFLIEETGEYDEQRLNHEGGEAERFYRDLKQKGIRVRVGMEATGYARWFERLLAELDFELWIGDPAEIEAQRVKKRKTDREDARLLLRLMREDRFPKTWVPSPENRDLRQLLWHRHRMVQMRTRIMNQLQALAMNEGKRWKSKLWSKPGRAEFEVLVLGPWASRRRRELLELLDRLNPSIEELTKAVQQEVHKRPEALRLMTHPGVGPITALAYVLIIGTPERFARGKQIGTYVGMIPTEDSSADKQRLGHISKQGSSLLRYLLVEAAQAATRFNPHWRRRYIHLAMRRHRSIAKVAMGRRMGIRLYWMWRNGCDYSPSFEFGSYAGQLAVRHGVQ

SEQ ID NO: 248783 - protein, 344 aa, unidentified
MITIGIDPHKSSLTAVAVDATGRQLAARRFVINAGAFAQLTRWSDRWSQRRFAVEGANGLGRGIAQQLAAAGDTVLDVPATLAARARLLDTGGGRKTDAADAVSVAHVALRHQRLRRAQAEDQSTILRLLAERRDDLAHERTRILNRLHGLLRDLVPGGATVGLSADKAAALLRLSRPQTATQACRRDLARDLLTDLRRIDRQLKANEAAQRDAVAATGSTLSEVHGIAVVLSAKILGNVGDVNRFPTADHFASYTGTSPLDASSGNRSRHRLNTGGNRQLNSALHTIAVCQARDPGPGRVYYLRKIAEGKTPAEARRALKRRLANVIYRHIQKDQRRRPTKAT

SEQ ID NO: 248784 - protein, 393 aa, unidentified
MHSVGIDIGKRQHVAAICRQGERTADKPVLRFSADRAGLADLGRWLSRHGPVERVVMESSGHYWMPLAAALHRARVPVAIVNPVSAKHFGARRLQRIKSDPADARTLAALGMADRPRIREPLAGAEPREAARFAMHLVEEQSRIDNKITRLIELGFPELERAYDDPTCTSALAILRLAPTAQAVARKRVATLADANRGPGHRAVGITKAAQIQALATDTMAPPELAPQIGFEMQLLIAQHDLLERQIAQAEARVAGLLDGELARRLQTIPGVGPAICATLIAEIGDIFRFSDFDQLVAYAGVHPAEKSSGQKGGPETSWQMAKTGNAYVRAALYRMSVVGLQHNPAIKAHYARKRAQGKSKMNALGHCMKKSLAIVWGIWRGDHDFTPEPPSA

SEQ ID NO: 248785 - protein, 408 aa, unidentified
MNAVGIDVSKGKSMVAALRPMGEVALLPQEFLHTEVGLEQMAYAIIALGEDTRVIMEATGRYHEPVAAALHEYGIYVCVLNPLFIKQSGGGSIRKVKTDKADAMKIAKYGLDNWVDLREYTPMDTVRQQLKLCSRQYNLYMKTVVSLQNNLISLTDKTFPGVNELFSSPERADGHQKWVDFVMTFWHCDCICRVSEKAFTDRYQKWCKRKGYHFSTEKALDLYAGSCGHFTTLPKNDNTKLLITTAAQQLLAGKTTLAALRTEMTRLAKQLPEYDTVRAMYGVGETTAAQLMAEIGDVRRFPRRSSIVGFAGVDPAVDQSGKHSAKSVPTTKRGSPHLRKTLYQIVCTYLKRSPADEPVYQFLDKKRAEGKPYFVYMTAAQNRFLRIYYARVKECLEAFDERQDTVQN

SEQ ID NO: 248786 - protein, 343 aa, unidentified
MGGLQVIGLDIAKSVFQLHSVDMATGEIVNLQLKRAKVLEHFANRAPCVIGIEACGGAHHWARELTAQGHTVRLIHAKAVRPFVSGNKTDATDARAIWLAVQQPGTKFVGMKTLAQQATLTLHRQREMLMKMKVMQINALRGLLYEFGATFARGRNALFSEIEATLESLANSMPQYVADSLREQVQRIKQLGADIKAVEVRLTAVLRTDTDMRRVAQIPGVGLLTATAAIATMGQAKAFKSAREFCAWLGLVPKQRGTGGRVNLLGISKRGDTYLRTLLIHGARSVLTHAKEPGPWLEQLKGRRPANVVIVAQAAKMARTIWAVTARQQDYQRGYQSIRRQAA

SEQ ID NO: 248787 - protein, 367 aa, unidentified
MDNFIFVGCDSHDKTLVTRIAHNRDGAERKTFSASRAGRCKFIEDLKRRSEQAGGAKVVVAYEASGNGFILSDELKQAGLECHVIAPTKIERSSKQKRNKNDDRDAERLLDILRGHYLGGTKLPSVWVPDIQTRDDREIVAARQDLSDKQSKIKTQVQMLLKRHGLEKREGLGCSWSQPHRRWLQGLAEDPGTGLGIRTGLKTLLRQLEFLEAEIQAANAAMKDLADRPRWKPIIDELMKEKGIALKAALKFATDIGDFCRFRRGRQVGAYFGLTPSSQESGENADRKGHITRHGSPSARKILCQSTWSRVRHDKHEGEVYRRVVAKNPKKKKIALVACTRRLVVRLWHVGRQAQLKMQSAASGTGQ

SEQ ID NO: 248788 - protein, 478 aa, unidentified
MKLRLGIDVACRAAHQATLADHTGTLLWSGRRFRTAAEELERLWALLPVGVDPGQVVVIMEPTRNAWVPLAAWFGAKGAQVVLVPPEQSADLRDYYHKHAKTDRLDSRVLARLPLLHPEGLRPIDGLGPGEALRRAVRLRANLVKRRAMALQRLDALLELLGPFWTDVLGTALTKTALVVLERYADPHALKRLGKTRLTRLLYRHSRGAWGQDKAQALLDAADQTLALWGEDGLDFVELADDIAVEVRLAQQLALEITALEERIDALYRQADPDQLVASGPGIGPILAAAILGRLGDAKRFANLAGVRAFTGLVPAIDQSGTGGRHGGPTKAGDAYLREALFNAADHARRVDPTLAARYHRLMTQAGKHHTAALCTIAAVLVTRLAACWRTGQPYQLRDTDGSPITPEQGRAICTQRYTVPAATRSARRNIRQSSDRKNGTGRRSKESPSAPSTGPSTLTLPGHRPAANTNPPPLDSR

SEQ ID NO: 248789 - protein, 428 aa, unidentified
MKNRNVQKLEAITPGTLVVGVDIAKETQWAQFVDYRGLELRKALKFKNHKNGFDSILAGIEAICKDRRLDNIIVGMEPTGHYWKPLANYLLKNKVNVVMVNPYHTKRAKELDDNSQTKSDKKDALTIARLVRDGRYYEVYMPQDIFAELRVLSNSRISLMKRSNALKNTITAVIDEYFPEIVTVFKNPLKGKAAMQILKSRPFPSLILELGIDGVLFEIKKAVKKTVGRKKAQQLVETAKSSIGVGYGLVSAKLKLGLMIEELELLTKQLEQLEKAMDKALADTGYGEIILSIPGIGVVTAASFLGEIGDPMRFDHPRQICKMAGYNLIENSSGKNKSRTVISKRGRKNLRSILYQMAMTMVAVNDEMKKLYKYLKTRPNNSLKKKQALVVISKKIVTVIYNLIKKQTEYQAELVLGEFRKNQIKQAA

SEQ ID NO: 248790 - protein, 410 aa, unidentified
MQVKYERCCGLDVHKDTVVACVIVSKSSGHVQKTIRTFATTTSGLRTLVQWLTETGCTQVAMESTGVYWKPVYNLLEGAFELLVANAAHIKKFGDKTDVTDAEWLADLLRHGLLRGSFIPSAPQRALRDLTRYRTRLIDDRSREVNRVQKVLEDANLKLASVASDVMGVSSRAILAQLIEGQSDPVVLADLAKGRLREKRAALEQALTGRFTAHHHFMLVQHLSHIDYLDEQIAQLDAEITEQIRPFQAAVDRWDQLPGINQRGGQVIVAEVGADLKPFADGAHLASWGGMCPGNQESAGKRQSGKTHKGDKWLRRALVEAAHGAARTKNSYFATLYHRLAGRRGKKRAWVAVGHSLLVTGYTLITRQVDYQDLGANYFDELNKDAVKRRTIKRLEQLGFQVELKPIVAA

SEQ ID NO: 248791 - protein, 339 aa, unidentified
MYYGAIDLHKNNSILGIIDADGQRLCMRKIPNDLALIKKALGPFAENLEGIVVESTFNWYWLVDGLQDAGYRMHLANPTAIQQYSGIKYTDDVTDAWWLAELLRTRQLKEGFVYPRAQRAVRDLLRKRAHLVKQRTQNILSIQNLTCRNTGGRLSANQTKQLTEEAVKTFYDQEEERALAINCSLRVIQTLKREITTIEKKVKSKLKLSQPYQVLQSVPGIGELLAMVIMLEAGDMSRFPSVGDFSSYCRCVSSVRLSNGKKKGSGNRKNGNKYLSWAFMEAAHYAIRYYPVIRKFYQRKSAQKGMMVAQMAVAHKLARASYYVLRDQVPFEETKCFVH

SEQ ID NO: 248792 - protein, 403 aa, unidentified
MNSVGIDISKGRSTIAVMRPFGEVVISPFEVRHTDSELSELARQLKSLNGETRVVMEATGNYHAPVAKLLHDAGLYVSVINAKLVHGYGNNDLRRVKTDKKDSVKLANYGLDRWLTLPRYVPEEDTRLLLKNCYRQYRQYSKVQTVLKNNLISLLDMVFPNVNRLFSSPIRGDGSEKWVDFVAEFWHCRCVSEKSQKAFTNKYQRWCRKHGYNFSEAKAHTIHAEACGHIDVIPKSETTKLLVEQAVAQLRATSAALAALKHEMQALASILPEYPVVMDMFGVGPTLGPQLMAEIGDVRRFYSKKALVAYAGLDAPPNDSGDVTGRHKSMSKVGASSLRRTLFLVMSVYLQNAPLDESVYQFMDKKRAEGKPYRVYMMASANKFLRIYYATVKAYLESLEHTA

SEQ ID NO: 248793 - protein, 343 aa, unidentified
MEHYAGIDVSLESASVCVVDATGRIVREAKVASEPEVLTAWFRGLGISLSRIGLEAGPLSQWLYAGMQEAGLPVELLETRHVRDAFKAMPVKTDRKDARGIAQLIRLGWFRPVHCKSLPAQETRALLTARKLVQSKRHDLEMSVRGILRGFGLKVGATTPRTFEGRIRELVRGHPTLLTVMEALLTARAALGEQLQRLEKRVRSLARDDQRARLLMSAPGVGAIVALTYVAAIDDPGRFRSSKNVGAHFGLTPKKYQSGETDVTGRISKIGDAGVRTALYEAANVILTRPVRGSSLKSWAARLAVRAGMRRAKVALARKLAVVLHRMLADGTSFLATRAAAMA

SEQ ID NO: 248794 - protein, 314 aa, unidentified
MTQKQNPQPYHLVAIDIAKETLEVLSAAGSRDELPNDSAGLSRLLKLLKVLPHALVVCEATGGYERPLLAALYQAGIAVVVLNPQRLRAFALSEGIKAKTDSIDARMILRFAQQKRLQPLPAPDPKTQELAGWLDRRSHLSEQQAREKNRLQNSPKSIHRSIKRMIGVIEKELALIERQIEKLIATSASLQTGVATLQSVKGVGKVTAWTLLAYLSEMPLLTRNKVVALAGIAPFNRDSGKTSAKRSIWAGRAKVRKCLYMAAQTAAMHNPVIKPYVQGLIARGKPYKCAIVAAMRKLLIHLQSLLKLQQKTLA

SEQ ID NO: 248795 - protein, 388 aa, unidentified
MEAQTVDTLPPVAADHDPVRCLLAIELSKKSWIVAITTALSDKISRYTLDGCDWEGLLELMERVRTRVAREMGRPVEMISCYEAGYDGFWLHRLLERQGVRSHVIDPASVQVDRRARRAKTDHIDAKRLLRSLMAYLRGEPKVWSVLRVPSVAEEDDRRLHRERDRLIAERGQHVNRIKGLCAIHGIYDYEPTRRDRMLRLEQLHTADGRELPPRLKAEIARELQRLELILGMLKEIEAERDAVALTENVSAHTNAKKIQNLVKLKAIGAEIATVLTGEVFYRAFNNRHQVASYVGLTPSPFQSGPKCRDQGISKVGNPKARSTMIELAWLWLRHQPDSALSVWFRERVGTLKGRIRRITIVAVARKLLIALWRYLETGMVPTGAVLN

SEQ ID NO: 248796 - protein, 411 aa, unidentified
MHNRQNYLYVGVDLHKEHHTAVIINCWQEKLGEIQFDNKPSAFSKFLLEVETYVSAGITVVFGLEDVGGYGRALAKYLVDHEQVVKEVNPALSFLERKSHVTTQKSDSWDAECVARILINKLNQLPDAKPNDLFWSIQQLVSRRNALVKAQSALKNQLHIQLNHHYPSYKKFFSELDGKTALAFWQQYPSPFCLEGANIKQLTAFLLDVSNNTCSVKKASDILKLVKEDGQTMKEYQETRDFLVRSIVRDIEFKKKEMKYIERELKRLVNLLDYQLETMPGIELVTASALIAEIGDVRRFTNANKLARFAGIAPVYFGSGGKGKTHKSKQGNRALHALFYNLAVQQVQVAKGSKLPRNPVFHAYYQKKLKEGKTKGQALVCIMRRLVNIVYGMMKYKTAYELPVVEEKEVV

SEQ ID NO: 248797 - protein, 321 aa, unidentified
MTSQTESTCFGIDVSKRWLDIAEHGRSPVLRIDNTAAAIRGWLRTLPPGAVRFACESTGTYHRLLVRLLIGAGHQVYLIDGYSLSRYRDTLGQRAKTDRHDAGLIARYLAHEGARLRAFSLPPRAVTELRALLRRRATLVRSLGRIRQSMEELPGFAREVRAVTERIQALIKRLEQRIAALIGASGWSDPYRRILKVEGIGALTAAGLCATFHRARFSGGDAFIAFLGLDVTVRQSGTQRGRGALSKKGDAEMRRLLYNAAMAASRSSTWQPFYQRLLQRGFSRTQALVALARKLARVAFSLMKNASNYVPKQHENACVGT

SEQ ID NO: 248798 - protein, 381 aa, unidentified
MRQVCGLDVHKDSVFACILNENGVIFQEKFGVLTPELEQLAAALQEHDVSEVCMESTSIYWMPVWRVLEPYVAELKLVNPYFIKQLPGKKSDVKDAEWIATCLLKDLIRGSYVPADIIQQLRQYDRRISDLNAECVRKLGKLDAAMQRCNIRISNYVATTDGKSYKDVVRLISEGIRDPAELLKVIHGRITNRVGKDVILASLTGIISDTDIDVIRQLREEVDLAQRHKDECQSKMDVICQQFFPEQLKNLQTIPGVKGRSATAILAEVGSDVSSFQDAAHLVSWCGLMPRNEESAGKIKARSITHGNRYLRKTLIECSWAASKTQGCYLNKFSYYQTVVRRKNKMKVQVAIARKILTAIWYVLHESVAYRDYNPDIAPAA

SEQ ID NO: 248799 - protein, 419 aa, unidentified
MTRNRSKVCGIDVHKAFVVATTLDGSGNKETKKYKQDFESLTALKDWILESNCESVAFESTADYWRPLYLILHPHITITVANAYHIKHIPGKKTDIIDSHWIAELELNGLITPSRVFEGEQHDLRALTRYRGTLVETRTKFKNKIHHQLDMSSIHLCRYMKDIFGKTGYIILQGLVAGKTLEEIKESLPQKSRKKADVILSAIPSNVPVHILFMLDSLLTMIDRINEQIKQIEERIKFLLNQKRRELRILMSIPGIGFIGASTILAEVGNASDFATSDKLTKWAGLTPSVYQSANTNFTGPITKQGSKHLRRILIECAHISIRSSGRMKNYFDRLLPSKGFKKAIVAVARKILKIAWHLLVNDEEFVDEEPRSKVIRIPKMPSLMDKIGIQKIIELLSRGAEMIIQEEGQEVMRVKLDT

SEQ ID NO: 248800 - protein, 413 aa, unidentified
MDVLHPRCCGLDVHKSSISACILLREAGRVQKHQRRFGAMTQELQELAEWLRQFGVSQVAMESSGVYWKPVWNILEGQFAVVLANAQHIKNVPGRKTDQKDAEWIAQLLQYGLLRASYIPCEIIRDLRDLTRMRTSLSQEASRISSRIQKVLEDANIKLASVATNVLGKSGRAMLEDIISGEDNPEHLASLALGHLRVKIPQLRLALEGKIRSHHRFLLGRLLDQIQFVEHEIALLDERLEDIGRQRPDLAQAVARWDTIPGIDRVAAWALLAEIGDNMAQFPTAEHLASWAALCPGNHESAGKRLRGTTRQGSPWLCRMACQCAWAAARTKNTYLSSQFRRLAARRGKKRAIIAVAHTIIVIGYHLQKNQSNYEDLGGNYFDRIHSDGLKRYLVKRLQQLGHKVTLEPMEAA

SEQ ID NO: 248801 - protein, 393 aa, unidentified
MICVGIDVAKDKHDCFIISSEGEILADVFTIPNNAEGFDTLLQAIRRSTRPEDKIKVGLEATGHYSYNILGFLLDKGLPTYVINPLHTNLYRKSLSLRKTKTDRVDARTIAAMLMSDVDLKSYTDTVYHNEELKSLTRYRFDKVRERAKLKQSVSRLVTILFPELEKLVSSLHSASVYALLSEFPGAKQISSTHMTHLKAVLKNASQGRYGQEMAETIRNAARSSVGSVMPAKSLELQHTIRLIRELDAEIEDIETAIQAIVDEMQSPITTIPGMGVRMGAVILAEIGDFSRFDSPDKILAYAGMSPSTYQSGQLSLSGAYSHMEKRGSRYLRYALYNATKHVCHWDPTFAAYLAKKRAEGKHYNVALSHAAKKLVRLIFAMEKSQRPYCAAA

SEQ ID NO: 248802 - protein, 339 aa, unidentified
MQVTTVGLDLAKDGFQVHGVTTDGTVLFNRSVRRAQLLPFFEKLPPCLVGMEACGSSHHWAREIRKLGHEVRLMPAFYVKPYVKRGKTDAVDAAAICEAVTRPTMRFVEVKEPEQQALLGLHRVRDLVVRQRTQVINMIRGFLREFGHILPKGPSAAIRFAKSCLAGDLPDIPDLAKGLISTLCDQLTALCNRISMYSKLVERHSRLAKRAWRLRSIPGVGPMTASAIVATIGDGKQFGGGRELAAWLGLTPLNRSSGGKERLGRITKKGDRYIRKLLVLGMTSRVQRARRHPEQVDPWTAKMLERKPVRLATVAMANKTARIIWAVLTRDTEYRRSTA

SEQ ID NO: 248803 - protein, 343 aa, unidentified
MSEISMIGLDLAKNVFQVHGVDASGSVVLRRQLRRGAVEKFFAQLPPCTVGVEACGSAHHWARVIGRYGHQVRLMPPAYVKPYVKRNKNDGRDAEAICESVSRPTMRFVPVKSVEQQATMAVHTTRALLVRQRTMVANSLRAALGELGIVAAQGIEGLRELMAKLEAPHEEVPEIMRGALLLLAKHWQALDADERVLERQIAKAARSDREARRLMEVPGVGPIIASTVLAKVPDAKVFRSGRDFAAWIGLTGRDHGTGGKHRPGRISKQGDRMLRALLISGASAYLRHQRTRGVSDPWLRDLLARRPYKVVMVALAAKTARILWAMLVKGEPYRDRASASAAA

SEQ ID NO: 248804 - protein, 373 aa, unidentified
MKKRSSSREQQKPTMKRKGRKEGATIGMDLGDRTSRYCALSKDGEILHEGEVPTTKAGMVEAFGPLGRVRIAIEVGTHSPWVSRLLQGLGHEIIVANPKQVKLITESTRKDDRLDAQTLARLARIDPQLLRPIQHRSDKAQAALMNIRVRAALMSARTSLVNTARGLAKSMGERLPKCDADQMGVRQAVSLPPRLQQVLEPLLKEVESLTEKIQDSDRKIEQIARKDYPETALLQQVGGVGPLIALTFVLTVEDKGRFQKSRDIGCYVGLRPRRSDSGQSQPQLRITKEGDPYLRTMLVQGAHYIISRRGPDTDLKRWGLHLAKHGGKRGKKRAVVAVARKLGILLHRLWVTGEVYEPLRNHNLRQERNKIAA

SEQ ID NO: 248805 - protein, 321 aa, unidentified
MKNLEKHYVGVDCHKDTIACYINGKFKEFNSNFKGFKKALEWVRKIEPDSAWAIEGAYSYGITLSKFLLNSGCEVFEFNPLITAKARKVLSISGEKNDIGDAKVISIFAKQVNMSKVSLKTIELKRLITNRKLLVKQRTEIILSIKSYCVKEGIELPFKALTTRKAITWLLNCEDFNLNILGRNLQTQYESIKQLEAKIEEQTPARVKNLCKITGIETLTASIFYTETKGKRMSKAQFANYCGVAPVECSSGLTTRFRNNKRGNRTLNSLLYSISISQARYDDMGSAYFQKKLAEGKSKKHARKCLARQVANIIWKGLFND

SEQ ID NO: 248806 - protein, 343 aa, unidentified
MQDVATVGLDIAKQVFQAHGADASGETLFNTQIKRENVLEFFSKLKPCLIGMESCATSYYWARQLLEFGHDVRLIHTSYVKPFVKRGKTDANDAEAINVALTQKTMRFVPVKTLNQQAAITIFRTRSLFVSQRTQLVNALRGHLAETGLIAARGVRNSSKLVKLMESASDAVVPAVMKRALKDICEQLQRLDGLVTKLDKEIERRVQHDGNACRLLTIPGVGPKTAMCVIATIPDIHRFPSGRHFSSWLGLTPRTHSSGGRSVLSRITKMGNSELRTMLYLGASAITMRDSKTPVGRWAARLRARRPYKVAVIAVANRIARIIWALLANGGVYNPTYGREASA

SEQ ID NO: 248807 - protein, 310 aa, unidentified
MEITVGIDVSKVRLDVHVHPAGESFAVGNDEAGVAELTGRLGQLDGLACIGLEASGRYERLAVAELAAAKLPVVVLNPAQVRAYAQAIGQRAKTDPIDARLIALFVEAVRPAQRQLAERETQQLGALMTRRRQLVQMLTTERLRRQQAPRGAVRVSMARIVASLEDALRELDAEIDKTVHGTPVWRDKEDLLASVPGIGKTIARTLLAEMPELGTLTPKQTAALAGLAPYTRQSGKWRGRSFIGGGRSVVRTALFMGALVAARHNPTLKAFRDRLVAAGKPKIVAIIATARKLLIILNAILRDKQPWRPA

SEQ ID NO: 248808 - protein, 401 aa, unidentified
MNSVGIDVSKGKSTVAALRPMGEVALPPAEYLHTEIELEKLAYTILALGEDTRVVMEATGRYHEPVATALHEYGIYICVLNPILIHQSGGGSIRKVKSDKKDAIKIAKYGLDNWVNLREYTPVDALRQQLKLFSRQYNLYMKNSVALSNNLISLTDKVFPGVNELFSSPEKADGHRKWVDFIETFWHCNCISLVSEKAFIECYRKWCKRKGYNFSVAKAVDLYTSSCGNTVTLSKNDTTKRLITTAAKQLTSFNCQLASFRNEMISIAGQLPEFDTVLNMFGVGEISAVNLIAEIGDVRRFPNRNSLVGFAGVDPCVDQSGKHFSKSNPTTKRGSAILRKTLFQVISTYVKRSPVEEPIYQFICKKRADGKPYYVCTTAAANKFLRIYYARVKECLNDNLF

SEQ ID NO: 248809 - protein, 320 aa, unidentified
MTILTSPTVIGVDVAKAEIVVYREDLKIIQAINNDRTSVGHWLKTLPTQSSIALEATNLYHLDTAELAHGMGHRVYIVDPYRVSHYRESIGQRAKTDPCDARLLARYLTSEQHRLRVWNPPPRHYTVLKSLLNKRAQLMKVRVSIKLSWSTEPLLEDLLADGLKHFKQLDQAIQELLRKVSQEAGISENIRRCKAIEGVGELTATGLATTYMRGEFASADAFIAFLGMDLKAKDSGKKHSPRHLSKKGDGELRRLAHNAAMAACRSPVWKPFYDSYLARGLARTQALVILARKLCRVAFALMKNQSEYQPNLRLQGSPAT

SEQ ID NO: 248810 - protein, 393 aa, unidentified
MLFVGIDVAKSHHDVAVLDDNGLVVLRHLRILNSRQGFATLHQSLIQLSADTNDDIRIAMEATGHYHLNLLLFLQANAYSTFAYNPFLIKEFARTLTLRKTKTDKADALTIAKKLATDLSSDRFKPDFNMQELKFLTHHRNRLTDSRSKLKTQYIRLLDILFPELAGFIGKTNLHYQYVYDLLTKYPSPAKLSRAHTNALVKLLHNHGNRLDMAQQLKVLAKQSIGLSSPANALELVQTISVIRLYDEQINAIDQEIAQIMNSLDEAAIVTSITGISNRLGSVILAEINHINNFQSPDQLLAFAGLEPSVYQSGQMNATGKIVKRGSTSLRWALCQAAEYASHWSPTLRQYRQKKLDEGKHYYVVMTHVAKKLVRIIYYLLKHHQYYDESKLI

SEQ ID NO: 248811 - protein, 443 aa, unidentified
MWLSIGLLSGRVPLPVRGSRGVCPALSSNARPASTNSDGGRVQLMAKVFIGVDPHKLSATIEVVDRHERVLATGRFGTDKAGYAAMRKHVVSYPDRVWAVEGSNGAGRSLAQRLLADGEHVVDVPAKLSARARLLDTGHNRKTDAHDAHAVAVVAVRTKTLRVLAYDADLEVLRMLVDRRDELSRAKVQCINRLHRLLSELVPGQGKKDLTALQAKAILASARPRDPVRKTLKRLALEQLAELVVMEKKIKASSKELKTLVIARGSHLMDLTGVGPVVAARILADVGDVARFTDRNRFASWTGTAPLDASSGEQIRHRLSRAGNRKANHVIHIAAVNQIRLDSPGRAYYRRKLAAGKTPLEALRCLKRRISDALYRQLRADAALRMEAGPGGHCGAALTSSAAGLHPHTGTSDQPLPGPAPTTLPPPRTRRKTTTPRTLQTAP

SEQ ID NO: 248812 - protein, 405 aa, unidentified
MDLLYSRCAGLDVHPRSVSACLRVVVDGRVSQEVRTFGTSTRELTEMAEWLASAGCTHVAMESTGVYWKPVWHVLEGRFELVLANAMYVKNIPGRKSDVKDAVWISDLLAHGLLRGSFVPPERIQELRDLTRTRKQLVREIARHTQRIQKTLEDANVKLTEVITNVIGTSGRAILRALIAGETDLDRLVDLTSGRLKASRAALKDALQGRVTEHHRFMLKMHLDQLEHLEATVRDVEARADQQPFRAATELLKTIPGVSGVTARVIVAEIGDDMSRFPTAGNLVSWAGLCPRLDESAGKRRSNRTRHGAPWLKPVLVQAARSAANKRDSYPRAQYMRLKARRGPNKAVLAVAASLLTAAYHMLKHGVEYRDLGPNHFERDKQVQAHRLLRRLKALGLEVTIKPAA

SEQ ID NO: 248813 - protein, 482 aa, unidentified
MATRKRSTYERLQPGPLNRQQRRELGRKIAAADPGLAVVHPDAAGIDIGNASHFVAIPPDREPVPIREFGAWTAALQEMAQWLTAHGIRTVALQATGVYWIAVQDVLEQAGLEVYLVNARGTKTLPGRKSDVQECEWLRKLHTYGLLRNSFRPPAEIRAIRTLWRQRDRWVQEAARAIQHMQKALTTRTVQLANTISDLSGVTGQAILRAIVAGTRDPGALAKLRDCRIAASEAELAASLQGTWREDVLFELRQTLEAYDFYQAQLAACERELAKYTAAVATRELPPPPPPPAGAAPLSPGKAARRATSRRKPQPGFDLAAELHRTMGVDLTRIDGINVLTTQVVFSEIGPDFSAFPSENHFASWLTLAPRHDISGGKVLRHVPAAGRNRVANALRMAAQSLVRSDSYLGARYRRLRARLDGPVAVKAMARYLACLIYRLVTKGQAYVDRGAAHYERKRQERERQALERRASNFGLKLVPAA

SEQ ID NO: 248814 - protein, 459 aa, unidentified
MNKVKQHKTSQFEKMPVVNLAAAGIDVGSRSHFVAIGQNTEDVKEFGVYTEDLHTLCKHLVASGITTVALESTGSYWQPLFVLLQQYNLDPILVNGKFTKNVKGRKTDVQDCQWIQKLHTMGMLEGSFIPDLFTEQVRQYYRHRQTLVANAASYINKMQKALRLINIRLDTALRDVMGRSGKDIIEAILKGERDAKVLASLAQPTVKTSKEEIVAALTGDWREENIFELRQCYEIYQHYHKKIDECDEVIKQIVTAEVQRKQTEENLAKAEGVKIKKKKARKNEARINIQQLAVDLTGGVDISRIEGVGLGLVLCITSETGLDLKAFPTAKHFSSWLSVAPDIKKTGGKVINSRTRKGKGRLARALMHAANAIGNMKTGNYLVHFFKRIERRRGRPTAIIATANKLSKIIWNMLVKKQTYNPIMPKEYLDKIRKREVKNIQRKIKQLNIQEEEIVFATP

SEQ ID NO: 248815 - protein, 420 aa, unidentified
MERQVARCAGLDVHKDEIVACARISDPGGPGRVELHTFGTTTRELLALRDWLTGLGVTRVGMESTGVFWKAPFHILEDAVAECWLLNARHLRNVPGRKTDAADAAWIAELVEYGLVRPSFVPPQPIRELRDLTRYRRAQIDERTREAQRLDKVLQDAGIKLSSVASDVLGKSGRAILDALVAGTTDPVVLAELAKGQLRKKIPALQEALTAFFTGHHAIIIGEILSKLDYLDEAIDRLSTEIDRVIAPFADEVALLDTIPGVDRRMAECLIAEIGVDMTVFGSAERLASWAGRCPGQHESAGKSKGGRTRKGSKWLRIYLHDAARAASRTKNSYLNAQYHRIKARRGPAKARVAVEHSILVAAFHMLDRGEPYHDLGADYFTRRRDPNRHAQRLISQLDALGYDAVITRRTDQPTDTKAA

SEQ ID NO: 248816 - protein, 351 aa, unidentified
MKKVLKQVLGIDVAQKELVVTLGRTLEDFTIELYAHKVFKNSDSGIRSLLDWVKKHTDNTINIRYVMEATGVYHQKIAYHLAENDYEVSIILPNKISNYMRTLENKTITDKTCSEAIAQFGLERKLDNWQRPKAVYRNLQQLSRERDQIVSERSMVKNQLHAESSEAYPYQKSIERLQDRIFFLNKQEKEIKQDIKEIVSENKALEQEVRIMSSIPGVGELTAIIVLAETNGFELIRSKKQLTSYAGLDVKEKQSGTSVKGKPKISKKGNRSLRKAMYLPALSAVKWDERFKAIYARIVGRNGIKMKGLVAVQRKLLEMMYILFKNKNTYDTHYLEKENSVQIQDQYAITG

SEQ ID NO: 248817 - protein, 341 aa, unidentified
MSDYSYFCGIDLAKNHFSLHAVDQNGKVILHKSVTRSKLLTTIANMPLMRIGVEACGGAHYWARTLNKLGHDARIMAVKYVVPHRTKGKNDLNDAVAICEAVQRPSTRFVPIKSPEQQAILSVHRIREHWVRERTALMNRMRALLSEFGLIIPVGRSSLLKQVPLLLEDAENELPHLARTVIADAYHHLGELNQRIADTEQVFDSFAKVSANVQRVMKVRGIGPQTATAILASIGNGSQFDKSRDFSAWLGLVPKQYSTGGKPRLGRITKHGDKYLRTLLVHGARAVIANLGDKQDKLSQWCRGVLERRGMNRAIVALAAKNARIIWSLLHNQTEYENYAA

SEQ ID NO: 248818 - protein, 322 aa, unidentified
MSLPGPLCVGIDVSKATLDIAASSAIESFSVTNDTDGFDSIIAELRKYSVALVLMEATGGLEAAVACALQAEGFELTVVNPRQARDFARAMGYLAKTDRIDARVLAQMAEVINRHPERSRFIRALPDAERQVLNAMVVRRRQLIAMLVAERNRLYLAPPQSRKSINTIIKALEDELARIDDDMNNHIRSHFKELSERLSSIKGVGAMTVAALLAEVPELGRLSRREISALVGVAPVNRDSGTMRGRRTIFGGRAGVRTALYMAALVATRYNPVIKAFYTRLVAAGKPKKVALVACMRKLLTILNAMLRKNEEWNESYHHVAP

SEQ ID NO: 248819 - protein, 475 aa, unidentified
MFCFQDITQGGTQMNKNNVKCGSGKSSDKMRVPSEITKINPDVAGMDLGSEEHWVCVPSDRADKNVQRFGVFTEDFRKLAAFLRASRISSVAMESTGVYWIPLYEFLDKEKFEVVLVNARHLKSVAGRPKTDVYDCQWIQRLHSYGLLQGSFRPSDEICELRGLTRHRASLVAEAGTKIQHMQKALQQMNVRLDKAVSDISGKTGTLIIERIIAGERDPVTLAKLRDSRVFKSEKEIAAALDGNYRSEHLFALKQSYEAMCFIQSQMNECDGEIKRALDSLDRKLDSSMAPALPPRKGSKRSNKNQPLFELRPALYEIYGVDLTQVDGFQSGTVLNILAELGPELCKFRSDKHFTSYLGLCVNKEISGGRVLKNRTRKVQSRAAKAFRMAAQTLKESNCYLGKFYRRIKFKAGAPKAITATARKLAVIFYNMVTKRQEYKPVDPDTFDRKHKERTLKTLKKRAQALGFDLVQAEA

SEQ ID NO: 248820 - protein, 404 aa, unidentified
MTGAAASVFLDPSLFAYVVGVDIGSETCCFTVLTPQKQVVIKPSDLANAASGFEQLQERLTGLGGDPAHIVVGMEATSRYGENLFCFLQQRGYHLCLLHPRQTHEFAERRGLRAKTDRLDATTIARVLLSGEARVGYVPDEQIASYRELVRLHTQLSDELARDKNEIQGLLVVLFPEFTQVFADPCRLTATTVLQTYPSARAIRAAGVDAITAILRATAPRNYGRDTARRLVELAEHSVSSDLAVEARSLSLKIWCEQLRHTQAHLEHLDEQIEQLLSHDSKARGLQTVPEFGTQTVAVLLAELGEVTRFQRLDQVVAYAGMDIQIKQSGKWRGQAKLSKRGSGLVRRMLYMAAMRCIWLPGSAFGVYYQRLLARGLGKKTALMAVMRKMLVIAAYLAPNRARL

SEQ ID NO: 248821 - protein, 331 aa, unidentified
MNTLMMPAAAARFNHVIAFDVAKASLSLHILPSGETLSLQNDGAAIRRLLKREEKRNRKQGLGRMLVICEATGGYEDAVLKAACELGLDCHRAHGSGVRAYAKFRGRHAKSDPIDAALIAEYGRDKLDLELYQPPRPEEAALRALMGRRAELKDMIQAETCRIEHASLKAVRVSLESHLAALKEQLALIEKEIRTLTRRDEAFSHNSRLMQTLAGIGAVASQTILAFLPELGHVPTPTAVALAGLAPYDRDSGKERGKRRICGGRGQIRPCLYMAAVAAIRSHAHFRDFAQRLTRKGKPFKVAVTAVMQKLIVILSAMIRNDQPWKHAQTA

SEQ ID NO: 248822 - protein, 380 aa, unidentified
MKEFTQQSIGIDISKETFSACVCQRNLSNDDVLSQVREFKNGKTGFNQLVKWTRKLTLSGTPVVFVMEATGNYYENLAYHLYALKQQVCVLLPNKVTYFAKSLNIKTNTDDVDAQVIARLGAERKLRFWQPPPPIFKCLKELTRQHSELVREKTSFSNRLHSVKSGYEPQPFIIKSNKSVIKALAKQIENCEGEIETLIQSEVWLWHKVKNVMTIKGVGFMTVAIILAETQGFEHVQNIRQLTSFAGLDVIRRESGTTVMGKTRISKKGNTRIRAALYFPALVAIQHNEDMRNKYHRIKEGKPSKMVGVTALQRRLLILTYTLWRKNEVYIDDYEQTQITKKQNQVNEKTNPIKSKAGRGLTNLPAQDDLQPKRLEISFV

SEQ ID NO: 248823 - protein, 408 aa, unidentified
MDLTPMHKRVIALDVHQAKITACAVVEHDDGRVEVAKRDFGAFKRDRRALAQWALEVKPEVVVMESTGVYWKSPFAALEAVGIIAWVVNARHVKAVPGRKTDMADAQWLATLARAGLLRASFIPPLQMRQLRLVARQRQKLVGMCSAEKNRLHKVLVDAGIRLNVVVGDIHGTAARAMVKALLADQPMHEVLDLKGRLRASREELFEALDAEQFSAVHRFVADEIVQHIEQIEQRIARMDEYLLKGLQACQPQLKLLQTLPGIDLQGAAMLLVEIGADMAAFGSAERLASWVGICPGNNESAGKRKTGRIRKGNAWVRRLLCEFAQAAARTRSALRAKFDALAIRKGRKKSVVALAHKMLRTIYAMLANGTYYQDKEVDYEALNVQRNAPRWIKMLRKHGFIAAPVAA

SEQ ID NO: 248824 - protein, 327 aa, unidentified
MFFIGIDVSKAKLDCTLLTAEADKRKTKVVVNTAAGVQALLAWCAKHGAQPAQLHAILEPTGLYHEQAAPALHDAQVRVSLVNPAQARDFAKALAMRSKNDALDSYVLARYGQTLSPALWHPAPLHARQLRALLTRREALGKDLLRELNRKEKSQFSPSAPLVDGSIDKAIAFLREQIKQIERAIDQHIDNHPDLKQDRELLNSIPAIGPQAGNAILAVMHNRRIDSAQTLAAYLGVVPVQRQSGSSLNSCARLSKAGPSQVRATLYMAALVGTRHNPHIRALYQRLLKAGKSKKAALGAAMRKLVHLCFGVLKNRIPYQPNYAMNA

SEQ ID NO: 248825 - protein, 354 aa, unidentified
MNATQVFEKRKIAVAIGIDLAKDHCDVVAYNADNKICFSKANMSYPKLMEWLANAYPAVVLMESCKGCHVRARDIADLGHDTRLVKGADVKALRNVCQKNDIRDADYIARLLYVPGTKFVFVKNQRQQSLQFLQNEYKSFQELRIQVGNQIHAGLEEFGCPAPKSKKFIQSRMMAHLEKNAELIPDEVMSSFLRRRDMWLNLFEQEEEAKKRMEEIAKTDDDAKRIMTVPGVGAQTAVGMLVHIGGDIGRFKNSGQFAASIGLVPKQNSTGGNTTLNGITKCGPKRLRANLVQCGQVILMHADKLKGNFGDWVRKMRDSGKKRGVIACAIAAKLARIIYRLMKDKVDYTPVPSR

SEQ ID NO: 248826 - protein, 436 aa, unidentified
MDPVNSTAAEASSNPDKQFDALTHFGGFDWAMEQHQFAVIDRDGTVLLNMQFSNDAVGWSELRAKVALFPHLGVAIETSCGPAVERLLELGVTVYPINPKAAERFRDRKAPAGVKNDPLDAWCFADALRTDGHGWRELRPLDPQTAELRILCRDEIALIEQRTAMVLQLKAALHEYYPTALAAFDDWTGPGAWHFVISFPDPHRLASAGKRKWEKFLHSHKLYRPETAQKRLDLFAKANEFVSPSRAVTNAKSLLAITLCKQLCGLQTQLDEYRDRISALFNNHPDRDCFGSLPGAGPKLAPRLLSELGNDRARFESHESLQAYAGTAPVTQQSGKRSIARMRRACNKTLRATVHLWADLSRPLCAWAQAYYQQKKEQGMGHAAALRCLGQRWLKILWKMWQTRTPYNESLHMRNQVSHGSWVIGLLSATNQKPTT

SEQ ID NO: 248827 - protein, 392 aa, unidentified
MVISVGIDVSKDKHDCFIQSSEGEVLVDVFTIPNNMDGFNILLEKIQRCATSQDKIKVGLEATGHYSYNLLGFLLDNGLATYVLNPLHTNLYRKSLSLRKTKTDRVDARTIASMLLSDVGLKPYTDTAYHNEELKSLTRYRFDKVKERAKLKTSVSRLVCILFPELEKLVPSLHIASVYALLAEFPGAKQIAAAHLTRLKALLETASKGHYKRDMALEIRDAARNSIGSWMPAKSLELQHTIRLIRELDDEIVEIEEQIQAIMDELNSPITTIPGLGFRMAAMIFAEVGDFNRFDSPDKLLAYAGMSPSTYQSGQLKNCYPHMEKRGSRYLRYALYNAPSYVCHWDPTFAAYLAKKRAEGKHYNVALSHAAKKLVRLIFAMEKSRRPYCLAA

SEQ ID NO: 248828 - protein, 344 aa, unidentified
MRIAVLGVDLGKNVCSLVGLNASGAVVLRRRAKRETVIALAAKLSCCIVGMEACCGAHHLGRVFAAYGHDVRLMSPEYVRPYVKAQKNDDRDAEGIAEAATRPTMRFVELKSQEQLDMQTLHRSRDRLVGERTALINQLRAILLERGIVAPQGKRKLEQFLFNLMDEQGGPGLSPRMITLVTDARAQWAELDRRIAAFDAEFVRWTKENEDARRLATIPGVGATIASALIAAIGKGETFERGRDLAAWLGLVPRQFTTGGKPKLLGISKRGNSYLRKLLIHGARAALPYVAERDVPLGRWAKSLLSRAHPNVVVVAFANKLARIAWAVLRRGEPFAAKGLPVAA

SEQ ID NO: 248829 - protein, 352 aa, unidentified
MTVYIGVDLHVRTQTVCWVDTADGELHEVTLDHERNDVRAFYAQFAAPAVVGVEASGYSLWFHRLLEELGHQLLVGDALAIRQCARRRQKNDHRDARLLLDLLLHQEFPAIHIPTPASREVLALLRYRHRLVRIRTMLRNGLQAVALSHRLRLGPKLFTASGLQQFAALPLTGAFAVQRQHSLALLASLAEQVQAVEAQLQDRAQQDPRVLRLRTHPGVGLLTSLAVVHTLEPVSRFDRARRVAAYCGLDPKERSSGDTQRWGHISKQGNRLLRFLLIEAAHTALRGDDDLQRFFFHLQARKNASIAIVAVARKLVLRLYRMLRDEIDYTQFRRRGRDARRAREDTSQAASG

SEQ ID NO: 248830 - protein, 317 aa, unidentified
MAKTSIIAAGIDTGKHKLDVAIHGDKERWQFDNNPAGFVGLVRLLRRRKVNRVGIEATGGYERDVVTALRKAGFAVVVLQPIQVRGYAQAVLCRAKSDTIDCGLIADCVAHREVIRRDPDPRLVPMADLLTFVEQTEEDIARCKVRREHAHSPDQRRLIEVDIKRFTKRRARLLAKLLVMIAAHDDLAKRHDLLLSIDGIGERTALAMLIRLPELGHITREQAASLAGLAPFVHDSGQRKGERHIAGGRDRLRRSVYAATIPAAFFHNHQLIAFYRRLVAAGKPPKLALIACARKLVIYANTVLARGTPWARQNAPA

SEQ ID NO: 248831 - protein, 336 aa, unidentified
MQHDSTHHDSSHHDSTPRDRAPFVVGIDVAKATLDCYIDPSGQRLHLANNDKDIAKLISVLRPLSVQLVVIEATGRHHRRVAADLLDADIPVTLVNPQRARQYAQSIGKLEKTDRVDAQVLAGFARAAQHQIMEKPSEKQVELNDLVSRRRALVQMRVAEKNRLAEVHQPRLAKTQAKTLLRLIDQQIEDIDRAIAQLIDDDDRWTRLLQIITSIPGVSTGTANQLLADLPELGKTNRQEIAKLAGVAPLANDSGPRRGQRSIQGGRQPVRNALYMAAFNAMRYCERFKAYAKHLTETGKPFKVVVTAAMRKLLITLNQMVKTDSLYNPKLFAPAH

SEQ ID NO: 248832 - protein, 344 aa, unidentified
MNKVTIGLDTAKSVFHLISKNTQGRILNKKKLKRAQVLDFFANLPPSIVVMEACGSSHYWCRGISRLGHEVKAIPPQYVVPYRKGNKNDYNDAEAIAEAAQRENMRFVPLKSQSQQDVQLVHRVRERLIGQRTALSNQTRGLLSEYGIVLPKGLAQLTKGLPYILEDADNELSIMARHQFSDLLEELKSLQDRIKQVDSQIKTLVKNLPTCQRLISMTGIGPLIATALYAGIGNGQAFKSGRHLAAWFGLVPKQHSTGDNPRLLGISKRGNTYLRTQFINGARAALRCIADKQDTVSQWCRQCLERMSFNKACVALANKMVRMAWAMLHYQQDYQPGHVNKAIS

SEQ ID NO: 248833 - protein, 337 aa, unidentified
MNYSGIDLHSNNCVIVVSDETDHVLYQRRAPNDLAVVLRALDPYRGELAGVVVESTFNWYWLVDGLQAAGYTVYLANTAAMKRYEGLKYSNDETDAAHLAHLLRLGILPTGYVCPIEQRALRDLARKRLQLSRSRTQHILAVESNVARQTGGRITSRAVKELTEAALKEFGFIENVTCAMSANVAVIETLSAQIEKLEARLRSEVRPRAEFALLTTTPGIGEIIATTIMLETASIERFAGVGNFASYARCVDSKRISNGKKKGQGNVKNGNKYLAWAFVEAAHFARRYCPEAKRFYERKKARTNAIVATKALAHKLARACYHMLKEKKPFDVKRCFA

SEQ ID NO: 248834 - protein, 385 aa, unidentified
MTNQLQDTTFISRDYDIFGGLDVDKKSMAVTFRDHGTMRKSLKLPYSASQLLNYTRKHFPGQRVAFVYEAGPTGFGLHDELTQASHPCLVVSPSMVPTVQRKRVKTNRLDSDNLPDRLRGGQLRGIHVPPPSYRELRHLVQLRDTQVAQLRATKCRIKSLLLYEGIPFPAANGKWSGQVLRQLVALPCNATVRFKLDQLIDAMQFHFLAAAKVQKQIRYFCQNDPELRQCISFLVSLPGVGTITATHALARLGDWRQIKDVRQIAGFLGLVSSEHSTGDKENRGEITRIGDSRLRNKLIQCAWTAIRKDPELRAFYRRIYERQPKKVAARKAIVAVARKLTTRMYAVLKEQRPFVIRADSSIAPLTAEETVGPRVRLDAAQNEQQ

SEQ ID NO: 248835 - protein, 424 aa, unidentified
MGRSIGLDVHRDFCQVAIADGGRARSAGRVKTSPAELELFAQSLAPTDRVVLEATGNAVAIARIIEPHVEAVVLAHAKHVRAISHAKIKTDKVDARVLADLLAADLVPAVWTGDERSRSLRRLVSRRRGLVKRRTQIKNEIAAVLHRNLKGRSPMTDAFGIEGRRWLADLELPVDERLTVDGCLRQLDFLGDELPRADRVIAEQVVDDRDVRRLMTIPGVHVTTAATLVAVIGDVRRFPTARHLVGYLGLHPTVRRSGNRPARHGRTSKEGSAAARHVLVEAAWSAARSPGPLRAFAERTTARRGRHIAAVAVARKLAVLAWHLLTRGEDYAFAQPGQVQRKLRMLELAAGAARRKSGPNGNPVWPSPAQQHAEKRLAEQAEAAYRRLISDWRASGPRAGAGATPERASQRPSKGKATRQATSS

SEQ ID NO: 248836 - protein, 343 aa, unidentified
MQTITTIGLDIAKSVFQVHGVDAGGQVIVRRQLKRRYVLTFFQKLSPCLVGIEACASSHHWSRELQALGHTVRLIPPAYVKPYVKRQKNDAADAEAICEAVTRANMRFVPTKTPEQQSGLVLHRARHLFIRQQTAVINAIRAHLAEFGIVAPVGRHGVEELLTAVADPNDRRVPEMARTCLLAFGAQLRRIKEQILEFDRLIRAWHRSNEMSMRLEEAPGVGPVLATALVAAVADSKSFRSGRNFSAWIGIVPKQHSSGGKNRLGNISKQGDRYLRGLFVAGALSVIRYAKIHGTKHRPWLTALLARRPTKVAAIALANKIARMVWAMMVRGERYKEPVALAR

SEQ ID NO: 248837 - protein, 411 aa, unidentified
MEVVHVRCAGLDVHKATVVASVRVPGSRRGERHSETKTFATTARGLTELAQWLIGLGVTDVAMESTSVYWRPVYAVLENTVHVILVNARHVKMVPGRKTDVRDSEWLAQLLECGLLRASFVPPPPIRDLRDLTRLRKTLIRERGHHVNRIEKTLELAHIKVSGVVTDLMGKTGRAILQALSAGSDDPDQLADYAQGLLRKKRAALREALVGRLTPHYAFLLQQHLALIEALDTHIATLDARIDEAMMPFAEAAALAQTMPGVAGRAAQAILAETGVDMTPFPTAAHLASWARLCPGNHESAGKRQPTTTGKGATWLRATLQQVAWAAIRTKQSYYRALYHRLKARGGAKKAIVAVQHAMIVALWHMLKHRVVHHDLGADYFERRDPARLRRHHVRRLEQLGYDVVLVDKAA

SEQ ID NO: 248838 - protein, 412 aa, unidentified
MEPIIERGAAVDVGQAVVVVCLLVGKAHEKARKEIKTFRTLTRELLEMRDWLLAEGCTHVGMESTGVYWKPVYAILEDSFELIVGNAQHIKNVPGRKTDMKDAEWLANLVRHGLIAKSFVPPKPIRELRDLLRYRRKLVESRSAERNRLLKLLETANIKLSSVASDVFGVSGMLMLQALVEGNSTPQEMAGLAKGRLREKTEDLILALEGRVQEHHRFLLRLQMRRLERVEADIAELDGQVDQKLIPYQAQHTLLTQIPGVDRVLAAVLIAELGIDMSVFHSPRHLAAWAGVCPGNNESAGKRKGSRARKGNVHLKTALVEAAAAAARKKGSYLKDKFFRLKARRGYKRAAMAIAHKILVAAYHMLSTGAPYKDLGEAYLDRLDKKQVAGNLVRRLRRLGYKVEIQELNAVA

SEQ ID NO: 248839 - protein, 371 aa, unidentified
MDEPSTFVGLDAHKDTIVVAMLLPGAVHPVEWQLVNEPGAVRRLARKLEREARGGARCCYEAGPGGYVLQRQLVTAGIHCAVVAPSLIPVKPGQSIKTDRRDARKLAELFRAGLLTEVHPPSEDEEAVRDLCRARDDAQRDLTRAKNRLSKFLLRRGCVYCVGRRPTWSQKYWRWLHALTFERPADQIVCEDYLLAVEQVEARLEALDDQLGRMSTTAPYRAPVAALRCFHGIDTVTALALVAELHDPRRFPAARQLTAYLGLVPRESSSGSRRRQGGITGAGNRHVRRLLVEAAWHYRHKPQIGRALRLRRRGQPAAVIALADRALRRLTLRHRRMMYQGKHPNTVTVAIARELAGHLWNALQATTPARS

SEQ ID NO: 248840 - protein, 353 aa, unidentified
MKRIVKQAVGIDVAQDELVVCMGRMHEDLTLELYSHKTFSNTAKGFELLTTWVSKLSNADVELNYVMEATGVYHESLAYYLSDRGDHLSIVLPNKISNYSRTLDVKTVTDKTASEAITRFGLERKLDNWEPPKGVYRSLRQLTRERDQVVVTRTIAKNQLHAEEAEAYPNKRSIARTKKHIAFLDKQEQEIKEELAQMIKEDEEVKRIVVLLCSLPGIGLLTAATILGETNGFDLIRNKRQLASYAGLDVKEKQSGTSVKGKPRISKKGNRYLRKAMHLPALTAIRHDERFKAIFARIVSKHGIKMKAAVVIQRKLLEMAYTLYKKQEKYNHEYLTKSEGKIAIEMQDLSIKN

SEQ ID NO: 248841 - protein, 327 aa, unidentified
MKDRPVVYIGVDVAKDSLSVDAGEVFKGEIENSTDAIRGLLNKLTKRCVDDQVVCICFESTGPYGERLFLECCEAGVPACILNPAKVRHYAKAMSEAAKTDPIDARVIRLFAENKRPEPTPPPSAATIHLRKLVLTRNALMKSVVQLSGTQETVVGSAAGEVLAKAIAELRMRIKELDRLITHAIAGDQRIAGLAAALAEIDGVGKLSAAKMVAMVPELGTLGRRRSAALAGLAPFTRDSGRYKGKTFISGGRAEVRRALFMPATVAIKHNPVLRDAYQNLRKNGKPYKVAITAIMRRLFQHMDAVAAQWLKDHAISLAETAVPVAS

SEQ ID NO: 248842 - protein, 347 aa, unidentified
MLIIGCDFHPGFQQVAIFDNLTGEIQEKRLQHRAEAEQFYRGLAGQEVRVGMEACGHYPWFERLLAELGFELWFGDAAKVRASVVRKQKTDRRDAEHLLDLLRENRFPQIWVPSLEVRDVRQLLVHRHKQVQARTRTKNQLQAMALSQGVQKKYKLWTKAGREELEQLPLLPYAAQRRKQLLQSLDGLEAEISELDRRVADEARQRPEAVRLMTHPGVGPVTALALVLTLGPADRFESAKQVGSYFGLIPSEDSSGGKQRLGRISKQGSSFLRFLLVEAGQTAARLDPQLKRFYRRLAARKNRSVAKVAVARKLATRLYLMLREDWTYTQLCQAVMQVSPSHSVAGQ

SEQ ID NO: 248843 - protein, 362 aa, unidentified
MAQPKSVVGLDVHATKTQAAVLHPETGELRSRRLSGPPRRALDLLAELPAPVLAVYEAGPTGYGLARGGAERGLDVRVCAPGSIPRAPGDRVKTDRRDAERLARLALAGGLSFVRVPSPEEESFRDLARAREAIRADLMRARHRVGKFLLRREVRWEGPGSAWTQAHWRWLGRIEFEDRPSGEVPADYLGAVRALEARRAGAERAIEEAWPHSPWAETISRLRCLRGIGTLTALGLCAEAGDLRRFGRAAALASYFGIVPREHSSGEQVRRGPITKAGSPHARRLLVEAAHHYRHPPAVGAALERRQRDADPRAVEIGWRAQRRLHQRWRRLRLERGKPGNVVRIALARELGCFVWEVGRLG

SEQ ID NO: 248844 - protein, 411 aa, unidentified
MNNTLFVGIDISKRSNVATFMNCEGKVVGRLTFSNNGSGADRLVAKILSYYEKGDFEAIRIGMENTSVYSKNLVWFLYEHEALNEHKLSIIPLNAIMVANYKKSFLDMDKDDITDSFAIADFIRIRPGLLPFKLDDRQEALKILTRSRYNYVQALSRMKSQFLTRLFLSFSEMEAGKPFYSIFSKTSLSLLEEEFTLDELAEKPIPELVEFLQEKGGGKFQNPEEIAKVLKKAASSSYRVPAMVRESLNRTMASDMEIMRILENEIHNCDKNIEKLMKSVPAILVSIPGIGPVLAAGIMSEIGDISRFQKQESLGKMAGFKWKRNQSGKKESEDKAAVLSGNKKLRYYLVEAANRVRIHDPVFEAYYRKKYAESKTHAHKRALILTARKLVRVIFYLLKENKLYKPDVGIS

SEQ ID NO: 248845 - protein, 418 aa, unidentified
MTKKLDTTFIQVVHPVCCGLDVHKKKISACLITIDEHGQEQYEIEEFATFTNDLLEMKEWLTDNGCPIIAMESTGVYWRPVHNVLEGFMEVILVNARHIKNVPGRKTDISDSKWLAGLLRHGLLRGSFIPPKEIRQWRELTRLRRTYTESLADYKRRVHKLFETANIKIDSVVSDLFGVTGRNLISLLCDNSELSVANIRENAKRGLKAKSKELHRSIHGFFEDHHRFQLIGMMEVISSFEEKVAEITERLDNLTSEHQDLLDRLDEIPGINKKSAQSIVSEIGVTLDEFICMAALASWAGLCPGNNESAGKRKSGRTSVRSHPFKTILIEVAWAAVKKKGSYYRAKYFKLKARRGPKKAIVAIAHRISKAIYNIIKNGDTFKDLGEDYLTSQTRQRTINNIKQRAKQLGYELVPCMN

SEQ ID NO: 248846 - protein, 306 aa, unidentified
MEQVTTIGLDLAKAVFQVHGVDAAGGVMVRRSLRRKQVLAFFAKLPRCLVGMEACATAHYWARELAKLGHDVRLIPPAYAKAYVRRNKNEAADAAAICEAVSRPSMRFVAIKTEAQQASAGIHKVREMLVKQRTMLINTLRGLMAEFGIVVAEGPRHVGELVAILADPADARIPAPLHDGLMAIVESLRGLEQRIARVEKQIVGGGRDNATCRHLITIPGYGPILSSAMAAMIVNPAAFTSARHFAASLGLVPRQDGTGGKSLPLRRRGSSSVRSANAAMATCVGCWSMARCRCCAVNAPKTIPGW

SEQ ID NO: 248847 - protein, 434 aa, unidentified
MRSYGIQVLKGLPVKEVRGRKNVNPVVGIDVAKGESQAQIFLDRNKLYGKGFRFSHTITDLEWLHGRLKEVEKDSGCRPAIILEATGHYHLPIVEWAEEKNYDLYILNPLLAQRAKKTHLRKVKTDKLDAVHLGELYYKEEFEPYQKQETHWLHLRHLTRQHEAMTDMYVQTKLQFRAVLDQVFPTYEGVFGDLYSTVSLGVLEMYSTPGAVKTAGVDKLAECMNTKLVRGRSPKWAKEKAIDMMAAAEKSPFQEGVHESYVLSLRMFITLLLQYQEHLSKLEKQIDALAEEKKEYDLLRSIPGVGNKIAATILAEIGEIERFDHAKKLVAFAGVDPSVTSSGKFTASTNRITKRGSKRLRRALYQAVQCGVRRRKGCLLQSSVNQRLREYYDVKKGEGKPHKQVVIACVNKLIRWIYCILTRSEPYKADFQSA

SEQ ID NO: 248848 - protein, 315 aa, unidentified
MAMPVSVTNPIVGVDVAKNELVIYHAELDRLEEIPNNKAAIKQWLKALSGAVAVAIESTNIYHLEFADLAYEAGCVIYMVGGYELSHYRKGVNIRAKTDALDARLLARYLKNEGDDLHPWTPPSPLYRRLLSLFRRRAALVQARVGLVQSWANEPLLKSAFAAQVKAMQQLETLVEKTINDHLKEAGLLGQLKRCLKVESIGFLTGARLLTAFQRGDFRNADAFIAFLGMDLRVSKSGQKDGRRSLTKRGDPEARRLLHNAAMSASRTPAWKGFYEEQRARGFSTTQALVILARKLARIVFALLKGQSEYQPKAV

SEQ ID NO: 248849 - protein, 448 aa, unidentified
MTKCKSVSAITLTHPNAAGIDIGSASHYVAVPPDRDDQPVREFKSFTDDIHALADWLSVCGVDVVAMESTGVYWIPLYELLERRGFTVYLVNARHVKNVSGRKSDVMDCQWLQQLMSYGLLSGAFRPADEICAIRGVVRTREMLLRYQGQHIQHMQKALTQMNLQLGNVISDIAGTSGMAILRAILAGERNPQVLAGLCDRRVRASREEVAKSLHGNWREEHLFALRVAVELYDAYHAQMQACDTQLSSMFTALEKNQNTPEPGRRRSASRNAPKFDVRTALLRLSGVDLTTINGIDVNTALKVLVEIGPDMTRFKSAKHFTSWLGLCPGTKISGGKVLDGKSKRIANRAARALKLASAALRSSQSALGAYYRRVCARMDRAKAITATAHKLARIIYALLTKGQAFVDQGEVYYEERYRQRVLRSLAAKATALGFILTPSPVIENQAA

SEQ ID NO: 248850 - protein, 359 aa, unidentified
MSDAITKETTLTVGLDLGDRYIQVCVLDETGEVVEESRLPNKRAALERRFGAGEPLRVVLEAGTHSPWVSRLLADLGHEVLVANPRKLRLIYQNESKSDRVDAEYLARVGRLDPSLLAPLRHRSAQTQEDLAVLRSRMCLVRARTRLISHARGAVKSFGERLPSCGAEVFAKKAENHIPPELEPALAPVFSAIRELTDKIKALDALIEKTARESYPKTSLLTQVPGVGTLTAQCFLLTIEDPARFPKPRAVGSYLGLRPRQAESGSLRPQLRITKAGDDHLRWLLVTAAHYILGPFGPDSDLRRWGLALCEKGAKSGKKRAVVAVARKLAVLLLRLWQTGEIYEPLRNTNRREAARACA

SEQ ID NO: 248851 - protein, 412 aa, unidentified
MEPFAERCAGLDVHRDTVVATVRRPRPDGGRASKTITFATTATELVALGDWLVAEDVDLVGMESTGVYWKPVYFLLEDRVPRVWLLNAEHLHNVPGRKTDVADSAWIAQLLEHGLVAPSFVPPPPIRELRDLTRHRRVLIEERTRVIQRLEKVLQDAGIKLSSVASTLLTKSGRAILDALLAGVSDPVDLAELAKGRLRSKIPALREALAGEFRVAHHGILVAQMLAHVDFLDESITELDARIEATVADYEPVLQRVATIPGVARKTAISLLAEIGADMSVFPTPAHLASWAGICPGNNASGGKSRPARTRHGSVWLKTALTEAAQAAARTKGTYLAAHHAAIRGRRGTFKAIGATRHDLLIAYWHIVHDRVDYRELGADWARRRHSQEHQTRRLVRQLEALGHHVQLTDAA

SEQ ID NO: 248852 - protein, 372 aa, unidentified
MTIVAEKHAPVHVTGGVDTHADVHVAAALDQLGRELGWSSFPTTPVGYAELERWLGTFGPVGVVGVEGTGAYGAGLTRALSASGLQVVEVDRPDRKDRHRQGKSDPIDAYAAARAVQSGRADGTPKTRDGSVEMIRTLRVARHGAVKARAVALTQVKALIKTAPEPLRSDLRGLDGAALLHRCAGLRAARGIAPTPSPFVKRTPRPGALIDPTAACKRALASLARRITVLNEEIGDLDDDLEPLITETAPHLLAMFGVGLDVAGQLLATAGDNSERIHSESAFAHLCGVAPIPASSGKTNRHRLNRGGDRQANHALWRIALVRLRYDPATIAYRDRRAKEQKSNKEIIRCLKRYIAREVYSALRADRGESCP

SEQ ID NO: 248853 - protein, 397 aa, unidentified
MIAVGIDISKAKSTVAVIDSDGTVLASPFTMAHTQPEMEAFVTYLKGLGEPTTILMEYTGHYHYPVLKKLQDEGFPVCIVNPYQMKKYGDVEIHKAKTDKKDALRIAAYALEKSYKLVPYSSMEQKYEDLKFLSRQYSQRITYVAKLKVQLIALLDQTMPGITRILPLNSRNPEKCALLLFIKRFKSFDEIHRIGKARFLASYDVLAKKASERSASSKGLSIYELAVDSITTRGEDPYIWLSQNQCVDLLSTTQNAADEIISQMRNIAETIPEYKVLRAMRGVGDRLGPIILAEIGDIRRFHSGKALNSYAGNDAPPYQSGQFESRNRHISKRGSSTLRKACYEVMQALKLTKPQDDPVYLFMLKKEQEGKPFNVAKMAGVNKFLRIYYARAMELYK

SEQ ID NO: 248854 - protein, 340 aa, unidentified
MEKTIKYIGLDVHKDTIQVAIAEEGRKKPVMSYGNILNTSLSIDKLIRKLKSGGHELSVVYEAGPTGYGIYRQLKAQNIECAVVAPSLIPQKSGDRVKTDRRDAINLARLHRSGDLTKIHVPDEEDEAIRDLTRAREDARICAKKAKQRLNSFLLRNNRTYSGKGRWNKTHLAWLSELSMPHPAQQIALQEYIDTLQESLQRIDRLTNQIKNIVEHWRLKPVVKAIQSLRGVSMIVAVTTLAELGDINRFENPKQLMAYLGLVPSEHSSGLKTKKGSITKTGNGHVRRVLTEAAWAYRFNPKKSLHILRRQKDIPKSVCDIAWKAQLRCRIPPSLVCLRW

SEQ ID NO: 248855 - protein, 384 aa, unidentified
MKVNKVETLHKRCAGLDVHSETIVACVLLGDSEAELERVIETFPTLTKDLFRLLKWLEEKEVTHIAMESTGVYWKPVYNILEDFFDITLANAQRIKNVPGRKTDVSDAEWIAKLLRHGLIEKSFVPPEDFRNLRDLTRLRKKWIGHMTSEKNRIQKVLETSNIKLSTVISDVFGVSGRKLLEQLISEGFIDQEEVEKKIHGRMAHKKQLITDSLFGTLNDHQLFLIQQSWMHITYLETLISDIEKRIDEILLDYQEEVQLLITMPGIKKDTAAVILAEIGVDMGQFPTSKHLASWAGLSPGNHESAGKRKSTRTVRGNPHIKSALCEAAWAVSRSRNKRLGIKYWSLAARRGKKKALVAIGHRMLTIVYHMLQNKEPYHELTSN

SEQ ID NO: 248856 - protein, 393 aa, unidentified
MEKIHDKETVSDIKDLWVGIDLHSNNHVIAIQDSKHERVFRKKLANDIKKTLACFERFKERICAITVESTYNWYWLVDGLMEAGYDVRLAHPAAINQYNGLKHSDDKDDAYFLAHLLCLGLLPEGYIYPKEERPVRDLNRKYRKFIEERTTHILSLKSSFNRSFSEHLSAYQIKKLTDKQVHEMVADKNSLAMTMADVDTIRYLTHTIEKLEGVLLSQVKLKPEFEKLMTLPGIGKALAISISLETGPISRFETAGDYASYCRCVESLRKSNKKIKGKNNRKNGNPYLSWAFHEAAEKAKRYCPYAKKFFERKVKKGNIFIARNALAHKYAKACYYVLKDQVDYDVTRVFESAKGKAKPTSKIKIKGRVSKPDRGLGTEPHAPIGIAGATALS

SEQ ID NO: 248857 - protein, 447 aa, unidentified
MAQRKRPTTQSAISLTHPNAAGIDIGSAAHFVAVPPDRDDEPVREFASFTTDLHRLADWLDACNVDTVAMESTGVYWIPLYELLESRGFTVLLVNARHVKNVSGRKSDVLDCQWLQQLMSFGLLHGAFRPAEQVCVLRSLSRQRTMLLRSQGRFVQHMQKALTQMNIQLANVISDVVGETGQKILRAIVAGERDGMALARLKNSRIHASEDEIAKSLQGSWRAEHLFALKQALDAFDFCGTQLAECDAQVQAQLQALHVREDEPAKGKKRGRARNAPKFDLRTQLFQMCGVDLTRIDGIDVTTALVVVSEVGADMGKFPSDKHFASWLGLCPGTKITGGKVMSGRTKRCANRAAQALRLAAAALRSSQSALGAYYRRMCARMDKPKAVTAAAHKLARLIYAMLTHGQEYTDRGQDYFEERYRQRVLHNLAQKAKAMGMQLVPSDNTA

SEQ ID NO: 248858 - protein, 423 aa, unidentified
MNNLTLCVGADVHLKDILLRGVDKLTGDEVIAPFSVTNNLPGAQAAAARITDVASRFGYTRIEIGYEATGMLWIPFHCFLSTCPLLQPFELDQVCFNPKLVADFKDALVLRKPKDDDRDAFDIAARVQIGHWPDSYVPDDFWQGLRRLTRYRFHLSRNLAREKMRFQSYAFLKCSDWKRVKPFSNIFGATSAALLTEFTAAELREMTHSQLADLIAHRGHGRFYDPDATARAVQEALHSSYPIDRQMDEMITFTLAIGWEHIRCLKRLMKRLDQQIARRIEPVPNPLITIRGLGPVITAGLLTEIVDISRFPEHKHLAQYFGISWAKRASGGFVSQNTRMTKVGNPYGRYYFILGADRLRQFNLEYKAYYWRKYNEVSKHQHKRALVLTARKLVRLVHALLTKNVPYVRPQMPADFVEDDLLR

SEQ ID NO: 248859 - protein, 371 aa, unidentified
MNTYILEAAPTACAIELKTDKRPKAKRILLGVDVHLRGYQAARKVDDGVIGVVDTFRSEVELLLHVEKQRQRAEEVVVVYEAGPLGYTLYRKLKAAGVLCYVCSPDGAQQRKKRRKNNKIDARNLASKLFNYLNGDKEALQLARVPTEAQEQLRLASRQHDQLVEERKRLGAKGNAMLLSQGFGSWSNWWRPKVWAQLSVLVPAWLLERLQIWVDVLKMLDEKLSQAKAALAGACSGPRPKGVGALSQMQLRSEVLDWHSYTNRRKIACLAGMVPSEWSTGEKERRGSITKVGVPAIRRIMVEMVWRIIFFQPQYKPVQKWQEVLRGSNPALKKKAVVAIGRQLIVDLWRMETGRVTAQELNLVMIEAEGV

SEQ ID NO: 248860 - protein, 338 aa, unidentified
MDNYIGMDAHSSICVFSIVDANGKEVNQAKIATNGQLLVEYIRSIEGSKKLVFEECELSAWLFETLRGEVDELIVCNPTRNQQYKKAKTDKLDAQNLARLLRGGFLTPVYHDGSKTEHLRALMSGYQDIVDTGVSIKNRYKSLFRKAGLPARGAGLYDDSSLLENLSRPDQRFIGRGFYRLLETLEKEREQYIVAIRKSSRAFPEIRLLKAIPGIGDIQAAKIVSQVISAQRFRDKHKFWSYCGLVRHRMESGGHIYGSKRSWGNRILKCVFKMAAQTVVRGENEFRAYYDELRLKGTSDRAAKNAVSRKLAAISLSILKTLRPYDETRIMPQTEQAR

SEQ ID NO: 248861 - protein, 345 aa, unidentified
MEYFAGLDVSVKETSVCIVDDTGKIVREAKVSSEPDAVLAVLAKPAYLFKRIGLEAGPLSQWLFSALAEAGLPVICVETRHMRAALKAQINKTDRNDARGIAQMMRAGLYRPVHVKTLRSQKLRMLLTHRKLLQSKAIAIENDLRGTLRNFGLKVGVVGTLRFEARIKELVEHLPDLAALVEPLLVVRRALREQIGILHRRLLAVVRDDDVCRRLMTIPGVGPVVALTYRTTVDVPARFRRSKTVGAVFGLTPAKYQSGESDRTGSISRCGDEMMRVMLYEAAHIMLVRSTKWSWLKAWAIQIARRRGLKKAIVALARRLAVIMHRIWVDGTEFRWTKEQATAAA

SEQ ID NO: 248862 - protein, 421 aa, unidentified
MTPTSHTTFAAFVGIDWADAKHDGCLQAAGSAKRECFQLEHTPEAIDAWVTTLRTRFHGHPVALCLELTTGPLVSALRKYDFLVLFPINPLTLARYREAFTPSRAKDDPTDAELQLELLLTHRDKLQPLQPQSPTMRTLAQLVEHRRRVVGDKVRITNRLTSALKNYFPQVLQWFQDKDTRIFCDFLSRWPTLKAAQLARRSTLETFFRDHHVHTADVLATRLHAIKAATPLTTDEGIIAPNVLLVQTLVSQLRVTLDAIEAFDQAIAQRALHHPDFPLFQALPGAGPVFASRLLVAFGEQRERYASAAELQKYAGIAPVTERSGKKAWVHWRLQCPKFLRQTFVEWTAESIRHSFWAQVYYQQQRDKGNTHQAAVRALAFKWIRILYRCWQERTPYDESTYLQALMRRNSSLIPNRVKAS

SEQ ID NO: 248863 - protein, 356 aa, unidentified
MSYDVKYIGMDVHKEAIVIAVLNGSGKLVMETILETKASSILQFIHGLRGELHVTWEEGTWAAWLYDLLQPQVQQVLVCNPRRNALLKEGTKSDKMDARKLAELLRTGMLRPVYHGENGLRTLRELGRSYQTISKDLTRVMNRVKAVYRGWGIPCAGTQVYVPRYREEWLSKIPQSGVRRRAELLYQQLDGLLALRREVRGEFLAESRKHKAAKLLRQIPCIGPIRAAGLIALMQTPHRFRSKRQLWTYSGLGIETHDSAQYRYVNGQLQRSKKPQQLRGLNRNHNHEMKEIFKSTATSASCGRGPFHDFYAALLDKGMEPEMARLTLARKIAAVTLTLWKKEERFDAEQLKTQAA

SEQ ID NO: 248864 - protein, 391 aa, unidentified
MFYLGIDVGRYHHAAALVDPRGATVALLPQFPATAEGLLTLRAFVQRHLPPKEQLRVGIEATGPYWQPVARWLSLQGWPCVVDNPIKTSSLRNYGIRGAKTDRIDAVLIAQALRWEDQAPRERLHPSALELRQLTRLHTSFVKDRTRATLRIDSLLSSLFPELPPLLPKKRSSPTTLALLEAAPSPAKILALGPNALTALLRRASRGKLGQARARRILDAAASSVGVPSPAAEIALALLLAQVRLLNEQIDSLDKHIAHAYSHLDLPLHTLPGVGVLLAAILAAELGSARRFARPQQMVAFAGIDPKLRQSGSLQGQVRMSKRGSRHLRRAIYLACQKAVRTDAQFKALYERHLARSKPHRRALGAVMNHFVHVLFAIWRDNRPYVPLTSS

SEQ ID NO: 248865 - protein, 387 aa, unidentified
MYYCGIDIAKTKHVIALIDETGTILKQGVSINNDLPGFERLDQLLLPYKGDVRIGLEATGHYWLALYEHFSKLGYELNVINPLLVKAFRKVDIRKRKTDRIDSVAISQFLRIYKPSSTQMHLPVILQLKELTRFRFQMVQNIGDCKRKIISVLDRVFPEYEQLFSDVFLITSRQLLSQAVTAEEFAAFDLTELEQLLQSVSRKRFGAEKAAQIHSAACQSVGVSFLTDAIHIEMHCMLQQIELLEEQCAEVEDKIKELMNSIPHHITTISGIGLVTGGMLLAEIGDIQRFPKPENLVAYAGIDPTVYKTGQFEGDEMHMSKRGSHYLRWAIWQAAGSSLLHNPELRQYYDKKRAEGKTHGVAMGALCNKLLGRIYVVMKEQRPYVNR

SEQ ID NO: 248866 - protein, 430 aa, unidentified
MYRNYNTQREKIERISEKTLVIGVDIAKDKHYAQVINWRKQAVRKGLGFKNKKEGFEKFLRWVQQALKQTGANDFLVAMEPTGSYYFVFEEYLERLGIEVAIVNGRDVRRTSEIMGNDSSKNDPRDALIISQLTIDGRYGPSTRPKKGIYAELKELIGVREILVADDIRNKNRLHNQLNQILSEYQDYQKRGFSMGMLAALKTFGTLEKLIAAGPEGILQVWQDLQINNYGHQKAQALYNLARTSIGIKRDSEAAAYKLRTLINKYESNQEALQETEEKIRQLLEQLPEAQLLMTIKGIGPVIAGTFLSEIGDIRHYDSPKQIQKLAGYAITSKASGKMHGKEKTSKMGRKLLKTILYKAAIVLIGTNDEFREIYDYYTKERKRPLIKMKAVIAISCKLIRVFYSLLKNGTPYDPKKMLTDIKRPANAFA

SEQ ID NO: 248867 - protein, 348 aa, unidentified
MDTESDRVAEIVGGVDTHKESHTVAAVDGAGRLLGTSEFPATASGYRALLDWLGKRGAVSRVGVEGTGSYGAGLARYLAQEGVLVVEVIRPNRQLRRRRGKSDPVDAEAAARAALSREADAEPKSADGPVEAMRMIRLARSSAVKARTQAANQIDALITCAPQSLRSQLKDLSLLRLTQRARRWRPGDIQEPLSACRATIKGLARRWSQLGAEIAGYDEQLLRLTRLVCPELLARLGVGFEVASSLLVAAGDNPDRLHTEASFAALCGVSPLDASSGQQRRHRLNRGGNRNANRALWVVAMTRLRVDARTQAYAARRTKQGRTRPEILRCLKRYIARELYPILLGSTD

SEQ ID NO: 248868 - protein, 384 aa, unidentified
MCFIKNNKRFGKVKKIDHDIEGFKRLLEDIQKLEAETNEKVCAVFEATGVYTKPLERFLSKNSIKTYIINPLESARKRKEEIHNKKTDKLDPISISKVYYDKEEMMELKKKDETYNWLRKKNRLYEDQLNHLRKYKVTFQNQLSICFPGYLDLFKDGYSDIPMTILKKYPHPDLLKNKKAETVARYLEKNTCHTHKVSLEYALKIIEFAKKTYPGCEKDDVEVEIFKILLDKVIETQRECEKTLNEMITVASTLEEYRYISSIDGIGPNLAARIIAEIGDIEEFKSREALVAYAGLDPHIYQSGDQDGKHLKISKKGNKYLRCLLFLAVGCSIRGAKDNPVNRFYQKKKQQSNPLNSKAAKTACTAKLLKIIYGICKNKTTYER

SEQ ID NO: 248869 - protein, 444 aa, unidentified
MAFSGMILIREVADAPVIMGISKPAGLKSPCGEVKIVNPLFVGIDVSSRNNVAYLMKPDGSRHSSFSVQNNLGGAKLLSERIVSALGSMQLERVVIGLEATSIYGDSLVYALREDGRLGRFQRKIHVLNPKQVRKFKEAYSDLPKNDWVDAFVIADHLRFGRINREVYMDDYRYKALQTLTRARFDVIQNLTREKQRFANYLFLKCSGMAQDKDIQNTSATTIALMEHFETVDDLANADLEELTAFITETGRGKFADPDATAKAVRAAAKGSYRLPKTVNDTVNQAMAVSIASMRALKGQVKVLDKAIEQQFEIIPNTLTSIPGIGKVYSAGIIAEIGDIHRFDSQASVAKYAGLVWNRSQSGDFEAEHSRMIKSGNRYLRYYLLEAANSVRRCDSEFRRYYDLKYHEVNKYQHKRALALTARKLVRLVFRLLKDNRLYIQPEG

SEQ ID NO: 248870 - protein, 341 aa, unidentified
MSESALIGIDLGKHSFHLHGQDKLGREVFRKKFSRQQMMTLFGNLPACTVVMEACAGAHFVARQLMAMGHEAKLISPQFVRPFVKGNKNDFVDAEAICEAASRPSMRFVSPKTEAQQTLSVLHRLRESLVRDRTKTANQMHGFLLEFGISLPKGLAIMKRLASILAEHELPVRLTVLLQRLHEHFCYLDEQIKALDKELASQLADDDLGSRLLSLPCVGPITASLLAVEMGDGRQYRCSRDFAASVGLVPRQYSTGGRANLLGISKRGDKHLRQLLVQCARVYMQRLEHQKGALADWVRSLLGRRHSNVVACALANKLARIAWALAAHHTQYEAGPDALNA

SEQ ID NO: 248871 - protein, 396 aa, unidentified
MAQAAVQNTTATPVLYVALELSKDTWKLGITLDRVSKAKIRDVRARDLDGFLAEIEAAKKHFNLPENTLVKSCYEAGRDGFWIHRFLLAHGIENVIIDPASIEVDRRSRKVKTDRVDAQKMAQLLARHGDGERVLRVVRVPPLESVDERILPRDLKALKKRREQAANKIQASLFEHGVDLNPRLGSFKDKDFLTALKAARQWDGKRLPPECLRSVKRSWQLYSLLTKQIKELEQRQRQVLREARAEPEKATSAARKAAILSQLRGVGDIGSYVLTTEFFGWRDFDNRSQVGALAGLTGTPFQSGNMGRDQGISKSGNPRVRTLMVELGWLWLRWQPDSRTTKWYHEHVGKGGSRAKRKAIVAVARKLLVEFWHFVEHGVVPTGAVLKTTNAEGSPA

SEQ ID NO: 248872 - protein, 347 aa, unidentified
MERQPLKKLEPDENDLIKLLERWRGEAEKAGHKINRIAVAFEAGRDGFWLARWLRARGIEAHVIHPASVAVSREHRRAKTDRLDTEQLKRAFLGWLRSEPVHCKMCAIPTFAEEDAKRPHRERETLVGEHTTIINRIKATLARLGIRNLNPKLKKAAELLERARTPEGETIPPNTLAELRRDMARKQFVAEQIRQIEKARLEQLEQAPKAGPNLMVLLLVRVIGIGIETADMLVKEILSRNLRDRRAVARYAGLTGSPDESGSRRREKGLARSGNARVRRGMIQLAWRFLEFQKGSALAKWFEARTENARGLRKKMIVALARKLLIALWHFVRDGVIPDGVVLRPAR

SEQ ID NO: 248873 - protein, 314 aa, unidentified
METSAQPVFVGIDVSKNKLDVALWPSGEGFAVERNAKGLNSLCAKLAALNPVTIALEATGGFETVVAAALAAASLPVAVVNPAQVRAFAQALGKRAKTDSLDAAVIARFAEAAKPAIRPLADAETQLLADLIARRRQIVDMIVAEKQRLGRAPAKRLKKSIERLLKALEKELSNLNGDIDTAVRASSLWRANEELLTSVPGVGPTTARTLIAELPELGTLTRKEIAALAGLCPFTRQSGQWRGKSFIQGGRASVRAALFMAAMVAARFNPILKTFYARLTAAGKPKKAALIAVARKLLTILNAILRDQKPWQTA

SEQ ID NO: 248874 - protein, 358 aa, unidentified
MDKIKSSKLDCTGQPIYVGLDVHKKSWSVSVFSRYGEYKSFTQPPQVDTLVNYLRHHFPGGEYHSVYEAGYCGFWIHDQLKERGINCTVVNPADVPTKQKEEQHKRDRVDCRKLARGLCNGEMEGIYVPSRQMREDRTLVRTRQSLVKKRTRCKNQIKGMLLFYGIHLTDEQTFAPWSGSFIKWIESISMERDSGNTALKAHLEELAYLRQLINTVNRAILKLARSEEYATPVKVLKSAPGVSTLTAMILLTELCDMARFASLDSLCSYVGLIPSIKSSGETEYVRGITPRRNAHLRWILIEAAWVAVRKDPALMMAFTEYGKRMRKNRAIVKIARKLLNRIRYILKHQTPYVPCIAR

SEQ ID NO: 248875 - protein, 318 aa, unidentified
MTQDLFVGIDVSKARLDVAVSPGEHAWSVANSEDGIQEFVLRIRQLGAPKIVLMEATGGLERRPLALLAAAGLPVTAINPRNARDFAKSIGLLAKTDRVDAKALALFAQRNQPPCRPLPDEQTRALQDIITRRRQMLDMLAAEQHRLGIVENLKVRRQITSHISWLKKRIHIVDHDLDTTIKNSPAWQPKSDLLKTVPGVGPVMTATIISRLPELGDLTNKQVSSLVGVAPFNRDSGTVHGRRCIWGGRAEVRNVLYMATLAAIRFNPTIKAFYLRLRAVGKLPKVALVAAMRKLLTILNAMVRDKSPWRTPHVENLS

SEQ ID NO: 248876 - protein, 368 aa, unidentified
MNDCIYVGLDVHVQTVSMATAGWDQEPVFVGTFPNKPAKILEHLAALGDPAALRVCYEAGPTGYGLARMLLAHHIACTVVAPSLIPITPGRQVKTDRIDALKLARLLRSGDLTAVVIPTPELEAVRAVSRAREAIRRDTHRAMMRLVTFLRQRAIGEPTGTRWTKKWWRWLDELALPYQADQIVLTQLAAQIRFLGNQNASLVTALETTAGASASFGAGIDALQRMHGVGLITATGIVAELGDLTRFATAPQLFAYAGLVPREHSSGGSQKQGAITKTGNKHVRYLLVEAAWRIVRPFKPDTLTADDPIGQIAATARRRLHKRFWRLIAKGKNRNQAIVAIARELLGFLWSMACTVAAAPAAPAALAA

SEQ ID NO: 248877 - protein, 318 aa, unidentified
MLNESFVGIDVSKDWLDVGWEPAQRSERLAHEEVAMVGLCERLTQERPCLIVLEATGGLETHLASALAAAGLPVAVVNPRQVRDYARACGRLAKTDRIDALVLAAFARAIRPQVRAPKDDETLELGALLVRRRQLIDMRVQEKLRLERASPVQRDSFKEHIAWLTERIARLDTDLTHRLRASSLWRDKEDLLKAIPGVGTITRVTLIALLPELGKLNRREIAALVGLAPFNRDSGQHRGERVIWGGRAQVRRVLYMASIAAIRSNPVIRVFYQHLRAQGKPGKVALVACMRKLLTIMNAMLKHNTPWNPSTLDLEHSC

SEQ ID NO: 248878 - protein, 359 aa, unidentified
MAAFGLSLEAPKEALMLHVGLDLSRKRLDVCVLDADGVLAARLTAPPDGAGLRQLAARLAGERVRAVVESMTGARFVHDTLEGCGWVVEVADAQRVKALAPLTAKTDRIDARVLADLSWRDLIPAIWLPPPEVRGMRELARFRLHLVKHRTALKNRIHSSLITWGIAVPVSDLFGLAGRNLLGRLDLPPAWRDTTQATLEAIDHLDGQISECDRQLRHVGQADPTVRLLQTIPGIGPILAFTIAAEIGDITRFPTPKHLVGYTGLCPRVHQSGDSDWRGPLAKHGPRWLRWALIEATTWASRHPAYSQRYQTISRRLGRQRGPAVARVDCARQLATAIWWMLTRQQPFQPASPATPLVA

SEQ ID NO: 248879 - protein, 418 aa, unidentified
MGKINERCGGIDVGKRFLLCCVLSGAAHEEPRSQTRRFDATVSDLARLREWLAAERITHVVMESTGSYWVPVFNILEGHFIIVLANPEEVKNRKGHKKDRKDAEHLADLLRHDHIRASFIPPKPIRDLRDLTRRRLQLIQEATRERNPVEKLLEHVNVKMGNVLSDVFGVSGQSMLLALLDEKTTAEQIAHLARGQAKRKIPQLTEALEGHGMRDHERFLIRSCLRHLACLEEEVEQMDCEILQRMQESPFQGAFQRLQTIPGVGQLAAASILAETGVDLTTFRTAEKMASWAGLCPGNRESAGIKKGSQTTLGNSYLRTTLVQCAWSATRKTGCIFQTRFRELSPRRGQKRAIVAIAHQMLTVLHFMLKNNVPFNGAANAPTQRRRQRRAHHHLRCLRRLGISVQIVEPTEFAPQTG

SEQ ID NO: 248880 - protein, 366 aa, unidentified
MLYLGIDQHARQITISLRDEGGDVLQARQISTQPEKVMAFFQQLARERLHNGESFVAVLEVCGFNDWLIRMLREYHCHKVILIQPDERKKCKTDRRDAAALSELLWVNRQRLLQGKPVRGLRQVDLASSTDQENRRLTTLRKESGQARTRLVNKVRHLLRRHNLQWQMPTKRLPTLAAIAWLKQVALPEIDRLEMDHLLNDLEHIRQRLKELERVIAQRCGVSAEAVLLSSMPGVSYFTATSLACRVGRIERFPRARSLANYWGLTPGCRNSGENTQRLGNITKAGSGMARWLLAQVTHKVLRKDARLREWFKRIKRRRGSTIARVAVMRKLATIIWHMLSKRKTYAECRALAEAGGKEREEQTCG

SEQ ID NO: 248881 - protein, 365 aa, unidentified
MTTRQRSTSSSTDPPVRREVVLGVDTHGEVHVAAAVSPLGKILGTESFPATAAGYRQLLVWARKRGTVRRAGVEGTGTFGAGLSRYLLAQRVEVFEVNRPDRTARRLLGKSDPLDAQAAARAVLSGRARARAKTGDGPVHSARMYKLAKDSAVKARTQAINQLKAVLVIADPALRERLSNLGNAELFRTCARFSPCDGGGDEDAVTQATHMTLRLLAERIEQLTGQIDELNRRLTRLVEHHAPQLLVPVGIGPDSAVTLLITMGDNPERLNTEASFAALCGVSPVEYSSGRRSTRRLNHGGDRQANAALHRIVFTRLRHDPRTQAYYERRTQEGKTRREIIRCLKRYAAREVFNLVRPVSRTPGL

SEQ ID NO: 248882 - protein, 354 aa, unidentified
MPEKLNTAIAVVGIDIGKNSFHVVGHDERGAIVLRQKWSRGQVEARFANMPPCLVGMEACVGAHHLSRKLKGLGHDARLMPAKYVRPYSKGQKNDFRDAEAIAEAVQRPTMKFVATKTADQLDLQALHRVRERLVSQRTGIINQIRAFLLERGVAVRQGLRFLRAELPGILATPPDVLSPRMVRVIEGLAGDWRRLDERIEGLSSEIEALAQRDAGCERLMSVPGIGPIISSAMVAAIGTGDAFSKGRDFAAWLGLVPKQISTGDRTILGKISKRGNRYLRVLFVQAAWVVLIKPKSWERRGLKTWIEAAKKRLHHNVLAIALANKLARIAWSVLARGRNFEVRSITNATAQTA

SEQ ID NO: 248883 - protein, 351 aa, unidentified
MMIIGVDYHPSFQTIAFFVEETGECGEQELNHSDGQAEKFYRDLKQRGICVRVGMEATGYSRWFERLLAELGFELWIGHPAEIKAKRVKKQKYDREDARLLLRLMRENNFPQVWVPSPENRDLRQLLWHRHRLVQMRTRIMNQLQALAMNEGYRWKKKLFSEQGRAQLEKLALAPWASRRRRELVELLDRMNPTIEELTAAVEREARKRPEVLRLMTHPGVGPLTALAYVLIIGTPARFQRGKQIGTYVGMIPSEDSSGGKQRLGHISKQGNSLLRFLLVEAAQAAARINPDWRRRYMHLAMRRHKSIAKVAMGRRLAIRLYWMWRNGCEYSQSLEFGSYAGQLGTGHGVK

SEQ ID NO: 248884 - protein, 323 aa, unidentified
MTVYLGIDIASKKFDVAELCDGNYRCKAFENTSAGFLALYKWLGQSTMPDIHACLEATGDYGTSLATFLYENKIKVSVVNPARIKGFGASELSRTKTDKADSKLIARFCKAAVPDGWKPTPAPVRKLQALVRRISALNGMLRMECNRRENADANIQASLDRIISLLKTEIEVVRQEIKDHVRSDDELKKQDALIQSVPGIGEVSSNLILSFMSGKGFRKAKEVTAYLGLNPRHHQSGSSVRGKTRMSKMGDTRLRSALYMPALAALRYNPDIKAFGQRLLLAGKPRMLVVGAVMRKLIHIVFGVLKSGTAFSSRIAVHSVVTS

SEQ ID NO: 248885 - protein, 355 aa, unidentified
MSQEKYIGLDVHQATISAAVMDPSGKLLMECLLETKAATILEFIQGLRGTLSLTFEEGTSAAWLHDLLKPYVSRLVVCDPRKAALLKEGNKSDRIDARKLAELLRTNQLKPVYHGEHGIRTLKELGRSYLTVSKEITRTMNRIKSLYRSWAIPCPGTTVYAPRHRREWLAKIVQPGVRVRAEHLYEQLDGLQPIRLQARRELLLESHQHAAVKLLRQIPSIGPIRAALLVALLQTPHRFRTKRQLWAYSGFAVETHDSGEYRWVRGKLQRNRERITVRGLNDNHNRDLKNLFKGAAISASTRPGPLQDFYLARVAQGIRPTMARLTLARKIATITLTLWKKGASFDPQHLSRQAV

SEQ ID NO: 248886 - protein, 345 aa, unidentified
MDHFAGLDVSVKETSICIVDDAGKIVREVKVASEPEALLAVLKNPAYHFKRIGLEAGPLSQWLFSALAEAGLPVICVETRHMQAVLKAQINKTDRNDARGIAQMMRAGLYRPVHVKTIRSQKLRMLLTHRKLLQSKAIAIENDLRGTLRNFGLKVGMVGKVKFEARIKELVENLPDLAVLVEPMLIVRRTLREQIVILHRRLLAIVRDDEVCRRLMTTPGVGPVVALTYRATVDVPARFRKSKAVGAVFGLTCAKYQSGEVDRNGRISRCGDEMMRVMLYEAAQSMLRSKKWSWLKAWAMQIARRRGMKKAIVALARRLAMIMHRIWVDGTEFRWTREQATAAAA

SEQ ID NO: 248887 - protein, 382 aa, unidentified
MSTTATTRTDHPTETLSLAMELGNGRWHLGFTTGFGQATRQRSVAARDRRALLREIEEAKKRFGLPAKARVVSCYEAGRDGFWLHRFLTSEGVENHVIDSSSIEVNRRRRRAKTDRLDLDGLLRLLLRYEAGERRAFAVVRVPSDSEEDARHLHRELLTAKRDRTRVTNRIRGFLANQGLEINLAGDVPGQLEEMRRWDGSPLPKTLIRRLRREWERVLFLTAQVQELVKERRSLIRESSDPAFAKVMQLAHLKGVGIESAWLHTMEFFGWRDFQNGKQIGGLAGLTPTPHQSGALRRELGIDKAGNKRVRWMAIEAAWSWIRFQPNSALTRWYDERFAHGGPRMRKIGIVAVARKLLVSLWRYLETGVLPEGAELKERVQI

SEQ ID NO: 248888 - protein, 363 aa, unidentified
MSDASKDQPNMTAGLDLGDRYSYLCLIDQHSGEVIEEGRLRTTPEAFRRRFASQEQPMRIAIEAGTHSPWVSRVLEEECGHEVLVANPRKTRLIYSNKRKTDEIDAENLARLARLDPKLLYPLEHRGVNSQAHLAIIRSRQALVGCRTQLVNHVRGAVKSFGGRLPKGPARSFHKRAAEHIPEALWPALEPILEQIGALTQRIRDYERQLEEISKVHYPETELLRQVEGIGPLTALTFVLTLEDPSRFAKSRSVGAYLGLVPATDQSGDRDPQKRISKEGDEMMRRLLVGSAHYILGPLGSDSDLRRHGEKIASRGGKNSKKRAVVAVARKLSVLLHRLWVTGEVYEPLRNTHRSGGQEEEVA

SEQ ID NO: 248889 - protein, 462 aa, unidentified
MLEEEQGTNRAAGAGEEEGLPVIRPRVAGADLGSTEHWVCAPRAEGGGRETERFGATTPELERMAAWLKARGVESVALESTGVYWIAPHEVLERHGLEVVLVNARDLARVPGRKKADRVDCAWIQRLHSCGLLAGSFRPAEAICMLRTLVRDQANQVAAAGDWLRRMQKSLDQMNVRVHRAVSDVDGVTGMAILRAIVGGERDPRKLAGLRDRRCHKSEKEIAEELTGHWREDHLFSLAQSLKMYDAVQAGIAAYEAEILRKLAAMEREECRGQQPPPLKPTKAKEIRKNGQEGLHEALFRMSGADLASIDAIGVGTVQVVLSEYGPDLSQFPTEKHFVSHTTLAPHKAVSGGKPLKKKKRGSASTRTAAAFRMAALSQRNSETALGAYYRKVARHKGGDVAVFATARKLATLVYRLLRWGKPYADEGAEAYEKRYRERRLHSLETSARDLGFQLTPIPAQA

SEQ ID NO: 248890 - protein, 351 aa, unidentified
MIIGCDFHPRFQQIACLDTKTGECNERRLMHTGEAERFYRSFAGCQVRVGVEATGNFAWFRRLLGELGHELMLGDATAIRASNPRSQKTDKRDARHILRLLVEERFPVVWQPGVENERLRQLLLHRSSLVRMRTRIENQLDSVGKNEGLVESRRWTAKRRSAVEGLKLDGWYGERRRDLLALLDGLQERIKPLDQAVRTAAEADPLARLLMTHPGVGPVVSLAYVLTIGDWQRFPRGKQVGSYLGLIPCEDSSGDKRRLGHISKQGNPMLRWLLVQAATVAQKYDADWHRQYVRLSMAKHHGVAKLAIAHKLAVRLYWMLRSGQDYKQIVERGSHAGQSACPNGCGKKPRT

SEQ ID NO: 248891 - protein, 345 aa, unidentified
MESKLEQLQERPSRPFTPRGGPAWPARILEAGVIYHVKEELVYCGVDIAKAYLDAAIGKEKRRWPNDSKGHRELISWINQIAGPVQVICEPSGGYERMLLQALVRAQIAVSLVPANRVRQFARAAGVLAKTDRIDTEVLCSFGKAMRPPSLSGARLEQEKLRELDSQRRHLMHLLVMEQNRGARLSDAAVRRFNRRLVNQIKKQIDAIDLLIQNHIEQSQELSAKAEKLTAISGVGERTSALLLAQMPELGQLNRRQVAALVGVAPFNRDSGKMRGKRTIFGGRRFVRHGLYMAALVAARHNPILRTFYQRLRASGKPAKVALTATMRKLLIVLNSALKPQSIYA

SEQ ID NO: 248892 - protein, 319 aa, unidentified
MEQNNYKIYIGIDVSKAKLDIQYNDSGLLLTIENKPGDFKKLNSYLPKDKKSVLVILEATGGYETKVVKWLLSRNIPVVVVNAKRVRDYAKATGQFAKNDKLDAGIIREYGLMFGHKLHLQQKKNKVEEQIDDLTRRRKQIISIRNKEKQHFAIIQNREALSSIKRAIKFYNDEVDKIEKKLAVALNKDKQLQAKADLLKTIKGVGDVTMYTMIGELPELGHVNNKEISALSGVAPFCRDSGTMKGKRTIWGGRSQVRTALYMAALSASKYNPAIKIFYDRLIAKGKCKKLALVACMRKLVIIMNTMIKNNEPWRAERL

SEQ ID NO: 248893 - protein, 320 aa, unidentified
MNTIGLDISQKTIDATLYKTDGSTYYTKVGNNREGFQSLKDWIKVNKVRKCVIGMEATGIYYESAAENLSETYTVYVINPLKIKDYGKSQFNRTKTDKADSNLIAEYTKRHADKIIPYSKPKNRYLQKLINLKQQLKDHQKQIKNRLHSSDDEMIQAIHQDLIQAYQEKINQTQTAIEAQIKEQAETDGHYRNLQTIAGIGKDTAAILYAQLTDKNFQTANQFVSYAGLSPQTEQSGTSVHKKGRLSRYGHRRLKRSLYMPALVAYRVNAFPQLILNLTNAGKPKMVIIVAIMRKLAKLAYYIVKTGKPYDSTRHKAAQA

SEQ ID NO: 248894 - protein, 378 aa, unidentified
MINRKYVAFDVHLATISFCILDGTGKILWESVFRNTAETIRDFLGGIRGEVHLTFEQGTQAAWLYDLVKPLVSNVLVCNPRYNRVVLCGDKSDRIDARKLAEQLRLGALRPVYQTEYSLRPLKQLVLGYEALIRDSVRTMTRIRSLFSGRGLSCTGGGLYNPAKHDLWLEKIKEPGLRFRLRILFQQLDSLMPLREEGKKQLLLESRKYPAVKLLKRIPCLGPIRSAQIVAVVATPHRFRTKRQFWPYCGLAVVNRTTSDYQIVNGRVQKKIRKASTRGLNRDYSRILKRVYKSAALQATTHKLLGPIYRSLLQKGLNPDMARLTLARRLSSTSLTIWKKEAKFDPNKFIVITTDSKHRKEEKKEKKLSLNKGKGTAQ

SEQ ID NO: 248895 - protein, 351 aa, unidentified
MIYVGLDLHKRYITACAIDAAGQLIAEERRLLTDLAVLSAWLGRLTGPVTVVLEATLYWAWLERQLTALGYTVQVAHPYQVKLIWQARTKTDPIDARKLAELARVNLLPAIWIPDAATRAQRQLLRGRAFLVRQRTVLKNRIHAYLTGENLRCPALDLYGRAGRAWLATVELPAVVRRHVDLLLANLDLLTTQILALDKYLQRHVRQDAVAQRLQTIPGVGPFGALLLQAEIGPVTRFRSAQELAAYAGLVPSTHSSGGKTHHGAIGRGSPWLKWIVIEIIQAHKLAPGPVGAHYQKLLRAKGKPKATVAAARKFVTYLYWILKKEWSYTEWLRQHDRPEVRPTQLLGSVA

SEQ ID NO: 248896 - protein, 428 aa, unidentified
MADYDKGKPYSSWVAIDVAKDYNAVMVERRDGTRKKFRMANNASDHDKLVEFIRELPQPCRIGFEATGNYHRALGFRLASEGFDTCLISSIASARYREVLFNSWDKNDPKDAEVLLELLKKGIVQRHVEPLIAGHHDLQELSKTYYNVTLSRTRLQHSILNHYLPLYFPEMAKFWCSTRAEWWINYLIRFPTAARVRELSFDEYRTVAWPLVGRKVAKQRKIEELYEVAKKSIGLPIAADSLACETFRLQLHRYLEINGHRKALEERAHEVMSTNPDYAVLRSIPGIGPITALTIFAEGGDLRRFGHHRQFLKYCGFDLAKNQSGTMRGLEQLSKRGNARLRLALWLAALNAVTHKENSFREKFRRYVKADPDNADLRRKALTAVAAKMARTVYGLIKSGKCYQGYFEQVLPSGSIPLCRAVEAVRTS

SEQ ID NO: 248897 - protein, 370 aa, unidentified
MSNATTFVGLDVHARSVKACAFVPETGETIRKSFGYEPGEIASWVSSLPQPARCVYESGVTGFHLCRELNAMGAACVIGAVSKMHKPAADRGRKTDRRDAQFLAVQLALGVVTEVHVPDAECEGARDLARALADARDDAVRAKQRLSKFLLRHGLVYDERNSAGQRRNRWTGDFWAWVGRIDLGDAAAMATLDHYCERVREADAAKAALEAKVKSLAQQPRWKPTCDALKCLKGIDAVTAASIACEADGFARFATASGFAAWVGLVPSEHSSGESRFRGGITKAGNKHLRKLLVEAAWHYKGASRSPKDLAKGQVVDAATRRHANAGVRRLVDRRRSMDDAGKQSSVANVAVARELACWCWAVGRMAEGA

SEQ ID NO: 248898 - protein, 454 aa, unidentified
MAKKAKKIKTNKGLKLEIVNPNSAGIDVSSTEMQVCVPEERDGENNRRFGTFTQDLHLISDWLKACGIETVAMESTGVYWVQLYMILESEGFDVLPVNAKAIKNISEKKTDRVDAETIMVLHSYGLLRASFQPQNHVRRIRNVSRHRDGLLKASSREVLHMQKAMELMNIKLGNVISDILGKSGQEIIRAILAGERDALKLSALADPRCKSPKETIAKSLQANWDEDLLFMLKQSYELYVYYQNLMKDCDKQIEGILQEYLKDVKPEETSKPEQRAKKAKAQKNAVTIDIEKHAIRLWGVNAMRIPGVSEAALLRLAGELGHDFTDKFDSYKQFCCWCNLTPNNKISGGKLQSSKIPKRKNPVGQILRSSANSLKTSKTPLGYYFRRIQAKSGYLPAIIATANKLGRILYTMVKYKVEFDDSFTQTSETEILRRKLIKTQRTLEKLQNQIKECG

SEQ ID NO: 248899 - protein, 381 aa, unidentified
MTTPATCHVPESTTAGTLFVAFELSEKTWKLGFTTGHGQKPRERTVTARHQERVLEEIAHAKRRLGLPDTAPVVSCYEAGREGFWLHRFLQGHGITNHVVDSSSIEVNRRRRRAKSDGLDVRKLLSMLLRYAQGERQVWQVVKVPSVEAEDQRHLHRDLETLKQERASTATRIQGLLSSQGLRVTSLTKLPEQLDALRLWDGSPIPPGLRRRVLRVYAHHTFLSEQIAAVEAERRAQLQTATDARIEKVRQLMQLKGIGINGAWLLVMEFFGWRAFKNRREVGGLAGFTPTPYQSGESAREQGITKSGNRHVRWMTTELAWSWLRFQPASALSVWFRERFGSGGKRLRRIGIVAVARKLLIALWRFLETGVLPAGAVLKEV

SEQ ID NO: 248900 - protein, 414 aa, unidentified
MKKKEKVEFEQAIERGCGLDVHKESVTATIMGQGIKQQTKEFSTYTRSLILLCDWLLKNGITHVAMESTGVYWKPVFNILGEHFKIILVNARHVKNVPGRKTDQLDSQWLAKLLMAGLLNASFIPNRKIRELKDLVRYKTKLTHQISSEKNRFIKILEDANIKLSSVLTDVFCVTGTKIIREIIESDYKPEKLLHYVHGRVKKSRSEVKEAITGYVTDHHRFMMQTILENIEKIEDTIAKIEAQIAEQTKEYGLEVELLKTIPGVGHDGAIGIISEIGVDMTVFPDKKHIAKWAGMCPGNNETAGKKKSSRASYGNAYIRALLVQLAWSASRTKKTYLSNKYKSLVRRMGKKKAIVAVGHKILIASYFIIKDKVKYNELGEDYLSNFKKDKLIAYHKKRLLELDPDLEFESKVA

SEQ ID NO: 248901 - protein, 351 aa, unidentified
MIVIGSDPHKQTHTLVAVDAATGERLGCETVAATIAGCERALGWARGLGDGERVWAIEDCRHVSGRLERWLLARGERIVRVAPTLMAGARRSARERGKSDPIDALAVARAALREGIERLPAAHLDDDALEIRLLLDHHDDLVADRSDEQRRLRWHLHDLFDDIDVPAGALDRQVWLERLARRLARCEQTARVRIAREQIRSIKQRTRRIRELEREIELLVAGYAPQLLAETGCGPLTAAKLIGEIAGAQRFAPDAQLARAAGVAPIPVSSGRRDRHRLDRGGNRQLNLALHRLAVNKGRHCPQTADYLARKQAEGKTRMEALRCLKRHLARRVHTLLTDPANAPTPALALT

SEQ ID NO: 248902 - protein, 420 aa, unidentified
MNESTSINIAPGSVLIGLDWAKRKHDFCLRTPEGGYESGQVEHDQTKLRQLIDSLSCRFEGRQICICMEAGRDPLLWLLETYEGVDLYVVNTATAARYRKTFTPSGDKNDQRDAASILDLFERHSEKVRVHKKSSLSARAMHQLSSARRNAVDRRTAVISSFREVLELYYPVAPKLFEDLSTGLALEFLKRWPDPKSLSKARESTLIDFFHKHRSRSQERIQKRLDKIAQSSPTIEDLTLLEVGRMRVSDHISQIQILNESIKRYEKQIEVVFEAHEQSSLFSQLPGAAKSLAPRLLAAFSLLEPRDAIEMQTMVGIAPIRVQSGQSTKTFMRQRCPKFIRQSFHEFAGCSVNSSAWAKAYYDHMTKTKRCGAHAAKRALAFKWIRILFACWERNEPYNEMKYIAGLQRRNSPLVKLILT

SEQ ID NO: 248903 - protein, 352 aa, unidentified
MNEITRIGMDTSKHLFQLHGVDAAGETVLRRQLRRGQLEAFFTSLPPARVVIEACTGAHHLARRLRSWGHEPRLIAPHRAKPYVGRNKNDAADAAGLCEAGGRPGMRFVPEKSPEQQARLMLMGVRASLIRARTQVANAIRGYAAEFGLIAPKGLCRIETLLEQVASDPALPPLARKLFALQGEQYAALAPALAKVEAELEAFVRDDDLARRLKAIPSVGPVGAALLTIKTPDPRVFASARGFAAWMGATPRDHSSGGKQRLGGITRAGDEALRAVLVAGAMAVIRQALRSGKASPWLARMLARKPVKLVAVALANKTARIAWKMMVSGERYDPTRAATAATAAATTATAPA

SEQ ID NO: 248904 - protein, 347 aa, unidentified
MGKSITDLSSVTTVGLDLAKHVFQVHGVDASGRVIVVKALRRKDVLAFFAQLPECLVGMEACGSAHHWARELIKLGHDARMMPPAYVKPYVRRQKNDAADAAGICEAVTRPSMRFVGVRTLENQAALMHHKLREMLVAQRTQLINALRGHLAEIGVIAAQGLKNARDLAGVIKAEGDETIPACVRAALAPLVRQLHALDQEIARSDQTIAAMARDDEMARRLMTIPGLGPVTASAMATSVQDVSVFSGPREFAAFIGLTPRQNSSGGKERLGRVSKMGNRYLRKLLVVGAHAVLYHRKPHDDALRSWAKKLMQTKPFKLVAVALANKMARIAFAIMLGKTSYSAAPA

SEQ ID NO: 248905 - protein, 346 aa, unidentified
MEQVIRIGMDTSKNLFQLHGVDASERPVLRRKVRRNDLLAFFVQQAPTVVGMEACGAAHYWARELSKLGHKVKLIAPQHVKAYVKRNKNDGRDAEALCEAMSRPTMHFVPVKSEEQQAALMLIGVRQQLMTRRTQLSNAIRGYAAEFGVITVKGLVKVEPLLAQIARDESLPALAREMFALLGRDYARLQIELKAVEVRLMAWHRANADSCRLAKIPSIGLIGATALVMKAPDPRLYPSGRHFAAWIGLTPKDHSTAGKTRIGKITRAGDEMLRSVLVAGATSVIQQAMKGRGRPSPWLVALLARKPPKLAAVALANKTARIAWKLLTTGESYDGERMPVASKCAA

SEQ ID NO: 248906 - protein, 369 aa, unidentified
MGNGNTLHVGLDVHKDSIAVAYAGVDGAEPVHIGSIGTRQCDIDALIRKLQSKSPHLVFVYEAGPCGYWLYRYLTRKTFPCFVVAPSLIPRKPGDHVKTDKRDAVTLARLARSGDLTPVYVPAVADEAIRDLARAREDALKDCNAARFRLKAFLLRNDIRHVGRANWSPEHLRWLARLVFPTSAQQIVFQEYVRTVTERTDLWHRLEAELVEQAKPWRFSPVVEALQALRGVQFTVAITTLAELGDLTRFDHPRQLMSYLGLTPSEYSSGDRRRLGGITKMGNRHARRVLIEAAKAYRHRAKVSEQIRARQQALPPAVCEIAWRAQVRLCGRFRKLLARGKHPNTVTAAIARELAAFMWAIAKLQPLAA

SEQ ID NO: 248907 - protein, 352 aa, unidentified
MRTVAEEYDRVVGVDTHAATHTMSLLIAATGAVVEHRNFPTSAAGLRRALTWIGNRTQDQACLVVVEGTGSYGAQLTEHFTQGGIVVAEAPTLPAVRLRGKDDVMDSARIARAVLGLRLDQLYWPRAGGIRTAIRVLVSARGQMGTERTKIINALTALVRSVDLGVDARKALTSAQITTIAGWRTRDEDPATAACRREAIRLASRIHALGRDMATNMAELRQFTAAEVPELLDLPGVGPVVAGTILLAWSHPGRVRSEAAFAALAGTSPIPASSGNTIRYRLNRGGDRQLNRVLTTIVLVRMRHHPATRDYVARRRAEGRTTKEIMRILKRYIARQVFRLLATAHPIPAPAA

SEQ ID NO: 248908 - protein, 412 aa, unidentified
MRRIIGMDIHRTFGEVVFWEDGRLRPAGRVDMTHTALEGFGKSLQRIDEVVIEATGNCMAVSRVLSPFVKRVVIANPLQVKAIAHAHVKTDKVDAGTLASLYAAGYLPEIWTPDAATERLRRLIARRYQVVRHRTRIKNEVHAILHAHLIPKCPHADLFNGRGRDWLAHQPVPDDERNAIERHVRELDRLAEDLTILDREIATNSLDDGSVRRLLTITGVNLAVAAGLMAAIGDITRFKSPQKLVSYLGLNPRVHQSGLGAAHHGRISKVGRSHARAMLVEAAWAAAKTPGPLHAFFVRIRARRGHQVAAVAVARKLTVLCWHLLTNEEDYLWARPSLVAHKMRGMELQAGRAQKKGNTRGPAYAYNIKQLRDQEMHVAEQAQRRYEHFVEAWRPRPPKEKARGRLNPAGHR

SEQ ID NO: 248909 - protein, 320 aa, unidentified
MDAVLGIDIAKAKFVVALLRPDGKLRHKSCANTPTGFAELATWLTRQQVTHVHATLEATGTYGEALATWLHAAGHLVSVVNPAIIHAYAQTRLARSKTDRIDAELIAHFTATQRPPAWTPPAAEIRQFQALVRRLDALQGMRTQEMNRLAAGVTVMDVRASIEAVLANLDAQIAHVQQLILDHLDRHPGLRAQRDLLTTIPGIGEATAAVLIAELFDKRYASARQAAAFAGLVPRLIESGTLRGRSRLSKIGPGRLRKALYMPAVAALRWNPTIRAVRFRLQAAGKPPMVIIGAVMRKLIHLAYGVLKTGRAYQPTCAHS

SEQ ID NO: 248910 - protein, 390 aa, unidentified
MRYFIGIDVAKFKHTACVIDTDGIALVEPFDFTNDIIGFQSLLKNIKPFLKKKHLVGMEDTGHYGDNLRNFLLEKQYKVVMLNPIVTSHIRKASNKAKNDRIDCFVIANTMMNPNFYRDQHAQSIDYATVRQLTRMHHTHTEEINRYKCQLQKSIDVVFPEFNSLLNTKYSKTYLEILDTYHSAYTIANTDIRLLRNTLKNVGVGRSVSISAEQLKKSAKESIGQHNLAIEMDIPFLISLIRRLTSILGEIDKKIEEFSHQLNSPILDISGISHFSAMSIISELGDITYFSNEKKLIKFAGVNPCVYESGTYSMTHTRLEKKGSKYLRKTLYQIIDSVIRFNPIFQAFYQKKISQGKSYRCAQGHCIRKLLRVIYKILSTGERFNPAKLK

SEQ ID NO: 248911 - protein, 343 aa, unidentified
MNYVGVDLHKKTIVSCALNQDRKPLASRTFGCQQTDAIRDFFRGLTPFRVVIEATASYDWLAELLDPLAERVVLAHPGKLRVIAESTKKTDKLDARILAEFLARDMIPEAHRPTQRQREHRALVRHRQHLKQSTTALKNKMRRIAADYNADRKDLFTATGWATLQAVALRDADRFVLDQLHAGWQHLEGQLKALAVRLKAFAAKAPAKEAEARAKLATIPGVGPVTVDVVVSELGDIGRFHSAKAVCAYAGLVPAVRQSGGKAKELGITKTGSPLLRWALVEAAWRVIRQGAAWRRVYEQVKKKAGGKKAIVAVARRLLVVMTAMLRDGTNYNFLKVGEASPT

SEQ ID NO: 248912 - protein, 425 aa, unidentified
MKNNILKTLFVGIDVSSKTNALCALDFSGNKLLNLKALNNQPGAKSLLDSVLGCLDLNSLKYVVIALESTSFYSTHIANFLASNELLLAYKPLVYCLNPKTIHNYRKSFVDMDKTDPLDAYVIADFARCGRIKSQPWRGAQFLALQRLTRHRLHLVECITREKTYMVSNVYLKFSQLAVLDKEDRPFSNSYGVTSAAVLTDFLSLDDITYSSIDELVSFVSEKGKNRFSDPVKTAKLLQKAARDSYRLDKVLYEPLNVSIASSFNVIKALDDEVKAVDKAIEKTIKGINNTEYQSLVSIPGIGPVLAGGILSEIGTITSFKSHDSLAKYAGLTWRVKESGDFKSDETRMTKTGNKYLRYYLIEAANCVKKHAPEYKEYYRKKYSEVTKYNHKRALALTSRKLVRLIFGLLTKNQIYSNDKVGEIQ

SEQ ID NO: 248913 - protein, 426 aa, unidentified
MNCTQNYKIDQVTEQTLVVGIDIAKRTHYACFVDDRGRVLRKSFPIFQSKEGFRQLYEAIQEAMQAFGKSEVIVAVEPTGHYWLNLAYFLEEHGIPLVMVNPAHVCRSKELDDNLPTKHDAKDALVIARLAKDGRFLVPRLLHEIEADLRVGSTLKEKLRKEQAAVKNAIIRWTDRYFPEFWTVFRDLGKTALSVLEWTPLPADMAGRTAEELLEAYRQSEGLKSPQKTKIQALIDAAKDSIGVTEGATMARFEIAALVRRYRQLEAEIAALDAELKALVQTTMEYQWLKTVDGLGDATIIDLLAEIGSFAHYRDPRQLVKLAGLTLKENSSGQRKGQKHISKRGRKRLRSVLFRAVIPLIRHNEAFRELHEYYTTRPVNPLTGKQSIVALCRKLLNVLFAICTKKQAFDAERMRQDVLSQVQRAA

SEQ ID NO: 248914 - protein, 414 aa, unidentified
MSVLINKACGLDLHKRFLIATILGRSDEIAQKRFERNDQGILELKSWVIEKQCDVVACESTSDFWVPIYDTLISHVTVIVGNARDIKAYSHKKTDKIDSEFIAQLALNNMVKPSRVFPKLHREFRSYVRLRHNLVRKRTDIKNQAHAILSSEMFHLSDVLTDIFGENGKMVLSGICSGKKFDEIVDKLSPNVRKKSEQIKEILEREMSQSAAVRLRTCLNLIQHIDEQISILETQLFNYVYKHHKHDMDILMSCPGIGELSAATLIAEIGDFNDFSSGDKLASWLGIVPNVYQSADKYHNGRITKRGSKVARWILTQIAQAASRKKASKLKEFFNRKKKTIGYQKAIIALARKIVTIIWHLITNNEMYEDETGYQKGEIQKRKIVETAEISIDERISIISEIFAIVNKKNTDVT

SEQ ID NO: 248915 - protein, 314 aa, unidentified
MSQATFVGIDVSKKSLEIHILPSGEPFSVNYDEPGLAALIQKLKTLQQLQVILMEATGGYEKLLAAELCASGLNKVRISNPRFIRDFARATGQLAKTDTIDAAMIALFAQMFNLKPQTMPSQAEEQLKAMVSRRQQLTKIRTAESNRLEKSTSLRVISSLNKIINLLESEIQELDQDIEKTIRQNPVWYAKEKKLRKVKGVGPATACQLLASLPELGQLNRRKIASLAGLAPINRDSGQFRGKRMICGGRSAVRKALYMATLVATIYNPTIRNFYNRLLATGKPKKLALTACMRKLLIILNSTLKNEPIICIQS

SEQ ID NO: 248916 - protein, 388 aa, unidentified
MNNVGIDISKYKHDCFIVTDFGEVLNEGFSFENNAKGFSALLDELRKSDKENLRIGFESTGNYSINLKLFLEKNGYSFMEINPVLVKEHIKSQSLRRTTTDKLSAMAIANYLVSKEYLPHLKSFYHTFSLKQLTRLRSDLVHQRSRYLVQITNVLDCVFPEFKPFFGGKFSATALFILENYPSPEKIANMNVKSFDILRRKSRGKFSMDKFVMLKHLAKNTVGMYTDFYGIQMDALLDIHAQLDSKLSELDAEITRIIIEINPPTLSIKGVGEVSAAVIVSEFGDFSRFTNPGKMLAFAGLEPGYFQSGTAEHNGRMVKHGSTHLRCAILNCCRALRLHNEVFAAYYLKKISEGKEYGVALSHMAKKLIRLIFTLETKGERFDPAKLR

SEQ ID NO: 248917 - protein, 353 aa, unidentified
MTQPTTASPVRTIGIDLGDQQSAFCVVDADGQSLEEGSVPTNRSAFADRFGAGPSSRVVIEASSHSLWASRCLAELGHEVIVANPRQVHLISKSERKSDRNDARMLARLGRADPKLLRPVRQRTERSFATRAVLSSRWQLVATRTRLINHVRAETKALGNRIPSCWSEIFTRRCRLHLPEGIRASVEPLLEVLDEIQKRINGYDQEIDRLCKEEYPETKVLRQVTGIGPVIALTYVATVEDPSRFSRSRVLGAYLGLTPRTYQSGQRDPQLRISKRGDNGLRSLLVSGATYVMRRTSPDCDLKRYGKRLARGGSPRDRARARVAVARKLAVLLHRLWVTGEVYQPIRERTSAA

SEQ ID NO: 248918 - protein, 427 aa, unidentified
MLKHNTEPNPAEEFAAFLALDWADEEHAFHLQVVGQSKIETGTLEQKPHVLGPWVAQLRERFGGRPIAVGLEQSRGALIHALMAYDFLVLYPIHPTTVAKYREAFKSSGAKSDPLDAGQILEILTKHQDRLHRFNPDTVETRLLGRLVEDRRKAVNLRTTHVQALGANLKEYFPQALELTSGNLSSRLACNLLLKWPTFADFQQAKPSTVKSFYYGHNVRSPEVLERVLALAQKSQALTTDSAIVESGSRLTQMYVGLIQALNPVIVKYDERIQEVFDAHPEVKIFTGLPGAGPALAPRLLAFFGTDRSRYAAALNVQSFTGVAPVTKSSGKSQVVYARAACPKFDRQTFHEFSRLSVTHCQWARNYVQYYSDKGKKYHTIIRALAYKWIRILHKCWQERTPYNEDLYMETLKKRGSIFATLHLKTK

SEQ ID NO: 248919 - protein, 345 aa, unidentified
MNKSSKIIGADLAKNVFQLALTTSEHSVFQYKRLNRTHFHEFFIHHPAVHVVVETCGTAHYWARTLMTMGHEVTLLPAQYIQPYVRRNKTDRNDSMAMVGAASNPSIHTVPVKTEYQQSIQALHRLREQWKSTRVARINALRGVMREFGILVPLGPRAAIKTTRDSLNMLPALLQATVTDVLNELSDIQLRMTALEKQLKKVVKDDPVIQKFMQLNGMCLLCATAMRASVQSPAQFKNGRQLSAWIGITPKEYSSGNQRYLGRIVKRGDKYLRTLLIHGARSAMARIKIIQRSQGELTALQQWASQLEQRVGHNKATIALANKMVRILWATWMHQRDFDGNYVLK

SEQ ID NO: 248920 - protein, 433 aa, unidentified
MSEKERVQPEPEFVAFVGIDWADQKHVWCWQAAGSTEREHGELEHKPETVEAWVGQLCQRFGPGPIAVAVEQVKGALVCMLSKYECLHLFPVPSTMSASMRKALYPSGAKDDPQDADLLELLVQHRDKLRCLRPDNEGTRRVQNLVEERRKLVEEKTAQLNRLTGYLKIYFPQMLEWFAKLDTKLVCELLERWPSLEELKKVPPAELRRFFRQRRGRHHELTEERLQGIAEAMPALQDRAVIEAKRAVVQVIAQLLCSLLEGIANLDRKIEESASSHPDFFIFDSLPGAGAALAPRLLAALGSQRDRYGSAEEVQKYSGIAPVTERSGKRKWIHFRWACPKFLRQSFHEWAGHSIAESVWARAYYQQQRERGKDHHAAVRALAFKWIRIVFRCWQDRVAYDENKYLAALAKRGSPLSAVLAPPATPLCNPCGL

SEQ ID NO: 248921 - protein, 368 aa, unidentified
MKQYKLKAAPTAVSKEGNSQKEAKANRIAIGVDAHLKSYQAARKIDNGAVGVAQTFRSKEALLLYVEKQRGQAKEVVVVYEAGPLGYTLYRQLKAMGLECLVCAPRSGEQKRKRRKNNAIDARSLTSELANYLNGNEQALQLVRVPTEAQEQARVESRQHDALVEQRKRIGAMGNSLLLSQGYGSWSNWWRAKAFERLSKGVAPWIVKHLQRWVGVLRELDQQIQQAKVELTKHYQGARPKGMGAPSLAQLNAEVLDWNLYSSGRKIGCLAGMVPSEWSTGEAQRLGSITKVGVPAIRRIITEMVWRMILFQPEYKAVQKWREVLEGPNRGLKKKAVVAIGRQLMVDIWRLQTGRISAQELNLIMVEG

SEQ ID NO: 248922 - protein, 457 aa, unidentified
MSQTKRSRRARELSPVHPAAAAIDIGATMHVAAVGSNRDNEPVRTFRTFTADLHRLAEWFSECGVRTVAMESTGVYWIPVFEILEQRGFEVMVVNARDAKHVPGRKTDVSDAQWLQRLHEYGLLRASFRPQAEMAALRAYLRQRERLLDYAASHIQHMQKALMQMNLQLHHVVSDITGATGMSIIRAIVTGERDPNVLASHRDRRCHSSVETVCQALIGNYREEHIFALTQAVELYDVYQTKLLICDTRIEAILKRLKKNAAPPKSKLPPARRKARQSNEPAFDVREALHAILGVDLTQINGLGPSLALKLVGECGTNLTAWPSAKHFTSWLGLAPHNKISGGKVLSSKTRRTCNRAASLLRLVATSVGRTDTALGAFYRRLSARVGKAKAITATARKIAVLFYNTLHNGMSYVDPGATYYEDRYQQRVLNNLQRRAKSLGFILHRAESDTPQAGVS

SEQ ID NO: 248923 - protein, 447 aa, unidentified
MNTRNLNSGAFELMHPNAAGIDIASQMHYIAVPMDRAEQSVRKFGSFTEDLHEMARWLKSCNIDTVAMESTGVYWVQPFLVLEEYGFDVFLVNARYIKNVSGRKSDVKDCQWIQQLHSYWLLNKSFQPEELIRELRTYVRQRKNLTQNSATQIQLIQKAFDQMNIKLHNVISDITGKSGRLIIDAILRGERDAGILAEFADIRIKASKEDVVKSLQGIWRQDNLFELKQAYELYQIFKDKIMECDNQIETVLQRLVNDSDKAQNKKENRKTKSKNKFSFNATDYLNIITGVNLTDIFGISELTVTEIVSEIGTDMSKWATEKNFTSWLNLAPNTRTSGGKRLKGKSIKKINKAGQAFRIAASTLKASNNWLGEFYRRIKAKSGTPVAIKATARKLAIIFYKMLKDKVDFNPLPIEEYNQYFKERKLKYINKQATNYGLKLVPVDFVS

SEQ ID NO: 248924 - protein, 338 aa, unidentified
MKIMTVGIDLAKNVFAVHGVDEYGKAALIRPNVRRDQLCALIATLPPCAIGMEACSGAHHWARTFSAMGHTPKLMAPKFVAPYRMGGQRGKNDAADAAAICEAVQRPNMRFVPIKSVDQQGMLCLHRVRQGFVEDRTSSINRIRGLLSEFGIVLPKKPDTIRRQAAASLEHLPGWANRVIGDLLSHLHALDQRIAEYDAHIKLVAQADERSRRLMQMPGIGPITASALLATIGNAHDFKCGRQLAAWLGLVPGQHGSGGVTRLGYITKAGDRYLRTLLILGARSVLASANNKTDRLSRWAVSVYARRGYGKALVAIAAKNARMAWAVLARGESFSPMP

SEQ ID NO: 248925 - protein, 337 aa, unidentified
MEHQQEYVGIDLHRRRSVIVRMSEAGEVLSTVKIDNDPVALALAVAEAGPDPEVALESTYGWYWAADLLQAEGARVHLVHPLGLHWDSRRVKNDVKDATELANRLRRNDLPESWIAPPEVRELREIVRYRAKLTALRTSAKAQVHAVMAKQGILPTLDDMFGPGGQKLLDAMPFDGVYGLRVESLRDLLEIYDRELALVEREMRRLFKDHAGYKAIQAITGVGPVMAAIFVAEIGDVTRFGGAAQLCSWSGLTPRHRESDTHVRRGHITKQGSRLVRWAAVEAVGRQRGGTVIAAHNHRVAQRRGPPIGRVAAARKLLTLVYYGLRDGHIRCLAETG

SEQ ID NO: 248926 - protein, 354 aa, unidentified
MVEGSWVGLDVHARSVVAGVLDAGSGELRTLGVPPESELTVAWLQTLPQPTHVAYEAGPTGYGLARTCAQVGIACTVAAPSKIPRAPGDRVKTDRRDAERLARLGELVSVRVSEPGEEAARDLVRAREDARGDLMRARHRLSKLLLRHGLVYEGSAWTLAHDAWLRRQRFGSGPLALTFDASYGAVVQTKARRDALDRAIAELAYEPPFADVVSRLVCLRGVSTLTALALTVELGDWERFRPQSLGPFLGLTPSEDSTGGRRRLGAITKTGNTHARRPLVEAAWHQRRPLRASAALERRWQGQPAQVCACADASARRLHARWHALESRRKRRTIVAVAVARELAGHCWALATMT

SEQ ID NO: 248927 - protein, 416 aa, unidentified
MSVALPQALFFTGIDWASAEHAVCVLDAAGKITARFTIKHSAGGIASLVRRLARYGDPAGLPVAIERPSGRLVDLLLEAGHPVVPVSPNAIKTWREGEVLSGAKSDAGDAAVIAGYLRLRYHRLAPAAPYCDETRALRAAVRTREDLVQMRVAATNQLSALLEAHWPGARAVFADVESPISLEFLTRYPTPAAARHLGHKRMAAFLVKHGYSGRRPAAQLLARLHGAPAGTAGRALTEALQDAVLAVVAVLRALNGAVKDLDRSVAAHLGEHPDGPVFTSLPRPGQINAAQMLAEWGDCRPAYDGPDCVAALAGVTPVTKQSGKYRGVEFRWACNKRFRRAVTTFAGNSRHASPWAAQIYAEARAAGKDHPHATRILARAWIRVIWPCWVNGVPYDPARHRAAAALAGQTPSQPAA

SEQ ID NO: 248928 - protein, 445 aa, unidentified
MLRIVYKRVAGLDVHKKTVVATRMRVTEDDRIEWETKTFGTTTPDLLELLDWLYEWDVTHVAMESTGDYWKPVFNVLEDTFEIWLVNAQHVKHVSGRKTDVKDSEWLAELMLHGLLKPSFIPPKPQRALREMTRYRTTLLQERTRIVNRVQKLLEGANIKLASVAADIMGASGRAMLAEIATGQTDAELMADLARGRMRNKIPELEKALTGIVQEHHRFVLAQQLDHIDYLDEKIEMISAEIGKQLESMSWPDEPSQPGVSESAEEGTGSADESELPLTWDAAVALLDTIPGIDRRIAEVILAEMGLDMSQFPTADHLVSWAGLAPGNHQSGGKRYSGRTTKGNKALSSIMVQAAWGASRSKDTFLKSRYHRLAARRGKKRAIVAVAHSMLVSVWHMLTYQQPYQELGSDYFDERKKESKVNYYLRRLEQLTGATVTIAFQPAAA

SEQ ID NO: 248929 - protein, 415 aa, unidentified
MGLKIVYPICCGIDVHKTFVVACIASTDNGVTTYKRHRFSTYTKGLRELSQWLCENNCKDVCMESTGKYWIPVFNMLEDSCNITVAHPKYVKAIQGKKTDKKDAKWMADLFKHDLVPGSFMPPSDIRHLRDLMRYRTKLTNMIASEKNRLQNSLSVSNIQLGSVVSDTLGKSSMNIIQKLLQDPENPHLDIPSLIHGSMKDKIPELELAVDGFITPEQVGKIRVILNHYKSLKHCKDELEQLILSLAEPYTEEINLLLTVPSIKSIFTAIGIISEIGVNMDEFPSAKHVCSWAGLTPTNNESAGKKKSVKISRAGVYIKPLLVQCANGVAKSDKHPEIRNRYLSIKKRRGHKRAIIAIARMLLTAIYHILKKKEPYNPELYKTSEVLPASRELTVEQAIALAKSQGFKIKEQPAT

SEQ ID NO: 248930 - protein, 419 aa, unidentified
MKPAFGVAAGIDVHRDSLVVSVRRKGIGSDDDIVTTKSFETFRDSLVEMCEWLAAEHVEVVALESTGVYWMPAVRVLQEKLPRTTVWLVNPLDVKRRAGRKTDRKDSQWLSEVALYALVPPSYLPSREQSELRKLTRHRTKLVADQTRYQNRILKELESSGVKLASVLSDCLGMSGRAMINALLENKPGVDVADLALGTLRKKIPTIRRAVEGSFTPSTAMVLRQLLAMFDATEKHIQAVDQEISRLMQTWSAEDKLLQTIPAIAETASPRILAELGVDMSAFPGAKNIAAWAGLAPGSEESAGKAKAAPTREGNKYLRTILVQCAWVAVRMKQGFWPQVFRRLRSRLGPKKAIVAVARKMLVALYYILRDRTPYREPSIDQAVSDQHRDRMARSFRSKLEALGYTVQLTKPAQQGSVS

SEQ ID NO: 248931 - protein, 383 aa, unidentified
MKAVCGLDVHKDSIFLCILHSDGELFEQVFGVLTFQLEEMRKLLQKHHVFEVCMESTSIYWIPIWRVLSPHFTLRLVNPYFIKQLPGHKSDVKDAQWIAECTLKELVRGSFVPPEIIQQLRQYDRRIFDLNAEIVRKVSKVDGVLQRCNIRLSNYVSNIECKSYRDVVRRLSEGVTNPNELMKLVHGRIVNRHGAETILASLTGVVSQAEIDVLRQLHEEIDIAESHRNECLQRMLEICEKHFPEELERLQKIPGIKERAATSLIAEIGTDMSKFETANHLASWSGLRPRNDESNKKIKSRKITHGNVYLRNTIIQCAWAASRQKDCFFSRFSYHQTIVRRKNKMKVIVAVARKLLIAVWHVLHDKTDYVDFKPDREESANNG

SEQ ID NO: 248932 - protein, 411 aa, unidentified
MDILVERCAGLDVHKDTVVACVRTPGPGRRREETTLTFGATTAELLGLRDWLVAEEVSLVGMESTGVYWKPVYYVLEDAMECWVLNARHLKNVPGKKTDVADAEWICQLVEHGLVRPSFVPPKEIRELRNLTRYRRAQIEERSREAQRLDKVLQDAGVKLSSVASHILGVSGRAMLEALVSGSTDPEILAELAKGVLRKKIPALRDALEGRFGPHHGLLVGQILAKLDFVDEAIGNLSKEVDRVIAPFEAQVQLLVTIPGVERRTAEELIAEIGVDMARFGSSERLASWAGMCPGHHESAGKQRSGKARPGPKWLQRTLTESAKAAGRTKNTYLGAQYTRLRGRRGAAKATKAVGHSILVAAFHMLSTGTPYQDLGPDWFGRLRPQQHARRLIHQLEALGYTVSANAPEAA

SEQ ID NO: 248933 - protein, 386 aa, unidentified
MKQNIIHIGLDVDDTQYHGSAFNKDTGEVIDFKSRPTLKGLLQQLDRMARHFKGHKIKLCYEASYVGYCLQREKVRADTAREAALGYLISNDIHCDIVSPSSIPSPRGKAIKTDRIDAGYLAQFYANDLLTIVQPPDEEQEQDRDLLRSRQKVMQQRNQLRKHLQAVLRRSGLHYKAETGNKSHWTKHHYCWLVRTIDGLPGSLKVNLELLLRQLKALNEVLTEYGQQIEVLASVPRYQPAVQSLICYKGIKNIFALTMITEIGDIKRFSHPRKLVSWIGMDIREYSSGGKHNRFGITKHGNRYLRTAFVEANQRGYRTARIGQDLKSRRKHIAPELVNIADRCLRRLNKKGNRLLLAGKHPNKVKVACAREMVGFVWESLNKVAA

SEQ ID NO: 248934 - protein, 365 aa, unidentified
MQKISTMQTSGKNIFEGQLTIGLDLGDRSSAYCVLNAAGEIVLEHRLATTPEAMKQVFGSLPRCRIAMETGTHSPWVSRLLMALGHEVIVGHAQKVRLITKSRRKDDRLDARTLARLARIDPELLSPVKHRSAQAQLHLTEIRARAALVSTRTALVNAARGLVKSYGERLRKCHTQQVGREMTRELSMGLREALKPLLQEVESLNERIKEYDRRIEKMAKEMYPETALLKQVKGVGDLIATAYVLTIEDPHRFRKSRDAGCFLGLQPGRRNSGESEPQMRISKEGDEYLRTLLVQGAHYILGPFGEDSDLRRWGQKLSARGGKNAKKRAVVAVARKLAVLLHRLWVSGEVYEPLRNSQKPMSTAA

SEQ ID NO: 248935 - protein, 319 aa, unidentified
MTQNDLVVVGIDVAKDKVDACIRRFKLRQTFPNHPQGRRKLIAWLRKYQVGKAVMEASGGYEREWRNVLHNAGIEVRIVDPRRVRNFALSAGRLAKNDPIDAEMIAWFAETFSQAPGQIPDAAREELAGLAKARKALMDVKIRLQAQNEHAAPQPARKAHARILKSLAAEIDKLEIAISAKIKATPEFAERAEIIQSVPGLAQTTSAILIAGMPELGQLSDEVAAALVGLAPYDDDSGKRRGERHIKGGRRWVRNAIYMPCLGAATQNNPVLRVFYQRLIAKGKEPKVAIVACMRKLIIILNTMLARRQKWIPGAHAIA

SEQ ID NO: 248936 - protein, 355 aa, unidentified
MTSTKYIGMDVHKESISIAVRNAAGKIVMECVIETKASVILQFFEGLHGDLQVTFEEGTAAAWLYDLLKPRVARLVVCNPRRNALLKMGNKDDRIDARKLSELLRGGQLLPVYHGEHGLRTLKELVRSYVAVSKDLARVMTRVKALYRSWAIPCSGTQVYSRLYRVSWLSKISEPGVRLRAAFYFQQLDALRELRQEVRRELLAESKKHPAWKRLCEIPSMGPIRASVALGILQTPHRFRTKRQLWSLSGFAIETRSSADHRMVNGQLQRTKKRVTIRGLNQNHNHELKNLFKGAAVIASTKPGPFHEFYDALLAKGMRPEMARLTLARKIATTVWIVWKRGASFDAHYLKPQTV

SEQ ID NO: 248937 - protein, 346 aa, unidentified
MPMVGGLDVHRKQITFDYLDTATGEVQRGQIAPADRAHLAAWLARRFPGGQDADFALEGCTGWRYVAEELAAAGIGAHVGEPAETAAARGPKKRAKTDRADSRHMRQLLADGRLPECWIPPSHILECRALLELYHDLRTVHTAWVQRIHAVLFHQGAQQLGEGSLRTGEGLAALRAIAGTQLSPAGQLQVATALDLLAALEGHLDAVRRRLLDAARHLTGAKVLRQRLYGVGPVTALALTCWLGGAGRFSSARKAVRFTGLDVTVYSSAGKRSPGHLSRQGPAVLRWCVYEAGKTHARASAPDYRYYAGVKDRIDGKRAAISEARKIIRQAVHILAELGDGALAPA

SEQ ID NO: 248938 - protein, 352 aa, unidentified
MNQLKYIGMDVHKAMTVISVLNSEGKELAQAIIETKSTTIIDFIHGQRGTLHVTFEEGTQAAWLYDLIRPHVASVLVCDPRKIVTRGNKADKIDARRLAELLRTKGLTAVYHGEHSTRAVKELTRNYQEMMEDSTRVKNRLKALFRARGIDCTGSAVYSPDERKTWTDKLEQAAVRARAGRLWEELDALEKLCEQAEGDLKTEARKHAAIKILQGIPGIGPVRAAVILGIAGTPHRFRSKKQFWTYCGLAVTSKITSEYQMVDGRISRSKKQPLVRGLNRNYSRTLKDVFKGAAKTAAAGAWKFHFDAMVANGQGPPLALLTIARKMASITLALWKRGERYDQKKVEILHAA

SEQ ID NO: 248939 - protein, 309 aa, unidentified
MKEELVYLGVDIAKSYLDAAIGNEKRRFSNERIGHRELIKWVKQLSAAVQVICESSGGYERALVQGLARARVKISLVQANRVRQFARAAGILAKTDRIDAEVLCEFGKVMRPQTVTAAKLEQEQLRELESQRRHLTHLLVMEQNRGARLSDASVQRLNRSLINQIKKQIDQLDLFIKRHIDQSHQLSAKAAKLTSISGVGARTAALLLAQLPELGQLNRREVAALVGVAPFNRDSGKMRGKRTIYGGRRPVRHGLYMAALVAAHHNPILRVFYLRLRAAGKPAKLALTATMRKLLIVLNSALKTDLNYA

SEQ ID NO: 248940 - protein, 375 aa, unidentified
MSNLSEAFVGLDTSKLRNSVAIAEGGRTGEVRFLGEIDTTPAAIRKLVKKLATKYERLSFCYEAGPTGYGAYRQITGLGHDCIVAAPSLIPKKPGDRVKTNRRDAVTLAKLHRAGELTAVWVPDCGHEAMREVTRARETAMLDLRRKRQQVSAFLLRQGLHYAAEKKTWTKAHMDWLAGQKLEHVEQRIVFEEMMLAVREAQARLERLADAIRVAVPEWSLAEGVTALMAMRGMDLVAAATFLAEIGDLSRFQGPRELMAYLGLVPSEASTGDTIKRGPITKTGNRRARRMLVECSWSYRHPPRVGRTKQEKVAAAPQAVREIAWKAQCRLHNRYRSLIRRGKLKTVANTAVARELAGFLWAVNRAITKTGAAAG

SEQ ID NO: 248941 - protein, 348 aa, unidentified
MTIAMIGLDTAKTVFQVHGIDKSGRAVLRRKLHRSELVRFFEQQPQCTVFLEACGAGHYWGRLLSGLGYEVKLIAPEAVRPFVKRGRKNDAADAAALCVAGTRPETRFVPIKSVEQQAVLALHAARSLLVKQATMLANALRGLAAEFGLTVPKGLHKLEELMALVSAEESIPAAGRQAMAELHAHGRTVAERVVALEEQIVRHARQDATARRLATIPGIGPITASLIAATVGANIGAFRSARHFAAWLGLVPRQHSTGGKTRLGRITKAGNAEIRRSLVLGATSMVWRARRWNSKAGLWVRGLLARRPVRLVTVALANKMARIAWALMTRKQVYQAQGHAQAAAEAAA

SEQ ID NO: 248942 - protein, 315 aa, unidentified
MTPTLLFVGIDVAKAECVVAVRPTGTTWTVPQTEAGWAALATRLQALAPALVLCEATGGLELPLASVLVAAGLPLAIINPRQVRDFAKAKGLLAKTDALDAAMLAHFADAIRPVPRPVPDATTQTLAALVTRRRQLVEMATAEENRLGSAPPPLRARLQAHLRWLQRELAALETDLDQAIRTHPGWRVQEDLLRSAPGVGSILAVTLLGGLPELGTLSRGGIAALVGVAPWNRDSGRRRGPRRCWGGRADVRAVLYMATLAAVRCNPVLRGFYQRLLAAGKLKKVALVACMRKLLTILNAMVKTQTPWAPRIAGA

SEQ ID NO: 248943 - protein, 334 aa, unidentified
MENIALIGIDLGKNSFHIHCQDRRGKAVYRKKFTRSKLIEFLATCQATTIAMEACGGSHFMARKLEELGHFPKLISPQFVRPFVKSNKNDFVDAEAICEAASRPSMRFVQPRTESQQAMRALHRVRESLVQDKVKTTNQMHAFLLEFGISVPRGSAVISRLSTILEDNNLPLYLSQLLLKLQQHYHYLVEQIKELESQLKRKLDEDEVGQRLLSIPCVGTLTASTISTEIGDGKRYASSRDFAAATGLVPRQYSTGGQTTLLGISKRGNKKIRTLLVQHARVFIQKLEHQSGRLADWVRELLCRKSNFVVTCARENKLARIAWALTTRQQTYEA

SEQ ID NO: 248944 - protein, 354 aa, unidentified
MTNDTTVETIGCDLGDKRSEICVLDDNGNVKARSTVRTTKKDMELYFTRAAAHVVIEVGVHSRWIANLLSQLGHRVTVANPRRVKLISESNNKTDRHDAELLARLGRADVKLLAPVQHRQRQSQADLAVAKARDVLVATRTKLMNHVRGTIKSFGLRLPACAAENFSRKTREFVPAELKPALDPVYEALEEIEQQIREQDKMVQRVAKRYPDVEVISQIGGVGTLTALVFMLTIENKDRFANSRMVGAYLGLRPRKSQSSKDDPQLRITKAGDPFVRRLLVIAANYVLGPFGKDSDLRRWGLELAKRGGKNARKRAKVAVARKLAVLMHRLWVTGEVYRPLGPQSRPAAETQAA

SEQ ID NO: 248945 - protein, 457 aa, unidentified
MNRKRTKSKVDRTMPMVHPNAAAIDVGATIHMAAVSADRTPEPVRSFGTFTTDLHRLVNWFKECGVETVVMESTSVYWIPIFELLDARGFTVFLVNARDAKHVPGRKTDVSDAQWLQRLHSYGLLRASFRPKGQIAELRAYVRQRERLLEYAASHIQHMQKALTEMNLQLHHVVADITGTTGLRIIRAILAGERDPKALAHLRDYRCHASAETIEKALTGSYRAEHLFALDQALALFDAYHEKVSACDVRIEAVLKELSISRSRGSGSLPSSRRRTDQTNAMAFDVRAALFALLGKDVTQINGLGPYLSLKLIAECGDDLSAWPSAKHFTSWLCLAPSNKISGGKVLSSRTRRSGSRASALLRLAAVTVGRTDTALGAFYRRLSARIGKAKAVTATARKIAVLFYNAVRHGMEYVDPGASFYETRYRKRVVENLHRRAKSFGFVLHPAEPTPSVAVS

SEQ ID NO: 248946 - protein, 408 aa, unidentified
MNPLFVGIDVSSRSNVAYLMKPDGSKHSSFSVQNNPGGVKILSSRIVSALDGLHLSSVAIGLESTSIYGDHLVYALREDGNLGRFTPKIHVLNPKQVRKFKEAYSDLPKNDFVDAFVIADNLRFGRSNREVFMDDYRYKALQTLTRARFYAIQNLAREKQHFANYLFLKCSGLALDKEVKNTSATLLTLMERFPSVDDLASADLDDLTDFVSKSGRGRFADPEGVAKMVQKAARSSYRLPKTVNDSVNQAMSISIASMRALGDQVKTLDKAIAKQFETIPNTLTSIPGIGPVYSAGIIAEIGDVRRFAGHAQVAKFAGLVWTQHQSGDFEAQSTRLIKSGNRFLRYYLLEGANSVRRCDSEFRRFYDLKFKEANRFQHKRALALTARKLVRLVFRLLKDNRLYKLPES

SEQ ID NO: 248947 - protein, 400 aa, unidentified
MLSIGIDVSKGKSTVCGMKPGGEIVYTPFEVQHTREGMSELVSLLRGSGEEVRVVLESTGSYHCPVVAALLENGIFVSVVNSLRMKRFCSQSIRRVKTDQIDAMQIALYGLAYWQELQPTRLPENTYRELQLLARQYYQMTSLLIKAKVDFNALCDQVLPGMQELMSDHAGRHKLSDFVLRYHHTAHILKMGETRFRKDYCKWAEKKGYRNRERMAALIFATAQNGIPVLPDAPSTQIVITEAIRVLHTVEASRDAILTQMQALAKTLPEYSLVREMPCIGDTLAPRLIAEIGDVRRFHSKRALIAYAGIDAPPYQSGKFCANNRHISKRGNRYLRKTGYEVMQSYVMHKPANDPIFTFIEKKRSEGKSGKLAMVAGLNKFLRVYYGKVTELYRSLPAIE

SEQ ID NO: 248948 - protein, 416 aa, unidentified
MEVVYPRCCGLDVHKKSISACIVIREQSKPERLERRFGTYTGQLEELAEWLEQHQVTHVAMEATGVYWKPVWNVLEGRLALLLVNPQHIKALSGKKFDRGDASHLADLLQHGLLQGSFVPSAAIRQLRDLTRNRARTVQETVRIHNRIHKILEEANIKLGSVASDVLGVSGRMMLDQLVAGESDPVKLADLALGKLRRKREQLEQALAGKVTDHHRRMLDKLLRALRTREAEIAEDEADIRRQIAPFAKAVKAWMQQPGIEEITAWSLVAEMGADMAPFDTAEQAASWSCVCPGNHQSAGKQSDGRTRKGNPWLRHAICEAAWGASRTKKSYFHAQYNRLCARRGPQRALLAVAHSMIVVGFYLVKYDLLFKDLGADFFDRQHRERTRNRAVKRLNALGYDVTLQPRPTPEPSAGP

SEQ ID NO: 248949 - protein, 422 aa, unidentified
MLTTTHDNEEIIERVAALDIGKAELMCCVRVPDGDHAGRRLQEVQACPAMTRAVLGLADHLGRLGVTRVVMEATADYWKPVFYLLEAAGLETWLVNAKDVKHLPGRPKTDKLDAVWLCKVAERQMLRPSFVPPPPIRQLRDLTRYRADLVAARTAEKQRVEKLLEDACIKLSAVVADIFGVSGRDMLAALVAGERDPKVLAQLARRSMRAKIAVLEEAFTGHFTTHHAFLLRTMPGRVDAISADIAALDDRIAAQAAPLAGAVARLDEIPGISLASAHVILAEIGTDMTRFPTAAHLASWARLAPGISESAGKKKGKGSTGHGNAYLASVLGNAAAGAAKTDTFLGEKYRRIARRRGSKRAIVALGRSILVIAWHLLSDPEGRFYDLGPGYHAARIDPERRKRTHIRELEALGYTVTLKPAA

SEQ ID NO: 248950 - protein, 442 aa, unidentified
MFVGYRVGAACSAYPTVVGGPGVFRAYERWARRARTIGRGSGDRWRHGELFRSRLTPSHEHIRSWVQDLPGPVAVTYEAGPTGFDLYRVLSAAGIRCEVAAPSKLQRPSGDRVKTDARDAVHLARLLRLDQITAVAIPSVDQEAARDLVRAREDCRGDLMRARHRVSKLLVRHGIVYGDGHAWTRRHDTWLRHDAIAQLSTRATRLAFDSDDENVLVVTARRDRLDVAIGEIAAASEFTPLVHRLGCLRGIGTLTGFALAVEIGDWGRFTGNTIGSFVGLVPSEHSSGSSRVQGSITKAGNTHVRRLLVEAAWHHRPGYVVGKTMRERWELAPAAARARGDEGNRRLHQRWVKFIERRKKSTIANGGHRPRARRLVLVPGDPRGVAPPAICFAVHEAGGSAWSDPRRIYEQRGTVSRRSTLDTRSRSCRKHRPAVTNPRISA

SEQ ID NO: 248951 - protein, 357 aa, unidentified
MKRTESNMNIPPQTIGIDLGDRSSYFIVLDGSGEILEEGRVKTRMVEFQAVFSQHPPSRVVVEAGNQSRWISEAMRGWGHEAIVANPRKVELIGKNTRKADREDAELLARLGRVDVKLLFPIQHRTEPQQEDLESVESRALLVKIRGQLVNHVRSVVKGFGQRLSSCSTEAFGRKVVEEIPPGLRPSLDPLLEEICRLTRQIREYEREIDRLCREKYPQTAVLQQIRGVGPVTALTFVLVLSDARRFRRSRDVGAYLGLCPRQAQSGERNPQLRITKAGHRLLRSLLVNCAQYILRQHSPDTDLKRHGEKIAERGGKNAKKRAVVAVARKLSVVMHRLWTTGEVYEPLHRAETRRAA

SEQ ID NO: 248952 - protein, 400 aa, unidentified
MNPPRARAWAGVDAGKGHHWAAVVDATGTTLWSKKIDNDETAILTALGEILALAEEVSFAVDISGTASALLLALLAAHGISAVYVPGRTVNRMSGAYRGEGKTDAKDAYVIAETSRHRNDFTTIEVPAQLAADLALLTAHRADLVADRVRMINRLRDVLTGVFPALERAFDYSAHKGALVLLTGYQTPAAIRRRGHTRLTAWLANRHVRSAETVAATAIAAAAAQQTTLPGEAVAAQIVAELARAILDLDDRIKRLEGQIRDTFREHPQAEVIESLPGFGPILGAELVVAAGDLASYTDAGHLASAAGLVPVPRDSGRRTGNLHRPKRYSRRLRRVFYLSTQTSIIRDGPNRDFYLKKRSEGCKHVQAVIALARRRVAVLWALLRDDRVFTPAPPVALAA

SEQ ID NO: 248953 - protein, 338 aa, unidentified
MSIYAGLDVSDKTTHVCVVDGEGAVLRREVLASDPDVIAKWLGRYCPNLVRVVLETGPLSAFLYHGMVARDVPIECICARHAKGVLSARVNKSDVHDAEGIAQMARTGWFKRIHMKASATHFDRAAVRIRAQLIMARTAMLNQLRGLLKLFGLRLGSTRAPGKRTERLDALYTQRPDLEALFAPLLASIEAIEAQLRTSSRILEQRAASDPVCARLMTVPGVGPITALTYTMSIEDPRRFARGEDVGAYAGLVPRRSQSGERDTQGHISKAGDPMLRRSLYEAANIILTRVKRPCALQSWGRKIAEAKGPRRAKVAVARKLAALLHSVWLNETEFRWA

SEQ ID NO: 248954 - protein, 365 aa, unidentified
MRKYYVGLDVHSKKSAFVIEDEGGKVIARGEVPTTPEGFWGLQATYHLANGTQVALETGTVAFFVARQLGQLGLDPIVVDAHEVRLKAHRPNQKSDGRDAFELCEGLRRGIYRSIVHVPRPEISRLRDTLSRRRHFVRLQAAQVGAVKALLRAAGLGRLSRSLGSEAGWARVIAAVRQHEELRTYAEQHRALWRCAWEQIRALDVSLARQQKESFAAQIARLQTIPGVGPIVASTAIAVFSTPERFPDAKHAASYAGLVPSTYQSGEHEAHGRITKRGSAELRAMLCEAAHHASRPDHPLNPYFARLCARRGYKMAIIAVAHRLCRMIFAMLRHQSDFDVAKLGVERGPFEHKIVRAYRLKASSQ

SEQ ID NO: 248955 - protein, 343 aa, unidentified
MEQVTIIGVDLAKNVFQVHGASDDGAVAFRKKLTRPQFQRFMREVDPCLVAMEACSSAHYWARELAAVGHEVRLIAPRYVKPFLKRQKNDAADAEAIAEAALRPTMRFVEPKSAEQQARAVVFRTREQFVNQRTDLVNALRSHLYEFGYSAPQGIQYLSRLAEVVEDEGSDLPDPARYACRLLLEQISAMTEQIKALQNKVAEISAKTGISRQLQTMPGVGPIGALAIETFAPPMEQFRRGRDFAAWLGLVPRQHSSGGKQALGKVTKMGQRDIRRLLITGAMAVIVACKRFGKHQGTWVARMLEKKPPMLVAVALANKMARGIWAMITKGQDYQEPVAKVKA

SEQ ID NO: 248956 - protein, 366 aa, unidentified
MGWMAPLRHRRAKLVFWRITRNREPSMSEITTIGLDLAKHVFQVHGIDAEGTTVLRKRLRRNQVLGFFSRLPRCVVGLEACATAQYWARELGALGHEVRLMPAQYVKAYVKRNKNDAADAEAICEAVQRPTMRFVAVKTAEQQAAQLLHRGREQLVRQRTMLVNALRAHLAEFGMVAAQGLRNVARLIAIVRDASDLRLPDVARQVLQVLSAQLEHIEAAIAALEKQLMAWHKANAVSQRLASIPGIGPIIATAIATTVADPGVFRSGREFAAWLGLVPRQNSTGGKTRLGGITKRGNRYLRRLLINGASANLLRSKATKADPWVIGIRRRRPPLVVAVALANKTARIAWAVMLREKEYQPKAVAA

SEQ ID NO: 248957 - protein, 346 aa, unidentified
MSYSTTVGVDLAKNVIQISVVSGRGKELSNRSLTRKKFAEFLGKQKPSLIAFESCASAHYWSRAAKRHGHEARIIPAKAVAPFRQGHKTDSNDALAVAEAARRPNIKEAPMKTAEQQGLQAIQRSRELLIGECTALSNHLRGILLEFGVAIPQGFASLLRALPEILEDGDNELPDLYRPTLHRMYTRLIELREDIEAMTKEVDNLVKHHPVCKRLTAIEGIGPIGALSLYAVMGSGKAFTKSREFSAYLGLTPRQYSSGGKTNIVGISKKVGNRRLRSILIQGARAYVYRMKEPKSLKDHWLKDLIERAGPNRAAVALANKNVRTAWAMVTQGTDYQRRLQLEMAA

SEQ ID NO: 248958 - protein, 326 aa, unidentified
MMNYLGIDVSKEKIDCCLFINGISGKGKSKIFSNSESGFIKLTDWLSHLNINTNDLLVTLEATGIYHENLCYFLHDLKINIAISNPMRTRRFAQGMSILTKTDKVDSEVLAKYGALAPIKYWKPDSKNFRELRDLMIRRDALSTDLVRESNRLEKSTFTKTSLHVISMIKESIDSLQTRINHIDVIINELIKNDSELTNEMNLLISIPAIGQRTALQMLTLFHGKDFDNAGAAAAYVGLVPIQKQSGTSVRGATRISKSGSSRIRAALYMAAIVAIRFNPHSKVLYNRLLKNGKSKMSALCAVMRKLVYLCYGVLKNKTPYQPDYA

SEQ ID NO: 248959 - protein, 421 aa, unidentified
MTPPSHDTFAAFVGIDWADAKHDGCLQAAGSAKRECFELEHTPEAIDAWVTALRTRFNGQPVAICLELNKGPLVFALRKYDFLVLFPINPLTLARYREAFTPSRAKDDPTDAALQLELLLTHRDKLQPLHPQSPTMRALEQLVEHRRRVVGDKVRMTNRLTSTLKNYFPQVLQWFQDKDTPIFCDFLSRWPTLKAAQLARRSTLETFFRDHHVRSADVIAQRLHAIKTATPLTTDEGVIAPNTLLVQALVAQLRVTLQAIADFDTAIAQRAQTHPDFPLFQALPGAGPVFAPRLLVAFGEQRARYAAAAELQKYAGIAPVTERSGKKSWVHWRLQCPKFLRQTFVEWAAESIRHSFWAQLYYQQQREKGQTHQAAVRALAFKWIRILYRCWQERTPYDESIYLQALNRRGSSLIHTLTKAS

SEQ ID NO: 248960 - protein, 425 aa, unidentified
MTETTSIKFAALVGIDWADRKHDICLQVADTGEREFSVLEHGPEAIDEWANALRVRFSNQPVAVCLEQRKGALITALLKYEHLVLFPVNPRLLAGLRRAFSPSGAKDDPTDAEIAVDILLQHRDKLRAWTPGDPRTRQLQVFVEARRRLVEQRVRVTNRLTANLKGYFPQALDCFESLDSVLACDFLTRWPSLGEAKRARAETLRAFFLKHNVRSQELIAARIALLKSAMALTSDAGVIVPALLATRTLVAELRTLIAGIERYDVAIAKVFNAHPDAFIFRSLPGAGPTFAPRLLAALGADRARFESVRAVQEYLGIAPVTERSGRSEWVHWRWSCPTFLRQSIVEWAHMSIRYSCWAQAYYRQQREKGKKHHAAIRALSFKWLRILYRCWKDRRPYDEGKYLLALQRRHSPLLQYIAEPLATAA

SEQ ID NO: 248961 - protein, 350 aa, unidentified
MVVVGTDVHKRTHTFVAVDEVGRKLGQKVVAATTAGHLKALVWARAEFGDDLLWGIEDCRNLSARLERDLLSAGQSVVRVAPKLTAQTRACARTRGKSDPIDALAVAQAVLRNPDLPVAAHDEVSRELKLLVDRREDLVAQRTSTINRLRQRVHELDPGAEPKLGSLHRAKSCAVLGAWLDTQTGLLAELARDELADVMRLTEAIDALAARVGNRVHVVAPTLVALPGCGELTAAKLVAETAGVSRFRSEAAFARHSGVAPIPVWSGNTAGRVRLNRSGNHQLNAALHRIAITQIRLPDNPGQRYYRKRLAEGDSTKEALRCLKRRLSRAVYTRLNTDERTRQTLKPAAA

SEQ ID NO: 248962 - protein, 310 aa, unidentified
MDAVVVGIDVSQEKLDVHVLPSGEAFVVSNDEAGIGDLADRLAGLAPSLVALEATGGLETLAAAALGGAGMPVAVVKPDQVRSFANALGQRAKTDPIDAAVIARFAAATGVAARPLPDAETRLLADLVTRRRQITAMIVAEEARLKRAANRQLKKSIARLLSALRRELESLDADLDDQIRRSPAWRVKEDLLSSVPGVGKAISRTLIAELPELGSLDRRRIAALVGVAPFTRQSGKWRGKSFISGGRASVRAALFMGALVASQHNPVLKAFRDRLVASGKPKIVAIIATARKLLTILNAIIRDQKPWQSA

SEQ ID NO: 248963 - protein, 357 aa, unidentified
MQTLPAKAPDYTEQNIYVGIDVHDKSWKVHIFSDEFELKSFSQQPDVDSLSKYLTRNYPKANFLLAYESGFFGFWIHRAFKDRGINCRVVHAADVPTSDKEQSRKSDAVDSKKIAKGLKNGDLSFIHVPEIQLELDRQVVRNRTTLAIDSTRVKNRIKGMLKLHGIIIPSTICSKHWSKKYLQWLQSIDFASVSGKLALGNMIDQLQFLDAQRRKIDNTIKALSESERYKEDVNLLRSIPSIGILSAMILLSEIGDIKRFKRFDELSSYCGLAPNCQQSGERRQPATLSHRGNAHIKNVLIECAWIIVRKDLAILLYYKEQIKRMKAQKAIIKVTRKLLSRIRHILINKTEYVLGVI

SEQ ID NO: 248964 - protein, 343 aa, unidentified
MKYFAGLDVSLDETAICVVDEDGIVVTEGKAASEPDDLVRWLVATGLTITRVGLEAGPLSPWLHTELRAAGLPAICIETRRMKGATAAMAVKTDRNDARAIAHAMRVGWFTVVHVKTAESQELRLLLNNRRTLLEKRVAIDNEIRGTLKAFGLKLGPVTVASFEARVLELLASRSRLLGMVRPMLAARTALRQQCDVLHRMVLKTVRANAVCRRLLSVPGVGPIVALTYATGVDDPARFAHARDLGPHFGLTPRKYASGEIDRNGSITKAGDGAVREALVQAALTLLTRVQRWSVLKAWGMAIAKRRGLRRAIVAVARKLAIVMHRIWVDGTTFTWSRETASA

SEQ ID NO: 248965 - protein, 402 aa, unidentified
MDVHKKVIVACLLREIDNGEVKKEIKHFSTLTEDILKMERWLLENECTHVAMESTSVYWKPIFNILEDSLKVMVVNARLIKNVPGRKTDQNDSEWIATLLRHGLLRNSFIPTRDIRDLRDLTRYRVKLVQNATAEKNRLQKILEDANIKLSSVLSKTFSVSGTEMIKAIIEGESSPEEIAELARKRLRSKIPELIKALRGHVTDHHRFMMTESFEHLNYLAERIQEIEQRIEEKLEPHKAVYELLMTIPGVNKHCAASIIAEIGVDMSVFPSAKHLASWAGVCPGNNESAGKRMSGKTRKGDAWLSVTLTEAAWAASKTKDNYLSEKYRRLVHRRGQKRSIMAIAHKILCIAYNVIDKKEPYKDLGPDYLEQLHKENSKRNAVNRLKSLGYEVNLTPTKAIC

SEQ ID NO: 248966 - protein, 346 aa, unidentified
MLHAGLDLSRNRLDVCLLSDQGELVEELTAFPDTAGLTALAQRVEAEGEPVRAVIESMTGARFVHDTLERYGWEVEIADAQKVKGLAPVAVKTDRIDARVLAVLSRRDLVPAIWLPDPTVREERELARFRLHLVKHKSALKNRIHSTLISFGRPCPVTDLFGVAGRKLLAEIEVPEPWRGNIAASLALIDDLEAQITEANRRLRDGHADHPYVPLLLTVPGVGWVLAFTIAAEIGEIERFPSPEKLTGYTGLCPRVVQSGESDRRGPLSKHGPTYLRWALIEATMHALKHPTYSKRYQRNKRRLGKQRGAKVAQIDIARRLAHAIWHMLTRNEEFAPRGAALRLAA

SEQ ID NO: 248967 - protein, 346 aa, unidentified
MALAAISILGVDLGKNVCSVVGLNSSGAVVMRRKMRRETLIRLAEKLPACVVGMEACCGAHHLGRLFAACGHDVRLMSPEYVRPYVKAHKNDDRDAEGIAEAATRPTMRFVELKRQDQLDMQTLHRSRDRLVGERTALINQLRAILLERGLVAPQGKRKLEQFLAVLMDEQGGAGLSPRMIRLVADTRAQWAELDRRIMVFDAEFVRWAKENEDTRRLTTIPGVGALVASALVAAVRRAGSFDRGRDLAAWLGLVPRQFTTGGKPKLRGISKRGDKYMRRQLIHGARAALPHVAERDTPLGRWAKGLLGRAHRNVAVVAFANKLARIAWAVLRGQERFAAQMTMAA

SEQ ID NO: 248968 - protein, 366 aa, unidentified
MEQHTEVFVGLDVAKARHAVAVAEDGRQGEVRYFGEIGADPESVRRLVVKLQKRHGRLHFCYEAGPTGYGLYRQLTKLGHPCTVVAPSLIPRKPGDRIKTNRRDAQQLARLLRAGELTAVWVPDEAHEAMRDLVRSRDAAVADLRRKRQAITSMMLRQGRAFPGKKTWGATYKYWLQKQSFEHPAHGLVLQELLLAVRHAEERLERVEATIIEFLPTWSLAPVVDALQALRGVGLIGAVTIMAGIGDLRRFDSPRQLMGYLGLVPGERSTGDSVHRLGITKAGNGRVRRTLIEGAWSYRHLPRTGRAKLAQHEHVPPAVRDIAAKAQTHLCARYRALSGRGKKLTVTVAALARELAGFVWAIGKEV

SEQ ID NO: 248969 - protein, 339 aa, unidentified
MQEQITFFVGTDVSKLTLDMSITSKGIELHSSRITNTKKAVAAWFKTMNKQTGISAGNTLFCMEFTGIYNYHLVEYLNSQAASMWIMPGVQLKHGKGMDRGKSDKADAKKIALYGFTHPHEVRLWKKPRLVLKQLKALINNREGLIQTRHQYERRLKESKSLVDKKELAITKKYCQPMLTLADKQIKVIDKAIKELIQGDEKLNEISGYVQSVDGVGIVTAAEIIVTTNEFENYGDAKKLACHCGVVPFKNQSGTSIKGKASVSHKANKKMKRLLHLAALAAIKVKGEFKIYYERKKAEGKHVMSILNAIRNKLVLRIFACVKSKRYYEKNYQYSLVKP

SEQ ID NO: 248970 - protein, 320 aa, unidentified
MLSFCGVDVSKDRLDVIVLPEQQCSSVGNDAAGWSQLIDWLRGFSISAIGLEASGGYERGIMRALLAAGMSVRQINPFKLRQFAKASGVLAKNDRLDARMIASFVAVMPTHPVQRRAPAVERLAEMVTVRRQLSDEKIAAENASRMLENPMLQRLSRRRIARLAADIAEIDERLVEIVLSDASLAERYRLLTSMPGVGAVLACTLIALLPELGRLSRTKIAALIGVAPYDFESGKLKGKRCIWGGRTPVRNVLYMAALSASNWNPTLKAFHDRLAATGKKPKVVIVAVMRKMITMLNAMVRDNIVWADRYGVRHSVPNAR

SEQ ID NO: 248971 - protein, 476 aa, unidentified
MNSKTKRANNQVNSVMNVQEQREMVEKANRILSEMKSFTWRDLETQGKFKKNDKLSFISDDMLILGCDIGSEKHYVRAIDTRGRELSRKALAFDNNAEGFQKAHDWAVQLAASNDKKQIVLGLEPTGHYWFCLAAWMVSNRISVVQVNPYAVKQTKELEDNSQQKDDRKDPKLIANLVKDGNYGMPYLPEKVYAELRRLSMFREQLMEDRNRNMNRLHREMKIYFPEYKDAFGKVDGAFCMEVLKEAPFPEDILGLGIEGIREIWHKAKLRGRGYRRAVEIVKYAETSIGLKDGTAAGKEAVRWFAEKIMELDEELAGIENRLNEKCKEIPHTENILEISGIGERILSGILAEMGDISRFDDAKELQKLSGLGLVSCSSGKHKGETRISHRGRKRLRYWLFQAARSAVAHGEEYKWIHAHYTTRAGNPLQKMQSLIVIACKILRVIYTMLKTGKPYDPEKLLKDIRYPENVQTAAA

SEQ ID NO: 248972 - protein, 349 aa, unidentified
MAEQRISYTGERIDVGIDVHKETYTVTCLCQRQMVKTATVPADPARLAESLLRWFPRARLFSAYEAGFSGFVLHRVLTTAGITNIVVNPASVAVAANDKVKTDRRDAKRLARDLADGRLRGIYVPTEAEELARLLPRTRAQLVAHRATITRQIKTKLHQFGLITPASRRLMSSRYLREIAAWELPTELRVSLTLLADQWRFATRQLLEVRRLLREQAKAQVALETVYRSVPGIGEIVARTLATELGDMNRFANERALFSYTGLTPSEYSSGTAIRRGHISRQGVSRLRHVLVETAWRALPRDPILQAMFDRIAATRGKQRAIVAIARRLIGRIRACFRHGTTYAVGTAG

SEQ ID NO: 248973 - protein, 442 aa, unidentified
MNPHPYDLVIGLDRSDQTADLCLLDTRTGQRRSQSLDTTPEALWEWLAQFRQAHPQARVGICLEQPAGHLVSFLEAYPWITLHPINPVTLQKFREAFVTSRAKDDTRDAEYLAELLYTHHAKLAVWAPEDSPTRAVQQLVVHRRAVVDERTALTNRLIALLKQYFPQALVLCGDDLWRPLATRFLLKWPSLQAVQKAKPARVKQFYYLNGSRSQQLMATRLALMQEAVPVTDELALIDSFVLRVQLLCRQLQLLTRTIAEYDQRIAAAYARHPDRELFASLPGAGAVLGSRLLASLGSQRQRFDHAAQLQRYTGIAPVTKKSGGSCYIHRRYRCPTFHKQSFHEYAKESLLWCRWAAAYYLQQRRKGSAHQTAVRALAYKWQRVIWRCWQNHTPYREEIYEAALRKRGSPIVALFDQIQLGKSPFKNPANKSQKTLDGLPQR

SEQ ID NO: 248974 - protein, 283 aa, unidentified
MRRVIGMDIHRTFAEVVFWEDGKLRPTGRVSMTRAGLEGFGRSLRKEDEVVIEATGNAMAVVRVLAPHVARVIVANPLQVKAIAHAHVKTDKIDAGVLASLRAADFLPEIWLPDADTERLRRLVARRNQVVRHRTRIKNEVHAILHAHLIPPCPHADLFGRLGRIWLARQVIPDDERAAIARHLRELDRLSEDLSVLDREIAQAAIDDPAVKRLLTITGVNLIVAAGLVAAIGDVRRFPDPQKLVSYVGLNPRVRQSGLGLAQHGRISKRGRSHARAMLVEAA

SEQ ID NO: 248975 - protein, 455 aa, unidentified
MTASKKLWRNRKERKEWARRLQSEDPGLEIVHPHAAGIDVGNNAHYVAVRPDRDQEPVRRFECFTADVHGMADWLQSCGVKSVAMQSTGVYWIPLYEILEERGFDVYLVNARHTKNLPGRKSDVQESQWLLKLHTYGLLNNSFQPVSEIRVLRTYWRQRGEHVRGAATCIQRMQKALTQMNVQLANVISDISGLTGQAIVRAIVAGERDTRKLAALSHPRIQASREEIAKSLEGNWRAELVFVLQQEVEMYDTYQKRIIECDQQLQKQLANLTVVTPPGIGQPQKPKSKPPAAKNAPRFDLSSELQRVTGVDLTRIDGIDVMVAETLISEVGLDMSRWKTESHFASWLGLCPDNRITGDRVVARGTRRVVNRAATALRQAANTLIRSRSYLGAQYRRFRTKLGAPKAVTAMAHRLARLVYRMLKYGQAYVDKGTEYYEERFRQQQMAANSLRLRM

SEQ ID NO: 248976 - protein, 472 aa, unidentified
MKSKSSRKRNPVDPVAEEIPDAEHELVIERVAAIDVAKASGKVCVRLPGKTGRRFSRVWDVPARTGAVSELAEQLIESGVEKVTVESTSDYWRIWYYLLEAAGLDVQLVNARDVKNVPGRPKTDKLDAVWLAKLTEKGLLRPSFVPPAEIRQLRDYTRLRVDLTRERTRYWQRLEKLLEDALIKISAVASTLDTLSTRDMIEALIAGERDPGRLADLARGKMKAKRSELIAALDGRFDDHHRELARMLLDQIDTLTAQIAALTSRIEQLLAAMPDTRSRGDGGTGGDPDRPSTGHGVEPETAARFTDATLLTPVERLDEITGIGELNAQVVLAEVGLDMTRFPTPAHLVSWAKLCPRTIQSGPVTRGGKTGRGNPYLKGALGEAAAAAARTDTFLGERYRRIVKRRGKLKALVAVARAILVVIWHLLANPEARFRDLGPDYHTQRIHTERKLRNHIAQLTAMGYQVTLEPAA

SEQ ID NO: 248977 - protein, 415 aa, unidentified
MTEDVQWFAGIDWASQTHQVCLIDGGGKIVGERGFAHGGAGLCELCSWLLTMTRGPAPAIAVAIEVPHGPVVEALLERGFQVHAINPKQLDRFRDRFTVAGAKDDRRDAQVLGDSLRTDRHCFRRLSAEDATVIELREWSRMTEDLQQERNRLTNRVREQLWRYYSQALAISDDVAADWFLELWAAAPTPATARRLRESTVERILKGHRIRRITAAEVLALLRQKPLTVAPGTAEAASAHIRTVAQRLKLVNRQIKQAHQRLDALCDRLAENEEDNAAGQNCEQRDVTILRSLPGVGRIVLATLLAEASEPLRRRDYHALRALSGVAPVTKRSGKRCTVVRRQACHTRLRSAVYHWARVATQHDQRSRHRYAELRKRGHSHGRALRSVGDRLLSVACAMLIRRTPFDPDVRQMAA

SEQ ID NO: 248978 - protein, 412 aa, unidentified
MGRRCIGLDVHREFAQVAVSEHGRVRQAGKIGLTAEALRVFCDSLGPEDEIAIEATCNTHAIVRLIEPHVARVVVSNPQKTRAIAEAKVKTDKVDAAILADLLAADFLPSVWVADEATHALRRQVARRANIVRQRTRLKNQVQAILQRNLIPRCPAADMFGVKGRCWLSDQHLPADEEVAVDALLRQLDFHAQELRIIDSALGRVALERDEVLRLMTIPGVDATVALSLAAAVGDFRRFSGPERLVSYLGLNPRVRQSGNQAASHGRITKQGRAHARGMLVEAAFTAARTPGPLRAFFERVRARRGVQIAIVATARKLVCLCWTMIERGEDYAFARPSLTDKKRRALELRAGLPSRQGRKGTAAAYSLKDVRERELEVAKQAEHAYRQQVADWQAGRPSKEGVVAAHGTRLK

SEQ ID NO: 248979 - protein, 361 aa, unidentified
MKSTTIIAFDQHAATTVAAVLLPGQRTSALHTLTSDSATILRFVEHLRRQGGVHCCYEAGPCGFELQRALSARGIPCDLIAPALIPRRAGDRIKTDRRDAGQLAVLYRAGALTAIHIPTEQEEAARDLLRCREDIRADLLRARHRLSKFLLRHGRRFTATKKAWSRRHDAWLRAQTWPIAALDQTHRAYLRAVDEVVARLCAVEEDLRALLDLEPLKPRVERLRCFRGIDDLTALTIAAELGDPRRFATAPSTMAFVGLVPSEHSSGTKRAQGGITKTGNAHLRRVLVESAWHYRHHPFVSATLRARQRGAPADVIARAWTAQQRLHRRYQRLAARGKPKQHIVTAVARELTGFVWAALTQ

SEQ ID NO: 248980 - protein, 347 aa, unidentified
MSVIMIGLDTAKSVFQIHGVNEADRAEIKRKLGRSELIPFFEKQSECTVVMEACGAGHHWARMLTGLGHTVRLIAPEAVKPFVTRGKKNDASDAAAICEAASRPEVKFIPVKSMEQQGILALHAARSLLIRQKVMLGNALRGLAAEFGLTVSKGIERLDEFVGLVDADESFPRDARHAIVTLRRHCNDMVDGIELLEAKILAHSGHDEMARRLGTIPGIGPITASLIAASVVDIGLFKTARHFAAWLGLVPRQSSTGGKTRLGRITKAGNREIRTLLVMGATSMIYRAGAWNGAVGAWLRKLLERRPARLATVALANKMARIAWALMARKEVYHAKGHSAAAAEAAA

SEQ ID NO: 248981 - protein, 416 aa, unidentified
MDRRRYNVCCGADIHKKFLIATILLLDGTKLTKRFSMDLKSLFEFRDWVIANGCEAVAVESTGSYWVPIYRVLEGYVELIVANAYRIKNVPGRKTDTIDSEWIAELCLNGQIKPSRIFPKDSRDLRSLTRARERYVDDKTRVKNRIHHVLDSNCIRLSSVLSDIFGKSGRYILNCLLEGTDIDEIIEAIPVKRIKKKEDQIREALIIQLSCTDIIPIRGYLEQIDSIQKNIEGLESEIRKRIAPLRKEMSIVMSVPGIGFISALVILAEIGNYNDFDKAEQLAAWCGLVPSVYQSADKIYMGSITKQGSGHIRRILVEVAHVIARTKARSKLKSFFLRIKAKKGNNIAAVALARKVLCVLHHLLKAHEMYQEEEKDGDAEVEDLGIPRQGISLDDMIRHLAKAGYEVRKRAPGAGG

SEQ ID NO: 248982 - protein, 422 aa, unidentified
MLEETHDDQEIIARVAALDIGKAELVCCTRLPSQNGSGRRVQEVTTYSTMTRSLQVMVDRLLELGVTRVVMEATSDYWKPPFYLLEAHGLDVWLVNAKDVKHLPGRPKTDRLDAVWLAKVAERQMIRASFVPPKPIRRLRDLTRYRVALVADVSAEKNRVEKLLEDAQIKLSVVASDIFGVSGRAMMAQLIAGQRDPKALAELARARMRTKIPQLEEAFHGYFTDHHAFLLTGMLTRIDQISAHIAALDSKIEAEIAPFAEAVQRLDQIPGVGLIAARVIIAEVGLDMTRFPTPSHLASWARFAPGVKESAGRKKGAGSTGHGNRYLASVLGEAAISAAKTDTFLGERYRRIARRRGKKRALVAVGRSILVIVWHLLNDPDAQFHDLGANFYDTRLGAERAKRNHVQHLEALGYKVILEAAA

SEQ ID NO: 248983 - protein, 411 aa, unidentified
MEVLYDRVAGLDVHRDSVAACARLLGPRGGVVADKERFKTTTAGLGRLGGWLAERQVALVAMEATGVYWKAVYYALEHDFEVWLCNAHHVKNVPGRKTDMSDAEWLADVAAHGMVRPSFVPPPPIRELRELTRYRKTQVDVRAAEVQRLERVLQDAGIKLTSVASRVLTQSGRAMVEALIGGERDPQRLAALAKGKLRPRIPELTEALAGHFGAHHAVAARRILDHLDFLEATVAALTEQIDARTRPYAAVFELLLPVPGLDRRTIDVVIAETGADMDRFPSPAHLASWAGLCPGNHESAGKRRRVATPPGNRWLRHALIEAARAAARTTGSYFGAEYRQIARRRGPNKAAVAVAHSLLDLIWHLLRTGECYHDLGDDFFVRRRDPARETRRLVHQLEQLGYTVTLASSAA

SEQ ID NO: 248984 - protein, 340 aa, unidentified
MNITTLGIDIAKQVFQLHGTDGHDKVTLKKRLRRKQLLTFMQQLPPCLVGMEACAGAHYWAKKFQAYGHTVKLIAPQYVKPYVKTNKNDYNDAEAINEAVTRPNMRFVGINADWQQDIQALHRVRSRLMQSRTSLANQIRGLLQEYGVVLPRQISQLRRGLPLILADTDNELSAQVRALFAGLYEELQELDRRIAEQDKQLLAIHKASELCRRLGEVEGIGPLTATAFVAGLGDAGMFRRGRECSAWLGLVPRQFSSGGKTVLGGISKRGDRYLRTNLIHGARSVIARAEGKTDTRSLWLMQLKARVGMNKACVALANKNARILWALMASGERYRASEAV

SEQ ID NO: 248985 - protein, 424 aa, unidentified
MKVTYKTCCGVDVHKSFLVATIITTTGGIQPSYQKKRFSTFNNSILEFKHWLLENDCHDVCMESTGKYWVPVFNLLEDEINVTIANPKWVKAVKGNKDDTKDSKWIGDLFRLGLVKGRYIPCKKIRILREYTRYRYKLVSCRSSEKNRYQNALTVCNVALDSVVSDIFGKSSTSIIDYLLEQTDNSINHEEIASKLLRRLKSKEDAVIESIEGYQMTDPQKYRMRLVRAHMDYITAEINDVDREIEKLISSDPDYENAIQFLMTIPGVKRDSAITIISEIGIDMSQFCSSKRLCCWAGLVPGSNESGGKKKSVRITRAGVYLKPALVQCAHAAVKSEKSPYYKKKYESLMKRRGKKRAIVAIARMILTAIYQMLSTGEAWNPSDLYKIDMPEALLEKQKAKAIKQAMKLLQREGLYPPLEPIAS

SEQ ID NO: 248986 - protein, 368 aa, unidentified
MNTKSANVSTKRVKANGPILAIDLGKYKSVACIYERAEPSWQLTSFPTNRAELIKLLDKHQPSVVVIEACALCGWVLDLCAERGLSCKVANTTSEAWKFKHSKRKTDKDDALRLAQLEALGQLPTVAIPPKATRQWRALIALRQSLVGRRVAVQNRIRSILVGQGLTAPCGAKAWSALGLQGIGRLARPLEACGADELWQGMLELALTDYRQISALVEQAEKRLDALGKADQDVQRLQTIAGVGPRTAEAVVAHLHEPKRFRTGKQVSAYAGMVPRQFQSGETDHRGRISKRGPRLLRKLLVECAWCLLRYNSWAQAVWQRLTRGGKVRRKQALVALARKLLVRCWAMLRDGTCWRDDPPAEPAATPA

SEQ ID NO: 248987 - protein, 343 aa, unidentified
METIKTIGLDIAKSVFQVHGVDGGGRIVVRRRLTRSRMLPFFAKLPPCLVGIEACNNSHYWARELMALGHVVKLMPAQYVKPYVKRGKNDAADAEAICEAVTRPTMRFVAVKGPEQQSMMMLHRVRLMLNRQRTQLSNAIRAHLSEFGIVASVGRNGVDQLLKIVADPKDDRIPEDARLCLRMLVAQLTVVKQQILENDRRVLASARRTDVGRRLMDIPGIGPLLASAFVATVADPAMFRTGRDLAAWIGLVPKQNSSGGKERLGGISRAGNRYLRQMLVVGAMAVIRFAQRHGTKRPWLLQLLARRPAKVAAVALANKNARMVWALMKSGERYREPSIAVDV

SEQ ID NO: 248988 - protein, 441 aa, unidentified
MRRCIGLDVHREFAQVAIWERGQVRQAGQIATTPEALRLFADSLCEHDEVAIEATCNTYAIARLLEERVARVVVSNPQKTRAIAEAKVKTDKVDAAVLAELLAADYLPGVWLPDEETHALRRQVARRAHIVRQRTRLKNQVQSILHRNLVPRCPAADLFGLKGRAWLAEQALPTDERQAVEALLRQLDFHGEELRLIDADLAQTALARAEVKRLMTIPGVDATVALAIVAAVGDFGRFPSPGRLVSYLGLDPKVRQSGGQPASHGRISKQGRAHARGMLVEAALVAAKTPGPLRAFYERVRARRGMQIAVVATARKLAVLCWHLIVKAEDYAYQRPSLTAQKLRALELRAGMPSRRGQRGSTHAYNLKEVRARERALSEQAERAYRQLVADWQAKAPASGAGVAAANGARLSRPALGPAARQDSAPAPALRSGVGHAHAEA

SEQ ID NO: 248989 - protein, 309 aa, unidentified
MELFIGIDVSKDRLDICVRPSGETFVVTRDDEGLERLVERLRALAPVLVALEATGGYETVVASALAAAHLPLAVINPRQIRDFARSTGKLAKTDRLDAAAIAHFAEAIRPPARRLADAEARALGELTARRRQVIEMIVAEKNRRRLAGQPRVLKAIDRHVDLLQAELSELDRDIDGAIRKSPAWQADADLLVSVPGVGKATLRTLIAELPELGRLDRRKIAALVGVAPINRDSGVARGRKTIAGGRAPVRTALYMAALVASRANPVIAPYYQKLRASGKPAKQALTACIRKLLVILNAIIRDQKPWLPA

SEQ ID NO: 248990 - protein, 329 aa, unidentified
MKRNWFIGIDISKKTLDVVIYDQQKKTSKKHFRALNEIKGFKDIMKTLKAENIKIDEAFVCLEYCGIYGLEIGLFLDGKIAFCFCSPLHIKRSLGLTRGKNDKLDAFKIARFSYLYRDELSPTTMPTQAMLKLKNLINERSRVVKAAKIEKQVIKELSGQLDKKTIIRAKKRLKILNTDIKTIEKEIPELIMSDNKLEENYKLLLSITGIGLVNAVMMILCTNNFEGITNARSFACYCGVAPFEYSSGTSIRGKTRVSNLANKRMKADLTNAARSAVINDPEIRIYYKRKRDEGKAHGTVMNAIKFKIITRAFAVISRKTPFVKLRQAG

SEQ ID NO: 248991 - protein, 400 aa, unidentified
MRNNAFVPSDYDVFSGLDVDKRSISATFNNQQGHIRSLRMPNSVEHLVNHVRKHFPDQKVAFVYEAGPTGYGLYDGLVAQGYRCLIASPSMIPKAPGQRVKTNRLDSVGLAENLRGGQLKSIHVPSPVYRELRHLTQLRDTFVSAMVGMKQRIKSLLLLEGIEFPPAPAGSQWSIVVKHKLRKLPCSSTVRFKLDQLLDSLEFNEKQVVKTTQQMRRFCQNDPELSRCMGYVMSVSGIGRIVASQLLARIGDWRELKNVRQLGGFLGLVPTEHSTGDRTDRGSITQTGDGRLRSKLIQASWSAIRQDSELREFFASVCKTHARHIAPRVAIVAVARKLSVRISVVLMKQRPYVVREKVHSAPLTQEETSPQGTTRRKPEPGEPKLLTVRPLRQRSRGLVP

SEQ ID NO: 248992 - protein, 345 aa, unidentified
MPIVGGLDIHRKQLTFDYLDTATGEVRRGQIAPADRAHLRAWLARFAGRDDVAFALEGCTGWRYVAEELAAARVAAHVAEPADTAFARGRKRHAKTDKTDARHLRVLLEQGRLPECWIPPAQILECRALLEAYHDLRREHTAWVERIHAVFFHQGAPRLGEGALRTERGLAALRAAAAAHLSAAGQLQVATALDMLAAVEARMDTLRQQLLHAARHLAGARALQAQLYGVGPLAALAMTCWLGGAGRFSSSRKAVRFAGLDVTVYSSDGKRSPGHLSRQGPEILRWVAYEAGKTHARASAPGHDYYAAVKDRQDGKIAALAQARKLIRQACHILAELGDDALAAA

SEQ ID NO: 248993 - protein, 428 aa, unidentified
MSYRIAGVDVHKKMLAVVVSDVEVDSQYQFERRMFGSNPEQLRSLAAWLLEQEVEEVVMESTAQYWKPVWEALERYWKPIREKREGARRNSGTLHLAQAQSNRGRRGRKRDFPDAERLVKRLVARELTLSFVPDTEQRLWRTVTRRKYQLTRDRVRLQNQLESLLEEAHIKLSSLVSNLFGASARRMLKALAEGETKPAALACLADQNLRATPEQLSDALGACTDLKPVYRRLLKMVLEQLQFLEQQIGQLDQEMANLLSQYQDAVQRLAEVPGLGVDSAQQIIAEVGPTAATFPSEKQLSSWVGVCSGDEESAGVNYSHRSPSGNRHMRRLLNQSANAAARTKGSIFEIVYRRSVPRLGHNQTIGAIAHRQCRLIWLILHKGVRYEERGPAVTKRAKQKRTARMIRQLRNLGYRIELSDPQHQTQAT

SEQ ID NO: 248994 - protein, 416 aa, unidentified
MEVIYPRCGALDVHKKSVTAGVRISEGSKVTKDVRPFDTTTKGLLALSDWLSSYGVTHVVMEATGVYWRPVWNVLSASEELTLTLANAAHVKNVPGRKTDVSDTDWMLDLHAHGLIRPSFVPDRATQELREIIRSRKQMVREQTRNVQRIQKTLEVANIKLDSVLSDILGKSGRAMLDAMAAGESDPVKLAALAHKGVQASQEQLRQALNGRMNDHHRFLLKVHLKLIDFLDMTIAKMDEQVEANLQPFRDAVELVCTAPGFRQLGAQSVVAEIGIDMSRFPSAAHLVSWTGICTRQDVSAGKRRSRRLRRGNPWLKTALIQAAHAARKKKGTYLQALYLRLKTRRGPQKAVCAVAASLVTSIYHMLKNGVPYEDLGPDHFHNRSHTSHARRLVRQLERLGYNVDLNPQKAELATA

SEQ ID NO: 248995 - protein, 359 aa, unidentified
MLYLGIDQHRKQLTVNIRDEQGDVVLKRQVSTEWDRVRKFLEDLRQRAELVGGFMAIVEICGFNDWLLEMLNDYGCRETVLIQPEKKSRKKTDRRDASALSQLLWVNRQRVLGGKKVQGLKRIILPSQEEQDNRQLTALRQRTAALRTRTINKVQHILLKHNLQQECPTKGMKTKKARQWLAELSLGEVDRLEMDQLLSRWELWDVQIAKIDAKIQERQQKHKTAPILATLPGASAYSSLALASRIGAIENFPRPGSLANYWGLTPGCRNSGDATDRLGSITKEGSAMARFILGQLVVHVLRRDASMKAWYARIKKRRGSKIARVAVMRRLATIIWHMIKNNEAYRMGGPPRHRQKKAA

SEQ ID NO: 248996 - protein, 359 aa, unidentified
MNNKKYIGMDVHQASISVAVRDSAGKLVMESIIETKATTIREFIRGLGGSLSITFEEGTSAAWLYELLKPEVAEVLVCNSRQNALLRAGNKNDRVDARKLSDLLRAGLLSPVYHGENGVRTLRELARSYLTITKDLTRVMNRIKGLYRSWAIACAGKKVYAARHRGAWLEKIAETGVRRRAELLYEQLDALAKIRRETRRALLQESLQHSASKLLRQIPRLGPIRVALLIALPQTPHRFRTKRQLWAYCGLALQTQVSGEYRVSDGQLQRSKKSPALRGLNHNHNRDLKSLFKSAATQASASAKKDPLGEFYENLLAKGMKPAMARLTLARKMAAIVLRVWKKGESFDPAQLKCQSVCV

SEQ ID NO: 248997 - protein, 359 aa, unidentified
MKEYITLDAHKHYSFAAREDAVSGKKHHQRIEHQRGSIRRYLEDIEPGTTVAVEATGNWYWIVEEIEAAGGKPALVHPRKAKVMLGCINKTDKLDADGMNRLQRVGTLPTVWIAPGQLRDLRELPRTRMFLTTQSTRLKNRIQSNLNKYGLAVTGYSDPMGKAALAETHRRLAQLPEQSALATAELLEQLESTTKLIKAQEQRITQLVAATPEMQLLQTMPGVGKILSVVIALEVGEISRFPSAAHFASYSGTTPRVSASGDKVRFGRLRPDVNRYLKWAFIEAANCVRLHRAKYGERHVGRRYWGIAQRKGHQKAVGAVARHLAEATFHILSRNEAYKDPGHKPQGLQPDGTTSAKHA

SEQ ID NO: 248998 - protein, 362 aa, unidentified
MAQPKSVVGLDVHATQTHACVLYPETGELSSKRLNGAPRRALDFLEGLRSPVLAVYEAGPTGYGLARGAAERGLDVRVCAPGSIPRAPSDRIKTDRRDAERLARLCLAGELSFVRVPSPEEERFRDLARCREAIRADLMRARHRVGKFLLRRELRWEGPGSPWTQAHWRWLSGIEFSDGASSAVLADYLSAVRALEQRRGVTEQAIEEGWPESPWAATIARLRCLRGIDTLTAIGLCSEAGDLRRFEHPASLMAYFGIVPSEHSSGEQRRRGPITKAGSAHARRLLVEAAHHYRHVPRVAGSLERRQRGVDPRACEIGWRAQVRLHRRWQRLRVERGKPANVVRIALARELGCFVWEVGQLG

SEQ ID NO: 248999 - protein, 460 aa, unidentified
MSKRGKRTKGIEEARPFAGMSRVNEDAAGIDIGAVEIVVCVSGDENTQIVKAFGNYTVDLHSIGQWLKERNIKTVAMESTGVYWIPLFEVLESMGFQCLLISSRSLRRVPGRKSDILDAQWIQTLHSYGLLESSFRPQADLVALRTLLRHRAQLLEHRAPHILHMQKSMLQMNVQLSQALSDITGETGLAIIRAIVAGERDPEKLAAYRDRNCKKSAAEIGQALTGTWRAEHLFVLKQSLEMYDFYTRQVEACDAEIDRMYALTRPDWDGGELKPPSAGKRNSHSKNAPKNKEEIRQHLKRISGVDLSAVEGIGVGVAQTVIVESGTDLNQFPKEGNYCSWLGLAPKHEISGAKVLKNRTLKTKNRAGQAFRMAAQSVKNSDCVFGLMFRRFRVRMDNRQATVATAHAIARVVYRMLKYKVEYDAIDVTEYEKKYEEQQIKYVTKKAAKLGFQLVPVVPA

SEQ ID NO: 249000 - protein, 359 aa, unidentified
MIIIGADSHKRTHTVVGVDQVGRRLGERTVKTTSDGHLALLEWSAQWPEVTFALEDCRHLTRRLEQDLLAAGQQVVRVPTRLMAAARRAGRQPGKSDPIDAEAVALAALRHPDLPVAELDGPTREVKLLVDYRRDLVRQRTRVANRLRWHLHELDPALQVPSRGLRRYKVIDELAARLAGVEGTVARLARRLLARCRELTVEINALEAELRSLVRRLAPRLLAVPGCGVLGAAMILGETAGAHRFRSKDAYARFTGTAPIPVWSGDRRGKMRLNRGGNRTINTALHMIAVTQIRGIGPGQAYAERLMARGKTRTEAVRLLRRRLSDVVFSALRTDEQARSTSTQTRYSAAAKAASARAA

SEQ ID NO: 249001 - protein, 403 aa, unidentified
MNAVGIDVSKGKSMVAILRPYGELVEAPFEVKHTSSEIQSLIQTVQSIDGESRIVMEHTGRYYEPLFCQLAGAGLFVTAVNPKLIKDFGTNSLRKVKSDKADAIKIAKYALDSWSDLKQYSVMDKIRKQLKTMNRQLDFYMKHKTSMKNNFIGLLDQTFPGVNNYFSSPAREDGSQKWVDFATTYWHVDCVRNMSRSAFISHYQNWCKRKEYNFSQSKAEEIYEAAKELVPVLPKDDVTKFIVKQAAGQLADASERVAQLKVKMDETASKLPEYPIVMAMYGVGSSLGPQLMAEIGDVSRFTHKGALTAFAGVDPGVNESGTYEQKSVPVSKRGSAPLRKALFQVMDCLIKHMPQDDPVYLFMDKKRTEGKPYYVYMTAGANKFLRIYYGRVKEYLLSLKQPE

SEQ ID NO: 249002 - protein, 347 aa, unidentified
MAQRLKKVKYVGLDIHTRTSTLAIFDPYAENPYDRMTIKTLRGSLKTVFDTFKAFKEPYPVCYEASTGYGVVYDTLAQYADRVVVAHPGKLRRSKRKNDKADAQTLAKLLFADIVPTVHVPRTDVRAWRRIINHRRGLVLDRSATKNALRALLRGLAIETPRNLWSKKSLAWLRTLEFASSSDALMRDVHLAHLTYLEEGIRRVETELDTIAAAHRGVALLQTIPGVGPRTAEAIVAWVDDPRRFRTSKSIGSYFGLVPCQDSSADRNPLGRITQAGPPVIRALLNQAAWQAIRRSPEVRAFRGRIMRDDPERKKKATVATMHYLARVMVAMLRDGAVWAPQPRVAA

SEQ ID NO: 249003 - protein, 369 aa, unidentified
MKDYIRVCREMTNPVPNEFSLFPKSTLGIDLGDCFCHCCALDYRGEVVERFRFEATKAGLAKAFENRPPCRVVLEVGTHSPWVSRALGALGHEVIVANAREVQSITKSDRKNDANDAEQLARLGRADPKLLHPIAHRQEDTQRDRALLTVRDKLVQVRASLTVQARGIAKALGERLPESTTPAMAKRVREEGFANLFPGMSSLLDVVELLSEEIRELDSEIEKVSKERYPETELVRQVKGVGPITSLAYVLTIEDPARFARSRSVGVYLGMRPRQRDSGDRNPHLSISKAGDPYLRNLLVECAQYILSRGPDSDLRRFGERIVERGGPGARQRAVVAIARKLAVLLHSLWRTAEVYDPLRQAQVTGATA

SEQ ID NO: 249004 - protein, 428 aa, unidentified
MTPHVSTTPTVAWVAIDVAKAQHQVLVEVREGQRTVLRFANTKPEIDRFVAYLRQLGRPCEIAFEPTGDYHRPITYWLGDAGFRLHQVSSLAVARTREALYNSWDKNDPKDAQVILYLLKTGATQRFVEPMAHGYLDLQEMANTYQQVSLRKVRVYHSIVTHHLPLFFPEAERYLHASRAEWFPAVLRLTPCPAAVRQYTKAAFIAAALQIVGGHKADKRRWLADFYDTAQTSAGLPVAEDSEAMRLFRIVLEEYQQLCRLRKRLEIDAIARLREHPDFVRLQTLPGVGPILAMLILAEARDLRRFGHVRQFLKYCGFDLCTEQSGQFRGTTHLSKRGNARLRYAFWIAGTVAIRMRENSFRRKFEEYIRPDPNNPDRRRKAYTAVAAKVARVAYAMITSGTDYRRFPEATRPSGRIPSPRAVEAVTS

SEQ ID NO: 249005 - protein, 341 aa, unidentified
MNTTTYGLDIAKTVFQLYWVEPSGKCFNRRLNRTKLIEFLARREPGRVALEACASAHWWARQLQGLGHKPVLLHARYVRPFVQTNKTDAADAKAIWTAAQQPGMREVAPKSETQQCVLAVHAMRSLRIKMRTMLVNQLRGMLVEFGIHFRRGRRAGLDEIVQRLPDIESRVPPTLFEAVHQQWRSLESLDNEIAEYDRQITAWGRQDRACQVISAIPGIGMLTATALVATIGEARTFKSGRQLAAFLGLVPKQAGTGGKVRLGGISKRGNPYLRTLLIHGARAVLGHLRRKNQGGWSQALAQKRPTNVVAVAMANKTGRTVWALLVHERTHDRDYVSVRPA

SEQ ID NO: 249006 - protein, 328 aa, unidentified
MENDIHFIGIDVAKAKLDVDMLRPDGRHRSKKFANTPTGHDELVSWLRGHQVIHAHVCMEATGTYMEDVATHLSDAGYPVSVINPMLSKAFVQSQGIRSKTDTVDARQLAYFCREKRPPIWEAPHPVERALRALVLRYQALTEMHVQEQNRRESAREVQLPSIDMHLLWLETELKRLEKQIKDLTDDDPDLKHRRKLLDSIPGIGPKTAAVLLAYVGLKDRFREGRQFAAYAGLTPRQHESGSSIRRVSRMSKMGHVSLRRALYMPAMVTLYKTEWGRVFRERLEKNGKNAKLIIGAMMRKLAQVAYGVLKSGRPFDATLHTKNACMA

SEQ ID NO: 249007 - protein, 423 aa, unidentified
MKSLRTHNFTAYVGLDWADTKHDICLQEAGSEQREFACVAHQVECIDEWAKSLQQRFGGTIAIALELAKGPIVYALQKYDFLVLFPINPLTLAKYREAFRPSRAKDDPSDAELALDLLLRHPERFAPLQPQSVGMRTLISLTERRRELINDKTRVTNRLTNTLKQYYPQALEWFDQHDTVMFCDFLSRWPTPLQAKRAHQASIKAFHHAHNAHRPKLITERLAAIKAAVPLTQDPGVVVPCRLHAMVLVEQLRLALQAIEQFDRHIAELAPTLPDYRLFEGLPGAGPHLAPRLLVAFGEDRERFQRAEELQKYSGIAPVTERSGKKNWVHWRWQCPTFLRQTFVEWAGQTINKSFWAGAYYYQQRAKGSTYQAAVRALAFKWIRILYRCWKSRIPYDESKYLKALKKRRSSLLTNLVPDPLNA

SEQ ID NO: 249008 - protein, 426 aa, unidentified
MSKNEDSGRQEQFAAFVGLDWADQKHDVWLRDAATQQTRHQVIEQSPEGLSAWVSGLRQQYPDKRIAVCLEQSRGALIYGLMEYPFLVLYPVNPLTLAKYREAFRPSRAKDDRSDAEFLCELVTQHRDRLQPWRPDDEQTRLLGLLNEGRRAAVDLRTQMVQQLLATLKKYFPQAVVLIGDDWEGPMVCDFLLQWPDLPSVQRSKPESVRAFYYGHNCRHPEVVKQRLALIQQAKPLTTDSAIITTCSMTVKMLATQIRHLNKAIADYQKQIAKVFAAHPDAKSFRSFPGAGNALAPRLLCVFGSDRDRFASPSDVQNFTGISPVIERSGKSTWVHWRWAAPEFVRQSVHEFAKCSLPRCAWANAYYQMQRERGKGHHAAVRAVAFKWLRILFRCWKDRVPYDEAVYLQSLTKGGSAILKYMATPA

SEQ ID NO: 249009 - protein, 343 aa, unidentified
MQAVTTIGLDIAKSVFQVHGVDAEGKVIIRRKLKRRYIVAFFQKLPPCLVGIEACASSHHWSRELHALGHTVRLMPPAYVKPYVKRHKNDAADAEAICEAVTRANMRFVETKTPEQQSCLMLHRTRHLFIRQQTAVINAIRAHLAEFGIVAPVGRNGVEALLDVVADTSDKRVPEIARACLVALGAHLRVLKTQILEFDRLIMAWHRSNETSKRLDEIPGVGPALATALVASVGDPRAFRSGRDFSAWIGLVPRQNSSGGKEKLGSISKRGDRYLRSLFTAGALAVIRYAKLHGTKHRPWLTALLARRPTKVAAIALANKIARMAWAMMARGERYKEPVALAR

SEQ ID NO: 249010 - protein, 402 aa, unidentified
MNAVGIDVSKGKSMVAIMRPFGEVVATPFEIKHTTSDINSLVELINSVEGESRIVMEHTGRYYEVLAHQLSQANIFVSAINPKLIKDFDNDSLRKVKSDKADAIKIARYALDKWQNLKQYSVMDELRNQLKTMNRQFGFYMKHKTAMKNNLIGILDQTYPGVNTYFDSPARSNGSQKWVDFASTYWHVDCVRKMSRNAFINHYQNWCKRKKYNFSQSKAEEIYGKAKELVPVLPKDEITKLIIKQAVDQLNSASTTVESLRTLMNETAFKLPEYPIVMAMKGVGPSLVPQLMAKIGDVSRFTHKGALTAFAGVDPGVNESGTYEQKSVPTSKRGSSDLRKTLFQVMDALIKTKPQDDPVYQFLDKKRAQGKPYYVYMTAGANKFLRIYYGRVKEYLSSLSES

SEQ ID NO: 249011 - protein, 424 aa, unidentified
MKVTYQTCCGVDVHKSFLVATIVKTTGGIEPSYQKKRFSTFNNSILEFKQWLLDNDCHDVCMESTGKYWVPVFNLLEDEINVVIANPKWVKAVKGNKDDTKDSKWIGDLFRLGLVRGSYVPCKKIRILREYTRYRYKLISCRSSQKNRYQNALTVCNVALDSVVSDIFGKSSTSIIDYLLEQSGTSINHEEIASKLLRSLKSKEDAVIESVEGYQMTDAQKYRMRLVRAHMDYITAEINDVDKMMENMISSNPDFENAVQFLCTIPGVKRDSAITIISEIGTDMSQFSSSKRLCCWAGLTPGSNESAGKKKSVRITRAGVYLKPALVQCAHAAVKSDKSPYYKKKYDSLVKRRGKKRAIIAIARMILTAIYQMMSTGEQWNPSDLYKIDMPVALVEKQKAKAIKQAKKLLQREGLLPPDEPLAS

SEQ ID NO: 249012 - protein, 468 aa, unidentified
MPCTLSWLSSLTSICARDLESVAENKQLGESPRGGRHVPLSVSLDEECSRNEESDDHPVAAIQVSRLRACWREVVPALIRQHAVEHPRSLNLRTQGGPTAETESGTGGSLTLEQEMGRRVQWVTAGIDVSAATLSVAVRGSNDVVREYTVSNDDAGHRTLCRILKKDRRPVRVAMEATGNYHFDLAMLLAEQLRIEVMVVNPKAARKFAEAQMRRAKTDRVDAHVLLEFLERMEFTKWLAPSEAFLRFRMLGRHLTSLIVQRVAAQNRLHAARAIKLTPSVIVDDIQVHIDELSKRIDTVQTEALAALRLDADLLERFNALVSIPGVADRSGIQILAELAILAQDMTPDEVVAHAGLDPQPRQTGNSDPRRGISRVGNPRLRGALYMPALVAAKHSPAVAAWYHQLLDREKLPLVAQVAVMRRLLRVAWVLMVRRQTWSDELFRSRHRTTGTNQFLPATSTPPAGTSP

SEQ ID NO: 249013 - protein, 398 aa, unidentified
MPEDVWAGIDAGKIAHHCVVINSGGTKLLSRKVSNDESDLLSLIDQVLEIADGGRICWAADLNSGGAALLIALLCERGQELLYIPGRTVHYAAAAYRGAGKTDAKDAAVIADQARMRRDLHPFRQRDEITVDLRMLCARRTDLTMDRTRAITRLRTQLLEYFPALERAFNYAHRRAALVLLTRFQTPAAIRQAGPAKISAWLRKHGAYSTDVIAATAVAAAERQYTVVPGEQTAAKIVRQLAVQVIALDAELDAIEVVITERFREHPYAPAIESLPGFGPLLGAEFIAGINGDLANYENADKLAGIAGLSPVPHDSGRITGNLKRPRRYDRRLLRACYLAAYNSIRTNPASRTFYDRKRAEGKRHTQAVLALARRRLNVIWAMIRDETTYQPVVLNAA

SEQ ID NO: 249014 - protein, 438 aa, unidentified
MRVLHEHVAGIDVHKDMIKVAIRSPGEKPWTRTTEIFEYRTFYGVLQAMARDLRRRGVTHVVMEASGIYTDPVYYALCEQDFTEVAVVNPAHVKALRGHKTDAADCRRLAELFECGLLRGSYIPPAELREVRDLTRYRMKTVQARTSEVQRLDKSLESAGIKLSSVASDITGTGPTAMIEALIDGERRGEVMADLARGRARTAGKLADLSMALEGRFTEHHALMCRLILDQIKVHDTAVGDLDQRIAGLAAAWQREIDLLKTIPGFGDVVAWTWIAEIGPAPHQWFGSQEKLASWVSLAPGNYISAGKRRHSRTGDAGTYIKPVLVQAAWAAIRVRGRLQARYNRLVRRFGGAKNPAAKKKAIVAIAHTLLKIAYKVLKSGTPYQDLGEDFYTRRETPAQRQAWLERQIQKLHPGCTVTITISPPPGHAPEAALTAGP

SEQ ID NO: 249015 - protein, 273 aa, unidentified
MLDLQGALLGNRCFEASSAGYRELETWLATFGTVERIGIECTGSYAAGLTRFLRERDVQVLEVNSTHRATRARRGKDDAIDAEMAARKALSGEAKAQAKDTTGFIESIRLIKLARESAIKARTGAFLQIRDVLVTAPAELREHVESAGGLRHRVNRAGALRPDLEHIDEPLQAAKFSLRVLSRRVKTLDEEIAAMDAQLSRLVHQCAPNLLNCLGVGVQHAATLLITAGQNLDRLKNDGAFARLCGAAPIPISSGKTNRMRLHRGGDRQANRT

SEQ ID NO: 249016 - protein, 355 aa, unidentified
MIQPSDYMAVVGLDVGDRKTHYCILDLGGDLVVEGEVATREASLRVQFAGKGRMRIALEAGAHSPWISRLLVELGHDVIVANPRNVRMISRSDSKNDPADARLLARLAHVGPELLSPIQTRSQQTQVDLALVRARDVAVQSRTKLINTVRGIVKSTGHRVPKSSTLTFARKAKDACPEALQPALLPLLRVIEELTREIELYEKLVVHKAEAEYPETKAIRTIHGVGHLTSLALVLLLNNDRSRFRKSRDVGCYIGLRPKQRESGLRAPQLGITKAGDPLLRRLATQSAQYILGPFGKDSALRRWGLSLALRGGKNAKKRAVIAVARKLVILMHRIWITQEVYEPLRGVTLKSTAA

SEQ ID NO: 249017 - protein, 416 aa, unidentified
MKLFIGLDVSSQKLDTCFLTDSKEILFEGSLSNDLIGAGEIKQRILEYQETFGFCQIVIGMESTSVYSFHPAIFFYLDEDLKLLPVEVTVENPYRIKQYSRMFDQDKTDKIDAQIIADYLRVDLHTLSPIKEEIYIGLQRLTRSRYQLVTQMVEAKQHFLENLTYKCNILSKELANEDNKTFVFGATIMNLLTEDITLDEFSEMPLEAAAELLQKLGKGRFKNPEQLVKSIQKAVRSSYRLGKVTKNSIDLVLGIIANEIKFLKKQIKEIEKAIIALLETIPEAQCLLSVPGLGPVYTAGLIAEIGQIERFDDQSKLAKYAGLTWTKNQSGNSQSENTPLNRSGNRYFRYYLIEATNRVRSTLPEFKEYYQKKKNEVPKHKHKRALVLTGRKFVRLIDALLRNGQFYQPTKVVIEK

SEQ ID NO: 249018 - protein, 440 aa, unidentified
MNVALFKGHAYQTFLIDGVASRLVSEVRRMQPILESCCGLDVHKSMVMACIAYGPLDKPPKYEIRKFSTMTSDIRELKDWLKKYNVTAVAMESTGIYWKPIFNILEDGFEIVLANAQHIKNVPGRKTDIRDCQWIAQLFRNGLIAGSFIPPRDIRELRDLTRTRRKLVEEMASEKNRVQKVLEDANIKLSSVVSKVFGVSSLKMIGVLLEKEELSAEEIAALAKGKLKKKVDQLVKALDGNVTDHHRFLLKEHLAHIDFLLEQIKDFDEEIRKKLRPYETKFKDIQSVTGVKDVSAASVIAEIGVDMSKFPDEAHLSSWAAVCPGNNESAGKKKSGRTRRGNNYLKATLTESAWAASRKKGTALSAIYHSIARRRGKKRALVAVGHRILIEIYRVLKTGKPYQDVGADIANERRSKNREHAMIRDLERRGYVVSKVMASI

SEQ ID NO: 249019 - protein, 311 aa, unidentified
MNTADVFIGMDVSKDTLDVAVRPTGEEMSFANTEDGVGMMRDFIQSFSPRLIVMEATGGWETAAASVLASQGLPVVIVNPRHVRNFAKSTGLLAKTDKLDARIIARFAESVKPEVRPLKDEEGQRLEAFLARRRQLLQMSTAEKNRLVLARRWTKKDIQAHIERLDKELDKVKRELHKLIQKSPLWRERDEILRSVKGVGPAMSITLLSDLPELGSLNRKKIAALVGVAPLNRDSGKFRGRRVIWGGRAQVRLVLYMAARAAIRFNPVIHAFAERLKKAGKPYKVVVTACMRKLLTILNAMVKNGTRWQAA

SEQ ID NO: 249020 - protein, 376 aa, unidentified
MITCFIGIDAHSTNYTLSTAIDAEDKPFNTCKYAPKLTYILKYANALCKKYNLKKEDILLGYEAGCLGFKLQRDLNENGFNCVVMVPSTIPGTAINRRKKTKNDIRDAEAIAKALRNDDYSSVATPDEEDEAIREFIRAREDVRMELKRCKQHIMAFCNRHGQHYEETGWTQKHMKWLNNLAFSQPVLKETLNSLLLEYEYLTEKLEEKDRRIEEFAQMDKYRESVHKLTCFKGIKTLTALAVIVEIGDFARFMKAKNFVAYLGLSVGEQSSGNDHNQTGITKQGNRFIRKLLTEAAQCFSRATSKKSKELKKRQEGNVEEVIAYADKANERLRKRYHHLVIHNMKSPNKAKCAITRELACFIWGMMTDNIHTVLV

SEQ ID NO: 249021 - protein, 432 aa, unidentified
MGNCAGVDWASEKHDLLIENPAGEELLAATFSHTEAGIAGLCRALVRHEVGLVAIERPDGLLVDRILDAGVRILPLHPNQVAASRDRFRASGGKSDRFDRFVLCELARTDAHRFRVLEPESDETKALRALTRAREDLVTARVAMSNQLRAELDRFWPGPVRMFSAIDTPVSLAFLAKYPSPSDAKALGVKRLTAFLKAHGSSKATAAAELLGRLRDAPSGRVGQAEAARRRTIVLSLVSALSVMVEQINRLETEIADALDAHPDGPVFRSFFVSQSAVLCPATLLAEIGDSRGRYPHRDAIAAQAGHAPVADESGKRKNAKFRWACNHRLRNALSTLAQSIRRWNPWAADLYNAASARGHNHRRALRTLGRSLARIIWKCWQTRTPYNPDRHPALQRHITVTIPDPSGPRPDHAATQLMINSLTKPQIPTTA

SEQ ID NO: 249022 - protein, 326 aa, unidentified
MATIGIDVSKKKLDLCWLRDAQSGKVKTRVFPNAHDHYPALLSWLLKQTDEAAGDLQVYLEATGIYHEPLAYWLHQAGVTVYVLNPARVRYYARSLGDQGKSDKKDSKRIAHFALANPELKPWCPEPEEVRPLKQLAKRLETVQKDIQREQNRLEKAQFNRDTQAEHSITHVLALLRREAKRLVNEVDDHIDRHDGLKRDRGLLESIPGIGPVLSVHLLVALRSRHFKSGRQVAAFMGLVPVESTSGSSVRHAPRLSKNGDPALRQKLYMGAVVAMRHNPSIRRQYQRLCAAGKRKMSALGAAMRKLVHIAYGVLAHQKEYEPQPI

SEQ ID NO: 249023 - protein, 414 aa, unidentified
MDTIYARVAGLDVHQKFTTVGVRCRLETGKLFAEVRTFGTMTRDLLALADYLEALGVTHVAMESTGILWKPVWNILEGRFTLLLVNPRRVKQVPGRKLDVSDAEWIAHLLQCGLLQGSFVPKRELRELRDLTRCRAQLVSEQTRVANRVHKVLEDANIKLGAVASDILGKSGRAMLWALNRGERDPDKLADLALGRLRAKIPELKLALEGHFREHHQFLVEHLLGHLDDLERRIEEISQRIAEHLPSILDDERLRRLDAIAGVNRTTIENVVAKIGVDMSQFPDEHHLSSWAGICPGNEESAGKRLRNRTTRKNRWLRRAITEAAWAAGRTKNSYLGALYRRLAPRRGKNRALIAIGHSLLVIFYHMLKYDVEYQDLGVDYFDKREPERLRNYLVKRLQLLGYQVCLTPQTDAA

SEQ ID NO: 249024 - protein, 328 aa, unidentified
MDNIGLDLHKRESQLCILTSDGEVVERRIQTSRERFTAVLGERAPARILVEAATESEWVAQHLEALGHEVIVADPNFAPMYATRSRRVKTDRRDARTLAEACQLAAYRRVHRLSPARRHVQVELTVRDALIRTRTRYVAVVKARVRREGLRVPGGDPEHTVAKLMALPLSVAVAAELAPLVALLEPLNAQIVAADARLAALAAADAVVQRLMTAPTIGPVTAVAYVATLDDVGRFATARRVAAYLGLAPTERSSGEQQRRGPISKTGNPRVRCLLVEAGWRILRSTQPAAAPLRAWAERIAARRGRAIAAVALARRLDYRAAAISAVV

SEQ ID NO: 249025 - protein, 338 aa, unidentified
MNTVTLLGIDIGKNTFHLHGQDARGNQLLRKKLNRSQLLPYLTQLPTCKIAMESCGGSQWLARQIESLGHRVQLIAAQHVKAYVTGNKNDFIDAEAICEAASRPRTHSVPVKTLEQQILSTEHKLRKSWVDNRTGIINQVHGFLLEFGIIFPVGYAALEQVPALMENHELPIRLRNAVERMLLDIQRLTRDIKTIDVEIKQQLSEDAAGMRLLSIPGIGPLTASALLADVGDASTYKSSRDFAASLGLVPRQYSTGGKTSLLGISKRGDKYLRSLLVQGAHALMIRIDKRNDALGAWVRKLLARKPPNKVACALANKMARIVWAVLARGGSYNVEQTA

SEQ ID NO: 249026 - protein, 343 aa, unidentified
MQIHSVGIDLGKTTFHLVALSAAGKVLLRKKFTQKQLIAITANMQTNLIGMEACSGAHFLGRVLRDQGHDVKLIPAQFVKPFVKSNKNDFLDAEAIAEAVDRQNMRFVPIKTDDQLDLQAMHRVRDRLVARRTSVINQLRAFLLERGMVFAKTPFKLKQAMPEILENADANLTPRMRNLVSMLWSEWKDLEQQIVAMNGEVEQIASSDPACQRLRQIPGIGPLVATAIVAAIGNGAAFKKGREFSSWLGLVPRQHSTGGKARLFGISKRGNSYLRKLLVHGARSAVLIVKRERSPFGPWLDSLEQRAPVKVVITAAANKLARVAWAVLSSGEEYRAPTTATAA

SEQ ID NO: 249027 - protein, 343 aa, unidentified
MDYFAGLDVSLKETSICIVDDAGKIVREVRVASEPEALLQVLTNTIYRFKRVGLEAGPLSQWLYSVLAEAGLPVICVETRHMRAMLKAQINKTDRNDARGIAQMMRVGLYRAVHVKTLRSQKLRMLLTHRKLLQSKAIAIENDLRATLRNFGLKVGMIGTVKFETRIRELVEKLPDLAMLAEPLLIVRRVIREQLDILHRRLLAVVRDDDVCRRLMTIPGVGPVVALTFRVTVDVPARFRNSKAVGAVFGLTPAKYQSGENDRTGAISRCGDEMMRMMLYEAAQSMLMRSTKWSWLKAWAMKIARHRGMKKAIVALARRLAVIMHRMWVDGTQFRWTREAAAA

SEQ ID NO: 249028 - protein, 433 aa, unidentified
MLKLNYMSTLFVGIDVSSKTNAVYAMDFEENKYISSSFGNNQPGADQLVNMIAECMQKHKNLDTVLIVLESTSVYSVHISNFLSTSEVLMPYKPYVFCVNPKATSNYRKSYIGMEKTDPTDAYLIADFGRVGRTKKLEPWRGGQFISLKRLTRHRMHLSECITREKTYMVSNLYLKFSELQLLEGDDKPFGSLYGATSSAVLTEFLSPQEIIDMPEEELLTFLAGKSRNRISDLSKTSELLRKAARDSYRLDKCMYEPLSISLASSFNCIHAYQKEIKLIEQAIEKCINGMNPNALLILQSIPGIGPIWASGILSEIGDITVFHSSDALAKYAGLYWPKGDSGDFTSEDNKMSKAGNPYLRCYLGEAANSVRKHIPEYADFYARKYAEVTKHQHKRALALTSRKLVRLVFGLLVKNQLYTGEKLDAEYNIESN

SEQ ID NO: 249029 - protein, 339 aa, unidentified
MKLYAAIDLHANNSVLVILNKKDRVVLEERRPNDLKAILAELAPYKKKIQAIAVESTYNWYWLVDGLMDEGYDVKLVNTAAVKVYEGLKYTGDEHDAKHLAHLLRLGVLPTGYIQPREDRAVRDLLRKRAQLVRCRTAQILSIQGLITRNSGKRINTEGVRKLDDEAIGQYCGGDSVLMLAVKSNLSVMRCLDEQVVALEKVVLKQARLKPEFKKILTIDGIWEIIGMTIMYEAGDMKRFDGVGHFASYARCVSSSRWSNGKKKGEGNRKNGNKYLAWAFIEAAHFAVRYNERIRSFYQRKMTKTNKIVAAKAVAHKLARACYHVLKDQEVFDETLAFA

SEQ ID NO: 249030 - protein, 433 aa, unidentified
MLKLNYMSTLFVGIDVSSKTNAVYAMDFEENKYISSSFGNNQPGADQLVNMIAECMQKHKNLDTVLIVLESTSVYSVHISNFLSASEVLMPYRPYVFCVNPKAASNYRKSYIGMEKTDPTDAYLIADFGRVGRTKKLEPWRGGQFISLKRLTRHRMHLSECITREKTYMVSNLYLKFSELQLLEGDDKPFGSLYGATSSAVLTEFLSPQEIIDMPEEELLTFLAGKSRNRISDLSKTSELLRKAARDSYRLDKCMYEPLSISLASSFNCIHAYQKEIKLIEQAIEKCINGMNPNALLILQSIPGIGPIWASGILSEIGDITVFHSSDALAKYAGLYWPKGDSGDFTSEDNKMSKAGNPYLRCYLGEAANSVRKHIPEYADFYARKYAEVTKHQHKRALALTSRKFVRLVFGLLAKNQLYTGEKLDAEYNIKSN

SEQ ID NO: 249031 - protein, 311 aa, unidentified
MNSYVGIDVAKAHVDLYDTVTERHIRFENNGSGIRKCVSLLISLTPQLIVLESTGGYELDLAVALTEASLPAAVVNPRQVRNFGRAVGRLAKTDQIDAILLAQYAATIKPPRRATRDRNGRQMKALVARRQQLVKMRTAEINRCEHIRDKVIAGSINAITRTIDRELKKIEQRLVILIEQLPELKRKMQALLSVPGIGPTTATMLLTEVPELGQLNRRQIAALIGVAPINRDSGTFRGKRMTGGGRQAVRTRLYMPTVVACHHNPVLQQFYERLLQNGKTKMTALVAAMRKLLTIINNMLAKGENWIPQLN

SEQ ID NO: 249032 - protein, 346 aa, unidentified
MNYYAGLDVSLKEISICVIDGTGTTVARGVSPADPEGVAGWFRARSLSPELIVHESGQLSIWLQRGLERLGLPAFCIDARRAHKSLSARPNKSDAADAEGLAQLARTGWFTPVHVRTEDADRLRALVSARAQLIDLRKDLEGHIRGILKTFGIRLTGIGKGRQRQGFRDQLAAAGERDPILRTIADGFISVHTTLCQAAAELDRAVKEKAETHPVTRRLMTIPGVGAIVALNFVALIDDPSRFRKAENVGAFLGLTPRRHQSGEIDWSGRVSKCGDGVMRSLLFEAATTLITRVQKFSALKSWAVRLAGRRGFAKAAVATARKLAVLMLTLWKNETEFTWKKEAVA

SEQ ID NO: 249033 - protein, 378 aa, unidentified
MRDHSEAFVAFDTSKLRNAVAIADGDRGNEVRFLGEIDNTGAAVAKLVNKLTAKYRRVTFCYEAGPTGYGLYRQITSLGHECSVVAPTLIPKRPGDRVKTNRRDAVSLAKLLRAGELTAVWVPDRRHEAMRDLTRARETAMLDLRAKRQQISSFLLRQGLCYPDGKRNWTKTHMNWLASLKFELAEHRIVFEEMMEAMRQAHGRLERLAEAIHAAVPDWSLCAVVTALMAMRGLDMISAATFLAEVGDLSRFRSPCELMAYLGLVPSEDSTGDKVKRGPITKTGNRRARRMLVECSWSYQHSPRVGKDKQAKVDAVPQAVRDIAWKAQCRLNRRYRALVRRGKLKTVAITAVAREFAGFIWAVARAARAPTTAIAAAR

SEQ ID NO: 249034 - protein, 374 aa, unidentified
MADCSEVFVGLDTSKLRNAVAIAEGGRNGEVRYLGVIENTEVATSKLVKKLAGSHRRLTFCYEAGPTGYGLYRQIRALGHECVVVAPSLIPKKPGDRVKTNRRDALNLAKLLRAGELTAVWVPDERHEAMRDLVRAREAAVNNLKSKRQQVLSLLLRVGRHFMGKRTWTRAHMNWLVSQKLAHREQRIAFEEMLLAVRQADERVIRLERAIAAAVPDWSLAEVVTALMAVRGLNLISAVIFLAEIGDLSRFASPRQLMAYLGLVPGEESTGDRVWRGGITKAGNHRARRILVECSWSYRHPPRVGKKKLAKVEAAPPAVQEIAWKAEARLTARYRALARRGKRPTLVVTAIARELSGFIWAVSRAVGAPATAAI

SEQ ID NO: 249035 - protein, 350 aa, unidentified
MIIGVDYHPSFQAIAFLMEETGECGEQELNHSDGQAEKFYRDLKQRGICVRVGLEATGYSRWFERLLAELGFELWIGDPAEIKTRRVKKQKTDRKDAQLLLRLMLENSFPQIWVPGPENRDLRQLLWHRHRLVQMRTRIMNQLQALAMNEGYRWKKKLFSEQGRAQLEKLSLAPWASRRRQELLELLDRMNPTIEELTAAAEQEVKKRPEALRLMTHPGVGPLTALAYVLIIGTPERFHCGKQIGTYVGMIPSEDSSARKQRLGHISKQGNSLLRFLLVEAAQAAARSNPEWRRRYLHLAMRRHKSIAKVAMGRKLGVRLYWMWRNGCEYSPSFEFGSYVGQLGTRHGVK

SEQ ID NO: 249036 - protein, 317 aa, unidentified
MQDERILIGVDVAKDELVIAGVPSSEAVVTVENSAVTIRRWLKTIPTGSSIAMESTGRYHVELARLAYAAGIEVFVLNAKDVWFASQGEGRRGKTDRLDAQVIKNYLEEHIKKLHPWAPGTRQQQRIEELIRRRATIVVHQVAIRKALEGVEGVDRQASSVDKQIARLLGKIDAEVQSLIAQDETMSAVQKRLMTIAGIGPQCSATLTALLERVPFKDVNAFIAFTGLDPRPRDSGKKRGVRVLTKRGPPSLRRLAYLAAFAACHSKAFKPVYKAIRARGFSGTESLVILARKILRVAWAVWRSGMPFDPTKVAVMA

SEQ ID NO: 249037 - protein, 331 aa, unidentified
MFYLGIDVSKAKLDCCLLLDNATFKRKDKSIANNHKGFNELLAWIQKQSVALNDVHIIMEATGVYHEQAAYAFHDAGVKLSLANPAYVRHFANGLAIKTKTDCMDSFVLARYGLSAQPQLWTPAPIEARLLQALLNRREAIAQDLQRERNRQEKAEVAVSPDIIQQSIKTSIAFLEQQLKQLQQDIDDHVDKHPKLKQDVKLLETIPAVGERVGNTMLSVLHNHHFESAEQVAAYLGLVPVEYQSGTSVLKRPRLSKTGSASVRATLYMAAVVATKYNPHIKKLYERLLAKGKCKMLAIGAAMRKLVHLCFGVWKNQTPYQEDFLPKNAIK

SEQ ID NO: 249038 - protein, 427 aa, unidentified
MNITYKLNKVKKNNWLNIAFDVSKDDLYMYTETGEETISCIADSFANKTDIILEKLDFINQTATSEGYSGIHIICEPSGGYESKLMNLSVKQGHAASYVSGEASNKFKMVEDNSDEKSDPRDARVIFKLCRYGKFLKYRNLDEQYAQLRHFNRMQEQEQDLRNIARGHLHHEIKILFSEQDWKEAFWYGSSGRALLTYYQANPYKIVQVGERRFYRRMKKMVKGIRNATLERIWSNVCLSVQLGHPLEISDLTANRIKQLWQDFQLHDQRINEIKQQMADIYRALLDQGEELPPVIKGFVSIENLARIVGETGPFSDFRSAKQIKRYAGMNIRIRESGQFKGQRKMSKKGRPRLRLILGQSIFHLIKKDRILGSYYHGLKERGMNGTKAMSVVSRKLVDVLFVLSRPGVVFDKGRLFVSESKYKQAA

SEQ ID NO: 249039 - protein, 402 aa, unidentified
MNAVGIDVSKSKSVVAIMRPFGEIVSTPFEIKHTASDIHSLIELINSVEGESRIVMEHTGRYYEVLAHQLLEANLFVSAINPKLIKDFDNDSLRKVKSDKADAVKIARYALDKWQNLKQYNVMDELRNQLKTMNRQFGFYMKHKTAMKNNLIGILDQTYPGVNTYFDSPARNDGSQKWVDFASTYWHVDCVRKMSLNAFIDHYQNWCKRKKYNFSQSKAEEIYGKAKELVPVLPKDAITKLIIKQAVDQLNSASTTVESLRTLMNETASKLPEYPVVMAMKGVGTSLGPQLMAEIGNVSRFTHKSAITAFAGVDPGVNESGTYEQKSVPTSKRGSADLRKTLFQVMDVLIKTHPQDDPVYQFLDKKRAQGKPYYVYMTAGANKFLRIYYGRVKEYLASLPES

SEQ ID NO: 249040 - protein, 429 aa, unidentified
MIREKALTPIAPGTRPNLTIKMLWGAARQWHHRRGNETMERPMPQLDDLSRSLVGLEQDATLIAVIEMGQSSWLVAGIVPGIDRQPLKKLTADQDGLLQLLHRWRNEAVQAGRTIKRIAVAYEAGRDGFWLARWLRAREIEAYVIHASSVPVSREHRRAKTDRLDTELLKRAFLGWLRGEPKHCSMAAIPTLEDEDARRPSRERESLVKECTRIVNRVKANLARLGIRGFRPSLAKASRQLKTLRTPEDAAVPANTLAELRRDINRLCFVRQQIKEIETTRAKRLERAARQGRDAMVQLLARVVGVGVETADMLVQEVFSRNLRDRKAVARYAGLTGAPDESGQKRRERGLAKAGNARVRRGMIQLAWGHLLHQRDSALADWYRKRTADACGGTRKTMIVALARKLLIALWRLATTGEAPAGLLLRPTE

SEQ ID NO: 249041 - protein, 417 aa, unidentified
MEDEQKASTNRYIALDIHKYYSVVAGVNRDGEEILPPCRVEHLNLEDWLGKNLLASDRVVIESTTNAWHVYDLLEPLVAEVLVANPIKVKQIACARVKTDNKDTLILARLLAANLVPTVWVPPKHVRELRQFVSHRRRLANMHTQVVNRMHSVAHRHHLNHPKGKDFQPKNTTWQQDDSLSRLEKLQLELDMATRAHLEKQIEQMTRELGRMSHEEPWASDMLYLMQIPGCGVVTGMTIMAAIGDITRFENPKALASYSGLTPGLEQSGVKVRGKGITKEGRRELRWAMVEVAWRAVKADPHWKRLFEELKRRMHPNQAIVTIAHHLLVVMWYVLTKHEPYRHYSPERIAYKYLTWSWALDEDQRQGMTRPQFARYYLMRLGIGNELKRVALNPEFPYRLASVEEVLALRPELRPPE

SEQ ID NO: 249042 - protein, 348 aa, unidentified
MALTIVETRAVTGRVDTHADTHVAAALDPVGGLPGVREFPATGARYAGLLGWLGGFGTVCLIGIEGTGSYGAGLARHITAAGIRIVEVDRSGRQDRRRQGKSDPLDAVSAARAALSGRARGAPKGRDGAVEAIRALMVAKRSAAGERTRTNCQARALILTGPDDLRQRFTRHTPATLVTALAALRPRLGDTVGYATRIALRELGRRAQFLDDQIGRLDELIVPLVTARAPGLLALYGLGPNTAALLLIAAGDHPGRLRSEAAWAHLCGVAPIPASSGKTVRHRLNPGGDRQANHALWRIVFTRLGSHPATRAYAERRTAEGKSKAEIIRCLKRYVAREACPHLRHVAD

SEQ ID NO: 249043 - protein, 394 aa, unidentified
MRFVGIDIAAETHVVAVVDESSALVVTPTPFGEDAAGYATLRALLGAPEDVLVAMEATGHYWQNLFAVLVAEGFAVALLNPMRTRRFAGEDLARAKTDAIDAVGIARFAAQKRPAVTRLPEAATQELRELVRLRDRLRQEFGDRTRQLHRLVDLGFPEFTRVIPDLKGRLATGLLAAYPTAAAFRGVSVLRLAALRADGTHRVGAALARALLEAARESVGQHHGPAYQLQVRYLCEDLELLRRRIEALEQDVATTLQTHEVGMLLTTITGIGVQTAARLVGELGDPARFRSAAALAAYVGVVPGTRESGKRRLTHARLAPTGHARLRAALWMPTLVAVRTNPWLRAYYARLRARGKLPKVALIAALHKLLLAIYSVAKHRRPFVPHLTVQGVEA

SEQ ID NO: 249044 - protein, 495 aa, unidentified
MSDFRIPRRNVRTRPTPAPAPAANDLSRAARHAEKTRRHAEECAKLVSMPVQHAHAAGIDAGDISHWACVESTPDDTDAVREFPAHTAGLRQLVDWLRQCGVTTVALEATGVYAHVLFLTLLEAGFVVVMTAPQFARQIKGRPKTDKRDCQWIQRLHKHGLLPAVFQPDEATQTLRDYVRQRANLVRLSGQHIQRMQKALQLMNLKLTRVLGDVTGVTGLMIIRAILAGQRDPQQLAKLRDRRCRHSVADIAQALDGRYRPEHVTELRCCLTLWEKYQEVIGELDEAIDAHLRTMRRQTELPPLPPKPRLRGHKPHDPRFDVRQALYFATGVDLTAIEGIEEMHALTLVSELGTDFTKWPTVKQFTCWLGLCPNWQKTGGKVKSSQTRRVKNRAAYALRLAAWSLQRSKSYLGAYLRRQRSRLGAPKAITALAHKLARIVYHLVRYGLAYVKQTEAAYAEQVRERLERQLRRRALELGFELKKIEPPVMPTVTEA

SEQ ID NO: 249045 - protein, 316 aa, unidentified
MKTEVFVGIDVSKQHLDVAVRPQSRHFIIPNDDRGLKQLLKRLTALKPQLIVLEASGGYELLATAALAEAQLPVALVNPLAVRQFAGATGKLAKTDKIDAQVLAHFAEAVRPEPRPLPDQEQQLLKAALQRRVQMVKMIGQEKNRLEKTFIPALRQDIQAHLAWLQQRLEQLDRDLNDQIRRSPLWRDRDRLLQTIPGIGPAVSRAVMAQLPEAGRLPGKKAAALVGVAPYNRDSGRFRGKRMIRGGRSYLRRMLYMAAVVAARWNPVIRTFYQRLLAAGKPKKLALTACMRKLVLILNAMLKNNQPWNQFINQVP

SEQ ID NO: 249046 - protein, 333 aa, unidentified
MACQVYCIGIDVSTAHLDTFNLPGKSGVHRRLSNTPESHAELAAALTDLCGSGNDVLVVMEASGGCERELHHALAGAGVPTAIVNPKRVRDFARSHGWLAKTDRVDAKVLHAFGQSHRPRPTALPDPVRAELKEMIAYRDQVVAEITARSLQRRHLRSAVLIERAEAARKSLRQEAETLALQIDMMMYTDETLGRRADLLRSFTGVGPQTAAVLVGHMPELGTLTDGEVASLAGLAPFARDSGSLRGVRTIYGGRGRVRQALFHATRAGLRWNPVLRAFYDRLRERGKPGKVALVACMRKMLVILNALLKAGQEWDPGHKHEKTGRTAGPASA

SEQ ID NO: 249047 - protein, 339 aa, unidentified
MVLYGGMDLHGDNVYCTLMDQEYRPVFERRLPNELPTILVALEPYREQLGGIAVESTYNWYWLVDGLRAQQFPVRLANPARMQENIGLKNANDKTDARFLAKQMAMGVLPEGYIYPKEERAVRDLLRRRMRLVQARTGEWLSLEGLVARHSGKDLGIQALNGLEDGELGQLLGNDPLVLQAAQISYRHIAFLDREIRQIEKAVEPRVKLTDGYERLLSVPGIGRILAMTIRLETGPIGRFPGPGNYASYCRAVKTEHTSNAHKKGEGNGKSGNRYLAWAYVEGANFAIRHSPELRAWYQRKAARTKRVVALKALANKLAKACYFILRDGVEFDVKKLVG

SEQ ID NO: 249048 - protein, 334 aa, unidentified
MLYAAIDIHKHAFQAAVLDPDSGEVVEERFSADRESLARWAEQWPGRVAVVAIEATTGWRWVWRELVASGFEVRLAEPVQTRALLGRRRSAKTDRLDARWLARLLAKEMLPQSWIPPAQIQELRDRTRLRKALAEDRRRWGQRLHAYLLHEGWPCSRSNLLRPPGLRWAAALRLSEHARLQVDSLLSVMAALEAQLDTVDGELRRFARNDQRCQALQSIYGIGPILACHLLAEIGEARRFRRAEQITRLAGLDPVVDESGETRRRGHLAKAGSPHLRWALIEAAVHAHRATAPDLALYRATRERRDTTVARLTVARKIGKRAFHTLRELELATT

SEQ ID NO: 249049 - protein, 455 aa, unidentified
MPRKSAKASLDLTRHIQGAAAIDIGSRMHMAAVAPEAAKDPIRYFGTFTSDLHALAEWFKECKVTSVAMESTGVYWIPVYEILEQHGFDVILVNARYAKNVPGCKTDVSDAGWLQQLHSYGLLRGSFRPQADIAALRAYLRQRERLVEYAAGHIQHMQKALMEMNLQLHHVVSDITGVTGMQIIRAIVGGERDPETLAAKRDVRCRSSAEVISAALMGNYRDEHVFALTQALELYDIYQERIMACDRRMEGLLLLLSHGSAKPAADLPKPRIKTKQVSAPSFDVRGILYRLLGVDLTQIHGIGVSLALKLVAECGTDLRAWPSAKHFTSWLCLAPGNKISGGKLLSSRTRRSSSRAAALLRLAATTLGRSDTALGAFYRRLSARVGKAKAVTATARKIAVLFYNTLRYGMVYADPGAGHYDEIHRKRVVSNLHRRAQSLGFVLHPIPVATEPAVS

SEQ ID NO: 249050 - protein, 353 aa, unidentified
MNAMTVAVDLAKDVFEIAVANRAGRIVERKRLTRRQFEPWIDARPAGTTVVMEACTMAHYWGRRCVAHGLAVRLLPPQYVRPYVRRNKTDRADAEGLLEAHRCGGIQAVAVKTVEQQTLQTLHRVRTQWQAARTARLNVMRGILREYGITIAVGARTAMTRIPALLDDTTSSLPALVRASLAMVLEEVRALEARVAQIDQQLGRIAREQPIARRLQQVPGVGVITATALMGAVGDIHAFRRGRQFASWLGLTPRESSSGMRRSLGRISKRGNVYLRCLLTHGSRAVLLAAQRAVRVAPHRATRFQQWAAELAIRRGPNKAAIAIANKLARRVWVVWHRDVDFDASAPCGAAAA

SEQ ID NO: 249051 - protein, 347 aa, unidentified
MKAPQYYVGIDIASASFTCSVGKMEGRWQIVVRPASFANEYDSFSAYLNWLHDHGVKPDNSVICMEATGVYNEVLAHFLCANGYTVAIEPPLKVKRAFKPEGHKSDPVDSTQIAEYAYRFWDELSQWTPRKEILEQIKTLLTTREQFVVERSGHQNALQALKRKQVRTLMAEKMHERAIEELKRHAQEIEAEIQRLIDQDPDLRNLAALLISIPGVGALLAAHMLLLFKSAPEPYNPKSLAAFIGICPYESSSGTSVRGPSTSRHYGPPALRKLLHLAAMSIATHQQQFRLYYLRKVKEGKPKQLVINNLANKLIKIMVAVARTRTKFIPNYCSVNPALLKMALTKS

SEQ ID NO: 249052 - protein, 360 aa, unidentified
MRSTSWDLAIMESRNGAVCGLDVSLKMTAICIVDRTGKIEREGMVASDPAAIAAFVRLHAPHVARIGLETGATSTWMWTELNKMGLPVICIDARHAKAALKMQINKSDRNDAVGIARIMQCGWYKEVRVKGLDSHAIKAVLVSRALLVKIKRDLENQIRGLLKNLGLVIGRAKMNMFVVRAAELIEDRPELAAAVEPLLKAREAVEKQIADLDRKVMRLARNDVQVRRFMTAPGIGPITALCYLATIDDPTRFKRSRSVGAYVGLTSRRYASGEVDWTGRISKCGDPMLRSYLYEAAGVLLTRVAKWSVLKAWGMRVAKRSGLRKAKVAVARKLAVILHRMWIDGTEFKWSSKEDATQPA

SEQ ID NO: 249053 - protein, 414 aa, unidentified
MDVVHPRCAGVDISKRDAKVCVRVPGSGRAKVKSTVTTWKAVTNQILALRDHLVAEQVTLVVMEATSDYWKPFYYLLEDGPFEVMLVNARHVKNLPGRKSDVSDAAWLAQLGAHGLVRGSFVPPEPIRQLRDLTRTRSTLVRARAMEIQRLEKLLEDAGIKLSSVASDITGVSGRAMLAALIDGQRDPEVLADLAKRRMRSKIPELTEALTGRFSEHHGFLAQLHLDLIDNHTQAIDELTGRIEVVVEPFRHVRDLLVTVPGISTLVADVIIAETGGDMSRFPTAGHLASWAGTCPGSNESAGKVKSTRTRPGNPYLKGALGIAALSASHGKDTYFAAKYRRIASRRGPVKAIVALEHAMLIAIWHMITNDVPYGDPGGDYFTRLNPDKAKHRAIHQLQQMGYSVTLEPLAVAG

SEQ ID NO: 249054 - protein, 318 aa, unidentified
MQTSGCFIGVDVGKFELQVAGHEGGIVAGVLPNNRSSIVGWLKRLPVGSVIAMEATGGYQELLARTAHDQGFEVYVLNPTHVHHYAISLGNRGKTDRLDAEVIAQYIAQRRTKLHRYQPISPELQQAKSLQALRSTVVRVGTSLRLSAQRHGCASSHQKKALASLNLWAEQLERELIATIKADSEWAKTYGLLTSICGIGPINGAALTTLFNRVHFASSDAAVAFCGLDPRPNESGRKTGRRRLSKQGDKAARTLLYNAASSAARSIYFKDYYAMLRARGLASTAALVVIARKLLRIAYGVWRTGQSFDPGKLRPVMG

SEQ ID NO: 249055 - protein, 378 aa, unidentified
MSKVLFVGLDVHAETIAVAVAEMGGDVRSLGVIPNRLESVRKLLHQLGPAQHLKACYEAGPTGYVLYWQLTQLGVACEVIAPSLVPTKAGDRVKTDRRDAEKLARCYRAGELTPVWVPDADHEALRDLVRAREAAKKDQLKARHRLGKFLLRQGQRRPDGIRVWTKKHREWIKSHVSFQQPALEATLADYLEEVDHVGTRIRKLDKAIDEAIQQAPSEIRAVVEALQALRGVAQTVAVSIVAEVGSLSRFPSPRELMGYSGLVPSEHSSGNRVQRGGITKTGNGHLRRVIGEAAWAYQHRPNVIGFLAQRQKNLAISEESKKIAWKAQQRLHKRYKALSARGKNKNQIVTAVGRELLGFIWAIGVGAEKQHKLTSAAA

SEQ ID NO: 249056 - protein, 272 aa, unidentified
MGEVSTIGLDIAKSVFQVHGVDVAGAVVIRKRISRAKVLEYFGELPPCLVGIEACPSAHHWGRELQKLGHVIRLIPPSYVKAYLKRSKNDANDAAAICEAVTRPSMRFVPIKTKEQQTALMLHRTRQLLVRQRTMLSNALRGHLAELGIVSAKGRSGTAELLRIIRDGEDSRVAPAVRGILDVLARQYGAIGTEIASIDKSIMALHRACEASRRLAEIPGIGPIGATALVAEIGDWKTFSSGRSLAAWIGLVPSLRGGGNSGIIEGRLCIVT

SEQ ID NO: 249057 - protein, 376 aa, unidentified
MSKDTLYVGLDTDKKSIAVALAEGLPGGEVRAWGKLANDARSVLRLVKRLQAGGRALEMCYEAGPCGYGLDRLLNGQPGVRCTVVAPSLTPRRPGDHVKTNRRDAIMLARLLRAGELTAVWVPDPAHEAMRDLVRARGTATGDLVRCRQRIGGFLLRQDIRYAGKPWTRKHRAWLGQLVATLPLAAHRLMLGEALQALDEATARRDRLTDHIAELVPGWSLAWLVEALQALRGFALINAATLAVEIGDPRRFATPRQLMAYLGLVPSEFSTGDTVRRFGLTKAGNGRTRKALIEAAWTYRRPARAPSDTARHAPAVVAIATKARHRLSQRYRRLIARGKRPVIVVAAIARELSGFAWAIAQVAGPTATTPQPPPKR

SEQ ID NO: 249058 - protein, 368 aa, unidentified
MNKRTTKVKAMAQAQALAACRTMAVDLAKHVFQVAGEDAGGRVVYEERFRSREAFWSFVQALAPGVEILLEPGPGAQAWARAFQAAGKPVRLLPAQRVAEHRSGAKNDRNDAHALLRAGRDRSIHAVPVKSVQALSMQALHRVRSGYVRRRTAVVNQARGLLLEQGLALPQGAVMMERRLPALLEDASVALPDLLRQLLAELLAEWTHLGDRIAQLTGHLEQVARQDECTRRLMTIRGFGPIIATALVAKQSQPERFANARQFAAYFGMVPDQHSSGQTVRLGKMSRRGDGYLRSLVIEGAHAVLRQLRPDSEQPDDRRLQRWLQRHDRKAAAIRLANRNLRIAWVLLQNQDTYHRQAACPQEAAMTH

SEQ ID NO: 249059 - protein, 338 aa, unidentified
MNIVFLGIDLAKNVFQLCGLNQAGKPVYTKRTGRKELLQTLANIPACLIGIEASTGAFYWQREFEKLGHKVKVISLQYVKPFVRGQKNDGNDAQAIAVALMQPTMQFVPPKSPEQQDIQALHRARQLIVNHRTATVCQIRGLLLDRGIPIGSAVSRARRAIPLILEDAENGLSSRMRRTIAELYDLFNDLGRRIHFFDKEIETVFRQSEACQRIAKVKGIGPETATAVVAAIGKGTEFKNGRHFAAWLGLVPRQHSSGDRQVLMNMTKKGDKHLRTLFIHGARAVVRVATNNNDGHMNQWVNQLKERRGFNKTTVAVANKNARIIWSMLRNDTGYQVV

SEQ ID NO: 249060 - protein, 428 aa, unidentified
MDYTQNAKIAQVTEKSLIIGVDIGSESHYARAFNWRGQEYGKKVFHFNDDVEGYKAFKGWVEAHKARTGAETVIVGFEPTGHYWFSFGGYVKQMGMMLVLVNPYHVKQIKELDDNSPKKTDFKDPKTIAKLVVDGRYSIPYIPEGVYAELRQAVSSRDRIIKEQNALTNRIKRWLKIYFPEYLKVYTKFSAESGLLLLEKAPLPAEIVELGVDGVTQIWREQKLRAVGKKRAETLVEAAKNSVGIDGGACAKLELQLLLSDFRTKQAQLEQVEAVIEAEVLKVPHVEKLLAIKGIGLITVAGFLSEVGEIGRFDSPKQIQKLAGLELKENSSGKHKGQTSISKRGRKKLRKILFQAVLPLIRSNAEFSDVYRYYTTRQKNPLKGKQAVIAVGCKLIRIFYTLLTKGVDYDASRMRLDIIRPADGEQVA

SEQ ID NO: 249061 - protein, 347 aa, unidentified
MKRIAVDLAKSVYQVAESIHVGRVDRRRRLDPEAFRRYVQEQPEPVEWVMEACGTAHYWGRVAQARGHRVVLLHPRYVRPYRRRNKTDRNDCDAILEAARCADIHPVPVKSHEQQQVQQLHNLREAWKKTRVQHINLLRGILRELGVTAPSSTQAFLRQACELIERPEVCALRSSLQMVLAEISLCEQAMRDSEEQLARWHADDDIVHKLDEVSGIGLLTASALKTAVGKPERFASGRHLSAWLGMTPNEYSSGERRRLGCISCKGNTYVRTLLIHGARAALLAAKRCQTRTPERLTQLQRWALQTAERIGHNKAAVALANKLVRICWAVWCHERRFSGDWQSARPA

SEQ ID NO: 249062 - protein, 418 aa, unidentified
MLYLITGVPGSGKTLKMISDLMTRQDLKNRPLYLDGIPEVDEKIIPNLPIPEGETMQTWHKWAPTGAILVIDECQRVFRPRPSGSKVPDFVAELETHRHKGIDIFLLDVSKLTIDCCLIADGQNHQKKFQNNKGGFEQLIKWLQSHKVSDKLHCVCEATGTYYEALAEYLYSRYTITVENPRKIKGYAIAELQRSKTDTQDAKLIAQYCQDRKHKLKAWQPPAKEQKQLQEIARYLDHLKQQRATEKAKQHEAPDYIKSHIQTTISNLTAQIQTVKKQLLQFYKDNPSYNNLRKRLKTITGIGEQATAVLLSTYKRHEFKNAKQFTAYLGLDPRKYQSGTSVNGKSRISKIGSSEIRKSLYMPAVVAYRCNAFPEFVGRLKNKGKHIKLILIAIMRKLAVIAFTLLQNGQDFQVERYK

SEQ ID NO: 249063 - protein, 345 aa, unidentified
MDHFAGLDVSVKETSVCIVDDTSTIVREVKVSSEPDALLAVLTNPAYQFKRIGLEAGPLSQWLFSALAEAGLPVICVETRHMRAALKAQINKTDRNDARGIAQMMRVGLYRPVHVKTLRSQKLRMLLTHRKLLQTKAIAIENDLRGTLRNFGLKVGVVGAVKFEARIKELVENLPDLAALIEPLLIVRRVLREQIGILHRRLLVVVRADDICRRLMTVPGVGPVVALTYRATVDVPTRFRNSKAVGAVFGLTPAKYQSGEIDRTGGISRCGDEMMRVMLYEAAHIMLVRSTKWSWLKAWALQIARRRGLKKAVVALARRLAVIMHRIWVDGTEFRWTREQAVAAA

SEQ ID NO: 249064 - protein, 381 aa, unidentified
MTTTATHPEYGNTAAGILFMAFELSDKTWKLGFTTGPGQKPRERNVAARNQERVLEEIASAKRRLGLPETAPVVSCYEAGRDGFWLHRFLLAHGITNHVVDSSAIEVSRRQRRAKSDGLDVRKLLSMLMRYHHGEQKVWQVVKVPSVEAEDQRHLHRDLETLKRERGSTTTRIKGLLSSQGLQVQSLSKLPEQLDAMRLWDGSPIPPGLRQRVLRVYAHYTFLSEQIAEVEAERRSLLQTSPDASIDKVRQLMMLKGIGINGSWLLVMEFFGWREFKNRREVGGLAGFTPTPYQSGESAREQGITKSGNRHVRWMTTELAWSWLRFQPDSALSIWFRERFGNGGKRLRRIGIVAVARKLLIALWRFLETGVLPEGAVLKEG

SEQ ID NO: 249065 - protein, 420 aa, unidentified
MKPSNAEFTAFVGLDWADAKHDICVQAAGCEAREFDRFPHRVADIEQWARALHQRFGGRIAVALELAKGPIVYALQKYDFLVLFPINPTTLAKYRQAFKPSRAKDDPTDAELALDLLLRHRERFQPLTPQSVPMRKLCLLVEQRRRLVGDKTRTVNRLCCTLKQYYPQVLEWFEQRDTVLCCDFISRWPTLMQVKRARETTLRAFFKAHNVRFARVINARLCAIKAARPLTQDAAVIEAHQLQAESLVEQLRVTLKAIDRFDEEIAATAAKLPDYALLFKPLPGAGPALAPRLLAGFGEDRQRYAGAAELQKYAGIAPVTERSGNKTWVHWRWQCPTFLRQTFIEWAGQTVNKSFWAGAYYRQQMAKGSSHQAAVRALAFKWVRILYRCWQTRTPYDESKYLEALRRRGSPLLKQLGETM

SEQ ID NO: 249066 - protein, 355 aa, unidentified
MTGCYTKRSGAMENIARVGIDLAKKVFHVTAVDDTGAMVERRKLRRAGLQSYLACLPRGCVVAMEACGSANHWGRLAAWHGHTVRLMSPQYVAPYIKSNKNDVNDADGIAEASSRPSMRFVGLKSVEQQHVQQLHRARQMAVRNRTAQSNQIHGFLLEYGIESPRRGALLPRLAEVLEDAENELPSEGRALLRELGDELRRLDERVRAFDARIEEVVRRMPACRRLMKIPGIGPMTATALVAAVGDASEFRNGRELAAWLGLVPRQRSTGGRPTLLGISKRGDRHLRTLLVHGARAVLYRASGRTDRRSRWVVATRERRGWNIAAVALANKNARTAWAVLARGTEFDAGHVGRAA

SEQ ID NO: 249067 - protein, 352 aa, unidentified
MLSVGLDLHKRYSQVEALEESGERRSGARLVNEFAEIEGFFRSLGEPCRVVLEAGWNWGSMYDWLEQVENVVEVQLAHPYGVRAIAAAQVKTDRIDARMLGQLLRVGLIPQAYIPGKETRQLREAVRQRLFLVRVRTMLKNRIHALLDRHHVVPPPVSDIFGKRGRDYLSRVELPGWAQNLMSQDLRLLEMLGQEVRQAEMLLARALKGDRRVELLLTIPGLGAILATVVVLEIDRIERFFRPAKLVSYAGLVPTTYSSGGKTSHGGLMKMSNKWLRWALVEAAWIAVRRDPYFRHQYGLRCRTKGAKTAIIAVARRLAEVIWYVLTEDRPYQVRQPASKRREYGLTPAALS

SEQ ID NO: 249068 - protein, 357 aa, unidentified
MSSQHQDQDQEVGVGIDTHADVHMVGVIDRVGREIAHQGFPTTEAGYQQLETWIASWGSVLRIGMEGTGTYGAELCRQLNAHGFCVVEVDRADRKTRRFQGKSDPIDAYAAARAAMSGRASAIPKARDGNVEMIRVLRVARNSAIKARVAAIVQLKATIVSAPAGLREGLAGIDKVALIDRCARFRVARTGDGHLDSTTSATKAALKTLARRVRSLDDEISGLDSDLGYLVEATAPTLVSLFGVGTDVAGQLLVTAGDNPERLKSSAAFAHLCGVAPVPASSGRTTRHRLNRGGDRHANAALYRITLCRLRHDDTTRAYRARRAAEQKSTQDIIRCLKRYIAREVYQAIRADFQISP

SEQ ID NO: 249069 - protein, 314 aa, unidentified
MTDISEQMRFVGIDVAKKHLDVHLLPDGKSWRVDYTPAGLARLLDQLEKMAPTLIAMEASGGYERACADCLAGAGLAVAVINPRLVRRFAGSLGKLAKTDQIDAAMIARYAAFAKPANHHTPDPAQAMLMALTMRRRQLVGMIVMEKQRTDPGHVHPAILPDIKRHLRMLEKEQLKLEARINALIASHPVWARVTAALQDVKGVGPQTATALITHLPEIGTLNRRQAAALAGLAPINRDSGTHRGRRFVQGGRQQLKTALYLAALSAARYHPTLKPFYLSLRNAGKAPKSALIAVARKLLVILNAVARETIMAA

SEQ ID NO: 249070 - protein, 371 aa, unidentified
MANCIMVGCDLHDKTLVLRYAVGRGRVERRTFAHDGPSRQVMIAWLTEQRRSRRAGRVLFAYEASSEGFGLYDELRAAGIECHVLAPTKIARSAKHAFGKNDGRDAVQLLELLRAHVLAGNGLPTVWVPDPQTRDDRELIRTRLDVADRRIVTKNQIQSLLKRNQVRRPAGTGKSWTNDYRSWLEGLACGRMTGLRPGSQAALSSLLRQLESFEAEIGRLDVQVAALSRTRRYAKAVSALTAIKGVAALSAMVFLTELGDVRRFTNRRQLAAYLGLVPTSNESGERDDCKGHITRQGPSRVRKVLCQSAWCLVRTDPKFEAAYAGIVRRNPKHRKIAVVAIMRRLAIVMWHRAREGGPPTGGRERPPGIAA

SEQ ID NO: 249071 - protein, 341 aa, unidentified
MKVSTLGIDLAKNVFQLHGVDHEGHTILRKKLTRAKFVQFVIQLEPCLIGMEACSSSHYFARLFTRYGHEVKLIPPQYVKPYVKTNKTDATDAEAICEAVTRPNMRFVQIKTEEQQAVLALHTERGILIRERIACANSLRATLAEFGITIAAGQNHLTRELPAILEDGENGLSPFVRTSIYRQSKHNRELEEQVKQVEEALASWYRTQEACQRMAKIPGVGMLTATYVVAAVGNARQFSTAKQFASWLGLTPKEHSSGGKQQLGGISKRGDGYFRYLLVHGARALTAWVNRNGAVEKNSWLQGLLERKHYNVAVVAMAAKTARIMWSMLSHNTEYQPRQLA

SEQ ID NO: 249072 - protein, 316 aa, unidentified
MSEDKKFVGIDVSKNQLDIAVRPEGLSFSVLNDDAGIQELISRLLPLSPTLVLFEATGGYENAAATALALAALPVKVINPRQARDFANALGKLAKTDKIDAMVLACFAQFVQPPPGPLPNAAQKELTHLVARRHQLMDMLVMEKNRIHQASLEVQPGIQQHIDWLTAEIDKLDRKLDDFIKKSPIWQEKVKLLQSVKGIGPVIALAILAYLPELGTLDRKKIAALVGVAPFNHDSGKFKGKRMIRGGRTRVRCLLYMASVVASRFNHVIGAFYQRLLQAGKPKKVALTACTRKLLTIINAMARNNSCWNPDAYQNA

SEQ ID NO: 249073 - protein, 406 aa, unidentified
MIFVGVDWAEAHHDVHVEDQDGRRLGGGRLAEGVAGIARFHELVGGHAGEAAEVVIGIETDRGLFVAALVAAGYQVFAVNPMSTSRYRERHSTSGAKSDPGDAKVLADMVRTDRHNHRPVAADSDTVEAVKVLARAHQSMIWSRGRLTNGLRSSLREFYPAALAAFDDLASSDALEVLKVAPTPTLGAGLSRAKIAAALRRGGRQRRLEERAVEIQTALRSPQLQAAPATATAMGATVTASVAVIATMNAQIAQLAGELTAGFESHPDAEVIRSLPGLGTILGARVLGEFGDAPNRYVTTKSRKNYAGTSPITRASGTKKVVLARYARNDRLADAIYLWAFAALSSPGARAHYDAHRAAGNTHHAALRALGNRLVGILHGCLEHHTLYDEHLAWSHRTDQKISQAA

SEQ ID NO: 249074 - protein, 316 aa, unidentified
MAETSERRHVGIDVSKKWLDVAMIPSGETWRTENTEEQILVLVRRLKETEVVRIVVEATGGFESRLVAELYAAGLPIARVNPARVREFARSIGQLAKTDKLDSKVLARFAEAVQPPLTRLPTEAEQALSALLARRKQLLEMLTAETNRLETAPVGVRPSLLEHVKWLKDQCKKLEREIEQFIQNYPEFKQKDEILQSTPGVGKVTASMLMANLPELGECDGKQIAALVGIAPFNHDSGYKKGKRSIQGGRPDIRQVLYMAALSATRHNPVIKVFYQRLLAAGKKKKVALVACMHKLLTILNSMLAHNSCWKPVLAA

SEQ ID NO: 249075 - protein, 364 aa, unidentified
MNDTYYIGLDVHKKSISYCVKTARGEIVQEGWVVARREELRAWAATQAQPWRGAMEATMFSAWIYDTLKPYAQQLDMAHPARMKAISAGKKKSDRLDARTIADLLRCNLLPACYVLSPEMRDLRRLLRYRQLVVGESVRMQNKMAGLLMETGTPFVKSKLHGKKYFNQLIQTLEEVPESVKDLLQMSRGAMEMFESTQKRLVQRLLLEPALEARVERLCTIPGVGPITALTWALEIADPQRFSSIGDAVSYCGLTAAFRTSGGKEQRGPISKQRNAWLQTALIEAAKLAPRWNPQLAAVHQHELTRGHRNRATLEVARKLVAYLMAVDKSGQPFQMRSSPQKLECKSTGKKERKKMPEPALAPA

SEQ ID NO: 249076 - protein, 332 aa, unidentified
MEIFYFFGVDVLKKKLNFCVMFEGKVVHEEETSNHQGAIMSLLHHLEEDYGIASGQMLVCAEHTGQYTFPLACACKAVECRLWLENAAEIKYSSGVQRGKSDKVDAKRIAIYASRFQDKVRYYERPTEDIERLKQLESERTLYVTDFAKYKGQMKDQKEYMPKSLYERKMKRLQALMDDLEEAIQSITDEMDEVIASCPVLFRQRELLMSIDGVGRVVATNMIIATEAFTRFDDPRKFNCYAGVAPFSYSSGSSQHSKARVSHRADKVMKRLLHLAAVAVTHRIGGELKKYYERKVAEGKNKMSVINALRAKIVARMFAVIKRNERYKPILS

SEQ ID NO: 249077 - protein, 311 aa, unidentified
MTKHVGIDLGKFAMDLYVLEDKKHIHLDHTAENIENCAAMLAKLDIELVAVEATGGYETNLVVALQTAGIPVAVVNPRRVRDFARAAGILAKTDKVDANVLARFAAVMQPPARELIDANSRILQALVARRKQLVDMQTMEKNRKDHIADKIIARSITNVIGTIEKEIDKVEKQIRQHIDQQPELKEKVRLLKTVPGIGDTTAAMLVVEVPEIGRINKKEIAALTGVAPMNRDSGTLRGKRMTGGGRRTVRARLFMPVLAAIRHNPVIRKYYQHLRSQGKAKMTAVVAAMRKLLVILNTMVRNKQPWNCKIA

SEQ ID NO: 249078 - protein, 343 aa, unidentified
MGEASIIGIDLAKRSFQVHGANGDGSVAYRKKLSRGKLLSFLASQPGCTVAMEACASAHYWGREIAALGHEVRLVPPIYVKPFVKRCKNDAADAEAITEAAQRPTMHFVAVKTEAQQAQGMLFRTRDLLVRQRTQTINALRGHLAEYGVVAPQGRAWIVQLAGVLEDKACGLPEAVVELGWLLLERIDELDEKIDGLDRKIRTSAGEHEETARLMTIPGIGPITALALEAFAPPMESFRRGRDFSAWLGLVPRQHTTGGKPRLGRISKMGQRDLRRLLITGAMAVEEGGRGGPRQPDGAEGLGAGHKEGDLPGSRCRLSGRRKERNESKGAARERWQQDARTG

SEQ ID NO: 249079 - protein, 359 aa, unidentified
MTSMPTLVPPRRVIVGVDTHKDVHAAAVLDERGALLGTALFAADRAGCRDLIDWSTDYGTPLRFGIEGTGSYGRGLAAAVRRGGHDVVEVARPNRADRHRRGKCDVFDAENAARAVLAGQARAIPKADEGIVEMIRHLKIAKDAAVKARSAAMQSIKAMLITAPAELREALEPLPDMALLRRCAALRPGELTSVTATAKHSLRAIAQRWQHLHAEITSHQHQLKILVDQLAPQLSTAVGIGPDTASALLIALGQNAGRLHSEAAFAKLCGACPIPASSGKTTRHRLNRGGHRQANAALHRIVIVRMKYHDPTRAYVTRRTTEGKTKPEIMRRLKRAITREIWARTQHLRQTTPQPLDAL

SEQ ID NO: 249080 - protein, 337 aa, unidentified
MKYCGIDLHSNNSMVVITDETDHVLYSKRHANDLSQILSALAIHRAELSGVVVESTFNWYWLVDGLRDAGYRVHLANTTAIKQYDGLKHRGDESDARQLAHLLRLGLLPQGHIMPKAARAVRDLARKRMQLVQQRTTQILSIESSLSRHTGGRMSSNNIKCLQETDLNAMQLGDMQTLGLKANVAVMQALQVQIDSLEKVLAKHCRTEPGYRLLKTVDGIGEVLATVILLETGSIERFADVGNYASYCRCVGSAHVSNGKKKGEGNTKNGNRYLAWAFVEAANFAVRYCEAARRFYQKKKAKRNSTVAIKAVAHKLARACYHMLKSKTEFSVERCFA

SEQ ID NO: 249081 - protein, 344 aa, unidentified
MKGYHYVGLDVHKKVIVYCVKTADGEIINEGSISATRKDLNLFAQSLPRPWAGAMEATLFTGWIYDFLLPHADELKVGHSYMLRAICASKKKNDRIDARKLADALRCDWFPECHMAPAQVRELRQALRYRNLLVRETVKMKNKTAGLLMEAGAEYNKEKLHGKKYFKELLERLDYVPGSVKEILELSHSSMEFFDSNQKRLVRRLRENPSLSERVERLMSIPGVGEITALTWALEIADPQRFASVKKAVSYCGLCSGQNESAGKTHRGPLSKQRNKHLQTILVEAAKIAPLWNAQLAAVSQKAKDRGANRNEATIAVARKLVAYLMYVDKSGERFEMKNYLNCA

SEQ ID NO: 249082 - protein, 393 aa, unidentified
MFYLGIDVGKFTHSLCLIDESGHHDIWQINNDKSGFESLRKKINSLNLLIESRLLVGMEATGHYFLNIYDFLLHLGLSTEQIALLNPLQVKSFRNTNLRGAKSDNVDAEQIAVLLQFGNFDRCNVSTDHIMNLRELTRLKSDLTANLGNLKRKMIAVVDRIFPEFAKIFANKFGLTVVTLLTDYQTPEEFAALSLEELTALIKGLSKRGVNRDKIQRLHEAARNSIGISFGREGFKIELSILLTQLKSIEEQIDFLEGKIAEMVNELNSPLFTIPGIGKTTGAAILAEIGDINHFASAVKLIAFAGLDPKLKSSGTYQGRTPISKRGSKYLRSALWYSAMVLCRVDEKFHKQYQDRKKLGKSHRYAVTAAANKLTKIVYHVLKNNCIYDPNLA

SEQ ID NO: 249083 - protein, 321 aa, unidentified
MTKYSKIYGVDISKDVFDVVDDHGSHHQFSNSPAGFKAFLKLLDCGELVVMESTGYYHYRLAQYLFKQGVTVSVVNPLQVKRFIQMRLSKIKTDKSDAKAICAYALVNAVPLYRALSEGQGVCLQLFRLLDNYLKQRTAIKNKLHGEEALGKPSKVVYQSLKRSLQHLNKEVGLLEASLLDLVRQDHQQQLTHLKSIPGFGTKTALFLIVITDGFSKFETAGQLCSYVGITPTIRVSGSSVRGKSRISKMGNKKLRNLLFLCAFSACKHNKGCKELYERIIAKGKSKKLALIAVANKLLKQAFAIAKSGLIYDENYKSKLA

SEQ ID NO: 249084 - protein, 339 aa, unidentified
MKFYSALDLHSNNSYLGIIDEAGERVFKQKLPNEPKKILQALQPYRGQTEGVVVESTFNWYWLVDLLMKEGYPVHLANPGAIQKYKGLKYANDQHDAFWLAEMLRLDILPEGYIYPKEERPTRDLLRKRLHLVKLRTSLMVSLQNILSRNNGFKLKKNDVRSLLEDRVSPYLPDQEDVALAGKVSKETIDYMSQQIERIEKVALEKVKLKSSYKKLLSVYGIGKVLAMTIMMETGPISRFPKAGNYVSYCRKVSSKWISNDKVKGKGNKKSGNKYLAWAYSEAAEIARRCYQDARGFYDRKRQKTNIMVAHNALAHKLAKASYFVMRDDVFFTPEKLFG

SEQ ID NO: 249085 - protein, 347 aa, unidentified
MDYFAGLDVSLETINVCIVNAAGDVLLEKKIAAEPAAIVHLLKTFGSPFKRIGLEAGPTSSWLYSELRAAGYGAICLECRHVKAGLSAMRNKTDRNDARGIAQLVRLGWFRQVHVKSEEAQRTRMLLVNRQQLLTKALDIENSVRGSLKVFGLRIGVVARRGFEARVLELVADDPIVLAVTKPMLRVRRALLEEFERLDRLCQQLARRDPVCRRLMTVPGVGVVVALTYRTGVDAPERFSKSRDVGAHFGLTPKRYSSGQTDYDGRISRCGDEMVRTALYQAANVLLHHGRWSSLRSWAMRIAKRGSVKGAKVALARRLAVVMHRMWTDGTDFRWSDTSRMTAPTAA

SEQ ID NO: 249086 - protein, 349 aa, unidentified
MLVVGIDAHKRTHTAVAVDEVGKKVAIKTVASTSAGNLELVRWAQGLGEHRFAVEDCRHISRRLERDLLAAGESLTRVPPKLMAKMRRSAREHGKSDPIDAMSVARAAQREEDLPTARLDGDERKVRLLTDHREDLVNERTRFENRLHWHLHELDPSIEIAAGSLGRYVVLDRLGAICATHSGTVAEIAAELIERIRALTIRINELEREIASLVRTMAPALLELRGCGPLSAAKIIGETAGIDRFGDRGRFARFNGSAPIPVWSSNSARFRLNRGGNRQVNAALHRIAVTQLRAGPGKDYVERRIAMGNTKTEAIRALRRRLSDEVYRRLMTDYAARESGQSTCIPMAA

SEQ ID NO: 249087 - protein, 420 aa, unidentified
MSQTEFVAYVAIDWADQKHDWQLATSDTAPREHGQVLNKPEAVDLWVTGLLARFPEGLIAVGLEQSRGALAYQLGKYERLVLFPVHPTTTVSLRQAFYPSGSKDDPVDAALVMDLLLHHRHRLRRLDPDTVETRQLRLFVELRRRLVDERTRNSNRLTAWLKLYFPQALDWIDDIDSSLGCDFLERWPTLEQLQRAQSQTVERFFREHNSRSQARIEERVEAIRKALPAVHDTALLRAGAASTTSLIAVLKALNTSIASLDQDIAAQLSHHPELDLFAGLAGAGPVLLPRLIVAFGTQRDRFQSAAELAAYSGIAPVTKKSGKSQSVHFRLACPMFLRQTFHEFAAHSIPGSPWAKEYYQQQRGRGAGHNAAVRSLAFKWIRVLYRCWKDRTPYDEKRYLEALKRRKTSKSASAAGCKDD

SEQ ID NO: 249088 - protein, 344 aa, unidentified
MSEVIIIGLDIAKYVFHVHGADERGRVIFSKRISRGKLLDFFAAQPNCTVALEACGGAHHWARQLTQLGHEVRLIPPAYVKPFVKRQKNDAIDAEAICEAAQRPSMRFVAVKSEQQQAAGLVFRTRDLLVRQRTQLINAIRGHLTEYGWVAPKGPSHVAMLTDLLEEEEMASSLPEAARAMFRLMLDLLAGLNGKIMDLDKEIARRAREDEVSRRLMTVPGIGPISATAIAALAPPAETFAKGRDFAAWLGLTPLQRSTGGKRKLGATSKMGERTLRRLLIIGSSAVVLQASKRGAPRGSWLEQMLARKPRMLVTVALANKMARIIWALLVKQENYRAPVAAKA

SEQ ID NO: 249089 - protein, 400 aa, unidentified
MISVGIDVSKEKSTVCILKPYGEVVSRPFEVCHVEKELSELTSMLLRLNDDIRVVMEATGIYHLPVLSYLKEKGLFVAVINPFEMKEYRCQGLRRVKTDKQDAITISNYGIDHWYRLKNYEAEDSVYAELKLLGRQYRHYMRMRVESVLELTHLLDYTMPGIKTLLKGWNETNGKDKLGDFAEEYWHYDNISKKSKEQFIESCLKWAKEKGYHQSQDKAVKIYALAKEGIPTVSSDTPSTKMLVQEAVRVLREVDNTLMTILTQMQALAKSLPEYPVVRAMGGVGNVLAPKLIAEIGDVRRFHSGKALIAHAGIDAPPYQSGQFIGTERKISKRGSSSLRKIGYEVMRCLKTHKEPEDAAVYKFILKKEKEGKSKRAAKIAGLNKFLRIYYARVMEVYQN

SEQ ID NO: 249090 - protein, 393 aa, unidentified
MVCVGIDVAKDKHDCFIISSEGEILADVFTIPNNAEGFDTLLQAIRRSTRPEDKIKVGLEATGHYSYNILGFLLDKGLPTYVINPLHTNLYRKSLSLRKTKTDRVDARTIAAMLMSDVDLKSYTDTVYHNEELKSLTRYRFDKVRERAKLKQSVSRLVTILFQELEKLVPTLHMASVYALLGELPGAKQIAGAHMTHLKAVLNNASKGRYGRDMAETIRDAARHSIGSVMPAKSLELQHTIRLIRELDSEIEDIEAAIETMMEEIASPITTIPGMGVRMDAMILAEIGDFSRFDSPDKILAYAGMSPSTYQSGQMSLTGTYSHMEKRGSRYLRYALYNATKYVCLWDPSFSAYLAKKRAEGKHYNVAVSHATKKLVRLIFAMEKSGQPYSSAA

SEQ ID NO: 249091 - protein, 351 aa, unidentified
MMLIGVDYHPSFQTIAFFVEETGEYDERELNHSGGDAERFYRDLQQRGIRVRVGMEATGFSRWFERLLAELGFELWIGDPAEIKAKRVKKQKYDREDARLLLRLMRENNFPQIWVPSPENRDLRQLLWHRHRLVQTRTRIKNQLQALAMNEGKRWKSKLWSKAGRAEFEKLALGPWASRRRQELLELLDRLNPSIEELTAAVEQEANKRPEALRLMTHPGVGPITALAYVLIIGTPARFARGKQIGTYVGMIPEEDSSAGKQRLGHISKQGNSLLRYLLVESAQSAARINPHWRSRYMHLVMRRHKSIAKVAMGRRMAIRLYWMWRNGCEYSPSFEFGSYVGQLEKRHGGK

SEQ ID NO: 249092 - protein, 419 aa, unidentified
MSFKILKFNCCGLDVHKTWIYACIGITDSNNRTEYKQARFSSFTKGLNELCDWLAKYNCTDVCMESTGKYWIPVFNILEQHNLWVTLSHPKYTKPMKGNKTDRKDAKWICDLYMCGMVKPSFIPPADIRELRDLVRYRYKLTCMITGEKNRAQNCLTVSNLKLDDVFSDVFGKSSRSITEHILQHPGEKFDIAPFVDSRCKTPITEIQAAVDGAISKEQVVKLRQCLDHIDELNKHISEVEQEILRLSDKYEAALNLIRTVPGFNKNPLTAIQVLSEIGGDMSVFPTAKHLVSWAGCCPRNDQSNQKIKSTRISRAGSYFKPVLVQVANALIKSKKHPEFTTRYKRIKARRGHKKAIIAICRMILTAIWHILSDLKPYTPDGFLESRPVGKEKILTTSQALNLLKQRGYLIKDDALPAS

SEQ ID NO: 249093 - protein, 320 aa, unidentified
MNTQAFSIGVDVSLAELVIAHFGDTTSLIKLANNTEQIKRWLKRLPPACTIGMEATGIHHRLLADLAFAAGHTVFVLNPREVALYLKSLRSRGKTDVLDARGIARYTHNETDKCHAYVPLTAQQQTITTLIQRRHQVVKSRTSLRMSFADTSQCTEALGKLMRAFDTLIADIDSQLKALLAADEGLNTRCKNLRSIQGIGPLISAALAMRMSRVRYANSDALVAAVGLDPRPRESGQYTGTRHLSKRGNPEERRLLYLAAVSACRHPTWKAIQTVLLHKGLPSTAVYCIIARKILRIAFAVWNSGVPYDPNLVGKACAPT

SEQ ID NO: 249094 - protein, 422 aa, unidentified
MKESGVRIVGFDCAEEDHYTVLLNEEGEIESRGKMVNRRDEVESGLAKLVLAIPPNTELVIVVESKRSHGRLVTDVAKGMGLRVWQMNVVALNHFRDVEGQPRKDDERDAYLLARMVFLRTKGGREVIETTNEERALSRLTRSHARLTADRTQQVLRLRALVLELAPEMLHRSWSGPKVKSKAMERLLERWPGFEGMEKAQLRSIEKILHRCRYGARAAEAARLLRDMARRIGIDGEERSAITLEMGFLVGQIQMCGVALKKLHAEISDRVEKHPIGIKLMEMPGIGVIISGVLISELLPVARTTTEAKSATYSGTTPLSRKTGKTPDNSRLARGINKQILNALYQSGVTAIRSSAVDKAYHQKKLRDYSGHPKPHVAAFIALARQRHKVIFKLMTTDARYDKETLIARHLERLEETRKAAA

SEQ ID NO: 249095 - protein, 374 aa, unidentified
MDDHSVAYVALDTSKLRNAVAIAEAGRDGEIRYLGEIDNAPAATAKLARRLAKKHATLTFAYEAGPTGYGLYRQIKNLGHDCIVVAPSLIPHKPGDRVKTNRRDALSLARQLRAGDLTAVWVPDPHHEAVRDLTRARGAAVRDQRAKRQQVSALLLRLGLHYPGKTTWGKAHMAWLAGQKLAHLEQRIALEEMLHAVRQAGDRIARLEQAIHAAVPDWSLAPSATALMALRGIEFIAATTLLAEIGDLTRFRTPRELMAWLGMVPSEHSTGERTRRGPITKSGNRRARSVLVECAWSYRHPPRVSRDKLARLEAAPPAVRDIAWKAQSRLTARYRALRRAGKLDVVAITAVARELAAFIWAVGLAVGSGRTPEV

SEQ ID NO: 249096 - protein, 348 aa, unidentified
MFLIGCDFHPSWQQVCWLNRTTGETEENKLVHAPGEVERFYRRFPVPARIGMESTGNCQWFVEMVTALGHQLWIGDAAKIRASDSRQQKHDKRDARLLLRLLMEERFPRIWTPSSEQRDLRQLLVHRYKLVLLRMQAKNGLQHLALNQGLQKKRRLWSRAGQKLLRELPLRPWASRRREDLTSVVKLLDQQIQSLDLAVIGAAEKDANARLLMTQPGVGPITSLAFVLTMGDVSRFRRGKQVASYLGLIPREYSSVGHQRLGSISKQGNRFLRMLLVEAAQGAVRCDPEFRNKYLHRCHSKPKGVAKVAAARKLAIRLYWMLRTNTGYPEIVRIESSSRVPLVVRYGG

SEQ ID NO: 249097 - protein, 351 aa, unidentified
MKICAGVDVSASSLEVAWRATDGPLRRRTFANDSSGHQALIKELRRERLPVFVALEATGIYGLDLALALDRASGVEVMVANPRTIADFGKALLQRSKTDRLDAETILLFVERMPFVPWHAPSTTTLELRAITRRIAALGKMVRAEKTRQHSAEASRAVGAILRKSARNTVAMLEKEMVTLRNAARKVIDSDAQLKRRMELLTSIKGIGAISAVQILAELMLLPADMTDRQWVAHAGLDPRLVQSGTSVRLTARISKAGNHYLRGALYMPALTASRYEPHVVAFRAHLLARGKRPKQIHVAVMRKLLHAIHAMFRTDSMFDGTKFYRIAAGAAGTSGIASFAISEVSAAHLA

SEQ ID NO: 249098 - protein, 418 aa, unidentified
MKMIKTKKQQIVNGKALIVTVDISKDKHFGYWRCPDGTDVKPFSFPNNGAGFFEFWERISRAKEIHRLDEIVFGYESTGPYAEALVHFMKARGVRLVQVNPMHTKRVKELQGNSPNKTDQKDPKIIADIIELGRALTVVIPEGPAAELRRLTQARERSTERHTALVNQLQSLLAIIFPEFLQVLNNVKTATAQCLLKHCPTPRSLVAFGLDNLTRTMRKVSRGKLKEDRARALYEAAEGSIGVVEGQASILLETQAILAAMEASEKFTEGLEKEMSHHLKQIPYSNCLLSIKGIGEVTAAGLIGEVGDFRKYSTLGELMKLAGLDLFEVSSGKYQGTRRISKRGRPLMRKLLYFAALRAVRSDGLMAHQYQRYLDRGMLKTKAVIAIARKLLRIIFAIVRDNSVFDYSRTSFQFKEAA

SEQ ID NO: 249099 - protein, 334 aa, unidentified
MPYIGIDLHKHYTHFVVLNQKGDVVKRARIPSEREAVIKFFSELEWPKVAALEATRNWYWFYDLVEKMGVSLNLVAPHKMRVIAESTVKTDKVDARVIAELLRVGYLPTCYVPSPEVRQLRELLRQRAFVVKMRTGVKNRIHGLLDKLGVKHPFANLFTGRGLKFLKSLELGGVYQLELEQCLALLEFLTELEKRSSKLIRQLAGESEDCRLLMTIPGIGCHNALLIMAEIGDIHRFSNGEKYASYCGLVPTVHISERTVRYGHLRPQGNPWLRWAYVEAAHIAIRKSVRLANLYTRVARKKGAQKAIGAVARELAVISFYVLKHRTEFKDRLW

SEQ ID NO: 249100 - protein, 421 aa, unidentified
MDVIVERCAGLDVHKAGLDVHKKTVMTCVRKPKDGKRVSVRREFSTFTHGPHQLRDWLASEGVTQVAMEATGIYWRPVWYVLEEMAGVELLLANAQHVKNLPGRKTDAKDAEWLAQLLECGLLRGSFIPTPVMQRLRDLTRYRNKLTQDRAREVQRIQKVLEDAGIKLDSVISDVLGKSSRQMLEALIAGERDPEVLAELSKARMRAKIPDLRLALVGRFGEHHALMARMPLDHLDHPDEMIDRLDQEVAREMAPFAEAAGRVVSVPGLGQHTTQAILAEIGIDMSRFPAAAHLASWAGMCPGNHESAGKSRSGRPRKGNAALRAVLCEAAWAASHTKDTYLAAQYQRFLRRFGKKGQKKAIFALAHTILVIVWNILSDGGTYEELGYDYFERRIDTEEKKRRLIRQLESLGVHVTVEPAA

SEQ ID NO: 249101 - protein, 363 aa, unidentified
MEYIAFDAHKHYTLASVVRPNGNLVREERIEHDRGSLREFLERCERGSPVAVETIGNWYWIVDEIEAAGCVAKLVHARKAKLMMGEINKTDRLDARGLNRLQRNGTLPTVWIPPGELRDQRDLPRTRMVLVRQRTQLKNRIHATLAKYALHDLEVSDFFGVRGRALLRQRFDLLPPHTAYASQQLLEQVEELDRRVREFEQRIQAVFKPTPAIQLLLTLPGVGLTLAAVIALEVGDVARFASAEKLAAYAGATPRVHASGGKTRFGPSRPDVNRYLKWAFVEAANAICIGRGRAPHCHVSRLYERIARRKGHAKAIGAVARHLAEATFWILRKHEPYREPKASAVSPTGDKRGWPLSSRKLDR

SEQ ID NO: 249102 - protein, 420 aa, unidentified
MHHPKMRFTYVGVDSHKDTHTAVFLDCFFDKLGEIVFDNLPSEFPAFLDDAEKLKQDGTELLFGLEDTGEFGRTLVVFLTDTGQQVKHVNSYLVARERKNQNITQKTDSIDAECAARVLLSKFGELPAADPSNQYWILRTLVVRRDQTVLSNKRMKTSLHNLLTQHYPNYRKFFVGTFGKTALAFFKTYPSPKNLEKVTVEELADFFQEASNGGIFGPGLNSIDRAKLIFDTLQNTAVPFQEIRDEAVRSTIRQIEFNLAEIERIEFSMATYLETFDCTLTTMTGIDVVSACQIMSCIGDVKRFPTPAKLARYSGIAPVTHASGKKDYQFANQRGNRELNSLFYWLAVRVSTPCGPNHKILNQFFYDYYHRKMSEGKTKRQALKCVQRRLVNIVWTMLTNGEEYVNPPVMDMPEPEAKVG

SEQ ID NO: 249103 - protein, 340 aa, unidentified
MQVSTVGLDIAKHVFQVHGVDEEGRPVLRQKVSRGQLLKLFAGLEPCLIGIEACATAHHWARELGALGHEVRLMPPAYVRAYVKRNKNDAADAEAICEAVTRPTMRFVPIKSAEAQSVLMLHRARHLLVRQRTAQASALRAHLAEYGIVAARGISRLRDLLPVLETGASLIPELARQTLLLIAQLIEALTIQIRKIDNELLHWHRTNPVSQRLESIPGVGVITATALAATVLDAKAFRSGRQFAAWLGLVPRQNSSGGKDRLGGISKMGDRYLRHLLVVGATAVVRYTRRKTTAVSLWANRLLQRKPARLVTVAVANKMARIIWAVMARNEIYRRAPVTA

SEQ ID NO: 249104 - protein, 319 aa, unidentified
MPRTIIGVDVSQDYLDVHVRPAGLRRRFANTAAGIADLVAWVRPHTAERILFESTGPYQKAAVGALLAEGLPAVVVNARQVRDFAKAMNYLAKTDTIDAAVIAHFGEVAHTTVRPLESQELRDLRELYDRRGQLVRMLAVEKNQRHSAAVAQASPKVLKSIDKHIDYLEGHIRDLEGRMDQIVEGSATFRARDEILQTITGIGPQVSRTLLAYLPELGRCSRQKITALVGLAPFNDDSGAHTGGRHIRGGRRKVRVGLYQAAVAAIRHCPRMKAFYAGLKARGKASRLALIAVARKLLVLANALIRDMVPYRAPANSVC

SEQ ID NO: 249105 - protein, 317 aa, unidentified
MTPSFVGIDVSKDHLDIHLRPAGEAFRLPNDPAGVAALAARLRGAAPALVVLEAGGGLERPAVAALVEAGLPVVVVNPRQARDFARALGRLAKTDALDAAVLAEFAERVRPPVRPLPDAQARELADLFARRRQLVEMRAAEQNRLHAAAGAALRRGIREHIAWLDRRLRGLDGELAALIEASPVWRVKDQLLRGVPGVGPVVSRALLAELPELGTLSRQQAAALAGLAPRARDSGRFRGRRCIGGGRAGVRSALYLAALSAARYNPLIRPLYRRLRAAGKAAKLALVACARKLLTILNALLRDGRPFDPARCGTERG

SEQ ID NO: 249106 - protein, 354 aa, unidentified
MENIKISFKNIPIYIGIDVHLKGWKVCILTEEFEHIVANFSPSAKVLSNYLRRKFPEGDYHSVYEAGYSGYWIHEELEKCGIKNLIVNPLDIPTSDKEKRIKTDKIDCRKLARCLRNGTLETIYIRDKEQQQDRALVRIRYKMIKKQTICKNQIKSLLAFYGIYIEEEKIQTYWSKKYIESVEYKTKQKGSATIAFDSLLRELKDLRSNILEITRQIRLLSRTERYQEKVRLLQSIPGISMLSAITILTEIGDIRNFHTLDKLNGYIGLIPREHSSGEREYKGGMLHRGNKILKCIMVESSWVAVKKDPSLMLSYKNFIQKHKKTRAIIKIARKLVNRIRYVLVNQKEYQPSVA

SEQ ID NO: 249107 - protein, 344 aa, unidentified
MSKVIMIGLDLAKNVFQVHGVDASGAVVLRRQLRRGQVEKFFSELAPAIVGLEACGGAHHWARMLERLGHEARLMPASYVKPYVKRNKNDGRDAEGVCEAMGRPTMRFVAVKSVEQQAVLVIHSTRALLIRQRTMAANALRAGLNEFGIVAAQGIKGLRTLIEQLRNPSEGVIPEVGRATLLLLARQWEALDADIRALERQIERAARADEAACRLMEVPSVGPITASAAVAKVPNARVFKTARDFVAWVGLTPRGRGTGGKHRSGGISKQGDRTLRSLLINGASSHLRQQIARGVKDPWLRDMLARRPYKVVMVALAAKNARIIWALLAKGERYRERAPVPAAA

SEQ ID NO: 249108 - protein, 371 aa, unidentified
MKSIIYIGMDVHKKTYSLCALLKETGEIIGETKIPADVSLIIKFIENAKKSVDSDDVQIKTGYEAGCLGYSLYWQLAEKGIECDILTPSTMHRSAKNKVVKNDRRDAKNIATNLANGTYKSVYVPTDEDVEIKEYIRMMHDFKIELKKVKQHINAFLLRFGHHYPGKSKWIPAHIKWLKELELSDMYREILDEYLSQLEILTEKIERFKYRLEELSQKETYNEKIGQLRCIKGIDTTAAMTMHAETSDFDRFPTANAFASYCGLTPGEDSSGESYHRLSITKQGNSMIRTTLIEAAQVLVRGTIGKKGKKVKSKQKDQDVKVIDYADKAVIRLQKKYHRMIFRGVKRNIAITAVARELACFVWGIETGHIS

SEQ ID NO: 249109 - protein, 530 aa, unidentified
MQYANLAYFCYIRVPCNSYSPLFTGALVPRKKTGSGQTKPSLVRREHSPRQDCYLLSTGLYGNSYQEDKGMEKTSTAVFEEIRRNVAGIDLAWRADHYVCGPRREDGEHEIAAFGTTTPELHQMLQWLKERRVESVAMESTSVYWIPVTDLLEANGIEVVLVDAREVRMVPGRKSDVQDCQWLQRLHSCGLLHGAFRPPEAVAAVRSILREKETLQAMRTQAIQQMQKSLDQMNIRVHHAVSDIDGKTGTAIIKAIVEGERNPVVLAKLRDKRCKQSEKEIADHLTGTWRDEHLFNLGQAFKTMQFLDERIAEYDVKASQMFSSLAASAGTPDNPPPPPSPDKKLTAKERADAAGKINVQKFMGFDMTVIPGIGYGTATIVASELGTKFDRFPDERHFASYIGLAPSLGKSAGKNVRQKKRCKNTSRVGRALRMAASTLCRSQTELGAFFRTVARRTDKKTAVKATARRIAHMIYRGVVYGKEYIDCGAEAYEARLRERTLRTVRKLIKSFKIDGSEIATVLATTALATT

SEQ ID NO: 249110 - protein, 431 aa, unidentified
MNDVTRFAHFSDFRNAIRGSRTHLIVGIDIAKDKHHAFFGTAYGQTLWRRLIFTNDLIGYSRLIEQVQALSSQHQLEQVVFGVEPTSNYHKPLAHWLIKQDYLVVLVGGKAVKDNRELLTGRWDKNDTKDSANVADLISQGKCLFYEHPDDNMVSVRNLLVLRKQLKKEEHRLRMRIRNGLLAKYFPEMDRHWGSSLAENLAIVRWYLDPRKIANTEFDQFVNHVTTTNRGLRQMRRLKAIYQAAGESVGLPVDASAGYEAQMLVERLKLVKEQVSQTMQRIESVCQNISGYQLLQTIPGFGPYIGAVVLATLANPYRFSSRKQVIRLAGLDLNASRSGKKSQDSVPVISKKGDADLRYALYQAALIASYHNGSFRRLYHRMLEGRHGERGIKTKARVKLAAKMLVVAWTMLKNNEPFDARHLLGESVEGR

SEQ ID NO: 249111 - protein, 368 aa, unidentified
MNEPITYVGIDAHARELQLAMLIGAAEQPMHWTSPTDPRALTRLRHKLERDAPGLIECCYEAGPTGYGLQRQLTGGRLRCRVIAPSLIPRRPGDRIKTNRRDARKLAQLLRADLLTEVRPPTTAEEAVRDLCRARDDARDNVMRARQRLGKFLLRRGLVYHGKNWTKRHGEWLCQLRWAHAAEHHVITDYRLAIAQADTRLTEIDRLVGDIASAPPYTNAVAALRCFRGIDTLTALTLLAELHDFRRFPHPRALMSFLGLVPSEDSTGERRRPGAITKMGNSHVRRLLVQVAWHYQHEPRLTAIRRRRQVGQAPAIIAIADKAEQRLCRRFRRLAARLKPKPLIVTAIARELVGFLWAVLQLPETQMP

SEQ ID NO: 249112 - protein, 367 aa, unidentified
MKKVSTAATKQGRNISRQTLTIGLDLGDRNSWYCVLDEVGQIQLEQRVRTTAKALQEVFGAMPRCRIALEIGTHSPWISRLLSELGHEVIVANARKVRLIGESRQKDDRLDAQTLARLARLDPKLLYPVKHRSAQAQADLMMIRARAGLVRARTGLVNTARGLAKSYGERLRGCNVRNMDPEKAESLSPELQRALEPLLVTIEELSKCIVEYNDRIEALAETSYPQVELLKQIKGVGTLIALTFLLTLEDPHRFGKSRDVGGYLGLQPGRRNSGQKEPQLHISKEGDPYLRTLLVQGAQHILGPFGIDCDLRRWGLKLAERGGRNGKKRAIVATARKLAVLLHHLWVSGEVYEPLHSSSATTVAAAA

SEQ ID NO: 249113 - protein, 338 aa, unidentified
MSQVSMIGLDIAKHVFHVHGADERGVAVFSRRLSRAKVLEFFASQPRCVVALEACGGAHHWARQLIALGHEVRLIAPAYVKPFVKRSKNDALDAEAICEAAQRPTMRFVAVKSEEQQAAALVFRTRDLLVRQRTQTINAIRSHMAEYGWVAPKGPSHVAALAERLEELPEAAGAMIRVMLDALDQLDRQIAGLDREIARRAREDEISRRLMTIPGIGPLTATALTALAPPPEAFARGRDFAAWLGLVPLQNSTGGKQRLGRISKAGERTLRRLLILGSSAVVLHASRRGAPSGSWLEGMLARKPRMLVVVALANKMARIVWAVLMKQEDYRAPVAAAA

SEQ ID NO: 249114 - protein, 343 aa, unidentified
MQIHSIGIDLGKTTFHLVALGAAGKVLVKKKFTQRQLLTYSANLQTSLIGLEACSGAHFLGRALRQQGHDVRLIPAQFVKPFVKSNKNDFVDAEAIAEAVERKNMRFVPIKTDDQLDLQAVHRVRDRLIARRVAVINQLRAFLLERGMTFAKTPAKLRIAMPDILENAELNLSPKMRDLIALLWVEWKTVEQQIEVLSDELDRIASSDADCIRIRQIPGIGPIVATAIVAAIGNGAAFRKGREFAAWLGLVPKQYSTGGKARLLGISKRGNSYLRKILVHGARAAVLRIKRDRAPIGAWMNALESRAPRNVLIVAMANKLARIAWAVLSSGEEYRAEHSAAAA

SEQ ID NO: 249115 - protein, 346 aa, unidentified
MDVYIGLDVSLSSTAICVLGERGEILIEEQVASAPDALVSFMHELPHGIAAIGLEAGPLSQWLHKGLADADFEAVLMETRQVKAALKAMPIKTDRRDAEGIARLLQMGWFRPVHCKTVSSQETRALLTSRKSVKDALINMELSLRGLLRNFGLRVGQVSKGRYEARVRELIAGNAMLEAAAEPILRARAALRRELAGLERLARDLAGEDAVCRLLMTMPGVGHVIALTFRSAIDDPGRFRRSKDVGPWVGLTPGRNQSGERDIVGRITKCGDAGLRSALYQAATVMLSRGAPNWLKAWALRLAVLRGKKRATVALARRIGVVLHRMWRDGTEFRFTRAEAMALQTA

SEQ ID NO: 249116 - protein, 339 aa, unidentified
MKNIKYYIGLDVHKAKTTYAVKDKIGNIIQEGITTTSYSELFKSLETYLKSSIIGLESSTSYYTLYKGFLKNGYNIKVANTIQLRQLITKNDKLDARRLSEMLRLGTFPTSYIPDEKIQHLRSLLQVRHSLIEEKTRCNNRIQALLDRNGIVMPDQEAFGKKWRQKLLQYIGSGEVSLELRYEYDHFIYLEEKSEHLGLEISGYTQKHWKKEYNLIQSITGFGPILSCYVIAHILPISRFPSNRKLRRYAGVVPTTHESGDKKSKGHIPKTSSRKNLRWALIQAANSAGRTNTKLGYYYRKKKRQKKNAGIAHVAVASSMIDIIYKVLTTKKPYNPKNC

SEQ ID NO: 249117 - protein, 417 aa, unidentified
MKKNSKSPTKKEPKAKRAKAQRPVQRETKEVLSELVEKLRGKLELKPTPASPVKAGQRPERSPNLDRLTVGVDLGDQWSRYCILGLQGETLSEGPLQTRQAELAEFFQAFPPARVVIEVGTHSAWVQEVIAAEGHEVLVANPRLMEGSKRRKRKNDRIDAHKLARLGRVDPQSLHPITHRSREVRQDLVLLRAREALVEARTELINATRGLVKSLGTRLPQCSSRSFGHKVGDAIPAEAREALLPLVQLADGMSACIKDYDRRIEELASEKYGHTKLLRQVKGVGPITSLAYVLTLEKPERFPKSRDVGPYVGLVPKQEDSGESQPQLGISKAGDTMLRKLLVGSAHYILGPFGPDTDLRRYGLRLCERGGKNAKKRAAVAVARKLAVLLHRLWVSGEVYEPLGYASSAAMVQKAAA

SEQ ID NO: 249118 - protein, 390 aa, unidentified
MPRKRILVKSIDTSISYQVIGIDLAKHLVSACLITGAGEIFGIDRLTYDDLLKSAERMSPTLFCMEPCPEVHYLAEKLQGYGHHTKVIDGAAVKEYIKTHFGGQKTDLNDAQAIAFLSLDTNLPEITPKNTSNSVLSSIQAVREQFRKEYIQSFVSLKGICQRWGLPISKGVMNKNKVEELVSESKKIPQEVKDWLLELLQSCRELQKRLNKISKYLKEYADNDEICQKIMSVPGIGPITATRLKATIGDIQRFEKPKSIVAYYGLVPKSKATGHNEKKGGITRRGDRVARSLLIEGAGVVLNLAAKGFLRSKPLNKWIEKKRKLKMPWGKLCCALAAKMLRIVRAILIQGTSFNAKIAGVARCSLPKESRNNVMGRECLKFCVCPKFIT

SEQ ID NO: 249119 - protein, 343 aa, unidentified
MKIIRVGVDLAKNVFHIHGVDRKGNPVWRRRLIREKWLKVLLAQIEPGCEIGMEACTGAHHWARLLQARGFTVKLIAPQFVKPYVKSNKNDAKDAEAICEAMSRPGMRYVGVKTVEQQDIQAMHRIRSELIGQRTAKANQIRGLVAEYGLVAPQQLGRLRPAIPVWLEDAENGLTMQFRELLQGLWNDLLTLDERVGELDREISRIAQSDPVATRLQQLRGVGPMVATALVAAVGNARQYGKGRQMAASLGLTPRQHSTGGKDRLFGISKRGDAYLRSILIHGARAVVSQAKHKDDRLSRWVTAIAQRRHPNVAAVALANKTVRMAWVMIRKEKDYDPGFVVT

SEQ ID NO: 249120 - protein, 343 aa, unidentified
MKEIITIGLDIAKSVFQVHGVAEGGAVVVRKQLRRSQVLTFFEKLPPCLVGIEACGTAHHWSRELQGLGHEVRLMPAGYVKAYVKRNKNDAADAEAICEAVTRPTMRFVGTKSKEQQAVLMLHKSRQLFVRQRTMVSNAIRGHLAEFGITAPKGREGLRALLAIICDQDDELIPDVARLALSALAEQYQAVDIEAAKLERCLQIWHRSNETSRRLAEIPGVGPLVATALTASITDPGVFSSGRGMAAWIGLVPKETSTGGKHQLGPISKQGNRYLRWLLVTGAMAVIRYAKKTGFKKRPWLARLVEHRPIKLAAVALANKIARIAWVIMARGERYQEPAALAA

SEQ ID NO: 249121 - protein, 360 aa, unidentified
MTIVAHAHPFVIGVDTHARTHTLAVLVAATGEPVATEEFPTTAAGMNRAVAWAARHTDGEMATLWVIEGIATYGAHLASAVKRAGFEVVEAAAMNARAHRGTGKSDAFDARRIAASVLSLEPEQLRRPRSDDGIRAALRVLVTARAHMTTERTAAINALTALLRIAALGIDARTPLTASQIGEVARWRTRAEDIVTSTARAEAARMAKRVVDLNEQLAANQGQMIDFLHASKAAILLDKTGIGPVTAAVVYTAWSHAGRVRSEAAFAALAGVNPIPASSGNTIRHRLNRGGDRRLNRALHMAAITRMTHDPETRAYVERRRAEGRTTKEIRRCLKRYLARQLYRTLESLHTEASAYPQPA

SEQ ID NO: 249122 - protein, 323 aa, unidentified
MQGKVSFQEDAMPVVYAGVDVSKEWLDVHLHPLGESRRFSNDKTGIRQLKRLLARHQPKSIVMEATGKFHRPAHRSLWLDGFAVAVVDPLRARMFARACGYLAKTDRLDARFLALLAESLRPPADTPPSPHIEALQELVNARSAAKCDITALQNRSKTATTALLRGELNRLVRRLEQHVERLDKEIERRVGEDPQLCRKAEILTSIPGIGRVTALALMAGMDELGSCSGKQAAMLAGLAPIANDSGARTGRRSIRAGRPAPRRALYMAALSACRYNPALARFADTLKAAGKPAKVILVAVMRKLLVLANCLLSHDRLWTPNPP

SEQ ID NO: 249123 - protein, 360 aa, unidentified
MTTSIPSKTTVSYDSVKLGIDAHAKYYWVSRQLDGATPQPVQKMTYDELLLFVVKQQKLTPNLVTCYEAGAFGFHLHRTFEQLGIKNYVVQPQDWDERGKGVKNDRLDAAALCQRLDRYQRGNTKAFSTVRVPSEDQERERAISRQRQQLMRERQRISAMGRSLLATHNVHVTGKWWKGKTWTVVQKLAPAWVVERLEVFIIILKPLEEQELKLMHQLQEAAQEQKIPRGVGPLTFEILRREVGDWGRFNNRRQVSSYTGLCPREHSSGGKRRSGSVSKSGNPRVRAMLVEMVWRMMRWQPEYKPLRKWAHVLYSPTPNAAAKKKAVVAIARQLAVDLWRIFTGQCKAETYGLIYLPEAA

SEQ ID NO: 249124 - protein, 312 aa, unidentified
MDATAIVGIDVSKDRLDVHVRPGGDAFFVRRDGDGIAALIERLSPLDPAAIAVEATGGFETVVAAGLVGAGLPVVVVNPAQVRAFANALGKRAKADPIDAAVIAHFVEATKPAIRPLPDEATQLLADLVSRRRQIVAMIGAERQRQKRAPARIARSIVRLVKALEKELASLDGDIDDAVRGSPAWRDKEDLLASVPGIGRTIARTLIAELPELGSLGRRQIAALVGLAPWTRQSGQWRGKSLIGGGRAAVRAALFMGAMVAARHNPTLKAFRDKLVAAGKPKLVAIIATARKLVTILNAVIRDQQPWREQDA

SEQ ID NO: 249125 - protein, 405 aa, unidentified
MDIQPIFRCAVGIDIHLALICVCIIVAEPGLEPVVHRREFGGFQRDRRAMADWIASFTPDMVVMESTGIYWKSPYAALEHVGIHAQVVNARQVKKVPGRKTDTSDAEWLAMLARAGLLRGSFIPPERLRTLRQVSRHHQKITAMRAMEKNRLVKVLSDAGIRISAVVSDPHGVAASAIIDCLLEGGTPEQALTLAGRLQAPREVLLAALQGELSADHRFVAQTIRHHLRALEAQLADLEHYLVDALQPHEAALQLLMTIPGIDQLAAAKLLVEIGADMAAFGNAGRLCKWAGVCPGNDESAGKRRRGDTAPGNRYVRALLCQIAWAAVRTTSQFKSRFQNLVSRRGTKRAIVAIGHKVLKTVFVLLSRQVPYHDSTVDYEALVVKRNAPRWIKQLRKFGYLPKMA

SEQ ID NO: 249126 - protein, 416 aa, unidentified
MKITCGIDWAENHHDVALVDDTGKLVAKRRISDDAQGYSRLLELFADAGDGTDEPIPVAVETARGLLIACLRATGRKVYSINPMAVARYRERHTVARAKSDHADAVALANILRTDARAHRPLPADSELVQAIAVLARAQQDAVWMRGQLSNQLRSHLKQYFPAALAAFQVRGVGLDSREARAVLAVAPDPAAAAKLSAARLGSVLRKAGRQRNIEAWAGRLRTIFTGDYLRQLPVVEQAMGCQARALVLQLDAACRAADDLAEAAAAAFAEHPDAAILTSFPGIGPVTGARVLGEIGDDRARFSDARGLKSYAGSAPITIASGKSRVVRHRKVKNQRLAAAGYVWIFGALPTPGIKEHYDRRRAAGDRHAAAMRNLFNRLLGCLHHCLHHCLQTGQTFDLDKAFPPPTGQHEPVAA

SEQ ID NO: 249127 - protein, 359 aa, unidentified
MRALYAGSDLHGNNNYLGIIDERGQRIFKKSLPNDRQLILDVLRPYKEEMAGIVVESTYNWYWLVDTLMDEGYRVHLANPSAIQQYTGLKHGDDKHDAFWLAEMLRLGILPEGYIYPKEERPVRDLLRKRSHLMRLRTSLVISLENMVIRNRGVRVSANEVKRLKEDRLTCLFEENEELWMAGRVSKESIDFLTRQIQKIETRVEKKVKLKEGYGDLLTLPGVGKILALTVMLETGPISRFSTVGDYASYCRKVPSQWISNGKRKGSGNTKSGNKYLAWAYAEASDFARRFYPEPRAYYQRKMQKTNAVVAHSALAHKLARAAYYVMRDHVPFRPEKLFGETMGWNGEPRMGLVKTHEV

SEQ ID NO: 249128 - protein, 386 aa, unidentified
MLSLGIDCGQLQHRYCLLDETGRVLAEGKLVETHTDLAAMRTRIAAIGQPDITVMEASGVYWHNLHAELAGWGWQPVGVDPQRASQFARLLHPRHKTDKADARSLAHMGFSAPQESFRAQQPALVARCLVAAVEERSVLTNQLHALLVVANPAVIRCSWKLAAPRTLEMLAKYPTTEQLRRARTLADLRYAAHNRVGAKAATALQQASQEALCAALTPAHGEQIGFLVAQIRTWSARIDALEDLLATLLPEASRLLTRRGIGRRTALLLCALIPFAALASAKAVAAFVGLHPHIFQSGQGCWSRLSKRGDAVARTVLYRAALPAIQFDPDCAAFYKRLTTRTEPGQHPLTKKQACCAVAHKIARIAFAIMNNRTPHPSLKSAAAAA

SEQ ID NO: 249129 - protein, 338 aa, unidentified
MENLNYFIGIDVSKEHLDFYVSKDMRKGSSAKVGNSKKEISAYIKTLIAKKEIVMESSVFCMENTGIYNNQLLSVLLDYKANIWVEIPVHLKRSLGLVRGKNDKIDAERIALYAYKNRDNVKLWQPERAIIVRLKNMLRTRERLMESIESLECPLREASRFDDKETVKLMRRSCKASVNALRNDIKKIDITIKEIIDSDEQIKSLFRIVSSVENVGPIIATAVIIYSNEFKKINDPKKFACYSGVAPFEHSSGKSIRGKTRVSFMANKYMKRLLHLAAIGAISRPGELRDYFDRKMAEGKNKMLVINAIRNKIILRIFTCVNQNKLFEKNIKNNLVLA

SEQ ID NO: 249130 - protein, 413 aa, unidentified
MHVTCGIDWAEDHHDVAVVDGDARLLGKLRIDDDAAGFQDLLRLLAEHGDRPDDPIPIAIETSRGLLVACLRASGRRVYAINPMAVARYRDRHVVSGKKSDHQDAVVLANILRTDAELHRPLPQDSDLARAIAVLARAQQDAVWDRTRAHNRLRSHLREYYPAILEAFADKRERLLAREARAILAIAPTPAQATRLTRSRLRAAVTRAGRQRRIEAETDRLLEVLHRPRLRQPALVEKAMGHQTRALLAQLEAACQACDELAHETEELFLQHPDAEIITSFPGLAMLTGARILAEIGDDRTRFHTARDLKAYAGSAPVTRESGKSRRVSHRRIKNSRLAAVGRHWSFAALTASLGAHSHYNRRREASDRYHAALRNLFNRLIGQLHHCLTTRQKFDEAIAFGRPAPPSLATAA

SEQ ID NO: 249131 - protein, 340 aa, unidentified
MQITTIGLDIAKNVFQLHGIDEAGQPVLRRKVRRDQLLAVLGVLEPCLIGIEACATAHYWARQLQGLGHEVKLMPPAYVKAYVKRNKNDAADAEAICEAVRRPTMRFVAIKSADAQSVLMLHRTRHLLVRQRTAQVSALRAHLAEYGIVAPKGRAHVRELVDTLKIGEAAIPELARHTLLLIVGMMDGLSQQIRQIEIELIAWHRANAACRRLETIPGIGFITATALVATVGDANIFRSGRQFAAWLGLVPKQHSSGGKERMGGISKMGDRYLRHLLVVGATAVVRYTRRKQTSVSIWANQLLDRKPARLVTVAVANKMARIAWAVMTRHENYRAGPAMA

SEQ ID NO: 249132 - protein, 308 aa, unidentified
MNTLDFLGIDIAKRTYNVALLRNDKLRHKKFENNPEGFKQLDNWLVKQGVIEIHVCLEATGSYSEGLAMHLYKAGHKVSLVNPARIKAFGQSELRRNKTDRADATLIARFCSMHRPAAWVPPPAEIRELQALVRHLDDLIGTRTQLANRFTDGPKVQSVLDSLQSLIEAVDAEIELTRKKIREHIDRHPGLKEDCELLETIPGIGAQTATTLLAEIEHLRHYKHARQAAAYAGLSPRLRESGTSGKRSRLSKTGNSRVRKALFMPAISAKQHNPVLRQFSERLARRGKPKMAIIGAVMRKLLHLALVS

SEQ ID NO: 249133 - protein, 315 aa, unidentified
MAMRVTLEKPIIGVDVAKNELVIYHNQYDRLEAIPNTKVAITQWLKALASSCAIAIEATNVYHVLFADAAHEAGCDVYMVDGYQLSHYRKGVNIRAKTDAQDARLLARYLKNELDELRPWIPASPLYRQRLSLFRRRAALVQARTGLVQSWTNEPFLRTAFANQVNSMKRFEALVEKKIRDVLQEAGLMRQVNRCMKVEGIGFLTAARLVTSFQRGEFSGANAFIAFLGLDLRVSKSGQSDGPRRLTKRGDPEARRLLHNAAMSGSRTPAWKPFYEEQRKRGFSTTQALVMLSRKLARVVFALLKNQSEYQTKVA

SEQ ID NO: 249134 - protein, 335 aa, unidentified
MFPVGIDVSKETLDLCMLYDGMKGRVKTRNIRNDRSAVTHILRWLRLQHCGPEDVHVVMEATGVYHERLATSLHDAGFCVSLANPHRSREFARGMGIMTKTDKVDAYMLACYALLKKPPRWEPPAADIRFLSALLRRRDVLLADAVREENRLEKYQSTDTPADVVSSCIRMAQLLREEVRSIERQVKAHIQASPDLKRDYALLTSIKSVGPQLGMHMLVVLRSHNFESADQAAAFLGVVPVKKRSGTSVRGRPRMSKIGPPQLRAKLYMSALCGKIHNKRMRTIYEEMCLRGKPKMVAIGALMRKLVHWCYGVLRTKTAFSDATVDPLQRKGVRV

SEQ ID NO: 249135 - protein, 387 aa, unidentified
MKRNDLSRSLVAFDQASTLVAVAELSLGSWLVAGLVPNLSRQPLKKLRSDPEALLGLLLRWRDQATKTGGRIKRIVLAFEAGRDGFWLARWLRARGIETYVIHASSIPVSREHRRAKTDRLDAGLLMRAVLGWLRGEPKHCSMAAIPTIAEEDARRPNRERETLVREQTRAINRIKSTLIRFGIRTFKAKLRQASKRLEELRGPEGEPLPPNTMAEVRRDLARLQVIRGQIREIERARLERLKRAPRQGTHPMMRMLARILGIGIETADMLVHEVLTRKLRDQRGVARYGGLTGSPDESGSKRREKGLARAGNARVRRGMIQLAWRWLMFQNKSVLTKWYRARTAGGKPGLRKAMIVALARKLLIALWRYVTIGEVPAGAVLRPATD

SEQ ID NO: 249136 - protein, 378 aa, unidentified
MKNDIRFVGLDVHAETIAVTTVEPDGEVIRHGIIPNRPEVVRRLVKRLGPAERLRVCYEAGPTGYVLYWQLTALGVHCDVVAPTLVPVMAGDRVKTDRRDADKLAVLYRGGYLTPVWVPDRAHEALRDLVRAREAAKSDQLRARHRLQKFLLRQGRRPPKGIKPWTQKHLDWVRREVHFEEPAQEVVLLDHLAEVDHARERIAHLERAIDTAVAAAPEPMRAVIAALQALRGVAKVSAATIVSEVGVLSRFPRPRQLMGYSGGVPREDSSGERTRRGAITKTGNAHLRRIVGEAAWSYRHRPAIGPTLRKRQEGLSPEVKEIAWKAQHRLYGRYHRLLGRGKTKQQVVTAVARELLGFIWAIGVHVEQHHGSVARNAA

SEQ ID NO: 249137 - protein, 475 aa, unidentified
MNIKGTKKKNQVVTVNIFEQQELLKKAEVIREKLTASTWRELETNGKFGKNEKLSFVRDDMLILGCDVGSDTHYVRAIDTRGRELSKSAFPFSNTLEGFQSLMDWATKIAASNDKKQIILGLEPTGHYWFCLATWLIGNGISVVQVNPYAVKQTKEVEDNSQLKDDRKDPKLIANLVKDGNFGMPYLPEKLYADIRRLSMLRDQINEDRIRDLNRLHREMKIYFPEYKDAFGKIDGAFCLEVLKVAPFPDELVMLGVEGIRQIWHEAKLRGRGYVNATSIFENAKKSIGIQDGAESGKLAVKWFVHRMLESNEQLADIESRLHQMCMEIPYAENILEISGIGENTLSGILAEMGDISRFDDVKEIQKLSGLGLVACSSGKHKGETKISHRGRKRLRYWLFQAAKSAVAHADEFKELHAYYTTRKDNPLKKKQSLIVIACKILRVIFAILTKGTTYDPKKMLEDIVRPNEKSVQTA

SEQ ID NO: 249138 - protein, 529 aa, unidentified
MNNTTNKRNNQILIVSNSAGAVPDTAVDSSTPLRITRAERRPQDKEAKKIAEREQKSRGQKPGKKRELSKEEQDCLKAIEEELRREMKGLTWRSLEVGRRFDQDSKINMITDDTLVLGVDVASEKHDIRAFDFRKRELSSKAYEFANSREGFEKAQEWILDLMAKNEKKRAIMGIEPTGHYWFNLYIWMKDHGITVVMVNPFAVNRIKEVDDNQQLKNDLKDPKTIAGLVIDGRYSVPYLPEGDYAELRGFAQLRDRAIESLVRAKNRLHRWTKIYFTAYDEIFNNIDAENGLLFLERGLFPEDLRELGVDGINNVFRESKMRGSGRKRAEKIYEAACRSLGITDGKKAARVEVIDLVQEIRRAQKLLTTAETEMERYCKAVSNTEGILEIRGITMNTLAPVLADLGDISRFDSDDEIIKLSGLAPVVCESGKYKGMGKISKRGRKRLRAYGYKMAISVVIHAPEFKEFHEYYTTREHNPLKPMQSLMVIACKLLRIIRHLLLTGEKYDPEKMRSQIKRMKEVTVSKAA

SEQ ID NO: 249139 - protein, 324 aa, unidentified
MAAVVIGVDPAKRSNTIEVIDGEENVLLAARFDNSREDYRRMLALVKRWPTRKWAVEGATGVGLGLAQRLVSDGERVVDVPSKLSTRVRAIDTGHGRKNDPSDAHAVAVVGLRTAGLREVSVDDEAVVMRLLSQRRRDLVRSRTQAVNRLHQVLTQLIPAGARKKLTADKAKTLLATVRPRDAAGKARRQLAADLIDDVVVLDRKIDAVDKRITEAVKASTTTLTDIVGVGPVTAAAILGEVGDVARFTTSDQFASYTGTAPLEVSSGDVVRHRLSRAGNRRLNNALHVVALSNKRYDARGKAYYQRKLAAGKGKKGSLRCLIG

SEQ ID NO: 249140 - protein, 344 aa, unidentified
MAYYTGIDVSLRSVSICVVDDKGEVCLEAKVAAEIDAIVDRLHRFSSDVRSVGFEAGTLTQYLTYGLQAAGFEVICLEARQVSVTLAAMRNKTDRNDARGLAQILRTGWYSRVHVKSLHSHQVRALLASRKAILKKCVDLENELRGLLKVFGIRLPSRVGHGSFDAELRETVSTDEMLACALVPLLDARTVLYKTYLKLDNAVKGLVRVDPICRRLMSIPGVGPVTALTFKAAVDDPSRFKSSRTVAAHFGLTPRRFQSGEVDNSGHISRAGDADVRSALYVAAHSLLTRNAQWSTLKAWGVRLAKTRGHRRAVIAVARKLAVILHRMWIDGSEFRWGAVATPA

SEQ ID NO: 249141 - protein, 343 aa, unidentified
MSISMIGLDTSKSVFQIHGVNETGKAELKRKVRRSELIAFFEKQERCTVVMEACGAAHYWARILTGLGHTVKLLAPEAVKPFVKKGKKNDAADAAAICEAASRPDVKFVPVKTVAQQGILALHTARALLVKQQTMLANAIRGLASEFGHVVPKGLHNLEPLVALVDADEDMPAQARQAIGELHKRFGELTTGIQSCEAEIVKHARSDATARRLATIPGIGPITASLIAATVVDISLFKSARQFAAWLGLVPRQHATAGKTRLGRITKAGNKEIRKLLVLGATSMLGHAEGWHSALGAWLRNILERRPARLATVALANKMARIAWAVMTRNEVYRPAGGVAAKA

SEQ ID NO: 249142 - protein, 343 aa, unidentified
MDRSIVTLSTTKNNSPTYYDHYIAVDWSQVNMAIATSTRKSEQIHAVDLRSNLRDMKDFLGNLKGSKILTIEECPAAQWLYVELTEYVDKVLICDPYRNRLLSDGPKNDPIDAKKLCLLLKNGLLREVYHTHNSLFELRKYVSGYEDIIKAGVRLKNQRSAIFRSEGKNFRKESVKSDINNFIVGIIDKNIETYEQDRKQYQSLFTQIKKHNSKLKNLCMIPGIDTISAVKILAEVVEAHRFPEKGNYLAYCGLVKYKRISGQKMYGFRKPRYSRILKSVYKTAAVVAITMSDNPIKEYYESLLEKGIEVHNARNAVARHIAIITYGMLKSGEKYKPYKKKNK

SEQ ID NO: 249143 - protein, 358 aa, unidentified
MRIVGCDLHARQQTIAMLDSDTGELEEKTLEHEGDTVREFYSALPGPILVGIEATGSMQWFLELMEELGIECRVGHPQKIRKAETRKQKHDRRDARLLLTLLAENRFPTIWMPSTEQRDLRTLLRHRHQWVRLRSRVQHTLQSIALNHGLRRGRSLWSQAGQHALRALPLAPHASERRKALLTLYPRLQESIEELDRQVSEQTQQRPDARRLMTHPGVGPITALATEVFLGDPLRFSDGKAVASYIGMIPSEHSSGDRQRLGAMSKQGNALLRYLWCEAAMHAVERDPELKRFYRRKLVQKGLGKARVAAARKLGIRLWIMMRDQIDYQEFCRRGKAGQESGSVHAGMPDRDSGPAAQ

SEQ ID NO: 249144 - protein, 381 aa, unidentified
MTTAATHKEQSTTTEATLFVAFELSEKTWKLGFTTGHGQQPRERTVTARQQERVLDEIAQAKRRMGLPETALVVSCYEAGREGFWLHRFLQAQGITNHVVDSSSIEVNRRRRRAKSDGLDVRKLLSMLMRYAQGERHVWQVVKVPAVEAEDQRHLHRDLETLKQERASTTTRIQGLLSTQGLRVTSMTRLPEQLDALRLWDGSPMPPGLRRRVLRVYAHYTFLSEQIAAVEVERRTLLQTSAEASLDKIRQLMQLKGIGINGAWLLVMEFFGWRAFKNRREVGGLAGFTPTPYQSGESAREQGITKSGNRHVRWMTTELAWSWLRFQPDSALSVWFRARFGGGGKRLRRIGIVAVARKLLIALWRFLETGVLPEGAVLKEA

SEQ ID NO: 249145 - protein, 327 aa, unidentified
MMFYVGIDVSKQTLDCLWLRDPEALKVKTKVFSNSAEGHLSLGEWLRKTVSTEESSIHVVMEATGVYHEALAYALEAQGFLVSLVNPAFIRDFAKGLGSRHKTDKKDSLILARYGALVQPDRWVPEPEEIRALKALLARLSALEKDLQRELNRREKAEISQSSAVVLDSITVMVDQLRQEVARVRQQIDDHIDRHPDLKSDRELLSSIPAIAQVMSREMLGVLRGRDFNNAGQVAAFMGLVPKLQESGQWRGRTTLTKNGNSRLRAKLYLAAVVATKHNPDVRAQYQRLLKAGKTKMQAIGAAMRKLVQICYGVLKHQSEYQPQCAI

SEQ ID NO: 249146 - protein, 440 aa, unidentified
MQTLPVLDGKACGIDVGSEQLHVSIAGDTPKIFGTTTGQLLALRDWLKEQSVKSVAMEATGVYWLCAYEVLETAGLKVLVVNGKHVKNLPGRKTDLKDCQWLATLHAHGLLRSGFVPPEHIRRLQDYLRLRADHVTLAASHIQHLQKALERMNVKLHDVISSVVGVSGLRVIRAILAGQRDAGELLKLCDGQIQKKKAEAVKESLRGTWKAEHLFALKQGLEAWEFYQQKISECDLEIERVLEELAGRETRPQSKGKPGGPNTPQIENLHGLLMRLCGDKDVTVLPGLADHTLLSLIGEVGTDLSRWKSEKHFTAWCGLPPGSRQSGKRRGVTSRQRNRAGRLFCVMARSVGRTVDKALGGFYRRLKARRGGLVANQALARKLAALFWRLMVHGQDYVEQGLKKYESRVEETQKSWLRKLAKKHGLVLISPPSAPAEVHG

SEQ ID NO: 249147 - protein, 433 aa, unidentified
MTFAGLDLHKKEVEAVVLDDDGRILHRSRFAATRAELEAFAKTRLSPDSTTVAVEATTNTWPVAAILRPLVHKVVVSNPLRTKAIAGAKIKTDKVDALALAQLVRTGYLPEVWIPDDETRLMRQRSTERAMLSADRTRIKNRIHSVLHQRLIEAPAGDLFCGKNLAWLKALPLESLDAFGRDSLDRHLRQLDRVDQELAALTAQIAVHAHQTPAVKLLMTLPGVDFTVAETILAALGDLSRFETPDKAASYLGLVPSTHQSGNRCYHGPITKQGARHARWLLVQAAQHAATHPGPIGAFFRRIAKKKNRNVAVVAVAHKLVVLAWYMLKNNEPYRYAQPLTLQAKLSRLRILATGKKRKGGLVKGQPRTEQYGKGRTKAVPGLDHLYSAEGLPPLSTPAKPGEQAMLERKGLAVFAAAVRVPKRVARGVKPKA

SEQ ID NO: 249148 - protein, 355 aa, unidentified
MTDQSQDVFGGVDTHTDTHHAAVVDHLGRHLADAQFPTTNPGYRALLNWLRSHGTVCAVGVEGTGSYGTQLARVLGAAGLTVFDINRPDRRIRHQQGKSDPIDAYAAAQAVASGRATIIPKTHVGAAEALRLLHTARTSAVKARTQAINQIRSHMVTAPDTLRAQLRGKSSSDLIAACARLRPAADLTDPAAAAKFTLRRLARHYQDLDHEIDDYEAELSTLATQAAPDLMAVYGVGPETAARLLAAVGDNPERLHSEAAFAHLCGAAPIPASSGRRDRHRLNRGGNRSANAALYRIAVVRMQHDRRTRDYVARRTAQGLQKKDIIRCLKRYIAREVYRVLTCTNITEPYLQSAA

SEQ ID NO: 249149 - protein, 385 aa, unidentified
MGKLIERCAGIDIGKRFLVCCVMTGAAHEEPRSETRRFDTTVPGLKRLRNWLNEERVTDVVMESTGSYWIPVFNLLEGHVTVVLANPEEVKNRKGHKTDRKDAGHLADLLRHNHVKSSYIPAEPVRQLRDLTRRRVQLTQDATRERNRVQKLLEQVNVKIGSVLTDVFGVSGLHMLLALLDGRAAPEEIAGLARGSAKRKTPQLIEAIEGNRMSDHVRFLIRGCLRHLACLEEEVEELDTEILRRMQLSTFQKAFTLLQTIPGVGQLSAATILAETGPDLDSFPTIEQMASWAGLCPGNRESAGIQKGPQTTHGNPYLCTALVQCAWAATRKRDSVFRSRFQRLAPRRGEKRAIIAVAHHMLIIALLHAETRCAISWRRTRTVRA

SEQ ID NO: 249150 - protein, 327 aa, unidentified
MQIVGVDVSKLTLDVHCYGHPKSADPVSNDPSGFKSLDKWMKHKVSKCKDDVLVVMEYTGIYTYNLERFLQHKGWKYVKRPALDIKRSCGMRRGKTDRMDAIMISEYGWMRQATLKPMVPLTDNQVALQQLMAHRDKLVADRASYQSRLKELKGQMGSKMNESIEESSIYLMEVITVQIKEIEKEIKQTIASNEAVQTNFELISTVRGIGFATAVHLLITTENFTRFENHRKFACYCGIAPFDHKSGTSIRGKTRVSHLANKKIKSLLTMAALTAIKYDRDHKAKYEQKVQEGKPKMSAINIIRIKIIERVFTVIRRQTKYELRAVG

SEQ ID NO: 249151 - protein, 400 aa, unidentified
MDKDRIVAGLDVHKDTIYLCVMDNTEAVIFAKVYGTLTPDLELMCSEMVSHGVTEAAMESTSTYWVPVWNALCESMSLKLVNPYFIKQLPGRKSDVKDAQWIAECLLKNLIRGSFVPDKTVQDMRKYNRRIFDLNEDLTYNSNKQDAALQRCGFRLSNYVSRVNGKSYQKCVRAIITGITDPEELVKLIHGKTLRKYGRNIIKDAVTGDFHQADICLLKQYAELIGVIERQIEECRNALISMCQEHFPKQFKRLQSIPGVKERAASAIIAETGADMKPFEKATNLVGWCGLKPRNDISNNKVKSNRTTHGNRFLRQILIEISWVASRTRNCFFSNFSYVQCTQRHKNKMKIQVAIARKLLVAVWHMLTKDEDFIDVYLKRLEKQAEWQNDLQALESLLVG

SEQ ID NO: 249152 - protein, 343 aa, unidentified
MQAITTIGLDIAKSVFQVHGIDAEGKVMLRRQLKRRYVLAFFQKLPPCLIGIEACASSHYWSRELQALGHSVRLMPPVYVKPYVKRQKNDMADAEAICEAVTRANMRFVPIKTPEQQSGLMLHRTRHLFIRQQTSVINAIRAHLAEFGVTAPVGRKGIEELLRVIADPSDKRVPDVVRACLAALGSQLISLKKQILDFDRMIMAWHRSDQTSKRLNCIPGVGPLLATALVASVADPKVFRSGRNFSAWIGLVPKQHSSGGRARLGSISKKGDRYLRSLFVAGAFAVIRYAKLHGTKYRPWVAALLARRPTKVAAIALANKLARMAWAMMATGERYNYPASLRV

SEQ ID NO: 249153 - protein, 408 aa, unidentified
MEVLYPRCAGLDVHKDTVVACVRVVEAGRVTTAVQTFGTTTAGLLTLADWLEAHGCTYVALESTGVYWKPVWHVLAGDFELVLAHAGHVRNVPGRKSDVNDAVWLADLLAHGLLRGSFVPPPAVQELRDLTRTRKQLVRTLGQHVQRIEKVLEDANIKLTGALTDVVGASGRRILEALIAGESDPTALAALASARVKASRAELAEALRGRVTPHHRFLLREHLAVIDHLRARIAVFEAQIGATLEPFRLAAERLMSIPGVSHVSAHVIVAEIGIDMQRFPSVRHLISWAGLCPRMDESAGKRRSTRIRKGAPWLKTVLVQCAWGASRAKGTYLQAQFRRLKGRRGAMKAVVAVAASILTAAYYMLRDGAAYRELGPDYFDRRDKAKLAQRLARRIKDLGYDVQLNIAA

SEQ ID NO: 249154 - protein, 355 aa, unidentified
MLADRVDYIIGVDTHTATHTAAVVTPTGAALAHRTVPADADGYLHIYRFAVEQAPGRRVWAIEGTGSYGAGLTTHLLEQGEWVVEVDRPARPARRNGTKTDDLDAVRAAREALGREHLAQPRQRGDREAIRVLVTTRQSAMQARTCAINHLKALVVNAPERLRQQLRALATDQLLARCARLRSHPTQPIEYRATIAALRRTAQRSLALAAEADDLHAELDTLIRRRAPWLLAEPGIGVICAAQLLNAWSHAGRLRSEAAFAMLGGAAPIEASSGKVVRHRLNRSGDRQLNRALHTIVLSRMAYHAETRAYVARRIAEGKTAREIQRCLKRYLARRLFKLLEAPPAHAQKEKIATT

SEQ ID NO: 249155 - protein, 372 aa, unidentified
MNYNTVYVGMDVHKESFTLCSCKYEDEKASHYQRTPASYKNVLRYLAFLRTIYGEDTRFVCGYEAGCLGYSLYHQLENFNVECVILAPTTMLEQRSKRRIKTDKRDAEIIAKSLAQHNYSPVHIPTKMDNQTKEFIRMRDDHKAELKKIKQQILAFCLRQGYQYDGSGNWTAKHVKWLRSLKTEGLYKEILDEYLLTYTILTDKLNRLDQRIEELASKEEYKESVSKLTCFLGIKIHTALSVIVEVGDFQRFVSARKFAGYLGLVPGQHSSGDDRNGLGITKAGNTHVRRLLVESAQSYTRGKIGYKSRVLRSRQAGNSPQIINYADRANERLRRRYYQMVLKDGKKYNIAKIAVARELACFIWGMMTDNIY

SEQ ID NO: 249156 - protein, 362 aa, unidentified
MFRPHTLYIRIRIVRKVSEPAFAMKDQDVTDVIRRKQQTAMKYIGIDVSKATFVVAYSSDKGGEIRTFNNTTTGIKQFIGALPKDSSIHCVMEATGNYSAMLLYLLNVAGIAVSMENPLKIKNFARAMLSTVKTDKIDARLIALYGEKMNPQPFKIQGEAILRLRQKRTVIRQLTKQITAMSNLRGSLACLPVPDKGATHTVDETIEFLEKRRDRLQSELTDLVEVEFSRQLALLTTIKGIGITLATALIITTGGFTYFQNAKQVSRYLGICPTYEQSGTSVNIRGHINRNGDAYTRGLLYVAAWTASRFNTKCGETYTRLRQNGKPGKLAMIAVANKLVRQAFAVVTHDKEYVDGFVSNRP

SEQ ID NO: 249157 - protein, 340 aa, unidentified
MNVTTIGIDLAKSVFQLHGVDAAGEVVFRKKLRRAAVLEFLRNLRPCLIGMEACATAHFWGREIGALGHEVRLIPPAYVKPYVKRQKNDAADAEAICEAVTRPNMRFVPVKSAERQGVLMLHRTRDLLMRQRTMTLNAVRSHLAEFGIITAQGPHKILTLIRAIRAGEVPGLPPIACAALESMATQLDTLASEIRRLARQLMAWHRADETSQRLETIPGVGIITATALAASVPDPSVFKTGRQFAAFLGLVPRQNSSGGKDRLGRISKMGDGYLRRLLVVGATSVIRRADSNPSATGTWVRGLLERKPARLVTVAVANKTARIAWVILARGETYRAPMTT

SEQ ID NO: 249158 - protein, 413 aa, unidentified
MLFVGDDWAEDHHDVELVDETGRRLGRARLPEGIEGIARLHALIAEQMGEEWAEADGEEEPAQVVVGMETDRGPWVAALVAAGYQVFAINPMAVARYRERHGTSGAKSDAGDAHVLAEIVRLDRAHHRPVAADSALVEGIKLVARAHQAAVWDRQRHVLRLRSTLREFFPAALAAFADLSAPEALELLERAPDPDRAARLSLAKITAALRRAGRRGDLQARAAAIQAVLRAETLRQPAVLESAYAAIVTGQARMIAMLTTQITDLGQVVGDHFGRHPDAEIYTSQPGLGDILGARVLGEFGDEAHRYGDAKARKNYAGTSPITRASGRSKLVLARYARNRRLATALHQQAFSALRASPGARAYYDALRARGTSHHAALRQLANRLVGILHGCLKTRTLYNETTAWPHTNQAAA

SEQ ID NO: 249159 - protein, 402 aa, unidentified
MAYDFVIGVDVGKYFHHACVLDFQGRQVLSERINQHEGSLRKLFGKFLADDASVLVIVDQPNNIGRLTVAVAQDMGADVRYLPGLAMRQLSRIHVGNSKTDVRDAYVIAHAGLKLPDALRSVDRVEEVFIQLKVLNGIDEDLARAYTRLINQMRSALVGTYPAFEHVLRGQVIHRKWILHLLAKYGGPTKIRRIGRARLAAFARSHRARNPEPVIDAMLAAIHGQTVSIAGAEYAELGVAMSAKDALAKLEHRKEIEAQVLKLIQDIPHTEILLSMPGIGPRSAAQILMTVGDMSDFPDAAHLASYAGLSPRTNQSGTSIMSNSPNRAGNKKLKNALWQSSFASIRFHERSRQFYERKRKEGKRHNAAVVALARRRLNVLFAMMRSGELYRDISTVQEVTAA

SEQ ID NO: 249160 - protein, 382 aa, unidentified
MKVTYQTCCGVDVHKSFLVATIVKTTGGIEPSYQKKRFSTFNNSILEFKQWLLDNDCHDVCMESTGKYWVPVFNLLEDDINVVIANPKWVKAVKGNKDDTKDSKWIGELFRLGLVRGSYVPCKKIRILREYTRYRYKLISCRSSEKNRYQNALTVCNVALDSVVSDIFGKSSTSIIDYLLEQSGTSINHEEIASKLLRSLKSKEDAVIESVEGYQMTDAQKYRMRLVRAHMDYITAEIGTDMSQFSSSKRLCCWAGLTPGSNESAGKKKSVRITRAGVYLKPALVQCAHAAVKSDKSPYYKKKYDSLVKRRGKKRAIIAIARMILTAIYQMMSTGEQWNPSDLYKIDMPVALVEKQKAKAIKQAKKLLQREGLLPPDEPLAS

SEQ ID NO: 249161 - protein, 392 aa, unidentified
MQFAADRLEAPTAIRTDLGAIFVSMELSRRAWLITSLSPGSGEKMSKHSVPASDVSGLLRRFAELRRKAAARTGRDFPIIVIQEAGLDGFWIHRVLQSEGIESHVVDAASILTSRRRRRAKTDRIDGETLVRTLMAYKRGEPRVCSMARAPTPQEEDRRRVCRERRTLVGERVTHVNRIKGLLFAQGVFGYEPLRKGRRERLEDLRTGDGRPLTVRLKAQIIRELDRLEVVLAQLKAVEAERNLLLKLTSDEVASPAAMLVRLKGIGPQTAVVLWSEGLFRQFDNRRQVAAYAGLAPTPWQSGSIEHEQGVSKAGNPHLRTTMVELAWLWLRNQPTSALSLWFRERVRRLGGRIRKTLIVALARKLLVALWRYTTAGVVIEGAVMKAAPATI

SEQ ID NO: 249162 - protein, 312 aa, unidentified
MTRLICGVDVSGETLDCRLGQDGPCLETARTAEGIGRLARFCREHAVELVVMEATGAYERMVFSLLWEAGIACAIVNPRSVRRFAEAMGFLEKTDRIDAGQIARYAEVKGIVAQEPASPSQQRLRALVTRLRQLTDLSVAQANQRRLVEEPDVLEGVEELLKLVKRQIRKLEAQIAELIDSDPLWRAFDEAFRSIKGVADRTVARLMADLPEIGTLSNKAIAKLAGLAPMAKDSGKRKGKRSIRGGRTSVRSILFVVASVVSRHNADFKDFHQRLSVEGRTKKAVRIAVARKLLVRLNAKAREIRHTFANAT

SEQ ID NO: 249163 - protein, 355 aa, unidentified
MTSTKYIGLDVHKESISIVVLNSAGKVVMECVIETKASTLLQFIHGLGGDVHLTFEEGTWAGWLYDLLKPHVTELVVCNPRKNALLKEGSKSDRIDARKLAELLYMSKLSSVYHGEHGLRMLKELSRSYLTISKDLGRVMNRLKALYRGWAIPCAGTQVYAPHHRSEWLSKITEAGVRRRAELYYQQLDALRLVRQQARKELLAEARKHRATKLLRQIPGIGPLRAAHLVALMQTPHRFRTKRQLWSYSGLGLETHDSAQYRVVEQQLQRSKKSVTLRGLNTNHNHDLKDIFKGAAMRVSTAAGPLHDFYEALLAKGRKPTMARLTLARKIAAITLIVWKKEVRFDANYLKQQAA

SEQ ID NO: 249164 - protein, 390 aa, unidentified
MILVGIDVAKDKHDCCITNTDGEMLFDIFTITNNSESFDILYERIRSVAPDLSKVKVGLEATGHYNYNILSYLLDKHLTAYVINPLHTNFYRKGLSLRKTKTDRIDSRTIALMLLTDLSLKPYSVSSYHRENLKSLTRYRFSRVQERSRQKSSISRLVTILFPELSQLVPCIHISSIYTMLEELPGASYVASVHLTRLTNILSKASNGRFGREMAITFREAARTSIGAKIPAKSLELRHTIADVRAIESEIREVETEIQKLMDEETTTITSVPGIGTQMGAIILAEIGDFSRFDSPDKILAFAGMSPSTYQSGKMISSYAHMEKRGSRYLRFALFNVTKHVCNYDPGFAAYLAKKRAEGKHYNVAISHAAKRLVRILYAMETNGTLYEAA

SEQ ID NO: 249165 - protein, 337 aa, unidentified
MKRQYVGIDLHRRSTTLYRMAEDGEMLGTERIVSQPFELARAMEAAGPEPEVVLESTYGWYWAADVLQDLGAHVHLAHALGNNWGDRRVKNDERDARDLAAMLRIGRLAEGWIAPHEVRELRELVRYRYSLIRHRTSAKAQIHGVMAKNGILPVVGELWGPTGQAQLDRLELPEAYAMRLDSLRNLLDVYEAAIAELDAHIHAELKGDAGYRALMTLPGVGKVLAAIFVAEIGDISRFDSAKKLSSWAGLTPKHRESDEVVHRGNITKQGSPLVRWACIEAVGNYRAKGNEKLRADYKRIAERRGKYKARVAVARKLLTLVFYAMRDGEVRCLETAA

SEQ ID NO: 249166 - protein, 343 aa, unidentified
MQVVTTVGLDIAKSVFQVHGIDAAGQVVIRRQLKRRYVLAFFEKLPPCLVGIEACASSHHWSRELKALGHTVRLMPAAYVKPYVKRQKNDAADAEAICEAVTRANMRFVPTKTPEQQSGLTLHRTRHLFIRQQTAVINVIRAHLAEFGIVAPVGRRGVEALLNVVSDASDQRVPVVARMCLAALGAQLRRLKEQILEFDRMIMAWHRSHETSRRLDAIPGVGPVLATALVASVADPKAFRSGRNFSAWIGLVPKQHSSGGKDRLGSISKQGDRYLRSLFMSGALAVIRYARIHGTKHRPWLTALLARRPTKIAAIALANKMARMVWAMMARGEHYKEPVVLAA

SEQ ID NO: 249167 - protein, 390 aa, unidentified
MLVKSITVCAVDDSGKVVLSRRLVNDEQPIRELVAEIDELAERVSWTVDLTTVYAALVLTVLADAGKTVRYLAGRAVWQASATYRGGEAKTDAKDARVIADQARMRGQDLPVLHPDDDLISELRMLTGHRADLVADRTRTINRLRQQLVAVCPALERAAQPSQDRGWVILLARYQRPKAIRQSGVSRLTKVLTDAGVRNAASIAAAAVAAVKTQTMRLPGEEVAAGLIADLAREVIALDDRIKTTDADIEGRFRRHPLAEVITSMPGIGFRLGAEFLAAVGDPALIGSADQLAAWAGLAPVSRDSGKRTGRLHTPKRYSRRLRRVMYMSALTAIRCDPDSKAYYQRKRDEGKRPIPATICLARRRTNVLYALIRDNRTWQPDSPPVTAAA

SEQ ID NO: 249168 - protein, 330 aa, unidentified
MTNALPEDRPAPALDFVGVDMAKQAFVWGLHGVRGTQTASNDETGFQALLSALQGRHVGLIVLEATGGLERALASFLLLHGLPVAVVNPRAAREFARSMGHLAKTDAIDALALAHYAQTLASKADQTGVLFAPASAELTALQALITRRTQLIQMRTAEKNRLGGAIRVLRKSIETVIKTLDKEIAKLDSDIGNHLDLHFKQLAQRFESIKGLGPITCATVLAFMPELGQVKSAKAAKLAGLAPLNRDSGKARGQRHVWGGRSVVRSALHMATLSAVRFNPVIKAFYERLTAAGKPKKVAMTACSHKLLRILNAMARTGQPWIDNFHVVTP

SEQ ID NO: 249169 - protein, 354 aa, unidentified
MIAIGVDVHKRQCTVAIQQEDGKLGCFGPMENTREGWRELLEQLPPEAEIALEVSTSGYFAMSVLEAAGWRERAHWVHTAGIDSLRKQKYDRLDAKRLARKLSVADRDPLPEAWFPPPAIRALRLRARQRCWLAVLRTQVKNRLQSLLQMHGLRPTVTDVFGVAGRAWLAAQALPEATRESVEQLLRVHDFLCQELAKAEGYLHAVDRQFPELARLRTLPGIGEILAPVIWSEMGTLERFRSAEAWVNYTGLVPSLYESGEVSIRGGITHQGSAWVRWALVQAANSVIQGVSPLARRYRRLRRRKPANVAKTAVARSLARCVYGVLKSGGNYQEARWGRRPTGVVSSLEQASLR

SEQ ID NO: 249170 - protein, 387 aa, unidentified
MEVRVVNTPSAGRNNDPVHCFVAIELSKSNWVVGFQTPLTDKASRHQVKAGDAKGLIELIERVRMRVGRQLSRPVEIVSCYEAGYDGFWLHRVLEAYGIHNHVLDPASLQVSRRARRPKTDRIDAERMVRALIRHLRGEPEACSVVCVPNVEQEDAKRLHRERRRLIAERVQHVNRIKGLCATQGIYDYSPLRKDRLARLDGLRTGDGRALPTRLKAEIVRELKRLELVIEMIATVEAERDAILTNPASTHVNAGKIKMLAKLRAIGPEFATNLVGEVFYREFANRRKLGSYVGLGSSPFCSGSVDRDQGISKAGNSTARSMMIELAWTWLRYQPGSALSVWFRERVGNLKGRPRRIAIVAMARKLLVALWRYLETGLVPTGTALKA

SEQ ID NO: 249171 - protein, 341 aa, unidentified
MGTDIIIGVDLAKSVFQVHGANRTGAVLFRKKLSRPQFLKFMTAQPACLVAMEACSTSYYWARTLSDAGHDVRLIPPIYVKPFVKRHKNDAADAEAIVEAALRPNMSFVEHKSAEKQALSMLMRTRDQLIDHRTATVNALRGHMAEFGLVVPVGIKNIERLQGLVDANNTLPVLATEMATIHFEQIVELTRQIDILTEKIKVYGTSSPKLKRLRTMPGIGPIGAMIIETFAPDMATFKTGRDFAAWLGLIPLQNSTGGKSRLGKITKMGQKDIRRALVIGAMSRIAGYARQKTRAEPWLQDKLDRKPKMVAAIALANKMARQIWAMITKGETYKPQEVVAT

SEQ ID NO: 249172 - protein, 314 aa, unidentified
MADYPSYIGVDVSKSWLDVHVNPSGDSFRVEYTASGLEQLVSRLSKLRSGLLVLEATGKYEAVAAASLASSGFKVAVVNPRQVRNFAHATGRLAKTDRLDAEAIALFGEAVKPKVRPLPNEQEAQFSELLARRRQLIEMLVSENNRLKGVASRKVGRSIKVHITWLKGALGRADDDLSDAVESSPVWRAKEALLRSVPGVGKVTSITLLAGLPELGSLSSKEIASLVGVAPMNRDSGLMRGKRTISGGRSAVRTALFMAALVASRRSPQLAPFYQRLVEGGKPKKVALVAVMRKLLITLNAVIARGTPWLPQKA

SEQ ID NO: 249173 - protein, 373 aa, unidentified
MRNLGIDVGKKESLFYVLDDPGRKVGSGRVPTSEAAFADLIRRYEGDEGVAVALETGNLTFMLSRAMTEAGADVFVVDPYQNALIAQSTKKTDRLDAKQLSNQRRLNMLPQHSVYVPTEQAEALRRLVSARARLVKERTALSNRAIRLAERQGITDIKKSALSESGAWKRLLNAVESWTLPMDRVLVTQYATDAERLRRQIKELEEVMAGHMETHFPEEMKLLRTVPGIGPVTAAALIAHVEEVRRFGSARKMCRYVGLTSAVRKSGRTVSVRHICKCGNSRLRGYLTQAAIHFLRHAKSDDPMVMWYQHIKVKRGWRKARVALARKIAAVCYGVLKHRAPYNPTYVREVLEKEGTDTVRHDGPVMPVVEHAL

SEQ ID NO: 249174 - protein, 384 aa, unidentified
MQTVADRPEAPTAIHTDLGAIFVSLELSRSTWLITSLSPGGGEKMSKHVVRGGDVAGLLERFAQLREKPRARTGKVFSFVVIQEAGLDGFWIDRVLQNEGIESHVVDPASIATSRRRRRAKTDRIDGEALVRALLAYKRGEPRVCAMVKAPTPEEEDRRRLCRERKVLIAERIRHVNRVKGLLFSQGISGYEPLRRDRRERLVTLQTGDGRLLPDHLKAQVCRELDRLELLLEQIKAVEAERDVLLAAQQAPAAMLLDIKGIGPEFAAILWSEGLFRHFDNRRQVASYAGLAPTPWQSGSVDREQGVSKAGNPRLRTTLIQLAWLWLRHQPQSALALWFKERVRRNGDRLKKTTIVALARKLLVALWKYVTAGVVIEGAVMKAA

SEQ ID NO: 249175 - protein, 361 aa, unidentified
MNYVGIDVHKQSFQAAVVDETGSRLDEFKLRNNREGIEQLIQRVRRYGSFQVVVESSANYWTKLFDIMEENHVSIKLSNPYKTKAIAEAKVKMDKLDARTLAQLLRAGLVAESYVPDRIDREKRALIRERASLTKYRTELRNKIHDLLVKYEYSYGFSDLFGKEGMTWLKTLKLSQYDQVILDANLRLLESLNAEIEKISIEIAKLATDPTDKNKQDQVKLLLGLKGIDYYAAMILLSEIGDIKRFPSPEKLVSWAGLAPRTYQSGETSYNGHITKKGSSRVRWILGQAAQTARQYDPKFRKFYERIAARKGHNKALVATMRKMLVIIWTILTRNEPYSGQDSELINRKFKRLRRLSSSQA

SEQ ID NO: 249176 - protein, 354 aa, unidentified
MPIVGGLDIHRKQLTFDYLDTVTGEVRRGQIAPADREYVRAWLARFAGRDDVAFAVEGCAGWRYVTEELAAAGIAAHLAEPADTAAARGRKRHAKTDKTDARHLRTLLAEGRLPECWIPPAHILEYRALLETYHDLRAAHTAWVQRIHAVFFHQGAPALGEGALRTEQGLAGLRAAAAAHLSAAGQLQVATALDMLAATEAQLGPLRRQLRRAAAHLMGAKVLAARLYGVGPVTALALTCWLAGADRFSSSRKAVRFTGLDITVWSSDRKGPPGRLSRQGPPVLRWAVYEAGKTHARTSAPDHGYYAAVADRKNSTRAALPGGPQDRPASLPHPGRARRRRAHHRLTASPKGPW

SEQ ID NO: 249177 - protein, 348 aa, unidentified
MTVYIGVDFHARQQTISYLTTEDGEIKQQQLEHDQPAAVRAFYEQFAGQRVLVGFESSGYAAWFEELLEELGYEIWIGHAAYIRKFARRRQKNDRRDADLMLELLVAGDFPRIHRYSPASRQVLQQLRYRQRLVKMRTMVVNSLLYMASSRGVSLRSQLQSKRGQERLRQIALPAPLGEQREELCQLLGELSSKIAKVQSWLEAQAQQDVRVQRLRTHYGIGPLTGLCLVATLECVERFANARQVTGYVGFDPVEDSTGERQRIGSISKQGSRLLRFYLVEAGQVAVKKDVELARVYKRLLVRRGHATAKVAIGRRLLVRAFIMLRDEIDYAEFQRRGVAARSSRGTA

SEQ ID NO: 249178 - protein, 385 aa, unidentified
MAQSEDMSKPPTALAQNDTLICVVEMGLKSWLVAGLVPGIERQPLKKLEADESALHRLVLRWKAEAEKAGRPISRITLAFEAGRDGFWLARWLGSRGIEAWVIHPTSIAVSRDHRRPKTDRLDTQMLMRAFLGWLRGEPGHCRMAAIPTLEQEDAKRPTREHETLVGERTRIINRSKSALIRLGIRGFKPGLRKASERLASLRTPEGVPIPPNTLAEMHRDMARLAVIQSQIAEIAVARLERLEHATDAPHAMIRLLARVIGVGVETAEMLVTEVLSRNLRDRRAVARYAGLTGAPYESGSKRHEKGLAKTGNARVRHGMIQFAWRFLLFQKESALARWYRARTENAKGSRKRMIVALARKLLIVLWRFVTTGEPPEGVALRVAA

SEQ ID NO: 249179 - protein, 398 aa, unidentified
MCLESGVLCEWDPMRQIDSPWVQVRPWRSVYRRMGILRPEPEQLPEPSRLSKGRGRSHLARLARELEEVPFNLEGVMSGTGTSAAVHVGVDVSKERLDVGLWPLGETTQEPNDRQGIERLAGRLAELRPRLVVLESTGGLEVPLALELGERQVPYRIVNPRQVRDFARAMGKLAKTDKIDALMLARWAESARLEPKALPEEARRELRALVMRRAQLIEARIAEENRLPGERVKEVRKSLRDSIAWLNRQIALLDRKLDRTIKGNPEFSALSERVQSVPGVGPNTARMLAASLPELGKLSRQKIAALVGIAPLNHDSGKTQGKRFCWGGRAEVRCALYMAALVATRHNPVIKTLYARLRAKGKAAKVALVACMRKLLVILNAMVRDQTLWRQTSPAATA

SEQ ID NO: 249180 - protein, 427 aa, unidentified
MNYTQNQKISQITPSTLIVGIDVAKEKHVARFQDDRGLEFGKRLIFENRIHGFQTLLDCVKRHQNDNHKDHVMFGMEPTGHYWLNLAYFLKAKGYDVVLVNPMHVKKSKELDDNSPTKNDTKDARVIAQLMKDGRYSVPNLLEGVYAELREGVKLRDQLIKQLMIIEGRIENVIQRFFPEFFDVFGDWKGKAVFHTLRMFPFPSDIQKLTPEEVLQKWKPHVQRGVGLKRATKLVEVANKSVGIEVGIQFAKRELDCLLDQYELYKTQLAQLDEELEGRVESIPGAKQMTSIPGLGHTTIALFFAEVGDLSKYNHPQQLVNLAGLSLKEHSSGKYKGQTKITKRGRRRLRKALYLAIRPLVAHNSVFKALHHYYTNRLDRPLKKQQSLIALCCKLLRVLFAIGKKQCEFDGLKLLKGLPQIKALQAA

SEQ ID NO: 249181 - protein, 343 aa, unidentified
MDQYIGLDVSLKDTAISIREDRKRIWRGKCPSDPKLLAQMIRKHAPHAKRVVFETGPLSTWFYHALTAEGVPAICIEARHAQKVLNETLNKTDANDADGLAQLAEAGFYKAVRVKSFDSMLTRALVAARNQLLSISIQLSNQIRGLMKTFGLIIPKGTGRVFDGNVRGLLDGNGGLARIILPLLEAWRDIRKRAADLDRQLLAAARESPATKLLMTIPGIGAVTAVSYVAAVEDPENFKTSRSVGAWLGLTTRRYQSGEVDYDGHISRRGDNHLRGLLYEAAVVLLTRTSASTESSLKIWGLKLRERLGFKRAAVAVARKLAVIMHSMLKTGEVFNTLAGASA

SEQ ID NO: 249182 - protein, 445 aa, unidentified
MFIQSQDDSQCCYSLFVKVVILMMKLKYSICCGLDVHKNVIVATIVTTNKDGISEYKQKSFSTINSDIQKFHNWLIENNCYHVCMESTGKYWIPIFNYLENDIDVCLTHPKYVKAIKGKKTDKKDSKWIADLYKFDLVRCSFIPPKDFRQLRELSRYRFKLVCMKSSEKNRIQNCMTISNVGIASVLSDPFGKTATEIISYLLEHTADSMDEKAVRKLIKKGAKSKSDEIIEAIKGYTIETDQAKKLELARGHLEYLDDMITQTEVELYVRIKPYYEFVEFVSTMPGMTELSSTIVLAETGVDMDIFDDAKHLCSWCGLSPANNESAGKKKSVRIAKAGDYLKPMMVQCALAAIKSKKQPYFAIKYGRIKKRRGHKKAIIAIARMMMVCIYHMVSEKKPFTPTDYEELMNPQNHVERVVLNENNVFAYLESLGYDSSKLVKRNDN

SEQ ID NO: 249183 - protein, 340 aa, unidentified
MTEYKRIAIDTSKAVFTLHGIDQQDRVILQRNLRRAQFLPFFRNLPPTEIVLEACGGAHHWARELTALGHGVRLLPPQYVRPFVKRGKNDRNDAEAICETGARPGIHPVPIKTVEQQAQGMVLKVRETLIGQRTALSNTVRGLAAEFGITAAKGLGRVAELLATIAADPALPVEAKDGFIILGEQLGRLDEQIKVLEKKVAAAHKANPLSTRLATIPGLGAIGSLSVATRVNADDFASGRHFSAWMGIVPKEHSTGGRQRMGGISRAGDERLRELFILGATSVIRAVTRPGGSKLASPWLLALLARKPRKLAAVALANKMARIAWALMKSGEVYRRPAAA

SEQ ID NO: 249184 - protein, 380 aa, unidentified
MNRVTLQSNDNAAEGVLYMAMELGDKRWKLVFSDGGAKRRHETVEAGRRMQLVEAISKAKAKFRLSPEARVVSCYEAGRDGFWLHRYLVSLGIENQVVDSSSIETNRRERRAKTDRLDGVKLLTMLMRYWAGERGLWSVVQVPNVEDEDARRLHRELGSLKKERTRHRNRIRDLLVAQGLRLEPNCGFLQRLETLTLWDGTSLPAELKGELEREYSRLSMVEQQLRALEKTRTERIAHAGSHPVQQVVQLMGLRAIGPNCAWLLVMEFFAWRGFRNRRELGACAGLTGTPYDSGGSKRDQGISKAGNARVRTMMVEIAWLWLRYQPNSKLSRWFRERFAGGGARMRRVGIVALARRLLVALWRYLEGGELPEGAELKAAG

SEQ ID NO: 249185 - protein, 401 aa, unidentified
MKRLSGGIDVGSESHHITILDEEDHILYNQKVAHKLNEFTESIKQFKKIERKEKGVISFALEGKNGYSAPFDRILLDQGFTLYNVDNLKLKRFREAFAGEWKDDKRDALMLSKMLKLKDHIDSEREKVFIKIEKPSPLTESLKLLSRHQQTLIDEKVRLVNRLRKKLLEVCPQILELGKAKSKKLIAILTKYPDFSKYKRITLCSLLKIKGIGEKGAFFLLKRLNHIEYMPGLTDIYKTIIFSYAKRILELQEEIKDIDKSLDEIGEKNKEVNHLKTIPGVATKLASRLIGEIGDINRFPSEKQLAIYCGIACVDNNSGKVTKAKAVYKANKICKQTLITMAGGSIRLSLQCRAYYQKKRAEGKSHNHTLRCLARQLIKVIYKMLTEDRDYMVRKELRKVA

SEQ ID NO: 249186 - protein, 422 aa, unidentified
MKSVGLDVHLEFCEVAIVEDGVVRSAGRVETRPERLEEFAAGLAADDRVALEVTGNAWEIARILEPHVAQVLVVSPSDTAIRQARAKTDRLDARTLARLLAAGSLDGVWMPDQLTWVMRRRLSRRSQLVWARSRAKNQVHAVLMRQLVGRAPVSDVFGVKGRKWLAGLALALEERETVDGAMRQITFLDSEIAGVEQLIASAALKSSEIKRLMSVPGVNVIVAATFLAAVGDIHRFKNQRKLVGYLGLDPRVRQSGPGPATHGHISKQGSNSARHALVEACWTAVRQPGPLHAFYQRVRARRGHSIAIVAAARKLACLFWCLLTREQDYAFAQPSLTAKKLRLLEVTAGSPTRRGKPSGVWATRERMREAERVLAQQAEHAYQRTVRDWHAAQAGKVGASATPGHASKGPSKGQAARQTTSP

SEQ ID NO: 249187 - protein, 414 aa, unidentified
MQSWSEITYYAGFDWSTDHHDVVIVNRSGQIVAEFQIEHTAEGWQRWGEQVAVLGPGLAACVETSQGFVVEQLLESGVAVYPISPASAKAYRQRKVPSGNKTDHVDAWSLADALRLDGHGWKALAKEDPLVAELRLLCRDEVALIEERTALINQLQSALREYYPAALEAFEDWTLPSAWAFVEAFPTPQALVSAGKRKWEKFLHTQQLARPQTYQKRMEIFARASEFVSGQALTRAKSRLALARVRMLRVLQNQIDSYRAEIEKLFAQHPDHDLFGSLPGAGPKIAPRLLGEIGSDRSRFEDPTALQCLAGTAPVSYQSGQVHKVYLRRHCNKLLRHAVHLWANLSRQSSPWAAVYYEQLRTRGKNHPCALRSLGQRWLKILWKMWQTGTRYDAELHARNQLKHGSWVLKIQHA

SEQ ID NO: 249188 - protein, 341 aa, unidentified
MSKRSFPSCAVLHCGIDVSAATLAVAVQPEGSDDFQQREFANSAAGHKQLIAWLLKRGASVRVSLEATGIYSLDVAMALDRADGIAVAVLNPRTVHQFAESLRRSKSDAADAVALAEYSRRMPFVAWVRPSGAALELRAISRHIATLTEEQARWKNRLHAAAGSGSTPRCVREDLRRSITGLEKRLLRLRREAKAAIAKDAGLAARFKHLTGITGIGEVSAVQLLGELAGLAPEMTVRQWVAQSGLDPVHQTSGTSVHKRPRISRRGNRHLRRALYMPALSAARFDPHMKAFYTLLLTRQKTRMQALIAVARKLLHAIFGIFKTGSEYDGAKLFPLLIPTS

SEQ ID NO: 249189 - protein, 402 aa, unidentified
MHYLGIDVSKASHQCIVLDTSGEALGKSFTVQSSKDDFIKLTKKLSELNIPKADLTIGLEATGNLWENLYSFLKEQGFNVILLNPYQTNKFHEAMLKKAKTDSIDALVIAGLLRSGCASSSYIPDDDIQSLRDIVRLKDGYLKDVKNYKRKAYSLLNLVFPEFLSLVKDPFNIVSTDMLLKYQTASDFKNLKPKDLIKIFKHRQGNNYDDSWADKVISSAKDSIYSGKAHKARGLVLKSLVQNIKYLKEQIELLDNEIQLLLKPDDKSQNSDVDNLLTIPGVGPKTIAVFLAEVGNIQRFLSCKDFIGFVGFYPKIEQSGSSLNKAKLTNKGSSILKHALYMASVASLIHNPYLKSVYHDKVSQGKCPKQALIVVARKLACIMYSMLKINSVYNPERVAIAI

SEQ ID NO: 249190 - protein, 368 aa, unidentified
MQDGITWVGLDAHKATIQVAMRLPGSDGPVEWQVANEPAAVKRLARKVQRAAPGEVRSCYEAGICGYTLQRQLVAAGMPCTVIAPALIPRKAGERVKTDRRDARKLADLLRAGLLTAVRPPTPREEAARDLCRGREDVREDLLRARHRLGKFLLRRGLGWHATRAWTQAHRRWLRSLSFAEAADQAVLTDYRLAVEQLEARLETVDAALVALAQTEPFRQPVGWLRCFRGIDTLTAITLVAELHDVRRFTSARALMAYVGMVPSEHSSGETRRRGGITKVGNAHARRVVIEAAWHYRHVPTVGKVLRTRRQGQPAAVIALADKALQRLHRRFARLTARGKPPHKAVVAVGRELVGFVWAALTATEVTA

SEQ ID NO: 249191 - protein, 419 aa, unidentified
MNEANNKGYLYVGVDPHKYLHIAVALNERNKIVGDISIENKPSDFVKFLKHFQTFAGDSTPVFGLEDIGGNGRSLAKFLVEQGQVVKEVNAADASIFRKRAQYKKNDHYDASCVAKVLLLDLDTLKDANPEDLHWTLRQLVGRRDILVENKMKNRHTLHDNLKHHYPSYNKFFSDIFGQAALFFWETYPSPMHLDNVTVEELAENFCKASRNSVSTKKATLIKELVESDGDTTREYQEERDFIVRSKVRETHFLIQELKEVERVIKSTMEKLGYKLDTMPGINTVLASKLVAEVGDIKRFKSPDRLAKFAGIAPYENSSGGRENNRKSKQGNRVLHKAFYNLAVQQVQVSKRGDGRNPVFREYYLKKQSEGKTKGQALVCVMRRLVNIIFGMMRTKTEYRAPVPKQTSQQPVLQEVHAA

SEQ ID NO: 249192 - protein, 388 aa, unidentified
MIYVGIDIAKLNHFASAISSDGEELIKPFKFTNDNDGFQLLLSKLDPLDKDSLIIGLESTAHYGDNLVRYLVAKNYKVCVLNPIKTSTMRKNNIRKTKTDKVDTYIICKTLMMQESLRFVTFYDLDLMDLKALGRFRQKTIKQRTRLKIQLTSYVDEIFPELQYFFKSGLHQKSVYALLKEAPTPEAIASMHMTHLAHLLKVNSHGRFDKEMAQQLRVLAQKSVGASDSSLSIQVTHTIQQIELLDSQLERVEAEMTEIMKFNDSVIMTIPGIGYINGGMILGEIGDIHRFSSPNKLLAYAGLDPSVYQSGNFQAKKTRMSKRGSKVLRYALVNAAHNVVKNNATFKAYYETKMAEGRTHYNALGHCAGKLVRVIWKMLTDEVEFNLN

SEQ ID NO: 249193 - protein, 351 aa, unidentified
MEKIIRVGVDTSKNVFELRGVNAAEQLVLRKRLRRSQVVAWFAGEPAMLVGLEACAGSHHLARTLNRLGHEVVLVPPQHVKPYVARGKNDGADAEAICEAISRPKVQKRFVPVKTPDQQAAQMLLHTREQFIRRRTQLSNAIRGYAAEFGHVVPKGFSHLEPLLARVEEDAEVPDLARELFALHKSEYGYIQAQLRRIEAMLMTWHRGNEASQRLAHIPAVGPICASMLAAKVPDAKRFKSGRDFAAWIGLTPKDHSTAGKQRMGGITRAGDEALRSAMVVGAMAIVQQIMRGNTRYASPWLVALLKRKLPKVAAVALANKNARIAWKLMVSGEGYDARKAARLRIIKDAA

SEQ ID NO: 249194 - protein, 345 aa, unidentified
MKLYGGIDLHSNNSVIAIINEHGETLTAKRLNNDMSVILSFLSPYKDNLKGLVVESTFNWYWLVDALMDEGFKLHLANPAAIQQYSGLKYLDDHSDARWLAEMLRLDILPEGYIYPRELRAVRDLMRKRMDIVQQSTKNLLSVQSCYMRHLGYKLSSNKIKQMVAIRKGVDAEQVHADFSSMNTALSVISNLSLIRCAQQQINAIESAILQQTSLSPEFINLTSIDGIGNTLALTIMLETGTIKRFDSPGNFSSYCRCVKGARYSNGKKKGATNQKNGNRYLAWAFTEAANFAIRYNPTIKKYYQRKLAKTNQVIAIKTVAHKLARACYHVLKDNVPFDEHKAFS

SEQ ID NO: 249195 - protein, 322 aa, unidentified
MKPQRLNIGIDVSKLKLDICILDENKKELEYLQIFNTENGIKDFIHYLSIQYPKANYYFGYEATNSYMRTLQKILTENEYKHLMINPHTLHHYFKYIGLKEKTDKSDSYGIALFISEKNDENFDDKINYELKSKYQDYVTTIELLSKMKTQLKNLKNSKNNLFNEELEKELEDVENKLNDIKDKIQKNAIEELKKDIPQFNEIKKEIKGIGDYTLLVILPLIATSKNKTVKEIQAYIGLNPVRYESGSSVMKKPKISKRGNSIARKVLYMSAMVAIRTNEIIKHKYERLLKNGKKKRVALTACMAHLLRAVYYQYHNKLVLN

SEQ ID NO: 249196 - protein, 343 aa, unidentified
MKQYVGLDVSLEQTAVCIVDEYGKALWRGKCASTPEAIAAVVKARAPHVERIGLESGPLSTWHWHELKKRGLPVICLDARHAKAALSLQVNKTDPNDALGLAQIVRTGWYREVTVKSLDSQVIRSFLSSRARLVEVRVDLINQIRGMLKPFGLVAGKGGRQPFIDRVRELVADGPLKDAVEALLTALQEVSRQIGVLSRRLMGLARQDQAARRLMTAPGVGSLVALAYISVIDTPDRFLRSSSVGAYLGLTPRRYQSGEIDRSGRISKCGDALLRTYLFEAAGILLNRVSRWSALKAWGTRLAKKVGGKKATVAVARKLAVILHRMWRDNTDFRWSRQEGQPA

SEQ ID NO: 249197 - protein, 407 aa, unidentified
MDLLKTVFGIDVSSRKSNVCIMVNGQKVNDYAISNDMVGFNRLLGDLKQVTKPQIIFEATGVYSRRLQAFLDMHELRYVMMNPLEAKRKTKDDLHQNKTDKLDALYLAKLQSEHPQRLAYVQNKEYQELMANNRIYEQASHDLITNKNRLHKAVQLTFPEIEHLMVNPRGKNYWSIALRFPHPDIVLETKEADIIDFLKGLSGIGKKRANDITQNLIRLAKVACPAVKKNSAHIRGLKMAINNILSAEEECQTALQEMAKLAPKRDLEILTSIPGIGENTALRIISELGDIRRFNNPSQLNAFVGVDPQVYESGNLTAHLSISKRGTAIGRKVLYLAINQIQSAKKAGNPCHIADYYEKRKRSSETASHKKAAIASIHKLLRTIFALIKNDQLYSYDVAKHNQRLLS

SEQ ID NO: 249198 - protein, 407 aa, unidentified
MEEKRTRYIGLDVHKHYLVALGMDADLNIVLPMRRVELSHLESWMKKNLTKQDEVVLEMTTNTWQLYDELVEHAGSVMVVHPPHVALITRSQVMTDKIAASILARLLAKGLLVGIWVPPLEIRELRGLVAQRQKMTRLATQAKNRLHAVIQRHHLKPPEGNPFAKTNNGWWQALALGRLEKLNLQSDLETLQFAQQQEARIEKEMTGIAVENEEIGRLLHIAGFGVITAITVYAAIGDIHRFEDAKHLVGYAGMGTRVHDSGMTTRTGKITKAGRRDLRVAMVEAAHVVANSHPHWKAELARLQPRIGYNRAIVAIARKLLITVWYVLQGEADKHAEPEAVAQKMLRFAYAVGKANRPKGQTAAQFARIRMDALGLGGELTSISWGSKKPIPLPPSRLKGRSDVPKS

SEQ ID NO: 249199 - protein, 364 aa, unidentified
MMIIGCDYHPSGQQVFGIDTESGEVFADGWIAHAGKELDEFYSALPAGTVVGVESSGNMLWFERRLQQYGHRLRLGDAAKIRARETRKQKHDRRDAELIARLLVEGTFPDLPWVPTLAERDQRQLLMHRHKLVRMRVQVKNQLQHIALNQGEQKKRQLWTRAGRELLEKLALDPWTARRRDDLLRWLDLLDRDCESLDQAVEQAAKARADARLLMTHPGIGPVISLGFVLTIGTVERFQRSRELVSYLGLNPSEDSSGERRRLGGISKQGNSFMRLLLIQGAQTAVRGDEELGRQYRRLASKKHRAVAKVMVARKLAVRMFWMLKTQHTHAELVRMRGSSSHPGVGKTDVLRERPASPRIQPQG

SEQ ID NO: 249200 - protein, 317 aa, unidentified
MSNHSTRAAGIDIAKDKLDLAIHGLPIRLTVENRRPGWRRLADELAKAGVNRVGVEATGGYERGVVAYLRAAGLTVVLLQPLQVKAYARLHLRRAKNDVIDAALIAACTAALDEPHSAPDAHLEPLADALTFVEQIEEELIRHKTRLEHIQQARLRRMVMADIRRLEARRLAELRRIAQELRRHDDLSRRLDLVQSVPGIGERTALALLLRMPELGQLSREQAAALAGLAPFDDDSGTHKGQRHIAGGRQRLRRSLYAAALPAAFRWNAALVSLYKRLTARGKSHKVALVACARKLLIMANAVLARATPWQPQPERT

SEQ ID NO: 249201 - protein, 359 aa, unidentified
MLNDSTTFLGLDLGDKHSHLAILDQHGDLIEETRIPTSKASFQRKFSGLPPARVAMEVGTHSPWASHLLSELGHDVLVANARKLRAIYSNPRKTDQVDAETLARLARLDPNLLSPIHHRSPKAQADLTVIRSRDALVRSRTLLINHVRGIVKSCGDRLPSCSAHSFSKKVEPSIPKPLRPALLPLLEMISALTQQIRAYDRQIETLCQMQYPETRSLQQVSGVGALTALAFVLTLEDPSRFAKSRHLGPALGLVPRRDQSGDRDPQLPITKTGNAFLRRLLVGSAHYVLGPFGPDCDLRRWGLKLAERGGKNAKNRAVVSVARKLAVLLHCLWKTGEIYDPFYLARQHDQASEAIPAAA

SEQ ID NO: 249202 - protein, 465 aa, unidentified
MRTDKMLWRNRRLKKELARRLQSENPGLEVVHPRAAGIDVGNGAHYAAVRPDRDSQPVRRFECFTADLYRLADWLQSCGVQTVALQSTGVYWIPLYDILEERGFEVYLVNARHTKNLPGRKSDVQESQWLLKLHTYGLLNNSFQPPSKIRILRTYWRQRLQHVTGAATCVQRMQKALTQMNIQLANVISDLSGVTGPLIVRAIIAGERDPWKLAELSHPRIQASRADIAKSLEGNWRRELIFVLQQELEMYDIYQRRVAECDQQLQKHLARFADTVAPPAKADLPPKKKKKQNKNNPHFHLADELQRITGVDLTRIDGVDVFVAQTMISEVGLDMSRWKTEAHFASWLGLCPDNRISGDKVLARGTRHVLNRAATALRLGASTLLKSQTYLGAQYRRLRSKLGAPKAITAMAHRLARLVYRMLKYGQQYVDKGAEYYEQRNRQQQIEFLRKKAAQLGMQVTAAHP

SEQ ID NO: 249203 - protein, 352 aa, unidentified
MARTEFDELMSVGIDIGKDTFHIVGFDHTGQRVIRKQIKRFALVATFEKLPRCIVGMEACLSAHFVSRTLRKMGFEPRIIPAIYVKPFSKGQKNDYNDAEAIAEAALRPNLKTVSEKTQDQLDLQALHRVRSRLVSRRTATINQIRAFLIEQGITVRKGLRALKNSFETILEERKDEISPRMRRILIGLYGDWMWMDDRIDKVSKEIGDISRTEENCVNVMTVPGIGPMISTAMVAAIGEGEAFDRGRDFAAWVGLVPRQYSTGGRTILGRISKRGSRYLRMLFVQAAKVIMMRPHRWPDFSFGEWLTRASERMHRNKVAVALANKLARMVWSILRHKTAFDTPRDEVAVGI

SEQ ID NO: 249204 - protein, 463 aa, unidentified
MQQPVEIRVDEHDQIVARVAAIDVAKASGMVCLRVPHETIPDRRVTTVWPVAATTAALIELGDHLRCERVARVVLESTSDYWRPFYYLLEAAGLTVWLVNATQAKNVPGRPKTDKLDAVWLAKLAERSMVSPSLVPAEPMRQVRDLARARFDLVEDRTRVKQRIEKLLEDALIKISSVLTDVLGVSGRAMIEALIAGQRSPKVLAELAKGRARSRRADLERALHGRFTDHHAQLARMLLGQLDELTARIGEVTELLDAAIAALPPTSPTSPSAGPAGRSNGDNDGDNDGDNDGRPGQAEYNSAVARLCVIPGGGPDSVRAVIGEIGLDMSVFGTPQRLCSWARVAPRTVQSGRKTGRARTGKGNPYLRSALAQMATGAAKTDTFLGERYRRLIKRMPKAKALVALQRSILVIIFHLLADPSVEFTDLGPDFYTRRIDRARRASHLMRQLHALGYQVQLTEAAA

SEQ ID NO: 249205 - protein, 469 aa, unidentified
MIRSVGIDLHQGQHRARCLDERAQPCDNFSFQTTPEGLTTLEEHVFRDGANPIIVLEPAGLPWLMVAVYLRSRHPDCRLVKAKTQKVAALRRYLRGPVKSDRLDALTLAKMPFIDPEQMDEIYLPPAEIHALQRLTRQRKRIEQDITGRKVRISAIVDGYLPGVRRAFNDVGSFPIRAFLRSRLNPFALVRDGEDTLHAFLSKASPRSKWSRAQTRLVFLACQSLAAVCELSEPTGTVNEEFFMDLQDEIARELRMLEADEVESEALARRIAELYRKLHYSDNLRTIPGVGEHTAPIFLATVGAPSRFRSQSAFANYTGVVPGARQSSDVQAKGLRITKAGPSIMRMALYQAGDIGRRWDPQLAAVYYREMVYHGKNHRQAMGAVMSHLGARVLRVLKEDRPYELRNVAGKPIDKNEAKKIILSQYHVSETIRQERRRRNSKNRRRSLTLGDSDLQDARGSRAPQPVQV

SEQ ID NO: 249206 - protein, 341 aa, unidentified
MELHTIGIDLGKTVFHLVGLNSRGEVVMRKKFSRTQLLRFTANVHVGLIGMEACGGAHFLGRALREQGHEVRLIPAQYVKPYVKTNKSDYIDAEAIAEAVARPTMRFVPIKTDDQLDLQSLHRVRERWVMRRTAVINQIRGLLLERGITLRKGRCHVGAALPGILEDADAKLSGALRMLLAQLKLELDHLDLRIDKADALIKKTACENEACQRLVAIPGIGPVTATAVIAAIGNGGAFRKGREFAAWMGLVPREHSTGGKQKLLGISKRRNSYLRRLFVEGAGAVMQQRTKQSSGLSAWLAQLNSRTHRNVAAVALANKLARMAWAVLAKNEQYRPPVLAG

SEQ ID NO: 249207 - protein, 428 aa, unidentified
MNYNTQNAKIASITEKTLIVGIDVGSETHYARAFDWRNYEYTKKPLEFSNTEAGFQTFKAWMGDIAEKYGKTAVIPGMEPTGHYWFALGKFLQDTGMKPVHVNPHHVKKSKELDDNNPNKNDRKDPKTIAALVNEGRFSYPYIPTGIHAEIRSLSNLRFQTQEELKRIRNRLARWFAIYFPEYKGVYGDLKAVSGRMVLKEAPLPEDIRKLGVEGVDRIWRDAKLRGAGMKRAKTLVTAAGHSVGSTEAPEAARMELKNLLADMDVYTSRLEGLPLKIEEKLKEIPYVDKLIGIKGIGLATVSGFIAEVGDIGRFDNPKQLQKLAGYAVVANDSGKHNGESRISYRGRKRLRYVLYEAAISLIGKNAEFRAIHGYYRTRKENPLKKMQSVVAVACKVLGIFYTILTKGVDYDAGKLMGDIRRPQIQAA

SEQ ID NO: 249208 - protein, 414 aa, unidentified
MPETAYALYVGIDWGTVTHQVAVLDAQRVLLGERAIAHEAVALHALTEWLTQLARGEPARVAVALEVPRGAVVDTLLDRGFHVFALNPKQLDRFRDRYTVAGAKDDRRDAFVLATALATDQPAFRALTPEDPLIIELREWSRVEDELREEWGRLASRLREQLHRFYPQALALCPAADEGWFWALVGLAPTPAAALRLRRAAVVTLLRAHRIRRLTADQVLAALQSPPLRVAPGTVQAASAHVALLLPRLDLVDRQRRDCARRIERLLDALATTGEHQGHRDVTILRSLPGVGRVVAATMLAEASRLLAARDYHGLRTQAGVAPVTRQSGKRLLVGMRYACNPRLRNALYYWGFISVRYDAHSRQHYQLLRGRGHSHGRALRGVVDRLLTVLMAMLAAQTTYDPARRSAMLALAP

SEQ ID NO: 249209 - protein, 387 aa, unidentified
MPQFDDASRSLVPFQQDTTLVAVIELSQSSWLVAATVPGIDRQPRKKIAPDETTLLRLLYRWRDEAVQSGYVITRIAVAYEAGRDGFWLARWLIEHGIEAHVIHPTSVAVSREHRRAKTDRLDTAMLMRVFIGWLRGERGHCGMVAVPTIEDEDAKRPSRERENLVGERTRIVNRLKAALARLGIRDFKPELRKAAQRLPTLRTPEGQPIPPNMLAEMQRDLARLEVIRGQIAAIERARVERIKETPDHRPHAMMQLLARVVGVGIETADMLVQEVLSRNMRDRRAVARYAGLTGSPDESGAKRREKGLAKSGNARVRRGLIQLAWRFLMFQKDSALAQWFVRRTEGPKGMRKTKMIVALARKLLIALWRMVTQGEIPQGVILRPAP

SEQ ID NO: 249210 - protein, 433 aa, unidentified
MEEVTDEPLYRDRVCGIDIGKAGLVATIRVPSDRDPARRMAETRSFGTTRRQVLALADWLRCWQVPAVVMEATGDYWQGPFYRLEAEGFECVLADAKQVKNLPGRPKRDPADSRWLAACFERGAITPCFVATPEFRIIRLHTRYRRDLTEERTREKQRAEKLLESAAIKISSVLTDLHGVTGRDIMDHLIGGERNPKVLAQLARAAARRKISQLEEALDGAEFFTAEHAALLAKVLARIDRLSADIEDLTEVIERLLAPYEEQLAQAESMPGWGRRAAQDAVAETGVDMTRFRTGAHLSSWAGRAPLDHQSGKRAGRAKAKKGNRYLGAITGETAVAAGRTQTREGARHRRLARRRGKAKACVATGNTQLKVYHKLLSNPGMRHQDLGPDYYERQRDIRRQIAHHVGKLGSLGFEVTLCRIPEPDGPGQTQAA

SEQ ID NO: 249211 - protein, 339 aa, unidentified
MGEVTTIGLDLAKNVFQVHGVDAAGAIAVRRALRRGQVLGYFAKLSPCLVGMEACATAHYWGRELARLGHRVRLIPPAYAKAYVRRNKNDAADAGAICEAVSRPSMRFVALKTAEQQAAAGLHKVRELLVKQRTMLINALRGLMAEFGLVATAGPQHVDELARMLNEAAGAAVPEPLHGGLMQLVHSLGRVQREVETIEKEIVRRGRDNRTCRHLDTIPGYGPILASAMAAMVVEPGAFKSGRHFAASLGLVPRQDGTGGKVKLGPISKRGNGYLRRLLVNGAMSLLRGKRARHDPWLAKLLAEKKRLVVACALANKMARIGWAVMVRQEEFRARPAAT

SEQ ID NO: 249212 - protein, 435 aa, unidentified
MSMRTVNLHAAGIDLGSEKIFVSVEDQAVKVFDTFTESYYEAARYLTEHGITTVAMEATGVLWMPLYDILEARGIEVYVVNARHVKHLPGRKSDVADCQWIQELHTHGLLHKSFIPQDNIRQLRSYTRLKEDHISMASQHILHMQKAFDLMNVKFHTVISSISGASGLRVVRAILQGERDPEELLSLCDVQIRQKKRDKVLASLKGNYRKEYLFQLQQALEGYDFYQKQIEACDKNIEHLFEEITRDLPPPKTSSKAKKSKRHSYIPNLHDHLMRMTGGTNPSKIPGFTDERFMRVIGEVGTDMNAWKTKKQYVSWMGTAPNMHQSGKSNKKRRRKVKSRAGQIFRLAALSLAKSNTAYGSFYRRIKARRGAAIAMKATARKLAGMYYDLMTKGIEYVEQGIEQYEQQLKEQQLRSLEKRARKMGFVLAPERVVL

SEQ ID NO: 249213 - protein, 328 aa, unidentified
MKLLHIIGADISKNSIDLFCYGEQSHLRITNDVAGFKQSALWLKQLKLSFSNLVFVMEHTGYYSYHFENFLHQNKIRFSKVPAMAIKKSLGVVRGKNDKIDAKRIARYGYEKRDKLRLEGPSDKILQRLQMLHSSRELLVKQRSSLMCAVKEHSVVLEPEDPIIQSQFKVIAELTRQIKNFEREMKQILNQPGSLPQNFKLLTSVKGIGPVVATATLIKTKNFTRFTNRKKFSCYCGSAPFEHSSGKSIRKKTRISHLADKTMKTLLTQSARTAIQHDKELKQYYQRRTQMGKSKKSTINVVRNKLIYRMFAVIKRQTPFIDNYLQTV

SEQ ID NO: 249214 - protein, 309 aa, unidentified
MKEELVYLGVDIAKSYLDAAIGNEKRRFANERTGHRELIKWIKQMEGSVQVICESSGGYERALIEALARAQVTVSLVQANRVRQFARAAGILAKTDRIDAKVLCIFGEVMQPGTISASQLEQQHLRELESQRRHLTHLLVMEQNRAARVSDACVRRLNRSLLNQIKKQIEQLDRLIKEHIEASPALLVKAQKLTAISGVGARTAALLLAQMPELGQLNRREVAALVGVAPFNRDSGKMRGKRAIYGGRRPVRHGLYMAALVAARHNPILRAFYLRLRAAGKPAKLALTATMRKLLIVLNSSLKPDPTYA

SEQ ID NO: 249215 - protein, 376 aa, unidentified
MSTVRFLGLDVHAETIAVAVAEAGGEVRSMGEIPKRLESVRKLVHKLGPVQYLRACYEAGPTGYVLYWQLTQLGVACEVIAPSLVPTKAGDRVKTDRRDAEKLARCYRASELTAVWVPDAAHEALRDLVRAREAAKKDQLKARHRLGKFLLRHGRRPEGLKAWTKKYLEWIKTHVHFDQPALEVTLADYLEEVDHVAARIVRLEKAIDEAVQQAPPETRVVIEALQALRGVAQTTAATIVSELGSLSRFQSPRQLMGYSGLVARECSSGNRVQRGAITKTGNAHLRRVLVESAWAYQHRPNVTGFLLRRQKNLALSDEVKKIAWKAQQRLHKRYQALAVRGKNKNQIVTAIGRELLGFLWAIAVAAEKRDKLSQAI

SEQ ID NO: 249216 - protein, 317 aa, unidentified
MINTKSHIEINVGVDVGKSKLDIVLHPLDLHFSIPNDDEHIQKIVQVLKTHQVKRIVTEATGRYEHAFVFACDKADLPVVVVNPTNIRRYAQAIGVLAKTDKIDATVIAQFAATIQPDIKPIPDRQSRIIKDLLIRRAQLLEMQTMEKNRLQIMPKELHSSIKALLKSLQTQIEKLTLKLDQLVAEVKHWRIKTEILTSVPGVGKVLAYTLLSELPELGKLNRKEIAALVGVAPMNRDSGSYNGKRRIRGGRHRIRTVMFMAMLSSIQCNPVFKRHYEHLKAVGKLPKVALIACMRKLIVILNTMLKNEERWNEKSA

SEQ ID NO: 249217 - protein, 413 aa, unidentified
MLKIVYRICCGMDVHKSFIVACIASTNEQGVTTYKSKRFSTFTRDLRRCAVWLAENNCKDVCMESTGKYWIPIYNILESTCNIVLAHPKYVKAIRGKKTDKRDAKWIADIFKHDLVSGSFIPPADIRQLRDLVRYRWKLTNFTTGEKNRAQNCLTVSNIKLDDVFSDVFGKAATAITTRLLENPSEKITDVSGFRTKGMKATNEEILAAVDGELCVEQAEKLRIIRSHMDSLDLCKANLESLILSVAEKYLPQINLVMTVPGIQSFAAIGIISEIGVDMSVFPTSKHLCSWAGLTPQNNESAGKKKTTRIGRAGAYIKPLLVQCALCAIRKKSNPEIRRRYENLKKRRGHKKAIIAIARMLLTAIYNILKKNEPYNPELYAHINTPPKHRAVSVEEAIFILQRQGYLVTPSAT

SEQ ID NO: 249218 - protein, 403 aa, unidentified
MNSVGIDVSKGKSMIAVMRPFGEVAVSPFEVRHTDSELCELAKLLRSLPGETRVVMEATGNYHLPVAWLLNDSGFYVSVVNAMLVHGYGNNDLRRVKTDRKDAVKLANYGLDRWLTLPRYVPEEDTRLLLKNCYRQYRQYSKVQTVLKNNLISLLDMVFPNVNRLFSSPIRGDGSEKWVDFVAEFWHCRCVSEKSERAFTSKYLRWCRKHGYNFREAKAHTIYAEASGHIGVMPKSETTKLLVEQAVAQLRATSAALAALKHEMQALASMLPEYPVVMDMFGVGPTLGPQLMAEIGDVRRFYSKKALVAYAGLDAPPNDSGDVTGRHKSMSKIGASSLRRTLFLVMSVYLQTAPLDEPVYQFMDRKRAEGKPYRVYMMASANKFLRIYYATVKAYLESLEHTA

SEQ ID NO: 249219 - protein, 454 aa, unidentified
MRKPQVIPDEDHEVIYERVAAVDVAKASGVVCMRTPDSSRPGRFVNRIWDNVPATRARIAELGQELLRCQVQMVTLESTSDYWRIWYYVLESTGLAVHLVSASQAKNLKGRPKTDKLDAMWLARLTQLGLLRPSFVPPAAIRAVRDFTRARTDLVRERTRCLQRLEKLLEDAMVKITSVVSDGMKAKSSVAMVAALIAGERDPGKLADLARGRLRAKRDALAEALDGMFDSHHGVIAQALLDQVAFLDQQIAQMEAGAIAALAQVKESWGVDATGDTGPHTGTSPDSPVLAAAYRLAEIPGISVWLAIVIIAEIGLNMTLFPTPAHLVSWTGLCRSAAQSGTRHGNGKQKKGNSYARAAAGQAAIGAAGTATFLGERHARIARRRGGAIAQVAVARSIMIIVWHLLSDPAARYRDLGPDWHATHVNRDKKIRNHIRGLQALGLTITITADEQAA

SEQ ID NO: 249220 - protein, 358 aa, unidentified
MRNKNSKLDFIGQTIYLGLDVHKMNWSVTIYFQGIILKTISMVPRPEQLVKYLHKNYPNATYVSVYEAGFCGYWIDRKLRELGVKNIIVNPADIPTKQKERRHKTDKVDSKKLARELGSNNLEGIYIPSQENESIRALSRLRRQTVKDQTRIKCRIKSLLHFVGIQMAENSELKYWSGKFIKYLSELEFEHKAMKLTLERLLESLTKQRQILVKVVKDLREIAKADQRVSKIVGLLQTVPGIGFVTAITLYAEIMDIKRFGKFDSLSCLIGFSPATDSSGERDKVVGISNQQNKYLRSMLIESAWTAIRKDPALTQAYGKLVMRMGKQRAIVRIAKKLLNRIMYVWRNEKEYVCAVVC

SEQ ID NO: 249221 - protein, 342 aa, unidentified
MDHSAGLDVSVKETSVCIVDDTGRIVREVKVASEPEALLGVLKNPGYHFKRIGLEAGPLSQWLYSALAEAGLPVICVETRHMRAVLKAQINKTDRNDARGIAQMMRVGLYRPVHVKTLRSQKLRMLLTHRKLLQSKAIAIDNDLRGTLRNFGLKVGVVGTVKFEARIKELVENIPDLAVLVEPLLIVRRVLREQFVIQHRRLLAIVRDDEVCRRLMTVPGVGPVVSLTYRATVDVPARFRKSKSVGAVFGLTCAKYQSGEVEWSGRISRCGDEMMRVMLYEAAQSMLRSKKWSWLKAWAMQIARRRGMKKAIVALARRLAVIMHRIWVDGTEFRWTREAAAA

SEQ ID NO: 249222 - protein, 346 aa, unidentified
MDHVGIDLHKRDSQICWLYDTGEVREARIRTTPERFEALFGGQAPAQILIEASTESEWVARHLERLGHVAVVVDPNYAPMYPRRRRRQKNDQRDALALATASRTGTYRAVHRVSAAQRAVRQALTIRDTLVQTRTRGVSVVRSLVRGEGLRVASGQAEGFVGRVAAAPVPEPLATTLAPLVTLLTTLEAAIDAVETHVRTLTADDARVPRLQGVPGVGWITATAFVAAVDGAGRFADAGQLAAYLGLVPRDRSSGKGHRSGPITKTGPSRIRWLLVQAGWRVLRATTAGAQPLRRWGLQVAERRGTRVAVIGLARRLARILYALLRDGTVFDPMQVAAGRAVRPAA

SEQ ID NO: 249223 - protein, 519 aa, unidentified
MHQTKYRGIITEAGSLTTPPWEPAFRLVKPPIKSVSPFGGDLCFGWLGSLRLYLYKPLGCVSAFWKWMPAGKDKTMQYQKVLKMLESIPYLSVGLDVGADFTWMSIMLPNGTLAGKPFKIIHSDPQSRELAVAKIKEAQEAYSLGSRCFLESTGIYHIPLLCFLRDKGFDCSVINPIITKNSTNMNVRKLHNDKFDSKKAAKVGLDASLKTSIVPDDAVIDLRNLVRDYYYFKDLQSAVVLKLNAELKVSFPAYLNVFSKITTQTSLKLLEAYPLAADILAAPKDELVETIRTTARFGEKYAISKYDAICAAAKDAAVFGRALPSNALRIRLYIKTYREYQAHLDDILEELHKAVDKLQGDPVYDRICLLQSLRGVGFLSAVVLIAEMGSFDLFSSPKKLYAYFGMDPGVNDSGKFHGDRMHMSKRGSSLARRILHMVAINNLKVDKATKMPVNPVIYYYYIRKCDSRKKMVAVGAVMHKICNIIFAMLRDNKPFEIITPEEHCERYAAGHPKSVNTAA

SEQ ID NO: 249224 - protein, 354 aa, unidentified
MTTPQMTPQMTPPKLTVGLDLGDRFTQLCALDAHGRIVATDRLRTTPAALERQIAAVPRCRIVLEVGTHSPWVSRLLERQGHEVLVANARQLRLIYGNDRKSDRVDAETLARLGRLDPALLKPIHHRGAAAQADLAQLRARDALVRTRTLLINHVRGAVKAWGARLPASSAPAFATRAAAAIPVALEPALGPLLELIATLTREIRGMEHQLERLATERYPETARLRQPSGVGLLTALCYVLTLEDPGRFRQSRAVGPYLGLCPRRDQSGGRDAQLRITKRGDAMLRRLLVSGAQYILGPFGPDTDLRRWGLRLAARGGKNAKKRAVVAVARKLATLLHRLWVSGAAYQPLRTAA

SEQ ID NO: 249225 - protein, 487 aa, unidentified
MRSIFRRRNADVQRLFQEAGDSGKVMCVAFDYAKKAHTSIVCNGIGHQLHGRFDVENNQLGLKFLLGIISGLCRKHHIKREHVFFGGEDCGPYAFNFIHALVSQGFLVVGMNTKQAKDERENAHASTDLIDTIGVAGMMIKMRGRTIGTQSKSVHVIKRLRRQRGAMVKAHAGSAHRMYGIGDQLLPGFLDDKASGITPFSRPSLWLMEERFSAAEIRARHRPALVRKLREFSVQDPEGTVAKLKTLTDVALPPPEEMVEALQRSLSEEIEIYRMLSDNTHALDIDIAKLLARTPGAMFTTIAGIGLRWAPGLYAELGDPARRRSVDRMAALGGMVPRLKQSGGSDKPAVIGHRSKQCSSFLKHMLFSSAVSVARYGHPEMREAYLVDKEMGRDCRIRLARKLLRIFLHIIDNQNFFLPPSLHERGTRDQIRDYYCKAWPKVLIKWRDAGAIKEATAEGAPLRQWRDMAQELYDIELSLKSPQTGRK

SEQ ID NO: 249226 - protein, 361 aa, unidentified
MTGMVTYAGLDVHARSTHAAAIDVLSGELLRARFGPGVEEPVRWLAGLRGPVCACYEAGPTGFGLYRAAMAAGVDVRVIAPGKTPRGPSDRVKTDRRDAELLARQLLAGSLTAVVVPPLEVEAAREMTRAHDACRQELMRARHRVSKMLLRHGRVYPKQKTWTAEHRRWLSAQRFAEAPSDMVFADLLAAVDGITSRKTAIALELSRLATDERWWPTVARLRAFRGIDTLTAFSIHLELGADWRRFEHAPALSAWLGLTPSLNQSGESSRQGAITKTGSMLARRLLVESAWHYSRQPRLGATLANRQQGQPDHVLAISNRAQQRLFKVNRRMRARGKPHNVTVVACARELACFLWAAATAD

SEQ ID NO: 249227 - protein, 392 aa, unidentified
MYIVGIDIGKNHHEASIVSPEGKQIGRSLRFATTHKGADSLMSFIFKNIGNSPCVFGMEATGHYWYPIYSFLKAKGYTIYVINPIQSDSLRKMYIRQTKNDSIDSFLIAEVIRFGQFGTTSMADENILAMRQLCRYRDSVISSRTEIKLRIGTIMEQLFPEYEKQFSSLWVSTSMGILEKYLTPENIENAPIDELFEIIKDKSHNRLTRAKAISIKEAAADTFGIKIAQDAFSFQLKQLIDRMNFLDKQIEALDCQILEYYEKFDCYLHTIPGIGIIGAATILAEIGDISRFKNSSSLIAFAGIDPTVRQSGEFNSTHNHMSKRGSPYLRHAIFLAATTCSFHNSPLNAYYKKKRDQGKHHLTATGAVARKLTTVIYAVLRDSKPYEPKKFC

SEQ ID NO: 249228 - protein, 433 aa, unidentified
MSKFFNNPVVGIDVSADFSYAAILAPNGDVYKKSFRINHDVKGFTHLVNEIKKVEEEFNMKTGLFMESTGVYHLSLFHYLKNNFDNTFVINPLVTKCNKNVAIRKVKNDKKDALSIANIGKFQNIKLSQPNDLDNFLLKNLIREYYKLRDSCSTYKKKLSADLRVIFPNYNTVFSDSTSNTSLELLSNYPTPKSVMDAPKQDVMTILLEKSKKSVTWSEKIYSKLITIAEEAKIIGVPLSGLAIKISSSLAVIKAFKSQIDNLLNEINTLIESSEFPESIKENIKLINSIPGIGHLTAITLIAEIGDINGFIKPKHLVAFFGIDSSVNQSGKFQGTQCKISKRGTRIGRRALYAVALASIRRSRTGIPINKVLLEYYQVNLKGKKAKVALVAIMHKILNYIFAVLRNQSPFEQRDPKLHKQIFLENKCLNTAA

SEQ ID NO: 249229 - protein, 476 aa, unidentified
MGEDYTREGWLEVDVSSCREHDAECDSGTDRHTQLYLQNGEYAEQSLERSRSEPALMRRNEMDVMYSKCAGLDVHKQSVFACRIYANGDGEVVSEVRKFGTFTGELLQLSDWLREVQVTHVAMESTGEYWKPIYNVLEGQFELVVANAYHLKNVPGRKTDVKDAEWIAQLLRHGLVKASFVPSQTQRDLRELTRLRTTVVEDRARTVNRLQKVLEQANIKLASVVSDISGVSAQAMLRELAGGNTDALALAQLAKGQLRDKTAELEQALTGRVRPIHQFMLADGLAQLDSYDARLARIEEEIEHYMHPFEAVVQRLDTIPGVGRTTAQVIVAEVGWQVESFASAERLCAWAGVAPGNNVSAGKNLGSKTRKGNRALKTALTQAAQSATRKTRSGETYLKVQYHRIAARRGRKRAVMAVAHSILKIAYYLIQRETGYEDLGADYFDKRDHERLTRRLTTRLERLGYTVVLTQQPHAA

SEQ ID NO: 249230 - protein, 394 aa, unidentified
MFFIGIDVAKRSNQAAVTDISGNVIVKPFNFKNSSDGFTKFLSIVESNAIEKNDCTIGLESTGHYWYPLYFFLIENGFDVKVFNPIQTAAFREITIRKVKNDNLDSLLIADFTRFGRYSETYIPDENMLALKNLTRFRLSISDICGSLKKKVIAILDQVFPEYTGVFSDVFGKTSKQLLEQFSTPDEFMDISTTKLTNLLLKVSRGRNGREKAELIKTAAQSSIGISYALDAFSFELKQLLAQIEFMENQLSDVDAEMEKLLSQSEYAVITTISGIGPMLGSVIVSEIGDINRFENSSKLVAYAGLDASVKQSGEFNSSKNKISKRGSPYLRRALWMAAFMSLQCDPALYDYYSKLRARGKTHRCATTAVARKLCIIVWAIMKSKKPYSPVLKN

SEQ ID NO: 249231 - protein, 312 aa, unidentified
MIEQCFGGIDVSQDRLDVLLLPQGTGFSVANDEAGWSTLIGRLRGLLLTAIGLEPSGGYERGVLRALLAAGLSVRRINPNRLRQFARARGALAKNDRIDARLIAEYVATMPTHVVRHDPAAARIAEIVTMRRQLCDEHVAIENQAAQLEDAMLRRLAKRRLARIETDIRLLEKRLTETIAAEADLARRYARLTSMPGVGPVLAFTLIALLPELGRMSRKQIAALVGLAPYDFDSGKLRGHRSIYGGRMPVRNVLYMAALSACRYNPALRAFHKRLAAAGKKPKVILVAVMRKMITTLNAMLRDGASWQPQAA

SEQ ID NO: 249232 - protein, 370 aa, unidentified
MDDITYVGLDVHKATVCVAVAESGRGGEVRQIGVFENRPEILIKLAARLSKGGRPLSFCYEAGPCGYGLHRLLTGHGHDCIVVAPSLIPIKAGDRVKTDRRDALMLAKLHRAGELTPIWIPDAAHEAMRDLVRARATAGRVLSKARQHLQSFLLRHDQIYRGVRAWTLAYRRWLTTVRFAHPAQQIVLQDYIHAVQDAEARVDRLTRQIEELLPGWSMAPVVTALQAMRGVALVVAVTVVAEVGDFRRFANARQLMAYLGLVPSEHSSGTSVRRGGITKAGNVLARRVLIEGAWTYRMAARVSRKLHDRNEKLSPTIRDIAWKGQIRLCSRYRRLAATGKPKVVVTTAIAREMVGFIWAIAGIAQPTLQA

SEQ ID NO: 249233 - protein, 353 aa, unidentified
MTGTKYIGMDVHKESISIAVRNDAGKLVMECVIETKTNVILEFIHGLRGELHVTFEEGTWATWLYDLLKPHVTKLVVCDPRKNSRQGNKNDRIDARELADRLYMNKLSSVYHGGAGVRTLKELARSYLTISKDLGRVMSRVKAIYRSWGIPCAGKQVYAPRHRAEWLAKITEVGVLRRAEFYYQQLDALRVLRQAVRRDLLTESKKHKATKLLRQIPSIGPIRAALLIALIQTPHRFRTKRPFWKYSGFAIEMHSSADYRSVKGELQKSKKQISVRGLNRDCNHDLKNLFKSAATIASVKPGPFQEFYAALVAKGMRPEMARLTLARKIATIVLIVWKRGVSFDAKYLKSQTA

SEQ ID NO: 249234 - protein, 335 aa, unidentified
MIVIGVDVHKHELTAVAVDELGRELESWSGPLGAALLSWPPPGERLWALEDCRHVSRALERLLLEAGERLVRVPPRLTAPERRRGRVRGKSDGLDALAIARAALREPNLDRPRAGEERLRELKLLLDHRDDLVAERRRCQQRLRWHLHELEPSLAVPLGALDRAVWLDRLARRLARREQTTQVRIARELLARCRSLTRSVLKLERELSVHTQLLAPALLRLPGCGPLGAAKLLCEIGPIERFANDAQLARHAGVAPLEASSGKRRRHRLDRGGNRQLNCALHRIAVTQGRVYGPARAYLERKQGEGKSRREALRCLKRQLARTVYTTLKSEPLLT

SEQ ID NO: 249235 - protein, 354 aa, unidentified
MKRSTKYVGLDVHQAMTVATVRSEGGRVIARSVIETSDEAIREFFNAMAGSVHVAFEEGTQAQWLYDLLSPRVDRVIVCDRRGEKRSGNKGDQGDADELSEQLRCGGLRAVYHGARGRADLKELTRAYRNLVEDGTRVMLRLKALFRARAIRTTGGGVYQPKGRAAWIARLPEQGARLRADTLYAQLDVLRAQRKKTKAAMVAEAKRDPAFAVLETIPYFGPVRIALLLATIGTPWRFRTKRNLWAYAGLAVVTRSTADYELFDGRPRRRRRPPLTRGLNRNHNRVLKNVFKGAANVAIARPGPLQEFYHGMLERGMREELARVTLARKLAALTLRLLKTGEVFDPTQLSRPQI

SEQ ID NO: 249236 - protein, 350 aa, unidentified
MLIIGCDYHPGFQQIAFVDTETGELQERRLQHREEAEKFYRDLAGQGASVRVGMEASGHARWFERLLSELQFELWIGDAAEIRRKRARKQKTDRQDAQLILRLMLEDRFPQIWVPSWENRDLRQLLWHRHRMVQARTRILNQLQAVALNEGLRCKKRLWREAGRQQLESFRLAPWASQRRRDLLELLDQLNPTIAELTQAIEQEVEKCPEAQRLRTHPGVGSLTALAFVLVLGRADRFQCGKQIASYLGLVPLEESSGNRRRLGHITKQGNSLLRFLLVEAAQVTVRSIPEWRSKYFHLAMRRGRKIAKVAMARRLAVQMFWMLRKGWNYEQVKKFGSHAGQPGHRVGVQ

SEQ ID NO: 249237 - protein, 326 aa, unidentified
MAIIGIDVSKEKLDCFWLKDAERRTGRAKVFKNTPGEFPALMNWMVAQTGEPPAQLHFVMEATGIYHEALALHLHAAGSKVSVVNPAWVRDYAKSLGVRTKTDKQDSVVLARLGAREPLRLWQPEPVEIRILKALLTRYEAVKQDHQRELNRLEKAEITQVSEVVLESIHTLLAELEKERVRLEKCIRQHIDQNPNLLADRRLLESIPGVGPVVSALMLAVLRSRSFNSASQCAAFLGLVPVQHESGSSVCGPARLSKAGDATVRAKLYMAAVVAIQHNPDIKRHYQRLLKNGKSKMAALGAAMRKLVHICFGVLKHQTAYQARIA

SEQ ID NO: 249238 - protein, 334 aa, unidentified
MTQPAPARITVGVDTHAEVHVAVAKDNFGRRLDVISVPTTPAGYGELLGWARRLGQIEGWGIEGTGSFGAGLTRFLHRHGQVVVEVNRPDRQTRRRRGKSDPLDAEAAARAVQAREGVIPKAGDGQVEMIRSLRVARATAMKARTQAINALKGLLVTTRDELREQLRALSAVRLVQTAAELEPGPVTTPAAAARLGLRSLARRYQALSAELTILDTELDRLTVTAAPKLLALFGVGSDSAGALLVAAGDNPDRLRSNACFSMLCGASPIQASSGKTQRHRLNRGGDRQANAALYRIVIARLRHDQQTKDYLDRRIREGKSKKEAIRCLKRYVAR

SEQ ID NO: 249239 - protein, 319 aa, unidentified
MTDPATFVGIDVSKDTLDVHVRPRGDAFAVGNDPQGIADLVARLAVARPALVALEATGGLGHACAAALAAAGHPVAVVNPRQARDFAKATGRLAKTDAIDAEGLALFAERVRPEPRPLPDEQAREFEALLQRRRQLLEMRAAERNRLGAAAAAPVRASLQAHIDWLSKQLEKVDKELGAAVEASPVWRAKDELLRGIPGIGPAVSRTLLAALPELGALTRQQIAALAGLAPVSRDSGRRKGQRSIGGGRAEVRSLLYMAALSAARYNPALRGFSERLRRAGKAAKVRLVAVARKLLTIANAVLRDGRRWDAALCGTERG

SEQ ID NO: 249240 - protein, 376 aa, unidentified
MREKLRFLGLDVDAETIVAAVAEPDGEVRSLGTIANREDSIRKFIKKLGSLEQLRACYEAGVTGFVLYWQLAQLDVECTVVAPTLVPKKPGDRVKTDRRDALKLARSHRSGDLTAVWVPDEASEALRDLVRQREAAKQDQLRARHRLTKFLLRSGQRAPLGVKAWTVRYMQWLAQVRYTQPAQEVTRLDCMNEVEHMSARVKRLEEAILEVVKQAPQAMQELIRGLQALRGIAHISAVTIASELGNVSSRFESARKLMGYSGAFPSENSSGNRIRKGAITKAGNAHLRRIVMESAWCYRHLPRVGEKLRKRQQGIPAEIIEIAWKAQNRLHKRYTKLVMAGKDQRKVITAVGRELLGFIWAIGVKVEQASRKPLPA

SEQ ID NO: 249241 - protein, 387 aa, unidentified
MSKHNDLSRCLVALEQDATLIAVVEMGQASWLVAGIAPGLDRYPLKKLGADRDALLQLLHRWRSEAAKAGHTIDRIAVAYEAGRDGFWLARWLRSQSIEAYVIHPSSVPVSREHRRAKTDRLDTELLKRAFLGWLRGEPKHCSMAAVPTLEDEDARRPGHERQTLVEERTRILNRLKANLARLGIRGFRPNLARAPSQLEALRTPEGVAIPTNTLAEMRRDLDRLRFVKRQIKEIEKTRADRLAKAPDERRHVAARALTRVVGVGVETADMLVQEVFSREIRDRRALARYAGLTGAPDESGQRRRERGLAKAGNARVRRGMIELAWGHLVHQKGSPLSAWYRRRTADARRGMRKTMIVALARKLLIVLWRLATTGEAPEGLLLRPAA

SEQ ID NO: 249242 - protein, 409 aa, unidentified
MMKQNIIFGIDVSSKSSTVCVVIDRIKQGETFKITNDSFGYQDLLDRLNQYLITPLVVFEATGVYSLSLQAFLEDYHIKYLKLNPLKAKKLMDNNLRHNKTDKVDAYRLALIQFNAPQKLRAPQPKEYHELQNASRYYEELAQALIINKNQLHRNLQSTFPQIESILSTSSGRVYWTIVSLFPHAQYVLNHNENQVFQSLLAISGIGRQRAHYLTTRLYALARQAYPYDNESSITIRAIQRNIANLLSLSAERDNVINYMEKLAMQANARSLNIYESIPGIAKTTAVRLVAELGDLRRFDTSAQIDAFVGIDPGRYQSGEKNSHLGITKHGNHLARKILYRTITQMETVKATQLCHITDYYDKKKRSSNSRGYKKIAIASVHKLIRTMFALIKHDQLYDYNVATHNQRL

SEQ ID NO: 249243 - protein, 321 aa, unidentified
MTYIGIDVSKDSFVVAYSPDKNSKTKTFKNTTRGIHEFIRTISKEEHHCVMEATGNYSALLVYLLSEAGITTSLENPLKVKNFARAMLSTVKTDEIDARLIALYGEKMQPAPYKLRSDAILTLKQKRTVIRQLKKQLISTRNLKGSMEALPFFDAKCRKSVEKTIAFLEKQIKDLEEDLGSLAKSEYKKQMDLLTSVKGIGITLAAALIMATGGFTYFDNAKQLTRHLGLSPTYQQSGTSVNFKGHINRNGDSFLRGQLYVAAFSSIRCNTECRACYDRLRSKGKPGKVAVIAVANKLIRQAFAVVTQEKPYVDGYISSKK

SEQ ID NO: 249244 - protein, 405 aa, unidentified
MELKGIILKTRESVRQSAAKMLCLKSISLKVINFIRVIEQTLNTERLMQHKVKELNFGGQNIYVGLDTHRNQTTVTVLGENLHHKTFSQPTAADILARYLKKNFPGANYYAAYEAGFSGFWLQETLQSQGINCIVVNAADVPTKGKERNQKNDNVDSRKIAYALRKGDLDAIYVPSKECQRDRGLLRARQRIVSNQTRCRNRIKALLNFFGIVYPEKFSKSGTHWSRRFMDWLKSVDLGGSGNDTLAIYLEEAEFLRALLAKTMKKINHLSNQERYAKNVKLLISVPGVGRLIAMILLTELERIDRFKTRDSLCNYVGLIPDVYSSDQTVHVGDITQRGNKSLKKFLIESSWIAARTDPALVMKYNQLCSRMNGNKAIIRIARMLLSRIRYILMHEQEYQMAVVA

SEQ ID NO: 249245 - protein, 409 aa, unidentified
MERLLERCAGLDVHKRTVAACVRVPGPGGKRVHHVHTFGTTAADLLALGDWLATHEVTHVAMESTGVYWKPVYAVLEERFTCVLVNAAHVKQVPGRKTDVADCAWIAQLVEHGLVRGSFVPPRPIRDLRDLTRYRTTLTHERVRHANRLHKVLEDAGIKLATVASDILGVSGRAMLGALVAGTTDPAVLAELARGRLRTKLPALRAALAGRFRGHHAFLVSQMLAHLDYLEEAIATVTTQIEEVLRPFAAVVERLDTIPGISRRVAEVVVAEIGTDMTAFPSDRHLASWAALCPGHHESAGRQKSGRTRKGNRWLRAALVQAALGAIGTRDCALAARYRRLVRHTGHNKAVVAVAHALLVTIYHVVARETAYTERGAAYFDARHAERVTQRAVQALERQGYRVVLERAA

SEQ ID NO: 249246 - protein, 332 aa, unidentified
MSVYVGIDVHRKRSQVAVINQDGEVLANRNVPNGVEPILRVIGGLPSGTPAAFEAAFGWGWLVELLEDYGFEPHLVHPLQCKAIASARLKNDKVDAAILAQLLRADLLPEAWIAPPQVRQLRALLRHRIQLVRLRTLLRNRIHAVLAGHGHDRPAGYWSGPGRDWLASLDLPAVSAEVIADALALIDALESVTGRLDAEIRGHARSDPRVTVLTALPGVGPFTALVLLAEIGDITRFGSARKLAAWAGLTPTVRGSDRMVRHGHISKQGSVWVRWILCEAAQTAKRSPEFAARYQAIARRRGKKIATTAIARKLLTRACHLLTDASSDGAPR

SEQ ID NO: 249247 - protein, 361 aa, unidentified
MAQAKTWAAFDVHVSGVVAATFDRDSGELRVQRLPGRSEEVAAFAATLPGRVRATYEAGPTGFVLARKLAAIGVDCLVCAPGLIPRAVTDRVKTDRRDAERLVRLLAAGELHRVTVPSVEEEALRDLVRAREDLRGDLMRARHRLAKLLLRHEVRFDGPQANWTQAHLGWLAGVRLDQAASQRALEDYRGAVAGLMIRREQLEAEIARALPASPWAQTARRLMCLRGIDTLTAAGLCAEIGDFRRFGHPAQVMSYLGVVPCEHSSGERRRRGPITKSGSQHARRLLVEAAWHYRRPPRVAGSLARRQLDGEPEVLALSWKAQRRLHHVWQRMEQRHKRRTIIAVAAARELAGFCWAVATAD

SEQ ID NO: 249248 - protein, 328 aa, unidentified
MYTVACDVSKATLDAAWWEDSTGRWHERSKLRNRRGGHHKLLRWMMKVCGCAPHELCLILEATGVYHRPLAEYASRAGVRVIVVNPGRSAEHASSQNRLNKSDRLDARGLQVYGRQLEKRHEYVPHSAPVQALQAQLSRLRQLDKDLARERNRLEKCQFIPESRALAASIRRQLGQLKREKQRVQHDIDALIAEQDDLRRIQRRLVSIKGIGKLTSQWLLPLLYRGQFESARQLAAYLGLTPVHQRSGTSLNKRGRLSGRGNPQLRAQLYMPAVSATTHDPAMARRYDDLIRRGKTPKQALTAVMRKLVHVCYGVVKNDQNYQCPIAA

SEQ ID NO: 249249 - protein, 448 aa, unidentified
MVVADIEVEGEYQLARRPFGATPQQLRSLAEWLIEREVEEAVMESTAQYWKPVWAALEQYWKPRCQKREGAGPMSGALHLAQAQSNRGPRGRKKDFPDAEQLLKRLVAQELRLSFVPDAEQRLWRTVTRRKYQLTRNRARLQNQLESLLEEAHIKLSSLVSDLLGASARRMLHALADGETNPATLAALANKQLRATSEQLCDALGACTEPNPVYRRLLKMALDELQFIEHHIGRLDQEMATLLLRHQDAVQRLAEVPGLGVDSAQQIIAEVGATAASFPSEKHLSSWVGACPGDEESAGVSHSHRSPNGNRQMRRILNQCANAAVKVKGSIFQILYRRLVPPLGTQSNHRGNCASDLSTHLGYVASRRALCGTRPCRPRKLETSTHGENDPATPELRLSRRTASTESSMSREEFSTLHGVQTKEQRTFVRCPSACTLPQVLRQTELCC

SEQ ID NO: 249250 - protein, 314 aa, unidentified
MQTDVVVGIDIAKAYLDVYLDTTDQLKRYSNTPSDREHLVVMLREQQPTLIVLEATGGLERLLVAELLAAALPVVVVNPRQVRDFAKATGRLAKTDALDARVLAAFGGAVKPALRPLPDETSIELAELLTRRRQLVDMLAAEKMRLKQATGKTLRRDLKAHVEWLEKRVRNSDDGLRQAVENSPVWQAKYDLLSEVKGIGPVTSMTLLALLPELGQLDRKRIAALVGIAPFNCDSGTLRGRRRIWGGRAEVRRVLYMATLGAIRGQNPPILELYKRLKAAGKQSKVAIVACMRKLLVILNAMMRDQAHFQVKTT

SEQ ID NO: 249251 - protein, 350 aa, unidentified
MRGTRPLMELHAIGIDLGKTLFHLVGVDSLGNVVVRKRCSRTQLLAYTANERVQRIGMEACGGAHFLGRALREQGHDVRLMPAQYVTPYVKTNKNDYIDAEAVAEAVQRPTMRFAPIKTEEQLDLQAVHRVRERWVRRRTAVVNQVRGLLLERGLTLPKGRSHVDQRLPDILEDGSLPLSDSFRVLLAQLKLELDQLSARIEQMDAVIRQTATENEVCQRLTAIPGIGPVTATALIAAIGNGSGFRRGRDLAAWVGMVPREYSTGGKQKLLGISKRGNAYLRRLFVQGARVVMQYRTKQAPGLSCWLGQLMARTHQNVAVVALANKLLRMAWAVLCKNEAYRPPVVNTSS

SEQ ID NO: 249252 - protein, 346 aa, unidentified
MNRMNYVGLDIHKKSISCCVRRADGTIIQEITITATRQALDEWMQQLPQPWMAGMEATLFTGWIYDHLESCGATVKVAHPAMLQGIAAGKKKNDRVDARKIADLLRCDYFPECHMAPREIRDRRRVLRYRNLLVRQAVQMKNKVSGLLMEAGVPYNQQKVHQKKYFAELLQKQKKEMPPSMPELLRLSRSTVEALTGMQRQLIRALERDALLAARVERLASIPGVGRVVALTWALEMGDIRRFASVKKAVSYCGLCGAEKSSGGKTERTPISKQRNKHLQTILVEAAKLAPRWNAELALVYEREKQKGNRNRATLAVARKMVAYLMAVDREQRPFDTQLRVAGNAA

SEQ ID NO: 249253 - protein, 375 aa, unidentified
MKEKLRFLGLDVHAETITAAVAEPDGEVRSLGTIANRVESIRKLVRKLGAVEQLRACYEAGPTGYVVYWQLAELGVKCEVIAPTLMPMKAGDRVKTDRRDAERLARSYRSGDLTAVWVPDEASEALRDLVRAREAAKQDQLRARHRLSKFLLRMGRRPAPGIKVWTTLYLAWVRQLRFEQPAQQATLVDYLHEVDHMAERVKRLEQAIGEAVKLASPEVREVVKGLQALRGIAEISAVTIVAELGCITRFEGARQLMAYCGTVPSETSSGQRTRRGGITKTGNAHLRRIVVEAAWSYRHRPAIGHRLRKRLETVPEPIQEIAWKAQVRLHRRYMKLAAAGKDPCKIATAVARELLGFVWAIGVKAERSVTEQVAA

SEQ ID NO: 249254 - protein, 410 aa, unidentified
MEVLYAVCCGLDVHKARVTACLRAPGDGPQRRQEVRTFGTTTRERLRLADWLSAAGCTHVAMESTGIYWRPVYNLLEGRFELSLVNAQHVKMVPGRKTDVRDSEWLARLLELGLLRRSFVPPAAPRELRDVVRYRKRLIEERAREANRVQKVLETANIKRGSVVTTVLGVSARAMLKALITGEGAPEQLADLAKRRLRRKRAALGEAFTGRVTAHHRFLLDQLLCHIEFLDGAIAVCDRQVETRTAPDADALARLDTIPGVARRPAEVIAAELGCDMSRFPTAGDAASRTGLGPGNRESAGKRLSGRTRHANRTLRQALVESARGAVRKRDSYLAAQYRRLVKRRGDKKAIVAVAHSILVIAYHLLRDGTSYRELGGDYFERLNADRLTRYHTKRLAALGYTVTLTKCAA

SEQ ID NO: 249255 - protein, 329 aa, unidentified
MGTNVLGIDVSKDTLDVVLRDQEHSQHQVFSNNKVGYTRLSRWLTTRRAGTVHACLEATGQYGDGVAEHLYQAGHAVSVVNPLRIKRYGESKLHRNKTDKADAALIAEFCVKENPPLWKPLPDSLKQLRQMVRRLDDLQCNYQQESNRLTSGVTNAWVLADLQGHLQELSQRIQAMKAAIDQFIAANPELKHKAYLLDTIPGIGMLTAARLLAEIGEISSFEDAPQLVAYAGLNPKGVRSGSSVHKKTRISKEGRAFIRYILYMPAISARIHNPIIRDFCDRLAQRNLPKMAIVAAAMRKLLHLVFGVLKNDTPFNPNILKEKVFALDI

SEQ ID NO: 249256 - protein, 328 aa, unidentified
MKLQHIIGADLSKESIDLFSHEFQAHLKIENSFKGFRQMLKWLRDQKISCSNVMIVMEHTGLYSYHMEVFLHKHQISFTKVSALAIKRSLGLVRGKNDKIDARRIARYGFEKKDVLVVTSKPDKAIERLRMLHSTRNRLVRHRASLICAIKEYKNILKQSDLIIKSQLSLVKSFTGQIKKIEAEISQLITKEQLVNQNFQLLKTIKGVGKVVATAAIIKTRNFTQFSNARKFACYCGTAPFEHSSGKTIRRKTRISHLADKEMKTLLDQSAKSAIQYDKELKSFYQRRIAIGKSKKSTINIVRNKILYRMFAVIKRQTPFIENYLKTA

SEQ ID NO: 249257 - protein, 338 aa, unidentified
MVYGAIDLHMRYSQIRIVDEDGAVVRDQRVVTSRERLTQAFASHGPMRILLETGTESEWVAQALEMAGHEVIVADPNYAPMYGELRRKVKTDRRDAAALAEANRRGWYRPAHRASAPQRETKQMLRSRRFLVQTRSGAVSLLRSLLRQSGHRLGTGSCETVPTRVSRLAVAPELGETLAPLCRQIATLTTEIHALDARLQTRTATDAIVARLRSVPGIGLIVATTFRAFVDRHERFGHAGQVSAAIGLVPREDSSAERRHRGHITKAGPREVRSMLIQAAWVCWRHPGSATLRGWTDRLAARRGRRIAVVALARRLSRILFALWRDETTFDGRTLAAA

SEQ ID NO: 249258 - protein, 386 aa, unidentified
MQKLNDLSRSLTALEPDGTLIAVIEMSLSSWLVAGIVPGVERQPLKKLAVDESALLKLLHRWREEAEKAGRRIERIAVAFEAGRDGFWLARWLKVRGIEAYVIHASSVAVSREHRRAKTDRLDTELLKRSFLGWLRGERDHCKMVAIPTMKDEDAKRPNREHDSLIGERSRIVNRMKAALVRLGIRGFNPKLKRASTRLDGLRTPEGEPIPPNALAELRRDMERRRLVNNQIRQIEEERLKRIEQAPCDGPHVMVRLLARVMGVGIETADMLVHEVLSRNMRDRRAVARYAGLTGSPDESGRKRREKGLARSGNVRVRRGMIQLAWRFLLHQKNSALTKWFRSRTENARGTRKPMIVALARKLLIALWRLVREGIVPDGVVLRAAQ

SEQ ID NO: 249259 - protein, 324 aa, unidentified
MNKIKQFFGIDISKDVFDVVDHADNHYQYKNDPSGFKEFYKILTEHSHCVMEVTGCYYQALATWLYARSVDVSVVNPLSVKRFIQMRLKTSKTDKLDARMIRLYSEFEDPELWKPPSQYLIEANELHKLIVLLLKQRTALKNKLHGLNAKGITTSTVVRSLRRQIRNLDNEVSALELKLESIVKKHQADLMTRLCSIPGIGKRTAIYLIVLTQGFEKFENSRQLISYFGLSPTIHESGSSIRGRSRISKTGNNHIRNLLFMCSLTACEHNKSCREIYQRITAKGKSKKLALIAVANKLLKQSLAIAKPGLYYDENFRSVYLNNV

SEQ ID NO: 249260 - protein, 356 aa, unidentified
MTEITTVGVDLAKEVIVVCGGNAAGRVVLRKQLSFVGFSQWAANLPPCVIGMEACSSAHHWARKLKRMGHTPQLIAAEHVEPFRMSRVAKNDHNDAMAIMVAVRQPTMRFVTVKSVDDQAMLSWHRCRSGFIDERKSLLNRARGLLSEFGIWVGLSTAVLVRKLPELMDEPTLPDLFKPILLHTLEHLRQIEQRVEECDARIAAHAMGSEAAQRVQKISGVGVVTASALVATIGDPKNFRNGRQMAAWAGLVPKQNSSGGKTRLGKITKHGDSYLRGLLTQGARSTLQVALKREPQKRSRLEQWIVAVHGRVGYHKTLVAIANKHLRMIWAILAKGEAYDPNAWRLYQQQKANVSA

SEQ ID NO: 249261 - protein, 349 aa, unidentified
MTEAYDGRQVVGIDLHRRRSVIVRMTEDGRKLETVRITNSPAALRREIAKAGKNPRVVVEATYGWYWAVDVLEEAGAEVHLAHPLGVKAFSYRRVKNDERDAADLADLLRMGRLPEAWIAPAEIRELREITRYRHQLVKARTSLKDQVHGVLAKLGIPVTHTDIFGVHGQAWLDELPMPQPYAGKVASLRQLAGGLTAEIGLLEQVTADLLAGHEGYAAIQQLPGIGPVLAAVIVAEIGDIRRFPGPGQLGSWAGLTPRHYESDTKVIRGHVTKQGSRMLRWAVTEAIQRQPAGSRPRQVKDAIIARRGKEAKNIAKIAAARELLTLVFYGMRDGRVRRLDPPRARPAA

SEQ ID NO: 249262 - protein, 377 aa, unidentified
MSKIRFVGLDVHAETIAVAVAEAGGEVRAHGVIPNRLESIRKLIGKLGPVGQIKACYEAGPTGYVLYWQLTQLGVVCEVIAPSLVPTKAGDRVKTDRRDAEKLARCYRAGELTPVWVPDAAHEALRDLVRAREAAKKDQLKARHRLGKFLLRQGRRPEGLKAWTKKYLEWIKTHVHFDQPALEVTLADYLEEVDHVAARIVKLEKAIDEAVRLAPPEIRAVIEALQALRGVAQTTAATIVSELGSVSRFQSPRQLMGYSGLVAREHSSGNRVRRGGITKTGNSHLRRVLVEAAWAYQHRPNVTGFLLRRQKNLALSDEVKKIAWKAQQRLHKRYQAFAARDKNKNQIVTALGRELLGFIWAIAVHTEKQQKQLNKIA

SEQ ID NO: 249263 - protein, 384 aa, unidentified
MNKHSMIFIGLDTHKEFHEVAYCEEQRGASPVHYGRIPSSKVSVKKLLRQFESKYPGATLHFVYEAGPCGYWIYRLITSLGHCCYVVAPSLIPKKPGEHIKTDRRDALKLVKLLKSEDLTPIYVPEPEDEAVRDLSRAREAAMKDLKEAKYQLKALLLRNNIRYEGTANWSKKHLRWLTELILPHPAQQIVLQEQLQTIEERIRRLERLDNELTHHVHQWRYYPVVKAIQAMRGVRLLVAVGVVAELGDLHRFDHPRKLMAYLGLVPSEQSSGGKRHLGAITKAGNGRARRLLIEGAHSYRYPANVSTELQLRQEGLPKDIVDIAWKAQLRLCKRYQRMNKKGKHYNLIITAIAREMAAYIWAIAKEVVLTPVNPKLRLSRVPA

SEQ ID NO: 249264 - protein, 338 aa, unidentified
MILTRRCARIPNSRLGLKSPHLQGRERRMSDIFVGIDVAQDHCDLYVYPLAQKSTFGICGMDDVIARLRDLQPAMIVMEATGGLEIPVAAELVAADLPVTVVNPRQVRDFARALGILAKTDAIDARVLALFAEKVRPESRPLPDVRMRALRELVTRRQQLVDMRTMESNRRRMLRSERASTSIQLMLDTIEKEIHKLDLEIKKHITKSPIWQKKADLLKSVPGIGNTTAPLLVVALPELGKLNRRQIASLVGLAPMNRDSGTLRGHRTIIGGRRMVRTALYMPTICAIRFNPIISRFYERLRTAGKPPKVAITACMRKLLIILNAIVRKNTPWVLHIA

SEQ ID NO: 249265 - protein, 348 aa, unidentified
MNITTVGIDLAKLFFQVHGVDARGKVTLRKQLKRSQVVAFFAQLAPCLVGMEACGGAHFWARKLLEFGHTVKLIAPQFVKPYVKTNKNDAADAEAICEAVGRPNMRFVPIKNTEQQALLGLHRARQGFVAARTAQANQIRGLLAEFGLVIPAGIRCIERKLPEFLEDAENGLSGASRALFARLLEHFRELDRQVKELEREINAWHREDTASQRLQAIPGIGPLTASALVASVGDAKVFHNGRQFAAWLGLVPRQDSSGGKTNLLGISKRGDTYLRTMLIHGARSVLLSLKRHPDRAGGWLARLADRRNHNIAAVALANKNARIAWALLAHGRDYQAGFRSANPVAVGA

SEQ ID NO: 249266 - protein, 426 aa, unidentified
MAVVMIGVDPHKASHTAVAVNAAEQSLGQLRVRASAVQAERLLAWAHAWPERTWAVEGAGGLGHLLAQQLLSAGERVLDVPPKLAARVRLLATGNINKNDPNDARSVAVAALRSADVRQARRDDHAAVLKVWSKRYRDLGRMRTQVACRLHQVLCELVPGGVPGEISAGQAVRLLASVTPAGAVEAARWELAAELTEDLRGLDARIRQTRTKAAAAVRAAGTCLTGLFGVGPVIAAAVIGDVRHVSRFGNRDRFAAYNGTAPIEVSSGGRKVYRLSRRGNRRLNHAIHMAAVTQIRYRHTKGRAYYDKKLAEGKTPKEALRALKRQISDAIFACLQEDARRAAAAAKSPGGQPGNHSATRAAGSHPEHRLFGQATPGPATHPTTPAAPVPAQLPSRASERLSPGPGAARPRSGARRASSTRPRASR

SEQ ID NO: 249267 - protein, 418 aa, unidentified
MSQRDTLFCGIDIGKARHVACVIDADGGRLMRSQSFTNDAAGFALLRQRLEDIRRGKPLLIAMEATGHYWYALHEYLTLQGHQVIVLNPLQTSHQARKQIRKTKTDKKDAYHIATLVKNGDFLRTVIPGDVATTCRQLTRLWFALRCQRTRLGQLIGSTLEWLWPEFEGHFADPLCATAQAVLRLAPSPQALCAVDLPTLTTLIETTSRRKLGEDLARRLLESARTSVGMRRGNQGATEAITTLLLQLDANKPVRQRLGDKIEALSANIPACLLTLPGVSPISAVSLFAETDPISTFTNPDQLVAFAGLDPAVFQSGEYDAPHRHVSKRGSPHLRRTLWLMAMGAILHPGPLRDYYQRRRKGGLHHTSAVTATALKLCRITWRIMTDQRDYTPEPPARQVSVAAVKTNASPKKRKASR

SEQ ID NO: 249268 - protein, 344 aa, unidentified
MKRYLGVDLHRTQFVVCTRWENQEQEIRQWRIAELAKFVEQLQPEDQIAVEAMGTTARFYDAVVGRVARVVVVNPHQFKVISESVKKTDRNDAAALALYLEKDLLPEVRMKPKQNRELMHLAETRDLLVKQRSALKGKINNLLAMQGIELKREALSSKIALERVLASPVRGMVQLELRVLVGQIRSLSESIAEVDEQLEEEGQQLPGYENLTSIKGIGWWSATVLLTVIGKISDFADENKLAAYLGLVPRISNSNESERSGKITKQGNKLARTALVQCGLVAKRYSPYLQRFYERIKQRRGGGKAKIALARKLVKIVYDTLKNQWVFEDFPSFTLAAKTSQNNF

SEQ ID NO: 249269 - protein, 377 aa, unidentified
MDKDSRFVGLDVHAETIAVGVAEPGGEVRSLGTIPNTPEAVRRLVKKLGPPETLRVCYEAGPTGYVLYRQLSALGVPCAVIAPTLVPVKAGDRVKTDRRDAEKLARSYRSGDLTPVWVPDPGHEALRDLVRAREAAKKDQLRARHRLGKFLLRQGRRAPTGSKAWGVKHRAWLQTIRFAHAAQDATLLDYRTEIDHAADRIARLERAIATAADLTPAPVRAVIAGLQALRGIAKLSAVSVVTEVGALSRFAKPRQLMGYSGAVASEHSSGPHRRRGGITKTGNAHLRRIVIEAAWAYRHRPAIGGTLRTRQAGLSEEVKALAWKAQHRLHGRYARLLAKGKAPTQVVTAIARELLGFIWAIGVHIEQHTAGGAPAAA

SEQ ID NO: 249270 - protein, 451 aa, unidentified
MAKRGEKRERRSMVLEPDAAGIDIGAEEIYVAVPPDRDEESTRRFSSFTGDLHALADWLSRCRIQSVAMESTGVYWIPLFQILEKRGFKVYLVNAHYLKSVPGRKSDVSDCQWIQYLHSVGLLRASFRPPEAICAIRTLWRHRGSLLEMAAEHILHMQKALSQMNLQLHHVLSDITGTSGQAILDAILSGQRDPVELAQLCHRRGKSPRDKVAQSLVGDYRPEHLFTLKQSLEGYRYYQKLILELDQETARLMQALPSATEDPLPPRTKATAYQRQRNDPRFDLRSELYRIAGVDLTDIPGVSAATAQVILTEIGTDVSRFRNASAFASWLGLCPEKRVSGGKILSCKTRKVKHRAATALRMGANSLCRAKGYFGEFFRRMRAKLGTAQAITATAHKIARILYHVLLTKEPFAETVFHRCDQQAQQRAEMRLRKQAAQLGFQLLPIPATGQ

SEQ ID NO: 249271 - protein, 387 aa, unidentified
MYFVGIDISKFKHDCAIVDELGDVITPSWSFQNDREGFSLLKELLDALDGEKKIGLEATGHYGQNLKLFLENNDFSFMEFNPLLINRFVHSKSLRKTKTDSIDALMIAQYLMTVEYKPYPPSFYTFEKLKSLTRFRDSLIRQRSRQLVELTNILDKVFPEFKPFFKGRFSATALYILSHYASPEKISNMNSKSYEPLRRLSRGRFSMVDFVELKTLARNTVGSTCDYLLQEMEITIDIYNQLQSKVEEIELQIHNCVLGLTPPMLTIPGIGVASAAVILSEFGDLSKFNSPSKLLSFAGMEPGYFQSGTSESTGKMVKHGSSHLRYAMMNCAQTVINNEPTFAAYYAKKRAEGKEHRVALTHVAKKLLRVIYTLQTKELSYNPDLVR

SEQ ID NO: 249272 - protein, 422 aa, unidentified
MAREEYFVFAGIDWATSSHAVCVVSADGDILGEAEFSNNAKELEKMCSWITAFSEGRPELVAVGIEVPHGIVVDTLLDHSLEAYSINPRQLDRFRDRFSPSGAKDDARDALVLADSLRTDRRAYRKISPDLPEVIEIREMGRMQRELGTERIRLSNRIEASLYRYFPQMVPLVGDLKRIWQVELMALAPTPEKARKLRLSRLKKFVQEHHVRVLSAEDLLKAFREPTVRVSPSTVRAASTHIAFALERMRVVNKQMDQCNKMLKHMIDTLVSEPVEDKEKEETPEHHDLEILLSLPGVGRIVLAMLLGEAWSAIEARDYQALRALSGVAPVTRSSGNSRRVLMRRACNPRLREALYHWSRIAVQKDDGCKTRYATMRARGMHHAQALRSIANRLLLVAITMLKNGTLYDSGYGNRTVLKEAS

SEQ ID NO: 249273 - protein, 418 aa, unidentified
MKKHSKSSQRSEPRLERTKARGPVQRDAKEVLAEVLGKLTGKLDMPAVSTSAKENRRGNTVGPNRDRLTVGVDLGDRWSQYCILGLAGETLAEGQLRTTQEDVREFFQALTVARVVIEVGTHSAWVQDVITEWGHEVLVANPRLMESSKRRKRKSDRIDANKLARLGRVDPQSLYPIRQRSREVRQDLVVLRARDALVSVRTELINTARGLVKSMGTRLPQCSSPSFAEKVKDAIPIEVREALLPLVELVERVNDCISKYDQKIEELGREKYGHTTMLRQVKGVGPITSLAYVLTLEDPQRFASSREVGPYLGLVPKQEDSGDSQPQLGISKTGDRMLRRLLVGSSQYMLGAFGPDTDLRRYGLRLCERGGKNAKKRAVVAVARKLAVLLHHLWVTGDVYEPLHHTGAETKTAQATAA

SEQ ID NO: 249274 - protein, 454 aa, unidentified
MSKKRGESKKKAVGIDALEQINLNAAGIDIGAEENYVAVPKGRDEETVRSFLTFTADLHQLADWLAACGVETVAMESTGVYWIPLFEILESRGFEVYLVNARHIKNVSGRKSDVLDCQWIQQLHTYGLLQPSFRPPEQICAIRSLVRHRDMLIKYRSAHIQHMQKALNLMNVRLTNVLSDITGVTGMKIIRSIVVGEHNPEVLASYRNGGCARSEVEIAKSLEGHYKREHLFALKQALELYDFYDQQLHDCDMELEALYEEFDLPDEPGTPPPDPRKTKRRKNQPHFDLAQSLYHITGVDLTQIDGLDSLTAQNILSEIGADMSPWPTVKHFASWLRLSPNNIVTGGKVKQRGTQPSKNRANTAFRMAAQSLARSDCALGAFYRRIRARHGGPKAVTATAHKLARIVYFMLKNRQPYHDPGADYYEEQYRIRAIRNLRHRAAKLGLRLEPTGAT

SEQ ID NO: 249275 - protein, 344 aa, unidentified
MHIASIGIDLGKTTFHLVALGERSKVLVRKKFSRTQLLAHTANLPPSLIGLETCSGAHFLGAALRQQGHEVRLIPAQFVKPYRKSNKNDFLDAEAIAEAVTKQNMRFVPIKTQEQLDVQAMHRVRDRLVQRRTALINEIRGFLLERGITFPAQPTHLRKNLPSVVEDAEQNLTPRLRWLLGLLWQEWKQTEIEMETVTDEIERISNQDERCQRLRQIPGFGPLVSTAMVAAIGNGAAFRRGRDFAAWIGVVPRQYSTGGKQKLFGISKRGNIYLRRMLIHGARAVLFRIKHDTAGLGQWVHRLSQRAPRNKVVVAIANKLARIAWAVLSSGKDYRHQPLQLAAA

SEQ ID NO: 249276 - protein, 405 aa, unidentified
MDITPIHRRVIGLDVHQNKITACALIEQADGSVAVAQGEFGGFKRDRRALAAWVHGLAPDIVVMESTGIYWKSPYAALEKVGIAAWVVNARHVKNVPGRKTDISDAQWLATLARAGLVRASFIPPAEIRHLRLIARQRQKLGGMLAAEKNRLHKVLADAGIRLNVLLSDLHGQSARAMVKALLADAPIHAILARAGRLRASREDLFEALQPEELSAKHRFVLNEIMAHIEYLEATMARFEQQLLVGLAPWEPQMRLLETVPGIDRLGAAMLLVEIGTDMDSFGSAERLASWVGICPGNNESAGKRKSGRTRKGNAWVRRLLCEFAQAASRTRCALKDKFSALAIRKGHKRSIVALAHKMLRIVYAMLANTTPYQDRTVDYEALMVGRNAPRWLKMLAKHGYIASA

SEQ ID NO: 249277 - protein, 392 aa, unidentified
MDVEQKGGHVIFVGIDWSETHHDVCLMDVDGRVLGQGRVRDGVEGVARLHEMVAIHAEEPSQVSVGIEIDRGLLVGALVATGYAVHAVNPLSVDRYRDRHRTSGAKSDPGDARVLADLVRTDRHLHRLVAGDSELAQGLKVVARAHQSLIWSRQRQMHQLRNALREFYPGALEAFGTDLGSADALAVLGVAPTPAAGRSLSAGRIAVALRKGGRRRRVSERAEQIQAALRSSQLEAPPVLSRAYGEVVGSTVRIVAEMTAQIEVLATGLEASFEVHPDAEIPRSLPGLGLVLGARALAEFGDDPTRYADPKARKNYAGTSPITKASGRSRWLWPGSPGTADWPTPWTCGPSARSPALRAPDATTTPTEPRATHTTRPCAHSPTDGWASSTAA

SEQ ID NO: 249278 - protein, 376 aa, unidentified
MDSIIYIGIDVHKDSYSYCSYLKDKDTFFAEHKSEADSKNAVKYIKSVIKTAGSQEPVLVGYEAGPTGYKLCRDLQKAGFACVVMAPSTIYKPHGVRVKTDRRDARLLAQTLAYKTFKQVVIPSEKIEAMKEFTRARCSKKRQLKKAKQELLSFLLRMGMIYPERGSYWTQRHFEWLKTVQFKDDYLQLAFEEYFAEVNELMAKVARLDTQIRQMAENSDIKEDVEKLICFTGIDYLTAVSIAVEVGDFSRFSNAKSFSNYIGLCPGEDSSGLRIRRTAITKAGNSRLRQLLVESAKSIKYGRLCSAKSKRLIQRQEGQSPLVIQYADMAIARIRHKMMSMERKGLHYNVITTAAARELSCFIWGMMTGNISRASV

SEQ ID NO: 249279 - protein, 338 aa, unidentified
MAIAFIGIDLAKNVFQLHGTDAAGRQLFSKRLRRDQLLPELVKLPPCIIGIEACTGAFFWQRQFEKLGYSVKIIAPQYVKPFVKHQKNDQNDAEAICTAMRQPNMKFVPTKNQEEQDIQSLHRARSRLVNHRTALVSQMRGLLLDRGITVGITIRRARRAIPEIIADMTNDLTDMTRDVIAELLEFLDQIDQRVKAFDRRIEAVFRANPTCQRIARICGVGPKTATAIVAAVGDGSEFKNGRHLAAWMGLVPRQHSSGNRKILMGISKRGDQRLRTLLVHGARAVVRVTAKREDAFSRWVNALRERRGMNRAIVAVANKNARIIWAVLRRDVEFQSAT

SEQ ID NO: 249280 - protein, 424 aa, unidentified
MVLEETQDRDEIVERVAALDIGKAEVVCCVRVPSATGSGRRAQEVKTYPTMTRSLIALGEWLTGLGVTRVVMEATSDYWKPPFYLLEAAGFEEVWLVNARDVKHLPGRPKTDKLDAVWLCKVAERGMLRPSFVPPTPIRQLRDLTRYRVDLVGERNREKNRVEKLLEDAQIKLSVVASDIFGVSGRAMMDALVAGQRDPTVLAQLARSRMRTKLPALQEAFVGRFTEHHAFLLARMLAHVDAINADIATVEDRIQTLIAPFAAAVARLDDIPGVAATAAHAMIAEIGADMTRFPTAGHLASWAKFAPGVKESAGKSKGTGATGHGNPYLARVLGEAAVGAARTDTFLGERYRRIARRRGKKKAVVAVGRSILVIAWHLLADEQARFTDLGPDHYDTRAGTQRAVRNHIRGLHALGYQVTLQPAA

SEQ ID NO: 249281 - protein, 359 aa, unidentified
MAKARTLVGLDVHAAKVVAAILDAETGELRFQRLGGECEPVVRLCGSLEGPVRASYEAGPTGYGLARALDLAGVECVVAAPGKIPRGATEKVKTDRRDAEHLVRLLLAGKLRPVRVPGPAEEALRDLVRAREDIRGDLMRARHRLSKLLLRHDIRFEGRAWSERHRAWLATVELREAPARATFVDYLGAVEALLHRKGELERQIEAAIPASPWAREVGRLRCLRGVDTLTAIGLCAEIGDFARFAKAGQLMSYLGLVPSEHSSGEQRRLGAITRSGSRHARRLLVEAAWHYRNQPRVGAELERRQHGQPAAAVAIGWSAQRRLHRVWSHMQRKGKRRTLIAVAVARELAGFGWSIAQVE

SEQ ID NO: 249282 - protein, 344 aa, unidentified
MLYAGVDTHKKYSRIIVTDQSGNKVAQASLSNDQASFNEFFQKLDEPTKSVVEAGRNWGIIYDMLEDLGAKPILANPLKTRAIAEAKIKTDSIDARTLADLLRADLIPKVYVPSKTVRAQKDLLRQRLWLISIRTMVKNRIHHILDRNHVALTLHSDIFGKAGREELNQVELPPPDDQLLTAHLEILDHIQGQVNSSEQWIREAVTGNPTVAILRTIPGLGKVLSALVALEIDDVRRFLNPGKLSSYAGLVPSTYASGGKVRHGRLLPTCNSWLRWAFVEAAWIAQRTSPYCRTYFERIKSRKGANSAATALARRLCEITWHCLTDNRPYEERSAPAAFSSSWS

SEQ ID NO: 249283 - protein, 431 aa, unidentified
MLKINPLSTLYVGIDVSSKSNYVCALDFYKNKYINSSFANNQPGAEELALKILECLKEHPDITTIVAALESTSVYSIHIANYLSSCEELMRFKPYVFVLNPKCTANYKKSYIGLGKSDPIDAFVIADYARAGNIESEPWRGSQFLALKRLTRHRLHLVECMTREKTYLISNLYLKFSELQMLEGDDQPFCDIYGATSSSVLMEYLSPEEILASSEENLIAFLAEKSCNRIKDISKTADLLKKAARDSYRLDKALYEPLNVSIASSFNCIETFKREIKVIDNAIEKEIKGLNPNAFIILQSIDGIGPVFAGGIIAEIGDITAFHSSDALAKYAGLTWKSNQSGDFYGEDTPMIKAGNRYLRYYLGEAANSMRKHNVEYGTYYRKKYNEVPKHQHKRALALTSRKFVRLVYGLLARNQLYSGVSLDTSIKDSN

SEQ ID NO: 249284 - protein, 443 aa, unidentified
MASRKRVAFEHTHPHAAGIDVGAASHFIAVPPDRDDEPVREFPSFTEDLERLADWLQACEVDTVAMESTGVYWIPLFELLEARGFTVYLVNTRHVKSVPGRKSDVLDCQWLQQLMSFGLLRGAFRPQGDFCALRGVARQREMLIRYQARHIQHMQKALTQMNLQLGQVISDVAGETGQRIIRAILAGERDGAVLAKLRHARIRASEAEIAKALQGTWRDEHLFALKQAVALYDAYAEQLEDCDRQLAGMLAALARHEAPPERPKRRTPAKPSAKFEMRTYLFQLCGVDLIRIDGIDVTTAFKVLEEVGADLSRFKSAKHFASWLGLCPGTKISGGKILSGASKRTTNRAAQALKMAAANLRTSQSALGAYYRRLCARMDKPRAITACAHKLARLIYTVLTQGEEYVDQGQAQYEERYRQRVVKSLTQRAEQLGFQLIPIPEAA

SEQ ID NO: 249285 - protein, 344 aa, unidentified
MTEVTTIGLDIAKNVFHAHCADERGAMVFSRKLTRGKLLDFFAGQAACVVALEACGGAHHWARQLQAMGHDVRLIPPSYVKPFVKRHKNDAIDAEAICEAAQRPGMRFVAIKSEEQQAAGLVFRTRDLVVRQRTQLINAIRGHLTEYGWVAPRGTAHMTMLADLIDDEEMASTLPDAARPMFKLMVDLLAELDKQISVLDREIARRAKEDEAARRLMTIPGIGPIAATAIIALAPPIETFRKGRDFAAWLGLAPRQHSTGGKQRLGSISKMGERTIRRLLIIGGSSMVRQACRFGAPAGSWLERMLARKPRMLVSVALANKMARMVWALLTKGEDYRAPAAVAA

SEQ ID NO: 249286 - protein, 414 aa, unidentified
MTHPLLVGVDVHRKTNTFCLMDAYGGEVRPRFTLDNNRPGTHAFVQQVAELMRADGFDELQVAAEATGWYWFHFFQSLQQEALLAAWPLELHALNPRLTANFKKSYVDMDKTDPIDAFVIADRLRWGRDIGVPFEYDPSYLALRFLTRYRYHVVHNLAREKAYCTAILYLKASEYSREDKKPFSNLFGAASRSVIQEFASIEEIAAMPFDELVEFIDARGKRRFPDPADNAHLLKQVAQDSYPLPPALQQPINLVLNLSLKQISALENQEERLNSAIAEQVEAIPNTLQTIPGFGPVFAAGILAEIGNPQRFNYDQSKVAKFAGFKWRKTGSADFTADETRMTRTGNPFLRYYFCEAAFSVQRCDSEYGAFFQRKFKEVRTHQHKRATVLTARKLVRLVMRLLATNQPYHPRRS

SEQ ID NO: 249287 - protein, 348 aa, unidentified
MKQISMIGLDLAKNVFAVHGIDAAGNVVIRRSFRRAPLEKFFAALAPCVVGMEACGGAHHWARLLIGMGHEVRMMPPGYVTPYVKRNKTDGRDAEGICEAMGRPTMRFVPVKSRDSQAMGTMHRARSLLVRQRTMLGNAMRAMMTEFGVVAPKGVKGLCELMEQLAAPCAAIPELARCSLLELKRHWDELNASIRKMEARIVRDTKADATARRILAVPGVGPIVASATLAKVPEPRVFKRARDFVAWMGLTPRQRGTGGKQRSGGISKQGDRTLRTLFIVGASAHLRQELRRGTTDPWLRRLLAERPFKVVAVAYAAKMARIVWAMLTSGEFYRPRGQARQVAAPAAA

SEQ ID NO: 249288 - protein, 472 aa, unidentified
MTPRRSKNGRMPPQAAEPLRVQHPHAAGIDIHAAEHWVAVPPDQAVPPPIDQPPNAPLYICRFGACTADLEMLADWLKACGITTVAMESTGIYWIPLFELLERRGFQVFLVDPRQTKQVTGRPKTDMLDCQWIQRLHSYGLLAPSFRPEDQVVILRSYLRQRQMLLRYASRHIQHLQKALEQMNVKLTEVVNDVTGVTGMAIIQAILAGERDALVLAKLRNKRCRRSEADIARALYGNWRAEHLFALGQALALYQNYQAKVQECDRAIAKHLGTCADQSGGQKLEPALRGNRRRKNQPAFDVRNALQRFSGVDLTIIEGIEQSTALIILSEIGRDMSKWPTAKHFASWLGLCPQQQISAGKMKRRRQRKGANPAARAFRMAAQGCHCAHNALGAFYRRIQARCGGPKAIMASAHKIAERVYRLLKYGETYVRQGMEMAEKAYQAKRLHGLARAAKQLGYSLVATQPAAPQTT

SEQ ID NO: 249289 - protein, 364 aa, unidentified
MGLERTSVGLDVHARSVSAAAIDGVTGELIRQRLVPDQRVVLDWVRGLPGPAAVVYEAGPTGFGLSRAFTAAGIRCEVAAASKISRPSGDRIKTDARDAVLLARLLRLDDIVSVRVPTVVQESARDLVRAREDVRVDLMRIRHRISKLLLRHGHVYYGGEAWTGKHQQWLNQIHFDGPERAGTQAAYDAEREALTLTLLRRRRLDAQIAALAADSEFTPVTRRLCCLRGISELTGFALAVEIGDWDRFTGASIGAYVGLVPGEHSSGGSRHQLGITKTGNSHVRRLLVEAAWHHQPGYRIGTTMRARWAQAPAAAQARGHAGNLRLHDRWTQLATRKKKHTVACVAIARELAGWCWSLATLPDD

SEQ ID NO: 249290 - protein, 427 aa, unidentified
MNQTDSATEPEFAVFVAIDWADRKHAWALQVAGCGQRESGEIQHTPEAVEAWVTMLSARFAGQPIAVALEQSHGALVFMLGKYGQLHVYPIHPRSAAQFRAALYPSGAKDDPVDADLLLDLLVLHRKHIRPLRPDTGQTRLVRHQVEARRRLVDEKTRQVQRLTAKLKLYFPQVLDWFDKVESPLVGALLRRWPTLPDLQKARPDTIRSFCRRHNCRDAELIEERIQKIRQAVPAIRDAAVIQPAVTMTRSLLDLIATLREGIAKLEQQIAETTAGHPDFPVFDSFPGAGPALAPRLLAAFGSMREAYTTAADMQKHSGIAPVIRRSGKAESVHFRRACPKFLRQSFHEWASHSIAFCDWARLFYQQQRQQGHDHHAAVRALAFKWIRIAFRCWQDSVPYDDARYVEALRRHGSPLAAALTASTPAR

SEQ ID NO: 249291 - protein, 391 aa, unidentified
MIYVGIDVAKDKHDCFITNSDSEILFNVFTIPNSHEGFDTLFQRIESVSDDFTNVKVGLEATGHYSYNLLGFLLDKGLTTFVINPLHTNLYRKSLSLRKTKTNKVDAHIIASMLMSDVNLKSYSDTSYHNEELKSLTRYRFDKVQERSKLKTSVSRLVCILFPELEKLVPSLHMVSIYALLSEFPSASAVASAHLTRLTNLLSDASKGRYGKDTAVMFRDAARSSIGSHMPAKSLELKHTIKLIRELDAEIKEIENEIKAIMDEINSPILTIPGISYRMGAMIIAEIGDFSRFDSPDKILAYAGLSPSTYQSGQLDGCYSHMEKRGSRYLRYALFNATKFVCNWDKTFGTYLAKKRAEGKHYNVAISHAAKKLVRVIYQLEKSKQAYIKQS

SEQ ID NO: 249292 - protein, 388 aa, unidentified
MIYVGIDIAKLNHFASAISSDGEELIKPFKFTNDNDGFQLLLSKLDPLDKDSLIIGLESTAHYGDNLVRYLVAKNYKVCVLNPIKTSTMRKNNIRKTKTDKVDTYIICKTLMMQESLRFVTFYDLDLMDLKALGRFRQKTIKQRTRLKIQLTSYVDEIFPELQYFFKSGLHQKSVYALLKEAPTPEAIASMHMTHLAHLLKVNSHGRFDKEMAQQLRVLAQKSVGASDSSLSIQVTHTIQQIELLDSQLERVEAEMTEIMKFNDSVIMTIPGIGYINGGMILGEIGDIHRFSSPNKLLAYAGLDPSVYQSGNFQAKKTRMSKRGSKVLRYALVNAAHNVVKNNATFKAYYDAKMAEGRTHYNALGHCAGKLVRIIWKMMTDNLEFNLD

SEQ ID NO: 249293 - protein, 348 aa, unidentified
MAHFVGLDVSVKETSVCVVDDAGKVIMEQKVPTEPADIIALLTSLGVSFSRIGIEAGPLSQWLVNALTAAELPMICVETRHMKALLTAQQINKTDRNDARGIAQMMRVGLFKPVHVKTLVAQEQRMLLTSRKLLQRKLLDLESDLRGTLRNFGLKVGVVSGGRYEARIRELVEGFPRLAAIVEPLLNVRRVMRQQLAVLHKMLLDTVRGDPVCRLLMTAPGVGAVVALTYRATVDQPQRFVHSRAVGAHVGLTPKRYQSGETDYDGGVSKCGDALLRTMLYEAAQVLLTHGSKWSWLKAWGVRVAQRRGMRRAIVAVARRLAVVLHRMWVDGSEFRWRKESAAVPSVA

SEQ ID NO: 249294 - protein, 432 aa, unidentified
MKRKNQYSQINVNEISIQELVRYRIGQNVVAGVDVGKAELVLCLVWPDREFERPWRVKSPGQIGLVISKLLELNRVCPVTVVMESSGTYGDAFRQGLDDAGLAVHRVSGKAVKDDSEGFDGVPSNHDGKDAAIIGTLCVNGRSRVWPWHGAAADESAQDESAQKDRAIRYWVRQLDTAQRIRQMWCGKLEGMLARHWPEVGRLTNQSGPTLTAALAHWGDPRALADDADAAERLAKIGGHYLLMEKIDRLIESARTTVGVRMNVWAVREMKDIAGAIVEQRRNIQQCRRELKKLTKDHQPIQSQASAVGLVTACVLWMCLGDPQQYGSAGAYRKAMGLNLTERSSGMHKGKLKLSKRGQRLPRKWLYFSSLRWMREPSVKIWLENKKRRDGGKGGKAATGIMRRLAAAAWHAGQGEVFDPKRLFPGSGVVSC

SEQ ID NO: 249295 - protein, 341 aa, unidentified
MEEYIGLDVSMKETAVSIRRDGQRIWRGKCASDPAVIAQLVRKRAPSVKRVVFETGPLSVWFYHALCSEGLPAICIDARHAKAALDMAPNKTDANDADGLAHLAEVGFFREVRVKGFDSMLTRTLVTARHQLVRITTALSNQIRGLMKTFGLVVPAGKGSNFERNVRRLLADHPGLSEIMLPVLEAWRTTRQQSVELGRQLVAQARRGKACQLLMSIPGVGAITATAFVTSIENPDNFRRSRSVGAWLGLTTRRYQSGEVDYDGHISRRGDRHVRSLLYEAAMVILTRSQADSDLRTWGLKLKERIGFKRAAVAVARKLAVIMHAMLRADTSFVRIAKAAA

SEQ ID NO: 249296 - protein, 312 aa, unidentified
MTEQLFIGVDVAKHWVDVHQPARKPGRIDNAPTALRAFAARCKKDGAWVIFEASGGYDRGLRDALEAADVAFTRVNPRQARDFARAMGVLGKTDRVDARMLAEFGVRLTPKRTEPASEARRALQAQATRRRQLVDLRKQEATRLQQTTDPAALADIRAIIAILDRHIAKAEARMAATVADDAELASTDRRLQTAPGVGPIVAATLIAELPELGQIDRRRIAALAGLAPVARDSGKKSGARTIAGGRAIVRTALYLAALQASRRSAIFREFRDRLQAAGKSVKATLTATARKLLVTLNAMVASGTDYRLDAAT

SEQ ID NO: 249297 - protein, 309 aa, unidentified
MEPNTIEFEQLIEKGCGIDVHKETAVATVQGKGIKTETRTFSTFTSSLKDMKEWLISIGITHIAMESTGVYWKPIFNILEDAFEILLVNARHLKNVPGRKTDKADSRWICKLLISGLLKGSFVPPENIRELRDLSRYRSKLTGQIASEKNRIQRILEDANIKLSSVVTDTSGVVATKLIEGLIAGRKDLDVLINECYHGKLSASKEELKEALTGRLTAHHAFMLKQMKAHIIYLESQIALIDEEMDNKLAEYNNQLALLQTIPGVGRDGARGILSEIGANMEVFPNEQHLSSWAGICPGNNESAGKKNT

SEQ ID NO: 249298 - protein, 341 aa, unidentified
MKNKSFIGIDISKNVIDASIFCEGTPIKDFPHAVFNNSRKGFGEMCTWLKKNHVVLSNCLFGMEFTGSYSMELEKFLYARNYQFCMLSTHVVKHYPMGSKDKSDKIDSAKIADFLYRYNDTECVKPYKMPDKTMQRLKTLMNERKFLVEQRTCFMNRRQLCSTKEDAQLYDGYIRKLGHDIENIELEEQKLLATDDSLLTTYKNLLTIPGIGFVNAINAIVITRNFTAFETARQYASYVGVAPHSHTSGTSVRWRPRPSARCDGQAKADLSMAATVAVQYDAELQSFYNRKLGGKQDSDTKRKALNAVKFKLVLRMFAIGKQNRKWEPLDSKSSNEKLAIS

SEQ ID NO: 249299 - protein, 408 aa, unidentified
MRRVIGMDIHRTFGEVVIWEDGKLRHAGRVDMTRTALEGFGKSLRATDEVVIEATGNCMAVSRVLSPFVARVVIANPLQVKAIAHAHVKTDKVDAGTLASLYAAGYLPEIWTPDAVTERKRRLVARRYQLVRHRTRIKNEVHAILHAHLIPPCPHADLFSKVGRAWLERQPVPDDERVAIERHVRELDRMGEDLAALDKEIAAEALDDASVARLITITGVNLTVATGLVAAIGDVRRFSSPQKLVSYFGLNPRVRQSGLGAAHHGRISKSGRSHARAMLVEAAWAAAKAPGPLHAFFVRIRAKRGHQIAAVALARKLTVLCWHLLTKETDYRWARPALVATKRRAMELRSGQPQKKGNRPGPAHAYNVKALRDQEMEVARHAERSYEHFVAQWETRPKVRGRSKSEGL

SEQ ID NO: 249300 - protein, 434 aa, unidentified
MGRMIIGVDPHKASVTIEVIDERGVVAATGRFATDNTSYHSMLGYARQSWRHRVWAVEGAAGVGRPLAQRLVADGEQVLDVPAKLAARVRVFDTGQGRKTDATDAHSIAAVALRTPDLRRLAVEDADLVALRLLVDRRDELSRRRVQALNRLHRLLAELIAGGAKKDLTPLQAKALLASVRPRDVAGRTRRRMTAEELADLVGVDVKLKAIKRELRDAVLARGSHLMDVYGVGPAGAARILVDVGNVARFADRNRFASWTGTAPLEASSGELIRHRLSRAGNRRMNHVLHIAAIVQLRNDTPGRAYYRRKRADGKTPMEALRCLKRRLSDVVYRQLVDDAKRSEAGPGGHSGATLLSSAVDLPPVIDTSDQPLPGPAPATLPAPTTPAKTAASPTGASTRRRDRGVNVERPTGRTTLTPTSAGAPSPRARKPRP

SEQ ID NO: 249301 - protein, 353 aa, unidentified
MKKVIMCSADVHEKNISVAIAVHREASVAKDYPYTMKGRQKLLSDLKTLAEKNQADRIVVVYEASSLGYGFYDDCRTAGVECHVLAPTRMAKSAQDRKRKSDRWDAKKMMELLRGHVLAGNALPSVWVPDHQLRDDRELVRTRIDIGEKKSALKAQVQMLLKRTKAKRPPEFKNWTLAYRAWLKKVELPAGTRTALDSLLRQLHHLEEESDQMDAVIATLSQTPRYLELVEALQKVKGVGVLAAIVYLTEMGDLSRFANRRKVGAYLGLAPACYESGEASDRKGHITRQGPSRLRKILCQAVWSRVRCDEQERVAYDRIVSRNPKHKKIAVVACMRRLGILLWHKGMEVKAAA

SEQ ID NO: 249302 - protein, 433 aa, unidentified
MSKFFNSPVVGIDVSADFSYAAILAPNGDVYKKSFKIKHDAKGFDHLVNEIKKVEKEFNMKTGIFMESTGVYHLSLFHYLNNNFDNTFVINPLVTKCNKNVDIRTVKNDKKDALFIANIGKFQNIKLSQTNNLAIFLLKNLVREYYKLTDTCSTFKKKLSADLRVIFPNYNTVFSDSTSNTSLEILSNYPNPKSVINAPKEDVIKILIEKSKKGVTWSENIYLKLISIAKEANIIGVPLSGLAIKISSSLVLIKAFESQIEDLLNEINTLIESSEFPESIKENIELINSIPGIGRLTAITLIAEIGDIDGFIKPKHLVAFFGIDSSVNQSGKFLGDQSKISKRGTRIGRRALYAVALASIRRSRAGIPINKVLLEYYQVNLKGKKAKVALVAIMHKILNYIFAVLRNQTPFEQRDPKIHKQMFLENKHLHNVA

SEQ ID NO: 249303 - protein, 456 aa, unidentified
MKKKQISLEIVNPNAAGIDIGSRSHWVAVGQNAQDVKEFGVYSQDHQELCEWLKKQNVTTIAMESTGTYWQNLFSSLVVFGFDVILVNGRQTKNIKGKKTDILDCQWIQKLHTLGLLSSSFLPDSTTAVIRTYSRHRQNILKQSASAILKMQKYLRLMNMRLDVVVKDIVGLTGTKIITAFIGGEKSGKVLAQNRHYNCRKSEDEISKALQYNGREDYYFALKQEWETYLHLQKQIDQVDIQIKKHLEEVIDNDDDKKQHIANKKPYKRKNKNTIRNTDMNQLSYQYFEGVDLMAIEGVNDATLMAFISEIGLEGINKFESAKQFTSWLRLAPNNKISGGRVLSHHLPKGSNRLKVALRQAANAIGNLKEGHLSDFFRRINYKKGRATAVSATARKLAVIIWNMLSRGIPYRPPTEYLFLDQKRKLKMVNRIKRNIAKFEIKPEDVGFDKSLNIST

SEQ ID NO: 249304 - protein, 385 aa, unidentified
MDRTSCSAVSRHTLHCALELSKKTWLLAIQFPDREQPSVYPIGGGDTEKLMAKLTAARDCWARVSGALPTITLCYEVGYDAFWLARFLKAHGIECLVIDPGSVQVNRRGRRVKTDRVDVKMLLRTLIAWCRGERHVWSLVRVPTIDEEDLRRSHRERSRLVRERTAHINRIKGLLFAQGIRGINVKSQYKTLAVDKLITGDGHRLPPRLACEIAREIQRLAVVQEQIAEIECERDTAPTPCEATERKRLLLLQLKSIGPAISALLSREVYYRQFVNRRQVGSFLGLTPSPYSSGEEEHCQGISRAGSGPVRAIMIETAWLWTRHQPKSALTRWFVGRTAGQSTRMRKIMIVAVARKLAIALWRYVEHGLVPQGAILKPPTTGKAR

SEQ ID NO: 249305 - protein, 368 aa, unidentified
MNGKTDSITTQKESDMKKVDFTGQDIYVGMDIGKKSWKVCILTQELEHGLISQPPRTEVLVHYLRKNFPGAKYHCTYEAGYSGYWIYEELKKEGIECLIVNPADVPTTHKEKTRKTDRVDARKLARELRNKELIGIYVPEHSTLEDRSLVRSRHSLVKKQTRCKNQIKGLLNFYGVKIPEELASSHWSRRYIGWLEQLIMGRPSVTHVVRTLLEELKYLRQMIAEVTKEIRKMSKQEEYNKNARNMVTIPGISMLSAMIFLTELERIDRFERLDELASYVGLVPGEHTSGEKKVITGITSRRNPFLRGLIIECSWVAAQKDPALTLAFNQLSKRMLRNQAIIRIARKLLNRIRYVLIHQEPYVPGVVS

SEQ ID NO: 249306 - protein, 355 aa, unidentified
MYFIGGDIHKTICTFNVMNAKLKTVEEFIDVPTNEEGFRCITRNYNPKDCYILIESSTRTNFVQRFFHHAGYTLITGHAKDLKKINQSRAKTDRIDARKLAEYAKEYYEWEKHRPTDENGRPIRPPFRISRMTDLSEYMERNMTRQVMRLSSLGAEYKRSIQEYMSAQDIQMPYNYRTIDAQRSIDYLKEYPDPALNIMASIMEQTIVWQDELTDELKELLENNEDVKLLMTIPGIDFRTASYFAMQIRDVSAFEDAESLVCYFGLAPKVSMSANKYKSGQPIVRESDSRLRRAVYDAVRSHVRSCKNSAIAHFEARMVSRIGVRKAEAAAGRKLVVVMWTMLTYREPFRPHPIR

SEQ ID NO: 249307 - protein, 452 aa, unidentified
MARKRKQGGKTNNGAMPVMRPDAAGIDIGATEIFVAVPVDRAAENVRSFPTFTQDLYVLADWLEACKIKTVAMESTGVYWIPLFQILEERGFEVCLVNARHVKNVPGRRTDVCDCQWLQFLHSVGLLKASYRPAQEVCAVRSLLRHRESLVRMAATHVNHMQKAMDQMNLQLHHVISDLVGQTGLAIVDAILAGQRDPLELAKLRGERIKASEAVIAKSLVGDYRHEHLFTLRQSLEAYRGYQKLIDACDREIRQHLEEFQPPTAPAASTGEPEIAKKQQSADGILRSELRRVWGVDLTKIPGIRTGIAQTLLGEIGPDFTKFRSASAFASWMGLCPDNDISGGKVLFVATRKVKCRAALALRMAAQSLHHSKSALGDFYRRMRAKLGAPKAITAAAHKLARIIFHLISTRQEFDDSRFAADQLRYQKRQEAKLHAKAKSMGYALIPLEAAE

SEQ ID NO: 249308 - protein, 322 aa, unidentified
MNTNQQSPVVTFEQVINRGCGLDVHEKTVVATIDGLGLKRETRTFDTFTESLIELRNWLKTHQVSHIAMESTGVYWKPIFNILEENFRILLVNARHLKNVPGRKTDKADSEWICKLLLSGLLKGSFVPEEKLRNLRDLSRYATKLTQQASAEKNRIHKILEDANIKLSSVVSDIDGAVSNRLIAGLIAGRRDLGQLVEETYHKKLKANKADLLKAITGKLTDHHRFMLGQIQSHLEYLEKQVMAIEDQMDRLLEDHEQQIELLKEIPGVDDKAAKKVLSEIGTDMEVFPSEKHLAKWAGICPGNNETAGKKKVDEPRRETNT

SEQ ID NO: 249309 - protein, 331 aa, unidentified
MFPVGIDVSKNTLDLCILYDGIKGRIKTRNIQNNRHSVENILRWLRLQHCGPEDVHVVMEATGVYHERLATELHDAGFRVSLANPHRSREFARGMGIMTKTDKVDAYMLACYSFLKKPHHWEPPSPEIRYLAALLRRRDVLLGDALREENRLEKYLSTDTPADIISSCRRMAQLLREEVSNIERQIKAHIKASPALRRDYTLLTSIKSVGPQLGMHMLVELRSHNFVSAEQAAAFLGVVPIEKRSGTSVRSRPRMSKIGPPQLRARLYMSALCGKIYNKRMRNIYDEMCLRGKPKMVAIGALMRKLVHWCYGVLKTGTVFNDEGLKQVLST

SEQ ID NO: 249310 - protein, 370 aa, unidentified
MLDTTTFVGLDVHARSIKAVSLDVMTGEVRCATFGYDAGAVAEWVRSVDPKARCVYESGVTGFDLQKRLSGLGVDCVVGAVSKMIKPSADRRRKNDRNDAEFLARMLSVGNVVEVWVPDDECEAARDLTRALEDARDDLSRAKQRLSKFLLRHGLAFDERTPTGRRKGNWTRAHWSWIESIRFAEGADNDVLAYYVDAVRRAAEEKARLEGLVEAEARKPRWRRRVDSLRCLKGVDTATAADLVFEAGEFSRFRNARSFAAWVGLTPSEHSSGESDRRGAITKAGNKHLRKALVEAAWHYLTCSGRPKDLAKGQAPDRVARSHAAKGVRRLVERREALLARGVHNNKANVATARELACWVWAVGLMAEEA

SEQ ID NO: 249311 - protein, 412 aa, unidentified
MSVVQFTQVLSRGCGMDIHKKVVVATVQGEGLCKETRSFDTFTRSLTQLREWLVSLGITHVAMESTGVYWKPIYNVFEGFIPHIWIVNARHIKNVPGHKTDKNDSEWICQLLMAGLLKPSFIPPKAQRELRDLTRYRRKLIQSVSANKNRIIRILEDGNIKLSSVLSDTSGATAVKLIDMLCDGKQITLSDIESVRHGRCQHTKEEMLEACTGCLDEHKVYMLGKIRECNASLKEDILDFDKRIKDVLSPYHDAIERMCEIPGIQNRVCEDLVAEIGLDMSNFPTSAHLCSWAGMCPGNNESAGKKKSSRTNHGDKQVKETLVEAAWAASRAKGTFFMERFNRLAPRKGSKKALIAVGHSLLKCIHYVLSTGGRYKELGDNYVPNKKEQKRKEYLKKELQKLGYSVKLSKED

SEQ ID NO: 249312 - protein, 345 aa, unidentified
MELHTIGIDLGKTVFHLVGLNQRGEVVVRKKFSRKQLLHFTANLQVELIGMEACGGAHFLGRALQEQGHAVRLMPAQYVKPYVKTNKSDYIDAEAIAEAVTRPRMRFVPIKSDDQLDLQSLHRVRERWVTRRTAVVNQIRGLLLERGITIRKGRCHVDAALPGILEDASARLSGALRVLLAQLRLELDHLQTRIDEADAVIQQTAGENEACRRLVAIPGVGPVTATAIIAAIGNGAAFRKGREFSAWLGMVPGEYTTGGKQKLLGISKRGNTYLRRLFVQGARAVLQQSAKQSSGLSAWLAQLTARTHPNVAAVALANKLARMAWAVLAKNEPYRPPVLADAATD

SEQ ID NO: 249313 - protein, 410 aa, unidentified
MEPIIERCCGLDVHQSKIVACLLTGPANKKAKKQIRAFSAFTRDLAALREWLLAENVTHVGMESTSVYWMGVYAVLEENFQLVVGNAHHIKNVPGRKTDVSDAEWIAELLRHGLIRSSFVPPRPIRDLRDLTRYRRALVDSRSAECNRLIKVLEMANVKLAMVCSEVLGVSGTLMIRQLIQGNTDRRAISQLAKGALRNKKDQLELALDGCLSEHHRRLLEMQLARIDRLDADVEVLDKQIEERLQPYQREFHLLCQIPGVDGTVAAVMIAELGADMSVFPTERHVAAWAGVSPRNNESAGKRKGGRRRTGNVHLTTALVLAAHCAARQNGSYLKDKYWRLKARRGAKRAAVAVGRKILIAGYHMLKTGRDYRDLGDAFLDSIDETMVCNNLVRRLERLGYHVSIEKKAA

SEQ ID NO: 249314 - protein, 345 aa, unidentified
MKHFAGLDVSLEETAICVVDETGTMVREARVSSEPEALVAFFRGLGLVVERIGLEACSLSAWLHESLVAASLPAVCIETRRAKAAMGAMPNKTDRNDARGLAQIIRTGWYRAVHVKSPTCRSWRALLTARRLVLNKMRDLENGLRALLREAGLKLGTPARKEFAARVRELTAADPVLSVMTEPLLTIIAAMTRELAQLTKRVLDIVRDEPVCRRLMGVPGVGPLTALTFRATIDRPERFRRSRDVGAHLGLTPKRYQSGETDVQGGISRCGDELARTALYEAAHSLLIRSRKWSTLRAWGMQVAKRRGMARARIAVARKLAAILHRMWADGTEFRWGEADAAVAT

SEQ ID NO: 249315 - protein, 346 aa, unidentified
MEHYAGIDVSLELSSVCVVDAQGKIVKEAKIASEPEALVDFFGSLDFAVKRIGLEAGPLSQWLHAGLTRAGFETVLLETRHVKAALSAMTVKTDRKDARGLAQLIRMGWFRPVHAKSMRSQEVRALLVARKQLLGRLIDVELSIRGILRGFGLKVGPVTRKGFEARIRELVMGQATLERVAGAMLSARAALKVEYEKLHKTVLAIVREDAVCRRLMTVPSVGPLVAITYKSAMDDPNRIAKSKAAGALFGLTPKKYQSGEKDVTGGITRAGDEMVRTALYEAANVLLSRITRFSKLKRWGMDVAKRRGSKRAKVALARKIAVILHRMWVDGTTYRWTEAQPIAAQA

SEQ ID NO: 249316 - protein, 471 aa, unidentified
MAIPHSSRLNRQQRRELTRRLRSDDPGLDVLHPNAAGIDVGNSAHYVAVRPDRDPDPVRRFDCFTADLHRLADWLQHCGVTTVALQSTGVYWLPLYDILEGRGLEVYLVNARHTKNLPGRKSDVQESQWLLKLHTYGLLRNSFYPSADIRVVRTYWRQRADHVRAVSTCIQRMQKTLTQMNIQLANVISDLSGWTGQRIVRAILAGERDPQTLAALSHPGIHASRDAIAKSLEGTWRPDLLFVLQQEVTMYDAYLQRIEECDQALEQHLKSFADKPADTPDAVASPAARDQARRRIKHRRKAGSHTPQFDLGRELRRISGVDLTRIDGIDVGVAQTVISEVGLEMSRWEDEHHFASWLGLCPDNRITGGKVLRRGTRHVINRAATALRLGASTLLRSQSYLGAQYRRFRGKLGAPKAITAMAHKLAVLVYRMLRWGQEYVDKGLQYYEERHREQQIRLLKKRAAKLGLLVV

SEQ ID NO: 249317 - protein, 341 aa, unidentified
MKNKSFIGIDISKNVIDASIFCEGTPIKDFPHAVFNNSHKGFGEMCTWLKKNHVVLSNSLFGMEFTGSYSMELEKFLNARKYQFCMLSTHVIKHYPMGPKDKSDKIDSAKIADFLYRYNGTECVKPYKMPDKTMQRLKALMNERKFLVEQRTCFMNRRQLCTTKEDAQLYDGYIKKFSRDIENIELEVQKLLETDDSLFTTYKNLLTIPGIGFVNAMNVIVITRNFTAFETARQYASYIGVAPHFHTSGTSVRWRPRPSARCDGQAKADLSMAATVAVQYDAELQSFYNRKLGGKQDSDTKRKALNAVKFKLVLRMFAIGKQNRKWEPLDSKSSKEKLAIS

SEQ ID NO: 249318 - protein, 408 aa, unidentified
MNTLYVGIDVSSKSNVVYLMLPNGDKHSNFSVANSHEGSTLLVKKIYSALTSHSLDTVLIGLEATSVYGDNLVYFLREDATLAPFNRKIHVLNPKQVKKFHDTYNDLPKNDYVDSFVIADCLRFGRINKEVYMGDYRYKALQNLTRARFFAVQNLVKEKQRFMNVLFKKYSTMTQEKVFSDAFSTTALAVYDEFDSAEALANMDLHELTDFIIEKGKNRFPDPDAVAKAIQKAARSSYRLPKTVNDSVNQVLSISITSMKALESQIKEFDKAIKALMELLPNVLISIPGIGPVYSAGIMAEIGDINRFDNQASLAKYAGLAWKQHQSGGFEAEVTRLIPSGNRFLKYYLCEAAFSLVRCDKEYSDFYHLKYKEVNRCQHKRALALTARKFVRLVFRLLKDNRLYCPAK

SEQ ID NO: 249319 - protein, 344 aa, unidentified
MDNHTQYSGFAGVDLAKKIMQIHFVTEDGEITDRQVKRAEFLDFFRNRSKCLIGMEACGASQEWARKLEAMGHEVHLMSPKAVKPFVSGQKNDHNDAIGIYKAMFNGVRRVPVKSTEIRDLQTLRRIRSQVAKDRIKEINHVRGLLAEYGIVMGRSVAAFNKGISSALVNLKERGGVSPLVAEELRTTVESIKTKTERQKRLDREIEQLARGCKNYENFLKTPGVGPFTAAMLCVLLCDPDIFANGRQFAAYIGLAPRSRGSGGKNVVIGIPSKFNCDSESRAVFVECAQALTRYKNKSPWIEGILRRKPKKVAVIAIANKLARQVWAMANKGESFKQMTILTA

SEQ ID NO: 249320 - protein, 370 aa, unidentified
MRTSVLYVGLDVHKMSMDVAIAEAGPGAEVRFYGQIGGDLDSLDRVIRKLRATGAQLQFAYEAGPCGYVVYRHLTAQGWPCLVAAPSLIPRRPGDRIKCDRRDALSLARLFRAGELTAVKVPDADDEAMRDLTRAREDAVSVERRAKQRTGALLLRHGRRYPGKTTWGRGHWRWLLQQVMDHPAQQIVLQEYLDAVREASARVQRLTGQIQELLPQWRRAPYVAAYQALRGVSLIVAATMVAELGDLSRFNNPKELMAYLGLVPSEHSSGASVRRGRITKTGNGHARRVLVEAAWAYRLRARVTRPVLQRQEGLSTGVKEIAWKAQLRLCARYRRLLARGKAKNTVATAIARELAAYIWAIGQAVEPLTA

SEQ ID NO: 249321 - protein, 320 aa, unidentified
MRNTVGLDISKLTFDATAIVGNAEYSAKFDNDSKGLDQFSDRLKSLGCQNLHICMEATGNYYEEVADYFAQYYSVYVVNPLKISKYAESRFKRTKTDKQDAKLIAQYCRSAQESELVKRQKPTDEQYRLSRMIAAYAQIKSECAAMKNRHHAAKDEEAAKAYAEIIKAMNEQLEVLKEKIKEQTEKPNCKEGVKRLETIPAIGRMTAAVLFHHLTSSKFETSNKFAAFAGLSPQQKESGTSVRGKGKLTKFGNRKLRAVLFMPAMVAYRIRAFPDFIKRLEEKKKPKKVIIAALMRKLAVIAYHVHKKGGDYDPSRYKSA

SEQ ID NO: 249322 - protein, 435 aa, unidentified
MEEVTDEPLYRDRVCGIDIGKAELYATIRVPSDKNPARRASETRSFATTKRGVLALADWLHCWQVPAVVMEATGDYWKGPFYRLEAEGFECVLADAKQVKHLPGRPKRDTSDSAWLAACFERGAVRPCFVPDPEFRIIRLHTRYRRDLTDERTREKNRTEKLLESAAVKLSSVVTDLHGVTGRDIMDHLIAGERNPKVLAQLARARARRKITELEHALDGAEFFTEDHAALLTAMLERIDGLNAQIARLTAVIERLLAPYEEQLQQAESQPGWGRRSAQDTLAETGPDMSKFPTGSHLSSWAGRTPLDSQSGKRTGRARHKKGNKYLGAITGETAVAAGKTQTREGARYRKLARSRGKAKAQVAVGNTQLKVYHKLLSNPGMRYQDLGPDYYERQAATRRKIAYHVREIEALGLEVTLARIPEPDPDGPASTQAA

SEQ ID NO: 249323 - protein, 399 aa, unidentified
MISVGIDVAKEKSMVCILKPYGEFLLSPIEIMHTEEALTKLVDKILALDGEVRVVLEATGAYHLPLISVFTEKKIFVSIINPLVMKKYVSTAIRKGKTDKIDSIRIANYGLDNWFHLRKYEPTEEVYEELKFLGRQYSHYVQMKVQSKLSLDGIVDRTMPGIKKLISVKRSEYPTKDKLSDFVEHYWHYDNITKLSEAKFIKSYQEWAKKKKYHASESKAREIYAMASSGIPTLSSSTPSTKMLVLESVRVLGEINKTLQIILAQLQATASTLKEYETVRAMSGVGNILAPRLIAEIGDVKKFHSASALVAYAGLDSPPFESGNFVGTRRKISKRGSSLLRKTGYEVMKCLKAIQPEKDAAVYQYMLKKEAEGKAKKVAKIAALNKFLRIYYARVMELQ

SEQ ID NO: 249324 - protein, 362 aa, unidentified
MLQSTTIIAFDHHAATTVAAVLLPGHRTPALHALSSDVSTIQRFVARVQRQGPVACCYEAGPCGFELQRALTAHRMPCEVIAPALIPRRAGDRIKTDRRDAGQLAVLHRAGALTAIHIPSDQEEAARDLLRCREDIRADLLRARHRLSKFLLRHGRRFTATKKAWSKRHDAWLRAQMWPLPALDQTHRAYLRAVDEAGARLATVEQDLRALLDLEPLRARVVRLRCFRGIDDLTALTIAAELGDPRRFATAPSLMAYVGLVPSEHSSGAKRAQGGITKTGNAHLRRVLVESAWHYRHHPFVSATLRARQRGAPTDVIARAWTAQQRLHRRYARFAARGKRKQLIVTAVARELTGFVWAALTQ

SEQ ID NO: 249325 - protein, 412 aa, unidentified
MKDLLEISCGLDVHKEKIVACILTGPLGKPTHSEIREFSTLIPDMIALRNWIVSKNCHHVAMESTGIYWMPIYEILEDAFSGDITLLVVNARHMKNVPGKKTDMRDSEWISTLLRAGLLNGSFIPEKRIREFRDLNRYRKSVIRDITSQKNRIEKFLQSSGFRLSSFISDIFGASGRNIILHLVEHGQIDKTALDSCLKTKTRNRIDEILMSVNGTLSEHQKAFLRILMTHYDSLKKHLAEIETSLEEDMAPFALQVEQLNSIYGISTTASCAIIAEIGIDMKPFKTAEHICSWAGLCPGNNESAGKRKSTSVTKGNPYIKSMLCEIAWVIAGKRNTYLSAWYWRIKQKKGAKKAIVALARKLLVIIYTMLKQGTLFDESCFETRRKHCEQKQLSRYIRELEKHGYHVEAQS

SEQ ID NO: 249326 - protein, 338 aa, unidentified
MSLYAAIDLHSSNSVLAVMDGDGKSLLQCRRPNDLPRLLSDLEPYREELVGVAVESTYNWYWLVDGLMDHGYDVRLVNTTAIPQYDGLKHGDDHTDALHLAQLMRLGLLPEGYIYPREQRATRDLLRRRFSLVRQAVRLMLSIQSSFSRSTGKQLSANQLRQLSPSQLVDLFPELTTRYGVMIQFQLWLTLQDQIKALETWIRKDLARPDLLRRLQSVPGIGPILGMTILLESGSIERFASVGDYASYCRMVESVRLSNGKRKGHGNRKCGNRYLCWAYMEAANYAVRYNPLIRRWYERKHARKHRVVAIKAVAHKLARACYHMLHEGTTFDLGRAFG

SEQ ID NO: 249327 - protein, 402 aa, unidentified
MNCVGIDVSKGKSMIAVMRPFGEVVISPFEVLHTANELSELAGLLKSLDGETRVVMESTGNYHAPVAWLLHDAGLYVSVINAMLVHDYGNNSLRRAKTDKKDAVKLANYGLDHWLTLPRYVPDEDTRLMLKTCYRQYQQYSKVQTMLKNNLISLLDTTFPDANRLFTSPPRANGSEKWVDFVAAFWHCECVCGLSEKAFTAKYQKWCRKHGYNFSEDKALDIYASACGHFGVMPKTDTAKLLVEQAISQLQTTSAALAALKQEMQSLAASLPEYPVVMGMFGVGPTLGPQLMAEIGDVRRFHSKKALVAFAGIDSPPYQSGQMDVHSRSISKRGSASLRRTLFLVMGVLLQCAPMDEPVYQFMNKKRSEGKPYRVYMMASANKFLRIYYASVKTYLDSLKHD

SEQ ID NO: 249328 - protein, 457 aa, unidentified
MRTIGIDLAVAAAHRAIVAGPDGKFLTPVLKFDSRREEIEELVARARAGVTPDEPLQAVMEPTGMAWFPTSVALSQLGVTPYLVNPRRVHDLRKFYKRHSSSDRISARVLAKLPLVDEESLYPLEIPSATQFACQRGCKEMDRLQTEITAIKNRLRDTDRFAWPGLEGVFKDIYSSAARLFRQTWYNPFQVVTAGVDEVQRTFSALPDQQDRLDWVTNLVQLASAVCQLYGPTAIDYALLQQEVTREQDLLAYLEERAAHVWQETVRPLYQQLHPSRDLESLYGVGERGAAVLSSFIGRAERFPDGRHFRGWHGLVPDSRQSGESEGKGLHVSQAGPDLVKKFAFLGGDIARRYDPQIAAIYHDQMVNKGKHHNQAVCACATHLLDRVYVVLREGRPYELRDTDGTPVTPAQARAIIAERYKVPEEVRKRNNRQARKERAERRMERQHKQGESRRSR

SEQ ID NO: 249329 - protein, 352 aa, unidentified
MEKNNKLDFGGQHIYVGMDVHKKSWSVSIHTEQFEHKTFTQPPEVEKLTYYLERTFPGATYHTVYEAGFSGFWLHDKLRAKGIDCMVVNPADVPTKDKERAGKRDRVDCRKLARGLRNGEINGIYVPPRVKVEDRTLVRTRQSMVRKQTRCKNQITSILFFYGIVIPEEGRWSRRFINWIESIRMERASGDFALKAHLEELKHLRQIIANLNKAILSLSRDEEYRADVLLLKSVPGISTLTAMILLTELADLSRFSSLDKLASYAGLVPDIRSSGETEYAAGITFRRNAALRALLIESSWVAVRKDPALTMAFNKLSVRMKKTKAIVHVARKLLNRIRFVLKNRQQYVPAVV

SEQ ID NO: 249330 - protein, 349 aa, unidentified
MADKLIVGIDVSKDWLDLCASNAAGVERIANTREAVAAWLERVAPGLIACEPTGGYERTLIAAARERGIAYLRVHPNDVIAFRKSRGIKAKTDAIDARLILAFVCDKAARAELRPSLIGDDRLQALAARRRQLVDALQAERCRLDAAALPAVRASLEAVIAVLRHSLETLETELADAIAAHPQTAELAKLLQTIFGIGPVAAMTLIADLPELGLLSAKQIAALVGLAPHTRRSGKTRYRETTGHGRPGVRRVLFNAARAALRHPSPFKDFYDRLVTDNRRPGKVALTAVMRKILITANAVARDREPWRGCPAAGTPCRPHAEQTARRAGRVKAAAAPRAVARSASLEAA

SEQ ID NO: 249331 - protein, 368 aa, unidentified
MTTRERSTSSSTDPPVLGEVVLGVDTHGELHVAAVVSPLGKVLGTESFPATAAGYRRLLVWARKRGTVRRAGVEGTGTFGAGLSRYLLAQDVQVYEVNRPDRAARRLLGKSDPLDAQAAARAVLSGRARARAKTGDGPVQSARMFKLAKDSAVKARTQAINQLKAVLVIADPALREQLSSLGNRELFRTCARLSPLDGDDSEGDEDAVAQATRITLSLLAQRIEQLTAQIDELNRRLTRLVERRAPQLLVPVGIGPDSAVTLLITMGGNPERLNTEGSFAALCGVSPIEYSSGRRTSRRLNHGGDRQANAALHRIVFTRLRHDPRTQAYYERRTQEGKTRREIIRCLKRYAAREVFNLVRTVPTKAPL

SEQ ID NO: 249332 - protein, 362 aa, unidentified
MNGTYYIGFDVHKQSVSYCVKQASGEIVQEGELRARREDLRAWAATQAQPWRGAMEATLFSAWIYDTLKPYAEQLEMGHPARMKAIGCAKKKSDRLDARTLSDLLRCNLLPTCYVLPPAMRNLRRLLRYRQLVVRQSVRMQNKMAGLLMETGAPFVKSKLHGKKYFTELLQTLEEVPESVKDLLQMSRGAMEMFESTQKRLVKELLAAPELAARVERLTTIPGVGALTALTWALETADPWRFSSLGHALSYCRLTTAFRSSAGHEQRGPLSKQGNAWLQTALIEAAKLAPRWNQQLAAVYQRELERGHRNRATLQVARKLVAYLLAVDKSGQPFQMRGAPALAGVSSSKKELQAARAALQPA

SEQ ID NO: 249333 - protein, 344 aa, unidentified
MQIAVLGIDLGKNSCSLVGLDASGTVIKRRRIRPENIPPFTELMPACVVAMEACCGAHHLGRVLAAQGHTVRLMSPEYVRPYVKAQKNDDRDAEAIAEAASRPTMRFVELKSEAQLDMQTLHRARDRLVGERTALINQLRAILLERGVTVAQGRHKLERHLAAMLDTGADSAIIPRMRRLIEDVRAEWLELDQRIAAFDNEFAACARSDADARRLATIPGIGVLNATALVAAIGNGETFARGRDLAAWLGLVPRQVTTGGKPRLVGITKRGNKYLRKLLIHGARSVLPILAASATPLGSWLQGLLKRTHKNAAVVALANKLARIVWVVLRRGAVFAAAASSVAA

SEQ ID NO: 249334 - protein, 315 aa, unidentified
MTQINITTAGIDTSKAKLDIAVHDRTERWQVTNTLPGWRALAGNLIKAGVTRIGIEATGGYERGVVEHLRAAGFIVLVLQPIQVKAFGRVHLRRAKNDALDAELIAACTAAIDQPRISPDPRLTELAGYLTFLEQTEEDVARFKTRLEHIDEPGLRRIVNSDIARLKARRAAQIRDIAKRLRTHDDLALRLDLVLSIPGIGERTALALIIRMPELGRVSREEAAALAGLAPFDNDSGQHSGQRHIAGGRGRLRRSLFAAALSAAFRWNKALVALYARLTASGKAHNAALTACARKLLIYANTVVQRGSPWTEKAA

SEQ ID NO: 249335 - protein, 352 aa, unidentified
MDCFNEKLGEITFQNKPSEFSKLSVKAKRYCTDGKGIVFALENSYGYGKALAAWLIERDYIVKDVNPALSYAYRKSVSQYKKNDSYDAQCVARVAVNELNTLPNAMPEDMYWTLSQFINRRANLKRHHIRLKNQLHEQVCVAYPSYKQFFQDIGRPTVLCFWEHYPFPWLPRGKTVEELAEELIPVSYNQFSIRKCQKILDAVKADGDTTRDYQTERDEITKGLVRDVRHYVTQLEKVDKAIADFLPRFGCTLNTIPGVSDTTVAKLLSEIGDIRRFPNANKLANFAGIAPVNFSSSGKGDDKPSKQGNRRLQGTIYFLAIQMIQLSSKGLPRNPAFYAYYQRQLARGKTKP

SEQ ID NO: 249336 - protein, 400 aa, unidentified
MNKTSFSGFLGIDISKDKFDAYCIDINGEKQFYLSCSMDRAGFEKLVGHMDNLSIPKENLLIGMESTACYHINLFSHLLAEGYTAVVINPLLIANFVKIQLRKTKTDKKDALVIAQFLLMYVDTLAQTSISPHVSDLRDLSRQRESLLSQMTALKCDMKRLLTMTFPELEKLTGVFTKSVLQLLSRFPSAHAIVQADPAEITQLLIDHSMGRNSATTTQAIIQAARSSVGTTSPSRELILKQKADVLIHLEGHLKELTAMMIELCRSDMGDDIDIMTSLRGIGEKTATNFLVEMGGDIRKFKDHKKLIAMAGLDPAIYQSGKHDGQGRITKRGNRHLRRVIWLMTIRVIQFNDCFRQHYQKRRQDGLPFKKAVLATAHKLLRVIFAMLTQRKTFCYATNS

SEQ ID NO: 249337 - protein, 352 aa, unidentified
MDATTVAVDLAKNVFQLAVADRNWRIVRTLRLSRAQFERWFDNACVETVIMEACGSAHHWSRVLQGRGIQVKLLPASYVRAYVKRNKTDAADAAALLEAARCADIVPVKTKSVEQQCLQGLHRVRSGWMATRTARINAMRGLCREFGVAVSPGAQCGLRQIAEALGGRDLPAALYPVLQALLAEVRELEQRVEQVERELAVVARHSAPCQNLMSVPGVGLLTATAMVAATSGSVSHFASARHFAAWFGLTPKEYSSGSTRRLGRISKRGDRYLRMLLTHGARSVLNAARLSQRRGRALDPLRSWAQGIAQRSHHNKATCALANKLARICFGVLRDAEPYVPGRLATPVVLAA

SEQ ID NO: 249338 - protein, 284 aa, unidentified
MNVTTVGLDLAKNVFHIVGLSGQGREVLKKRLTRSQVLKHFANTPRCAVAMEACASSHYFARELRKLGHESKLIPPQYVKAYVRGQKNDYNDARAIAEAARVPAMRVVAALLADATNGLSERFRRLLKQGHTELIELDAHIEVLTAELKAAAREDDAAQRLQTIPGFGPIVAAVFAASLGDGRQFPNGRAASAAVGLVPRQHSSGGKPLLLGITKRGDRYLRSLLVHGARAVVRAAQNKDDHLSRWVNRLREARGMNKATVALANKLTRIGWAVLAHKSVYQPA

SEQ ID NO: 249339 - protein, 473 aa, unidentified
MAVTHPSRLNRKQRKDLARRLQSADPGLDVIHPHAAGIDVGNSTHYVAVRPDRDPNPVRRFECFTADLHRLADWLQQCGVTTVAMQSTGVYWIPLYEILDARGLEVYLVNARHTKNLPGRKSDVQESQWLMKLHTYGLLRNSFHPPAEIRVCRTFWRQRSDHVRAISTCIQRMQKALTQMNIQLANVISDLSGWTGMRIVRAILAGERDPQTLAALCHPGIRATRDVIAKSLEGAWQADLLFVLQQEVAMYDAYHQRIAECDQALERHLQSVADKLPDLSSPTEAVSNRPPRQRRSGPKRRRKATGHAPQFDLGGELHRISGVDLTRIDGIDVGVAQTLISEVGFDMSCWPDEHHFASWLGLCPDNRITGGKVIRRGTRPVINRASTALRIGATTLLRSESYLGAQYRRLRGKLGAPKAITAMAHKLALLVYRMLRWGHEYVDKGMQYYEERHREQQIRVLKKRAAALGLAVV

SEQ ID NO: 249340 - protein, 356 aa, unidentified
MSEKLNSPIAVIGIDIGKNSFHLIGLDKRGAIVLRQKWSRGQVEVRLANLSPCLIGMEACVGAHHLSRKLQALGHDARLMPAKYVRPYSKGQKNDFRDAEAIAEAVQRPTMKFVATKTVEQLDLQALHRVRERLVGERTGIINQMRAFLLERGVAVRKGPRFLRAELPTILAKRSDVLSPRMLRIIEDLAGDWRHLDERIEGVSSEIAALVDQNAACKRLMSVPGIGPIISSAMVAAIGTGDVFSKGRDFGAWLGLVPKQISTGDRTILGSISKRGNRYLRVLFVQAARVVLGKLKPEDWERYGLRSWIEAAQRRLHRNVLAIALANKLARIAWAVLHKGRDFECVKTNAMASRPA

SEQ ID NO: 249341 - protein, 345 aa, unidentified
MNLHSIGIDLGKTVFHLIGLNQSGEVVVRKKFSRLQLLRFTANVHARLIGMEACGGAHFLGRALREQGHEVRLIPAQYVKPFVKTNKSDYIDAEAIAEAVCRPTMRFVPIKTDEQLDMQSLHRVRERWIMRRTAVVNQIRGLLLERGITLRKGRCHLDAALPGILEDAATTLSGALRLLLMELKRELEQLAVHLEDADALILRAAQQSEACQRLDAIPGIGPLTATALIAAVGNGAAFRKGREFAAWVGLVPREHSTGGKQKLLGISKRGNAYLRRLFIQGARAVLQFREKQSSGLRIWLAQLTSRTHYNVVGVALANKLARMAWAVLAKGEVYRPPVLAGDIAA

SEQ ID NO: 249342 - protein, 360 aa, unidentified
MDVVGIDWSWNFHTCYSIEQDKVFKIKDGIAGYEKLLKTVSKDAVFVIEESFNRLGDFLLSRGKEVYLLPPKRSKEARGYHSNGVKTDSTDARCIALTYKEHPEYCIKATHDELGMLFRELLRHYRYYTDMVARLKNKLQNELHNYFPEYARVMGSSWTDCDGKIFLLTICPDITMLRKISDKEINRHFQANHLRYTSSLKRKVKELREKAVDWGMSKYTRDMIANVATQLLEAKREKKKITKEMEKELRKSKYNIILTLPGVGVATGVALVTAFLTHEFKNYRDFQKYCGTMPIVSQSGNFSVCRMRKNCDKKLRGILHMMAINAKKCGAWMKGYYDKHFLHTNSKITGISRSIVELCQ

SEQ ID NO: 249343 - protein, 346 aa, unidentified
MKIMRIGVDLAKNVYQVHGVDRKEKPVWRRQLSRGKWLGAIFEKVEPGSEIGMEACGGAHHWARELQARGYTVKLIAPQFVKPYVKSNKSDRNDAEAICEAMSRPTMRFVSVKSVEQQDIQAMHRIREELVGARTAKSNQIRGLVAEYGVVAPQGLAKLRAAIAQWLEDAENGLTDRFRGLLAGVWADLVELDRRVKELDDEIGALAKSHPVAHRLQQLRGVGPITATALVATLGSGEQFTKGRDFSVSLGLTPKQHSTGGKERLLGISKRGDPYLRKLLVHGARAVISAAKDKDDRLSQWVMRLTSRRHMNVATVALANKTARMAWSMIRNDTDYEPERAASLPG

SEQ ID NO: 249344 - protein, 400 aa, unidentified
MRAVFGIDVSKVSSEVAILVNGEKVHSYTMSNDAIGFSRLLGDLRTVHKPEIIFEATGVYSRRLQAFLDEHGYAYTRLNPLEAKKQLDSLRVRKTDQIDAEKLAQSQFVLNRKPTYVQEEVYQDLRDFSRFYQNLTEDIVRAKNRLHKVLQVTFPELETLLSTPTGEQYWNLVIAFPCKDFVLHLSKDELSESIRLSTSKRISDKRVAYLAEKLTALANHSYCAVKKTSPILEEVRYYANELLRLFEQRQAVLDEMVELAQPLPEYDILLSIPGIAETTATSIIGELGDIRRFQSANQINAFIGIDLRHYESGNFLAKEHITKRGNPYARKILFKCIHNIASASHTNPCHIADFYEKRKRQSQTTSTKPHTIASIHRLIRTMYYLITHNKLYDYISTQNQ

SEQ ID NO: 249345 - protein, 423 aa, unidentified
MEIMHERVAGLDVHKATIVACVRVGTGRKVMRECRTFDTTTDGLLALLAWLVECRCSHVAMEATGVYWMPVWKILSEGDFTLIVANAAHIKNVPGRKTDMNDAMWIADLLACGLIKASFVPEEDVQELRSLLRTRKQLGREQTRHVQRIQKTLAEANIKLDSVLSDIMGASGRRMIEAMIAGVRNPRQLAALASAQIKATPKQLYDALHGRLTDHHRFLLKLHLRQWDGLDATIRDIDQEVEARIARMDKEVKAGTAPFRDLIRLLCTIPGVSTLSARTILSEIGRDMSRFPTAGHLVAWAGLCPGQNESAGKRKLVRLRKGAPWLKTMLVQCAWAAKRKKDSYYKAQFFRLQSRRGPQKAICAVAASILTAIFHILKDGTEHHDLGANHFNRRSTQGQTKRLVAQLTRLGFEVQLQPTAQAA

SEQ ID NO: 249346 - protein, 345 aa, unidentified
MKKVVAGVDLHSNNLVIGVMDMDGKRLAHQKVECDLKKVTRFLAPYQKRLDQVAVESTYNWYWLVDGLQAQKYPVVLANPAGMEQYSGIKHADDTNDAFFLAELARLKILPTGHIYDVNLRPVRDLLRRRLTLVHHRTALMLSFKSLYTRTTGLEMALGRLKELKIKEAQNLYEHPANQLIAGMQIKHIEQLTESIEKIEKAVLSCARELPCYAKLITLPGVGKILAMTITMEVGDIKRFADPGNFASYCRTVEAKRTSNNKKKGENNSKCGNKYLAWAFVEGANFARRFDGECRQWYDRKAGKTSNVIATKALACKLAKAAWYLMAEGTEYNSKRMFGQPATTK

SEQ ID NO: 249347 - protein, 430 aa, unidentified
MEIVYPRACGVDVHKSFIVAVICISESINPRYIKKRFSTFNNQLIQFRDWLIENNCHNVCMESTGKYYIPVYNALEGHIPNVVVANPKWVKAIKGEKDDNKDAKWIADLFKFGIVRSSYIPKKDIRILREFTRYQYKLVNIRSSEKNRFQNALTVGNCKLDLVFTDVFGKSASSIVDTILSDEPYTSEDILSKVHGRCKASSDDILSAVEGTNLNQYQKARIKIVQKHMEYVDSLLDEVQHHIDMMVESYENYIQLLMTIPGVNRKSAIIIISELGIDVSQWSSAHKLAVWAGLAPGHNESAGKKKSVKISKAGIYLKPCLVQVAHAAVKDKTCSYYAEKFGRISKRRGKKRAIIAIARKILVAIYHILKTGEVFNPSDMADVETTKEQRIAYITNNFRNAFNQLSRTGLSEEEILSIIIKKSNNSPQTE

SEQ ID NO: 249348 - protein, 313 aa, unidentified
MNNHSTKAAGVDIGKAALDVAIFSSAQRWRFSNDDAGRSALVALLREHGVGRVGLEASGGYERPAVETLRDAEFEVIVFQPRQVRAYAAYRLRRAKTDRIDAGLIAACAADHGPARAAPDPRLAALAEPLRWLEQIEDDIARLKTRREAYRDEAILAQLDEEIVRLKALRVRQIKLLRSALSRYADMARRMEIIASVPGVGERTALTLLIAMPELGSLSREEAASLAGLAPFDHSSGKHDGRRNIVGGRANVRTALYAAALPAAFRWNKALVAFYQRLKAAGKSHKQALVACARKLLIYVNTVVARDAPWKAA

SEQ ID NO: 249349 - protein, 352 aa, unidentified
MASQRWRAAMEYYVGLDVSLKQTSICVVDQSGSVVREGVVDSGPEAISVYVRSKAPGAVRIGLETGPTSTWLWTELKQLGLPVICIDARHAKAVLKMRINKSDRNDAIGIARIMQSGWFKEVHVKDIDSHSVRALLASRALLVKIKRDLENHVRGLLKNRGLVIGRAKFNVFAVRAEELIEDRPELIAAIRPLLEARNVVEQQVSELDRKVMKLARHDAQVRQFMIVPGVGPITALAFKATIDDPARFARSRSVGAYVGLTCRRHASGEVDWSGRISKCGDAMLRSYLFEAAGVLLTRVQKWSAVKAWGVKLAKRNGLRKAKVAVARKLAVILHRMWIDGTEFNWSKKEIAA

SEQ ID NO: 249350 - protein, 379 aa, unidentified
MGWLPPSPDGIAMCQDVVLKEPQNGEDGDMNDTMIGVDLAKSVFQLHGASMTGQLKYRKKLTRPQFRKFMADQPPSVVVMEACGSAHYWTREMVRLGHDVKLIAPQYVLPFVKRQKNDAADAEAIVIAAQRPEMRFVEPKSQEQQARAVLFRARERLVHQRTELVNALRAVLYEFGHAVPKGTGNIKQFDVILEDPNCDLPALVRDECGDLVKQIAEQTIRIDAKTKTAKEMATTANTARRLQTMPGVGPLTALAIEAFAPAMQSFKRGRDFAAWLGLVPRQHSSGGKERLGRVSKAGQTDIRRLLIIGAMSRLNWMGRKTITEGSWLARMLARKPRMLVAIALANKMARGIWAMLTKNEDYRDPVPAVAARSTCAATT

SEQ ID NO: 249351 - protein, 339 aa, unidentified
MTIVIGIDPHKASHTAVAVDVYEQVLDSTRLAASVDQIEHLQRWAAEFDDRTWAVESAHGLGLVLSQQLVAAGETVIDVPPALAARTRLLGSGRSQKNDHNDALSIAISALRHHGLNTVRPEAHAQILKMMAKRHRDLSRLKNQAASRLHALLLDLVPGGLAGTMHPSKARDILDSLTVGDAMAESRVELATELIDDIERLGQQITRSKKRLQSAVSESGTSLVSIVGVGPVCAALIIGNVGDVSRFRTAGHFASYNGTAPLEASSGDRRRHRLNPHGNRQLNYALHIIAIGQLRCGGPGQAFYDRKVTEGKSHKEALRSLKRHLSNVVFRALLNDAAR

SEQ ID NO: 249352 - protein, 346 aa, unidentified
MAIAVLGIDLGKNSCSVAGLDGTGRVVLRRRLTRESVVRLAGTLPACVVAMEACCGAHHLGRVLREQGHEVRLMSPEYVQPYVKAQKNDERDAEAIAEAATRPTMRFVELKSEAQLDAQILHRARSRLVGQRTALINQLRAVLLERGIVVAKGRRRLEEYLIGLLDEDGDRRATLSLRTCLLIEDMRLEWSELDQRIAALTAEFVARAREDQAARRLATIPGFGALNATALVAAIGTGETFRRARDLAAWLGLVPRQATTGGKPRLLGITKRGNTYLRTLLIHGARAALPSLSASQSPMGEWLRGLIGRAHKNKVIVALAGKLARIAWAVLRSGETYVKEGRPVAA

SEQ ID NO: 249353 - protein, 435 aa, unidentified
MIDKILPGFAALDLGASKLFAATADTAVKSFGTFTVELQALCAWLKEHKVHSVAMEATGVYWIPVHDLLEKEGFKVTLFHGAHARNLPGRKSDVSDCQWHAMLHSHGLLRPCFVPAEPIRKLRSFYRLREDHLSMAVAHISHMQRALDLMNVRLHHVLSQLHGVSGLRVIEAILAGQRDPMVLAALCDMQVLKKKKAELIKSLEGDWQEHHLFALRQGLEAYRFYQGQIAACDAQIESLLRTLNAQRAPQQPKPGQKVKIVRHNAPLIGNLHGELLTLCGGRDATLLPGISPLGWMKLTGEAGIDLSEFADEHHFAGWAGLAPERHQSGRRQRRRPRRKTAIGQIFREAALSIAKSKHLALGGFYRRVKGRRGAAIAIVATARKLAVLYYRAMTRGLEYVERGLAQYEADYRKQSERHLRKMAARLGFTVQPKTA

SEQ ID NO: 249354 - protein, 320 aa, unidentified
MLSFCGIDVSKDRLDAMVLPDEQCSSVPNDAAGWAALVEQLRGCSVTAIGIEASGGYERGVIRSLHAAGMPVRQVNPFKLRQFARASGVLAKSDPLDARMIASFVAIMPTRPAQPHVPAIERLAEMLAVRRQLSAEKVAAENGSRLLEDAMLQRLSRRRIARLAADIDLLDKRLVEIVMADAGLAQRYRLLTSMPGVGPVLACTLIALLPELGQMSRKQVAALVGVAPYAFDSGKLKGRRCIWGGRAHVRHVLYMAAMSASNWNPGLKAFHDRLRAAGKLPKVAIVAVMRKMITTLNAMVRDGVVWADRHSGRHNVPTAR

SEQ ID NO: 249355 - protein, 325 aa, unidentified
MTDAPTAAPCVGIDVAATALVVARTDTAAVAAYPNTPAGHAALAAALGKAPAPARVVVEATGGYERLLVAHLAGAGLPVVVINPRQARDFAKATGQLAKTDRVDARVLAAFGARVAPPLRPLPDALHEELRELLDRRHQLLQMLVAERTRLTQPAGPRPKRVRQDLKSHVADLEKRLRRLDADLDDTLRASPLWLAQDELLRSVPGIGPQTARTLLAFLPELGTVSPRVIARLAGLAPLARESGSWRGARRTGGGRPAVRACLYMATLAAVRANPRVRAWYTALVARGKPKRVALIACMRKLLVVLNAMLARGTRWQPLDAHTTP

SEQ ID NO: 249356 - protein, 416 aa, unidentified
MNAAGIDVSSRKSTVAVLRPFGEVVRLPFDVAHNTEGLASLAEQLKALDGETRVVLEHTGRYYEPVAKALHEAGLYVSAVNPLLIKEYGANSLRRVKTDKADAVKIARYALDNWADLRDYTPMDTIRYDLKTLNRQFQLASKQRTASANNLIALLEQSFPGIRKCFDSPVRSDGTQKWVDFVHTFWHVECVRKQSLNAFSERYRKWCKRHGYIFKQGNAVEVYSLAKNAVVLVPKSEVTKVLVQEAANQLTSISRSVETYRAEMERLASTLPEYPVVMAMYGVGKSFGPQLMAEIGDVRRFERKQSLVAFAGIDPMPNQSGDKNVRSNKSSKRGSPYLRKTLFNIMGIYLKCSPQDEPVYQFLDHKRSEGKPFYVYMTAASNKFLRRYYAQVRDYLSTLDNLPPVDMDSTGLKPSD

SEQ ID NO: 249357 - protein, 345 aa, unidentified
MTAPDRSSSPDSIPSTGPHVGIDVSKASLEIALIGSEEDVSASQTVPNTKDGFDQLLSWIKTQADVQLEESPEQIHVCLEASGGYQRPVARFLHERGLTVSIVNPLRTSAYAESQLSRSKTDKVDARLLARFCQREEPNPWEPSSSEQKSLKEMTRGLEQLKKERDRLKNQIRQSENPTVTGSLESVLESINEQIDHLEDQVDKHVESTDTLARNRDLLETIPGVGSTTAALVLAELGDPERFESARQAAAYAGLTPSHHTSGSSVHRKPRLSKVGSSRLRRALYFPAIAALRFNAAVEALGDRLAERGKEKMVIIGAAMRKLLHICYGVLKNQTPFDASLHPGT

SEQ ID NO: 249358 - protein, 426 aa, unidentified
MKSTQNQKISQIKFSTLVVGIDVAKETHYARAFDFRGMELAKLLRFSNTAEGYQKLEEWTQEICRQRQKTDIIVGFEPTGHYWFTLGDHLKSHGHRLAIVNPFHVKRSKELDDNSPSKSDSKDPKTIAMLVKDGRYREVYIPEGLYQEMRVVVAERDRLVQRLITINNNVSRWIDIHFPEYPTVFKDWRGQAGFLTLRHFPTPEKIASAGAEKIEAIWKRYMRRTAGLKRAQQLVEAAQSSIGRQTGLVAAEAGLQNLLTEYELYRQQYADLEQLMLDLLQQVPNGEKLLAIKGVGLVTAATFVGEVGDISRFQDPRQIQKLAGLNLVENSSGKHQGKTRISHRGRKRLRHGLFMAMITILAKNQEFRMLHQKNLTREKNPLTKMQSIIALCGKLIRVFYGLLRTGTDYSAEKMLGDIERGMKTAA

SEQ ID NO: 249359 - protein, 337 aa, unidentified
MDIKVIGLDLAKDVFQVHGVDSSGRALLRRQLKRREVCAFFAKLQPVLVGMEACGGAHYWARELAKLGHTVKVMNPRYVKPFVKTNKNDRTDAEAIAEAASRRTVPEVAVKQAWQQDLQSLHRVRSQLMRERVGLGNQIRGLLSEYGIVMGKGATALKRALPQVLEDAQNGLSGVMREVLAEQYERMRTLEQKIAEYQRKLNVAAREHEGCSALMEVPGIGVLGATALVAQVNDARTLKNGRELAAREGLVPMHSGSGGRERLGHISKRGDGYVRTLFIHGARAVLNHAPRKTDRLSRWATEVMRRRGRPIAAVALANKMARIAWVILARNQRYQPQ

SEQ ID NO: 249360 - protein, 320 aa, unidentified
MQSVCGIDVSKDRLDVMVLPEQQCFSVRNDAVGWAELVERLHGLSISAIGLEASGGYEGGAMRALLAAGMPARQVNPFKLRQFARASGVLAKNDPLDARMIASFVAIMPTQPAQPRAPAIERLTEMLAVRRQLNAEKVAAENASRLLEDPMLQRLSRRRIARLAADIDMLDRHLAEIVGADAALAHRYQLLTSMPGVGPVLAYTLIALLPELGRMSRKQVAALVGVAPYAFESGKFKGRRCIWGGRAPVRNVLYMGAMSASNWNPVLKAFHDRLKAAGKLPKVVIVAVMRKMITALNAMVRDDVVWADHLSGRHSVPTAR

SEQ ID NO: 249361 - protein, 397 aa, unidentified
MLAVGIDISKSKSVAAILNQDGSMHTSPFEFHHTQPELDAFIKYILNSNQSATILMENTGHYHYPVLKAFREAGLPVCMVNAYQIKKFGDMDLRKAKTDKKDAVRIARYALEKSYSLVPYTSMEQKYEDLRFLARQYNQRMLTLKTNKVFLLNLLDETMPGITNILPLTTRTPETSLSVLFINRFKSYDRIKKMGKSRFLDAFEKITRKSRNRQTKTYGLAIYEAALRNITTRGENEYTLAAQDQCLELVCESQKAADSIILKMQTLAETLPEYAVLRSMAGVGDRLGPLILAEIGDIRRFHSGKALNAYAGNDAPPYQSGTFESHNRHISKRGNAALRKYCFEVMQALKLTRPQDDPVYLFLLKKEQEGKPYNVAKMAAVNKFLRIYYARAMELYK

SEQ ID NO: 249362 - protein, 312 aa, unidentified
MTSEAFIGIDVSKRWLEVCVDGEGESKKIGNDADGFSTLLAEMKVCQPRLIVFEATGGYESRAAQALREAGFAVAVVNPTRVRRFAEALAILAKTDKIDAKVIAHFASMIQPTVNGQQTRLEEQLAAFVERRRQLLVALVAEKNRLSTCPVCVRDGIQEHIAWIEAQVDNLEAKIQACIAQRPDWRVRAEIIDSVPGVGPVSASTLVAELPELGQLSHKKIAALVGVAPFNRDSGPKRGKRKIFGGRSGVRRTLYMAALSATKHNPVIRAFYESLLKRGKEKKVALIACMRKLLVFINAMVKKGEHWRFSPA

SEQ ID NO: 249363 - protein, 416 aa, unidentified
MDTMYERCCGLDIHKKTIEACFRSGKKKTHMSFGTTSAELRKLTMWLVENDCQSVAMESTGSYWKPIFNILELSGTDMKIIVVNARHMKNVPGRKTDVNDAEWIAELLQYGLLRPSFIPDREQRELRELSRYRKSLVGERAREINRLQKMLEGGNIKLTSVVSEVTGYSSRRLLDRLLRNDEPMTEDVISGLVHTSLVGKSKELETALDGLLSELQKELLIKVLDHIDDMSRRIADLDDFCRKQMKKYEDALDKLDEIPGIARRTAETILIETGLDMSRFPTAKHFARWAGLAPGNNESAGKRSSGRTTKGNPTLKSTLIQSAKVAARKKNSFFKARYQKIAAKRGANRASVAVAHSMLIAIYHILKSGERFKDLGEDYYNQFNKEKKKKYYLKKLTKLGVNLKEATLSISIQAAT

SEQ ID NO: 249364 - protein, 488 aa, unidentified
MSKCKTCASPSKTSKSRSRQKHRRIRKAQQRIQKVGVGATAAASATPVPAPAVVHAHAAAIDVHSDNHVVCVGPNQVRTFGAYTVDLRAIADHLSQYGVTTVVLESTGVYWVPLFELLESRGFEMYLIEPSQARHCGARPKTDVLDCQWLQRLHTFGLLRPSFRPPESVLALRGYWRQRQMQVRYAASHVQHIQKALEQMNVKLSEVAADIMGLTGTRIIQAILDGERDAKQLARLRDSGCKKTQEEYAKALEGSWRPEHVFALKQAFALYQFHHQQITECDQRVAEELARLPNGAGNKPFQSRPRRCGRKSNDVRFNATEPLFKALGVDLTLIDGIDVNTTLVILAEIGVDVSRFPTEKHFASWLRLSPQLDQSNQTQKKRSPRRGKNRVAQALRMAAQAVSRTKTPLAAFYHRMKGRLGGKGAITATAHKLAVLVYRLLKYGVEYVRQSLDEYAAKVRKQAERSLRRKAQQLGYELVPITPAAEPA

SEQ ID NO: 249365 - protein, 377 aa, unidentified
MTQFAVSTTTEQTIHAALELSKNSWLLAIQVAGRDKPSLHPIKGGNAEGLMAKLDAARDRVAKLTGQRPPVVLCYEAGYDGFWLARLLEARGIECLVIEPASLQVNRRARRVKTDRIDVESILHTLIAWCRGERHVCSLVVIPSVEEEDLRRSHRERDRLVRERTAHINRIKGLLFGQGIRGINVKARYKSLVPAELVTGDGRPLPERLGREITREIERLALVQTQLVAIEGERDSAPTPCVATERKRRDLLRLNGIGPALSAILAREVYYRRFANRRQVASYIGLAPSPYDSGEGRRSQGISKAGNGLARYALIQAAWLWLRHQPDSALTQWFHQRTEGQSKRVRCIMIVALARKLAIALWRYLEHGLIPQGAVVK

SEQ ID NO: 249366 - protein, 412 aa, unidentified
MEVLYPRCCGLDVHKSSITACVLISQSGKPLKHIRRFGCTTRELRELVVWLHEFGVEHVAMESTGVYWKPVWNVLEGHFQILLANAQHIKAVPGRKTDTKDCQWIAELLQHGLLRGSFIPPVMIRDLRDLTRARTSWSQEHSRIASRIQKVLEDANIKLASVASNTLGKSGRAILQAIIEGEESSERLADLALGHLRLKIPQLQAALEGKVREHHRFLLQSLLRQLGFIETEIVMLDARLDQLGQEHLDLTEALNRWTTVPGVDRVAAWSFIAEIGTDCSSFPTAAHLASWAGVCPGNNESAGKRISSKIRKGSPWLRRMACQSAWAAARTKNTYLSAQFKKLAARRGRKCAIIAVAHSILVIGYHLQHKGCVYSDLGGNYFDRLHADGLKRYLVKRLESLGHLVTLQPRTA

SEQ ID NO: 249367 - protein, 355 aa, unidentified
MTSTKYIGMDVHKESISIAVMNAFGKIVMECVIETKASILLQFIHGLRGDLHVTFEEGTWAAWLYDLLKPHVTEVVVCNPRKIALLKDGSKSDRIDARKLTEQLYLNKLQAVYHGEHGLRTLKELARSYLTITKDLTRVMNRLKALYRSWGIPCAGNEVYAPRHRSEWLGKITEPGVRRRAEHSYQQLDVLRLMRQEVRRDLLVESKKHKAWKLLRQIPGIGPIRAALLVALIQTPHRFRTKRHLWTYSGLGLETHDSAQYRVVEGQLQRSKKPATLRGLNENHNHDLKDIFKGAAMRASTAAGPLHDFYEALLAKGRKPTMARLTLARKIAAITLIVWKKEVRFDANYLKLQAA

SEQ ID NO: 249368 - protein, 375 aa, unidentified
MREKLRFLGMDVHAETIAAAIAEPDGEVRSLGTIPNRMESVRKLIKKLGPVEKLRVCYEAGPTGYVLYWQLAELGVQCEVIAPSLVPMKAGDRVKTDRRDAERLARSYRSGDLTAVWVPDEGSEALRDLVRAREAAKQDELRARHRLGKFLLRSGQRPPTGVRSWTHLHLIWVSQIRYAQMAQEATRLDYLHEVEHMRERVLRLEQAIAEAVKLASPALQEVITDLQALRGIAHISAVTIAAELGQVSRFAGARELMGYCGVVPSENSSGERTRRGSITKTGNAHLRRIVVEAAWSYQRPPAIWAGLRKRQQSASEEAKEIAWKAQHRLHKRYARLAAKGKDKRKIVTAVGRELLGFIWAIGTKAEATVNQRIAA

SEQ ID NO: 249369 - protein, 326 aa, unidentified
MNLPIRVGMDTSKSVFQLHGVDENEVVVVRRQFRRAEMIRYFERLPPVLVAIESCGSSHHWARLLQSFGHVVKLIPPQYVKAYVKRGKNDAADAEALCEAVTRPSMRFVPVKSKERQAACMLMTVRERLVSVKSQLSNAFRSYAAEFGIVGPAGRQNVTALIKRVLEDNSLPEMAQDLFRLQADEYAAVEARLAKIEAKLMKWHREDEVSRRIATSPGVGPIGSSMLSMKAPPPETFRSGRDFAAWLGLTPKDHSTGGRQRHGGITKAGDSVLRSTLIVGATALLRHIRKGRHKPTPWLASLLERKPPKLVAVALANKFARYAGLQ

SEQ ID NO: 249370 - protein, 319 aa, unidentified
METTEVSFTQVVSRGCGIDVHQKVVVATISGDGIKKETREYGTFTRSLTELKEWLLEQGITHVAMESTGVYWKPVYHVLEPTPIKVWIVNARHIKYVPGHKTDKQDSAWICKLLLAGLLKPSYIPPREQRELRDLTRYRTKLIQHVASEKNRIIRVLEDCNVKLSSVLSSTQGVTATRLINQLCEGRTVTMKDIEEVYHGKLGASKEDLYEACQGLMTPHHIYLLETIREDIRSTEGIIEGLNDRIRAMLSVYENVLENLKAIPGLSKKTVEDLVAEIGLDMSVFPTEKHLASWAGMCPGNNESGGKKKADAPTTAISR

SEQ ID NO: 249371 - protein, 338 aa, unidentified
MTITTIGVDLAKNSFQLHGVDHTGRTVLRKKLSRSRFLEFFADLPACTIGMEACGGAHHWARELTKLGHTVRLMPPQYVKPYVKRNKHDAADAEACCEAVQRPSMRFIPIKSQEQQSLLMLHRIRDRLLAERTASINAIRGHLAEFGIVAAQGARGLGELRGVIGDVDDHRLPARARALLTYEVEHLQELEAHLEHLDHELVEQARTDEACQRLTGVPGIGPVIATAMVATVGDAKVFRNGRSFAAWIGLTPKQHSSGGKELLLGISRRGDGYLRRQLTHGARSLVKIARGREGKLWAWINGLLARRSFNTTVAAVANKLARIVHAVLSRGEAYRAPA

SEQ ID NO: 249372 - protein, 344 aa, unidentified
MNQIIRIGMDTSKHIFQLHGVDAAEQVGLRRKLRRHQMLEFFAKLPPTVIGIEACGAAHYWARELRKLGHEVKLMAPQHVKAYVKRNKNDGRDAEGLCEAMSRPTMQFVPVKTEEQQAVLMLAGVRQQLIARRTQISNAIRGYAAEFGLIAVKGLDKIEALLARIGQDQTVPAMARELFALHGRDYARLQVEMKAIEAKLMAWHRANATSRRLAQIPGVGPIGATALVIKAPDPRLFRSGRHFAAWIGLTPKDHSTAGKTRLGKITRAGDEMLRSVLVAGATAVVKQAKHGRGSPWLLALLKRKSPKHAAVALANKIARIAWKLMVTGESYDGARMPGASALAA

SEQ ID NO: 249373 - protein, 327 aa, unidentified
MTASVSFDNHIFIGIDVSGASFEAAWHRGGSTQYENRPDAIAAFVARLGGEKQIIRIAVEPTGGYEKPLVKALRGAGLPVEMVHTSRFAAYRTLVGAKAKSDTSDARLLAAYAAAPEEVRGRKADYVEIPQDALREHLAELAVRCDQLKRMIHAESCRLATVRSNDVREQIAAHLEALREAGRKLHVAMMQLVRECAELRNAKRLLRSIKSIGDKTALASLALVPELGLISNKAASALIGVAPFVHRSGTMNAPAHIHGGRAAVRNVFYMTAVTASRHNPVLAPFYDRLIAAGKPPKVALVAVMRRLVVYANAVLRSGQPWKGAQTS

SEQ ID NO: 249374 - protein, 315 aa, unidentified
MTKPVIGIDVGKDKLDVGLATEKRVRVWNNDDSGRAELSDWVMAQGASLVVVEASGGYEAALVSELAGREQAVALVNPTRVRAFAKAEGVLAKTDKIDARVIARFGATMKPQARVRRDEAQVKLNDTINRRRQLVLMLTAEKNRLHTASVDMKTHINSHISWLQANIEELEKQISQAIQANPTWAEAAKRVESAPGIGFITAATLVADLPELGHLNRQKIAALVGVAPFNRDSGKQRGKRRIFGGRGSVRSVLYMATLSAIRHNPVIKKFYHRLLKKGKLKKVALTACMRKLLVILNTMVKTGQDWNPPSSSPAI

SEQ ID NO: 249375 - protein, 356 aa, unidentified
MERYIGLDPHGTSCTFGVIGPSGRKLRHDVVETNGAALVNYLRSVPGRKHLCLEEGTQSAWLYEILSPHVEEIVVAGICESRGQKSDALDAFRRAEELRIGAIEKPVFKAPRLYSRLRELGRVHSMLVRDVVRAQARLKVMYRARGISTPGKSVYGLRQRAQWLRQLPVSSRWATEKLHEECDLLVELKREAEHELVAESRKHRISRVLATAPGLGPIRVAQLLPIVVTPQRFRTRSQFWAYCGLGIVMRSSSDWVQSPNGGWMRAQVQRTRGLSRRHNSSLKNIFKGAANTVVMKLHTDPLYEHYLRLTSAGTKPNLARLTIARRVAAIVLRMWKDEQEYEPDKLKQTTVAPAGR

SEQ ID NO: 249376 - protein, 418 aa, unidentified
MNLFVGLDVSSEKLDVCFLSDDDNLTILEEITLGNDIDGATTVKEKVITFQEAYGFNQVIMGMESTSMYSFHPAMFFNQDKELKAINTIVTIENPFRISQFSRMFDEDKTDRNDAFRIADFLRIQRFTTSPIKEEKYMALQRLTRTRYQLIKQLVRTKQHFLENLSYKCNTLTRELKELDGTTSVFSTTVMSLMTDNYSLDELAELPLEDFATLLQEKGKGRFKNPKSLAKSIKRAIANSYRLGTIAQESVDVVLSVLVREIRALEASIKDLDKAIEQLVVILPEYQCLTSIPGVGKVYAAGMIAEIGQIERFEDQTKLAKYAGLSWKVKQSGNYQSEYTPLTKQGNRYFRYYLVEAANSVRRYLPEFQEFYSKKFKETPKHQHKRALVLTARKFTRLVDTLLRNHQLYTPPRSVIDK

SEQ ID NO: 249377 - protein, 361 aa, unidentified
MEDGTTPGDARNRAVPAALTVGLDVSDQYSALCMLDEEGSVIEEGRVRTTVSALTQRFAGRAPCRVVLEVGTHSPWVSRLLAELGHEVIVANPRAVRLIAESDRKQDRTDAEQLARLGRLDPRLLAPIRHRGEQAQQDLAFLRSRHSLVRARTALINHVRGVVKAHGARLPACSAPAFHRKVAAHLPAGLRPALLPHLELIAHLTHQIVAADRQVEALSAERYPETRLLRQVAGVGPLTALTYVLTIEDPRRFRKSREVGPYLGLTPRQRQSGVRCPQLPISKAGDRYLRQLLVGCAHYILGPFGPESELRRWGLRYAPAGARNARHRAVVAVARRLAVLLHHLWVTGEVYQPLRQEEQAA

SEQ ID NO: 249378 - protein, 309 aa, unidentified
MKQSVVYIGVDVAKANLDVAWAAASRRFPNDPNGHAALVLWIKQSAAPVQLICEASGGYEQGLLESLEQNNLAVTLVQAIRVRQYARAAGILAKTDTIDAKVLAAFGAAMQPKPTPPFSAEQKRLRGYEAQRRHLSKVLLAEQNRLAQVSCAELRSLSRSLISKIKKQIDTLDTGIANLIAQDQVLCVKAQKLTAISGVGARTAALLLAQMPELGQLNRGEAAALAGLAPFNHDSGSIRGKRAIFGGRRALRSGLYMAALSAARYNPILSSFYQRLRAKGKPHKLALTAVMRKLLLALNSSLKPEPILA

SEQ ID NO: 249379 - protein, 400 aa, unidentified
MLSIGIDVSKGKSTVCGMKPGGEIVYAPFEVQHTREGMSELVSLLRSSGEEVRVVLESTGSYHCPVVAALLENGIFVSVVNSLRMKRFCSQSIRKVKTDRIDAMQIALYGLAYWQELQPTRLPEDTYRELQLLARQYYQMTSMLIKAKVDFNALCDQVLPGMQEFMNDHAGRHKLSDFVLRYRHTTHILEMGETRFRKDYCKWAEKKGYRNCERMAALIFATAQNGIPVLPNAPSTQIVITEAIRVLHTVEASRDAILTQMQALAKTLPEYSLVREMPCIGDTLAPRLIAEIGDVRRFHSKRALIAYAGIDAPPYQSGKFCANNRHISKRGNRYLRKTGYEVMQSYVMHKPANDPIFTFIEKKRGEGKSGKLAMVAGLNKFLRIYYGKVTELYRSLPAIE

SEQ ID NO: 249380 - protein, 316 aa, unidentified
MAKRVKEITLGVDVSKDELVIYDWDTEESITLENKASIIKDWFENLCGLVRVAIEPTSNYHLEFVEQGHALGFEVYLINPRQLANYRKAVDVRNKTDPLDAWLLARFLTRECDSLRPFKPLCAQSKQLWSLLKRRAAAVKARTQLKQSFAEIKLPTKALFSEIQRVLDRIDQRMMELIRKLGWWLDYQRCKSIPGAGKLNAAALVTVFHRGAFAGADAFISFIGLDICVRESGKFKGKSKLSKRGEAEIRRLLFCATQPARSYQPFDDYYLKQLVKGRSKIAAKCALARKLARIAFSLMTNQQSFKKQEIAYSISP

SEQ ID NO: 249381 - protein, 422 aa, unidentified
MLEEAHDSEELVQRVAALDIGKAQLVCCVRVPGEGKRARRLQEVKAYPTMTRSLLVLADRLRQLGVTRVVMEATSDYWKPVFYLLEAAGFEVWLVNAKDVKHLPGRPKTDRLDAVWLCKVAERQMLRPSFVPPPEIRRLRDLTRYRIDLVAVRTAEKQRVEKLLEDAQIKLSVVASDVFGVSGRAMLAALVAGERDPKVLARLARTRLRAKTAQLEEAFVGRFSDHHAFLLQTMLGRIDQASADIAELDRKIDEAVAPFAAAVDRLDEVTGIGRTAAQVVIAEVGVDMGRFPTAGHLVSWARFAPGVKESAGKRKGKATTGHGNRYLARVLGEAAVAAGRTDTFLGERYRRIARRRGSKRAIVAVGRSILVIIWHLLSDPNLRYQDLGPGFYDTRINAEHRKRNHVRQLQALGYKVTLEPAA

SEQ ID NO: 249382 - protein, 382 aa, unidentified
MSQTASRGDFTAMGSELFVSFELGWNRWRLAFASAMGQRAWQITIPARNILALTDAIRKARQRLGLFQDCPVFSCYEAGREGFWLHRLLQQMSVANLVVDSSSIEVNRRARRAKTDRLDAEKLLSMLLRYHAGEKKLWSVVHGPTPEQEDRRHLQREIRTLKKEQTRQINRIRGLLANQGVAIKANRRGLLEPFDSIRIWDGSPLPSGLQRRLETAVARHAFVHRQLLDLESERDALIRQSQDRAAQIARRLMTLRGIAEVGAETYARELSWRAFKNRRQVGSLIGLTSTPHQSGDSSRERGISRAGNRHMRGIAIDLAWIWLRQQPHSDLTLWFNRRFAHASPSLRKIGIVALARKLTIALWRYADFAEIPKGALLKSNTA

SEQ ID NO: 249383 - protein, 355 aa, unidentified
MDSKKYIGMDVHKESISIAVRNGAGKIVMECVIETKASMILQFIDGLRGDLQVTFEEGTSAAWLYDLLKPHVTKLLVCDPRKNASMREGNQSDKIDARRLAELLRLNHLSPVYHGEHGLRSLKELVRSYLTITKDLVRVMTRVKAIYRSWAIPCTGKQVYAPRHRVEWLGKIGEPGVRRRAEFYYQQLDALRLVRQEVRRELLAEAKKHKAWKLLCQIPSIGPIRSAVLLGILQTPHRFRTKRQLWTYSGFGIETQSSADHRKVDGQLERVKKQSSIRGLNRNCNHDLKNLFKGAAIVASSKPGPFQEFYTALVTKGIRPEMARLTLARKIATIVLMVWKRGACFDAQHLKPQTA

SEQ ID NO: 249384 - protein, 455 aa, unidentified
MKAKAVSAPRSKRGLRPEVSRATEPQVVGLAPQTTGMTERTDTMKTYLLRDPNAVEPQKPTRPPRRQPAPPPRPPGPALCIGLDVHNDSIAVSLAPADATEVRRYGIIGGQHDDVLKLLKKLAAAHPGVALRCCYEAGPRGYPLCRFIRSHGAECLIVAPSKVPRQPGDRVKTDRRDADQLARLLRAGELTGIYVPDPQDEAVRDLIRARYQVQKQQHRARQQLKMFLLRQNIRYTGTKPWTQKHLNFLATVKLPFGEQQFVFQEMVNVISEAGQRLERYEKQIESVVAGWRWAPVVRALMSLRGVALLTGATLVAELGDLHRFESAPQLMSYLGLCPSEHTSGTTRQQGGITKLGNGIARKAMIEAAWNNRTPARISRTVLARQAGLPKTVTEAAWNAQTRLHQRYKHLTGVGRKKSQVAAAALGRELAGFVWAIGRMVQPHAAPVAAGNAKAA

SEQ ID NO: 249385 - protein, 404 aa, unidentified
MEHVIIGVDPHKLSATIEVVDHHEQLLGSGRFTTDQAGYTAMRTYATTWPDRVWAVEGANGVGRPLAQRLLEAGEQVVDVPAKLAARVRLFDTGHNRKTDARDAHSIAIVAARTRTLRVLQVDGELEALRMLTDRREALTRRRVQTVDRLQALLAELLPGQAKRDITTGQAKAMLASVRPRDIAGKTRRRIAAEELAELVAVEAKIKKATAELKAIVLARGSRLMDIHGVGPVVAARVLADVGDVTRFADRNRFASWTGTAPLDASSGEQNRHRLSRAGNRRMNHMIHIAAISQIRLDTDGRVYYRRKRAEGKKSLEAIRCLKRRISDAIYRQLLADAQLAAATDLGTGPGGHCGASHESSAVDLPPHIDSNDRKQPAAVVTLTSTDVLLDCLGTVMSGRCGSR

SEQ ID NO: 249386 - protein, 391 aa, unidentified
MGSETFAANPDGYDRLIDMLPGPGAVAAVGVEGTNSFGAALARRLAAAGYEVREVLRPKRNVRRRNGKSDPIDAVAAARSVMAGDDAGPPKSSDGWVEALRHLNAQRAQLVSAMTAISNSTNGLLVTAPEPVRERYRGLKGGARMNRLAECRPAGGLVEHSALVALKSAAKAWKALKRQSGLLEERMRAILEEHARPLLDMYCVGTVIAAALAIVAGDNPERIRSEAAFAKLCGACPLPASSGRTSRHRLNKGGNRQGNVALHRIAIVRLRYHQPTRDYAARKTREGKGKLEIIRCVKRFIAREAYRALIAIRNGGNGRGTSGERGARLRELRMNHGITQQQVGEALCVPSSRISEIERGRRDLPELEQRAIQWIHSITDPKQHAQTLDNV

SEQ ID NO: 249387 - protein, 379 aa, unidentified
MRTVSGLDVHKDSIFMCILDEQGKKTEEKFGVTTREIKRLGRVMQSRYVSDVCMESTSIYWMPIWRLLESDFRLHLVNPLFLKQLPGRKSDVKDAEWIATALIKDLVKDSFVPDGNIQRLRQYGRRINEINRDLVRCEQRIDTVLQRCNIRLSNHVSRTKNKSYRKVVDALIAGESSCDVLIKLIHGRTVNRCGKSAVHDCLEGCIGQSDRDMLGQYTQMFDMYETQKQQCIEAMIQMCVELYREAFLFLLSIPGIKEISAAIIISEIGDNMELFATAATLVSWAGLRPRNDESAGKIKSRKITHGNKYLRKALMECAWGAARTKGSVFYSRFFYLKGMKKHHNAIIVAIARQMLTIIWTLLTKKEHFDKEYHLKKKSV

SEQ ID NO: 249388 - protein, 349 aa, unidentified
MEVERRERNPILYFGAIDLHSDNSVLGVINEAGQRIFCRKLPNQLEVIRHAIEPFRNELKGIVVESTYNWYWLVDGLKHAGYRVHLANTAATQPYIGLKHSDDETDTWWLAELLRLGLLKEGYVYPQAQRAVRDLLRKRAHLVQQRSRNILSVQNLTNRNLGVRLSARAAKGLTAAGVAESYDNEYLALAITSTLEVIEVLDKQIQTIEKRVKDKVKLTVPYQLLQTVSGIGEILAMAIMLEAGEIGRFPTVGDFASYCRCVQSHRLSNKKKKGKGNRKNGNGWLRWAFIEAANFAIRYQPVIQRYSQRKEKRTSTVVARSAVAHKLARASYYVLRDRVPFHVNRCFGQ

SEQ ID NO: 249389 - protein, 521 aa, unidentified
MATRTSFQRRRRSHEIHKPTGTLHPRVQAVGPERFGIVCIDCAKSRSKVLLADFYGKVLIPPTVVNHDRGGFEAAIQAVREAAQRHRLAVVVVAVERTGRFHLPIQAAFQAAGFEVRIIHPFATKQFRQPADPGNKTDDTDLSAIHRAAVNGFGLLEHEPDPLYAQIQLLARHRRDLVTKNITLRNQIHDHLQVIMPGLVAVLDPFASPLPLWIVKHLGSADAVLAVGVPGLLKRLREAGFHPHLKTVEKIVAWAKAASAPDAQSSIHRRVLISLDCDRTAKLEAIQSVEGDLVGLLARTPYVLLLGIPGINVVTAAEFAGEMGPIGRYPKARSITGRAGLFPSRYQSDTVDRSHGSLVRRGNHSLREVILRIADNLIMCNDHFKAQAAKWRLSGKDARDIHVRVGGRFCRIAYQMVAGQSVYRHPSCQHRHYVLEKLITFLNTRNLECALVIGSLESAAAQLPRSEYRSEAAPLAEELARTRSKRGTGPCLLGGILPAVLARLGVDLLPSNGSGEPDPTE

SEQ ID NO: 249390 - protein, 358 aa, unidentified
MAQRRIKYGVGLDPSKEHIYACFGCQTEQQEFKVIATRRFANTSKGHQQLADWIRQKRKDPSLPWQIFLEVTGVYHEAVLYYLHSLGYPICLLLAKRVKKYLQSNGYDSKNDKEDAKGIAQMACEQKRPLWEPVSPHILQIRSLLRHRKALITSRDQFKNQLHALNAAHFQERTVKSSLRKIIKRLDKQIQEIEKKTVELAQKDKELYRKVRQIADSVKGLGIITVLTVVAETNGFKKIYSIRQLVSYAGYDVVENSSGKFKGKTKISKQGNARLRAAMYMPALTVIRSQVEPFYSLYTRLLVRNGGLKKKALVAVQRKLLVLIYTLWKKDEPFIENFHEKQKARRKKENAEKLVAPM

SEQ ID NO: 249391 - protein, 349 aa, unidentified
MGQVSTIGLDIAKNLFQIHGVDAEGMVVIRKRLSRGRVLEFFADLPPCRVGMEACATAHQWARELRKLGHDTRLMPPTYVKAYVKRGKNDAADAAAICEAVTRPSMRFVPIKDVEQQSMLMLHRARDLLIRQRTQLINALRAHLAELGLVAAKGREGLHQLVAVVTECGDERLPSNARFACQAIVTQLHTVQIEISGLDKRITQIQRTNADCKRLNTIPGFGVILSTAVAATMADPKMFRTGRDFAAWIGLVPRQNSTGGKERLGSISKQGDRYLRRLLVVGATSVINCARARPYKYPWVIELLGRRPTKVVAVALANKMARIAWAVLSKGELYRAPTRSSNAVVPKVA

SEQ ID NO: 249392 - protein, 340 aa, unidentified
MAIVGGLDVHRAQITYDHLDTVTGEVEVGRIVPATRVELRDWLSRFEGREAAFATEGCTGWRFVVEELQHAGVEAHLAEPADTATLRGRKKRAKTDRADARHLRALLIEDRLPESWIPPAHVLETRIKGRAYVALMDHRRAWQQRIQAQLFHQGVEKRRGLLTEAGRSHLDEAELSGAGRQLIDVALRVIDALGAEADPLRRELQGFARRQPGCRALVDELYGVGALTAAVIWAEMGDTRRFSSSDQAVRHTGLDITVYESDGKRSPGRLSRQGPSTLRWALFEAALTATRNSSPDHGYYLEVAERLGPKRAYLSVARKLARRVHHILRGLGDTAFEEVT

SEQ ID NO: 249393 - protein, 348 aa, unidentified
MTVTIVETRAITGGVDTHADTHVAAALDPAGGLLGGQEFPATPAGCARLLGWLGGFGPVCLVGIEGTGSYGAGLARHMAAAGARVVEVDRSDRQDRRRQGKSDPLDAVSAARAAQSGRARGAPKGRDGAVEAIRALMVAKRSARSERTQTINQARALILTGPDDLRARFAQHTAAALVAGTALLRPRPGDAAGYATRFALRELGRRAEFPDGQIERLDELIVPLAGARAPGLLALYGVGPETAALLLVAAGDHPERLRSESAWAHLCAAAPIPASSGKRTRHRLNPGGDRQANHALWRIVITRMSSHPPTRAYVDRRTAEGLSKKEIIRCLKRYVAREVYHQLLTPAG

SEQ ID NO: 249394 - protein, 408 aa, unidentified
MQVLYPRCAGLDVHKDTVVACVRCVSEPEHHETRSFATTTRELLALGEWIASHGCSHVALEATGVYWRPVWHVLEGQVELVLANAHHIKNVPGRKTDVNDAMWIADLLAHGLIRSSFVPPQPIQELRDLTRTRKQVVREISQHSLRIQKVLEDANIKLGSVLSEVLGVSGRAMLGAIIEGERDPHKLADLAHGTARRKHDALVEALHGHIRPHHCTLLKLHLNLIIALEHTVAEVDAAVGKCLDPIHQRARLLTTMPGVRDTVAEVIVAEIGIDMTRFPTPGHLLSWATMCPRNDESAGKRRSTRLLKGNNWLKTALVTAAWAAVRTKTSYLRAQFLRLKARRGAKKAIIAVAASMLTAAYFILRDGVPYRDLGPNHFDRQQRGKTVRRLLRRLHDLGYNLPPQHQPV

SEQ ID NO: 249395 - protein, 349 aa, unidentified
MYYIGMDIHKKDTQASVLNEKGKFVHGERIRTDVVDIGHFFEKIERMNDDDLSVVIEATGFYFWIYDVIAGRGHQVKVVHPNRAKALMKARSKTDRNDAFMLAQLLQLGGLEGIYVPSKDVRELRDLTRHRESLVRKMGDLKREIIGSLDQHGIKVPAEFKTNFSNKFNEHVRKLDVFIINEKLDLLVTTIEKLKNVEAVIEERYGKDDEVELMMTMPGIGIVTASVLKGEIGDIGRFQSFGNLATYAGLTPSRSQSGEKEWFGPTGHGNDRIKHVLIEATLSHVHHKTIRRSRTSTKGRRGRWARTRSWWPPPGRCWRRSTSCCIVRKRITLTDVDHRRTHPPRSALS

SEQ ID NO: 249396 - protein, 368 aa, unidentified
MSKTITSFVGLDVHKDSTAIAEAEAGRETPRFIGTVGPDLGQLLKALRSLGKPETMLVVYEAGPCGYGLARQLRSRGYSCEVVAAGKIARRPGERIKTDRRDALTLARLARSGDLVKVLVPDERDEAMRDLSRAREDAVRARLKARQQLKALLLRHGHRYGGKSSWTLAHERYLAGVSFAHPAQDIAFAEYRQAVREGHERVERVTQALRSQTEHWRLKGLVAALSSLRGIDFVAAVTLTAEIGDFSRFAHPSELMGFLGLVPSEYSTGDSRRQGDITKTGNSHARRVLVEAAWNYRFPARLSRILQIRQEGQPQAVREIAWRAQLRLAHRYRRLSSRKLHPNKICVAIARELAGFLWDIARQVKVAA

SEQ ID NO: 249397 - protein, 348 aa, unidentified
MESCFAGKELFVGIDVHKKRWVVSVRTYDLELKTFSMIADAEKLEKFLAQNYKDALLHIVYECCFSGFWIYDYFHNKRYDIIVTPTNRIYRDGSVVKTDKIDSRKLAFQHSRGLLRAVKVPTEKIREYRSIFRIYDKEKVREGQILRQIRCILEVRNHPLKWERWNKEMIERLKSVRFQEAIFNSKFEQLLREYEYVKDQIKDSEIRIKEIGEDEELRSKIKRIEKINGVGIVSAARLVVFLFDKKGRFETGEKLVHYLGLTPGEHSSGEEIIRQRTGLVGNKQLRSIIIQLAWVAVRKDGSLLNKFERVYRKSGSKQKAIVAVARKLMMKVYAITEKEEEYEINKAA

SEQ ID NO: 249398 - protein, 349 aa, unidentified
MSTTYYIGADVHSNSTELAIEKRGKIVARYSVPTSIPAIINVLDSLQGKKYLAVEEGPMSGWLYRNLNKKLDHFISSDPRRNKLIASDGDKDDKIDAAKLAFLLRGGFLRTIYHTDDDSRAELKHWVSLYHDRVRDAVRSINKIRARCRMHGITISRAALRDPASRINWLSKTKHISLANQLKMLWIGYDATAQQVKFAKRQLSMLGKKFDTIKLWSQLPGIGLIRATTIFAYLDTPWRFKKKNKLWKYCGVGLQRTTSGTDKNGKPKPARLKLPWAVNRTLKNAVLGAALSSINQKDNAFKDYYERMVKNGIIPSNARHAVARKLLTVMWAMWKTNSPFDENSVCLSN

SEQ ID NO: 249399 - protein, 371 aa, unidentified
MDEPSTFVGLDAHKDSIVVAMLLPGTVHPVEWKLVNEPGAVRRLANKLEREARGGVRCCYEAGPGGYVLQRQLVAAGIPCTVIAPSLIPVKPGQSIKTDRRDARKLAELFRAGLLTEVHPPTEDEEAVRDLCRARDDAQRDRTRAKNRLTKFLLRRGCVYCVGRKPTWSQKYWRWLHALNFERPADQIVFEDYLLAVEQVEARLEALDDQLGRMSTTEPYRAPVAALRCFHGIDTVTALALVAELHDPRRFPSARQLTAYLGLVPRESSSGSRRRLGGITGAGNRHVRRLLVEAAWHYRHKPQIGRGLRLRRRGQPPAVIALADRALRRLTLRHRRMIYQGKHPNTVTVAIARELAGHLWNALQATTPARS

SEQ ID NO: 249400 - protein, 414 aa, unidentified
MTSNVNIAAGLDIHNAFVLATILWSTGQMIQERFSRTQEGLIQLKNWILSHNCEVIACESTSDFWVPIYELLNNLVPVIVGNARDIKALSHKKTDKVDSELIARLALHGMIQPSRIFSKSHREFRKILRLRHRLVEKRSSFKNQIRGILNTEMIHIRSVLSDIFGKSGLLILNGIINGMPLKDIIAILPPRIQQKSDSIEAVLKQSISHSALFQIKVLLDVIKCLDEQEKLLKESALHFAFENYPREMEILMSIPGIGAVSAATLIAEIGNIHDFGSGDKLAAWLGLVPTVYQSAGKLRMGNITKRGSVHARWILNQIAHAATRCKINSFRTFYERKHIVIGKAKAIIALARKIATIIWHLLMHDEYYEDPVFGKKNIPKLSKVAIPREVTIEQLLEIFAKADILLKSPDPDIL

SEQ ID NO: 249401 - protein, 471 aa, unidentified
MRISDLRGRKAGERIFAHGGEGLADMAGWLVAVTGVEPDGIDVAIEVPHGPVVESLLERGFRVHAINPKQLDRFRDRFSPAGAKDDSRDAEVLADALRTDRRCFRRLAPLDPVLVELREWSRMAEELRAERNRLGNRVREQLWRYYPQVLDLADDVAAGWFLDLWALLPTPEKARRVREETVARLLKRHRIRRFTAADVLERLRRTAVLVAPGTTEAAVAHVQALAKRLDLVNRQNAEAETRLDRLTERMAQARADAEPGEPGQDEVQQGGAQRDVTILRSLPGVGRVVLATLLAEAWEALQRRDYHALRCLCGVAPVTKRSGKSKIVQRRQAAHQRLANAVYHWSRAPYSTTPEAAPSTPHSASAVTVTPAPCVPSETVSSPSPEPCSKPEPHSIRLSLVKEPQLSPKANSETTESPPRTWRNYFITVGELFQTSVKHPNFKTYLELYFRNPTIRAIQSIVEKANTRFMP

SEQ ID NO: 249402 - protein, 338 aa, unidentified
MTIVMGIDQHRAQITGEWIDIETGEVQRARVAPADRAGVRRFLARFAGVQLEVAVEATTGWRFVVEELRRVGAVVHLAEPAETAGLRGPKKRAKNDRADARHLRELLMVGRLPESWIPPEHILDLRARVRLRHTLMAQRSEWQQRIQAVLYHHGCPRRRSLIIGDGREWLAVQPLPVGAREQVTVALAVIDALEAQIVPLDRELRAFARRQAGCRTLQAHYGIGPLVAVTILAELGDCTRFSASRHAVRFAGIDITVHASDQHRSPGHLSRQGPPALRWALFEAAQSACRPASPDHDYYRQAAARLGHNRACLSVARKLLKRSHHTLRELGEEALAPA

SEQ ID NO: 249403 - protein, 345 aa, unidentified
MKKGITIGMDLGDKKHQVCILDPAGKIIGEKEVAGNRTAMTSFFKQYCGAVVAMEAGTHSRWVSQIAAATGLEVLVGNARKLRMIWQSRQKSDTRDAVMLARIARFDPALLCPIRHRGEQVQMDLEIIRARDLLVGERTRMVNHVRGVVKNMGERLPASSTASFGHKAKIPEALNEALKPMLEMIRELTKKIRGYDLMIKEKAANKYPETEQLRQVGGVGPLTALAYVLTLEEPERFAKSRMAGAYLGLVPRLDQSGQINKQLRITKHGDGYLRRLLIGSAHYILGPFGPDCDLRTFGLKLMQRGGKNAKKRAVVAVARKLAVLLHALWSSGQKYEPKRIKPLAA

SEQ ID NO: 249404 - protein, 426 aa, unidentified
MQNCLFIGVDIALKGNQFCVMNFDQHIYFNLKFPNNPEGNDMVINKIKDIENKFFFEKIIIVMESTGMYSFHPACYLSSNEYLNKFHTEVYQINACDFDKYKKSFHDLDKEDGIDAYILADYARVGRTKVLYPFRGSQYIALQRLTRQRYHICKELIREKTYVLTNLYLSFSGLMSLDKNELPFSDLFGTTSSAFLEEFVSPDQIAESSVEELINFISEKSKNHSSNLNDKVTALNKAMRASYRLDQTAYEPINIAIACSLNTIKFYQQQLKNIDKAILNAALGLDSNTYHILLSIRGIGKVYAAGIMAEIGNIDRFSHNSKLAKYSGLYWKRNQSGEFDSQDKKSSKKSNKYLRYYLVEATASCVRQNFPFIKDYYNLKYKEVTKHQHKRALVLSARKLERLIFGLLRKNQYYRPINSVQNSKIS

SEQ ID NO: 249405 - protein, 280 aa, unidentified
MDEKGQVLKEGRIGNSQKSLQHFLGKAEVGRKAVLEAGRNWTIMHDWLESEVEEVKLAHPLKVKAIADAKIKTDKIDAKTLAHLLRCDLVPCAYVPDKKTRIVKNILRQRMFLVKLSTMVKNRIHIIIDRHPELKDEKGTIDLFSKQGLEWLKKATLPKEDKRILNEELDLLDYINKKLDSSNYWITQLGKEDKRVRLLMTIPGIGKFFALLIANEIGNIRRFKHKSKLASYCGLVPSVHASADKVFYGRIIRSANKYLRWAFIEAVWPAIRKDCTLLKI

SEQ ID NO: 249406 - protein, 318 aa, unidentified
MKALQSRVAGIDVHKEILAVTVLIGEADAEPEVTQFQCDTFTEDLMRLGSKLLDLGVKDVVCESTGVYWKPLHNVLTPMGITLTVGQAAHMRNVPGRKTDMNDSHWIATLHRYGLVRASFIPDDVFQRMRLLSRHRTNLVEDLSRVKNRVQRTLEDGNVKFGSIASDVFGKSGIQILRSIAAGNTDAKVLASKVTTQIKRKEEARKALTNCLTKDHCFLVKELMAQYDDITKRIVNVENELMDRAKPYSHLIEELQKIPGISDVLAYAIIAEATTDMSHFKDERSFAAWSGVAPGNNESASKKKDQNVGRGILTYGES

SEQ ID NO: 249407 - protein, 356 aa, unidentified
MMVVGVDPHKQTHTAVAADELGRRKAQKTVRARRDGHRELIAWARQACPGGRTWAVEDVRHVAGGLVRDLLAAGEAVVFVPPKLMAGARRGGRERGKSDPIDALAVARAALREEIALPAARLDGPVLEVRRLGDYRDDLVAERTRVINRLRWMVHDLDPALAPAPRSLGSARARAKLEAGLAALPAGAGRAVALSQLARVAALSAEITGLEQDLAGLVTPLVPDLLAMTGVAVLTAAKILGEAGDIRRFTSPAAFARHDGTAPLPASSGTSDGASDGPHRLNRGGNRQLNAAIHRIALAQARCHPGARALLERRGQDKHETRKASFRALKRHLSDAVYRALKADAWRLDDTAQHAA

SEQ ID NO: 249408 - protein, 312 aa, unidentified
MPCCVGIDGAKAPWDIALRPAGERWAVPNDAGGVVMRVERWQALPPTLMVLAATGGLERAATAALATAALPVVVVHPRQARDCARATGPLAKTDAVEARALAHCAAVIRPTPRPLPDAQTQELRALLGRRQHLIGMRTAEQHRLAGTTARLTKDSAAHMTWRNAAIATLDGDLETLRRASPRWRDKDDLWQRATGIGPVWARTLRRALPALGTRTRQQSAAVVGVAPRHCDRGTLRGRRMIWGGRAPVRPVFYMGTLVATRFNPQSKVFAERRLAAGQVNKVALTACMQKLLPILNAMLKPRTPWQPQEVQS

SEQ ID NO: 249409 - protein, 420 aa, unidentified
MKEITETGNKVKGRVYPLDNISWVVGIDIGKEKLSCALMTINKALICRFDIEGSLSGYNGLMDRVKRETRGNGKVVFALEPTGHYWMVLGQFFEDHNQSYVLIHPLVVARSREVHHLNKSKTDSLDARLIGELACDKSVIRTQIPEDHWATIRFYAREYIDREKEIAREKNRIMSYLETTLPEFMKIFPRPLCMSGRACLRVLADFKQALKGNGEHFEMRIRKHLACKRLMTSRIRRLHDMLQRGDVLGLRAGRQAMFFRIIHSLDRLEVFEGQEKAAKQAMLDVYEESEYKEYLDSIWGTAPAANALILGFMGDPALYDSPASLVKLAGCDPVPNESGKFKGRTSIFHRGRSLLRKAGDRVSFLLEKRNSVFRAFFNRLMSRQKNKLTKRQARVACINKYFRIVWVLCHYKVHFNPALA

SEQ ID NO: 249410 - protein, 331 aa, unidentified
MSNYSNAIGIDISRDKFDVKDYKLGTHKELPNSESGFKQLLSQARKDHGKELNGIIICFEHTGLYSLPLSVFLTQKKISFTMVSGLEIKKSLGMARGKSDKIDAYQIARYAYLRREEIKEFELPSEEILKLKGLLSLRERMVKHRMAYLGHLKELKSFYKKGKKSLLVKSQEQLIKDLSKQIDNLEKEMLETIKNDPELKRLYSLVTSVKGVGLVVGITFLVYTNAFTAFETWRKFATYAGIAPFPDESGTSRNKPKKVSHMANKRIKTLLSNSASTSIIHNPEMRIYYEKRIKEGKSTMSTQNIIRNKIVSRVFAVVKRGTPYVDTLGYA

SEQ ID NO: 249411 - protein, 311 aa, unidentified
MAYVGIDVSKATLDVAVHEGATTHVANDAPGCTTVVQQLRGLPVTLVVLEATGVYHHAVTTALVTAGIPVAVVNPRQVRDFARSTGQLAKTDRLDAALLARFAAVVQPVPRALPDEATQALAAMMERRRQLVEMLTAEKNRLAVARPPVRASVQRVIRALEQALASADDDLERWIRASPIWRAQEELLRSVPGVGPQTARLLIASLPELGRLTRREIAALVGVAPLACDSGTLRSRRRCGGGRSHIRAMLYMAVVTGTRCNPVIRSCYHRLRAAGKPVKVALTACMRRLITILNAMAKRHQPWRAPTLVTP

SEQ ID NO: 249412 - protein, 403 aa, unidentified
MSQELSIDIFLGLDVGKSEHHACALDRDGNKVFDKPLPQLESELASVFHQLQEHGTVLVVVDQPNTIGALPIAVARACGCEVGYLPGLAMRKAADLYPGRAKTDKRDAFIIADTARTMPHTLRAVDRSNEVLSALKMLSGFDDNIARDCTRTVNRLRSILTQIYPSLERVFAGSTLTRTPVLDLLIHYKGPQGLKRAGYHRVLNWMIKHTRKDPTPLVDEIFAALKAQTVTVPGSDAAELVIPQLAANIKALKEQRNTIAEQVEGMLDDFPLCEVLMSIPGVGIKTAAQILLAIGDSSDFDSAGHLAAYAGIAPVTRRSGSSIRGEFPARSGNKRLKNALFYSAFAAIRSHEPSRQYYERKRAEGKRHNAAVICLARRRCNVIYAILKNKEFFREIPPRPAAA

SEQ ID NO: 249413 - protein, 421 aa, unidentified
MKNTAARKLKQVPEGYLIIGVDPHKKKHAAVAITQDFTLRDRFKFDNTREGLEFLLRRVRAEMVKSDCRGVMFAIETGGHYWRNVAYYLDERGIPFRFINQYTLKRRREGKDLNRRKNDYRDSEVAAQLLCTGEFVESVIPQGVYAELRTAHNTYRRLVKERTRITNLLKGLLDGLFPEFTQVFKDPCGLTALSVLSTCSIPGVIAGMTEDEFVATIEAKHHGRLMRKKLMALHYAVRSSIGIAAGAKSVSSEISFLVEKLELIRRHIRIIERTLVRLVDETEEGKYLLSIRGLNYIAVAGLLAKLGCFKAYRGAKQMIKMAGSNPTESESAGKKKSRTPMSKQGRPVLRYCAWTSVIPMLRFNSDFRAWAKQRRERPAHANPLGGREIVGAALNRLLRLSFALVKNQTYYRSPQLVQVTG

SEQ ID NO: 249414 - protein, 319 aa, unidentified
MSESTVVEVFVGIDVSKNTLDVGMDLGNEFFQVSNDDAGIQDLCRRLQTLSPGPTLVVMEATGGLEACVASELVLQGFAVAVVNPRQARDFAKATGHLAKTDRIDALLLARFARAIRPEARPLKDAATQELADLLSRRRQLVDNRVQEELRLHSAKMLRVRKNLKAHIEWLNKRISELDDDLYGHLQRSPAWKEKDNLLQGIPGVGKVTSLAVIARCPEIGTLNRREIASLAGVAPHACDSGKFRGKRSIWGGRADLRAVLYMAALSAMRSNSGIKRFAERLKATGKPAKVVIVACMRKLLTIMNAMIKNNTPWQPDFA

SEQ ID NO: 249415 - protein, 392 aa, unidentified
MVYAGVDIAKTDHVIGAVDDAGEQVGRPMPFRNSDAGFERCIAWLESVAEGPEDVFVGMEATGHYWRACFARLVSAGYRVCVVNPMQVHAMRRFEGLAGIKNDSIDSILIANTLRRGNFEQTQLATDDVQSLRQLTRYHQGLKQELATVKTQAICVLDSYFPEYAGLFSDMFGSASLRLLAECPVPSEMARRRTSTIAKLLREGSRGKLGEAKAAEAKAAAKRSVGIRLGEDAAAFQIRCMVSQIEFLESTIDEVEAQIAELLARIEPNITTIPGVGTVTGAQIVAEIGDVKRFRSAASIVKYAGLNSGVDESGEFAATGVPITKHGSPYLRRAMWLAANRAWQYDRKLGEFYRKKRAEGKPHRVAVTAVARKLCHIVYAVMRDGKPYDPDR

SEQ ID NO: 249416 - protein, 370 aa, unidentified
MGTGRMDDITYVGLDVHKATVCVAVAESGRGGEVRQVGVFQNRPEILCKMAAKLGRGGRRLSFSYEAGPCGYGLHRLLTACGHSCVVVAPSLIPMKSGDRVKTDRRDAMMLAKLHRAGELTAIWIPDATHEAIRDLVRARATAGRVLSKARQHLQGFLLRHDRIYRGARAWTQAYWRWLTTVRFEHPAQQIVLQDYIHAVEDAEARRDRLTRQIEEMLPSWSMAPVVAALQAMRGVALVVAVTVVAEVGDFRRFANARQLMAYLGLVPSEHSSGSTIRRSGITKAGNTLVRRVLIEGAWTYRMTARVSRKLHDRLEPLSPVIRGIAWKAQVRLCARYRRLAASGKPKVVVTTAIAREMVGFIWAIACIAS

SEQ ID NO: 249417 - protein, 301 aa, unidentified
MFTERTSVGLDVHARSVVAHAMDVQTGEIFKARLCPDPLEVTAWIKALPGPAAAIYETGPTGYGLARTLLSHDIRTVVAAPSKLQKPAGSRVKTDAIDAEHLSTLLRLDAFTAVTVPDELTEAARDLVRAREDCRSDLMRSRHRLSKLLLRHGIVYSGGQAWVGAHDAWLRRQRVESPLLQAAFDEAYDSVVTITARRDRLDERIEAMAVDGPWTDTIRRLGCLRGISTLTGFGLAVEIGDWNRFSGNSIGSYLGLVPSENSSGQSRLNRPGFRSVLEARMEHDEPEVLSRDARARAADAR

SEQ ID NO: 249418 - protein, 359 aa, unidentified
MRERRNEISFKGQKIYVGIDVHLKSWSVTVLSETSVLKKFSQNPSPEALHGFLTRSYPGAEYRSVYEAGFCGFWIHERLTALGIDNIVVNPADVPTKSSEKLRKTDTVDSGKLARSLRANELKGIYTPDSVSLEMRSLIRLKNSITKDTTRQKNRIKSQLRYLGIEIPPEFLEPFSNWSKRFFAWLKKVETLTPSGRQALDIQIRHLEELRRQKLEMTRALRTLAKTDRFREPLRLIMTVPGFGQATGMAFLSEICDIARFRNAEQLAAYIGMIPMCHSSGEKDGTGDITVRKHAIMRCNLIEAAWVAVRQDPAMNLFYTEQCKRMPKSKAIVKVARELVNRLYFVLKHQTEYVNCVVS

SEQ ID NO: 249419 - protein, 408 aa, unidentified
MVVQAVPVCSSTVVVAIDVGKTEFAFSVTDASRALLLKPRTGCPMTGSSLTRVVADIVDVLRVGAMVKVGIEAAGHYHRPLLHAAWPDGWEVLELNPAHVTEQRRVLGKRTIKTDVIDLQAMTELLLAGRGQPVRDRSLALGELTAWSAHRTGRVAIRTATKNQLLGQLDRTFPGLTLALPDVLATKVGRLVATEFPDPARLTALGSTRFIRFGATRGLQIRKPVADRIVQAAREALPAADAAVARAVLAADLALLSDLDAQVDQATDQLARILPSTPFASLMSVPGWAAVRAGNYGGALGDPTRFDNHRQVYRTAGLNPIQYESAGKRHDSVISREGSVELRRALIDLGMGLWLNDPAAKAYGAQLRARGKKGGVIACAMANRANRIAYALVRDQNTYDPARWLKED

SEQ ID NO: 249420 - protein, 348 aa, unidentified
MKIIGCDFHPSYQQIALVDTETGELWEGRLEHQEGEARRFYQALHGQRVRVGMEAVGNSQWFEKMLAEMGHELWIGDAAQIRRLVVRQQKTDRRDAQHILNLLLDGRFPRLWVPSAEVRDLRQLLRHRQKLVELRTQVKNQLQHLALNQGVQRKRRLWSREGRAVLEQLPLEGWTARRRAELLAMLDQLEGQVAELDQAVCTEALRRPEVRLLMTHPGVGPVVGLAYVLTIGPPQRFPRGKQVASYLGLIPREHSSGGRQRLGSISKQGNTMMRTLLVEAAQTAARFDQELRRDYGRLAARQHRALAKVMVARKLAVRMYWMLRENRPYPLRPVARMQGRPSHSVVAG

SEQ ID NO: 249421 - protein, 324 aa, unidentified
MNKGINYFGIDISKDVFDVVDSGGSYWQFENNFKGFRKFLKELDINSHCVMESTGYYHQQLAYYLLEKEIKVSVENPISIKRFIQMKLSKIKTDKSDAKMICAYAESEEPKLWTGQSKHQITCLQMIRLVSVYFKQTTALKNKIHGEQALGNPCMDVVRSLNRSLKNLQKEISMIEEKVLKLVKLEHQDLLTRIETIPGLGKKTSIMLLVLTDGFERFTSSGELCSYAGLTPTIRQSGSSVRGKARISKMGNQKLRNLLFMCSFTACKHNKACKAIYDRIVAKGKSKKLALIAVCNKLLKQAYAIAKSGLVYDNEYRSVNPALN

SEQ ID NO: 249422 - protein, 424 aa, unidentified
MPSERKNSSIVSVVHEICCGLDVHKKTIVACLVRTESADGERSEILEFDTFTDDLIKLRDWLLERECPIVAMESTGSYWTPIHNILEGYFQVVLVNARHMKNVPGRKTDISDSRWLAGLLRHGLIKGAFIPPKYQRQWRDLTRMRKNYVLTLGDFKRRIHKLFQQANIKIDSVLTDLFGSTGRNLMKLLISKESTPTFPEVEDCLRGSLKEKAKELHRSVKGFFEEHHRYLLVFLLETIEKLEKQIEDLEVRISQVQRTSEKQINRLKEIPGVSEVSAHALLAELGPTLEAFPSPTALSSWCGLCPGNNQSGGKRYSGKIRVKKHHLKTIMVEIAWPAIKTKGSYYKAKYYALKSRLGPKKAIIAVAHRILKAIYYVIKHGVCFKDLGEAYLLERNRASKIRYLNKQAALLGFELTSIAQVVTT

SEQ ID NO: 249423 - protein, 329 aa, unidentified
MKQVFTDRKLYCGIDISGDTLDICYHQQDGTLCFEKCANGPEGFKQIWRLTGKLYHFVMESTGVYQLPFCFYLETKKANYSVVNALQIKRYIQMKLERNKTDKKDAQHICMYGLENNPECYQMPDRLYFECRSLNNAIETITKDITAFKNKMHAVNKLEFDTKAITATYKKLLRELQAELKKLETELYKKLEAWQPAMVKQVRSVVGIGKRATAILIVNTQGFKHTESYQQLISYAGLSPKEYRSGSSIRGRIRICKQGGALLRHTLYMCALNAKETNAGCKALFERLVAKGKNKKLAVIAVANKLLKQVFGVVKNECLFDRNYYGKIA

SEQ ID NO: 249424 - protein, 356 aa, unidentified
MKQNKKIDFKGQKFSIGIDVHERDWEVAIRQSDILLKRMTINASPKILADYMKKHYPGGDYYSVYEAGFSGYWAHRQLCEYGIQNIIINAADVPTKDKEKRRKTDRIDANKLSRELANGSLEPIYVPSPYHQSLRSLVHLRERNVSHQTRIKNRIKMFLYFYGIKIPPTSEIKHWSKRFLVYLKQIQFEEPIAKEAFDDMLRELDEIRTNVLRVTRQLRKYARDSKDRHVIKNLLTVSGVGFVTAVTFYAVICDITRFACFNRLSSFVGLVPSEFSTGKKPKTTGITPRRDRKLRYLIIEAAWVAIRRDPALLMAYNELSQRMDNKKAIIRIAKKLLSRMHYVWINNQPYECGVIE

SEQ ID NO: 249425 - protein, 421 aa, unidentified
MKNKAARKLKQVPAGYLAIGVDPHKKVHAAVAITEDLTVRTKFKFSNSRAGFEQALENARAEMIKTCCCGVIFAIETGGHYWRNFAYFLDERGIPFRLISQITLKRMRDGRDINRRKSDFRDAEMAADILRTGDFTETRLPQGVYADLRSTHSAYFRLVKERSRIVNLMKGLLDGLFPEFTQVFKDPCGRNAMAVLLTCPSPAVIASIGEDVFIAKIRDRRQGRLMLKKLRALHQAAKTSVGVKPGADSVATEISLLAGRYGLIEEQIDKLVKSLISLVGRTEEGKYLLSIPGISYLSAAALLAETGPLKQYQNAKQVIKMAGTNPIESESGGKRLGETPMSKKGRPRLRYSAWNAVIPLFRHNPDFRCWAKRLRERPAHAHPLNGKEVVGAALNRLLRLVFALVKKQEFYRSPEIALVVN

SEQ ID NO: 249426 - protein, 410 aa, unidentified
MRYYLGVDWADQTHAVWVVDETGSKLTACAVAHTAEGLGEWGRELDAWRAQGIELWAAIERPDGRVVDFLLDHSVVVYPVNPKALDRARDRFRQSGAKSDPFDARVLADFLRTDHAHLRALQPSSEAAQELKLLTEDCQRHIRQQTRLVNQLTATLKAYYPRALEIAEVPSALMREYLPAYPTPAALTAVTERQWQRWARAHRLPETRTAELWAVLRQPQLPVPAHVVRAKARLMHTLMEQLRPVVAAVAQYRTAIDDFFARMPAAQWARTLPIGKHGITAPTLWARLGDAPGRWESFRHLQAHAGTVPVTKRSGKQQRVVQFRFACDKALRYVVDQVAYLSLLSSAWARAYYDQQRARGHSHRQALRALGAKWLKIIFVMWQRQVPYDEQSHLATMARQQLRQHQERLA

SEQ ID NO: 249427 - protein, 339 aa, unidentified
MKHVAIDPGSLESQVCVREADGTLLEEKKVFTKTLLTQFAAWEPRRVILETSSEAFALADAARAAQHEVRVVPATLVRALGVGARRLKTDQRDARALSAASCRVDLPSVHVPSSSSRELKSICGSRDELVETRTKLINNARGWLRTQLWRIRSGAPVSFPERVRAHALERGITLPPHIARNLEELDLVTTQIRAADAQLREYAKSDPICRLLMTVPGVGPVTSVRFRATIDDVSRFTSSHGLQSYLGLTPGEHSSSLSQHRTGITKAGAPATRRLLIQSAWSAFRTHESHPMVMWAKKIEQRRGKFIAVVALARKLAGILFAMWRSHTAYNPERGAARP

SEQ ID NO: 249428 - protein, 402 aa, unidentified
MTSQRLVVAGADTHSQTHHVAVLDAGTGALLGDRQFPATLAGYRAILAFISDFGAVVRFGIEGTNSYGAGLTRHAVAAGVEVRAVIRPNRAERRLHGKSDPLDAITAARVVMAGEALPTPKSSDGPIESIRVLHLARDSAVKARANVLRQIAMILVSAPVEQRERLHQLGEKALLNTLRRSRPNHPSHGVEHATAVSLRSLARRHHHLSEEIDDLTDHLRDLVAHAAPALLAAKGVGVVTAAQLLITTGDNPARITSKAAFAALTGVAPIPASSGKTTRHRLNRGGDRRANNAIHTIALVRMSMDLRTKTYITKKRGEGKTKLEAIRCLKRHLANELFTLITNPPEMPDISDLRPARQARGLSLQTVADHFGVWPMHISTIERGKRRDDDLANRYRQWLNAA

SEQ ID NO: 249429 - protein, 357 aa, unidentified
MQKKNTKLNFAGQEIYVGLDTGKKSWKVTILTKDFEHKTFSQPPKPEVLVGYLRKHFPGARYLCVYEAGYFGFWIHDALREQGVECIVTHPADVPTKDKERSNRNDTVDARKLARNLRNGELAALYVPTRKSLEVRTLVRTRMGMVKKQTRCKNQIKALLSQYGYAIPEDMVGSGWSRRFIDWLENLLFETEAGKQSLHILLEELKHLRQSIALLTRQIRTLGRQEPYRTQVELLDSIPGIGLLSAMTFLTEIVDINRFKNLDHLASYVGLVPGENSSGELERTTGISRRRNSFLRVMLVECSWVAVRKDPALLMAFNKLSERMPKNRAIIRIARKLLSRIRYVLKHQEYYETCVVA

SEQ ID NO: 249430 - protein, 419 aa, unidentified
MSFKILKFNCCGLDVHKTWIYACIGITDSNNRTEYKQARFSSFTKGLNELCDWLAKYNCKDVCMESTGKYWIPVFNILEQHQIWVTLSHPKYTKPMKGNKTDRKDAKWICDLYMCGMVNPSFIPPADIRELRDLVRYRYKLTCMITGEKNRAQNCLTVSNLKLDDVFSDVFGKSSRSITEHILQHPGEKFDVAPFIHGCCKTPVEEIQAAVDGAISKEQAVKLRQCLNHIDELQKHISEVEQEILRLSDKYEAALTLIRTVPGFNKNPMTAIQVLSEIGGDMSVFPTAKHLVSWAGCCPRNDKSNRKIKSTRISCAGSYFKPVLVQVANALIKSKKHPEFTTRYKRIKARRGHKKAIIAICRMILTAIWHILSDLKPYTPEGFLESRPVSKEKILTTSQALNLLRQRGYLIKDDPLSAS

SEQ ID NO: 249431 - protein, 516 aa, unidentified
MSKFRRSAKRPKPFLLQKPNGVLADRVQAVGPEHFGIVAFDCAKARSRYLFADFYGHVFLEPTTVAHNRHDFNAAIQSVRQAMAQHGVRDCVVAIEMTGDYHRPVQRAFRDARFDTRLVHPFTSKQYRQPAAADNKTDDTDLGGIFRAATHGFGLIEPTWSDDYRNLQVLRRHRRDLVDKRAQLFCQIKELLHALMPGYAECFCHLFETPTPLVLARHTLSADAVVRLGIAGLQKIAADAKLVCRRDTFPKILNWAQQAPPGADPSPARKLMLETLDDDRLHKTTQITGLERDLAHLVVRTPYVLLLAMSGVNIVSCADLAGELGPIANYASANGITGRAGLMPMRYQSDRVDATGPLSRRGNRRLRAVLLQTADNLIHCNHYFQGRANFWRHAGKDARWVRVKVAKIFSRLAFALVAGGQLFPHECCQQRHHILGKLLAFHMEHHTPADQVHRDLDAAIEQMPRRARRPLATPLQEELDKLANRRGPQPLANILPLVLARLLGRVVKSTPEDADS

SEQ ID NO: 249432 - protein, 349 aa, unidentified
MSEAYDGPQVVGMDLHRRRSVLVRMTADGRKLETARIANSPAGLRGVIARAGKRPKVVLEATYGWYWAADTLAAAGAQVHLAHPLGVKAFSYRRVKNDEKDAADLAGLLRMGRLPEAWIAPAEIRELRELTRYRIKVVRLRTSCKDQVHAVLAKLGIEVTCSDIFGVAGSAWLDGLELPQPYAGKVASLRTLAAELTAEITLLEAAIADLLAHHDGYHAVQALPGIGAVLAAVLVAEIGDITRFSCPARLCSWAGLTPRHRESDTKVSRGHITKQGSPLVRWALVEAIQHVPAGHPLRQRKEDILARRGDQAKHIAKIAVARQLLTWVFYAMRDGQVRALAPATGQQAA

SEQ ID NO: 249433 - protein, 306 aa, unidentified
MIVIGLDVHKQTVAAVAVDAAGRPLDEQTIVVGSDELLGWASALGGERLWAVEDCRQLTGWLERQLLDLGELLVRVPPKLTVPERRAGRTRGKSDPIDALAIARAALRERDLSRPRPGEQAYREIKLLVDHRDDLVDERRRTQQRLRWHLHRLDPTFVPLRMLARSSHLERVSRWLGRQEEQLQVRLARELVARCRSLNRAISELDQELEQRTAQTAPALLELPGCAAVTAAKLLAEIGPIDRFRSDAQLARHGGVAPLEASSGRVQRHRLDRGGNRQLNAALYRIAITQSRYHPAARCLPRTQEG

SEQ ID NO: 249434 - protein, 343 aa, unidentified
MDQYIGLDVSLKDTAVSIREDRKRIWRGKCPSDPKALSQIIHKHAPHAKLVVFETGPLSTWFYHALTAEGIPAICIEARHAQKVLNETLNKTDANDADGLAQLAEAGFYKAVRVKAFDNMLTRTLVAARSQLVSISKQLSNQIRGLLKTFGLIVPKGEGRVFDANVRELLNGNSGLEVVILPLLEAWRDIRKRAANLDHQLLAASRQSRATKLLMTIPGIGAVTAVSYIAAIEDPENFPTSRSVGAWLGLTTRRYQSGEIDYDGHISRRGDGRLRGLLYEAATVLLTRTTARTECNLKTWGLKLRERLGFKRAAVAVARKLAVIMHSMLKSGQAFNPLAGAAA

SEQ ID NO: 249435 - protein, 442 aa, unidentified
MSNLAVLDPRAAFVDVGSEKMHVSIGGGPPQVFGAVTSQLQALRDFLIEHRVRSVAMEATGVYWLPLYGVLEAAGLDVRMVDGRQTRHLPGRKSDMQDCQWGATLHAHGLLRAGFVPPAHIRRLQDYLRLRGEHIAAAAGHVQHMQKALERMNVKLHDVISSLTGASGLAVVRAIVAGERDPAALLALCDVRIRKVKAERVLEALRGNWTDEHLFALEQAVQSWDHYQAQITDCDRRIAAVLARMPGGDAPAAPVEKPAKPRTRPGVNAPEIPNLRELLQRMCAGNDATTLPAHSEYTVLQLVAEVGTDLTKWPTEKHFASWVGLAPGSAQSGKRRTAVKRRRNRAGQIFCVMARALARSKYIALGGYYRRMAARRGGLVANKALAHKLAILFWRVMVKGMDYVEQGLAHYQAQVLETRQRLLRKLAKQFGQQLVPIQANPA

SEQ ID NO: 249436 - protein, 470 aa, unidentified
MMVNRRRSSQSQVRRTDAHSDVVPRGLGYKECKFSGMSEKATEEMKDQEQIVAWIGMDWADEGHHVWEYNVGTGGKENYAVQHSAESLQEWLSQVRSRYEGKQVAVVVEQARGGLIYALMNTDFIVIYPVNPQSLAKYRKALYPSGAKSDPADAELLGEMVRQNPERFRAWVPGDVPTRTLQLLTEGRRKLVEDMTALTNQLTSVLKTYYPQALEWAGPLGSEQACAFLEKWPTLMELQKSRPFRIREFYQKYGRPSREVLNERVNQIQKGQPLTLDGAVVTASVMMVHALVAQIRPLRLAIENYDEEIERVFRQHPDRVVFESFPGAGKVLAPRLLAAFGADRDRFQTALEVQEFSGIAPVTERSGKAIWVHRRLACPKFMLQTFHEFANCAWRFCTWSKLYYQQQRSRGKDHHAAVRALAYKWIRIMFRCWKDRTPYDDSLYVKSLTKRGSHLVKGLNLPRPDFVVEI

SEQ ID NO: 249437 - protein, 403 aa, unidentified
MVFLGVDWAEEHHDICLLDADGNRLEKARVPEGIEGVRRIHALVANHAEEPGEVAVGIETDRGLLVGALIGAGYHVYAVNPLAVNRYRERHAVSRAKSDKADAKLLADLVRTDRHNHRQVRGDSEEALAIRVLARAHQSQIAARQRQANQLRNTLREFYPAALEILGTDLDSNMAVALLSKAPTPTAGRKLSRAQIRSALATAGLQRNLDDKAALIQQQLREVQLEAPPLVAQAFGTIVSSGVKVIRALNQEISAVEVELNASFEAHPDAEIIRSLPGLGTVLGARVLAEFGDDRTRYANAKSRKNYAGTSPITKASGTQKVVLARFVRNRHLADATYLWAFCSLTHSPGARCYYDTRRASGANHHQALRALGNRLVGVLHGCLRYGQNYSEVTAWGESALAA

SEQ ID NO: 249438 - protein, 409 aa, unidentified
MLFIGDDWAEAHHDIELVDEDGRRLTRRRLPDGVEGLSALHALIADQLAEDAEPEQVVVGIETDRGPWVGALIATGYTVYAINPLQVARYRERHGTAGAKSDPGDAHVLAELVRLDRAHHRPVAGDSPIAEHVKVLARTHQSLIWSRQRQANALRSMLREFYPAALDAFGDELASRGALAVLALAPSPEAGRRLSRAKIAAALRRAGRQRSIEDSAERIQAALRAPQLEAQPGVVGAYAASVRSLVAVIDALVVQIETLRGEVEAGFGRHPDAEIYLSQPGLGTVLGARVLAEFGDDPDRYADPKARKNYSGMAPITRASGTRRVVLARYARNRRLADALYLQAFTAISASPGARSYYDAQRARGATHHQALRSVANRLVGILHGCLRHHTHYDEATAWHTHPDQAAAA

SEQ ID NO: 249439 - protein, 323 aa, unidentified
MNTLDFLGIDIAKKTFNVALLRNDKLRHKKFENSPEGFKQLDSWLVKQGVIEIHACLEATGSYSEGLALHLHQAGHKVSLVNPARIKAFGQSELRRNKTDRADATLIARFCSMHRPAAWVPPPAEIRELQALVRHLDDLIGTRTQLGNRFTDGPKIKSVLESLKTLIEAVDVEIKLTRKKIREHIDQHPGLKEDCELLETIPGIGEKTATTLLAEIEHLRHYKHARQAAAYAGLSPRLRESGTSGKRSRLSKTGNSRVRKALFMPAISAKQHNPVLRQFSERLARRGKPKMAIIGAVMRKLLHLAFGVLKTRKPFDPNHPVAA

SEQ ID NO: 249440 - protein, 391 aa, unidentified
MVCVGIDVAKDKHDCCILDSDGTIRADCITIPNNMDGFKQLLQTIRDCTKKSDKIKVGLEATGHYSYNILGFLLDNDLAVYVMNPLHTNLYRKSLSLRKTKTDRVDARTIATMLLSDVDLKSYTDTAYHNEELKSLTRYRFDKVRERAKLKQSVSRLVTILFPELEKLVPSLHIASVYALLSEYPGAKQISEIHLTKLTNLLATASKGRYGKDKAIQIRDAARTSIGSVMPAKSLELKHTIKLIRELTSEIDEIEDSIQKIMDELNPPILSIPGVGIQSAAMILAEIGDFSNFESPDKILAYAGCSPSTYQSGKLTNCYAHMEKRGSRYLRYALYNATKYVCHWNPVFAEYLAKKRAEGKHYNVALSHATKKLVRLIYALQKSGKAYLVAA

SEQ ID NO: 249441 - protein, 339 aa, unidentified
MAILFVGIDLAKNVFAVHGVDEHGKPVLVRPSVQRAKLHELVASLPVCTIGMEACSGAHHWARLFKQHGHTVRLMAPKFVSPYRMSGARGKNDAADAAAICEAVQRPNMHFVPVKSEDEQARLCVHRVRQGFVEQRTATINRLRGLLSEFGIVLPQKAAIVRRQATAHLEDLPGWANTAVGDSLSEVHRLDERLAEYDRHVSHMAANDERSRRLMQLQGVGCTTASALVSTIGDAHDFRNGRQLAAWLGLVPGQYSSGGKARLGSITKAGDRYLRTLLVLGAKSVLAAAKSKDDRLSRWALALQVRRGYWRAIVAIAAKNARMAWAVLAKGESFRPIQI

SEQ ID NO: 249442 - protein, 325 aa, unidentified
MEAKKLCCGIDVSHTTLDVCYQNNLGELFHLRVGNNNKGFATVLEHTGPDYHFVMEATGVYYIRLAFYLHHQSCKLSVVNALSIKRYIQMHLERNKSDKKDAAWICRYAIEQQPPYWEMPDSAYFESKQLYNAIREYTEQIKRFNNQLHSLKLLPVPSKDTIKSLEKIKQQLAKEIINLEVKLETLLQSWQPAQLKSISSIKGVGKRATAMLIVFTQGFKNTHSHRQLISFAGLSPTEYSSGSSIQGKPRIYKRGGKNLRDVLYMCSMNAIKTNTACKTLYERLRANGKTGKQALIAVCNKLLKQVFAVVKNNSLYQPNYCSAKP

SEQ ID NO: 249443 - protein, 319 aa, unidentified
MNCKKNQKEISIGVDTGKFQLDIHIRPLDIYFTVTNDEKGIKEAIKKIKPHKPMRIVIEATGRLEHAFVMACSQADLPFTVANPAHVKKFAGAIGRKAKTDKLDAQLIAHYAEAIKPPLSTLKPENMQLMSDLLSRRRQLMTMQTMEKNRLQIMPKEISSAIKPVLTAIKNQIEKIDSKLCKLIEKCSEYKAKNTIIQSMPGIGNVVAFNLLSDMPELGYLTNKEAASLIGVAPFNKESGSYEGQRNIRGGRHKIRTVMYMAMMSAMQCNPVFKATYQRLLAAGKPKKTAIIACVRKMIIILNSMVRDGVMWDPKMNQN

SEQ ID NO: 249444 - protein, 367 aa, unidentified
MKDFITVVGLDVHKNSIEIVTADTDGAMEVRRFGRIGGTMDALDRAVRKLVSGGASLRFVYEAGPCGYEIYRHLTGKGFSCKVVAPSKIPKKSGDRIKNDRRDAETLARLERAGELTGIYVPREEDEAMRDLTRAREDAVKSLKTARHQLNAFLLRYGKRYPGKGSWTPAHMRWLSDIVLPHPSQQIVLQEYITTVRVGTERTTRLTDQIAKLLPEWRLSPVVKALQALRGVAPIVAATTIAEIGDMSRFENPRQLMAYLGLVPSEDSSGESTHRGSITKTGNGHVRRALVEAAHAYGFPARVSRHLLKRQEGLPEPVLAIAWKAQVRLCGKFRRLMARGKLKNKIVTAIARELSGFMWAIAREVEV

SEQ ID NO: 249445 - protein, 347 aa, unidentified
MKHYAGIDVSLNSSNVCVVDESGKVVREVKVPSEPVALIRCIKSLGVRVERIGLEAGPLSQWLYGALRESGLPVELLETRHVKAALSAMPVKTDRNDARGLAQLMRLGWFRPVHCKSMAAQEVRALLTARKLVQSKLYDIEMSLRGILRGFGLKVGPTTSRSFAARINHLTADHPSLEMVAEALLSTHAAALCAFKNLEKNVRQISRADTRVRLLMSTPGVGPVVALTYVSAIDDPKRFTSSKPVGRILGSRRRKYQSGETDINGRISKVGDSSVRAVLYEAAHIILTRPIHGGALKSWAMRLAKRAGMKKAKVALARKLAVVLHRMWVSASTFDFEKANSCTRAAA

SEQ ID NO: 249446 - protein, 337 aa, unidentified
MKLYCAADLHSNNHFLTIIDEHDKRVLEKRLPNDLAVTLHTLEPYRADISGVAVESTFNWYWLVDGLMEAGYPVMLVNTAKARQYEGLKHTDDRYDAFWLAQQMRLGILPTGYIYPKEQRPLRDLLRERRRLVRQRTTHVLSTQSTVWRHTAVRLPSKVILGVSKKPWPQLSDANVELGVRAHRATIKVLTTQLEGIERAVLKSLAPRPEYQMLLTVPGIGPVIAWTIVLEAGDLRRFVNVGHFASYCRCVDSKRTSNERKKGENNVKNGNPYLAWAFFEAAHFAIQFLPAAKRFYERKATQRNPILAMKALAHKLARACYYIMRDKVPFDAARLFA

SEQ ID NO: 249447 - protein, 465 aa, unidentified
MAARKKKRMSAQVVEDEDYQLHYEKVAGIDVAKESAAVCIRLPAAEGKTHRTSHLREVIATVPAITELAWELKTLGVQMVSMESTSDYWRIWFIVLEEAGLAVQLVNSSQARSLPGRPKTDKEDARWIARLTEMGLLRPSFVPPPEIRALRLLTRHISDLTADRTRYWQRLEKLLEDGLCKLSAVVSKLAGHQTARAVIEAMIGGERDPRALAALGKGNMRDEKLPALAAALTGMRFGPEHAGVAASLLAAIDLLEEELRVAEDAVAAKLAAIPASWGVDADGATGPDAGREEGAPVLPAAGRLDEIPGLGRESAAALIAEIGLDMSRFPTPEALVSWAGLTPTARQSGPRKGRGKKGRGNTYAKHIAVLAAYAAANTDTFLGERFRRLASRPGGGGRKKAGCAVGRSILVIVWHLLSDPAARYRDLGPGWHARHTDRNRKARSARRQLEALGYDVIITLREDAA

SEQ ID NO: 249448 - protein, 355 aa, unidentified
MSSEKYIGLDVHQATISVAVLDSKGKLVMESILETKAATILEFFAGLRGTLSVTFEEGTWAAWLYDLLKPHVAKLVVCNPRKNALLKQGNKSDKIDARKLADRLRLDDLKPVYHGETGVRTLRELARSYLTIVKDLTRVMNRLKALYRSWAIPCAGRDVYYTRHRDEWLSKIKEAGVRRRAEQLYQQLDMLQHLRQQARRELLAESRKHSITAKLRQIPSLGPIRSALAVALIQTPHRFRSKRQLWAYSGLALETRTSGEYRFVNGQLRRSKKQISIRGLNKDHNHDLKGLFKAAATRASFQPGPFQDFYQRSLAKGIKPTMVRLTLARKIAAITLTLWKKGENFDVEKLKSQAA

SEQ ID NO: 249449 - protein, 333 aa, unidentified
MEKKWFIGIDISKKTLDVVIYVPTKKHADETNYERFLNKEEGYKSLLCWLKKKNMAKKRLVISMENTGIYSFDLCLFLETASSDYCSFNPLHLKRSLGLVRGKNDRVDAERIAYFDYLHRDELSYSKLSGSSIIRLRDFAAERKRFVKQQAEYKGFLTDRKDCEMTSTIERAAHMVKILDEEIASVEEEMLQIINSDPSILRNYELLNSIKGIGTINAMNTIIHTNNFQAFETARQYACYLGIAPFEHSSGTSIKGKTRVYPTGAKLLKADLSQAANSAIVWDKEMKEYYERKRKEGKAYGVVLNAVKFKLVGRMFAVVKRGTPFVELMTYKK

SEQ ID NO: 249450 - protein, 343 aa, unidentified
MQAVTTIGLDIAKSIFQVHGVDAEGNVVVRRKLKRRHIVAFFRKLPPCLVGIEACASSHHWARELQALGHTVRLMPPAYVKPYVKRHKNDAADAEAICEAVTRANMRFVATKTPEQQSCLMLHRTRHLFIRQQTAVINAIRAHLAEFGIVAPVGRNGVETLLNVVADTSDNRIPKVARACLVALGAQLRTLKAQILEFDRLIMAWHRSSEASKRLDEIPGVGPALATALVASVGDPRAFRSGRDFSAWIGLVPKQNSSGGKEKLGSISKRGDRYLRSLFTTGALAVIRYAKLHGTEHRPWLTALLARRPTKVAAIALANKLARMAWAMMAKGERYKEPITLAA

SEQ ID NO: 249451 - protein, 329 aa, unidentified
MKKLFIGLDVSKDVFDFCALNDLGEQESSKKVFQNSKQGIDQFCKSLKKWNDSDILICLEHTGHYGYLLSYELAKRNLKYALINPLEIKNSIGMTRGKNDAIDAYRIAYYALTHYRKIKPHVLPIEDLQKLKALMGIRDGYVKIIVQLKNSLKALEIINESVNIKSQINDHKLLIKRFEKSIDKVEKQMMEIINKNEDIKKAFTKINTVIGVGMLTAIKCIIETDNFTKFKDGRKFSCHCGLAPFEYQSGSSVRGRTRTSSLNNKGLKSILFKAAATAIQHDPQLKGYYLRKLDQGKHKLSVLNAVANKIVLRIFAVVKREEPFVKLIA

SEQ ID NO: 249452 - protein, 433 aa, unidentified
MKVKYEDRQKQKVTAITTDTLVVGVDIAKNYQWARLVDFRGIEHGRALKFKNSRGGFETILARIREICRKENFAKAVVGMEPAGHYWKAFANWLEKQDGIKAVLVDPYATKQAEELDDNSQTKSDKKDALTTAELVKDGRYFELCLPHDVYAELRGLSTARTGLNRRKNALKNTITAVMDEYFPEHGEVFKCPLSGKASRHILKPCPFPKFILEPGEDGVTDEIKKAVNKTVGRKKAAQLIETAKESIGVDYGEEAAGLKLRLMLEELELLEKQAEELEVQMEAALQKTDYAGFLLSIKGIGVVTLAACLGEPGNPARFENPRQMSRMAGCNLAEDSSGKNKSGTKISKRGRKNLRSVPCQMALIMAATNDEMKQLYHYLKTREEAPLRKMQALIVVSKKILALVHAPAKKKENYDPGKVFGPVRREQLKAAA

SEQ ID NO: 249453 - protein, 350 aa, unidentified
MIIIGVDFHPEFQQVASVDTESGEFQEKRLGHREEAETFYRALAGQKVCVGMEASGQARWFERLVAELQFELRIGDAAKIQTKRVRKQKTDRQDAQLILGLLLEDRFPQIWVPSWENRDLRQLLWHRHRMVQARTRIMNQLQAVALNEGLRCKKRLWRKHGRQQLESFRLAPWASRRRRDLLELLDRLNPTIAELSQAVEQEAKKFPEARCLMTHPGVGALTALAFVLIIGRADRFQCGKQIASYLGLVPLEDSSGNRRRLGHITKQGSSMLRFLLVEAAQVTARSIPEWRSKYFHLAMRRGRKIAKVAMARRLAIALYWMWRDWGSLVSDALRPKSRLPLLFRSNGESG

SEQ ID NO: 249454 - protein, 316 aa, unidentified
MTQISRTAGIDTSKAKLDVAVYGGNEHWQLDNTLQGWRHLAAEFSRTEVRRVGIEASGGYERGVVGYLRKRGFTVLVLQPIQVKAYARLHLRRAKNDKLDAVLIAACAATIDRPRMEPDERLAKLAQHLTFVEQIEEDIARLKVRIEHVDDPRLRRMVIADIARLKARRSAELLRIAVALRPHDDLAHRLDLVLSIPGLGQRTAFALIIRMPELGQVSREQAAALAGLAPFDDDSGKHAGERHIAGGRSRLRRSLFAAALPAAFRWNKALIVLYTRLTQRGKAHNEALIACARKLLIYANTVVHRGTPWTERPASI

SEQ ID NO: 249455 - protein, 433 aa, unidentified
MTIDSAAVRAPKGKKMKPWTEITHYAGFDWARDHHDVVIVDRQGQIVADFRIEHSLAGWQAFRDQVKSYPALAVAIETNQGTAVDQLLSLASTIYPVNPLSAKSYRERKAPSGHKTDRLDAWSLAEALRQDGQQWKALQPMDPLTQQLQLLCRDEIGLIEQRTALINQLQQALVEYYPAALEAFEDWTQPFCWDFIIQFPTPEKLVAAGQRRWEKFLHTQKLWRPETAAKRMGIFRNACQFCGSAAVTSAKSLLSISLAKLLNALQLQLDQYRQQIEALFKQHPDHDLFGSLPGAAQTLAPRLLGEIGGNPQRFEDTEALQCIAGTAPVSFQSGQIHRVHVRYQCNKILRHTVHLWAQCSLRVCPWAEVYYRQKRAEGKSHACALRCLGQRWLKILWRMIQTRQPYDADLHARNQKQHGSWVLTLMKPAPQAG

SEQ ID NO: 249456 - protein, 421 aa, unidentified
MSDDRCRLGSDDVVIGLDLASAEHQAVVVTAAGKRLTRFRMPHTRAGLEELLRRTTPAALGRPGGARVFAFEATGHLWEAVAYVLRARGEPYVVVNPLATFRVREARQLSREKTDLTDAEQIAELCRTGLVTRTQLEARPYLALRRAWGEYARLREERARLKVLVAHQLNGLFPEFLRVWADLLQPGALAVLRTGLTHAAMAALPLTEFVAQARAHGAGHRLWRDTLAQVHRAAAQTMACPDGLDVLAREVQRAVARIDMLTAHMTAVAAEIDSMLAELEEVPSLRPIPGLGWTSVAGLLAPVGAITKYHHGRQLIKLAGTNPSRRDSGQTVGHGQRMSHRGRAGLREVLYLATISCLQHNPRIRAHDDRLIQRPDRPLPKMQALGACMNKLLLYAFAVMHRREAFQLDHDWPRTTMARVA

SEQ ID NO: 249457 - protein, 422 aa, unidentified
MEQNDDIRLQEFRQLRREIRGSHDHLVVGMDIAKEKHHAFFGTPQGRTLYKGLTFTNTKEGFDHLLFHADTLMKQYELKKLVFGLEPTADYHKPLAEYLIKEGHTVVLVAGTAVKKNRELLDGRWDKHDTKDAANVADLIIQGKCLFYDLPSSDIKDLRGLLSLRKRLKQLEHASRVRIRNHLIAQYFPEMDDYFSYREGPSIVRWCFNPKEITAFSFDEFSRMVSSHRNTKQLIRLQEIYHKAGSSIGCEVTSGVPHEAKTLLDQLQVFREMIRSTDKKIAEIGKRFPEYGVLLSIPGFGPDISSKVLGAIGNPYRFENQSQVLKMAGLDLSADRSGKSDGIPVISKKGKADLRYGLYQAALIASSLNHHFIQYFTNKLRGREREKGIKTKMRVKLSAKMLIIAWTLMKKKERFDPTYLKD

SEQ ID NO: 249458 - protein, 388 aa, unidentified
MSSTSNPRELAEIAFRPDHATVYVSLELSRSKWLVTSLSAWRDKMSKHSVDAGDGAALLDRLARLRMEAEQRLGAPARVVVIQEAGLDGFWIHRLLEAGGIESHVVEPASIAVPRRHRRAKTDVVDGEMLVRTLAAFKRGEPRVCSMVVAPSPGEEDRRRVSRERRTLIKERIEHANRIKGLLASQGISGCEPMRRSFRDRLESLRTGDGRPLGLRLKAEIGRELDRMDLVLRQIAAVEADRDALVRPDHADAEAPAARLMKLRGIGPEFAAVLWLEGLFRRFANRRQLAAYAGLAPSPWQSGRVDREQGIAKSGNPRLRTAMVELAWLWLRHQPGSALSRWFRERVGSERGRIRRIAIVALARKLLAALWRYTTSGELPVGATLKTA

SEQ ID NO: 249459 - protein, 332 aa, unidentified
MMISQRDFDVLGLDIAKDKIDCALLYQERYQYITISNNVAGFAELLGWLKCRGIDLSHLHVCCEVTNVYYLAVAEYFYERQIKVSAINPSVIKHYSQMRQRRVKTDKQDAKLIADYCALERPILWQPENEDKAYLMHLIRRADQLTEMLTMEKNRLYVADERLKHLLVSIIATLQEQLDFCRAEIQCVIDSRQDMQRKQQIINSIVGVGKTTSQILLAVLLDIDKFPSARHLISWLGLSPVVRQSGKFSGVARLSKMGDKMIRKALYLPAKAACTRSKLWRSWFDEQIKTKPAKKVYVQMMVKIVKYAYYCVKNDQLFNPDLHRFEPQAAPH

SEQ ID NO: 249460 - protein, 337 aa, unidentified
MSEISILAIDLAKNSFQVCAVRGDGTIVSNRAVSRPRLYELLAKQEGCIVAMEACATSHHWGRVAVSYGHNVRLIPAQYVKPFVKRQKNDHADAAAIAEAASRPTMSFVAVKSAEKQGRAVAFRTHQCFVRQRTQLINSLRGHLAEFGLVAAKGPASLKVLENALADPITDIPEQVRQMGAIYIEQIAQLTEIIERLAKELETASKADEELRRLCTVLGVGPVTAGAVAAFAPDMSTFESGRNFASWLGLVPRQRSTGGKARLGAVSKMGQCDIRKLLIVGAMSVIRWVVRRGGSKNKWLASLVARKPRMVAAVALANKMARQIWAMATKGEDYRMA

SEQ ID NO: 249461 - protein, 422 aa, unidentified
MRLIYPICCGLDVHKNVIVATIVTTNDSGISEYNQKSFSTINSDIQKFHDWLMENNCKHVCMESTGKYWIPIFNYLEQDMDICLTHPKYVKSIKGKKTDKKDSKWIADLYKFDLVRCSFIPPKDFRGLRELARYRFKLVCMKSSEKNRIQNCMTISNIGIASILSDPFCKTATEIMTYLLSNTSKTIDDKAVRKLIKKKANAKSDEIIEAIKGYNIETDQAKKLELARAHLDYLDDMITQTEVELYVRIKPYYEYVELIATLPGITELSATIVLAELGVNMDIFDDAKHLCSWCGLAPSNNESAGKKKSVRIAKAGAYLKPLMVQCALAAIKSKKQPYFAIKYGRIRKRRGHKKAIIAIARMMMVCIYHMVSEKQPFNPTDYEELMDPHYNQPKVTLNDTNVFEYLKSQGYDTSLLVKCNDN

SEQ ID NO: 249462 - protein, 323 aa, unidentified
MSKHSMVCAGIDTGKYKLDVALNGSGEQLQIDNDADGQAALSAWLKRHKVQRVGIEASGGYEQDVVARLRRDKFVVVVFQPAQVRAYAKFLLQLAKNDKIDAALIAACTAESKKIHAPPDPRLAPLAERMTLIDQLTEQVAECKNFHEGSRNPQIRQFWKDQIAHLNKLLRAELKALEAAIRQHRDLAERLELIESVDGVGRKTAVAILVRMPEIGCLNRGQAAKLAGLAPFDDDSGTRVGIRHIAGGRERLRGSLYKAALPAAFYWNRQLIALYKRLIATGKEHKAALIACARKLLIFVNTVVARGTPWVSNRSAAAVRAAA

SEQ ID NO: 249463 - protein, 359 aa, unidentified
MKFKAQDKQNQLIENITVHHLVVGVDIAQEVHVARAVNFRGIALGTPLEFGNHREGFKLFERWIQDLLKTYKLSSVMVGMEPTGHYWFSLARWLVAQGIEAVLVNPHLVKKNKENRDNTPSKSDRKDALVIADMIKNGYYSPVRFHPEAYEELRILMANRETVTKRLNSAVNQIHRWVDIVFPELRQVFKILTCTSAIATLRTFPLPREISRLNTEQVLDGWKQYVKRHAGVKRAELLISLAKSSVGTTQALHAYKLHLGQLLEKYDLAKRQLEQIEHELHLILERIPYAQKLLEIRGVNATSLAGVLGDAGDLSGYSHGNALLRHAGLNLAEASSGKWRGKWYSANAVVHVCVIFSIS

SEQ ID NO: 249464 - protein, 409 aa, unidentified
MTAFDFTVSTLLVAIDISKHRHEVLIGVPGKKRRRRMTITNTLDDFQRLVAALSGYGLPVRIGFEATGNYHRALAHYLGQAGFELKLVSSVGLARTREALHNSWDKNDPKDAQVILHMLEIGAVQFFHDPLATGTADIQELSKTHEIVSRSKTELWHRILTHYLPLYFPEAERFHRSSRTDWFLAFLDKYPSPHMISAMSRQAFIADAWQVVGRKVAKERLLSDIYTTAAGSVGLPVGPDSDAVRMFRLVLAEGRSLIRQRNEIEARSVELLSGLPDYQLLTTIPGIGPINAMTILAEAGDLRRFRHHRQFLKFCGMDLATVQSGMVRGQSKISKYGNARLRRTLWMAGQTAALKKTNSFRDKFERYISKDRHNAHLRRKAYTAIAAKMARTVHAVVKHGEPYRPFFEG

SEQ ID NO: 249465 - protein, 330 aa, unidentified
MEHTTQHSAAPAPNPGVVVGIDVSKDRLDVAILPGGEAFFVKRDAEGLDALAARLRPLAPEAVALEATGGYETVVAATLGAAGLPVVIVNPAQVRSFGRALGQRAKTDPIDARLIAQFTAMTRPEVRPLPDEATQRLADLVARRRQIIAMIVAERQRQKRFTGRKPTPDRLQKSITRLLEALERELSEVDADIDTDIRGSSAWREKENLLASVPGVGSTIARTLIAEMPELGTLDRRQIAALAGLAPWTRQSGQWKGRSFIGGGRAPIRAALHMGAITAARHNPALKTFRDRLLAAGKPKMVALVAVARKLLTILNAIIRTGKPWDAKPA

SEQ ID NO: 249466 - protein, 420 aa, unidentified
MKSFVPVAGVDVSKRFSDLCVLSPDNNVLLRQKIYHDMVSMKLAEKKLHEIELECGARPVVVMESTSHYHLILFQFFTDAGFEVVVVNPIQSGALKNINVRKVKNDRVDAYRIAMLYRLKVLRPSQIPTSSLRGLRLLTRQRSELKGDVARFKNRMTAYLDQIFPGYGEVFSDVGGSASRAVLHMCPTPEELLNADGSLLAKAICEAGNKGPKFGAEKAAKLREAAGSAQVIGVRSASNASLIKNVLDIIEGLLAAIQRIEGEIKELVTQDTRLDEDVKLLCSIPGIGFSSAVVIAAEMGNISLFRKPKQLAAYLGLDPGERQSGTFKGRKNKLSKRGSPQVRAALHMAAVSSVSRNRDGTYRNPVLAEYYERKCAEKPCKVARVAVMRKLSNIIYAVLRDRKPFELRTPQEHMALLAAA

SEQ ID NO: 249467 - protein, 408 aa, unidentified
MQKRENLLYVGIDLHKESHTAVMVNCWNEKLEVVVIENKPSEFKKLAEKVNRKSNHLGLEPIYGLENAYGYGRSLAVWLIEKGYIVKDINPALAYDQRKSAPMLRKNDEHDAYCVATVLINQLHTLPNAKPKDNEWTLAQLVNRRDLLVKDGIRFKNGLHEQISMAYPSYSKFFSEIDGKCAMYFWKTYPSPVHLQGKTAEDLTIEFKEISRIAKKDKAELILDCVQNDGNTFREYQESRDFITRSLVRDLEHQKEELAGLDQEIGKILLSFDYKLTSMPGIGTSVASKLIAEIGDIRRFPSADKLARFAGVAPVKFSSAGKGKEQSSRQGNRQLHGLFYFLAVTMVSRPKNGMPNHPVFYDYYMRKIGEGKTKSQALVCIMRRLVNIVYGMMKNKTEYREPNREEEQ

SEQ ID NO: 249468 - protein, 348 aa, unidentified
MTKRLLKQVVGIDVAQKELVVSLGNMDEEASCNVYAYKTFSNTEKGFMALVLWVKKHNIEGPPLRYVMEATGVYHEALAYFLSENGYVTSIVMPNKISNFFKTLEIKTVTDKSMSEAIALFGLSKKLEDWVQPQKAFRELRQVTRERDQLVVERTMLKNQLHAEEVEAHPSKMTISRIKSRIKLINTQIKATQTETAAIIKNDAEINQGVMLITSIPGIGLVTAAVIMAETNGFALIRSKKQLTSYAGLDVKEKESGTSVKGKSRISKRGNRYLRKAMYMPALAAIRHSERYKAIFVRIVSRNGIKMKGCVAVQRKLLEMAFTIYKTKTPYKANYLQTQQENELALNN

SEQ ID NO: 249469 - protein, 482 aa, unidentified
MKKRTIFFYQSQELNSLFEEAGNNAKVMCIPIDYAKKEHVVMFCNGHGNILRKPFSIKNSPKGIEYLTQQVLSSCHHRGIDPKYAFFGGEDVGSYAENFINTLRSGGWIVAGVNAHDAKKQRPNVQASTDKLDLMGIASMLLNRRANCSPAQTGIYRNLRDLTRHRKKLVDMSTEEKNRIYTVVDQIFPGFLDEKNTGISPFSNSSLYLMADRFSPAQIRRRKRQKLIDTLRRYGTVKPEVGADKLQLYAAHVLNTPAEYLSALQISLAQHIKHFKCLKESIEQLEKEMALWLAQTQGAFLTTLPGIGIVLAAGATAEIGNPTKQRPVANLVSYSGIIPRVKQTGGPEGQTRTGKVSKRCNRILKNYVVQSAHHIGLHGPEDLMADYKRRDANGQHADFGIGRRYIRTAMCLMRNAQIYIPKRLRSKGINPEERAGYFLMIWPSLRDKWAKLGALEIAFTNDNPLGRWRNMVQELYEIKLKL

SEQ ID NO: 249470 - protein, 360 aa, unidentified
MKEEKRRYVGIDLGKREYTMAIIGRNGKMSIHKGTTTEKGRAALYRLLEKDDKVALEAGKLAFGIAREILQRVGSEVRVLNSAKLPVIWSEPTKTDKEDAMKLAHLVEERRDEKLPIVPLPSEREMERREVISGYQRGVRGRTRVVNTPHSLFWKQGQTQIVRKDLATVAKAREAVKILTGLIREDAEWQLQHLELHEKRLGELRDRIKAEAKGDGNKGIAGVGAIVAYAFVAHVGDGSRFGSGAQVSNFPGFAPKLDYSGSIRRHGPISKRGNGYLRGLLVQAVLAMVRSSKGGALKDRYIYLTRERGNNKGKTMVTIGRRMAELMYSIMRSKTDYEVRAWKKPVGKTAGLVEQARISA

SEQ ID NO: 249471 - protein, 373 aa, unidentified
MGDHSEVFVGIDASKSRHSVAIAEDGRGGEVRFYGEIEADEAAVRKLVRRLATRASRLTFCYEAGPTGYGLYRLITALGHECHVVAPSLIPRKPGERVKTNRRDATSLARLLRAGELTSVWTPDERHEAMRDLVCARSSAAIDLRMKRQQTSAFLLRLGRPYLGKKTWGRTHMKWLASQTFAHLEQRTAFEELSLAMRQAQERIARLEKAIEEAVPNRSLAERVTALMAMRGFDLVAATTILAEIGDLGRFDSPRELMGWLGLAPAESSTGDKVRRFGITKAGNTRARRTMIESAWCYRHPARVGLSKQARVAAAPPIVREIAWKAQMRLTRRYRALSGKGKAKNVATVAVARELAGFVWAIDRALENACASA

SEQ ID NO: 249472 - protein, 319 aa, unidentified
MQMIHFLGVDVSQDWFDVAIFGAAKPAQFSNDAEGFATFARHCSDFDWSKCFVVVEATGGYETRLLRFLIAQGAKVHRATPLHAKHFVRSLGLKAKTDKIDALALARYAVERHAELPAFVFPDEEQSAFNDLMMRRHDLVAFAAAEKARAAQPRYKDAAPSVMASVEAMLDFIDAQIAAIEAELDALVETSPTLSRRIETLRTVKGIGRLSAYTLQAFMPELGTLTRRTAASLAGCAPHPRDSGIKNGKRSVFGGRGTVKRMLFLAAMAARRYEPTLKAFFEKLVANGKPKMVALTALMRKIVVIANARLKEINLQSTW

SEQ ID NO: 249473 - protein, 337 aa, unidentified
MQYLGIDWGTRRASWCAIDERGTLREGVISADQDGLSRLALTLGAGDVHGCIEMMSGAVWVRDRLAVVGWDIRLADARKAKAIAPLACKTDRVDARVLADLARRDLIPEVWVPSVDERANRERLRRRSHLIRLRTSATNRAFGLLTQWGLRHSLTALRKPGAIDELAEHDVPPVWQQSILTLLGVIDDLDRQLAPLERELRPHARADPRVKRLMTIPGVAELLGLTLAAEIGEISRFPTARKLVGYSGLTPTIRQSGQSARTGRLSKAGPNTLRWAAVEAAQQAWRPSNPWHRLYTDTKTRHGKSNPAKAAVARKVLIAAWHVLARNEPFKPSRAAA

SEQ ID NO: 249474 - protein, 351 aa, unidentified
MVVVGADVHKRTHTFVAVDQAGRQLGQFTIQATTKGHAKALAWARREFGSDLVWAVEDCRHLSARLERDLLTAGQQVVRVPPKMMAMTRASARTRGKSDPIDALAVARAFLREPDLPVASHDETSRELKLLVDRRETLIAQRTATINSLLWRVHELDPARAPKARSLDLAKHQHALRDWLVTLTGVVAELALDELDDIIALTARAKNYERRITALTTQVAPTLVAMPGCGALTAAKLTGEAAGITRFPDEAKFARHAGVAPIPVWSGNTAGRVRMTRSGNRQLNAALHRIAVTQIRLTGSLGKTYYEKKKAQGMSNREALRCLKRRLARTVFNHLTNDHHSRPTTSLPAAA

SEQ ID NO: 249475 - protein, 362 aa, unidentified
MESMRWVGVDVHAKESVAAVLDQATGEISTHRIAGRPEDVLLWLTTVAQPFRAVYEAGPTGYGLVRRAEERGLDVVVCAPGHILKNATDHIKVDKRDAVRLARLLSAGELRLVRVPQPDEEQLRDLVRSREDVRVDLTRIRNRIGKFLLRRELYPPKHAESWGVLHRKWLQQLRFEDRASELVFQDALHAHEILVARREQLEQALAEIAANSPWSRTVARLRCLRGIDTLSALGLVAEVGDFRRFVHPRFLSSYLGLVPSEHSSGEKRRQGGITKAGSKHARRLLVEAAWQYRHVPRTSHHISQRQQGQDPRVIDIAWRAQRRLYKRWQRLHEERRKRSTVVAVAVGRELATYCWEIATLTG

SEQ ID NO: 249476 - protein, 340 aa, unidentified
MKLKRVGVDLAKNVFQVHGVDGHEQVKVRRQLKRRDVLNFFRQIEPCLIAMETCGSAHYWGREFTKLGHTVVLMAPQFVKPYVKSGKNDANDAEAICEAASRPSMRHVALKTAGQQAGQAIHRVRSRLVRARTALVNEIRGLLSEFGIIGATKGVSACRRLLAEVLEDAENGVPDTLRELLAQLSAELKEQDAHIARLDASIKRQCAQDERIKRLLPIEGIGPISASAIVAAVGDARQFRSARDLSAWLGLVPNPHSSGGKERLGAISKRGDAYLRTLLIHGARAVVNACTNKTDRKSEWIKALMSRRNKNIATVALANKNARIIWAVLTREEAYRAAYA

SEQ ID NO: 249477 - protein, 343 aa, unidentified
MKLMRVGVDLAKNVFQLHGVGRDERIVWRRRLARDRWLETLREKLEPGCEIGMEACTGAHHWARQLQREGFTVRLIAPQFVKPYVKSNKNDATDAEAVCEAMARPSMRFVAVKTLEQQDIQAVHRIRSGLIEQRTAKANQIRGLVAEYGLVAPRELGQLRIALPRWLENAENGLSSRFRRLLSGLWDDLKVLDDRVCELDREIAAIARNDPTAKRLQRLRGVGPIIASALVAAVGDARQFANGRQMAASLGLTPKQHSSGGKERLLGISKRGDRYLRSVLIHGARAVIRTAKGKSDRLSMWITSLAARRHPNVAAVALANKTARIAWAMLRNGTDYQPELVRG

SEQ ID NO: 249478 - protein, 422 aa, unidentified
MKSKAYRAVEVNRVDLGKWLEGRNQSVVHAGLDVGKETILCTLRWGGDDFDRPWRVRNPFELARLAELLSAVGQDRRLIVALEPTGTYGDALRQALQRARLTVHRVSPKNAADYAEMFDGVPSQHDGKDAGVIAELAAQGRSWPWPLLARTEAEQELAYQVEWLDGQRRQMMMWSGRLEARLSRHWPEATRLVRLVSGTLLHCLAEYGGPAGLAAAPDALQRVQGWGRHYLSAEKAQALVDSARQTAGVVMGQWEEEQLRRYAREIQKCRGEMRGSRRRLKELTGTHAVIRAMGEVVGVATACVLWSELGAPSAYHCGPAYRKSMGLNLAERSSGKWQGKLKISKRGSSQVRRWMYLAALRWVRTEPVRSWYLRQKAQRRGEGKPALIGVMRKLALALYRVGGRGEKFDQQQLYRSLTTAAV

SEQ ID NO: 249479 - protein, 344 aa, unidentified
MKITTIGLDVAKNVFQVHGVDAAGEVLVRRALRRGQMLVFFGKLEPCMVGMEACGTSHYWARELGRLGHEVKLMPPAYVKPYVKRGKTDAGDAEAICEAVTRPTMRFVAVKSADQQSVVMLHRTRELLVRQRTQLVNMMRGQLAEFGVVLAKGIQHAQKFVRELVDGEAPSIPELAVKIVAILAEQLRQLQIRIGELEKHLKRWFRTNQVAQGLATIPGIGVITASALASSVTDPHQFTSGWQFAAWLGLTPRANSSGGKERQGRISKMGDQHIRRLLVSGMTSQLRCVRRNPDAHPWVASLLARKPAKLVAVAMANKAARIAWVVMTRGELYNTQPPSTQAVA

SEQ ID NO: 249480 - protein, 392 aa, unidentified
MIFVGIDIAKDKHDCFISNSDGEVLFNAFTITNSLEGFNDLYQKISSLTRDFSNIKVGLEATGHYSYNLLRYLIDKGLTAYVINPLHTNLYRKSLSLRQTKTDKVDARTIASMLMSDVNLKSYSDTSYHNEELKSLTRYRFDKIKQRAKLKSSITRLINILFPELEKLVPTLHMASVYALLSEFPGASYVASAHLTRLTHLLVKASKGHYDKNTALRLRETARNSIGSVMPAKSLELKHTVKLIQELTFEIDEIEAAIKQIMDEEIQSPILTIPGISYRMGAMIIAEIGDFSRFDSPDKILAYAGMSPSTYQSGKMDNCHSHMEKRGSRYLRYALYNATKYVCHWDKSFGAYLEKKRSEGKHYNVALSHAAKKLVRTIFAMEKSGQAYRATI

SEQ ID NO: 249481 - protein, 464 aa, unidentified
MKVAKVNQQKRKPKKTRAPSFPIINPNAAGIDIGSAEHWVAVPEDRDEQPVRRFACFTQDLHAMAAWLKQCRVETVIMESTGVYWIPVFQILETHGFEVKLVNAKHAKNVPGRKTDVLDSQWLQRLHTYGLLSGSFRPDDAICVLRSYWRHRDTLVSYVSSHVRHMQKALTQMNVQLHKVISDITGVTGMSIVRAILSGERDPLKLAQMKNYRIQNSTETITKALEGDYRQEHLFSLRQAVELYDFYQQQIQACDREVQAYLSQLDGIDIASNPIPPSRRRIQKHKGNQPDFDLRTHLYRISGVDFTQIDGLDVLNVQTILSEVGLNPDAFPTVKNFTSWLAICPNNRITGGRIKSRSTRKAANRATEAFRMAAYSLTHSSSALGAFCRRMRARDGSPKAITATAHKIARIFYQMWKYRTPYKDLGADYYEQRYKERVLSGMKKKAKQIGYFITLTPMPQPAVS

SEQ ID NO: 249482 - protein, 450 aa, unidentified
MSKKPQVIDDEERERVHERVAAVDVAKDTGMVCTRLPHPSRPGARQSTVWTVRARMGAIRVLGRQLARDGIEIVTLESTSDYWRIWFFVLEACGLAVQLVNASQAKSLPGRPKTDKLDAMWLARLTEMGLLRASFVPPKAVRDLRDYTRMRTRLIQERTRCFQRMEKLLESALVKLSSVASKLTTLSAQDMIRAMIAGQRDPLVLAALARTAMRARHDDLVQALDGMFDDHHGELAGMLLDQIAFLDQRIAALAARAASLTAAMPAAWGVDAGGTTGPDAGTGPDAPVLPAVARLAEVPGISPDLARAIIAETGLDMSRFPTAAHLVSWAGLCPSARQSGPRTRTGKKGQGDTWLRGTLGQAANGAARTHTFLGERYHRILRRRGKAKAQVAVARSILVIIWHLLKDPAARYTELGHGYYQGRLDTDRRLKNHIRQIQALGFDVTITKTA

SEQ ID NO: 249483 - protein, 419 aa, unidentified
MSKQPVELAAFIGLDWADEQHAVCLQEAGATRREALKLDQTPEALQAWIQQLRARFGGRPVGIAVEQARGALIYALMHVDFLQLYPVNPQTLAKLRQAFYPSGAKDDPGDAELLLEVLLKHRDHLRVWVPDNILTRSIQLLTEGRRKLVDERTALTNQLTAALKMYFPQALDWFGDLHTARACAFLQRWPSLPQLQGATTSSVRKFYRKQGYRGDDKLKQLIQNIQQAQPLTEDPAVVLSSTMMVHALVKQIPSLTESIQDYDRQIASLFKEHDDSTLFGSFPGAGPTLAPRLLAAFGSDRNRFEYAAEVQQLSGVAPVTEKSGKACWVHWRWACSKFLRQSFHEFAGQSILKSVWARAYYQQQRQRGQSHHAALRALAYKWIRIIFRCWKDRTPYDEATYLKSLQLRGSNLASDLKTT

SEQ ID NO: 249484 - protein, 371 aa, unidentified
MNTITIGVDLAKSVFSVCEMDDSGHVLRRRDLKRDAFAAWLAQVPAGTVVAMEACSGAHHWGRCCLEFGLQPRLMAAQFVTPFRKNRTAKNDRNDAEAIATAARQGNMRFVPVKTIDQQARLSWHRVREGYKVESLAIGNRLRGLLAEFGIVVAKSDHALRRVLADLDQQTALPSEMRELLRNLSAHWGQVRTAVDACSARIDAHARADERCVRLRAMVGVGAITADAAIATLGDAKEFRNGRQVSAWLGLVPTQHSSGGHARLGAISCRGDGYLRTLLIQGARSSLQRAKAVSVDKSTLEQIWIRQLACRMPFGKVLVAIANKHARQLWAMLAHDETYDADAWLKHPTGWPRAMVQRPAGKHAITMSTAA

SEQ ID NO: 249485 - protein, 333 aa, unidentified
MNAVFCGLDVHKESTYATVLDADGQVVTQRRVKNEEVPAFLEPLQVEKVAMEASTYIIPMYRKLVEEGYDVTVSHPKKTRYIAEARIKSDRVDSKALAELLRLDSLPTSYIPPRELSQLREKVRRRAFLVRQGSKLKVKIRDVLAYEGIKPPTGHGLFTRKGVDWLKGLGLEPVDCYLRLMAPLSREVLLLSKELRGMARDDPDVQLLMTIPGVGYYIGLLIKAEIGDIGRFSSGDHLASYAGLVPSTRSSGGVTRHGRITREGSRWLRWALVEAAMVHVRRDTAVTRFYHRVAERRGKKLALVAVARKLATVCYSVLVNRRPYFDPLGAQAT

SEQ ID NO: 249486 - protein, 315 aa, unidentified
MTTSSRKFVGIDVAKDKLDIAVLGETKASQVGNDESGISKLIKKMQKLAPALIVVEATGGYQRAVVLGMYEAGLPVAVVNPARVRQYARACGLLAKTDKLDAFNLAEFGKQVKPRQFEAKSEAGRYVSALLVRRRQVEEMLKAEKSRLRTVHADMRDSLERMIEVLKEEIKRLEKDLDHFMKEHADWQAQEQILCSAKGVGRVTAATLLAELPELGKLDRKKIAALVGLAPMNSDSGKKRGYRKTKGGRIEVRSVLYMSTLVATRYNPLIKAQYQELLRRGKVKKVALTACMRKFLTILNAMMRDRVPFRQTVLA

SEQ ID NO: 249487 - protein, 364 aa, unidentified
MASVQFVGLDVHKDTIDATVMSGKNSTPDFEKRYTNSPKVVQKLFKSLQQRGPVAAAYEAGCMGFELQRMLKGMGVECLVIAPGKMPRFTSDRIKTDRRDARTIAKLLKNGEVTPINVPTPEDEATRDFLRAREDLKQDSGRAKQRLMKFLLRHGYTYRGGSYWTMKFARCLSELHFALPLLKETFDSYRLKVQELKDQMRMLDERIVAIAVQEQYAQRVARLRCFRGIDYLIALALVVEVGDFRRFATAASFMAYLGLVPREISSGGSRRQGGITKSGNGHLRKLLIEASWHSRWKPSVSKRLRERREGQPVELIAYADRAMNRLHQKYIKIVVRGKTKQRAVTAVARELSGFVWGTMNGKIS

SEQ ID NO: 249488 - protein, 386 aa, unidentified
MSRLDDLSSCLVPFGQDNTLVVVIELSQESWLVAGTVPGVERRPLKKMEPNETALLRLLHRWRDEATRAGRTIERIVVAYESGRDGFWLARWLANQGIEVHVIHSSSVAVSREHKRAKTDRLDTAMLNRVFLGWLRGERGHCKMVVVPTLAEEDAKRPSRQLEKLTGECTRIVNRLKAALARLGIRGFNPKLRKAAACLETLRNPEGEPIPQNLLEELQRDLAHLAFLREQKREIEQLRLERLQQAPKTGTNLMVLMLASVIGIGIDTADLLVQELLSRNLRDRRAVGRSAGLTGSPDESGSKRREKGLSKCGNARVRRTMIQLAWRWQQFQPNSALAKWYKSRIEGAKRVVKLKLIVGLARKLLIALWRMVNTGEIPEGVVLRPA

SEQ ID NO: 249489 - protein, 352 aa, unidentified
MNRGDASKIQGCDFHPSWEQVAWLNMETGETAEQKLVHGEGEAEGFYRGLAAPALIGLEATGNCHWLLDLLRDLGHEVWVGDAAEIRASYVRRQKTDKRDAAHILKLLVEGRFPRLWVPEREQRDLRQLLIHRHKLVEIRSRVKNGLQHLALNQGVQKKQRLWSAAGQQALRELPLQPWASRRREDLLGLLGALSRQIAPLDRAVAEAAQQNPQARLLMSQPGVGPITGLAFVLTIGDVSRFARGKQVASYLGLIPREHSSAGHQRLGAISKQGNRFLRMLLVEAAQSAVRCDPEFRREYQHRCHSKPKNVAKVAAARKLAVRLYWMLRTQQARPESVAIESSPRVPLVGAS

SEQ ID NO: 249490 - protein, 423 aa, unidentified
MNTSKDNTSVQSAPAAWIGLDWGDKEHAFAIQDAAGASESGTLAHSAENLHAWLKTLGERFGTRPIALAIEASRGAVIHALLEYPWLMIYPINPITSARYRSAFTPSGAKDDLPDAKVLLELVRDHAAKLRVLESQDPVTIKLAGLVEARRKLVDRRTQLILQVQSLIKSYYPQALEVAGDLKSEVALAFLNRWPDLISLKAARPATIKRFYYLHQVRSQDLITQRLALIAQAQALTTDAARVEVAVLHLRALLDQLKVFHQHIPRLDEAIHQTFASHADRDLFRNLPGAGQQLAPRLCVAFGTLRSLYPDPASLQKYAGVAPVREKSGNQVWTHWRWQASTFLRQTFVEWAGQTVHYSEWAKVYYQRMLKKGKKHAVVLRALAFKWIRVLWKCWQDRQPYDEARYLKQLIHRKSPNAAPINL

SEQ ID NO: 249491 - protein, 393 aa, unidentified
MHSCLAIDVAKGKSMVTLVSSSGEVLIDPYEVNHSINDFTNLLNRIKKHKLDDISVIMESTGIYHRPIERFFLENNFKVFVINPIYGKMKKRNLRKTKTDKEDCFNLVNLFMSNTFKEYIKPDQLYLDLNALSRQYFALDELCVNIKNRYRNLLYLCFPEYEEIFKGNMVYSSIALEFIENYPHADIISNTRIDKLQNFFKKRGYKSWKSKPIKIKETASKSYPSVNMNDELVSNLSQIARLVNEYQKAIDIIKYKITFLAKKSKYFETINSIYGIGEFTTSIIIAELGDINRFNNIKELTAYCGLDPSIKQSGKSINVHGPISKSGNKYMRKILYIACSNIITIVGKTKQENDIEIYYRKKRNEGKHHYAAIVACTTKLLRKILALGKQLYK

SEQ ID NO: 249492 - protein, 407 aa, unidentified
MYNAVGIDVSKGKSTVAVLQPGGTVVRKPFDVAHSSCELKSLIDYIQTLDGETKVVMECTGRYHEPILRALSAVGIFVSAVNPHLIKNFGNNTIRKVKSDPADSRKIARYTLDNWANLRQYSSMDTTRAQLKTLNAQMDFFTKQKVAAKTNLISLLDMTYPGVNDLFDTPVRDDGSEKWVDYATSFWHVDCVRKIGLKAFTERYQAFCKRHGYNYQKDKPEELFNASKELVAVFPKEQEYKDMIQMSIQQFNIISANVEHIRQKMNRLASTLPEYNTVMSMRGVGATFGPQLIAEIGDISRFNHREALTAFAGVDPGVNESGKFKSTSNNASKCGPSRLRKTLFLIMSCLLQTKPVDDPVYRFLDKKRSEGKPYQVYMTAGANKFLRIYYGKVKECLKNQAQAEVDK

SEQ ID NO: 249493 - protein, 317 aa, unidentified
MQTERVYIGIDVSKQWLDVAVYPDQSHWRTANTAAGHQQLVARLQGYAVAWVVLEASGGYEQGVVEALVGAGFAVSRVSPARVRQFARSRGQLAKTDRLDAAVLALYAAKTADELCPVVVPGDVQRQLSALLQRRTQLLEMLIAEQNRLQTAPAFIQPHIQTVIALLNDQLQAINQQIDDLRNQLPPDLQQRYQALQAQPGVGPILASTLIADVPELGTCSRKQIAALIGVAPFAHESGSQRRHRFIKGGRAAVRQVLYMATLAAIRCHPVIRALYRRLLQVGKLKKVALVACMRKFITILNAVARDTLVSQSMPVP

SEQ ID NO: 249494 - protein, 393 aa, unidentified
MSITCGIDWAEAHHDVALIDEHGVVVARHRIDTGTAGFSVLLALIAEHGGGVDDTAIAVETDKNLIVVALAEAGFVVYPINPRAVARYRERYGQAGGKSDPGDAAILAHILRTDRHMHRRLPTNTNQAGAVKVLARQHQEAIWALQQTVSRLRSVLLDFYPQALQAFPNLKHHAATTVLAAVPTPADAEKLTKTRVTSLLRRSGRGNHTVLAERILLELRVPALRQPACVEVAYGHTVQGLVGTVVAMRAAVDQLEKALFCEFDQHPQSTLLRSVPGLGPVLAARILAEVGDDPERFGNPQSLRAYAGAAPVTIASGRSHYVKARKVRNKRLADACHWWAFTSLHHLDQITGCSRTLRPPTSRWRPSQCRAPQPRQQTPRPPLVVPGQQSVVG

SEQ ID NO: 249495 - protein, 387 aa, unidentified
MSKNKGRVVGLDVHPDNFAGAVVEGTDPASAQVLSTSTRVELEQLEQWTLRHTRREDTLVLEASGNAFAVAARLRAIGREVEILESHRAGKVGKVYCANDRVDAVKIARIYLSALSPIVWQPDQKTIERREIFSAYQAVVKESTRAKQQLRSMLNEHCVRLEKGFRLCHPNAIRRLLALREWTPARTMLLQQLHGSLLAARARRTLLRRHMAQEIAAEEALLRLTRLCGINLVTLYGVAAAVGDVRRFSHSKKLVAYLGLNPSVSQSGNFEGSGALKRHGRGALRALLIQSGKKLLEVNNPLQKWGLAIAARRGRNKAAVAVARKLCVALWHVLMGHVIGALERLDTLETKLSKFATEMGPAALRALGYNNKAEFVERKLYVLRSYP

SEQ ID NO: 249496 - protein, 356 aa, unidentified
MNNVSRLDFTGQQIYVGMDVHKKSWSISIFTDQFEHKTFSQPPEVGVLVNYLKRNFPGAAYKSVYEAGFSGFWIHDRLQEQGVQCVVVNPADVPTKDKERATKTDRVDCRKLARSLRNGEIEGIYVPTRPKVEDRGLLRTRGSMVKKQTRCKNQIKSVLCFYGIDIPDDFANGYWSNRFINWIESVRMERASGNLAFKAHLDELKHIRRIIADLNRGIRILAKSDEYRENVRILKTVPGVSILTAMMFLTELYDINRFKTLDKLCSYVGLIPNTNSSGETDHKTGMTGRQNAQLRVVLIESAWTAVRKDPALMMAFNELCKNMTKTKAIVRIARKLLNRIRYVLKNHQEYVPAIVQ

SEQ ID NO: 249497 - protein, 343 aa, unidentified
MDHYVALDVSLKETSVCVLNADGSVAFEGRAPSDPASLAQVIRTKAPRAVKIGLETGAISVWLWHALKAEGLPVVCMDARHAHAALSIRPTKSDRSDARGLADMVRMGWYREVQIKSLAAHERRALLAARHRLVLIRLELDAQIRGMLKPFGLVVGPGNSDAFIRRAQELAQGHPVLAPLLACLAEVRRHVVAQISKLDREIGRIVRTDMTLRRFMTVPGVGPVTALAFLSTIDDPNRFRRARDVGPYLGLTPRRHQSGETDHQGRISKCGDTFTRTCLYEAANVLLTKVQRWSPLKAWGVRLAKRIGAKKARVAIARKLAVILRCMWVDGTQFWWTKEAAMA

SEQ ID NO: 249498 - protein, 438 aa, unidentified
MSNKVIFNLDELFISVGIDVGADFSWMSIALPNQQFVGKPYKILHNSIDSLTTAVSKIKEAEELYSLESRIFLESTGIYHYPLFCYLRDKGFNCSVINPIITKNSTNINIRKVHNDRFDSKKAALVGLKPDLKVSLMPSDLALNCRNLCREYYDLMDNRSAYVNKLQGELRMAFPQYLGIFSKVTINTSLTLLETYTSPSAFLKVDKQEIIDIIKSTARFGLTYAQNKYNAIIQAATDANQFGYIIDSNIKRIRLYISFIRKYDEEINSILESLHELVDANEDADFVKQIHLIETFKGAGFLSAVSIMGEIGDFSAFSKPKQLFAYFGLDPSVKQSGKFEGTKVQMSKRGSAIARRVIHTLTLQSISISRNREAKNPVLREYYLKKCDSKPKLVAMGAVSHKVCNMIFAILRDNKPFKIIAPQEHIKQYNSAKCDIAA

SEQ ID NO: 249499 - protein, 401 aa, unidentified
MGHFCGIDWGGLRHAVCVVDQAGAVVARFEVGHDAAGLAELRRRLARFGPPAELPVAIERPSGLLVDHLVAWGHRVVPIHPNAVKASRPRYRTAGGKHDAGDAYLLADLLRTDGHRFTALLPPSDDIQALRALVRGRDDLVAARVALANQLRSLLESYWPGAAVIFAEVDSPIALAFVRRYPTPASAAQLGEKRLAAFLAKHAYCGRRTPGELLARLRMPPAGLAGPAEADAKGELAHALCVILESLVGQIALLTAQVSHAVAEIPHGRVVMSFPRAGRINAAQILAEIGDQPRRFLTDQHLAAEAGVCPVTFQSGKSRGVAWRWACNKRLRGALTCFADNSRHASQWARSVYHAARLRGCDHPHAVRILARAWVRVLWRAWQDGQPYDPERHHAAHRIAA

SEQ ID NO: 249500 - protein, 468 aa, unidentified
MLYLGIDQHRKQLTVNLRNEQGDVVLKRQVSTEWDRVRKFFDELRKLVDQEDGFVTIVEVCGFNGWLLKMLDEYGCREVVLIQPERRSKKKTDRRDAAELSQTLWVNRERLLAGKSVHGIKRIVPPSKTDGENRELTALRKRTAWLCTRTINKVHRILLKHNLQQECPTKGIKTKKARRWLAELPLEEIDRMEMDLLLAQWKLWESQLEQLDEKIRERQSTDATAAIVATMPGAGAYSSLALASRIGSIDRFPRPGSLANYWGLTPGCRNSGDATDRLGSITKQGSAMARFILGQMVLHVLRRDVAMKAWYAKIKRRRGSKIARVAVIRYPSQRVEQVRELAKQHDDEEIAEILNCSGQRSSHGKPFTKAMIAWIRYKHGISAPELKRPEELTVCEVAEKFGVSRGVVYYWIDRDILSARQQKPGRPYWITLSQDKEDELSRWMRESNRIPKTLAHQAGHETKIPNAI

SEQ ID NO: 249501 - protein, 358 aa, unidentified
MQIIGVDLHVRQQTIAMLDTDTGEVVEKTLQHEAEDVREFYSALPGPVQVGVEATGSMHWFLELMEELGIDRLVGHPSEIRKAETRKQKHDRRDAALLLKLQIENRFPSIWMPSTELRDLRTLLTHRHQWVRMRTRVQNALQAIALSRGLRRGKTLWSQAGQQAIESLPLPPNAAYRRAELQSLYRTLNEQVDELDKRVSDQAFQRPGATRLMTHPGVGPVTALATDVFLGDPARFADGKALVSYVGMIPSEYSSGGQQRLGGLSKQGNPLLRFLWCEAAVHAVRRDPELQRFYRRKLSQKGLGKARVAAARKLGIRLWIMLRDQIDYQEFCRRGQMRQKSGGARAGMPEVGHSPAMQ

SEQ ID NO: 249502 - protein, 350 aa, unidentified
MREYIAFDAHKHYTLAEREEVVSGRARQTRIDHVPGAIRAYLSRCAPGTPVAVEAMGYWYWIVEEIEAAGCRPLLVHARKAKLMMGQTNKTDRLDVHGLNRLQRTGTLPTVWVPPSDVRDLRELTRARITLVHWRTDVKNRIHAMLAKHGLQVGASDAFGKKGRAELDGLLDRLPPETGRVTRMLLAEVDTLTGHITELERRLKALIVVTPEMGRLMTLPGIGLILSATIALEIGDVKRFRSAPRLAAYAGTTPRVYASGGKTTYGPLRADANRTLQWAFAEAANSVAVNHTRKPERHVSALYRRLRERKNHGKAIGAVARHLAEATWHVLTKDQPYLDPNERRGRTTAA

SEQ ID NO: 249503 - protein, 381 aa, unidentified
MRFYNQPHQPHRFYCGVDLHARTMYLCILDHGGAIVLHKEVPAEPGAFLEAIAPYRDGLVVACECLFCWYWLADLCQAENIAFVLGHALYMKAIHGGKSKDDKIDSRKIAQLLRGGNLPIAYAYPKGLRETRDLLRRRMYLVHKRAEVVAHTVNTNSQYNLPAFGKKLIYARNRQALKIAERFGDASVRKSIEVNLRLLDSLDDLIGDVELYLERTVKVDDADTFYRLRSIPGVGKILALVLLYEIHDIRRFGGEGEFLSYARLIRPLKTSAGKVTAGGGAKIGNAHLKWAFSEAACLLVRESDQAKRFLAKKEKKHGKPKALGILAARLGRSVYHMLRQKRAFDPVRFWNGEPGVTPAQLKKSAVKRPGHRKGSRCVLEA

SEQ ID NO: 249504 - protein, 389 aa, unidentified
MEARTVNNLPPAGIDDDAVRCLLAIELSKKSWIVAVNTPLSDKISRHTLKACDGKELLDLCERIRTRVARETKKRVEIVSCYEAGYDGFWLHRLLEAHGIRNYVIDPASLQVDRRARRAKSDGIDVEKLLRSLMAYLRGEPKVWSVVRVPSVAEEDDRRLHRERGRLINERIQHVNRIKGLLAIHGIYNYQPLRRDRMQQLERLRTADGRTLSPRLKAEIRRELQRLELVIGMIKTIEAERDAIASTKTETEHTSAKKIQDLAKIKSIGPEFATTLVGEVFYRSFDNRKQVGSYVGLTPAHFQSGAMCRDQGISKAGNGKARTVMIELAWLWLRHQPDSPLSVWFRDRVGKLKGRIRRITIVAVARKLLIALWRYLETGLVPKGAALKV

SEQ ID NO: 249505 - protein, 340 aa, unidentified
MKIIGCDFHPSFQQIAMVDTETGEQTERRIAREEAGEFYRGLSGPVRVGMEASGNTLWLERLLAELGHELWLGDAGRIRAMEVRKQKTDRRDAELLLRLMIQDRFPRLWVPSQEQRDLRQLLVHRHKLVGMRRQVKNQLQHLALNQGVQQKHKLWTRAGRKLLEELPLEGWTARRREESLQLLDDLEGRIMPLDQAVKQAAEKDRVAGLLQTHPGVGAITALAYAVTLGEIERFRHSRQVVSYLGLNPSEHSSGGRQRLGSISKQGNTMVRSLLVEAGQSAARLDTELKRAYQRLKHRKHSAVAKVMVARKLAVRLYWMWKREQPYAATRMQGSPSHPVA

SEQ ID NO: 249506 - protein, 362 aa, unidentified
MPKMIWLGMDVHAASITVAQYEDQAPTATVQTIANDPAQVRRLVRRLPAGSDVRACYEAGSCGYGLHRQLTALGVHCDVIAPALIPRRPGERIKTDRRDAEKLGRFYRSGELTTITVPTPSQEGVRDLVRAREDVRRDRTAARQRLAKFLLRHGHRYPGSHWTKRHWEWVCGHTFDGPARTVFVHYCDHVLALNERLAHLEREIRTLAESAAYQPVVTRLSCLRGLATLSALVLIAELYDLRRFRTPRELMAYLGLVPSEHSSGARERRGRITKTGNALARRLLIEAAWAYRHPARQTRRVHQALTTQPPEVHAISDRALHRLTARYRRLLSRGKTPHHAVTAIARELCGFVWAIALVPDLA

SEQ ID NO: 249507 - protein, 453 aa, unidentified
MKQRNPGLLVKAVKSRAALCITHPNAAGIDIGSASHFVAVPPDRDEQAVREFASFTVDLHALADWLDACSVDTVAMESTGVYWIPLFELLESRGFTVLLVNARHVKNVSGRKSDVLDCQWLQQLMSYGLLNGAFRPADQVCVLRSLWRQRGMLLRSQGRYVQHMQKALTQMNVQLANVISDVVGETGQKILRAIIAGERDGQVLAAMKNARIHASVDEIAKSLQGNWRTEHLFALQQALDAFDFIGLQLAQCDQHIEAQLQSLQAHDGEPAKGKKRGRARNAPKFDLRTQLFRMCGVDLTRIDGIDVTTALAVISETGADMSRFPSVGHFTSWLGLCPGTKITGGKVMSGKTKRVANRAAQALRLAAAALRSSQSALGAYFRRLCARMDRPKAVTAAAHKLARLIYTLLTKGEEYTDQGQDYYEERYRERVLRHLSQRAKQMGLKLVPEQQPA

SEQ ID NO: 249508 - protein, 401 aa, unidentified
MSTMQANVQRVKRFRELKATLRTNRSRLLVGLDIAQAEHVAHLRHAHTRVVVPTLTIPNSTRGFATLWARIQQAQRATGCREVVCGLEPTGTYHQAVASFLEAQGADVLLLSTSVAYWNRRTQDGTWDKNDRKDAANCADLLEQGKVLFYSQPEGPLAELRRLVKCLRRARGELAACKGRWRTTLRPALGPMGEPLPNRLRAELPAVLQAWEPAAPGRPAVAKGRLLPGLATACADLGAQVTAVQARLTTLEQALTPLAEQLPAYPLLQTIPGVGPTVAAILLAEIGDVAWFTKFSQLRKLAGLDILRVQTGKFAGQWRISKCGRGLLRWALYQAARGCARTAGGRARLAALTAKRQGDRYAGLKATVELAAKLLRVVWGVWRSGTPYDPTRAGGLQRQAR

SEQ ID NO: 249509 - protein, 345 aa, unidentified
MSRSTIIASKQAVFAGIDFHKQFSVITLGDIDGQVIEQLRLTNDEHQIRKFFLRRSNLKCAIENCRGNEWFVDLLKDIGCQVFVGNTAAIRLIADSRCKTDKIDSRILMELLAKNFLPVCYQASKQERILREQLRWRVALVRSRTQYKNRVHALIDKENKGQNITSKRSRSKLLEQMPVSSQRQGLLTKHIEVIDYFEGLVKEQDKCVEILAKDSEDAVRLQTIPGIGDKSALMFLAEIGDYTRFKKARQVSSYFGLVPRVYSSANTRYLGSITKKGSRMMRWLLIQDAWKAVSDCKPIRSKYVNICIRRGKKVAIVAIARMLAEIAFRILRDKTEFNEKLLALG

SEQ ID NO: 249510 - protein, 371 aa, unidentified
MGKHRLAFVAFDSAKNKHAAAIADDGRDGEVRYLGEIDNSPDAVRKLVAKLSRQYERLHFCYEAGPTGYGLHRQLTELGHVCDVVAPTMIPKRSGDRVKTNRRDSVTLVKLLRAGELRAIWVPDSVHEAVRDLTRARETAMVDLKTKRQQLLSFLLRHGRSFPDGRNWTKMYERWLAKQTFGHPAQQIVFQDQLEAITTAQARLAALEQQLREIVPTWTMASVVAAYQALRGVSFLVAATFVAEVGDVRRFATPQQLMAFLGLVPSERTTGDTVRRGSITKTGNYRARRVLIEGAWTYRFSARVSETLRTRLKDLPLSVRAIAWKAQVRLCARYRRLIARGKKPPVVTSAIARELAAFLWAIGQQVAPKTG

SEQ ID NO: 249511 - protein, 411 aa, unidentified
MEALIERVAGLDVHQGSVVACVIIGAAGHRPAKEVRSFGAMRQDLAALRAWLLERGVTHVGMEATGVYWRPVHTALEGAFTLIVGNASHMRNVPGRKTDVKDAEWIADLIRHGLVRASFVPPPEVRVLRDLVRHRKALVGTLAAERNRTIKLLESAGIKLAGVMSSVFGVSGMLMLRALAAGTAAPAAMADLAKRRLRSKLDRLTLALDGSLALHQRLLLGMHIRRLEEIGRDVAEVEAAIAAAMRPFAAQQALLVTIPGVDALTAAAIVAEIGTDMAAFGTAQRLAAWAGLCPANHESAGKQKRRGTRKGDPYLKATLVTAAVCAARTNGTYLRDKFHRLRARMGAKKAAVAIAHKILLAVFHMLQRAVAFADLGGDYLDRVDKHRTAKRLIRRLDALGYDVMLRPKAAG

SEQ ID NO: 249512 - protein, 360 aa, unidentified
MHATTVAVDLAKSVFQIVVADDQWRIIDTQRLTRSQFERWFVNRSVGLVVMEACGSAHHWARWLDDLGIEVSLLPAQYVRAYVRRNKTDATDAAALLEAARASDIRPVRVKSVEQQALQGLHRIRSLWMGTRTSRINALRGFCREFGITIAQGARTGVETISRVLADPRSAVPELIRHTASMLLEEIRLLETRIAQVERELASVARDSPACTLLLSVPGIGLLTATALVAATSGDVTHFQDARHFSSWFGLTPREYSSGSSRYLGRISKKGDRYLRMLLTHGARSVLRAAKVAQGAGKELQGVRRWALDVQARSNHNKATCALANKLARICYATLRDHKPFDEAARLNRKERRQSFAMPD

SEQ ID NO: 249513 - protein, 418 aa, unidentified
MQVETDEPEVIERVAALDVGKAEVVCCARVPGPGGQRMQEVRTVSTMTAAVLSLGDWLAGLGVTRVVMEATSDYWRAPFYLLEDRFETWLVNAHDVKHLPGRPKTDRLDAVWLCKVAERQMLRPSFVPPPAIRELRDLTRYRVDLLAVRTAEKQRVEKLLEDALIKLSVVVSDLFGVSGRAMMAALIAGERNPAVLAELARGSMRSKTARLSEALTGRFTEHHAFLLTQMLARVDAITADIATVQARIDAQIGELAPAVARLDAIPGIGPVAAQMILAEIGTDMTRFPTPAHLTSWARFAPGVSESAGRPKGNAGTGKGNRYLARVVGEAAVSAARTDTFLGERYRRIARRRGKKRAIVAVGRSILVIIWALLSDDDAQFIDLGPDYYASRANSERKVRNHLRELRALGYTVTLNPAA

SEQ ID NO: 249514 - protein, 400 aa, unidentified
MEQFRSEHGPAGVARLVARCLELEPDPAEVRVVLETRHGLLVEALADAGFTVLPVNPDLVARRRGPAKKKDDAEDARICCLLALDACLDLRRLIPHGQIGAELRAIARDDERAARDERRIGNRLRADLLAVFPAAAGIAAGDLGPAVFLRLLERWPSAAALAQASREELEAFARTAGHGWPGRFADRVTEAMAAPRLAARPELARAKAGSIRLAAAQLLAIGAQRRAWERRMGELLPGAPRTGRDRTVKDPGPGKAFPGGEIYLSMPGLGDRLAARVAGEIGEHPEQFTTPNALQCYAGRAPVTRRPGRSEFTIARRLACNRHLGEAVHQWAFCSLTRSAWAREFYDTKTAAGDTHHAALRKLGNRWLEVLWHCLDKGACYDEAIHTANRARARSLKPAA

SEQ ID NO: 249515 - protein, 375 aa, unidentified
MNNTIFVGLDVHKETIAIAYAKGSNRGVESLGIIMNEYMAITKLVKKMESKGATLLFCYEAGPCGYGLQRQISSLGHTCVVVAPGLVPSKPGDRIKTDRRDAEKLARHFRNGDLTPVWVPDIDHEAMQDLVRGRQSAKEDLHRNRQRLLKFLLRLGVRSPKGARNWGSKHKGWLQGLKLDNETQQIVLTEHLNAIRECEGRVERFEKEIQVQSSEGETHQAIIAALQGLRGIALVSAATIIAEVGDLTRFDKPQQLMSYAGLVPSEDSSGGTTKRGSITKCGNSHLRRVIVEAAWHYRHRPAVGVNLGKRQNHVSEEVKQISWKAQHRLNLKYRRMVGRGKTKQKAITAVGRELLGFIWAIGQEVKYGKQSDGVA

SEQ ID NO: 249516 - protein, 413 aa, unidentified
MRVFCGIDWASDHHDVAIIDDGGKLLAKARIGDDPAGFSELLALLAEHGDAPDDQVPVAIETSRGLLVAALRATGRRIHVINPMAAARYRERATVTRKKSDHLDAMTLAGILRTDADKHRPLSADTELAQAVAVLARAQQDAVWDRTQAGNKLRSHLREYYTAFLAAFATREHFSSPVAQAVLAAAPTPALGTKLTISQLKALLAKAGRQRRIDTEARRIQAALRTPQLRQPPLLEAAMGQKTKAMLGQFTAACTAADDLEAAATAAFADHPDAEIITSLPGLGQLLGARILGEIGDDPGRFADARGLKAYAGAAPVTRASGKSLTVSRRRVKNDRMAAAGYVWAFSAITASPGAGQLYHRLRDNGQYHAASLRRLFSKLLGFLHHCLKTRTAYQEALAFPGADPDLALVADL

SEQ ID NO: 249517 - protein, 344 aa, unidentified
MEITTIGLDLAKSVFQVHGVDATGQVVIRRSLRRAQMLPFFTRLPSCLIGMEACGTSHYWARELIKLGHQVRLMPPAYVKPYVKRGKTDAADAEAICEAVTRPTMRFVAVKSPEQQAALSMHRTRDLLVKQRTQLVNMIRGLLAEFGIDIPKGLERALLMARRIVDGEAPDVPMEAAKIVSTLSQQALDIHIRLREIDRDLLVWQRGNDVARRLMTIPGIGPIGATALAASITDPRQFRSGRQFAAWLGLTPLQKSSGGKERLGRISKMGDKYLRKLLIVGMTSLVRRAKYNPKTVDLRLADLLVRKPVRVATVAMANKTARIVWAVMARGETYCAGHRPALAT

SEQ ID NO: 249518 - protein, 438 aa, unidentified
MPMTFARLLDPCFEDDDDPFRHYDVRGEPLEDRLYLPCGIDPHKKVCYAAFVHPLPHRQEILTHRRIPNRDLQAALWLVQEGKRLAHQFKATPIYVFETSGPYWRPYRLFLHQLGLPTATVSGRQTKRARGTGTRKTHNDLKAAYLIAKVFKQGESHASRIPPEPIASLREYARLHFFFVKYSVAIQNRMFDIRYQTHPGFDDLLSKPTIPTALALAKEELMHPVRLLQADHDELVQTLRRASRGKLGDQLADALHHSALTAFYAPYAVDALSFNLRMLAEAYDHIHRHILPPLRARMDDCLNRLPFEQYLPEMPYVGPVTTGTFLGELGLPSWFKTVDSVVAWFGFDPSLSESADHETGTSHLTKRGTKYGRRIWWLVARNWSRYVSQGRRMFKKEFYVNGLSYDGAICVIAAKLVRIAFAMVRDGTHFDMSKAFPG

SEQ ID NO: 249519 - protein, 360 aa, unidentified
MRIIGCDLHARQQTLAMLDTQTGEVVNRTLMHEGNQVREFYAQLPHPVLVGIEAIGPMKWFLNLLEELRIECQVGDAAKVRAAEPRKQKHDRRDAELILKLLVQNRFPKIWMPNQEQLDLRALLLHRHHWVRLRTQIQNALQAIALANGLRRGPGLWSCDGQAKIASLPLPPHTSYRRSALQTTYRKMAEEIEGLTEQVAEQAKQRCGARLLMTHPGVGPVTALATDVFLGDPQRFADGKALASYVGMIPREYSSGERQRFGAITKQGSPLLRFLWGEAAAHAARRDPDLQRFYRRKLVQKGLGKARMAVARKLGIRLWIMLRDQIDYEEFCRRGQKQSSAACAGMPETGYGANRHRPVD

SEQ ID NO: 249520 - protein, 340 aa, unidentified
MDKLDFSGIEVSAEELVVALQREGKRRDLKTFPNTAAGHQAVIRHLSCPGRTVRVVLESTGLYGLDLALALQRAQLEVMVANPRAVRHFAQALMQRSKNDRLDAWVLLEFAARMPFQAWQPPATPALQLHAVARRLQALTEMQTAEKSRLAALEATATTPPALRRDLERSLRSQRRALARLSVEAQKIIQQEPGLKLRFDLLISAHGSIAATSAIQILAELAVLSPDMDARQWVAYAGLDPRECSSGSSVHRKARISKAGNAHLRRALFMPALVAIRHQPHLRAFYQHLCAQGKPKMVALTALMRKLLHAIYGMFNHQQPFDGSKVYRRPDPEISTEKAA

SEQ ID NO: 249521 - protein, 337 aa, unidentified
MNYSIGLDISKSLISVYIPINNLSIEIGNSSKDLKKLISKLKKLYKKELDKIVFVYEPTGSYSDLVKKFCFEKEIKCFIVNPKQSSNFAKSMGERNKTDKVDAKLLSKAIVLANDEDIKVPIYDKRVEDMKTLMSYYKFVVKSRVRLNNHLESIVAKDGLAYTIDSLKDEIKEYKIKEQDILSQIMDIINKDDQLKQDLANIKSITGIGDKSGIVLLHLFLKYPNANQREITSLVGLDPIEKSSGSSVRGKIRISKAGSKIYRGSMFMSVMTAIRYSQHFKSFFERLQAKGKHTTLIQIAVMRKMILIAHSLYKNNQKFDDERYNKDCGRQITKEVA

SEQ ID NO: 249522 - protein, 351 aa, unidentified
MHYIGVDYHKKYSYVVVKDREGKVERRGKVNNTREEFWQLLKPYHSGKAVLEATRNWGLIYDWLEEILDDVALAHPLKVRAIAEARIKTDKISADILCDLLRSNLLPEAYIPDKETRQAKNILRQRMFFVRVQTMVKNRLYAILDRHPEILSQAPDVSDLFGASGMEWLKQVVLPGQDNQLLASELELLQVLKRKISESNGIVKELARGDKKVKLLRSIPGLGPFFSVLVAKEIDDISRFRDEKKLCAYAGLVPSTYASGGKVFHGRITKTGNKWLRWAFIEAVQPAIISDADLYAYYHRLRIRKDANAARVATARRLLTIVYRVLSQERLYERRNRRATRRLAPAALVTS

SEQ ID NO: 249523 - protein, 406 aa, unidentified
MRLYIGVDWADAADAVWVEDDAGKKLLSRSVPHPVEGLRDWGRWLDERRAEGHAVWAAIERPEGRTVDFLLDHGGVVFPINPRVVDRIRDRFRMSGAKSDPFDARVLASFLRTDHGHLSPLRPSSEYAQELKGLTRDYARHVRQQTRLLNQVTATLKAYYPRALELCDDRKSAWGRAFLREYPTPEALARLTERRWQRWARDHRLRAERAAELWPIIQRPQLALPAHVVRVKARLLHALLEQLAVTIRTVQAYTETITHFFAGRPGPNWAASLPGAASGTTGPSVYAELGDAARRWQTFRHLQGCSGTVPVTERSGKVASVKFRFACNHYLRQAVHQFAFQSLTKSEWARAYYDRCRKRGHRHHHALRALAAKWLKIIFVLWSRQVAYDENRHLATMARQQLRQSA

SEQ ID NO: 249524 - protein, 479 aa, unidentified
MEERRVVGLDLGIASAHTAVVLRADGTEVCRRRCVPTVESLTELEAAALEGAPEGTRLEVVVEPTGPAWLPVAVFFGHRGHGVYRVPSAKAADLRRFLSRHAKSNSIDAATLARLALVDPGGLRPVELPGADRACLDRRVRATDRLTRAGAQHKRRIKDLVRMLMPVSPLTGDIGRADLAVLERYADPNALLAAGKARLTALIAEASHNHLGAERAERWLAAARASVALYGGDGAVAFADLAAEVATEVRLLRAVEAELALHAEARERSYLRVDPEGLARSLPGIAEVGGPVLQAAVGRAHRFAKGSEFKSFTGLTPRASETGETDRKGQPMSKAGPSLLRTQLLRSAELARTIDPQLAAIYYVQMVERGANHLKALCVVAAHLAERAWAVLARGTPYELRDTDGRPVSREEAKAIIAERWTVPEEVRRRRRSKKAGKVPHQVLTGHVSRARGAVPRRPSPPDIVEAAPRAVKLVRGGA

SEQ ID NO: 249525 - protein, 370 aa, unidentified
MSVRRILAKTIDTDLEYEAIGIDLAKNCVSAALLTTDGEVVCIDRLDYSELEKSAQVLTPTTFAMEPCTEMNYLVQKLEAWGHRCLVIGGKNVQNYVENHYSGQKTDLNDAQALAFLAQDKQLRTIKAKDIEQQKYASLTTLREQYIKQYRQTIVSLKGICQAWGLNISKGISGKAQLKDLIENHAAFPEELRESLVDMVTHAQTTQKVLNKITKTLEVLAKNDKVCQLIQTIPGLGTICSCRLRATIGDIKRFKNPKDFPAYYGLVPRSIATGHNEKKGKITHRGDRTMRSLMVQGAGCVIRLATCGKLKSKHLTKWILKKQKEKMPWGKLVCAVAAKLLRIVRAILISSKPYNPKIAGVAKCSLSKGS

SEQ ID NO: 249526 - protein, 352 aa, unidentified
MRTSQKTAGIITTIGIDLGKNTFHLIGFDQRGAIILQQKVSRGQLERRLAIIPRCLIGMEACSGSHHIGRQLQAAGHDVRLIPAQDVKPFLKGHKNDYRDAEAIAEAVQRPTMHFVAIKTPEQMDLLALHRVRSRLVSQRTGVINQIRGFLIERGIIVRQGVVPLRKALPEILSSQTGRLSPRMIGLIADLTQDWRRLDERIAAVSAEIEALAEQNESCQRLMTVPGVGPIISSAVVAAIGNGAGFRQGRDFGAWLGLVPKQESTGDRTILGKISKRGNKYLRTLFVQAAHVVLVRRPRAAMRGLWPWIEQASKRLHRNMLAIALANKLARIAWAVLARGRAYQPRITADAA

SEQ ID NO: 249527 - protein, 350 aa, unidentified
MMIIGCDYHPGFQQIAFVDTETGELQERRLEHREEAEKFYHDLAAQGMKIRVGMEASGHARWFERLLAELQFELWIGDAAAINAKRVRKQKTDRQDAQLILRLMLKDDFPQIWVPNWENRDLRQLLWHRHRMVQTRTRIMNQLQAVALNEGLRCKKRLWRDTGREQLEAFKLAPWASHRRRDLLALLDRLTPTIAELTAAIEQEVEKCPAARRLQTHPGVGALTALAFVLIIGKADRFQCGKQIACYLGLVPLEDSSGQRRRLGHITKQGNSLLRFLLVEAAQVTVRSLPEWRSKYCHMALRRGRKIAKVAMARKLAVRLYWMMRKEWDYEQLRKFGSHAGKPGHRDGVK

SEQ ID NO: 249528 - protein, 365 aa, unidentified
MSILAHPDSVFLGMDVHKDSISVAVLDPGRESPDVEKIFNDEASIRRLIARFPEPGLLRACYEAGPTGYDLHRLLASLGVRCSVIAPSMIPKAPGDKVKTDARDSRRLARLYRAGELVAIRVPSPAEEAVRDLCRTRGDMVEDLTRAKNRLTKFLLRHSTVWRGGENWTVKHETWLAAQRFDEPALQTTFEHYRAVVMSRDAQLAAVEADLRLWIDRAPFAQPVQRLAAYRGVTAMGALSLQTEVCDWRRFARAQQMMGFVGLVPSEYSSGGSTHRGHITKAGNTHLRAQLVESAWAYQHRPYVGPEIGKRHVGLPPEVIARAWKAQLRLCGRFAHLAARKNTKSVVAAAIARELAGFLWAEMNA

SEQ ID NO: 249529 - protein, 373 aa, unidentified
MAASSGSMHYVGLDVHQRRSSLCILDGNGKTVKQLEVRGDWSKLLERVAEVPRPFSVCYEASCGYGYLYERLSPMAQHVSVAHPGQLRLIYNSKKKNDRVDASKLAKLLYVDMVPQVHVPSADVRAWRGLIVYRHRLMDRRVGMKNRIRALLRGLGIICPAGKKLWSKKGIKWLKDQPMAELHALQRDMAAEELQELNQKIARAQRQLDKIADAHPAVAVLKTIPGVGTRTAEAIVAYVDDVKRFSGVRKLGSYFGLVPCQDASAGKERLGHITRDGPPVVRKLLCEAAWRGIRSSPALKSYFERVTHGDPDRRKIALIATAHHLLRCMGAMLRTGEVWDESAATRSPRPPLSPPEDTKRPLQALSSEVKRHT

SEQ ID NO: 249530 - protein, 422 aa, unidentified
MRSVALDVHLDFCEVAIVEDGELRSAGRIETKPVQIELFASSLAPDDRVALEVSGNAWEIARLIEPHVAQVLVVSPSDTGIRQARAKTDRLDARTLARLLAAGSLDGVWVPDRQTWIMRRRLSRRSQLVWARNRSKNQIHAVLMRQLVGRPPFSDLFGVKGREWLSRLQLPLEESETVSAAMRQIEFFDSEISEIERLISQTALESAEIKRLMSVPGVNVIVAASFMAAIGDIHRFQSPRKLAGYLGLDPLVRQSGVSPATHGHISKRGSVRARHALVEACWTTVRQPGPMHAFYQRIRARRGHSVAIVAAARKLASLFWCLLTREEDYAYQQPSLTRKKLRRLEIAAGAERYTAKAAGVWSANDAVREAERELARQAEVAYARTVRDWHSTQAVKVGASVTPGRASNKPAKGEAARQTTSP

SEQ ID NO: 249531 - protein, 454 aa, unidentified
MLNPEGLAFVAVDTHREQHTACVLNCWGRPLATVETSTDPRLFPDFLARVKESTNGHQLVFGLEDTGGLGRGLAQYLLAEGYKVKEVNPILVNRQRRRAPHPNKSDPDDALAIGKVLITEFERLPDLLPDELYVALREAVNHRRALVKEQTRLKNRLHALLRELYPSYKAIFPETFSKSALAFWERFPTPDALRGYGVKRLAAFLRVHSSGRVSTRRAKKVLELVNKARTSGILDKTRAVVVRSIVRQLRALSQEQEGAENLLADLLPRLGMPLETMEGIDLVNASELLSALGPVERFSSSDQIARFLGVAPQDSSSGSRRRQRRSKRGHRQGNATLYRIALYQIGLRRDGKPKNPVARAYYLKKIAEGKRKGSALTCLMRRLCDILFAMMRDRSPYRPEKFPVLNERVRITASKEQTCENVPSYYVREALPLYRREECVHNLESLIEVSPQVH

SEQ ID NO: 249532 - protein, 331 aa, unidentified
MKKKCFIGIDVSKETLDTYIHGANHYFVAPNSTSGFPFLLEECCKSLGCKFSELFFCFENTGRYSRQLAAFLSESGITFTMAPAMDIKKSLGLKRGKSDRIDAKAIALYAWQKRDSIEPTVLNSGMVAQLRQLLTLRDKLIRHRTSYKNAIKDLQDTFFEGETEFLKESQVRMIAHLNQEIELAEGQIEQIIANSENWKNNYHLIQSVRGIGPVLAKYLIIYTENFNRIDNAKSFACYAGIAPFEYSSGSSIKGRTRVHPFANRHLKSLLNIAAMGAIQLQGEYKTYYQRRTLEGKNKMSTLNIIRNKLVSRVFAVVKRQTRYVDLGKFAA

SEQ ID NO: 249533 - protein, 400 aa, unidentified
MKQSNATQPATVERTVAQRVSAASNVHAAYIGLDVHKASISVAIAEAGRQTPEFRGEIPNEPAAIDKLVRQLSQRFDGQPLLFSYEAGPCGYGAYHQIQASGHDCEVVAPTLIPQRAGDRIKTDRRDAKMLARLSRSGELTPVWVPTPEQEAIRDLTRARDDMKAAELRARQRLNAFLLRHSKVYPGKSKWIPAHFRWLETVRFDTPVQQVVLEEYVDNVKDAQRRVVGLEKQMRAVLPNWSLAPVVEAVQAMRGVSLITAMTVLAELGDISRFDSPRQLMAYLGLVPSEHSSGGSRRQGGITKTGNGHVRRVLVEAAWSYRFPARKTRIIEQRAEKTSPTVQAIAWEAQKRLCGRYRRLVATGKVKQQVTTAVAREMAGFLWAIACEAMGKPHGSRATA

SEQ ID NO: 249534 - protein, 424 aa, unidentified
MQNTAARKRKQVPEGYLVVGVDPHKKSHAAVAITQDFTTQAKFKFDNTREGLEAMLDRAKVEMVKSGCRGVMFAIETGGHYWRNVAYFLDEQGIPFRFINQFTLKRRREGKDLNRRKNDYRDSEVAAQLLCTGEFTESKLPKGVYAELRTAHNAYRRLVKERTRITNLVKGLLDALFPEFTQVFKDPCALTALSVLSICPIPGVIAGMTEDEFEATIEAQHKGRRLMRKKLRALHYSARTSIGIDAGACSLSSEIAFLVEKLELIRGHICSIERTLVRLVDETEEGKYLLSIRGLNYIAVAGLLAELGCFKAYWSAKQMIKMAGTNPTESESAGKKRARTPMSKQGRPVLRYCAWTSVIPMLRFNSDFRAWAKQRRERPVHANPLGGREVVGAALNRLLRLAFAMVKNKTYYQVSKAELTLVAV

SEQ ID NO: 249535 - protein, 340 aa, unidentified
MAEQYVGIDLHRRRSVIVRLTGQGEVLETVRIDNDPVALSLELAKAGPDPEVVLEATYGWYWAADLLQACGARVHLAHPLGVKMFGYQRVKTDARDSTNLAELLRMGRLPEAWLAPPAVRELRELVRYRAKLVALRSGLKAQVHAVLAKEGVRVPMSDLFGVAGARLLDQLRLGRAYALRIASLRSLITAYDQEITRLGREISTALAGDVGYLAIQTIPGVGPVLAAVFVAEIGDIHRFAGAPPLCSWAGLTPRHRESDTTVRRGPITKQGPRLVRWAAVEAVQRLPGASKQAADFHRIADRRGTGIGRVAAARKLLTLVYYGLRDGQVRCLAPAPRQAE

SEQ ID NO: 249536 - protein, 339 aa, unidentified
MEEFIRIGVDLSKSHFQIHALTGSSTIQRKLSRAKMRAFFAPLAPCRVGMEACGSAHYWARELAAMGHEVVLMPPAYIKPYVKRGKNDALDAAAICEAMSRPDMRFVPIKSADQQAVLMLHKTRELMVKQRTMSVNALRGHLAEFGLVVAKGISRVDELLELADKDASLPEEARETAKLLAAHVEGLDRSIDVAEKKIARANARSGTGQLLDRIPGVGPLIASAITASVPDPGVFESGRDFAAWLGLTPRQNSSGGKAKLGAITKQGNQYIRKMLVVGSRSALRVAGKRKGALAEWIAALRARKPERLVAVALANKLARICWAIMTTGEVFRQESFAKA

SEQ ID NO: 249537 - protein, 431 aa, unidentified
MNYNQNKKIAQITPYTLIIGVDIAKFKHVARAQDFRGMEFGYPCYFENTKEGFEHFLHWISETKKAHSMEKVIVGMEPTGHYWFNLAHILKENEIKFVAVNPLHVKKSKELDDNSPTKNDVKDAKVIAQLVKDGRYAEPTIPQGVYAELRVAKKIRDLLTEDLQTVQGQVHNWIDRYFPEFLKVFKKWEGKAALQFLRLYALPHEIANFTEDELLIHLRKSVKRSVGANKIQELKQAASQSIGLRQGSEMAKMELKTLLAKYDLIQKEFEELDGKVDSLLDEIPGVAQMLAIKGVGRDTVAGFFAEVGDLSEYSHPRQIIKLAGLSLKENTSGKHKGKTTISKRGRKKLRALLFRVCMILVAKNSAFKALHAYFTQRPDNPLKKMQSLIALCNKLIRIFFSISKKQFEFSEEKMLKDIPHLAGSKKAELAA

SEQ ID NO: 249538 - protein, 323 aa, unidentified
MQGKVSFQEDAMPVVYAGVDVSKEWLDVHLHPLGESRRFSNDKTGIRQLKRLLARHQPKSIVMEATGKFHRSAHRSLWLDGFAVAVVDPLRARMFARACGYLAKTDRLDARFLALLAESLRPPADTPPSPHIEALQELVNARSAAKCDITALQNRSKTATTALLRGELNRLVRRLEQHVERLDKEIERCVGEDPQLSRKAEILTSIPGIGRVTALALMAGMDELGSCSGKQAAMLAGLAPIANDSGARTGRRSIRAGRPAPRRALYMAALSARRYNPALARFADTLKAAGKPAKVILVAIMRKLLVLANCLLAHDRIWTPNPP

SEQ ID NO: 249539 - protein, 359 aa, unidentified
MQTQRKELNFEGQNIFVGIDVHLKSWNVSIFTQYLHHKTFSQPPKAEVLSEYLKSNFPNATYLSAYEAGFCGLWVHYKLKELGVNNIVVNPADVPTKQKEKMRKSDPIDSNKLGRSLRSNELDEIYIPRPETLEDRSLVRVRSSIVKDLVRIKQRIKSMLNFYGIEYPVEFQNSNSHWSKKFINWLKGIELRYPTGTSALSLLINEAELQRKLLLEATTKMRILSKTAHYVKNMELITSVPGIGLITGMQFLTEIEDINRFENSDKLAGLVGIVPDCSKSGEKEKNGDITSRGHSFMRKGLIESSWVAVRIDPALSLAYYNYCKRMEPNKAIVRIARKLLNRIYSVLKHQKRYVTGIVK

SEQ ID NO: 249540 - protein, 347 aa, unidentified
MKYYAGLDVSLEETSVCVVDGEGSIVAEAKVVTEPDAIAAYLAPWSGSLVYVGHEAGGLSPWLHGGLRGAGLSAVCIETRRMKAYAKASPVKTDRRDARLIALALRAGLYRAVHVKSVDAHKMRLALTGRQTLLRQARQLQGKIRGDLKVFGIKLGQVGSGGFAGRVKVLLAEHADLWALVAPLLEMRAALLDQVRAYDRALRRLAKDDVVCQRLMTVPGVGVLTALAYRSGIDRPERFRCARNVPPALGLTPRVDNSGELERNGAITKAGDKLLRSLLYEAANALLTRSRRWSALKRWGLAVAAKRGGKRARVAVARRLAVILFAMWRDGSDFRYGRDDGAAVSAA

SEQ ID NO: 249541 - protein, 400 aa, unidentified
MRVVFGIDVSKASSEVAILVNGEKVHNYTMSNDAIGFSRLLGDLRTVHKPEIIFEATGVYSRRLQTFLDDNGYAYTRLNPLEAKKQLDSLRVRKTDQIDAEKLAQSQFVLNRKPTYVQEEVYQNLRDLSRFYQNLTEDIVRAKNRLHKVLQVTFPELENILSTPTGEQYWNLVITFPCKDFVLDLSKNELSKSIRQSTSKRISDKRVAYLAEKLTALANQSYCAVKKTSPILEEVHYYAKELLRLSEQRQAVLDQMVELAQPLPEYDILLSIPGIAETTATSIIGELGDIRRFQSANQINAFIGIDLRHYESGNFLAKEHITKRGNPYARKILFKCIHNIASVSHTNPCHIADFYEKRKRQSQTTSTKPHTIASIHRLIRTMYYLIMHNKLYDYASTQNR

SEQ ID NO: 249542 - protein, 426 aa, unidentified
MISAVIERCAGIDVGKKELSVCVMAGPANGEARCEIRTYGTTMGQLEELRAWLKAEQCTHAVMESTGSYWKPVFNVLEDSLEVQLANPNEVKARKGHKTDNRDAWWLAHLLRHAMITPSFIPPRQQRDLRDLTRRRKRIIQAATGEKNRVDKILQDANVKLSNVLSDLFGVSGQRMLEGLLKGPVDPSVLASLAHGRMKKKVPDIIAALADNQMREHHRQMLRFSLEHLQFLEEQLLAIDDAIAALIRQAGYGPQWDLLQSIPGVQAPTAAVLLAEVGPNVNAFESEKKLSSWAGVCPGNNRSAGKNKSSATTEGSPWLKAALTESAWAISHTKRGQLRDKYWRLAAKNRSKAIVAVAHDVLRLAYAVLQRGTAYEERGGQPMSQAQRQRLIQHHVRRLGKLGVRVRAGFATKCNTKEAAQTEHQI

SEQ ID NO: 249543 - protein, 395 aa, unidentified
MKYGIGIDISKGKSTIAILSIEGEVIKEPFEFYHNQKDLDNLDALLNQYAKEDLKIIMEETGTYHLPVLSYLIDKGYCVIAENAFRIKKYLDRGLRKAKTDKKDSLKLAEYACDNWYKLKMPIIEDSKYKDLRFLSRQYFAFNSIKVQQKVNFSNLTDMLFPGYYKLLNENNYILGLKVFQKYSLETIKNKKLETFINEINKMAQKIGHKRAGITFAKKVYELAKQSVSSCPYSEYTQLIIDNCVVALIQSIETTKEIISKMQEIANTLPEYETVKNMSGAGPRLAPLLIAEIGDIRKFKNSSSLIAYAGIDAPPYQSGQFEATNRHISKRGNKYLRKTGYEVMKAIKSFYSVGNEFYDYMLKKESEGKKKKVAKIATLNKFLRQYYAKLAKLYN

SEQ ID NO: 249544 - protein, 355 aa, unidentified
MNQEKYIGMDVHAATISVAVKNAQGKLLMECVLETKAATILEFIQGLRGTLALTFEEGTLAAWLHDLLKPHVSRLVVCDPRKNALLRDGNQNDRVDARNLAELLRTNQVHAVYHGQQGICALRELGRSYSTLTQDSTRVMNRIKSVYRSWAIPCAGTSVYSRRHRAEWLAQLVEPGVRIRAEHLYQQLDSLEAVRQAARRELLRESRKHAAVKLLRQIPAIGPIRSALLVAILQTPHRFRTKRQLWAYSGFAVQTYDSGEYRVVRGKLQRNRERITVRGLNRNHNHDLKNLLKGAAISAIQRPGPLQDFYAARVEKGMRPSMARLTLARKIAAITLTLWKKGVSFDPKQLQRQTA

SEQ ID NO: 249545 - protein, 337 aa, unidentified
MTQVQTVGIDLAKQVCSVHGVDSQGRPALRRTVRAEQLAELIANLPPCRIGMESCSGAHHWARRFQEHGHDVRLIAPRFIAAYRKGDKNDGNDAEAICEAVSRPSMRFVPIKSVEQQAVLTVHRVRQGFVTERTAIINRMRGLMAEFGVVMPLRPIEVQRRVPALLEDLPALAAGAIADVYAQFIHLGERVRQYDRQIADLVRLSEPSRRLMARPGIGKLTASALVASVGTARDFRNGRQFAAWLGLVPRQYSTGGKTRLGRITKRGDTYLRTLLILGARHVVRSAARHKDSGLHRWALQVKERRGWHRACVAVAAKNARIVWALLARQQPDVAAAI

SEQ ID NO: 249546 - protein, 319 aa, unidentified
MAQDDRVVAGIDVAKDKVDVCIRSLSLRRAFASTAEGRRELASWLRRKKAGKAVMEASGGYERQWAKALRDAGIEVRIVDPKRVRSFARSAGRLAKNDTIDAEMIAWFAETFGEAKGQACDAAREPLRQMMNARQALKEMQVRLESQGEHAGPAAVQRMHARILKTIGVELVNIEAAIAAMIQATPGFTELAGIIESVPGIGRTTSAALIAAMPELGQANNKSVAALLGVAPYDDDSGRRRGQRHIRGGRRRTRNVFYMACVGAATRHNPVLKAFYDRLVARGKAKKVALIACMRKLISILNVMIERRQKWDAGRYAVS

SEQ ID NO: 249547 - protein, 370 aa, unidentified
MQDTIKYVGLDVSKEKIAVAIAEEGRTEPRYWGLIPHTPEAVKKLMKKLGRPETLRVCYEAGPTGYPLYRLLMAMGIQCSVIAPSLIPKRPGERIKTDRRDSIRLAHLYRAGELTAIYVPDKENEALRDLIRCREDAKEDELRGKHRLSKFLLRNDIKPPSGINKWTKKYFEWLDTLKFENTSLQITFQEYYHQIKELSQRILRLEEEIRIQSNEGVHAQKIQALQSLRGVAFITATSIVAEIGSFKRFTTPKQFMAYVGLIPSEYSSGERRSQGQITKTGNRHVRRLLVEASWSYRYKPAVKGELKKRQNGQSPTIQAISWKAQNRLHKKYFRLLARGKESPKAVTAVARELAGFIWAVMQEVEDIPQG

SEQ ID NO: 249548 - protein, 393 aa, unidentified
MRKPKKQQKPLNDLSRSLTPFDPNQTLIAVVEMGKKSWLVAGIIPGLQRQPLKKLAPDEDELLKLLKRWRAEAEKAGHKINRFSVAFETGRDGFWLARWLRARGIDAHVIHAASVAVSREHRRAKTDRLDTEQLKRAFLGWLRGERDHCKMAAIPSFADEDAKRPHRERETLVGEHTTIINRIKATLVRLGIRNFNPKLKKAPERLEHLRTPEGAAIPPNTLAELRRDLERKHLVAGQIRQIEKSRLEQLKQAPKAGPNLMVLLLMRVIGIGIETADMLVKEVLSRNMRDRRAVARYGGLTGSPDESGMKRREKGLARAGNARVRKGMIQLAWRFLDFQQHSTLAKWFRARTETNRGLRKKMIVALARKLLIALWHFVRDGVVPEGVVLRPAH

SEQ ID NO: 249549 - protein, 343 aa, unidentified
MHTTRTVGLDIAKSVFQVHGIDADGNVVVRRQLKRRYVLTFFQKLPPCLVGIEACASSHYWSRELQALGHTVRLMPPAYVKPYVKRHKNDAADAEAICEAVTRRNMRFVPTKTPEQQSCLTLHRTRHLFIRQQTAIINSIRAHLAEFGIVAPVGRRGVERLLEVVADANETRLPEVARACVAALGTQLLALKAQILAFDRRIMAWHRSNETSKRLDAIPGVGPALATAVVASIGDPKAFRSGRDFSAWIGLVPKQNSSGGKDKLGSISKQGDRYLRSLFTAGALAVIRYAKLHGTKHRPWLTALLARRPTKVAAIALANKIARMAWAMMTKGERYKEPVALAA

SEQ ID NO: 249550 - protein, 363 aa, unidentified
MEAYVGLDVHSKMSVFVITDARGEVTARGEVPTTPSGLGRLRTQYGVAAGTPVALETGTVAFYVARELQALDLAPVVIDAHEVRLKAHRPMHKSDRRDAFELCDGLRRDIYRTRVHVPSLAIGELRETLSRRRHFVRVQTAQVNAVKRLLRAQGVATACRTLTTDAAWTRLFAALPAGTALRGFVEDHHTVWRVARAQVTRLEQRLAQQQRPHAAAVARLETVPGVGPIVALTTLAVLADVPRFPSAKHAASYAGLVPSTHQSGARDRHGHLTKRGSGELRAMLVEAAHQARRRTSPLHPYFTKLCARHGYKRAVIALAHRLCRILFAVLRDETRFDVTKLGIEEGPFTRTVTHRYRLKRLHH

SEQ ID NO: 249551 - protein, 433 aa, unidentified
MLKLNYMSTLFVGIDVSSKTNAVYAMDFEENKYISSSFGNNQPGADKLVNMIAECMHKHKNLNTILIVLESTSVYSVHISNFLSTSEVLMPYKPYVFCVNPKATSNYRKSYIGMEKTDSTDAYLIADFGRVGRTKKLEPWRGGQFISLKRLTRHRMHLSECITREKTYMVSNLYLKFSELQLLEGDDKPFGSLYGATSSAVLTEFLSPQEIIDMPEEELLTFLAGKSRNRISDLSKTSELLRKAARDSYRLDKCMYEPLSISLASSFNCIHAYQKEIKLIEQAIEKCINGMNPNALLILQSIPGIGPIWASGILSEIGDITVFHSSDALAKYAGLYWPKGDSGDFTSEDNKMSKAGNPYLRCYLGEAANSVRKHIPEYADFYARKYAEVTKHQHKRALALTSRKLVRLVFGLLVKNQLYTGEKLDTEYNIESN

SEQ ID NO: 249552 - protein, 546 aa, unidentified
MAVSTKKSKNRRSKSRTTSRPKKRFIGKPNGKIQSRVQQAGPQHFGVISVDCAKRRSKWMLTDFYGKVIIEPTIVEHNAGALRAMTGYVRTVCNDNDIRDSIVAIEMTGIYHRLPQRAFRKAGFDTRVVHPFASSHYRRPLHPDAKTDDNDLEAIFHAAINGYGLATLEVDPVYQQLQAASRHRHNLVKQRGRLQVQIRRLMHLTMPGYADLFVDDKLFNRSIALPVAEPFSSAMAIGALGVDGIAKHLKKNKIRFQLRTIEKIVAWSKTAADASELATMQTRQWKQLNELRLMLSQQVLGVEGELAGLLAKTPYILLLSVTGINVVSAARLAGEAGPIKHYASGRAINGRAGLYPSRYQSDEVDHADGSLVRQANRKLRGAAMLVAENLIKCHPYYRGLSALWSQQKVDPRDRRCRVANRAMRMVFQLVSGRQLWRGKGVDREYLLFKLREFHRGHQTPLTECIADLQEAFKWLPKSSYASEAKPLVELTRRKRRGVVSIGELLVPLLIRLGVGEEAEEIETATETGVASESPLESNTSEARDSD

SEQ ID NO: 249553 - protein, 412 aa, unidentified
MTAIDQFAAHVGLDWADKKHDVCVQFKNGERTFHVINHTPESLDTWLNELHQKVKGRIAIALELKKGPVVYALQKYPFVTVFPVHALSLARYRQTFSPSGAKDDPQDAELALDLMLRYPQKIKPIEPDNADIRLLLQLVEQRRLLVEDKRRFVNRLINTLKQYYPQPLEWFSHRDSALFCELIIRWPSLQQLKRARSDTVRHFMNARGGPAVAYTEQRVTSIANAIPLTTDKSVIEANALMATALASQIKLVGELIRTYDERIESLFDTLPDAELFKSLPGMGPCMAPRMLAALGDNRDRFNSAEEIQNYTGIAPVTERSGQKSWVHWRWQCAKFVRQTFVEWAAKTVNSSYWAKLYYQGLREKGKSHQSAIRALAFKWIRIIYRCWKTRTHYDEAKYLLALEARKSPLLMP

SEQ ID NO: 249554 - protein, 401 aa, unidentified
MTATHNTNCTAACAPVLYLALDLGAGNWKLAFTVGLGQKPRLKTITARSTLCLVLEIKAAKRRFGLPEDAPVLCCYEAGRDGFWLHRFLLAHGVQNQVVDSSSIEVNRRQRRAKSDRLDAVKLVEMLIRWHNGEHKVWSVVHAPSVEQEDQRQLHREMSKLKAERTAQSNSIKGLLAGLGLCLIVDETLPAQLENVRQWDGAKLPLQLRQRLLREFERWQLIDRKIHELEAERMAKIRDDQTPHVEKVRRLLNLKGIGDNGAWLLVYEFFAWRTFKNRRELGSLAGLTPTPYASGESRREQGISKAGNRRVRWMMTELAWGWLRYQPTSELSQWYKRRFSRGNTRLRKVGIIALARKLLIALWKYLEGGEVPAGAMEVGWDNKPRFRAVKSRRRKEVSQAG

SEQ ID NO: 249555 - protein, 474 aa, unidentified
MKVPTNIMAVGIDPAKQVHQAVALAYPEVILLNCRFENSYEVISSFDEKVMKIAKKNNLKLIYGLEDSGAYGRTIKEVLTSRSREIREINPLKTNRQKDFYGGDKSDEIDAKCIAQILLRSYESLPKIEEDNQVYVSIRGAERFRETLVKMKTQNVNRLHFYLTTTWGGSYKKFFSKLQSKVALSFFSSYPVPQALKEIKVKELSGFLYEASSHRLGKGNPWKLAYKKAKFILSSIKAIKDLPLTLERETKQEIIKELITIVSQLKDSIEAIEKKLEKDLLPQTGQSLTTLKSISTVTASVLLGETLNPDRFSTRDKFARYNGTAPKEISSGGKIKHRTRKGCNRRLKRTIRHISVTAIVREPLTKNYYQGCFSRGLSKSQALKRVDRKISDIVYKMMRTKQPYDRELAIRNIIERRQRTNNLGRARWQSRNLRIKKSSDEIESLVLPPVDILSELRKFEREEKNQSVSKKILT

SEQ ID NO: 249556 - protein, 407 aa, unidentified
MRLFVGDDWSEADHDVELMDATGRTLAKARLAEGVAGMARLHALVGDHLGEDDGDVEVVVGIETDHGPWVQALLAAGYTVFAVNPLQAARYRDRLGVSGAKSDAADAHMLADMVRTDSHQLRAVAGDSPRAQAIKVVARAHKTLIWERTRHGQRLRHALREYFPGALEAFEDLHALDTLELLAKAPDPASAARLSISQISAALKRARRRKIAEKAGRIQAALRAEYLGQPEIVVAAYAATVRSTIAILAVLNEQIASMQKQVETHFGQHPAAEIILSQPGLGPILGARVLAEFGDAEDRYASAKARKNYAGTSPITRASGKKKVVLARPVHNDRLIDALDSQAFTALTASPGARAYYDHIRAREVSHRAALRQLANRLVGILHGCLKTGTLYDETTAWSHHAETVAA

SEQ ID NO: 249557 - protein, 343 aa, unidentified
MYYIGLDVHKRTISYCVKDATGHVHREGKIGSTRRELDGWIKTLPGPRMMAMEATIFSGWIYDHLLPHAEKVKVAHPLMLRAIAAAKKKNDRIDAAKIADCLRCDFLPECHMASTEIRDRRRTLRYRNLVIKQMVQMKNRVSGLLMETGVDYNKRRLHKVGYFADLMSSNEEVNQSIRPLLRLSRATIVRSQRLDYALVSSLERDPLLAERLKRLRTVPGVGPITALTWALEIGDFSRFESIKEAVSYCGLCGDERSSADKVLRMPLSKQRNKYIQRTPIEAAKLATRYCHELAVIYEKERQRGNANRATLAVARKLVAYLLAVERRKQDFVPAEEFRSTAVA

SEQ ID NO: 249558 - protein, 347 aa, unidentified
MYKANRRDGLCERSLTMFPVGIDVSKNTLDLCILYDGIKGRIKTRNIQNNRHSVENILRWLRLQHCGPEDVHVVMEATGVYHERLATELHDAGFRVSLANPHRSREFARGMGIMTKTDKVDAYMLACYAFLKKPHHWEPPSPEIRYLAALLRRRDVLLGDALREENRLEKYLSTDTPADIISSCRRMAQLLREEVSNIERQIKAHIKASPALRRDYTLLNSIKSVGPQLGMHMLVELRSHNFASAEQAAAFLGVVPIEKRSGTSVRSRPRMSKIGPPQLRARLYMSALCGKIYNKRMRNIYDEMCLRGKPKMVAIGALMRKLVHWCYGVLKTGTVFNDEGLKQVLST

SEQ ID NO: 249559 - protein, 334 aa, unidentified
MQNITLIGIDLGKHSFHIHCQDKSGKALLRKKFTRTKLMQFLATCPPSVVVMEACAGAHFMARRISDFGHETKLISPQFVRPFVKSNKNDFVDAEAICEAASRPSMRFVQPRTEPLQAMRALHRVRESLIRDKVKTTNQIHGFLLEFGISLPTGDAVIKRLSLVLAEHEIPEYLSRLLVRLHTHYLYLVEQIAELESELSQSINADDTAQRIMTIPGVGPITASLLSSQPSDGKQFSCSRDFAASTGLVPRQYSTGGKSTLLGISKRGDKNLRRLLVQCARSFMMRLERQHGKLAEWVREQLNKKHSNVVACALANKLARIAWVITTQQKEYQA

SEQ ID NO: 249560 - protein, 417 aa, unidentified
MELIHPRCAAIDVHKKTVVVAIRIAVSGNRAKSETRTFGTFTQDLLAASDWLEESGVTHVVMESTGSYWRPVYSVLEGRFELIVANAQHVKNVSGRKTDVKDAEWLSDLLAHGLLKASFVPEPALRALRDLTRGRSTLVTQRATLANRIQKLLEEANIKLGSVASDVLGVSGRDMLAQLASGQEDSTALASLARGILRKKTDDLQKALQGRMQPHQRILLRELLKQVESLDASVRTLEKEIDAYIGQQTTSPFEAAVSLLETTPGVGRTSAVIVVSEIGTDMTRFGSSDRLCAWGGAAPGNCQSAGKRLPGGKRHGNKNLMTCLVECAASAVRMKDTYYYALYRRIAPRRGKKRALVAIAHSMLRSFYYMISNGTAFKDLGADHFERANKQRIVNRLVKRLTDFGYEVTPPQETATA

SEQ ID NO: 249561 - protein, 400 aa, unidentified
MISVGIDVSKGKSTVCILKPYGEIVSKPFNITHTQKDLSELSSMLFRLNDEVKIVMEATGIYHLPVLTYLQEKGFFVSVINPYLMKSYRNESLRKAKTDKIDSRIIANYGIDHWFKMKEFQTSGEIYEELKLLGQQYRHYMKLHLLSLAELTHLLDLTMPGIKNLLASWNETNRKDKRSDFVERFWHYDVITSMSEQEFTEEYILWAKEKKYVPSQEKAKVIYTLAQESIPTLPSETSSFKMLVTEAVRGLKEVDANLGLILSRMQEIAKTLPEYSVVREMGGVGNTLAPKLIAEIGDVRRFRNGKALVAFAGIDPPPYESGQFVGCNRKISKRGSASLRKVGYETMRSLKMRSRPEDPVYRYVVKKESEGKSKKSAKIAGLNKFLRIYYARVTELYKNI

SEQ ID NO: 249562 - protein, 338 aa, unidentified
MKTDQTAQTYALFVGVDIAATTATASILRPGAQAQRSFTIDQTPEGYTSLLHKLQATGHASCHVLVVMEATGSYWISLATRLVHEGFAVSVINPAQAHHFAKALLKRAKTDAIDAQTLAQLAMVLQPEPWTPPPQIYYALQQRLAQRDDLLNLRQQVRNQLHALVQHPEVIPEVRARMDRLLATFEAQLTEVEREIAAALTQDPAWAAAATRLQSIKGVGWVTAAWTLVTTLNFTSCDTVDSLTAYAGLAPMPRQSGSSVWHRPSIGHTGNGRLRTAFYMATLSAAQPNPVIKAFYTRLREVGKPEKVARCAAARKLLHIAWAVVKKDQPFDPNYALG

SEQ ID NO: 249563 - protein, 369 aa, unidentified
MKDYSEVFVAFDVAKLKNAVAIAQDGRDGEVRYLGEIKSTQAATRKLVAKLAAKHAKLTFCYEAGPTGYSLYRLIKSLGHDCIVVAPSLTPSKPGDRVKTNRRDAVGMARLLRAGELTAVWVPDERHEAMRELVRARAVAQKDLRSKRQQISGSLLRMGYHYPGRKTWGRAHLNWLTSVKLDHLEQRIAFEELMGAMRQAKERSERLEQAIREVIPDWSLAQQVVALQAMRGIDLITAVGVLAEIGDLSRFESPRQLMAYLGLVPSERSTGDRVRRASITKAGNTRARRLLIESAWSYRYPARVSKDKQAKVEAAPRAVREIAWKAQTRLCGRFRSLTRNGKKSTIVATAIARELSAFIWAINREVAAT

SEQ ID NO: 249564 - protein, 344 aa, unidentified
MERYVGMDVSLKETSICVVDGSGEVLFEGTVISEPEAIAGIVQTNAPQAIRIGLETGPTTTWLWHELRALGLPVICIDARHAKAALSMQINKSDRNDAVGLARIMQTGWYRQVRVKSVACHEIRAVLNSRAQLVKIKRDLENQIRGLLKNLGLVIGKAKGSVFARRVEDLLGRHGLLCDAVRPLLDVREKVGREIAALHRQLLQLARCDEQCRRSMTVPGIGPITALAFLTAIDDPGRFPRSRSVGAYVGLTPRRYASGEVDWTGRISKCGDRMLRTYLFEAAGVLLTRVSKWCKLKAWGHRLWKRIGFKKAKTAVARKLAVILHRMWRDRTDFQWTAKEEVAA

SEQ ID NO: 249565 - protein, 369 aa, unidentified
MGEYSELFVAFDVAKKKHAVAIAEGGRRGEIRFVGDIENSPATIERMIKKLADRYKRLHVCFEAGPTGYELYRQILALGHDCMVVAPALIPKRAGDRVKTNRRDAITLARLHRAGELTAVWVPDATHEAIRDLVRAREAAADDLRRKRQQLLSFLLRRGRIYSGGGHWTLAHRRWLAGQAFEHASQQIVFQEGIDTTEDATQRLHRLEQQLAVIVPSWSMAPVVAAYQAMRGASFLVAVIFAAAIGDVRRFDAPRQLMSFLGLVPAESSTGDTVRRKGLTLAGNRRARRALVEAAWTYRYPARVSETLRARIEGLPKPVRDIAWKAQLRLCARYRRLSAAGKKLPVVIAAIAREMAAFLWAIGREIAPV

SEQ ID NO: 249566 - protein, 417 aa, unidentified
MMQYAALVGIDWADSKHDICVFDVTTRQLEASILRHSSKSIDEWATALRRRFGGQPVAICLEQSRGPLIFALMKYDFLTLYPVNPTTLAKYREAFSPSRHKDDASDAAYLVELLLHHREHLRAWQPDSEQTRTLRYLVEHRRRLVDDRTRISNRLTALLKLYFPQVLEWFPDIRTQMVCDFLMRWPALEKLHRVRRETLLKFFRQHHSVRKGTIEKRVDSIKASQPLVTDRAVLNSSIVMCKALVSQMQSTLSAINEFDAEIEAICSVHQDFALFKSLPGAGNIYASRLVVALGSDRGRWHSADEVARFSGIAPVIERSGKSCRVRWRYFCPKFLRQSFHEYAGESVKHSFWARAYYEQQRGKGKSHQAAVRALAFKWIRIIFRCWQTRTVYDEVKYLEGLRRKGSSLLNYAANNPA

SEQ ID NO: 249567 - protein, 409 aa, unidentified
MDVILDRVCGLDVHKDSIKACVRVPGQGKKRDQHITTFGTKTEDILALREWLEQWKVTHVAMESTGEYWKPIYYLLEDRFQVLLVNAAHIKNVPGRKTDAKDGAWIAQLLECGLLARSFVPPPPIREIRDLTRYRKKLIQQRTEEVLRLHGVLQRAGIKLSSVASNIVGVSGRAILNALVEGKKDPAAMAELARGQLRKKIPQLKQALAGRFTNHHGKLVNHMLSHIDYLEEVIADLSTELDALMEPYAAQIALLETIPGVERRTAEVIIGEIGVDMGQFPEDRNLCSWAGVCPGNRRSAGKRKPEKIRKGGRWLKPALTEATWAAVKENQSYLSGQYHRLVPHKGKKKAAVAVSHSMLVCVYHVLKKATAYRDLGSDYFLRRNQEATKRRCLRQLEQMGFGVTLQKLA

SEQ ID NO: 249568 - protein, 340 aa, unidentified
MLYVGLDIHTKHIAVCVLSEAGKVVQRARVRGIEEMLRVLKGLPDRFEVCYEASCGYGHYHDLLQPLAARVLVAHPGQLRLIFRSKSKNDRNDAERLAKLLYLGETPTVHVPSLDVRTWRELINCRSQVIAKRTRAKNALRALLRGAGVVPPRHPDLWTKAGLAWLRQLELPTTSQQLRRDLLLEEVEGLNRQVRRIEQELNRRAQQTPAVARLRSIPGVGIRTAEAVVAFLDDPHRFRHAKAVGSYFGLVPCQDQSGDKNRLGHITREGPAVVRQLVAEATWQAVRHSPTVRAFFERTQRGDPQRKKIAVGATAHYLVRVMWALLKRGTVWQENEARAE

SEQ ID NO: 249569 - protein, 483 aa, unidentified
MKSKPEEKAQKTTNHSTPKPWDEMNRQQRRATMRKIQSADLSLEVVHPNAGGIDIGNESHYVAVPPDRDSQPVRRFGCTTAELQAMAQWLSQSGICTVAMQSTGVYWIAVYDILEKAGLEVYLVNARDTKNLPGHKSDVQESQWLMKLHTYGLLRNSFRPAQEIRTMRTYWRQRNDLVQAAARHIQRMQKVLTQMNVQLANVLSDISGVTGQAIIKAILAGERDPHKLAAFRDVRVKASEEQIAQYLEGHWQEDLLFVLQQEKEGFDFCQKQMAACDEQLKQYLQQQEDRSQGAPLPKEKRKSRLKKKKGNMPQFELRAELFRMNGTDLTQIDGIDVLTAATVLSEAGSDMSKWADEAHFVSWLRLCPGNRISGERIIGKRRLPTNNRINVALKMAASSLRTSNTYLGAQFRRLRTRLGAPIAIKAMAAKLARLVYRMLRYGMKYVDQGAAFYELKHRELQVQHLKSKAAKLGYKVTPIPAAA

SEQ ID NO: 249570 - protein, 370 aa, unidentified
MSQSSTLFIGMDVHKETIAVAYVAQEHGAEVIYLGTIGTRQCDIDHLVRKMQSKAKHLIFVYEAGPCGYWLYRYLTKKGYDCWVVAPSLIPKKSGDRVKTNRRDAVQLARLARSGDLTLVSVPKVEDEAIRDLTRAREDTISDLKDAKFRLKAFLLRQDIRYAGRANWGPAHLRWLSEVVCPTAAQQIVFQEYVRAITEYTERLQRLEQELQAQVQVWRLHPVVEALQALRGVQFTVAVTMVAEIGDLTRFEHPRELMKFLGLTPSEYSTGDHRRQGAITKAGNTHARRALIEGAWAYRYPAKVSRHLQLRLEKQPKVIQDISWKAQVRLWRRYRRLGARGKHANVVTVAIARELAGFLWAIAKQVSVTP

SEQ ID NO: 249571 - protein, 395 aa, unidentified
MTGVIIGVDPHKLSATIEVVDHHERLLGSGRFTTDQAGYSAMRRYVAAWPDRVWAVEGSNGAGRPLAQRLLEDGERVVDVPAKLSARARLFDTGHNRKTDARDAHSIAAVAVRTKTLRVLRVDGELEALRMLADRREELTRSRVQTVNRLQRLLSELLPGQAKRDITTAQAKALLATVRPRDIAGKTRRRIAADELHELMAIEVKMKKSTAELKTLVLARRSRLMDLHGVGPVVAARTLADVGDVARFADRNRFASWTGTAPLDASSGEQIRHRLSRAGNRRMNHMIHIAAISQIRLDTPGRAYYRRKLAAGKTPLEALRCLKRRISDAIYRQLLADAQTVEGADPGGHCGASLDSSAVDSHPPHRHFGSATPGPATPTLRPTTTTRKRQLSPPA

SEQ ID NO: 249572 - protein, 366 aa, unidentified
MQKISTVPMSGSRIFKGRQLTIGLDLGDRWSRYCVLNEVGDIVLERKLTTTPEAMKQVYGRMPRSRIALETGAHSPWVSRLLTTLGHEVIVAHARNVRLIGESRRKDDRIDARTLARLARVDPQLLSPVQHRSAQAQIHLMVIRARAELVRARTALVNSARGLVKSYGERLGKCGTQQVDQELARGLSPELREALQPLLREVESLNAHIKEYDRRIEKMAREKYPQVELLKQVKGVGDLIALTYVLTIDDAHRFRKSREVGCFVGLQPGRRNSGQSEPQMHISKEGDRYLRTLLVQGAHYILGPFGEDSDLRRWGLKLAQRGGKNAKKRAVVAVARKLAVLLHRLWLGAEVYEPLHNSQRPVPAVA

SEQ ID NO: 249573 - protein, 352 aa, unidentified
MEMIALDCHKRYSVASVQTPEGHRLAECRIEHRRGSIRAFLAPYSPGCPVAVETIGNWYWIVDEIEQAGKVPRLVHARKAKLMLGAINKTDKLDVRGLNRLQQAGTLPTVWIPPASLRDQRELPRTRMVFSTARTRLKNRIHSVLDKYGLQDQLAGISDLFAAGVRARLKKSLQQLPLQAAYTSDLLLEQLDQVQETIEALEQRMGEVFQPTEELQRLDTLPGVGLILGVVLLLEIGDIQRFRCPAHLASYAGTVPRVHSSGGKTYYGRTRPDVNHYLKWAYTEAANAVAVHREHLAQRHVGQLYNRLRSRRGHASAVGAVARHLAEATYWMLTKREPYRERGIPEVSPQGV

SEQ ID NO: 249574 - protein, 342 aa, unidentified
MQVTTIGLDIAKNVFQVHGIDASEKVVVRKQLRRSQVLAFFKALPRCLVGMEACATAHYWARELTMLGHRVRLMPAKDVKAYVKRNKNDAADAEAICEAVRRPTMRFVQVKSAEQQGRLMQHRTRDLLMRQRTQVINALRAHLGELGIAAAQGREGLKELLKIIASEEDARLPVDAHTSLVVLAMQLQAVQTMIGSIEKRIMVQHRSSEASKRLETIPGIGVIGATAIAAMVTDPKVFRSGRDFAAWIGIVPRQDSTGGKQKLGPISKQGDRYLRRILVVGAHAVLKQARRQPEKYPWLTQLLARKPFKVVAVALANKMARIAWALLAKGGTYRAPKLAAAA

SEQ ID NO: 249575 - protein, 449 aa, unidentified
MPKQRSRVASLPVIEPNAAGIDVGATEIFVAVPADRDPEPVRCFPTFTVDLERLADWLQQCQVRTVAMESTGVYWIPLFQILEKRKFDVRLVNAHHVKNVPGRKTDVEDCQWIQHLHSVGLLRGSFRPDDEICAMRSLWRHRDNLIQMATLHLQHMQKALDQMNLQIHHVISDLAGTTGLAIMDAILAGERDPHKLARLRNRHIQASEETITKSLVGDYREEHLFTLCQSLKSYRHYQELIQEVDLQVKQMLQKLPSRIAAEQKPPKGGKIRRTPWRNEPPQLRNDLYRAYGVDLTEVPGINSLTAQMLLTEIGPDWSRFPTAAAFCSWLRLCPNPKISGGQVLSSRTQPTKNRAALALRMATQGLHRSETFLGDYFRRMKARMGAPKAMTATAHKLARIIYHMVTTQQEYDATVFQQQEQRRRLQKSARLHAQARELGFQLVPIGVVP

SEQ ID NO: 249576 - protein, 343 aa, unidentified
MEHYVGLDVSLKQTSICVVNQVGSVVREGVVDSEPEAIAAFVRSKAPGALRVGLETGPTTTWLWTELKQLGLPVICIDARHARAVLKMQVNKSDRNDAAGIARIMQTGWFKEVRVKDPDSHSVRALLASRALLVKIKRDVENQIRGLLKNVGLVIGRAKFNVFAVRAEELIEDRPELIAVVGPLLKARQAIEQQTDDLDRKVLKLARYDAQVRRFMTVPGIGSITALCFKATIDDPTRFKRSRSVGAYVGLTTRRHASGEIDWTGRISKCGDAMLRSYLFEAAGVLLTRVPKWSALKAWGMRLAKRNGLRKATVAVARKLAVILHRMWIDRTEFNWSKEEVAA

SEQ ID NO: 249577 - protein, 314 aa, unidentified
MNNVSKVFVGVDVSKKYLDININPLNRAMKIANDEKGIKRLSKELGAYLVGQVVCEASGGYEKMMLKGLSDKGYKTWCVDPRRIKAFIASEGIKAKTDAIDAKMIALFASQKSCAYDQIYKTESTEELSALVKQRDTLVEFISIESKRMLQASNATVKKIIRKHISFMTKQVKQLENVINEFVQTDVALEKKVALAESVPGIGKTTATALVASVPELGMVTHKEIAAIVGVAPYTRQSGTFRGRAMISGGRSKPRQALFMAALVASRHNPKLKQFYNRLIQAGKKPKVAVIAVIRKLIIILNAMFRKGELWKIA

SEQ ID NO: 249578 - protein, 338 aa, unidentified
MGTYVGIDLHSSNNYIGIMDQDHKRLFGRRLPNSLDKILMVLEPFKSDLKGVVVESTYNWYWLVDGLQEHGYRVHLANPSAIKQYEGIKHTDDKWDSFWLAHMKHLNILPEGYIYPKEQRPVRDLLRRRLFFVRHRTANILSLQSTITRNLGIKMSSNEIKKLDMDDACDLFDSSNLVFMAQNNISTIKHLRKIIKGIEKEVKTQVQLRKEFVMLTTIPGIGIILGLTIMLEVGDISRFYKVGNYSSYCRCVGSKRLSNGKKKGENNKKNGNKYLAWAYVEAAHFAKRYIPKAQRFYQQKMAKANGAVATKALANKLARASYFIMRDQVPFDEDMLFR

SEQ ID NO: 249579 - protein, 454 aa, unidentified
MRKPQMVPDEDHEVIYERVAAVDVAKASGVVCLRTPDPARPGRFVNRIWDNVPAMRAQIAELGAELLRCRVQMVTLESTSDYWRIWYYVLESIGLAVQLVSASQAKNLKGRPKTDKLDAMWLARLTQWGMLRPSFVPPAAIRRVRDFTRARQDLVAERTRCLQRVEKLLEDAMIKVTSVAKDGMKAKSVVAMVAALAAGQRDPRVLADLAKGPLRAKRDQLAQALDGMFDSHHGMIARSLLDQVAFLDRQITLMEDQAIAALAGVPESWGVDADGQTGPQAGTSPDSPVLAAAHRLAEIPGISLWLAIVIIAEIGLNMTCFPTPAHLVSWMGLCRSAASSGTRHGKGKPKKGNSYARAAAGQAAIGAARTATFLGERYSRIARRRGKAIAQAAVARSIMIIAWHLLSDPAARYRDLGPDWHARRTSRDKKIRTHIQGLNALGVTVAITGDEHAA

SEQ ID NO: 249580 - protein, 361 aa, unidentified
MSMVPCYVGLDYHDDSIRVCTIDEDGSVLMNRDVPNNPTLVMLAVARTSDQVLGVAIEACCGAADFAARLQTLSGWPIKLAHAGAVQCLKKTRDKSDFGDAWHLADLIRVKFLPEVWLADEQTRQLRRLVSHRNGLVAERKNVKLRIRALLREERIISTGRAWTKPWMEWLRVCQMRAESRWVLDQEILRLSQLDEAIQRVEQRFAEATQGDAVVEKLLEEDQVGMVTAVGLRAVIGRFDRFRRGKQLSSYCGITPCNASSGKRQADAGLTNRGNEELRTMLIQLAKRLPRSGGHWRELHQRLSRTKPANVVSAAIANRWLRQLFHKMVTVPKAQAERDLGSGSANGAAPVAPHPRLDLGS

SEQ ID NO: 249581 - protein, 405 aa, unidentified
MNAVGIDVSKGRSTVTIRQPGDVVVLPPRDFRHTQSSINELIATIMELDGETKVCMEHTGRYYEPVASWLSSAGIFVSAVNPCLIKDFGDESLRAPKTDKADAKKIARFALDRWTKLRQYSRMDELRNQLKTMNRQFGFYMDQKTAMKNNLIALLDQTFPGANDFFDSPARSDGSQKWVDFVYTYWHVDCVRSKSLDAFTEHYRNWCKRKEYNFSAEKAESIYRSASDLIAVFPKDDNTKMLIRQAVAMLNTASETVETLRAKMNHAASQLPEYPVVMQMNGVGPTLGPQLIAEIGDVTRFEHRGSLTAFAGVDPRPNESGDYKRQSNPTTKKGSPYLRKTLFQIMDGLVKRSPVDDPVYAFMDKKRAEGKPYHVYMTAGANKFLRIYYGRVNAFLAPAKVSEET

SEQ ID NO: 249582 - protein, 419 aa, unidentified
MSFKIFRKNCCGLDVHKTWIYACIGITDTNGRTDYKQTRFSSFSKGLKELSDWLAKYHCTEVCMESTGKYWIPVFNVLEKNNIFVTLSHPKYTKPQKGNKTDRKDAKWICDLYMCGMVKPSFIPPADIRQLRDLVRYRFKLTCMITGEKNRAHNCLTVSNLKLDDVFSDIFGKSSRSITEQILQHPGEVFDVAPFVDSRCKTPIEEIQAAVDGAISHEQAVKLRQCLKHIDELEMHKAEIEREIFRLSQKYESVLDLIRTIPGFDKNPLTAIQVLSEIGADMSVFPTAKNLVSWAGCCPRNDQSSRKIKSTRISRAGSYFKPVLVQIANALIKSKKHPEFTTRYRRIKARRGHKKAIIAICRMILTAIWHILTDLKPYTPEGFLESRPVNKEKVLTISQALNLIKQRGYIIKDDVGPVT

SEQ ID NO: 249583 - protein, 402 aa, unidentified
MEKVPTRFIGLDIHKEYFVAIGVNAMREVVFGPEKVSVYQLDDWIFRHLTPSDAVVLEMTANAYSFYDALLPHVHSIIAVHPQHVSLVTNAPVKTDKKAALALAQLHAAGLLTGVWIPPQKVRDLRALVAQREKLVRLSTMAKNRLHSVLHRNQLVLPVKPFATEQRAWWESLPLSPTELFRLRSDLDTLAFAQKQVEQIEAFLKKECTQDNRIPLMVQLPGVAMLTAITILAAIGDITRFPSAKELVGYAGLGTRVHNSGMTHTSGRITKTGRKDLRQAMVNAANNAVQNHKHWKKELERMEPHLGRSKAIVAIARKLLVAVWHVLTKESADRFADPRDVACSFFRFAYKVGVKNLPDGQSALAFTRERLDRLGIGKDLQVIPWGSKRYKLPPSKLLPVKE

SEQ ID NO: 249584 - protein, 344 aa, unidentified
MPHYVGLDVSQKTTAICVVVEQGRRLWRGACVTDPGAISARVLRHAGVVDVKVGVETGSMTPWLVHGLRSAGLDVECLDARRVKAALQMRLNKTDENDAEGLAQVMRTGWYRPVHVKSFDAHRARALLGARAQLVGMTTRLSNMIRGVLKTFGLLPGAGRGLRFDRRVEALLEGAPEIGLIVRPLLATWRQLREQIAVFDKAVQQRVRADPICRLLMTVPGIGALSSLVYVSTVEDPGRFSRSRAVGAHLGLTPRRYQSGETDRSGHISRCGDGLARTLMYEAAVVILRRVKRSLHLKDWAAAIEQRSGPGKARVALARKLSVILHSVWRSGEPFRWAPQTIAA

SEQ ID NO: 249585 - protein, 377 aa, unidentified
MEKGITYVAMDTHKKQHRVALVYPNDELIIEFSVKNTPTEIRKMVRKIKRNAPGKIKFCYEAGVCGFTLQRRIEALGCTCSVIALSLIPRKPGERKKTDRRDAKKLLGLSMADMLTEVYPPDEQQEAARELTRCRGAAQENLKRIRHQLQKMLVRHGYVFIDGQHWTQKHLRWLGAVEFDQPLLQEVFDCYFTEMRHCLQRVKTLDRELEKLAQSEDYREVVGILRCFYGIETLTAITIIAEIFDFGRFASARDFMSYLGLTPSESSSGEKEHKGSITKTGNKRARRLLTEAAWHHRHSYGVSTALRKRREGQPQWAIDIADRAGLRLRKRYRRLVHRGKLPCKVTTAVARELAGFIWSVLVEYEARKKRKVKRKVA

SEQ ID NO: 249586 - protein, 430 aa, unidentified
MKKKNHSNEKLEAITFKTLIVGVDIAKHNQWARFVDCRGIEHNKAIKFENNRNGFNTILTRIYEICKNEDFNKVIMGMEPTGHYWKAFANFLLKQAKITVVLVNPYHTKKAKELDDNSQTKSDKKDALTIARLVKDGRYFETYLPHDVYAELRGLTTTRHSMNKRKKSIINTITAVLDEYFPEFVSVFKHPFKGKAAMHLLKVCPIPKFILELGEEGVLEEIKKAVKKTVGRKKAAQLVETAKDSIGVDYGEYAARFKIQQLMEELELITSQLEALEAEMAETLKETEESEYLLSITGMGVVSLATCLGELGNPLRFEDARQMSRLAGYNLIEDSSGKNKSGTCISKRGRKNLRSVLYQISLIMVANNKEMRQLYDYLKTREDNPLKKMQALVVVSKKVLTLIFTLSKKKAYYEPELVFGSYRKSQLQAA

SEQ ID NO: 249587 - protein, 343 aa, unidentified
MRTVSTVGLDIAKSVFQVHCVDAADQVVIRRQLKRRYVLAFFQKLPPCLIGIEACASSHYWSRELQPLGHTVRLMPAAYVKPYVKRQKNDATDAEAICEAVTRANMRFVETKTPEQQSCLMLHRTRHLLIRQQTAVINAVRAHLAEFGIVAPLGRLGVEALLGVVADPNDKRVPEVARACLVALGAQLRVLKKQILEFDRMINAWHQSSETSKRLDEIPGVGPALATALVASVADPRAFRSGRDFSAWIGLVPRQHSSGGKDKLGSISKRGDRYLRGLFTAGALAVIRYAKIHGTKHRPWLAALLARRPTKVAAIALANKLARMAWAMMAKRESYKEPVALAA

SEQ ID NO: 249588 - protein, 318 aa, unidentified
MAIQAVTHDYGVDVSKGTLQMAAEQGPESIPNELKSIRRWLKSVPAGSCFAVEATGTYHVLFVQQTHQLGHTVYLIDGFRLNRYRDSIGGRAKNDVLDAVLLRRYLQREKADLRPWEPAPKGYTELMRLLHRRERLVTARVALEQSLGDMPESRSTIQALLRQLRRLADRLERRIVATVRTRGWGEDMRRCQQIEGIGPLTSAALATVFQRGQFRNADAFIAFLGLDVRVRDSGKQRGKRKLTKKGDSELRRLLYNAAMSASSTPQWHPYYERHLARGLTKIQALVALGRKLARVAFALMQNQSDYQPKTPQEACIAA

SEQ ID NO: 249589 - protein, 355 aa, unidentified
MIIIGCDYHPGFQQIAFVDTETGDYGEQRLEHSERAERFYRDLADQGKKVRVGMEASGHARWFERLLVELTFELWIGDASEIRAKRVRKQKTDRQDAQHILQLLMENRFPKIWVPSGENRDLRQLLWHRHRMVQARTRIMNQLQAVALNEGLRCKKRLWRDAGREQLESFRLSPWASRRRRDLLELLDRLTPTIAELTAAIEQEVEKCPEAQRLQTHPGVGALTALAFVLIIGRADRFQCGKQIASYLGLVPLEDSSGQRRRLGHITKQGNSLLRFLLVEAAQVTVRSDQEWRSKYFHLAMRRGRKIAKVAMARRLAVRLYWMWRKGWNYGQLKSSVRTRESPEIAMVCSRTPRN

SEQ ID NO: 249590 - protein, 357 aa, unidentified
MKYIGCDFHPSFQQIAMLDKETGEMVERRLLHTEEARAFYQELQGEVVVGVEASGNMDWFESLLAHCPHQLWIGDAAAIARQEGRKQKHDRRAAALILKLMVENRFPRIWVPTVGERDLRQLLIHRQHLVRMRTRIKNQLQHIALNQGWQKKRKLWSQAGLELLRSLKLEPWTHQRRDTLLEMLEELEEKIRPLDQAVGKEAEQCEAARRLATHPGVGPVISLATVLTMGDVGRFADSRSWVSYLGLNPSEQSSGQRRRLGSISKQGNPFLRYLLVEGATSAARGDKDLGRVYTRLKARKHHGVAKVAVARKLAVRLYWMARTKKSYPEVVRTQGSQSLPVAEVKAVSLSRPPASHP

SEQ ID NO: 249591 - protein, 392 aa, unidentified
MIYVGIDVAKDKHDCFISNSDDEVLFKAFTISNNREGFETLFQRIQSVSDDLTKVKVGLEATGHYSYNLLGFLLDKGLPTYVINPLHTNLYRKSLSLRKTKTDKVDSRTIATMLMSDMNLKSYSDTSYHNEELKSLTRYRFNKVKERAKLKSSVSRLVCILFPELEKLVPTLHMASVYDLLSEFPSADAVASAHLTRLSNLLSESSKGRYGKDTAVMFREAARSSIGSHMPAKSLELKHTIKLIQELTAEIDDIETAVKRIMDEEIQSPILTIPGISYRMGAMIIAEIGDFNRFDSPDKILAYSGMSPSTYQSGQLDNCYAHMEKRGSRYLRYALYNATKYVCHWDKSFGAYLEKKRAEGKHYNVALSHATKKLVRLIYAMEKSGQPYSKAA

SEQ ID NO: 249592 - protein, 401 aa, unidentified
MVSVGIDVSKDRSTVCILKPYGEVVASPHEINHVETELADLILLLKSFESEVKIVMEATGAYHFPVLNRMKEEGLFVSVINPLIMKKYAGINLRKGKTDKIDSVRIANYGLDNWFRLVDFKASDEVYEELKQLGRQYSHYVKMRIQSKLALDNLLQRTMPGIKTLLCGKRSDEPTKDKLSDFAEEYWHYDNIKNKEEADFVNEYANWAKRRGYHRSETKAKKIYAMAKDGIPVLSSNSPSTKMLMLEAVKVLREINKTLGIILTRMQELANSLPEYSVVRSMNGVGAVLAPRLIAEIGDVRRFSNASSLIAYAGIDSPPYESGSFIGTKRRISKRGSSLLRKTGYEVMKCVKTAKPTEDNAVYLFMLKKEAEGKPKNVAKIAALNKFLRIYYARVKEVYSA

SEQ ID NO: 249593 - protein, 346 aa, unidentified
MHSENIAAYIGLDVHKETLAVAIAAPERLGEVRYYGTINNEAQAVRRLFQKLQGLYGNILSCYEAGPCGFGLYHQLTAMNIKCQVIAPSRIPKSPTDRIKNDHRDAISLARLLRAGELTPVWIPDLTHEAMRDLIRARAAAKRDSRVARQRILSMLLRTDKRYAGKHWTGKHRTWLANQSFSQPSQQIAFQHYCQSLEQIEDRILQLDQKISRLLPEWSLCNLVCQLQALKGVGQLIAITLVAELGDFSRFSNPKQLMAFLGLVPGEYSSGNSIRPRGITKVGNSELRRLLYEAAWSYRTPAKVGAWLIYYRPDSVTQYSKDIAWKAQQRLCSRYRSLTAKGKNHK

SEQ ID NO: 249594 - protein, 431 aa, unidentified
MMRSIGLDCHLEFIEVAILDAAGAHVSAGRIESSGEAIRLFAEGLGADDRVALESSANAAAIAALIRPHVAEVVIANSRRLAQISQARAKTDRLDARTLAKLLRAGALQEVWAPDARTRARRRLCSRRAALVRARTRAKNEAHAVLARNLKGRPPATDLFGRAGRRWLAALELPADERLTVDACLRQVDFLSAEIAELERLASADLIDDEDAHRLLTIPGVGPQATLALLAAIGDVSRFGSARQLVAYLGLDPRVRQSGSGEARHGRISKQGPAQARAALVEAAQQAMRQPGPLRAFGARIRARRGYQVAAVAVARKLACLAWQLLTRGEDYAFERPQLTQRKLRRLELAAGAPRRRGKANGAPSKDPQREAAEREAAERAEAAYRRLVADWKASGARSARAGAGAPRGRASRGPSKGPAARQATAPDPAL

SEQ ID NO: 249595 - protein, 385 aa, unidentified
MPAVDDLSRSLTALAQDSTLMTVIELSKSSWLVAGMVPGIERHPVKKLDPDPVALLNLVSRWRCEAERKERRIERVVLAFEAGRDGFWLARWLRERGIEAYVIHSTSVAVTREHRRAKTDRLDTAMLLRVFLGWLRGERGHCRMVAIPTYEEEDAKRPSRERESLVGERTRIINRMKGALARLGIRGFKPELRRAPEKLSALLTPEGELLPSNLLEEMRREMTRLSLIREQIVAIEQARLVRLQQAPTSRPNAMTTLLARVIGVGLETADMLVQEVLNRNLRDRRAVARYAGLTGSPDESGSRRREKGLAKAGNARVRRGLIQLAWRFLMFQKDSGLAQWYRARTGQGARKTTMIVALARKLLIALWRMVTVGEVPTGVVLRPGM

SEQ ID NO: 249596 - protein, 411 aa, unidentified
MDVYCGIDWAEDHHDIAVVDRDGKLVARRRISDDPAGLAGLLDLLAEHGDSADDPVPVAIETPRGLLVACLRATGRPVYPVNPMAVARYRDRHSVTGKKSDHGDSVVLANVLRTDMGMHRPLAADSELAQAIAVLARAQQDAVWDRTTAHNKLRSHLREYFPGFLAAFAAARGGITRPEARAILAAAPTPAAAAALTLAQLRSLLKKAGRSRGIDTEATRLRDAFRIPQMRQLPLIEQAMGQQTLALLRQLDAACASADDLEQAAAASFNQHPDAGIITSFPGLGPLTGARVLAEIGDDRSRFQDAKGLKAYAGAAPITRASGKTKSVTRRKVKNNRLAAVGYTWAFSAISASPGARAHYDRRRDAGDKHAGALRNLFGRLTGCLHHCLITGQHYDEATAFCATTKQPAAA

SEQ ID NO: 249597 - protein, 346 aa, unidentified
MKCKVIGIDLAKRVFQACALSDTLQPLFNRSITRKKLAATVAQWPSTLIAMEACAGAHYWGRVFEGMGHRVMLIPPQHVKAFTRTHKSDVHDALAIAEASLRPRLHAVPIKTVDQQDAQLLNRLRQRLIQQRTRTLNQIRGFAGEYGVIFPMSRQQCLLQLPLALEDAENSLSFIAREQLALLRDEVIEITTKLETLQQQQRAKAEQDPAYARLLAIPGFGPIVTAGFLGSVGNGHQFQRGRDCSAWVGLVPKQDGTGGKIRLLGITKNGDRHLRYLLVHAARSIIRWIDKRDDAMSAWLKPLIERRGTNRATVAFANKLARIAWNVVAKNESFEMNKAFVPLQKT

SEQ ID NO: 249598 - protein, 368 aa, unidentified
MVTIARIGIDTSKGSFQLHGVDAEEQVVLRKTLRRKQFLEYLAKQEVGEIGLEACGASHHWARALGQLGHRVVLVPPQYVKGYVARGKNDKNDAEAICEAMSRRRVRERLVPVKTLEQSAGQMMMKVRSSLIERRTQLTNSIRGHAAEFGLVAAKGMDKIGPLLERIAVDESLPARAREMFAMLGEDYAELAARIARIDKRLLAFQRDNELARRLMEVPTIGPIGACLWVTKVVDPHAFRSGRSCAAWLGLTPKDRSTAGKQRLGGITRAGDESLRATLVLGATAYLRHVRSGRIAATPWLAGMLARKPPKLVAVALANKTARIAWKLMTSGERYDPAHQPTREGLDASRYGGRRAEPLAAVAGEAAI

SEQ ID NO: 249599 - protein, 408 aa, unidentified
MNPLFVGIDVSSKNNVAYLMKPDGSKHSSFSVQNNLGGTKLLSERIVSALGSMQLERVVIGLEATSIYGDSLVYALREDGRLGRFQRKIHVLNPKQVRKFKEAYSDLPKNDWVDAFVIADHLRFGRINREVYMDDYRYKALQTLTRARFDVIQNLTREKQRFANYLFLKCSGMAQDKDIQNTSATTIALMEHFETVDDLANADLEELTAFITETGRGKFADPDATAKAVRAAAKGSYRLPKTVNDTVNQAMAVSIASMRALKGQVKVLDKAIEQQFEIIPNTLTSIPGIGKVYSAGIIAEIGDIHRFDSQASVAKYAGLVWNRSQSGDFEAEHSRMIKSGNRYLRYYLLEAANSVRRCDSEFRRYYDLKFKEVNKYQHKRALALTARKLVRLVFRLLKDNRLYIPPEG

SEQ ID NO: 249600 - protein, 420 aa, unidentified
MTSQNSIPADAVLVAIDIAKVRNEVLIEAPGHKRRRRLSVLNTRAEHDHLIEILQSYGRSVVCAFEATGNYHRPIAWRLVEAGFETRLVSSLALARTREALHNSWDKNDPKDAQVILHMLRIHSTQVYHDPLRAGINDVQELSKTHEAIANAKTEIQHRILTHYLPLYFPEIERFRGNSRSDWFFAFLDAFPTPSSITILTKEKFVEAAWDVVGRKVSKSQILMDIYETARTSIGLPLPLDAPAIRMFRMVVAEARSLIRQRNEIEAQADDLLRNSRDYQILRQIPGIGPINALTIIAEAGDLRRFHHHRQFLKFCGLDLSTQQSGQYRGQTRLSKFGNARLRRTLWIAGQVAIRQRENGFRHKFERYIARDRDNPDLRRKAMTAITAKMARVVHAVVKSGSDYRPFVEGRVPGGRTSVS

SEQ ID NO: 249601 - protein, 351 aa, unidentified
MNTQQTAYPKLYIGIDIHKRSWKVHCATDLFAGKSFSMSPDPKQLHSYVSKHFKEYEVTVAYEAGCCGYHAHRCFESYGWRSLVVNQADIHRKGKEKHTKTDKIDAQLIARELKDNRLQSIIVPDRKREELRSLFRRRNDLVKDFRRVKSYIKMQLLYFGIREPEEFDNDHWSHKYRNWLDDIMFEYPTAKATLESRMRFFRFVDQELRDVSTQLRRYYKVNYKKDYLLLRSIPGIGGIVACGILCELGDLRRFNNIKHLAGYVGLAPSMYQSGNSQRTMGMTPRANRLLRSYFVEASWQAIRADPVMQAYYRKHQGKNVKSIIVKVARKLLSRTLAVIKTEVPYTIGVIE

SEQ ID NO: 249602 - protein, 356 aa, unidentified
MKKQCVGIDISKANFAAVLCSRSATDDLSFSVSRKFDNDKKGFNQLTRWVAKESDKATTLVFLMEATGVYHENLTHHLNGVGKTVHLILPNTSKNYFRSLNIKTKTDDVDARILAQFGVERTHREWQPPKKIFREMRDLSRYRIQLQEQKTALSNIAHSKEYSYEISNDIMKSNKKLIKLLDKEVDAIKSKLEALVDTDENLAERIRKICTTKGLGIQTVAGLIAETNGFESFRNGKQLASFAGYDIVHQESGTSIKGKTRISKKGNRYIRHLMHHPAMSASKHVLEFKNLRDRVIKRTQIPMKAQCAVQRKLLLLVFTLWENETEYESEYHLKKIARAKAQATQDKLTRSFPLET

SEQ ID NO: 249603 - protein, 385 aa, unidentified
MSKLIEEAVRREAALHSVVRVGVDLAKQVIQVHAVDRAGKVVVSRAMARDRFAGWCAALPRGCMVAMEACGGAHHWARRLRLLGLEVRLVAGAFVTPYRMAGKRGKNDANDAAAICEAASRPHMRFVAVKSAEQQGWLAVHRLREGFKEERTACINRIRGLLAEFGLVFGQRPEVLRAALPEVLEDGSNELAGVARLGLQRALQHWIELDEQLAWCDERIALHARQDAKAKAIMALPGLGPITASALVASVGEFGQFDSARQFGAWLGLTPSQNSSGGKTSLGGVSKRGDTYLRTLLVQAARSAVQTAQRRADRLSRWVLALRERRGWQTACVALANKNARIVWAILTRGECFDAEHVPEPPAPKRPKAGTVGATKATTLLPAPT

SEQ ID NO: 249604 - protein, 388 aa, unidentified
MRRQRKPNDLSRSLIPLDMDTTLIAVVELSLSSWLVAGIVPGVERQPLKKLKTDENALLTLLNRWRDEAVRSGHKISRIAVAFEAGRDGFWLARWLRARGIEAHVIHASSVAVSREHRRAKTDRLDTELLKRAFVGWLRGERDHCKTAAIPALREEDAKRPSRERESLVGEQSRLVNRMKATLIRLGIRGFNPKLRQAEQRLEILRTPEGEPIPANTLAELKRDMQRRRFICDQIRSIEQERLERLKRTPDTEPHAMVRLLARVTGIGIETADLLVHEVLLRNMRDRRAVARYGGLTGSPDRSGGTNREKGMARSGNARVRRGMIQLAWRFLLFQKDSALAQWYRRRTEHSPKARKTMIVALARKLLIALWRLAREGVIPEGVAMRPA

SEQ ID NO: 249605 - protein, 391 aa, unidentified
MTTQRQVVIGMDPHKRSVTVEVMEADETIVGHGRFGTDVAGFAHLVSFAAQWPQRVWAIEGCEGIGRHVAQRLLAAGEQVVDVPAKLSARMRMFATGQGRKTDDTDAHSIALVGVRIAGLQPVVADEQLEMLRLLVDRRRRIGDDHTRMVCQLHQLLLELVAGGAKKNLSAAQARKILAGVRPKDEVGKLRKRVALELVVDLERTYQRKKQANKELVALLKTTGTGLLDLHGMGPSGAARLLVEVGDITRFPDRGHFASWTGTAPIDVSSGDRQHHRLSRGGNRQINRVLHIMAVVQLRNPTEGRAYYDRKVAAGKSPNEAMRCLKRRLSDIVYRAMLDDYVAAKATGPGGHRGASLQSSAAGSHPHTDTSDQSLPGPVTRKPTTPLPKAS

SEQ ID NO: 249606 - protein, 403 aa, unidentified
MNMNAVGIDVSKGKSMVAILRPYGEIISKPFEVKHTVSGIRSLIEQIQSIDGESRIVMEHTGRYYEPLVRELSKADLFVSAINPKLIKDFGDNSLRKVKSDKADAVKIARYTLDSWTELRQYSLMDEIRNQLKTMNRQFDFYMKHKTAMTNNLISILDQTYPGANTYFDSPAREDGSQKWVDFSATYWHVDCVRKLSLNAFIDHYQKWCKRRKYNFSRSKAVEIYEASKELVSILPKDDLTKLIIKQAVEQLNTASQTVEQLRTMMNEAASKLPEYPVVMAMKGVGKSLGPQLMAEIGDVSRFTHKGAITAFAGVDPGVNESGSYEQKSVPASKRGSSTLRKTLFQVMDVLIKTKPQDDPVYLFMDKKRAQGKPYYVYMTAGANKFLRIYYGRVKEYLSSLPE

SEQ ID NO: 249607 - protein, 373 aa, unidentified
MQEFSKYVGLDTHKDTIAVAIAEIYGGKPRFYGEISNTPGAITKLVKKLSPSGETLSFCYEAGPCGYEIYRQLTKLGHKCDVVAPSLIPRKPGDRVKTDRRDGEMLARLHRAGELTPVWVPDQEQEAIRDLTRCREDMKTAERQARQQLNAYLLRHGKVYKSGRSRWTQTHFRWMEQIKFDIPVQQIVFQEYVDNVKQAQLRVAGLEEEMHNALSDWQLGPVVEALMALRGVKLITAMTVMAELGDISRFDSPPQLMAFLGLVPSENSSGKTRRRGGITKTGNGHVRRVLTEAAWSYRFPARKTAHLQRHAEKTSEAVQAIAWKAQKRLCGRYRYLIGRGKLNVLVCTAIARELSGFIWAIACEEMGRPVVMR

SEQ ID NO: 249608 - protein, 345 aa, unidentified
MVVIGIDAHKRTHTAVAVDGNGVRLGTKTVAANSAGHLELVRWGEGLAGGHRFAVEDCRHLTRLLERDLLRAGEVIVRVPPKLMAGQRRSARTRGKSDPIDALSVARAALREPDLPAASLDGAERRVRLLLDHREDLVAERTRIINRVRWHLHGLDPAVETSVGALTCVKNVEALARRLEGVGGVEAEILADLLPRLAELTVTERRLERQITARVAPLAPSLLALPGCGALTAAKIVGETAGVGRFKNRHAFARHNGTAPIPVWSGNHDHHRLNRGGNRQLNAALHRIAVTQLRNQGPARDLLERLMASGKTKRDALRVIRRRLSDIVYKRLLEDSRAHQPTATF

SEQ ID NO: 249609 - protein, 345 aa, unidentified
MHIASIGIDLGKTTFHLVALGERNKVLVRKKFSRSQLLAYTANLPSSLIGLEACAGAHFVGTALREQGHQVRLIPAQFVKPYRKSNKNDFLDAEAIAEAVTKQNMRFAQLKTQEQLDWQAMHRVRDRLVQRRTALINEIRGFLLERGITFAAQPIHLRKNLPAVIEDAERNLSPRLRWLLERMWQEWKQIEIDVRAITDEIERISNDDARCRRLRQIPGFGPLISTATVAAIGNGSAFRRGRDFAAWVGVVPRQHSTGGKQKLYGISKRGNVYLRRMLIHGARSVLFRVKYDTGGFGQWVHRLAQRAPRNKVVVAIANKLARIAWAVLSSGRDYRHQPLRQLPAA

SEQ ID NO: 249610 - protein, 339 aa, unidentified
MKLTPVGIDIAKNVMQVHYVDEETGEVVNKPIKRAQFLEYFANRAPCLIGMEACGGAHHWARQLTKMGHQVKLMPAEFVKAFNIRNKNDAADARAIWLAVQQPSKPVAVKTEMQQAMLALHRTREQLVAFRTMQINGLRGLLTEYGEVMGKGRAAITKAIPEVLARVADRLPAVLIDTLREQWNRVAELDEQIARIERRMREWKKDDRAVKAISEIPGVGLLTATAAVAMMGDVKAFRSGREFAAWVGLVPKQTGSGGKVKLHGISKLGDTYLRTLLIHGARSVLTNAKEPGPWIEQMKKRRPLNVVIVALANKMARTIWAVLAHDRPYQKGYVSAKPA

SEQ ID NO: 249611 - protein, 401 aa, unidentified
MKEFNAEQIEAKTASALEAVQEASQSKQYAVYVGLDVHKETIAVAIARPGRDDPEYREEIANMRKTVEKLIERLSREFDGALLLFCYEAGPCGYGLHRQIIGTGHDCEVVAPSLIPKKPGERIKTDRRDALKLARLLRAGELTGIWVPDEEQEAMRDLCRARDDMKSQERKACQQLNAFVLRHGHHWPSGKTRWTSAHYNWLESLKFAHDWQQVVLQEYIDAVKAASTGVAEMMGQMLRVLPQWRMAPVVDALTALRGIDKLSAMTLLAELGDISRFQSPKQLMAYLGLVPGEHSSGGRRRQGAITLTGNAHARRTLVESAWSYRFPARQTAHIKRKAAAASDEAKIIAWRAQKRLCGRYRTLTQAGKNTKLVCVAIARELAGFIWDIVCTEMPRLKAMAA

SEQ ID NO: 249612 - protein, 353 aa, unidentified
MAHPTAPPVTIGVDTHLDVHVAHAADQLGRRVATVQVPTTPAGYQHLLAWARGLGQPVAWGVEGTGSYGAALARFLAANHQVVVEVNRPDRQARRRHGKSDPVDAQAAAKAVQAGDATVVPKAGTGQVEMIRCLRVARQTAMRARTQTINALKALLVTAPAELREQLRGMSATRLVGAAADLEPGLITSPLAAAMLALCTLARRHQALSAEITALTSELDRLTATAAPKLVALFGVGQDSAGALLVAAGDNPGRLRSDACFAMLCGSSPIQASSGKTTRHRLNRGGDRQANAALYRIVLVRLCHHQQTKDYMARRLTEGKSKKEIIRCLKRYVAREVFAVLHQMGQDALTAAA

SEQ ID NO: 249613 - protein, 345 aa, unidentified
MIIGCDFHPSWQQIAWLDSETGESGERKLVHASGEAQQFYRQLAAPALIGMEATGNSQWFIELVEDVGHEIWIGDAAQIRASYVRKQKTDKRDAAHILKLVVEGRFPRLWTPDREQRDLRQLVLHRHKLVEIRSRVKNELQHLSLNKGMQRKGKLWSQAGQKLLRELPLKPWAACRREDLLGLLSMLNQRIGQLDTAVQHAAEENPQARLLMTQPGVGPNTALAYVLTLGDVSRFPRGKQVASYLGLIPREHSSGGRQKLGVITKQGNRMLRSLLVEAAQIAVRFDPGMKKQYLHRCHQKPKGVAKVATARKLAVRLYWMLRTNVAYPEIVRIESSPRVPLVGAS

SEQ ID NO: 249614 - protein, 372 aa, unidentified
MGHHTEAFVGIDTSKSSNAIAVADGGRGGEVRYLGGFPATETATRKLVAKLAARCPHLTFCYEAGPTGYGLYRLLKSLGHDCLVVAPSLVPKKAGDRVKTNRRDAVSLAKLLRAGELTAVWVPDERHEAMRDLSRARQAVKKDLQGKRQQISSLMLRLGRIYPGKTTWGPAHMRWLMEQKLEHREQRIAFEELLEGIRQESERVERLENAIREAVPEWSLAEAVVAMQAVRGIDLIAAVGVLAEIGDLSRFQNPRELMGYLGLVPSENSTGDKVKRGGITKAGNGRARRILVEAAWSYRYPPRVSRDKQPKVEAAPRHVREIAWKAQTRLCGRFRSLERKGKRRTVIATAIARELSAFIWAINRELMARRQA

SEQ ID NO: 249615 - protein, 402 aa, unidentified
MNAVGIDVSKGKSMVAIMRPFGEIVSTPFEIKHTTSDINSLVELIKSVEGESRIVMEHTGRYYEILAHQLSNANLFVSAINPKLIKDFDNDSLRKVKSDKADAVKIARYALDKWQNLKQYSVMDELRNQLKTMNRQFGFYMKHKTAMKNNLIGILDQTYPGVNAYFDSPARSDGSQKWVDFASSYWHVDCVRKMSLNAFIDHYQNWCKRKKYNFSQSKAEEIYGKAKELVPVLPKDDITKLIIRQAVDQLNSASTTVESLRTLMNETASKLPEYPIVMAMKGVGSSLGPQLMAEIGDVSRFTHKGAITAFAGVDPGVNESGTYEQKSVPTSKRGSSDLRKTLFQVMDALIKTKPLDDPVYQFLDKKRAQGKPYYVYMTAGANKFLRIYYGRVKEYLASLPES

SEQ ID NO: 249616 - protein, 344 aa, unidentified
MDYFAGLDVSVKETSVCIVDDSGKIVREAKVASEPEALLSVLKNPAYRFKRIGLEAGPLSQWLFSALAEAELPVVCVETRHMQAVLKAQINKTDRNDARGIAQMMRVGLYRPVHVKTLRSQKLRMMLTHRKLLQSKAIAIENDLRGTLRNFGLKVGIAGKTKFEARIKELVENLPDLAELVEPMLVVRRTLREQIVILHRRLLAIVRDDEVCRRLMTTPGVGPVVALTYRATVDVPARFRKSKSVGAVFGLTCSKYQSGEIDWSGRISRCGDEMMRVMLYEAAQVMLTRTNKWSWLKAWAMQIARRRGMKKAIVALARRLAVILHRIWVDGTEFRWTREQAVAA

SEQ ID NO: 249617 - protein, 360 aa, unidentified
MKRQRTSVGLDVHARSVLGCALDGDTGEVFQRRLCPDHGEIVAWLGELPGPVAVTYEAGPTGFGLARALAAAGITCEVAAPSKLIRPPGDRVKTDARDAAHLARLLHLGQITAVTIPSASQEAGRDLVRARDDCRGDLMTARHRVSKLLLRQGIVYSGGKAWTSDHERWLRTQRFDNPALQLSYEAAFDAMLACLDRRHRLDRAITAMAADSEFTPVVHRLGCIRGVATLTAFGLAVEIGDWHRLTGRTIGAYVGLVPSEYSSGDTRTQGGVTKTGNGHVRRLLVEAAWHHRTRYRPGTELRRRWDLASPAARARGQAANRRLHNRWAGFDARQKRPVIANVAIARELAGWCWSLAIMPD

SEQ ID NO: 249618 - protein, 414 aa, unidentified
MSVNDTTGPARGVSAGVDWAKDDYAVCVVDSDGEPVARKTLPYTTSGLRRLVELLDRHGVDAVGIERPDGPIIDTLLPAGKTVLVIPPSQVKSLRRRYGSAGNKDDRFDAYVLADTVRTDRRRLTPLILDNEATIALRKLCRARKDLVAHRVAVANQLRAHLQTALPAVVDLFRDIDSATSRTFLARFTTQDALDWLSPKRLAAWLASIGYSGRTNPAVLHTRITAAPRGAAGEHGRVLAGITHAYLATLQAITAQIETLAQQIAENLTVHPDRDIFTTLPRAGTVRAARLLAEIGDARGRFPTPASLACLAGVAPSTRESGKARIVAFRWAVDKQLRDAVCDFAGDSRRKNPWAADLYNRARARGHDHPHAVRILARAWIDIIWKCWTTNTPYDPDQHRALQQLLNQDQQAGG

SEQ ID NO: 249619 - protein, 315 aa, unidentified
MSDVPCFVGIDVAKAQLDIALRPTGERWTVPNDPHGCVTLVERLQTVHPTLIVLEATGGLERPVTAALATAGLPVVVVNPRQARDFARATGQLAKTDALDARALAHFADVIRPTPRPLPDAQTQELRALLGRRQQLITMRTAEQNRLAGTSGRLQTDIAAHITWLNERLATLDDDLETLLRASPLWRENDDLLQSAKGIGPVCAHTLLLELPELGTLTRQQIAALVGVAPLNCDSGTLRGRRTIWGGRAHVRTVLYMGTLVATRYNPQIKAFYERLLAAGKVKKVALTACMHTLLTILNAMLKHRTPWQPQEVQS

SEQ ID NO: 249620 - protein, 339 aa, unidentified
MKVPYIIGADLSKKTIDFASQQLGNHVKVENNLTGFNELMRWMKQLKIPVNEVMIVMEHTGLYSHRLEQFLHQKQVSFTKVSGLAIKLSMGMVRGKTDKQDAFRIAQYGEEKTNQLVATPPVDKPLERLQILHSTRERMVRMKASLMTAVKEYHQGYGLEKSDRIITQQLEVIESLDKKIKEITSDMEIIVEGQQSLTTNYKLLKSIKGVGQILALAVIIKTGNFTRFTNPRKFACYCGTAPFENSSGTSIRRKTRVSHLADKRMKTLLDLAAKSAIQHDHELQAYYLRRTENGKSKMSTINVVRNKLLYRIFAVVKRQTPFIERNLSQTTDKLLLIQP

SEQ ID NO: 249621 - protein, 371 aa, unidentified
MTSTDAATETVYAAIELSKKTWVLAIAFPDRDRPSIHRVSGGNVAELVSRLRVAARNNRRILVCYEAGYDGFWLARALAKMGIECRVLDPASIQVNRRARRVKTDRIDVLALLRALIATDRGERHVCAIVRVPSVAEEDTRRSHRERQRLIRERTGHINRIKGLLFAQGIRDIKPKLRRTRIDFAALETGEGHPLPDRLRRELEREYARLALIETQLREVEKERDLADAQDPVVERKRQMLVALQGVGGTSAAILAREVFARPFASRRQLGSYLGLTPSAYDSGSVTRCQGISKAGNSWARRILIEVAWLWQKHQPASPLSHWYIQKTSGQSSRIRRIMLIALARKLAISLWRYVETGLVPEGVVIAGAEA

SEQ ID NO: 249622 - protein, 345 aa, unidentified
MKNLFIGIDFSKETFDVSFFGRETRQQVHHSSFENVRTGYIAMLRWIGSQTDVPRQEWLFCGEHTGLYSIGLSDFLIGKGLEIWLENPNQIKLSSGIKREKSDPADSLAIAEYAMRFEDKCRLYEGKSKIYRSLKSLFNHRSRIVEIKKQLLTAVREERRVMSRNTGCRFVYEHTMAIIDRLSKEIKATEKMMKSLLEKSAEMKENYSLATSVVGISFVNAMAIIIVTENFTRFASAREFACYSGTVPFHNDSGKIKDRCHISRIANIKIKVLLTEAAQCAMVYDAELRDYTERKLKQGKDKRLIINNIRNKLILRVFSVVRNKRPYIREKSDENGLESMNVNMN

SEQ ID NO: 249623 - protein, 341 aa, unidentified
MSEVSTIGLDIAKQVFQAHGVDASGHVLFRKRLTRTKLVEFFRSLPRCLVALEACGGAHYWGRELAKIGHRVRLIPPAYVKPFVKRQKNDAADAEAICEAAQRPSMRFVAIKDEAQQASGVVFRARDVLVRQRTQCINALRGHLTEYGWVVAKGATHVPTLIDQIEDPNCGLPERARAIFKVLIATLKSLEENIATLDVEISRRSKEDPVARRLMTIPGVGHITAAAIAALAPPVETFRTGRDFAAWLGLTPLQKSTGGKQRLGATSKMGERTIRRLLIIGGSAVVRQACRRGAAEGSWLARMLARKPRMLVTVALANKTARIVWALLSKGEVYRARVVAA

SEQ ID NO: 249624 - protein, 371 aa, unidentified
MVWTAPYGISCARMRCCKSQTREPSVNQINRIGMDTSKHIFQLHGVDSAERPVLRRKLRRSEMLGFFAKLPPTVIGMEACAASHDWARKLRELGHEVKLMAPQHVKAYIKRNKNDGRDAEGLCEAMSRPTMQFVAVKTEEQQAALMLLGVREQLVKRRTQLGNVIRGYAAEFGLITAKGLDKIEPLLARIAQDQSLPELAREMFATQGRDYARLQVELKTIEARLRAWHRANADSRRLAKIPGVGLIGATALVMKAPDPQAFPSGRHFAAWMGLTPKDHSTAGKTRIGKITRAGDEMLRSVLVAGSTAVIQQARKGRGRPSPWLVALLARKSPKLAAIALANKIARIAWKLLTTGESYDAARWLGASAVAA

SEQ ID NO: 249625 - protein, 415 aa, unidentified
MEKIYDKCCGIDVHKKLIVACLRSGRKNEIREFGTSTKEILSMTDWLTSEGCEMIAMESTGSYWKPIYNIIESCGLKAIIVNAQHMKAVPGRKTDVKDAQWIADLLQHGLLRASYIPDKAQRELRELVCYRKSLIEDEARELNRLQKMLEGGNIKLSGTVSDINGKSSRNMLEVILSGEVLDLKKLESMVSEKKVSKRLKAPKQKIVDDMDGVLTALQRKMIRELLKHIDELERHIKNLSDDIDRFMDSGEKAAVKAIEEVPGIGKASAEAIISVIGTDMSRFPTDRHISKWAGLCPGNNESAKKRNSGRTTKGNKTLKTTLVLCAHAAVRVKESYFAAQFARISVHRGKKRAYVAVAHSMLIAIYHMLRYGTTFMDLGSEYYNAFNRERKAEGCLKKLKQLGYAANIATIADLA

SEQ ID NO: 249626 - protein, 405 aa, unidentified
MQVYIGIDWSESKHDVVAMNAAGAVLAQLTIPHSIEGFLQLTDLQEKLGMHSDDCLIGLETAHNLIIDFLWSRGFGQVFVVPPRVVKSNRTRFRHSAARTDLSDALVIADCLRTDRGRMQPWHPDSLLTQQIRAKVSLIHHLTRGVGRLYNRLRDVLLRYYPAALDVFGNQSKVWLAFICAYGSPEKAQKLTFEDFRLFARQHRYPNPALLPAAFARLQAPQPVASATIVMVYEDEAHTLARLLLEMKTSKEKALKELKNLFDQHPDAPIFASLPGAGDLLAPALLAKFGDDRDRFTSPASVQALAGTCPVTDASGKRRVIKFRRACDREFRRITQQWAKASLGKSVWANAYWLKVYSRRGYASHAYRCLANRWLAILWRIWQDGVIYDETYHLQQRAMHSKARN

SEQ ID NO: 249627 - protein, 354 aa, unidentified
MKKFFIGIDFAKEKFDAAIIDAIGLREFGERQFGTFSNDKKGYRQFMKWVKGHCGNSTETDWLFCGEDTGQCSHGLSKWLYGKGLDIWIESPYAIKHSSGIQRLKTDKADASMIAEYAWRHQDKASLFKPLSESLEQLREVFLYRHKLVQQRVAMEVRDKGKESEDSSRGLSFIRRKAKHLIAELDKTIKECDLMIDRLIDSDDELKANYKIVTSIKGIARQNGACLLIYTNNFHRFDMDARKIACYYGVAPFAKDSGKSIHAPAQTSHFANKLIKSLLTQGANIAKMFNPEIRSYYDSLIKRGKHKSVALNNVKNKLLRIIVALVRDRTMYDPKTFQFYQQRWKEKNQETLSL

SEQ ID NO: 249628 - protein, 341 aa, unidentified
MEQATTIGLDIAKHVFQVHGADGAGHVLFRKRITRAKLLSFLAAQARCVVAMEACASAHYWAREIAKLGHHVRLIAPAYVKPFIKRQKNDAADAEAICEAAQRPSMRFVPVKTEEQQANGIVFRARDLLVRQRTQCVNALRGHLMEYGYVFPKGITHVETLVAVVEDLQSSLPDSVRVILKLLVDTFTALEAQISALDAEINQRSKSDPTARRLMTIPGIGPITSTAVTALVPAAEGFRAGRDFAAWLGLTPLQKSTGGKQKLGAVSKRGERTIRRLLIIGASAVVQQASRRGAPKGSWLAQMLARKPKMLVTVALANKMARIIWALLVKGGTYRTPIAAA

SEQ ID NO: 249629 - protein, 457 aa, unidentified
MNRKRSKPKIDRTMPMVHPNAAAIDIGATMHMAAVRADRTSEPVRSFGTFTTDLHRLVNWFKECGVETVVMESTSVYWIPIFELLDARGFTVFLVNARDAKHVPGRKTDVSDAQWLQRLHSYGLLRASFRPKGQIAELRAYVRQRERLLEYAASHIQHMQKALTEMNLQLHHVIADITAATGMRIIRAIIAGERDPKVLARLRDYRCHSSVETIEKALTGSYRAEHLFALEQALALYEAYHEKVSACDVRIEAVLKELSIDRGHGSASLPSSRRRTDQPNELAFDVPAALFAVLGKDITQIDGLGPYLSLKLIAECGDDLSAWPSAKHFTSWLCLAPSNKISGGKVLSSRTRRRGNRAAALLRLAAVTVGRTDTALGAFYRRLSARIGKAKAVTATARKIAVLFYNAVRHGMQYVDPGASFYEMRYRTRVIGNLHRRAKAFGFVLQPMEPTPGAAVS

SEQ ID NO: 249630 - protein, 423 aa, unidentified
MNYLNNGQYTAFIGIDWADTKHDICLQGADSNHREFDCIPHQVDDIERWALALRQRFGGPIAIALELSKGPIVYALQKYDFLVLFPINPSTLAKYREAFTPSRAKDDPTDAELALDLLLCHPDRFQPLAPQSVELRALATLVEQRRDLVNDRVRITNRLRNTLKQYYPQVLEWFDRINTPLFCDFITRWPTLEQVKRARKSTLERFFRQHSMRRPQVLEKRYQAIKAATPLTRDAAVVTPHRLHTLVLAEQLRVTLQAIRRYDEEIAQLAPKHPDYELFSALPGAGPSLAPRLLVAFGEQRERFTSAAEVQKCSGVAPVTERSGRKHWVHWRWQCSTFLRQTFVEWAAQTVNKSFWAGAYYRQQKAKGASHQAAVRALAFKWIRILYRCWQARTPYDELVYLEALRRRGSSLLDQLGTVAETA

SEQ ID NO: 249631 - protein, 417 aa, unidentified
MIGSRRKLYVGIDVHSRSHKAALIPVAVLEETGTTWKKVKPLDIGNNIADFERLHNAIKTHVSSPDEVAIAVDHTGGHYSESIVYFLQTRGFCVYYLETKAVKAARERFLDEESKSDVIDSTSAAYLLYLRDLHGLSFRISAITPELESTATTLNSLVLQRWQLNKSATQATNRLHQLLIGVFPEGEARYFKQLLRIIPNYPTPKDILASDCLGGIAKLLPKDKESILQLAANTVGVPSDIYRELIKHLGNLRMKALAERDALTLILRKQVAMHPYGQILLSFPFLGDIAAATIIGIIKDIDRWPDKKKFRKALGVYSSLVQSGTSPTKTRRGYGGNRHGRRVLFQVCLGCASNTACDNDFKDYFLRLVAKGKPRIKALVGSMGKLAEIVYHCLKVGEPYQYQGKYKMKRTYQNNAL

SEQ ID NO: 249632 - protein, 410 aa, unidentified
MLYIGIDWAADSYTVTLLAPSGEVLASLVIENRLAGFLTLLEAIHKHRRKLEPTATPDAVLFAIEDQNQRLTDFLLAQGFQGYLIEPSRMKGYRLRYRSSGNKTDPDDSFVLADVLYRDHDQLPRIAPDSDVVRALKTLLRDRESFVRDQTRLTNRLTACLRQYYPEALDFFEDVAGKTVLDFIAAFPDFAAASRLSRREMKRFLVEHHCHRETQLERIMAVLGSSPTPVPAVVIRTKRQQALAIIQQLRMVQAAVGGYNAEIERLGAENDEVKRFRSMPGGGPITGAGLTTLFGDDRTRFNSAMAVQSLVGTAPKTIQSGQFRTVCFRYGCNRFYRTLLQQMALGALRSSAWAKQYYRGKRKEGKTHQHSLRCLANLLLKIAYAIWRDRTEYCEDRHLAQIMRHHLRPT

SEQ ID NO: 249633 - protein, 393 aa, unidentified
MSIIDRPNALAATAVENGIVAVSLELSRSKWLVTSLLPGSEKMSKHMVAAGDTAMLLTLLERRRRQAEAQVGGPVRVIAIEEAGLDGFWLHRLLEANGVESHVVDAASVAVPRRRRRGKSDGIDGETLLRTLLAWRRGEPRVCSMVRPPNPQEEDRRRVVRERAVLIRERIAITNRIRGLLMSQGVTDYQPLRRDRRERLETLVTGDGRALPPQTKRELMRALDRLDLLLQQLKAVEAERDAMQEAATEAAASEAVATDDPARLLLRLRAIGPQTAAVLTLEAFHRHFDNRRQVAAFAGLAPSPWQSGAVVHDQGISKAGQPQLRKAMVELAWLWRRHQPGSALSRWYAQRARGQDARRRCALIVALARKLLVALWRYVSAGVVPEGAAFKAA

SEQ ID NO: 249634 - protein, 477 aa, unidentified
MNQKQGDNVQPPKAKSKRRRRNKGMCLEDRPVLEPNAAGIDVGAREMFVAVPPGRDENPVRVFATFTEDLERLTDWLEQCGVTTVALESTGVYWVPLFEILEQRGIRPCLVNARHMKNVPGRRTDWHECQWLQFLHSVGLLRAAFRPGQDVCAVRTILRHRNELVAAASQHVQHMHKALTQMNLQIHHVISDITGLTGRAIVDAILAGQRDGAELAKLRDPHIKADTETIRKSLEGNWRPEHLFTLGQSRDLYRIYQQQIVNCDLEIEKMLQGFAPRIDPGERPLPPDRKRNRAGSKRRRKNGHPHPEFDLRTEAYKLFGVDVSQIPGLEENALPLFSEVGRDMSRWPSAAHFVSWLALCPDNDISGGKLLWRGARRVKNRAGHLFRMAAYALHRSLTPLGNYLRRMKAKLGPQAATMATAHKIAVIFYTMIKNQVEYDETIWDARDAQREKKLQAKLKRQAKQLGYELVPIEPQAA

SEQ ID NO: 249635 - protein, 367 aa, unidentified
MKKVSTRATARSRNISQQKLTIGLDLGDRNSWYCVLDEAGQIQLEQRVRTTGKGLREVFAGMARSRIALEIGTHSPWISRLLSELGHEVIVANARKVRLIGESRKKDDRLDAQSLARLARMDPELLYPVKHRSAKAQADLTVIRARAGLVRARTSLVNTARSLAKSYGERLRSCNVRNLNPEKAESLSPELQAALEPLLNAIESLSERIVEYNDRIENLAEQSYPQVALLKQIKGVGTLIALTFLLTLEDPHRFGKSRDVGGYLGLQPGRRNSGQSEPQMHISKEGDPYLRTLLVQGAQHILGPFGPDCDLRRWGLKLAERGGRNSKKRAIVATARKLAVLLHHLWVSGEVYEPLHNSCPTTVAAAA

SEQ ID NO: 249636 - protein, 343 aa, unidentified
MGEVSTIGLDIAKSIFQIHGVDAAGAVVMRKRITRAKLLEFFATLPGCLVGIEACPSAHYWSRRLQALGHTVRLLPPSYVKAYLKRSKNDANDAAAICEAVTRPSMRFVATKTEQQQSGLMLHRSRQLLVCQRTMLSNAIRGHMAELGIISAKGRNGTAELLKIIADENDDRIPAAARFSLDVLARQYTVIRAEIVAIEKRIHAWHRSCGESRRLEEIPGVGPIVATALVAEVGDWKVFSSGRSLAAWIGLVPRQHSTGGKERLGRISKQGNRHLRWLLVAGAMAVIRYARQHGTNRLWLARLMDRRPIKVAAVALANKIARMAWAMMVRGERFKEPKLLPAI

SEQ ID NO: 249637 - protein, 363 aa, unidentified
MNFIGVDLHKKSITICVLNENLKVLARKTVFCDQTDQIVEFFRPFRPFKVVVEATASYLWFVELVEPLAEEVVLANPKKLRVIAESTKKTDRLDAQVLAEFLARDQIPRAYMPTPRQRQHRRLVRHRQYLRQRMTSVRCKIRHILSDYNADRKDLFSTQCGPAYFKEIALSDADRFVIKQLWSEWQDHQSRLLALTKKIKAFIVKAPNREKETRAILKTAPGVGFVTAEVIVSEVGDVSRFRNAKQICAYAGLVPVVRQTGGKKSKDLRITKEGSGLLRWALVESAWRLVKTSPKWSAFFSQLRKRSGSKRAIVAVARKLLCVLYAMLKTSTPYKIVATQTKAPRPTRRRLVRKSSAKETVTT

SEQ ID NO: 249638 - protein, 348 aa, unidentified
MPVAVTRMSGDRVVVAVDPHKASWTAAAVDGSLQPLATVRVPVSRDGYRALRRFAHRWPHARWAIEGAAGLGAPLTTRLGTDGIEVIDVPAKLAARVRVLSSGHGRKNDDADALSVGIAALTSPALGTAKIDAATTALRAVVEHRDDLVKTRTQTVNRLHVVLTRLVLAGARRHLSADHAAELLRGVRPRDAAAKTLRALAMDLVSEMRQLDRRIAKAANDIQMAVSASGTTLTELSGLGALSAGKILGRVGDVSRFRSAAAFASYTGTAPIEVSSGEVVRHRLSRAGDRQLNFCLHVMAIAQIRHDTPGRAYYLRKRSEGKNHNETMTPHTGSSDKLDVPPGDASRA

SEQ ID NO: 249639 - protein, 350 aa, unidentified
MIIIGADYHPGFQQIAYVDTETGELQERRLRHREEAEKFYRELAAPQMKVRVGMEASGHARWFERLLWELQFELWIGDAAEIRTKRVRKQKTDRQDAQLILKLMLEDRFPQIWVPSWENRDLRQLLWHRHRMVQARTRIMNQLQAVALNEGLRSKKRLWGEQGREQLAAFRLAPWASRRRQDLLELLDRLNPTIGELTKAVEQEAEKCPEAQRLMTHPGVGPLTALAFVLVIGTAERFGCGKQIASYLGLVPEEDSSGERRRLGHISKQGNALLRFLLVEAAQVRVRSNQEWRSKFFHLAMRRGRKIAKVAMARRLAIRLYWMWRKSWNYEQLTKFGSHAGQPGNPHGVR

SEQ ID NO: 249640 - protein, 428 aa, unidentified
MDEVDRNRLEEFRQLRQAIRQSEEHLIVGIDIAKDRHHAFFGTATGKTLLRRLVFSNDGEGFGKLLGQAEALRVRHGLKKVVYGMEPTGNYHKPLGEYLIHMGRTVVLVSGVTVKHNRESLDGRWDKHDDKDSANVADLISQGKCLYYEYPTAELRGLRGLLSLKRRLKRQEQSYRVRIRNHLIAQYFPEMDSEYGRSEAQGLAIVRWCFPVSQITEIDVNPFIERVTSRRISMEKKRRLEAIWEKAGESIGCDAVPGVEHEAKVMVEGLRQIREMIKEIDGKIQELCESFPEYRSLLSIPGFGPDVSAKVLGAIGDPDRFQNGKQVLKQAGLDLSANRSGKDSAKAIPQISKRGKADLRYALYQAAFIASTKNQDFMRYYTSKLRGREKEKGIHTKMLIKLSAKMLLIAWTVMRKKETFNPTYLKAE

SEQ ID NO: 249641 - protein, 427 aa, unidentified
MDRFLLISQQVVTFSSTRNVRNLNMRRAYTMYIVGIDIAKRKHEAAVIDGEGAVIIKPFSFTNNCSGYNRLLAMLTKAKLPLDEVSFAMEATGHYWLALFTRLQKEGFRVQVINPVQTNSIRSFYIRQAKTDPRDALLIAEVIRFGHFSESTLHPENIYELRELCRGRHAIVSMQADVKRKVVALLDQVFPEYETAFTNLFGDTSMAILQTCPTPKELSEMPLEELCHLIEVSSHKRFRMAKAQELQELARNSFGFAMAGDVFSTMIRLYAKHLVFLKQQVQEMDRKIAEIMDTLDTPITTITGIGPTLGAYILSEIGDISRFSSAAKLAAYAGIDPTMRQSGEYNGVRNRMSKRGSPYLRHAIWLAASSAVLHDPALKLYFQKKRDEGKPYMASVGHACRKMVSIIYAVMRDNKAYTPCIPNEISA

SEQ ID NO: 249642 - protein, 331 aa, unidentified
MDEVKRFVGIDVAKAALDVFIGSAAAAFSVANDEVGIQELFRQLKPADFVILEATGGLEMPVASALAAAGIAVAIVNPRQVRDFARATGRLAKTDRLDAEVLARFGEAVRPEARPLANEQAQALEALVTRRRQLVEMLTAEKNRRARAPKVLHRSIDEHIRWLEKRLAGFDDELAEMIRDTPLWRERDELLRSVPGVGKVLSSTLLAHLPELGALNRKQIAALAGLAPFNRDSGSLHGSRCIWGGRAQVRRVLYMATVAGVRSNPVIKNFYTQLRARGKYPKSALTACMRKLLEILKAMLYNKTHWQTPALTSSTSPLFPLLGAVPEHGCC

SEQ ID NO: 249643 - protein, 379 aa, unidentified
MTTLSMPAAFRTVQAAEAVAAPRSVVLGVDTHKDVHVGAVLDHVGGLLGTGEFPATAAGYRQLLDWACTFGTVLRAGVECTGSYGAGLARYLATQRVPVVEVNQPDRSARRRRGKTDAVDAESAARAALSGTARAVPKSGDGQVEVLRMLRLAKNSAVKARTQALNQLKAVLVNAPSALRETLEPLSTWILARRCAELVDPCGGNPAAETAVFTLRLLAQRVLRLRQEVTELARRITAAVRASAPSLLERFGIGPDSAAALLIAAGDNPERLSSEASFAALCGASPVEKSSGKTQRRRLNRGGDRQANAALHRIVVTRMRQDGRTRAYLERRTAEGRGKREVMRCLKRYVAREVYALIRADMITCHQRPDDPSALTTAA

SEQ ID NO: 249644 - protein, 322 aa, unidentified
MAVIGVDIAKRSFDLAVLQSNGKHRTKGRLSNDPSGFAVFADWLQQHAEPGAWIVMEATGTYHEALAEHFHALGYRIAVLNPAQIARYAQSQLQRSKTDKLDAKLIATYGQRHEDSLRAWHPEPVSIRTLRALTRRLEDLQSLRQMELNRLEVSPEKVQHSIRAVVQRLDEQIAWTLEQIKRHIDDDPDLSGKRDLLVSIDGIADKTAALILAELGDIGRFADARAVTAFAGLNPRLQESGLYRGHTGISRMGSVRLRSALYLPAVVALTYNPAIKAQAERLKTRGKKGKQTVCAAMRKLLTIAYGVLKSGKPFDPALAIAH

SEQ ID NO: 249645 - protein, 392 aa, unidentified
MQAAADQAEARTAIQTDLRAIFVSLELSRSTWLITSLSPSGGEKMSKHSVPAGDIAGLLRRFAQLKEKARARTGRDFPIIVIQETGLDGFWIHRMLQSEGIESHVVDAASILTSRRGRRAKTDRIDGETLVRTLMAFKRGEPRVCSMARAPTPQEEDRRRVCRERRTLVGERVTHVNRIKGLLFAQGVFGYQPLRKGRREQLEELRTGDGRPLPVHLMAQIVRELDRLEVVLEQLKTVEAERNALLKPATGAAASPPAMLLELKGIGPETAAVLWSEGLFRQFDNRRQVAAYAGLAPTPWQSGSIDHEQGVSKAGNPRLRTTMVELAWLWLQNQPASALSLWFHERVRRLGGRMRKTTVVALARKLLIALWRYTTAGVVIEGAVMKSAPATI

SEQ ID NO: 249646 - protein, 355 aa, unidentified
MNDTKFIGLDVHKTSISAAVLDHDGRLVMQSVFATHAAAILSFMHGLRGTLRVTFEEGTHSTWLYDLLWPHVAEVLVCNPRKNALLKSGNKSDQIDARKLAELLRGGMLSAVYHGQTSTLTVKELGRTYTTLTQDTTRVMSRLKALYRSQAIATEGKKLYTRRRRESWLAQLPHVGQRYRAERMFQQLEALQGLRRQARRDLMVECRKHTATALLTSVPFLGPIRAALLLARVQTPFRFRGKRQFWAYCGLALETRSSADYHFVAGELRRSKKPVLIRGLNLNHNHDLKNIFKAAATTASALPGPFRAFYENLLGKGMKPEMARLTLARKIAAISLILWKKGERFDPEQLKSQAA

SEQ ID NO: 249647 - protein, 341 aa, unidentified
MQPYFVGLDVHKQVIAYCVKTSAGEIVAEGKIAATRAALNEWVRTLPGPWHGGMEATMFSHWIYRHLEPHAARLEMGHAATMKAISAGKKKSDKIDARTIADLLRCQLFPSCFVISPELGALRQQLRFRRLVVEETVMFKNKTAGLLMGAGVEYERRRLHGKRYFKELVKDNEWIDEQMRPLLAFNREQIETLQGMNERLIRMLERHPRLQARVKALQVIDGVGPVTGLTWALETGTPERFGSIKAAMSYCGLTSALRESAGQQKRGPLSKQRNRHLQSVLIEAAKMAPMLNDKLKEVYTKAKEKGGHRNRATLAVARKLVAYLLAADRAFLAKERERVAA

SEQ ID NO: 249648 - protein, 404 aa, unidentified
MIFVGCDWSRSKHDVVVLDPQGERLGQLTVLHDAAALADLAHKIAELEPDPTEVKVGVELHDGGLLAWLLEQGYSVYAVNPKSAERARDRYRPSGAKDDKSDAFILADLVRTDAGALRLLRAESEITQELGAWLRYRDKLTKQKTAAFHQLRALLAEWCPALSALCGDFNRKWQRDLLAEFPLHQDLCAAHGNRINAFAKKHNLQAATRQRLRQAKATVPLPIPESRIGLLRFQIADLLDSIAQRLAALARVKTELERLISAHPDQEIFSSLPVRGTFTVATLLSAFGQDREAAASWRELAALWGVAPVTKQSGYSRSVKRRRACDHLILQGLLSFAHNTAFTAGCWAGEYYQAKRERGAEHYTTLRCLAQRWVKILYRMWKDRAPYCEQLHQANRQLHAAAAT

SEQ ID NO: 249649 - protein, 383 aa, unidentified
MDMEPSTSPLTNTAPVTLYVALELSRSKWVITSLSPCSNKMSKYSIDGGNGTALLDCLARLRVKAESRIGTAVKIVVIQEAGLDGFWIHRLLESNGIESHVVEPASIAVPRRHRRAKTDAIDGEMLVRTLMAYKRGEPRVCSMVVAPTPEEEDRRRISRERRTLIKERIEHVNRVKGLLASQGIFEYEPMRKDFRNRIESLRTGDGRPLLPQLKAEIIRELDRIDLVLRQIAAIEAERDALVKSDSTDEAPAALLMKLKGIGPEFAAVLWLEGLFRRFANRRQLAAYAGLVPSPWQSGSVNRDQGISKSGNPRLRTIMVELAWLWLRYQPASALSCWFRERVGSERGRIRRITIVALARKLLVALWRYTTHGELPNGAELKTA

SEQ ID NO: 249650 - protein, 408 aa, unidentified
MQILYERCAGLDVHKRSVVACLLFPENGQPRKERQTFSTMTPDLVRLRDWLKDHDCSCVAMESTGVFWKPIYNLLEEHFQVLVVNAQHIKTVPGRKTDVKDAEWIADLLQHGLLRPSFIPPVWQRSLRDLTRSRSTLTQERTRVIARLQKGLEDANIKLASVVSDVMGTSAQHMLQALVKGELSPVAMAELAQGKMRPKREQLAQALTGHLQPHHRLLITEHLAHIGNLEQAMTRLSAEIAERLTPYEEILLRLETIPGIKRRIAEILLAEIGPDMSRFPSAAHLASWAGMCPGNRESAGKRLSGKTRKGSQWLRTALVEAAHAASHCKESYLSAQYHHLAFRRGKKRAAVALGHTLLIIIYHLIAEKKEYEELGGDYLDQLDRQGKEKRLIRQLEKLGFEISLTPTH

SEQ ID NO: 249651 - protein, 342 aa, unidentified
MQITTIGLDVAKNVFQVHGIDADEKVVVRKQLRRGQVLAFFKALSPCLVGMEACATAHYWAREFTKLGHEVRLMPPKDVKAYVKRNKNDAADAAAICEAVRRPTMRFVQVKSTEQQGRLMLHRTRDLLMRQRTQVINALRAHLAELGIVAAQGREGIKELLKIIASEEDARLPVDAHTSLVILAAELQAMQTLIGSIEKRIMAQHRSSEASKRLESIPGIGVIGATAIAATVADPKIFRSGRDFAAWIGLVPREDSTGGKHKLGPISKRGDRYLRRILVVGAHAVLRLARQKPEKYPWLTQLLARKPFRVVAVALANKMARMAWALLAKGGTYRTPALAAAA

SEQ ID NO: 249652 - protein, 350 aa, unidentified
MDTIYIGVDFHARQQTICYLKTETGELVTCELKHQDKEKVRAFYAELRGQVIVGLEASGYSPWFERLLEELGCQVWLGHATEIRRRARWRQKNDRRDAELILDLMLHDEFPRLHRPAVQSREVLRMLRYRQKLIKIRTMSKNSLQALAIQAGLARGSRLFTKDGQQQLGAAEMSPVMHWQREHWLQLMEPLNQQLLETMAWCKAQSKGDLLVARLRTHPGIGLLTSLCLVHTLQPVSRFRNTRKVAAYAGFDPIERSSAERKCFLGISKAGSRLLRYLVVEAAHTAVRKDEDLKRFYQRLAERRGRPKAKVATARKLLIRAYIMLRDEIDYAEFRRRAVAARLARSVHRP

SEQ ID NO: 249653 - protein, 428 aa, unidentified
MNTPTSNPPVVAWVGLDWADQRHEIRLQAAGSPRLESFSVEQKPEAFQAWVAELRARFPQGRIALALEQSRGAVIYALMNYDFFLLYPLPPKTLARYREAFASSGAKSDRSDADLLLELVRTHGDRLRAWQPDDAMTRQLRLLVEYRRKTVADRTRLTNRLTDLLKTYFPQALDWLGDLRSLAACEFLGAWPTLQAVQGANRPALRRFFHDHRRLSAEEREKLLDQIRHARPLTQDRAVLEASELMTQTLVEQLRAVISTLARLDQALEELFGQHPDQQLFDRLPGAGEALGPRLAAAFGTDRDRYQSAEKIQQFSGIAPVTAASGKMRWVHWRWACPKFLRQTFHEFADASRKKSLWARAYYQQQRQHGVSHHAAVRALAYKWIRILYRCWKTRTPYDEALYLRALQRRHSPLWLAAASLSTQEAHP

SEQ ID NO: 249654 - protein, 326 aa, unidentified
MTLSHLTDNIFVGIDVGGAGLDVAWHRGDGAHYANRPDAIAALVERLRTGPEVTRIVLEPTGGYEKPLVKALRQAQLPVEVIHTTRFNAYRALVGVKAKSDTSDAKLLASYAAAPDEVRGRKAGYVELPEDAIREELSELASRRDQLKHMIHAETCRLGTVRLAELRQMITTHLEALRAEDKQVHRTMLELVRQRIDLRRDHRLLKTVKGIGAKSALAFLASVPELGRIDNKAAAALIGVAPFVRKSGTMTAPARIHGGRAAVRSILYMAAVTASRHNPVLRPFYERLIAKGKPPKVALIAVLRRLVVFANAVLRSGQPWRGASAT

SEQ ID NO: 249655 - protein, 323 aa, unidentified
MTAPKLGIDISKKTFDVALIRDPETMKLKQRQFSNTPDGFRALHTWLAKQGVGRVHAVMEATGAYGLDLAECLHGAGHLVSIVNPAQIKAFGQSELQRNKTDRADAALIARFGLRHNPAPWTPPEPEQQELQSLVRHLDDLIEQRTQVSNRLSDARLTKLVRESWEEILQALNERIAEVKRQINRHFDDHPRLKRQRELLDSIPGIGPETAARLLAEMPQLGEFDSARAAAAHSGLTPKRHQSGTSINAPARISKIGNPRVRYALYMPAMAALRSSKEFKELAARLTERGKKKMQIIAAAMHKLVRIAYGVLKNQQAYDPNYV

SEQ ID NO: 249656 - protein, 346 aa, unidentified
MQPVIGCDAHKHFSVFVSVDQHGKASRPIRVDHDHDLYCEFLRTLPPGSEIALEATGHWYWIVDAMEEAGHHPHLANPFEAKRRMAKSNKTDALDAKGLAILLRCGTLPESWIPPGELRDKRELLRTRMALRDLRTSLKHRIHAGIDRYGLQADAISDLFGTKGRGYLAGILKALPTETAHMIAMQLHSIDQLEEKIAAIELRIADQLKASPEMRLLRTVPGLGPILAPLVWLEVGDVDRFPRAEHLASYAGLVPRIIASGGHIRHGSTCRNVNHYLKWAFVEAANCAIRIKAHRQNHIGLLYQRLYPNKGHGRAVVAVARHLAEASYWVLRKKQAYRAPQPRIAG

SEQ ID NO: 249657 - protein, 377 aa, unidentified
MSKIRFVGLDVHAETIAVAVAEAGGEVRAHGVIPNRLESIRKLIGKLGPVGQIKACYEAGPTGYVLYWQLTQLGVVCEVIAPSLVPTKAGDRVKTDRRDAEKLARCYRAGELTPVWVPDAAHEALRDLVRAREAAKKDQLKARHRLGKFLLRHGRRPEGLKAWTKKYLEWIKTHVHFDQPALEVTLADYLEEVDHVAARIVKLEKAIDEAVRLAPPEIRAVIEALQALRGVAQTTAATIVSELGSVSRFQSPRQLMGYSGLVAREHSSGNRVRRGGITKTGNSHLRRVLVEAAWAYQHRPNVTGFLLRRQKNLALSDEVKKMAWKAQQRLHKRYQAFAARGKNKNQIVTALGRELLGFIWAIAVHTEKQQKQLNKIA

SEQ ID NO: 249658 - protein, 352 aa, unidentified
MTMLAGLVELVIGIDTHADTHTAAVVTVKTGALVETLTVTADPGGYDDLLAAADRHGGLRAFAIEGAGGYGAGLARHLAAGGEVVVELDRPARPTRRGGRKSDPIDAERAARDALTRTHLAAPKSGPQRAALAALQLARRSAVQAAGDAGRQLRALVITAPEPVRARFRGHRSTRALLTVALALRPTASRADLEVVTTMTVLRELARRVRDLEAEAAAHEKAIGQIVASWRPDLLALPGVGPINAAAVLVAWSHPGRCRDDAAFAMLAGVAPIPASSGKTVRHRLNRAGDRQLNRALHNIAVCRQRYHQPTRDYTEQRQKQAKTDREIRRCLKRYIARQLYRQLEQHPATTA

SEQ ID NO: 249659 - protein, 352 aa, unidentified
MLYTAIDYHRKYSVVRTEDSAGNRVASRRIDQNEPAAFADYFAGLPEPSRVVLEACWNWGWLYDLLGELDQVEDRVLAHPYKTRLIADAQIKTDGLDTKALCMLLRGNLVAAVHAPSPQTRARKHVVRQRMFWVGLRTAIRNRVHTVIARQRDLAQPQMSDLFGKKGLHWLHELALPAPDGALLKQDLAALELLGQLIRELEALTAVENASDPAVARLQSLPGVGPILAAVMTIEIDGIARFRRADKLCGYCGLAPTTSASGGHVHHGRMLPFSNRWLKWAFIEAAWVSVGCSPYFGQLYRRHRARGKKANTAITIVARRMCRIAWQLLTQERAYTPNSPPLTLSPAAPIRD

SEQ ID NO: 249660 - protein, 466 aa, unidentified
MAFTLTEETAMPRGRRQTTRAATPPVLNPNAAGIDIGATEIYVCVPLERDPQPIRRFGTFTQDLLAVATWLTQCGVTSVAMESTGVYWIPLYQILEARGLEVCLVNARHVKNVPGRKTDVQDCQWLQYLHAVGLLRASFRPPETVCAVRSLLRHRDNLVRLAAVHTQHLQKALNQMNLQLHHVLSDITGVTGLAILDALLAGERDPHVLAGHRDHRIKASAETIAKALVGDYRREHLFTLRQSLGAYRHYQQLISECDREVQGLLATFESVSDPAVSPLSPATTTHRKPQGNAPRFDLRTELYRILGIDLTQVAGLNTATVYTLFAELGSDLGKFPSAKHFASWLGLCPDNRISGGKVLSVQTRHVKHRVAQALRMAAQSLYRSHSALGAFFRRMRAKLGAPKAITATAHKLARIVYHLLTTREPYAESQLAKHEGMYRKRLESRLYAQARALGFQLVPAAGQSVS

SEQ ID NO: 249661 - protein, 344 aa, unidentified
MECYAGIDVSLELSSVCVVDAGGKIVAEAKIESHPDAIVAFVCKLGLSIERIGLEAGPLSQWLHAGLSKGGFETVLLETRHVKAALSAMTVKTDRKDARGIAQLLRMGWFRPVHCKSLGSQEVRALLTARQQLLSKLTDVELSIRGILRGFGLKMGVTTRKNFEHRARELAAGQTMLETVIAAMLTARAALLAEQNRLHKAVLRIVHDDQICRRLMSVPGVGPIVAITFKTAVDDPTRIAKSKAIGPLFGLTPRKYQSGETDVTGAVSCVGDTKVRTALYEAANILLSRVKRFSALKRWGMDVAKRRGPKRARVALARRIGVIMHRMWIDGTEFRWTAAERAAA

SEQ ID NO: 249662 - protein, 339 aa, unidentified
MKCRIIGIDLAKSVFQVCGVNQYLKPLFNKKLARRDFIAFMSEQPPTQVVMEACYSSHYWARELTKLGHTVRLIPAQHVTPFVRGNKNDHNDALAIVEASQRPYIRFVPIKSEAQQEVMALHRIRERLIKNKTALTNQAHGLLSDFGIIFNQGERCFTVMAHIVATSSEVTENIKSLVASQHEKFLELKAKLKIIEKKLKQNLNNFPQAEILLSIPGIGYIIASAFIASIDKGQAFKSAKDFAVWLGITPRQYASGSNSYMGKITKRGNRYLRKQLIHGARAVLNIYKNDKDALKSWGVAVAHRRGFNKAVVAIAHKIARIAWHLLQKNETYQPQSVKA

SEQ ID NO: 249663 - protein, 371 aa, unidentified
MSTVINIGIDVHKDSYSLCSYSFATKQAFAQTRIASNSNLVIKYVRKLQEAQPNVEVLCGYEAGPTGYGLYRDLEKAGIGCVIMAPTTLPKASGNRVKTDRLDAMELSKHLAFGTYSAVHIPTSEDEAVKNYTRLRNTRVDALKKAKQNLLSFLLRSGRVFSEGRNYWTNIHYAWLKRQQFTDPVDQETFNEYLQEVYDQQDKVDRYNQRIEQLSQLEAYREKVARLRCFRGIETHTALSLVSEIGDFSRFANAQQFSAYLGLVPGEDSSGQREKRGGITKAGNTRLRLLLIEGANATLRSSLYGQKSKRLKARQEGNEADVIAYADKANRRLHRVYNNLTNRGVIKNKATVAVARELSCFIWGMMNNRID

SEQ ID NO: 249664 - protein, 411 aa, unidentified
MLKIVFKICCGIDVHKDFVVACIAKTDDKNVTTYQTKRFSTFTNGLRELSEWLCSNSCKDVCMESTGKYWYPVFNILEDSCKVIVAHPKYVKAIRGKKTDKKDAKWIADLFKHDLVVSSFIPDRCIRQLRDLCRYYCKLTNLTTSETQRTHNCLTVSNIQLANVVSDINGKSAQKILSKILENPNDTSFDIESLLHKSMLPKLDDIALAIDGVITTEQASKLQIIKKHFDNLNICKSDLENLIYELAKPYEHEIALLQTIPGINSKLTAIRIIAEVSNDVSSFPTSKHLCSWAGLTPTNNESAGKKKSVRISKAGCYIKPLLVQCGLAALKSKDNPEFGNRYKNLKMRRGHKKAIIAIARMLMTIIYHILQDKVCYDKELYSHYNQLPTSKEITVEQAIALAKRQGYKLVC

SEQ ID NO: 249665 - protein, 408 aa, unidentified
MRVVGLDIHRVFAEAVMLDDGGTVRLGRIGMTREHLDAFARKLRRDDHVVIEATGNATAVAEVIRPHVGRVVIANPRRVRLIAEARIKTDVIDATVLARLYASGFLPEVWVPDQATLALRRQVTRRNQIVRQRARLKTIIQSILHAHLVPPCPHADLLGPKGRAWLLGQALPPDEQDAVARHLREHDRLSEDLRVVEREIAREALADADTRRLMTVPGIDMVVATGLLAAIGPVARFAGPGKLVAYLGLNPSVHQSGEGRPRHGRITKQGRTHARTMLVEAAWQAVRGPGPLRAFYQRIARRRGNHIAAVAVARKLAVIIWHLLTRGEDYAWVRPALHARKLRDLELRSGQPARRGQRGQAYDYNLSRVRLEERRRAEQAETAYRRQTEGWTRRGKRAPTGAAREERP

SEQ ID NO: 249666 - protein, 328 aa, unidentified
MFLGIDIAKASMDCAILAGPGGKPLGRRSFPNSAEGVDRAVRWAARVSGAEVAETHVVVEATAAYHELAAHRLAAAGMRVSIVNPARVRSFARALGILGKTDRIDAQLLARYGQLVGPKLWSPPAKALLDLRSLIARLDDLEADSRREENRLEQARTRGCPELVQRSLLASITALEAQAGDLRRGIAAHVAADAALQADLERLMTIPAVGPKTATRMLLMLRSRSFDTARQAAAFLGLVPVERTSGTSVRGRPTLSRAGNPRLRAALYMAAVVGIRKNPDLRAQYGRLLARGKCKMAALGAAMRKLVHLCFGVLKSEGGYRPAAAIKA

SEQ ID NO: 249667 - protein, 418 aa, unidentified
MEIIYERVAGIDVGKKIIAVAVRTPGERPGKRRQQLRKFDTYYQTLTEMVTWLIAEGVTHVSMEATGVYWRPVFHALCEAERALEVLLVNARHVKNVPGRKSDALDAVWLAELTECGLLRGSFIPPREIAAIRELTRYRKKLIEQRTSELQRLAKVLEDGGIKIDSVASALTTLSARDMVEALINGERDPGVLAEFARGKMRRKIPDLRLACAGRFGAQHALMCTLHLEHIDHLADMIARLDTRIDEASLPFVRQTTSLATIPGISERAAQVIISEIGIDMARFPTAAHLASWAGLCPGNNESAGKHRSGRTRKGSKELRALLTECAWSAGRTNTYVGAQFRRFHRRFGTKGGKKAATATAHTLIVIIWHVLAEATAYRDLGSDYFTRRLDSPEARKRRLIHELEALGHKVTIEPAAA

SEQ ID NO: 249668 - protein, 359 aa, unidentified
MLYLGIDQHRKQLTVNLRNEEGDVVLKRQVSTQWGRVQKFFEELEQQAELEGGFMAIVELCGFNDWLLQMLALYGCRETVLIQPQKKFRKKTDRRDASALSQSLWVNRHRVLGGARAQGVRRIHLPPHEEQENRQLTALRKRTVALRTQSINKVHHILLKHNLQQECPTKGIKTKKARKWLIELPLGDIDRLEMNQLLARWELWDSQIAEIEKKIEERQRRHKTAPVVATIPGANAFSSLGLASRIGSIDRFPRPGSLANYWGLTPGCRNSGEATDRLGSITKDGSPMARFILSQWVVHVLRRDSSMKAWHARIKKRRGSKIARVAVMRRLATIVWHMVKNNEPYHIGGLPKQRQKKAA

SEQ ID NO: 249669 - protein, 315 aa, unidentified
MKYVGVDISKETFDAFNDELGSRQFSNDSVGFAVFKKWIGVSGQVVMEASGPYYLRLAHDLYKANIPVSVINPLVIRRFCQMNLQRAKTDKKDAVSITQFAELTNPSTWSPAPEYLQQLLQMQSVMEQLSKQQTSTLNAMEALTQHPFIDKRAEKALSKVAQIQKAQMTNLEKEIMELTKQHYQNEYASLTSIPGIGKKTAMLLILVTDGFTRFDNIKQLVAYTGIAPRIFQSGKTVNKKPKISKLGMADLRKSLYMCTLRAIEQNEACKNLYERLRQKGKAAKVALIAVCHKLLRQAFAVVKNKNQYRTELSLA

SEQ ID NO: 249670 - protein, 396 aa, unidentified
MCKVIMIGCDLHDTTMVLKVADGPQTPVRKGFLTSNRAGMIAWLREFAAERGATRIVFAYEASGQGFGLYDQLIDAGIECYVLAPTHLPHSSHSRKQKTDDHDAEMILDEVRACVLAGRALPAVWVPDHQTRDDRETVRLELAAQRTRLKNQIRNLCKRSQQALPDDFTASGEWSQHSLAWLRDVSAGTRGALREGARTALASLIELYAGLTVQLKSLDRAIAHLSRTDRYAKLFRKLQLLSGVGTLTAMVFLTELGELARFANRRQLAAYLGLAPSSFESGARNDRKGHITKQGPARVRHVLCQAAWAALRVSPEWRAKYDRIKRGSKSRGKIAIVAIMRQLGVTMWQVARSAELDDLLQEKDGKKLNEGPPTSAPAPRKRGRPSRITAASAQTG

SEQ ID NO: 249671 - protein, 340 aa, unidentified
MLIIGCDYHPSFQQVSFVDTETGECGQRRLDHSSVEAESFYRGLRGNTVRVGMEASGHGRWFERLLAELGYELWIGDPAKIRAAEVRRQKTDRRDAEHLLQLLLEDRFPRIWVPTLAERDLRQLVLHRHRLVGLRTRVKNQLQAVALNEGMQRKKRLWSKKGREEFEQLPLLPWAGRRRADLLALLDGFDGSITQLSQAVEQEAQRRPEVRRLMTHPGVGPLTALAFVLTIGPWERFGCGKQVASYLGLIPSEHSSGGHQRLGHISKQGNTLARWLLVEAAHVAVQSDPQWRRHFIHLSLRRQRSVAIVAVARKLAVRLYWMLRRGCDYQQMAQHGSHGG

SEQ ID NO: 249672 - protein, 308 aa, unidentified
MKDTIYDQYIAIDWSIENMAIARMTKKSNKITAIDVPSDIVDLQAYLKNLKGTKILAIEETTTSQWLYAELKDYVDTIFICDPNRNKLLNEGPKTDKIDAAKLVQLLKAGLMKEVYHSGDKFLYLRRVTSGYEDLVKAGVRLKNQRYALLRACGKAGNEKKGINLGSQGEQFVLECLDRQIEVYEREKQCYENEFERLARKNPEIKHQKSLPGIGIINAVKIVTRVVTPHRFPDKGHYLSYTGLIKLDKISGGRSYDKKNPRFSRQLKSIYKSGILAAIGGTNPINDYYEHLIQEKGYPEHNTTLLGP

SEQ ID NO: 249673 - protein, 316 aa, unidentified
MAKPVTKITLGIDVAKDQLVICQWGCEQLLTLVNQPAEIQAWLETLCGPVRLAIEPTSHYHLAVVEAALACGHQVYLVNPRQLAHYRQAVNLRHKSDPHDAWLLARFLAHEAAQLRPLRPQDRRAQRLWALLTRRATVVQSRQQLQQSFAEVRLSIQALLSQFQQLLQRLDQQIQHLLRELGWWPDYLRCQSIPGIGPANAAALVAAYHRGAFAGSDAFIAYLGLDIRLRESGRFKGKSKLTKRGEPELRRLLYCGSNAACNHPRFAAYRQRQLDKGLSKIAARVALARKLARIAFTLMNQQETFATEQKTHCMAP

SEQ ID NO: 249674 - protein, 482 aa, unidentified
MKKKNIYQNQSQELLSLFEQAANNAKVMCVPIDYAKKDHVVMFCNGYGDILRKPFSVKNSPQGVDYLTDQVIRSCHQRSISEKHVFFGGEQVGSFADNFVSTLRSQGWLVAGVNAHEAKTQRENLQASTDRLDLMGIAKSLLNRRANCSPAQSGIYLNMRTVVRHRRKLVGITTEVKNRIHAVVDRLFPGFLNESKSGITPFSNSSLWLMKERFSAPQIRRRRRSTLIESLRRLGTKKSECTADTLQQYAAQVLKPPQDYVHMLQLSLAQHVKHFCCLQESIGQLEKEIALNLAQTQGAFLTSVRGVGIVLAAGVSAEIGNPFEQKTINNLVSYCGIIPRVKQTGGPQGETRTGKVAKRCNRILKDYAVQSASHLGLHGPADLMSDYKRRDAAGQHADFGMARRYLRMAMCLMRTSQIYLPSRLRKAQAQVKQRADYYLMTWPYLRDKWQKLGTLETAFKADHPLGQWRKIVQQFYGIKLTL

SEQ ID NO: 249675 - protein, 279 aa, unidentified
MAYLTSKSKDVVKEEQIKHNEVQIKKFINKLKSEWNKIHCCYEAGVTGYPLYRYLKSLGVNCILVAPGKIPRQSLDKIKTDAIKLARLLRSGDLESIHVPTEEDEAVRDYLRSRDSLRLDLGRNRQRLMKFLLRKGNVYSATKYWTVSHYKWLNNLHFENEILQETFNDYYSRVKVQEENLKAMDQRIQEIAESEPFRERVGILRCFRGVDYLTAMFLLCEVCDFKRFKTAGSFMSFLGLVPGEYSSGSKRKQTRITKTGSPRHFDGSCLAASLSWNGK

SEQ ID NO: 249676 - protein, 430 aa, unidentified
MDTAEGELVLGIGIDWAEEFHDVALGTAEKGVIEQFRVEHTPAGVGALIERVLRLEPDPAEVRVVLETRHGLLVEALIDAGFTVLPVNPDLVARRRGPARKKDDAEDARICCLLAVDRHAGLKALIPHGELGGELRAIARDDDRAARDQRRLLNRLRADLQTTYPAALVLAGQDLGAPTVLRLLERWPTQAELAAAPRAELVEFARAGRHGWPDRFADRVAAALTAPSLPTRDYLVRAKAAGIRLAAVQLLALHEARRGWEARMAELLLGGRRTGRNHTVQDPDPGKAFPGGAIYLSFPGLGDRLAARVAGEIGEHIDQFDSPNGLQCYAGQAPVTRRSGKSDFVVARRLAHNRYLGAAVHQWAFCSLTRSGWAREFYDQKITAGKSHHAALRALGNRWLEILWHCLTKGVPYNEAVHVANRNRALARAA

SEQ ID NO: 249677 - protein, 417 aa, unidentified
MKSKTKKVRSINGKSLIVAVDIGKTVHYGYFRAPNGEDLKPFRFYNFKKSFEQFWTKICRFQRQQNLEDIVIGFESTGPYAEPLFHFLRKKPAKLIQVNPMHTKRLKELTGNSPNKTDKKDPRVIADVISLGHALTLVVPEGPAAQLRRLTQARERAMKSRTVAVNQLQHLVFVIFPEFFSVMKTLTKSAMYFIKNHTTPESIFAMGFKSLAKVLKKVSRGKLGQDRAKELFEVARDSIGICEGKESIILEIDHLVSKIENENRFIDNLEKQMADYLGQIPYSQSILSIKGIGRITVAGLIGEVGDFGKFNTISEITKLAGLDLYEVSSGKHQGQRHISKRGRSLMRKLLFFAAINAVKSNGIMHEPYQQMLDRGMPKIKALIAISRKLLRIIFALARDNVEYVKDYNKTQHYKLAA

SEQ ID NO: 249678 - protein, 354 aa, unidentified
MAPFSRSHKIRTVHWGSTPNSGWVDLWGHVYIQIEKELSMIVGIDVSKKSFDVAWNNAGKSYHQTHDYNDKAIELLLSETPSDSHFVMEATGVYHSKLALKLHQAGRKVSVVNPVVIKRFAQMGLTRVKSDKADAQLICRYGEHSELALWEPSKEEIHKLQQAHSWLDDLIRDQTRLLNRKEAHRHHAVPSLFVKREMKAHEKSLKEQIRRCEGYLRAIVKKCFPELYDRLISIPAIGPKTAIELIVITKGFTQFDSVKALSAYAGISPTTYSSGTSIKGKGGIAKMGRGRIRQLLYLCSWTAKRSNKACVELHQRLSEAGKPPKVINIAIAHKLLRQAYAVATQGVEYSESCA

SEQ ID NO: 249679 - protein, 359 aa, unidentified
MQSPLVRPVYQFFVGVDIAYRDFTVASLVPGTKPKREPKPFEQTGKGFEHFQTLLRESGIEPASILVVMEATGSYWVALATTLHQAGFAVSVINPAQAHYFAKAQLKRAKNDALDAQTLAELAQALVPTCWTPPPHIYHELYQRLVQRLNLQELRTHVNNQLHALSVSPVIVPEVRLRLIQLIATLEQQLAQIDNEIAQVVQSTEQENDQQETSVESRWKRSITLLLTIPGVGMMTACWLVVATLNFTLCETPEAAVHYVGLTPIERRSGTSVRGRAQIGHGGHARARTVLYLATLTAARYNPVIKTCFDRLRDAGKPTKVARCACARKLLLLAFAVVRHGQAFNPNYQTAVNKSAISA

SEQ ID NO: 249680 - protein, 338 aa, unidentified
MTILYVGIDLAKNVFAVHAVNEAGKPEFVRPNVARAKLLELIAELPPCVIGMEACSGAHHWARLFMSHGHTVRLMAPKFVSPYRLSGKRGKNDAADAAAICEAVQRPNMRFVPIKSLEQQSQLSVHRVRQGFIDQRTATINRIRGLLSEFGVVLPLKASTVRSQAMACLEDLPGWSNTVIGDLLSELTHLDERIALYDRHVAQLARQDTRAQQLMRLHGVGPTTATALLAMIGNGHEFKCGRQFAAWLGLVPSQYSSGGKARLGHITKAGDPYMRSLLVLGARAILNSAKNKTDSVSQWAAALAERRGYWRAIVAIAAKNARMAWAVLSRGEQFTMPA

SEQ ID NO: 249681 - protein, 378 aa, unidentified
MIATTRPEMSVSEPTLYVAFEVGKKEWQLAMTSGFGVDPWVRTVVSGDLPAVAGALRQGRMRFALPAQARVVSCYEAGRDGFWIHRALTQLGLDNRVVDSASIEVNRRARRAKTDRLDALNLVRMLVRVCAGERKVWSEVRVPTVAVEAARHVSRERTALRQEQTRLSNQLRGWLATWGCRLPRYRKPGWWTAVRDWAGAPLPLEVQTRLARAEARWAVLERQRTELEAQQQAAVPAAAPASALRQLVQLKGVATTSASVLLDEGLVWRGFRNRRQIGGLLGFAPTRFDSGESEREQGISRAGNGHLQSISIQLAWNWVRWQPLSALTQWYRARFGTGKRARRRGIVAVARKLLIALWRYVTTGVVPAGATLKVAAIA

SEQ ID NO: 249682 - protein, 439 aa, unidentified
MNAAGIDIGSRSHFVAVPLDRDPQPVQEFPAFTADLERLADWLARCGITTVAMESTGVYWIPLFELLESRGFDVKLVNSHHVKNVPGRKSDVLDCQWIQQLHTFGLLSGSFRPDDEICVLRAHMRQRDNLTRYASAHIQHMQKALNQMNIQLHHVVSDLTGVTGMKIIRAVLAGERDPRVLAEHRDRRCKNPVQTIAKALQGNWREEHLFSLRQAVELFDVYQQKINDCDQAIARALDALESQTDQQAPQPVRKQQRSRNTPDINLHERLFQMTGVDLTRIDALNPHSVLKILSETGTDMTRWPSAKQFASWLGLSPGNRVSGGKRIGKSKTTPSANRAAAAFRMAAQSLHASQSALGGFFRRQKARLGSPKAVTAAAHKLARIFYSMLKNKTAYDAPDINYYEQQYRKRVMANLRKRAAQMGFELVERSADDTQPCMA

SEQ ID NO: 249683 - protein, 337 aa, unidentified
MSKVSSAAFCGIDVSAATLAAAVQRVDRDGFEQREFANSAAGHRQLIGWLSKRATAVRVSLEATGIYSLDVALALDRAEGIEVAVLNPKTANRFAQTLRRSKTDKADAMALSEYSLRMPFVAWQRPSPVSLELRAIGRHIAALTKDRTRLGNRLNAAEGSATTPGCVRRDLKRSVDGLDKRIARLRKEAVAMVCQDADLKRKFEQLVSIPGIAETSAVQLLSELAGLDPEMTVRQWVALSGLDPAHRQSGTSVHAPSNISRHGNSHLRRALYMPALVGVRHDPYLRAFYQTLQARRKTKLQAIMAVARKLLHAIFGIFKTGTPYDGAKLFPQLIPTS

SEQ ID NO: 249684 - protein, 418 aa, unidentified
MKIHPQLTHFAGFDWAKDHHDTTVVDLRGDIVAEFRIDHSLAGWQQWREKTATYPALGVAIETSFGAAIEGLLDSGVTVYPVNPLNAKRYRERKCASGNKTDRHDAWSLADALRVDGHAWRTLTVQDPVVAELRLMGRDEVALIGERTALVNQLQQALQEYYPPALEAFDDWTSASAWSFVETFPTPEALVKAGKRKWEKFLHSHKLCRPQTYQKRMDTFGTAGQWHVSAPVTAAKSFLAVTRCKQLRVLQSQLASYRKRIEALFASHPDSGLFGSLPGAGPKLAPRLLGEIGSDRALYEDPQGLQCMAGTAPVSYQSGKVHKVRIRRACNKHLRQAIHHFADKSRAQCSWAAVYYQALRDRGQTHPKALRSLGQRWLKIIWKIWQTNTAYDADKHMANQLAHGSWVLKLQPSPATKP

SEQ ID NO: 249685 - protein, 411 aa, unidentified
MLLFVGDDWAEDHHDVELMDASGRRLAKARLSEGMAGMARLHAMIGQALGDDIDAEDAATRVSIGIETDRGPWVQALVAAGYTVYPVNPLQAARYRERLVLSGAKSDAADAHMLADMVRTDSHQLRPIAGDSPQAEAVKVVTRMHKTLIWERTRATQRLRHALREYFPAALVAFEDLDAGDTLELLAKAPDPAAAARLSISQISAALKRARRRDIPTKAAAIQAALRAEQLGQPAVVTAAYAATVRALVALLGTLNEQVKALQGQVEAHFGQHPDAEIILSQPGLGTILGARVLAEFGDDHDRYTSAKARKNYAATSPITRASGKKKTVIARFVHNDRLVDALMTQAFTALSNSPGARAYYDLQRARGVSHNAALRQLANRLVGILHGCLKTGTVYNETAAWSHHLNEAAA

SEQ ID NO: 249686 - protein, 360 aa, unidentified
MTTPTTFVGIDIAKAKFDVALLNPLGKYRSKVYANTPEGYNQFFTWLQKHEALDAHICMETTGAYGRGLARFLAQQNLLVSVVNPAQIHAFGKTELVRAKTDKADARLIARYCQMHRPAHWVPPTDELVTLQALVQRLDDLLSLHNMENSRLETAEAAAQPSIEAVLVIINQQIDAVRRQIQEHIDDHPDLKSQKKLLLSIPGIGDNTTATLLAFISPFERFHSAKQLVAYAGLNPRIRQSGQWAGKTPIAKTGNVLLRKALYMPALTAKRYNPVITVFCDRLLIAHGKRPMQVIIAAMRKPCILPMTSSNPVSRSTLKKPLQRLHQGGICLTLMSSYVDNLHHVVSYVAPPRVCLASSP

SEQ ID NO: 249687 - protein, 392 aa, unidentified
MIYVGIDIAKDKHDCFIINSDGEILFNPFTISNNHEGFNTLFQRIESVSDDFTKVKVGLEATGHYSYNLLGFLLDKGLPTYVINPLHTNLYRKSLSLRKTKTDKVDSRTIATMIMSDMNLKSYSDISYHNEELKSLTRYRFDKVKERAKLKTSVSRLVNILFPELEKLVPSLHLSSVYALLSEFPGAAQIAASHLTKLSNLLSQASKGRYGKETAILFRETARSSIGSVMPAKSLELKHTIKLIQELTAEIDEIEAAIKQIMDEEIHSPILTIPGISYRMGAMILAEIGDFNRFDSADQILAYAGMSPSTYQSGQLNNCYSHMEKRGSRYLRYALYNATKYVCQWDESFSAYLAKKRSEGKHYNVALSHATKKLVRLIFAMEKSGRTYQPAA

SEQ ID NO: 249688 - protein, 316 aa, unidentified
MIPPPLFVGIDVAKATLDIAVRPTAETWSAPNEATGIDALVAHLVPLAPVLIVLEATGGYQGPLVAALVAAALPVVVVNPRHIRAFAQAVGILAKTDRIDAQVIAHFAEAVKPAPRALPDAQTQELRALLVRRRQLVAMVSAERARLDTAPLGIQETIHAHIAWLTTQIAGLDDALTQASQMHPAWQAKDAVLQSIPGVGPVLARTMLGHVPELGTLSPKPLAALIGVAPFNRDSGTLRGRRTVYGGRAEVRAVLYMGALVATRYNPVIKAFYERLLAAGKVKKVALTACMHKLLTIMNAMVRDLKPWHPQEAPSA

SEQ ID NO: 249689 - protein, 323 aa, unidentified
MTVYLGIDIASKKFDVAELSDGNYRCRAFANTSAGFLAFYKWLSTENKQDIHACLEATGDYGTGLATFLYERNLKVSVVNPARIKGYGASELSRTKTDRADSKLIARFCKASNPERWKPMPAPVRKLQALVRRISALNGMLRMECNRRENADANIQASLDRIINQLKKEIEAVRQELYAHVRSHDELKKQDELIQSVPGIGAISSHLILSFISGKEFRKAKEVTAYLGLNPRHHQSGSSVRGKTRMSKMGDARLRSALYMPALTALKHNPDIKAFGQRLLLAGKPRMLVVGAVMRKLIHIVFGVLKSNIAFSSRIALDSVTTS

SEQ ID NO: 249690 - protein, 356 aa, unidentified
MDSTKYIGMDVHKEATTIAVMNSAGKLVMESIVETKAATIVQFFEGLRGALYVTLEEGTWAAWLYDLLKPHVTKVVVCNPRKNALLKAGNKSDRIDARKLAELLRAGLLSAVYHGETGLRTLKELCRSYLAISKDLARTMNRIKALYQSWSIPCGGTSVYAPRHRKEWLSKITEPGVRRRAELFYQQLDGLQKLRQEARRDLLAESRKHGATEQLRRIPYIGPIRAALLIALMQTPHRFRTKRQLWAYSGLALETHSSAEYHYVQGQLQRSKRPVALRGLNQNHNHDLKSIFKGAANKAGSAKGPFHDFYTALVAKGMKPTMARLTLARKIAAITLIVWKKGVCFDAQQLKQQVSV

SEQ ID NO: 249691 - protein, 343 aa, unidentified
MELFVGLDVSLESIAICVLSSHGTVVKETTSPCEPEDLIALLRSLPGRVECIGLEAAPLSQWLYRHLIEVRFETTLMETRQVKGALKAMPIKTDRRDAEGIARLLHMGWFRPVHCKSTSAQEMRALLSARKTIVSAITNLELSIRGILRNFGLKLGRISKGGFEERVQELAAGNVKLQAAAISILAARNALRVELAGLEKLLRDFAKADPLCHLFMTMPGVGPIVALTVKAAIDDPNRFQSSKDVGPWVGLTPRREQSGERDIVGSISRAGDAGLRTGLYQAAMVMLNKGRPSWLTAWALNVAKRRGKRRATVALARRIGVILHRMWQDGTEFRFTRAAPNAA

SEQ ID NO: 249692 - protein, 400 aa, unidentified
MRVVFGIDVSKVSSEVAILVNGEKVHGYTMSNDAIGFSRLLGDLKTVHKPEIIFEATGVYSRRLQTFLDEHGYAYTRLNPLEAKKQLDSLRVRKTDQIDAEKLAQSQFVLNRKTTYVQKEVYQNLRDLSRFYQNLTEDIVRAKNRLHKALQVTFPELENILSTPTGEQYWNLVIAFPCKDFVLDLSKDELSESIRQSTSKRISDKRVAYLAEKLIALANQSYCAVKKNSPMLEEVRYYTKELLRLSEQRQAVLDEMVELAQPLPEYDILLSIPGIAETTATSIIGELGDIRRFQSANQINAFIGIDLRHYESGNFLAKEHITKRGNPYARKILFKCIHNIASASHTNPCHIADFYEKRKRQSQTTSTKPHTIASIHRLIRTMYYLIMHNKLYDYASTQNR

SEQ ID NO: 249693 - protein, 370 aa, unidentified
MEQYTEAFVGIDTAKNKHALAIADLGREGEVRYLGEIDSAPAAVERMIRKLAGRNGKLYFCYEAGPTGYGLYRQVRALGHDCIVVAPSLVPKRPGERVKTNRRDAVTLARLLRAGDLTPVWVPDTVHEAVRDLVRAHAAASQDLRRKHQQLLSFLLRHGRIYSGRKHWTKPHLRWLAQQKFDHPAQQIVFQDAVDTIEDAATRLRRLEEQLAAIVPSWSMAPVVEAYQAMRGVSFAVAVTFVAEIGDLQRFDNPRQLMAFLGLVPSERSTGERVRRGGLTLAGNKRARRVLIEGAWSYRHPARVSQTLQARLEGLPKAVRAIAWKAQIRLCARYRRLTAAGKKRPVVIAAIAREMAAFLWAIAQHVAPTA

SEQ ID NO: 249694 - protein, 382 aa, unidentified
MDTVAVVGMDLHRDFSKAVMMTEEGKVIESRNVWHDTREEMAELFGEFDPGTEVVMEASFNWPWIADMAEKAGLKPHLGHAMRCRELAKGMSKNDRKDATFLARLWLAGDIFPEAYLAPREVRARRSRFRTRALLVKIRTEVKNSIHGILHKNGIRNDEVTDLYGKKGRKWLKGLELSPEAREEMEAKLAVVDDVDKHITRLEEKLWAELPTDPRASLLQTIPGVGRLIADGFLAEIGEIGRFPDRRALASYAGVLPMDNRSAGEEHGKRTNPRCAKFLKLMAIEAVRGSVRTSGRMRSLFERVRAKNPDKPGKAVVAVARELMEVVHIVLSRGVPYEEAPVRPGSKEGVVTGHSEDRRTRGPRRASQVGRSAGPEKIQAAK

SEQ ID NO: 249695 - protein, 457 aa, unidentified
MSRARKAPKTIKSVAEVDTLTMLNRNAAGIDIGLDEMWVSVRADRDAEPVRRFGMNTPDLIAVAEWLKACGVETVAMESTGVYWIPLYEVLEERGFQVYLVNARHAKNLPGRKKDETDAQWLRRLHTFGLLNNSFRPAGEMCAVRAYWRHRADLIEHRAAHIQHMQKALHQMNVRLSPTVKDITGVTGMAIIRAILAGERDPLTLAQLRDPRCAQPEAEFVKALTGNYRDEHVFALKQAVALYDAYTQQILECDQELERKFSALKPVHDDDLPPLDTTDKRNTHSKNAPAYDGRSLLYQLLGVDLVAVDGLNEVTAQTIISEIGTDMSRWQDEKHFCSWLGLAPHNDISGGKLLRSRTLKTHNRAGQAFRLAAQAVSKTDTAYGAFFRRMRTMHGPMKAIVATAHKIARAVYFMLRDHKPFHDTNAEEYHQREREREIARLKKKATKLGFTLAPASA

SEQ ID NO: 249696 - protein, 337 aa, unidentified
MIVIGVDVHKHSLTAVAVDELGRAVGERSGPVGADVVAWAQTLEAERLWAVEDCRHVTRGLERTLLEAGERLVRVPPRLTAPQRRRGRTRGKSDSIDALAVARAALQEPSLDGPRAGEETLRELKLLVDHRDDLVAERRRCQQRLRWHLHELDPTLAVPLGALDRTIWIERLSRQLARRKQTTQARLARELVGRCRTLTRSIGELDRELHTRTATLAPRLLQLPGCGPLSAAKLLCEIGPIDRFPSDAQLARHAGVAPLDASSGKHQRHRLDRGGNRQLNCALHRIAITQGRIHAPAQAYLERKQNEGKTRREAIRCLKRQLARTVYTTLKKELLLT

SEQ ID NO: 249697 - protein, 421 aa, unidentified
MGINKANVKTSKHIGRENMKHVIAFDISMGKSYMVVYNALKKCQLEKEIAHNRPGFMDLKKLIDDLIEGYGEQPHIVFESTGVYSRTLERFMQENNYSYCLLNPLEAKLQCDSLRIHKTDRSDAHRLALTHFTHERRIETDSNDVYRQLKRLSRHYSELDDELSVTRSRLHKVVQETFPELENIFTTKSELFLNVVQLYPHPDLVLNHSKTIIKNRILANTNKRMAVNKAEEKAVELIEAAKQSYPAASSTDVVCDQVRVYAKRFQELLLQKEQCISKMESIAERLEEYSIIRSIPAIGANSAVRIIAEIGNIQRFDNNRQLNAYTGIDIRRYQSGKFIAKDKINKRGNKHLRKIMYLTVQNMIRQRRFGGNHIVEYYDKLKTQPYNKCHKVASVACVNKLLKTIFFLVTHNQNYDYRLAP

SEQ ID NO: 249698 - protein, 330 aa, unidentified
MKLPQIIGADLSKKSIDFISHPSQEHLKTENNTRGYLDFIRWLKKQKINCSAVMIVMEHIGLYSKQFEQFLHQKGLIFTKVSGLAIKRSMGLVRGKSDKLDAMRIARYGHEKFKDLIVVKPGNETLERLKMLHSLRERLVRNRAALITAVKEYQLTCGLKNSDIMIASQLQLIKGFTTQITKIDSTMDDLIRSQPALKRNYDLLQSVKGVGPVLALATIIKTSNFSCFNDARKFACLCGTAPFEKTSGTSIRGKTRVSHYADKRMKTLLDLAAKSAIQYDKELKKYYINRTHNGKSKMSTINVVRNKILGRMFAVIKRQTPFIENYLQAA

SEQ ID NO: 249699 - protein, 308 aa, unidentified
MFPVGIDVSKNTLDLCMLYDGIKGRIKTRNIQNNRHSVENILRWLRLQHCSPEDVHVVMEATGVYHERLATELHDAGFRVSLANPHRSREFARGMGIMTKTDKVDAYMLACYAFLKKPHRWEPPAPEIRYLGALLRRRDVLLGDALREENRLEKYLSTDTPADIISSCRRMAQLLREEISNIERQIKAHIKASPALRRDYTLLASIKSVGPQLGMHMLIVLRSHNFVSAEQAAAFLGVVPIEKRSGTSVRRRPRMSKIGPPQLRAKLYMSALCGKIYNKRMRNIYDEMCLRGKPKMVAIGALMRKLGH

SEQ ID NO: 249700 - protein, 370 aa, unidentified
MKNSITYVAMDTHKKDHKIALHYPGDEEIIEFAVKNTVRDIKKMVKKIDKHAPGKVEFCYEAGVCGFTLKRRIEALGCKCCVIAPSLVPIKPGERIKTDRRDARKLLGLFISGMLTEVVAPDQKQEAGRELTRLRETAKENLKRIRHQILKLLTRHGYVYTDGYHWTQKHLLWLRGLEFTEPVLTDVFDYYFTEMQHCIGRLGGLDKELETLARSQPYKEVVGFLRCFHGIDTLTAITIITEIFDFGRFASARNFMSYLGLTPSESSSGDKHKKGPITKAGNKRVRRLLNEASWHYRHRFSPSAPLKKRRRGQPQWVIDIADAAGHRLSKRYRRLVRNGKMPCKANIAVARELAGFIWAVLNEYETTKAA

SEQ ID NO: 249701 - protein, 355 aa, unidentified
MDSVKYIGMDVHKEAISIAVLNSSGKLMMECVIETKAISILQFFQGLRGSLHVTFEEGTWAAWLYDLLRRQVTEVVVCNPRRNALLEEGNKSDRIDARKLAELLYLNKLKAVYHGENGVRALQELARSYLTISSDLVRVMTRLKALYRSWAIPCAGKQVYALRYRAQWLGKITEVGVRRRAEFCYQQLDALRSLRQQVRRELLAESGKHQAWKLLCQIPSIGPIRAAQLIAILQTPHRFRTKRQLWAYGGLGIETHSSADHRYVDGRLQPSKRPASLRGLNRNHNHDLKNILKGAAIIAATKPGPFREFYADLVAKGIRPEMARLTLARKIAAITLIVWKKGVCFDARHLKPQTA

SEQ ID NO: 249702 - protein, 394 aa, unidentified
MFFVGIDVAKRKHEAVVIDDKGRIVQKSFSFPNSLSGYNSLISCVKRITSTRKDIVFGMESTSHYWLALYSHLIKDGYTAHVINPIQSDAFRGLFIRQTKTDPIDAVIIAEVIRFGKYSSTHFPQHKILALREMCRNRLYMVDAISDLKRKTIALIDQVFPEYDQLFSDTFLVSSIEVLYRYPTPKKLLHIRRNTLTNLLIKTSGGHFGSAKADEIIHAAKNTFGIDDPYDVYADLIQTFIKQIKFIQKNVAEIDQKITAIMDEIASPITSIPGIGVTLGAVILSEIGDISRFKSADKLAAFAGIDPSLKQSGDYSSIRNHMSKRGSPYLRRALWMACIPATQVDPMFHAYYLKKRSEGKSHMKTMGHVAKKMICVIYAVLRDNKEYQPVLTAA

SEQ ID NO: 249703 - protein, 370 aa, unidentified
MESIIYVGIDVHKESYSLCCYDPRTDRYLYEHKMKSTTTNVLKYLDSVKKQLGDVIFICGYEAGPTGFGLCRDLLRKDIACVVMAPTSLKRNANYKVKNDKVDARLLAKDLFTHDYSPVHLSSQKEEAIKEFCRMRRSIMTELKTAKQVLLAFLLRQGKHFDGKTHWSGEHRKWLKQITFEQPYLQEAFDEYLISVNELEARLKRVEHRLEEISKDEEVESKVKKLICFCGIDTLTAVSIVSEVGDFMRFARAWDFANFVGLSVGEHSSGGKERHLGITKSGNCYLRRLFTESAKSLKKTSMKSKKSKRLIDRQQGNDPRVIAYADKCRYRLKYKMMSLENRGKAANVASTAAARELACFVWGMMTDHIA

SEQ ID NO: 249704 - protein, 343 aa, unidentified
MSKSTTIAIDLAKSSFAVVALSSSGRELWRRTLRRKQLVALLSRQEQATVAMEACGSAHYWARCWRAMGHEVQLLPPQHVKGYLRGQKNDYNDALAIAEASLHGRVRPVRPKSVEQQDEQAFHGIRQSLGRERVRLSNQLRGLLMEYGIVIAKGCAALKREVPLMLEDAGNGLTPRFRMLLQRQYHRFLALEKELAWYDDQLKQQVNQDEVCVRLMEVPAVGPVVASAVKNWMGDGKQFKRGRDASAALGLVPRQHSTGGRQVLSGITKRGDNYLRSLIIHGARSVVARVDNKTDSLSRWVQRIKATRGYNKAAVALANKLIRILWVIVARGERYRPANTVTA

SEQ ID NO: 249705 - protein, 352 aa, unidentified
MRKSNKGGAQVHFIGVDHHKQTSTMTVLDDQGREVRTARLLNLRADVEAFIREAAPGGFLAVIEAGRASYGMADLLRELGGQVKMANPLQVKAIAHARIKTDKRDSRTLAQLLRADLIPEVYQREAWNREAQRVLRLRAFWLSLRVQVRNKIRALLAQQPEEIRLAVEKQDGPLFGAKGQELLGSLKLGERDGEILRALLRGYQTFQAFQAESDQVVAALYQDLPAARLIDTAPGFATTLAVLVAVEIADVRRFPRAEALSAYAGLIPSTYSSGERTYHGPIVKGNVWLRWALVEAVHPAIRKDQELAILYYRLARTKGPNVAKVATARRLLTILYRMLTENRVYRLKPKAA

SEQ ID NO: 249706 - protein, 310 aa, unidentified
MFSCSAGIDVSKDSLEVRIHSLEAGVSCSNTERELPALIGWLMLYQVNRVLVEATGGYERKVVKAAQAAGLEVMCVNPRRAKEFSRAMGQKAKTDPIDAKSLAHYAAILDSPSARITSPEHDKLRALVQQREHFVQQRDDDRRRLKTASCDAVKPALQSHIDYLNTAVEAIDQLIRQSANELDSEKVARLCSVKGIGLVTATSLMAYLPELGEIGGRPIAALAGLAPYNNDSGRHKGARHISGGRFSARRSLYMACWVVIRDQPEFGTRYKALRDKGKCAKVALIACMRVLLVRLNAMLRDRTEWIERTA

SEQ ID NO: 249707 - protein, 353 aa, unidentified
MRKMNESIVSGKRIFVGLEDAKRSWKLCVRCEGMIVHEVSMPALYPALRGYLMGRYPECRIVVMYETGFGGFNLYDKLMADGIECVVTPAHTVQQAKVSRVKTDRTDARLLAANLEAGTYVTCRVPDRQRREDRQVSRTTSQMQRYIIAVKNQIRRFLEFHGLDEGLAAGRWRDRDYRDVDIASLPSSLRTSLGALLSLLAKVEELHAELKQELKRLSQQSPYQAGVAAKAGCPGVGWLSAIRFTLEWGEMSRFQTNGQIASFVGLTAAEDSSGESIHRGHITGQGSSQVRAWLIQCAWRAIRLDPVLLHKFRAVWSASGSKKKAIVAVARKLVVRMRTVEVTNQPYVIGVER

SEQ ID NO: 249708 - protein, 402 aa, unidentified
MTESPTRFFGLDIHKEYFMAVGVNVQREVIFGPQKVSNYQLDIWASRLLTPQDSVVLEMTTNTYLFYDTLMPYVHSIIAVHPPSVALVTNAQVKTDKKAALALAQLHAAGMLTGVWIPPHEVRDLRALIARREKMVHLSTMAKNRLHSLLHRNHLVLPEKPFDPEQRTWWENLPISATEQFLVRSDLETLAFARKQVEQAEECLKKESAQDERILLLVQLPGVAMLTAITILAAIGDISRFSTAKKLVGYAGLGARVHDSGMTHATGRISKAGRKDLRRAMVNAANHAIEHHVHWKKEFERLEPHLGRSKAVVAISRKLLVAVWHVLSKEVADRFADPRDVASSFLRYAYRVGVRNLPDEQPALVFTRDQLDRLGVGKDLKEIPWGSKRFKLPPSKILHEKE

SEQ ID NO: 249709 - protein, 428 aa, unidentified
MLGVGLDWAEDRHDVALGLPGKGVIEQFRIDHGPDGMARLVARCLTLEPDPAEVRVVLETRHGLLVEALLDAGFTVLPVNPDLVARRRGPAKKKDDAEDARICCLLALDQFVELRRLIPHGETGAELRAIARDDDRAARDERRLGNRLRADLLAVFPAAIDIADGDLAAAVFLHLIERWPSHAELAAAGRDDVEALARTHRHGWPDRFADRVTAALSTPRLAVRPELARAKAGSIRLAAAQLLLLRTQRRTWHRRMGELLLGAPRTGRAKQPKDPKQPKDPNPGNAFPGGEIYLSMPGLGDRLAARVAGEIGEHVEQFTTPNALQCYAGTAPVTRRSGRSEYVVARRLAYNRYLGNAVQQWAFCSLQQSAWARTFYDTKIAAGKNHHAALRALANRWLEILWHCLRLGVHYDETVHTTNRTHALKPAA

SEQ ID NO: 249710 - protein, 386 aa, unidentified
MQKLNDLSRSLTPLKPDRTLIAVIEMSLSSWLVAGIVPGIERQPLKKLEVDESTLLKLLIRWREEAKKSGHSIERIAVAFEAGRDGFWLARWLRARDIEAHIIHASSVAVSREHRRAKTDRLDTELLKRAFLGWLRGERDHCRMVAIPTIKDEDAKRPNRERESLVGEQSRIVNRMKAALVRLGIRGFNPKLKKAVERLDGLRTPEGEPIPPNTLAELRRDMARRRLVNDQIRQIEDTRLERLEQAPCDGPHAMVRLLARVIGVGIETADMLVQEVLSRNMRDRRAIARYAGLTGSPDESGRKRREKGLARSGNARVRRGMIQLAWRFLMFQKDSTLAQWFRARTENARSARKTMIVALARKLLIGLWRLVREGVVPDGVVLRPVS

SEQ ID NO: 249711 - protein, 333 aa, unidentified
MHVAAALDERGARLGVESFAATAAGYQELLGWLEGFGTLELVGVEGTGSYGAGLTRHLLGHQIAVVEVDRPNRQRRRRTGKSDPHDAVAAARAAQGGEATGSAKTRDGNVEAMRVLRVARRSARGNRTQALNQMRSLISTAPDELRSELRDLSIYKVLTVASAFRHTGRTDVTTVTKLTLRTLARRALSLEEEVKEIDRLLKTLVAETAPELNAIDGVGTDVASAILVAAGDNPERLKSESTFAKLCGVSPLDASSGKQQRHRLNRSGDRQANSALWHIVFTRMVNDPRTKHYIERRMKEGRSKKEAMRCLKRYVAREVFAALPRSQFALDSP

SEQ ID NO: 249712 - protein, 493 aa, unidentified
MGPGAGELNKSGPANRRLRLRKEAGAGSTILLPVRLLEGRERPRTSAESLRAKADDREQLLWSAPALIAGEIVRDLNFAINPGGAGRSDKPEPPAPMPTAIVGLDVASTSARACVTDLAGAVLLEKDFPATLAGEELLLAALPAGSVIIIESTGPYHLTWARRLQAAGHRVLLLNALLAKRLATSANALRQRKTDTIDARHLAEVGRLHLAALLRFEFVEDAPRAQLRALCRVRRGVRHALTNAVRLAQHLLMTMLPGADAAGLNFAYNASLPELFLRIHSLAQLQRLRRATLARHACSKSDALLTLLAEPRQTAAMFDALLPALQVQLRVVQSLREHFAALGPQLRAALKHGEHTRTAELVRSIPGYGEKTTPIIIASLPPQWRTWGNKRQIASRIQAHWGCDPRPRESGKWKGQVRMTKRGDEMARTALFQVAVCALLHDPMLKAFYDKKRAEGQHHLIAVTHVMRRQLRRLVAVLYDQKPFVPHAEPAAA

SEQ ID NO: 249713 - protein, 319 aa, unidentified
MVYVGVDLHRKRSHIVALDPAGEVVLSRRIGNAPAEFWRLFGELEPQPIEVVFEATYGWSWFADLLADAGIPTHMAHPLATKAISAARVTNDAVDAKTLAHLLRTNLLAEAWIAPPDAREARRLVRTRAGLVRMRSRVQSQLHALLADLGVIPELTTLFGPAGRRWLADLPMPASARDRLDAGLRLIDAITVEVGRADADLRTTFAGDRRVQRLLPIPGVGLVTAATVVAEVWDIQRFPSPERLCSWAGLTPGERTSDAHTRRGHITKQGSRWLRWMLVEAATTAVRDRQLGRFTAQIAQRRGPKIARVALARRLLTLC

SEQ ID NO: 249714 - protein, 344 aa, unidentified
MKALKSHVAGIDVHKEMLAITVLIGELDGEPKEYQFEFSTFTDDLMALGLKLKEMGVTDVAMESSGIYWKPVFNVFNPLGLKVVVANAAPIKNVPGRKTDMNDSRWIAELHRFGLIRASFIPDGEFQRMRLLSRHRTNLTEDLARVKNRIQKVLEDGNIKLSIVVSDIFGVSGLKVLKQIAGGYTHPNILITEVTTKIKRMEEMKKALTNCLTTEHCFVINVLMKQYEELKNRIEEGENELCKKVEPYAHLVEELDKIPGIDAILAMGIIAESSANMSSFKDERAFAAWSAVASGNNESAGKKKRAKCRKGNPALRKMLIQAAQKATTARNPFIDLNTTNSAFA

SEQ ID NO: 249715 - protein, 312 aa, unidentified
MDEWGVVAGIDVSKDRLDVCVLPHGDVFAVPRDGEGLQALSARLLALKPQVVAVEATGGFETTVAAAIAGAGLPLVIVNPAQVRAFAQAVGQRAKTDPIDAQVIARFTLAVKPQVRPLPTAAEQLLSDLVTRRRQIVQMISAEKQREKRQLQPRLKRSIARLVSALTKELTELDRQIDDEIRGAPAWQAKEELLRSAPGVGPIVSRTLVAELPELGQLDRRQIAALAGLAPWTRQSGKWKGKSFIGGGRTSVRTALFMAALVGARHNPVLKAFHQRLISAGKPKLVALTATARKLLTILNTMVRTQTPWRHA

SEQ ID NO: 249716 - protein, 310 aa, unidentified
MTILCGVDVSKSWLDAWIEPAGHQRFANTAEGVAELGAWCRAHHAALVVMEASGGLEQPAYLALWQAGQPCAVANARSVRKFAEAMGYLEKTDRIDAMMIARFADAKRMVATPPPSADQQRLVALAVRLRQVTADLGVQKQRLRSVRDPFARQSIQEAIAFFTTQASQLASEIAALIEVDPLWVALDRTFRSIKGVADRTVAYILAELPEIGTISNRAVTKLVGLAPLPDDSGQRRGRRSIRGGRAGLRSILFLVADVARRYDQSLTDFRERLLARGLSKMEVRIALARKLLVRLNAKARDVRAELAHAL

SEQ ID NO: 249717 - protein, 413 aa, unidentified
MEPLEDVFKTPCAGIDVHKRELSVCVEWWGADLKLNREVRSYDTKRKSVRAMGVWFKEMGVTHAALESTANYWRPVFDQLETLCVVVLVNPYFVKQMPGRKSDVADCIWIATLLRKGLLRASFIPPREIRDLRDLTRMRTVRIEHAVKVGNELRQCLEKAHIKLDSVVSDLLGVSGRAMIRAMIEGETNPEVLANLAQRRMRGKIPELRAAMDGRLNDHYRFLIRQHWDLLETLEKQVEKLEREIEQRVIPFDWAVRLLMTAPGIKKIAAATILAEIGDNMDCFETARHLVSWAGVCPGNNRSAGKSRSGRNPRGNRFIKGILVQVALAASRTKQAYARALYQRIARHRGKKRAILAVANSLLQAIWYMLKHRQEYKELGVNYYEEQSKEQLTKALVKRLERLGHQVSLRQVA

SEQ ID NO: 249718 - protein, 427 aa, unidentified
MYNETERLNAYRQMRSSIRNSGQYLIVGIDIAKEKHHAFFGTAAGKVLCKQLIFTNDKSGFELLIARAEQLRLQHQLTYVVFGMEPTANYHKPLAEYLIQEDAMVVQVSGTAVVRNRELLDNRWDKHDRKDAANVADLVGAGKCQFYDNPPQAIHDLRELLSLRRRYRKLESGIRTRIRNNLLALYFPELDCRFTSFQQDCLTIIKTCLSPAAIAAMPFEEFKRRIVIRQKGKRQESFLEDIWNSAHHTVGRPVDETVQYMAAQSVSQLEHFRAEIDNLDRQIFMIASSLPEYKYLISIPGFGPFISAKLLATINDPDRFSNEAQVIKLAGFDLCASRSGKPSGKAIPQISKKGNAELRFALVQAAIVATTRNTLFIRYLNQKLQGREQEKGILKKMRTKVASKLLVIAWTLMKQHEYFNGEHLRLT

SEQ ID NO: 249719 - protein, 353 aa, unidentified
MSKYITIGMDLGNKKHAACALDQDGKVLWRREVANTPEALKPFFEENAGATVAMETGLCCRWISALAKSCGCDAIVGNARKLAAIWTNTRKNDENDALLIAEIARSSRRLFHPVELRDDERHEMVQIIELRDVAVSQRTQAVNSVRGLCKAHGVFIPKCDASCFHKVAKGAIPPGMAWKFRPMLRHLKELAATIKRYDAMLEKYAHEHFKEEVELLQTAPGVGQMTSCAFVALVADPGRFGSARDVGAYFGLTPGQDQSGDKDAPKRVTKAGSALMRRLLVTAANHILRASSPDTALKRHGERICARGGKVARRKAKAAVARKLAVVMLAMLKSGKPYDDGHAARKAGAGIVS

SEQ ID NO: 249720 - protein, 333 aa, unidentified
MQNFYFIGIDVSKKKLDICVMSNSKVLKEEQVNNHPQAIATVIAGIKEELSMSNDSLIICAEHTGQYTYPLICACKSVGSKLWLENASQIKYCSGVTRGKNDKVDARRIAVYAMRFFDKAKPYQRPTEELMRLKQLEAERSLYLTDLAKYKAQLSDQEGFMEDKIFKRKAKRLKEMIKSLEKTLKEIAQEMADVIYSSEELSRQMRLLKSVEGVGPVVAMNMIIATEAFTRFDNPRQFNCYVGVAPFAYTSGSSQHSRNRVSQRAVKYIKCLLHMAAVAIAHKKTGDLKTYFERKVAEGKNKMTVLNAVRAKLVARMFAVIRNNRVYQPILSV

SEQ ID NO: 249721 - protein, 407 aa, unidentified
MLFAGIDWSEKFLDFHLRTAEGEVLAEGQVKPGVEGMAELFAKLENHASASEIGVAIETAHGAWVQALLDRGLKVYPLNPKTVERFREALSANGVKTDKIDRKVLAMFLATFHQENKPLRPDDPDIIQLRILCQDRLRLAEERSAKVNELGAVLKCYYPSFTGLFGRLDSDIALDFLRQYPTQNQMQKLSERRLRNWLSRHHYSFPSRIDGMVGQLKQPVLQVAEHLQQAKKTLICYLARSIKMLNSEIADRDKQINDHLDGLPESDWVRSLPGAGKVLAPALLSCLGRDPQRFASVAEARALMGTAPVTKASGNFRVVQFRRGCWKFARRTLQLFAEQSRHQCYWAQAFYEKQRNSGHKHHAALRALAHRWLKILLAMRRSGSLYDEDIFLNSQRRYLLKIPMLKN

SEQ ID NO: 249722 - protein, 299 aa, unidentified
MTLPKTYIGVDVAKDWIDVFTASNQRFTRVSNLRDRLSKWAQGLTGDVMLIFEATGRYDRVLIACLEDSGVSYARVNPLRARQFARAAGLLAKTDRLDARILCTMGEALRPERATPIQLHRQRLHDLQARRDDIVNMITAEQNRLSVADDAFITKDIKASIRSLTKRREALHKQINAHIGAHEDLNEQNQRLQSVPGVGPQTACHLMASMPELGQVNRRQIANLVGLAPHARESGSTRASGQSMEADHVSAARCIWQRSSPFGGIHIGKPSMAKCATMERLQKQPSSPLLDDCWSVSMR

SEQ ID NO: 249723 - protein, 343 aa, unidentified
MEQPITIGLDIAKHVFQAHGADATGHVLFRKRLTRARLLGFLAAQMPCVVAMEACAGSHYWGREISKLGHTVRLIPPAYVKPFVKRQKNDAADAEAICEAAQRPSMRFVPVKDEEQQANGVVFRARDLLVRQRTQCINALRGHLSEYGYIFRQGITHAATLIAHVKDPNSSLPESARVILRLLIDTFAALESQIKELDAEINRRSKADPVARRLMTSPGVGPITATAITALVPSAGSFRTGRDFAAWLGLTPLQKSTGGKQKLGAISRRGERTIRRLLILGASAVVRQAGRRGAPAKSWLAQILPRKPRMLVTVALANKMARVVWALLVRGGVYRAPATAALS

SEQ ID NO: 249724 - protein, 317 aa, unidentified
MCNSFIGIDVSKEKLDICILRNNKLTTKIYDNNVGGYELLISFIKSKKLSPHICMESTGKYSLGSATHLHEAGYKVSILNPLRIRAYRNTQLLRNKTDKYDAQIIAEFCKLYIPEQWYPATSEFSELKELFRCMQSYQEDKIRYQNKLELVSKDSKMRKLMQKSIKHTENQIKELEEIIDSHIASHCEMQKNCKNLQTIPGIGKKTAIAILAEISDLRNYKSARKLASHAGLTPMHNQSGSSVKGRAKISKIGSSNLRKALYFPAITAINFNKTMITFSKRLEERGKRKMVIIAAVMRKLIHVIFAILKNGVEFKEI

SEQ ID NO: 249725 - protein, 426 aa, unidentified
MPNCLFIGVDVALKGNQFCVMNFDQHVYFNLKFPNNPEGNNMVIDKIKDIEDKFFFEKIIIVMESTGMYSFHPACYLSSNEYLNNFHTEVYQINACDFDKYKKSFHDLEKEDGIDAYILADYARVGRTKPLYPFRGSQYIALQRLTRQRYHICKELIREKTYVMTNLYLSFSGLLSLNKNELPFSNMFGATSSAILEEFISPDQIAESSIEELMNFISSKGKKHTKNPESKATALQKAIRSSYRLDQTAYEPINIAIASSINTIKFHQEQLKNIDKAILNTILGLDSNVYNILLSIRGIGKVYAAGIMAEIGNIDRFPHNSKLAKYAGLYWKRNQSGEFDSQDKKSSKKSNKYLRYYLIEAAASCVRQGFPFIKDFYNIKYNEVTKHQHKRALVLSARKLERLIFGLLRKNQYYKPLNSVQNSKNI

SEQ ID NO: 249726 - protein, 428 aa, unidentified
MEEIAEEPVQVVARVCAIDIGKAGLVACVRVPHASRPDRRVQEVREYATVTPALLALADWLRVERVELVAMEATSDYWKPVFYLLEAEGFQCWLLNAKHVKNVPGRPKTDRLDAVWLAKVVERGMCRPSLVHPRPIRQLRDVTRYRRSLVREQTREKQRLEKTLEDAQIKLDSVISDLHGVSGRQMLQAMIDGQRDPKVLAELARGSMRRKIPQLREALTGHFDDHHAFICATMLRRIDAIAADIADLDARIEEMIAPFAQAVAKLDEITGIGVRSAQEIIAELGVDMNAFPTAAHLVSWAKFCPIDASSAGRKKGNSTGKGNPWLAGALGEVVAGLARTNTFLGERYRRLARRRGKKRAIVAVGNSVLTIVWHLLSDVDARYQDLGPSYHESRINNQRRQRDLIRQLEHLTGHKVTLQPQPELPAAA

SEQ ID NO: 249727 - protein, 345 aa, unidentified
MPIVGGLDIHRKQITFDYLDTGTGQVRRGQVSPADREHLRAWLARFAGREDVAFALEGCAGWRYVAEELAAAGITAHLAEPADTAFARGRKRHAKTDKTDARHLRMLLAEGRLPECWIPPRHILECRAVLELYNDLRRERTAWAQRIHAVLFHQGAPALGEGALRTERGVAELRAAAAAHLSPAGQLQVATAVEVIDALEARLHVVRHQLLDAARHLAGAKALAARLYGVGPVTALAITCWLGGAGRFSSSRQAVRFAGLDITVSSSDRKGPPGKLSRQGPPVLRWAVYEAGKAHARTSAPDHGYYAAVKDRKNSKRACLSEARKILRQAHHILAGLGDDALAVA

SEQ ID NO: 249728 - protein, 349 aa, unidentified
MSHKLNAGIAVIGIDIGKNSFHAVGLDRRGAIVLRQKWSRGQVETRLANLPPCLIGMEACVGAHHLSRKLASLGHDARLMPAKYVRPYSRGQKNDFRDAEAIAEAVQRPTMKFVATKTAEQLDLQALHRVRERLVSQRTSIINQIRAFLLERAVAVRQGLRFLRAELPRILATPCDALSPRMLRVIEDLAGDWRRLDERIEDLSSEIEVLARRDVGCERLMGVPGIGPIISSAMVAAIGSGDAFTKGRDFAAWLGLVPKQISTGDRTILGKISKRGNRYLRVLFVQAAWVVLIKPKSWQRHGLKPWLEAAKKRLHHNVLAIALANKLARIAWSVLARGRAFEASKIQVA

SEQ ID NO: 249729 - protein, 354 aa, unidentified
MNQTQNNKLSFKGQIFFIGIDVHKKSWTVTIRLNGMQLKTFTMQPNAEKLKKFLMKNYPGGHYMSVYEAGFSGYWLHYQLEELGIHNKVVSPGDVPIANKEKSYKDDAIDSRKLARELENNSLFSVYVPTPEQSATRQLSRLYALESNENKKIKLRIKSFLNYLGIEIPIEIGNRWSNRLISWLEELKLKNKLDRYYLDQLIKNLKDKRKEMLATLKLIRENYSDHRIIKYLRTVPGVGLITAFTFYAEIMDIRRFPNQNKLAAYVGFIPSIKSSGDKTRSRGLTRRQNKLLKFRIIESAWVAVKNDPALTSCYMNYLKRMSKQEAIIKISRKLLNRMRSVWLNEQAYQVGRTI

SEQ ID NO: 249730 - protein, 359 aa, unidentified
MQKYELNFNGENVYVGIDVHLKQWHVCVRTAHVSKKPFSQPPSAMALKQYLENNFPGGTYLSAYEAGFCGFSVHYELESAGIRNIVFNPADINDTQKERSRKTDAVDCIKICRNLMNDELKAIYVPSREELGLRGYLSARDTAVKKQRVAKQRIKSLLNRNGVKIPDELFPTSKTHWSRHFNGWLEQVAADLGSGEGYRLNDLLKDLHHAHSQVLAAGRRLNEVISAHHMDTNELLLSIPGIGRVTAARICLEVPHASNFVNSDHLASYIGFVPDVHGSDDNVYVRGITYRRRVLLRSAFVESSWRAIGKDPAMGLAYSNYIKRGMKPNNAIIRIARKLVNRVFFVLRERKRYEIARVR

SEQ ID NO: 249731 - protein, 433 aa, unidentified
MDRLVERCAGLDVHKDSVAATVRVPGGGRERLQETRTFSATTRGLLTLADWLASYGVTLVGMESTGVYWKPVFYVLEERFECWLLNARHLRNVPGRKTDVQDSAWICQLLEHGLVRASFVPPKPIRELRDLTRYRKTQIEERSREVQRLDKVLQDAGIKLSSVASKTLGLSVRRMLEALIAGTHDPEVLAELACGRLRAKLPALREALAGSFRSEHHGLLVAQILAHVDYLDETITTLSERIEQLLAPFSRQRELLETIPGIGRTAAQVLIAELGVDMSVFPSSAHLASWAGQCPGNRESAGKRRSGRPRHGSKWLQTTLTESAKAAARTKGSYLSAQYTRLRGRRGPGKATGALRHSILVAAYQILDQNVPYHELGADYFDQRSSEQRTKRLVRQLLGADYFDQRSSEQRTKRLVRQLEQLGHNVTLEPLAA

SEQ ID NO: 249732 - protein, 402 aa, unidentified
MIKDYELVDVFIGIDVGKSNHHAVALDRSGKKLLDRALPQDETKLRNIITSLAGHGNLLLVVDQPATIGALPVAVAQAEGISVGYLPGLAMRRIADLHPGEAKTDARDAAIIAEAARTMPHTLRSIVIADEQIAELSMLCGFDDDLAKQATATSNRIRGLLTQIHPAMERVIGAHLDHPAMTTLLSKYPTPAALQKAGQKRVATLLTKFAPRAGNRWAAELFTALAEQTVVVTGTGAAHIVLPQLAGMLSQVRTARGEVLAQVEALVETHPLHLVLTSLPAVGVRTEARILTEVIGKDFKTAGHLGSYAGLAPVTWRSGTSIRGDHSSRKGNKVLKRALFLSAFAALKDPTSRTYYDRKRAEGKRHNQALIALARRRCDVLFAMLRDGTLYDDQKPKRPQAA

SEQ ID NO: 249733 - protein, 463 aa, unidentified
MKSKKGEPAEPPQGSAAKKLDWKALEVVHPDAAGIDVGGSEHWVAISPERDAEPVRRFGCFTADLREMARWLVEKGVRTVAMQSTGVYWMPLFEILEQAGLNVYLVNAQHTKNVPGRKSDIQECQWLLKLHAFGLLNNSFQPSDEIRIARTLWRHRGNLVAEAGSAIQRMQKALIEMNIQLSNVLSDLSGVSGQAIIQAILGGERDPWALAGLAQPEVQATAEEIAQSLEGNWREELLFVLGQEVELYRTYQEKIRDCDRQLRQHLESFGSRVDVGAQPLGPKPKGKKGSKNAPQFDLRSELYRITGIDWVQVNGIDVLTAQTVIAEAGADLSAFPREQQFTSWLGLCPTNEKSGGKILKRRTRKVVNRAAAAFRNAATTLLRSQSYLGAQYRRLRTRLGAPKAITAMARKLACLFYRLIKQGQQYVDKGMEFYEARYREQQVRLLTRKAQKLGLQVVNPQAA

SEQ ID NO: 249734 - protein, 368 aa, unidentified
MDKIITSFVGLDVHKDSIAVAIAPTGREPPRFVGTVTPQWASLSKALSRLGRVHELQIVYEAGPCGYTLARQLRSCGYACEVIAPAKIARRPGDRIKTDRRDALLLARAARAGELVNVMIPDERDEALRDLVRARADAVRARLKARQQLKALLLRHGHRYTGRSSWTLAHERYLARVCFAQPAQGIAFAEYRSAVRDAHERVERLTAALRAQLEHWRMRPVVEALMSLRGIELIAAITLVAEIGDFHRFARARELMGFLGLVPSEHTSGSKRRQGAITKTGNSHARRVLVEAAWNYRFPARMGRLLQVRQQAQPKAVRDIAWRAQLRLVRRHRHLAARKLALNKICVAIARELSAFVWDIARQVKPSA

SEQ ID NO: 249735 - protein, 403 aa, unidentified
MNAVGIDVSKGKSMIAIMRPFGELVGKPFEISHVASELGKLADLLKSLNGETRIVMEYTGRYYQPIARYLHEAGLYVCVVHAKLVHDFGNNSIRRVKTDKADALKIANYAIANWISLKRYTPEDDSRLLLKTYSRQYNQYTKLKVSLKNNLIALLDLTFPGVNLLFSSPMRDDGHEKWVDFAARFWHCECIRRMYLPRFTAQYNNWCTKNGYYGSHIKAAEIYELAICQVPSLPCCQNMKSLITQAINQVNAISSTLADVRTNMRDLAASLPEFEIVLAMRGVGNVLGPQLMAEIGDVRRFAHKESLVAFAGVDAPPFQSGSFESTSRSISKRGSPALRKTLFQVMACLLQTAPNDDAVFQFLDRKRSEGKRFYVYMVAGCNKFLRIYYARVKSSLETHDIAV

SEQ ID NO: 249736 - protein, 345 aa, unidentified
MTNIKRVGVDIAKTVFHIHAVDGRDKSVWEGKYNRKAWLQAIIKRVPNGALIGMEACASSHYWARELRGLGFVVKLIAPQFVKPYVKSNKNDRADAAAICEALGRPHMRFVAVKSILQQDIQAAHRIREELVCHRTAKANQIRGLVGEYGIVAPVGIGQLRRALPQWLEDGENGLTSDFRQLMFGMAEDLAALDERIEETTALMTRKVQSDPAAQRLMTIGGVGPIVASALLGALGDGRNFRKGRDFAASLGLTPRQHSTGGKPTLLGISKRGNSYLRKLLVHGARSVFRHAGTKEDKLSLWLMSLAKRKHANVAIVALANKIARIAWAVVHNEDTYNPSSAAGL

SEQ ID NO: 249737 - protein, 421 aa, unidentified
MKNNAARKLKQVPAGYLIVGIDPHKKKHAAVAINEDLVVQTKFKFLNSRDGFDEALEKAGVEIVKASCRGVMFAIETGGHFWRNFAYFLEERGIPFRLISQLTLKRMRDGRDLNRRKNDFRDAEMAAGVLRTGDFTETKLPQGVYAELRSTHSAYYRLVKERTRIINLMKGLLDGLFPEFTQVFKNPCGLTALVVLSICPSPAAIASMNEDVFTDLIRSGRQGRLMKKKLRALHQAALTSIGIKPGAEAVATEVTLLVSRYYLIEQQVDRLVKSLINLVDKTEEGKYLLSIPGINYLSAAALLAELGSLRSYHNAKQLIKMAGTNPIESESGGKRLGKTPMSKKGRPRLRYSAWSAVIPLFRHNPDFRAWAKQLRERPAHANPLNGKEVVGAALNRLLRLVYTLVKKQEFYCSPQLALVVN

SEQ ID NO: 249738 - protein, 370 aa, unidentified
MNEKILFIGLDVDEKNFHGYAISETDPTGTPFKTKANLGALLKALEKLAEPSTKIRICYESTYCGFHLCRGLQKAGFDCSVIAASLIPEVAGQKVKNDRLDAEKLARYFCKGILTAVYVPGEEDEHVRALVRSRTFMRGQGKELKRHMISLTKQLGWGFREEFGEASAYWTDKYRTWLKQKIANSTPVVRLNFEMLLLQLDAVEREVEKYALEIGKIAKEPKYDSLVKALICHRGVDVLTAMILITELGDIRRFPHPKKLTSYVGLDIAEYSSGGKERRFSMTKMGNKHVRKILTEAVQSARRPVLLSKELRRRREGTDPKYVDIADRCMVRLHKKSSSLLFKGKPVNKVKAACAREMLGFIWESMKLAT

SEQ ID NO: 249739 - protein, 389 aa, unidentified
MPGLSFHQGSTLGQYDIFSGLDVDKKSITVTYADSQQILCSLRVPYEARHLIAYVRKHFADRRVIFAYEAGPTGYGLYDGLTAAGFPCLIAPASMIPVAPGQRVKNNRLDSKKIAIALRNGELKSIHVPSPLYRHLRHLTKQRDLLVRQITATKIRIKALCLFEGMAFPPGKWSRQVIEQLQRFSCSEAVRFRLDGLLAALEFNQRQLLQTMRALRRFCRQEEELWRCLGYLRSIPGIGLIVGTDLLARIGDWRQLAGHKVSQLGSFLGLVPTEHSTGEKVHRGSINRAGDRRLRSKLIQSAWAAIRKDPELLEFYQAVYKRHSPNQAARKAIVAVARKLTGRIFAILKEQRAYEVRPALRSRPLTAEEIRPGESLDGPQKQEEAQRSS

SEQ ID NO: 249740 - protein, 355 aa, unidentified
MSQEKYIGMDVHQATISVAVMDGNGKLLMECLLETKAATILEFVQGLRGTLSLTFEEGTSAAWLHDLLKPHVSRLVVCDPRKAALLKEGNKSDRIDARKLAELLRTNQLKPVYHGEHGIRTLKELGRSYLTVSKDVTRTMNRIKSLYRSWAIPCPGTTVYAPSHRLEWLAKIVQPGVRVRAQHLYEQLDNLQPIRQQARRELLLESHKHPAVKLLRQIPSIGPIRAALLVALLQTPHRFRTKRQLWAYSGFAVETHDSGEYRYVRGKVQRNRERITVRGLNDNHNPDLKNLFKGAAISASTRPGPLHDFYAARVAKGMRPTMARLTLARKVAAITLTMWKKGVSFDPQQLSRQAV

SEQ ID NO: 249741 - protein, 466 aa, unidentified
MAIEETEEAGPFVERVAALDIGKAGLVACLRVPAEGGGRRRRQEVTDWTTMTADLVNLADYLVCQGVELVVMEATGDYWRSPYYVLEAAGLRCWLVNARQVKHLPGRPKTDKIDSVWLCKVAERGMCSPSFVPARPQRRLRLFTRYRIAAVRERTREMQRAEKLLEDAQLKVSVVASDLFGVSGRAMLTALVAGERDPEVLADLARGRLRRKRTELVRAFRGSFEDAHATVLAMILDRVERLDSDIARLDASIAEAIAAMTDHAPTQDRSGPGGGAPSPDTAGPPPGGPAPESPPPAGGRARLGPAERLAEIPGISLATAHTILAEVGTDVAAFPTAAHLVSWAGLAPKANQSAGRSSPARTTKGNRYLAGTLGQVVFSLARTQTFFGDRYRRIRASRGPQKAIVAVSRSVLTTIWHLLDDPDARYRELGADYHRNRQDTHKQAAAVRRLERLGFEVTLAQPAAAI

SEQ ID NO: 249742 - protein, 323 aa, unidentified
MLVGIDVAKAELVVAARPSGERWTVANDERGVRTLVDRFRIDRPDLIVLEATGGYELLCVGALASAGLPVVVVNPRQVRDFAKATGQLAKTDRIDADVLALFAERVRPEVRPLPDAAAQELEALLARRRQLLEMLQAERNRLGQVFGRGKQPVKKSLKGHIAFLERELRITDSDLGEMIRQTPAWRERDDLLQSVPGVGPILSRTLLADLPELGRLSRREIAKLVGVAPLSRDSGTMRGRRFVQGGRATVRGVLYMAALVATKRNAVIREFYQRLLRAGKPKKLALVACMRKLLAILNTMVRTAEPWSVTWSATNADRLRILA

SEQ ID NO: 249743 - protein, 368 aa, unidentified
MDRKSSKLYVGMDVHKESIDIAVADEGGEVRHHGQIGGEMNALWRAVRKLESLGRQLVFVYEAGPCGFGIYRGLTARGHACWVVAPSNTPRRVRDRIKTDRRDSLKLAGLARAGELTPIYVPDVRDEAMRDLVRTREDAVMMQRQARQRLAALLLRNDVRYAGKTAWTAAHRRWIADVKLPQSAQRLAFEEYVQAVEEASARVQRLSQCIEQELAHWCWRPVVGALQACRGIQLIHAVRIVAELGDLSPFSHPRQLMAYLRLIPSEDSSGEHRQRGAITKAGNSSARRALVEAAWAYQYTAKVSALIARRQADVPKAALDIAWKAQVRLCARFCRLAARGVNRNKIVVAIARELAGFVWAIAQQVKPI

SEQ ID NO: 249744 - protein, 416 aa, unidentified
MEANWNERKYFGALDWASDHHDIIVVDKTGATVYRSRIQHTPEGWQKLRDELVDFQPLAMAVETNHGMAVEQMIALGCEVYPVNPKSSKRYRDRKAPSGVKDDELDAWSLADALRVDGHGWRRLLPDDPLVVELRLLTRDEVSLIAQRTSFVNELQAALRDYYPAALAAFDDWTRPNTWEFIEVFPTPEILEKAGARKWERFLRTHKLWREDTAEKRLAIFEHATALQGSPGAVAAKSLLAVSVAKVLNMLQTQLDAYRARIEERFAQHPDHDLFGSLPGTGTKLAPRLLGEIGDNRTRFDCAEGLQSYAGTAPVTFQSGQIERHQVRRACAMQLRSTIHLWANLSRTKCAWAEAYYQAHREKGQSHACALRCLGQRWLKILWKMWQTHSLYDEALHMRNQLKHGSWLLALQSQNP

SEQ ID NO: 249745 - protein, 382 aa, unidentified
MIGTEPHAWGTGLMDDITFVGLDVHKATVCVALAESGRGGEVRQIGVFANRPEVLTKMVTRLGRGGHRLSFCYEAGPCGYGLHRLLTRCGHECVVVAPSLIPMKAGERVKTDRRDATMLAKLHRAGELTAIWIPDAAHEAMRDLVRARATAVRVLSKARQHLQGFLLRHDKVYQGAHAWTLAYRRWLTTVRFDHPAQQIVLQDYIHAVEDAQARRDRLTQQIEDLLPNWSMAPVVAAIQAMRGVALVVAVTVVAEVGDFRRFATPRQLMAYLGLVPSEHSSGSTIRRGGITKAGNALARRVLIEGAWTYRMSARVSRKLHDRLEPLPTAVRDIAWKAQVRLCARYRRLVAAGKPKVVVTTAIAREMVGFIWAIARVTQAAPV

SEQ ID NO: 249746 - protein, 343 aa, unidentified
MKVTTIGVDLAKSVFQVHGTDERGHVVVRKQMRREQVASYFANLPPCLVGMEACGSAHHWARKLQGFGHHVRLISPQFVKPYVKSNKNDAADAEAICEAVARPNMRFVPIKTMEQQAVLSVHRVRQGFVKARTAQANQIRGLLTEFGLVLPQGITNVFRRVPQLIDGTADLPASMRQLIERLLENIKVLDRQVKELEAQIKAWHLGSELSRKLEKIPGIGPLAASALVASIADARSFKNGRQVAAWLGLVPKQDSSGGKPKLLGISKRGDTYLRTLLIHGARSAIVAAQRKDKPNVWLSGLLARRHPNIVAVALANKNARTIWALLAHEREFRPDYVPRSVCA

SEQ ID NO: 249747 - protein, 386 aa, unidentified
MQKLNDLSRSLTALEPDGTLIAVIEMSLSSWLVAGIVPGVERQPLKKLAVDESALLKLLHRWREEAKKAGRRIERIAIAFEAGRDGFWLARWLKARSIEAHVIHAASVAVSREHRRAKTDRLDTELLKRAFLGWLRGERDHCKMVAIPSIKDEDAKRSNRERENLVSEQSRIINRMKAALIRLGIRGFNPKLKRAAGRLEDLRTPEDEPIPPNTLAELRRDMERRRLVRDQIRQIEEARLERLDHAPGDGPHAMVRLLARVIGVGIETADMLVHEALSRNMRDRRAVARYAGLTGSPDESGRKRREKGLARSGNGRVRRSMIQLAWRFLTHQKHSALAQWFRARTENARGTRKPMIVALARKLLIALWRLVRQGVVPDGVVLRPAQ

SEQ ID NO: 249748 - protein, 357 aa, unidentified
MHERTFIGLDVHARSVQAGVLDGLTGEVKSLAVPVATKALVAWVCAQPAPAVTYEAGPTGYELARALLAAGVPCLVAAPSRIPRAPGDRVKTDRRDAVRLARLLRLEELVAVRVPGLAEEAARDLVRAREDARGDLMRARHRLSKLLLRRGIVWEERAWTQAHELWLVRQRFSERPLQIAYEEALAAMLSVRDRRDALDAAIAVEAAMEPWAETVARLACLRGVSTLTAFALTVEIGDWQRFSGRSLAAFLGLTPSESSSGASRRQGAITKTGNAHVRRLLVEAAWQQRRAPGKSLRTHLARAAQPAAVRERAVAAERRLRHRWVRFDERGKRSTVAAVAVARELAGWCWSLAVMDA

SEQ ID NO: 249749 - protein, 468 aa, unidentified
MKRKNRGAKCQKGSPFDGELKLIEADAAAIDVGSRSHWVAVNPQRDREAVREFGAFTTDLMRLADWLAQCEVKSVVMEATGVYWVGLYDLLESRGFKVYVVDAHTVRHLPGRSKSDVKDCQWLRRLHSYGLLRGSFRPPAQIRQLRNYLRSCTKIVEAAAQQQLRMQKALTLMNIQLHHVISDISGLTGLSIVRAIVGGERDPKQLAKLRDPRIRASKETVEKSLQGHWQEELLFDLKMALESYDHFQGQIAAYQEQMRRALQEVPSKVDVLEEPLPAARPKVSHKRPGMSREDQLDLRVELYRISGVDLTRIDGIGLQTAQTVFFEIGTDVSAWPNEEAFSSWLGLSPNHRISGGKVLKRGSRKVVNPLSIALRLAARTLRNSQSALGANFRRLIAKIGMPKAITAMARKLAVLIYRMLKYGTQYVDKGREHYEAKYRETKLQYLRSQAAKLGMSLVANDSALTAAC

SEQ ID NO: 249750 - protein, 373 aa, unidentified
MNASPIRIMYMALELSNKEWKLAFTCRGGSVRVRAIPARQISRLLAEIRQAKAKQGLPDEAVVRSCYEAGRDGFWLHRCLEKNGLENLVVDSASIEVNRRLRRAKTDRLDARSLAAGLLRHWEETTGRSHWSVVRVPTEAEEDARRPRRETDRLTEEQTAHLARIRSLLCLHGVVLKRITRPALEQVTDWAGRELPTGVREEVFRELTRLEQVREQLKALVEEQTQALEKSANAGCQAAKKLMQVKSLGQATAVTLAYEFFGWRDFRNRRQVGACAGLTGTPYDSGGQRREQGISKAGNRRIRYTMIEQAWRWLKWQPESEMAQWYRRRFGGGGVRMRRIGIVALARKLLVALWKYVTFDVVPGGAILKQAAA

SEQ ID NO: 249751 - protein, 342 aa, unidentified
MEYYAGIDVSLECSSVCVVDASGKIIREGKVASEPDALINWLKSRGYELIRVGLEAGPLSQCLFAAMREAGLAVELLETRHVRKAFEAMPVKSDRNDARGIAQLMRLGWFRPVHCKSMGAQEVRAVLTARKLIQTKLQDVENSLRGILRGFGLKVGKTTDRSFTGRIQELVKGQPSLEAIGEALLSVRAGLLREFNAFEKRVRAMARLNARTRLLMSTPAVGPIVALTYASAIDDPARFKSSKQTGPHFGLTPKRYQSGETDYSGRISKVGDASVREALYQAAHVMLTKPVKGCPQLKSWAMRIARRAGMSKAKVALARKLAVILHRMLANGTPFNAAAAAA

SEQ ID NO: 249752 - protein, 344 aa, unidentified
MTSMNFIGLDIHKKTISYCVKEAAGEVLAEGTISSTRQSLDAWMRRLCEPWTVAMEATMFTGWIDDYLLPHAAAVKVAHPLMLRAIAAAKKKNDRIDASKIADCLRCNFLPECSMASTEIRERRRTLRYRKLLVRQNVQLRNKVSQMLMESGVVYNKQKLHKVGYFKELMTTNPDIGEGLRPLLTICRETIVRIGKTEAALVRSLARDPLLSDRVQRLMTIPAVGPITALTWVLEVHDVARFGSVKQAISYCGLCGAERSSADMVKRLPISKQRNKHLQSVLIEAAKLGPRLSPDLALVNETEKQKGHANRATLAVARKLVAYLLAVDRSGREFVVAGERREAA

SEQ ID NO: 249753 - protein, 440 aa, unidentified
MAMRKRNDEVFPNAAGIDIGASSHWVAVPPNLAEESVREFGAMTDDLNGMADWLLACGVDVVALESTGVYWIPVYEVLEQRGLKVWLVDARQLKYVPGRKSDVQDCQWLQKLMSFGLLRAAWRPDGEVCVVRAVARQREVLLIEQASWVQRMQKALVQMNIQLTEVLTDIMGMTGQAIIRAIVAGERDPKVLTRHRHSRVKASTEEVTKALTGNWRDEHLFVLAQALAMYDDIARHLAECDAKLQVLLAERSQSKVDLGKVPKVGSKLRLEFDVRQALANWAGVDLTRINGLGVTIVMKLLSEIGTDLSRFASVKHFCSWLGLCPATKISGGKVLSSGTKRCANRARQALKIAAMTLSHSDSALGAFYRRLCARMDKPRANTAVAHKLARMVYFMLTRGEAFVDQGQQLYEEQQRQRSIAALKRRAAALGFQLNPTTVPA

SEQ ID NO: 249754 - protein, 399 aa, unidentified
MDSDEIGVFLGLDVGKSSHHGHGLTPVGKKVFDKQLPNTEPKLREVFTKLKTKFGTVLVIVDQPASIGALPLTVARDAGCKVAYLPGLAMRRIADLYPGEAKTDAKDAAVIADAARTMPHTLRSLEATDAITAELTVLVGFDQDLAGEATRTSNRIRGLLTQFHPSLERALGPRLDHQAVTWLLERYGSPTALRKAGRRRLVEVIRPKAPRMANRLIDDIFEALEEQTVIVPGTGTLDIVIPSLARSLGAVHEQRRATEAQITALLEDHPLSKVLTSLPGVGVRTAATLLVTVGDGTSFATAAHLASYAGLAPTTKSSGTSIHGEHAPRGGNRQLKRAMFLSAFAALHDSASRTYYDKCRARGKTHTQALLRLARQRINVLFAMLRDGTFYEPRTPRLA

SEQ ID NO: 249755 - protein, 326 aa, unidentified
MTTPAKQKVVGIDVSKDSLAICHLVEEKMQHLEMQNNQAGFKQLIKQCGTESLYVMEATGIYYLQLAYYLYEQGAQIAVVNPVIIKRYIQMHLGKGKSDKKDAQWIRRYGEQNQTVYWQPEEQVIVECRQLEQVIEQLIKQKTMVINSLEALQLQPVKSHLAAKSLMQTLKTLEKQIKQLEDKLIDNLEKAFAQEIKLLSSIPGIGKKTAGMLLLFAGGFRSVTNYRQLIAKAGLSPREYTSGSSIRGKVRITKMGGGLIRSKLFMCSFSAKRSNAACKALYERLVAKGKNGKLALIAVCNKLLKQAFAIVKSGIPYCPDFATISA

SEQ ID NO: 249756 - protein, 352 aa, unidentified
MDKFIGFDIDHKHTVACVVQGGQPDRYRTLRTDVGELREWLKTERGPGGRLHLTFEVSGLSGHLYDGLVDVVHRLEVSNPTKLTWIYRTAKKNDRIDARKQAVLLSMNELPRVHMPCEGVREWRRTIQHRRNLVNTMTQTKNRIRSLLKSQGLKQAHRGTWWNTTNRTWMRQEAEHGDAPWRDVLGDLLDMLELQGHQLKRVTRRLDARLDELPGAWLLMTIPGVGPRTVEAVLAYTDDVRRFRRGKQYGAYFGVTPRLDESGSRRRTGHISKQGPSVVRWLIVESAWRAVRYSPALRAFHERVMHGQKQRNKIAIVATARKLLTIMRAMLMTGETFNESLVSEQVVLAQQK

SEQ ID NO: 249757 - protein, 413 aa, unidentified
MVDVLHERCCGLDVHQQTVVACLITPGPGGPPQKEIRTFGTMTADLLELADWLRAAACPVVAMEATGVYWKPLWNLLEDAFTLLLVNARHIKAVPGRKTDVKDCEWLADLLRHGLLRASFVPDRPQRELRELTRYRTALVRERAAEIQRLHKTLEGANLKLGSVASKVLGVSARQIVDALLAGTTDPAALAALAKGKLRAKRPQLERALVGTPGLHQHFLLACQLAHIDFLDETVEQVSAAIAERLRPCADALARLDGIPGVGQATAEVLLAEIGPDMRRFPSAGHLAAWAGMCPGNYESAGKRQKGKTRKGSKWLRTALLEAARAAARKKESYLAAQYHRLVPRLGKKKAAVAVGHSILRIAYYLLQRETTYQELGGAYFDERHRDRVERRLVHRLEQLGFEVTLTPKDPAA

SEQ ID NO: 249758 - protein, 344 aa, unidentified
MKHYAGLDVSVKETSVCIIDEAGKTTREVKVASEPEAILAILMNEALTIERVGLEAGPLSQWLYSGLAETGLPVICVETRHMKAALSAQLNKSDRNDARGIAHMMRVGLYRPVHVKTLASQKRRMLLTSRQLLQAKALDIENDLRGTLRNFGLKVGMVGVAKFEARIRDLVVDHPDLAAITEPLLIARRVLREQLGVLHRRLLAVVRQDEVCRRLMTVPGVGPVVALTFRATVDVAARFKNSKAVGAVFGLTPRRHQSGEIDRMGSISKSGDAMVRTVLFGAAQVMLTRTIRWSWLKAWGMKIARHRGMKRAIVAVARRMAVIMHRMWADGTEFRWSNTNAATA

SEQ ID NO: 249759 - protein, 342 aa, unidentified
MTIAVLGIDLGKNSCSLVGLDAGGRVVLRRRMRRETVIAFGAKLTPCVVAMEACCGAHHMGRALAAQGHTVRLMSPEYVRPYVKAHKNDDRDAEAIAEAATRPTMRFVAIKSEAQLDMQTLHRVRDRLVGERTALMNQIRSILLERGHVVPQGRAKLAGFLTSLLEAEEGVILTPRMQALVADVRERWQLLDQRIAALDAEFAEQARTDEAARRLTTIPGIGALNATALVAAIGDVATFARGRDLAAWLGLVPRQVTTGGRPKLVGITKRGSKYLRKMLIQGARATMPTLRQSDTRLGQWLRGLLARAHANTAVVALAAKMARIVWALLRHERVYEATAVAA

SEQ ID NO: 249760 - protein, 460 aa, unidentified
MNPKRSKSRNGGKMQMVHPDAAAIDVGATMHMAAVRADRAPEPVRSFGTFTADLHRLVDWFTECGVETVVMESTSVYWIPIFELLDARGFNVFLVNARDAKHVPGRKTDVSDAQWLQRLHSFGLLRASFRPKGQIAELRAYVRQRERLLEYAASHIQHMQKALTEMNLQLHHVVTDITGATGLRIIRAILAGERDPEALACLRHYSCHSSAETIAKALTGSYRAEHLFALEQALALYDAYHEKASACDARIEAVLKELSFRRGHGHGSAPRVSRRRNRTDQANAPAFDVREALFALLGKDLTAIDGLGPYLSLKLIAECGDDLSSWPSAKHFTSWLGLAPSNKISGGKMLSSRTRRSGGRAAALLRLAAVTVGRTDTALGAFYRRLSARIGKAKAVTATARKIAVLFYNAVRYGMDYVDPGASSYETRYRTRVVNNLHRRAKAFGFVLQPLEPKVDAAVS

SEQ ID NO: 249761 - protein, 339 aa, unidentified
MFYVGLDIHTKRIAFCVLSDQGQLVQRGQVRGLDEVLRILKGLPDRFEVCYEASCGYGHYHDLLQPLAARVLVAHPGQLRLIFRAKNKNDRNDAERLAKLLYLGETPIVHVPSLQVRTWRELINCRSQVIAKRTRAKNAVRALLRGAGIAPPKQPGLWTKKGLAWLRRLELPTPSQQLRRDLLLEEIETLLRQVRRIEQQLNHQAQHTPAVGQLRSIPGVGIRTAEAVAAFVDDPERFGNAKAVGRYFGLVPCQDQSGDKNRLGHITREGAPVVRQLVAEAAWQAQRRSPAVRAYFERIQRDDPRRKKIALVATAHYLVRVMWAMLKRGTLWEEKAPAN

SEQ ID NO: 249762 - protein, 385 aa, unidentified
MQKLNDLSRSLAPLNPDSTLIAVIEMSQSSWLVAGIVPGIERHPLKKLEPNEGELLRLLMRWRAEATKMDCTITRIAVAYEAGRDGFWLARWLRARDIETYVIHPTSVAVSREHRRAKTDRLDTGLLKRVFIGWLRGEPDHCHMAAIPTLAEEDAKRPNREREGIVRERTRIVNRMKSCLARFGVRNFKPTLRKTPERLATLVTPEGGHLPPNTLLELRRDMARLRFVTDQIKEVEQARAQRLERTPQDKTHAMVRLVARVIGVGIETADMLVHEILSRSLRDRRAVARYAGLTGAPDESGSKRREKGLAKAGNARVRRGMIQLAWRFLIFQKDSQLAQWYRTRTERGGKKRKTMIIALARKLLIALWRLVTTGEVPAGVVLRAA

SEQ ID NO: 249763 - protein, 370 aa, unidentified
MGEYSGTFVAFDVAKAKHAVAIAESGRRGEIRFLGEVENTPTAIARTIKGLETRYGRLDVCFEAGPTGYGLYRQIQELGHECMVVAPALIPRRPGERVKTNRRDAVTLARLHRAGELTGVWVPDAIHEAVRDLVRAREAAADDLRRKRQQLLSFLLRHGRVYTAGRDHWTQMHRRWLARQSFEHPAHQIVFQEGIDAIEDAAQRLRRLEQQITAIVPRWSMAPVVAAYQAMRGASFLVAVTFAAEVGDLRRFDTPRQLAAFLGLVPGERSTGDTVRRTSLTLAGNRRARRVLVEAAWAYRFPARVSETLNARLEGLPKAVRDIAWKAQVRLCARYRRLSVTGKKLPVIVAAIARELAAFLWAIGREVSPS

SEQ ID NO: 249764 - protein, 361 aa, unidentified
MQSTTIIAFDHHAATTVAAVLLPGSRTPALHSLTSDATTIVRFVERVRRGHVVRCCYEAGPCGFELQRALTVHDIPCDVIAPALIPRRAGDRIKTDRRDAAQLAVLSRAGALTAIHIPTEQEEAARDLLRCREDIRADLLRARHRLSKFLLRHGRRFTGTKKAWSKSHDLWLRAQTWPMPALDQTYRAYLRAVDEAVARLRAVEDDLRGLVTLEPLRRRVQSLRCFRGMDDLTALTVAAELGDARRFASAPRAMAFVGLVPSEHSSGTRQARGAITKTGNAHLRRVLVEAAWHYRHRPFVGAALRRRQRGAPAAIIAQAWTAQQRLHRRYHRLRARGKPNQHVITAVARELTGFVWAALIQ

SEQ ID NO: 249765 - protein, 373 aa, unidentified
MNTVIHIGIDVHKDSYSLCAYDFSTNQSFAQMRIESRNELVVNYVERLLSNHEGRDVTILCGYEAGPSGYGLYRYLDERNIPCVLMAPTSLPKAPGSRVKNDRLDAMELAKHLAYGTYSAVSVPTLEDEAVKDYTRMRNARVEALKKAKQNLLSFLLRRSRSFSEGRSYWTQIHYRWLRQQQFSDPLDQETFNEYLQEVIDQQEKVDRFDNRIAEIADDERWNERVSKLRCFRGIETHTALSLVSEIGDFSRFRTAQQFSAFLGLVPTEDSSGQRELRGGITKTGNVRLRKLLVEGANATLRGSMYGQKSKRLKARQAGNEAQVIAYADRANRRMHRVYDQLTVRQVHRNKAKVAVARELSCFIWGMMNDKID

SEQ ID NO: 249766 - protein, 345 aa, unidentified
MELHTIGIDLGKTVFHLVGLDLRGEIVVRKKFSRTQLLRFTANVHVGLIGMEACGGSHFLGRALREQRHEVRLIPAQYVKPYVKTNKSDYIDAEAIAEAVARPTMRFVPIKTDDQLDMQSLHRVRERWVMRRTAVINQIRGLLLERGITLRKGRRHVDAALPLILEDAEANLSGAVRLLLAQLKLDLDQLSVRIDEADAVIQKTAHENEACRRLVAIPGIGPVTATALIAAIGNGGAFHKGREFAAWMGVVPREHSTGGQQKLLGISKRGNSYLRRLFVQGARAVLQQRTKQSAGLSAWLAQLTSRTHRNIAAVALANKLARIAWAVLAKNEQYRPSVVADVAAA

SEQ ID NO: 249767 - protein, 467 aa, unidentified
MKRRPQAESKKERRRNRRKREAKFLERVNLNAAGIDIGSASHWVAVPEDRDDQAVREFKSFTPDLHALADWLDVCGIETIAMESTGVYWIPLFEILQDRGFEVLLVNARHVKGVPGRKTDVVDCQWLQQLHTFGLLRASFRPDPEITAIRTLMRHRGTLVQESAAHIQRMQKSMALMNLQLHNVLTDVTGVTGMAILRDIVAGQTDPVVLAHHRDYRCRATQDEFVASLTGHYRDELVFALRQSIELYDIYQDKIRVCDEHIEARLRALEAQCPKPEGELPPPPRTRKTRTNEPHFDIRSPLFALAGGVDITELPGIGPHGALQLISEIGLDMSRWPSPDHFASWLTLAPHNKITGGKLLGSATQPSANRAAKTLRIAAMTGTRSDHALGAFYRRLAGRAGKAKAITATARKLAIILYCMLRDSTPYREQSAAVYDQRQRKRALHGLRKRAQSLGFDLVQIDSGLVL

SEQ ID NO: 249768 - protein, 390 aa, unidentified
MQALCPRPDEHIAVRTDLNAIFVSLELSRSTWIITSLAPGGGEKMSKHSVPSGDVAALLARLSQLQEKARARTGRIFPIIVIQEAGLDGFWIHRVLQQEGIESHVVDPASIATSRRRRRAKTDRIDGEAQVRALLAYKRGEPRVCAMVQAPTPQEEDRRRISRERETLTAERVRHVNRIKGLLFAQGIGDYEPLHRNRRERLEALITGDGRPLPECLKAQIRRELDRLELLIEQVKAVEAERDAVLARAQASPGVPAPAALLLALKGIGPEAAATLWSEGLFRTFRNRKQVAAYAGLAPTPWQSGSVHRDQGVSKAGNPRLRTIMIQIAWLWLRHQPQSALAVWFRERIKRTGGRLGKTMIVALARKLLVALWKYATAGVLIEGAILKPA

SEQ ID NO: 249769 - protein, 358 aa, unidentified
MADKVTEATVVGGVDTHKDLHVAAVVDQNNKVLGTQYFATTRQGYRLMLAWMTSFGALKRIGVECTGTYGSGLLRYLQNAGLEVLEVTAPDRMERRKRGKSDTIDAECAAHAAFSGIRTVTPKTRNGMIESLRVLKTCRKTAISARRVALQIIHSNIISAPDELREQLRNMTRMQLIRTLGAWRPDASEYRNVTNVYRISLKSLARRYLELHDEIADLDVIIAAIVDELAPELIKRNAIGYESASQLLITAGDNPQRLRSESGFAALCGVSPVPVSSGKMNRYRLNRGGDRAANSALHIIAIGRLRTDDKTKEYVARRVAEGHTKMEAIRCLKRYISREVYTLLRNQNRQVNSIPIMA

SEQ ID NO: 249770 - protein, 420 aa, unidentified
MNPESGKPFTAYIGIDWASAKHDICLQVAGTEERTFERITHTPEAIEAWAQGLYQRLGGPIAVALELSEGPIVSALEKYDFLVIFPIDPKRLAKYREAFTPSGAKDDPTDAEFALDYLMRHPEKLKALKPQSVPMRKLRYLVEARDRLKGDQSRCVNRLVQALKHYYPQALDWFSEHNTVVFCDFLKQWPTLEKVKRARRTKLERFFADHNVRFAQVIEDRIQAIKAATPLTHDEAVIDAHRLQVEILIEQLRLTIQALKRFDQEIASIAEQLPDYALFSPLSGAGKVIGPRLLAAFGEDRDRYRAADQLQKSSGIAPITKRSGNTTWVHWRWQCPKFLRQTFVEYAAQTINKSAWAGAYYRQQRAKGASHNAAVRALAYKWIRILYRCWQTRTPYDESKYLEALRLRGSPLLKHLAEAA

SEQ ID NO: 249771 - protein, 401 aa, unidentified
MRCIFGIDVSSKSCNVAVAVNKHLVEELKLSLDAIGFNQLKVALDVYTDPEVVFEATGVYSRRLERFLTDNGYHFIRLNPLQARIELTSFRYNKTDVNDAQNLALSSFDHKRQLTTPTARVYQDLRDLNRFYQNVNEDVVRLKNRLHKVLQLTFPELEQILSTTDGEFYWQIVDHYAHPTLVSSEDQTQTIAFLASISKKKVTSTYLQRIAQRLTALSHQAFPAVAIDSPKVMEIRYYAQQLIHGYQQKAELIEQMVTIAKELPEFRNLVSIPGFGENTVVTLIAEFGDIRRFKSSNAMNAFVGIDFRHYESGKFVAKDTISKRGNAIARKILYKAVLNCVIASHYHPNHIGDFYRERKKQSSSPQTKKIAIGAIHRLIRTMYHLVKNDQLYDYTKVHVDR

SEQ ID NO: 249772 - protein, 341 aa, unidentified
MSSIKALGIDLAKLVFSIHGVDEHSKCKFRKTVKRNKLLAEIAKLPPCIIGMEACSGAHYWAREFTKLGHDVRIMAVKFVIPYRQNEKNDANDAEAICEAVTRPKTRFVSIKSEEQQAVLCLHRIRQGLIKDRTARINRLRGLLAEFGLIMPKGRYPAQNAIGGILEDAENALPMLARELLNDVWQSIRQLNEEILKYDRKLYALANQMKAAKRLMGIPGIGEITATAVVATVNDAKQFDTSRQFSAWIGLVPRQYSTGGVARLGKISKRGEKHIRTSLIHGARAVIANCKNKTDRTSLWVKELVERRGFKRATVALAAKNARLIWALLRSEKEYQIDYVK

SEQ ID NO: 249773 - protein, 427 aa, unidentified
MDYTQNAKIAQVTEKTLIIGVDVGSETHYARAFNWRGQEFSKKAFSFGNDLGGYLAFVKWLDAYRQSMDAEKIMVGCEPTGHYWFNFARYVKQSGMTLVLVNPYHVKQTKELDDNSPTKNDRKDPKTIAKLVSEGRYTFPYMPEGIYADLRQAVSSRDRIVKELNALTNRIQRWLQIYFPEFLKVYGKFSAESALLVLETAPYPADILALGADGVNQIWREHKLRAVGMKRATTLVEAARKSVGMDGGVSARIDLQFLLEDFRRKQEQLEQITEVLEAETRKVPHIEKLLAIKGVGLITVAGFLAEAGDVGRFDSPKQIQKLAGLELKENSSGKHRGQSSISKRGRKNLRKILFQAVLPLIRSNDEFREVYHYYTTRQKNPLKGKQAVIAVGCKLIRVFYAILTHGVDYDANRLRTDIIRPQEQQAA

SEQ ID NO: 249774 - protein, 451 aa, unidentified
MLIQGSSDPPRLVRVGIDAAIVAQHEVCIRATDAQGQVRTDRFRVQPTLAGLRSLSNRLAEMPGVVAVAEPTSMTWLGLSVALRDAGCDLSLLGARHAARLRGAISGKHKSDVIDADVLARAGEVFDLQPLRPVEPAQLALRRACVRRGAAVLDGNRHLRRLISLARWGFPDVWNGFRGSLPTAVAVLNRWPHLAQLAAARRSTLTAMVALHTRGVADVPDRVEAIRSSAAAWAAFWEGHLDLDALAFDVTEHLTDMADAKARTERATGQAQRYWRQLYGDDELLLSMPGMGPVTASVIRGFLADGTGFGSGKAAASYVGLNPSTWSSGTVSQPSRAITKEGPAVLRLAFFQAANAARRQDPQLAGFYHQLMTEHGHCHTQACVAVARKLVERTWTVLSRGTPYQIRDLDGQPISRLEAKKIIKQQCTVPEQVRAKARAHSAATNRAKLTR

SEQ ID NO: 249775 - protein, 381 aa, unidentified
MITIGMDVHVRNSYLHVTDDAGVPLRHGRCHNTMSDLAKFLGPLEPNARQQSEPIRVVLESTTNSRAIQRLLTQYGEEAGVDLTAEVLDARKIRIIAESVCKCDRLDAKVLCELARSNLKLPTCYMPDDEEFALREHLRARTDLVRMRTMFKNRVHAVLHRRGILAPTVTLFTKTGRAYLRQLDLETEGREILDRFLALMDETDRTITNSTASLRELMRRPRWAKQAALLMTMPGIGLITAMTILAELGNLDRFRSRAAVANYAGLVPICRSSNDKRYSGGITHRGSKHLRAMLVEAAWMAVPRVPVYRAMFDRIAQKKNKLVAVTAIARRMLEDAFTMLKRDEAFRYVGVSLADAPQQVGSVTPTPTSSSNRKVASSVAG

SEQ ID NO: 249776 - protein, 355 aa, unidentified
MSQEKYIGMDVHQATISAAVMDVHGKLLMECLLQTKASTIVEFIEGLQGPLCLTFEEGNSAAWLHDLLKPHVSRLVVCDPRKAALLKDGNKSDRIDARKLAEMLRTNQLKPVYHGEHGIRSLKELGRSYLTITKDATRVMNRIKALYRSWAIPCSGTTVYAPRHREAWLAKIVEPAVRMRAEHLYQQLDSLQAIRLEARRELLRESHKHPAVKLLRQIPAIGPIRAVLLVALLQTPHRFRTKRQLWAYSGFAVETHDSGEYRYVRGKIRRNRERITVRGLNDNHNKDLKNLFKGAAISASTRRGPLRDFYTARVESGMRPTMARLTLARKIASITLTMWKKGVSFDPKQLQRQAA

SEQ ID NO: 249777 - protein, 345 aa, unidentified
MEIHTIGIDLGKTVFHLVGLNPRGAVVVRKKCSRNQILRFTANLRVSLIGMEACGGSHFLGRALREQGHDVRLMPAQYVKPYVKTNKNDYIDAEAIAEAVGRPSMRFVPIKTDDQLDLQSLHRVRERWVGRRTAVINQIRGLLLERGITIRKGRRYIEAALPGILEDADNKLSGALRVLLRQLQLETQYLHRQVEESDKLILRIAGDLEACRRLVAIPGIGPLTATATIAAIGNGAAFKKGRGFAAWLGVVPGEHSTGGKQTLTGTSRRGNKYLRKLFVQGAHAVLLQKTKQATGLRTWLAQLTSRKRTQVATVAMANKMARMAWAVLAKGEAYRPPLLLETAGD

SEQ ID NO: 249778 - protein, 425 aa, unidentified
MNFNTNEKINQVTENTLVIGIDIAKKKHFACAVDERGRVLQKSFPFTQTHDGFEWLYERLMVLRETHQKTEILVGFEPTGHYWMNLAAFLTEHGIHYVMVNPMHVNRTKELDDNLQTKNDQKDALVIARLMRDGRFSYPRILEGIGAELRNGATLRSKMQEDLNAIHNRIIRWIDRFFPEFTQVFKDFGKMAYAALEMTPFPSDIQGKSPEELLFLYRQVEGMKSPQLPKAKQLVAVAKQSIGLTEGMEMARFEIATLLRQLKLLQADLDTITAQLEELAKQMTDYDYLASVPGVGDATIVELLSEIGSFTQYEHPRQLIKLAGLTLRENSSGQHKGQKRISKRGRRKLRAVLFRVMMPLIRHNRAFKALHQYYTTRLQNPLRKKQSIVVLCGKLLKILHALCHKKMMFNEDAMMKDLYCLQDAA

SEQ ID NO: 249779 - protein, 384 aa, unidentified
MNKMNSNVACAGMDVHYKFSNVTFRDSDGRVVARQRLDHPDRQGLAGRLRGWPQGLPVVLEASFGWGWLSDLLSEAGLEPHLSNCYKLEQMRKARGGVKTNKKDADMVSLLPFETTDWWEVWRAPLEVRNRREQMRFRGDLVALQTEVKNRIHAVFHRHGIFHEFSDLFGGKGRRFLTTLCLEGSPYLSPEALQALRGQVRLLDHLRRQLAEVARVLRRQLVKTPLIRRLDHIDGFGLILSHVLTAEIGQIERFRNHKALASYSLLAPRSNDTGQEDPSQSPKGRHLGLRGNRTLKWAFLEAARGAVRSGGRWRALFDRVTAGGTKDRNRGYIKVARELVKVVYAVWAKGVDYQATPPARPGRQRNKNTSRSGTGQPFHPMVHA

SEQ ID NO: 249780 - protein, 346 aa, unidentified
MTIVEDRRAITGGVDTHADTHVAAALDPVGGLLGVEEFPATAAGYARLLGWLGGFGTVCLVGIEGTGSYGAGLARHVTAAGVRVVEVDRSDRQDRRRQGKSDPLDAVSAARAAQSGRARGAPKGRDGAVEAIRALMVAKRSAAGERTRTVNQARALILTGPDDLRARFAGHTAAALVSGLASLRPRPGSTVGYATRIALRELGRRAEFLDGQLGRLNELIVPLVSARAPGLLALFGVGPNTAALLLIAAGDHPERLRSEAAWAHLCAAAPIPASSGKVTRRRLNPGGDRQANHALWRIVFTRMGSHAATRAYVERRTEEGKSKAEIIRCLKRYVAREVYPHLRPAG

SEQ ID NO: 249781 - protein, 346 aa, unidentified
MLADELDYVIGVDPHRDSHALAVVDVRSGGVVFEATALADGEGYASVLRLADQHAPGRRAFAVEGTGSFGAGLTRFLVSQEERVLEVGRLRRERRSGKSDALDAIRAARSVLGQTRPARPRAGGEREALRALSAAREGAVTARRAGLCQLRGLLVSAPEPLRAELRSLTRAQLLRRLAAVRPEGRQDPELRGTLLALRALARRVKALTVEERELAREIETLTRKLAPQLLAQPGVGPLAAAQVLISWSHRGRITSEAAFARLAGCAPIPASSGQTVRYRLDRGGDRRLNRALHMILVTRRRAHAPTIAYIDRRIQEGKSRREATRCLKRYLARNLYRLLENPPMPT

SEQ ID NO: 249782 - protein, 314 aa, unidentified
MSPLVFVGIDVSQARLDIAVRPGASSSHPHNESAIAAVVEQLRALSPTLIVLEATGGMEIPLTSALATAGLPVVVVNPRQVRDFAKASGHLAKTDALDAQVLAQFAEVMRPHPRPLPDAETRALAALLTRRRQLVEMLTAEKNRLLSAASPIRKRVRAHIVWLERELEHTNTELSEAIRQSPVWREKDELLQSVPGVGPVLTSTLLASLPELGTLTNKQIAALVGVAPLNRDSGTLRGRRTVWGGRAQVRAVLYMGAIVAARFNPVIRVFYQRLQRAGKAKKVALTACMRKLLTILNAMLKHRTPWRQMETQLA

SEQ ID NO: 249783 - protein, 342 aa, unidentified
MGEVVRIGLDIAKSVFQLHGVDADGEVVLRRRLTRARMLPFFAGLEPCLIGIEACATAHFWARELGKLGHEVKLMAPSYVKPYVKRQKNDTADAEAICEAVSRPSMRFVGAKTPTQQSTLVLHRTRLMLMRQRTQLSNAMRGHMGEFGIVAPIGRKGLQKLISIIADEADDRLPTSARACLQMLAGQLELVNVQVLEIDRRVMASARATDVGRRLMGIPGVGPVLASALVATVPDPSAFRNGRNLAAWIGLVPKQNSSGGKERLGGITKQGDRYLRQMLVLGAMAVIRYAERHGTRRPWLVKLMARRTTKVAAVALANKMARMVWAIMTSGEPYREPVLQAA

SEQ ID NO: 249784 - protein, 387 aa, unidentified
MSQVDDLSRSLAAFDQNTTLTVVVELSEASWLVAGLVPAVDRQPLKKQEPDPRALLRLLERWRAEATKTGRMIERIVLAFEAGRDGFWLARWLRARGIEVYVIHSTSVPVSREHRRAKTDRLDTGMLMRVFLGWLRGERGHCRMVAIPTLEEEDAKRPSRERESLVGERTRIINRMKSALARLGIRGFKPALRKAPQRLEALRTPEDTPIPPNMLDEVRRDMIRLAVVREQIDAIERARLVRLEQAPASGSHPMVRLLARVIGVGIETADMLVQEVLSRKLRDRRAVARYVGLTGSPDESGKRRREKGLAKAGNARVRRGLIQLAWRFLRFQKDSALAQWYRARTEGPKGVRKTTMIVALARKLLIALWRLVMTGEIPVGVVLRAAA

SEQ ID NO: 249785 - protein, 430 aa, unidentified
MKYARIHVLPETPPGGLTAGIDWGSTDHAVCVVDAAGQVRARFAVAHDRAGIGKLIAGLRAAGVREAAIERSDGVLVDALLGAGLTLVVISSRQMKNLRSRYGSAGAKDDRFDAFVLADVLRTDRARLRPLAVDMPATAALRAVVRARRDLVAHRIAACNQLRAHLAAVFPGAVGLFAALDSQISLAFLSRFQTQDAVDQVSEEELAAWLGTLPRRGNAPRPGQLYARLQAAARGTTGADGAARAAITGALVATMITLAAQIKALEAEIAAQLAAHPDAHIFTSLPRAGTVRAARLLAETGDCRARFPDPESLAGLAGVAPVTRQSGKHISIGFRWAASRQLRDAVCDFAADSRHASCWAAAIYDAARARGKDHPHAVRILARAWNYVIWRCWQDGTAYDPAKHNALQQIMDQQQATQAAAAGPGPEMTR

SEQ ID NO: 249786 - protein, 335 aa, unidentified
MQIYGIDLAKEKFDVSFFDLTSKKVSNQPSHKVVTNNLKGIGKFFKGLPSDAVLVAEHTGVYGDTLLKCCMDCNVKIAFVGGYVIHRYRATPDRAKTDVLDCALLRDFGERYPDKLKYKTFPEEALYELRQLARHREMLVEQRKQLITADRSEDCRPIRSLAVKRSMDRIKEMLDTEIAETEKEMLKVINGHESIHHNYELVKSVDGVGLITAVELLVKTENFTKITTARQYAAYAGTAPYEKSSGKMDKGAHISKIGNRRSKTLLYICAESARLHNKEIKLYYERRTLIDKKPRHYVLNAIANKLLRIIFTLVEKGEYYDANFIRQDPRVVKHN

SEQ ID NO: 249787 - protein, 355 aa, unidentified
MNSVKYVGLDVHQSTISVAVLNGEGKLIMQSVLATQAAAILDFLHGLSGSLQLTFEEGTQSAWLYDLLVRHVAHVVVCNPRQNVLLKAGSKNDAIDARKLAELLRGGQLSPVYHGEHGTRGLQELVRSYAALTEDTTRVMGRLKALYRGRAIGCAGKKLYGTRHRGEWLSQLREAGLQRRAERLYQELDGLQQLRRQARQEVIAECRKHGAAKLLRTVPFLGPLRAALLIGRVQTPHRFRSKRQFWAYCGLALETRSSADYRFQSGQLVRSKKPGFIRGLNLNHNHDLKNLFKSAATTASGMPGPFREFYQALLAKGMQPAMARLTLARKIAAITLSLWKKGEAFDAEHLKPQAA

SEQ ID NO: 249788 - protein, 329 aa, unidentified
MKLVIGADVSKKKLNISEYDGKNHKLKVILNKNSDIERFLKKYDKGKKDLLFVMEATGIYHLQLANILYERGFLVSVVNPLIIKRYAEMKMLRAKTDKVDAKVIAQYGYEQDVKLFQPRSKKRQRIIKILKAIEDLTVSKNNYLNRLGALDKDPLKERSVEECFNKLISELNISIKRLEEELKNLINKHYLNEYSRLLSISGVGPKTAIIIIAFFGRFEDFKNSKQVVSYIGTNPSPKESGSSLRGRGRISQKGNSYLRKQLFMTSLSAMQHNNACRNMYERLSLKGKEHKVLRVAVLNKLVRQIFVVLKYDRKYDPNYEEKFTSFAYC

SEQ ID NO: 249789 - protein, 344 aa, unidentified
MTKISTIGLDLAKNVFQVHGVDASGAVVLGRQLRRAAVEKFFAQLPPCLVGMEACGGAHQWARVISRYGHEVRLMPPAYVKPYVKRNKNDGRDAEAICEAVSRPTMRFVPVKSVEQQATLAVHGTRALLVRQRTMIANALRAALSELGIVAAQGYEGLGELMARLQEASDEIPETMRGALLLLAQHWQALDTDERALERQIAKAARCDGEARRLMEVPGVGPIIASTVLAKVPDAKVFRSGRDFAAWIGLTGRDHGTGGKHRPGRISKQGDRVLRALLISGASAHLRQQKRRGISDPWLRELLARRPYKVAMVAFAAKTARIIWAMLVKGEHYRDRATAPAAAC

SEQ ID NO: 249790 - protein, 428 aa, unidentified
MAYRIAAIDVHKKMLAVVVADVAGEGEYQFERRKFGATPDQLHLLAQWLVEQEVEEVVMESTAQYWKPVWGALERYWKPARQKRDGATKMSGTLHLCQAKSNRGPRGRKNDFADGERMIKRLVAQELVLSFVPSPEQRLWRTVTRRKYQLTCDKVRFRNQLESLLEQAHIKLSSFVSDLLGVSARRMLKALAEGETDPVALAALADHRLRATPEQLRDALGACTQLHEVYRRLLKMALEELRLMEEQIEQLDREALGLLQEHQDVVQRVAEVPGFGVDSALQMIAEVGPEAAAFRSEKALASWVGVCPGEEESAGESQSTRSPKGNCHMRRLLNQAAHAAVKVKGSIFEVTFQRLRAAGLEYQEAIWATAHRLCRLLWLILHKGVRYEERGPAVNAKSKRTRAARMIRELRKLGYRVEGGPLPAGNPA

SEQ ID NO: 249791 - protein, 324 aa, unidentified
MDKNKKIFGIDISKETFDVVDSQGNYYQFSNNFKSFLKFLKLLDENSHCVMEATGYYHYSLACFLVEKGIAVSVENPLSVKRFIQMHLSRIKTDKSDAAMICLYGQQRLLSLWEGYSKNQLESLQLIGLLETYTKQSTALKNKLEDQQTLGNPSNLVLKSLKKNLMHLQKEMVLIEQELLVLVKQEHQQMLTQLESIPGVGRKTAMLLVVLSDGFRRFENSSQLCSFTGLTPMIRQSGSSVKGKNRISKMGNGRLRNLLFMCSFTACKCNKGCRELYERLVNQGKSKKLVLIAVCNKLLKQAFAIAKSGVLYNENHRSKLQITS

SEQ ID NO: 249792 - protein, 346 aa, unidentified
MKNSTPKRAVKVLGIDLAKNSFQLHGVDKHGKIVLIKKLTRSKLKAFVAKLPACLIGIEACGGANYWKRVFESYGHTVKMMSPQFVKPYVKSNKNNAIDAEAICEAVQRPNMRFVPCKSIEQQDIQSLHRIRSQLVARRTAQANQIRGLLLEYGIAIPKGISYVRKAIPTILENAENELTLLFRALLKDLYDEMVHLDERVESLEDELKKVSRGNINCQRLLTIPGIGLLSATALIAAIGDISVFKNGRELAAWLGLVPRQHSTGGKPTLLGISKRGDSYLRTLLIHGGRSITRVADKHQDKRSQWIGRLEHRRGNNIAAVAVANKNARIAWALLTRQVNYKTSLV

SEQ ID NO: 249793 - protein, 346 aa, unidentified
MKKIFIGIDFSKEKFDATLIKAEGVEERAERQHEVFDNKVSGFRRLLRWVRSATDEQDTGLWLFCGENTGGYSRALCNYLYGSGYDMWLENALSIRRSSALQRSKSDKADAGIIAEYAMRNYDQMRLYKPQDKNLERLREVFLYRHNLVKLKAGMTVRKGEKKLTQDKSDISRFMAMSSKHLISEFNKKIAECDMRIERIISEDENLRRNFDIITSVPGVGTQNAVCLMVYTDNFCRFDFDSRKIACYYGVAPFGRQSGTSVNTPPHVSPFANKLIKALLTQAALASVHFCPQMAIYHHRLVEAGKKKPVALNNVKNKLLHVITAMVRKGEKYNPDHDYYAALNAA

SEQ ID NO: 249794 - protein, 343 aa, unidentified
MQTITTIGFDIAKSVFQVHGVDAQGNVVLRRQLKRRYVLAFFQKLPSCLIGIEACASSHHWSRELQALGHTVRLMPPAYVKPYVKRQKNDATDAEAICEAVTRPNMRFVATKMAEQQSCLMLHRTRHLFIRQQTSVINAIRAHLAEFGIVAPVGRNGVDQLLGVVADTLDKRLPEIARLCVAALGAELRMLKAQILEFDRMIRAWHRSSEASMRLDAIPGVGPALATALVASVADPKAFRSGRDFSAWIGLVPKQNSSGGKERLGNISKRGDRYLRSLFTTGALAVIRYAKIHGNRQRPWLTALLARRPTKVAAIALANKIARMAWAMMAKGERYKEPVALAA

SEQ ID NO: 249795 - protein, 412 aa, unidentified
MEGETVIAGVDTHKDVHVLCLLDGLGRKIWSGSFGADPEGYDRLAEAIGDPGSCMVVGVEGTASYGAGLTRRLVELGYNVVEVLRPKRDKVRPGEGKSDPLDAERAARKAASGKGCSVPKSQDGWVEAVRQLYVARRLAVATSTSCVACAKSMLTTAPSALRERFRGRERPKDLMPLLARGRKAGDALEESVLASLRSVAAVWKEARSQVESLDERIRALLEANAPALLGVEGCGTTTAAALVVAAGDNPGRLKGEAAFSMMCGASPIPASSGKTDRHRLNRGGNRQANWALYEIAIKRMAYDERTRRYVARRTSEGKSRREAVRCLKRYIAREVYHVLMNPNPDGAAPEGPELAKMRKAMRVTQKKAAEGLGLSAATLGHLEHGRRRSTKLERRYYELLCELKGALPQTAS

SEQ ID NO: 249796 - protein, 374 aa, unidentified
MQTSVATARTDVIYVAIEMSNTQWRLAFTAGDKIRQVAITAGATAAFLAHLQTAKEKLHVAADAPVYSCYEAGRDGFWFHRFLTVHGVTNLVVDAGSMRVQRKHRSAKTDRLDAELLVRHLLRWQAGERNVWSVVRVPSVADEDQRRLERERQRLRKEWTAHWARLWSLLKLHGISSCPKPRFLAHVAAARTWDGAPLPERIQAEIRREYERVEQLAQQRASLEAEQVRQLKAPSTAAEKVAAKLHRLVSLGPLGASTLAYEFFGWRNFKNRREVGALAGLTDTPWSSGALAHSQGISKAGNKRVRHVMIEVAWKWLRYQPDSALSQWYARRFANGGARLRRIGIVALARKILIAMWRWVAFDEVAAGIRLRPA

SEQ ID NO: 249797 - protein, 359 aa, unidentified
MSKCSTENKKVYVGFDVSEKTIEIFAVCGTETSKGSCKIDNNHDAIKKFLSTFKDPSRVCVVMETGTHSLWMSELIKGLGFEVIVAHARDLALIYRSDRKNDQLDAEKLARLAQADRKLLHPVKHMTLERQTDLTVLKARDLVVRQRTQLINTIRGLLRAAGHKLIEEEYSTRTIKKCCSALPEYMRPAIMPLLQQICYLDLAIKEYDRLVRKLCKKYPATKILQQITGVGELTSLAFVLIVGDPHRFDNAARLCAYLGVVPKQDQSGDTDKQLGITKKGNKLGRKLLIQAAHYILGPFGPDSELRSYGFRIQARGGKIAKKKSYVAVARKLVTVMLALWKNPDIEYDPNFKATRKLHK

SEQ ID NO: 249798 - protein, 335 aa, unidentified
MQIYGIDLAKEKFDVSFFDLTSKKVSNQPSHKVVKNNFKSIGRFLETLPSDAVLVAEHTGVYGDTLLKCCMDSNVKIAFVGGYVIHRYRATPDRAKTDVLDCALLRDFGERYPDKLKYKTFPEEALYELRQLARHREMLVEQRKQLITADKSEDCRPIRSLTVKRSMDRIKEMLDTEIAETEKEMLKVINGHESIRHNYELVKSVDGVGLITAVELLVKTENFTKITTARQYAAYAGTAPYEKSSGKMDKGAHISKIGNRRSKTLLYICAESARLHNKEIKLYYERRTLIDKKPRHYVLNAIANKLLRIIFTLVEKGEYYDANFIRQDPRVVKYN

SEQ ID NO: 249799 - protein, 400 aa, unidentified
MTHPQSCPVVTPTRIGVGCRGRPLTQKRKDTATVTIVAHTHPFVIGVDTHARNHALSILGMPHGEVIDDGEFSTTSAGIARAIEWVGRRTGGDLGVLWVIECSATYGAQLARSVTAAGYQVVEAARMSAADNRGVGKSDPMDARRIAASVLALRADQLRYLRKDDGPRAGLRVLLAARDHMTSERTATINALIALLRILDLGIDARRPLTGKQVIEVSRWRSRAEAVEVGIARAEAVRLARRVVDLDDELAQNITTTTVLLRKSAARVLLDKPGIGPVTAAVALAAWSHDGRLHSEAAFASLAGVSPIPASSGNTVRHRLNRGGDRRLNKALHMAVIVRMTHDAETRAYVDRRLAEGLTKREIRRILKRYLARQIHRALTAASRADHLPINSTPATSFPT

SEQ ID NO: 249800 - protein, 335 aa, unidentified
MYCGIDLHSTKSWVAVLDDQLKVVRERGLGNNLEDIVRLLEPYREEIEGVAVESTWNWYWLVDGLMDAGYRVHLTNTWAAQQWDGLKYTDDRHDARWLAHLLKLGILPEGYIYPKEERPIRDLLRRRAFLVRKRTSFLLSMRGAFECRTGMRTNSNDLKKWEAEDVEAYLGDDMSALGITCLLEPVRVLTAQIRTIEKEALKRARLRDEFAPLLTVWGIGKILALTTMYEVGDIRRFRKVGNFASYCRLVKTARLSVGKRKGSGNRKNGNPYLSWAFSEAAHHANRHHEEARKYFQRKKSKTNGIIAIRALAHKLARASYHVMRDQTDFDPTKLF

SEQ ID NO: 249801 - protein, 416 aa, unidentified
MDVIVSRCAGLDVHKNTVMACVRAPGPDGGRTSTVRRFRTFTDSLRQLRAWLVAEGVTQVAMEATGVYWRPVWHVLEAVPEFELLLANAHAVKNMPGRKTDVADAEWLALLCECGLLRGSFVPPPVIAELRDLTRYRKKLIEERSRETQRVQKLLEDAGIKLDSVVSDILGVSARQMLEALIAGVRDVEALAELAQTRMRPKIPQLRRAVEGRFGAHHALMLRMHLDHVDQLSVAIERLDVEVDRVIGPFSTQLQRLITIPGVGRRTAEVIIAEVGVDMRRFATAGHLASWAGMCPGNHESGGKRRSGRARKGNQALRAALCEAAWAAARSKDGYLPAQYRHLLRTFGKKGQTRAVFAVGHSILVIAWHLLANNCDYADLGAEHFTRHTDPETRKHYLIRQLEALGHKVTVAPAAA

SEQ ID NO: 249802 - protein, 322 aa, unidentified
MKEATTYVGIDIAKGQVDVQTYPPSTPVQFGNTPSGLAKLCKAIKRLRNVARVVIEATGGYETAAVVALAKAQLPVVVVNPRQVRDYARALGILAKTDTLDAAVLARFAHDTKPPVRPLPTETERAMSELIRRRGQLVQQHVADLCRLQQASLPGVIKNIQTSLDFNEKQQAEILTQLDELIQASPIYADKVELMQSVKSIGPITARTLLVELPELGTLTNKQIASLAGLAPFNRDSGTMRGTRTLWGGRQRARTALYMAAVNATQHNPVIREFYQRLIHAGKLPMTAIAACMRKLLTILNALLRDHKPWNPEKTTKPAKFA

SEQ ID NO: 249803 - protein, 341 aa, unidentified
MSNIKYFIGLDIACDDFTVSIYRSPETQVITKESIKNNQDGFNMLNSWLKEHGITKSNSVICMEATGVYGQAIAHYLAAKNFNVSVEPPLKVKRAFEPVGHKTDALDSKQIAEYAYRFKDELTPFKPKDEVLEKIRQLLSARERFTKQSTSIQNAMAAYEREFVQVPLIIKSNQKTLKQIKQHIADINKELDKLMHQDPNIFQKSNILKGIPGCGMLLASNLIAITGNFEDIRDYKKLAAFIGIVPYKHESGTSVHKKPRIRHFGPQTTRKLLRLAAQSVATHDSHFRQYYLRKLAEGKAKALVLNNIANKLLKIACAMIKNNTNYIKEHRSIHPMYLKTA

SEQ ID NO: 249804 - protein, 342 aa, unidentified
MNKVAIAAIDLGKHSFHLHAQDERGHELCRKKFTRPSLIQYLANLDPCTVAMEACGGAHFMAQEVAKLGHTPKLIAPHLVRPYVKSNKNDFADAEAICEAATRPTMRFVAAKTQAQQVLAMLNSTRDAFIKDRTATVNRIHAALLEVGVSLAPGFKSIKELPALLEASSFSAPLKNILMRLHGHFCYLDEQVKTSDKDLECQAAEDDLAARLMTMPCVGPITSSALAAELGDGKQFKCGRGYAASIGLVPKQHSTGGQTVLLGISKRGDRNQRRLLIQCARVYLIQLDRQKGALADWVRQLLASHHHSNLVVCALANKLARIAWGIAAHHTEFDAGPAAMNA

SEQ ID NO: 249805 - protein, 439 aa, unidentified
MNNHTIQSNSQLPLVPAPIDIWIGADWADQAHVLAIRTRSGATRTCSLEQKPELLDQFFLGLRQEHPQSRIGVCIEQTRGALIYALMKYDFLVIYSINPRSLADFRRAFCVSGAKSDPSDAQLLCEMGCKHQERLRPLQAEDACTRKLRLLVEARRSFVDRNTSVLNEFGAVLKCYYPLMIELFEGNLDSQMACDLLKRWPHLAALKQAKPATLRAFCYAHNCRGKQRIEQRLEAIAKAVPLTEDPAIVEPLQLQALALAELLCVLAKQIKSYDERIQRVFNEHSEAWLFRELPGAGLVIAPRLAALFGTQRANWPNALDLLCRTGVAPVQKQSGNQCRVQFRWARPKFLHQTVVEFAKCSLRFCPWAKLLYEDQLAKGKSRFSAIRMVAFKWIRILWRCWTQRVAYHETTYVLGLQRRGVKLYQSLYGNPAGEPVNNP

SEQ ID NO: 249806 - protein, 312 aa, unidentified
MMQQTFIGVDVAKSWLDIHHPKQRSLRIDNTPKAARAFAGACVKEGAWVIFEASGGYDRILREALETAEVPFSRVNPRQARDFARAMGVIGKTDRVDARMLVELGIRLNPPRTEPLAQARKALQAQTVRRRQLVDLRKQEDTRLKQTADTDVRADIKSLIAVLERRIAKIEREMVRLVNADAELAAIDEILQSAPGVGPIVSATLIAELPELGNVDRRAIAALAGLAPVARDSGKRSGPRAIEGGRPVIRTILYLAGLHASRAASRFRDFRDRLQRAGKAPKAAIIATAHKLLVTLNAMVATRQRYAVQPPG

SEQ ID NO: 249807 - protein, 335 aa, unidentified
MQIYGIDLAKEKFDVSFFDLTSKKVSNQPSHKVVKNNFKSIGRFLETLPSDAVLVAEHTGVYGDTLLKCCMDSNVKIAFVGGYVIHRYRATPDRAKTDVLDCALLRDFGERYPDKLKYKTFPEEALYELRQLARHREMLVEQRKQLITADKSEDCRPIRSLAVKRSMDRIKEMLDTEIAETEKEMLKVINGHESIRHNYELVKSVDGVGLITAVELLVKTENFTKITTARQYAAYAGTAPYEKSSGKMDKGAHISKIGNRRSKTLLYICAESARLHNKEIKLYYERRTLIDKKPRHYVLNAIANKLLRIIFTLVEKGEYYDANFIRQDPRAVKYN

SEQ ID NO: 249808 - protein, 367 aa, unidentified
MEKSSKVYVGMDVHKESIEATLAEQGGEVRRLGQIGGDRGSLLKMARKLQSKGGERVFVYEAGPCGFWIHRELAALGERCMVVSPALVPKRAGDHVKTDRRDSERLASLARAGELEAIHVPDIRDEAIRDLVRGRDDAVIAQRRVRQQLKALLLRNDIRYVGRTSWTGAHRRWLSELKLPEPAQRIVFEEYVDAITVATGRIERLTRAIDTEVLTWRFAPVVAALQAMRGIQFVHAVTLIAELGDLTRFGSARQLMGYLGLVPREDSSGEHRRQGSITKAGNSYARRALIEAAWAYRHPARVTRIIATRQTGLPKTACDIAWRAQLRLSAKYRRLNARHLHHNKIVVALARELSGFVWAIGQCVKPQ

SEQ ID NO: 249809 - protein, 270 aa, unidentified
MANQIAVGIDISKKTMDVAIGHEQSTAIFSNDGAGHQALIEVLKSHQVSLIVMEATGQYQLACAYALQAAGFAVVVIHPRQARDFAKAMGRLVKTDSVDARMLAELAQVLNQRPDRDRFIKPMPDQAQQHLHALVLRRRQLVRLLVSERQRKHMAHAEVVQDIAELTDVLVKQLEMLDRRIAQHLIQYQSDLAALLKSVKGVGPTTAATPISELPELGQLKAKQICALVGVAPMNRGSGQARSKRIICGDRPRSGVRCTWPPSSPCALTP

SEQ ID NO: 249810 - protein, 365 aa, unidentified
MKDTIKYVGLDVSKEKIAVAVAEEGREEPRYFGMIRHKAEDVRKLVKKLGAAENLHVCYEAGVTGYGLYRLMLSLGVTCEVIAPSLIPKKPGDRVKTDKRDAIRLAKLLRAGELVSVHVPTEDDEALRDLVRAREDAKEDELRAKHRLTKFLLRHDIHPPDGVKRWSYDYRQWLDKVSFERSASQVTFQEYLHQLIEIEQRIARFEEEIQRQATDSVHAPIIQALQTLRGVATITATSLVAEIGSFKRFGSAKQFMAYTGLVPSESSSGDVRHQGKITKTGNRHVRRLLIESAWSYRYKPAVKGKLKKRQEGQPAPILTISWNAQNRLHGKYYRLLSRGKVCGKSITAVARELAGFIWAIGHLVE

SEQ ID NO: 249811 - protein, 317 aa, unidentified
MTIPSESYVGIDVGKTWLDVALWGSEEAWRVSNDEAGIAKIMEWVTALKPRLIAVEATGGYEQLAVQTMLLDSQPVAVINPTRVRALSKATGKLAKTDVIDARLIAEYAFKIHPDAQEPKKANEIRLNALVTRPEQLVVMCTAEQNRLGTVLNSLQADISEHIEWMNVRINKLEEEINQLIDSLPEWKEQAARLDSIPGVGMITAMTVLAEMPELGQLDRQKIAALAGLAPFNQDSGKKRGKRRIFGGRKGIRRVLYMACLSATKCNPVIRSMFQRLIKKGKLFKVALTACMHKMLTIMNAMTRDRVEWRAPKPSPI

SEQ ID NO: 249812 - protein, 356 aa, unidentified
MSRDIKYIGMDVHKEAIVIAVLDGSGRLVMESIVETKASSILQFIHGLRGELHVTWEEGTWAGWLYDLLQPQVPQVLVCDPRRNALLKEGNKSDKVDARKLADLLHTGMLRPVYHGEHGLRTLRELGRSYQTIGKDLNRVMNRLKALYRGWGIACAGTQVYAPRYRKEWLSKIPHPGVRRRAELLYQQFDGLQALRRRLRPELLAESREHRATKLLRQIPCIGPIRAARLLALMQTPHRFRSKRQLWTYSGLGIETHNSAQYCYVRGQLQRTKKPQQIRGLNQNHNHEMKEIFKGAATRASCGVGPLRDFYVALLAKGMKPEMARLTLARKIAAIALTLWKKEEPFDAEQLKPQAA

SEQ ID NO: 249813 - protein, 341 aa, unidentified
MQFVGLDVSVDETSVCVVDAAGTVMRELKVRTDPVAIGRAVSQHAPEAERIGLEAGGSSSWLCRELKLQGLPVMHMEARHAHRALSMRINKTDRNDARGLAELMRVGWFKPAHAKSVDAHRIRSLLLARKRLIDMRRDLTNQARNIMKTTGTMLGSTAGRGFVAKATAACDADANLASMCRPLLEVARTMALQIRAYDRTLLAMARHHQTARRMMTVPGVGSLTALAFISAIDDPLRFKRSTDVGAYLGLTPRRHQSGEMDWSGRISKLGDGLARTYLFEAASVLVGRIARWSSLQEWGVRLTKRVGSKKARVAVARKIAIILHCIWVDGTEFEWGTPIEA

SEQ ID NO: 249814 - protein, 350 aa, unidentified
MPQRNMPRPAAVYGIDIGKNIFHVVGLGSDGVPVQKVRFRRDTLLQFFERAAPAIVGMESCAGSQWIARKIQALGHKVRLIPAQFVKPYVKSNKSDIIDAEAIAEAATRPTMRFAALKSEEQADLQALHRIRDQMIGTRTRLINQMRAFCLEYGIALRQGAGLFKVDLPHAVEDQSNDLSSAMRKLLADLFADLRQLEQRIGDVTREIEAIASREDVARRLMTIPGIGALGATALLAAVGNGRQFQKARDLAAWLGLVPREYSTGGKQKLLGISKRGNRYVRKLLVHGARSCFRHLDRTRDRLGNWLNGLQARMHPNKAVVALAAKMARIVWVVLTKPGALYERRDPAFT

SEQ ID NO: 249815 - protein, 475 aa, unidentified
MAASRKTMMKDAAAPPEPRDDGVEPAEERVEVVRFAAAIDVAKGSGMVCTRVPGSRGDRKRQKVWQVDATYSSVIALMDHLRCEGIQRLVLESTSDYWRCWYYLAEAAGLEVWLVNAKDVKHLPGRGKSDRQDCVWLCKLNERGMLRRSFVPPEEIRDLRALTRTRARLAQDQVRHQCRVEKVLEDALLKISGVISDLFGVSGRRFLDALVAGERSPAALAALGDGRLKASPQRLAEALTGRFRDIHAFEIAAHLRLIDAINDEIARLDERIEQQLAAIPGVAPACIACGLIGGGHAPGCVRDGTPVPGLIERLDEITGVGARNAQVLIAELGTDMSVFPTAGHAAAWARLTPRTRQSGTTARPGRTGKGDPYLRGALGQCVMAAARTDTRLGEMYRRIARRRGKQKGIVAVSRVICEIAWLLIADRDARFTDLGADYYNARNPRQQTRSRIREIERLNPGMKVILAPAGPAPAA

SEQ ID NO: 249816 - protein, 397 aa, unidentified
MLAVGIDVSKSKSTVAIIRSDGTVLSKPHDFSHTISDITQLTALIHSYQEETKVALESTGHYHYPILKALLEAGFTVFVINPFLVKKFMDNSIRKGKTDKKDAVRIAHFVLEKSYQLRPYSPTDQKYEDLKFLSRQYSQSVSMKVKARVQLSNLLDEIMPGIQNIIPISSRYLENTLFFDFVEKYQSYEKISQMGEKRFVNSYIAFAQKHRCRGSQKKALAIYQAASDGIITRSPDVTTSLALSQCLLMLKQASSSADLILRQMQSIAYTMPEYSIVRSMYGVGDRLAPILIAEIGDVRRFTSAKALNAYAGNDAPPYQSGQFEGTNRHISKRGSAYLRKACYEVMHSLKVHKPENDPVYQFIIKKESEGKHKTVAKMAGVNKFLRIYYARVMELYK

SEQ ID NO: 249817 - protein, 351 aa, unidentified
MSRKTTSFEAVATIGIDIGKNTFHLIGLDKKGAIVLRQKLSRGQVNIRLANMLPCVIGMEACVGAHHLGRQLKTLGHDARLMPARYVRPYSKGQKNDFRDAEAIAEAVLRPTMKFVAIKTVEQLDLQGLHRIRERLVCQRTSVINQIRAFLLERGIAVRQGLRALRTEIPIVLAMTDKLSPRMIHMIEDLCTDWHHLDGHIETVSDEIETLSEQDDGAKRLMTVPGIGPIISTATVAAIGRGDVFSKGRDFGAWLGLVPRQMSTGGRTVLGPISKRGNRYLRMLFVQAARAVLLRPQSWEKHGLKSWIEAAARRLNRFKLAIALANKIARIAWGVLHGGRNFEVRPAPQAA

SEQ ID NO: 249818 - protein, 341 aa, unidentified
MQITTIGLDIAKNVFQVHGIGAAEKVIVRKQLRRGQVMAFFEALAPCLIGMEACATSHHWARELTKLGHQVRLMPAKDVRAYVKRNKNDAADAEAICEAVRRPTMRFVRIKSAEQQGQLMLHRARDLLMRQRTQVINALRAHLAEFGITAAQGREGIKELLAIVVRDEGSRLPVDAYASLTVLAAQLQAVQTMIGSLEKRIVAQHRSNEASKRLETIPGIGVIGATTIAAVVPDPRVFRSGRDFAAWIGIVPRQDSTGGKQKLGPISKQGDQYLRRILIVGAHAVLRRARQQPEKYPWLTQLLARRPFKVVAVALANKMARIAWALLAKGGTYRAPQLVAA

SEQ ID NO: 249819 - protein, 343 aa, unidentified
MQVVTTIGLDIAKSVFQVHGVDAQGEVLIRRQLKRRYVLAFFQKLPPCLVGIEACASSHHWSRELKALGHTVRLMPPAYVKPYVKRQKNDAADAEAICEAVTRTNMRFVETKTPEQQSGLVLHRTRHLFIRQQTAVINAIRSHLGEFGIVAPVGRNGVEDLLDVVADPSDKRVPEIARACLAALGAQLLKLKEEILQFDRMIRAWHRSNEMSLRLDDCPGVGPVLATALAATVADPKAFRSARNFSAWIGLVPKQHSSGGKNRLGSISKQGDRYLRSLFVAGALAVIRYAKIHGTKHRPWLTALLARRPTKIVAIALANKIARMAWAMMAKGERYKQPVALAV

SEQ ID NO: 249820 - protein, 355 aa, unidentified
MKYYTSTTEFNCGIDLHARQMYVCVMDRQGKKLVHTNVKDNDFAFFLKLVQPYKHSLTVCCECMFGWYWLADACLEAGLSFVLAHALYVRAIHGGKNKNDRIDSEKLTHLLRSNLIPPAYVYPATLRPVRALLRQRVCYVWRRSELLARIYSHQLAYNRIPVRQSRRNRDPWKERFLAQEDHPLRRIALQNDWAMIVQYDTQISALELDLLRVTKECAGRDYALLQSVPGIGRSLGLTILYEIGSIDRFPTVKDFLSYCRLVKGTVASAGKIKGLRGAKLGNPYLRWAFGEAAVIAKRDHAIIGPLAQRLEAQMNGNKFKANTVLAIKLARAVYFMLKNKTVFDPERLVAVLAKH

SEQ ID NO: 249821 - protein, 353 aa, unidentified
MKYYTSTTKFNCGIDLHARQMYVCVMDRDGKKFVHTNIRNNDFEFFLKLVAPYRHDLTVCAECMFGWYWLADACQAAGLHFVLAHALYLKAIHGGKNKNDRIDSEKLAHLLRTNFIPPAYVYPADKRPLRALLRQRILYVWRRSELLSRIQSHQLAYNRPTCRQNLYNRQSWTEQLLASEPDPVRQLALQNDLALIGHYDAQLASLEKALLKLTKQTASRDFNLLQTTPGIGDYLGLTILHEIGDIARFPTVKDFLSYCRLVKGTVASAGKLKGLRGAKLGNPYLRWAFGEAAVIAKRDGVLGPLAQRLEARLGNKFKANTVLAIKLARAVYFMLKHKTAFDPDRLVATLSKN

SEQ ID NO: 249822 - protein, 355 aa, unidentified
MTSTKYIGMDVHKESISIAVMNAAGKLVMECVIETKASTILQFIHGLRGDLHVTFEEGTWAAWLYDLLKPYVTEVVVCNPRKNALLKDGSKSDRIDARKLAEQLYMNKIKSVYHGEHGLRTLKELARSYLTITKDLTRVMNRLKALYRSWGIPCAGNEVYAPRHRSEWLSKITEAGVRRRAEHYYQQLDVLRLLRQEVRRDLLAESRKHKAWKLLRLIPGIGPIRAALLVALIQTPHRFRTKRQLWTYSGLGLETHDSAQYRVVDGQLNRSKKSVTLRGLNKDHNHDLKDIFKGAATRVSSSSGPRRDFYEALLAKGRKPTMARLTLARKIAAITLIVWKKEVRFDANYLKPQAA

SEQ ID NO: 249823 - protein, 315 aa, unidentified
MDEPPAVFVGIDVSKDRLDVHLRPSGKAFCVPRDAKGLDGLVGRLGSLPIALVVLEATGGFEATVAAALAGAGLPLCVVNPRQIRDFARAMGRLAKTDALDAEVIALFAERVRPQARPLQEPERSHLAELVGRRRQVIEMIGMETNRRGQTVDKQLARRLDRHVAFLEKELADVDRDIGQAIKASPAWREAEALLKSVPGIGDVTARTLLAELPELGTIGRHQLAALVGVAPINRDSGLMRGRRAIGGGRTSVRGVLYMAALTAIRRRSPLRAFYDRLTTRGRPKKVALVAVMRKLLTILNAIVRDRTRWQPLNA

SEQ ID NO: 249824 - protein, 455 aa, unidentified
MARAKSGSKEALSMVNPRAAGIDIGSTTHMAAINPDVDDNPVREFGTFTGDLHEMARWFKECGVTSVAMESTGVYWIPTYEVLEEHGFQVFLVNARYAKNVPGRKTDVSDAAWLQRLHSYGLLRGSFRPEAGVATLRAYLRQRERLIEYTASHIQHMQKALMEMNVQLHHVVSDITGVTGMRIIRAIVDGDRDPAKLAEMRDIRCHASVEKICAALSGNWRDEHVFALCQSLALYDFYQTKILECDRKLEIALQALEVGNGHDTRRLPKVRTKTKQVNTPDFEVRSALYRVLGVDLTQNHGIGPSLALKLVGECGTDLAAWPNSKHFTSWLCLVPGNKISGGKLLSSKTRRSSSRAAALLRLAATTIGRSDTALGAFYRRLSARAGKAKAVTATARKIAVLFYNSLRYGMAYHDPGASQYEERYRSRVIGNLQRRAKAFGFALHELPAVPEIAVS

SEQ ID NO: 249825 - protein, 360 aa, unidentified
MRTVSCAQSEAVARIATRMQLTLTYPIKISVSQRKGFFMIFVGIDISKLTFDVAVLIDGKYQSRQFENKQSGFLKLSQWIKSFKKPAYFCLEATGIYGLALAKHLYQTNQKVIVANPLQTHAFAKMEMARNKTDKADAMSIARYCQYLFNRGEIDKSLFIPRSAAFERVQFLVTRLDQLSKMKSQENNRSGVSLDKAAARSIGSMLTFIDKQIMVIKKEITMIIKQDEQLTVQLTLLVSINGIGDKTAWALLAYIGDISLFENSKQISSYAGLNPSIDQSGTSLNRSSLSKTGSTRLRKSLYMPAMVAVRYNPLMLAFYNKLLTKGKPKKVALIAVMRKLLVLAFGVLKSGKPFDVNYQH

SEQ ID NO: 249826 - protein, 402 aa, unidentified
MNAVGIDVSKSKSVVAIMRPFGEIVSAPFEIKHTASDIHSLVELINSVEGESRIVMEHTGRYYEVLAHQLSKANLFVSAINPKLIKDFDNDSLRKVKSDKADSVKIARYALDKWQNLKQYNVMDELRNQLKTMNRQFGFYMKHKTAMKNNLIGILDQTYPGVNTYFDSPARSDGSQKWVDFASTYWHVDCVRKMSLNAFIDHYQNWCKRKKYNFSQSKAEEIYGKAKELVPVLPKDAITKLIIKQAVDQLNSASTTVESLRTLMNETASKLPEYPVVMAMKGVGTSLGPQLMAEIGNVSRFTHKSAITAFAGVDPGVNESGTYEQKSVPTSKRGSADLRKTLFQVMDVLIKTHPQDDPVYQFLDKKRAQGKPYYVYMTAGANKFLRIYYGRVKEYLASLPES

SEQ ID NO: 249827 - protein, 338 aa, unidentified
METYAGIDLHSSNNFIGVINDKDKILYGKRHSNRLDDVLRALDPFQDSLQGVVVESTFNWYWLVDGLQEHGYAVHLANPSAIQQYEGLKHTDDQWDSFWLAHMYRLGILPEGYIYPKEHRAVRDLLRRRLLFVKHSTSHILSLQSMISRNLGLNMSGREIKKLKPEDVDDLFDCPNLGFMANNSLEAINFLKKIILDIEKKVESQVKMRKEFLMILTIPGIGNILGLTINLEVGDIGRFPAVGDYSSYCRCVESKRLSNGKKKGENNKKNGNRYLAWAYVEAAQFCRRYCVKAQSFYQSKAAKTKPVVAVKALSNKLSRASYYIMRDQVAFDEDKLFS

SEQ ID NO: 249828 - protein, 332 aa, unidentified
MKNIIIGADVSKRTLDCVLHDEDKQKMLGANHLKITNDKNGCDELLKWLKQKKISRKEVLFCMEHTGDYSYGFAELLAEKGVSFCQIHPMEIKRATAALRGKNDKVDAVRIANYAYRYRDELEPSTLKDKDILRIRDLLNDRKLVVKCRRTFKTIMTEYKNKQECSRYQRAKRNVELCDGQIGEIEAELLEIVNGNESLVKTYMLLTSIPGISLVNAFNFIVVTCNFTSFKTARQLAAYCGIAPYEYTSGTSVNKGTHVSKMGNKEIKADLTMAAQAAILWDTDLRLYYTRKRAEGKSFGCVLNAVKFKLVCRMFAVVKRGTVYVDTKKYAS

SEQ ID NO: 249829 - protein, 418 aa, unidentified
MSFKIIRKNCCGLDVHKTWIYACIGIADSHDRVEYKQARFSSFTKGLNELCDWLAKYNCTDICMESTGKYWIPVFNILEKHNLWVTLSHPKYTKPQTGNKTDRKDAKWICDLYMCGMVKPSFIPPADIRQLRDLVRYRFKLTCMITGEKNRAHNCLTVSNLKLDDVFSDIFGKSSRSITEQILQHPGEFFDVTPFVDDRCKTPIEEIQAAVDGAISPEQAVKLRQCLEHIDELEKHKSEIEREIFRLSDKYEVALNLIRTVPGFDKNPLTAIQVLSEIGSDMSVFPTAKNLVSWAGCCPRNDKSDRKIKSTRISRAGTYFKPVLVQIANALIKSKKHPEFTNRYRRIKARRGHKKAIIAICRMILTAIWHILTDLKPYTSEGFLESRPVNEAKVLTTSQALNLLKQRGYIIKDDVSVS

SEQ ID NO: 249830 - protein, 407 aa, unidentified
MEVMYPRCAGLDVHAKTVVACVRVATGRTVTYAHQTVATDTRGLLALADWLATFEVTHVAMEATGVYWKPVWHVLEDAFTLVLANAQHVRNVPGRKSDKSDAKWLADLLALGLIRSSFVPPAPIQELRDLTRTRKQLVRELSRHTQRIQKTLEDANLKLTEVISDVLGQSGRAILTALVAGETDPERLIDLTHGLKASREELVQAVHGRVTPHHRFMIQLHLTQVAALEQGIADLDARIGDALAPFRAAVDLLTTMPGLKTTAAAVIIAEIGVDMSVFPSAGHLISWAGLCPRLDESAGKRRSRRTRQSTPWLKATLVQIAWPASRKKESYFHAQFLRLKSRRGPKKAIVAVAASMLTDVYYMLRDGVEFQDLGNQYFIQRDKSRITKRLLQRLRDLGVDVEVKNAA

SEQ ID NO: 249831 - protein, 388 aa, unidentified
MQTAADRPEAPNAIRSDLAAIFVSLELSRSTWLITSLSPDGGEKMSKHAVRGGDVAGLLERFAQLQKKARARTGKVFHFVVIQEAGLDGFWIDRMLRKEGIESHVVDPASIATSRRRRRAKTDRIDGEALVRALLAYKRGEPRVCAMVKAPTPEEEDRRRLCRERKVLIVERVRHVNRVKGVLFSQGISGYKPLRRDRRERLDTLQTGDGRLLPDHLKAQVRRELDRLELLLEQIKAVESERDAVLAVQQGAAPAPATMLLNIKGIGPEFAAILWSEGLFRHFDNRRQVASYAGLAPTPWQSGSVDREQGMSKAGNPRLRTTLIQLAWLWLRNQPQSALALWFKDRVSRNGGRLKKTTVVALARKLLIALWKYVTAGVVIEGAIVKSA

SEQ ID NO: 249832 - protein, 467 aa, unidentified
MKLLYRCCAGLDVHRDTVSACIRRRVRGQAEATIEEQVFGTFTQDLECLRTWLKKNKVRQVAMESTGVYWIPIGNVLERHSRFTLTLANPATVRALQGQKTDRIDARRIAEYLQYGLLRGSFIPPKPIRELRELTRLRVPIQQDRNRVINRIARLLETVNLKLASVASNIAGTSGMAMLRLLASGVRDPERLAQCAQGQMRIKIPALLLALDGRPDAHFRWMLSEFLTQLARLDEQRARVDARIEQLALPDEDRLRRLSTIPGVDRTTALVLLAEFGTDMTQFPTPGHLASWAGLCPGNAESAGKRFSGRTRKGDRYVRRILVQSAWAASRCHDCFLAALFFRTAQRRGMKKAAVAVAHRILIIAWHILAEAGVEYYERGGDHFDRRHPERTARKLTRRLEAIGYKVTLIAPPKPPRPCSKPRVGTPPTPPVHPSVCARCARWGMPRCICLVKRNRTPSPPQSKRPL

SEQ ID NO: 249833 - protein, 365 aa, unidentified
MEITTIGIDLAKSVFALSGADRAGKVVLRKQLRRGQVLEFLRGRRPCLVGMEACGGAHHWARAIGALGHQVRLMSPALVRPYRSGANKHDRNDADAICEAVGRPQMRYVAVKSVAQQDLLALHRVRTQLLKQRIALSNLIRALLHERGVIAPLGAAGLRQALAQALQAENSELSAAIGEVLRELSGGLRELEQRIATITRRIECAAKDDERCARLRQVPGVGPLTSSALVATVGNAREFKRGRELSAYLGLTPRQHSSGGKTVLLGISKHGDRYLRTLLIHGARALLYRNRSNPRAAWAARIMAARGPNVAAVALANHNARVLWALLSRGTSYRPAPHPSSFPSRPSPVVARAREGKLLITTERS

SEQ ID NO: 249834 - protein, 321 aa, unidentified
MTYVGIDVSKATFVVAYSSAKSSETKTFKNTTKGIREFIRTISPEENHCVLEATGNYSMLLVYLLSKAGFTVSLENPLKIKNFARVMLSVVKTDEIDARLIALYGERMQPAPFKLRSDSLLLLKQKRTVLRQLKKQLTANRNLEGSLKILPFIDSKCKKVLEKTIKFLEKQIEEMEEELTSLAEIEYKKQMDLLTSIKGIGATLAAALIIATGGFTYFDNAKQLTRYLGLSPTYQQSGTSVNVKGHINRNGDSSLRSQLYVAAFSSLRCNTECKACFDRLRSNGKPGKVVVIAVANKLVRQAFAVVTQGKPYVDGFKSEKP

SEQ ID NO: 249835 - protein, 333 aa, unidentified
MAQKELVVSIGKMDEQAVITVYANKIFPNNEKGFANLEVWINKQSIPQYPLRYVMEATGVYHERLAYYLAGKGYAVSIVMPNKISNFFKTLEIKTITDKSMSFAIAMFGLEKKLDNWVQPKRVFRTLRQITREREQLIAERTMIKNQLHAEQSEAFPGEDTIRRMMDRIKMIGEQLKEILTEIRTAVAQDKHLKQTLATITTIPGVGLLTATVIIAETNGFELIRSKKQLTSYAGLDVREKESGSSVKGKPKISKRGNKHLRKAMHLPALAAIRHSERYKAIFVRIVSRNSVKMKATVAVQRKLLEMVYTIYKTNKPFEKDYLQQNAHISENS

SEQ ID NO: 249836 - protein, 456 aa, unidentified
MKIPQSTIRLLTGRLVKILLYREVSTMKSNTQNAKIEAITEKTLVLGIDVGSETHYARAFDYRGVEYSKKPFKFSNTEAGFVTFKAWVLDIKEKHGKDKVIPGMEPTGHYWFNLGKFLQDNEMKPVLVNPHHVKKSKELDDNHPTKNDRKDPKVIAGLVREGRYMIPYLPDGVYADLRTASNIRFQLQAELTRIQNRINRWFNIYFPEYKTVYGKPDAKSGILILKEAPLPEDILTLGIDGVNQIWRDAKLRAVGKARAKTLIEAAEHSVGSKEGAVSARMEIRMLLEDYESRNIRLQEVMGLIEGLVNQIPMAEKLLEIKGVGIKTVSGFLAEVGDIRRFNDPKELQKLAGLALVENSSGKHKGKTTISRRGRKRLRYLLFEVAMSLVAKNPEFRELHNYYTTRRLNPLKKMQSLMAIAAKLLRVFYAILTKGVGYDPKKMVNDIRRPAAYAQAA

SEQ ID NO: 249837 - protein, 426 aa, unidentified
MEVMYKRVAGLDVHKETVVACVRAMAGRQPTRECRTFATTTDGLLALLALLAWLTASRVTHVAMEATGVYWKPVWTILSDGPFVLMVANAAHIKNVPGRKTDLNDAMWIADLLACGLIKASFVPAADIQELRSLMRTRKQLVREQTRHVQRLEKTLEEANIKLGAVISDLMGVSGRRMIEAMIAGERNPHRLAALAERTVKASPKQLCDALHGRLREHHRFLLKLHLQQWDALDTAIQQIDRQVAGQIERMDAEAAASQPPFRDLILRLSAIPGVSSLSATTILAEIGRDMSRFPTAGHLVAWAGLCPGQNESAGKRKSARLRRGAPWLKTMLVQCAWAAKRAKDSYYRAQFFRLQSRRGPQKAICAVAASILTAIYHMLKSGLPHRDLGADYFDRRSPEAKAKRLVAQLAKLGFGAQLQPLADAA

SEQ ID NO: 249838 - protein, 418 aa, unidentified
MCIKTKKVKWINKKTMIATFDIGKNVHYGYFKAPDGRERKPFCFHNTQKSFKQLWADIFQFKQDHHLEQIVIGFESTGPYAEPLFHFLRKKPVKLVQVNPVHTKRIKELTGNSPNKTDKKDPRVIADVICLGHALTLVVPKGASAHLRRLTQARERALRDRTATSNQLQHLIFVIFPEFLSIMKNISTKTATYLIKHYPGAQNIAAMGVEDLTAIMRKISRGKLAGERAKELIAAAKNSVGICEGRESIFLEIAYLSARIENENDFIDTLENQLDEYLQQIPYSSSIMSVKGIGVVTTAGLIGEVADFKKFDTISELMKLAGLDLYEISSGKHRGQRRISKRGRPLMRKLLFFAAINAVKSNGIMHETYQRMLERGMLKMKALVAISRKLLGLIFAIVRDNTKYIEDYNEKHHYKLAA

SEQ ID NO: 249839 - protein, 412 aa, unidentified
MDVIHQRCAGIDISKADVKVCVRVPGPGTRRRTEVRTFSSMTAGLLAMRDWLMSEQVTLVGMEATGAYWKPIFYLLESDVECWLLNARHMKTVPGRKTDVKDAEWIAKLIEHGLVRPSFVPPQPIRQLRDLTRYRTEVVRERTRETQRLHNLLEDAGIKITLVVSDVLGKSGRAMLDALIAGERDPHTLAELAVGRLRGKHAALIDALTGTFTEHHAFLARAMLDRIDTATAMHNRLSARIDRLVQPYRRHVELLASVPGVSEHTAQVILAEIGSDIARFPSAGHLASWAGVCPGNNESAGKHSSGTTRPGDPWLKSVLGQAAISASRGKDTYLAARYRRLMARRGRKRALVALQHSILIAVWHMFTHDMAYCDLGANYFIECADKARATRRLIGQLNHLGYQVTLNPLAVT

SEQ ID NO: 249840 - protein, 405 aa, unidentified
MGIVMALDVSMGKSYKVVYDDQQCLSEGEVIHSQAGFQELLDEIHTLPEDMMLVFESTGVYSKPVETFCQKNQLRYCLLNPLAAKKQLEQGTLRSWKTDKHDAHKLAQVHQQNDRPEKIHQPDIYHEIRDLSRFYQEIEEDIKRTRMYLHNALQLSFPELEKFFSSRVTPYALTLIDLFPHPELVLQTSKTKIKNLLMKSTTKRISENRAKQKASEIIEYAKESYPTVSSTSVQTQKVQYYARQLLQLLEEKEKVSKQMIEKAKTLFEFEILTSFPGIGEISAALFIGEIGDLSRFSDHKKVNAFIGIDIRRYQSGKYAGQDHINKRGNPKGRKILYFIVRNMIRQQKAAPNHIVGYYYKLKEQPHPKKDKVAVVACMNKLLKCIYSMVRNNTKYDYSHTVSMDQ

SEQ ID NO: 249841 - protein, 400 aa, unidentified
MNAVGIDVAKGKSMITVRQPLGVVIVKPYEILHTAIELKKLAESLKSLNGETRVIMENTGVYHLPIADYLHDAGIFVSVVNAKEIHGYDKSPLRKVKTDKADAKKIAEYGLAKWEKIRRYSPGEDTRRQLQTYNRQYWHYAKIKTMHKNNLDALLEQVFPQVKQLFTSSVRTDGHEKWVDFVGKFWHIECVSCLMEAKFREQYRKWCHKFGYRYIESNANEIYAVSLTYIATMPKDEFTEKLIKSSAAQINAVSKTQSEILEKMREIAKSLPEWEVVIEMSGVGETLAAQLIAEIGDINRFDSKKSLTGFAGVDSPTYQSGTVNRQGEPVTKSGSPHLRRTLFLIMLNLIRGKPEDDVYNFMMKKKSEKKQFLVYMVAGFTKFLRIYYGKVKEHTARVNS

SEQ ID NO: 249842 - protein, 402 aa, unidentified
MNCVGIDVSHGKSIIVVMRPFGEVVVSPFEVLHTDSELSKLAGLLKSLDGETRVVMESTGNYHAPVAWLLHDAGLYVSVVNAMLVHDYGNNSLKRAKTDKKDAVKLANCGLDHWLTLPRYVPEEDTRLMLKTCYRKYQQYSKVQTMLKNNLISLLDIAFPDANRLFTSPPRADGSEKWVDFVAAFWHCECVCGLSEKAFTAKYQKWCKKHGYNFSEDKALDIYASACGHFGVMPKTDTTKLLVEQAISQLRATSAALAALKQEMQSLAASLPEYPVVMEMFGVGPALGPQLMAEIGDVRRFHSKKALVAVAGIDAPPYQFGQMDVRSHSISKRGSASLRRTLFLVMSVILQHAPMNEPVYQFMNKKRSEGKPYRVYMMASANKFLRIYYASVKAYLDSLEHD

SEQ ID NO: 249843 - protein, 342 aa, unidentified
MKETKKKTVIGVDTAKRVFQLYWIDVETGEILNRKLTRAKFVVHFANLSPCVIGMEACGGSQHWSRELKKLGHDVRLLPAKMVRPFVTGNKSDAHDARAIWRAVQQPDIKYVAAKSEAQQAILALHRMRQQLVKFRTAQVNGLRGLLTEYGEVMPQGRAGLRNGIAAALERISERLPTMVIETLREQWARIITLDEQVSGIEHRLTLWHRKDEASQRIAEIPGVGLLSATAAMAMMGDPTAFKSGREFAAWLGLVPRHTGTGGRIRMHGISKRGDSYLRTLLIHGARSVLTNSTAPPAWALRLAERRPRNVVTVALANKMARKIWALLAYKRTYRDFVSQPV

SEQ ID NO: 249844 - protein, 375 aa, unidentified
MERVYERCAALDVHKAQVTACVHVPDRQGKRAELCAEFSTMTAELLALRDWLKGLGVTHVAMEATGVYWKPVYYLLEDDFELLLVNAQHVKNVPGRKTDVQDAQWLCQLLEHGLVRSSYVPPKPIRELRDLTRYRKSLVWERAREANRLHKVLEDANIKLDCVASRPFGASGKAMLKELCEGNNDPVALADLAKGKLRAKLPALHQALEGRFRDHHALLVGHLLAHIEYLDQTIAELSEEIEERMRPFEHKRELLCTIPGVAERTAEVIIAELGPDMERFPTHRHAASWAAICPGHHESAGKRHSGRTRKGDSWLRTALIEAAQSAAGRTKDTYEELGGDYFVRREDQDRLTRRLVRQLERLGQHVTLEPALEAR

SEQ ID NO: 249845 - protein, 323 aa, unidentified
MSDKEGINNEAQSFVGFDVSKASVDALSLPDGEYQRFENTDCGLQQCLAWVQGKRHCLCVVEASGGYETALAGVLAAAGVPIAVVNPKHVRDFARGMGILAKSDRIDARVLALFAQKRRPPIRALPGEAQRRFIDLVDRRRQLVSMRAQEQTRLTQAKGRPRKSIQAHIKWLNAAIDDVDRNLNDTLRGCELWLVDSQLLDSVPGVGKVTICTLLARLPELGHLDRAAIAALVGVAPFVRESGQWRGRRFSWGGRAEVRSVLYMAVISAIRCNPVIKAFYQKLLAAGKAPKVALTACMRKLLTILNCMMRTRTPWNPPLAQNT

SEQ ID NO: 249846 - protein, 370 aa, unidentified
MGNYSGTFVSFDVSKTKHAVAIAESGRAGEVRFVGEIENTPATIERTIKKLAGRYGRLHVCYEAGPTGYGLYRQIRELGHDCLVVAPALIPQRPGERVKTNRRDAVTLARLHRAGELAGVWVPDVQHEAVRDLVRTREAAGDDLRRKRQQLLSFLLRHGRIYTAGRDHWTQAHRRWLARQSFEHPAQQIVFQEGVDGIEDAMQRLRRIDEQLAIILPSWSMAPVVKAYQAMRGASFLVALIFAAEIGDIRRFETPRQLMAFLGLVPGERSTGNTVRRTSLTLAGNRRARRVLIEAAWTYRFPARVSDALRARLEGLPKAVRDIAWKAQIRLCARYRRLSAAGKKLPVVVAAIAREIAAFLWAIGREVAPA

SEQ ID NO: 249847 - protein, 409 aa, unidentified
MRLFVGLDVSSFDIKACILNGEGKKLDSFSVNNDLPGATALKERVLQCIANQEIETFKIGLESTSVYSFHPSMFLHYDEDLQRFGAKVFLMNPKQIANFKKSYSDMDKTDEIDAFVIADYLRFGRNQMSIVKESQYVALQQLTRSRYQLVRMLTKEKQHFLQHLSYKCNTFSQEVDSSIFGNAMMELFLEKFSLEELADMPLEELAEFLQKKGKNRFGDPKCIASTIQKAVRSSYRLDKVVEDSIDVLLGTSIAVIRTYQQQIKELEKSIKRIMAGLTQTLESIPGIGPVFAAGIIAEIGQIERFDDETKVAKYAGLYWRTHQSGRFTAENTSLSRNGNHYLRYYLVEAANSVRRHVSDYQEYYVKKYNEVPKHQHKRALVLTARKLVRLVDALLRSHQLFTPERCVKV

SEQ ID NO: 249848 - protein, 404 aa, unidentified
MWYAGIDWADTHHDAVVIDEAGRQADALRVMHTKEGLAELTSFLRALAKTPDQMACIVETNQGLLIAALLEAGFTVYPVNPKTVDRRRSASGAKTDAIDAYLLAKTGRADLVDLRPLKPDSPLVQELKVLTRDQDALIQSRTRLVNQLTACLKAYYPVALQLFAKLQQRSTLVFLQTYPTPQAAQAASVAEIEATLRKGHHSNPTKIAQQIFARVHQPQLIADTITTRTKARLMLALVSQLLPLIEQIATYDKEIKRLFLTHADNAVFRSLPGAGKRLAPRLLAEWGDDRTRYTGSNSVQALAGTAPVAFQSGNYAKAHKRYACLKPLRNALYQFAWQSTKQEAWALAYYRRKRAEGKSHSVAVRALANVWVRIIYRMWVNKTSYETATFEAARLAHAPRPHAA

SEQ ID NO: 249849 - protein, 343 aa, unidentified
MEVAVGIDTHKRTLAAAAVDALGRVLDVREFSNDPKGHRSLAQWVKDRDQPRRVGIEGSMHYGAAAASRLLAEGEDVREVSPSLTHVERRRRSKGKSDPVDAVAIARVVAADEILPSAKRATLLADLKLLVDHHDQLVRARTQLANRVHADLVVMRPGYEQVVPNLRARRHVAKARSLVSRDRSVRGELVRHRLRDILRLEAEMAQADRRIADKLKETNTTLTQIPGVGPFIAAKILGEVGEVSRIRSKASFAQLSGTAPLVASSGQTHRHRLNRRGNRQLNWALHYIALVQSRTTLEAKAYLTRQREGGKSQKEAMRCLKRHLSNVVYRHLLVDGRRLEQAA

SEQ ID NO: 249850 - protein, 437 aa, unidentified
MNTSPADTPMNTPAANVAFAELEHFAGFDWATEKHDVVVVDHAGQVVLTLTFPDTAEGWAQLREQLAPLGKVGVAIETSRGPAVERLLAAGWTVFPMNPKAAERFRDRKAPSGVKDDRLDAWSFADALRTDGHAWRPLRPEDPQTQLLRLLCRDEIGLIEQRTALVHQLKQALYEYYPAALEAFDDWTVPAAWEFVARFPTPAALAQAGPRRWQKFLHVQRLYCPTTAEKRLAIFARAAEFVNPSEAVTTAKSLLATTLVNQLRTLAAQLKEYRRRIEQAFGDHPDADLFNSLPGGGKKLAPRLLGELGANREVFASAEALQCYAGTAPVTQQSGKTRFVHVRRACNKVLRTTVHLWADESRHKCAWADAYYQQKKAQGQSHAQALRCLGQRWLKILWRMWQDRRPYDEARHMVNLAKSGSWVLGLTPPAAPAVTPT

SEQ ID NO: 249851 - protein, 340 aa, unidentified
MTIAIGLDVHRAQITFDALDLESGEVETGQIAPATRPELRRGLRRWNGEQVAAAVEATTGWRFVVEELRRAGAEAHLAEPAETSARRGNKRRAKTDRRDARHLRELLVEGRLPEAYIPPAHLLDLRARVRWRKTLVDQRTEWLQRIHAVLFHHGLRIPTGRLSGRGAADALAQLDLPESAQCQIAIALELIEHVNGQLAPLDAELRSFARRQPGCRALMGHYGIGARTSTAFLAELGDVRRFSSSRQAVRFAGLDVTVHESDRKRRAGHLSRQGPPVLRWAAFEAAETACRPASPDHDYYLEVKARQGANRACLSVARKLLRRAYHTLRELGDAALEPVA

SEQ ID NO: 249852 - protein, 322 aa, unidentified
MHGVDRHGKTQWQGKYSRQKWLDGLSRKVPAGAEIGMEACASSHHWARELQKRGYHVRLIAAQFVKPYVKSNKNDRVDAEAICEAMSRPNMRFVAPKTVAQQDIQAAHRIREELVGQRTAKANQIRGLVGEYGIIAPVGIQQLRQALPGWLEDAENGLTDSFRALLNGLAEDLRYLDDRIVESVRKNPVAKRLMTLCGVGPLTASALSGALGDGKAFRRGRDFAASLGLTPKQHSTGGRDRLLGISKRGDSYLRKQLVHGARAVLRHVDGKDDGLSHWLKGLASRKHFNVATVALANKTARIAWALAHGEEDYDEKLAAAGA

SEQ ID NO: 249853 - protein, 399 aa, unidentified
MAAPSLWAGIDAGKLDHHCVAIDASGRRLLSRRVRNDEAALVALIEDVIALADGGSVQWAIDLNAGGAALAIALLLVRDQDLLYIPGRIVHHAAAAYRGDGKTDAKDAAIIADQARMRTDLPEFRHRDETTVELRTLCARRADVSADRNRALNRLRAQLLEYFPALERAFDYSHRKAALILLTGYQTPEALRRIGRTRLENWLRDRHAYNPGAIVSRAMEAANAQHIVVTGQHLAAVMVARIAQQILDIDAELTVLDDMIEERFSRHHQASVIRSMPGFGPLLGAELVAATNGALDSFPSADRLAAVAGLAPVPKDSGRITGNLKRPRRYDRRLLRVFYLAATNSIKTCPESRAYYDRKRAEGKHHRQAVLSLARRRVNVLWAMHRDNTTYKSTAKTAA

SEQ ID NO: 249854 - protein, 392 aa, unidentified
MAVITRSPDCTGTIRTDLGAIFVSLELSRSTWLVTSLSPGGGEKMSRHQVDGGDLAGLLERFATLRRKAEARTGRRFPVIVVQEAGLDGFWIHRALEAEGIESHVVDPASIAMPRRRRRTKTDRIDGEMLVRTLLAFKRGEPRVCAMVKAPTPEHEDRRRLVRERQELTAERVRAVNRIKGLLFAQGIRDYRPLRRDRRQRLAELRGGDGRALGPHLQAQLARLLERLELLLEQLKALLAALKALAAEAQAAAAGTDAAVMARLLEIKGIGLGFASVLFTEGLFRPFANRRQVAAYAGLAPTPWRSGTIDYEQGVSKAGNPRLRATLIQLAWLWLRHQPQTALSRWFHDRVRQNGGRFKKVMITALARKLLVAVWKYVTQGVDIEGMAMTTA

SEQ ID NO: 249855 - protein, 452 aa, unidentified
MAQRNRAFGRAGLQLTHPDAAGIDIGSASHFVAVPPQRDAEPVREFGSFTADLLRLADWLAACGVKTVAMESTGVYWIALYELLEARGFEVLLVNARHVKNVTGRKSDVLDCQWLQQLHSYGLLRGAFRPAEAVCTLRAYARQRGALLRTQSRSVQHMQKALAQMNIQLVNTIADVAGCSGQAILRAIVDGERDPYALAALKDRRIRASDEQIARSLQGNWRAEHLFALKQALDAFDFCGRQLAECDAQIESQLQRLRRTDPEAEPAKGKRRGSARNAPKFDLRARLFQMCGVDLTRIDGIDVTTALVVVSEIGADLGRFPSDKHFASWLGLCPGTKITGGKLISGRTKPCANRAAQALRLAAAALRTSQSALGAYYRRLCARMDKPKAVTAAAHKLARLIYAMLTKGEEYTDQGQAYFEERYRQRVLLNLKRRAQQLGMKVVPDAPAAAAA

SEQ ID NO: 249856 - protein, 402 aa, unidentified
MNCVGIDVSKGKSTIAVMRPFGEVVVSLFEVCHTVNELSELARQLKSLDGETRVVMESTGNYHAPVAWLLHDAGFYVSVVNAMLVHDYGNNSLRRAKTDKKDAVKLANYGLDHWLTLPRYVPEEDTRLMLKTCYRQYQQYSKVQTMLKNNLISLLDTAFPNANRLFTSPPRADGSEKWVDFVATFWHCECVCGLSEKAFTAKYQKWCKKHGYNFSEDKALDIYASAFAHFGVMPKTDTAKLLVEQAISQLRATSAALAALKQKMQSLAASLPEYPVVMEMFGVGPTLGPQLMAEIGDVRRFHSKKALVAFAGIDAPPYQSGQIDVRSRSISKRGSASLRRTLFLVMGVLLQCAPMDEPVYQFMDKKRSEGKPYRVYMMASANKFLRIYYASVKAYLDSLEHD

SEQ ID NO: 249857 - protein, 375 aa, unidentified
MEGAPMLDTTTFIGLDVHARSIKAVSLDVMTGEVRAATFGYDAGAVAEWVRSVDPRARCVYESGVTGFDLQKRLSGLGVDCAVGAVSKMIKPSADRRRKNDRNDAEFLARMLSVGNVVEVWVPDDECEAARDLTRALEDARDDLSRSKQRLSKFLLRHGLAFDERTPTGRRKGNWTRAHWSWIESIRFAERADNDVLAYYVDAVRRAAEEKARLEGLVEAEARKPRWRKRVDSLRCLKGVDTATAADLVFEAGEFSRFRNARSFAAWVGLTPSEHSSGESDRRGAITKAGNKHLRKALVEAAWHYLTCSGRPKGLAKGQAPDRGARRHAAKGVRRLVERREALLARGVHGNKANVATARELACWVWAVGLMAEEA

SEQ ID NO: 249858 - protein, 254 aa, unidentified
MNYYTGIDVSKQTLKMFDGTKDYEVPNERGLKTLKKLLKKNYGKEWIETKLVYEPTGPYSNYLREFASENQLRVYEVNPKKSANFAKALGNRSKTDIIDAKMLYRFHVLLKEGDLSIPGIDEITEQLGSFIHSYEIIQKTRTMLLNHLHSMEYKSGVDTKLKESIKKEIKHLCEMEENLEKETEAFVENNQETREDLKNLLSIKGIGVISAINLLYLFRKYPDANRNEITALAGLDPVQRQSGSSLNGGRKITC

SEQ ID NO: 249859 - protein, 387 aa, unidentified
MGSERTSVGLDVHARSVVAAAIDGVTGEVFRARLTPDYGQVVRWVQALPGPAAVAYEAGPTGLGLARALGAQGIRCEVAAPSKLQRPSGDRVKTDARDAMHLARLLRLEEVTSVTVPSVAQEAARDMVRAREDCRGDLMRARHRLSKLLLRYGIVYYGGTAWTGVHDRWLRQQGLQLGSPAARVAFDECYDAVVSVGARRDRLDAAIGVMAADSEFTAVTRRLGCLRGISTLTGFALAVEIGDWARFTGNSIGSYVGLVPSEYSSGASRVQGSITKTGNGHARMLLVEAAWHHQKQYRPGKAMRERWDLAPAAARARGDAGNRRLHARWVRFNERGKRHVIANVAVARELAGWCWSLAVMPDDPLDLLVASRPIALDGPRRTATVMR

SEQ ID NO: 249860 - protein, 359 aa, unidentified
MTAMSIVAHSHAFVVGVDTHARNHVYAIITATTGELVDTRDFPTTGAGINRATAWVARRTGADLAVLWVIEGAASYGAILAGTVVTKGYSVVEAARMDAKSHHGVGKSDVLDAQRIARAVLPMQEKQLRRPRLNEGVRAALRVLVSARHSMTGERTRAVNGLTALVRVNELGLDARKALTGAQITEVSRWREQDEELALSVARTEAVRLAKRIGDLDKDVAGNTQQITELVKVSEAAPLLDVKGFGAITAATCLTVWSHQGRVHSEAAYASLAGVNPIPASSGNTVRHRLNRGGDRSLNSALHMVAITRMTHDEETREYVQKREAEGLSTKEIRRCIKRYLARRVYRIFNSQAEALIAG

SEQ ID NO: 249861 - protein, 335 aa, unidentified
MKKYLVTVGIDVSKLKLDVRFVFDINSKEHPHIIVANNEEGIRAIIAFLKTKKVQTCDALFCFENTGLYSMPLAIFFSKHQLDYWDIPAIEIKRSKGIARGKSDKIDAKDVAFYAITHSYQLKLCQVPEQDILKLQLLYSEREKLIKALHAMQASTEVASFLPKEIIKEVIAINKKTTAHLKASLKQIDERIAAIIKSNHSINTCFDLSVSVPGVGKQSAVYLIIKTRCFSRFDNWRKLACYAGIAPFEYSSGSSIRGKTKVSHLADKKMKSLLNMAALSAKKNDKEIGDYYKRKTDEGKNPMLVMNAIRCKVLSRVFAVINRQTPFVNTQKFAA

SEQ ID NO: 249862 - protein, 336 aa, unidentified
MEHLAIDLGGRESQICVRQADGTIVEERRHRTAALPAYLAERPRSRVVLETCSEAFRIADAALAAGHEVRVVPATLVRTLGVGARGVKTDRRDARVLSEVSCQINLPSVHIPSPTARQRKTLCGLREGLVSARTQLVNTVRGWLRAEGYRPRSGDVATFPARVTAVVPEASLPAAVARQLRAIAALSAEVAEAERDLRAVATGDPVIRRLLTVPGVGPSTATRFVAALDQVERFASAHAVEAYLGLVPGEDSSADRRRRTGITKAGAPAVRWCLVQAAWAARRTRRKDPLHHWVDAVEQRRGTRIAILALARKLAGVLYALWRDGTVYTPAQAARS

SEQ ID NO: 249863 - protein, 345 aa, unidentified
MEIHTIGIDLGKTVFHLVGLDTRGEVVVRKKCSRDQILRFTANLQVSLIGMEACGGAHFLARALREQGHDARLMPAKYVKPYVKTNKNDYIDAEAIAEAVGRARMRFVPIKTDDQLDLQSLHRVRERWVSARTAVINQIRGLLLERGITIRKGRRHIEESLPGILEDADNKLTGALRALLSQLRLEMQYLQKQIAECDKLILRIANELEDCRRILAVPGIGPMTATATIAAIGNGSAFKKGRGFAAWLGVAPGEHSTGGKQTLTGTGRRGNRYLRKLFIQGAHAVLQQRMKQSNGLNTWLAQLTSRKRIQVAAVALANKMARMVWAVLSKGEAYRPPLLAGTVEV

SEQ ID NO: 249864 - protein, 358 aa, unidentified
MKYVGVDVHKKVCQAAIVGESGEVLDEFRFRNSREGIEGFALRLKGFRDGVRVAVESTANLWIPLYDHLEGEGVQVVLSNPAKTRLIAEAKVKTDRVDARTLAQLLRSDMLPLCWVPSGEQRDKRGFIRHRLGLVKTRTEVKNRIHALLEKHGLRCPCSTLFSKKGVKWLRGLDLGFMDDAVLKSDLALLETLDGQIALMEAKIAAVAVNDERVKLLMTMPGLSYFAASLLVAEICDVNRFSSDRKLVAWAGLAPGIRQSGEKVRAGGITRQGNKRVRWVMVQAAQTARLHDERFRIFYERYAKRRSSQKAVVAVAHEMLRIVWFMLKRREPYRGERPDLSRRKLKRLERCALVGLRA

SEQ ID NO: 249865 - protein, 342 aa, unidentified
MTIVTVGIDLAKNVFAVHGVDAAGKPVLVRPSVARDKLLELIASLPPCLIGMEACSGAHHLAREFDKLGHTARLMAPKFVAPYRLSGKRGKNDAADAAAICEAVTRPQMRFVPLKSADQQGQFIVHRSCQGFIEQRTATLNRIRGLLSELGIVLPLKAATVRRQALQHLEDLPGWANTVIGDLLSEVSHLDERIAQYDRHIALMARHSTQAQHLMQLAGIGETTATAIVSTVGNGHDFVCGRSFSAWLGLVPGQYSSGGKQRLGRITKAGDAYLRSLLVMGARVVLAAAMNSKAPKQDPLSRWARALAERRGYWRAVVAIAAKNARLCWAVLQRGDNFKIPA

SEQ ID NO: 249866 - protein, 361 aa, unidentified
MSNVSRERMKMTAGMDLGDKYTHLCLLDTGNGDVIEEGRLRTTPEAMRRRFDSEQPLRIAIEVGTHSPWVSRVLEECGHEVLIANPRKTRLIYGQRRKTDKLDAQKLARLARADPELLYPVEHRGCDSQAHLAVVHSREALIRSRTQMINHARGTVKSFGYRLPKCSAGSFHKKVPAELPSELAEALGPIVETIGSLTEKIKDYDRRIEGLATELYPETRLLRQVPGVGPLTALTFVLTLEDPHRFAESRSVGAYLGLAPGTDQSGEQDPQKRISGEGDEMLRRLLVSSAHYILGPFAPDSDLRRHGEKIAGRGGKNAKKRAVVAVARKLSVLLHRLWVSAEVYEPLRNARCLGVQGEEVA

SEQ ID NO: 249867 - protein, 421 aa, unidentified
MPAPLLQGFGGEAMITCGIDWADAKHRVCILDGSGEKLTSFDVAHTPEGLEKLDERLLKCAGGPGEVRIALETKDSLLVDFLSERGYTLYFLNPKQTDRFRDRHRMSSAKDDDFDAYVLADAVRTDAHLLEEVSPLDERTVLLRVLTRTRVAIVERKVACQNELTAALKRYFPAALRLFDDLTHPAGLDFLLRYPTHGQASQAPLAAVVGLLKEHGFLEHQAQRRAAHILAVLQEPQLKPAASAAAAYPGAVSSLLRELRSAMEEITALDRQIEKAFAEHPDKAIFESLPGFAQVLAPVLAAEVGGDVSRFSSVRELKALGGSSPVTKRSGKYCTIQMRYACNENLRRALHLGSQAAVQQCGWARDLYDGLRARNCKYGRALRAVAGQLLEMLYVMLKRKACYDEGYHLRMKETHGKPSLA

SEQ ID NO: 249868 - protein, 343 aa, unidentified
MKIMRIGVDLAKNVYQVHGVDRAEKPVWRRRLSREKWLKVLLEKVEPGCEIGMEACAGAHHWARQLQAHGLTVKMIAPQFVKPYVKSNKNDANDAEAVCEAMSRPTMRFVSVKSVEQQDIQAVHRIRTELVAQRTAKGNQIRGLVGEYGLVAPKQLSHLRAALPSWLEDAENGLSERFRRLLNALWGDLVELDTRVGELDDEVNAIAKSDPVAQRLQQLRGVGPITATALVAAVGSAEQFAKGRDMAVSLGLTPKQHSTGGKDRLLGISKRGDPYLRSLLVHGARSMIRAAKGKDDRLSQWVMNLVARSHPNVAAVAMANKTARIAWAMIRKGTDYQPERAAR

SEQ ID NO: 249869 - protein, 341 aa, unidentified
MSIVGAFDVHRRQLTFEYLDTVTGELKRGRVIPADREHLRKWLARLAGQDDVHFALEGCTGWRYVAEELAAAGIIAHLAEPADTAALRGKKRHAKTDKTDARHLRVHLLAGDLPECWIPPGHVLEARAVVRLYKDLLDERGAWHQRIAATLFHQGAPLGGSVATAAGRAAAGQADLSPAGQQAVETGLRQIDRLSAELDPLRRQLDMLSRRQPGCRALRDTHYGIGPVTSVAIWAELGDVRRFGNSDDVVRHTGLDITIYSSDTKRAAGHLSRQGPELLRWALYESAKLAARPAAPDHRYYTATRDRRTGGLATLSVARKLARRCYHTLRELGEEALQPAA

SEQ ID NO: 249870 - protein, 320 aa, unidentified
MSALSVTVGIDVAKAHVDVCVLDANGAVQRFANDADGHSALAAALQPLGVGLVAMEATGGYEAALACALQASGLPVAVLNPRQARDFAKSMGRLAKTDAVDARMLAEMAAVLVRREDLARFVRPLADECQQWLSALVTRRRQLLAMLGSERQRLQITPRKLHPSIQAIVAAIKAQLDDLEAQMVGHVGEHFGELDRLLQSASGIGPVASATLIAQLPELGRLNRREIAALVGVAPMSNDSGNRKGRRRVQGGRFEIRRVLYMATLTAARYNPAIRAFYERLKGADKLPKVALVACMRKLLTMLNAMVRTGKPWDASLHRA

SEQ ID NO: 249871 - protein, 311 aa, unidentified
MSEFIGIDVSKARLDVAAHSGSSFAVENAEADVGRLCEQLKALAPELVVMEASGGYERLCVAALAAAGLPVALVNPRQVREFARATGVLAKTDRLDARVLAHFAAVVRPPVRPLPDEQHQVLEELLARRRQMVAALVAEKNRLGLARTRLVKRTVREAAATYERLLGLIDRELDELIKASPLWREKEDLLRSFKGIGPVSARTLLAELPELGLLNRKQIAALVGVAPIARESGSWRGRRSIWGGRGQVRAILYMATVTAMRANVQIRTFYLRLRQAGKPGKVALVACMRKLLTILNAMVRTQTRWQQPIAV

SEQ ID NO: 249872 - protein, 385 aa, unidentified
MANQNDLSRSLVAFEQDNTIIAVIEMSLNSWLVAGIVPGIERRPLKKLSCDEQMLLQLLYRWRDEAVKAERKITRMVVAFEAGRDGFWLARWLRSRGIEAYVIHPTSVAVSREHRRAKTDRLDTELLIRAFLGWLRGEPDHCSMAAIPNLQEEDAKRPTRERENLVGERTRIVNRMKACLIRFGIRNFNPILRRATERLNALCTPEGVSLPPNTLAELRRDMARLRFVMDQINEIEAARLRRLEQAPAEEPHAKVRLLARVIGVGLETADMLVHEILSRKLRDRRAVARYAGLTGAPDESGSKRREKGLAKAGNARVRRGMIQLAWRFLLFQKNSALSQWYRTRTESAGKKRKTMIVALARKLLIALWRLVTTGEVPAGVVLRAV

SEQ ID NO: 249873 - protein, 339 aa, unidentified
MYCSGIDQHKRTSVITTYDVDGQLVKRAKLPNDRRRLGAYFRDLPGPHKAVVESTGAWYWLADTLAAFGVDLCLGHAKRLKAISAAKVKTDKIDAKTLALLLRADLIPIAHMIAPAKRGPRDLMRMRLRLVAKVISCENSLHRLLEKFNISQLEALDDLYRLQATCYQSQIQLLEQQITQLETALHTTLVPHDEVQRLLWIPGIGKINALTIYTELDDIARFPSVKQFLSYCRLVPGADNSGGRTRHRSGSKEGNRYLKLAFSHAAVRAMQYNPEIRAFFKTLAHRKPEPVARARVAIELARIVYHVLRTGEPFNGTFKGQPLQRTKQLQWPRLASPAA

SEQ ID NO: 249874 - protein, 398 aa, unidentified
MKEVASGRERITEMAVMIAGQSRFQPFGLSCWGFRDLNKGVGSTTASYDYHIGVDYHKSYSHLVVQDSCGKTLRSGRVKNDRQSLGSFLERYRENSHAVVEATRNWMVIYDWLDDICDDVVLAHPLKVKAIADAKIKTDKIDATVLAHLLRADLVPQAWAPSDKARELRVALRERMFYVRLRTMTKNRIVTVFDRYPEQTAQLKKFGDLFGKAGRIQLTQVAVSAIDRVQIDRGLAFIGDIDARIKQAETTIRAMTKGNGNVRLLKTIPGIGEFFARLIDAEIDDINRFRNPKKLAAYAGLVPSTYSSGGKTFHGKIIRQGNKWLRWAFVEAVTPAIASDPELRAQYDHLKFRGVNKARVAIARKLLTIAFQILRDQRAYERRDTSPMESASTISRLS

SEQ ID NO: 249875 - protein, 341 aa, unidentified
MEQATTIGLDIAKHVFQLHGADAAGHVLFRKRITRVKLLGFLAAQTRCVVAMEACAGAHYWAREIAKLGHHVRLIAPAYVKPFIKRQKNDAADAEAICEAAQRPSMRFVPVKTEEQQANGIVFRARDLLVRQRTQCVNALRGHLMEYGYVFPKGITHVETLIALVEDLQSSLPDSVRVILKLLIDTFTALEAQIAVLDAEINQRSKSDPTARRLMTIPGVGPIASTAITALVPAAEGFPAGRDFAAWLGLTPLQKSTGGKQKLGAVSKRGERTIRRLLIIGASAVVQQASRRGAPKGSWLAQMLARKPKMLVTVALANKTARIIWALLVKGGTYRTPAAVA

SEQ ID NO: 249876 - protein, 377 aa, unidentified
MHSENIAAYIGLDVHKETLAVAIAAPERLGEVRYYGTINNEAQAVRRLFQKLQGLYGNILSCYEAGPCGFGLYHQLTAMNIKCQVIAPSRIPKSPTDRIKNDHRDAISLARLLRAGELTPVWIPDLTHEAMRDLIRARAATKRDSRVARQRILSMLLRTDKRYAGKHWTGKHRTWLANQSFSQPSQQIAFQHYCQSLEQIEDRILQLDQEISRLLPEWSLCNLVCQLQALKGVGQLTAITLVAELGEFSRFSSPKQLMAFLGLVPGEYSSGNSIRPRGITKVGNSELRRLLYEAAWSYRTPAKVGAWLIYYRPDSVTQYSKDIAWKAQQRLCSRYRSLTAKGKKSQVAITAVARELTGFMWDIALAAQSSFSQQKQN

SEQ ID NO: 249877 - protein, 357 aa, unidentified
MRQQNYKKDFNGQNIFVGIDVHLKTWSVSVALPGGYLKTHTQKASAKELFEHLNKNYPNGTYHAVYESGFSGFSTCYALRELGVDCIIVHAADVPTTQKEKVSKSDPTDSRKLARSLMSGELDGIYIHSKDNLDDRGLLRHRAMLLKLMGGIKSRIKHLLYNNGVPYPEEFEQKSKHWSRRFISWLQHDVQLLSETRVTMDLLIEELLYFRKHILNVNKKIRTLANTDRYREKFENLISVPGIGAIVSMCLLTEIDDVWRFSNQRQFASFLGLVPVMQASGDNCYVGEKTFRGNKILGPKIIEASWVTIRYDSELAAKFGHLCNKGMKRNKAIIRIARKLSNVIFTILRENRKYVCR

SEQ ID NO: 249878 - protein, 353 aa, unidentified
MNNIKYVGMDVHKSITVIVVLNELGQFESRSQVKTKSENICDFFRGISGKVEVVFEEGTHSAWLYKLLKPLVASVTVCDPRHNKLIEDGNKSDDEDAETLAHLLRLGALKAIYKGDDQQQQLKEICRAYDNLIEDSTRVQNRLKAIYRGRGISCSGHDLYRADQRSDWLAKLGEDSARFRAESLLDQLDSLSQLRKQAKRRLLAQARTHADYRILIKLPGFGPVRVAQLIATVGTPHRFRTKRQFWPYCGYAVVTRSSADYQIVEGKIVKQRKKVSTRGLNRNHNPQLKQVFKGAALAALRHEAIKTYYQRLIDHGTRPELARVSVARKLASIALTVWQRREEFNVKKAFAQD

SEQ ID NO: 249879 - protein, 340 aa, unidentified
MLSVGLDIHTKHIALCVLSEAGHVVQRARVRGLEELLRLLKGLPDRFEVCYEASCGYGHYHDLLRPLAARVLVAHPGRLRLIFRSRDKNDRKDAERLAKLLYLGETPTAHVPSLDVRTWRELINCRSQVIAKRTRAKNALRALLRGAGVVPPKSPGPWTKKGLAWLRQLGLPTASQQLRRDLLLEEVEALNGQVRRLEQELNRRAQQTPAVARLRSIPGVGIRTAEAVAAFIDDPQRFRHAKAVGRYFGLVPCQDQSGDKNRLGHITREGPAVVRRLVAEATWQAVRRSPAVRAFLERTQRGDPQRKKIAVVATAHYLVRVMWALRKRGTVWQENEARAK

SEQ ID NO: 249880 - protein, 345 aa, unidentified
MIIGCDFHPSWQQIAWLDSETGETGERKLVHASGDAKAFYQQLAAPARIGMEATGNSQWFIELVQDLGHEIWIGDAAQIRASYVRKQKTDKRDAAHILKLVVEGRFPRLWTPDGEQRDLRQLVLHRHRLVEIRSRVKNELQHLALNKGMQRKAKLWSQAGQKLLRELPLKPWAAGRREDLLGLLALLNQQIGTLDQAVQQAADQHPQAKLLMTQPGVGPNTALAYVLTIGDVSRFPRGKQVASYVGLIPREESSGGRQKLGAISKQGNRLLRSLLVEAAQIAVRYDPGLRKQYLHRCHQKPKGVAKVAAARQLAVRLYWMLRTGKPYPEIVRIESSPRVALVGAS

SEQ ID NO: 249881 - protein, 313 aa, unidentified
MKETTTVGIDISKDSFDVHIDTTSQFLHLENTPTGIQLLLEALRELSVSLVVMEATSKYHYLLASMLTEAGLAVAVVNPRQVKNFARALGKIAKSDPIDAKTICEFGKRMQPAPRPLKGNELQELSLILARRRQLVQTRTMEAARCQEKPSPFIEQGIAKHIAWLNAEINALDLEIKARLKESEELTIRRKLLDSVKGIGPVTQAVLLTQLPELGKLNSRQISALVGVCPYDRDSGSLRGKRAIWGGRSGVRAMLYMAMLSAVRYNPQIKMFYTNLVSRGKPKKVALTACIRKFITILNAMFRDERMWAELKS

SEQ ID NO: 249882 - protein, 390 aa, unidentified
MSQSFDASKSLTAFEQDSTLVAVIEMSQSKWLVAAVVPGIARQPLKKLDADAGALLKLLQRWREEARKAGREVKRIVCAYEAGRDGFWLVRWLQARTIETYVIHAASIAVSREHRRAKTDRIDTELLMRSFLGWLRGEKRHCSMVAIPTMVEEDARRPSRERESLVAEQTRTVNRVKAALALLGIGGFNPRLRKAAQKLETLRTVEGTPLPENVHAELRRDLERLRLVHDQIRTIESERLRRLAQAPAAATGPHAMVRLIAKVLGVGIETADMLVNEVLARNLRDRRAVARYAGLTGAPDESGKRRREKGLARAGNGRVRRAMIQLAWRSLIFQKESRLVRWFRARTADGRSTTRKTMIVALARKLLIALWRLVTTGEMTEGLKLRPAGT

SEQ ID NO: 249883 - protein, 356 aa, unidentified
MADKPIVGIDISKEWLDLCTSQAVEVERIANTPEAVAAWLERTGPGLIAFEPTGGCERFVSAAARERRIPFLRVHPNDVVAFRQSRGIKAKTDAIDARLLLAFAGDRLARRELRTSVLGDERLRALAARRRQLVETLQAEGCRLGAAALPAVRNSIEAVTAALRHSLDALEAELAAVIAANPQTAELARLLQTICGIGPVVATALIADLPELGLLSSKQIAALVGLAPYTRRSGKIQFRETTGHGRVGVRRALFNAARATLRHPSPFKDFFDRLVSDNRRPGKVALTAVMRKILITANAVARDRQPWRGLRHTTPPPGAVGTRCRPHGEQTGHRPGRVKAAAALRAVARSASLDAA

SEQ ID NO: 249884 - protein, 354 aa, unidentified
MSQNLNTAIAVVGIDIGKNSFHVVGQDERGTIVLHQKWSRGQVEARFANMPPCLIGMEACVGAHHLSRKLKALGHDARLMPAQYVRPYSKGQKNDFRDAEAIAEAVQRPTMKFVATKTAEQLDLQALHRVRARLVSQRTGIINQIRAFLLERGIPVRQGLRFLRAELPRILATPPEVLSPRMVRVVEDLAGDWRRLDERIEGLSGEIEAIARQDVSCERLMSVPGIGPIISSAMVAAIGSGEAFSKGRDFAAWLGLVPKQISTGDRTILGKISKRGNRYLRVLFVQAAWVVLIKPKIWERHGLKPWIEAAKKRLHHNVLAIALANKLARIAWNVLAHGRAFEVRKSDAVAAQSA

SEQ ID NO: 249885 - protein, 406 aa, unidentified
MLETMVRCCAGLDVHRRQVVSTVIREGSKEAREYSTFHRELQELAHWLQREQVELAVMESTGIYWKAIYAALEDAGIETRVVNARHVKQVPGRKTDVQDSEWLAELARCGLLRSSFIPPRDLRELRLLTRYRRKLTGMLSAEKNRLHKVLDDAGIRLGCVVSDIDGISARAMVEALIRGGSTPEQMAEKALGRLQKKRDALQLALEGEISDRHRLVLKKILLHVKWLQRQIVTIDGQIVAAMKPYQEEWKLLQTIPGFDILSAAMLLAEIGVDMGRFASRDRLCSWAGMCPGNQESAGKKKSGRTRKGNAYVRSLLCEAANSAKKTQSQFQGLYKGLVIRRGHKRAIVAVGHKILQVVYVLLSRKEPYRDPEIDYEALVVHRNAPRWLDALHKYGYLESIKGSVER

SEQ ID NO: 249886 - protein, 351 aa, unidentified
MDATTVAVDLAKTVFELAIADVQWRITARQRLNRTQFGRFLRQTAPTHVVMEACGMAHYWGRVAQGHGHTVTLVPPSYVRPYVRRNKTDRADAEAILEAVRSGQIPGVPVKRIEQQALVALHRVREQWMTTRTARINALRGILREHGILLPAGARAAVQAVPTVLEDAAVPLPAHLRHVLASVQEEIREIEARVATLERELRALADADPVVAHLRTIPGIGLLTATALVGTVGHIHTFRRARQFASWLGLTPREHSSGARRRLGGISKQGDVYLRCLLTHGARAVLLAAHRRRRDARPMTRLHAWAATIHDRRGHNKATIAVANKLGRIVWAVWHKDVPFAGSDVLEPAHL

SEQ ID NO: 249887 - protein, 355 aa, unidentified
MNSSKYIAMDVHTATISVAVRDAAGKLIMESVIETKTSTILQFIQGLRGDLHVTFEEGTWAAWLYDLIKPHVTNVVVCNPRRNALLKEGSRNDRIDARKLAELLRTNLLRPVYHGEKGLRTLKELARAYLTISKDLTRVMNRVKAIYRSWGIPCGGQSVYNPRHRKEWLSKITQASVRRRAELYYEQLDALVLLRKQARQELLAEGKKHQAWKLLRSIPALGPIRAAVLMAIVQTPHRFRTKRLLWKYSGFGVVTHSSADHRYVKGQLERSKKPVSVRGLDRDHNHQLKDLFKGAAIQASTRKGPFREFYEALVAKGMRPEMARLTLARKIAVIALTVWKKGGAFDAKYLKPQTA

SEQ ID NO: 249888 - protein, 294 aa, unidentified
MPQQSRIVGIDVSKRKVDACIRSLQRALSKPSTPAGEQELIAWLRDNGVGLAVMEASVMEASGGYERGWAEALRKAGIAVRIVDPKRVRYFAKSARRLAKNDPIDAAMIAWFAGTFAPEAAPAHDPEREALNRLVTARRLLVRLSIQVRQLGEHHQPRIVKAAQRAIGKTIAAQIQANAEFAARAAIIQSIPGLGPQFVAGALAWLPELGHITNKAAAALVGIAPYDDDSGEHRGERHIRGGRRDIRDLLYMATLGAASRHNPVVQAYYHKPTINGCAPRARRPRSRLSPACAS

SEQ ID NO: 249889 - protein, 356 aa, unidentified
MGQKWLMHCSQFKTKKMKKQTCFFLGIDVSKLWFDISLMIVIEFQKQPMITERFDNTIEGLALLKKWLKAHKVKFDNDTLVVIENTGIYHRLLWKFFSENNIPIHIGNAAHIKKSFGIARGKNDKIDSQRLCSYAYKNEDDLRATSALNPVFLTLRDLITSRTRLKAQLGANRTYLKELKNINDKGTQKMMEKAYKMAIIGLEKSIDEIEKQITVIIKSDPSIFDNYNFLLSVPGIGPVTATYILYCTNNFAGKVSGKQLGCYAGVVPFNDSSGTSLKGRNKVHKMANKELKSLLHMCALSAIKSYPEFRNYYDRKINEGKHPNSVLNAICNKIVLRAVAVVNNRKKYVENYKKAA

SEQ ID NO: 249890 - protein, 351 aa, unidentified
MPSKADTAVARTIGIDTGKNTLHMIGLDEKGAIVLREKVSRTRIATRLANVPPCLIGIEAGMASHHVARELAALGHEVKQVPPAYSKPFRQGHKNDFRDAHAVAEAAERPSTRCVPIKTDGQLDLQALHRVRSRLVSNRTAVINQIRGFLLEHGIPVRQGHHFLRKQLPQLLAARADVLSPRMIRIIGDLKADWNYLDERIDRLTDEIEALARADEGCQQLITVPGIGPIISTAMVAAIGNGAAFCKGRDFAAWLGLVPKQMSTGDRTILGRITKRGNRHLRMLFIQGARAILLRPASWAKHSFGSWLAAAARRLHRNILSVALANKLARIAWTVLAQGRPYEARVEPRVA

SEQ ID NO: 249891 - protein, 422 aa, unidentified
MLEETQDNDQIIQRVAALDIGKAELTCCVRVPGQAGSGKRAQEVRTYKTMTRSLLVMVDRLAELGVTRVVMEATSDYWRGAFYLLEAHGFETWLVNARDVKHLPGRPKTDTLDAVWLCKLAERQMLRPSFVPPRPTRQLRQVTRYRADLVAARTAEKQRVEKLLEDAQIKLSVVASDIFGVSGRAMLTALIAGERDPKRLAQLARARLRAKLSLLEEAFSGFFTDQHAFLLAKMLARVDQLDADLAELDAKLQELIAPFVAAVERLDEIPGVGQLAAHLLIAEIGTDMTRFPTAGHLVSWAKFAPGVKESAGKRKGSGSTGHGNPYLARVLGEAAVAASKTDTFLGERYRRIARRRGAKKAIVAVGRSILVIAWHLLSDPEAHFHDLGAGFYDTRIGPERAKRNHIRQLEALGYKVTLQPAA

SEQ ID NO: 249892 - protein, 357 aa, unidentified
MQTPQMMSFAGDHFFVGVDAHLKNWKVTIHLNGMELKTFSMNPAPLELIAYLRKHYPDGIYHVVYEAGFCGFWALRIFRQNSVDCIICNPADVPTMNKERVNKCDPIDSRKLSRELENKSLHGIYIPDTFQEELRMLMRLRYRIIQSQTRIKNRIKGLLYAQGILIPLQFSGNNRWSHAFILWLEKLQLLTPAGNFTLQNLILQLKEIREHNKNVLKQLRKEARNKDIAPIMNVLQGIPGIAFISAMSLYTEIIDMKRFPNDDALANFVGLVPSTQTSDDKVYVNGISYRQNKFLRSLMIESAWVAVKEDPALTLKYKELTKRMKPQDAIIRIAKKLLKRVRHVWLNQEQYVYALVA

SEQ ID NO: 249893 - protein, 423 aa, unidentified
MNATPEVPLFVGIDTARKSLMIGCQDATGTQVGRVKEFTNDLPGAQELEAYLLIQLEEGGFTKVVIGTEATSFYDFHILEFLAQSEALSKYTPLFYRLNPKLVNGFKKVHTYRTKNDRKDALLIASRLRFGELPPPYQPNMPHLPLQRMTRFRAQTVRSLTAEQNRFVGLLFLKFSAYTSIKPFSNTFGATSTAFIEEFFSPDEVLNMPIEKLVEFLVQKGRNRFTDPEAVVKKVAQVARESYRLRPQLNQSVNLVLSLMYKNIQTPKTTIKQLDKAIEEEFEGFSSVLMSIPGIGPVYAAGIYAEIGDISRFPGQAQLARYAGLTWTEHQSGDFRAQETRLIKAANSYLRYYLVEATNSVKNREPEFGAFYTKKYHEVSKHQHKRALVLTARKLVRLIYALEKQKRLYQPKSTYLQAKENQN

SEQ ID NO: 249894 - protein, 285 aa, unidentified
MRYIGIDVSKATFVVAYSSDKGGEIRTFNNTTAGIRQFIGTLPKDGSIHCVMEATGNYSALLLYMLNVAGITVSMENPLKVKNFAKAMLSTIKTDKSDARLITLYGEKMNPRPFKVQGEAILRLRQKRTVIRQLTKQITAMSNLRGSLACLPVPDKGATHTVDETIKFLEKKRDRLQSELTDLVEVEFSRQLALLTTIKGIGITLATALIITTGGFTYFQNAKQVSRYLGICPTYEQSGTSVNIKGHINRNGDAYTRGLLYIAAWPASRFNAQCKETYTLSLIHI

SEQ ID NO: 249895 - protein, 330 aa, unidentified
MYFIGVDVHKDFSYVAILDKDGNIIKQGKVANNKHSIQKFFSEFEKAKVAIEACGIFEPLIEIFKSIGYEVKLAHPLKTKLIAESKIKTDKVDANVLANLLRTNFLPESYLPKMEIRELRELVRHRISLVRMRARIKNSIRRILIRRGIEIKDPFSKEGRKQLSDLKIYAIDNYLVLLDKYDELINKVSKEIKEKTNNNEDASLLMTIPGIGYFSALLIASEIADINRFHSSKKLASYTGLVPSLNQSGIRKSYGKITKEGNRYLRWVLVQCAHVAIRQDERFMKFYERIAKKSKQKAIIAVARKLATICYWVLKKRKPFNEVYTYPLSH

SEQ ID NO: 249896 - protein, 415 aa, unidentified
MAQNRLPSPLDPSPFSYVVGIDIGSQKYSACVLKPDKRQVHKPRLFANTVAGFHRLQDQLASLDVPAAQVLIGMEATSRYGDALFHFLQEQGYQLCLLHPGQTHQFAQRRGLRAKTDQLDAITIGHVLLSGEARVGYVPDELISSYRELVRLHTQLTDDIARYKNEIHALLQVQFPEFTQVFADPCRPTALAVLQRYPSAACLSTVSVEELTTLLRGLAPRHYGRKTAQSLIALARASVSPGVAQRARSKSMQILAAQLAHTRENLAQVAAELAQVQEKDSGWQRLSGVPEFGDKTVAVLRAELGDVARFQRIDQAVASAGLDLQIRTSGKWQGQAKLSKRGSGLLRRMLYLAAARSTHMRDSAFGAYYHRLVARGLRKSAALIAVMRKMLIVAVHLLKTEQEYDPSKVASACGG

SEQ ID NO: 249897 - protein, 446 aa, unidentified
MEMDIVNPNCAGIDVGSKSHYAAVGQGLDDVKEFGVYADDLTEICLHFKEYGITSVAMESTGNYWQNLYVELIKHGFEVTLCNGKFTKNAKGKKTDVKDCRWIQKLHSLGLLTGSFLPDDTTEQLRTYCRQRCNMIDLAAEATHKMQKYLRLLNFRLDVVVKDVCGLTGISIIADICKGHLDPERLANHRNHNCKKSKEEIAKALKGNNRADYLFGLKQEYESYIFYQKKVEDCDKQISVFLKAQINSNPEKKKLKTDHKPHKRINKNAIKSLDLNQAAYQYFGGVDLMRIEGLSHATILSIMSEIGPDGFEKFPSAKHFTSWLRLAPNNKISGGKILSNKIPKGSNRIKITLRNAANAIGNLKDTHLSDFFRRVAFRKGRQAAVSATARKLAVIIWHMITKKIEYKPPTEYLFLDQKRKLKLVMQIRKKISKFELKPEDVGFVTA

SEQ ID NO: 249898 - protein, 346 aa, unidentified
MKVKTLGIDLAKETFGLHGVDALGRVVVHRRVTRKHLLGFLVKLERCLVGMEACGSAHYWAREIEKLGHTVKLMSPQFVIPYRKGNKNDPNDAEAICEAVTRPSMCFVPIKNEEQQDLQALHRVREQLVKNRTALANQIRGLLRERGVVVAQAIARLRAALPLILEDQSNRLSALMRELLGELAERLRMLDDRLRQYDQRIARICQQDERCRRLVKVEGVGPLVATAVVAAIGNARQFTNGRELSAWLGLVPREHSSGKRTVLLGISKRGNRYLRTLLIHGARAAARVAERKRDARSTWLSRLKLRGGPNVAAVALANKNARVLWALLARGDSYRVRPALDRASAA

SEQ ID NO: 249899 - protein, 348 aa, unidentified
MNDMHYIGLDVHKKTISYCVRQSDGTILHEGTIAATRQALEAWMGQQPQPWTAGMEATMFTGWIYDHLESGGATVKVAHSAMLKAIAAGKKKNDQIDARKIADLLRCDYFPECHMASREIRDRRRVLRYRSLLVRQAVRMKNKVSGLLMEVGVEYNQQKVHGKKYFAEMFHAHKEEMPPSLPQLLQLSRSTIETLSGMERQLMRALEQDDLLAARVERLATIPGVGRVLSLTWALEIGEISRFSSVSKAVSYCGLCGAERSSGGKTERTSISKQRNKHLQSTLIEAAKLAPRWNAELALVYEREKQKGNRNRATLAVARKLVAYLMAVDRREQGFHKTVAKVVNQQAA

SEQ ID NO: 249900 - protein, 316 aa, unidentified
MQTILNLGADVDSRFIVVACAARSFAPQRISNDRQGIRTWLRSVPRGSRLGIESTGSYHELLADLAHAAGLQVFVINPRVLRRYAQGVGQRGKTDRIDAEMIARYVAREHAELHAYVPPTKEQRALARLINRRGTLVAARGAVTQSLRGVADLDAELSHLEVCFERLLRQVEILMQEALQQLPAAKQAAKQIATIPGYGPLGSTCLGYTLTRLPYANSDAVIAHTGFDPRPEDSGQKHGRRRLSKRGPSEQRRILFNCARAASRTRHWQPYYAAQLAKGLSSTAATVILARKMVRVAFAVVKQNAPFDPERVYAHA

SEQ ID NO: 249901 - protein, 340 aa, unidentified
MRFIGVIPNTPEAVHKMAKQLTRHGELDFCYEASGCGYGIHRQLTRLGHRCTVAAPSMIPRKPGERIKTDRRDSEKLAILHRSGDLTPVWVPDTTHEALRDLVRARVDASMHLMRARQQLLAFLLRHGRSYPTGKHWTQRHRSWLAGQTFHEHAHGIVFQDYLETVWTAQQRRDALIERISAMVGSWSLGPLVEALRGLRGIDMISAATFIASTGDLSRFESPRLLMGYLGLVPSEHSSGGTIRRGGITKTGNREARRMLIEAAWSYQYPARIAKEKAEILVRLPKNIRDIAWKAQTRLCARYRTMIARGKKPTVVVAALARELAGFIWAIGQEVRLSGA

SEQ ID NO: 249902 - protein, 462 aa, unidentified
MKRKAKSQATHSGLAVVNPNAAAIDIGATMHMAAVGADRASDPVRSFGTFTADLRRLADWFAECGVKTVVMESTSVYWIPIFELLEERGFEVILVNARDAKHVPGRKTDVSDAQWLQRLHSYGLLRASFRPKGEIIELRAYLRQRERLLDTAASLIQHMQKAMTEMNLQLHHVVSDITGATGMRIIRAITAGERDPAVLASMRDVRCHSSIEVIEKALTGHYRAEHLFVLEQALALYDVYQQKVAACDIRIESVLNELISVRGSKEDANANGSGSPRRRSRQSNGPDFDVGKALNALLGKDLTRIHGVGPYLALKLVSECGDDLSAWPTAKHFTSWLCLAPSNKISGGKVLSSRTRRSGSRAASLLRLAAVTIGRTDTALGAFYRRLSARAGKSKAVTATARKIAVLFYNAIRHGMDYVDPGASYYETRYRERVVKNLHRRAKAFGFILQAAEIPVAERAVS

SEQ ID NO: 249903 - protein, 354 aa, unidentified
MNYVGVDIHKRYSVLVAVDERGRELARGRISGNSVHAFAQFFEALQGPGRVVLEACWNWGRIYDVLSEIEQVEEVVLAHPLKTRLIAEAQIKTDSLDALALATLLRGNLIARAHVPSKATRARKELLRQRLYWARLRTRVRNRVHAVLDRQRELEMPQCSDLFGRKGLNALSKLRLAEPDATLLGEELDLLKLIDSQIKAQEGRIVAFNANEQATQYLQSLPGMGKILGAVAAAEIDASERFDGAAKLCAYAGLVPTTYGSGGKVHQGHLLKSRNKWLQWAFIEAAWVAVGCSSYFGGIYRYHRARGKKANIAITIVARRMCRIAFTLLKERRNFQEQHRTFPGRSAVRLTAAA

SEQ ID NO: 249904 - protein, 403 aa, unidentified
MYKYFLGIDISKDSFDFCFTDESEKVLHKDHYLMDIDNFTNLANYLASFSNDEILIVMEATGIYHLNLLSFFLEQGLNVSVVNPLFIHAFTKSMTIRKTKTDSKDALIISIFAKRNYSSLKLSKSSDLETIKPIVREKDKLTAQISAIKTDMKSIVNQLFPEMLKNTNIFTKSSLNLLLQAPSKRVIRNLKEKKIAKLLSCDNAKGKKPSITANEILSLAKNSIGINNPSLEKILISKIKQMSFIQTQIDEYNEIIEKFVDEYHNNDIDLLTSIDGVGKSSAASFLTELGDINNFATHKQLIAFVGTDPTIYQSGTSVNVKGSISKRGNSHLRRILWHMARAATVWNTTLKAYYDKKRSEGKTFKQSVIAVANKLIRIIFSMLKNNTKFDVNFSKLAIKSASI

SEQ ID NO: 249905 - protein, 336 aa, unidentified
MVKYIGMDAHMSTCSFCVMDEAGRETDNIKLPTNGRLIIDYLRNIDGTKKLTFEECELSSWLYGILRDEVDELVVCNPAANTEYKKKKTDKFDARQLAKLLRGNFLVPVFHDGSKREKFRGLMSGYQDLVNDNVRLKNRYKSLFRKSGVRVEGEAVYKDRSLLEKIDRPDFRFIGVQLHYLLERMDESLGIYQKQIARSKNHFEEIKNLMTIPGIGYIQAAKIVAQVVSPERFPDKYRYFSYCGLIRHKKESGQRRYGTQRVWGNRTLKCVYKMAAHSAIKGQSAIRKYYDSLRSKGLDENKAYNAVCRKIAAISLSIWRNNKKYDDSILSDGLIK

SEQ ID NO: 249906 - protein, 338 aa, unidentified
MELYAAIDLHSNNSVLVVTDAEDHVVFAKRLRNDLQMIVTALRSCAGDIRAVAVESTYNWYWLVDGLREVGFDVRLVNTAAVKQYEGLKHGDDFSDGKHLAQLLRLGILPQGYIYPPEQRAVRDLMRKRSQLVHQRTAQILSIHNLLARNLAQSVKGDDIKRLEDSEIDGLALLEDQKRALRANVAVMRCLEEQIRLLERAILAKGRLRQEFHGLKTVSGIGDVLALTIALETGDIQRFASAGKFASYARMVNSRRESNGKSKGVGNRKCGNKHLSWAFIEAAHCAVRYDPSIRRFYQRKRAKGLAVVAIKAVAHKLARACYHIMRDGVPYDGTRAFA

SEQ ID NO: 249907 - protein, 454 aa, unidentified
MTSTGTVHSPTTIQARAGIDCAIVANHQCELIEYRNDGTTRTTRKTIPSTAAGMNELTRFLAAVDVAVDVVAEPTSLTWVGIQAAVGAAGGRFYLIGTRHSSRLRAAVAGKNKSDVIDAHLLAKALDLFDLEPLVVADVGSEAIKRSALSRGDARVHYDQCWRRLRSYVAATVPDIDKILAGSRTRTLAVLGRWPDLRALARAHRSTIAAVLRQHSYCSGRQEQIADQLRSAAAAWVSILEDYYDLDFWRLKVAGMLADIDQAADRFDRYTEQLDGLWHAFYGPDDLLLSVPGTGPITAATIRGWLGDGSRFARPEDFASYCGLTPSNWSSGTMEHKHRAISKEGPSALRMAVFLAANAARTSDPQLARVYHRLMVDKGQHHNKAVCAVARKLAERIWIVVHRNAPYEYRDDDGAILDITQARAIVRERYQVPAEVRARHRNHTTAQRRARLAA

SEQ ID NO: 249908 - protein, 433 aa, unidentified
MSNYYHLPVVGIDIAANFSIVTALKPDGDIYQKNLRIEHTLCGFNKLLTFLQKIEEELGDSPKVFCESTGIYHLTLLHFLVNNQVDIRVINPLITNSNKNSNIRKVKNDKLDSLSIAKICKFDNVKTSSFTCEEFLHLKFLVREYYKVVDLKANLKKTFSNNIYIHYPGLQDAFADLTGKTPLMFITKYPTPQHLLDACENEVINMLVTSSKRGVKWATKKFKQLMDIAKSAAVIGINSLLFQSKVNRFYESFTFYSHQLQSITKEIFEYLDGCSFANIFKYNLELLKTFKGIGDISAITLLVEIGNIDKFCKPQQLVAFFGVDPGINQSGNFSSDCNKMSKRGTKVGRRALYAIALASIRTNKNKVPINQVIYEYYHISLDSKKKKVKLVAVMNKLLRYIFSVLKNQKPYEIRNPKIHKRMFLESKPSLQSA

SEQ ID NO: 249909 - protein, 348 aa, unidentified
MALTIVETHAITGGVDTHADVHVAAALDPIGGLLGVKEFPATAAGYGRLLGWLGGFGTVALVGIEGTGSYGAGLARHITTAGVRVVEVDRSDRQDRRRQGKSDPLDAVSAARAAQSGRARGASKGRDGAVEAIRALMVAKRSAAGDRTPTNGQARALILTGPDDLRARFTGHTAAALVAGLASLRPRPGSTVGYATWVALRELGRRAEFLDGQLERLDELIGPLVAARAPGLLALYGIGPHTAALLLIAAGDHPERLRSEAAWAHLCGAAPIPASSGKTIRRRLNPGGDRQANHALWRIVFTRLGSDPATRAYAERRTAEGKSKKEIIRCLKRYVAREVYPHLRASAG

SEQ ID NO: 249910 - protein, 412 aa, unidentified
MKDLLEISCGLDVHKEKIVACILTGPLGKPTRSEIREFTTLIPDMIALRDWIVSQNCHHVAMESTGIYWMPIYEILEDAFSGDITLLVVNARHMKNVPGKKTDMRDSEWISTLLRAGLLNGSFIPEKRIREFRDLNRYRKSVIHDITSQKNRIEKFLQSSGFRLSSFISDIFGASGRNIILHLMEHGQIDKAALDSCLKTKTRNRIDEILMSVNGTLSEHQKTFLKILMTHYDSLKEHLTEVETSLEEDMAPFTLQVEQLNSIYGISTTASCAIIAEIGIDMEPFKTAEHICSWAGLCPGNNESAGKRKSASVTKGNPYIKSMLCEIAWVIAGKRNTYLSAWYWRIKQKKGAKKAIVALARKLLVIIYTMLKQGTLFDESCFETRRKNCEQKQLSRYIRKLEKHGYHVEAQS

SEQ ID NO: 249911 - protein, 353 aa, unidentified
MTSLTDLRQAVDVVIGVDTHVNTHTAAVVDTRTGGVLAELTVPTTPAGYTRLVELADQHSALRAWAIEGTGGHGAGLARVLADRGEVVVELDRPQRAARRNGAKSDPLDAARAAREALSRTRLGTPRTGGERQALSVLLAARRSAVEASTDAQRQVFSLVIAAPDKIRDKFAGMNLPQMITTAAALRLHSSWDAETCTTVTVLRSLARRARTLTIEADEHAKAILALVRAWRPDLLDLPGVGPITAAVVLCAWSHPGRIHSEAAFAMLAGAAPIPANSGQVTNRYRLNRYGDRQLNRALHTIALSRTRYHQPTRDYIARRTTEGKTPREIKRCLKRYIARDLYRRLENPPATT

SEQ ID NO: 249912 - protein, 410 aa, unidentified
MEVLFERVAGLDIGKESLTVCMRIPGPGGRRVSETRTVKTTTRALGVMRNWLDEHGVTIAAMESTSTYWKAPFYCLEEVMEVWLLNAAHMKAVPGRKTDVKDAEWIAQLLEHGLLRPSFVPPPGIRRLRMLTRYREQLMGDRTREATRLELMLEDASIKLSSVASSLTTVSARAMLAALIEGERDPRALAQLAKGRMRVKIPELTEALTGHFDANHARLARAILDRLDRVEAALAELDAVLEDAFAPWDRQLQLLQTIPGVGPRVAQVIIAETGADMSRFPSAAHLAAWAGVAPGVYESAGKRSPAGARHGNKWLNHMLVEAAGSVARMKGTNYLSAQHARLTARRGMGRAQVAVAHSILVSAYYMLRDDEPYRELGADWLARRNDEAHTRRLVAQLERLGHTVVLDPVA

SEQ ID NO: 249913 - protein, 360 aa, unidentified
MAKTKAVHSSYVIGGVDTHKDLHVAAVVDQNNCVLGSEFFATTRQGYRQLLAWMASFGTVKRIGVECTGSYGAGLLRYLQSAGVDVLEVTAPDKMERRRRGKSDTIDAESAAHAAFSLIRTVTPKTRGGMIEALRVLKVCRKTAVAARRTALQMIQMNIVSAPDELRDQIRSLSRMQLIRTLASWRPDVTAYRNVQDAYRIALKSLARRYLELHDEIADLDVMLASIVDELAPELIKRNSVGYECASQLLITAGDNPQRLHSEAGFAALCGVSPVPASSGKKNRHRLNRGGDRAANSALHIIAIGRLRTDTKTQEYIGKRVAEGHSKMEALRCLKRYISREVYTLLRNQNRQINSTQITT

SEQ ID NO: 249914 - protein, 390 aa, unidentified
MTTAATEGTMSSTNGGILHLAFELGRKKWKLGFTIGLGQKARKKNVDGGDTAAVVHEIAAAKRRFGLSADARVVSCYEAGPEGFWLHRWLISIGVENVVVDSASIEVDRRKRRAKSDGLDVESLLKLLCRHTMGEPKVWSVVRVPPPQIEDLRQLHRDLATLTEERTRLRNRIRGLLAVHGAAVRRWSKVREEVASLRLWDGSALGDGLRQRLEREIERMEIVQRQLRGIKQEMEAELQAAAEPGSAIAMMQRLVSLRGIGAQGARIMVVELFAWRGFRNRREVGGCTGLTPTPYQSGTTVHEQGIDKAGNVWLRRVAIQLAWSWVRWQPHSGLTRWFNEKFASAGRRQRRVGIVAVARKLIIALWRYAFGASLPDVVTGQGEVYVLKAA

SEQ ID NO: 249915 - protein, 331 aa, unidentified
MNFSLFIGIDVSKSTLDVHLKPIGCYKAFSNDPHGFITMVEWIMDQAGKFCHKELVFGLEHTGLYSENLILFLDQNDFAFTVIPGLELKRSLGIRRGKSDKADARNIAEYIYEKREKIKLYKLPSQTLDKLKKLASIRERMVKERAAYQVRMDEYLEQFPDSTFETYLQTQQELIHCFNSQIERVEKDIERLIKEDSSLSDQYKLINSIKGVGPQTAIMMIILTNGFSSFDNWRKFASYAGIAPFPNQSGTFNGRTKTNKLANKRIKSLLTMCASTAIQFNPEMRKYYENRVQMGKNKMSTLNIIRNKLTARIFAVISRNTPYVEIHKYAA

SEQ ID NO: 249916 - protein, 367 aa, unidentified
MEKHNTARKSSCGGKRTTGKLTIGLDLGDRSSRYCLLDEQGEVIEEGSLPTTRKGLDRVFGAAGRCRLAMEVGTHSPWVSRYLARLGYEVIVANARRVRLISESSRKDDKLDAKTLARLARIDPELLSPIRHRGVQAQADLMMIRARAVLVQTRTALINAARGLTKSYGERLPSCATYQMGKDQAELLSPAIRAALEPLLAEVETVTERIREYDKQLEQLCQTRYPETKLLKQVHGVGTLIALAFVLTIEDPHRFRKSRAVGCYVGLRPKRRQSGQSRPQLGISKEGDVYLRTLLVQGAHHVLGPFGKDSDLRRWGLKLAAQGGKNAKKRAVVAVARKLAVLLHKLWVSGETYEPLRLANRAQTVAA

SEQ ID NO: 249917 - protein, 414 aa, unidentified
MELLHERCAALDIGKKDLKACVRTPSPKGKRSRRQEIRTFATTTNALLELRDWLVAEQVSLVVVEATGDYWRGAFYLLEDQLNVILVNAAHAKGLPGRKTDVCDAAWLCQLGECGLLRASFVPPEPIRQLRDLTRYRTTLTAERSREAQRLEKELEDAGIKLSSVATDITGVSGRAMLAALIDGERDPQVLAEMAKTRMRPKIPHLVQALTGNFGEHHAFLCRLHLQRIDELTAAIAELSARIAEQMRPFARQLEHLMTIPGVGQTVAEVIVAETGTDMGRFRTGANLASWAGVCPGHHESAGKRKSGKTRHGDRWLTGALGTAAMAAARTKDTTYLGARYRRLAPRLGKKKALVAIEHSILVAVWHILTNNVDYHDLGGDYFARLDPERAMRRIIRQANSLGFTVRFDPIQAA

SEQ ID NO: 249918 - protein, 349 aa, unidentified
MILLGVDPHKSTHTTTAVEPESNQQVGTMRIEASLTDYRRLLAWAKRWPQRKWAVENANGLGRHLAQWLIARGESVVDVPAAATSRVRELSRGGRRKNDQIDAAAAATVAYLQGDGRDVEPEDHTTALALLDERRVNLAQARVRTVKQLHALLRDLLPGGAPTQLSADLAAKLLRSVRPAGDVETVRKDIAWDLVAEIRKLDKQLTDNAARMQSLVEASGSALMDTPGIGPVMAARLIGRTRRAHRFPTSAAFANYAGAAPVEIASADKARHRLSRSGDRQLNSVLHTIAVVQIRMPKSPGHAYYQRKLSEGKTPKEAKRCLKRRLADHVWRVMIADERRVKSLPGQAA

SEQ ID NO: 249919 - protein, 461 aa, unidentified
MNRERSKKKQKRAGQGGAVPSLNCIEPNAAGIDVGATEIFVAVPQDRDLSPVRSFETFTQDLHRLKEWLQQCRITTVAMESTGVYWIPLFQILEEAGLEVCLVNAQHVKHVPGRKSDVIDCQWLQYLHSVGLLRASFRPEDRVCVIRSLLRHRDSLVQMAAAHVQHMQKALTQMNVQIHHVLSDITGQSGLAILDAMVAGERNPLVLAQLRHSRVQASEEEVVKSLVGDYRREHLFTLRQSLEAYRYYQRLITGCDAEIEQQLQNFDGHLPPDAPALPPERYPHPQRKNEFRFDMRSELYRIFGVDLTAIPSINALTGYTLLAEVGTDWSKFRNLQAFASWACFCPQNKKSGGKVLSAKTRRSANRVNRALRLAAQTLERSTSYLGIFYRKLCARLGRPAGITATAHKLARIIFHMVTTRRAYDESIFAAEEQRQRKHLESSLRRKAAKLGYQLIPLPQTA

SEQ ID NO: 249920 - protein, 357 aa, unidentified
MTKRSQDILRKEKVFVGLEDSKKTWQLCVRSGGVIVNETSMPAKLDVLSNYFNNKFPECQIQVIYEAGFKGFGLHDELEAKGWDCIVTPPHTVTEEKCQRKKNDRTDCRRLAKNLENGDYHSCFVPDKELREDRQISRTYEQIQEDITRVCNRLRRTLEFHGLDDGLLPGSWNRSMYTRVKLYLEDLEISASLRFSLKVMFNELEHLRQLRKELLQQLRTLAKSDRYKERVEILQSAPGIGMFTAIRLVLEWGDVSRFKRKEEFASFLGLVPSDYSSGETERQGHITKQGNSSVRSWLVECSWMAIKHDPVLLDKYRRVLKNCGSKKKAIVAVSRKLAIRLRRILLNGEPYVIGVME

SEQ ID NO: 249921 - protein, 397 aa, unidentified
MAHNTTTRSSGVVGCRSFAVKTIGVASGIPLYASLELSRATWLVTSLAPGSDRMSKHSTAGGDGGALLGLLERTRTRTQKVAGHALKIVAIQEAGPDGFWVHRLLEANGIESHVVDPASIAVPRRRRRAKTDAIDGETLLRTLLAWKRGEPRVCAMVVPPTPEEEDRRRVCRERAILLQERIRHTNRIKGLLAGQGIADYNPLHKDRRHLLDATRTGDSRPLPRQLKAEILREIELIELLLRQIADVEAAREALARPKTAKAPSPVVLLEQLKGIGPEIASVLYLEGLFRTFGYRRQVAAYAGLAPTPWRSGTVDREQGISKAGNPRLRSTMIELAWLWQRHQPGSALSRWFHARVGTERGRIRRISIVALARKLLVAIWRYVTQGEIPEGAVVKAA

SEQ ID NO: 249922 - protein, 364 aa, unidentified
MKRKVYVGMDVHKETIQIAYLTSNSKEILKEQQIKHNEVQIKKFIKKLKTEWNEIYCCYEAGVTGYPLYRYLKSLGVNCILVAPGKIPRQSTDKIKTDKRDAIKLARLMRSGELESIHVPSEEDEAVRDYLRSRDSLRLDLGRNRQRLMKFLLRKDIKYSTTKYWTVSHYKWLNNLHFNNEILQETFNDYYNRVRVQEENLKSMDKKIQEIAESEPYREKVGILRCFRGVDYLTAMFLLCEVNDFKRFKTAGSFMSFLGLVPGEYSSGSKRKQTGITKTGSPRLRRILTEAAWQHRFPGTGSKIITARRSGQPALVVALAEKASLRLHKKFRNLQLRGKTPQVMITAVSRELSGFLWAAMNLVA

SEQ ID NO: 249923 - protein, 343 aa, unidentified
MDYYAGIDVSLELSSVCILDASGQIIREAKVASEPEALTTFLARLGLPLTRVGLEAGPLSQWLYAGLLQAGYDVVLLETRHVKAALSAMIVKTDRRDARGIAQLLRMGWFCPVHCKSPPAQETRALLVARKLLQAKMRDVELSLRGLLRGFGLKVGEISKNQFAARVRTLAAGHPMLERIADAMLRAREALRTEFSKLHRAMLAIVRSDEVCRRLMTVPGVGALIAVTFTSAVDQPERFSRSRAVGAHFGLTPKKYQSGETDITGAVSRVGDAMVRTALYEGAHILLTRAVRFSALKRWALEVAKRRGMRRAKVALARKLAVILHRMWMDGTTFRWGREEAAA

SEQ ID NO: 249924 - protein, 400 aa, unidentified
MNAVGIDVSKGKSTVAVLRPFGEVVAFPFDVIHNDNDLKRLVKLIRSLPGESKVVMEYTGTYFEPIAQFLHNNGIFVSVVNALLVHDYGGNSLRKVKTDKKDALKLASYALDRWTELDEYVPADEQRKILKLLNRQYNQSIKIQTMMKNNLISLTDSVFPGINRLFTSLERQSDGHEKWVDFLHAFPHKDCVAKLYLSAFKAKYKSWCSRNKYRYSESKAEKIHSYAKSVIAVLPLNESVKLIVTQVVSQLNTILETAFSIRTEMNRIASSLPEYDTVMSMFGVGKVYGPQLIAEIGDTRRFRNRRAITAFAGLDAPPYQSGQLDVSSRHISKRGSAALRKVLFQITEIFILSKPENEPVYQFIIKKRSEGKHYYSYRIAAANKFLRIYYAKVNQILNAT

SEQ ID NO: 249925 - protein, 295 aa, unidentified
MKKPAQHLIAEVPRRQAKVEITIGIDLGDVWSHYCTLNQDGEVVDRGRFRTTPKAIEKWFTDVSPARVAMEAGTHSIWISAQLQELGHEVIVANVRELRAISHSDRKSDQVDAEKLARYARLDPNILRPIAHRTVQQQEALTLVRARALLVRLRTAAVNAVRGLTKSCGYRMPASATTCFAQRSLAVMPAGLAQALGPVLQQIAEMTIKIKQYDRQIQQLGQTDYPETQALLKVHGVGHLTALTFVLTLGSKERFGRSRDVGCYLGLRPRRSQSGDHDPQLGITHAGKAPALGEG

SEQ ID NO: 249926 - protein, 379 aa, unidentified
MPDVSSTAPAEVKLWVAFDVHKNSIVAAILPASGGAPRLAQIETTERAIRRFVRGLGEPATIALCYEAGPCGYDLLRLLARLGVACDVVAPSLVPVRAGARVKTDRRDAKKLVTLYRAGALSFVAPPSLEQEGLRDLVRARDDLRRARTAARHRVAKTLLRYGHVFRDGKKSWTRAHVAWVRRQRLADPLAQEALTHLIAHLDAVDAQLAALDHRLDQVAGTEPWSDPVRWLCSFRGISTRTALGLLAEIGDFRRFSSARELMGFLGLTPSEYSSGESRHRGHITKTGNEHARRLLVEAAWHYRHAPRPSARARAQAAHLPPEVPARAWAAQVRLHHRHRHLTAHGKRSTVANVAVARELCGFLWAAMTHQPLRGEVAA

SEQ ID NO: 249927 - protein, 348 aa, unidentified
MIIIGVDFHPEFQQIASVDTETGEFQEKRLGHREEAEQFYRALGGQKVRVGMEASGHARWFERLVAELQFELWIGDAAEIRTKRVRKQKTDRQDAQLILRLLLEDRFPKIWVPSWENRDLRQLLWHRHRMVQARTRIMNQLQAVALNEGLRCKKRLWRERGRQQLESFQLAPWASRRRRDLLELMDRLNPTITELSQAIEQEVEKCPEAQRLRTHPGVGPLTALAFVLIIGKAERFRCGKQVASYLGLVPLEESSGNRRRLGHITKQGSSMLRFLLVEAAQVTVRSLPEWRSKYLHLMLRRGRKTAKVAMARRLAVRLYWMMRQGWDYQQWSKFGSHAGQPGNRDGVQ

SEQ ID NO: 249928 - protein, 322 aa, unidentified
MSQPGSLCVGIDVSKAILDIAASSAIEQFSVGNDSDGFDAIIAELRMYAIALVLMKATGGLETAIVCALQAEGFELAVVNPRQARDFARAMGYLAKTDSIDARVLSQMAEVLNRHPERERFIRALPDTECQVLTAMVVRRRQLITMLVAERNRLHPAHPLNRKSINIIIKALEDELARLDADMNSHIHSHFKELAKRLSSIKGVGTMTAAALLAEVPEQGNLSRREISALVGMVPVNRDSGTMRGRRTIFGGRAGVRTALYMAALVATRFNPVIKVFYMRLLAAGKPKKVALVTCIRKLLTILNAMLRKNEEWNESYHHVAP

SEQ ID NO: 249929 - protein, 314 aa, unidentified
MASITAFVGIDVSKDHLDVHILHGASFRCPNSSSGRASLLHKLPEPGTCLIVVEATGRYERPLIGDLTAAGQAVSVVNPRQVRDYARALGLLAKTDRIDARVLAGFALHVQPRPVAHTRDKQAQLEELVTRRRQLVAHRTAELNRRSQCVNKEVRHSVQHFIDTINKDLKRIDREILKLVESEDDWRQRYELLKSVPGVGEVTAATLVAQLPELGRLNRQEIAALVGVAPINRDSGQFRGQRRIQGGRAPLRTTLYMAALVATRHNPRLKQFYERLREQGKQAKVALTACMRKLLVILNTMVKNNTPWQLASHA

SEQ ID NO: 249930 - protein, 340 aa, unidentified
MPLYGGIDLHANNSVIVLLNEQDKVIYRKRLSNDLPAILGQLAPYHTEIKGLVVESTYNWYWLVDGLMEAEYRVHLANPAAMQQYSGLKYTDDDSDARWLAHLLRLGVLPEGYIYPKAERAVRDLLRKRAHLVRQHTANVLSVQNILARNTGARFSGKRIHELTKQELTTLLAEDTQVLAVTSSLMVLDCLRQQIKMLEQSVHKQLHHTPSYEQLLTVQGIGTVLAQTITLETGAISRFPTVGHYASYCRCVDSTRISNGKRKGTGNVKNGNPYLAWAYMEAAQFALRFQPEAQRFYQRKLAKSRNNTVLARKAVAHKLSRACYYLMRDRVPYEATKAFG

SEQ ID NO: 249931 - protein, 326 aa, unidentified
MLSFLGVDVSKAKLDVALLLEGDKFKSKVFANELRGFEALRQWLKAHLPGGLHGLHICMESTGSYHEALACALHDQGLWVCVVNPLLVKRFAQANRLRNKTDAGDAKCLALFCKQQEPERWQAPTLAVRTLQALVVRLQTLQTMRQAECNRQDVAHSSVADSITQVIADLDAAVDRVKAQIASTIDDDPDLKRRAALLDTIPGLGDKTIAQLLAYIGQPTRFKSVKAVIAYAGLTPMIQQSGTSLDKHRGLHPMGHQELRRALYFPAMVAGRHNPVIARFWDKLHKQGKPGKVIVVACMHKLLAIAYGVLRSGQPFNPDHLKPKIA

SEQ ID NO: 249932 - protein, 408 aa, unidentified
MQVLYTRCAGLDVHKDTIVACVRCVSPPMHQEVRSFGTTTVELLKLTDWLAEHDCTHVAMEATGVYWKPVWHVLEAEFELVLANAAHIRNVPGRKTDVNDAMWIADLLAHGLIRSSFVPPQAIQQLRDLTRTRKQLVREVSQHALRIQKVLEDANLKLGSVLSDVLGKSGRAMLDAIVAGETDPARLAALAQGTARNKTAELREALRGRITEHHRTMLRLHLQVVDALQRTLGELDAAVGKALAPIQQRARLLTTMPGVSDLTASVVVAEIGVDMSRFPSAGHLVSWAGLCPRSDESAGKRRSTRVRKSGTWIKTTLVTAAWAAVRVKTSYLRAQFLRIKARRGAKKAILAVAASMLTAAFHMLRDGTEYNDLGSEHFDRQDKSKTIRRLLKRLQDLGCNVPEMVHTA

SEQ ID NO: 249933 - protein, 389 aa, unidentified
MLDQQKESYEGERIAVGIDPCKEFLQLAILSPGRAVEFRKLPLLPSITEEIAQSTDPQRTQIAIESYASYGRLLIYELLKKGYDVREVNPSVSRKLVDLFTEEHNDRQDAESFARALFLIPDLPKVCFSEGKLWLAKLSRLRKRLVKDLNGYLNRLHIALTESYGAVYRGLFRTLSTGKALRFFETYPTINNALGHKRKVKELIGEEKWCLLSSSGQWEQSFYLELLEKEIRTLIRLIRVLLETRKELDEEIKKIGEEDEEVGILRTFPGIDYLTACTLLSEIGNIERFDRESSLSSYCGVSPVMWQSGTSRIKAKRRKRFSRRLKGALYFLSLSQIRINSESRDYYWRKRKEGKTHWQAMNALSRQLIKIIYYMLKNKVPYHRKQLVN

SEQ ID NO: 249934 - protein, 366 aa, unidentified
MLYLGIDQHARQITVSLRDEGGDVLQARQVSTQPDKINAFFQQLTRERLRDGESFVAVLEVCGFNDWLIRMLREYHCHKVILIQPDERKKCKTDRRDAAALSELLWANRERLLQGKPVRGLRQVDIACSTDQENRRLTTLRKEAGQARTRLVNKVRHILRRHNLQWQMPTKRLPTKAAIAWLKQLVLPEIDRLEMNHLLADVEQVQQRVKELERVIAQRCGVSAEAGLIASMPGVSYFTATSLACRVGRVERFPRAQSLANYWGLTPGCRNSGESTQRLGNITKAGSSMARWLLAQVTHKVLRKDARLREWFKRIKRRRGSTIARVAVMRKLATIIWHMLRKRKTYAECRVLAEVGTKERDKQGCL

SEQ ID NO: 249935 - protein, 330 aa, unidentified
MEKKDYVGIDVSKETLDLRLHSVKQQEVVDNNIAGFKKMYRWILKQVEPGTKLLFCFEHTGLYAVPLQLYLEEMDLEYVQVSGLQVKRSLGIQRGKNDRIDAQKLAEYAYLHRDTLRPYKLQSTYLIRLKYLLSLRSRLVRQRGGYAASANEYKKFLALGTADALLHSQREMIKACDKQIVILEKEIKQVIFSDQKIQDQYSLATSVKGIGMISAAYMIALTNCFTEFKTWRKFACYAGSAPFEHQSGKSIRGKTKISQYANKQMKAILTNAAKSAIQYCPELKQYYQRRIKEGKGKKVVVNIIRNKLISRVFSVINRGTPYIELAKYAS

SEQ ID NO: 249936 - protein, 310 aa, unidentified
MDVIIDKGCGLDVHKETVVACVMGEGIKKEIRTFSTMTEDLFRLKSWLSEKGITHVAMESTGPYWKPVFNVLEDSFEVILANARHIKNVPGRKTDVKDSEWICKLLRSGLLAASFVPPKAIRELRDLTRYRKKLTQAISAEKNRVQKVLEDANVKISSVVSDTFGVSASRMIEAILAGNLDADSISDLAVGKLKGKKEELKKALVGNFQEHHRFMIQASLDHIESLEKIIAGLDQEINRKLKDYHKEYELLQTIPGVKEQGAAAIIAEIGADMGRFPSDGHLSSWAGMSPGNNESAGKKKAERPPTAIRI

SEQ ID NO: 249937 - protein, 483 aa, unidentified
MSKPKKHSKKLGQEKTAAGQSKLGGKRKGMCLGDRPILEPNAAGIDIGAREIFVAVPPDRDEHPVRVFSTFTEDLEKMAQWLVDCGVTTVAMESTGVYWIPLYDVVEKHGVKPCLVDARGMKNVPGRRTDWHECQWIQFLHSVGLLRAAFRPEGNVCAVRSLMRHRSDLVQMTNQHIQHMHKALTQMNLQIHHVISDITGVTGLAVLDAIGAGERDPQKLAKLRDPRIQATEETILKSLVGNWRPEHLFTLKQSRQMYGHYQEQISACDTEIEKLLVAFQPRVDPQQKPLPPDRKKKQRARQKKATPKTGFDLRTESYKLFGVDLTQIPGLMTMVLTLFSEVGRDMSRWKTAGQFVSWLALCPDNDITGGRVAWRGTRKVHNRAGELFRMAAYSLHHEQSPLGHYLRRMKSKLGPTGATTATAHKIAIIFYTMVKKQVEYDETLWAERDAQREKRFEAKLKRQAQQLGYKLVPIEEKPSRVTG

SEQ ID NO: 249938 - protein, 402 aa, unidentified
MRFFVGLDWASEAHAVCLIDGRGRVRWQTSVAHSAAGLATLVQRLRRWRQRGPLAIAIERPSGLVVDTLVQAGLDVVPIHPNVVKATRPRYSAAGGKSDPGDAFLLADLLRTDGHRFRPLQPPSDDTRALRTLVRGRDDLVAQRVALANQLRALLERVWPGAAQIFADVDSPIALAFLTRYPTAHSAARLAEKRLSHFLVQHAYCGRRAPRELLARLHAAPPSRVADAEAEAAGDLVRSLVAVLTPLVAQIQQLGAAIAAALQHHPDAPVVQSLPRGGTINAAQILAELGDERRRFSSAEHLAAEAGVAPVTHASGKHHGVAFRWACNKRLRAALTTFANNSRHASAWAATVYQRAVGRGCDHPHAIRILARAWVRILWRCWQNRTPYDLSRHGAAATLAAA

SEQ ID NO: 249939 - protein, 361 aa, unidentified
MSKDKYVGMDVHKATVVVCVSDKDGKTVTEATIQTKREAIRDFVKGIGGTIHLTFEEGTQAAWLYDLLKPYVVELIVCDPRYNKGRYAVSKNDKLDARRLADLLRTKSLKAVYHGEKSTRALKELAQSYEGLVSDSVRVMNRIKAIYRGRAISCSGLSVYSPRMRDQWLSELKEPGARKRAEFLYSELDHLKELRRQSKEALIEESKKHKIRRHLLTVPALGAIRVAQIIAIVAYPQRFGNKRQFWTYCGLSVLEHTSADHEFKDGVLRKKNKGKTTRGLTWCYNRQLKTILKAAALEAIRREPFKSIYQKMIDRGLRAEVARVAIARKMAAIILSLMKRGESFDPKHLIKETAQSTTAAQ

SEQ ID NO: 249940 - protein, 345 aa, unidentified
MTYYAGIDVSLEQSSVCVRDSDGKIIREAKVASEPDALIAWFANFGLPMSRIGLEAGPLSQWLYAAMKQAGLAVELLETRHVRTAFKTMPVKTDRKDARGIAELMRMGWFRPVHCKSIPAQETRALLTTRRLIESKLRDIEMSLRGVLRGFGLKVGKTTPTNFAERIKELVSGHPSLQVIADSLLAIREVLLREFRAYEKRVRTMARHNDDAKLLMTTTGVGAIISLTYASAIDDPKRFENSKQVGAHYGMTPKRYQSGDTDYSGRISKIGDKSVRTALYQAAHVILTRPVKASALKTWACQLAKRIGMAKAKVALARKLAVIMHRMLIERKPFDHKLSKQAAAA

SEQ ID NO: 249941 - protein, 426 aa, unidentified
MLKIVHPICCGIDVHNKFIVATIATTDPKGVTRYQTKEFKTFNYDLENLKAWLAKNNCVPVCMESTGKYWIPVFNYLESTCSVTLANPKYVKAINGKKTDKKDSRWIADLFKHDLVPGSYIPPREIRMLRDLCRYENKLVSCRASEINRVQNSLTVSNIGIANVLSDTFGKTASRIIEYTLTCDKFDPEYCKTLIDRRIKASPDDVIKSILGYNLTLAQSSKIQVSKAHLNSINEAISNLNETLTELANPYQDHIKLLTSMVGIKEKSALKIISEIGTDMSVFKSAKHLCSWAGLAPQNNESAGKKKSSKISRAGVYLKPILVQCANAAIKSTCNPYFREKFFRIKKRRGHKKAIIAVARMMLTCIYHMISKGEMFAPSDVNYSDLPNAVLEKRKQKMIHSAIVLLQKQGFSVVMPTDNEGLSLTG

SEQ ID NO: 249942 - protein, 347 aa, unidentified
MNYIGVDCHISSLDFAVVNERGTTTKKAKVDTGVKEFIGFVKSVPKPRRIYIEEGELAGWMLETSLKFGEQLIITDPKINKWIGKAGQKDDTIDAEKLAQLARGKYIKAIYHPGDKRRRFKELVFAYHDTVKSKARVKNKIKANFRKNGIRCSGDTVYSDKHRSKWRGKLSKNKITHLIVEELWAQLDQVRGSKERLKRNIKIESKQYPEIKRFMQIPGIGLIHAATISAIIDTPHRFANKKKVWMYAGVGIMERSSGEKVYSRKLTREYNRPLKNAIKQAVEASIFANDNQFRRQYLRLTLEKGIASHKAKLTVARSMLAVMYGMWKKGEEYDPDIDIKRRNGVKS

SEQ ID NO: 249943 - protein, 324 aa, unidentified
MNKDKEYLGIDISKDVFDVCDSNFNYYQFKNNVLGFKKLLKLLTVNSICVMEATGYYHVRLAYFLLENGKGVCVVNPLKIKRYIQMHLSKTKTDKSDSRMIYKYAKDCDAELWFGQSKTQQESLQLSRLLSIYTKQSTQLKNKIHGESILGNPSKTVDESLNRQLKTLQKEMKFLEDKLLKNVKSAYQESLTLLKTIPGIGDKTALMLLVFTDGFNRFASSKELCSYAGITPIIRQSGSSVKGRPRISKMGNPKLRNLLFMCSFNACKYNAACKALFDRIVAKGKSKKLALIAVCNKLLKQAFSIVKNKLPYNVGYRSALVLNK

SEQ ID NO: 249944 - protein, 436 aa, unidentified
MVTVSREPYLEYFPYRVTCTARKKKTRRIKMHYVGIDWADEKHDIYITNDSGKKLACFEISNDQKGMLKLLAKIQKLSKDTSSILFAMEKSSGPLAEFILDHNYTLYSINPKVVDRYRDRHKVSGAKTDPIDAMVLAHILRTDRHQFRPLLPDSELARKIKLLSRDRDNLVKAKTRILNKLRANLKEYFPAAARAFKNLDKREVIKFLRKYPSHEEAAQLRKEEIKNFFRGSGHSFKKIEKIYSILQVPSIQVPQFIVEAKKRYTLALLAQLPPLIKQIKEYKEEISRLMDKHPEKNIFRTLPGSGDTISARLLGELGDNKERFKDYSSYQCYGGTAPITKYSGKMRRGVKARRACNRGLKQTVSQLAFCSLRRSTWAREYYIKKKKGGYSHSQALVALGNKWLKILFALRKKKEIYKEEFHLMMKEKHRMKAIPA

SEQ ID NO: 249945 - protein, 375 aa, unidentified
MIATTRPEISVSEPTLYVAFELGKKEWKLAMTSGFGVAPWLRSVASGDWRGVERALAQGRARFGVPAAAPVVSCYEAGRDGFWIHRALQQRGIRNRVVDSASIEVNRRARRAKTDRLDALKLVMMLVRVCWGERRVWSEVHVPSAAAEAARHVSRERTALGKEQTRLTNQMKGWLATWGATLPPRRPSGWWRTVRDWAGAALPVEVQTRLARADASWAVVGERIAELEDQQQAAVTAAMPASALRQLVQLKGIATTSASVLLDEGLVWRAFRNRRQIGGLLGFAPTPFNSGESTREQGISRAGNNRLQAISIQLAWNWVRWQPLSALTQWYQAHFGNGKRARRIGIVAVARKLVIALWRYVTTGVVPAGAIVKVA

SEQ ID NO: 249946 - protein, 376 aa, unidentified
MKEKLRFLGLDVHAVTIAVAVAEPNGEVRSLGMIANREDSIRKFIRKLGSPEHLRACYEAGPTGFVLYWQLTQLGVKCDVVAPSLVPKKPGDRVKTDRRDALKLARSHRSDDLTAVWVPDEGSEALRDLVRAREAAKQDQLRAKHRLTKFLLRTGQRPPLGVKAWTEKYVEWVQQVRYTHPAQEATLLDCLNEVQHMEERVKRLEQSIVEVIQLAPAPMQEVVRGLQALRGIAHISAVTIAVELGNITSRFESARDLMGYSGAFPSEDSTGKRIRRGGITKSGNAHLRRIVVESAWSYRHRPAIGARLRRRQEGLPAEITEIAWKAQNRLHKRYMTLMARGKEQRKTMTAIARELLGFIWAIGIKAEAACKQQMTA

SEQ ID NO: 249947 - protein, 354 aa, unidentified
MSSKYDYTGKTIYVGIDVHKNSYSVVITNDGIVVKKDRLIASPADFVCYLKNNFNGAKINTAYEAGFSGFHLHRCLIAHDINNIVVHPSAIEVSRERVKNDKRDALKISAQLASGRLKCIHIPSEEQEANRRVTRLRSSLMADRVKYGNRIKALLFQHGLIAANDDTVVSKLWLEKVAKLLETEKSAAGLRYSIQGYSEQWLAITKKVKEIDKELAKQAKDEKTIDDIYRSTPGIGPLSARILANELGNMKQFSSEKKLFSFTGLTPREYSSGDKQCLGSISKQGRPILRKILIETAWVAIKKDKNLEVIFEAIAKRAGKKRAIIAVARRLIGRIRSCIMKGEKYKIEKFENEL

SEQ ID NO: 249948 - protein, 403 aa, unidentified
MEQVIIGVDPHKLSATIEVVDEHEKLLGSGRFTTDQAGYTAMRTYAKSWPDRVWAVEGANGAGRPLAQRLLEAGEHVVDVPAKLAARVRLFDTGHNRKTDARDAHSIAIVAVRTDSLRVLKTDGELEALRMLTDRREALTRRRVQTVNRLQALLAELLPGQAKRDITTGQAKAMLATVRPRDIAGKTRRRIAAEELADLLVVEAKIKTATAELKAMVLARDSRLMDLHGVGPVVAARILADVGDVTRFADRNRFASWTGTAPLDASSGEQNRHRLSRAGNRRMNHMIHIAAVTQIRLDTDGRTYYRRKRADGKKPMEAMRCLKRRISDTVYRQLVADAERAALAKPLEAADAGPGGHCGASQESSAVDLPPHIDTSDQPLPGPADETLRPAPPTRKRTLQPTG

SEQ ID NO: 249949 - protein, 340 aa, unidentified
MKKFIRIGVDIAKNSFQVHALESEDGRATKRKLSRSGIVKFLAEVEPCLVGMEACGSAHYWARRLGAMGHEIRLTPPSYVKPYVKRGKNDAADAAAICEAMSRPNMRFVPVKSEDQQATLMAHKTRELLIKQRTMSVNALRGHLAEFGVIAAKGIGHVEELVERAAGADLPAMVQATLGALLAQLRGLDAAIDELERAIVADHRRDPVSRLAASVPGVGALAASAILASAPDPHAFKSGRDFAAWLGATPKQNSTGGKEKFGSITKQGNRYIRRLLVLGAISILRAAPKRKGALCDWLAALRARKPAKVVAVALANKLARIVWAIITTGEAFRSSIYAKA

SEQ ID NO: 249950 - protein, 415 aa, unidentified
MNIVYERCAGIDVHKRSVVVCTITPDQQGQRHKQRDTFSTMMPDLLRMRQWFQSLGVTHVAMESTGSFWKPIFNVLEGHVEVLVVNAQHLKAVPGRKTDLKDAEWIADLLQHGLLRPSFVPPAFQRELRELTRYRGSVVEERSRTINRLQKILEDTNLKLSAVATDLMGLSAREMLAALLAGETNPTALAELARGKMRAKRDLLVQALQGQFKPHHRLLISEQLTHIDALDEEIERLSTDIAQRLLPYEAQLKRLGTIPGIKRRLAEVILAEIGPDMQRFPSARHLASWAGMCPGNRESAGKRLSGKTRKGDPWLRTALVEAAHAATHCKDSYLSAQYHRLVLRRGGKKATIAVGHTLLVIVYHVLADEKDYQELGGNYFDDYDRQAVQKRLVHRLEKLGYEVILAPTAPTSPAP

SEQ ID NO: 249951 - protein, 431 aa, unidentified
MELYVGLDASMDETSICVVDRDGKIIKECKATTDPTAIHSALKAYTDHLQRVGLEAQAFSPWLSKELSAMGLPVIVVEAVHMQKSLSAQRNKTDRNDARGAHMMRVGWFRQVHVKDDDNQRLCVLLSGRQLLKRKLVDIENELRGSLKAFGIKIGAVGRNKFEARALELVEAAEPLLRDVISGMLAVRKAVWAEYKRLHNALVRVVRQDAVCRRFTTIPGVGPVTALAFKTTIDDPHRFTRSRTVGAHFGLAPERFQSGTIDYDGRITRCGDPEVRTNLYEAASGLMVRCKKWSALKAWGMSIAKRRGHKRAIVAVARKLAIVMHRMWLDGTEFRWTNADGLQADDQPGSKWEHRICRDQSHRRQFNRIRYGGKAPVVVSRTGVKGRYLAGPACWKPRECLAHSDSSLASMEPASGRARRNAWTTTERMMF

SEQ ID NO: 249952 - protein, 340 aa, unidentified
MIIGCDFHPGFQQIAFVDQETGEYGERRLSHPVEAEQFYRSLAGRQVRIGAEATGNFRWFRQLMDELGQEFLLGDATQIRASNPRKQKTDKRDARHILKLLVEDRFPAVWQPPVENEELRQLLLHRCRLVRMRTRIKNQLDSMAKNEGLLGSRTWSAKRRQAIEALPLSGWYVERRKDLLALWDQLDERIAPLDEAVREAAETNQEARLLMTHPGVGPIVSLAYVLTIGDWRRFPRGKQVGSYLGLIPVEESSGDKRRLGKVSKQGNTLVRWLLVEAAVHAQRHDASWHRQYVRLSMSRHHGVAKVAIAHKLAVRLYWMLRSAQDYEQVMERGSHVGQSV

SEQ ID NO: 249953 - protein, 323 aa, unidentified
MQGKALPDQSAQAPVYVGVDVCKDWLDVYFHPVGKTLRLANDRNGLKRLKRECEGLAIARVVMEATGKYHRQAHRSLHAVGLPVAVVNPLRSRLFAQAIGALAKTDRIDAAMLALFGERLDPAAAPPASEAMEELQELVRARQAAVADKTALANRRGEAKTAFLRAEIARRVASVERHIARLDEGIARRVEANEALTARYRILLSIKGVGPVTAVTLLACLEELGACSKKGAAMLTGLAPLACDSGDKNGQRHIRGGRAHVRTALYMAAVAAARSNPDLAAFYKRLIEKGKKAKVALTAVMRKLVVIANALIKENRHWQPTRP

SEQ ID NO: 249954 - protein, 412 aa, unidentified
MEVIVERPAALDVHKAQVTACVRVPGKGGAREQEVVQFQTTVRGLLTLRDWLKAHRVTQVAMEATGVYWKPVWAVLEDDFELLLVNARHVKQVPGRKTDVSDAAWLCQLLEAGLLRASFVPPKPIRALRQLTRYRKAQIKERQREANRLHKALEDTGIKLDCVATDILGVSGRAMLDALCRGTTDPELLAELARGKLRTKLPALKEALEGRFDELHALLVGSILAHLDFLDEQIERLSDAIEAQLRPFQPAVELLRSLDGIETRTAQNILAEIGVEMSVFPSARHLASWGGQCPGNDQSAGKRRSGRTRRGSKWLNDALKDAAMAAIRTNDSYLQAQYQRLRPRVGHGRALGAVKHTIICACWHMLTTGELYHDLGGDYYRRRDPERQTRRLVAQLEALGHTVILQEPPLAA
